United States Patent Application Publication US 2015/0141320 A1 - sequence listing, part 9

SEQ ID NO: 154248 - DNA, 15 bp, Homo sapiens
agactgcggccagag

SEQ ID NO: 154249 - DNA, 15 bp, Homo sapiens
gagactgcggccaga

SEQ ID NO: 154250 - DNA, 15 bp, Homo sapiens
ggagactgcggccag

SEQ ID NO: 154251 - DNA, 15 bp, Homo sapiens
gggagactgcggcca

SEQ ID NO: 154252 - DNA, 15 bp, Homo sapiens
ggggagactgcggcc

SEQ ID NO: 154253 - DNA, 15 bp, Homo sapiens
tggggagactgcggc

SEQ ID NO: 154254 - DNA, 15 bp, Homo sapiens
ctggggagactgcgg

SEQ ID NO: 154255 - DNA, 15 bp, Homo sapiens
actggggagactgcg

SEQ ID NO: 154256 - DNA, 15 bp, Homo sapiens
tactggggagactgc

SEQ ID NO: 154257 - DNA, 15 bp, Homo sapiens
ctactggggagactg

SEQ ID NO: 154258 - DNA, 15 bp, Homo sapiens
gctactggggagact

SEQ ID NO: 154259 - DNA, 15 bp, Homo sapiens
agctactggggagac

SEQ ID NO: 154260 - DNA, 15 bp, Homo sapiens
cagctactggggaga

SEQ ID NO: 154261 - DNA, 15 bp, Homo sapiens
ccagctactggggag

SEQ ID NO: 154262 - DNA, 15 bp, Homo sapiens
cccagctactgggga

SEQ ID NO: 154263 - DNA, 15 bp, Homo sapiens
tcccagctactgggg

SEQ ID NO: 154264 - DNA, 15 bp, Homo sapiens
ttcccagctactggg

SEQ ID NO: 154265 - DNA, 15 bp, Homo sapiens
attcccagctactgg

SEQ ID NO: 154266 - DNA, 15 bp, Homo sapiens
tattcccagctactg

SEQ ID NO: 154267 - DNA, 15 bp, Homo sapiens
gtattcccagctact

SEQ ID NO: 154268 - DNA, 15 bp, Homo sapiens
tgtattcccagctac

SEQ ID NO: 154269 - DNA, 15 bp, Homo sapiens
ctgtattcccagcta

SEQ ID NO: 154270 - DNA, 15 bp, Homo sapiens
cctgtattcccagct

SEQ ID NO: 154271 - DNA, 15 bp, Homo sapiens
gcctgtattcccagc

SEQ ID NO: 154272 - DNA, 15 bp, Homo sapiens
cgcctgtattcccag

SEQ ID NO: 154273 - DNA, 15 bp, Homo sapiens
gcgcctgtattccca

SEQ ID NO: 154274 - DNA, 15 bp, Homo sapiens
ggcgcctgtattccc

SEQ ID NO: 154275 - DNA, 15 bp, Homo sapiens
gggcgcctgtattcc

SEQ ID NO: 154276 - DNA, 15 bp, Homo sapiens
tgggcgcctgtattc

SEQ ID NO: 154277 - DNA, 15 bp, Homo sapiens
gtgggcgcctgtatt

SEQ ID NO: 154278 - DNA, 15 bp, Homo sapiens
ggtgggcgcctgtat

SEQ ID NO: 154279 - DNA, 15 bp, Homo sapiens
atggtggtgggcgcc

SEQ ID NO: 154280 - DNA, 15 bp, Homo sapiens
catggtggtgggcgc

SEQ ID NO: 154281 - DNA, 15 bp, Homo sapiens
gcatggtggtgggcg

SEQ ID NO: 154282 - DNA, 15 bp, Homo sapiens
ggcatggtggtgggc

SEQ ID NO: 154283 - DNA, 15 bp, Homo sapiens
gggcatggtggtggg

SEQ ID NO: 154284 - DNA, 15 bp, Homo sapiens
cgggcatggtggtgg

SEQ ID NO: 154285 - DNA, 15 bp, Homo sapiens
ccgggcatggtggtg

SEQ ID NO: 154286 - DNA, 15 bp, Homo sapiens
gccgggcatggtggt

SEQ ID NO: 154287 - DNA, 15 bp, Homo sapiens
agccgggcatggtgg

SEQ ID NO: 154288 - DNA, 15 bp, Homo sapiens
tagccgggcatggtg

SEQ ID NO: 154289 - DNA, 15 bp, Homo sapiens
ttagccgggcatggt

SEQ ID NO: 154290 - DNA, 15 bp, Homo sapiens
attagccgggcatgg

SEQ ID NO: 154291 - DNA, 15 bp, Homo sapiens
aattagccgggcatg

SEQ ID NO: 154292 - DNA, 15 bp, Homo sapiens
aaattagccgggcat

SEQ ID NO: 154293 - DNA, 15 bp, Homo sapiens
aaaattagccgggca

SEQ ID NO: 154294 - DNA, 15 bp, Homo sapiens
caaaaattagccggg

SEQ ID NO: 154295 - DNA, 15 bp, Homo sapiens
ccaaaaattagccgg

SEQ ID NO: 154296 - DNA, 15 bp, Homo sapiens
tccaaaaattagccg

SEQ ID NO: 154297 - DNA, 15 bp, Homo sapiens
atccaaaaattagcc

SEQ ID NO: 154298 - DNA, 15 bp, Homo sapiens
aatccaaaaattagc

SEQ ID NO: 154299 - DNA, 15 bp, Homo sapiens
aaatccaaaaattag

SEQ ID NO: 154300 - DNA, 15 bp, Homo sapiens
aaaatccaaaaatta

SEQ ID NO: 154301 - DNA, 15 bp, Homo sapiens
aaaaatccaaaaatt

SEQ ID NO: 154302 - DNA, 15 bp, Homo sapiens
aaaaaatccaaaaat

SEQ ID NO: 154303 - DNA, 15 bp, Homo sapiens
taaaaaatccaaaaa

SEQ ID NO: 154304 - DNA, 15 bp, Homo sapiens
ctaaaaaatccaaaa

SEQ ID NO: 154305 - DNA, 15 bp, Homo sapiens
actaaaaaatccaaa

SEQ ID NO: 154306 - DNA, 15 bp, Homo sapiens
tactaaaaaatccaa

SEQ ID NO: 154307 - DNA, 15 bp, Homo sapiens
ctactaaaaaatcca

SEQ ID NO: 154308 - DNA, 15 bp, Homo sapiens
tctactaaaaaatcc

SEQ ID NO: 154309 - DNA, 15 bp, Homo sapiens
ctctactaaaaaatc

SEQ ID NO: 154310 - DNA, 15 bp, Homo sapiens
tctctactaaaaaat

SEQ ID NO: 154311 - DNA, 15 bp, Homo sapiens
agtgaaaccccatct

SEQ ID NO: 154312 - DNA, 15 bp, Homo sapiens
tagtgaaaccccatc

SEQ ID NO: 154313 - DNA, 15 bp, Homo sapiens
atagtgaaaccccat

SEQ ID NO: 154314 - DNA, 15 bp, Homo sapiens
tatagtgaaacccca

SEQ ID NO: 154315 - DNA, 15 bp, Homo sapiens
atatagtgaaacccc

SEQ ID NO: 154316 - DNA, 15 bp, Homo sapiens
aatatagtgaaaccc

SEQ ID NO: 154317 - DNA, 15 bp, Homo sapiens
caatatagtgaaacc

SEQ ID NO: 154318 - DNA, 15 bp, Homo sapiens
ccaatatagtgaaac

SEQ ID NO: 154319 - DNA, 15 bp, Homo sapiens
gccaatatagtgaaa

SEQ ID NO: 154320 - DNA, 15 bp, Homo sapiens
ggccaatatagtgaa

SEQ ID NO: 154321 - DNA, 15 bp, Homo sapiens
tggccaatatagtga

SEQ ID NO: 154322 - DNA, 15 bp, Homo sapiens
ctggccaatatagtg

SEQ ID NO: 154323 - DNA, 15 bp, Homo sapiens
cctggccaatatagt

SEQ ID NO: 154324 - DNA, 15 bp, Homo sapiens
gcctggccaatatag

SEQ ID NO: 154325 - DNA, 15 bp, Homo sapiens
agcctggccaatata

SEQ ID NO: 154326 - DNA, 15 bp, Homo sapiens
tagcctggccaatat

SEQ ID NO: 154327 - DNA, 15 bp, Homo sapiens
ctagcctggccaata

SEQ ID NO: 154328 - DNA, 15 bp, Homo sapiens
actagcctggccaat

SEQ ID NO: 154329 - DNA, 15 bp, Homo sapiens
gactagcctggccaa

SEQ ID NO: 154330 - DNA, 15 bp, Homo sapiens
agactagcctggcca

SEQ ID NO: 154331 - DNA, 15 bp, Homo sapiens
gagactagcctggcc

SEQ ID NO: 154332 - DNA, 15 bp, Homo sapiens
cgagactagcctggc

SEQ ID NO: 154333 - DNA, 15 bp, Homo sapiens
tcgagactagcctgg

SEQ ID NO: 154334 - DNA, 15 bp, Homo sapiens
ttcgagactagcctg

SEQ ID NO: 154335 - DNA, 15 bp, Homo sapiens
gttcgagactagcct

SEQ ID NO: 154336 - DNA, 15 bp, Homo sapiens
agttcgagactagcc

SEQ ID NO: 154337 - DNA, 15 bp, Homo sapiens
gagttcgagactagc

SEQ ID NO: 154338 - DNA, 15 bp, Homo sapiens
ggagttcgagactag

SEQ ID NO: 154339 - DNA, 15 bp, Homo sapiens
aggagttcgagacta

SEQ ID NO: 154340 - DNA, 15 bp, Homo sapiens
gaggagttcgagact

SEQ ID NO: 154341 - DNA, 15 bp, Homo sapiens
tgaggagttcgagac

SEQ ID NO: 154342 - DNA, 15 bp, Homo sapiens
gtgaggagttcgaga

SEQ ID NO: 154343 - DNA, 15 bp, Homo sapiens
ggtgaggagttcgag

SEQ ID NO: 154344 - DNA, 15 bp, Homo sapiens
aggtgaggagttcga

SEQ ID NO: 154345 - DNA, 15 bp, Homo sapiens
gaggtgaggagttcg

SEQ ID NO: 154346 - DNA, 15 bp, Homo sapiens
tgaggtgaggagttc

SEQ ID NO: 154347 - DNA, 15 bp, Homo sapiens
gtgaggtgaggagtt

SEQ ID NO: 154348 - DNA, 15 bp, Homo sapiens
cgtgaggtgaggagt

SEQ ID NO: 154349 - DNA, 15 bp, Homo sapiens
acgtgaggtgaggag

SEQ ID NO: 154350 - DNA, 15 bp, Homo sapiens
cacgtgaggtgagga

SEQ ID NO: 154351 - DNA, 15 bp, Homo sapiens
tcacgtgaggtgagg

SEQ ID NO: 154352 - DNA, 15 bp, Homo sapiens
atcacgtgaggtgag

SEQ ID NO: 154353 - DNA, 15 bp, Homo sapiens
gatcacgtgaggtga

SEQ ID NO: 154354 - DNA, 15 bp, Homo sapiens
agatcacgtgaggtg

SEQ ID NO: 154355 - DNA, 15 bp, Homo sapiens
cagatcacgtgaggt

SEQ ID NO: 154356 - DNA, 15 bp, Homo sapiens
gcagatcacgtgagg

SEQ ID NO: 154357 - DNA, 15 bp, Homo sapiens
ggcagatcacgtgag

SEQ ID NO: 154358 - DNA, 15 bp, Homo sapiens
gggcagatcacgtga

SEQ ID NO: 154359 - DNA, 15 bp, Homo sapiens
cgggcagatcacgtg

SEQ ID NO: 154360 - DNA, 15 bp, Homo sapiens
gcgggcagatcacgt

SEQ ID NO: 154361 - DNA, 15 bp, Homo sapiens
ggcgggcagatcacg

SEQ ID NO: 154362 - DNA, 15 bp, Homo sapiens
aaggcgggcagatca

SEQ ID NO: 154363 - DNA, 15 bp, Homo sapiens
caaggcgggcagatc

SEQ ID NO: 154364 - DNA, 15 bp, Homo sapiens
ccaaggcgggcagat

SEQ ID NO: 154365 - DNA, 15 bp, Homo sapiens
gccaaggcgggcaga

SEQ ID NO: 154366 - DNA, 15 bp, Homo sapiens
ggccaaggcgggcag

SEQ ID NO: 154367 - DNA, 15 bp, Homo sapiens
aggccaaggcgggca

SEQ ID NO: 154368 - DNA, 15 bp, Homo sapiens
gaggccaaggcgggc

SEQ ID NO: 154369 - DNA, 15 bp, Homo sapiens
cgtaatcccagcact

SEQ ID NO: 154370 - DNA, 15 bp, Homo sapiens
ccgtaatcccagcac

SEQ ID NO: 154371 - DNA, 15 bp, Homo sapiens
cccgtaatcccagca

SEQ ID NO: 154372 - DNA, 15 bp, Homo sapiens
gcccgtaatcccagc

SEQ ID NO: 154373 - DNA, 15 bp, Homo sapiens
cgcccgtaatcccag

SEQ ID NO: 154374 - DNA, 15 bp, Homo sapiens
acgcccgtaatccca

SEQ ID NO: 154375 - DNA, 15 bp, Homo sapiens
cacgcccgtaatccc

SEQ ID NO: 154376 - DNA, 15 bp, Homo sapiens
tcacgcccgtaatcc

SEQ ID NO: 154377 - DNA, 15 bp, Homo sapiens
ctcacgcccgtaatc

SEQ ID NO: 154378 - DNA, 15 bp, Homo sapiens
gctcacgcccgtaat

SEQ ID NO: 154379 - DNA, 15 bp, Homo sapiens
agctcacgcccgtaa

SEQ ID NO: 154380 - DNA, 15 bp, Homo sapiens
tagctcacgcccgta

SEQ ID NO: 154381 - DNA, 15 bp, Homo sapiens
gtagctcacgcccgt

SEQ ID NO: 154382 - DNA, 15 bp, Homo sapiens
agtagctcacgcccg

SEQ ID NO: 154383 - DNA, 15 bp, Homo sapiens
cagtagctcacgccc

SEQ ID NO: 154384 - DNA, 15 bp, Homo sapiens
gcagtagctcacgcc

SEQ ID NO: 154385 - DNA, 15 bp, Homo sapiens
cgcagtagctcacgc

SEQ ID NO: 154386 - DNA, 15 bp, Homo sapiens
gcgcagtagctcacg

SEQ ID NO: 154387 - DNA, 15 bp, Homo sapiens
ggcgcagtagctcac

SEQ ID NO: 154388 - DNA, 15 bp, Homo sapiens
gggcgcagtagctca

SEQ ID NO: 154389 - DNA, 15 bp, Homo sapiens
cgggcgcagtagctc

SEQ ID NO: 154390 - DNA, 15 bp, Homo sapiens
tcgggcgcagtagct

SEQ ID NO: 154391 - DNA, 15 bp, Homo sapiens
gtcgggcgcagtagc

SEQ ID NO: 154392 - DNA, 15 bp, Homo sapiens
ggtcgggcgcagtag

SEQ ID NO: 154393 - DNA, 15 bp, Homo sapiens
tggtcgggcgcagta

SEQ ID NO: 154394 - DNA, 15 bp, Homo sapiens
gtggtcgggcgcagt

SEQ ID NO: 154395 - DNA, 15 bp, Homo sapiens
agtggtcgggcgcag

SEQ ID NO: 154396 - DNA, 15 bp, Homo sapiens
tagtggtcgggcgca

SEQ ID NO: 154397 - DNA, 15 bp, Homo sapiens
ttagtggtcgggcgc

SEQ ID NO: 154398 - DNA, 15 bp, Homo sapiens
tttagtggtcgggcg

SEQ ID NO: 154399 - DNA, 15 bp, Homo sapiens
ttttagtggtcgggc

SEQ ID NO: 154400 - DNA, 15 bp, Homo sapiens
gttttagtggtcggg

SEQ ID NO: 154401 - DNA, 15 bp, Homo sapiens
ggttttagtggtcgg

SEQ ID NO: 154402 - DNA, 15 bp, Homo sapiens
aggttttagtggtcg

SEQ ID NO: 154403 - DNA, 15 bp, Homo sapiens
aaggttttagtggtc

SEQ ID NO: 154404 - DNA, 15 bp, Homo sapiens
aaaggttttagtggt

SEQ ID NO: 154405 - DNA, 15 bp, Homo sapiens
aaaaggttttagtgg

SEQ ID NO: 154406 - DNA, 15 bp, Homo sapiens
aaaaaggttttagtg

SEQ ID NO: 154407 - DNA, 15 bp, Homo sapiens
gaaaaaaaggtttta

SEQ ID NO: 154408 - DNA, 15 bp, Homo sapiens
ggaaaaaaaggtttt

SEQ ID NO: 154409 - DNA, 15 bp, Homo sapiens
tggaaaaaaaggttt

SEQ ID NO: 154410 - DNA, 15 bp, Homo sapiens
gtggaaaaaaaggtt

SEQ ID NO: 154411 - DNA, 15 bp, Homo sapiens
agtggaaaaaaaggt

SEQ ID NO: 154412 - DNA, 15 bp, Homo sapiens
gagtggaaaaaaagg

SEQ ID NO: 154413 - DNA, 15 bp, Homo sapiens
tgagtggaaaaaaag

SEQ ID NO: 154414 - DNA, 15 bp, Homo sapiens
gtgagtggaaaaaaa

SEQ ID NO: 154415 - DNA, 15 bp, Homo sapiens
agtgagtggaaaaaa

SEQ ID NO: 154416 - DNA, 15 bp, Homo sapiens
aagtgagtggaaaaa

SEQ ID NO: 154417 - DNA, 15 bp, Homo sapiens
caagtgagtggaaaa

SEQ ID NO: 154418 - DNA, 15 bp, Homo sapiens
tcaagtgagtggaaa

SEQ ID NO: 154419 - DNA, 15 bp, Homo sapiens
ttcaagtgagtggaa

SEQ ID NO: 154420 - DNA, 15 bp, Homo sapiens
attcaagtgagtgga

SEQ ID NO: 154421 - DNA, 15 bp, Homo sapiens
aattcaagtgagtgg

SEQ ID NO: 154422 - DNA, 15 bp, Homo sapiens
aaattcaagtgagtg

SEQ ID NO: 154423 - DNA, 15 bp, Homo sapiens
taaattcaagtgagt

SEQ ID NO: 154424 - DNA, 15 bp, Homo sapiens
gtaaattcaagtgag

SEQ ID NO: 154425 - DNA, 15 bp, Homo sapiens
tgtaaattcaagtga

SEQ ID NO: 154426 - DNA, 15 bp, Homo sapiens
ttgtaaattcaagtg

SEQ ID NO: 154427 - DNA, 15 bp, Homo sapiens
gttgtaaattcaagt

SEQ ID NO: 154428 - DNA, 15 bp, Homo sapiens
ggttgtaaattcaag

SEQ ID NO: 154429 - DNA, 15 bp, Homo sapiens
aggttgtaaattcaa

SEQ ID NO: 154430 - DNA, 15 bp, Homo sapiens
gaggttgtaaattca

SEQ ID NO: 154431 - DNA, 15 bp, Homo sapiens
tgaggttgtaaattc

SEQ ID NO: 154432 - DNA, 15 bp, Homo sapiens
atgaggttgtaaatt

SEQ ID NO: 154433 - DNA, 15 bp, Homo sapiens
aatgaggttgtaaat

SEQ ID NO: 154434 - DNA, 15 bp, Homo sapiens
caatgaggttgtaaa

SEQ ID NO: 154435 - DNA, 15 bp, Homo sapiens
acaatgaggttgtaa

SEQ ID NO: 154436 - DNA, 15 bp, Homo sapiens
cacaatgaggttgta

SEQ ID NO: 154437 - DNA, 15 bp, Homo sapiens
tcacaatgaggttgt

SEQ ID NO: 154438 - DNA, 15 bp, Homo sapiens
ctcacaatgaggttg

SEQ ID NO: 154439 - DNA, 15 bp, Homo sapiens
tctcacaatgaggtt

SEQ ID NO: 154440 - DNA, 15 bp, Homo sapiens
atctcacaatgaggt

SEQ ID NO: 154441 - DNA, 15 bp, Homo sapiens
aatctcacaatgagg

SEQ ID NO: 154442 - DNA, 15 bp, Homo sapiens
aaatctcacaatgag

SEQ ID NO: 154443 - DNA, 15 bp, Homo sapiens
aaaatctcacaatga

SEQ ID NO: 154444 - DNA, 15 bp, Homo sapiens
gaaaatctcacaatg

SEQ ID NO: 154445 - DNA, 15 bp, Homo sapiens
agaaaatctcacaat

SEQ ID NO: 154446 - DNA, 15 bp, Homo sapiens
tagaaaatctcacaa

SEQ ID NO: 154447 - DNA, 15 bp, Homo sapiens
ctagaaaatctcaca

SEQ ID NO: 154448 - DNA, 15 bp, Homo sapiens
cctagaaaatctcac

SEQ ID NO: 154449 - DNA, 15 bp, Homo sapiens
gcctagaaaatctca

SEQ ID NO: 154450 - DNA, 15 bp, Homo sapiens
tgcctagaaaatctc

SEQ ID NO: 154451 - DNA, 15 bp, Homo sapiens
ctgcctagaaaatct

SEQ ID NO: 154452 - DNA, 15 bp, Homo sapiens
gctgcctagaaaatc

SEQ ID NO: 154453 - DNA, 15 bp, Homo sapiens
agctgcctagaaaat

SEQ ID NO: 154454 - DNA, 15 bp, Homo sapiens
tagctgcctagaaaa

SEQ ID NO: 154455 - DNA, 15 bp, Homo sapiens
gtagctgcctagaaa

SEQ ID NO: 154456 - DNA, 15 bp, Homo sapiens
agtagctgcctagaa

SEQ ID NO: 154457 - DNA, 15 bp, Homo sapiens
gagtagctgcctaga

SEQ ID NO: 154458 - DNA, 15 bp, Homo sapiens
ggagtagctgcctag

SEQ ID NO: 154459 - DNA, 15 bp, Homo sapiens
tggagtagctgccta

SEQ ID NO: 154460 - DNA, 15 bp, Homo sapiens
gtggagtagctgcct

SEQ ID NO: 154461 - DNA, 15 bp, Homo sapiens
agtggagtagctgcc

SEQ ID NO: 154462 - DNA, 15 bp, Homo sapiens
cagtggagtagctgc

SEQ ID NO: 154463 - DNA, 15 bp, Homo sapiens
ccagtggagtagctg

SEQ ID NO: 154464 - DNA, 15 bp, Homo sapiens
cccagtggagtagct

SEQ ID NO: 154465 - DNA, 15 bp, Homo sapiens
tcccagtggagtagc

SEQ ID NO: 154466 - DNA, 15 bp, Homo sapiens
gtcccagtggagtag

SEQ ID NO: 154467 - DNA, 15 bp, Homo sapiens
tgtcccagtggagta

SEQ ID NO: 154468 - DNA, 15 bp, Homo sapiens
atgtcccagtggagt

SEQ ID NO: 154469 - DNA, 15 bp, Homo sapiens
aatgtcccagtggag

SEQ ID NO: 154470 - DNA, 15 bp, Homo sapiens
aaatgtcccagtgga

SEQ ID NO: 154471 - DNA, 15 bp, Homo sapiens
aaaatgtcccagtgg

SEQ ID NO: 154472 - DNA, 15 bp, Homo sapiens
caaaatgtcccagtg

SEQ ID NO: 154473 - DNA, 15 bp, Homo sapiens
gcaaaatgtcccagt

SEQ ID NO: 154474 - DNA, 15 bp, Homo sapiens
agcaaaatgtcccag

SEQ ID NO: 154475 - DNA, 15 bp, Homo sapiens
tagcaaaatgtccca

SEQ ID NO: 154476 - DNA, 15 bp, Homo sapiens
ctagcaaaatgtccc

SEQ ID NO: 154477 - DNA, 15 bp, Homo sapiens
actagcaaaatgtcc

SEQ ID NO: 154478 - DNA, 15 bp, Homo sapiens
gactagcaaaatgtc

SEQ ID NO: 154479 - DNA, 15 bp, Homo sapiens
ggactagcaaaatgt

SEQ ID NO: 154480 - DNA, 15 bp, Homo sapiens
tggactagcaaaatg

SEQ ID NO: 154481 - DNA, 15 bp, Homo sapiens
ctggactagcaaaat

SEQ ID NO: 154482 - DNA, 15 bp, Homo sapiens
cctggactagcaaaa

SEQ ID NO: 154483 - DNA, 15 bp, Homo sapiens
acctggactagcaaa

SEQ ID NO: 154484 - DNA, 15 bp, Homo sapiens
cacctggactagcaa

SEQ ID NO: 154485 - DNA, 15 bp, Homo sapiens
ccacctggactagca

SEQ ID NO: 154486 - DNA, 15 bp, Homo sapiens
gccacctggactagc

SEQ ID NO: 154487 - DNA, 15 bp, Homo sapiens
ggccacctggactag

SEQ ID NO: 154488 - DNA, 15 bp, Homo sapiens
aggccacctggacta

SEQ ID NO: 154489 - DNA, 15 bp, Homo sapiens
taggccacctggact

SEQ ID NO: 154490 - DNA, 15 bp, Homo sapiens
ctaggccacctggac

SEQ ID NO: 154491 - DNA, 15 bp, Homo sapiens
gctaggccacctgga

SEQ ID NO: 154492 - DNA, 15 bp, Homo sapiens
agctaggccacctgg

SEQ ID NO: 154493 - DNA, 15 bp, Homo sapiens
cagctaggccacctg

SEQ ID NO: 154494 - DNA, 15 bp, Homo sapiens
gcagctaggccacct

SEQ ID NO: 154495 - DNA, 15 bp, Homo sapiens
agcagctaggccacc

SEQ ID NO: 154496 - DNA, 15 bp, Homo sapiens
cagcagctaggccac

SEQ ID NO: 154497 - DNA, 15 bp, Homo sapiens
acagcagctaggcca

SEQ ID NO: 154498 - DNA, 15 bp, Homo sapiens
tacagcagctaggcc

SEQ ID NO: 154499 - DNA, 15 bp, Homo sapiens
ctacagcagctaggc

SEQ ID NO: 154500 - DNA, 15 bp, Homo sapiens
gctacagcagctagg

SEQ ID NO: 154501 - DNA, 15 bp, Homo sapiens
tgctacagcagctag

SEQ ID NO: 154502 - DNA, 15 bp, Homo sapiens
ttgctacagcagcta

SEQ ID NO: 154503 - DNA, 15 bp, Homo sapiens
cttgctacagcagct

SEQ ID NO: 154504 - DNA, 15 bp, Homo sapiens
gcttgctacagcagc

SEQ ID NO: 154505 - DNA, 15 bp, Homo sapiens
tgcttgctacagcag

SEQ ID NO: 154506 - DNA, 15 bp, Homo sapiens
ttgcttgctacagca

SEQ ID NO: 154507 - DNA, 15 bp, Homo sapiens
gttgcttgctacagc

SEQ ID NO: 154508 - DNA, 15 bp, Homo sapiens
ggttgcttgctacag

SEQ ID NO: 154509 - DNA, 15 bp, Homo sapiens
gggttgcttgctaca

SEQ ID NO: 154510 - DNA, 15 bp, Homo sapiens
agggttgcttgctac

SEQ ID NO: 154511 - DNA, 15 bp, Homo sapiens
gagggttgcttgcta

SEQ ID NO: 154512 - DNA, 15 bp, Homo sapiens
tgagggttgcttgct

SEQ ID NO: 154513 - DNA, 15 bp, Homo sapiens
ttgagggttgcttgc

SEQ ID NO: 154514 - DNA, 15 bp, Homo sapiens
gttgagggttgcttg

SEQ ID NO: 154515 - DNA, 15 bp, Homo sapiens
agttgagggttgctt

SEQ ID NO: 154516 - DNA, 15 bp, Homo sapiens
gagttgagggttgct

SEQ ID NO: 154517 - DNA, 15 bp, Homo sapiens
ggagttgagggttgc

SEQ ID NO: 154518 - DNA, 15 bp, Homo sapiens
tggagttgagggttg

SEQ ID NO: 154519 - DNA, 15 bp, Homo sapiens
ctggagttgagggtt

SEQ ID NO: 154520 - DNA, 15 bp, Homo sapiens
gctggagttgagggt

SEQ ID NO: 154521 - DNA, 15 bp, Homo sapiens
ggctggagttgaggg

SEQ ID NO: 154522 - DNA, 15 bp, Homo sapiens
tggctggagttgagg

SEQ ID NO: 154523 - DNA, 15 bp, Homo sapiens
atggctggagttgag

SEQ ID NO: 154524 - DNA, 15 bp, Homo sapiens
catggctggagttga

SEQ ID NO: 154525 - DNA, 15 bp, Homo sapiens
acatggctggagttg

SEQ ID NO: 154526 - DNA, 15 bp, Homo sapiens
tacatggctggagtt

SEQ ID NO: 154527 - DNA, 15 bp, Homo sapiens
ttacatggctggagt

SEQ ID NO: 154528 - DNA, 15 bp, Homo sapiens
gttacatggctggag

SEQ ID NO: 154529 - DNA, 15 bp, Homo sapiens
tgttacatggctgga

SEQ ID NO: 154530 - DNA, 15 bp, Homo sapiens
gtgttacatggctgg

SEQ ID NO: 154531 - DNA, 15 bp, Homo sapiens
tgtgttacatggctg

SEQ ID NO: 154532 - DNA, 15 bp, Homo sapiens
ttgtgttacatggct

SEQ ID NO: 154533 - DNA, 15 bp, Homo sapiens
attgtgttacatggc

SEQ ID NO: 154534 - DNA, 15 bp, Homo sapiens
gattgtgttacatgg

SEQ ID NO: 154535 - DNA, 15 bp, Homo sapiens
tgattgtgttacatg

SEQ ID NO: 154536 - DNA, 15 bp, Homo sapiens
ttgattgtgttacat

SEQ ID NO: 154537 - DNA, 15 bp, Homo sapiens
tttgattgtgttaca

SEQ ID NO: 154538 - DNA, 15 bp, Homo sapiens
ctttgattgtgttac

SEQ ID NO: 154539 - DNA, 15 bp, Homo sapiens
cctttgattgtgtta

SEQ ID NO: 154540 - DNA, 15 bp, Homo sapiens
ccctttgattgtgtt

SEQ ID NO: 154541 - DNA, 15 bp, Homo sapiens
accctttgattgtgt

SEQ ID NO: 154542 - DNA, 15 bp, Homo sapiens
caccctttgattgtg

SEQ ID NO: 154543 - DNA, 15 bp, Homo sapiens
acaccctttgattgt

SEQ ID NO: 154544 - DNA, 15 bp, Homo sapiens
cacaccctttgattg

SEQ ID NO: 154545 - DNA, 15 bp, Homo sapiens
acacaccctttgatt

SEQ ID NO: 154546 - DNA, 15 bp, Homo sapiens
gacacaccctttgat

SEQ ID NO: 154547 - DNA, 15 bp, Homo sapiens
agacacaccctttga

SEQ ID NO: 154548 - DNA, 15 bp, Homo sapiens
cagacacaccctttg

SEQ ID NO: 154549 - DNA, 15 bp, Homo sapiens
acagacacacccttt

SEQ ID NO: 154550 - DNA, 15 bp, Homo sapiens
cacagacacaccctt

SEQ ID NO: 154551 - DNA, 15 bp, Homo sapiens
ccacagacacaccct

SEQ ID NO: 154552 - DNA, 15 bp, Homo sapiens
gccacagacacaccc

SEQ ID NO: 154553 - DNA, 15 bp, Homo sapiens
agccacagacacacc

SEQ ID NO: 154554 - DNA, 15 bp, Homo sapiens
gagccacagacacac

SEQ ID NO: 154555 - DNA, 15 bp, Homo sapiens
agagccacagacaca

SEQ ID NO: 154556 - DNA, 15 bp, Homo sapiens
cagagccacagacac

SEQ ID NO: 154557 - DNA, 15 bp, Homo sapiens
gcagagccacagaca

SEQ ID NO: 154558 - DNA, 15 bp, Homo sapiens
ggcagagccacagac

SEQ ID NO: 154559 - DNA, 15 bp, Homo sapiens
gggcagagccacaga

SEQ ID NO: 154560 - DNA, 15 bp, Homo sapiens
agggcagagccacag

SEQ ID NO: 154561 - DNA, 15 bp, Homo sapiens
aagggcagagccaca

SEQ ID NO: 154562 - DNA, 15 bp, Homo sapiens
aaagggcagagccac

SEQ ID NO: 154563 - DNA, 15 bp, Homo sapiens
gaaagggcagagcca

SEQ ID NO: 154564 - DNA, 15 bp, Homo sapiens
agaaagggcagagcc

SEQ ID NO: 154565 - DNA, 15 bp, Homo sapiens
tagaaagggcagagc

SEQ ID NO: 154566 - DNA, 15 bp, Homo sapiens
ctagaaagggcagag

SEQ ID NO: 154567 - DNA, 15 bp, Homo sapiens
cctagaaagggcaga

SEQ ID NO: 154568 - DNA, 15 bp, Homo sapiens
acctagaaagggcag

SEQ ID NO: 154569 - DNA, 15 bp, Homo sapiens
tacctagaaagggca

SEQ ID NO: 154570 - DNA, 15 bp, Homo sapiens
gtacctagaaagggc

SEQ ID NO: 154571 - DNA, 15 bp, Homo sapiens
ggtacctagaaaggg

SEQ ID NO: 154572 - DNA, 15 bp, Homo sapiens
gggtacctagaaagg

SEQ ID NO: 154573 - DNA, 15 bp, Homo sapiens
tgggtacctagaaag

SEQ ID NO: 154574 - DNA, 15 bp, Homo sapiens
ctgggtacctagaaa

SEQ ID NO: 154575 - DNA, 15 bp, Homo sapiens
tctgggtacctagaa

SEQ ID NO: 154576 - DNA, 15 bp, Homo sapiens
ttctgggtacctaga

SEQ ID NO: 154577 - DNA, 15 bp, Homo sapiens
attctgggtacctag

SEQ ID NO: 154578 - DNA, 15 bp, Homo sapiens
gattctgggtaccta

SEQ ID NO: 154579 - DNA, 15 bp, Homo sapiens
ggattctgggtacct

SEQ ID NO: 154580 - DNA, 15 bp, Homo sapiens
aggattctgggtacc

SEQ ID NO: 154581 - DNA, 15 bp, Homo sapiens
gaggattctgggtac

SEQ ID NO: 154582 - DNA, 15 bp, Homo sapiens
ggaggattctgggta

SEQ ID NO: 154583 - DNA, 15 bp, Homo sapiens
aggaggattctgggt

SEQ ID NO: 154584 - DNA, 15 bp, Homo sapiens
gaggaggattctggg

SEQ ID NO: 154585 - DNA, 15 bp, Homo sapiens
agaggaggattctgg

SEQ ID NO: 154586 - DNA, 15 bp, Homo sapiens
cagaggaggattctg

SEQ ID NO: 154587 - DNA, 15 bp, Homo sapiens
ccagaggaggattct

SEQ ID NO: 154588 - DNA, 15 bp, Homo sapiens
cccagaggaggattc

SEQ ID NO: 154589 - DNA, 15 bp, Homo sapiens
acccagaggaggatt

SEQ ID NO: 154590 - DNA, 15 bp, Homo sapiens
gacccagaggaggat

SEQ ID NO: 154591 - DNA, 15 bp, Homo sapiens
agacccagaggagga

SEQ ID NO: 154592 - DNA, 15 bp, Homo sapiens
aagacccagaggagg

SEQ ID NO: 154593 - DNA, 15 bp, Homo sapiens
gaagacccagaggag

SEQ ID NO: 154594 - DNA, 15 bp, Homo sapiens
tgaagacccagagga

SEQ ID NO: 154595 - DNA, 15 bp, Homo sapiens
ctgaagacccagagg

SEQ ID NO: 154596 - DNA, 15 bp, Homo sapiens
gctgaagacccagag

SEQ ID NO: 154597 - DNA, 15 bp, Homo sapiens
agctgaagacccaga

SEQ ID NO: 154598 - DNA, 15 bp, Homo sapiens
cagctgaagacccag

SEQ ID NO: 154599 - DNA, 15 bp, Homo sapiens
ccagctgaagaccca

SEQ ID NO: 154600 - DNA, 15 bp, Homo sapiens
gccagctgaagaccc

SEQ ID NO: 154601 - DNA, 15 bp, Homo sapiens
tgccagctgaagacc

SEQ ID NO: 154602 - DNA, 15 bp, Homo sapiens
ctgccagctgaagac

SEQ ID NO: 154603 - DNA, 15 bp, Homo sapiens
tctgccagctgaaga

SEQ ID NO: 154604 - DNA, 15 bp, Homo sapiens
ctctgccagctgaag

SEQ ID NO: 154605 - DNA, 15 bp, Homo sapiens
cctctgccagctgaa

SEQ ID NO: 154606 - DNA, 15 bp, Homo sapiens
tcctctgccagctga

SEQ ID NO: 154607 - DNA, 15 bp, Homo sapiens
ctcctctgccagctg

SEQ ID NO: 154608 - DNA, 15 bp, Homo sapiens
tctcctctgccagct

SEQ ID NO: 154609 - DNA, 15 bp, Homo sapiens
ttctcctctgccagc

SEQ ID NO: 154610 - DNA, 15 bp, Homo sapiens
tttctcctctgccag

SEQ ID NO: 154611 - DNA, 15 bp, Homo sapiens
ttttctcctctgcca

SEQ ID NO: 154612 - DNA, 15 bp, Homo sapiens
tttttctcctctgcc

SEQ ID NO: 154613 - DNA, 15 bp, Homo sapiens
ctttttctcctctgc

SEQ ID NO: 154614 - DNA, 15 bp, Homo sapiens
tctttttctcctctg

SEQ ID NO: 154615 - DNA, 15 bp, Homo sapiens
ctctttttctcctct

SEQ ID NO: 154616 - DNA, 15 bp, Homo sapiens
cctctttttctcctc

SEQ ID NO: 154617 - DNA, 15 bp, Homo sapiens
ccctctttttctcct

SEQ ID NO: 154618 - DNA, 15 bp, Homo sapiens
ctccctctttttctc

SEQ ID NO: 154619 - DNA, 15 bp, Homo sapiens
gctccctctttttct

SEQ ID NO: 154620 - DNA, 15 bp, Homo sapiens
tgctccctctttttc

SEQ ID NO: 154621 - DNA, 15 bp, Homo sapiens
ctgctccctcttttt

SEQ ID NO: 154622 - DNA, 15 bp, Homo sapiens
cctgctccctctttt

SEQ ID NO: 154623 - DNA, 15 bp, Homo sapiens
tcctgctccctcttt

SEQ ID NO: 154624 - DNA, 15 bp, Homo sapiens
atcctgctccctctt

SEQ ID NO: 154625 - DNA, 15 bp, Homo sapiens
gatcctgctccctct

SEQ ID NO: 154626 - DNA, 15 bp, Homo sapiens
cgatcctgctccctc

SEQ ID NO: 154627 - DNA, 15 bp, Homo sapiens
acgatcctgctccct

SEQ ID NO: 154628 - DNA, 15 bp, Homo sapiens
cacgatcctgctccc

SEQ ID NO: 154629 - DNA, 15 bp, Homo sapiens
cacacgatcctgctc

SEQ ID NO: 154630 - DNA, 15 bp, Homo sapiens
acacacgatcctgct

SEQ ID NO: 154631 - DNA, 15 bp, Homo sapiens
cacacacgatcctgc

SEQ ID NO: 154632 - DNA, 15 bp, Homo sapiens
tcacacacgatcctg

SEQ ID NO: 154633 - DNA, 15 bp, Homo sapiens
ttcacacacgatcct

SEQ ID NO: 154634 - DNA, 15 bp, Homo sapiens
cttcacacacgatcc

SEQ ID NO: 154635 - DNA, 15 bp, Homo sapiens
ccttcacacacgatc

SEQ ID NO: 154636 - DNA, 15 bp, Homo sapiens
gccttcacacacgat

SEQ ID NO: 154637 - DNA, 15 bp, Homo sapiens
agccttcacacacga

SEQ ID NO: 154638 - DNA, 15 bp, Homo sapiens
aagccttcacacacg

SEQ ID NO: 154639 - DNA, 15 bp, Homo sapiens
aaagccttcacacac

SEQ ID NO: 154640 - DNA, 15 bp, Homo sapiens
taaagccttcacaca

SEQ ID NO: 154641 - DNA, 15 bp, Homo sapiens
ataaagccttcacac

SEQ ID NO: 154642 - DNA, 15 bp, Homo sapiens
tataaagccttcaca

SEQ ID NO: 154643 - DNA, 15 bp, Homo sapiens
ctataaagccttcac

SEQ ID NO: 154644 - DNA, 15 bp, Homo sapiens
tctataaagccttca

SEQ ID NO: 154645 - DNA, 15 bp, Homo sapiens
ctctataaagccttc

SEQ ID NO: 154646 - DNA, 15 bp, Homo sapiens
gctctataaagcctt

SEQ ID NO: 154647 - DNA, 15 bp, Homo sapiens
tgctctataaagcct

SEQ ID NO: 154648 - DNA, 15 bp, Homo sapiens
ctgctctataaagcc

SEQ ID NO: 154649 - DNA, 15 bp, Homo sapiens
tctgctctataaagc

SEQ ID NO: 154650 - DNA, 15 bp, Homo sapiens
atctgctctataaag

SEQ ID NO: 154651 - DNA, 15 bp, Homo sapiens
tatctgctctataaa

SEQ ID NO: 154652 - DNA, 15 bp, Homo sapiens
gtatctgctctataa

SEQ ID NO: 154653 - DNA, 15 bp, Homo sapiens
agtatctgctctata

SEQ ID NO: 154654 - DNA, 15 bp, Homo sapiens
gagtatctgctctat

SEQ ID NO: 154655 - DNA, 15 bp, Homo sapiens
agagtatctgctcta

SEQ ID NO: 154656 - DNA, 15 bp, Homo sapiens
cagagtatctgctct

SEQ ID NO: 154657 - DNA, 15 bp, Homo sapiens
gcagagtatctgctc

SEQ ID NO: 154658 - DNA, 15 bp, Homo sapiens
ggcagagtatctgct

SEQ ID NO: 154659 - DNA, 15 bp, Homo sapiens
gggcagagtatctgc

SEQ ID NO: 154660 - DNA, 15 bp, Homo sapiens
tgggcagagtatctg

SEQ ID NO: 154661 - DNA, 15 bp, Homo sapiens
gtgggcagagtatct

SEQ ID NO: 154662 - DNA, 15 bp, Homo sapiens
tgtgggcagagtatc

SEQ ID NO: 154663 - DNA, 15 bp, Homo sapiens
atgtgggcagagtat

SEQ ID NO: 154664 - DNA, 15 bp, Homo sapiens
aatgtgggcagagta

SEQ ID NO: 154665 - DNA, 15 bp, Homo sapiens
gaatgtgggcagagt

SEQ ID NO: 154666 - DNA, 15 bp, Homo sapiens
agaatgtgggcagag

SEQ ID NO: 154667 - DNA, 15 bp, Homo sapiens
cagaatgtgggcaga

SEQ ID NO: 154668 - DNA, 15 bp, Homo sapiens
gcagaatgtgggcag

SEQ ID NO: 154669 - DNA, 15 bp, Homo sapiens
agcagaatgtgggca

SEQ ID NO: 154670 - DNA, 15 bp, Homo sapiens
cagcagaatgtgggc

SEQ ID NO: 154671 - DNA, 15 bp, Homo sapiens
ccagcagaatgtggg

SEQ ID NO: 154672 - DNA, 15 bp, Homo sapiens
gccagcagaatgtgg

SEQ ID NO: 154673 - DNA, 15 bp, Homo sapiens
ggccagcagaatgtg

SEQ ID NO: 154674 - DNA, 15 bp, Homo sapiens
tggccagcagaatgt

SEQ ID NO: 154675 - DNA, 15 bp, Homo sapiens
ctggccagcagaatg

SEQ ID NO: 154676 - DNA, 15 bp, Homo sapiens
tctggccagcagaat

SEQ ID NO: 154677 - DNA, 15 bp, Homo sapiens
ttctggccagcagaa

SEQ ID NO: 154678 - DNA, 15 bp, Homo sapiens
gttctggccagcaga

SEQ ID NO: 154679 - DNA, 15 bp, Homo sapiens
agttctggccagcag

SEQ ID NO: 154680 - DNA, 15 bp, Homo sapiens
aagttctggccagca

SEQ ID NO: 154681 - DNA, 15 bp, Homo sapiens
caagttctggccagc

SEQ ID NO: 154682 - DNA, 15 bp, Homo sapiens
tcaagttctggccag

SEQ ID NO: 154683 - DNA, 15 bp, Homo sapiens
agatcaagttctggc

SEQ ID NO: 154684 - DNA, 15 bp, Homo sapiens
aagatcaagttctgg

SEQ ID NO: 154685 - DNA, 15 bp, Homo sapiens
gaagatcaagttctg

SEQ ID NO: 154686 - DNA, 15 bp, Homo sapiens
ggaagatcaagttct

SEQ ID NO: 154687 - DNA, 15 bp, Homo sapiens
tggaagatcaagttc

SEQ ID NO: 154688 - DNA, 15 bp, Homo sapiens
ctggaagatcaagtt

SEQ ID NO: 154689 - DNA, 15 bp, Homo sapiens
actggaagatcaagt

SEQ ID NO: 154690 - DNA, 15 bp, Homo sapiens
gactggaagatcaag

SEQ ID NO: 154691 - DNA, 15 bp, Homo sapiens
ggactggaagatcaa

SEQ ID NO: 154692 - DNA, 15 bp, Homo sapiens
tggactggaagatca

SEQ ID NO: 154693 - DNA, 15 bp, Homo sapiens
atggactggaagatc

SEQ ID NO: 154694 - DNA, 15 bp, Homo sapiens
gatggactggaagat

SEQ ID NO: 154695 - DNA, 15 bp, Homo sapiens
agatggactggaaga

SEQ ID NO: 154696 - DNA, 15 bp, Homo sapiens
tagatggactggaag

SEQ ID NO: 154697 - DNA, 15 bp, Homo sapiens
ttagatggactggaa

SEQ ID NO: 154698 - DNA, 15 bp, Homo sapiens
gttagatggactgga

SEQ ID NO: 154699 - DNA, 15 bp, Homo sapiens
agttagatggactgg

SEQ ID NO: 154700 - DNA, 15 bp, Homo sapiens
cagttagatggactg

SEQ ID NO: 154701 - DNA, 15 bp, Homo sapiens
ccagttagatggact

SEQ ID NO: 154702 - DNA, 15 bp, Homo sapiens
tccagttagatggac

SEQ ID NO: 154703 - DNA, 15 bp, Homo sapiens
ctccagttagatgga

SEQ ID NO: 154704 - DNA, 15 bp, Homo sapiens
cctccagttagatgg

SEQ ID NO: 154705 - DNA, 15 bp, Homo sapiens
ccctccagttagatg

SEQ ID NO: 154706 - DNA, 15 bp, Homo sapiens
tccctccagttagat

SEQ ID NO: 154707 - DNA, 15 bp, Homo sapiens
ctccctccagttaga

SEQ ID NO: 154708 - DNA, 15 bp, Homo sapiens
cctccctccagttag

SEQ ID NO: 154709 - DNA, 15 bp, Homo sapiens
gcctccctccagtta

SEQ ID NO: 154710 - DNA, 15 bp, Homo sapiens
agcctccctccagtt

SEQ ID NO: 154711 - DNA, 15 bp, Homo sapiens
cagcctccctccagt

SEQ ID NO: 154712 - DNA, 15 bp, Homo sapiens
ccagcctccctccag

SEQ ID NO: 154713 - DNA, 15 bp, Homo sapiens
cccagcctccctcca

SEQ ID NO: 154714 - DNA, 15 bp, Homo sapiens
tcccagcctccctcc

SEQ ID NO: 154715 - DNA, 15 bp, Homo sapiens
ttcccagcctccctc

SEQ ID NO: 154716 - DNA, 15 bp, Homo sapiens
tttcccagcctccct

SEQ ID NO: 154717 - DNA, 15 bp, Homo sapiens
ctttcccagcctccc

SEQ ID NO: 154718 - DNA, 15 bp, Homo sapiens
cctttcccagcctcc

SEQ ID NO: 154719 - DNA, 15 bp, Homo sapiens
gcctttcccagcctc

SEQ ID NO: 154720 - DNA, 15 bp, Homo sapiens
ggcctttcccagcct

SEQ ID NO: 154721 - DNA, 15 bp, Homo sapiens
tggcctttcccagcc

SEQ ID NO: 154722 - DNA, 15 bp, Homo sapiens
ctggcctttcccagc

SEQ ID NO: 154723 - DNA, 15 bp, Homo sapiens
gctggcctttcccag

SEQ ID NO: 154724 - DNA, 15 bp, Homo sapiens
ggctggcctttccca

SEQ ID NO: 154725 - DNA, 15 bp, Homo sapiens
tggctggcctttccc

SEQ ID NO: 154726 - DNA, 15 bp, Homo sapiens
atggctggcctttcc

SEQ ID NO: 154727 - DNA, 15 bp, Homo sapiens
tatggctggcctttc

SEQ ID NO: 154728 - DNA, 15 bp, Homo sapiens
gtatggctggccttt

SEQ ID NO: 154729 - DNA, 15 bp, Homo sapiens
cgtatggctggcctt

SEQ ID NO: 154730 - DNA, 15 bp, Homo sapiens
gcgtatggctggcct

SEQ ID NO: 154731 - DNA, 15 bp, Homo sapiens
ggcgtatggctggcc

SEQ ID NO: 154732 - DNA, 15 bp, Homo sapiens
tggcgtatggctggc

SEQ ID NO: 154733 - DNA, 15 bp, Homo sapiens
atggcgtatggctgg

SEQ ID NO: 154734 - DNA, 15 bp, Homo sapiens
aatggcgtatggctg

SEQ ID NO: 154735 - DNA, 15 bp, Homo sapiens
caatggcgtatggct

SEQ ID NO: 154736 - DNA, 15 bp, Homo sapiens
acaatggcgtatggc

SEQ ID NO: 154737 - DNA, 15 bp, Homo sapiens
aacaatggcgtatgg

SEQ ID NO: 154738 - DNA, 15 bp, Homo sapiens
taacaatggcgtatg

SEQ ID NO: 154739 - DNA, 15 bp, Homo sapiens
ataacaatggcgtat

SEQ ID NO: 154740 - DNA, 15 bp, Homo sapiens
gataacaatggcgta

SEQ ID NO: 154741 - DNA, 15 bp, Homo sapiens
tgataacaatggcgt

SEQ ID NO: 154742 - DNA, 15 bp, Homo sapiens
ctgataacaatggcg

SEQ ID NO: 154743 - DNA, 15 bp, Homo sapiens
actgataacaatggc

SEQ ID NO: 154744 - DNA, 15 bp, Homo sapiens
gactgataacaatgg

SEQ ID NO: 154745 - DNA, 15 bp, Homo sapiens
ggactgataacaatg

SEQ ID NO: 154746 - DNA, 15 bp, Homo sapiens
aggactgataacaat

SEQ ID NO: 154747 - DNA, 15 bp, Homo sapiens
caggactgataacaa

SEQ ID NO: 154748 - DNA, 15 bp, Homo sapiens
tcaggactgataaca

SEQ ID NO: 154749 - DNA, 15 bp, Homo sapiens
gtcaggactgataac

SEQ ID NO: 154750 - DNA, 15 bp, Homo sapiens
ggtcaggactgataa

SEQ ID NO: 154751 - DNA, 15 bp, Homo sapiens
tggtcaggactgata

SEQ ID NO: 154752 - DNA, 15 bp, Homo sapiens
ctggtcaggactgat

SEQ ID NO: 154753 - DNA, 15 bp, Homo sapiens
cctggtcaggactga

SEQ ID NO: 154754 - DNA, 15 bp, Homo sapiens
acctggtcaggactg

SEQ ID NO: 154755 - DNA, 15 bp, Homo sapiens
cacctggtcaggact

SEQ ID NO: 154756 - DNA, 15 bp, Homo sapiens
gcacctggtcaggac

SEQ ID NO: 154757 - DNA, 15 bp, Homo sapiens
agcacctggtcagga

SEQ ID NO: 154758 - DNA, 15 bp, Homo sapiens
aagcacctggtcagg

SEQ ID NO: 154759 - DNA, 15 bp, Homo sapiens
caagcacctggtcag

SEQ ID NO: 154760 - DNA, 15 bp, Homo sapiens
ccaagcacctggtca

SEQ ID NO: 154761 - DNA, 15 bp, Homo sapiens
accaagcacctggtc

SEQ ID NO: 154762 - DNA, 15 bp, Homo sapiens
caccaagcacctggt

SEQ ID NO: 154763 - DNA, 15 bp, Homo sapiens
tcaccaagcacctgg

SEQ ID NO: 154764 - DNA, 15 bp, Homo sapiens
ttcaccaagcacctg

SEQ ID NO: 154765 - DNA, 15 bp, Homo sapiens
gttcaccaagcacct

SEQ ID NO: 154766 - DNA, 15 bp, Homo sapiens
ggttcaccaagcacc

SEQ ID NO: 154767 - DNA, 15 bp, Homo sapiens
tggttcaccaagcac

SEQ ID NO: 154768 - DNA, 15 bp, Homo sapiens
atggttcaccaagca

SEQ ID NO: 154769 - DNA, 15 bp, Homo sapiens
catggttcaccaagc

SEQ ID NO: 154770 - DNA, 15 bp, Homo sapiens
ccatggttcaccaag

SEQ ID NO: 154771 - DNA, 15 bp, Homo sapiens
accatggttcaccaa

SEQ ID NO: 154772 - DNA, 15 bp, Homo sapiens
gaccatggttcacca

SEQ ID NO: 154773 - DNA, 15 bp, Homo sapiens
agaccatggttcacc

SEQ ID NO: 154774 - DNA, 15 bp, Homo sapiens
gagaccatggttcac

SEQ ID NO: 154775 - DNA, 15 bp, Homo sapiens
agagaccatggttca

SEQ ID NO: 154776 - DNA, 15 bp, Homo sapiens
aagagaccatggttc

SEQ ID NO: 154777 - DNA, 15 bp, Homo sapiens
taagagaccatggtt

SEQ ID NO: 154778 - DNA, 15 bp, Homo sapiens
ctaagagaccatggt

SEQ ID NO: 154779 - DNA, 15 bp, Homo sapiens
actaagagaccatgg

SEQ ID NO: 154780 - DNA, 15 bp, Homo sapiens
cactaagagaccatg

SEQ ID NO: 154781 - DNA, 15 bp, Homo sapiens
gcactaagagaccat

SEQ ID NO: 154782 - DNA, 15 bp, Homo sapiens
ggcactaagagacca

SEQ ID NO: 154783 - DNA, 15 bp, Homo sapiens
gggcactaagagacc

SEQ ID NO: 154784 - DNA, 15 bp, Homo sapiens
agggcactaagagac

SEQ ID NO: 154785 - DNA, 15 bp, Homo sapiens
cagggcactaagaga

SEQ ID NO: 154786 - DNA, 15 bp, Homo sapiens
acagggcactaagag

SEQ ID NO: 154787 - DNA, 15 bp, Homo sapiens
cacagggcactaaga

SEQ ID NO: 154788 - DNA, 15 bp, Homo sapiens
ccacagggcactaag

SEQ ID NO: 154789 - DNA, 15 bp, Homo sapiens
cccacagggcactaa

SEQ ID NO: 154790 - DNA, 15 bp, Homo sapiens
tcccacagggcacta

SEQ ID NO: 154791 - DNA, 15 bp, Homo sapiens
gtcccacagggcact

SEQ ID NO: 154792 - DNA, 15 bp, Homo sapiens
agtcccacagggcac

SEQ ID NO: 154793 - DNA, 15 bp, Homo sapiens
aagtcccacagggca

SEQ ID NO: 154794 - DNA, 15 bp, Homo sapiens
caagtcccacagggc

SEQ ID NO: 154795 - DNA, 15 bp, Homo sapiens
acaagtcccacaggg

SEQ ID NO: 154796 - DNA, 15 bp, Homo sapiens
tacaagtcccacagg

SEQ ID NO: 154797 - DNA, 15 bp, Homo sapiens
ttacaagtcccacag

SEQ ID NO: 154798 - DNA, 15 bp, Homo sapiens
cttacaagtcccaca

SEQ ID NO: 154799 - DNA, 15 bp, Homo sapiens
acttacaagtcccac

SEQ ID NO: 154800 - DNA, 15 bp, Homo sapiens
aacttacaagtccca

SEQ ID NO: 154801 - DNA, 15 bp, Homo sapiens
aaacttacaagtccc

SEQ ID NO: 154802 - DNA, 15 bp, Homo sapiens
aaaacttacaagtcc

SEQ ID NO: 154803 - DNA, 15 bp, Homo sapiens
aaaaacttacaagtc

SEQ ID NO: 154804 - DNA, 15 bp, Homo sapiens
caaaaacttacaagt

SEQ ID NO: 154805 - DNA, 15 bp, Homo sapiens
tcaaaaacttacaag

SEQ ID NO: 154806 - DNA, 15 bp, Homo sapiens
ttcaaaaacttacaa

SEQ ID NO: 154807 - DNA, 15 bp, Homo sapiens
cttcaaaaacttaca

SEQ ID NO: 154808 - DNA, 15 bp, Homo sapiens
acttcaaaaacttac

SEQ ID NO: 154809 - DNA, 15 bp, Homo sapiens
cacttcaaaaactta

SEQ ID NO: 154810 - DNA, 15 bp, Homo sapiens
acacttcaaaaactt

SEQ ID NO: 154811 - DNA, 15 bp, Homo sapiens
gacacttcaaaaact

SEQ ID NO: 154812 - DNA, 15 bp, Homo sapiens
agacacttcaaaaac

SEQ ID NO: 154813 - DNA, 15 bp, Homo sapiens
aagacacttcaaaaa

SEQ ID NO: 154814 - DNA, 15 bp, Homo sapiens
gaagacacttcaaaa

SEQ ID NO: 154815 - DNA, 15 bp, Homo sapiens
agaagacacttcaaa

SEQ ID NO: 154816 - DNA, 15 bp, Homo sapiens
gagaagacacttcaa

SEQ ID NO: 154817 - DNA, 15 bp, Homo sapiens
tgagaagacacttca

SEQ ID NO: 154818 - DNA, 15 bp, Homo sapiens
ttgagaagacacttc

SEQ ID NO: 154819 - DNA, 15 bp, Homo sapiens
cttgagaagacactt

SEQ ID NO: 154820 - DNA, 15 bp, Homo sapiens
acttgagaagacact

SEQ ID NO: 154821 - DNA, 15 bp, Homo sapiens
cacttgagaagacac

SEQ ID NO: 154822 - DNA, 15 bp, Homo sapiens
acacttgagaagaca

SEQ ID NO: 154823 - DNA, 15 bp, Homo sapiens
cacacttgagaagac

SEQ ID NO: 154824 - DNA, 15 bp, Homo sapiens
tcacacttgagaaga

SEQ ID NO: 154825 - DNA, 15 bp, Homo sapiens
atcacacttgagaag

SEQ ID NO: 154826 - DNA, 15 bp, Homo sapiens
gatcacacttgagaa

SEQ ID NO: 154827 - DNA, 15 bp, Homo sapiens
agatcacacttgaga

SEQ ID NO: 154828 - DNA, 15 bp, Homo sapiens
gagatcacacttgag

SEQ ID NO: 154829 - DNA, 15 bp, Homo sapiens
tgagatcacacttga

SEQ ID NO: 154830 - DNA, 15 bp, Homo sapiens
gtgagatcacacttg

SEQ ID NO: 154831 - DNA, 15 bp, Homo sapiens
agtgagatcacactt

SEQ ID NO: 154832 - DNA, 15 bp, Homo sapiens
gagtgagatcacact

SEQ ID NO: 154833 - DNA, 15 bp, Homo sapiens
ggagtgagatcacac

SEQ ID NO: 154834 - DNA, 15 bp, Homo sapiens
tggagtgagatcaca

SEQ ID NO: 154835 - DNA, 15 bp, Homo sapiens
atggagtgagatcac

SEQ ID NO: 154836 - DNA, 15 bp, Homo sapiens
gatggagtgagatca

SEQ ID NO: 154837 - DNA, 15 bp, Homo sapiens
ggatggagtgagatc

SEQ ID NO: 154838 - DNA, 15 bp, Homo sapiens
aggatggagtgagat

SEQ ID NO: 154839 - DNA, 15 bp, Homo sapiens
gaggatggagtgaga

SEQ ID NO: 154840 - DNA, 15 bp, Homo sapiens
tgaggatggagtgag

SEQ ID NO: 154841 - DNA, 15 bp, Homo sapiens
atgaggatggagtga

SEQ ID NO: 154842 - DNA, 15 bp, Homo sapiens
tatgaggatggagtg

SEQ ID NO: 154843 - DNA, 15 bp, Homo sapiens
ctatgaggatggagt

SEQ ID NO: 154844 - DNA, 15 bp, Homo sapiens
gctatgaggatggag

SEQ ID NO: 154845 - DNA, 15 bp, Homo sapiens
tgctatgaggatgga

SEQ ID NO: 154846 - DNA, 15 bp, Homo sapiens
gtgctatgaggatgg

SEQ ID NO: 154847 - DNA, 15 bp, Homo sapiens
agtgctatgaggatg

SEQ ID NO: 154848 - DNA, 15 bp, Homo sapiens
cagtgctatgaggat

SEQ ID NO: 154849 - DNA, 15 bp, Homo sapiens
tcagtgctatgagga

SEQ ID NO: 154850 - DNA, 15 bp, Homo sapiens
gtcagtgctatgagg

SEQ ID NO: 154851 - DNA, 15 bp, Homo sapiens
tgtcagtgctatgag

SEQ ID NO: 154852 - DNA, 15 bp, Homo sapiens
ttgtcagtgctatga

SEQ ID NO: 154853 - DNA, 15 bp, Homo sapiens
gttgtcagtgctatg

SEQ ID NO: 154854 - DNA, 15 bp, Homo sapiens
ggttgtcagtgctat

SEQ ID NO: 154855 - DNA, 15 bp, Homo sapiens
gggttgtcagtgcta

SEQ ID NO: 154856 - DNA, 15 bp, Homo sapiens
agggttgtcagtgct

SEQ ID NO: 154857 - DNA, 15 bp, Homo sapiens
tagggttgtcagtgc

SEQ ID NO: 154858 - DNA, 15 bp, Homo sapiens
atagggttgtcagtg

SEQ ID NO: 154859 - DNA, 15 bp, Homo sapiens
catagggttgtcagt

SEQ ID NO: 154860 - DNA, 15 bp, Homo sapiens
tcatagggttgtcag

SEQ ID NO: 154861 - DNA, 15 bp, Homo sapiens
ctcatagggttgtca

SEQ ID NO: 154862 - DNA, 15 bp, Homo sapiens
cctcatagggttgtc

SEQ ID NO: 154863 - DNA, 15 bp, Homo sapiens
tcctcatagggttgt

SEQ ID NO: 154864 - DNA, 15 bp, Homo sapiens
ttcctcatagggttg

SEQ ID NO: 154865 - DNA, 15 bp, Homo sapiens
cttcctcatagggtt

SEQ ID NO: 154866 - DNA, 15 bp, Homo sapiens
acttcctcatagggt

SEQ ID NO: 154867 - DNA, 15 bp, Homo sapiens
tacttcctcataggg

SEQ ID NO: 154868 - DNA, 15 bp, Homo sapiens
ttacttcctcatagg

SEQ ID NO: 154869 - DNA, 15 bp, Homo sapiens
cttacttcctcatag

SEQ ID NO: 154870 - DNA, 15 bp, Homo sapiens
tcttacttcctcata

SEQ ID NO: 154871 - DNA, 15 bp, Homo sapiens
atcttacttcctcat

SEQ ID NO: 154872 - DNA, 15 bp, Homo sapiens
catcttacttcctca

SEQ ID NO: 154873 - DNA, 15 bp, Homo sapiens
tcatcttacttcctc

SEQ ID NO: 154874 - DNA, 15 bp, Homo sapiens
ctcatcttacttcct

SEQ ID NO: 154875 - DNA, 15 bp, Homo sapiens
actcatcttacttcc

SEQ ID NO: 154876 - DNA, 15 bp, Homo sapiens
cactcatcttacttc

SEQ ID NO: 154877 - DNA, 15 bp, Homo sapiens
gcactcatcttactt

SEQ ID NO: 154878 - DNA, 15 bp, Homo sapiens
agcactcatcttact

SEQ ID NO: 154879 - DNA, 15 bp, Homo sapiens
aagcactcatcttac

SEQ ID NO: 154880 - DNA, 15 bp, Homo sapiens
gaagcactcatctta

SEQ ID NO: 154881 - DNA, 15 bp, Homo sapiens
agaagcactcatctt

SEQ ID NO: 154882 - DNA, 15 bp, Homo sapiens
tagaagcactcatct

SEQ ID NO: 154883 - DNA, 15 bp, Homo sapiens
ttagaagcactcatc

SEQ ID NO: 154884 - DNA, 15 bp, Homo sapiens
gttagaagcactcat

SEQ ID NO: 154885 - DNA, 15 bp, Homo sapiens
agttagaagcactca

SEQ ID NO: 154886 - DNA, 15 bp, Homo sapiens
gagttagaagcactc

SEQ ID NO: 154887 - DNA, 15 bp, Homo sapiens
ggagttagaagcact

SEQ ID NO: 154888 - DNA, 15 bp, Homo sapiens
gggagttagaagcac

SEQ ID NO: 154889 - DNA, 15 bp, Homo sapiens
tgggagttagaagca

SEQ ID NO: 154890 - DNA, 15 bp, Homo sapiens
ctgggagttagaagc

SEQ ID NO: 154891 - DNA, 15 bp, Homo sapiens
actgggagttagaag

SEQ ID NO: 154892 - DNA, 15 bp, Homo sapiens
aactgggagttagaa

SEQ ID NO: 154893 - DNA, 15 bp, Homo sapiens
gaactgggagttaga

SEQ ID NO: 154894 - DNA, 15 bp, Homo sapiens
tgaactgggagttag

SEQ ID NO: 154895 - DNA, 15 bp, Homo sapiens
ctgaactgggagtta

SEQ ID NO: 154896 - DNA, 15 bp, Homo sapiens
tctgaactgggagtt

SEQ ID NO: 154897 - DNA, 15 bp, Homo sapiens
ttctgaactgggagt

SEQ ID NO: 154898 - DNA, 15 bp, Homo sapiens
gttctgaactgggag

SEQ ID NO: 154899 - DNA, 15 bp, Homo sapiens
ggttctgaactggga

SEQ ID NO: 154900 - DNA, 15 bp, Homo sapiens
cggttctgaactggg

SEQ ID NO: 154901 - DNA, 15 bp, Homo sapiens
acggttctgaactgg

SEQ ID NO: 154902 - DNA, 15 bp, Homo sapiens
cacggttctgaactg

SEQ ID NO: 154903 - DNA, 15 bp, Homo sapiens
ccacggttctgaact

SEQ ID NO: 154904 - DNA, 15 bp, Homo sapiens
tccacggttctgaac

SEQ ID NO: 154905 - DNA, 15 bp, Homo sapiens
ctccacggttctgaa

SEQ ID NO: 154906 - DNA, 15 bp, Homo sapiens
tctccacggttctga

SEQ ID NO: 154907 - DNA, 15 bp, Homo sapiens
gtctccacggttctg

SEQ ID NO: 154908 - DNA, 15 bp, Homo sapiens
agtctccacggttct

SEQ ID NO: 154909 - DNA, 15 bp, Homo sapiens
cagtctccacggttc

SEQ ID NO: 154910 - DNA, 15 bp, Homo sapiens
tcagtctccacggtt

SEQ ID NO: 154911 - DNA, 15 bp, Homo sapiens
ctcagtctccacggt

SEQ ID NO: 154912 - DNA, 15 bp, Homo sapiens
cctcagtctccacgg

SEQ ID NO: 154913 - DNA, 15 bp, Homo sapiens
acctcagtctccacg

SEQ ID NO: 154914 - DNA, 15 bp, Homo sapiens
gacctcagtctccac

SEQ ID NO: 154915 - DNA, 15 bp, Homo sapiens
agacctcagtctcca

SEQ ID NO: 154916 - DNA, 15 bp, Homo sapiens
tagacctcagtctcc

SEQ ID NO: 154917 - DNA, 15 bp, Homo sapiens
ctagacctcagtctc

SEQ ID NO: 154918 - DNA, 15 bp, Homo sapiens
cctagacctcagtct

SEQ ID NO: 154919 - DNA, 15 bp, Homo sapiens
ccctagacctcagtc

SEQ ID NO: 154920 - DNA, 15 bp, Homo sapiens
tccctagacctcagt

SEQ ID NO: 154921 - DNA, 15 bp, Homo sapiens
ctccctagacctcag

SEQ ID NO: 154922 - DNA, 15 bp, Homo sapiens
tctccctagacctca

SEQ ID NO: 154923 - DNA, 15 bp, Homo sapiens
atctccctagacctc

SEQ ID NO: 154924 - DNA, 15 bp, Homo sapiens
tatctccctagacct

SEQ ID NO: 154925 - DNA, 15 bp, Homo sapiens
ttatctccctagacc

SEQ ID NO: 154926 - DNA, 15 bp, Homo sapiens
cttatctccctagac

SEQ ID NO: 154927 - DNA, 15 bp, Homo sapiens
acttatctccctaga

SEQ ID NO: 154928 - DNA, 15 bp, Homo sapiens
cacttatctccctag

SEQ ID NO: 154929 - DNA, 15 bp, Homo sapiens
acacttatctcccta

SEQ ID NO: 154930 - DNA, 15 bp, Homo sapiens
gacacttatctccct

SEQ ID NO: 154931 - DNA, 15 bp, Homo sapiens
cgacacttatctccc

SEQ ID NO: 154932 - DNA, 15 bp, Homo sapiens
acgacacttatctcc

SEQ ID NO: 154933 - DNA, 15 bp, Homo sapiens
cacgacacttatctc

SEQ ID NO: 154934 - DNA, 15 bp, Homo sapiens
ccacgacacttatct

SEQ ID NO: 154935 - DNA, 15 bp, Homo sapiens
cccacgacacttatc

SEQ ID NO: 154936 - DNA, 15 bp, Homo sapiens
gcccacgacacttat

SEQ ID NO: 154937 - DNA, 15 bp, Homo sapiens
tgcccacgacactta

SEQ ID NO: 154938 - DNA, 15 bp, Homo sapiens
ttgcccacgacactt

SEQ ID NO: 154939 - DNA, 15 bp, Homo sapiens
cttgcccacgacact

SEQ ID NO: 154940 - DNA, 15 bp, Homo sapiens
ccttgcccacgacac

SEQ ID NO: 154941 - DNA, 15 bp, Homo sapiens
cccttgcccacgaca

SEQ ID NO: 154942 - DNA, 15 bp, Homo sapiens
acccttgcccacgac

SEQ ID NO: 154943 - DNA, 15 bp, Homo sapiens
tacccttgcccacga

SEQ ID NO: 154944 - DNA, 15 bp, Homo sapiens
ctacccttgcccacg

SEQ ID NO: 154945 - DNA, 15 bp, Homo sapiens
cctacccttgcccac

SEQ ID NO: 154946 - DNA, 15 bp, Homo sapiens
gcctacccttgccca

SEQ ID NO: 154947 - DNA, 15 bp, Homo sapiens
tgcctacccttgccc

SEQ ID NO: 154948 - DNA, 15 bp, Homo sapiens
gtgcctacccttgcc

SEQ ID NO: 154949 - DNA, 15 bp, Homo sapiens
agtgcctacccttgc

SEQ ID NO: 154950 - DNA, 15 bp, Homo sapiens
aagtgcctacccttg

SEQ ID NO: 154951 - DNA, 15 bp, Homo sapiens
taagtgcctaccctt

SEQ ID NO: 154952 - DNA, 15 bp, Homo sapiens
ctaagtgcctaccct

SEQ ID NO: 154953 - DNA, 15 bp, Homo sapiens
cctaagtgcctaccc

SEQ ID NO: 154954 - DNA, 15 bp, Homo sapiens
acctaagtgcctacc

SEQ ID NO: 154955 - DNA, 15 bp, Homo sapiens
tacctaagtgcctac

SEQ ID NO: 154956 - DNA, 15 bp, Homo sapiens
ctacctaagtgccta

SEQ ID NO: 154957 - DNA, 15 bp, Homo sapiens
cctacctaagtgcct

SEQ ID NO: 154958 - DNA, 15 bp, Homo sapiens
ccctacctaagtgcc

SEQ ID NO: 154959 - DNA, 15 bp, Homo sapiens
tccctacctaagtgc

SEQ ID NO: 154960 - DNA, 15 bp, Homo sapiens
gtccctacctaagtg

SEQ ID NO: 154961 - DNA, 15 bp, Homo sapiens
tgtccctacctaagt

SEQ ID NO: 154962 - DNA, 15 bp, Homo sapiens
gtgtccctacctaag

SEQ ID NO: 154963 - DNA, 15 bp, Homo sapiens
tgtgtccctacctaa

SEQ ID NO: 154964 - DNA, 15 bp, Homo sapiens
ttgtgtccctaccta

SEQ ID NO: 154965 - DNA, 15 bp, Homo sapiens
tttgtgtccctacct

SEQ ID NO: 154966 - DNA, 15 bp, Homo sapiens
atttgtgtccctacc

SEQ ID NO: 154967 - DNA, 15 bp, Homo sapiens
catttgtgtccctac

SEQ ID NO: 154968 - DNA, 15 bp, Homo sapiens
ccatttgtgtcccta

SEQ ID NO: 154969 - DNA, 15 bp, Homo sapiens
accatttgtgtccct

SEQ ID NO: 154970 - DNA, 15 bp, Homo sapiens
taccatttgtgtccc

SEQ ID NO: 154971 - DNA, 15 bp, Homo sapiens
ctaccatttgtgtcc

SEQ ID NO: 154972 - DNA, 15 bp, Homo sapiens
cctaccatttgtgtc

SEQ ID NO: 154973 - DNA, 15 bp, Homo sapiens
ccctaccatttgtgt

SEQ ID NO: 154974 - DNA, 15 bp, Homo sapiens
tccctaccatttgtg

SEQ ID NO: 154975 - DNA, 15 bp, Homo sapiens
ctccctaccatttgt

SEQ ID NO: 154976 - DNA, 15 bp, Homo sapiens
tctccctaccatttg

SEQ ID NO: 154977 - DNA, 15 bp, Homo sapiens
gtctccctaccattt

SEQ ID NO: 154978 - DNA, 15 bp, Homo sapiens
cgtctccctaccatt

SEQ ID NO: 154979 - DNA, 15 bp, Homo sapiens
ccgtctccctaccat

SEQ ID NO: 154980 - DNA, 15 bp, Homo sapiens
cccgtctccctacca

SEQ ID NO: 154981 - DNA, 15 bp, Homo sapiens
ccccgtctccctacc

SEQ ID NO: 154982 - DNA, 15 bp, Homo sapiens
accccgtctccctac

SEQ ID NO: 154983 - DNA, 15 bp, Homo sapiens
aaccccgtctcccta

SEQ ID NO: 154984 - DNA, 15 bp, Homo sapiens
aaaccccgtctccct

SEQ ID NO: 154985 - DNA, 15 bp, Homo sapiens
caaaccccgtctccc

SEQ ID NO: 154986 - DNA, 15 bp, Homo sapiens
tcaaaccccgtctcc

SEQ ID NO: 154987 - DNA, 15 bp, Homo sapiens
ttcaaaccccgtctc

SEQ ID NO: 154988 - DNA, 15 bp, Homo sapiens
gttcaaaccccgtct

SEQ ID NO: 154989 - DNA, 15 bp, Homo sapiens
tgttcaaaccccgtc

SEQ ID NO: 154990 - DNA, 15 bp, Homo sapiens
ttgttcaaaccccgt

SEQ ID NO: 154991 - DNA, 15 bp, Homo sapiens
tttgttcaaaccccg

SEQ ID NO: 154992 - DNA, 15 bp, Homo sapiens
ctttgttcaaacccc

SEQ ID NO: 154993 - DNA, 15 bp, Homo sapiens
tctttgttcaaaccc

SEQ ID NO: 154994 - DNA, 15 bp, Homo sapiens
ctctttgttcaaacc

SEQ ID NO: 154995 - DNA, 15 bp, Homo sapiens
gctctttgttcaaac

SEQ ID NO: 154996 - DNA, 15 bp, Homo sapiens
agctctttgttcaaa

SEQ ID NO: 154997 - DNA, 15 bp, Homo sapiens
gagctctttgttcaa

SEQ ID NO: 154998 - DNA, 15 bp, Homo sapiens
agagctctttgttca

SEQ ID NO: 154999 - DNA, 15 bp, Homo sapiens
gagagctctttgttc

SEQ ID NO: 155000 - DNA, 15 bp, Homo sapiens
tgagagctctttgtt

SEQ ID NO: 155001 - DNA, 15 bp, Homo sapiens
atgagagctctttgt

SEQ ID NO: 155002 - DNA, 15 bp, Homo sapiens
catgagagctctttg

SEQ ID NO: 155003 - DNA, 15 bp, Homo sapiens
gcatgagagctcttt

SEQ ID NO: 155004 - DNA, 15 bp, Homo sapiens
agcatgagagctctt

SEQ ID NO: 155005 - DNA, 15 bp, Homo sapiens
cagcatgagagctct

SEQ ID NO: 155006 - DNA, 15 bp, Homo sapiens
tcagcatgagagctc

SEQ ID NO: 155007 - DNA, 15 bp, Homo sapiens
gtcagcatgagagct

SEQ ID NO: 155008 - DNA, 15 bp, Homo sapiens
agtcagcatgagagc

SEQ ID NO: 155009 - DNA, 15 bp, Homo sapiens
cagtcagcatgagag

SEQ ID NO: 155010 - DNA, 15 bp, Homo sapiens
ccagtcagcatgaga

SEQ ID NO: 155011 - DNA, 15 bp, Homo sapiens
gccagtcagcatgag

SEQ ID NO: 155012 - DNA, 15 bp, Homo sapiens
ggccagtcagcatga

SEQ ID NO: 155013 - DNA, 15 bp, Homo sapiens
gggccagtcagcatg

SEQ ID NO: 155014 - DNA, 15 bp, Homo sapiens
ggggccagtcagcat

SEQ ID NO: 155015 - DNA, 15 bp, Homo sapiens
tggggccagtcagca

SEQ ID NO: 155016 - DNA, 15 bp, Homo sapiens
atggggccagtcagc

SEQ ID NO: 155017 - DNA, 15 bp, Homo sapiens
gatggggccagtcag

SEQ ID NO: 155018 - DNA, 15 bp, Homo sapiens
ggatggggccagtca

SEQ ID NO: 155019 - DNA, 15 bp, Homo sapiens
cggatggggccagtc

SEQ ID NO: 155020 - DNA, 15 bp, Homo sapiens
tcggatggggccagt

SEQ ID NO: 155021 - DNA, 15 bp, Homo sapiens
gtcggatggggccag

SEQ ID NO: 155022 - DNA, 15 bp, Homo sapiens
tgtcggatggggcca

SEQ ID NO: 155023 - DNA, 15 bp, Homo sapiens
ctgtcggatggggcc

SEQ ID NO: 155024 - DNA, 15 bp, Homo sapiens
cctgtcggatggggc

SEQ ID NO: 155025 - DNA, 15 bp, Homo sapiens
tcctgtcggatgggg

SEQ ID NO: 155026 - DNA, 15 bp, Homo sapiens
gtcctgtcggatggg

SEQ ID NO: 155027 - DNA, 15 bp, Homo sapiens
tgtcctgtcggatgg

SEQ ID NO: 155028 - DNA, 15 bp, Homo sapiens
gtgtcctgtcggatg

SEQ ID NO: 155029 - DNA, 15 bp, Homo sapiens
tgtgtcctgtcggat

SEQ ID NO: 155030 - DNA, 15 bp, Homo sapiens
ttgtgtcctgtcgga

SEQ ID NO: 155031 - DNA, 15 bp, Homo sapiens
cttgtgtcctgtcgg

SEQ ID NO: 155032 - DNA, 15 bp, Homo sapiens
tcttgtgtcctgtcg

SEQ ID NO: 155033 - DNA, 15 bp, Homo sapiens
ctcttgtgtcctgtc

SEQ ID NO: 155034 - DNA, 15 bp, Homo sapiens
gctcttgtgtcctgt

SEQ ID NO: 155035 - DNA, 15 bp, Homo sapiens
tgctcttgtgtcctg

SEQ ID NO: 155036 - DNA, 15 bp, Homo sapiens
gtgctcttgtgtcct

SEQ ID NO: 155037 - DNA, 15 bp, Homo sapiens
ggtgctcttgtgtcc

SEQ ID NO: 155038 - DNA, 15 bp, Homo sapiens
gggtgctcttgtgtc

SEQ ID NO: 155039 - DNA, 15 bp, Homo sapiens
tgggtgctcttgtgt

SEQ ID NO: 155040 - DNA, 15 bp, Homo sapiens
gtgggtgctcttgtg

SEQ ID NO: 155041 - DNA, 15 bp, Homo sapiens
agtgggtgctcttgt

SEQ ID NO: 155042 - DNA, 15 bp, Homo sapiens
gagtgggtgctcttg

SEQ ID NO: 155043 - DNA, 15 bp, Homo sapiens
agagtgggtgctctt

SEQ ID NO: 155044 - DNA, 15 bp, Homo sapiens
cagagtgggtgctct

SEQ ID NO: 155045 - DNA, 15 bp, Homo sapiens
ccagagtgggtgctc

SEQ ID NO: 155046 - DNA, 15 bp, Homo sapiens
cccagagtgggtgct

SEQ ID NO: 155047 - DNA, 15 bp, Homo sapiens
acccagagtgggtgc

SEQ ID NO: 155048 - DNA, 15 bp, Homo sapiens
cacccagagtgggtg

SEQ ID NO: 155049 - DNA, 15 bp, Homo sapiens
acacccagagtgggt

SEQ ID NO: 155050 - DNA, 15 bp, Homo sapiens
cacacccagagtggg

SEQ ID NO: 155051 - DNA, 15 bp, Homo sapiens
gcacacccagagtgg

SEQ ID NO: 155052 - DNA, 15 bp, Homo sapiens
ggcacacccagagtg

SEQ ID NO: 155053 - DNA, 15 bp, Homo sapiens
aggcacacccagagt

SEQ ID NO: 155054 - DNA, 15 bp, Homo sapiens
caggcacacccagag

SEQ ID NO: 155055 - DNA, 15 bp, Homo sapiens
ccaggcacacccaga

SEQ ID NO: 155056 - DNA, 15 bp, Homo sapiens
cccaggcacacccag

SEQ ID NO: 155057 - DNA, 15 bp, Homo sapiens
acccaggcacaccca

SEQ ID NO: 155058 - DNA, 15 bp, Homo sapiens
gacccaggcacaccc

SEQ ID NO: 155059 - DNA, 15 bp, Homo sapiens
tgacccaggcacacc

SEQ ID NO: 155060 - DNA, 15 bp, Homo sapiens
gtgacccaggcacac

SEQ ID NO: 155061 - DNA, 15 bp, Homo sapiens
ggtgacccaggcaca

SEQ ID NO: 155062 - DNA, 15 bp, Homo sapiens
gggtgacccaggcac

SEQ ID NO: 155063 - DNA, 15 bp, Homo sapiens
agggtgacccaggca

SEQ ID NO: 155064 - DNA, 15 bp, Homo sapiens
gagggtgacccaggc

SEQ ID NO: 155065 - DNA, 15 bp, Homo sapiens
agagggtgacccagg

SEQ ID NO: 155066 - DNA, 15 bp, Homo sapiens
cagagggtgacccag

SEQ ID NO: 155067 - DNA, 15 bp, Homo sapiens
gcagagggtgaccca

SEQ ID NO: 155068 - DNA, 15 bp, Homo sapiens
tgcagagggtgaccc

SEQ ID NO: 155069 - DNA, 15 bp, Homo sapiens
atgcagagggtgacc

SEQ ID NO: 155070 - DNA, 15 bp, Homo sapiens
catgcagagggtgac

SEQ ID NO: 155071 - DNA, 15 bp, Homo sapiens
acatgcagagggtga

SEQ ID NO: 155072 - DNA, 15 bp, Homo sapiens
tacatgcagagggtg

SEQ ID NO: 155073 - DNA, 15 bp, Homo sapiens
ctacatgcagagggt

SEQ ID NO: 155074 - DNA, 15 bp, Homo sapiens
actacatgcagaggg

SEQ ID NO: 155075 - DNA, 15 bp, Homo sapiens
cactacatgcagagg

SEQ ID NO: 155076 - DNA, 15 bp, Homo sapiens
ccactacatgcagag

SEQ ID NO: 155077 - DNA, 15 bp, Homo sapiens
cccactacatgcaga

SEQ ID NO: 155078 - DNA, 15 bp, Homo sapiens
gcccactacatgcag

SEQ ID NO: 155079 - DNA, 15 bp, Homo sapiens
tgcccactacatgca

SEQ ID NO: 155080 - DNA, 15 bp, Homo sapiens
atgcccactacatgc

SEQ ID NO: 155081 - DNA, 15 bp, Homo sapiens
catgcccactacatg

SEQ ID NO: 155082 - DNA, 15 bp, Homo sapiens
ccatgcccactacat

SEQ ID NO: 155083 - DNA, 15 bp, Homo sapiens
cccatgcccactaca

SEQ ID NO: 155084 - DNA, 15 bp, Homo sapiens
tcccatgcccactac

SEQ ID NO: 155085 - DNA, 15 bp, Homo sapiens
ctcccatgcccacta

SEQ ID NO: 155086 - DNA, 15 bp, Homo sapiens
tctcccatgcccact

SEQ ID NO: 155087 - DNA, 15 bp, Homo sapiens
ttctcccatgcccac

SEQ ID NO: 155088 - DNA, 15 bp, Homo sapiens
tttctcccatgccca

SEQ ID NO: 155089 - DNA, 15 bp, Homo sapiens
ttttctcccatgccc

SEQ ID NO: 155090 - DNA, 15 bp, Homo sapiens
cttttctcccatgcc

SEQ ID NO: 155091 - DNA, 15 bp, Homo sapiens
ccttttctcccatgc

SEQ ID NO: 155092 - DNA, 15 bp, Homo sapiens
cccttttctcccatg

SEQ ID NO: 155093 - DNA, 15 bp, Homo sapiens
gcccttttctcccat

SEQ ID NO: 155094 - DNA, 15 bp, Homo sapiens
agcccttttctccca

SEQ ID NO: 155095 - DNA, 15 bp, Homo sapiens
cagcccttttctccc

SEQ ID NO: 155096 - DNA, 15 bp, Homo sapiens
gcagcccttttctcc

SEQ ID NO: 155097 - DNA, 15 bp, Homo sapiens
agcagcccttttctc

SEQ ID NO: 155098 - DNA, 15 bp, Homo sapiens
aagcagcccttttct

SEQ ID NO: 155099 - DNA, 15 bp, Homo sapiens
taagcagcccttttc

SEQ ID NO: 155100 - DNA, 15 bp, Homo sapiens
ctaagcagccctttt

SEQ ID NO: 155101 - DNA, 15 bp, Homo sapiens
gctaagcagcccttt

SEQ ID NO: 155102 - DNA, 15 bp, Homo sapiens
cgctaagcagccctt

SEQ ID NO: 155103 - DNA, 15 bp, Homo sapiens
tcgctaagcagccct

SEQ ID NO: 155104 - DNA, 15 bp, Homo sapiens
ctcgctaagcagccc

SEQ ID NO: 155105 - DNA, 15 bp, Homo sapiens
cctcgctaagcagcc

SEQ ID NO: 155106 - DNA, 15 bp, Homo sapiens
ccctcgctaagcagc

SEQ ID NO: 155107 - DNA, 15 bp, Homo sapiens
cccctcgctaagcag

SEQ ID NO: 155108 - DNA, 15 bp, Homo sapiens
tcccctcgctaagca

SEQ ID NO: 155109 - DNA, 15 bp, Homo sapiens
ttcccctcgctaagc

SEQ ID NO: 155110 - DNA, 15 bp, Homo sapiens
tttcccctcgctaag

SEQ ID NO: 155111 - DNA, 15 bp, Homo sapiens
atttcccctcgctaa

SEQ ID NO: 155112 - DNA, 15 bp, Homo sapiens
aatttcccctcgcta

SEQ ID NO: 155113 - DNA, 15 bp, Homo sapiens
caatttcccctcgct

SEQ ID NO: 155114 - DNA, 15 bp, Homo sapiens
ccaatttcccctcgc

SEQ ID NO: 155115 - DNA, 15 bp, Homo sapiens
accaatttcccctcg

SEQ ID NO: 155116 - DNA, 15 bp, Homo sapiens
caccaatttcccctc

SEQ ID NO: 155117 - DNA, 15 bp, Homo sapiens
ccaccaatttcccct

SEQ ID NO: 155118 - DNA, 15 bp, Homo sapiens
gccaccaatttcccc

SEQ ID NO: 155119 - DNA, 15 bp, Homo sapiens
agccaccaatttccc

SEQ ID NO: 155120 - DNA, 15 bp, Homo sapiens
cagccaccaatttcc

SEQ ID NO: 155121 - DNA, 15 bp, Homo sapiens
ccagccaccaatttc

SEQ ID NO: 155122 - DNA, 15 bp, Homo sapiens
gccagccaccaattt

SEQ ID NO: 155123 - DNA, 15 bp, Homo sapiens
agccagccaccaatt

SEQ ID NO: 155124 - DNA, 15 bp, Homo sapiens
cagccagccaccaat

SEQ ID NO: 155125 - DNA, 15 bp, Homo sapiens
ccagccagccaccaa

SEQ ID NO: 155126 - DNA, 15 bp, Homo sapiens
tccagccagccacca

SEQ ID NO: 155127 - DNA, 15 bp, Homo sapiens
ctccagccagccacc

SEQ ID NO: 155128 - DNA, 15 bp, Homo sapiens
actccagccagccac

SEQ ID NO: 155129 - DNA, 15 bp, Homo sapiens
cactccagccagcca

SEQ ID NO: 155130 - DNA, 15 bp, Homo sapiens
gcactccagccagcc

SEQ ID NO: 155131 - DNA, 15 bp, Homo sapiens
agcactccagccagc

SEQ ID NO: 155132 - DNA, 15 bp, Homo sapiens
aagcactccagccag

SEQ ID NO: 155133 - DNA, 15 bp, Homo sapiens
gaagcactccagcca

SEQ ID NO: 155134 - DNA, 15 bp, Homo sapiens
agaagcactccagcc

SEQ ID NO: 155135 - DNA, 15 bp, Homo sapiens
aagaagcactccagc

SEQ ID NO: 155136 - DNA, 15 bp, Homo sapiens
gaagaagcactccag

SEQ ID NO: 155137 - DNA, 15 bp, Homo sapiens
agaagaagcactcca

SEQ ID NO: 155138 - DNA, 15 bp, Homo sapiens
tagaagaagcactcc

SEQ ID NO: 155139 - DNA, 15 bp, Homo sapiens
atagaagaagcactc

SEQ ID NO: 155140 - DNA, 15 bp, Homo sapiens
gatagaagaagcact

SEQ ID NO: 155141 - DNA, 15 bp, Homo sapiens
ggatagaagaagcac

SEQ ID NO: 155142 - DNA, 15 bp, Homo sapiens
aggatagaagaagca

SEQ ID NO: 155143 - DNA, 15 bp, Homo sapiens
taggatagaagaagc

SEQ ID NO: 155144 - DNA, 15 bp, Homo sapiens
ctaggatagaagaag

SEQ ID NO: 155145 - DNA, 15 bp, Homo sapiens
tctaggatagaagaa

SEQ ID NO: 155146 - DNA, 15 bp, Homo sapiens
ctctaggatagaaga

SEQ ID NO: 155147 - DNA, 15 bp, Homo sapiens
actctaggatagaag

SEQ ID NO: 155148 - DNA, 15 bp, Homo sapiens
cactctaggatagaa

SEQ ID NO: 155149 - DNA, 15 bp, Homo sapiens
acactctaggataga

SEQ ID NO: 155150 - DNA, 15 bp, Homo sapiens
cacactctaggatag

SEQ ID NO: 155151 - DNA, 15 bp, Homo sapiens
ccacactctaggata

SEQ ID NO: 155152 - DNA, 15 bp, Homo sapiens
gccacactctaggat

SEQ ID NO: 155153 - DNA, 15 bp, Homo sapiens
tgccacactctagga

SEQ ID NO: 155154 - DNA, 15 bp, Homo sapiens
ttgccacactctagg

SEQ ID NO: 155155 - DNA, 15 bp, Homo sapiens
cttgccacactctag

SEQ ID NO: 155156 - DNA, 15 bp, Homo sapiens
tcttgccacactcta

SEQ ID NO: 155157 - DNA, 15 bp, Homo sapiens
ttcttgccacactct

SEQ ID NO: 155158 - DNA, 15 bp, Homo sapiens
tttcttgccacactc

SEQ ID NO: 155159 - DNA, 15 bp, Homo sapiens
ctttcttgccacact

SEQ ID NO: 155160 - DNA, 15 bp, Homo sapiens
cctttcttgccacac

SEQ ID NO: 155161 - DNA, 15 bp, Homo sapiens
tcctttcttgccaca

SEQ ID NO: 155162 - DNA, 15 bp, Homo sapiens
ttcctttcttgccac

SEQ ID NO: 155163 - DNA, 15 bp, Homo sapiens
cttcctttcttgcca

SEQ ID NO: 155164 - DNA, 15 bp, Homo sapiens
acttcctttcttgcc

SEQ ID NO: 155165 - DNA, 15 bp, Homo sapiens
aacttcctttcttgc

SEQ ID NO: 155166 - DNA, 15 bp, Homo sapiens
caacttcctttcttg

SEQ ID NO: 155167 - DNA, 15 bp, Homo sapiens
acaacttcctttctt

SEQ ID NO: 155168 - DNA, 15 bp, Homo sapiens
gacaacttcctttct

SEQ ID NO: 155169 - DNA, 15 bp, Homo sapiens
agacaacttcctttc

SEQ ID NO: 155170 - DNA, 15 bp, Homo sapiens
gagacaacttccttt

SEQ ID NO: 155171 - DNA, 15 bp, Homo sapiens
agagacaacttcctt

SEQ ID NO: 155172 - DNA, 15 bp, Homo sapiens
aagagacaacttcct

SEQ ID NO: 155173 - DNA, 15 bp, Homo sapiens
caagagacaacttcc

SEQ ID NO: 155174 - DNA, 15 bp, Homo sapiens
gcaagagacaacttc

SEQ ID NO: 155175 - DNA, 15 bp, Homo sapiens
ggcaagagacaactt

SEQ ID NO: 155176 - DNA, 15 bp, Homo sapiens
aggcaagagacaact

SEQ ID NO: 155177 - DNA, 15 bp, Homo sapiens
aaggcaagagacaac

SEQ ID NO: 155178 - DNA, 15 bp, Homo sapiens
aaaggcaagagacaa

SEQ ID NO: 155179 - DNA, 15 bp, Homo sapiens
aaaaggcaagagaca

SEQ ID NO: 155180 - DNA, 15 bp, Homo sapiens
caaaaggcaagagac

SEQ ID NO: 155181 - DNA, 15 bp, Homo sapiens
gcaaaaggcaagaga

SEQ ID NO: 155182 - DNA, 15 bp, Homo sapiens
tgcaaaaggcaagag

SEQ ID NO: 155183 - DNA, 15 bp, Homo sapiens
ttgcaaaaggcaaga

SEQ ID NO: 155184 - DNA, 15 bp, Homo sapiens
tttgcaaaaggcaag

SEQ ID NO: 155185 - DNA, 15 bp, Homo sapiens
atttgcaaaaggcaa

SEQ ID NO: 155186 - DNA, 15 bp, Homo sapiens
aatttgcaaaaggca

SEQ ID NO: 155187 - DNA, 15 bp, Homo sapiens
caatttgcaaaaggc

SEQ ID NO: 155188 - DNA, 15 bp, Homo sapiens
gcaatttgcaaaagg

SEQ ID NO: 155189 - DNA, 15 bp, Homo sapiens
tgcaatttgcaaaag

SEQ ID NO: 155190 - DNA, 15 bp, Homo sapiens
ttgcaatttgcaaaa

SEQ ID NO: 155191 - DNA, 15 bp, Homo sapiens
gttgcaatttgcaaa

SEQ ID NO: 155192 - DNA, 15 bp, Homo sapiens
ggttgcaatttgcaa

SEQ ID NO: 155193 - DNA, 15 bp, Homo sapiens
cggttgcaatttgca

SEQ ID NO: 155194 - DNA, 15 bp, Homo sapiens
tcggttgcaatttgc

SEQ ID NO: 155195 - DNA, 15 bp, Homo sapiens
ttcggttgcaatttg

SEQ ID NO: 155196 - DNA, 15 bp, Homo sapiens
attcggttgcaattt

SEQ ID NO: 155197 - DNA, 15 bp, Homo sapiens
cattcggttgcaatt

SEQ ID NO: 155198 - DNA, 15 bp, Homo sapiens
ccattcggttgcaat

SEQ ID NO: 155199 - DNA, 15 bp, Homo sapiens
accattcggttgcaa

SEQ ID NO: 155200 - DNA, 15 bp, Homo sapiens
caccattcggttgca

SEQ ID NO: 155201 - DNA, 15 bp, Homo sapiens
tcaccattcggttgc

SEQ ID NO: 155202 - DNA, 15 bp, Homo sapiens
ctcaccattcggttg

SEQ ID NO: 155203 - DNA, 15 bp, Homo sapiens
cctcaccattcggtt

SEQ ID NO: 155204 - DNA, 15 bp, Homo sapiens
ccctcaccattcggt

SEQ ID NO: 155205 - DNA, 15 bp, Homo sapiens
cccctcaccattcgg

SEQ ID NO: 155206 - DNA, 15 bp, Homo sapiens
acccctcaccattcg

SEQ ID NO: 155207 - DNA, 15 bp, Homo sapiens
cacccctcaccattc

SEQ ID NO: 155208 - DNA, 15 bp, Homo sapiens
tcacccctcaccatt

SEQ ID NO: 155209 - DNA, 15 bp, Homo sapiens
gtcacccctcaccat

SEQ ID NO: 155210 - DNA, 15 bp, Homo sapiens
tgtcacccctcacca

SEQ ID NO: 155211 - DNA, 15 bp, Homo sapiens
ctgtcacccctcacc

SEQ ID NO: 155212 - DNA, 15 bp, Homo sapiens
actgtcacccctcac

SEQ ID NO: 155213 - DNA, 15 bp, Homo sapiens
tactgtcacccctca

SEQ ID NO: 155214 - DNA, 15 bp, Homo sapiens
atactgtcacccctc

SEQ ID NO: 155215 - DNA, 15 bp, Homo sapiens
aatactgtcacccct

SEQ ID NO: 155216 - DNA, 15 bp, Homo sapiens
caatactgtcacccc

SEQ ID NO: 155217 - DNA, 15 bp, Homo sapiens
gcaatactgtcaccc

SEQ ID NO: 155218 - DNA, 15 bp, Homo sapiens
agcaatactgtcacc

SEQ ID NO: 155219 - DNA, 15 bp, Homo sapiens
tagcaatactgtcac

SEQ ID NO: 155220 - DNA, 15 bp, Homo sapiens
gtagcaatactgtca

SEQ ID NO: 155221 - DNA, 15 bp, Homo sapiens
agtagcaatactgtc

SEQ ID NO: 155222 - DNA, 15 bp, Homo sapiens
cagtagcaatactgt

SEQ ID NO: 155223 - DNA, 15 bp, Homo sapiens
ccagtagcaatactg

SEQ ID NO: 155224 - DNA, 15 bp, Homo sapiens
accagtagcaatact

SEQ ID NO: 155225 - DNA, 15 bp, Homo sapiens
taccagtagcaatac

SEQ ID NO: 155226 - DNA, 15 bp, Homo sapiens
ctaccagtagcaata

SEQ ID NO: 155227 - DNA, 15 bp, Homo sapiens
cctaccagtagcaat

SEQ ID NO: 155228 - DNA, 15 bp, Homo sapiens
tcctaccagtagcaa

SEQ ID NO: 155229 - DNA, 15 bp, Homo sapiens
ttcctaccagtagca

SEQ ID NO: 155230 - DNA, 15 bp, Homo sapiens
tttcctaccagtagc

SEQ ID NO: 155231 - DNA, 15 bp, Homo sapiens
ctttcctaccagtag

SEQ ID NO: 155232 - DNA, 15 bp, Homo sapiens
gctttcctaccagta

SEQ ID NO: 155233 - DNA, 15 bp, Homo sapiens
agctttcctaccagt

SEQ ID NO: 155234 - DNA, 15 bp, Homo sapiens
aagctttcctaccag

SEQ ID NO: 155235 - DNA, 15 bp, Homo sapiens
caagctttcctacca

SEQ ID NO: 155236 - DNA, 15 bp, Homo sapiens
ccaagctttcctacc

SEQ ID NO: 155237 - DNA, 15 bp, Homo sapiens
tccaagctttcctac

SEQ ID NO: 155238 - DNA, 15 bp, Homo sapiens
atccaagctttccta

SEQ ID NO: 155239 - DNA, 15 bp, Homo sapiens
catccaagctttcct

SEQ ID NO: 155240 - DNA, 15 bp, Homo sapiens
ccatccaagctttcc

SEQ ID NO: 155241 - DNA, 15 bp, Homo sapiens
gccatccaagctttc

SEQ ID NO: 155242 - DNA, 15 bp, Homo sapiens
tgccatccaagcttt

SEQ ID NO: 155243 - DNA, 15 bp, Homo sapiens
ctgccatccaagctt

SEQ ID NO: 155244 - DNA, 15 bp, Homo sapiens
cctgccatccaagct

SEQ ID NO: 155245 - DNA, 15 bp, Homo sapiens
ccctgccatccaagc

SEQ ID NO: 155246 - DNA, 15 bp, Homo sapiens
tccctgccatccaag

SEQ ID NO: 155247 - DNA, 15 bp, Homo sapiens
gtccctgccatccaa

SEQ ID NO: 155248 - DNA, 15 bp, Homo sapiens
tgtccctgccatcca

SEQ ID NO: 155249 - DNA, 15 bp, Homo sapiens
ctgtccctgccatcc

SEQ ID NO: 155250 - DNA, 15 bp, Homo sapiens
tctgtccctgccatc

SEQ ID NO: 155251 - DNA, 15 bp, Homo sapiens
ttctgtccctgccat

SEQ ID NO: 155252 - DNA, 15 bp, Homo sapiens
gttctgtccctgcca

SEQ ID NO: 155253 - DNA, 15 bp, Homo sapiens
cgttctgtccctgcc

SEQ ID NO: 155254 - DNA, 15 bp, Homo sapiens
ccgttctgtccctgc

SEQ ID NO: 155255 - DNA, 15 bp, Homo sapiens
gccgttctgtccctg

SEQ ID NO: 155256 - DNA, 15 bp, Homo sapiens
agccgttctgtccct

SEQ ID NO: 155257 - DNA, 15 bp, Homo sapiens
cagccgttctgtccc

SEQ ID NO: 155258 - DNA, 15 bp, Homo sapiens
acagccgttctgtcc

SEQ ID NO: 155259 - DNA, 15 bp, Homo sapiens
tacagccgttctgtc

SEQ ID NO: 155260 - DNA, 15 bp, Homo sapiens
ttacagccgttctgt

SEQ ID NO: 155261 - DNA, 15 bp, Homo sapiens
tttacagccgttctg

SEQ ID NO: 155262 - DNA, 15 bp, Homo sapiens
gtttacagccgttct

SEQ ID NO: 155263 - DNA, 15 bp, Homo sapiens
ggtttacagccgttc

SEQ ID NO: 155264 - DNA, 15 bp, Homo sapiens
aggtttacagccgtt

SEQ ID NO: 155265 - DNA, 15 bp, Homo sapiens
caggtttacagccgt

SEQ ID NO: 155266 - DNA, 15 bp, Homo sapiens
ccaggtttacagccg

SEQ ID NO: 155267 - DNA, 15 bp, Homo sapiens
gccaggtttacagcc

SEQ ID NO: 155268 - DNA, 15 bp, Homo sapiens
tgccaggtttacagc

SEQ ID NO: 155269 - DNA, 15 bp, Homo sapiens
gtgccaggtttacag

SEQ ID NO: 155270 - DNA, 15 bp, Homo sapiens
ggtgccaggtttaca

SEQ ID NO: 155271 - DNA, 15 bp, Homo sapiens
aggtgccaggtttac

SEQ ID NO: 155272 - DNA, 15 bp, Homo sapiens
gaggtgccaggttta

SEQ ID NO: 155273 - DNA, 15 bp, Homo sapiens
agaggtgccaggttt

SEQ ID NO: 155274 - DNA, 15 bp, Homo sapiens
cagaggtgccaggtt

SEQ ID NO: 155275 - DNA, 15 bp, Homo sapiens
ccagaggtgccaggt

SEQ ID NO: 155276 - DNA, 15 bp, Homo sapiens
cccagaggtgccagg

SEQ ID NO: 155277 - DNA, 15 bp, Homo sapiens
ccccagaggtgccag

SEQ ID NO: 155278 - DNA, 15 bp, Homo sapiens
cccccagaggtgcca

SEQ ID NO: 155279 - DNA, 15 bp, Homo sapiens
tcccccagaggtgcc

SEQ ID NO: 155280 - DNA, 15 bp, Homo sapiens
ctcccccagaggtgc

SEQ ID NO: 155281 - DNA, 15 bp, Homo sapiens
gctcccccagaggtg

SEQ ID NO: 155282 - DNA, 15 bp, Homo sapiens
agctcccccagaggt

SEQ ID NO: 155283 - DNA, 15 bp, Homo sapiens
cagctcccccagagg

SEQ ID NO: 155284 - DNA, 15 bp, Homo sapiens
gcagctcccccagag

SEQ ID NO: 155285 - DNA, 15 bp, Homo sapiens
ggcagctcccccaga

SEQ ID NO: 155286 - DNA, 15 bp, Homo sapiens
gggcagctcccccag

SEQ ID NO: 155287 - DNA, 15 bp, Homo sapiens
ggggcagctccccca

SEQ ID NO: 155288 - DNA, 15 bp, Homo sapiens
gggggcagctccccc

SEQ ID NO: 155289 - DNA, 15 bp, Homo sapiens
agggggcagctcccc

SEQ ID NO: 155290 - DNA, 15 bp, Homo sapiens
gagggggcagctccc

SEQ ID NO: 155291 - DNA, 15 bp, Homo sapiens
tgagggggcagctcc

SEQ ID NO: 155292 - DNA, 15 bp, Homo sapiens
gtgagggggcagctc

SEQ ID NO: 155293 - DNA, 15 bp, Homo sapiens
ggtgagggggcagct

SEQ ID NO: 155294 - DNA, 15 bp, Homo sapiens
aggtgagggggcagc

SEQ ID NO: 155295 - DNA, 15 bp, Homo sapiens
aaggtgagggggcag

SEQ ID NO: 155296 - DNA, 15 bp, Homo sapiens
caaggtgagggggca

SEQ ID NO: 155297 - DNA, 15 bp, Homo sapiens
tcaaggtgagggggc

SEQ ID NO: 155298 - DNA, 15 bp, Homo sapiens
gtcaaggtgaggggg

SEQ ID NO: 155299 - DNA, 15 bp, Homo sapiens
agtcaaggtgagggg

SEQ ID NO: 155300 - DNA, 15 bp, Homo sapiens
aagtcaaggtgaggg

SEQ ID NO: 155301 - DNA, 15 bp, Homo sapiens
aaagtcaaggtgagg

SEQ ID NO: 155302 - DNA, 15 bp, Homo sapiens
caaagtcaaggtgag

SEQ ID NO: 155303 - DNA, 15 bp, Homo sapiens
tcaaagtcaaggtga

SEQ ID NO: 155304 - DNA, 15 bp, Homo sapiens
gtcaaagtcaaggtg

SEQ ID NO: 155305 - DNA, 15 bp, Homo sapiens
ggtcaaagtcaaggt

SEQ ID NO: 155306 - DNA, 15 bp, Homo sapiens
tggtcaaagtcaagg

SEQ ID NO: 155307 - DNA, 15 bp, Homo sapiens
atggtcaaagtcaag

SEQ ID NO: 155308 - DNA, 15 bp, Homo sapiens
aatggtcaaagtcaa

SEQ ID NO: 155309 - DNA, 15 bp, Homo sapiens
caatggtcaaagtca

SEQ ID NO: 155310 - DNA, 15 bp, Homo sapiens
acaatggtcaaagtc

SEQ ID NO: 155311 - DNA, 15 bp, Homo sapiens
gacaatggtcaaagt

SEQ ID NO: 155312 - DNA, 15 bp, Homo sapiens
ggacaatggtcaaag

SEQ ID NO: 155313 - DNA, 15 bp, Homo sapiens
gggacaatggtcaaa

SEQ ID NO: 155314 - DNA, 15 bp, Homo sapiens
agggacaatggtcaa

SEQ ID NO: 155315 - DNA, 15 bp, Homo sapiens
aagggacaatggtca

SEQ ID NO: 155316 - DNA, 15 bp, Homo sapiens
aaagggacaatggtc

SEQ ID NO: 155317 - DNA, 15 bp, Homo sapiens
gaaagggacaatggt

SEQ ID NO: 155318 - DNA, 15 bp, Homo sapiens
agaaagggacaatgg

SEQ ID NO: 155319 - DNA, 15 bp, Homo sapiens
aagaaagggacaatg

SEQ ID NO: 155320 - DNA, 15 bp, Homo sapiens
aaagaaagggacaat

SEQ ID NO: 155321 - DNA, 15 bp, Homo sapiens
aaaagaaagggacaa

SEQ ID NO: 155322 - DNA, 15 bp, Homo sapiens
gaaaagaaagggaca

SEQ ID NO: 155323 - DNA, 15 bp, Homo sapiens
tgaaaagaaagggac

SEQ ID NO: 155324 - DNA, 15 bp, Homo sapiens
gtgaaaagaaaggga

SEQ ID NO: 155325 - DNA, 15 bp, Homo sapiens
agtgaaaagaaaggg

SEQ ID NO: 155326 - DNA, 15 bp, Homo sapiens
aagtgaaaagaaagg

SEQ ID NO: 155327 - DNA, 15 bp, Homo sapiens
aaagtgaaaagaaag

SEQ ID NO: 155328 - DNA, 15 bp, Homo sapiens
gaaagtgaaaagaaa

SEQ ID NO: 155329 - DNA, 15 bp, Homo sapiens
tgaaagtgaaaagaa

SEQ ID NO: 155330 - DNA, 15 bp, Homo sapiens
atgaaagtgaaaaga

SEQ ID NO: 155331 - DNA, 15 bp, Homo sapiens
catgaaagtgaaaag

SEQ ID NO: 155332 - DNA, 15 bp, Homo sapiens
ccatgaaagtgaaaa

SEQ ID NO: 155333 - DNA, 15 bp, Homo sapiens
cccatgaaagtgaaa

SEQ ID NO: 155334 - DNA, 15 bp, Homo sapiens
tcccatgaaagtgaa

SEQ ID NO: 155335 - DNA, 15 bp, Homo sapiens
gtcccatgaaagtga

SEQ ID NO: 155336 - DNA, 15 bp, Homo sapiens
tgtcccatgaaagtg

SEQ ID NO: 155337 - DNA, 15 bp, Homo sapiens
gtgtcccatgaaagt

SEQ ID NO: 155338 - DNA, 15 bp, Homo sapiens
agtgtcccatgaaag

SEQ ID NO: 155339 - DNA, 15 bp, Homo sapiens
tagtgtcccatgaaa

SEQ ID NO: 155340 - DNA, 15 bp, Homo sapiens
ctagtgtcccatgaa

SEQ ID NO: 155341 - DNA, 15 bp, Homo sapiens
gctagtgtcccatga

SEQ ID NO: 155342 - DNA, 15 bp, Homo sapiens
cgctagtgtcccatg

SEQ ID NO: 155343 - DNA, 15 bp, Homo sapiens
acgctagtgtcccat

SEQ ID NO: 155344 - DNA, 15 bp, Homo sapiens
aacgctagtgtccca

SEQ ID NO: 155345 - DNA, 15 bp, Homo sapiens
caacgctagtgtccc

SEQ ID NO: 155346 - DNA, 15 bp, Homo sapiens
tcaacgctagtgtcc

SEQ ID NO: 155347 - DNA, 15 bp, Homo sapiens
ttcaacgctagtgtc

SEQ ID NO: 155348 - DNA, 15 bp, Homo sapiens
tttcaacgctagtgt

SEQ ID NO: 155349 - DNA, 15 bp, Homo sapiens
ttttcaacgctagtg

SEQ ID NO: 155350 - DNA, 15 bp, Homo sapiens
tttttcaacgctagt

SEQ ID NO: 155351 - DNA, 15 bp, Homo sapiens
atttttcaacgctag

SEQ ID NO: 155352 - DNA, 15 bp, Homo sapiens
aatttttcaacgcta

SEQ ID NO: 155353 - DNA, 15 bp, Homo sapiens
caatttttcaacgct

SEQ ID NO: 155354 - DNA, 15 bp, Homo sapiens
ccaatttttcaacgc

SEQ ID NO: 155355 - DNA, 15 bp, Homo sapiens
cccaatttttcaacg

SEQ ID NO: 155356 - DNA, 15 bp, Homo sapiens
ccccaatttttcaac

SEQ ID NO: 155357 - DNA, 15 bp, Homo sapiens
gccccaatttttcaa

SEQ ID NO: 155358 - DNA, 15 bp, Homo sapiens
ggccccaatttttca

SEQ ID NO: 155359 - DNA, 15 bp, Homo sapiens
aggccccaatttttc

SEQ ID NO: 155360 - DNA, 15 bp, Homo sapiens
aaggccccaattttt

SEQ ID NO: 155361 - DNA, 15 bp, Homo sapiens
aaaggccccaatttt

SEQ ID NO: 155362 - DNA, 15 bp, Homo sapiens
aaaaggccccaattt

SEQ ID NO: 155363 - DNA, 15 bp, Homo sapiens
aaaaaggccccaatt

SEQ ID NO: 155364 - DNA, 15 bp, Homo sapiens
gaaaaaggccccaat

SEQ ID NO: 155365 - DNA, 15 bp, Homo sapiens
agaaaaaggccccaa

SEQ ID NO: 155366 - DNA, 15 bp, Homo sapiens
aagaaaaaggcccca

SEQ ID NO: 155367 - DNA, 15 bp, Homo sapiens
gaagaaaaaggcccc

SEQ ID NO: 155368 - DNA, 15 bp, Homo sapiens
tgaagaaaaaggccc

SEQ ID NO: 155369 - DNA, 15 bp, Homo sapiens
gtgaagaaaaaggcc

SEQ ID NO: 155370 - DNA, 15 bp, Homo sapiens
tgtgaagaaaaaggc

SEQ ID NO: 155371 - DNA, 15 bp, Homo sapiens
gtgtgaagaaaaagg

SEQ ID NO: 155372 - DNA, 15 bp, Homo sapiens
agtgtgaagaaaaag

SEQ ID NO: 155373 - DNA, 15 bp, Homo sapiens
gagtgtgaagaaaaa

SEQ ID NO: 155374 - DNA, 15 bp, Homo sapiens
ggagtgtgaagaaaa

SEQ ID NO: 155375 - DNA, 15 bp, Homo sapiens
gggagtgtgaagaaa

SEQ ID NO: 155376 - DNA, 15 bp, Homo sapiens
tgggagtgtgaagaa

SEQ ID NO: 155377 - DNA, 15 bp, Homo sapiens
atgggagtgtgaaga

SEQ ID NO: 155378 - DNA, 15 bp, Homo sapiens
aatgggagtgtgaag

SEQ ID NO: 155379 - DNA, 15 bp, Homo sapiens
aaatgggagtgtgaa

SEQ ID NO: 155380 - DNA, 15 bp, Homo sapiens
gaaatgggagtgtga

SEQ ID NO: 155381 - DNA, 15 bp, Homo sapiens
agaaatgggagtgtg

SEQ ID NO: 155382 - DNA, 15 bp, Homo sapiens
gagaaatgggagtgt

SEQ ID NO: 155383 - DNA, 15 bp, Homo sapiens
agagaaatgggagtg

SEQ ID NO: 155384 - DNA, 15 bp, Homo sapiens
aagagaaatgggagt

SEQ ID NO: 155385 - DNA, 15 bp, Homo sapiens
aaagagaaatgggag

SEQ ID NO: 155386 - DNA, 15 bp, Homo sapiens
taaagagaaatggga

SEQ ID NO: 155387 - DNA, 15 bp, Homo sapiens
ataaagagaaatggg

SEQ ID NO: 155388 - DNA, 15 bp, Homo sapiens
aataaagagaaatgg

SEQ ID NO: 155389 - DNA, 15 bp, Homo sapiens
aaataaagagaaatg

SEQ ID NO: 155390 - DNA, 15 bp, Homo sapiens
taaataaagagaaat

SEQ ID NO: 155391 - DNA, 15 bp, Homo sapiens
ttaaataaagagaaa

SEQ ID NO: 155392 - DNA, 15 bp, Homo sapiens
attaaataaagagaa

SEQ ID NO: 155393 - DNA, 15 bp, Homo sapiens
aattaaataaagaga

SEQ ID NO: 155394 - DNA, 15 bp, Homo sapiens
taattaaataaagag

SEQ ID NO: 155395 - DNA, 15 bp, Homo sapiens
ataattaaataaaga

SEQ ID NO: 155396 - DNA, 15 bp, Homo sapiens
aataattaaataaag

SEQ ID NO: 155397 - DNA, 15 bp, Homo sapiens
aaataattaaataaa

SEQ ID NO: 155398 - DNA, 15 bp, Homo sapiens
aaaataattaaataa

SEQ ID NO: 155399 - DNA, 15 bp, Homo sapiens
taaaataattaaata

SEQ ID NO: 155400 - DNA, 15 bp, Homo sapiens
ttaaaataattaaat

SEQ ID NO: 155401 - DNA, 15 bp, Homo sapiens
tttaaaataattaaa

SEQ ID NO: 155402 - DNA, 15 bp, Homo sapiens
ttttaaaataattaa

SEQ ID NO: 155403 - DNA, 15 bp, Homo sapiens
gttttaaaataatta

SEQ ID NO: 155404 - DNA, 15 bp, Homo sapiens
tgttttaaaataatt

SEQ ID NO: 155405 - DNA, 15 bp, Homo sapiens
atgttttaaaataat

SEQ ID NO: 155406 - DNA, 15 bp, Homo sapiens
gatgttttaaaataa

SEQ ID NO: 155407 - DNA, 15 bp, Homo sapiens
agatgttttaaaata

SEQ ID NO: 155408 - DNA, 15 bp, Homo sapiens
cagatgttttaaaat

SEQ ID NO: 155409 - DNA, 15 bp, Homo sapiens
tcagatgttttaaaa

SEQ ID NO: 155410 - DNA, 15 bp, Homo sapiens
atcagatgttttaaa

SEQ ID NO: 155411 - DNA, 15 bp, Homo sapiens
catcagatgttttaa

SEQ ID NO: 155412 - DNA, 15 bp, Homo sapiens
gcatcagatgtttta

SEQ ID NO: 155413 - DNA, 15 bp, Homo sapiens
agcatcagatgtttt

SEQ ID NO: 155414 - DNA, 15 bp, Homo sapiens
cagcatcagatgttt

SEQ ID NO: 155415 - DNA, 15 bp, Homo sapiens
gcagcatcagatgtt

SEQ ID NO: 155416 - DNA, 15 bp, Homo sapiens
tgcagcatcagatgt

SEQ ID NO: 155417 - DNA, 15 bp, Homo sapiens
ctgcagcatcagatg

SEQ ID NO: 155418 - DNA, 15 bp, Homo sapiens
actgcagcatcagat

SEQ ID NO: 155419 - DNA, 15 bp, Homo sapiens
cactgcagcatcaga

SEQ ID NO: 155420 - DNA, 15 bp, Homo sapiens
tcactgcagcatcag

SEQ ID NO: 155421 - DNA, 15 bp, Homo sapiens
ctcactgcagcatca

SEQ ID NO: 155422 - DNA, 15 bp, Homo sapiens
tctcactgcagcatc

SEQ ID NO: 155423 - DNA, 15 bp, Homo sapiens
atctcactgcagcat

SEQ ID NO: 155424 - DNA, 15 bp, Homo sapiens
gatctcactgcagca

SEQ ID NO: 155425 - DNA, 15 bp, Homo sapiens
tgatctcactgcagc

SEQ ID NO: 155426 - DNA, 15 bp, Homo sapiens
ctgatctcactgcag

SEQ ID NO: 155427 - DNA, 15 bp, Homo sapiens
gctgatctcactgca

SEQ ID NO: 155428 - DNA, 15 bp, Homo sapiens
agctgatctcactgc

SEQ ID NO: 155429 - DNA, 15 bp, Homo sapiens
cagctgatctcactg

SEQ ID NO: 155430 - DNA, 15 bp, Homo sapiens
acagctgatctcact

SEQ ID NO: 155431 - DNA, 15 bp, Homo sapiens
cacagctgatctcac

SEQ ID NO: 155432 - DNA, 15 bp, Homo sapiens
tcacagctgatctca

SEQ ID NO: 155433 - DNA, 15 bp, Homo sapiens
atcacagctgatctc

SEQ ID NO: 155434 - DNA, 15 bp, Homo sapiens
tatcacagctgatct

SEQ ID NO: 155435 - DNA, 15 bp, Homo sapiens
gtatcacagctgatc

SEQ ID NO: 155436 - DNA, 15 bp, Homo sapiens
tgtatcacagctgat

SEQ ID NO: 155437 - DNA, 15 bp, Homo sapiens
atgtatcacagctga

SEQ ID NO: 155438 - DNA, 15 bp, Homo sapiens
gatgtatcacagctg

SEQ ID NO: 155439 - DNA, 15 bp, Homo sapiens
tgatgtatcacagct

SEQ ID NO: 155440 - DNA, 15 bp, Homo sapiens
atgatgtatcacagc

SEQ ID NO: 155441 - DNA, 15 bp, Homo sapiens
gatgatgtatcacag

SEQ ID NO: 155442 - DNA, 15 bp, Homo sapiens
agatgatgtatcaca

SEQ ID NO: 155443 - DNA, 15 bp, Homo sapiens
cagatgatgtatcac

SEQ ID NO: 155444 - DNA, 15 bp, Homo sapiens
acagatgatgtatca

SEQ ID NO: 155445 - DNA, 15 bp, Homo sapiens
aacagatgatgtatc

SEQ ID NO: 155446 - DNA, 15 bp, Homo sapiens
gaacagatgatgtat

SEQ ID NO: 155447 - DNA, 15 bp, Homo sapiens
agaacagatgatgta

SEQ ID NO: 155448 - DNA, 15 bp, Homo sapiens
tagaacagatgatgt

SEQ ID NO: 155449 - DNA, 15 bp, Homo sapiens
atagaacagatgatg

SEQ ID NO: 155450 - DNA, 15 bp, Homo sapiens
aatagaacagatgat

SEQ ID NO: 155451 - DNA, 15 bp, Homo sapiens
aaatagaacagatga

SEQ ID NO: 155452 - DNA, 15 bp, Homo sapiens
aaaatagaacagatg

SEQ ID NO: 155453 - DNA, 15 bp, Homo sapiens
caaaatagaacagat

SEQ ID NO: 155454 - DNA, 15 bp, Homo sapiens
tcaaaatagaacaga

SEQ ID NO: 155455 - DNA, 15 bp, Homo sapiens
ctcaaaatagaacag

SEQ ID NO: 155456 - DNA, 15 bp, Homo sapiens
gctcaaaatagaaca

SEQ ID NO: 155457 - DNA, 15 bp, Homo sapiens
agctcaaaatagaac

SEQ ID NO: 155458 - DNA, 15 bp, Homo sapiens
cagctcaaaatagaa

SEQ ID NO: 155459 - DNA, 15 bp, Homo sapiens
gcagctcaaaataga

SEQ ID NO: 155460 - DNA, 15 bp, Homo sapiens
tgcagctcaaaatag

SEQ ID NO: 155461 - DNA, 15 bp, Homo sapiens
ctgcagctcaaaata

SEQ ID NO: 155462 - DNA, 15 bp, Homo sapiens
cctgcagctcaaaat

SEQ ID NO: 155463 - DNA, 15 bp, Homo sapiens
ccctgcagctcaaaa

SEQ ID NO: 155464 - DNA, 15 bp, Homo sapiens
tccctgcagctcaaa

SEQ ID NO: 155465 - DNA, 15 bp, Homo sapiens
ctccctgcagctcaa

SEQ ID NO: 155466 - DNA, 15 bp, Homo sapiens
tctccctgcagctca

SEQ ID NO: 155467 - DNA, 15 bp, Homo sapiens
gtctccctgcagctc

SEQ ID NO: 155468 - DNA, 15 bp, Homo sapiens
tgtctccctgcagct

SEQ ID NO: 155469 - DNA, 15 bp, Homo sapiens
ttgtctccctgcagc

SEQ ID NO: 155470 - DNA, 15 bp, Homo sapiens
tttgtctccctgcag

SEQ ID NO: 155471 - DNA, 15 bp, Homo sapiens
atttgtctccctgca

SEQ ID NO: 155472 - DNA, 15 bp, Homo sapiens
catttgtctccctgc

SEQ ID NO: 155473 - DNA, 15 bp, Homo sapiens
ccatttgtctccctg

SEQ ID NO: 155474 - DNA, 15 bp, Homo sapiens
tccatttgtctccct

SEQ ID NO: 155475 - DNA, 15 bp, Homo sapiens
ctccatttgtctccc

SEQ ID NO: 155476 - DNA, 15 bp, Homo sapiens
tctccatttgtctcc

SEQ ID NO: 155477 - DNA, 15 bp, Homo sapiens
ttctccatttgtctc

SEQ ID NO: 155478 - DNA, 15 bp, Homo sapiens
attctccatttgtct

SEQ ID NO: 155479 - DNA, 15 bp, Homo sapiens
tattctccatttgtc

SEQ ID NO: 155480 - DNA, 15 bp, Homo sapiens
gtattctccatttgt

SEQ ID NO: 155481 - DNA, 15 bp, Homo sapiens
agtattctccatttg

SEQ ID NO: 155482 - DNA, 15 bp, Homo sapiens
cagtattctccattt

SEQ ID NO: 155483 - DNA, 15 bp, Homo sapiens
gcagtattctccatt

SEQ ID NO: 155484 - DNA, 15 bp, Homo sapiens
agcagtattctccat

SEQ ID NO: 155485 - DNA, 15 bp, Homo sapiens
tagcagtattctcca

SEQ ID NO: 155486 - DNA, 15 bp, Homo sapiens
gtagcagtattctcc

SEQ ID NO: 155487 - DNA, 15 bp, Homo sapiens
ggtagcagtattctc

SEQ ID NO: 155488 - DNA, 15 bp, Homo sapiens
aggtagcagtattct

SEQ ID NO: 155489 - DNA, 15 bp, Homo sapiens
gaggtagcagtattc

SEQ ID NO: 155490 - DNA, 15 bp, Homo sapiens
ggaggtagcagtatt

SEQ ID NO: 155491 - DNA, 15 bp, Homo sapiens
gggaggtagcagtat

SEQ ID NO: 155492 - DNA, 15 bp, Homo sapiens
ggggaggtagcagta

SEQ ID NO: 155493 - DNA, 15 bp, Homo sapiens
aggggaggtagcagt

SEQ ID NO: 155494 - DNA, 15 bp, Homo sapiens
gaggggaggtagcag

SEQ ID NO: 155495 - DNA, 15 bp, Homo sapiens
ggaggggaggtagca

SEQ ID NO: 155496 - DNA, 15 bp, Homo sapiens
aggaggggaggtagc

SEQ ID NO: 155497 - DNA, 15 bp, Homo sapiens
caggaggggaggtag

SEQ ID NO: 155498 - DNA, 15 bp, Homo sapiens
ccaggaggggaggta

SEQ ID NO: 155499 - DNA, 15 bp, Homo sapiens
gccaggaggggaggt

SEQ ID NO: 155500 - DNA, 15 bp, Homo sapiens
cgccaggaggggagg

SEQ ID NO: 155501 - DNA, 15 bp, Homo sapiens
tcgccaggaggggag

SEQ ID NO: 155502 - DNA, 15 bp, Homo sapiens
ctcgccaggagggga

SEQ ID NO: 155503 - DNA, 15 bp, Homo sapiens
cctcgccaggagggg

SEQ ID NO: 155504 - DNA, 15 bp, Homo sapiens
tcctcgccaggaggg

SEQ ID NO: 155505 - DNA, 15 bp, Homo sapiens
gtcctcgccaggagg

SEQ ID NO: 155506 - DNA, 15 bp, Homo sapiens
agtcctcgccaggag

SEQ ID NO: 155507 - DNA, 15 bp, Homo sapiens
cagtcctcgccagga

SEQ ID NO: 155508 - DNA, 15 bp, Homo sapiens
acagtcctcgccagg

SEQ ID NO: 155509 - DNA, 15 bp, Homo sapiens
cacagtcctcgccag

SEQ ID NO: 155510 - DNA, 15 bp, Homo sapiens
gcacagtcctcgcca

SEQ ID NO: 155511 - DNA, 15 bp, Homo sapiens
agcacagtcctcgcc

SEQ ID NO: 155512 - DNA, 15 bp, Homo sapiens
gagcacagtcctcgc

SEQ ID NO: 155513 - DNA, 15 bp, Homo sapiens
ggagcacagtcctcg

SEQ ID NO: 155514 - DNA, 15 bp, Homo sapiens
gggagcacagtcctc

SEQ ID NO: 155515 - DNA, 15 bp, Homo sapiens
tgggagcacagtcct

SEQ ID NO: 155516 - DNA, 15 bp, Homo sapiens
ctgggagcacagtcc

SEQ ID NO: 155517 - DNA, 15 bp, Homo sapiens
cctgggagcacagtc

SEQ ID NO: 155518 - DNA, 15 bp, Homo sapiens
tcctgggagcacagt

SEQ ID NO: 155519 - DNA, 15 bp, Homo sapiens
ctcctgggagcacag

SEQ ID NO: 155520 - DNA, 15 bp, Homo sapiens
gctcctgggagcaca

SEQ ID NO: 155521 - DNA, 15 bp, Homo sapiens
ggctcctgggagcac

SEQ ID NO: 155522 - DNA, 15 bp, Homo sapiens
gggctcctgggagca

SEQ ID NO: 155523 - DNA, 15 bp, Homo sapiens
tgggctcctgggagc

SEQ ID NO: 155524 - DNA, 15 bp, Homo sapiens
ttgggctcctgggag

SEQ ID NO: 155525 - DNA, 15 bp, Homo sapiens
attgggctcctggga

SEQ ID NO: 155526 - DNA, 15 bp, Homo sapiens
cattgggctcctggg

SEQ ID NO: 155527 - DNA, 15 bp, Homo sapiens
ccattgggctcctgg

SEQ ID NO: 155528 - DNA, 15 bp, Homo sapiens
tccattgggctcctg

SEQ ID NO: 155529 - DNA, 15 bp, Homo sapiens
atccattgggctcct

SEQ ID NO: 155530 - DNA, 15 bp, Homo sapiens
catccattgggctcc

SEQ ID NO: 155531 - DNA, 15 bp, Homo sapiens
ccatccattgggctc

SEQ ID NO: 155532 - DNA, 15 bp, Homo sapiens
tccatccattgggct

SEQ ID NO: 155533 - DNA, 15 bp, Homo sapiens
gtccatccattgggc

SEQ ID NO: 155534 - DNA, 15 bp, Homo sapiens
ggtccatccattggg

SEQ ID NO: 155535 - DNA, 15 bp, Homo sapiens
cggtccatccattgg

SEQ ID NO: 155536 - DNA, 15 bp, Homo sapiens
tcggtccatccattg

SEQ ID NO: 155537 - DNA, 15 bp, Homo sapiens
ctcggtccatccatt

SEQ ID NO: 155538 - DNA, 15 bp, Homo sapiens
gctcggtccatccat

SEQ ID NO: 155539 - DNA, 15 bp, Homo sapiens
ggctcggtccatcca

SEQ ID NO: 155540 - DNA, 15 bp, Homo sapiens
tggctcggtccatcc

SEQ ID NO: 155541 - DNA, 15 bp, Homo sapiens
ttggctcggtccatc

SEQ ID NO: 155542 - DNA, 15 bp, Homo sapiens
cttggctcggtccat

SEQ ID NO: 155543 - DNA, 15 bp, Homo sapiens
ccttggctcggtcca

SEQ ID NO: 155544 - DNA, 15 bp, Homo sapiens
gccttggctcggtcc

SEQ ID NO: 155545 - DNA, 15 bp, Homo sapiens
tgccttggctcggtc

SEQ ID NO: 155546 - DNA, 15 bp, Homo sapiens
ctgccttggctcggt

SEQ ID NO: 155547 - DNA, 15 bp, Homo sapiens
gctgccttggctcgg

SEQ ID NO: 155548 - DNA, 15 bp, Homo sapiens
agctgccttggctcg

SEQ ID NO: 155549 - DNA, 15 bp, Homo sapiens
gagctgccttggctc

SEQ ID NO: 155550 - DNA, 15 bp, Homo sapiens
agagctgccttggct

SEQ ID NO: 155551 - DNA, 15 bp, Homo sapiens
cagagctgccttggc

SEQ ID NO: 155552 - DNA, 15 bp, Homo sapiens
ccagagctgccttgg

SEQ ID NO: 155553 - DNA, 15 bp, Homo sapiens
cccagagctgccttg

SEQ ID NO: 155554 - DNA, 15 bp, Homo sapiens
gcccagagctgcctt

SEQ ID NO: 155555 - DNA, 15 bp, Homo sapiens
tgcccagagctgcct

SEQ ID NO: 155556 - DNA, 15 bp, Homo sapiens
gtgcccagagctgcc

SEQ ID NO: 155557 - DNA, 15 bp, Homo sapiens
tgtgcccagagctgc

SEQ ID NO: 155558 - DNA, 15 bp, Homo sapiens
ttgtgcccagagctg

SEQ ID NO: 155559 - DNA, 15 bp, Homo sapiens
attgtgcccagagct

SEQ ID NO: 155560 - DNA, 15 bp, Homo sapiens
aattgtgcccagagc

SEQ ID NO: 155561 - DNA, 15 bp, Homo sapiens
aaattgtgcccagag

SEQ ID NO: 155562 - DNA, 15 bp, Homo sapiens
caaattgtgcccaga

SEQ ID NO: 155563 - DNA, 15 bp, Homo sapiens
ccaaattgtgcccag

SEQ ID NO: 155564 - DNA, 15 bp, Homo sapiens
tccaaattgtgccca

SEQ ID NO: 155565 - DNA, 15 bp, Homo sapiens
atccaaattgtgccc

SEQ ID NO: 155566 - DNA, 15 bp, Homo sapiens
catccaaattgtgcc

SEQ ID NO: 155567 - DNA, 15 bp, Homo sapiens
gcatccaaattgtgc

SEQ ID NO: 155568 - DNA, 15 bp, Homo sapiens
agcatccaaattgtg

SEQ ID NO: 155569 - DNA, 15 bp, Homo sapiens
aagcatccaaattgt

SEQ ID NO: 155570 - DNA, 15 bp, Homo sapiens
aaagcatccaaattg

SEQ ID NO: 155571 - DNA, 15 bp, Homo sapiens
gaaagcatccaaatt

SEQ ID NO: 155572 - DNA, 15 bp, Homo sapiens
ggaaagcatccaaat

SEQ ID NO: 155573 - DNA, 15 bp, Homo sapiens
gggaaagcatccaaa

SEQ ID NO: 155574 - DNA, 15 bp, Homo sapiens
ggggaaagcatccaa

SEQ ID NO: 155575 - DNA, 15 bp, Homo sapiens
aggggaaagcatcca

SEQ ID NO: 155576 - DNA, 15 bp, Homo sapiens
gaggggaaagcatcc

SEQ ID NO: 155577 - DNA, 15 bp, Homo sapiens
ggaggggaaagcatc

SEQ ID NO: 155578 - DNA, 15 bp, Homo sapiens
tggaggggaaagcat

SEQ ID NO: 155579 - DNA, 15 bp, Homo sapiens
ctggaggggaaagca

SEQ ID NO: 155580 - DNA, 15 bp, Homo sapiens
cctggaggggaaagc

SEQ ID NO: 155581 - DNA, 15 bp, Homo sapiens
ccctggaggggaaag

SEQ ID NO: 155582 - DNA, 15 bp, Homo sapiens
cccctggaggggaaa

SEQ ID NO: 155583 - DNA, 15 bp, Homo sapiens
tcccctggaggggaa

SEQ ID NO: 155584 - DNA, 15 bp, Homo sapiens
ttcccctggagggga

SEQ ID NO: 155585 - DNA, 15 bp, Homo sapiens
attcccctggagggg

SEQ ID NO: 155586 - DNA, 15 bp, Homo sapiens
cattcccctggaggg

SEQ ID NO: 155587 - DNA, 15 bp, Homo sapiens
gcattcccctggagg

SEQ ID NO: 155588 - DNA, 15 bp, Homo sapiens
ggcattcccctggag

SEQ ID NO: 155589 - DNA, 15 bp, Homo sapiens
aggcattcccctgga

SEQ ID NO: 155590 - DNA, 15 bp, Homo sapiens
caggcattcccctgg

SEQ ID NO: 155591 - DNA, 15 bp, Homo sapiens
ccaggcattcccctg

SEQ ID NO: 155592 - DNA, 15 bp, Homo sapiens
cccaggcattcccct

SEQ ID NO: 155593 - DNA, 15 bp, Homo sapiens
acccaggcattcccc

SEQ ID NO: 155594 - DNA, 15 bp, Homo sapiens
aacccaggcattccc

SEQ ID NO: 155595 - DNA, 15 bp, Homo sapiens
aaacccaggcattcc

SEQ ID NO: 155596 - DNA, 15 bp, Homo sapiens
gaaacccaggcattc

SEQ ID NO: 155597 - DNA, 15 bp, Homo sapiens
ggaaacccaggcatt

SEQ ID NO: 155598 - DNA, 15 bp, Homo sapiens
aggaaacccaggcat

SEQ ID NO: 155599 - DNA, 15 bp, Homo sapiens
aaggaaacccaggca

SEQ ID NO: 155600 - DNA, 15 bp, Homo sapiens
taaggaaacccaggc

SEQ ID NO: 155601 - DNA, 15 bp, Homo sapiens
ataaggaaacccagg

SEQ ID NO: 155602 - DNA, 15 bp, Homo sapiens
aataaggaaacccag

SEQ ID NO: 155603 - DNA, 15 bp, Homo sapiens
caataaggaaaccca

SEQ ID NO: 155604 - DNA, 15 bp, Homo sapiens
acaataaggaaaccc

SEQ ID NO: 155605 - DNA, 15 bp, Homo sapiens
cacaataaggaaacc

SEQ ID NO: 155606 - DNA, 15 bp, Homo sapiens
gcacaataaggaaac

SEQ ID NO: 155607 - DNA, 15 bp, Homo sapiens
tgcacaataaggaaa

SEQ ID NO: 155608 - DNA, 15 bp, Homo sapiens
ctgcacaataaggaa

SEQ ID NO: 155609 - DNA, 15 bp, Homo sapiens
tctgcacaataagga

SEQ ID NO: 155610 - DNA, 15 bp, Homo sapiens
atctgcacaataagg

SEQ ID NO: 155611 - DNA, 15 bp, Homo sapiens
catctgcacaataag

SEQ ID NO: 155612 - DNA, 15 bp, Homo sapiens
gcatctgcacaataa

SEQ ID NO: 155613 - DNA, 15 bp, Homo sapiens
ggcatctgcacaata

SEQ ID NO: 155614 - DNA, 15 bp, Homo sapiens
aggcatctgcacaat

SEQ ID NO: 155615 - DNA, 15 bp, Homo sapiens
aaggcatctgcacaa

SEQ ID NO: 155616 - DNA, 15 bp, Homo sapiens
caaggcatctgcaca

SEQ ID NO: 155617 - DNA, 15 bp, Homo sapiens
tcaaggcatctgcac

SEQ ID NO: 155618 - DNA, 15 bp, Homo sapiens
ttcaaggcatctgca

SEQ ID NO: 155619 - DNA, 15 bp, Homo sapiens
gttcaaggcatctgc

SEQ ID NO: 155620 - DNA, 15 bp, Homo sapiens
agttcaaggcatctg

SEQ ID NO: 155621 - DNA, 15 bp, Homo sapiens
tagttcaaggcatct

SEQ ID NO: 155622 - DNA, 15 bp, Homo sapiens
ttagttcaaggcatc

SEQ ID NO: 155623 - DNA, 15 bp, Homo sapiens
gttagttcaaggcat

SEQ ID NO: 155624 - DNA, 15 bp, Homo sapiens
ggttagttcaaggca

SEQ ID NO: 155625 - DNA, 15 bp, Homo sapiens
aggttagttcaaggc

SEQ ID NO: 155626 - DNA, 15 bp, Homo sapiens
caggttagttcaagg

SEQ ID NO: 155627 - DNA, 15 bp, Homo sapiens
ccaggttagttcaag

SEQ ID NO: 155628 - DNA, 15 bp, Homo sapiens
accaggttagttcaa

SEQ ID NO: 155629 - DNA, 15 bp, Homo sapiens
gaccaggttagttca

SEQ ID NO: 155630 - DNA, 15 bp, Homo sapiens
tgaccaggttagttc

SEQ ID NO: 155631 - DNA, 15 bp, Homo sapiens
ttgaccaggttagtt

SEQ ID NO: 155632 - DNA, 15 bp, Homo sapiens
tttgaccaggttagt

SEQ ID NO: 155633 - DNA, 15 bp, Homo sapiens
ttttgaccaggttag

SEQ ID NO: 155634 - DNA, 15 bp, Homo sapiens
tttttgaccaggtta

SEQ ID NO: 155635 - DNA, 15 bp, Homo sapiens
gtttttgaccaggtt

SEQ ID NO: 155636 - DNA, 15 bp, Homo sapiens
agtttttgaccaggt

SEQ ID NO: 155637 - DNA, 15 bp, Homo sapiens
tagtttttgaccagg

SEQ ID NO: 155638 - DNA, 15 bp, Homo sapiens
ctagtttttgaccag

SEQ ID NO: 155639 - DNA, 15 bp, Homo sapiens
tctagtttttgacca

SEQ ID NO: 155640 - DNA, 15 bp, Homo sapiens
ctctagtttttgacc

SEQ ID NO: 155641 - DNA, 15 bp, Homo sapiens
tctctagtttttgac

SEQ ID NO: 155642 - DNA, 15 bp, Homo sapiens
ctctctagtttttga

SEQ ID NO: 155643 - DNA, 15 bp, Homo sapiens
tctctctagtttttg

SEQ ID NO: 155644 - DNA, 15 bp, Homo sapiens
gtctctctagttttt

SEQ ID NO: 155645 - DNA, 15 bp, Homo sapiens
tgtctctctagtttt

SEQ ID NO: 155646 - DNA, 15 bp, Homo sapiens
ttgtctctctagttt

SEQ ID NO: 155647 - DNA, 15 bp, Homo sapiens
tttgtctctctagtt

SEQ ID NO: 155648 - DNA, 15 bp, Homo sapiens
ttttgtctctctagt

SEQ ID NO: 155649 - DNA, 15 bp, Homo sapiens
attttgtctctctag

SEQ ID NO: 155650 - DNA, 15 bp, Homo sapiens
gattttgtctctcta

SEQ ID NO: 155651 - DNA, 15 bp, Homo sapiens
tgattttgtctctct

SEQ ID NO: 155652 - DNA, 15 bp, Homo sapiens
gtgattttgtctctc

SEQ ID NO: 155653 - DNA, 15 bp, Homo sapiens
tgtgattttgtctct

SEQ ID NO: 155654 - DNA, 15 bp, Homo sapiens
ctgtgattttgtctc

SEQ ID NO: 155655 - DNA, 15 bp, Homo sapiens
tctgtgattttgtct

SEQ ID NO: 155656 - DNA, 15 bp, Homo sapiens
atctgtgattttgtc

SEQ ID NO: 155657 - DNA, 15 bp, Homo sapiens
catctgtgattttgt

SEQ ID NO: 155658 - DNA, 15 bp, Homo sapiens
ccatctgtgattttg

SEQ ID NO: 155659 - DNA, 15 bp, Homo sapiens
accatctgtgatttt

SEQ ID NO: 155660 - DNA, 15 bp, Homo sapiens
aaccatctgtgattt

SEQ ID NO: 155661 - DNA, 15 bp, Homo sapiens
caaccatctgtgatt

SEQ ID NO: 155662 - DNA, 15 bp, Homo sapiens
gcaaccatctgtgat

SEQ ID NO: 155663 - DNA, 15 bp, Homo sapiens
tgcaaccatctgtga

SEQ ID NO: 155664 - DNA, 15 bp, Homo sapiens
gtgcaaccatctgtg

SEQ ID NO: 155665 - DNA, 15 bp, Homo sapiens
tgtgcaaccatctgt

SEQ ID NO: 155666 - DNA, 15 bp, Homo sapiens
ctgtgcaaccatctg

SEQ ID NO: 155667 - DNA, 15 bp, Homo sapiens
cctgtgcaaccatct

SEQ ID NO: 155668 - DNA, 15 bp, Homo sapiens
acctgtgcaaccatc

SEQ ID NO: 155669 - DNA, 15 bp, Homo sapiens
aacctgtgcaaccat

SEQ ID NO: 155670 - DNA, 15 bp, Homo sapiens
caacctgtgcaacca

SEQ ID NO: 155671 - DNA, 15 bp, Homo sapiens
acaacctgtgcaacc

SEQ ID NO: 155672 - DNA, 15 bp, Homo sapiens
aacaacctgtgcaac

SEQ ID NO: 155673 - DNA, 15 bp, Homo sapiens
caacaacctgtgcaa

SEQ ID NO: 155674 - DNA, 15 bp, Homo sapiens
ccaacaacctgtgca

SEQ ID NO: 155675 - DNA, 15 bp, Homo sapiens
tccaacaacctgtgc

SEQ ID NO: 155676 - DNA, 15 bp, Homo sapiens
ctccaacaacctgtg

SEQ ID NO: 155677 - DNA, 15 bp, Homo sapiens
actccaacaacctgt

SEQ ID NO: 155678 - DNA, 15 bp, Homo sapiens
tactccaacaacctg

SEQ ID NO: 155679 - DNA, 15 bp, Homo sapiens
ctactccaacaacct

SEQ ID NO: 155680 - DNA, 15 bp, Homo sapiens
gctactccaacaacc

SEQ ID NO: 155681 - DNA, 15 bp, Homo sapiens
tgctactccaacaac

SEQ ID NO: 155682 - DNA, 15 bp, Homo sapiens
ttgctactccaacaa

SEQ ID NO: 155683 - DNA, 15 bp, Homo sapiens
tttgctactccaaca

SEQ ID NO: 155684 - DNA, 15 bp, Homo sapiens
ctttgctactccaac

SEQ ID NO: 155685 - DNA, 15 bp, Homo sapiens
tctttgctactccaa

SEQ ID NO: 155686 - DNA, 15 bp, Homo sapiens
gtctttgctactcca

SEQ ID NO: 155687 - DNA, 15 bp, Homo sapiens
tgtctttgctactcc

SEQ ID NO: 155688 - DNA, 15 bp, Homo sapiens
ctgtctttgctactc

SEQ ID NO: 155689 - DNA, 15 bp, Homo sapiens
gctgtctttgctact

SEQ ID NO: 155690 - DNA, 15 bp, Homo sapiens
tgctgtctttgctac

SEQ ID NO: 155691 - DNA, 15 bp, Homo sapiens
gtgctgtctttgcta

SEQ ID NO: 155692 - DNA, 15 bp, Homo sapiens
ggtgctgtctttgct

SEQ ID NO: 155693 - DNA, 15 bp, Homo sapiens
tggtgctgtctttgc

SEQ ID NO: 155694 - DNA, 15 bp, Homo sapiens
ttggtgctgtctttg

SEQ ID NO: 155695 - DNA, 15 bp, Homo sapiens
cttggtgctgtcttt

SEQ ID NO: 155696 - DNA, 15 bp, Homo sapiens
gcttggtgctgtctt

SEQ ID NO: 155697 - DNA, 15 bp, Homo sapiens
tgcttggtgctgtct

SEQ ID NO: 155698 - DNA, 15 bp, Homo sapiens
ctgcttggtgctgtc

SEQ ID NO: 155699 - DNA, 15 bp, Homo sapiens
gctgcttggtgctgt

SEQ ID NO: 155700 - DNA, 15 bp, Homo sapiens
tgctgcttggtgctg

SEQ ID NO: 155701 - DNA, 15 bp, Homo sapiens
ctgctgcttggtgct

SEQ ID NO: 155702 - DNA, 15 bp, Homo sapiens
tctgctgcttggtgc

SEQ ID NO: 155703 - DNA, 15 bp, Homo sapiens
ttctgctgcttggtg

SEQ ID NO: 155704 - DNA, 15 bp, Homo sapiens
tttctgctgcttggt

SEQ ID NO: 155705 - DNA, 15 bp, Homo sapiens
ctttctgctgcttgg

SEQ ID NO: 155706 - DNA, 15 bp, Homo sapiens
tctttctgctgcttg

SEQ ID NO: 155707 - DNA, 15 bp, Homo sapiens
ttctttctgctgctt

SEQ ID NO: 155708 - DNA, 15 bp, Homo sapiens
cttctttctgctgct

SEQ ID NO: 155709 - DNA, 15 bp, Homo sapiens
tcttctttctgctgc

SEQ ID NO: 155710 - DNA, 15 bp, Homo sapiens
atcttctttctgctg

SEQ ID NO: 155711 - DNA, 15 bp, Homo sapiens
catcttctttctgct

SEQ ID NO: 155712 - DNA, 15 bp, Homo sapiens
tcatcttctttctgc

SEQ ID NO: 155713 - DNA, 15 bp, Homo sapiens
ctcatcttctttctg

SEQ ID NO: 155714 - DNA, 15 bp, Homo sapiens
cctcatcttctttct

SEQ ID NO: 155715 - DNA, 15 bp, Homo sapiens
gcctcatcttctttc

SEQ ID NO: 155716 - DNA, 15 bp, Homo sapiens
tgcctcatcttcttt

SEQ ID NO: 155717 - DNA, 15 bp, Homo sapiens
atgcctcatcttctt

SEQ ID NO: 155718 - DNA, 15 bp, Homo sapiens
aatgcctcatcttct

SEQ ID NO: 155719 - DNA, 15 bp, Homo sapiens
caatgcctcatcttc

SEQ ID NO: 155720 - DNA, 15 bp, Homo sapiens
tcaatgcctcatctt

SEQ ID NO: 155721 - DNA, 15 bp, Homo sapiens
ctcaatgcctcatct

SEQ ID NO: 155722 - DNA, 15 bp, Homo sapiens
actcaatgcctcatc

SEQ ID NO: 155723 - DNA, 15 bp, Homo sapiens
gactcaatgcctcat

SEQ ID NO: 155724 - DNA, 15 bp, Homo sapiens
ggactcaatgcctca

SEQ ID NO: 155725 - DNA, 15 bp, Homo sapiens
aggactcaatgcctc

SEQ ID NO: 155726 - DNA, 15 bp, Homo sapiens
taggactcaatgcct

SEQ ID NO: 155727 - DNA, 15 bp, Homo sapiens
gtaggactcaatgcc

SEQ ID NO: 155728 - DNA, 15 bp, Homo sapiens
cgtaggactcaatgc

SEQ ID NO: 155729 - DNA, 15 bp, Homo sapiens
gcgtaggactcaatg

SEQ ID NO: 155730 - DNA, 15 bp, Homo sapiens
agcgtaggactcaat

SEQ ID NO: 155731 - DNA, 15 bp, Homo sapiens
gagcgtaggactcaa

SEQ ID NO: 155732 - DNA, 15 bp, Homo sapiens
tgagcgtaggactca

SEQ ID NO: 155733 - DNA, 15 bp, Homo sapiens
ctgagcgtaggactc

SEQ ID NO: 155734 - DNA, 15 bp, Homo sapiens
cctgagcgtaggact

SEQ ID NO: 155735 - DNA, 15 bp, Homo sapiens
ccctgagcgtaggac

SEQ ID NO: 155736 - DNA, 15 bp, Homo sapiens
gccctgagcgtagga

SEQ ID NO: 155737 - DNA, 15 bp, Homo sapiens
agccctgagcgtagg

SEQ ID NO: 155738 - DNA, 15 bp, Homo sapiens
cagccctgagcgtag

SEQ ID NO: 155739 - DNA, 15 bp, Homo sapiens
tcagccctgagcgta

SEQ ID NO: 155740 - DNA, 15 bp, Homo sapiens
ctcagccctgagcgt

SEQ ID NO: 155741 - DNA, 15 bp, Homo sapiens
gctcagccctgagcg

SEQ ID NO: 155742 - DNA, 15 bp, Homo sapiens
tgctcagccctgagc

SEQ ID NO: 155743 - DNA, 15 bp, Homo sapiens
gtgctcagccctgag

SEQ ID NO: 155744 - DNA, 15 bp, Homo sapiens
ggtgctcagccctga

SEQ ID NO: 155745 - DNA, 15 bp, Homo sapiens
cggtgctcagccctg

SEQ ID NO: 155746 - DNA, 15 bp, Homo sapiens
acggtgctcagccct

SEQ ID NO: 155747 - DNA, 15 bp, Homo sapiens
gacggtgctcagccc

SEQ ID NO: 155748 - DNA, 15 bp, Homo sapiens
tgacggtgctcagcc

SEQ ID NO: 155749 - DNA, 15 bp, Homo sapiens
gtgacggtgctcagc

SEQ ID NO: 155750 - DNA, 15 bp, Homo sapiens
agtgacggtgctcag

SEQ ID NO: 155751 - DNA, 15 bp, Homo sapiens
gagtgacggtgctca

SEQ ID NO: 155752 - DNA, 15 bp, Homo sapiens
ggagtgacggtgctc

SEQ ID NO: 155753 - DNA, 15 bp, Homo sapiens
aggagtgacggtgct

SEQ ID NO: 155754 - DNA, 15 bp, Homo sapiens
taggagtgacggtgc

SEQ ID NO: 155755 - DNA, 15 bp, Homo sapiens
ttaggagtgacggtg

SEQ ID NO: 155756 - DNA, 15 bp, Homo sapiens
attaggagtgacggt

SEQ ID NO: 155757 - DNA, 15 bp, Homo sapiens
aattaggagtgacgg

SEQ ID NO: 155758 - DNA, 15 bp, Homo sapiens
caattaggagtgacg

SEQ ID NO: 155759 - DNA, 15 bp, Homo sapiens
tcaattaggagtgac

SEQ ID NO: 155760 - DNA, 15 bp, Homo sapiens
ttcaattaggagtga

SEQ ID NO: 155761 - DNA, 15 bp, Homo sapiens
attcaattaggagtg

SEQ ID NO: 155762 - DNA, 15 bp, Homo sapiens
cattcaattaggagt

SEQ ID NO: 155763 - DNA, 15 bp, Homo sapiens
ccattcaattaggag

SEQ ID NO: 155764 - DNA, 15 bp, Homo sapiens
gccattcaattagga

SEQ ID NO: 155765 - DNA, 15 bp, Homo sapiens
ggccattcaattagg

SEQ ID NO: 155766 - DNA, 15 bp, Homo sapiens
tggccattcaattag

SEQ ID NO: 155767 - DNA, 15 bp, Homo sapiens
gtggccattcaatta

SEQ ID NO: 155768 - DNA, 15 bp, Homo sapiens
agtggccattcaatt

SEQ ID NO: 155769 - DNA, 15 bp, Homo sapiens
cagtggccattcaat

SEQ ID NO: 155770 - DNA, 15 bp, Homo sapiens
tcagtggccattcaa

SEQ ID NO: 155771 - DNA, 15 bp, Homo sapiens
ttcagtggccattca

SEQ ID NO: 155772 - DNA, 15 bp, Homo sapiens
gttcagtggccattc

SEQ ID NO: 155773 - DNA, 15 bp, Homo sapiens
agttcagtggccatt

SEQ ID NO: 155774 - DNA, 15 bp, Homo sapiens
aagttcagtggccat

SEQ ID NO: 155775 - DNA, 15 bp, Homo sapiens
aaagttcagtggcca

SEQ ID NO: 155776 - DNA, 15 bp, Homo sapiens
caaagttcagtggcc

SEQ ID NO: 155777 - DNA, 15 bp, Homo sapiens
acaaagttcagtggc

SEQ ID NO: 155778 - DNA, 15 bp, Homo sapiens
aacaaagttcagtgg

SEQ ID NO: 155779 - DNA, 15 bp, Homo sapiens
aaacaaagttcagtg

SEQ ID NO: 155780 - DNA, 15 bp, Homo sapiens
gaaacaaagttcagt

SEQ ID NO: 155781 - DNA, 15 bp, Homo sapiens
ggaaacaaagttcag

SEQ ID NO: 155782 - DNA, 15 bp, Homo sapiens
aggaaacaaagttca

SEQ ID NO: 155783 - DNA, 15 bp, Homo sapiens
gaggaaacaaagttc

SEQ ID NO: 155784 - DNA, 15 bp, Homo sapiens
tgaggaaacaaagtt

SEQ ID NO: 155785 - DNA, 15 bp, Homo sapiens
atgaggaaacaaagt

SEQ ID NO: 155786 - DNA, 15 bp, Homo sapiens
gatgaggaaacaaag

SEQ ID NO: 155787 - DNA, 15 bp, Homo sapiens
agatgaggaaacaaa

SEQ ID NO: 155788 - DNA, 15 bp, Homo sapiens
tagatgaggaaacaa

SEQ ID NO: 155789 - DNA, 15 bp, Homo sapiens
atagatgaggaaaca

SEQ ID NO: 155790 - DNA, 15 bp, Homo sapiens
catagatgaggaaac

SEQ ID NO: 155791 - DNA, 15 bp, Homo sapiens
gcatagatgaggaaa

SEQ ID NO: 155792 - DNA, 15 bp, Homo sapiens
ggcatagatgaggaa

SEQ ID NO: 155793 - DNA, 15 bp, Homo sapiens
tggcatagatgagga

SEQ ID NO: 155794 - DNA, 15 bp, Homo sapiens
ttggcatagatgagg

SEQ ID NO: 155795 - DNA, 15 bp, Homo sapiens
tttggcatagatgag

SEQ ID NO: 155796 - DNA, 15 bp, Homo sapiens
ctttggcatagatga

SEQ ID NO: 155797 - DNA, 15 bp, Homo sapiens
tctttggcatagatg

SEQ ID NO: 155798 - DNA, 15 bp, Homo sapiens
ttctttggcatagat

SEQ ID NO: 155799 - DNA, 15 bp, Homo sapiens
tttctttggcataga

SEQ ID NO: 155800 - DNA, 15 bp, Homo sapiens
atttctttggcatag

SEQ ID NO: 155801 - DNA, 15 bp, Homo sapiens
tatttctttggcata

SEQ ID NO: 155802 - DNA, 15 bp, Homo sapiens
ttatttctttggcat

SEQ ID NO: 155803 - DNA, 15 bp, Homo sapiens
gttatttctttggca

SEQ ID NO: 155804 - DNA, 15 bp, Homo sapiens
tgttatttctttggc

SEQ ID NO: 155805 - DNA, 15 bp, Homo sapiens
atgttatttctttgg

SEQ ID NO: 155806 - DNA, 15 bp, Homo sapiens
aatgttatttctttg

SEQ ID NO: 155807 - DNA, 15 bp, Homo sapiens
aaatgttatttcttt

SEQ ID NO: 155808 - DNA, 15 bp, Homo sapiens
aaaatgttatttctt

SEQ ID NO: 155809 - DNA, 15 bp, Homo sapiens
aaaaatgttatttct

SEQ ID NO: 155810 - DNA, 15 bp, Homo sapiens
gaaaaatgttatttc

SEQ ID NO: 155811 - DNA, 15 bp, Homo sapiens
ggaaaaatgttattt

SEQ ID NO: 155812 - DNA, 15 bp, Homo sapiens
aggaaaaatgttatt

SEQ ID NO: 155813 - DNA, 15 bp, Homo sapiens
taggaaaaatgttat

SEQ ID NO: 155814 - DNA, 15 bp, Homo sapiens
gtaggaaaaatgtta

SEQ ID NO: 155815 - DNA, 15 bp, Homo sapiens
ggtaggaaaaatgtt

SEQ ID NO: 155816 - DNA, 15 bp, Homo sapiens
tggtaggaaaaatgt

SEQ ID NO: 155817 - DNA, 15 bp, Homo sapiens
gtggtaggaaaaatg

SEQ ID NO: 155818 - DNA, 15 bp, Homo sapiens
agtggtaggaaaaat

SEQ ID NO: 155819 - DNA, 15 bp, Homo sapiens
aagtggtaggaaaaa

SEQ ID NO: 155820 - DNA, 15 bp, Homo sapiens
aaagtggtaggaaaa

SEQ ID NO: 155821 - DNA, 15 bp, Homo sapiens
gaaagtggtaggaaa

SEQ ID NO: 155822 - DNA, 15 bp, Homo sapiens
tgaaagtggtaggaa

SEQ ID NO: 155823 - DNA, 15 bp, Homo sapiens
gtgaaagtggtagga

SEQ ID NO: 155824 - DNA, 15 bp, Homo sapiens
agtgaaagtggtagg

SEQ ID NO: 155825 - DNA, 15 bp, Homo sapiens
cagtgaaagtggtag

SEQ ID NO: 155826 - DNA, 15 bp, Homo sapiens
ccagtgaaagtggta

SEQ ID NO: 155827 - DNA, 15 bp, Homo sapiens
cccagtgaaagtggt

SEQ ID NO: 155828 - DNA, 15 bp, Homo sapiens
acccagtgaaagtgg

SEQ ID NO: 155829 - DNA, 15 bp, Homo sapiens
aacccagtgaaagtg

SEQ ID NO: 155830 - DNA, 15 bp, Homo sapiens
gaacccagtgaaagt

SEQ ID NO: 155831 - DNA, 15 bp, Homo sapiens
agaacccagtgaaag

SEQ ID NO: 155832 - DNA, 15 bp, Homo sapiens
aagaacccagtgaaa

SEQ ID NO: 155833 - DNA, 15 bp, Homo sapiens
taagaacccagtgaa

SEQ ID NO: 155834 - DNA, 15 bp, Homo sapiens
ataagaacccagtga

SEQ ID NO: 155835 - DNA, 15 bp, Homo sapiens
cataagaacccagtg

SEQ ID NO: 155836 - DNA, 15 bp, Homo sapiens
tcataagaacccagt

SEQ ID NO: 155837 - DNA, 15 bp, Homo sapiens
ctcataagaacccag

SEQ ID NO: 155838 - DNA, 15 bp, Homo sapiens
cctcataagaaccca

SEQ ID NO: 155839 - DNA, 15 bp, Homo sapiens
tcctcataagaaccc

SEQ ID NO: 155840 - DNA, 15 bp, Homo sapiens
atcctcataagaacc

SEQ ID NO: 155841 - DNA, 15 bp, Homo sapiens
gatcctcataagaac

SEQ ID NO: 155842 - DNA, 15 bp, Homo sapiens
tgatcctcataagaa

SEQ ID NO: 155843 - DNA, 15 bp, Homo sapiens
gtgatcctcataaga

SEQ ID NO: 155844 - DNA, 15 bp, Homo sapiens
tgtgatcctcataag

SEQ ID NO: 155845 - DNA, 15 bp, Homo sapiens
gtgtgatcctcataa

SEQ ID NO: 155846 - DNA, 15 bp, Homo sapiens
tgtgtgatcctcata

SEQ ID NO: 155847 - DNA, 15 bp, Homo sapiens
ttgtgtgatcctcat

SEQ ID NO: 155848 - DNA, 15 bp, Homo sapiens
cttgtgtgatcctca

SEQ ID NO: 155849 - DNA, 15 bp, Homo sapiens
tcttgtgtgatcctc

SEQ ID NO: 155850 - DNA, 15 bp, Homo sapiens
atcttgtgtgatcct

SEQ ID NO: 155851 - DNA, 15 bp, Homo sapiens
tatcttgtgtgatcc

SEQ ID NO: 155852 - DNA, 15 bp, Homo sapiens
ttatcttgtgtgatc

SEQ ID NO: 155853 - DNA, 15 bp, Homo sapiens
attatcttgtgtgat

SEQ ID NO: 155854 - DNA, 15 bp, Homo sapiens
cattatcttgtgtga

SEQ ID NO: 155855 - DNA, 15 bp, Homo sapiens
acattatcttgtgtg

SEQ ID NO: 155856 - DNA, 15 bp, Homo sapiens
cacattatcttgtgt

SEQ ID NO: 155857 - DNA, 15 bp, Homo sapiens
acacattatcttgtg

SEQ ID NO: 155858 - DNA, 15 bp, Homo sapiens
tacacattatcttgt

SEQ ID NO: 155859 - DNA, 15 bp, Homo sapiens
atacacattatcttg

SEQ ID NO: 155860 - DNA, 15 bp, Homo sapiens
tatacacattatctt

SEQ ID NO: 155861 - DNA, 15 bp, Homo sapiens
ttatacacattatct

SEQ ID NO: 155862 - DNA, 15 bp, Homo sapiens
tttatacacattatc

SEQ ID NO: 155863 - DNA, 15 bp, Homo sapiens
ttttatacacattat

SEQ ID NO: 155864 - DNA, 15 bp, Homo sapiens
tttttatacacatta

SEQ ID NO: 155865 - DNA, 15 bp, Homo sapiens
atttttatacacatt

SEQ ID NO: 155866 - DNA, 15 bp, Homo sapiens
catttttatacacat

SEQ ID NO: 155867 - DNA, 15 bp, Homo sapiens
gcatttttatacaca

SEQ ID NO: 155868 - DNA, 15 bp, Homo sapiens
agcatttttatacac

SEQ ID NO: 155869 - DNA, 15 bp, Homo sapiens
aagcatttttataca

SEQ ID NO: 155870 - DNA, 15 bp, Homo sapiens
aaagcatttttatac

SEQ ID NO: 155871 - DNA, 15 bp, Homo sapiens
caaagcatttttata

SEQ ID NO: 155872 - DNA, 15 bp, Homo sapiens
acaaagcatttttat

SEQ ID NO: 155873 - DNA, 15 bp, Homo sapiens
tacaaagcattttta

SEQ ID NO: 155874 - DNA, 15 bp, Homo sapiens
ttacaaagcattttt

SEQ ID NO: 155875 - DNA, 15 bp, Homo sapiens
tttacaaagcatttt

SEQ ID NO: 155876 - DNA, 15 bp, Homo sapiens
atttacaaagcattt

SEQ ID NO: 155877 - DNA, 15 bp, Homo sapiens
catttacaaagcatt

SEQ ID NO: 155878 - DNA, 15 bp, Homo sapiens
ccatttacaaagcat

SEQ ID NO: 155879 - DNA, 15 bp, Homo sapiens
tccatttacaaagca

SEQ ID NO: 155880 - DNA, 15 bp, Homo sapiens
ttccatttacaaagc

SEQ ID NO: 155881 - DNA, 15 bp, Homo sapiens
tttccatttacaaag

SEQ ID NO: 155882 - DNA, 15 bp, Homo sapiens
ttttccatttacaaa

SEQ ID NO: 155883 - DNA, 15 bp, Homo sapiens
cttttccatttacaa

SEQ ID NO: 155884 - DNA, 15 bp, Homo sapiens
gcttttccatttaca

SEQ ID NO: 155885 - DNA, 15 bp, Homo sapiens
tgcttttccatttac

SEQ ID NO: 155886 - DNA, 15 bp, Homo sapiens
gtgcttttccattta

SEQ ID NO: 155887 - DNA, 15 bp, Homo sapiens
agtgcttttccattt

SEQ ID NO: 155888 - DNA, 15 bp, Homo sapiens
gagtgcttttccatt

SEQ ID NO: 155889 - DNA, 15 bp, Homo sapiens
agagtgcttttccat

SEQ ID NO: 155890 - DNA, 15 bp, Homo sapiens
cagagtgcttttcca

SEQ ID NO: 155891 - DNA, 15 bp, Homo sapiens
gcagagtgcttttcc

SEQ ID NO: 155892 - DNA, 15 bp, Homo sapiens
tgcagagtgcttttc

SEQ ID NO: 155893 - DNA, 15 bp, Homo sapiens
ttgcagagtgctttt

SEQ ID NO: 155894 - DNA, 15 bp, Homo sapiens
attgcagagtgcttt

SEQ ID NO: 155895 - DNA, 15 bp, Homo sapiens
aattgcagagtgctt

SEQ ID NO: 155896 - DNA, 15 bp, Homo sapiens
aaattgcagagtgct

SEQ ID NO: 155897 - DNA, 15 bp, Homo sapiens
taaattgcagagtgc

SEQ ID NO: 155898 - DNA, 15 bp, Homo sapiens
ttaaattgcagagtg

SEQ ID NO: 155899 - DNA, 15 bp, Homo sapiens
cttaaattgcagagt

SEQ ID NO: 155900 - DNA, 15 bp, Homo sapiens
tcttaaattgcagag

SEQ ID NO: 155901 - DNA, 15 bp, Homo sapiens
gtcttaaattgcaga

SEQ ID NO: 155902 - DNA, 15 bp, Homo sapiens
tgtcttaaattgcag

SEQ ID NO: 155903 - DNA, 15 bp, Homo sapiens
atgtcttaaattgca

SEQ ID NO: 155904 - DNA, 15 bp, Homo sapiens
aatgtcttaaattgc

SEQ ID NO: 155905 - DNA, 15 bp, Homo sapiens
taatgtcttaaattg

SEQ ID NO: 155906 - DNA, 15 bp, Homo sapiens
ataatgtcttaaatt

SEQ ID NO: 155907 - DNA, 15 bp, Homo sapiens
aataatgtcttaaat

SEQ ID NO: 155908 - DNA, 15 bp, Homo sapiens
taataatgtcttaaa

SEQ ID NO: 155909 - DNA, 15 bp, Homo sapiens
ataataatgtcttaa

SEQ ID NO: 155910 - DNA, 15 bp, Homo sapiens
tataataatgtctta

SEQ ID NO: 155911 - DNA, 15 bp, Homo sapiens
atataataatgtctt

SEQ ID NO: 155912 - DNA, 15 bp, Homo sapiens
aatataataatgtct

SEQ ID NO: 155913 - DNA, 15 bp, Homo sapiens
taatataataatgtc

SEQ ID NO: 155914 - DNA, 15 bp, Homo sapiens
ttaatataataatgt

SEQ ID NO: 155915 - DNA, 15 bp, Homo sapiens
attaatataataatg

SEQ ID NO: 155916 - DNA, 15 bp, Homo sapiens
tattaatataataat

SEQ ID NO: 155917 - DNA, 15 bp, Homo sapiens
ctattaatataataa

SEQ ID NO: 155918 - DNA, 15 bp, Homo sapiens
actattaatataata

SEQ ID NO: 155919 - DNA, 15 bp, Homo sapiens
tactattaatataat

SEQ ID NO: 155920 - DNA, 15 bp, Homo sapiens
ttactattaatataa

SEQ ID NO: 155921 - DNA, 15 bp, Homo sapiens
gttactattaatata

SEQ ID NO: 155922 - DNA, 15 bp, Homo sapiens
tgttactattaatat

SEQ ID NO: 155923 - DNA, 15 bp, Homo sapiens
ttgttactattaata

SEQ ID NO: 155924 - DNA, 15 bp, Homo sapiens
attgttactattaat

SEQ ID NO: 155925 - DNA, 15 bp, Homo sapiens
aattgttactattaa

SEQ ID NO: 155926 - DNA, 15 bp, Homo sapiens
taattgttactatta

SEQ ID NO: 155927 - DNA, 15 bp, Homo sapiens
gtaattgttactatt

SEQ ID NO: 155928 - DNA, 15 bp, Homo sapiens
ggtaattgttactat

SEQ ID NO: 155929 - DNA, 15 bp, Homo sapiens
tggtaattgttacta

SEQ ID NO: 155930 - DNA, 15 bp, Homo sapiens
atggtaattgttact

SEQ ID NO: 155931 - DNA, 15 bp, Homo sapiens
aatggtaattgttac

SEQ ID NO: 155932 - DNA, 15 bp, Homo sapiens
aaatggtaattgtta

SEQ ID NO: 155933 - DNA, 15 bp, Homo sapiens
gaaatggtaattgtt

SEQ ID NO: 155934 - DNA, 15 bp, Homo sapiens
ggaaatggtaattgt

SEQ ID NO: 155935 - DNA, 15 bp, Homo sapiens
tggaaatggtaattg

SEQ ID NO: 155936 - DNA, 15 bp, Homo sapiens
ttggaaatggtaatt

SEQ ID NO: 155937 - DNA, 15 bp, Homo sapiens
attggaaatggtaat

SEQ ID NO: 155938 - DNA, 15 bp, Homo sapiens
aattggaaatggtaa

SEQ ID NO: 155939 - DNA, 15 bp, Homo sapiens
gaattggaaatggta

SEQ ID NO: 155940 - DNA, 15 bp, Homo sapiens
agaattggaaatggt

SEQ ID NO: 155941 - DNA, 15 bp, Homo sapiens
cagaattggaaatgg

SEQ ID NO: 155942 - DNA, 15 bp, Homo sapiens
ccagaattggaaatg

SEQ ID NO: 155943 - DNA, 15 bp, Homo sapiens
accagaattggaaat

SEQ ID NO: 155944 - DNA, 15 bp, Homo sapiens
caccagaattggaaa

SEQ ID NO: 155945 - DNA, 15 bp, Homo sapiens
tcaccagaattggaa

SEQ ID NO: 155946 - DNA, 15 bp, Homo sapiens
atcaccagaattgga

SEQ ID NO: 155947 - DNA, 15 bp, Homo sapiens
aatcaccagaattgg

SEQ ID NO: 155948 - DNA, 15 bp, Homo sapiens
gaatcaccagaattg

SEQ ID NO: 155949 - DNA, 15 bp, Homo sapiens
tgaatcaccagaatt

SEQ ID NO: 155950 - DNA, 15 bp, Homo sapiens
gtgaatcaccagaat

SEQ ID NO: 155951 - DNA, 15 bp, Homo sapiens
agtgaatcaccagaa

SEQ ID NO: 155952 - DNA, 15 bp, Homo sapiens
aagtgaatcaccaga

SEQ ID NO: 155953 - DNA, 15 bp, Homo sapiens
caagtgaatcaccag

SEQ ID NO: 155954 - DNA, 15 bp, Homo sapiens
ccaagtgaatcacca

SEQ ID NO: 155955 - DNA, 15 bp, Homo sapiens
cccaagtgaatcacc

SEQ ID NO: 155956 - DNA, 15 bp, Homo sapiens
ccccaagtgaatcac

SEQ ID NO: 155957 - DNA, 15 bp, Homo sapiens
accccaagtgaatca

SEQ ID NO: 155958 - DNA, 15 bp, Homo sapiens
taccccaagtgaatc

SEQ ID NO: 155959 - DNA, 15 bp, Homo sapiens
ctaccccaagtgaat

SEQ ID NO: 155960 - DNA, 15 bp, Homo sapiens
cctaccccaagtgaa

SEQ ID NO: 155961 - DNA, 15 bp, Homo sapiens
tcctaccccaagtga

SEQ ID NO: 155962 - DNA, 15 bp, Homo sapiens
ctcctaccccaagtg

SEQ ID NO: 155963 - DNA, 15 bp, Homo sapiens
gctcctaccccaagt

SEQ ID NO: 155964 - DNA, 15 bp, Homo sapiens
ggctcctaccccaag

SEQ ID NO: 155965 - DNA, 15 bp, Homo sapiens
gggctcctaccccaa

SEQ ID NO: 155966 - DNA, 15 bp, Homo sapiens
tgggctcctacccca

SEQ ID NO: 155967 - DNA, 15 bp, Homo sapiens
atgggctcctacccc

SEQ ID NO: 155968 - DNA, 15 bp, Homo sapiens
tatgggctcctaccc

SEQ ID NO: 155969 - DNA, 15 bp, Homo sapiens
ctatgggctcctacc

SEQ ID NO: 155970 - DNA, 15 bp, Homo sapiens
tctatgggctcctac

SEQ ID NO: 155971 - DNA, 15 bp, Homo sapiens
atctatgggctccta

SEQ ID NO: 155972 - DNA, 15 bp, Homo sapiens
gatctatgggctcct

SEQ ID NO: 155973 - DNA, 15 bp, Homo sapiens
agatctatgggctcc

SEQ ID NO: 155974 - DNA, 15 bp, Homo sapiens
gagatctatgggctc

SEQ ID NO: 155975 - DNA, 15 bp, Homo sapiens
tgagatctatgggct

SEQ ID NO: 155976 - DNA, 15 bp, Homo sapiens
atgagatctatgggc

SEQ ID NO: 155977 - DNA, 15 bp, Homo sapiens
gatgagatctatggg

SEQ ID NO: 155978 - DNA, 15 bp, Homo sapiens
tgatgagatctatgg

SEQ ID NO: 155979 - DNA, 15 bp, Homo sapiens
gtgatgagatctatg

SEQ ID NO: 155980 - DNA, 15 bp, Homo sapiens
agtgatgagatctat

SEQ ID NO: 155981 - DNA, 15 bp, Homo sapiens
cagtgatgagatcta

SEQ ID NO: 155982 - DNA, 15 bp, Homo sapiens
gcagtgatgagatct

SEQ ID NO: 155983 - DNA, 15 bp, Homo sapiens
agcagtgatgagatc

SEQ ID NO: 155984 - DNA, 15 bp, Homo sapiens
tagcagtgatgagat

SEQ ID NO: 155985 - DNA, 15 bp, Homo sapiens
gtagcagtgatgaga

SEQ ID NO: 155986 - DNA, 15 bp, Homo sapiens
ggtagcagtgatgag

SEQ ID NO: 155987 - DNA, 15 bp, Homo sapiens
tggtagcagtgatga

SEQ ID NO: 155988 - DNA, 15 bp, Homo sapiens
atggtagcagtgatg

SEQ ID NO: 155989 - DNA, 15 bp, Homo sapiens
aatggtagcagtgat

SEQ ID NO: 155990 - DNA, 15 bp, Homo sapiens
taatggtagcagtga

SEQ ID NO: 155991 - DNA, 15 bp, Homo sapiens
gtaatggtagcagtg

SEQ ID NO: 155992 - DNA, 15 bp, Homo sapiens
agtaatggtagcagt

SEQ ID NO: 155993 - DNA, 15 bp, Homo sapiens
tagtaatggtagcag

SEQ ID NO: 155994 - DNA, 15 bp, Homo sapiens
gtagtaatggtagca

SEQ ID NO: 155995 - DNA, 15 bp, Homo sapiens
ggtagtaatggtagc

SEQ ID NO: 155996 - DNA, 15 bp, Homo sapiens
gggtagtaatggtag

SEQ ID NO: 155997 - DNA, 15 bp, Homo sapiens
ggggtagtaatggta

SEQ ID NO: 155998 - DNA, 15 bp, Homo sapiens
tggggtagtaatggt

SEQ ID NO: 155999 - DNA, 15 bp, Homo sapiens
gtggggtagtaatgg

SEQ ID NO: 156000 - DNA, 15 bp, Homo sapiens
tgtggggtagtaatg

SEQ ID NO: 156001 - DNA, 15 bp, Homo sapiens
atgtggggtagtaat

SEQ ID NO: 156002 - DNA, 15 bp, Homo sapiens
aatgtggggtagtaa

SEQ ID NO: 156003 - DNA, 15 bp, Homo sapiens
caatgtggggtagta

SEQ ID NO: 156004 - DNA, 15 bp, Homo sapiens
acaatgtggggtagt

SEQ ID NO: 156005 - DNA, 15 bp, Homo sapiens
tacaatgtggggtag

SEQ ID NO: 156006 - DNA, 15 bp, Homo sapiens
gtacaatgtggggta

SEQ ID NO: 156007 - DNA, 15 bp, Homo sapiens
agtacaatgtggggt

SEQ ID NO: 156008 - DNA, 15 bp, Homo sapiens
aagtacaatgtgggg

SEQ ID NO: 156009 - DNA, 15 bp, Homo sapiens
gaagtacaatgtggg

SEQ ID NO: 156010 - DNA, 15 bp, Homo sapiens
tgaagtacaatgtgg

SEQ ID NO: 156011 - DNA, 15 bp, Homo sapiens
ttgaagtacaatgtg

SEQ ID NO: 156012 - DNA, 15 bp, Homo sapiens
tttgaagtacaatgt

SEQ ID NO: 156013 - DNA, 15 bp, Homo sapiens
ctttgaagtacaatg

SEQ ID NO: 156014 - DNA, 15 bp, Homo sapiens
gctttgaagtacaat

SEQ ID NO: 156015 - DNA, 15 bp, Homo sapiens
agctttgaagtacaa

SEQ ID NO: 156016 - DNA, 15 bp, Homo sapiens
cagctttgaagtaca

SEQ ID NO: 156017 - DNA, 15 bp, Homo sapiens
gcagctttgaagtac

SEQ ID NO: 156018 - DNA, 15 bp, Homo sapiens
tgcagctttgaagta

SEQ ID NO: 156019 - DNA, 15 bp, Homo sapiens
ttgcagctttgaagt

SEQ ID NO: 156020 - DNA, 15 bp, Homo sapiens
attgcagctttgaag

SEQ ID NO: 156021 - DNA, 15 bp, Homo sapiens
aattgcagctttgaa

SEQ ID NO: 156022 - DNA, 15 bp, Homo sapiens
taattgcagctttga

SEQ ID NO: 156023 - DNA, 15 bp, Homo sapiens
gtaattgcagctttg

SEQ ID NO: 156024 - DNA, 15 bp, Homo sapiens
ggtaattgcagcttt

SEQ ID NO: 156025 - DNA, 15 bp, Homo sapiens
aggtaattgcagctt

SEQ ID NO: 156026 - DNA, 15 bp, Homo sapiens
aaggtaattgcagct

SEQ ID NO: 156027 - DNA, 15 bp, Homo sapiens
caaggtaattgcagc

SEQ ID NO: 156028 - DNA, 15 bp, Homo sapiens
gcaaggtaattgcag

SEQ ID NO: 156029 - DNA, 15 bp, Homo sapiens
tgcaaggtaattgca

SEQ ID NO: 156030 - DNA, 15 bp, Homo sapiens
gtgcaaggtaattgc

SEQ ID NO: 156031 - DNA, 15 bp, Homo sapiens
tgtgcaaggtaattg

SEQ ID NO: 156032 - DNA, 15 bp, Homo sapiens
ttgtgcaaggtaatt

SEQ ID NO: 156033 - DNA, 15 bp, Homo sapiens
attgtgcaaggtaat

SEQ ID NO: 156034 - DNA, 15 bp, Homo sapiens
aattgtgcaaggtaa

SEQ ID NO: 156035 - DNA, 15 bp, Homo sapiens
aaattgtgcaaggta

SEQ ID NO: 156036 - DNA, 15 bp, Homo sapiens
gaaattgtgcaaggt

SEQ ID NO: 156037 - DNA, 15 bp, Homo sapiens
tgaaattgtgcaagg

SEQ ID NO: 156038 - DNA, 15 bp, Homo sapiens
atgaaattgtgcaag

SEQ ID NO: 156039 - DNA, 15 bp, Homo sapiens
aatgaaattgtgcaa

SEQ ID NO: 156040 - DNA, 15 bp, Homo sapiens
aaatgaaattgtgca

SEQ ID NO: 156041 - DNA, 15 bp, Homo sapiens
caaatgaaattgtgc

SEQ ID NO: 156042 - DNA, 15 bp, Homo sapiens
tcaaatgaaattgtg

SEQ ID NO: 156043 - DNA, 15 bp, Homo sapiens
atcaaatgaaattgt

SEQ ID NO: 156044 - DNA, 15 bp, Homo sapiens
tatcaaatgaaattg

SEQ ID NO: 156045 - DNA, 15 bp, Homo sapiens
gtatcaaatgaaatt

SEQ ID NO: 156046 - DNA, 15 bp, Homo sapiens
tgtatcaaatgaaat

SEQ ID NO: 156047 - DNA, 15 bp, Homo sapiens
atgtatcaaatgaaa

SEQ ID NO: 156048 - DNA, 15 bp, Homo sapiens
aatgtatcaaatgaa

SEQ ID NO: 156049 - DNA, 15 bp, Homo sapiens
taatgtatcaaatga

SEQ ID NO: 156050 - DNA, 15 bp, Homo sapiens
gtaatgtatcaaatg

SEQ ID NO: 156051 - DNA, 15 bp, Homo sapiens
agtaatgtatcaaat

SEQ ID NO: 156052 - DNA, 15 bp, Homo sapiens
cagtaatgtatcaaa

SEQ ID NO: 156053 - DNA, 15 bp, Homo sapiens
tcagtaatgtatcaa

SEQ ID NO: 156054 - DNA, 15 bp, Homo sapiens
atcagtaatgtatca

SEQ ID NO: 156055 - DNA, 15 bp, Homo sapiens
aatcagtaatgtatc

SEQ ID NO: 156056 - DNA, 15 bp, Homo sapiens
taatcagtaatgtat

SEQ ID NO: 156057 - DNA, 15 bp, Homo sapiens
ataatcagtaatgta

SEQ ID NO: 156058 - DNA, 15 bp, Homo sapiens
cataatcagtaatgt

SEQ ID NO: 156059 - DNA, 15 bp, Homo sapiens
gcataatcagtaatg

SEQ ID NO: 156060 - DNA, 15 bp, Homo sapiens
tgcataatcagtaat

SEQ ID NO: 156061 - DNA, 15 bp, Homo sapiens
ctgcataatcagtaa

SEQ ID NO: 156062 - DNA, 15 bp, Homo sapiens
actgcataatcagta

SEQ ID NO: 156063 - DNA, 15 bp, Homo sapiens
cactgcataatcagt

SEQ ID NO: 156064 - DNA, 15 bp, Homo sapiens
acactgcataatcag

SEQ ID NO: 156065 - DNA, 15 bp, Homo sapiens
aacactgcataatca

SEQ ID NO: 156066 - DNA, 15 bp, Homo sapiens
taacactgcataatc

SEQ ID NO: 156067 - DNA, 15 bp, Homo sapiens
ctaacactgcataat

SEQ ID NO: 156068 - DNA, 15 bp, Homo sapiens
tctaacactgcataa

SEQ ID NO: 156069 - DNA, 15 bp, Homo sapiens
ttctaacactgcata

SEQ ID NO: 156070 - DNA, 15 bp, Homo sapiens
gttctaacactgcat

SEQ ID NO: 156071 - DNA, 15 bp, Homo sapiens
agttctaacactgca

SEQ ID NO: 156072 - DNA, 15 bp, Homo sapiens
cagttctaacactgc

SEQ ID NO: 156073 - DNA, 15 bp, Homo sapiens
ccagttctaacactg

SEQ ID NO: 156074 - DNA, 15 bp, Homo sapiens
tccagttctaacact

SEQ ID NO: 156075 - DNA, 15 bp, Homo sapiens
ttccagttctaacac

SEQ ID NO: 156076 - DNA, 15 bp, Homo sapiens
tttccagttctaaca

SEQ ID NO: 156077 - DNA, 15 bp, Homo sapiens
ctttccagttctaac

SEQ ID NO: 156078 - DNA, 15 bp, Homo sapiens
gctttccagttctaa

SEQ ID NO: 156079 - DNA, 15 bp, Homo sapiens
tgctttccagttcta

SEQ ID NO: 156080 - DNA, 15 bp, Homo sapiens
atgctttccagttct

SEQ ID NO: 156081 - DNA, 15 bp, Homo sapiens
gatgctttccagttc

SEQ ID NO: 156082 - DNA, 15 bp, Homo sapiens
agatgctttccagtt

SEQ ID NO: 156083 - DNA, 15 bp, Homo sapiens
aagatgctttccagt

SEQ ID NO: 156084 - DNA, 15 bp, Homo sapiens
caagatgctttccag

SEQ ID NO: 156085 - DNA, 15 bp, Homo sapiens
tcaagatgctttcca

SEQ ID NO: 156086 - DNA, 15 bp, Homo sapiens
ctcaagatgctttcc

SEQ ID NO: 156087 - DNA, 15 bp, Homo sapiens
cctcaagatgctttc

SEQ ID NO: 156088 - DNA, 15 bp, Homo sapiens
tcctcaagatgcttt

SEQ ID NO: 156089 - DNA, 15 bp, Homo sapiens
atcctcaagatgctt

SEQ ID NO: 156090 - DNA, 15 bp, Homo sapiens
aatcctcaagatgct

SEQ ID NO: 156091 - DNA, 15 bp, Homo sapiens
taatcctcaagatgc

SEQ ID NO: 156092 - DNA, 15 bp, Homo sapiens
ttaatcctcaagatg

SEQ ID NO: 156093 - DNA, 15 bp, Homo sapiens
gttaatcctcaagat

SEQ ID NO: 156094 - DNA, 15 bp, Homo sapiens
agttaatcctcaaga

SEQ ID NO: 156095 - DNA, 15 bp, Homo sapiens
tagttaatcctcaag

SEQ ID NO: 156096 - DNA, 15 bp, Homo sapiens
ttagttaatcctcaa

SEQ ID NO: 156097 - DNA, 15 bp, Homo sapiens
attagttaatcctca

SEQ ID NO: 156098 - DNA, 15 bp, Homo sapiens
gattagttaatcctc

SEQ ID NO: 156099 - DNA, 15 bp, Homo sapiens
ggattagttaatcct

SEQ ID NO: 156100 - DNA, 15 bp, Homo sapiens
tggattagttaatcc

SEQ ID NO: 156101 - DNA, 15 bp, Homo sapiens
ttggattagttaatc

SEQ ID NO: 156102 - DNA, 15 bp, Homo sapiens
tttggattagttaat

SEQ ID NO: 156103 - DNA, 15 bp, Homo sapiens
atttggattagttaa

SEQ ID NO: 156104 - DNA, 15 bp, Homo sapiens
catttggattagtta

SEQ ID NO: 156105 - DNA, 15 bp, Homo sapiens
acatttggattagtt

SEQ ID NO: 156106 - DNA, 15 bp, Homo sapiens
tacatttggattagt

SEQ ID NO: 156107 - DNA, 15 bp, Homo sapiens
atacatttggattag

SEQ ID NO: 156108 - DNA, 15 bp, Homo sapiens
gatacatttggatta

SEQ ID NO: 156109 - DNA, 15 bp, Homo sapiens
cgatacatttggatt

SEQ ID NO: 156110 - DNA, 15 bp, Homo sapiens
gcgatacatttggat

SEQ ID NO: 156111 - DNA, 15 bp, Homo sapiens
agcgatacatttgga

SEQ ID NO: 156112 - DNA, 15 bp, Homo sapiens
aagcgatacatttgg

SEQ ID NO: 156113 - DNA, 15 bp, Homo sapiens
aaagcgatacatttg

SEQ ID NO: 156114 - DNA, 15 bp, Homo sapiens
taaagcgatacattt

SEQ ID NO: 156115 - DNA, 15 bp, Homo sapiens
ataaagcgatacatt

SEQ ID NO: 156116 - DNA, 15 bp, Homo sapiens
tataaagcgatacat

SEQ ID NO: 156117 - DNA, 15 bp, Homo sapiens
ctataaagcgataca

SEQ ID NO: 156118 - DNA, 15 bp, Homo sapiens
tctataaagcgatac

SEQ ID NO: 156119 - DNA, 15 bp, Homo sapiens
atctataaagcgata

SEQ ID NO: 156120 - DNA, 15 bp, Homo sapiens
catctataaagcgat

SEQ ID NO: 156121 - DNA, 15 bp, Homo sapiens
ccatctataaagcga

SEQ ID NO: 156122 - DNA, 15 bp, Homo sapiens
accatctataaagcg

SEQ ID NO: 156123 - DNA, 15 bp, Homo sapiens
caccatctataaagc

SEQ ID NO: 156124 - DNA, 15 bp, Homo sapiens
tcaccatctataaag

SEQ ID NO: 156125 - DNA, 15 bp, Homo sapiens
gtcaccatctataaa

SEQ ID NO: 156126 - DNA, 15 bp, Homo sapiens
ggtcaccatctataa

SEQ ID NO: 156127 - DNA, 15 bp, Homo sapiens
aggtcaccatctata

SEQ ID NO: 156128 - DNA, 15 bp, Homo sapiens
caggtcaccatctat

SEQ ID NO: 156129 - DNA, 15 bp, Homo sapiens
ccaggtcaccatcta

SEQ ID NO: 156130 - DNA, 15 bp, Homo sapiens
gccaggtcaccatct

SEQ ID NO: 156131 - DNA, 15 bp, Homo sapiens
cgccaggtcaccatc

SEQ ID NO: 156132 - DNA, 15 bp, Homo sapiens
gcgccaggtcaccat

SEQ ID NO: 156133 - DNA, 15 bp, Homo sapiens
ggcgccaggtcacca

SEQ ID NO: 156134 - DNA, 15 bp, Homo sapiens
aggcgccaggtcacc

SEQ ID NO: 156135 - DNA, 15 bp, Homo sapiens
caggcgccaggtcac

SEQ ID NO: 156136 - DNA, 15 bp, Homo sapiens
ccaggcgccaggtca

SEQ ID NO: 156137 - DNA, 15 bp, Homo sapiens
tccaggcgccaggtc

SEQ ID NO: 156138 - DNA, 15 bp, Homo sapiens
ttccaggcgccaggt

SEQ ID NO: 156139 - DNA, 15 bp, Homo sapiens
cttccaggcgccagg

SEQ ID NO: 156140 - DNA, 15 bp, Homo sapiens
ccttccaggcgccag

SEQ ID NO: 156141 - DNA, 15 bp, Homo sapiens
cccttccaggcgcca

SEQ ID NO: 156142 - DNA, 15 bp, Homo sapiens
tcccttccaggcgcc

SEQ ID NO: 156143 - DNA, 15 bp, Homo sapiens
ctcccttccaggcgc

SEQ ID NO: 156144 - DNA, 15 bp, Homo sapiens
tctcccttccaggcg

SEQ ID NO: 156145 - DNA, 15 bp, Homo sapiens
ctctcccttccaggc

SEQ ID NO: 156146 - DNA, 15 bp, Homo sapiens
tctctcccttccagg

SEQ ID NO: 156147 - DNA, 15 bp, Homo sapiens
gtctctcccttccag

SEQ ID NO: 156148 - DNA, 15 bp, Homo sapiens
agtctctcccttcca

SEQ ID NO: 156149 - DNA, 15 bp, Homo sapiens
aagtctctcccttcc

SEQ ID NO: 156150 - DNA, 15 bp, Homo sapiens
taagtctctcccttc

SEQ ID NO: 156151 - DNA, 15 bp, Homo sapiens
ataagtctctccctt

SEQ ID NO: 156152 - DNA, 15 bp, Homo sapiens
aataagtctctccct

SEQ ID NO: 156153 - DNA, 15 bp, Homo sapiens
aaataagtctctccc

SEQ ID NO: 156154 - DNA, 15 bp, Homo sapiens
caaataagtctctcc

SEQ ID NO: 156155 - DNA, 15 bp, Homo sapiens
tcaaataagtctctc

SEQ ID NO: 156156 - DNA, 15 bp, Homo sapiens
ctcaaataagtctct

SEQ ID NO: 156157 - DNA, 15 bp, Homo sapiens
cctcaaataagtctc

SEQ ID NO: 156158 - DNA, 15 bp, Homo sapiens
acctcaaataagtct

SEQ ID NO: 156159 - DNA, 15 bp, Homo sapiens
gacctcaaataagtc

SEQ ID NO: 156160 - DNA, 15 bp, Homo sapiens
ggacctcaaataagt

SEQ ID NO: 156161 - DNA, 15 bp, Homo sapiens
gggacctcaaataag

SEQ ID NO: 156162 - DNA, 15 bp, Homo sapiens
agggacctcaaataa

SEQ ID NO: 156163 - DNA, 15 bp, Homo sapiens
tagggacctcaaata

SEQ ID NO: 156164 - DNA, 15 bp, Homo sapiens
ctagggacctcaaat

SEQ ID NO: 156165 - DNA, 15 bp, Homo sapiens
tctagggacctcaaa

SEQ ID NO: 156166 - DNA, 15 bp, Homo sapiens
ttctagggacctcaa

SEQ ID NO: 156167 - DNA, 15 bp, Homo sapiens
gttctagggacctca

SEQ ID NO: 156168 - DNA, 15 bp, Homo sapiens
agttctagggacctc

SEQ ID NO: 156169 - DNA, 15 bp, Homo sapiens
gagttctagggacct

SEQ ID NO: 156170 - DNA, 15 bp, Homo sapiens
tgagttctagggacc

SEQ ID NO: 156171 - DNA, 15 bp, Homo sapiens
ctgagttctagggac

SEQ ID NO: 156172 - DNA, 15 bp, Homo sapiens
cctgagttctaggga

SEQ ID NO: 156173 - DNA, 15 bp, Homo sapiens
tcctgagttctaggg

SEQ ID NO: 156174 - DNA, 15 bp, Homo sapiens
gtcctgagttctagg

SEQ ID NO: 156175 - DNA, 15 bp, Homo sapiens
agtcctgagttctag

SEQ ID NO: 156176 - DNA, 15 bp, Homo sapiens
cagtcctgagttcta

SEQ ID NO: 156177 - DNA, 15 bp, Homo sapiens
acagtcctgagttct

SEQ ID NO: 156178 - DNA, 15 bp, Homo sapiens
cacagtcctgagttc

SEQ ID NO: 156179 - DNA, 15 bp, Homo sapiens
ccacagtcctgagtt

SEQ ID NO: 156180 - DNA, 15 bp, Homo sapiens
cccacagtcctgagt

SEQ ID NO: 156181 - DNA, 15 bp, Homo sapiens
gcccacagtcctgag

SEQ ID NO: 156182 - DNA, 15 bp, Homo sapiens
agcccacagtcctga

SEQ ID NO: 156183 - DNA, 15 bp, Homo sapiens
cagcccacagtcctg

SEQ ID NO: 156184 - DNA, 15 bp, Homo sapiens
acagcccacagtcct

SEQ ID NO: 156185 - DNA, 15 bp, Homo sapiens
gacagcccacagtcc

SEQ ID NO: 156186 - DNA, 15 bp, Homo sapiens
tgacagcccacagtc

SEQ ID NO: 156187 - DNA, 15 bp, Homo sapiens
atgacagcccacagt

SEQ ID NO: 156188 - DNA, 15 bp, Homo sapiens
aatgacagcccacag

SEQ ID NO: 156189 - DNA, 15 bp, Homo sapiens
gaatgacagcccaca

SEQ ID NO: 156190 - DNA, 15 bp, Homo sapiens
ggaatgacagcccac

SEQ ID NO: 156191 - DNA, 15 bp, Homo sapiens
aggaatgacagccca

SEQ ID NO: 156192 - DNA, 15 bp, Homo sapiens
taggaatgacagccc

SEQ ID NO: 156193 - DNA, 15 bp, Homo sapiens
ctaggaatgacagcc

SEQ ID NO: 156194 - DNA, 15 bp, Homo sapiens
cctaggaatgacagc

SEQ ID NO: 156195 - DNA, 15 bp, Homo sapiens
ccctaggaatgacag

SEQ ID NO: 156196 - DNA, 15 bp, Homo sapiens
tccctaggaatgaca

SEQ ID NO: 156197 - DNA, 15 bp, Homo sapiens
ctccctaggaatgac

SEQ ID NO: 156198 - DNA, 15 bp, Homo sapiens
actccctaggaatga

SEQ ID NO: 156199 - DNA, 15 bp, Homo sapiens
tactccctaggaatg

SEQ ID NO: 156200 - DNA, 15 bp, Homo sapiens
ctactccctaggaat

SEQ ID NO: 156201 - DNA, 15 bp, Homo sapiens
cctactccctaggaa

SEQ ID NO: 156202 - DNA, 15 bp, Homo sapiens
gcctactccctagga

SEQ ID NO: 156203 - DNA, 15 bp, Homo sapiens
agcctactccctagg

SEQ ID NO: 156204 - DNA, 15 bp, Homo sapiens
cagcctactccctag

SEQ ID NO: 156205 - DNA, 15 bp, Homo sapiens
acagcctactcccta

SEQ ID NO: 156206 - DNA, 15 bp, Homo sapiens
aacagcctactccct

SEQ ID NO: 156207 - DNA, 15 bp, Homo sapiens
aaacagcctactccc

SEQ ID NO: 156208 - DNA, 15 bp, Homo sapiens
aaaacagcctactcc

SEQ ID NO: 156209 - DNA, 15 bp, Homo sapiens
taaaacagcctactc

SEQ ID NO: 156210 - DNA, 15 bp, Homo sapiens
gtaaaacagcctact

SEQ ID NO: 156211 - DNA, 15 bp, Homo sapiens
agtaaaacagcctac

SEQ ID NO: 156212 - DNA, 15 bp, Homo sapiens
aagtaaaacagccta

SEQ ID NO: 156213 - DNA, 15 bp, Homo sapiens
aaagtaaaacagcct

SEQ ID NO: 156214 - DNA, 15 bp, Homo sapiens
caaagtaaaacagcc

SEQ ID NO: 156215 - DNA, 15 bp, Homo sapiens
ccaaagtaaaacagc

SEQ ID NO: 156216 - DNA, 15 bp, Homo sapiens
tccaaagtaaaacag

SEQ ID NO: 156217 - DNA, 15 bp, Homo sapiens
atccaaagtaaaaca

SEQ ID NO: 156218 - DNA, 15 bp, Homo sapiens
aatccaaagtaaaac

SEQ ID NO: 156219 - DNA, 15 bp, Homo sapiens
taatccaaagtaaaa

SEQ ID NO: 156220 - DNA, 15 bp, Homo sapiens
ataatccaaagtaaa

SEQ ID NO: 156221 - DNA, 15 bp, Homo sapiens
cataatccaaagtaa

SEQ ID NO: 156222 - DNA, 15 bp, Homo sapiens
ccataatccaaagta

SEQ ID NO: 156223 - DNA, 15 bp, Homo sapiens
accataatccaaagt

SEQ ID NO: 156224 - DNA, 15 bp, Homo sapiens
aaccataatccaaag

SEQ ID NO: 156225 - DNA, 15 bp, Homo sapiens
gaaccataatccaaa

SEQ ID NO: 156226 - DNA, 15 bp, Homo sapiens
ggaaccataatccaa

SEQ ID NO: 156227 - DNA, 15 bp, Homo sapiens
gggaaccataatcca

SEQ ID NO: 156228 - DNA, 15 bp, Homo sapiens
agggaaccataatcc

SEQ ID NO: 156229 - DNA, 15 bp, Homo sapiens
cagggaaccataatc

SEQ ID NO: 156230 - DNA, 15 bp, Homo sapiens
acagggaaccataat

SEQ ID NO: 156231 - DNA, 15 bp, Homo sapiens
gacagggaaccataa

SEQ ID NO: 156232 - DNA, 15 bp, Homo sapiens
ggacagggaaccata

SEQ ID NO: 156233 - DNA, 15 bp, Homo sapiens
aggacagggaaccat

SEQ ID NO: 156234 - DNA, 15 bp, Homo sapiens
aaggacagggaacca

SEQ ID NO: 156235 - DNA, 15 bp, Homo sapiens
aaaggacagggaacc

SEQ ID NO: 156236 - DNA, 15 bp, Homo sapiens
gaaaggacagggaac

SEQ ID NO: 156237 - DNA, 15 bp, Homo sapiens
agaaaggacagggaa

SEQ ID NO: 156238 - DNA, 15 bp, Homo sapiens
cagaaaggacaggga

SEQ ID NO: 156239 - DNA, 15 bp, Homo sapiens
tcagaaaggacaggg

SEQ ID NO: 156240 - DNA, 15 bp, Homo sapiens
ttcagaaaggacagg

SEQ ID NO: 156241 - DNA, 15 bp, Homo sapiens
cttcagaaaggacag

SEQ ID NO: 156242 - DNA, 15 bp, Homo sapiens
ccttcagaaaggaca

SEQ ID NO: 156243 - DNA, 15 bp, Homo sapiens
cccttcagaaaggac

SEQ ID NO: 156244 - DNA, 15 bp, Homo sapiens
gcccttcagaaagga

SEQ ID NO: 156245 - DNA, 15 bp, Homo sapiens
agcccttcagaaagg

SEQ ID NO: 156246 - DNA, 15 bp, Homo sapiens
tagcccttcagaaag

SEQ ID NO: 156247 - DNA, 15 bp, Homo sapiens
ctagcccttcagaaa

SEQ ID NO: 156248 - DNA, 15 bp, Homo sapiens
tctagcccttcagaa

SEQ ID NO: 156249 - DNA, 15 bp, Homo sapiens
gtctagcccttcaga

SEQ ID NO: 156250 - DNA, 15 bp, Homo sapiens
tgtctagcccttcag

SEQ ID NO: 156251 - DNA, 15 bp, Homo sapiens
atgtctagcccttca

SEQ ID NO: 156252 - DNA, 15 bp, Homo sapiens
catgtctagcccttc

SEQ ID NO: 156253 - DNA, 15 bp, Homo sapiens
ccatgtctagccctt

SEQ ID NO: 156254 - DNA, 15 bp, Homo sapiens
cccatgtctagccct

SEQ ID NO: 156255 - DNA, 15 bp, Homo sapiens
tcccatgtctagccc

SEQ ID NO: 156256 - DNA, 15 bp, Homo sapiens
ttcccatgtctagcc

SEQ ID NO: 156257 - DNA, 15 bp, Homo sapiens
gttcccatgtctagc

SEQ ID NO: 156258 - DNA, 15 bp, Homo sapiens
agttcccatgtctag

SEQ ID NO: 156259 - DNA, 15 bp, Homo sapiens
aagttcccatgtcta

SEQ ID NO: 156260 - DNA, 15 bp, Homo sapiens
aaagttcccatgtct

SEQ ID NO: 156261 - DNA, 15 bp, Homo sapiens
caaagttcccatgtc

SEQ ID NO: 156262 - DNA, 15 bp, Homo sapiens
ccaaagttcccatgt

SEQ ID NO: 156263 - DNA, 15 bp, Homo sapiens
cccaaagttcccatg

SEQ ID NO: 156264 - DNA, 15 bp, Homo sapiens
acccaaagttcccat

SEQ ID NO: 156265 - DNA, 15 bp, Homo sapiens
cacccaaagttccca

SEQ ID NO: 156266 - DNA, 15 bp, Homo sapiens
ccacccaaagttccc

SEQ ID NO: 156267 - DNA, 15 bp, Homo sapiens
cccacccaaagttcc

SEQ ID NO: 156268 - DNA, 15 bp, Homo sapiens
tcccacccaaagttc

SEQ ID NO: 156269 - DNA, 15 bp, Homo sapiens
gtcccacccaaagtt

SEQ ID NO: 156270 - DNA, 15 bp, Homo sapiens
cgtcccacccaaagt

SEQ ID NO: 156271 - DNA, 15 bp, Homo sapiens
acgtcccacccaaag

SEQ ID NO: 156272 - DNA, 15 bp, Homo sapiens
aacgtcccacccaaa

SEQ ID NO: 156273 - DNA, 15 bp, Homo sapiens
caacgtcccacccaa

SEQ ID NO: 156274 - DNA, 15 bp, Homo sapiens
tcaacgtcccaccca

SEQ ID NO: 156275 - DNA, 15 bp, Homo sapiens
atcaacgtcccaccc

SEQ ID NO: 156276 - DNA, 15 bp, Homo sapiens
gatcaacgtcccacc

SEQ ID NO: 156277 - DNA, 15 bp, Homo sapiens
ggatcaacgtcccac

SEQ ID NO: 156278 - DNA, 15 bp, Homo sapiens
aggatcaacgtccca

SEQ ID NO: 156279 - DNA, 15 bp, Homo sapiens
aaggatcaacgtccc

SEQ ID NO: 156280 - DNA, 15 bp, Homo sapiens
taaggatcaacgtcc

SEQ ID NO: 156281 - DNA, 15 bp, Homo sapiens
ctaaggatcaacgtc

SEQ ID NO: 156282 - DNA, 15 bp, Homo sapiens
actaaggatcaacgt

SEQ ID NO: 156283 - DNA, 15 bp, Homo sapiens
gactaaggatcaacg

SEQ ID NO: 156284 - DNA, 15 bp, Homo sapiens
tgactaaggatcaac

SEQ ID NO: 156285 - DNA, 15 bp, Homo sapiens
atgactaaggatcaa

SEQ ID NO: 156286 - DNA, 15 bp, Homo sapiens
aatgactaaggatca

SEQ ID NO: 156287 - DNA, 15 bp, Homo sapiens
taatgactaaggatc

SEQ ID NO: 156288 - DNA, 15 bp, Homo sapiens
ctaatgactaaggat

SEQ ID NO: 156289 - DNA, 15 bp, Homo sapiens
cctaatgactaagga

SEQ ID NO: 156290 - DNA, 15 bp, Homo sapiens
acctaatgactaagg

SEQ ID NO: 156291 - DNA, 15 bp, Homo sapiens
cacctaatgactaag

SEQ ID NO: 156292 - DNA, 15 bp, Homo sapiens
ccacctaatgactaa

SEQ ID NO: 156293 - DNA, 15 bp, Homo sapiens
tccacctaatgacta

SEQ ID NO: 156294 - DNA, 15 bp, Homo sapiens
ctccacctaatgact

SEQ ID NO: 156295 - DNA, 15 bp, Homo sapiens
actccacctaatgac

SEQ ID NO: 156296 - DNA, 15 bp, Homo sapiens
gactccacctaatga

SEQ ID NO: 156297 - DNA, 15 bp, Homo sapiens
agactccacctaatg

SEQ ID NO: 156298 - DNA, 15 bp, Homo sapiens
gagactccacctaat

SEQ ID NO: 156299 - DNA, 15 bp, Homo sapiens
tgagactccacctaa

SEQ ID NO: 156300 - DNA, 15 bp, Homo sapiens
ctgagactccaccta

SEQ ID NO: 156301 - DNA, 15 bp, Homo sapiens
gctgagactccacct

SEQ ID NO: 156302 - DNA, 15 bp, Homo sapiens
ggctgagactccacc

SEQ ID NO: 156303 - DNA, 15 bp, Homo sapiens
aggctgagactccac

SEQ ID NO: 156304 - DNA, 15 bp, Homo sapiens
caggctgagactcca

SEQ ID NO: 156305 - DNA, 15 bp, Homo sapiens
tcaggctgagactcc

SEQ ID NO: 156306 - DNA, 15 bp, Homo sapiens
gtcaggctgagactc

SEQ ID NO: 156307 - DNA, 15 bp, Homo sapiens
agtcaggctgagact

SEQ ID NO: 156308 - DNA, 15 bp, Homo sapiens
gagtcaggctgagac

SEQ ID NO: 156309 - DNA, 15 bp, Homo sapiens
tgagtcaggctgaga

SEQ ID NO: 156310 - DNA, 15 bp, Homo sapiens
atgagtcaggctgag

SEQ ID NO: 156311 - DNA, 15 bp, Homo sapiens
catgagtcaggctga

SEQ ID NO: 156312 - DNA, 15 bp, Homo sapiens
acatgagtcaggctg

SEQ ID NO: 156313 - DNA, 15 bp, Homo sapiens
gacatgagtcaggct

SEQ ID NO: 156314 - DNA, 15 bp, Homo sapiens
agacatgagtcaggc

SEQ ID NO: 156315 - DNA, 15 bp, Homo sapiens
cagacatgagtcagg

SEQ ID NO: 156316 - DNA, 15 bp, Homo sapiens
gcagacatgagtcag

SEQ ID NO: 156317 - DNA, 15 bp, Homo sapiens
agcagacatgagtca

SEQ ID NO: 156318 - DNA, 15 bp, Homo sapiens
aagcagacatgagtc

SEQ ID NO: 156319 - DNA, 15 bp, Homo sapiens
taagcagacatgagt

SEQ ID NO: 156320 - DNA, 15 bp, Homo sapiens
gtaagcagacatgag

SEQ ID NO: 156321 - DNA, 15 bp, Homo sapiens
agtaagcagacatga

SEQ ID NO: 156322 - DNA, 15 bp, Homo sapiens
gagtaagcagacatg

SEQ ID NO: 156323 - DNA, 15 bp, Homo sapiens
tgagtaagcagacat

SEQ ID NO: 156324 - DNA, 15 bp, Homo sapiens
gtgagtaagcagaca

SEQ ID NO: 156325 - DNA, 15 bp, Homo sapiens
cgtgagtaagcagac

SEQ ID NO: 156326 - DNA, 15 bp, Homo sapiens
acgtgagtaagcaga

SEQ ID NO: 156327 - DNA, 15 bp, Homo sapiens
gacgtgagtaagcag

SEQ ID NO: 156328 - DNA, 15 bp, Homo sapiens
tgacgtgagtaagca

SEQ ID NO: 156329 - DNA, 15 bp, Homo sapiens
ttgacgtgagtaagc

SEQ ID NO: 156330 - DNA, 15 bp, Homo sapiens
gttgacgtgagtaag

SEQ ID NO: 156331 - DNA, 15 bp, Homo sapiens
ggttgacgtgagtaa

SEQ ID NO: 156332 - DNA, 15 bp, Homo sapiens
gggttgacgtgagta

SEQ ID NO: 156333 - DNA, 15 bp, Homo sapiens
agggttgacgtgagt

SEQ ID NO: 156334 - DNA, 15 bp, Homo sapiens
cagggttgacgtgag

SEQ ID NO: 156335 - DNA, 15 bp, Homo sapiens
gcagggttgacgtga

SEQ ID NO: 156336 - DNA, 15 bp, Homo sapiens
agcagggttgacgtg

SEQ ID NO: 156337 - DNA, 15 bp, Homo sapiens
gagcagggttgacgt

SEQ ID NO: 156338 - DNA, 15 bp, Homo sapiens
agagcagggttgacg

SEQ ID NO: 156339 - DNA, 15 bp, Homo sapiens
cagagcagggttgac

SEQ ID NO: 156340 - DNA, 15 bp, Homo sapiens
tcagagcagggttga

SEQ ID NO: 156341 - DNA, 15 bp, Homo sapiens
ctcagagcagggttg

SEQ ID NO: 156342 - DNA, 15 bp, Homo sapiens
gctcagagcagggtt

SEQ ID NO: 156343 - DNA, 15 bp, Homo sapiens
agctcagagcagggt

SEQ ID NO: 156344 - DNA, 15 bp, Homo sapiens
gagctcagagcaggg

SEQ ID NO: 156345 - DNA, 15 bp, Homo sapiens
ggagctcagagcagg

SEQ ID NO: 156346 - DNA, 15 bp, Homo sapiens
tggagctcagagcag

SEQ ID NO: 156347 - DNA, 15 bp, Homo sapiens
gtggagctcagagca

SEQ ID NO: 156348 - DNA, 15 bp, Homo sapiens
agtggagctcagagc

SEQ ID NO: 156349 - DNA, 15 bp, Homo sapiens
cagtggagctcagag

SEQ ID NO: 156350 - DNA, 15 bp, Homo sapiens
gcagtggagctcaga

SEQ ID NO: 156351 - DNA, 15 bp, Homo sapiens
agcagtggagctcag

SEQ ID NO: 156352 - DNA, 15 bp, Homo sapiens
gagcagtggagctca

SEQ ID NO: 156353 - DNA, 15 bp, Homo sapiens
tgagcagtggagctc

SEQ ID NO: 156354 - DNA, 15 bp, Homo sapiens
ttgagcagtggagct

SEQ ID NO: 156355 - DNA, 15 bp, Homo sapiens
cttgagcagtggagc

SEQ ID NO: 156356 - DNA, 15 bp, Homo sapiens
ccttgagcagtggag

SEQ ID NO: 156357 - DNA, 15 bp, Homo sapiens
accttgagcagtgga

SEQ ID NO: 156358 - DNA, 15 bp, Homo sapiens
aaccttgagcagtgg

SEQ ID NO: 156359 - DNA, 15 bp, Homo sapiens
gaaccttgagcagtg

SEQ ID NO: 156360 - DNA, 15 bp, Homo sapiens
agaaccttgagcagt

SEQ ID NO: 156361 - DNA, 15 bp, Homo sapiens
cagaaccttgagcag

SEQ ID NO: 156362 - DNA, 15 bp, Homo sapiens
ccagaaccttgagca

SEQ ID NO: 156363 - DNA, 15 bp, Homo sapiens
cccagaaccttgagc

SEQ ID NO: 156364 - DNA, 15 bp, Homo sapiens
gcccagaaccttgag

SEQ ID NO: 156365 - DNA, 15 bp, Homo sapiens
cgcccagaaccttga

SEQ ID NO: 156366 - DNA, 15 bp, Homo sapiens
gcgcccagaaccttg

SEQ ID NO: 156367 - DNA, 15 bp, Homo sapiens
tgcgcccagaacctt

SEQ ID NO: 156368 - DNA, 15 bp, Homo sapiens
atgcgcccagaacct

SEQ ID NO: 156369 - DNA, 15 bp, Homo sapiens
catgcgcccagaacc

SEQ ID NO: 156370 - DNA, 15 bp, Homo sapiens
acatgcgcccagaac

SEQ ID NO: 156371 - DNA, 15 bp, Homo sapiens
cacatgcgcccagaa

SEQ ID NO: 156372 - DNA, 15 bp, Homo sapiens
ccacatgcgcccaga

SEQ ID NO: 156373 - DNA, 15 bp, Homo sapiens
tccacatgcgcccag

SEQ ID NO: 156374 - DNA, 15 bp, Homo sapiens
gtccacatgcgccca

SEQ ID NO: 156375 - DNA, 15 bp, Homo sapiens
tgtccacatgcgccc

SEQ ID NO: 156376 - DNA, 15 bp, Homo sapiens
ctgtccacatgcgcc

SEQ ID NO: 156377 - DNA, 15 bp, Homo sapiens
actgtccacatgcgc

SEQ ID NO: 156378 - DNA, 15 bp, Homo sapiens
cactgtccacatgcg

SEQ ID NO: 156379 - DNA, 15 bp, Homo sapiens
gcactgtccacatgc

SEQ ID NO: 156380 - DNA, 15 bp, Homo sapiens
agcactgtccacatg

SEQ ID NO: 156381 - DNA, 15 bp, Homo sapiens
aagcactgtccacat

SEQ ID NO: 156382 - DNA, 15 bp, Homo sapiens
taagcactgtccaca

SEQ ID NO: 156383 - DNA, 15 bp, Homo sapiens
ctaagcactgtccac

SEQ ID NO: 156384 - DNA, 15 bp, Homo sapiens
tctaagcactgtcca

SEQ ID NO: 156385 - DNA, 15 bp, Homo sapiens
ctctaagcactgtcc

SEQ ID NO: 156386 - DNA, 15 bp, Homo sapiens
cctctaagcactgtc

SEQ ID NO: 156387 - DNA, 15 bp, Homo sapiens
tcctctaagcactgt

SEQ ID NO: 156388 - DNA, 15 bp, Homo sapiens
ctcctctaagcactg

SEQ ID NO: 156389 - DNA, 15 bp, Homo sapiens
tctcctctaagcact

SEQ ID NO: 156390 - DNA, 15 bp, Homo sapiens
ttctcctctaagcac

SEQ ID NO: 156391 - DNA, 15 bp, Homo sapiens
cttctcctctaagca

SEQ ID NO: 156392 - DNA, 15 bp, Homo sapiens
gcttctcctctaagc

SEQ ID NO: 156393 - DNA, 15 bp, Homo sapiens
agcttctcctctaag

SEQ ID NO: 156394 - DNA, 15 bp, Homo sapiens
gagcttctcctctaa

SEQ ID NO: 156395 - DNA, 15 bp, Homo sapiens
tgagcttctcctcta

SEQ ID NO: 156396 - DNA, 15 bp, Homo sapiens
gtgagcttctcctct

SEQ ID NO: 156397 - DNA, 15 bp, Homo sapiens
tgtgagcttctcctc

SEQ ID NO: 156398 - DNA, 15 bp, Homo sapiens
atgtgagcttctcct

SEQ ID NO: 156399 - DNA, 15 bp, Homo sapiens
catgtgagcttctcc

SEQ ID NO: 156400 - DNA, 15 bp, Homo sapiens
gcatgtgagcttctc

SEQ ID NO: 156401 - DNA, 15 bp, Homo sapiens
agcatgtgagcttct

SEQ ID NO: 156402 - DNA, 15 bp, Homo sapiens
cagcatgtgagcttc

SEQ ID NO: 156403 - DNA, 15 bp, Homo sapiens
tcagcatgtgagctt

SEQ ID NO: 156404 - DNA, 15 bp, Homo sapiens
ctcagcatgtgagct

SEQ ID NO: 156405 - DNA, 15 bp, Homo sapiens
tctcagcatgtgagc

SEQ ID NO: 156406 - DNA, 15 bp, Homo sapiens
ttctcagcatgtgag

SEQ ID NO: 156407 - DNA, 15 bp, Homo sapiens
cttctcagcatgtga

SEQ ID NO: 156408 - DNA, 15 bp, Homo sapiens
gcttctcagcatgtg

SEQ ID NO: 156409 - DNA, 15 bp, Homo sapiens
agcttctcagcatgt

SEQ ID NO: 156410 - DNA, 15 bp, Homo sapiens
aagcttctcagcatg

SEQ ID NO: 156411 - DNA, 15 bp, Homo sapiens
caagcttctcagcat

SEQ ID NO: 156412 - DNA, 15 bp, Homo sapiens
ccaagcttctcagca

SEQ ID NO: 156413 - DNA, 15 bp, Homo sapiens
cccaagcttctcagc

SEQ ID NO: 156414 - DNA, 15 bp, Homo sapiens
gcccaagcttctcag

SEQ ID NO: 156415 - DNA, 15 bp, Homo sapiens
tgcccaagcttctca

SEQ ID NO: 156416 - DNA, 15 bp, Homo sapiens
gtgcccaagcttctc

SEQ ID NO: 156417 - DNA, 15 bp, Homo sapiens
tgtgcccaagcttct

SEQ ID NO: 156418 - DNA, 15 bp, Homo sapiens
ctgtgcccaagcttc

SEQ ID NO: 156419 - DNA, 15 bp, Homo sapiens
cctgtgcccaagctt

SEQ ID NO: 156420 - DNA, 15 bp, Homo sapiens
ccctgtgcccaagct

SEQ ID NO: 156421 - DNA, 15 bp, Homo sapiens
accctgtgcccaagc

SEQ ID NO: 156422 - DNA, 15 bp, Homo sapiens
gaccctgtgcccaag

SEQ ID NO: 156423 - DNA, 15 bp, Homo sapiens
tgaccctgtgcccaa

SEQ ID NO: 156424 - DNA, 15 bp, Homo sapiens
ttgaccctgtgccca

SEQ ID NO: 156425 - DNA, 15 bp, Homo sapiens
tttgaccctgtgccc

SEQ ID NO: 156426 - DNA, 15 bp, Homo sapiens
ctttgaccctgtgcc

SEQ ID NO: 156427 - DNA, 15 bp, Homo sapiens
tctttgaccctgtgc

SEQ ID NO: 156428 - DNA, 15 bp, Homo sapiens
ctctttgaccctgtg

SEQ ID NO: 156429 - DNA, 15 bp, Homo sapiens
tctctttgaccctgt

SEQ ID NO: 156430 - DNA, 15 bp, Homo sapiens
ctctctttgaccctg

SEQ ID NO: 156431 - DNA, 15 bp, Homo sapiens
cctctctttgaccct

SEQ ID NO: 156432 - DNA, 15 bp, Homo sapiens
tcctctctttgaccc

SEQ ID NO: 156433 - DNA, 15 bp, Homo sapiens
ctcctctctttgacc

SEQ ID NO: 156434 - DNA, 15 bp, Homo sapiens
tctcctctctttgac

SEQ ID NO: 156435 - DNA, 15 bp, Homo sapiens
ttctcctctctttga

SEQ ID NO: 156436 - DNA, 15 bp, Homo sapiens
tttctcctctctttg

SEQ ID NO: 156437 - DNA, 15 bp, Homo sapiens
ctttctcctctcttt

SEQ ID NO: 156438 - DNA, 15 bp, Homo sapiens
actttctcctctctt

SEQ ID NO: 156439 - DNA, 15 bp, Homo sapiens
tactttctcctctct

SEQ ID NO: 156440 - DNA, 15 bp, Homo sapiens
ctactttctcctctc

SEQ ID NO: 156441 - DNA, 15 bp, Homo sapiens
cctactttctcctct

SEQ ID NO: 156442 - DNA, 15 bp, Homo sapiens
tcctactttctcctc

SEQ ID NO: 156443 - DNA, 15 bp, Homo sapiens
ttcctactttctcct

SEQ ID NO: 156444 - DNA, 15 bp, Homo sapiens
gttcctactttctcc

SEQ ID NO: 156445 - DNA, 15 bp, Homo sapiens
agttcctactttctc

SEQ ID NO: 156446 - DNA, 15 bp, Homo sapiens
tagttcctactttct

SEQ ID NO: 156447 - DNA, 15 bp, Homo sapiens
ttagttcctactttc

SEQ ID NO: 156448 - DNA, 15 bp, Homo sapiens
tttagttcctacttt

SEQ ID NO: 156449 - DNA, 15 bp, Homo sapiens
ctttagttcctactt

SEQ ID NO: 156450 - DNA, 15 bp, Homo sapiens
actttagttcctact

SEQ ID NO: 156451 - DNA, 15 bp, Homo sapiens
cactttagttcctac

SEQ ID NO: 156452 - DNA, 15 bp, Homo sapiens
ccactttagttccta

SEQ ID NO: 156453 - DNA, 15 bp, Homo sapiens
accactttagttcct

SEQ ID NO: 156454 - DNA, 15 bp, Homo sapiens
aaccactttagttcc

SEQ ID NO: 156455 - DNA, 15 bp, Homo sapiens
aaaccactttagttc

SEQ ID NO: 156456 - DNA, 15 bp, Homo sapiens
caaaccactttagtt

SEQ ID NO: 156457 - DNA, 15 bp, Homo sapiens
gcaaaccactttagt

SEQ ID NO: 156458 - DNA, 15 bp, Homo sapiens
agcaaaccactttag

SEQ ID NO: 156459 - DNA, 15 bp, Homo sapiens
cagcaaaccacttta

SEQ ID NO: 156460 - DNA, 15 bp, Homo sapiens
ccagcaaaccacttt

SEQ ID NO: 156461 - DNA, 15 bp, Homo sapiens
gccagcaaaccactt

SEQ ID NO: 156462 - DNA, 15 bp, Homo sapiens
tgccagcaaaccact

SEQ ID NO: 156463 - DNA, 15 bp, Homo sapiens
ttgccagcaaaccac

SEQ ID NO: 156464 - DNA, 15 bp, Homo sapiens
cttgccagcaaacca

SEQ ID NO: 156465 - DNA, 15 bp, Homo sapiens
tcttgccagcaaacc

SEQ ID NO: 156466 - DNA, 15 bp, Homo sapiens
ttcttgccagcaaac

SEQ ID NO: 156467 - DNA, 15 bp, Homo sapiens
tttcttgccagcaaa

SEQ ID NO: 156468 - DNA, 15 bp, Homo sapiens
ttttcttgccagcaa

SEQ ID NO: 156469 - DNA, 15 bp, Homo sapiens
tttttcttgccagca

SEQ ID NO: 156470 - DNA, 15 bp, Homo sapiens
ctttttcttgccagc

SEQ ID NO: 156471 - DNA, 15 bp, Homo sapiens
tctttttcttgccag

SEQ ID NO: 156472 - DNA, 15 bp, Homo sapiens
ctctttttcttgcca

SEQ ID NO: 156473 - DNA, 15 bp, Homo sapiens
tctctttttcttgcc

SEQ ID NO: 156474 - DNA, 15 bp, Homo sapiens
gtctctttttcttgc

SEQ ID NO: 156475 - DNA, 15 bp, Homo sapiens
ggtctctttttcttg

SEQ ID NO: 156476 - DNA, 15 bp, Homo sapiens
tggtctctttttctt

SEQ ID NO: 156477 - DNA, 15 bp, Homo sapiens
ctggtctctttttct

SEQ ID NO: 156478 - DNA, 15 bp, Homo sapiens
cctggtctctttttc

SEQ ID NO: 156479 - DNA, 15 bp, Homo sapiens
ccctggtctcttttt

SEQ ID NO: 156480 - DNA, 15 bp, Homo sapiens
gccctggtctctttt

SEQ ID NO: 156481 - DNA, 15 bp, Homo sapiens
tgccctggtctcttt

SEQ ID NO: 156482 - DNA, 15 bp, Homo sapiens
ttgccctggtctctt

SEQ ID NO: 156483 - DNA, 15 bp, Homo sapiens
attgccctggtctct

SEQ ID NO: 156484 - DNA, 15 bp, Homo sapiens
aattgccctggtctc

SEQ ID NO: 156485 - DNA, 15 bp, Homo sapiens
gaattgccctggtct

SEQ ID NO: 156486 - DNA, 15 bp, Homo sapiens
ggaattgccctggtc

SEQ ID NO: 156487 - DNA, 15 bp, Homo sapiens
tggaattgccctggt

SEQ ID NO: 156488 - DNA, 15 bp, Homo sapiens
ctggaattgccctgg

SEQ ID NO: 156489 - DNA, 15 bp, Homo sapiens
tctggaattgccctg

SEQ ID NO: 156490 - DNA, 15 bp, Homo sapiens
ttctggaattgccct

SEQ ID NO: 156491 - DNA, 15 bp, Homo sapiens
gttctggaattgccc

SEQ ID NO: 156492 - DNA, 15 bp, Homo sapiens
tgttctggaattgcc

SEQ ID NO: 156493 - DNA, 15 bp, Homo sapiens
ttgttctggaattgc

SEQ ID NO: 156494 - DNA, 15 bp, Homo sapiens
tttgttctggaattg

SEQ ID NO: 156495 - DNA, 15 bp, Homo sapiens
ctttgttctggaatt

SEQ ID NO: 156496 - DNA, 15 bp, Homo sapiens
tctttgttctggaat

SEQ ID NO: 156497 - DNA, 15 bp, Homo sapiens
ttctttgttctggaa

SEQ ID NO: 156498 - DNA, 15 bp, Homo sapiens
cttctttgttctgga

SEQ ID NO: 156499 - DNA, 15 bp, Homo sapiens
ccttctttgttctgg

SEQ ID NO: 156500 - DNA, 15 bp, Homo sapiens
accttctttgttctg

SEQ ID NO: 156501 - DNA, 15 bp, Homo sapiens
caccttctttgttct

SEQ ID NO: 156502 - DNA, 15 bp, Homo sapiens
ccaccttctttgttc

SEQ ID NO: 156503 - DNA, 15 bp, Homo sapiens
tccaccttctttgtt

SEQ ID NO: 156504 - DNA, 15 bp, Homo sapiens
ctccaccttctttgt

SEQ ID NO: 156505 - DNA, 15 bp, Homo sapiens
cctccaccttctttg

SEQ ID NO: 156506 - DNA, 15 bp, Homo sapiens
acctccaccttcttt

SEQ ID NO: 156507 - DNA, 15 bp, Homo sapiens
cacctccaccttctt

SEQ ID NO: 156508 - DNA, 15 bp, Homo sapiens
gcacctccaccttct

SEQ ID NO: 156509 - DNA, 15 bp, Homo sapiens
agcacctccaccttc

SEQ ID NO: 156510 - DNA, 15 bp, Homo sapiens
gagcacctccacctt

SEQ ID NO: 156511 - DNA, 15 bp, Homo sapiens
ggagcacctccacct

SEQ ID NO: 156512 - DNA, 15 bp, Homo sapiens
aggagcacctccacc

SEQ ID NO: 156513 - DNA, 15 bp, Homo sapiens
caggagcacctccac

SEQ ID NO: 156514 - DNA, 15 bp, Homo sapiens
ccaggagcacctcca

SEQ ID NO: 156515 - DNA, 15 bp, Homo sapiens
accaggagcacctcc

SEQ ID NO: 156516 - DNA, 15 bp, Homo sapiens
gaccaggagcacctc

SEQ ID NO: 156517 - DNA, 15 bp, Homo sapiens
agaccaggagcacct

SEQ ID NO: 156518 - DNA, 15 bp, Homo sapiens
gagaccaggagcacc

SEQ ID NO: 156519 - DNA, 15 bp, Homo sapiens
tgagaccaggagcac

SEQ ID NO: 156520 - DNA, 15 bp, Homo sapiens
ttgagaccaggagca

SEQ ID NO: 156521 - DNA, 15 bp, Homo sapiens
gttgagaccaggagc

SEQ ID NO: 156522 - DNA, 15 bp, Homo sapiens
ggttgagaccaggag

SEQ ID NO: 156523 - DNA, 15 bp, Homo sapiens
aggttgagaccagga

SEQ ID NO: 156524 - DNA, 15 bp, Homo sapiens
aaggttgagaccagg

SEQ ID NO: 156525 - DNA, 15 bp, Homo sapiens
caaggttgagaccag

SEQ ID NO: 156526 - DNA, 15 bp, Homo sapiens
ccaaggttgagacca

SEQ ID NO: 156527 - DNA, 15 bp, Homo sapiens
accaaggttgagacc

SEQ ID NO: 156528 - DNA, 15 bp, Homo sapiens
gaccaaggttgagac

SEQ ID NO: 156529 - DNA, 15 bp, Homo sapiens
agaccaaggttgaga

SEQ ID NO: 156530 - DNA, 15 bp, Homo sapiens
aagaccaaggttgag

SEQ ID NO: 156531 - DNA, 15 bp, Homo sapiens
aaagaccaaggttga

SEQ ID NO: 156532 - DNA, 15 bp, Homo sapiens
taaagaccaaggttg

SEQ ID NO: 156533 - DNA, 15 bp, Homo sapiens
ataaagaccaaggtt

SEQ ID NO: 156534 - DNA, 15 bp, Homo sapiens
aataaagaccaaggt

SEQ ID NO: 156535 - DNA, 15 bp, Homo sapiens
caataaagaccaagg

SEQ ID NO: 156536 - DNA, 15 bp, Homo sapiens
ccaataaagaccaag

SEQ ID NO: 156537 - DNA, 15 bp, Homo sapiens
tccaataaagaccaa

SEQ ID NO: 156538 - DNA, 15 bp, Homo sapiens
gtccaataaagacca

SEQ ID NO: 156539 - DNA, 15 bp, Homo sapiens
ggtccaataaagacc

SEQ ID NO: 156540 - DNA, 15 bp, Homo sapiens
gggtccaataaagac

SEQ ID NO: 156541 - DNA, 15 bp, Homo sapiens
ggggtccaataaaga

SEQ ID NO: 156542 - DNA, 15 bp, Homo sapiens
tggggtccaataaag

SEQ ID NO: 156543 - DNA, 15 bp, Homo sapiens
gtggggtccaataaa

SEQ ID NO: 156544 - DNA, 15 bp, Homo sapiens
agtggggtccaataa

SEQ ID NO: 156545 - DNA, 15 bp, Homo sapiens
cagtggggtccaata

SEQ ID NO: 156546 - DNA, 15 bp, Homo sapiens
gcagtggggtccaat

SEQ ID NO: 156547 - DNA, 15 bp, Homo sapiens
ggcagtggggtccaa

SEQ ID NO: 156548 - DNA, 15 bp, Homo sapiens
aggcagtggggtcca

SEQ ID NO: 156549 - DNA, 15 bp, Homo sapiens
aaggcagtggggtcc

SEQ ID NO: 156550 - DNA, 15 bp, Homo sapiens
aaaggcagtggggtc

SEQ ID NO: 156551 - DNA, 15 bp, Homo sapiens
caaaggcagtggggt

SEQ ID NO: 156552 - DNA, 15 bp, Homo sapiens
acaaaggcagtgggg

SEQ ID NO: 156553 - DNA, 15 bp, Homo sapiens
cacaaaggcagtggg

SEQ ID NO: 156554 - DNA, 15 bp, Homo sapiens
gcacaaaggcagtgg

SEQ ID NO: 156555 - DNA, 15 bp, Homo sapiens
cgcacaaaggcagtg

SEQ ID NO: 156556 - DNA, 15 bp, Homo sapiens
gcgcacaaaggcagt

SEQ ID NO: 156557 - DNA, 15 bp, Homo sapiens
agcgcacaaaggcag

SEQ ID NO: 156558 - DNA, 15 bp, Homo sapiens
gagcgcacaaaggca

SEQ ID NO: 156559 - DNA, 15 bp, Homo sapiens
agagcgcacaaaggc

SEQ ID NO: 156560 - DNA, 15 bp, Homo sapiens
gagagcgcacaaagg

SEQ ID NO: 156561 - DNA, 15 bp, Homo sapiens
agagagcgcacaaag

SEQ ID NO: 156562 - DNA, 15 bp, Homo sapiens
gagagagcgcacaaa

SEQ ID NO: 156563 - DNA, 15 bp, Homo sapiens
agagagagcgcacaa

SEQ ID NO: 156564 - DNA, 15 bp, Homo sapiens
aagagagagcgcaca

SEQ ID NO: 156565 - DNA, 15 bp, Homo sapiens
taagagagagcgcac

SEQ ID NO: 156566 - DNA, 15 bp, Homo sapiens
gtaagagagagcgca

SEQ ID NO: 156567 - DNA, 15 bp, Homo sapiens
agtaagagagagcgc

SEQ ID NO: 156568 - DNA, 15 bp, Homo sapiens
cagtaagagagagcg

SEQ ID NO: 156569 - DNA, 15 bp, Homo sapiens
acagtaagagagagc

SEQ ID NO: 156570 - DNA, 15 bp, Homo sapiens
gacagtaagagagag

SEQ ID NO: 156571 - DNA, 15 bp, Homo sapiens
ggacagtaagagaga

SEQ ID NO: 156572 - DNA, 15 bp, Homo sapiens
tggacagtaagagag

SEQ ID NO: 156573 - DNA, 15 bp, Homo sapiens
gtggacagtaagaga

SEQ ID NO: 156574 - DNA, 15 bp, Homo sapiens
agtggacagtaagag

SEQ ID NO: 156575 - DNA, 15 bp, Homo sapiens
gagtggacagtaaga

SEQ ID NO: 156576 - DNA, 15 bp, Homo sapiens
ggagtggacagtaag

SEQ ID NO: 156577 - DNA, 15 bp, Homo sapiens
tggagtggacagtaa

SEQ ID NO: 156578 - DNA, 15 bp, Homo sapiens
ctggagtggacagta

SEQ ID NO: 156579 - DNA, 15 bp, Homo sapiens
cctggagtggacagt

SEQ ID NO: 156580 - DNA, 15 bp, Homo sapiens
ccctggagtggacag

SEQ ID NO: 156581 - DNA, 15 bp, Homo sapiens
cccctggagtggaca

SEQ ID NO: 156582 - DNA, 15 bp, Homo sapiens
gcccctggagtggac

SEQ ID NO: 156583 - DNA, 15 bp, Homo sapiens
agcccctggagtgga

SEQ ID NO: 156584 - DNA, 15 bp, Homo sapiens
gagcccctggagtgg

SEQ ID NO: 156585 - DNA, 15 bp, Homo sapiens
tgagcccctggagtg

SEQ ID NO: 156586 - DNA, 15 bp, Homo sapiens
ctgagcccctggagt

SEQ ID NO: 156587 - DNA, 15 bp, Homo sapiens
cctgagcccctggag

SEQ ID NO: 156588 - DNA, 15 bp, Homo sapiens
gcctgagcccctgga

SEQ ID NO: 156589 - DNA, 15 bp, Homo sapiens
agcctgagcccctgg

SEQ ID NO: 156590 - DNA, 15 bp, Homo sapiens
gcagcctgagcccct

SEQ ID NO: 156591 - DNA, 15 bp, Homo sapiens
ggcagcctgagcccc

SEQ ID NO: 156592 - DNA, 15 bp, Homo sapiens
cggcagcctgagccc

SEQ ID NO: 156593 - DNA, 15 bp, Homo sapiens
ccggcagcctgagcc

SEQ ID NO: 156594 - DNA, 15 bp, Homo sapiens
cccggcagcctgagc

SEQ ID NO: 156595 - DNA, 15 bp, Homo sapiens
ccccggcagcctgag

SEQ ID NO: 156596 - DNA, 15 bp, Homo sapiens
gccccggcagcctga

SEQ ID NO: 156597 - DNA, 15 bp, Homo sapiens
tgccccggcagcctg

SEQ ID NO: 156598 - DNA, 15 bp, Homo sapiens
gtgccccggcagcct

SEQ ID NO: 156599 - DNA, 15 bp, Homo sapiens
tgtgccccggcagcc

SEQ ID NO: 156600 - DNA, 15 bp, Homo sapiens
gtgtgccccggcagc

SEQ ID NO: 156601 - DNA, 15 bp, Homo sapiens
agtgtgccccggcag

SEQ ID NO: 156602 - DNA, 15 bp, Homo sapiens
gagtgtgccccggca

SEQ ID NO: 156603 - DNA, 15 bp, Homo sapiens
tgagtgtgccccggc

SEQ ID NO: 156604 - DNA, 15 bp, Homo sapiens
ctgagtgtgccccgg

SEQ ID NO: 156605 - DNA, 15 bp, Homo sapiens
actgagtgtgccccg

SEQ ID NO: 156606 - DNA, 15 bp, Homo sapiens
cactgagtgtgcccc

SEQ ID NO: 156607 - DNA, 15 bp, Homo sapiens
ccactgagtgtgccc

SEQ ID NO: 156608 - DNA, 15 bp, Homo sapiens
cccactgagtgtgcc

SEQ ID NO: 156609 - DNA, 15 bp, Homo sapiens
gcccactgagtgtgc

SEQ ID NO: 156610 - DNA, 15 bp, Homo sapiens
tgcccactgagtgtg

SEQ ID NO: 156611 - DNA, 15 bp, Homo sapiens
gtgcccactgagtgt

SEQ ID NO: 156612 - DNA, 15 bp, Homo sapiens
tgtgcccactgagtg

SEQ ID NO: 156613 - DNA, 15 bp, Homo sapiens
ctgtgcccactgagt

SEQ ID NO: 156614 - DNA, 15 bp, Homo sapiens
gctgtgcccactgag

SEQ ID NO: 156615 - DNA, 15 bp, Homo sapiens
agctgtgcccactga

SEQ ID NO: 156616 - DNA, 15 bp, Homo sapiens
cagctgtgcccactg

SEQ ID NO: 156617 - DNA, 15 bp, Homo sapiens
gcagctgtgcccact

SEQ ID NO: 156618 - DNA, 15 bp, Homo sapiens
tgcagctgtgcccac

SEQ ID NO: 156619 - DNA, 15 bp, Homo sapiens
ctgcagctgtgccca

SEQ ID NO: 156620 - DNA, 15 bp, Homo sapiens
cctgcagctgtgccc

SEQ ID NO: 156621 - DNA, 15 bp, Homo sapiens
tcctgcagctgtgcc

SEQ ID NO: 156622 - DNA, 15 bp, Homo sapiens
gtcctgcagctgtgc

SEQ ID NO: 156623 - DNA, 15 bp, Homo sapiens
agtcctgcagctgtg

SEQ ID NO: 156624 - DNA, 15 bp, Homo sapiens
cagtcctgcagctgt

SEQ ID NO: 156625 - DNA, 15 bp, Homo sapiens
acagtcctgcagctg

SEQ ID NO: 156626 - DNA, 15 bp, Homo sapiens
cacagtcctgcagct

SEQ ID NO: 156627 - DNA, 15 bp, Homo sapiens
tcacagtcctgcagc

SEQ ID NO: 156628 - DNA, 15 bp, Homo sapiens
ctcacagtcctgcag

SEQ ID NO: 156629 - DNA, 15 bp, Homo sapiens
cctcacagtcctgca

SEQ ID NO: 156630 - DNA, 15 bp, Homo sapiens
gcctcacagtcctgc

SEQ ID NO: 156631 - DNA, 15 bp, Homo sapiens
ggcctcacagtcctg

SEQ ID NO: 156632 - DNA, 15 bp, Homo sapiens
aggcctcacagtcct

SEQ ID NO: 156633 - DNA, 15 bp, Homo sapiens
gaggcctcacagtcc

SEQ ID NO: 156634 - DNA, 15 bp, Homo sapiens
ggaggcctcacagtc

SEQ ID NO: 156635 - DNA, 15 bp, Homo sapiens
aggaggcctcacagt

SEQ ID NO: 156636 - DNA, 15 bp, Homo sapiens
gaggaggcctcacag

SEQ ID NO: 156637 - DNA, 15 bp, Homo sapiens
agaggaggcctcaca

SEQ ID NO: 156638 - DNA, 15 bp, Homo sapiens
tagaggaggcctcac

SEQ ID NO: 156639 - DNA, 15 bp, Homo sapiens
ttagaggaggcctca

SEQ ID NO: 156640 - DNA, 15 bp, Homo sapiens
tttagaggaggcctc

SEQ ID NO: 156641 - DNA, 15 bp, Homo sapiens
ctttagaggaggcct

SEQ ID NO: 156642 - DNA, 15 bp, Homo sapiens
tctttagaggaggcc

SEQ ID NO: 156643 - DNA, 15 bp, Homo sapiens
ctctttagaggaggc

SEQ ID NO: 156644 - DNA, 15 bp, Homo sapiens
tctctttagaggagg

SEQ ID NO: 156645 - DNA, 15 bp, Homo sapiens
ttctctttagaggag

SEQ ID NO: 156646 - DNA, 15 bp, Homo sapiens
cttctctttagagga

SEQ ID NO: 156647 - DNA, 15 bp, Homo sapiens
tcttctctttagagg

SEQ ID NO: 156648 - DNA, 15 bp, Homo sapiens
gtcttctctttagag

SEQ ID NO: 156649 - DNA, 15 bp, Homo sapiens
agtcttctctttaga

SEQ ID NO: 156650 - DNA, 15 bp, Homo sapiens
cagtcttctctttag

SEQ ID NO: 156651 - DNA, 15 bp, Homo sapiens
tcagtcttctcttta

SEQ ID NO: 156652 - DNA, 15 bp, Homo sapiens
ctcagtcttctcttt

SEQ ID NO: 156653 - DNA, 15 bp, Homo sapiens
cctcagtcttctctt

SEQ ID NO: 156654 - DNA, 15 bp, Homo sapiens
ccctcagtcttctct

SEQ ID NO: 156655 - DNA, 15 bp, Homo sapiens
accctcagtcttctc

SEQ ID NO: 156656 - DNA, 15 bp, Homo sapiens
gaccctcagtcttct

SEQ ID NO: 156657 - DNA, 15 bp, Homo sapiens
ggaccctcagtcttc

SEQ ID NO: 156658 - DNA, 15 bp, Homo sapiens
aggaccctcagtctt

SEQ ID NO: 156659 - DNA, 15 bp, Homo sapiens
gaggaccctcagtct

SEQ ID NO: 156660 - DNA, 15 bp, Homo sapiens
ggaggaccctcagtc

SEQ ID NO: 156661 - DNA, 15 bp, Homo sapiens
tggaggaccctcagt

SEQ ID NO: 156662 - DNA, 15 bp, Homo sapiens
ctggaggaccctcag

SEQ ID NO: 156663 - DNA, 15 bp, Homo sapiens
gctggaggaccctca

SEQ ID NO: 156664 - DNA, 15 bp, Homo sapiens
tgctggaggaccctc

SEQ ID NO: 156665 - DNA, 15 bp, Homo sapiens
atgctggaggaccct

SEQ ID NO: 156666 - DNA, 15 bp, Homo sapiens
aatgctggaggaccc

SEQ ID NO: 156667 - DNA, 15 bp, Homo sapiens
taatgctggaggacc

SEQ ID NO: 156668 - DNA, 15 bp, Homo sapiens
ataatgctggaggac

SEQ ID NO: 156669 - DNA, 15 bp, Homo sapiens
aataatgctggagga

SEQ ID NO: 156670 - DNA, 15 bp, Homo sapiens
caataatgctggagg

SEQ ID NO: 156671 - DNA, 15 bp, Homo sapiens
acaataatgctggag

SEQ ID NO: 156672 - DNA, 15 bp, Homo sapiens
tacaataatgctgga

SEQ ID NO: 156673 - DNA, 15 bp, Homo sapiens
ttacaataatgctgg

SEQ ID NO: 156674 - DNA, 15 bp, Homo sapiens
cttacaataatgctg

SEQ ID NO: 156675 - DNA, 15 bp, Homo sapiens
acttacaataatgct

SEQ ID NO: 156676 - DNA, 15 bp, Homo sapiens
cacttacaataatgc

SEQ ID NO: 156677 - DNA, 15 bp, Homo sapiens
acacttacaataatg

SEQ ID NO: 156678 - DNA, 15 bp, Homo sapiens
aacacttacaataat

SEQ ID NO: 156679 - DNA, 15 bp, Homo sapiens
gaacacttacaataa

SEQ ID NO: 156680 - DNA, 15 bp, Homo sapiens
tgaacacttacaata

SEQ ID NO: 156681 - DNA, 15 bp, Homo sapiens
ttgaacacttacaat

SEQ ID NO: 156682 - DNA, 15 bp, Homo sapiens
tttgaacacttacaa

SEQ ID NO: 156683 - DNA, 15 bp, Homo sapiens
ctttgaacacttaca

SEQ ID NO: 156684 - DNA, 15 bp, Homo sapiens
gctttgaacacttac

SEQ ID NO: 156685 - DNA, 15 bp, Homo sapiens
cgctttgaacactta

SEQ ID NO: 156686 - DNA, 15 bp, Homo sapiens
acgctttgaacactt

SEQ ID NO: 156687 - DNA, 15 bp, Homo sapiens
cacgctttgaacact

SEQ ID NO: 156688 - DNA, 15 bp, Homo sapiens
ccacgctttgaacac

SEQ ID NO: 156689 - DNA, 15 bp, Homo sapiens
accacgctttgaaca

SEQ ID NO: 156690 - DNA, 15 bp, Homo sapiens
gaccacgctttgaac

SEQ ID NO: 156691 - DNA, 15 bp, Homo sapiens
tgaccacgctttgaa

SEQ ID NO: 156692 - DNA, 15 bp, Homo sapiens
ctgaccacgctttga

SEQ ID NO: 156693 - DNA, 15 bp, Homo sapiens
tctgaccacgctttg

SEQ ID NO: 156694 - DNA, 15 bp, Homo sapiens
ttctgaccacgcttt

SEQ ID NO: 156695 - DNA, 15 bp, Homo sapiens
attctgaccacgctt

SEQ ID NO: 156696 - DNA, 15 bp, Homo sapiens
aattctgaccacgct

SEQ ID NO: 156697 - DNA, 15 bp, Homo sapiens
gaattctgaccacgc

SEQ ID NO: 156698 - DNA, 15 bp, Homo sapiens
tgaattctgaccacg

SEQ ID NO: 156699 - DNA, 15 bp, Homo sapiens
atgaattctgaccac

SEQ ID NO: 156700 - DNA, 15 bp, Homo sapiens
gatgaattctgacca

SEQ ID NO: 156701 - DNA, 15 bp, Homo sapiens
agatgaattctgacc

SEQ ID NO: 156702 - DNA, 15 bp, Homo sapiens
cagatgaattctgac

SEQ ID NO: 156703 - DNA, 15 bp, Homo sapiens
ccagatgaattctga

SEQ ID NO: 156704 - DNA, 15 bp, Homo sapiens
tccagatgaattctg

SEQ ID NO: 156705 - DNA, 15 bp, Homo sapiens
atccagatgaattct

SEQ ID NO: 156706 - DNA, 15 bp, Homo sapiens
tatccagatgaattc

SEQ ID NO: 156707 - DNA, 15 bp, Homo sapiens
ctatccagatgaatt

SEQ ID NO: 156708 - DNA, 15 bp, Homo sapiens
tctatccagatgaat

SEQ ID NO: 156709 - DNA, 15 bp, Homo sapiens
ttctatccagatgaa

SEQ ID NO: 156710 - DNA, 15 bp, Homo sapiens
cttctatccagatga

SEQ ID NO: 156711 - DNA, 15 bp, Homo sapiens
tcttctatccagatg

SEQ ID NO: 156712 - DNA, 15 bp, Homo sapiens
ttcttctatccagat

SEQ ID NO: 156713 - DNA, 15 bp, Homo sapiens
gttcttctatccaga

SEQ ID NO: 156714 - DNA, 15 bp, Homo sapiens
tgttcttctatccag

SEQ ID NO: 156715 - DNA, 15 bp, Homo sapiens
ttgttcttctatcca

SEQ ID NO: 156716 - DNA, 15 bp, Homo sapiens
cttgttcttctatcc

SEQ ID NO: 156717 - DNA, 15 bp, Homo sapiens
gcttgttcttctatc

SEQ ID NO: 156718 - DNA, 15 bp, Homo sapiens
tgcttgttcttctat

SEQ ID NO: 156719 - DNA, 15 bp, Homo sapiens
gtgcttgttcttcta

SEQ ID NO: 156720 - DNA, 15 bp, Homo sapiens
tgtgcttgttcttct

SEQ ID NO: 156721 - DNA, 15 bp, Homo sapiens
ttgtgcttgttcttc

SEQ ID NO: 156722 - DNA, 15 bp, Homo sapiens
tttgtgcttgttctt

SEQ ID NO: 156723 - DNA, 15 bp, Homo sapiens
gtttgtgcttgttct

SEQ ID NO: 156724 - DNA, 15 bp, Homo sapiens
cgtttgtgcttgttc

SEQ ID NO: 156725 - DNA, 15 bp, Homo sapiens
ccgtttgtgcttgtt

SEQ ID NO: 156726 - DNA, 15 bp, Homo sapiens
cccgtttgtgcttgt

SEQ ID NO: 156727 - DNA, 15 bp, Homo sapiens
acccgtttgtgcttg

SEQ ID NO: 156728 - DNA, 15 bp, Homo sapiens
tacccgtttgtgctt

SEQ ID NO: 156729 - DNA, 15 bp, Homo sapiens
ttacccgtttgtgct

SEQ ID NO: 156730 - DNA, 15 bp, Homo sapiens
tttacccgtttgtgc

SEQ ID NO: 156731 - DNA, 15 bp, Homo sapiens
gtttacccgtttgtg

SEQ ID NO: 156732 - DNA, 15 bp, Homo sapiens
tgtttacccgtttgt

SEQ ID NO: 156733 - DNA, 15 bp, Homo sapiens
atgtttacccgtttg

SEQ ID NO: 156734 - DNA, 15 bp, Homo sapiens
gatgtttacccgttt

SEQ ID NO: 156735 - DNA, 15 bp, Homo sapiens
ggatgtttacccgtt

SEQ ID NO: 156736 - DNA, 15 bp, Homo sapiens
aggatgtttacccgt

SEQ ID NO: 156737 - DNA, 15 bp, Homo sapiens
caggatgtttacccg

SEQ ID NO: 156738 - DNA, 15 bp, Homo sapiens
ccaggatgtttaccc

SEQ ID NO: 156739 - DNA, 15 bp, Homo sapiens
gccaggatgtttacc

SEQ ID NO: 156740 - DNA, 15 bp, Homo sapiens
tgccaggatgtttac

SEQ ID NO: 156741 - DNA, 15 bp, Homo sapiens
ttgccaggatgttta

SEQ ID NO: 156742 - DNA, 15 bp, Homo sapiens
cttgccaggatgttt

SEQ ID NO: 156743 - DNA, 15 bp, Homo sapiens
tcttgccaggatgtt

SEQ ID NO: 156744 - DNA, 15 bp, Homo sapiens
gtcttgccaggatgt

SEQ ID NO: 156745 - DNA, 15 bp, Homo sapiens
agtcttgccaggatg

SEQ ID NO: 156746 - DNA, 15 bp, Homo sapiens
cagtcttgccaggat

SEQ ID NO: 156747 - DNA, 15 bp, Homo sapiens
tcagtcttgccagga

SEQ ID NO: 156748 - DNA, 15 bp, Homo sapiens
ctcagtcttgccagg

SEQ ID NO: 156749 - DNA, 15 bp, Homo sapiens
actcagtcttgccag

SEQ ID NO: 156750 - DNA, 15 bp, Homo sapiens
aactcagtcttgcca

SEQ ID NO: 156751 - DNA, 15 bp, Homo sapiens
aaactcagtcttgcc

SEQ ID NO: 156752 - DNA, 15 bp, Homo sapiens
caaactcagtcttgc

SEQ ID NO: 156753 - DNA, 15 bp, Homo sapiens
ccaaactcagtcttg

SEQ ID NO: 156754 - DNA, 15 bp, Homo sapiens
gccaaactcagtctt

SEQ ID NO: 156755 - DNA, 15 bp, Homo sapiens
ggccaaactcagtct

SEQ ID NO: 156756 - DNA, 15 bp, Homo sapiens
aggccaaactcagtc

SEQ ID NO: 156757 - DNA, 15 bp, Homo sapiens
gaggccaaactcagt

SEQ ID NO: 156758 - DNA, 15 bp, Homo sapiens
tgaggccaaactcag

SEQ ID NO: 156759 - DNA, 15 bp, Homo sapiens
atgaggccaaactca

SEQ ID NO: 156760 - DNA, 15 bp, Homo sapiens
catgaggccaaactc

SEQ ID NO: 156761 - DNA, 15 bp, Homo sapiens
acatgaggccaaact

SEQ ID NO: 156762 - DNA, 15 bp, Homo sapiens
gacatgaggccaaac

SEQ ID NO: 156763 - DNA, 15 bp, Homo sapiens
tgacatgaggccaaa

SEQ ID NO: 156764 - DNA, 15 bp, Homo sapiens
atgacatgaggccaa

SEQ ID NO: 156765 - DNA, 15 bp, Homo sapiens
aatgacatgaggcca

SEQ ID NO: 156766 - DNA, 15 bp, Homo sapiens
gaatgacatgaggcc

SEQ ID NO: 156767 - DNA, 15 bp, Homo sapiens
tgaatgacatgaggc

SEQ ID NO: 156768 - DNA, 15 bp, Homo sapiens
gtgaatgacatgagg

SEQ ID NO: 156769 - DNA, 15 bp, Homo sapiens
tgtgaatgacatgag

SEQ ID NO: 156770 - DNA, 15 bp, Homo sapiens
ctgtgaatgacatga

SEQ ID NO: 156771 - DNA, 15 bp, Homo sapiens
actgtgaatgacatg

SEQ ID NO: 156772 - DNA, 15 bp, Homo sapiens
cactgtgaatgacat

SEQ ID NO: 156773 - DNA, 15 bp, Homo sapiens
gcactgtgaatgaca

SEQ ID NO: 156774 - DNA, 15 bp, Homo sapiens
ggcactgtgaatgac

SEQ ID NO: 156775 - DNA, 15 bp, Homo sapiens
tggcactgtgaatga

SEQ ID NO: 156776 - DNA, 15 bp, Homo sapiens
gtggcactgtgaatg

SEQ ID NO: 156777 - DNA, 15 bp, Homo sapiens
agtggcactgtgaat

SEQ ID NO: 156778 - DNA, 15 bp, Homo sapiens
cagtggcactgtgaa

SEQ ID NO: 156779 - DNA, 15 bp, Homo sapiens
ccagtggcactgtga

SEQ ID NO: 156780 - DNA, 15 bp, Homo sapiens
accagtggcactgtg

SEQ ID NO: 156781 - DNA, 15 bp, Homo sapiens
aaccagtggcactgt

SEQ ID NO: 156782 - DNA, 15 bp, Homo sapiens
caaccagtggcactg

SEQ ID NO: 156783 - DNA, 15 bp, Homo sapiens
ccaaccagtggcact

SEQ ID NO: 156784 - DNA, 15 bp, Homo sapiens
gccaaccagtggcac

SEQ ID NO: 156785 - DNA, 15 bp, Homo sapiens
ggccaaccagtggca

SEQ ID NO: 156786 - DNA, 15 bp, Homo sapiens
gggccaaccagtggc

SEQ ID NO: 156787 - DNA, 15 bp, Homo sapiens
ggggccaaccagtgg

SEQ ID NO: 156788 - DNA, 15 bp, Homo sapiens
aggggccaaccagtg

SEQ ID NO: 156789 - DNA, 15 bp, Homo sapiens
aaggggccaaccagt

SEQ ID NO: 156790 - DNA, 15 bp, Homo sapiens
aaaggggccaaccag

SEQ ID NO: 156791 - DNA, 15 bp, Homo sapiens
gaaaggggccaacca

SEQ ID NO: 156792 - DNA, 15 bp, Homo sapiens
ggaaaggggccaacc

SEQ ID NO: 156793 - DNA, 15 bp, Homo sapiens
aggaaaggggccaac

SEQ ID NO: 156794 - DNA, 15 bp, Homo sapiens
caggaaaggggccaa

SEQ ID NO: 156795 - DNA, 15 bp, Homo sapiens
gcaggaaaggggcca

SEQ ID NO: 156796 - DNA, 15 bp, Homo sapiens
ggcaggaaaggggcc

SEQ ID NO: 156797 - DNA, 15 bp, Homo sapiens
aggcaggaaaggggc

SEQ ID NO: 156798 - DNA, 15 bp, Homo sapiens
gaggcaggaaagggg

SEQ ID NO: 156799 - DNA, 15 bp, Homo sapiens
agaggcaggaaaggg

SEQ ID NO: 156800 - DNA, 15 bp, Homo sapiens
cagaggcaggaaagg

SEQ ID NO: 156801 - DNA, 15 bp, Homo sapiens
ccagaggcaggaaag

SEQ ID NO: 156802 - DNA, 15 bp, Homo sapiens
cccagaggcaggaaa

SEQ ID NO: 156803 - DNA, 15 bp, Homo sapiens
acccagaggcaggaa

SEQ ID NO: 156804 - DNA, 15 bp, Homo sapiens
gacccagaggcagga

SEQ ID NO: 156805 - DNA, 15 bp, Homo sapiens
agacccagaggcagg

SEQ ID NO: 156806 - DNA, 15 bp, Homo sapiens
aagacccagaggcag

SEQ ID NO: 156807 - DNA, 15 bp, Homo sapiens
caagacccagaggca

SEQ ID NO: 156808 - DNA, 15 bp, Homo sapiens
gcaagacccagaggc

SEQ ID NO: 156809 - DNA, 15 bp, Homo sapiens
ggcaagacccagagg

SEQ ID NO: 156810 - DNA, 15 bp, Homo sapiens
gggcaagacccagag

SEQ ID NO: 156811 - DNA, 15 bp, Homo sapiens
tgggcaagacccaga

SEQ ID NO: 156812 - DNA, 15 bp, Homo sapiens
ttgggcaagacccag

SEQ ID NO: 156813 - DNA, 15 bp, Homo sapiens
tttgggcaagaccca

SEQ ID NO: 156814 - DNA, 15 bp, Homo sapiens
atttgggcaagaccc

SEQ ID NO: 156815 - DNA, 15 bp, Homo sapiens
catttgggcaagacc

SEQ ID NO: 156816 - DNA, 15 bp, Homo sapiens
acatttgggcaagac

SEQ ID NO: 156817 - DNA, 15 bp, Homo sapiens
gacatttgggcaaga

SEQ ID NO: 156818 - DNA, 15 bp, Homo sapiens
tgacatttgggcaag

SEQ ID NO: 156819 - DNA, 15 bp, Homo sapiens
atgacatttgggcaa

SEQ ID NO: 156820 - DNA, 15 bp, Homo sapiens
gatgacatttgggca

SEQ ID NO: 156821 - DNA, 15 bp, Homo sapiens
agatgacatttgggc

SEQ ID NO: 156822 - DNA, 15 bp, Homo sapiens
aagatgacatttggg

SEQ ID NO: 156823 - DNA, 15 bp, Homo sapiens
caagatgacatttgg

SEQ ID NO: 156824 - DNA, 15 bp, Homo sapiens
gcaagatgacatttg

SEQ ID NO: 156825 - DNA, 15 bp, Homo sapiens
ggcaagatgacattt

SEQ ID NO: 156826 - DNA, 15 bp, Homo sapiens
gggcaagatgacatt

SEQ ID NO: 156827 - DNA, 15 bp, Homo sapiens
tgggcaagatgacat

SEQ ID NO: 156828 - DNA, 15 bp, Homo sapiens
gtgggcaagatgaca

SEQ ID NO: 156829 - DNA, 15 bp, Homo sapiens
tgtgggcaagatgac

SEQ ID NO: 156830 - DNA, 15 bp, Homo sapiens
atgtgggcaagatga

SEQ ID NO: 156831 - DNA, 15 bp, Homo sapiens
catgtgggcaagatg

SEQ ID NO: 156832 - DNA, 15 bp, Homo sapiens
acatgtgggcaagat

SEQ ID NO: 156833 - DNA, 15 bp, Homo sapiens
gacatgtgggcaaga

SEQ ID NO: 156834 - DNA, 15 bp, Homo sapiens
tgacatgtgggcaag

SEQ ID NO: 156835 - DNA, 15 bp, Homo sapiens
gtgacatgtgggcaa

SEQ ID NO: 156836 - DNA, 15 bp, Homo sapiens
agtgacatgtgggca

SEQ ID NO: 156837 - DNA, 15 bp, Homo sapiens
aagtgacatgtgggc

SEQ ID NO: 156838 - DNA, 15 bp, Homo sapiens
gaagtgacatgtggg

SEQ ID NO: 156839 - DNA, 15 bp, Homo sapiens
agaagtgacatgtgg

SEQ ID NO: 156840 - DNA, 15 bp, Homo sapiens
gagaagtgacatgtg

SEQ ID NO: 156841 - DNA, 15 bp, Homo sapiens
agagaagtgacatgt

SEQ ID NO: 156842 - DNA, 15 bp, Homo sapiens
tagagaagtgacatg

SEQ ID NO: 156843 - DNA, 15 bp, Homo sapiens
atagagaagtgacat

SEQ ID NO: 156844 - DNA, 15 bp, Homo sapiens
aatagagaagtgaca

SEQ ID NO: 156845 - DNA, 15 bp, Homo sapiens
aaatagagaagtgac

SEQ ID NO: 156846 - DNA, 15 bp, Homo sapiens
taaatagagaagtga

SEQ ID NO: 156847 - DNA, 15 bp, Homo sapiens
ttaaatagagaagtg

SEQ ID NO: 156848 - DNA, 15 bp, Homo sapiens
cttaaatagagaagt

SEQ ID NO: 156849 - DNA, 15 bp, Homo sapiens
ccttaaatagagaag

SEQ ID NO: 156850 - DNA, 15 bp, Homo sapiens
tccttaaatagagaa

SEQ ID NO: 156851 - DNA, 15 bp, Homo sapiens
atccttaaatagaga

SEQ ID NO: 156852 - DNA, 15 bp, Homo sapiens
catccttaaatagag

SEQ ID NO: 156853 - DNA, 15 bp, Homo sapiens
gcatccttaaataga

SEQ ID NO: 156854 - DNA, 15 bp, Homo sapiens
ggcatccttaaatag

SEQ ID NO: 156855 - DNA, 15 bp, Homo sapiens
tggcatccttaaata

SEQ ID NO: 156856 - DNA, 15 bp, Homo sapiens
ttggcatccttaaat

SEQ ID NO: 156857 - DNA, 15 bp, Homo sapiens
gttggcatccttaaa

SEQ ID NO: 156858 - DNA, 15 bp, Homo sapiens
agttggcatccttaa

SEQ ID NO: 156859 - DNA, 15 bp, Homo sapiens
cagttggcatcctta

SEQ ID NO: 156860 - DNA, 15 bp, Homo sapiens
gcagttggcatcctt

SEQ ID NO: 156861 - DNA, 15 bp, Homo sapiens
tgcagttggcatcct

SEQ ID NO: 156862 - DNA, 15 bp, Homo sapiens
gtgcagttggcatcc

SEQ ID NO: 156863 - DNA, 15 bp, Homo sapiens
ggtgcagttggcatc

SEQ ID NO: 156864 - DNA, 15 bp, Homo sapiens
aggtgcagttggcat

SEQ ID NO: 156865 - DNA, 15 bp, Homo sapiens
gaggtgcagttggca

SEQ ID NO: 156866 - DNA, 15 bp, Homo sapiens
tgaggtgcagttggc

SEQ ID NO: 156867 - DNA, 15 bp, Homo sapiens
gtgaggtgcagttgg

SEQ ID NO: 156868 - DNA, 15 bp, Homo sapiens
ggtgaggtgcagttg

SEQ ID NO: 156869 - DNA, 15 bp, Homo sapiens
aggtgaggtgcagtt

SEQ ID NO: 156870 - DNA, 15 bp, Homo sapiens
gaggtgaggtgcagt

SEQ ID NO: 156871 - DNA, 15 bp, Homo sapiens
agaggtgaggtgcag

SEQ ID NO: 156872 - DNA, 15 bp, Homo sapiens
aagaggtgaggtgca

SEQ ID NO: 156873 - DNA, 15 bp, Homo sapiens
taagaggtgaggtgc

SEQ ID NO: 156874 - DNA, 15 bp, Homo sapiens
ataagaggtgaggtg

SEQ ID NO: 156875 - DNA, 15 bp, Homo sapiens
aataagaggtgaggt

SEQ ID NO: 156876 - DNA, 15 bp, Homo sapiens
aaataagaggtgagg

SEQ ID NO: 156877 - DNA, 15 bp, Homo sapiens
caaataagaggtgag

SEQ ID NO: 156878 - DNA, 15 bp, Homo sapiens
ccaaataagaggtga

SEQ ID NO: 156879 - DNA, 15 bp, Homo sapiens
tccaaataagaggtg

SEQ ID NO: 156880 - DNA, 15 bp, Homo sapiens
gtccaaataagaggt

SEQ ID NO: 156881 - DNA, 15 bp, Homo sapiens
ggtccaaataagagg

SEQ ID NO: 156882 - DNA, 15 bp, Homo sapiens
tggtccaaataagag

SEQ ID NO: 156883 - DNA, 15 bp, Homo sapiens
atggtccaaataaga

SEQ ID NO: 156884 - DNA, 15 bp, Homo sapiens
gatggtccaaataag

SEQ ID NO: 156885 - DNA, 15 bp, Homo sapiens
agatggtccaaataa

SEQ ID NO: 156886 - DNA, 15 bp, Homo sapiens
aagatggtccaaata

SEQ ID NO: 156887 - DNA, 15 bp, Homo sapiens
aaagatggtccaaat

SEQ ID NO: 156888 - DNA, 15 bp, Homo sapiens
gaaagatggtccaaa

SEQ ID NO: 156889 - DNA, 15 bp, Homo sapiens
ggaaagatggtccaa

SEQ ID NO: 156890 - DNA, 15 bp, Homo sapiens
gggaaagatggtcca

SEQ ID NO: 156891 - DNA, 15 bp, Homo sapiens
tgggaaagatggtcc

SEQ ID NO: 156892 - DNA, 15 bp, Homo sapiens
ttgggaaagatggtc

SEQ ID NO: 156893 - DNA, 15 bp, Homo sapiens
gttgggaaagatggt

SEQ ID NO: 156894 - DNA, 15 bp, Homo sapiens
agttgggaaagatgg

SEQ ID NO: 156895 - DNA, 15 bp, Homo sapiens
cagttgggaaagatg

SEQ ID NO: 156896 - DNA, 15 bp, Homo sapiens
ccagttgggaaagat

SEQ ID NO: 156897 - DNA, 15 bp, Homo sapiens
tccagttgggaaaga

SEQ ID NO: 156898 - DNA, 15 bp, Homo sapiens
atccagttgggaaag

SEQ ID NO: 156899 - DNA, 15 bp, Homo sapiens
aatccagttgggaaa

SEQ ID NO: 156900 - DNA, 15 bp, Homo sapiens
aaatccagttgggaa

SEQ ID NO: 156901 - DNA, 15 bp, Homo sapiens
caaatccagttggga

SEQ ID NO: 156902 - DNA, 15 bp, Homo sapiens
gcaaatccagttggg

SEQ ID NO: 156903 - DNA, 15 bp, Homo sapiens
ggcaaatccagttgg

SEQ ID NO: 156904 - DNA, 15 bp, Homo sapiens
tggcaaatccagttg

SEQ ID NO: 156905 - DNA, 15 bp, Homo sapiens
atggcaaatccagtt

SEQ ID NO: 156906 - DNA, 15 bp, Homo sapiens
gatggcaaatccagt

SEQ ID NO: 156907 - DNA, 15 bp, Homo sapiens
tgatggcaaatccag

SEQ ID NO: 156908 - DNA, 15 bp, Homo sapiens
ttgatggcaaatcca

SEQ ID NO: 156909 - DNA, 15 bp, Homo sapiens
tttgatggcaaatcc

SEQ ID NO: 156910 - DNA, 15 bp, Homo sapiens
ttttgatggcaaatc

SEQ ID NO: 156911 - DNA, 15 bp, Homo sapiens
attttgatggcaaat

SEQ ID NO: 156912 - DNA, 15 bp, Homo sapiens
tattttgatggcaaa

SEQ ID NO: 156913 - DNA, 15 bp, Homo sapiens
atattttgatggcaa

SEQ ID NO: 156914 - DNA, 15 bp, Homo sapiens
aatattttgatggca

SEQ ID NO: 156915 - DNA, 15 bp, Homo sapiens
taatattttgatggc

SEQ ID NO: 156916 - DNA, 15 bp, Homo sapiens
ataatattttgatgg

SEQ ID NO: 156917 - DNA, 15 bp, Homo sapiens
tataatattttgatg

SEQ ID NO: 156918 - DNA, 15 bp, Homo sapiens
gtataatattttgat

SEQ ID NO: 156919 - DNA, 15 bp, Homo sapiens
tgtataatattttga

SEQ ID NO: 156920 - DNA, 15 bp, Homo sapiens
ctgtataatattttg

SEQ ID NO: 156921 - DNA, 15 bp, Homo sapiens
tctgtataatatttt

SEQ ID NO: 156922 - DNA, 15 bp, Homo sapiens
ttctgtataatattt

SEQ ID NO: 156923 - DNA, 15 bp, Homo sapiens
tttctgtataatatt

SEQ ID NO: 156924 - DNA, 15 bp, Homo sapiens
ttttctgtataatat

SEQ ID NO: 156925 - DNA, 15 bp, Homo sapiens
attttctgtataata

SEQ ID NO: 156926 - DNA, 15 bp, Homo sapiens
aattttctgtataat

SEQ ID NO: 156927 - DNA, 15 bp, Homo sapiens
aaattttctgtataa

SEQ ID NO: 156928 - DNA, 15 bp, Homo sapiens
caaattttctgtata

SEQ ID NO: 156929 - DNA, 15 bp, Homo sapiens
gcaaattttctgtat

SEQ ID NO: 156930 - DNA, 15 bp, Homo sapiens
tgcaaattttctgta

SEQ ID NO: 156931 - DNA, 15 bp, Homo sapiens
ttgcaaattttctgt

SEQ ID NO: 156932 - DNA, 15 bp, Homo sapiens
tttgcaaattttctg

SEQ ID NO: 156933 - DNA, 15 bp, Homo sapiens
atttgcaaattttct

SEQ ID NO: 156934 - DNA, 15 bp, Homo sapiens
aatttgcaaattttc

SEQ ID NO: 156935 - DNA, 15 bp, Homo sapiens
taatttgcaaatttt

SEQ ID NO: 156936 - DNA, 15 bp, Homo sapiens
ctaatttgcaaattt

SEQ ID NO: 156937 - DNA, 15 bp, Homo sapiens
actaatttgcaaatt

SEQ ID NO: 156938 - DNA, 15 bp, Homo sapiens
tactaatttgcaaat

SEQ ID NO: 156939 - DNA, 15 bp, Homo sapiens
gtactaatttgcaaa

SEQ ID NO: 156940 - DNA, 15 bp, Homo sapiens
tgtactaatttgcaa

SEQ ID NO: 156941 - DNA, 15 bp, Homo sapiens
ctgtactaatttgca

SEQ ID NO: 156942 - DNA, 15 bp, Homo sapiens
tctgtactaatttgc

SEQ ID NO: 156943 - DNA, 15 bp, Homo sapiens
ctctgtactaatttg

SEQ ID NO: 156944 - DNA, 15 bp, Homo sapiens
tctctgtactaattt

SEQ ID NO: 156945 - DNA, 15 bp, Homo sapiens
ttctctgtactaatt

SEQ ID NO: 156946 - DNA, 15 bp, Homo sapiens
attctctgtactaat

SEQ ID NO: 156947 - DNA, 15 bp, Homo sapiens
aattctctgtactaa

SEQ ID NO: 156948 - DNA, 15 bp, Homo sapiens
gaattctctgtacta

SEQ ID NO: 156949 - DNA, 15 bp, Homo sapiens
ggaattctctgtact

SEQ ID NO: 156950 - DNA, 15 bp, Homo sapiens
aggaattctctgtac

SEQ ID NO: 156951 - DNA, 15 bp, Homo sapiens
caggaattctctgta

SEQ ID NO: 156952 - DNA, 15 bp, Homo sapiens
acaggaattctctgt

SEQ ID NO: 156953 - DNA, 15 bp, Homo sapiens
gacaggaattctctg

SEQ ID NO: 156954 - DNA, 15 bp, Homo sapiens
agacaggaattctct

SEQ ID NO: 156955 - DNA, 15 bp, Homo sapiens
tagacaggaattctc

SEQ ID NO: 156956 - DNA, 15 bp, Homo sapiens
gtagacaggaattct

SEQ ID NO: 156957 - DNA, 15 bp, Homo sapiens
ggtagacaggaattc

SEQ ID NO: 156958 - DNA, 15 bp, Homo sapiens
aggtagacaggaatt

SEQ ID NO: 156959 - DNA, 15 bp, Homo sapiens
caggtagacaggaat

SEQ ID NO: 156960 - DNA, 15 bp, Homo sapiens
acaggtagacaggaa

SEQ ID NO: 156961 - DNA, 15 bp, Homo sapiens
aacaggtagacagga

SEQ ID NO: 156962 - DNA, 15 bp, Homo sapiens
taacaggtagacagg

SEQ ID NO: 156963 - DNA, 15 bp, Homo sapiens
ctaacaggtagacag

SEQ ID NO: 156964 - DNA, 15 bp, Homo sapiens
gctaacaggtagaca

SEQ ID NO: 156965 - DNA, 15 bp, Homo sapiens
ggctaacaggtagac

SEQ ID NO: 156966 - DNA, 15 bp, Homo sapiens
tggctaacaggtaga

SEQ ID NO: 156967 - DNA, 15 bp, Homo sapiens
ctggctaacaggtag

SEQ ID NO: 156968 - DNA, 15 bp, Homo sapiens
actggctaacaggta

SEQ ID NO: 156969 - DNA, 15 bp, Homo sapiens
aactggctaacaggt

SEQ ID NO: 156970 - DNA, 15 bp, Homo sapiens
aaactggctaacagg

SEQ ID NO: 156971 - DNA, 15 bp, Homo sapiens
gaaactggctaacag

SEQ ID NO: 156972 - DNA, 15 bp, Homo sapiens
ggaaactggctaaca

SEQ ID NO: 156973 - DNA, 15 bp, Homo sapiens
gggaaactggctaac

SEQ ID NO: 156974 - DNA, 15 bp, Homo sapiens
cgggaaactggctaa

SEQ ID NO: 156975 - DNA, 15 bp, Homo sapiens
acgggaaactggcta

SEQ ID NO: 156976 - DNA, 15 bp, Homo sapiens
tacgggaaactggct

SEQ ID NO: 156977 - DNA, 15 bp, Homo sapiens
ttacgggaaactggc

SEQ ID NO: 156978 - DNA, 15 bp, Homo sapiens
attacgggaaactgg

SEQ ID NO: 156979 - DNA, 15 bp, Homo sapiens
aattacgggaaactg

SEQ ID NO: 156980 - DNA, 15 bp, Homo sapiens
caattacgggaaact

SEQ ID NO: 156981 - DNA, 15 bp, Homo sapiens
acaattacgggaaac

SEQ ID NO: 156982 - DNA, 15 bp, Homo sapiens
aacaattacgggaaa

SEQ ID NO: 156983 - DNA, 15 bp, Homo sapiens
gaacaattacgggaa

SEQ ID NO: 156984 - DNA, 15 bp, Homo sapiens
tgaacaattacggga

SEQ ID NO: 156985 - DNA, 15 bp, Homo sapiens
gtgaacaattacggg

SEQ ID NO: 156986 - DNA, 15 bp, Homo sapiens
tgtgaacaattacgg

SEQ ID NO: 156987 - DNA, 15 bp, Homo sapiens
atgtgaacaattacg

SEQ ID NO: 156988 - DNA, 15 bp, Homo sapiens
gatgtgaacaattac

SEQ ID NO: 156989 - DNA, 15 bp, Homo sapiens
agatgtgaacaatta

SEQ ID NO: 156990 - DNA, 15 bp, Homo sapiens
aagatgtgaacaatt

SEQ ID NO: 156991 - DNA, 15 bp, Homo sapiens
taagatgtgaacaat

SEQ ID NO: 156992 - DNA, 15 bp, Homo sapiens
gtaagatgtgaacaa

SEQ ID NO: 156993 - DNA, 15 bp, Homo sapiens
tgtaagatgtgaaca

SEQ ID NO: 156994 - DNA, 15 bp, Homo sapiens
atgtaagatgtgaac

SEQ ID NO: 156995 - DNA, 15 bp, Homo sapiens
gatgtaagatgtgaa

SEQ ID NO: 156996 - DNA, 15 bp, Homo sapiens
tgatgtaagatgtga

SEQ ID NO: 156997 - DNA, 15 bp, Homo sapiens
gtgatgtaagatgtg

SEQ ID NO: 156998 - DNA, 15 bp, Homo sapiens
agtgatgtaagatgt

SEQ ID NO: 156999 - DNA, 15 bp, Homo sapiens
tagtgatgtaagatg

SEQ ID NO: 157000 - DNA, 15 bp, Homo sapiens
atagtgatgtaagat

SEQ ID NO: 157001 - DNA, 15 bp, Homo sapiens
tatagtgatgtaaga

SEQ ID NO: 157002 - DNA, 15 bp, Homo sapiens
ctatagtgatgtaag

SEQ ID NO: 157003 - DNA, 15 bp, Homo sapiens
tctatagtgatgtaa

SEQ ID NO: 157004 - DNA, 15 bp, Homo sapiens
ttctatagtgatgta

SEQ ID NO: 157005 - DNA, 15 bp, Homo sapiens
tttctatagtgatgt

SEQ ID NO: 157006 - DNA, 15 bp, Homo sapiens
ttttctatagtgatg

SEQ ID NO: 157007 - DNA, 15 bp, Homo sapiens
cttttctatagtgat

SEQ ID NO: 157008 - DNA, 15 bp, Homo sapiens
tcttttctatagtga

SEQ ID NO: 157009 - DNA, 15 bp, Homo sapiens
ttcttttctatagtg

SEQ ID NO: 157010 - DNA, 15 bp, Homo sapiens
gttcttttctatagt

SEQ ID NO: 157011 - DNA, 15 bp, Homo sapiens
tgttcttttctatag

SEQ ID NO: 157012 - DNA, 15 bp, Homo sapiens
ttgttcttttctata

SEQ ID NO: 157013 - DNA, 15 bp, Homo sapiens
cttgttcttttctat

SEQ ID NO: 157014 - DNA, 15 bp, Homo sapiens
acttgttcttttcta

SEQ ID NO: 157015 - DNA, 15 bp, Homo sapiens
aacttgttcttttct

SEQ ID NO: 157016 - DNA, 15 bp, Homo sapiens
aaacttgttcttttc

SEQ ID NO: 157017 - DNA, 15 bp, Homo sapiens
gaaacttgttctttt

SEQ ID NO: 157018 - DNA, 15 bp, Homo sapiens
tgaaacttgttcttt

SEQ ID NO: 157019 - DNA, 15 bp, Homo sapiens
atgaaacttgttctt

SEQ ID NO: 157020 - DNA, 15 bp, Homo sapiens
catgaaacttgttct

SEQ ID NO: 157021 - DNA, 15 bp, Homo sapiens
acatgaaacttgttc

SEQ ID NO: 157022 - DNA, 15 bp, Homo sapiens
aacatgaaacttgtt

SEQ ID NO: 157023 - DNA, 15 bp, Homo sapiens
caacatgaaacttgt

SEQ ID NO: 157024 - DNA, 15 bp, Homo sapiens
ccaacatgaaacttg

SEQ ID NO: 157025 - DNA, 15 bp, Homo sapiens
accaacatgaaactt

SEQ ID NO: 157026 - DNA, 15 bp, Homo sapiens
gaccaacatgaaact

SEQ ID NO: 157027 - DNA, 15 bp, Homo sapiens
agaccaacatgaaac

SEQ ID NO: 157028 - DNA, 15 bp, Homo sapiens
tagaccaacatgaaa

SEQ ID NO: 157029 - DNA, 15 bp, Homo sapiens
ttagaccaacatgaa

SEQ ID NO: 157030 - DNA, 15 bp, Homo sapiens
tttagaccaacatga

SEQ ID NO: 157031 - DNA, 15 bp, Homo sapiens
ttttagaccaacatg

SEQ ID NO: 157032 - DNA, 15 bp, Homo sapiens
gttttagaccaacat

SEQ ID NO: 157033 - DNA, 15 bp, Homo sapiens
agttttagaccaaca

SEQ ID NO: 157034 - DNA, 15 bp, Homo sapiens
cagttttagaccaac

SEQ ID NO: 157035 - DNA, 15 bp, Homo sapiens
gcagttttagaccaa

SEQ ID NO: 157036 - DNA, 15 bp, Homo sapiens
tgcagttttagacca

SEQ ID NO: 157037 - DNA, 15 bp, Homo sapiens
atgcagttttagacc

SEQ ID NO: 157038 - DNA, 15 bp, Homo sapiens
catgcagttttagac

SEQ ID NO: 157039 - DNA, 15 bp, Homo sapiens
acatgcagttttaga

SEQ ID NO: 157040 - DNA, 15 bp, Homo sapiens
gacatgcagttttag

SEQ ID NO: 157041 - DNA, 15 bp, Homo sapiens
tgacatgcagtttta

SEQ ID NO: 157042 - DNA, 15 bp, Homo sapiens
ttgacatgcagtttt

SEQ ID NO: 157043 - DNA, 15 bp, Homo sapiens
tttgacatgcagttt

SEQ ID NO: 157044 - DNA, 15 bp, Homo sapiens
gtttgacatgcagtt

SEQ ID NO: 157045 - DNA, 15 bp, Homo sapiens
agtttgacatgcagt

SEQ ID NO: 157046 - DNA, 15 bp, Homo sapiens
aagtttgacatgcag

SEQ ID NO: 157047 - DNA, 15 bp, Homo sapiens
aaagtttgacatgca

SEQ ID NO: 157048 - DNA, 15 bp, Homo sapiens
taaagtttgacatgc

SEQ ID NO: 157049 - DNA, 15 bp, Homo sapiens
ttaaagtttgacatg

SEQ ID NO: 157050 - DNA, 15 bp, Homo sapiens
cttaaagtttgacat

SEQ ID NO: 157051 - DNA, 15 bp, Homo sapiens
gcttaaagtttgaca

SEQ ID NO: 157052 - DNA, 15 bp, Homo sapiens
ggcttaaagtttgac

SEQ ID NO: 157053 - DNA, 15 bp, Homo sapiens
aggcttaaagtttga

SEQ ID NO: 157054 - DNA, 15 bp, Homo sapiens
aaggcttaaagtttg

SEQ ID NO: 157055 - DNA, 15 bp, Homo sapiens
gaaggcttaaagttt

SEQ ID NO: 157056 - DNA, 15 bp, Homo sapiens
ggaaggcttaaagtt

SEQ ID NO: 157057 - DNA, 15 bp, Homo sapiens
aggaaggcttaaagt

SEQ ID NO: 157058 - DNA, 15 bp, Homo sapiens
gaggaaggcttaaag

SEQ ID NO: 157059 - DNA, 15 bp, Homo sapiens
tgaggaaggcttaaa

SEQ ID NO: 157060 - DNA, 15 bp, Homo sapiens
ttgaggaaggcttaa

SEQ ID NO: 157061 - DNA, 15 bp, Homo sapiens
tttgaggaaggctta

SEQ ID NO: 157062 - DNA, 15 bp, Homo sapiens
atttgaggaaggctt

SEQ ID NO: 157063 - DNA, 15 bp, Homo sapiens
tatttgaggaaggct

SEQ ID NO: 157064 - DNA, 15 bp, Homo sapiens
atatttgaggaaggc

SEQ ID NO: 157065 - DNA, 15 bp, Homo sapiens
gatatttgaggaagg

SEQ ID NO: 157066 - DNA, 15 bp, Homo sapiens
tgatatttgaggaag

SEQ ID NO: 157067 - DNA, 15 bp, Homo sapiens
atgatatttgaggaa

SEQ ID NO: 157068 - DNA, 15 bp, Homo sapiens
gatgatatttgagga

SEQ ID NO: 157069 - DNA, 15 bp, Homo sapiens
tgatgatatttgagg

SEQ ID NO: 157070 - DNA, 15 bp, Homo sapiens
gtgatgatatttgag

SEQ ID NO: 157071 - DNA, 15 bp, Homo sapiens
agtgatgatatttga

SEQ ID NO: 157072 - DNA, 15 bp, Homo sapiens
aagtgatgatatttg

SEQ ID NO: 157073 - DNA, 15 bp, Homo sapiens
aaagtgatgatattt

SEQ ID NO: 157074 - DNA, 15 bp, Homo sapiens
aaaagtgatgatatt

SEQ ID NO: 157075 - DNA, 15 bp, Homo sapiens
gaaaagtgatgatat

SEQ ID NO: 157076 - DNA, 15 bp, Homo sapiens
ggaaaagtgatgata

SEQ ID NO: 157077 - DNA, 15 bp, Homo sapiens
gggaaaagtgatgat

SEQ ID NO: 157078 - DNA, 15 bp, Homo sapiens
tgggaaaagtgatga

SEQ ID NO: 157079 - DNA, 15 bp, Homo sapiens
gtgggaaaagtgatg

SEQ ID NO: 157080 - DNA, 15 bp, Homo sapiens
agtgggaaaagtgat

SEQ ID NO: 157081 - DNA, 15 bp, Homo sapiens
cagtgggaaaagtga

SEQ ID NO: 157082 - DNA, 15 bp, Homo sapiens
tcagtgggaaaagtg

SEQ ID NO: 157083 - DNA, 15 bp, Homo sapiens
atcagtgggaaaagt

SEQ ID NO: 157084 - DNA, 15 bp, Homo sapiens
catcagtgggaaaag

SEQ ID NO: 157085 - DNA, 15 bp, Homo sapiens
gcatcagtgggaaaa

SEQ ID NO: 157086 - DNA, 15 bp, Homo sapiens
agcatcagtgggaaa

SEQ ID NO: 157087 - DNA, 15 bp, Homo sapiens
cagcatcagtgggaa

SEQ ID NO: 157088 - DNA, 15 bp, Homo sapiens
acagcatcagtggga

SEQ ID NO: 157089 - DNA, 15 bp, Homo sapiens
aacagcatcagtggg

SEQ ID NO: 157090 - DNA, 15 bp, Homo sapiens
aaacagcatcagtgg

SEQ ID NO: 157091 - DNA, 15 bp, Homo sapiens
aaaacagcatcagtg

SEQ ID NO: 157092 - DNA, 15 bp, Homo sapiens
aaaaacagcatcagt

SEQ ID NO: 157093 - DNA, 15 bp, Homo sapiens
gaaaaacagcatcag

SEQ ID NO: 157094 - DNA, 15 bp, Homo sapiens
agaaaaacagcatca

SEQ ID NO: 157095 - DNA, 15 bp, Homo sapiens
aagaaaaacagcatc

SEQ ID NO: 157096 - DNA, 15 bp, Homo sapiens
aaagaaaaacagcat

SEQ ID NO: 157097 - DNA, 15 bp, Homo sapiens
aaaagaaaaacagca

SEQ ID NO: 157098 - DNA, 15 bp, Homo sapiens
gaaaagaaaaacagc

SEQ ID NO: 157099 - DNA, 15 bp, Homo sapiens
ggaaaagaaaaacag

SEQ ID NO: 157100 - DNA, 15 bp, Homo sapiens
tggaaaagaaaaaca

SEQ ID NO: 157101 - DNA, 15 bp, Homo sapiens
ctggaaaagaaaaac

SEQ ID NO: 157102 - DNA, 15 bp, Homo sapiens
cctggaaaagaaaaa

SEQ ID NO: 157103 - DNA, 15 bp, Homo sapiens
tcctggaaaagaaaa

SEQ ID NO: 157104 - DNA, 15 bp, Homo sapiens
atcctggaaaagaaa

SEQ ID NO: 157105 - DNA, 15 bp, Homo sapiens
gatcctggaaaagaa

SEQ ID NO: 157106 - DNA, 15 bp, Homo sapiens
ggatcctggaaaaga

SEQ ID NO: 157107 - DNA, 15 bp, Homo sapiens
tggatcctggaaaag

SEQ ID NO: 157108 - DNA, 15 bp, Homo sapiens
ctggatcctggaaaa

SEQ ID NO: 157109 - DNA, 15 bp, Homo sapiens
actggatcctggaaa

SEQ ID NO: 157110 - DNA, 15 bp, Homo sapiens
gactggatcctggaa

SEQ ID NO: 157111 - DNA, 15 bp, Homo sapiens
ggactggatcctgga

SEQ ID NO: 157112 - DNA, 15 bp, Homo sapiens
tggactggatcctgg

SEQ ID NO: 157113 - DNA, 15 bp, Homo sapiens
ctggactggatcctg

SEQ ID NO: 157114 - DNA, 15 bp, Homo sapiens
cctggactggatcct

SEQ ID NO: 157115 - DNA, 15 bp, Homo sapiens
ccctggactggatcc

SEQ ID NO: 157116 - DNA, 15 bp, Homo sapiens
accctggactggatc

SEQ ID NO: 157117 - DNA, 15 bp, Homo sapiens
gaccctggactggat

SEQ ID NO: 157118 - DNA, 15 bp, Homo sapiens
ggaccctggactgga

SEQ ID NO: 157119 - DNA, 15 bp, Homo sapiens
gggaccctggactgg

SEQ ID NO: 157120 - DNA, 15 bp, Homo sapiens
tgggaccctggactg

SEQ ID NO: 157121 - DNA, 15 bp, Homo sapiens
gtgggaccctggact

SEQ ID NO: 157122 - DNA, 15 bp, Homo sapiens
tgtgggaccctggac

SEQ ID NO: 157123 - DNA, 15 bp, Homo sapiens
atgtgggaccctgga

SEQ ID NO: 157124 - DNA, 15 bp, Homo sapiens
aatgtgggaccctgg

SEQ ID NO: 157125 - DNA, 15 bp, Homo sapiens
caatgtgggaccctg

SEQ ID NO: 157126 - DNA, 15 bp, Homo sapiens
gcaatgtgggaccct

SEQ ID NO: 157127 - DNA, 15 bp, Homo sapiens
tgcaatgtgggaccc

SEQ ID NO: 157128 - DNA, 15 bp, Homo sapiens
atgcaatgtgggacc

SEQ ID NO: 157129 - DNA, 15 bp, Homo sapiens
catgcaatgtgggac

SEQ ID NO: 157130 - DNA, 15 bp, Homo sapiens
acatgcaatgtggga

SEQ ID NO: 157131 - DNA, 15 bp, Homo sapiens
tacatgcaatgtggg

SEQ ID NO: 157132 - DNA, 15 bp, Homo sapiens
gtacatgcaatgtgg

SEQ ID NO: 157133 - DNA, 15 bp, Homo sapiens
ggtacatgcaatgtg

SEQ ID NO: 157134 - DNA, 15 bp, Homo sapiens
gggtacatgcaatgt

SEQ ID NO: 157135 - DNA, 15 bp, Homo sapiens
tgggtacatgcaatg

SEQ ID NO: 157136 - DNA, 15 bp, Homo sapiens
gtgggtacatgcaat

SEQ ID NO: 157137 - DNA, 15 bp, Homo sapiens
ggtgggtacatgcaa

SEQ ID NO: 157138 - DNA, 15 bp, Homo sapiens
tggtgggtacatgca

SEQ ID NO: 157139 - DNA, 15 bp, Homo sapiens
atggtgggtacatgc

SEQ ID NO: 157140 - DNA, 15 bp, Homo sapiens
catggtgggtacatg

SEQ ID NO: 157141 - DNA, 15 bp, Homo sapiens
acatggtgggtacat

SEQ ID NO: 157142 - DNA, 15 bp, Homo sapiens
gacatggtgggtaca

SEQ ID NO: 157143 - DNA, 15 bp, Homo sapiens
agacatggtgggtac

SEQ ID NO: 157144 - DNA, 15 bp, Homo sapiens
gagacatggtgggta

SEQ ID NO: 157145 - DNA, 15 bp, Homo sapiens
ggagacatggtgggt

SEQ ID NO: 157146 - DNA, 15 bp, Homo sapiens
aggagacatggtggg

SEQ ID NO: 157147 - DNA, 15 bp, Homo sapiens
aaggagacatggtgg

SEQ ID NO: 157148 - DNA, 15 bp, Homo sapiens
taaggagacatggtg

SEQ ID NO: 157149 - DNA, 15 bp, Homo sapiens
ctaaggagacatggt

SEQ ID NO: 157150 - DNA, 15 bp, Homo sapiens
actaaggagacatgg

SEQ ID NO: 157151 - DNA, 15 bp, Homo sapiens
cactaaggagacatg

SEQ ID NO: 157152 - DNA, 15 bp, Homo sapiens
acactaaggagacat

SEQ ID NO: 157153 - DNA, 15 bp, Homo sapiens
cacactaaggagaca

SEQ ID NO: 157154 - DNA, 15 bp, Homo sapiens
gcacactaaggagac

SEQ ID NO: 157155 - DNA, 15 bp, Homo sapiens
agcacactaaggaga

SEQ ID NO: 157156 - DNA, 15 bp, Homo sapiens
aagcacactaaggag

SEQ ID NO: 157157 - DNA, 15 bp, Homo sapiens
aaagcacactaagga

SEQ ID NO: 157158 - DNA, 15 bp, Homo sapiens
aaaagcacactaagg

SEQ ID NO: 157159 - DNA, 15 bp, Homo sapiens
caaaagcacactaag

SEQ ID NO: 157160 - DNA, 15 bp, Homo sapiens
acaaaagcacactaa

SEQ ID NO: 157161 - DNA, 15 bp, Homo sapiens
cacaaaagcacacta

SEQ ID NO: 157162 - DNA, 15 bp, Homo sapiens
tcacaaaagcacact

SEQ ID NO: 157163 - DNA, 15 bp, Homo sapiens
gtcacaaaagcacac

SEQ ID NO: 157164 - DNA, 15 bp, Homo sapiens
agtcacaaaagcaca

SEQ ID NO: 157165 - DNA, 15 bp, Homo sapiens
gagtcacaaaagcac

SEQ ID NO: 157166 - DNA, 15 bp, Homo sapiens
cgagtcacaaaagca

SEQ ID NO: 157167 - DNA, 15 bp, Homo sapiens
acgagtcacaaaagc

SEQ ID NO: 157168 - DNA, 15 bp, Homo sapiens
gacgagtcacaaaag

SEQ ID NO: 157169 - DNA, 15 bp, Homo sapiens
agacgagtcacaaaa

SEQ ID NO: 157170 - DNA, 15 bp, Homo sapiens
aagacgagtcacaaa

SEQ ID NO: 157171 - DNA, 15 bp, Homo sapiens
aaagacgagtcacaa

SEQ ID NO: 157172 - DNA, 15 bp, Homo sapiens
gaaagacgagtcaca

SEQ ID NO: 157173 - DNA, 15 bp, Homo sapiens
ggaaagacgagtcac

SEQ ID NO: 157174 - DNA, 15 bp, Homo sapiens
aggaaagacgagtca

SEQ ID NO: 157175 - DNA, 15 bp, Homo sapiens
aaggaaagacgagtc

SEQ ID NO: 157176 - DNA, 15 bp, Homo sapiens
taaggaaagacgagt

SEQ ID NO: 157177 - DNA, 15 bp, Homo sapiens
gtaaggaaagacgag

SEQ ID NO: 157178 - DNA, 15 bp, Homo sapiens
ggtaaggaaagacga

SEQ ID NO: 157179 - DNA, 15 bp, Homo sapiens
aggtaaggaaagacg

SEQ ID NO: 157180 - DNA, 15 bp, Homo sapiens
aaggtaaggaaagac

SEQ ID NO: 157181 - DNA, 15 bp, Homo sapiens
aaaggtaaggaaaga

SEQ ID NO: 157182 - DNA, 15 bp, Homo sapiens
gaaaggtaaggaaag

SEQ ID NO: 157183 - DNA, 15 bp, Homo sapiens
tgaaaggtaaggaaa

SEQ ID NO: 157184 - DNA, 15 bp, Homo sapiens
atgaaaggtaaggaa

SEQ ID NO: 157185 - DNA, 15 bp, Homo sapiens
catgaaaggtaagga

SEQ ID NO: 157186 - DNA, 15 bp, Homo sapiens
tcatgaaaggtaagg

SEQ ID NO: 157187 - DNA, 15 bp, Homo sapiens
gtcatgaaaggtaag

SEQ ID NO: 157188 - DNA, 15 bp, Homo sapiens
agtcatgaaaggtaa

SEQ ID NO: 157189 - DNA, 15 bp, Homo sapiens
aagtcatgaaaggta

SEQ ID NO: 157190 - DNA, 15 bp, Homo sapiens
aaagtcatgaaaggt

SEQ ID NO: 157191 - DNA, 15 bp, Homo sapiens
caaagtcatgaaagg

SEQ ID NO: 157192 - DNA, 15 bp, Homo sapiens
tcaaagtcatgaaag

SEQ ID NO: 157193 - DNA, 15 bp, Homo sapiens
gtcaaagtcatgaaa

SEQ ID NO: 157194 - DNA, 15 bp, Homo sapiens
tgtcaaagtcatgaa

SEQ ID NO: 157195 - DNA, 15 bp, Homo sapiens
atgtcaaagtcatga

SEQ ID NO: 157196 - DNA, 15 bp, Homo sapiens
aatgtcaaagtcatg

SEQ ID NO: 157197 - DNA, 15 bp, Homo sapiens
caatgtcaaagtcat

SEQ ID NO: 157198 - DNA, 15 bp, Homo sapiens
ccaatgtcaaagtca

SEQ ID NO: 157199 - DNA, 15 bp, Homo sapiens
accaatgtcaaagtc

SEQ ID NO: 157200 - DNA, 15 bp, Homo sapiens
caccaatgtcaaagt

SEQ ID NO: 157201 - DNA, 15 bp, Homo sapiens
tcaccaatgtcaaag

SEQ ID NO: 157202 - DNA, 15 bp, Homo sapiens
ttcaccaatgtcaaa

SEQ ID NO: 157203 - DNA, 15 bp, Homo sapiens
cttcaccaatgtcaa

SEQ ID NO: 157204 - DNA, 15 bp, Homo sapiens
tcttcaccaatgtca

SEQ ID NO: 157205 - DNA, 15 bp, Homo sapiens
ctcttcaccaatgtc

SEQ ID NO: 157206 - DNA, 15 bp, Homo sapiens
actcttcaccaatgt

SEQ ID NO: 157207 - DNA, 15 bp, Homo sapiens
cactcttcaccaatg

SEQ ID NO: 157208 - DNA, 15 bp, Homo sapiens
gcactcttcaccaat

SEQ ID NO: 157209 - DNA, 15 bp, Homo sapiens
agcactcttcaccaa

SEQ ID NO: 157210 - DNA, 15 bp, Homo sapiens
cagcactcttcacca

SEQ ID NO: 157211 - DNA, 15 bp, Homo sapiens
ccagcactcttcacc

SEQ ID NO: 157212 - DNA, 15 bp, Homo sapiens
accagcactcttcac

SEQ ID NO: 157213 - DNA, 15 bp, Homo sapiens
aaccagcactcttca

SEQ ID NO: 157214 - DNA, 15 bp, Homo sapiens
taaccagcactcttc

SEQ ID NO: 157215 - DNA, 15 bp, Homo sapiens
ctaaccagcactctt

SEQ ID NO: 157216 - DNA, 15 bp, Homo sapiens
actaaccagcactct

SEQ ID NO: 157217 - DNA, 15 bp, Homo sapiens
aactaaccagcactc

SEQ ID NO: 157218 - DNA, 15 bp, Homo sapiens
taactaaccagcact

SEQ ID NO: 157219 - DNA, 15 bp, Homo sapiens
ataactaaccagcac

SEQ ID NO: 157220 - DNA, 15 bp, Homo sapiens
aataactaaccagca

SEQ ID NO: 157221 - DNA, 15 bp, Homo sapiens
aaataactaaccagc

SEQ ID NO: 157222 - DNA, 15 bp, Homo sapiens
aaaataactaaccag

SEQ ID NO: 157223 - DNA, 15 bp, Homo sapiens
gaaaataactaacca

SEQ ID NO: 157224 - DNA, 15 bp, Homo sapiens
tgaaaataactaacc

SEQ ID NO: 157225 - DNA, 15 bp, Homo sapiens
atgaaaataactaac

SEQ ID NO: 157226 - DNA, 15 bp, Homo sapiens
tatgaaaataactaa

SEQ ID NO: 157227 - DNA, 15 bp, Homo sapiens
ctatgaaaataacta

SEQ ID NO: 157228 - DNA, 15 bp, Homo sapiens
cctatgaaaataact

SEQ ID NO: 157229 - DNA, 15 bp, Homo sapiens
gcctatgaaaataac

SEQ ID NO: 157230 - DNA, 15 bp, Homo sapiens
cgcctatgaaaataa

SEQ ID NO: 157231 - DNA, 15 bp, Homo sapiens
ccgcctatgaaaata

SEQ ID NO: 157232 - DNA, 15 bp, Homo sapiens
accgcctatgaaaat

SEQ ID NO: 157233 - DNA, 15 bp, Homo sapiens
gaccgcctatgaaaa

SEQ ID NO: 157234 - DNA, 15 bp, Homo sapiens
agaccgcctatgaaa

SEQ ID NO: 157235 - DNA, 15 bp, Homo sapiens
cagaccgcctatgaa

SEQ ID NO: 157236 - DNA, 15 bp, Homo sapiens
acagaccgcctatga

SEQ ID NO: 157237 - DNA, 15 bp, Homo sapiens
tacagaccgcctatg

SEQ ID NO: 157238 - DNA, 15 bp, Homo sapiens
atacagaccgcctat

SEQ ID NO: 157239 - DNA, 15 bp, Homo sapiens
tatacagaccgccta

SEQ ID NO: 157240 - DNA, 15 bp, Homo sapiens
atatacagaccgcct

SEQ ID NO: 157241 - DNA, 15 bp, Homo sapiens
aatatacagaccgcc

SEQ ID NO: 157242 - DNA, 15 bp, Homo sapiens
aaatatacagaccgc

SEQ ID NO: 157243 - DNA, 15 bp, Homo sapiens
aaaatatacagaccg

SEQ ID NO: 157244 - DNA, 15 bp, Homo sapiens
caaaatatacagacc

SEQ ID NO: 157245 - DNA, 15 bp, Homo sapiens
ccaaaatatacagac

SEQ ID NO: 157246 - DNA, 15 bp, Homo sapiens
accaaaatatacaga

SEQ ID NO: 157247 - DNA, 15 bp, Homo sapiens
caccaaaatatacag

SEQ ID NO: 157248 - DNA, 15 bp, Homo sapiens
acaccaaaatataca

SEQ ID NO: 157249 - DNA, 15 bp, Homo sapiens
cacaccaaaatatac

SEQ ID NO: 157250 - DNA, 15 bp, Homo sapiens
acacaccaaaatata

SEQ ID NO: 157251 - DNA, 15 bp, Homo sapiens
gacacaccaaaatat

SEQ ID NO: 157252 - DNA, 15 bp, Homo sapiens
agacacaccaaaata

SEQ ID NO: 157253 - DNA, 15 bp, Homo sapiens
cagacacaccaaaat

SEQ ID NO: 157254 - DNA, 15 bp, Homo sapiens
tcagacacaccaaaa

SEQ ID NO: 157255 - DNA, 15 bp, Homo sapiens
atcagacacaccaaa

SEQ ID NO: 157256 - DNA, 15 bp, Homo sapiens
catcagacacaccaa

SEQ ID NO: 157257 - DNA, 15 bp, Homo sapiens
acatcagacacacca

SEQ ID NO: 157258 - DNA, 15 bp, Homo sapiens
aacatcagacacacc

SEQ ID NO: 157259 - DNA, 15 bp, Homo sapiens
aaacatcagacacac

SEQ ID NO: 157260 - DNA, 15 bp, Homo sapiens
aaaacatcagacaca

SEQ ID NO: 157261 - DNA, 15 bp, Homo sapiens
gaaaacatcagacac

SEQ ID NO: 157262 - DNA, 15 bp, Homo sapiens
agaaaacatcagaca

SEQ ID NO: 157263 - DNA, 15 bp, Homo sapiens
tagaaaacatcagac

SEQ ID NO: 157264 - DNA, 15 bp, Homo sapiens
ttagaaaacatcaga

SEQ ID NO: 157265 - DNA, 15 bp, Homo sapiens
attagaaaacatcag

SEQ ID NO: 157266 - DNA, 15 bp, Homo sapiens
cattagaaaacatca

SEQ ID NO: 157267 - DNA, 15 bp, Homo sapiens
ccattagaaaacatc

SEQ ID NO: 157268 - DNA, 15 bp, Homo sapiens
accattagaaaacat

SEQ ID NO: 157269 - DNA, 15 bp, Homo sapiens
aaccattagaaaaca

SEQ ID NO: 157270 - DNA, 15 bp, Homo sapiens
taaccattagaaaac

SEQ ID NO: 157271 - DNA, 15 bp, Homo sapiens
ttaaccattagaaaa

SEQ ID NO: 157272 - DNA, 15 bp, Homo sapiens
tttaaccattagaaa

SEQ ID NO: 157273 - DNA, 15 bp, Homo sapiens
ctttaaccattagaa

SEQ ID NO: 157274 - DNA, 15 bp, Homo sapiens
gctttaaccattaga

SEQ ID NO: 157275 - DNA, 15 bp, Homo sapiens
tgctttaaccattag

SEQ ID NO: 157276 - DNA, 15 bp, Homo sapiens
atgctttaaccatta

SEQ ID NO: 157277 - DNA, 15 bp, Homo sapiens
tatgctttaaccatt

SEQ ID NO: 157278 - DNA, 15 bp, Homo sapiens
atatgctttaaccat

SEQ ID NO: 157279 - DNA, 15 bp, Homo sapiens
catatgctttaacca

SEQ ID NO: 157280 - DNA, 15 bp, Homo sapiens
ccatatgctttaacc

SEQ ID NO: 157281 - DNA, 15 bp, Homo sapiens
cccatatgctttaac

SEQ ID NO: 157282 - DNA, 15 bp, Homo sapiens
acccatatgctttaa

SEQ ID NO: 157283 - DNA, 15 bp, Homo sapiens
aacccatatgcttta

SEQ ID NO: 157284 - DNA, 15 bp, Homo sapiens
aaacccatatgcttt

SEQ ID NO: 157285 - DNA, 15 bp, Homo sapiens
aaaacccatatgctt

SEQ ID NO: 157286 - DNA, 15 bp, Homo sapiens
aaaaacccatatgct

SEQ ID NO: 157287 - DNA, 15 bp, Homo sapiens
aaaaaacccatatgc

SEQ ID NO: 157288 - DNA, 15 bp, Homo sapiens
aaaaaaacccatatg

SEQ ID NO: 157289 - DNA, 15 bp, Homo sapiens
aaaaaaaacccatat

SEQ ID NO: 157290 - DNA, 15 bp, Homo sapiens
aaaaaaaaacccata

SEQ ID NO: 157291 - DNA, 15 bp, Homo sapiens
caaaaaaaaacccat

SEQ ID NO: 157292 - DNA, 15 bp, Homo sapiens
acaaaaaaaaaccca

SEQ ID NO: 157293 - DNA, 15 bp, Homo sapiens
aacaaaaaaaaaccc

SEQ ID NO: 157294 - DNA, 15 bp, Homo sapiens
aaacaaaaaaaaacc

SEQ ID NO: 157295 - DNA, 15 bp, Homo sapiens
aaaacaaaaaaaaac

SEQ ID NO: 157296 - DNA, 15 bp, Homo sapiens
taaaacaaaaaaaaa

SEQ ID NO: 157297 - DNA, 15 bp, Homo sapiens
ataaaacaaaaaaaa

SEQ ID NO: 157298 - DNA, 15 bp, Homo sapiens
aataaaacaaaaaaa

SEQ ID NO: 157299 - DNA, 15 bp, Homo sapiens
ataaataaaacaaaa

SEQ ID NO: 157300 - DNA, 15 bp, Homo sapiens
aataaataaaacaaa

SEQ ID NO: 157301 - DNA, 15 bp, Homo sapiens
aaataaataaaacaa

SEQ ID NO: 157302 - DNA, 15 bp, Homo sapiens
taaataaataaaaca

SEQ ID NO: 157303 - DNA, 15 bp, Homo sapiens
ataaataaataaaac

SEQ ID NO: 157304 - DNA, 15 bp, Homo sapiens
aataaataaataaaa

SEQ ID NO: 157305 - DNA, 15 bp, Homo sapiens
caataaataaataaa

SEQ ID NO: 157306 - DNA, 15 bp, Homo sapiens
gcaataaataaataa

SEQ ID NO: 157307 - DNA, 15 bp, Homo sapiens
agcaataaataaata

SEQ ID NO: 157308 - DNA, 15 bp, Homo sapiens
tagcaataaataaat

SEQ ID NO: 157309 - DNA, 15 bp, Homo sapiens
atagcaataaataaa

SEQ ID NO: 157310 - DNA, 15 bp, Homo sapiens
aatagcaataaataa

SEQ ID NO: 157311 - DNA, 15 bp, Homo sapiens
caatagcaataaata

SEQ ID NO: 157312 - DNA, 15 bp, Homo sapiens
tcaatagcaataaat

SEQ ID NO: 157313 - DNA, 15 bp, Homo sapiens
atcaatagcaataaa

SEQ ID NO: 157314 - DNA, 15 bp, Homo sapiens
aatcaatagcaataa

SEQ ID NO: 157315 - DNA, 15 bp, Homo sapiens
caatcaatagcaata

SEQ ID NO: 157316 - DNA, 15 bp, Homo sapiens
ccaatcaatagcaat

SEQ ID NO: 157317 - DNA, 15 bp, Homo sapiens
cccaatcaatagcaa

SEQ ID NO: 157318 - DNA, 15 bp, Homo sapiens
acccaatcaatagca

SEQ ID NO: 157319 - DNA, 15 bp, Homo sapiens
gacccaatcaatagc

SEQ ID NO: 157320 - DNA, 15 bp, Homo sapiens
agacccaatcaatag

SEQ ID NO: 157321 - DNA, 15 bp, Homo sapiens
gagacccaatcaata

SEQ ID NO: 157322 - DNA, 15 bp, Homo sapiens
agagacccaatcaat

SEQ ID NO: 157323 - DNA, 15 bp, Homo sapiens
gagagacccaatcaa

SEQ ID NO: 157324 - DNA, 15 bp, Homo sapiens
ggagagacccaatca

SEQ ID NO: 157325 - DNA, 15 bp, Homo sapiens
aggagagacccaatc

SEQ ID NO: 157326 - DNA, 15 bp, Homo sapiens
caggagagacccaat

SEQ ID NO: 157327 - DNA, 15 bp, Homo sapiens
gcaggagagacccaa

SEQ ID NO: 157328 - DNA, 15 bp, Homo sapiens
ggcaggagagaccca

SEQ ID NO: 157329 - DNA, 15 bp, Homo sapiens
tggcaggagagaccc

SEQ ID NO: 157330 - DNA, 15 bp, Homo sapiens
gtggcaggagagacc

SEQ ID NO: 157331 - DNA, 15 bp, Homo sapiens
agtggcaggagagac

SEQ ID NO: 157332 - DNA, 15 bp, Homo sapiens
cagtggcaggagaga

SEQ ID NO: 157333 - DNA, 15 bp, Homo sapiens
ccagtggcaggagag

SEQ ID NO: 157334 - DNA, 15 bp, Homo sapiens
tccagtggcaggaga

SEQ ID NO: 157335 - DNA, 15 bp, Homo sapiens
ttccagtggcaggag

SEQ ID NO: 157336 - DNA, 15 bp, Homo sapiens
attccagtggcagga

SEQ ID NO: 157337 - DNA, 15 bp, Homo sapiens
tattccagtggcagg

SEQ ID NO: 157338 - DNA, 15 bp, Homo sapiens
atattccagtggcag

SEQ ID NO: 157339 - DNA, 15 bp, Homo sapiens
gatattccagtggca

SEQ ID NO: 157340 - DNA, 15 bp, Homo sapiens
agatattccagtggc

SEQ ID NO: 157341 - DNA, 15 bp, Homo sapiens
cagatattccagtgg

SEQ ID NO: 157342 - DNA, 15 bp, Homo sapiens
gcagatattccagtg

SEQ ID NO: 157343 - DNA, 15 bp, Homo sapiens
agcagatattccagt

SEQ ID NO: 157344 - DNA, 15 bp, Homo sapiens
gagcagatattccag

SEQ ID NO: 157345 - DNA, 15 bp, Homo sapiens
ggagcagatattcca

SEQ ID NO: 157346 - DNA, 15 bp, Homo sapiens
gggagcagatattcc

SEQ ID NO: 157347 - DNA, 15 bp, Homo sapiens
agggagcagatattc

SEQ ID NO: 157348 - DNA, 15 bp, Homo sapiens
gagggagcagatatt

SEQ ID NO: 157349 - DNA, 15 bp, Homo sapiens
ggagggagcagatat

SEQ ID NO: 157350 - DNA, 15 bp, Homo sapiens
cggagggagcagata

SEQ ID NO: 157351 - DNA, 15 bp, Homo sapiens
tcggagggagcagat

SEQ ID NO: 157352 - DNA, 15 bp, Homo sapiens
ctcggagggagcaga

SEQ ID NO: 157353 - DNA, 15 bp, Homo sapiens
gctcggagggagcag

SEQ ID NO: 157354 - DNA, 15 bp, Homo sapiens
tgctcggagggagca

SEQ ID NO: 157355 - DNA, 15 bp, Homo sapiens
ttgctcggagggagc

SEQ ID NO: 157356 - DNA, 15 bp, Homo sapiens
cttgctcggagggag

SEQ ID NO: 157357 - DNA, 15 bp, Homo sapiens
ccttgctcggaggga

SEQ ID NO: 157358 - DNA, 15 bp, Homo sapiens
tccttgctcggaggg

SEQ ID NO: 157359 - DNA, 15 bp, Homo sapiens
atccttgctcggagg

SEQ ID NO: 157360 - DNA, 15 bp, Homo sapiens
aatccttgctcggag

SEQ ID NO: 157361 - DNA, 15 bp, Homo sapiens
gaatccttgctcgga

SEQ ID NO: 157362 - DNA, 15 bp, Homo sapiens
agaatccttgctcgg

SEQ ID NO: 157363 - DNA, 15 bp, Homo sapiens
gagaatccttgctcg

SEQ ID NO: 157364 - DNA, 15 bp, Homo sapiens
tgagaatccttgctc

SEQ ID NO: 157365 - DNA, 15 bp, Homo sapiens
atgagaatccttgct

SEQ ID NO: 157366 - DNA, 15 bp, Homo sapiens
aatgagaatccttgc

SEQ ID NO: 157367 - DNA, 15 bp, Homo sapiens
caatgagaatccttg

SEQ ID NO: 157368 - DNA, 15 bp, Homo sapiens
ccaatgagaatcctt

SEQ ID NO: 157369 - DNA, 15 bp, Homo sapiens
accaatgagaatcct

SEQ ID NO: 157370 - DNA, 15 bp, Homo sapiens
gaccaatgagaatcc

SEQ ID NO: 157371 - DNA, 15 bp, Homo sapiens
agaccaatgagaatc

SEQ ID NO: 157372 - DNA, 15 bp, Homo sapiens
gagaccaatgagaat

SEQ ID NO: 157373 - DNA, 15 bp, Homo sapiens
cgagaccaatgagaa

SEQ ID NO: 157374 - DNA, 15 bp, Homo sapiens
acgagaccaatgaga

SEQ ID NO: 157375 - DNA, 15 bp, Homo sapiens
aacgagaccaatgag

SEQ ID NO: 157376 - DNA, 15 bp, Homo sapiens
gaacgagaccaatga

SEQ ID NO: 157377 - DNA, 15 bp, Homo sapiens
tgaacgagaccaatg

SEQ ID NO: 157378 - DNA, 15 bp, Homo sapiens
gtgaacgagaccaat

SEQ ID NO: 157379 - DNA, 15 bp, Homo sapiens
agtgaacgagaccaa

SEQ ID NO: 157380 - DNA, 15 bp, Homo sapiens
aagtgaacgagacca

SEQ ID NO: 157381 - DNA, 15 bp, Homo sapiens
caagtgaacgagacc

SEQ ID NO: 157382 - DNA, 15 bp, Homo sapiens
acaagtgaacgagac

SEQ ID NO: 157383 - DNA, 15 bp, Homo sapiens
cacaagtgaacgaga

SEQ ID NO: 157384 - DNA, 15 bp, Homo sapiens
acacaagtgaacgag

SEQ ID NO: 157385 - DNA, 15 bp, Homo sapiens
cacacaagtgaacga

SEQ ID NO: 157386 - DNA, 15 bp, Homo sapiens
gcacacaagtgaacg

SEQ ID NO: 157387 - DNA, 15 bp, Homo sapiens
tgcacacaagtgaac

SEQ ID NO: 157388 - DNA, 15 bp, Homo sapiens
ctgcacacaagtgaa

SEQ ID NO: 157389 - DNA, 15 bp, Homo sapiens
cctgcacacaagtga

SEQ ID NO: 157390 - DNA, 15 bp, Homo sapiens
tcctgcacacaagtg

SEQ ID NO: 157391 - DNA, 15 bp, Homo sapiens
ttcctgcacacaagt

SEQ ID NO: 157392 - DNA, 15 bp, Homo sapiens
gttcctgcacacaag

SEQ ID NO: 157393 - DNA, 15 bp, Homo sapiens
tgttcctgcacacaa

SEQ ID NO: 157394 - DNA, 15 bp, Homo sapiens
atgttcctgcacaca

SEQ ID NO: 157395 - DNA, 15 bp, Homo sapiens
gatgttcctgcacac

SEQ ID NO: 157396 - DNA, 15 bp, Homo sapiens
agatgttcctgcaca

SEQ ID NO: 157397 - DNA, 15 bp, Homo sapiens
cagatgttcctgcac

SEQ ID NO: 157398 - DNA, 15 bp, Homo sapiens
acagatgttcctgca

SEQ ID NO: 157399 - DNA, 15 bp, Homo sapiens
cacagatgttcctgc

SEQ ID NO: 157400 - DNA, 15 bp, Homo sapiens
acacagatgttcctg

SEQ ID NO: 157401 - DNA, 15 bp, Homo sapiens
cacacagatgttcct

SEQ ID NO: 157402 - DNA, 15 bp, Homo sapiens
acacacagatgttcc

SEQ ID NO: 157403 - DNA, 15 bp, Homo sapiens
cacacacagatgttc

SEQ ID NO: 157404 - DNA, 15 bp, Homo sapiens
gcacacacagatgtt

SEQ ID NO: 157405 - DNA, 15 bp, Homo sapiens
ggcacacacagatgt

SEQ ID NO: 157406 - DNA, 15 bp, Homo sapiens
aggcacacacagatg

SEQ ID NO: 157407 - DNA, 15 bp, Homo sapiens
gaggcacacacagat

SEQ ID NO: 157408 - DNA, 15 bp, Homo sapiens
cgaggcacacacaga

SEQ ID NO: 157409 - DNA, 15 bp, Homo sapiens
gcgaggcacacacag

SEQ ID NO: 157410 - DNA, 15 bp, Homo sapiens
tgcgaggcacacaca

SEQ ID NO: 157411 - DNA, 15 bp, Homo sapiens
gtgcgaggcacacac

SEQ ID NO: 157412 - DNA, 15 bp, Homo sapiens
ggtgcgaggcacaca

SEQ ID NO: 157413 - DNA, 15 bp, Homo sapiens
gggtgcgaggcacac

SEQ ID NO: 157414 - DNA, 15 bp, Homo sapiens
tgggtgcgaggcaca

SEQ ID NO: 157415 - DNA, 15 bp, Homo sapiens
atgggtgcgaggcac

SEQ ID NO: 157416 - DNA, 15 bp, Homo sapiens
catgggtgcgaggca

SEQ ID NO: 157417 - DNA, 15 bp, Homo sapiens
gcatgggtgcgaggc

SEQ ID NO: 157418 - DNA, 15 bp, Homo sapiens
agcatgggtgcgagg

SEQ ID NO: 157419 - DNA, 15 bp, Homo sapiens
gagcatgggtgcgag

SEQ ID NO: 157420 - DNA, 15 bp, Homo sapiens
tgagcatgggtgcga

SEQ ID NO: 157421 - DNA, 15 bp, Homo sapiens
ctgagcatgggtgcg

SEQ ID NO: 157422 - DNA, 15 bp, Homo sapiens
actgagcatgggtgc

SEQ ID NO: 157423 - DNA, 15 bp, Homo sapiens
gactgagcatgggtg

SEQ ID NO: 157424 - DNA, 15 bp, Homo sapiens
tgactgagcatgggt

SEQ ID NO: 157425 - DNA, 15 bp, Homo sapiens
ttgactgagcatggg

SEQ ID NO: 157426 - DNA, 15 bp, Homo sapiens
attgactgagcatgg

SEQ ID NO: 157427 - DNA, 15 bp, Homo sapiens
tattgactgagcatg

SEQ ID NO: 157428 - DNA, 15 bp, Homo sapiens
atattgactgagcat

SEQ ID NO: 157429 - DNA, 15 bp, Homo sapiens
aatattgactgagca

SEQ ID NO: 157430 - DNA, 15 bp, Homo sapiens
aaatattgactgagc

SEQ ID NO: 157431 - DNA, 15 bp, Homo sapiens
caaatattgactgag

SEQ ID NO: 157432 - DNA, 15 bp, Homo sapiens
gcaaatattgactga

SEQ ID NO: 157433 - DNA, 15 bp, Homo sapiens
agcaaatattgactg

SEQ ID NO: 157434 - DNA, 15 bp, Homo sapiens
cagcaaatattgact

SEQ ID NO: 157435 - DNA, 15 bp, Homo sapiens
ccagcaaatattgac

SEQ ID NO: 157436 - DNA, 15 bp, Homo sapiens
cccagcaaatattga

SEQ ID NO: 157437 - DNA, 15 bp, Homo sapiens
gcccagcaaatattg

SEQ ID NO: 157438 - DNA, 15 bp, Homo sapiens
cgcccagcaaatatt

SEQ ID NO: 157439 - DNA, 15 bp, Homo sapiens
tcgcccagcaaatat

SEQ ID NO: 157440 - DNA, 15 bp, Homo sapiens
ttcgcccagcaaata

SEQ ID NO: 157441 - DNA, 15 bp, Homo sapiens
gttcgcccagcaaat

SEQ ID NO: 157442 - DNA, 15 bp, Homo sapiens
cgttcgcccagcaaa

SEQ ID NO: 157443 - DNA, 15 bp, Homo sapiens
tcgttcgcccagcaa

SEQ ID NO: 157444 - DNA, 15 bp, Homo sapiens
ttcgttcgcccagca

SEQ ID NO: 157445 - DNA, 15 bp, Homo sapiens
attcgttcgcccagc

SEQ ID NO: 157446 - DNA, 15 bp, Homo sapiens
cattcgttcgcccag

SEQ ID NO: 157447 - DNA, 15 bp, Homo sapiens
tcattcgttcgccca

SEQ ID NO: 157448 - DNA, 15 bp, Homo sapiens
ctcattcgttcgccc

SEQ ID NO: 157449 - DNA, 15 bp, Homo sapiens
tctcattcgttcgcc

SEQ ID NO: 157450 - DNA, 15 bp, Homo sapiens
gtctcattcgttcgc

SEQ ID NO: 157451 - DNA, 15 bp, Homo sapiens
agtctcattcgttcg

SEQ ID NO: 157452 - DNA, 15 bp, Homo sapiens
cagtctcattcgttc

SEQ ID NO: 157453 - DNA, 15 bp, Homo sapiens
tcagtctcattcgtt

SEQ ID NO: 157454 - DNA, 15 bp, Homo sapiens
ttcagtctcattcgt

SEQ ID NO: 157455 - DNA, 15 bp, Homo sapiens
gttcagtctcattcg

SEQ ID NO: 157456 - DNA, 15 bp, Homo sapiens
agttcagtctcattc

SEQ ID NO: 157457 - DNA, 15 bp, Homo sapiens
gagttcagtctcatt

SEQ ID NO: 157458 - DNA, 15 bp, Homo sapiens
ggagttcagtctcat

SEQ ID NO: 157459 - DNA, 15 bp, Homo sapiens
gggagttcagtctca

SEQ ID NO: 157460 - DNA, 15 bp, Homo sapiens
tgggagttcagtctc

SEQ ID NO: 157461 - DNA, 15 bp, Homo sapiens
ctgggagttcagtct

SEQ ID NO: 157462 - DNA, 15 bp, Homo sapiens
cctgggagttcagtc

SEQ ID NO: 157463 - DNA, 15 bp, Homo sapiens
gcctgggagttcagt

SEQ ID NO: 157464 - DNA, 15 bp, Homo sapiens
tgcctgggagttcag

SEQ ID NO: 157465 - DNA, 15 bp, Homo sapiens
atgcctgggagttca

SEQ ID NO: 157466 - DNA, 15 bp, Homo sapiens
aatgcctgggagttc

SEQ ID NO: 157467 - DNA, 15 bp, Homo sapiens
taatgcctgggagtt

SEQ ID NO: 157468 - DNA, 15 bp, Homo sapiens
ctaatgcctgggagt

SEQ ID NO: 157469 - DNA, 15 bp, Homo sapiens
actaatgcctgggag

SEQ ID NO: 157470 - DNA, 15 bp, Homo sapiens
cactaatgcctggga

SEQ ID NO: 157471 - DNA, 15 bp, Homo sapiens
ccactaatgcctggg

SEQ ID NO: 157472 - DNA, 15 bp, Homo sapiens
tccactaatgcctgg

SEQ ID NO: 157473 - DNA, 15 bp, Homo sapiens
ctccactaatgcctg

SEQ ID NO: 157474 - DNA, 15 bp, Homo sapiens
gctccactaatgcct

SEQ ID NO: 157475 - DNA, 15 bp, Homo sapiens
tgctccactaatgcc

SEQ ID NO: 157476 - DNA, 15 bp, Homo sapiens
atgctccactaatgc

SEQ ID NO: 157477 - DNA, 15 bp, Homo sapiens
gatgctccactaatg

SEQ ID NO: 157478 - DNA, 15 bp, Homo sapiens
agatgctccactaat

SEQ ID NO: 157479 - DNA, 15 bp, Homo sapiens
cagatgctccactaa

SEQ ID NO: 157480 - DNA, 15 bp, Homo sapiens
tcagatgctccacta

SEQ ID NO: 157481 - DNA, 15 bp, Homo sapiens
gtcagatgctccact

SEQ ID NO: 157482 - DNA, 15 bp, Homo sapiens
ggtcagatgctccac

SEQ ID NO: 157483 - DNA, 15 bp, Homo sapiens
aggtcagatgctcca

SEQ ID NO: 157484 - DNA, 15 bp, Homo sapiens
caggtcagatgctcc

SEQ ID NO: 157485 - DNA, 15 bp, Homo sapiens
tcaggtcagatgctc

SEQ ID NO: 157486 - DNA, 15 bp, Homo sapiens
gtcaggtcagatgct

SEQ ID NO: 157487 - DNA, 15 bp, Homo sapiens
ggtcaggtcagatgc

SEQ ID NO: 157488 - DNA, 15 bp, Homo sapiens
aggtcaggtcagatg

SEQ ID NO: 157489 - DNA, 15 bp, Homo sapiens
caggtcaggtcagat

SEQ ID NO: 157490 - DNA, 15 bp, Homo sapiens
tcaggtcaggtcaga

SEQ ID NO: 157491 - DNA, 15 bp, Homo sapiens
ctcaggtcaggtcag

SEQ ID NO: 157492 - DNA, 15 bp, Homo sapiens
tctcaggtcaggtca

SEQ ID NO: 157493 - DNA, 15 bp, Homo sapiens
ctctcaggtcaggtc

SEQ ID NO: 157494 - DNA, 15 bp, Homo sapiens
tctctcaggtcaggt

SEQ ID NO: 157495 - DNA, 15 bp, Homo sapiens
ttctctcaggtcagg

SEQ ID NO: 157496 - DNA, 15 bp, Homo sapiens
tttctctcaggtcag

SEQ ID NO: 157497 - DNA, 15 bp, Homo sapiens
gtttctctcaggtca

SEQ ID NO: 157498 - DNA, 15 bp, Homo sapiens
cgtttctctcaggtc

SEQ ID NO: 157499 - DNA, 15 bp, Homo sapiens
acgtttctctcaggt

SEQ ID NO: 157500 - DNA, 15 bp, Homo sapiens
cacgtttctctcagg

SEQ ID NO: 157501 - DNA, 15 bp, Homo sapiens
ccacgtttctctcag

SEQ ID NO: 157502 - DNA, 15 bp, Homo sapiens
tccacgtttctctca

SEQ ID NO: 157503 - DNA, 15 bp, Homo sapiens
ctccacgtttctctc

SEQ ID NO: 157504 - DNA, 15 bp, Homo sapiens
tctccacgtttctct

SEQ ID NO: 157505 - DNA, 15 bp, Homo sapiens
ttctccacgtttctc

SEQ ID NO: 157506 - DNA, 15 bp, Homo sapiens
cttctccacgtttct

SEQ ID NO: 157507 - DNA, 15 bp, Homo sapiens
gcttctccacgtttc

SEQ ID NO: 157508 - DNA, 15 bp, Homo sapiens
agcttctccacgttt

SEQ ID NO: 157509 - DNA, 15 bp, Homo sapiens
cagcttctccacgtt

SEQ ID NO: 157510 - DNA, 15 bp, Homo sapiens
ccagcttctccacgt

SEQ ID NO: 157511 - DNA, 15 bp, Homo sapiens
cccagcttctccacg

SEQ ID NO: 157512 - DNA, 15 bp, Homo sapiens
acccagcttctccac

SEQ ID NO: 157513 - DNA, 15 bp, Homo sapiens
gacccagcttctcca

SEQ ID NO: 157514 - DNA, 15 bp, Homo sapiens
ggacccagcttctcc

SEQ ID NO: 157515 - DNA, 15 bp, Homo sapiens
aggacccagcttctc

SEQ ID NO: 157516 - DNA, 15 bp, Homo sapiens
caggacccagcttct

SEQ ID NO: 157517 - DNA, 15 bp, Homo sapiens
ccaggacccagcttc

SEQ ID NO: 157518 - DNA, 15 bp, Homo sapiens
gccaggacccagctt

SEQ ID NO: 157519 - DNA, 15 bp, Homo sapiens
tgccaggacccagct

SEQ ID NO: 157520 - DNA, 15 bp, Homo sapiens
ctgccaggacccagc

SEQ ID NO: 157521 - DNA, 15 bp, Homo sapiens
tctgccaggacccag

SEQ ID NO: 157522 - DNA, 15 bp, Homo sapiens
ctctgccaggaccca

SEQ ID NO: 157523 - DNA, 15 bp, Homo sapiens
gctctgccaggaccc

SEQ ID NO: 157524 - DNA, 15 bp, Homo sapiens
ggctctgccaggacc

SEQ ID NO: 157525 - DNA, 15 bp, Homo sapiens
aggctctgccaggac

SEQ ID NO: 157526 - DNA, 15 bp, Homo sapiens
aaggctctgccagga

SEQ ID NO: 157527 - DNA, 15 bp, Homo sapiens
caaggctctgccagg

SEQ ID NO: 157528 - DNA, 15 bp, Homo sapiens
tcaaggctctgccag

SEQ ID NO: 157529 - DNA, 15 bp, Homo sapiens
atcaaggctctgcca

SEQ ID NO: 157530 - DNA, 15 bp, Homo sapiens
catcaaggctctgcc

SEQ ID NO: 157531 - DNA, 15 bp, Homo sapiens
ccatcaaggctctgc

SEQ ID NO: 157532 - DNA, 15 bp, Homo sapiens
cccatcaaggctctg

SEQ ID NO: 157533 - DNA, 15 bp, Homo sapiens
gcccatcaaggctct

SEQ ID NO: 157534 - DNA, 15 bp, Homo sapiens
tgcccatcaaggctc

SEQ ID NO: 157535 - DNA, 15 bp, Homo sapiens
ctgcccatcaaggct

SEQ ID NO: 157536 - DNA, 15 bp, Homo sapiens
actgcccatcaaggc

SEQ ID NO: 157537 - DNA, 15 bp, Homo sapiens
aactgcccatcaagg

SEQ ID NO: 157538 - DNA, 15 bp, Homo sapiens
caactgcccatcaag

SEQ ID NO: 157539 - DNA, 15 bp, Homo sapiens
ccaactgcccatcaa

SEQ ID NO: 157540 - DNA, 15 bp, Homo sapiens
cccaactgcccatca

SEQ ID NO: 157541 - DNA, 15 bp, Homo sapiens
gcccaactgcccatc

SEQ ID NO: 157542 - DNA, 15 bp, Homo sapiens
agcccaactgcccat

SEQ ID NO: 157543 - DNA, 15 bp, Homo sapiens
cagcccaactgccca

SEQ ID NO: 157544 - DNA, 15 bp, Homo sapiens
ccagcccaactgccc

SEQ ID NO: 157545 - DNA, 15 bp, Homo sapiens
tccagcccaactgcc

SEQ ID NO: 157546 - DNA, 15 bp, Homo sapiens
atccagcccaactgc

SEQ ID NO: 157547 - DNA, 15 bp, Homo sapiens
catccagcccaactg

SEQ ID NO: 157548 - DNA, 15 bp, Homo sapiens
ccatccagcccaact

SEQ ID NO: 157549 - DNA, 15 bp, Homo sapiens
cccatccagcccaac

SEQ ID NO: 157550 - DNA, 15 bp, Homo sapiens
gcccatccagcccaa

SEQ ID NO: 157551 - DNA, 15 bp, Homo sapiens
tgcccatccagccca

SEQ ID NO: 157552 - DNA, 15 bp, Homo sapiens
gtgcccatccagccc

SEQ ID NO: 157553 - DNA, 15 bp, Homo sapiens
agtgcccatccagcc

SEQ ID NO: 157554 - DNA, 15 bp, Homo sapiens
tagtgcccatccagc

SEQ ID NO: 157555 - DNA, 15 bp, Homo sapiens
ttagtgcccatccag

SEQ ID NO: 157556 - DNA, 15 bp, Homo sapiens
tttagtgcccatcca

SEQ ID NO: 157557 - DNA, 15 bp, Homo sapiens
ctttagtgcccatcc

SEQ ID NO: 157558 - DNA, 15 bp, Homo sapiens
gctttagtgcccatc

SEQ ID NO: 157559 - DNA, 15 bp, Homo sapiens
ggctttagtgcccat

SEQ ID NO: 157560 - DNA, 15 bp, Homo sapiens
aggctttagtgccca

SEQ ID NO: 157561 - DNA, 15 bp, Homo sapiens
gaggctttagtgccc

SEQ ID NO: 157562 - DNA, 15 bp, Homo sapiens
agaggctttagtgcc

SEQ ID NO: 157563 - DNA, 15 bp, Homo sapiens
aagaggctttagtgc

SEQ ID NO: 157564 - DNA, 15 bp, Homo sapiens
aaagaggctttagtg

SEQ ID NO: 157565 - DNA, 15 bp, Homo sapiens
gaaagaggctttagt

SEQ ID NO: 157566 - DNA, 15 bp, Homo sapiens
tgaaagaggctttag

SEQ ID NO: 157567 - DNA, 15 bp, Homo sapiens
ctgaaagaggcttta

SEQ ID NO: 157568 - DNA, 15 bp, Homo sapiens
gctgaaagaggcttt

SEQ ID NO: 157569 - DNA, 15 bp, Homo sapiens
tgctgaaagaggctt

SEQ ID NO: 157570 - DNA, 15 bp, Homo sapiens
atgctgaaagaggct

SEQ ID NO: 157571 - DNA, 15 bp, Homo sapiens
aatgctgaaagaggc

SEQ ID NO: 157572 - DNA, 15 bp, Homo sapiens
gaatgctgaaagagg

SEQ ID NO: 157573 - DNA, 15 bp, Homo sapiens
tgaatgctgaaagag

SEQ ID NO: 157574 - DNA, 15 bp, Homo sapiens
ctgaatgctgaaaga

SEQ ID NO: 157575 - DNA, 15 bp, Homo sapiens
cctgaatgctgaaag

SEQ ID NO: 157576 - DNA, 15 bp, Homo sapiens
acctgaatgctgaaa

SEQ ID NO: 157577 - DNA, 15 bp, Homo sapiens
aacctgaatgctgaa

SEQ ID NO: 157578 - DNA, 15 bp, Homo sapiens
gaacctgaatgctga

SEQ ID NO: 157579 - DNA, 15 bp, Homo sapiens
agaacctgaatgctg

SEQ ID NO: 157580 - DNA, 15 bp, Homo sapiens
cagaacctgaatgct

SEQ ID NO: 157581 - DNA, 15 bp, Homo sapiens
acagaacctgaatgc

SEQ ID NO: 157582 - DNA, 15 bp, Homo sapiens
cacagaacctgaatg

SEQ ID NO: 157583 - DNA, 15 bp, Homo sapiens
tcacagaacctgaat

SEQ ID NO: 157584 - DNA, 15 bp, Homo sapiens
atcacagaacctgaa

SEQ ID NO: 157585 - DNA, 15 bp, Homo sapiens
aatcacagaacctga

SEQ ID NO: 157586 - DNA, 15 bp, Homo sapiens
aaatcacagaacctg

SEQ ID NO: 157587 - DNA, 15 bp, Homo sapiens
aaaatcacagaacct

SEQ ID NO: 157588 - DNA, 15 bp, Homo sapiens
caaaatcacagaacc

SEQ ID NO: 157589 - DNA, 15 bp, Homo sapiens
acaaaatcacagaac

SEQ ID NO: 157590 - DNA, 15 bp, Homo sapiens
tacaaaatcacagaa

SEQ ID NO: 157591 - DNA, 15 bp, Homo sapiens
ttacaaaatcacaga

SEQ ID NO: 157592 - DNA, 15 bp, Homo sapiens
gttacaaaatcacag

SEQ ID NO: 157593 - DNA, 15 bp, Homo sapiens
ggttacaaaatcaca

SEQ ID NO: 157594 - DNA, 15 bp, Homo sapiens
aggttacaaaatcac

SEQ ID NO: 157595 - DNA, 15 bp, Homo sapiens
caggttacaaaatca

SEQ ID NO: 157596 - DNA, 15 bp, Homo sapiens
tcaggttacaaaatc

SEQ ID NO: 157597 - DNA, 15 bp, Homo sapiens
atcaggttacaaaat

SEQ ID NO: 157598 - DNA, 15 bp, Homo sapiens
catcaggttacaaaa

SEQ ID NO: 157599 - DNA, 15 bp, Homo sapiens
ccatcaggttacaaa

SEQ ID NO: 157600 - DNA, 15 bp, Homo sapiens
accatcaggttacaa

SEQ ID NO: 157601 - DNA, 15 bp, Homo sapiens
caccatcaggttaca

SEQ ID NO: 157602 - DNA, 15 bp, Homo sapiens
ccaccatcaggttac

SEQ ID NO: 157603 - DNA, 15 bp, Homo sapiens
accaccatcaggtta

SEQ ID NO: 157604 - DNA, 15 bp, Homo sapiens
taccaccatcaggtt

SEQ ID NO: 157605 - DNA, 15 bp, Homo sapiens
ataccaccatcaggt

SEQ ID NO: 157606 - DNA, 15 bp, Homo sapiens
gataccaccatcagg

SEQ ID NO: 157607 - DNA, 15 bp, Homo sapiens
agataccaccatcag

SEQ ID NO: 157608 - DNA, 15 bp, Homo sapiens
cagataccaccatca

SEQ ID NO: 157609 - DNA, 15 bp, Homo sapiens
tcagataccaccatc

SEQ ID NO: 157610 - DNA, 15 bp, Homo sapiens
ttcagataccaccat

SEQ ID NO: 157611 - DNA, 15 bp, Homo sapiens
gttcagataccacca

SEQ ID NO: 157612 - DNA, 15 bp, Homo sapiens
agttcagataccacc

SEQ ID NO: 157613 - DNA, 15 bp, Homo sapiens
gagttcagataccac

SEQ ID NO: 157614 - DNA, 15 bp, Homo sapiens
tgagttcagatacca

SEQ ID NO: 157615 - DNA, 15 bp, Homo sapiens
ttgagttcagatacc

SEQ ID NO: 157616 - DNA, 15 bp, Homo sapiens
cttgagttcagatac

SEQ ID NO: 157617 - DNA, 15 bp, Homo sapiens
gcttgagttcagata

SEQ ID NO: 157618 - DNA, 15 bp, Homo sapiens
agcttgagttcagat

SEQ ID NO: 157619 - DNA, 15 bp, Homo sapiens
tagcttgagttcaga

SEQ ID NO: 157620 - DNA, 15 bp, Homo sapiens
ttagcttgagttcag

SEQ ID NO: 157621 - DNA, 15 bp, Homo sapiens
attagcttgagttca

SEQ ID NO: 157622 - DNA, 15 bp, Homo sapiens
aattagcttgagttc

SEQ ID NO: 157623 - DNA, 15 bp, Homo sapiens
taattagcttgagtt

SEQ ID NO: 157624 - DNA, 15 bp, Homo sapiens
ttaattagcttgagt

SEQ ID NO: 157625 - DNA, 15 bp, Homo sapiens
tttaattagcttgag

SEQ ID NO: 157626 - DNA, 15 bp, Homo sapiens
atttaattagcttga

SEQ ID NO: 157627 - DNA, 15 bp, Homo sapiens
aatttaattagcttg

SEQ ID NO: 157628 - DNA, 15 bp, Homo sapiens
gaatttaattagctt

SEQ ID NO: 157629 - DNA, 15 bp, Homo sapiens
ggaatttaattagct

SEQ ID NO: 157630 - DNA, 15 bp, Homo sapiens
tggaatttaattagc

SEQ ID NO: 157631 - DNA, 15 bp, Homo sapiens
gtggaatttaattag

SEQ ID NO: 157632 - DNA, 15 bp, Homo sapiens
tgtggaatttaatta

SEQ ID NO: 157633 - DNA, 15 bp, Homo sapiens
ctgtggaatttaatt

SEQ ID NO: 157634 - DNA, 15 bp, Homo sapiens
cctgtggaatttaat

SEQ ID NO: 157635 - DNA, 15 bp, Homo sapiens
acctgtggaatttaa

SEQ ID NO: 157636 - DNA, 15 bp, Homo sapiens
cacctgtggaattta

SEQ ID NO: 157637 - DNA, 15 bp, Homo sapiens
acacctgtggaattt

SEQ ID NO: 157638 - DNA, 15 bp, Homo sapiens
aacacctgtggaatt

SEQ ID NO: 157639 - DNA, 15 bp, Homo sapiens
aaacacctgtggaat

SEQ ID NO: 157640 - DNA, 15 bp, Homo sapiens
caaacacctgtggaa

SEQ ID NO: 157641 - DNA, 15 bp, Homo sapiens
gcaaacacctgtgga

SEQ ID NO: 157642 - DNA, 15 bp, Homo sapiens
agcaaacacctgtgg

SEQ ID NO: 157643 - DNA, 15 bp, Homo sapiens
cagcaaacacctgtg

SEQ ID NO: 157644 - DNA, 15 bp, Homo sapiens
tcagcaaacacctgt

SEQ ID NO: 157645 - DNA, 15 bp, Homo sapiens
ctcagcaaacacctg

SEQ ID NO: 157646 - DNA, 15 bp, Homo sapiens
cctcagcaaacacct

SEQ ID NO: 157647 - DNA, 15 bp, Homo sapiens
tcctcagcaaacacc

SEQ ID NO: 157648 - DNA, 15 bp, Homo sapiens
ttcctcagcaaacac

SEQ ID NO: 157649 - DNA, 15 bp, Homo sapiens
cttcctcagcaaaca

SEQ ID NO: 157650 - DNA, 15 bp, Homo sapiens
acttcctcagcaaac

SEQ ID NO: 157651 - DNA, 15 bp, Homo sapiens
tacttcctcagcaaa

SEQ ID NO: 157652 - DNA, 15 bp, Homo sapiens
gtacttcctcagcaa

SEQ ID NO: 157653 - DNA, 15 bp, Homo sapiens
agtacttcctcagca

SEQ ID NO: 157654 - DNA, 15 bp, Homo sapiens
aagtacttcctcagc

SEQ ID NO: 157655 - DNA, 15 bp, Homo sapiens
caagtacttcctcag

SEQ ID NO: 157656 - DNA, 15 bp, Homo sapiens
gcaagtacttcctca

SEQ ID NO: 157657 - DNA, 15 bp, Homo sapiens
agcaagtacttcctc

SEQ ID NO: 157658 - DNA, 15 bp, Homo sapiens
cagcaagtacttcct

SEQ ID NO: 157659 - DNA, 15 bp, Homo sapiens
acagcaagtacttcc

SEQ ID NO: 157660 - DNA, 15 bp, Homo sapiens
cacagcaagtacttc

SEQ ID NO: 157661 - DNA, 15 bp, Homo sapiens
ccacagcaagtactt

SEQ ID NO: 157662 - DNA, 15 bp, Homo sapiens
gccacagcaagtact

SEQ ID NO: 157663 - DNA, 15 bp, Homo sapiens
tgccacagcaagtac

SEQ ID NO: 157664 - DNA, 15 bp, Homo sapiens
atgccacagcaagta

SEQ ID NO: 157665 - DNA, 15 bp, Homo sapiens
gatgccacagcaagt

SEQ ID NO: 157666 - DNA, 15 bp, Homo sapiens
ggatgccacagcaag

SEQ ID NO: 157667 - DNA, 15 bp, Homo sapiens
aggatgccacagcaa

SEQ ID NO: 157668 - DNA, 15 bp, Homo sapiens
caggatgccacagca

SEQ ID NO: 157669 - DNA, 15 bp, Homo sapiens
ccaggatgccacagc

SEQ ID NO: 157670 - DNA, 15 bp, Homo sapiens
cccaggatgccacag

SEQ ID NO: 157671 - DNA, 15 bp, Homo sapiens
gcccaggatgccaca

SEQ ID NO: 157672 - DNA, 15 bp, Homo sapiens
agcccaggatgccac

SEQ ID NO: 157673 - DNA, 15 bp, Homo sapiens
cagcccaggatgcca

SEQ ID NO: 157674 - DNA, 15 bp, Homo sapiens
ccagcccaggatgcc

SEQ ID NO: 157675 - DNA, 15 bp, Homo sapiens
cccagcccaggatgc

SEQ ID NO: 157676 - DNA, 15 bp, Homo sapiens
gcccagcccaggatg

SEQ ID NO: 157677 - DNA, 15 bp, Homo sapiens
tgcccagcccaggat

SEQ ID NO: 157678 - DNA, 15 bp, Homo sapiens
ttgcccagcccagga

SEQ ID NO: 157679 - DNA, 15 bp, Homo sapiens
cttgcccagcccagg

SEQ ID NO: 157680 - DNA, 15 bp, Homo sapiens
ccttgcccagcccag

SEQ ID NO: 157681 - DNA, 15 bp, Homo sapiens
accttgcccagccca

SEQ ID NO: 157682 - DNA, 15 bp, Homo sapiens
caccttgcccagccc

SEQ ID NO: 157683 - DNA, 15 bp, Homo sapiens
ccaccttgcccagcc

SEQ ID NO: 157684 - DNA, 15 bp, Homo sapiens
cccaccttgcccagc

SEQ ID NO: 157685 - DNA, 15 bp, Homo sapiens
ccccaccttgcccag

SEQ ID NO: 157686 - DNA, 15 bp, Homo sapiens
cccccaccttgccca

SEQ ID NO: 157687 - DNA, 15 bp, Homo sapiens
tcccccaccttgccc

SEQ ID NO: 157688 - DNA, 15 bp, Homo sapiens
atcccccaccttgcc

SEQ ID NO: 157689 - DNA, 15 bp, Homo sapiens
aatcccccaccttgc

SEQ ID NO: 157690 - DNA, 15 bp, Homo sapiens
caatcccccaccttg

SEQ ID NO: 157691 - DNA, 15 bp, Homo sapiens
tcaatcccccacctt

SEQ ID NO: 157692 - DNA, 15 bp, Homo sapiens
atcaatcccccacct

SEQ ID NO: 157693 - DNA, 15 bp, Homo sapiens
catcaatcccccacc

SEQ ID NO: 157694 - DNA, 15 bp, Homo sapiens
ccatcaatcccccac

SEQ ID NO: 157695 - DNA, 15 bp, Homo sapiens
cccatcaatccccca

SEQ ID NO: 157696 - DNA, 15 bp, Homo sapiens
gcccatcaatccccc

SEQ ID NO: 157697 - DNA, 15 bp, Homo sapiens
tgcccatcaatcccc

SEQ ID NO: 157698 - DNA, 15 bp, Homo sapiens
atgcccatcaatccc

SEQ ID NO: 157699 - DNA, 15 bp, Homo sapiens
catgcccatcaatcc

SEQ ID NO: 157700 - DNA, 15 bp, Homo sapiens
acatgcccatcaatc

SEQ ID NO: 157701 - DNA, 15 bp, Homo sapiens
cacatgcccatcaat

SEQ ID NO: 157702 - DNA, 15 bp, Homo sapiens
gcacatgcccatcaa

SEQ ID NO: 157703 - DNA, 15 bp, Homo sapiens
cgcacatgcccatca

SEQ ID NO: 157704 - DNA, 15 bp, Homo sapiens
tcgcacatgcccatc

SEQ ID NO: 157705 - DNA, 15 bp, Homo sapiens
atcgcacatgcccat

SEQ ID NO: 157706 - DNA, 15 bp, Homo sapiens
gatcgcacatgccca

SEQ ID NO: 157707 - DNA, 15 bp, Homo sapiens
ggatcgcacatgccc

SEQ ID NO: 157708 - DNA, 15 bp, Homo sapiens
tggatcgcacatgcc

SEQ ID NO: 157709 - DNA, 15 bp, Homo sapiens
ctggatcgcacatgc

SEQ ID NO: 157710 - DNA, 15 bp, Homo sapiens
cctggatcgcacatg

SEQ ID NO: 157711 - DNA, 15 bp, Homo sapiens
gcctggatcgcacat

SEQ ID NO: 157712 - DNA, 15 bp, Homo sapiens
agcctggatcgcaca

SEQ ID NO: 157713 - DNA, 15 bp, Homo sapiens
gagcctggatcgcac

SEQ ID NO: 157714 - DNA, 15 bp, Homo sapiens
agagcctggatcgca

SEQ ID NO: 157715 - DNA, 15 bp, Homo sapiens
cagagcctggatcgc

SEQ ID NO: 157716 - DNA, 15 bp, Homo sapiens
tcagagcctggatcg

SEQ ID NO: 157717 - DNA, 15 bp, Homo sapiens
ttcagagcctggatc

SEQ ID NO: 157718 - DNA, 15 bp, Homo sapiens
tttcagagcctggat

SEQ ID NO: 157719 - DNA, 15 bp, Homo sapiens
atttcagagcctgga

SEQ ID NO: 157720 - DNA, 15 bp, Homo sapiens
catttcagagcctgg

SEQ ID NO: 157721 - DNA, 15 bp, Homo sapiens
gcatttcagagcctg

SEQ ID NO: 157722 - DNA, 15 bp, Homo sapiens
tgcatttcagagcct

SEQ ID NO: 157723 - DNA, 15 bp, Homo sapiens
ttgcatttcagagcc

SEQ ID NO: 157724 - DNA, 15 bp, Homo sapiens
gttgcatttcagagc

SEQ ID NO: 157725 - DNA, 15 bp, Homo sapiens
ggttgcatttcagag

SEQ ID NO: 157726 - DNA, 15 bp, Homo sapiens
tggttgcatttcaga

SEQ ID NO: 157727 - DNA, 15 bp, Homo sapiens
gtggttgcatttcag

SEQ ID NO: 157728 - DNA, 15 bp, Homo sapiens
tgtggttgcatttca

SEQ ID NO: 157729 - DNA, 15 bp, Homo sapiens
atgtggttgcatttc

SEQ ID NO: 157730 - DNA, 15 bp, Homo sapiens
aatgtggttgcattt

SEQ ID NO: 157731 - DNA, 15 bp, Homo sapiens
gaatgtggttgcatt

SEQ ID NO: 157732 - DNA, 15 bp, Homo sapiens
ggaatgtggttgcat

SEQ ID NO: 157733 - DNA, 15 bp, Homo sapiens
gggaatgtggttgca

SEQ ID NO: 157734 - DNA, 15 bp, Homo sapiens
tgggaatgtggttgc

SEQ ID NO: 157735 - DNA, 15 bp, Homo sapiens
ctgggaatgtggttg

SEQ ID NO: 157736 - DNA, 15 bp, Homo sapiens
cctgggaatgtggtt

SEQ ID NO: 157737 - DNA, 15 bp, Homo sapiens
ccctgggaatgtggt

SEQ ID NO: 157738 - DNA, 15 bp, Homo sapiens
tccctgggaatgtgg

SEQ ID NO: 157739 - DNA, 15 bp, Homo sapiens
ttccctgggaatgtg

SEQ ID NO: 157740 - DNA, 15 bp, Homo sapiens
cttccctgggaatgt

SEQ ID NO: 157741 - DNA, 15 bp, Homo sapiens
gcttccctgggaatg

SEQ ID NO: 157742 - DNA, 15 bp, Homo sapiens
ggcttccctgggaat

SEQ ID NO: 157743 - DNA, 15 bp, Homo sapiens
tggcttccctgggaa

SEQ ID NO: 157744 - DNA, 15 bp, Homo sapiens
ctggcttccctggga

SEQ ID NO: 157745 - DNA, 15 bp, Homo sapiens
cctggcttccctggg

SEQ ID NO: 157746 - DNA, 15 bp, Homo sapiens
tcctggcttccctgg

SEQ ID NO: 157747 - DNA, 15 bp, Homo sapiens
ctcctggcttccctg

SEQ ID NO: 157748 - DNA, 15 bp, Homo sapiens
gctcctggcttccct

SEQ ID NO: 157749 - DNA, 15 bp, Homo sapiens
tgctcctggcttccc

SEQ ID NO: 157750 - DNA, 15 bp, Homo sapiens
gtgctcctggcttcc

SEQ ID NO: 157751 - DNA, 15 bp, Homo sapiens
tgtgctcctggcttc

SEQ ID NO: 157752 - DNA, 15 bp, Homo sapiens
ctgtgctcctggctt

SEQ ID NO: 157753 - DNA, 15 bp, Homo sapiens
cctgtgctcctggct

SEQ ID NO: 157754 - DNA, 15 bp, Homo sapiens
ccctgtgctcctggc

SEQ ID NO: 157755 - DNA, 15 bp, Homo sapiens
tccctgtgctcctgg

SEQ ID NO: 157756 - DNA, 15 bp, Homo sapiens
atccctgtgctcctg

SEQ ID NO: 157757 - DNA, 15 bp, Homo sapiens
aatccctgtgctcct

SEQ ID NO: 157758 - DNA, 15 bp, Homo sapiens
caatccctgtgctcc

SEQ ID NO: 157759 - DNA, 15 bp, Homo sapiens
gcaatccctgtgctc

SEQ ID NO: 157760 - DNA, 15 bp, Homo sapiens
tgcaatccctgtgct

SEQ ID NO: 157761 - DNA, 15 bp, Homo sapiens
atgcaatccctgtgc

SEQ ID NO: 157762 - DNA, 15 bp, Homo sapiens
catgcaatccctgtg

SEQ ID NO: 157763 - DNA, 15 bp, Homo sapiens
acatgcaatccctgt

SEQ ID NO: 157764 - DNA, 15 bp, Homo sapiens
tacatgcaatccctg

SEQ ID NO: 157765 - DNA, 15 bp, Homo sapiens
ttacatgcaatccct

SEQ ID NO: 157766 - DNA, 15 bp, Homo sapiens
tttacatgcaatccc

SEQ ID NO: 157767 - DNA, 15 bp, Homo sapiens
ttttacatgcaatcc

SEQ ID NO: 157768 - DNA, 15 bp, Homo sapiens
gttttacatgcaatc

SEQ ID NO: 157769 - DNA, 15 bp, Homo sapiens
tgttttacatgcaat

SEQ ID NO: 157770 - DNA, 15 bp, Homo sapiens
gtgttttacatgcaa

SEQ ID NO: 157771 - DNA, 15 bp, Homo sapiens
tgtgttttacatgca

SEQ ID NO: 157772 - DNA, 15 bp, Homo sapiens
ctgtgttttacatgc

SEQ ID NO: 157773 - DNA, 15 bp, Homo sapiens
cctgtgttttacatg

SEQ ID NO: 157774 - DNA, 15 bp, Homo sapiens
acctgtgttttacat

SEQ ID NO: 157775 - DNA, 15 bp, Homo sapiens
cacctgtgttttaca

SEQ ID NO: 157776 - DNA, 15 bp, Homo sapiens
acacctgtgttttac

SEQ ID NO: 157777 - DNA, 15 bp, Homo sapiens
gacacctgtgtttta

SEQ ID NO: 157778 - DNA, 15 bp, Homo sapiens
ggacacctgtgtttt

SEQ ID NO: 157779 - DNA, 15 bp, Homo sapiens
tggacacctgtgttt

SEQ ID NO: 157780 - DNA, 15 bp, Homo sapiens
ctggacacctgtgtt

SEQ ID NO: 157781 - DNA, 15 bp, Homo sapiens
actggacacctgtgt

SEQ ID NO: 157782 - DNA, 15 bp, Homo sapiens
aactggacacctgtg

SEQ ID NO: 157783 - DNA, 15 bp, Homo sapiens
taactggacacctgt

SEQ ID NO: 157784 - DNA, 15 bp, Homo sapiens
ctaactggacacctg

SEQ ID NO: 157785 - DNA, 15 bp, Homo sapiens
actaactggacacct

SEQ ID NO: 157786 - DNA, 15 bp, Homo sapiens
cactaactggacacc

SEQ ID NO: 157787 - DNA, 15 bp, Homo sapiens
ccactaactggacac

SEQ ID NO: 157788 - DNA, 15 bp, Homo sapiens
accactaactggaca

SEQ ID NO: 157789 - DNA, 15 bp, Homo sapiens
aaccactaactggac

SEQ ID NO: 157790 - DNA, 15 bp, Homo sapiens
aaaccactaactgga

SEQ ID NO: 157791 - DNA, 15 bp, Homo sapiens
taaaccactaactgg

SEQ ID NO: 157792 - DNA, 15 bp, Homo sapiens
ctaaaccactaactg

SEQ ID NO: 157793 - DNA, 15 bp, Homo sapiens
tctaaaccactaact

SEQ ID NO: 157794 - DNA, 15 bp, Homo sapiens
ttctaaaccactaac

SEQ ID NO: 157795 - DNA, 15 bp, Homo sapiens
attctaaaccactaa

SEQ ID NO: 157796 - DNA, 15 bp, Homo sapiens
gattctaaaccacta

SEQ ID NO: 157797 - DNA, 15 bp, Homo sapiens
agattctaaaccact

SEQ ID NO: 157798 - DNA, 15 bp, Homo sapiens
tagattctaaaccac

SEQ ID NO: 157799 - DNA, 15 bp, Homo sapiens
ctagattctaaacca

SEQ ID NO: 157800 - DNA, 15 bp, Homo sapiens
tctagattctaaacc

SEQ ID NO: 157801 - DNA, 15 bp, Homo sapiens
gtctagattctaaac

SEQ ID NO: 157802 - DNA, 15 bp, Homo sapiens
agtctagattctaaa

SEQ ID NO: 157803 - DNA, 15 bp, Homo sapiens
aagtctagattctaa

SEQ ID NO: 157804 - DNA, 15 bp, Homo sapiens
aaagtctagattcta

SEQ ID NO: 157805 - DNA, 15 bp, Homo sapiens
caaagtctagattct

SEQ ID NO: 157806 - DNA, 15 bp, Homo sapiens
ccaaagtctagattc

SEQ ID NO: 157807 - DNA, 15 bp, Homo sapiens
tccaaagtctagatt

SEQ ID NO: 157808 - DNA, 15 bp, Homo sapiens
atccaaagtctagat

SEQ ID NO: 157809 - DNA, 15 bp, Homo sapiens
aatccaaagtctaga

SEQ ID NO: 157810 - DNA, 15 bp, Homo sapiens
taatccaaagtctag

SEQ ID NO: 157811 - DNA, 15 bp, Homo sapiens
ctaatccaaagtcta

SEQ ID NO: 157812 - DNA, 15 bp, Homo sapiens
actaatccaaagtct

SEQ ID NO: 157813 - DNA, 15 bp, Homo sapiens
cactaatccaaagtc

SEQ ID NO: 157814 - DNA, 15 bp, Homo sapiens
ccactaatccaaagt

SEQ ID NO: 157815 - DNA, 15 bp, Homo sapiens
gccactaatccaaag

SEQ ID NO: 157816 - DNA, 15 bp, Homo sapiens
agccactaatccaaa

SEQ ID NO: 157817 - DNA, 15 bp, Homo sapiens
gagccactaatccaa

SEQ ID NO: 157818 - DNA, 15 bp, Homo sapiens
ggagccactaatcca

SEQ ID NO: 157819 - DNA, 15 bp, Homo sapiens
gggagccactaatcc

SEQ ID NO: 157820 - DNA, 15 bp, Homo sapiens
tgggagccactaatc

SEQ ID NO: 157821 - DNA, 15 bp, Homo sapiens
ttgggagccactaat

SEQ ID NO: 157822 - DNA, 15 bp, Homo sapiens
tttgggagccactaa

SEQ ID NO: 157823 - DNA, 15 bp, Homo sapiens
gtttgggagccacta

SEQ ID NO: 157824 - DNA, 15 bp, Homo sapiens
ggtttgggagccact

SEQ ID NO: 157825 - DNA, 15 bp, Homo sapiens
tggtttgggagccac

SEQ ID NO: 157826 - DNA, 15 bp, Homo sapiens
gtggtttgggagcca

SEQ ID NO: 157827 - DNA, 15 bp, Homo sapiens
tgtggtttgggagcc

SEQ ID NO: 157828 - DNA, 15 bp, Homo sapiens
ctgtggtttgggagc

SEQ ID NO: 157829 - DNA, 15 bp, Homo sapiens
gctgtggtttgggag

SEQ ID NO: 157830 - DNA, 15 bp, Homo sapiens
ggctgtggtttggga

SEQ ID NO: 157831 - DNA, 15 bp, Homo sapiens
aggctgtggtttggg

SEQ ID NO: 157832 - DNA, 15 bp, Homo sapiens
caggctgtggtttgg

SEQ ID NO: 157833 - DNA, 15 bp, Homo sapiens
gcaggctgtggtttg

SEQ ID NO: 157834 - DNA, 15 bp, Homo sapiens
agcaggctgtggttt

SEQ ID NO: 157835 - DNA, 15 bp, Homo sapiens
aagcaggctgtggtt

SEQ ID NO: 157836 - DNA, 15 bp, Homo sapiens
aaagcaggctgtggt

SEQ ID NO: 157837 - DNA, 15 bp, Homo sapiens
taaagcaggctgtgg

SEQ ID NO: 157838 - DNA, 15 bp, Homo sapiens
ctaaagcaggctgtg

SEQ ID NO: 157839 - DNA, 15 bp, Homo sapiens
tctaaagcaggctgt

SEQ ID NO: 157840 - DNA, 15 bp, Homo sapiens
ttctaaagcaggctg

SEQ ID NO: 157841 - DNA, 15 bp, Homo sapiens
attctaaagcaggct

SEQ ID NO: 157842 - DNA, 15 bp, Homo sapiens
gattctaaagcaggc

SEQ ID NO: 157843 - DNA, 15 bp, Homo sapiens
tgattctaaagcagg

SEQ ID NO: 157844 - DNA, 15 bp, Homo sapiens
gtgattctaaagcag

SEQ ID NO: 157845 - DNA, 15 bp, Homo sapiens
agtgattctaaagca

SEQ ID NO: 157846 - DNA, 15 bp, Homo sapiens
tagtgattctaaagc

SEQ ID NO: 157847 - DNA, 15 bp, Homo sapiens
ctagtgattctaaag

SEQ ID NO: 157848 - DNA, 15 bp, Homo sapiens
cctagtgattctaaa

SEQ ID NO: 157849 - DNA, 15 bp, Homo sapiens
tcctagtgattctaa

SEQ ID NO: 157850 - DNA, 15 bp, Homo sapiens
ctcctagtgattcta

SEQ ID NO: 157851 - DNA, 15 bp, Homo sapiens
cctcctagtgattct

SEQ ID NO: 157852 - DNA, 15 bp, Homo sapiens
tcctcctagtgattc

SEQ ID NO: 157853 - DNA, 15 bp, Homo sapiens
gtcctcctagtgatt

SEQ ID NO: 157854 - DNA, 15 bp, Homo sapiens
tgtcctcctagtgat

SEQ ID NO: 157855 - DNA, 15 bp, Homo sapiens
atgtcctcctagtga

SEQ ID NO: 157856 - DNA, 15 bp, Homo sapiens
aatgtcctcctagtg

SEQ ID NO: 157857 - DNA, 15 bp, Homo sapiens
taatgtcctcctagt

SEQ ID NO: 157858 - DNA, 15 bp, Homo sapiens
ataatgtcctcctag

SEQ ID NO: 157859 - DNA, 15 bp, Homo sapiens
aataatgtcctccta

SEQ ID NO: 157860 - DNA, 15 bp, Homo sapiens
taataatgtcctcct

SEQ ID NO: 157861 - DNA, 15 bp, Homo sapiens
ttaataatgtcctcc

SEQ ID NO: 157862 - DNA, 15 bp, Homo sapiens
tttaataatgtcctc

SEQ ID NO: 157863 - DNA, 15 bp, Homo sapiens
ttttaataatgtcct

SEQ ID NO: 157864 - DNA, 15 bp, Homo sapiens
gttttaataatgtcc

SEQ ID NO: 157865 - DNA, 15 bp, Homo sapiens
tgttttaataatgtc

SEQ ID NO: 157866 - DNA, 15 bp, Homo sapiens
gtgttttaataatgt

SEQ ID NO: 157867 - DNA, 15 bp, Homo sapiens
ggtgttttaataatg

SEQ ID NO: 157868 - DNA, 15 bp, Homo sapiens
tggtgttttaataat

SEQ ID NO: 157869 - DNA, 15 bp, Homo sapiens
ttggtgttttaataa

SEQ ID NO: 157870 - DNA, 15 bp, Homo sapiens
attggtgttttaata

SEQ ID NO: 157871 - DNA, 15 bp, Homo sapiens
aattggtgttttaat

SEQ ID NO: 157872 - DNA, 15 bp, Homo sapiens
caattggtgttttaa

SEQ ID NO: 157873 - DNA, 15 bp, Homo sapiens
gcaattggtgtttta

SEQ ID NO: 157874 - DNA, 15 bp, Homo sapiens
agcaattggtgtttt

SEQ ID NO: 157875 - DNA, 15 bp, Homo sapiens
cagcaattggtgttt

SEQ ID NO: 157876 - DNA, 15 bp, Homo sapiens
ccagcaattggtgtt

SEQ ID NO: 157877 - DNA, 15 bp, Homo sapiens
cccagcaattggtgt

SEQ ID NO: 157878 - DNA, 15 bp, Homo sapiens
acccagcaattggtg

SEQ ID NO: 157879 - DNA, 15 bp, Homo sapiens
gacccagcaattggt

SEQ ID NO: 157880 - DNA, 15 bp, Homo sapiens
ggacccagcaattgg

SEQ ID NO: 157881 - DNA, 15 bp, Homo sapiens
gggacccagcaattg

SEQ ID NO: 157882 - DNA, 15 bp, Homo sapiens
tgggacccagcaatt

SEQ ID NO: 157883 - DNA, 15 bp, Homo sapiens
gtgggacccagcaat

SEQ ID NO: 157884 - DNA, 15 bp, Homo sapiens
ggtgggacccagcaa

SEQ ID NO: 157885 - DNA, 15 bp, Homo sapiens
gggtgggacccagca

SEQ ID NO: 157886 - DNA, 15 bp, Homo sapiens
agggtgggacccagc

SEQ ID NO: 157887 - DNA, 15 bp, Homo sapiens
gagggtgggacccag

SEQ ID NO: 157888 - DNA, 15 bp, Homo sapiens
tgagggtgggaccca

SEQ ID NO: 157889 - DNA, 15 bp, Homo sapiens
ctgagggtgggaccc

SEQ ID NO: 157890 - DNA, 15 bp, Homo sapiens
tctgagggtgggacc

SEQ ID NO: 157891 - DNA, 15 bp, Homo sapiens
ctctgagggtgggac

SEQ ID NO: 157892 - DNA, 15 bp, Homo sapiens
actctgagggtggga

SEQ ID NO: 157893 - DNA, 15 bp, Homo sapiens
aactctgagggtggg

SEQ ID NO: 157894 - DNA, 15 bp, Homo sapiens
aaactctgagggtgg

SEQ ID NO: 157895 - DNA, 15 bp, Homo sapiens
gaaactctgagggtg

SEQ ID NO: 157896 - DNA, 15 bp, Homo sapiens
agaaactctgagggt

SEQ ID NO: 157897 - DNA, 15 bp, Homo sapiens
tagaaactctgaggg

SEQ ID NO: 157898 - DNA, 15 bp, Homo sapiens
ttagaaactctgagg

SEQ ID NO: 157899 - DNA, 15 bp, Homo sapiens
cttagaaactctgag

SEQ ID NO: 157900 - DNA, 15 bp, Homo sapiens
acttagaaactctga

SEQ ID NO: 157901 - DNA, 15 bp, Homo sapiens
aacttagaaactctg

SEQ ID NO: 157902 - DNA, 15 bp, Homo sapiens
caacttagaaactct

SEQ ID NO: 157903 - DNA, 15 bp, Homo sapiens
gcaacttagaaactc

SEQ ID NO: 157904 - DNA, 15 bp, Homo sapiens
agcaacttagaaact

SEQ ID NO: 157905 - DNA, 15 bp, Homo sapiens
aagcaacttagaaac

SEQ ID NO: 157906 - DNA, 15 bp, Homo sapiens
caagcaacttagaaa

SEQ ID NO: 157907 - DNA, 15 bp, Homo sapiens
ccaagcaacttagaa

SEQ ID NO: 157908 - DNA, 15 bp, Homo sapiens
gccaagcaacttaga

SEQ ID NO: 157909 - DNA, 15 bp, Homo sapiens
ggccaagcaacttag

SEQ ID NO: 157910 - DNA, 15 bp, Homo sapiens
aggccaagcaactta

SEQ ID NO: 157911 - DNA, 15 bp, Homo sapiens
caggccaagcaactt

SEQ ID NO: 157912 - DNA, 15 bp, Homo sapiens
ccaggccaagcaact

SEQ ID NO: 157913 - DNA, 15 bp, Homo sapiens
cccaggccaagcaac

SEQ ID NO: 157914 - DNA, 15 bp, Homo sapiens
acccaggccaagcaa

SEQ ID NO: 157915 - DNA, 15 bp, Homo sapiens
cacccaggccaagca

SEQ ID NO: 157916 - DNA, 15 bp, Homo sapiens
ccacccaggccaagc

SEQ ID NO: 157917 - DNA, 15 bp, Homo sapiens
cccacccaggccaag

SEQ ID NO: 157918 - DNA, 15 bp, Homo sapiens
ccccacccaggccaa

SEQ ID NO: 157919 - DNA, 15 bp, Homo sapiens
gccccacccaggcca

SEQ ID NO: 157920 - DNA, 15 bp, Homo sapiens
ggccccacccaggcc

SEQ ID NO: 157921 - DNA, 15 bp, Homo sapiens
aggccccacccaggc

SEQ ID NO: 157922 - DNA, 15 bp, Homo sapiens
caggccccacccagg

SEQ ID NO: 157923 - DNA, 15 bp, Homo sapiens
tcaggccccacccag

SEQ ID NO: 157924 - DNA, 15 bp, Homo sapiens
ctcaggccccaccca

SEQ ID NO: 157925 - DNA, 15 bp, Homo sapiens
tctcaggccccaccc

SEQ ID NO: 157926 - DNA, 15 bp, Homo sapiens
ttctcaggccccacc

SEQ ID NO: 157927 - DNA, 15 bp, Homo sapiens
gttctcaggccccac

SEQ ID NO: 157928 - DNA, 15 bp, Homo sapiens
agttctcaggcccca

SEQ ID NO: 157929 - DNA, 15 bp, Homo sapiens
aagttctcaggcccc

SEQ ID NO: 157930 - DNA, 15 bp, Homo sapiens
gaagttctcaggccc

SEQ ID NO: 157931 - DNA, 15 bp, Homo sapiens
ggaagttctcaggcc

SEQ ID NO: 157932 - DNA, 15 bp, Homo sapiens
tggaagttctcaggc

SEQ ID NO: 157933 - DNA, 15 bp, Homo sapiens
ttggaagttctcagg

SEQ ID NO: 157934 - DNA, 15 bp, Homo sapiens
gttggaagttctcag

SEQ ID NO: 157935 - DNA, 15 bp, Homo sapiens
tgttggaagttctca

SEQ ID NO: 157936 - DNA, 15 bp, Homo sapiens
ctgttggaagttctc

SEQ ID NO: 157937 - DNA, 15 bp, Homo sapiens
gctgttggaagttct

SEQ ID NO: 157938 - DNA, 15 bp, Homo sapiens
tgctgttggaagttc

SEQ ID NO: 157939 - DNA, 15 bp, Homo sapiens
ctgctgttggaagtt

SEQ ID NO: 157940 - DNA, 15 bp, Homo sapiens
actgctgttggaagt

SEQ ID NO: 157941 - DNA, 15 bp, Homo sapiens
aactgctgttggaag

SEQ ID NO: 157942 - DNA, 15 bp, Homo sapiens
gaactgctgttggaa

SEQ ID NO: 157943 - DNA, 15 bp, Homo sapiens
ggaactgctgttgga

SEQ ID NO: 157944 - DNA, 15 bp, Homo sapiens
tggaactgctgttgg

SEQ ID NO: 157945 - DNA, 15 bp, Homo sapiens
ctggaactgctgttg

SEQ ID NO: 157946 - DNA, 15 bp, Homo sapiens
gctggaactgctgtt

SEQ ID NO: 157947 - DNA, 15 bp, Homo sapiens
tgctggaactgctgt

SEQ ID NO: 157948 - DNA, 15 bp, Homo sapiens
ttgctggaactgctg

SEQ ID NO: 157949 - DNA, 15 bp, Homo sapiens
gttgctggaactgct

SEQ ID NO: 157950 - DNA, 15 bp, Homo sapiens
agttgctggaactgc

SEQ ID NO: 157951 - DNA, 15 bp, Homo sapiens
aagttgctggaactg

SEQ ID NO: 157952 - DNA, 15 bp, Homo sapiens
gaagttgctggaact

SEQ ID NO: 157953 - DNA, 15 bp, Homo sapiens
ggaagttgctggaac

SEQ ID NO: 157954 - DNA, 15 bp, Homo sapiens
gggaagttgctggaa

SEQ ID NO: 157955 - DNA, 15 bp, Homo sapiens
tgggaagttgctgga

SEQ ID NO: 157956 - DNA, 15 bp, Homo sapiens
ctgggaagttgctgg

SEQ ID NO: 157957 - DNA, 15 bp, Homo sapiens
cctgggaagttgctg

SEQ ID NO: 157958 - DNA, 15 bp, Homo sapiens
acctgggaagttgct

SEQ ID NO: 157959 - DNA, 15 bp, Homo sapiens
cacctgggaagttgc

SEQ ID NO: 157960 - DNA, 15 bp, Homo sapiens
ccacctgggaagttg

SEQ ID NO: 157961 - DNA, 15 bp, Homo sapiens
accacctgggaagtt

SEQ ID NO: 157962 - DNA, 15 bp, Homo sapiens
caccacctgggaagt

SEQ ID NO: 157963 - DNA, 15 bp, Homo sapiens
gcaccacctgggaag

SEQ ID NO: 157964 - DNA, 15 bp, Homo sapiens
agcaccacctgggaa

SEQ ID NO: 157965 - DNA, 15 bp, Homo sapiens
aagcaccacctggga

SEQ ID NO: 157966 - DNA, 15 bp, Homo sapiens
taagcaccacctggg

SEQ ID NO: 157967 - DNA, 15 bp, Homo sapiens
ataagcaccacctgg

SEQ ID NO: 157968 - DNA, 15 bp, Homo sapiens
aataagcaccacctg

SEQ ID NO: 157969 - DNA, 15 bp, Homo sapiens
caataagcaccacct

SEQ ID NO: 157970 - DNA, 15 bp, Homo sapiens
tcaataagcaccacc

SEQ ID NO: 157971 - DNA, 15 bp, Homo sapiens
atcaataagcaccac

SEQ ID NO: 157972 - DNA, 15 bp, Homo sapiens
catcaataagcacca

SEQ ID NO: 157973 - DNA, 15 bp, Homo sapiens
tcatcaataagcacc

SEQ ID NO: 157974 - DNA, 15 bp, Homo sapiens
atcatcaataagcac

SEQ ID NO: 157975 - DNA, 15 bp, Homo sapiens
catcatcaataagca

SEQ ID NO: 157976 - DNA, 15 bp, Homo sapiens
gcatcatcaataagc

SEQ ID NO: 157977 - DNA, 15 bp, Homo sapiens
agcatcatcaataag

SEQ ID NO: 157978 - DNA, 15 bp, Homo sapiens
cagcatcatcaataa

SEQ ID NO: 157979 - DNA, 15 bp, Homo sapiens
ccagcatcatcaata

SEQ ID NO: 157980 - DNA, 15 bp, Homo sapiens
accagcatcatcaat

SEQ ID NO: 157981 - DNA, 15 bp, Homo sapiens
gaccagcatcatcaa

SEQ ID NO: 157982 - DNA, 15 bp, Homo sapiens
agaccagcatcatca

SEQ ID NO: 157983 - DNA, 15 bp, Homo sapiens
gagaccagcatcatc

SEQ ID NO: 157984 - DNA, 15 bp, Homo sapiens
cgagaccagcatcat

SEQ ID NO: 157985 - DNA, 15 bp, Homo sapiens
gcgagaccagcatca

SEQ ID NO: 157986 - DNA, 15 bp, Homo sapiens
tgcgagaccagcatc

SEQ ID NO: 157987 - DNA, 15 bp, Homo sapiens
ttgcgagaccagcat

SEQ ID NO: 157988 - DNA, 15 bp, Homo sapiens
gttgcgagaccagca

SEQ ID NO: 157989 - DNA, 15 bp, Homo sapiens
ggttgcgagaccagc

SEQ ID NO: 157990 - DNA, 15 bp, Homo sapiens
gggttgcgagaccag

SEQ ID NO: 157991 - DNA, 15 bp, Homo sapiens
agggttgcgagacca

SEQ ID NO: 157992 - DNA, 15 bp, Homo sapiens
tagggttgcgagacc

SEQ ID NO: 157993 - DNA, 15 bp, Homo sapiens
atagggttgcgagac

SEQ ID NO: 157994 - DNA, 15 bp, Homo sapiens
catagggttgcgaga

SEQ ID NO: 157995 - DNA, 15 bp, Homo sapiens
acatagggttgcgag

SEQ ID NO: 157996 - DNA, 15 bp, Homo sapiens
aacatagggttgcga

SEQ ID NO: 157997 - DNA, 15 bp, Homo sapiens
caacatagggttgcg

SEQ ID NO: 157998 - DNA, 15 bp, Homo sapiens
tcaacatagggttgc

SEQ ID NO: 157999 - DNA, 15 bp, Homo sapiens
ctcaacatagggttg

SEQ ID NO: 158000 - DNA, 15 bp, Homo sapiens
tctcaacatagggtt

SEQ ID NO: 158001 - DNA, 15 bp, Homo sapiens
ttctcaacatagggt

SEQ ID NO: 158002 - DNA, 15 bp, Homo sapiens
cttctcaacataggg

SEQ ID NO: 158003 - DNA, 15 bp, Homo sapiens
acttctcaacatagg

SEQ ID NO: 158004 - DNA, 15 bp, Homo sapiens
tacttctcaacatag

SEQ ID NO: 158005 - DNA, 15 bp, Homo sapiens
atacttctcaacata

SEQ ID NO: 158006 - DNA, 15 bp, Homo sapiens
aatacttctcaacat

SEQ ID NO: 158007 - DNA, 15 bp, Homo sapiens
taatacttctcaaca

SEQ ID NO: 158008 - DNA, 15 bp, Homo sapiens
gtaatacttctcaac

SEQ ID NO: 158009 - DNA, 15 bp, Homo sapiens
agtaatacttctcaa

SEQ ID NO: 158010 - DNA, 15 bp, Homo sapiens
gagtaatacttctca

SEQ ID NO: 158011 - DNA, 15 bp, Homo sapiens
agagtaatacttctc

SEQ ID NO: 158012 - DNA, 15 bp, Homo sapiens
tagagtaatacttct

SEQ ID NO: 158013 - DNA, 15 bp, Homo sapiens
ctagagtaatacttc

SEQ ID NO: 158014 - DNA, 15 bp, Homo sapiens
tctagagtaatactt

SEQ ID NO: 158015 - DNA, 15 bp, Homo sapiens
atctagagtaatact

SEQ ID NO: 158016 - DNA, 15 bp, Homo sapiens
catctagagtaatac

SEQ ID NO: 158017 - DNA, 15 bp, Homo sapiens
acatctagagtaata

SEQ ID NO: 158018 - DNA, 15 bp, Homo sapiens
aacatctagagtaat

SEQ ID NO: 158019 - DNA, 15 bp, Homo sapiens
taacatctagagtaa

SEQ ID NO: 158020 - DNA, 15 bp, Homo sapiens
ttaacatctagagta

SEQ ID NO: 158021 - DNA, 15 bp, Homo sapiens
cttaacatctagagt

SEQ ID NO: 158022 - DNA, 15 bp, Homo sapiens
tcttaacatctagag

SEQ ID NO: 158023 - DNA, 15 bp, Homo sapiens
ctcttaacatctaga

SEQ ID NO: 158024 - DNA, 15 bp, Homo sapiens
tctcttaacatctag

SEQ ID NO: 158025 - DNA, 15 bp, Homo sapiens
ttctcttaacatcta

SEQ ID NO: 158026 - DNA, 15 bp, Homo sapiens
gttctcttaacatct

SEQ ID NO: 158027 - DNA, 15 bp, Homo sapiens
tgttctcttaacatc

SEQ ID NO: 158028 - DNA, 15 bp, Homo sapiens
gtgttctcttaacat

SEQ ID NO: 158029 - DNA, 15 bp, Homo sapiens
tgtgttctcttaaca

SEQ ID NO: 158030 - DNA, 15 bp, Homo sapiens
gtgtgttctcttaac

SEQ ID NO: 158031 - DNA, 15 bp, Homo sapiens
tgtgtgttctcttaa

SEQ ID NO: 158032 - DNA, 15 bp, Homo sapiens
ttgtgtgttctctta

SEQ ID NO: 158033 - DNA, 15 bp, Homo sapiens
attgtgtgttctctt

SEQ ID NO: 158034 - DNA, 15 bp, Homo sapiens
aattgtgtgttctct

SEQ ID NO: 158035 - DNA, 15 bp, Homo sapiens
aaattgtgtgttctc

SEQ ID NO: 158036 - DNA, 15 bp, Homo sapiens
taaattgtgtgttct

SEQ ID NO: 158037 - DNA, 15 bp, Homo sapiens
gtaaattgtgtgttc

SEQ ID NO: 158038 - DNA, 15 bp, Homo sapiens
agtaaattgtgtgtt

SEQ ID NO: 158039 - DNA, 15 bp, Homo sapiens
cagtaaattgtgtgt

SEQ ID NO: 158040 - DNA, 15 bp, Homo sapiens
gcagtaaattgtgtg

SEQ ID NO: 158041 - DNA, 15 bp, Homo sapiens
agcagtaaattgtgt

SEQ ID NO: 158042 - DNA, 15 bp, Homo sapiens
tagcagtaaattgtg

SEQ ID NO: 158043 - DNA, 15 bp, Homo sapiens
ttagcagtaaattgt

SEQ ID NO: 158044 - DNA, 15 bp, Homo sapiens
attagcagtaaattg

SEQ ID NO: 158045 - DNA, 15 bp, Homo sapiens
aattagcagtaaatt

SEQ ID NO: 158046 - DNA, 15 bp, Homo sapiens
taattagcagtaaat

SEQ ID NO: 158047 - DNA, 15 bp, Homo sapiens
ctaattagcagtaaa

SEQ ID NO: 158048 - DNA, 15 bp, Homo sapiens
gctaattagcagtaa

SEQ ID NO: 158049 - DNA, 15 bp, Homo sapiens
tgctaattagcagta

SEQ ID NO: 158050 - DNA, 15 bp, Homo sapiens
ttgctaattagcagt

SEQ ID NO: 158051 - DNA, 15 bp, Homo sapiens
cttgctaattagcag

SEQ ID NO: 158052 - DNA, 15 bp, Homo sapiens
tcttgctaattagca

SEQ ID NO: 158053 - DNA, 15 bp, Homo sapiens
ctcttgctaattagc

SEQ ID NO: 158054 - DNA, 15 bp, Homo sapiens
gctcttgctaattag

SEQ ID NO: 158055 - DNA, 15 bp, Homo sapiens
ggctcttgctaatta

SEQ ID NO: 158056 - DNA, 15 bp, Homo sapiens
tggctcttgctaatt

SEQ ID NO: 158057 - DNA, 15 bp, Homo sapiens
ctggctcttgctaat

SEQ ID NO: 158058 - DNA, 15 bp, Homo sapiens
cctggctcttgctaa

SEQ ID NO: 158059 - DNA, 15 bp, Homo sapiens
tcctggctcttgcta

SEQ ID NO: 158060 - DNA, 15 bp, Homo sapiens
ctcctggctcttgct

SEQ ID NO: 158061 - DNA, 15 bp, Homo sapiens
cctcctggctcttgc

SEQ ID NO: 158062 - DNA, 15 bp, Homo sapiens
ccctcctggctcttg

SEQ ID NO: 158063 - DNA, 15 bp, Homo sapiens
gccctcctggctctt

SEQ ID NO: 158064 - DNA, 15 bp, Homo sapiens
agccctcctggctct

SEQ ID NO: 158065 - DNA, 15 bp, Homo sapiens
aagccctcctggctc

SEQ ID NO: 158066 - DNA, 15 bp, Homo sapiens
gaagccctcctggct

SEQ ID NO: 158067 - DNA, 15 bp, Homo sapiens
ggaagccctcctggc

SEQ ID NO: 158068 - DNA, 15 bp, Homo sapiens
aggaagccctcctgg

SEQ ID NO: 158069 - DNA, 15 bp, Homo sapiens
caggaagccctcctg

SEQ ID NO: 158070 - DNA, 15 bp, Homo sapiens
ccaggaagccctcct

SEQ ID NO: 158071 - DNA, 15 bp, Homo sapiens
tccaggaagccctcc

SEQ ID NO: 158072 - DNA, 15 bp, Homo sapiens
ctccaggaagccctc

SEQ ID NO: 158073 - DNA, 15 bp, Homo sapiens
cctccaggaagccct

SEQ ID NO: 158074 - DNA, 15 bp, Homo sapiens
tcctccaggaagccc

SEQ ID NO: 158075 - DNA, 15 bp, Homo sapiens
ctcctccaggaagcc

SEQ ID NO: 158076 - DNA, 15 bp, Homo sapiens
cctcctccaggaagc

SEQ ID NO: 158077 - DNA, 15 bp, Homo sapiens
acctcctccaggaag

SEQ ID NO: 158078 - DNA, 15 bp, Homo sapiens
cacctcctccaggaa

SEQ ID NO: 158079 - DNA, 15 bp, Homo sapiens
ccacctcctccagga

SEQ ID NO: 158080 - DNA, 15 bp, Homo sapiens
accacctcctccagg

SEQ ID NO: 158081 - DNA, 15 bp, Homo sapiens
gaccacctcctccag

SEQ ID NO: 158082 - DNA, 15 bp, Homo sapiens
tgaccacctcctcca

SEQ ID NO: 158083 - DNA, 15 bp, Homo sapiens
ctgaccacctcctcc

SEQ ID NO: 158084 - DNA, 15 bp, Homo sapiens
cctgaccacctcctc

SEQ ID NO: 158085 - DNA, 15 bp, Homo sapiens
gcctgaccacctcct

SEQ ID NO: 158086 - DNA, 15 bp, Homo sapiens
agcctgaccacctcc

SEQ ID NO: 158087 - DNA, 15 bp, Homo sapiens
aagcctgaccacctc

SEQ ID NO: 158088 - DNA, 15 bp, Homo sapiens
caagcctgaccacct

SEQ ID NO: 158089 - DNA, 15 bp, Homo sapiens
tcaagcctgaccacc

SEQ ID NO: 158090 - DNA, 15 bp, Homo sapiens
ctcaagcctgaccac

SEQ ID NO: 158091 - DNA, 15 bp, Homo sapiens
actcaagcctgacca

SEQ ID NO: 158092 - DNA, 15 bp, Homo sapiens
tactcaagcctgacc

SEQ ID NO: 158093 - DNA, 15 bp, Homo sapiens
ctactcaagcctgac

SEQ ID NO: 158094 - DNA, 15 bp, Homo sapiens
cctactcaagcctga

SEQ ID NO: 158095 - DNA, 15 bp, Homo sapiens
ccctactcaagcctg

SEQ ID NO: 158096 - DNA, 15 bp, Homo sapiens
accctactcaagcct

SEQ ID NO: 158097 - DNA, 15 bp, Homo sapiens
taccctactcaagcc

SEQ ID NO: 158098 - DNA, 15 bp, Homo sapiens
ctaccctactcaagc

SEQ ID NO: 158099 - DNA, 15 bp, Homo sapiens
cctaccctactcaag

SEQ ID NO: 158100 - DNA, 15 bp, Homo sapiens
tcctaccctactcaa

SEQ ID NO: 158101 - DNA, 15 bp, Homo sapiens
atcctaccctactca

SEQ ID NO: 158102 - DNA, 15 bp, Homo sapiens
aatcctaccctactc

SEQ ID NO: 158103 - DNA, 15 bp, Homo sapiens
aaatcctaccctact

SEQ ID NO: 158104 - DNA, 15 bp, Homo sapiens
aaaatcctaccctac

SEQ ID NO: 158105 - DNA, 15 bp, Homo sapiens
gaaaatcctacccta

SEQ ID NO: 158106 - DNA, 15 bp, Homo sapiens
tgaaaatcctaccct

SEQ ID NO: 158107 - DNA, 15 bp, Homo sapiens
ctgaaaatcctaccc

SEQ ID NO: 158108 - DNA, 15 bp, Homo sapiens
tctgaaaatcctacc

SEQ ID NO: 158109 - DNA, 15 bp, Homo sapiens
ctctgaaaatcctac

SEQ ID NO: 158110 - DNA, 15 bp, Homo sapiens
cctctgaaaatccta

SEQ ID NO: 158111 - DNA, 15 bp, Homo sapiens
acctctgaaaatcct

SEQ ID NO: 158112 - DNA, 15 bp, Homo sapiens
cacctctgaaaatcc

SEQ ID NO: 158113 - DNA, 15 bp, Homo sapiens
ccacctctgaaaatc

SEQ ID NO: 158114 - DNA, 15 bp, Homo sapiens
cccacctctgaaaat

SEQ ID NO: 158115 - DNA, 15 bp, Homo sapiens
acccacctctgaaaa

SEQ ID NO: 158116 - DNA, 15 bp, Homo sapiens
gacccacctctgaaa

SEQ ID NO: 158117 - DNA, 15 bp, Homo sapiens
agacccacctctgaa

SEQ ID NO: 158118 - DNA, 15 bp, Homo sapiens
cagacccacctctga

SEQ ID NO: 158119 - DNA, 15 bp, Homo sapiens
tcagacccacctctg

SEQ ID NO: 158120 - DNA, 15 bp, Homo sapiens
ctcagacccacctct

SEQ ID NO: 158121 - DNA, 15 bp, Homo sapiens
cctcagacccacctc

SEQ ID NO: 158122 - DNA, 15 bp, Homo sapiens
gcctcagacccacct

SEQ ID NO: 158123 - DNA, 15 bp, Homo sapiens
agcctcagacccacc

SEQ ID NO: 158124 - DNA, 15 bp, Homo sapiens
aagcctcagacccac

SEQ ID NO: 158125 - DNA, 15 bp, Homo sapiens
caagcctcagaccca

SEQ ID NO: 158126 - DNA, 15 bp, Homo sapiens
tcaagcctcagaccc

SEQ ID NO: 158127 - DNA, 15 bp, Homo sapiens
ttcaagcctcagacc

SEQ ID NO: 158128 - DNA, 15 bp, Homo sapiens
attcaagcctcagac

SEQ ID NO: 158129 - DNA, 15 bp, Homo sapiens
gattcaagcctcaga

SEQ ID NO: 158130 - DNA, 15 bp, Homo sapiens
agattcaagcctcag

SEQ ID NO: 158131 - DNA, 15 bp, Homo sapiens
tctccaagcattata

SEQ ID NO: 158132 - DNA, 15 bp, Homo sapiens
ctctccaagcattat

SEQ ID NO: 158133 - DNA, 15 bp, Homo sapiens
tctctccaagcatta

SEQ ID NO: 158134 - DNA, 15 bp, Homo sapiens
ttctctccaagcatt

SEQ ID NO: 158135 - DNA, 15 bp, Homo sapiens
cttctctccaagcat

SEQ ID NO: 158136 - DNA, 15 bp, Homo sapiens
acttctctccaagca

SEQ ID NO: 158137 - DNA, 15 bp, Homo sapiens
cacttctctccaagc

SEQ ID NO: 158138 - DNA, 15 bp, Homo sapiens
gcacttctctccaag

SEQ ID NO: 158139 - DNA, 15 bp, Homo sapiens
tgcacttctctccaa

SEQ ID NO: 158140 - DNA, 15 bp, Homo sapiens
ttgcacttctctcca

SEQ ID NO: 158141 - DNA, 15 bp, Homo sapiens
tttgcacttctctcc

SEQ ID NO: 158142 - DNA, 15 bp, Homo sapiens
atttgcacttctctc

SEQ ID NO: 158143 - DNA, 15 bp, Homo sapiens
catttgcacttctct

SEQ ID NO: 158144 - DNA, 15 bp, Homo sapiens
acatttgcacttctc

SEQ ID NO: 158145 - DNA, 15 bp, Homo sapiens
aacatttgcacttct

SEQ ID NO: 158146 - DNA, 15 bp, Homo sapiens
aaacatttgcacttc

SEQ ID NO: 158147 - DNA, 15 bp, Homo sapiens
gaaacatttgcactt

SEQ ID NO: 158148 - DNA, 15 bp, Homo sapiens
tgaaacatttgcact

SEQ ID NO: 158149 - DNA, 15 bp, Homo sapiens
atgaaacatttgcac

SEQ ID NO: 158150 - DNA, 15 bp, Homo sapiens
gatgaaacatttgca

SEQ ID NO: 158151 - DNA, 15 bp, Homo sapiens
agatgaaacatttgc

SEQ ID NO: 158152 - DNA, 15 bp, Homo sapiens
gagatgaaacatttg

SEQ ID NO: 158153 - DNA, 15 bp, Homo sapiens
ggagatgaaacattt

SEQ ID NO: 158154 - DNA, 15 bp, Homo sapiens
cggagatgaaacatt

SEQ ID NO: 158155 - DNA, 15 bp, Homo sapiens
gcggagatgaaacat

SEQ ID NO: 158156 - DNA, 15 bp, Homo sapiens
ggcggagatgaaaca

SEQ ID NO: 158157 - DNA, 15 bp, Homo sapiens
aggcggagatgaaac

SEQ ID NO: 158158 - DNA, 15 bp, Homo sapiens
taggcggagatgaaa

SEQ ID NO: 158159 - DNA, 15 bp, Homo sapiens
gtaggcggagatgaa

SEQ ID NO: 158160 - DNA, 15 bp, Homo sapiens
agtaggcggagatga

SEQ ID NO: 158161 - DNA, 15 bp, Homo sapiens
cagtaggcggagatg

SEQ ID NO: 158162 - DNA, 15 bp, Homo sapiens
tcagtaggcggagat

SEQ ID NO: 158163 - DNA, 15 bp, Homo sapiens
ctcagtaggcggaga

SEQ ID NO: 158164 - DNA, 15 bp, Homo sapiens
actcagtaggcggag

SEQ ID NO: 158165 - DNA, 15 bp, Homo sapiens
aactcagtaggcgga

SEQ ID NO: 158166 - DNA, 15 bp, Homo sapiens
taactcagtaggcgg

SEQ ID NO: 158167 - DNA, 15 bp, Homo sapiens
ataactcagtaggcg

SEQ ID NO: 158168 - DNA, 15 bp, Homo sapiens
tataactcagtaggc

SEQ ID NO: 158169 - DNA, 15 bp, Homo sapiens
gtataactcagtagg

SEQ ID NO: 158170 - DNA, 15 bp, Homo sapiens
agtataactcagtag

SEQ ID NO: 158171 - DNA, 15 bp, Homo sapiens
cagtataactcagta

SEQ ID NO: 158172 - DNA, 15 bp, Homo sapiens
gcagtataactcagt

SEQ ID NO: 158173 - DNA, 15 bp, Homo sapiens
ggcagtataactcag

SEQ ID NO: 158174 - DNA, 15 bp, Homo sapiens
aggcagtataactca

SEQ ID NO: 158175 - DNA, 15 bp, Homo sapiens
caggcagtataactc

SEQ ID NO: 158176 - DNA, 15 bp, Homo sapiens
acaggcagtataact

SEQ ID NO: 158177 - DNA, 15 bp, Homo sapiens
aacaggcagtataac

SEQ ID NO: 158178 - DNA, 15 bp, Homo sapiens
aaacaggcagtataa

SEQ ID NO: 158179 - DNA, 15 bp, Homo sapiens
taaacaggcagtata

SEQ ID NO: 158180 - DNA, 15 bp, Homo sapiens
gtaaacaggcagtat

SEQ ID NO: 158181 - DNA, 15 bp, Homo sapiens
tgtaaacaggcagta

SEQ ID NO: 158182 - DNA, 15 bp, Homo sapiens
atgtaaacaggcagt

SEQ ID NO: 158183 - DNA, 15 bp, Homo sapiens
tatgtaaacaggcag

SEQ ID NO: 158184 - DNA, 15 bp, Homo sapiens
ttatgtaaacaggca

SEQ ID NO: 158185 - DNA, 15 bp, Homo sapiens
cttatgtaaacaggc

SEQ ID NO: 158186 - DNA, 15 bp, Homo sapiens
gcttatgtaaacagg

SEQ ID NO: 158187 - DNA, 15 bp, Homo sapiens
ggcttatgtaaacag

SEQ ID NO: 158188 - DNA, 15 bp, Homo sapiens
aggcttatgtaaaca

SEQ ID NO: 158189 - DNA, 15 bp, Homo sapiens
taggcttatgtaaac

SEQ ID NO: 158190 - DNA, 15 bp, Homo sapiens
ataggcttatgtaaa

SEQ ID NO: 158191 - DNA, 15 bp, Homo sapiens
tataggcttatgtaa

SEQ ID NO: 158192 - DNA, 15 bp, Homo sapiens
atataggcttatgta

SEQ ID NO: 158193 - DNA, 15 bp, Homo sapiens
aatataggcttatgt

SEQ ID NO: 158194 - DNA, 15 bp, Homo sapiens
gaatataggcttatg

SEQ ID NO: 158195 - DNA, 15 bp, Homo sapiens
tgaatataggcttat

SEQ ID NO: 158196 - DNA, 15 bp, Homo sapiens
ctgaatataggctta

SEQ ID NO: 158197 - DNA, 15 bp, Homo sapiens
actgaatataggctt

SEQ ID NO: 158198 - DNA, 15 bp, Homo sapiens
cactgaatataggct

SEQ ID NO: 158199 - DNA, 15 bp, Homo sapiens
ccactgaatataggc

SEQ ID NO: 158200 - DNA, 15 bp, Homo sapiens
gccactgaatatagg

SEQ ID NO: 158201 - DNA, 15 bp, Homo sapiens
ggccactgaatatag

SEQ ID NO: 158202 - DNA, 15 bp, Homo sapiens
aggccactgaatata

SEQ ID NO: 158203 - DNA, 15 bp, Homo sapiens
caggccactgaatat

SEQ ID NO: 158204 - DNA, 15 bp, Homo sapiens
tcaggccactgaata

SEQ ID NO: 158205 - DNA, 15 bp, Homo sapiens
ctcaggccactgaat

SEQ ID NO: 158206 - DNA, 15 bp, Homo sapiens
tctcaggccactgaa

SEQ ID NO: 158207 - DNA, 15 bp, Homo sapiens
ttctcaggccactga

SEQ ID NO: 158208 - DNA, 15 bp, Homo sapiens
tttctcaggccactg

SEQ ID NO: 158209 - DNA, 15 bp, Homo sapiens
ttttctcaggccact

SEQ ID NO: 158210 - DNA, 15 bp, Homo sapiens
cttttctcaggccac

SEQ ID NO: 158211 - DNA, 15 bp, Homo sapiens
ccttttctcaggcca

SEQ ID NO: 158212 - DNA, 15 bp, Homo sapiens
gccttttctcaggcc

SEQ ID NO: 158213 - DNA, 15 bp, Homo sapiens
agccttttctcaggc

SEQ ID NO: 158214 - DNA, 15 bp, Homo sapiens
aagccttttctcagg

SEQ ID NO: 158215 - DNA, 15 bp, Homo sapiens
gaagccttttctcag

SEQ ID NO: 158216 - DNA, 15 bp, Homo sapiens
agaagccttttctca

SEQ ID NO: 158217 - DNA, 15 bp, Homo sapiens
aagaagccttttctc

SEQ ID NO: 158218 - DNA, 15 bp, Homo sapiens
caagaagccttttct

SEQ ID NO: 158219 - DNA, 15 bp, Homo sapiens
gcaagaagccttttc

SEQ ID NO: 158220 - DNA, 15 bp, Homo sapiens
ggcaagaagcctttt

SEQ ID NO: 158221 - DNA, 15 bp, Homo sapiens
aggcaagaagccttt

SEQ ID NO: 158222 - DNA, 15 bp, Homo sapiens
aaggcaagaagcctt

SEQ ID NO: 158223 - DNA, 15 bp, Homo sapiens
gaaggcaagaagcct

SEQ ID NO: 158224 - DNA, 15 bp, Homo sapiens
agaaggcaagaagcc

SEQ ID NO: 158225 - DNA, 15 bp, Homo sapiens
aagaaggcaagaagc

SEQ ID NO: 158226 - DNA, 15 bp, Homo sapiens
gaagaaggcaagaag

SEQ ID NO: 158227 - DNA, 15 bp, Homo sapiens
tgaagaaggcaagaa

SEQ ID NO: 158228 - DNA, 15 bp, Homo sapiens
ctgaagaaggcaaga

SEQ ID NO: 158229 - DNA, 15 bp, Homo sapiens
cctgaagaaggcaag

SEQ ID NO: 158230 - DNA, 15 bp, Homo sapiens
ccctgaagaaggcaa

SEQ ID NO: 158231 - DNA, 15 bp, Homo sapiens
gccctgaagaaggca

SEQ ID NO: 158232 - DNA, 15 bp, Homo sapiens
cgccctgaagaaggc

SEQ ID NO: 158233 - DNA, 15 bp, Homo sapiens
acgccctgaagaagg

SEQ ID NO: 158234 - DNA, 15 bp, Homo sapiens
cacgccctgaagaag

SEQ ID NO: 158235 - DNA, 15 bp, Homo sapiens
tcacgccctgaagaa

SEQ ID NO: 158236 - DNA, 15 bp, Homo sapiens
atcacgccctgaaga

SEQ ID NO: 158237 - DNA, 15 bp, Homo sapiens
catcacgccctgaag

SEQ ID NO: 158238 - DNA, 15 bp, Homo sapiens
ccatcacgccctgaa

SEQ ID NO: 158239 - DNA, 15 bp, Homo sapiens
accatcacgccctga

SEQ ID NO: 158240 - DNA, 15 bp, Homo sapiens
caccatcacgccctg

SEQ ID NO: 158241 - DNA, 15 bp, Homo sapiens
gcaccatcacgccct

SEQ ID NO: 158242 - DNA, 15 bp, Homo sapiens
tgcaccatcacgccc

SEQ ID NO: 158243 - DNA, 15 bp, Homo sapiens
ttgcaccatcacgcc

SEQ ID NO: 158244 - DNA, 15 bp, Homo sapiens
attgcaccatcacgc

SEQ ID NO: 158245 - DNA, 15 bp, Homo sapiens
gattgcaccatcacg

SEQ ID NO: 158246 - DNA, 15 bp, Homo sapiens
agattgcaccatcac

SEQ ID NO: 158247 - DNA, 15 bp, Homo sapiens
aagattgcaccatca

SEQ ID NO: 158248 - DNA, 15 bp, Homo sapiens
caagattgcaccatc

SEQ ID NO: 158249 - DNA, 15 bp, Homo sapiens
ccaagattgcaccat

SEQ ID NO: 158250 - DNA, 15 bp, Homo sapiens
accaagattgcacca

SEQ ID NO: 158251 - DNA, 15 bp, Homo sapiens
caccaagattgcacc

SEQ ID NO: 158252 - DNA, 15 bp, Homo sapiens
acaccaagattgcac

SEQ ID NO: 158253 - DNA, 15 bp, Homo sapiens
tacaccaagattgca

SEQ ID NO: 158254 - DNA, 15 bp, Homo sapiens
ctacaccaagattgc

SEQ ID NO: 158255 - DNA, 15 bp, Homo sapiens
tctacaccaagattg

SEQ ID NO: 158256 - DNA, 15 bp, Homo sapiens
ctctacaccaagatt

SEQ ID NO: 158257 - DNA, 15 bp, Homo sapiens
actctacaccaagat

SEQ ID NO: 158258 - DNA, 15 bp, Homo sapiens
aactctacaccaaga

SEQ ID NO: 158259 - DNA, 15 bp, Homo sapiens
aaactctacaccaag

SEQ ID NO: 158260 - DNA, 15 bp, Homo sapiens
gaaactctacaccaa

SEQ ID NO: 158261 - DNA, 15 bp, Homo sapiens
ggaaactctacacca

SEQ ID NO: 158262 - DNA, 15 bp, Homo sapiens
tggaaactctacacc

SEQ ID NO: 158263 - DNA, 15 bp, Homo sapiens
ttggaaactctacac

SEQ ID NO: 158264 - DNA, 15 bp, Homo sapiens
cttggaaactctaca

SEQ ID NO: 158265 - DNA, 15 bp, Homo sapiens
gcttggaaactctac

SEQ ID NO: 158266 - DNA, 15 bp, Homo sapiens
tgcttggaaactcta

SEQ ID NO: 158267 - DNA, 15 bp, Homo sapiens
ctgcttggaaactct

SEQ ID NO: 158268 - DNA, 15 bp, Homo sapiens
tctgcttggaaactc

SEQ ID NO: 158269 - DNA, 15 bp, Homo sapiens
ctctgcttggaaact

SEQ ID NO: 158270 - DNA, 15 bp, Homo sapiens
tctctgcttggaaac

SEQ ID NO: 158271 - DNA, 15 bp, Homo sapiens
atctctgcttggaaa

SEQ ID NO: 158272 - DNA, 15 bp, Homo sapiens
catctctgcttggaa

SEQ ID NO: 158273 - DNA, 15 bp, Homo sapiens
tcatctctgcttgga

SEQ ID NO: 158274 - DNA, 15 bp, Homo sapiens
atcatctctgcttgg

SEQ ID NO: 158275 - DNA, 15 bp, Homo sapiens
catcatctctgcttg

SEQ ID NO: 158276 - DNA, 15 bp, Homo sapiens
gcatcatctctgctt

SEQ ID NO: 158277 - DNA, 15 bp, Homo sapiens
agcatcatctctgct

SEQ ID NO: 158278 - DNA, 15 bp, Homo sapiens
tagcatcatctctgc

SEQ ID NO: 158279 - DNA, 15 bp, Homo sapiens
gtagcatcatctctg

SEQ ID NO: 158280 - DNA, 15 bp, Homo sapiens
cgtagcatcatctct

SEQ ID NO: 158281 - DNA, 15 bp, Homo sapiens
ccgtagcatcatctc

SEQ ID NO: 158282 - DNA, 15 bp, Homo sapiens
gccgtagcatcatct

SEQ ID NO: 158283 - DNA, 15 bp, Homo sapiens
ggccgtagcatcatc

SEQ ID NO: 158284 - DNA, 15 bp, Homo sapiens
aggccgtagcatcat

SEQ ID NO: 158285 - DNA, 15 bp, Homo sapiens
gaggccgtagcatca

SEQ ID NO: 158286 - DNA, 15 bp, Homo sapiens
tgaggccgtagcatc

SEQ ID NO: 158287 - DNA, 15 bp, Homo sapiens
gtgaggccgtagcat

SEQ ID NO: 158288 - DNA, 15 bp, Homo sapiens
cgtgaggccgtagca

SEQ ID NO: 158289 - DNA, 15 bp, Homo sapiens
acgtgaggccgtagc

SEQ ID NO: 158290 - DNA, 15 bp, Homo sapiens
cacgtgaggccgtag

SEQ ID NO: 158291 - DNA, 15 bp, Homo sapiens
ccacgtgaggccgta

SEQ ID NO: 158292 - DNA, 15 bp, Homo sapiens
accacgtgaggccgt

SEQ ID NO: 158293 - DNA, 15 bp, Homo sapiens
caccacgtgaggccg

SEQ ID NO: 158294 - DNA, 15 bp, Homo sapiens
ccaccacgtgaggcc

SEQ ID NO: 158295 - DNA, 15 bp, Homo sapiens
cccaccacgtgaggc

SEQ ID NO: 158296 - DNA, 15 bp, Homo sapiens
tcccaccacgtgagg

SEQ ID NO: 158297 - DNA, 15 bp, Homo sapiens
ttcccaccacgtgag

SEQ ID NO: 158298 - DNA, 15 bp, Homo sapiens
cttcccaccacgtga

SEQ ID NO: 158299 - DNA, 15 bp, Homo sapiens
ccttcccaccacgtg

SEQ ID NO: 158300 - DNA, 15 bp, Homo sapiens
gccttcccaccacgt

SEQ ID NO: 158301 - DNA, 15 bp, Homo sapiens
agccttcccaccacg

SEQ ID NO: 158302 - DNA, 15 bp, Homo sapiens
cagccttcccaccac

SEQ ID NO: 158303 - DNA, 15 bp, Homo sapiens
acagccttcccacca

SEQ ID NO: 158304 - DNA, 15 bp, Homo sapiens
cacagccttcccacc

SEQ ID NO: 158305 - DNA, 15 bp, Homo sapiens
acacagccttcccac

SEQ ID NO: 158306 - DNA, 15 bp, Homo sapiens
cacacagccttccca

SEQ ID NO: 158307 - DNA, 15 bp, Homo sapiens
ccacacagccttccc

SEQ ID NO: 158308 - DNA, 15 bp, Homo sapiens
gccacacagccttcc

SEQ ID NO: 158309 - DNA, 15 bp, Homo sapiens
tgccacacagccttc

SEQ ID NO: 158310 - DNA, 15 bp, Homo sapiens
ctgccacacagcctt

SEQ ID NO: 158311 - DNA, 15 bp, Homo sapiens
cctgccacacagcct

SEQ ID NO: 158312 - DNA, 15 bp, Homo sapiens
tcctgccacacagcc

SEQ ID NO: 158313 - DNA, 15 bp, Homo sapiens
ttcctgccacacagc

SEQ ID NO: 158314 - DNA, 15 bp, Homo sapiens
cttcctgccacacag

SEQ ID NO: 158315 - DNA, 15 bp, Homo sapiens
tcttcctgccacaca

SEQ ID NO: 158316 - DNA, 15 bp, Homo sapiens
ttcttcctgccacac

SEQ ID NO: 158317 - DNA, 15 bp, Homo sapiens
attcttcctgccaca

SEQ ID NO: 158318 - DNA, 15 bp, Homo sapiens
tattcttcctgccac

SEQ ID NO: 158319 - DNA, 15 bp, Homo sapiens
ttattcttcctgcca

SEQ ID NO: 158320 - DNA, 15 bp, Homo sapiens
cttattcttcctgcc

SEQ ID NO: 158321 - DNA, 15 bp, Homo sapiens
acttattcttcctgc

SEQ ID NO: 158322 - DNA, 15 bp, Homo sapiens
aacttattcttcctg

SEQ ID NO: 158323 - DNA, 15 bp, Homo sapiens
gaacttattcttcct

SEQ ID NO: 158324 - DNA, 15 bp, Homo sapiens
tgaacttattcttcc

SEQ ID NO: 158325 - DNA, 15 bp, Homo sapiens
ttgaacttattcttc

SEQ ID NO: 158326 - DNA, 15 bp, Homo sapiens
tttgaacttattctt

SEQ ID NO: 158327 - DNA, 15 bp, Homo sapiens
gtttgaacttattct

SEQ ID NO: 158328 - DNA, 15 bp, Homo sapiens
agtttgaacttattc

SEQ ID NO: 158329 - DNA, 15 bp, Homo sapiens
cagtttgaacttatt

SEQ ID NO: 158330 - DNA, 15 bp, Homo sapiens
acagtttgaacttat

SEQ ID NO: 158331 - DNA, 15 bp, Homo sapiens
cacagtttgaactta

SEQ ID NO: 158332 - DNA, 15 bp, Homo sapiens
gcacagtttgaactt

SEQ ID NO: 158333 - DNA, 15 bp, Homo sapiens
agcacagtttgaact

SEQ ID NO: 158334 - DNA, 15 bp, Homo sapiens
aagcacagtttgaac

SEQ ID NO: 158335 - DNA, 15 bp, Homo sapiens
aaagcacagtttgaa

SEQ ID NO: 158336 - DNA, 15 bp, Homo sapiens
caaagcacagtttga

SEQ ID NO: 158337 - DNA, 15 bp, Homo sapiens
acaaagcacagtttg

SEQ ID NO: 158338 - DNA, 15 bp, Homo sapiens
aacaaagcacagttt

SEQ ID NO: 158339 - DNA, 15 bp, Homo sapiens
aaacaaagcacagtt

SEQ ID NO: 158340 - DNA, 15 bp, Homo sapiens
taaacaaagcacagt

SEQ ID NO: 158341 - DNA, 15 bp, Homo sapiens
ctaaacaaagcacag

SEQ ID NO: 158342 - DNA, 15 bp, Homo sapiens
tctaaacaaagcaca

SEQ ID NO: 158343 - DNA, 15 bp, Homo sapiens
ttctaaacaaagcac

SEQ ID NO: 158344 - DNA, 15 bp, Homo sapiens
gttctaaacaaagca

SEQ ID NO: 158345 - DNA, 15 bp, Homo sapiens
agttctaaacaaagc

SEQ ID NO: 158346 - DNA, 15 bp, Homo sapiens
cagttctaaacaaag

SEQ ID NO: 158347 - DNA, 15 bp, Homo sapiens
acagttctaaacaaa

SEQ ID NO: 158348 - DNA, 15 bp, Homo sapiens
aacagttctaaacaa

SEQ ID NO: 158349 - DNA, 15 bp, Homo sapiens
caacagttctaaaca

SEQ ID NO: 158350 - DNA, 15 bp, Homo sapiens
acaacagttctaaac

SEQ ID NO: 158351 - DNA, 15 bp, Homo sapiens
cacaacagttctaaa

SEQ ID NO: 158352 - DNA, 15 bp, Homo sapiens
gcacaacagttctaa

SEQ ID NO: 158353 - DNA, 15 bp, Homo sapiens
tgcacaacagttcta

SEQ ID NO: 158354 - DNA, 15 bp, Homo sapiens
ttgcacaacagttct

SEQ ID NO: 158355 - DNA, 15 bp, Homo sapiens
tttgcacaacagttc

SEQ ID NO: 158356 - DNA, 15 bp, Homo sapiens
ctttgcacaacagtt

SEQ ID NO: 158357 - DNA, 15 bp, Homo sapiens
actttgcacaacagt

SEQ ID NO: 158358 - DNA, 15 bp, Homo sapiens
aactttgcacaacag

SEQ ID NO: 158359 - DNA, 15 bp, Homo sapiens
caactttgcacaaca

SEQ ID NO: 158360 - DNA, 15 bp, Homo sapiens
acaactttgcacaac

SEQ ID NO: 158361 - DNA, 15 bp, Homo sapiens
aacaactttgcacaa

SEQ ID NO: 158362 - DNA, 15 bp, Homo sapiens
aaacaactttgcaca

SEQ ID NO: 158363 - DNA, 15 bp, Homo sapiens
gaaacaactttgcac

SEQ ID NO: 158364 - DNA, 15 bp, Homo sapiens
agaaacaactttgca

SEQ ID NO: 158365 - DNA, 15 bp, Homo sapiens
aagaaacaactttgc

SEQ ID NO: 158366 - DNA, 15 bp, Homo sapiens
gaagaaacaactttg

SEQ ID NO: 158367 - DNA, 15 bp, Homo sapiens
ggaagaaacaacttt

SEQ ID NO: 158368 - DNA, 15 bp, Homo sapiens
tggaagaaacaactt

SEQ ID NO: 158369 - DNA, 15 bp, Homo sapiens
atggaagaaacaact

SEQ ID NO: 158370 - DNA, 15 bp, Homo sapiens
gatggaagaaacaac

SEQ ID NO: 158371 - DNA, 15 bp, Homo sapiens
ggatggaagaaacaa

SEQ ID NO: 158372 - DNA, 15 bp, Homo sapiens
tggatggaagaaaca

SEQ ID NO: 158373 - DNA, 15 bp, Homo sapiens
ttggatggaagaaac

SEQ ID NO: 158374 - DNA, 15 bp, Homo sapiens
cttggatggaagaaa

SEQ ID NO: 158375 - DNA, 15 bp, Homo sapiens
acttggatggaagaa

SEQ ID NO: 158376 - DNA, 15 bp, Homo sapiens
tacttggatggaaga

SEQ ID NO: 158377 - DNA, 15 bp, Homo sapiens
atacttggatggaag

SEQ ID NO: 158378 - DNA, 15 bp, Homo sapiens
aatacttggatggaa

SEQ ID NO: 158379 - DNA, 15 bp, Homo sapiens
taatacttggatgga

SEQ ID NO: 158380 - DNA, 15 bp, Homo sapiens
ttaatacttggatgg

SEQ ID NO: 158381 - DNA, 15 bp, Homo sapiens
gttaatacttggatg

SEQ ID NO: 158382 - DNA, 15 bp, Homo sapiens
agttaatacttggat

SEQ ID NO: 158383 - DNA, 15 bp, Homo sapiens
cagttaatacttgga

SEQ ID NO: 158384 - DNA, 15 bp, Homo sapiens
ccagttaatacttgg

SEQ ID NO: 158385 - DNA, 15 bp, Homo sapiens
cccagttaatacttg

SEQ ID NO: 158386 - DNA, 15 bp, Homo sapiens
gcccagttaatactt

SEQ ID NO: 158387 - DNA, 15 bp, Homo sapiens
ggcccagttaatact

SEQ ID NO: 158388 - DNA, 15 bp, Homo sapiens
tggcccagttaatac

SEQ ID NO: 158389 - DNA, 15 bp, Homo sapiens
ctggcccagttaata

SEQ ID NO: 158390 - DNA, 15 bp, Homo sapiens
tctggcccagttaat

SEQ ID NO: 158391 - DNA, 15 bp, Homo sapiens
gtctggcccagttaa

SEQ ID NO: 158392 - DNA, 15 bp, Homo sapiens
ggtctggcccagtta

SEQ ID NO: 158393 - DNA, 15 bp, Homo sapiens
gggtctggcccagtt

SEQ ID NO: 158394 - DNA, 15 bp, Homo sapiens
agggtctggcccagt

SEQ ID NO: 158395 - DNA, 15 bp, Homo sapiens
cagggtctggcccag

SEQ ID NO: 158396 - DNA, 15 bp, Homo sapiens
gcagggtctggccca

SEQ ID NO: 158397 - DNA, 15 bp, Homo sapiens
agcagggtctggccc

SEQ ID NO: 158398 - DNA, 15 bp, Homo sapiens
aagcagggtctggcc

SEQ ID NO: 158399 - DNA, 15 bp, Homo sapiens
taagcagggtctggc

SEQ ID NO: 158400 - DNA, 15 bp, Homo sapiens
ctaagcagggtctgg

SEQ ID NO: 158401 - DNA, 15 bp, Homo sapiens
gctaagcagggtctg

SEQ ID NO: 158402 - DNA, 15 bp, Homo sapiens
agctaagcagggtct

SEQ ID NO: 158403 - DNA, 15 bp, Homo sapiens
cagctaagcagggtc

SEQ ID NO: 158404 - DNA, 15 bp, Homo sapiens
gcagctaagcagggt

SEQ ID NO: 158405 - DNA, 15 bp, Homo sapiens
ggcagctaagcaggg

SEQ ID NO: 158406 - DNA, 15 bp, Homo sapiens
tggcagctaagcagg

SEQ ID NO: 158407 - DNA, 15 bp, Homo sapiens
ttggcagctaagcag

SEQ ID NO: 158408 - DNA, 15 bp, Homo sapiens
cttggcagctaagca

SEQ ID NO: 158409 - DNA, 15 bp, Homo sapiens
tcttggcagctaagc

SEQ ID NO: 158410 - DNA, 15 bp, Homo sapiens
atcttggcagctaag

SEQ ID NO: 158411 - DNA, 15 bp, Homo sapiens
gatcttggcagctaa

SEQ ID NO: 158412 - DNA, 15 bp, Homo sapiens
tgatcttggcagcta

SEQ ID NO: 158413 - DNA, 15 bp, Homo sapiens
ctgatcttggcagct

SEQ ID NO: 158414 - DNA, 15 bp, Homo sapiens
tctgatcttggcagc

SEQ ID NO: 158415 - DNA, 15 bp, Homo sapiens
gtctgatcttggcag

SEQ ID NO: 158416 - DNA, 15 bp, Homo sapiens
tgtctgatcttggca

SEQ ID NO: 158417 - DNA, 15 bp, Homo sapiens
ttgtctgatcttggc

SEQ ID NO: 158418 - DNA, 15 bp, Homo sapiens
cttgtctgatcttgg

SEQ ID NO: 158419 - DNA, 15 bp, Homo sapiens
tcttgtctgatcttg

SEQ ID NO: 158420 - DNA, 15 bp, Homo sapiens
atcttgtctgatctt

SEQ ID NO: 158421 - DNA, 15 bp, Homo sapiens
gatcttgtctgatct

SEQ ID NO: 158422 - DNA, 15 bp, Homo sapiens
tgatcttgtctgatc

SEQ ID NO: 158423 - DNA, 15 bp, Homo sapiens
ctgatcttgtctgat

SEQ ID NO: 158424 - DNA, 15 bp, Homo sapiens
cctgatcttgtctga

SEQ ID NO: 158425 - DNA, 15 bp, Homo sapiens
acctgatcttgtctg

SEQ ID NO: 158426 - DNA, 15 bp, Homo sapiens
cacctgatcttgtct

SEQ ID NO: 158427 - DNA, 15 bp, Homo sapiens
acacctgatcttgtc

SEQ ID NO: 158428 - DNA, 15 bp, Homo sapiens
cacacctgatcttgt

SEQ ID NO: 158429 - DNA, 15 bp, Homo sapiens
acacacctgatcttg

SEQ ID NO: 158430 - DNA, 15 bp, Homo sapiens
gacacacctgatctt

SEQ ID NO: 158431 - DNA, 15 bp, Homo sapiens
ggacacacctgatct

SEQ ID NO: 158432 - DNA, 15 bp, Homo sapiens
tggacacacctgatc

SEQ ID NO: 158433 - DNA, 15 bp, Homo sapiens
ctggacacacctgat

SEQ ID NO: 158434 - DNA, 15 bp, Homo sapiens
cctggacacacctga

SEQ ID NO: 158435 - DNA, 15 bp, Homo sapiens
ccctggacacacctg

SEQ ID NO: 158436 - DNA, 15 bp, Homo sapiens
accctggacacacct

SEQ ID NO: 158437 - DNA, 15 bp, Homo sapiens
caccctggacacacc

SEQ ID NO: 158438 - DNA, 15 bp, Homo sapiens
ccaccctggacacac

SEQ ID NO: 158439 - DNA, 15 bp, Homo sapiens
accaccctggacaca

SEQ ID NO: 158440 - DNA, 15 bp, Homo sapiens
taccaccctggacac

SEQ ID NO: 158441 - DNA, 15 bp, Homo sapiens
ataccaccctggaca

SEQ ID NO: 158442 - DNA, 15 bp, Homo sapiens
cataccaccctggac

SEQ ID NO: 158443 - DNA, 15 bp, Homo sapiens
ccataccaccctgga

SEQ ID NO: 158444 - DNA, 15 bp, Homo sapiens
gccataccaccctgg

SEQ ID NO: 158445 - DNA, 15 bp, Homo sapiens
ggccataccaccctg

SEQ ID NO: 158446 - DNA, 15 bp, Homo sapiens
cggccataccaccct

SEQ ID NO: 158447 - DNA, 15 bp, Homo sapiens
gcggccataccaccc

SEQ ID NO: 158448 - DNA, 15 bp, Homo sapiens
tgcggccataccacc

SEQ ID NO: 158449 - DNA, 15 bp, Homo sapiens
ctgcggccataccac

SEQ ID NO: 158450 - DNA, 15 bp, Homo sapiens
tctgcggccatacca

SEQ ID NO: 158451 - DNA, 15 bp, Homo sapiens
atctgcggccatacc

SEQ ID NO: 158452 - DNA, 15 bp, Homo sapiens
tatctgcggccatac

SEQ ID NO: 158453 - DNA, 15 bp, Homo sapiens
gtatctgcggccata

SEQ ID NO: 158454 - DNA, 15 bp, Homo sapiens
ggtatctgcggccat

SEQ ID NO: 158455 - DNA, 15 bp, Homo sapiens
tggtatctgcggcca

SEQ ID NO: 158456 - DNA, 15 bp, Homo sapiens
ttggtatctgcggcc

SEQ ID NO: 158457 - DNA, 15 bp, Homo sapiens
cttggtatctgcggc

SEQ ID NO: 158458 - DNA, 15 bp, Homo sapiens
gcttggtatctgcgg

SEQ ID NO: 158459 - DNA, 15 bp, Homo sapiens
agcttggtatctgcg

SEQ ID NO: 158460 - DNA, 15 bp, Homo sapiens
tagcttggtatctgc

SEQ ID NO: 158461 - DNA, 15 bp, Homo sapiens
atagcttggtatctg

SEQ ID NO: 158462 - DNA, 15 bp, Homo sapiens
aatagcttggtatct

SEQ ID NO: 158463 - DNA, 15 bp, Homo sapiens
aaatagcttggtatc

SEQ ID NO: 158464 - DNA, 15 bp, Homo sapiens
gaaatagcttggtat

SEQ ID NO: 158465 - DNA, 15 bp, Homo sapiens
agaaatagcttggta

SEQ ID NO: 158466 - DNA, 15 bp, Homo sapiens
tagaaatagcttggt

SEQ ID NO: 158467 - DNA, 15 bp, Homo sapiens
ttagaaatagcttgg

SEQ ID NO: 158468 - DNA, 15 bp, Homo sapiens
gttagaaatagcttg

SEQ ID NO: 158469 - DNA, 15 bp, Homo sapiens
tgttagaaatagctt

SEQ ID NO: 158470 - DNA, 15 bp, Homo sapiens
gtgttagaaatagct

SEQ ID NO: 158471 - DNA, 15 bp, Homo sapiens
tgtgttagaaatagc

SEQ ID NO: 158472 - DNA, 15 bp, Homo sapiens
ttgtgttagaaatag

SEQ ID NO: 158473 - DNA, 15 bp, Homo sapiens
cttgtgttagaaata

SEQ ID NO: 158474 - DNA, 15 bp, Homo sapiens
ccttgtgttagaaat

SEQ ID NO: 158475 - DNA, 15 bp, Homo sapiens
tccttgtgttagaaa

SEQ ID NO: 158476 - DNA, 15 bp, Homo sapiens
atccttgtgttagaa

SEQ ID NO: 158477 - DNA, 15 bp, Homo sapiens
catccttgtgttaga

SEQ ID NO: 158478 - DNA, 15 bp, Homo sapiens
gcatccttgtgttag

SEQ ID NO: 158479 - DNA, 15 bp, Homo sapiens
agcatccttgtgtta

SEQ ID NO: 158480 - DNA, 15 bp, Homo sapiens
gagcatccttgtgtt

SEQ ID NO: 158481 - DNA, 15 bp, Homo sapiens
agagcatccttgtgt

SEQ ID NO: 158482 - DNA, 15 bp, Homo sapiens
gagagcatccttgtg

SEQ ID NO: 158483 - DNA, 15 bp, Homo sapiens
ggagagcatccttgt

SEQ ID NO: 158484 - DNA, 15 bp, Homo sapiens
aggagagcatccttg

SEQ ID NO: 158485 - DNA, 15 bp, Homo sapiens
aaggagagcatcctt

SEQ ID NO: 158486 - DNA, 15 bp, Homo sapiens
aaaggagagcatcct

SEQ ID NO: 158487 - DNA, 15 bp, Homo sapiens
aaaaggagagcatcc

SEQ ID NO: 158488 - DNA, 15 bp, Homo sapiens
taaaaggagagcatc

SEQ ID NO: 158489 - DNA, 15 bp, Homo sapiens
ataaaaggagagcat

SEQ ID NO: 158490 - DNA, 15 bp, Homo sapiens
aataaaaggagagca

SEQ ID NO: 158491 - DNA, 15 bp, Homo sapiens
caataaaaggagagc

SEQ ID NO: 158492 - DNA, 15 bp, Homo sapiens
tcaataaaaggagag

SEQ ID NO: 158493 - DNA, 15 bp, Homo sapiens
ctcaataaaaggaga

SEQ ID NO: 158494 - DNA, 15 bp, Homo sapiens
gctcaataaaaggag

SEQ ID NO: 158495 - DNA, 15 bp, Homo sapiens
tgctcaataaaagga

SEQ ID NO: 158496 - DNA, 15 bp, Homo sapiens
ctgctcaataaaagg

SEQ ID NO: 158497 - DNA, 15 bp, Homo sapiens
cctgctcaataaaag

SEQ ID NO: 158498 - DNA, 15 bp, Homo sapiens
ccctgctcaataaaa

SEQ ID NO: 158499 - DNA, 15 bp, Homo sapiens
tccctgctcaataaa

SEQ ID NO: 158500 - DNA, 15 bp, Homo sapiens
ctccctgctcaataa

SEQ ID NO: 158501 - DNA, 15 bp, Homo sapiens
tctccctgctcaata

SEQ ID NO: 158502 - DNA, 15 bp, Homo sapiens
ttctccctgctcaat

SEQ ID NO: 158503 - DNA, 15 bp, Homo sapiens
cttctccctgctcaa

SEQ ID NO: 158504 - DNA, 15 bp, Homo sapiens
tcttctccctgctca

SEQ ID NO: 158505 - DNA, 15 bp, Homo sapiens
gtcttctccctgctc

SEQ ID NO: 158506 - DNA, 15 bp, Homo sapiens
tgtcttctccctgct

SEQ ID NO: 158507 - DNA, 15 bp, Homo sapiens
ctgtcttctccctgc

SEQ ID NO: 158508 - DNA, 15 bp, Homo sapiens
gctgtcttctccctg

SEQ ID NO: 158509 - DNA, 15 bp, Homo sapiens
tgctgtcttctccct

SEQ ID NO: 158510 - DNA, 15 bp, Homo sapiens
gtgctgtcttctccc

SEQ ID NO: 158511 - DNA, 15 bp, Homo sapiens
cgtgctgtcttctcc

SEQ ID NO: 158512 - DNA, 15 bp, Homo sapiens
acgtgctgtcttctc

SEQ ID NO: 158513 - DNA, 15 bp, Homo sapiens
tacgtgctgtcttct

SEQ ID NO: 158514 - DNA, 15 bp, Homo sapiens
gtacgtgctgtcttc

SEQ ID NO: 158515 - DNA, 15 bp, Homo sapiens
tgtacgtgctgtctt

SEQ ID NO: 158516 - DNA, 15 bp, Homo sapiens
ctgtacgtgctgtct

SEQ ID NO: 158517 - DNA, 15 bp, Homo sapiens
tctgtacgtgctgtc

SEQ ID NO: 158518 - DNA, 15 bp, Homo sapiens
gtctgtacgtgctgt

SEQ ID NO: 158519 - DNA, 15 bp, Homo sapiens
ggtctgtacgtgctg

SEQ ID NO: 158520 - DNA, 15 bp, Homo sapiens
tggtctgtacgtgct

SEQ ID NO: 158521 - DNA, 15 bp, Homo sapiens
ttggtctgtacgtgc

SEQ ID NO: 158522 - DNA, 15 bp, Homo sapiens
gttggtctgtacgtg

SEQ ID NO: 158523 - DNA, 15 bp, Homo sapiens
ggttggtctgtacgt

SEQ ID NO: 158524 - DNA, 15 bp, Homo sapiens
tggttggtctgtacg

SEQ ID NO: 158525 - DNA, 15 bp, Homo sapiens
atggttggtctgtac

SEQ ID NO: 158526 - DNA, 15 bp, Homo sapiens
gatggttggtctgta

SEQ ID NO: 158527 - DNA, 15 bp, Homo sapiens
ggatggttggtctgt

SEQ ID NO: 158528 - DNA, 15 bp, Homo sapiens
aggatggttggtctg

SEQ ID NO: 158529 - DNA, 15 bp, Homo sapiens
caggatggttggtct

SEQ ID NO: 158530 - DNA, 15 bp, Homo sapiens
ccaggatggttggtc

SEQ ID NO: 158531 - DNA, 15 bp, Homo sapiens
accaggatggttggt

SEQ ID NO: 158532 - DNA, 15 bp, Homo sapiens
aaccaggatggttgg

SEQ ID NO: 158533 - DNA, 15 bp, Homo sapiens
caaccaggatggttg

SEQ ID NO: 158534 - DNA, 15 bp, Homo sapiens
acaaccaggatggtt

SEQ ID NO: 158535 - DNA, 15 bp, Homo sapiens
tacaaccaggatggt

SEQ ID NO: 158536 - DNA, 15 bp, Homo sapiens
ttacaaccaggatgg

SEQ ID NO: 158537 - DNA, 15 bp, Homo sapiens
tttacaaccaggatg

SEQ ID NO: 158538 - DNA, 15 bp, Homo sapiens
gtttacaaccaggat

SEQ ID NO: 158539 - DNA, 15 bp, Homo sapiens
agtttacaaccagga

SEQ ID NO: 158540 - DNA, 15 bp, Homo sapiens
aagtttacaaccagg

SEQ ID NO: 158541 - DNA, 15 bp, Homo sapiens
caagtttacaaccag

SEQ ID NO: 158542 - DNA, 15 bp, Homo sapiens
acaagtttacaacca

SEQ ID NO: 158543 - DNA, 15 bp, Homo sapiens
cacaagtttacaacc

SEQ ID NO: 158544 - DNA, 15 bp, Homo sapiens
acacaagtttacaac

SEQ ID NO: 158545 - DNA, 15 bp, Homo sapiens
gacacaagtttacaa

SEQ ID NO: 158546 - DNA, 15 bp, Homo sapiens
ggacacaagtttaca

SEQ ID NO: 158547 - DNA, 15 bp, Homo sapiens
aggacacaagtttac

SEQ ID NO: 158548 - DNA, 15 bp, Homo sapiens
taggacacaagttta

SEQ ID NO: 158549 - DNA, 15 bp, Homo sapiens
ctaggacacaagttt

SEQ ID NO: 158550 - DNA, 15 bp, Homo sapiens
actaggacacaagtt

SEQ ID NO: 158551 - DNA, 15 bp, Homo sapiens
gactaggacacaagt

SEQ ID NO: 158552 - DNA, 15 bp, Homo sapiens
tgactaggacacaag

SEQ ID NO: 158553 - DNA, 15 bp, Homo sapiens
ctgactaggacacaa

SEQ ID NO: 158554 - DNA, 15 bp, Homo sapiens
tctgactaggacaca

SEQ ID NO: 158555 - DNA, 15 bp, Homo sapiens
ctctgactaggacac

SEQ ID NO: 158556 - DNA, 15 bp, Homo sapiens
gctctgactaggaca

SEQ ID NO: 158557 - DNA, 15 bp, Homo sapiens
agctctgactaggac

SEQ ID NO: 158558 - DNA, 15 bp, Homo sapiens
gagctctgactagga

SEQ ID NO: 158559 - DNA, 15 bp, Homo sapiens
agagctctgactagg

SEQ ID NO: 158560 - DNA, 15 bp, Homo sapiens
aagagctctgactag

SEQ ID NO: 158561 - DNA, 15 bp, Homo sapiens
aaagagctctgacta

SEQ ID NO: 158562 - DNA, 15 bp, Homo sapiens
gaaagagctctgact

SEQ ID NO: 158563 - DNA, 15 bp, Homo sapiens
agaaagagctctgac

SEQ ID NO: 158564 - DNA, 15 bp, Homo sapiens
tagaaagagctctga

SEQ ID NO: 158565 - DNA, 15 bp, Homo sapiens
ctagaaagagctctg

SEQ ID NO: 158566 - DNA, 15 bp, Homo sapiens
gctagaaagagctct

SEQ ID NO: 158567 - DNA, 15 bp, Homo sapiens
agctagaaagagctc

SEQ ID NO: 158568 - DNA, 15 bp, Homo sapiens
cagctagaaagagct

SEQ ID NO: 158569 - DNA, 15 bp, Homo sapiens
ccagctagaaagagc

SEQ ID NO: 158570 - DNA, 15 bp, Homo sapiens
tccagctagaaagag

SEQ ID NO: 158571 - DNA, 15 bp, Homo sapiens
ctccagctagaaaga

SEQ ID NO: 158572 - DNA, 15 bp, Homo sapiens
actccagctagaaag

SEQ ID NO: 158573 - DNA, 15 bp, Homo sapiens
tactccagctagaaa

SEQ ID NO: 158574 - DNA, 15 bp, Homo sapiens
ctactccagctagaa

SEQ ID NO: 158575 - DNA, 15 bp, Homo sapiens
tctactccagctaga

SEQ ID NO: 158576 - DNA, 15 bp, Homo sapiens
ttctactccagctag

SEQ ID NO: 158577 - DNA, 15 bp, Homo sapiens
tttctactccagcta

SEQ ID NO: 158578 - DNA, 15 bp, Homo sapiens
ttttctactccagct

SEQ ID NO: 158579 - DNA, 15 bp, Homo sapiens
attttctactccagc

SEQ ID NO: 158580 - DNA, 15 bp, Homo sapiens
aattttctactccag

SEQ ID NO: 158581 - DNA, 15 bp, Homo sapiens
gaattttctactcca

SEQ ID NO: 158582 - DNA, 15 bp, Homo sapiens
agaattttctactcc

SEQ ID NO: 158583 - DNA, 15 bp, Homo sapiens
aagaattttctactc

SEQ ID NO: 158584 - DNA, 15 bp, Homo sapiens
taagaattttctact

SEQ ID NO: 158585 - DNA, 15 bp, Homo sapiens
ctaagaattttctac

SEQ ID NO: 158586 - DNA, 15 bp, Homo sapiens
cctaagaattttcta

SEQ ID NO: 158587 - DNA, 15 bp, Homo sapiens
gcctaagaattttct

SEQ ID NO: 158588 - DNA, 15 bp, Homo sapiens
agcctaagaattttc

SEQ ID NO: 158589 - DNA, 15 bp, Homo sapiens
cagcctaagaatttt

SEQ ID NO: 158590 - DNA, 15 bp, Homo sapiens
acagcctaagaattt

SEQ ID NO: 158591 - DNA, 15 bp, Homo sapiens
tacagcctaagaatt

SEQ ID NO: 158592 - DNA, 15 bp, Homo sapiens
atacagcctaagaat

SEQ ID NO: 158593 - DNA, 15 bp, Homo sapiens
catacagcctaagaa

SEQ ID NO: 158594 - DNA, 15 bp, Homo sapiens
acatacagcctaaga

SEQ ID NO: 158595 - DNA, 15 bp, Homo sapiens
tacatacagcctaag

SEQ ID NO: 158596 - DNA, 15 bp, Homo sapiens
ttacatacagcctaa

SEQ ID NO: 158597 - DNA, 15 bp, Homo sapiens
attacatacagccta

SEQ ID NO: 158598 - DNA, 15 bp, Homo sapiens
cattacatacagcct

SEQ ID NO: 158599 - DNA, 15 bp, Homo sapiens
ccattacatacagcc

SEQ ID NO: 158600 - DNA, 15 bp, Homo sapiens
tccattacatacagc

SEQ ID NO: 158601 - DNA, 15 bp, Homo sapiens
ttccattacatacag

SEQ ID NO: 158602 - DNA, 15 bp, Homo sapiens
tttccattacataca

SEQ ID NO: 158603 - DNA, 15 bp, Homo sapiens
ctttccattacatac

SEQ ID NO: 158604 - DNA, 15 bp, Homo sapiens
tctttccattacata

SEQ ID NO: 158605 - DNA, 15 bp, Homo sapiens
ctctttccattacat

SEQ ID NO: 158606 - DNA, 15 bp, Homo sapiens
tctctttccattaca

SEQ ID NO: 158607 - DNA, 15 bp, Homo sapiens
ctctctttccattac

SEQ ID NO: 158608 - DNA, 15 bp, Homo sapiens
actctctttccatta

SEQ ID NO: 158609 - DNA, 15 bp, Homo sapiens
cactctctttccatt

SEQ ID NO: 158610 - DNA, 15 bp, Homo sapiens
ccactctctttccat

SEQ ID NO: 158611 - DNA, 15 bp, Homo sapiens
tccactctctttcca

SEQ ID NO: 158612 - DNA, 15 bp, Homo sapiens
ctccactctctttcc

SEQ ID NO: 158613 - DNA, 15 bp, Homo sapiens
actccactctctttc

SEQ ID NO: 158614 - DNA, 15 bp, Homo sapiens
gactccactctcttt

SEQ ID NO: 158615 - DNA, 15 bp, Homo sapiens
ggactccactctctt

SEQ ID NO: 158616 - DNA, 15 bp, Homo sapiens
tggactccactctct

SEQ ID NO: 158617 - DNA, 15 bp, Homo sapiens
ctggactccactctc

SEQ ID NO: 158618 - DNA, 15 bp, Homo sapiens
gctggactccactct

SEQ ID NO: 158619 - DNA, 15 bp, Homo sapiens
tgctggactccactc

SEQ ID NO: 158620 - DNA, 15 bp, Homo sapiens
ttgctggactccact

SEQ ID NO: 158621 - DNA, 15 bp, Homo sapiens
attgctggactccac

SEQ ID NO: 158622 - DNA, 15 bp, Homo sapiens
tattgctggactcca

SEQ ID NO: 158623 - DNA, 15 bp, Homo sapiens
ttattgctggactcc

SEQ ID NO: 158624 - DNA, 15 bp, Homo sapiens
tttattgctggactc

SEQ ID NO: 158625 - DNA, 15 bp, Homo sapiens
ttttattgctggact

SEQ ID NO: 158626 - DNA, 15 bp, Homo sapiens
tttttattgctggac

SEQ ID NO: 158627 - DNA, 15 bp, Homo sapiens
gtttttattgctgga

SEQ ID NO: 158628 - DNA, 15 bp, Homo sapiens
tgtttttattgctgg

SEQ ID NO: 158629 - DNA, 15 bp, Homo sapiens
ctgtttttattgctg

SEQ ID NO: 158630 - DNA, 15 bp, Homo sapiens
tctgtttttattgct

SEQ ID NO: 158631 - DNA, 15 bp, Homo sapiens
atctgtttttattgc

SEQ ID NO: 158632 - DNA, 15 bp, Homo sapiens
gatctgtttttattg

SEQ ID NO: 158633 - DNA, 15 bp, Homo sapiens
tgatctgtttttatt

SEQ ID NO: 158634 - DNA, 15 bp, Homo sapiens
ctgatctgtttttat

SEQ ID NO: 158635 - DNA, 15 bp, Homo sapiens
cctgatctgttttta

SEQ ID NO: 158636 - DNA, 15 bp, Homo sapiens
acctgatctgttttt

SEQ ID NO: 158637 - DNA, 15 bp, Homo sapiens
tacctgatctgtttt

SEQ ID NO: 158638 - DNA, 15 bp, Homo sapiens
ttacctgatctgttt

SEQ ID NO: 158639 - DNA, 15 bp, Homo sapiens
tttacctgatctgtt

SEQ ID NO: 158640 - DNA, 15 bp, Homo sapiens
ttttacctgatctgt

SEQ ID NO: 158641 - DNA, 15 bp, Homo sapiens
tttttacctgatctg

SEQ ID NO: 158642 - DNA, 15 bp, Homo sapiens
atttttacctgatct

SEQ ID NO: 158643 - DNA, 15 bp, Homo sapiens
tatttttacctgatc

SEQ ID NO: 158644 - DNA, 15 bp, Homo sapiens
ctatttttacctgat

SEQ ID NO: 158645 - DNA, 15 bp, Homo sapiens
tctatttttacctga

SEQ ID NO: 158646 - DNA, 15 bp, Homo sapiens
ctctatttttacctg

SEQ ID NO: 158647 - DNA, 15 bp, Homo sapiens
gctctatttttacct

SEQ ID NO: 158648 - DNA, 15 bp, Homo sapiens
agctctatttttacc

SEQ ID NO: 158649 - DNA, 15 bp, Homo sapiens
tagctctatttttac

SEQ ID NO: 158650 - DNA, 15 bp, Homo sapiens
ctagctctattttta

SEQ ID NO: 158651 - DNA, 15 bp, Homo sapiens
cctagctctattttt

SEQ ID NO: 158652 - DNA, 15 bp, Homo sapiens
tcctagctctatttt

SEQ ID NO: 158653 - DNA, 15 bp, Homo sapiens
ctcctagctctattt

SEQ ID NO: 158654 - DNA, 15 bp, Homo sapiens
actcctagctctatt

SEQ ID NO: 158655 - DNA, 15 bp, Homo sapiens
gactcctagctctat

SEQ ID NO: 158656 - DNA, 15 bp, Homo sapiens
tgactcctagctcta

SEQ ID NO: 158657 - DNA, 15 bp, Homo sapiens
ttgactcctagctct

SEQ ID NO: 158658 - DNA, 15 bp, Homo sapiens
attgactcctagctc

SEQ ID NO: 158659 - DNA, 15 bp, Homo sapiens
tattgactcctagct

SEQ ID NO: 158660 - DNA, 15 bp, Homo sapiens
ctattgactcctagc

SEQ ID NO: 158661 - DNA, 15 bp, Homo sapiens
actattgactcctag

SEQ ID NO: 158662 - DNA, 15 bp, Homo sapiens
cactattgactccta

SEQ ID NO: 158663 - DNA, 15 bp, Homo sapiens
tcactattgactcct

SEQ ID NO: 158664 - DNA, 15 bp, Homo sapiens
ctcactattgactcc

SEQ ID NO: 158665 - DNA, 15 bp, Homo sapiens
cctcactattgactc

SEQ ID NO: 158666 - DNA, 15 bp, Homo sapiens
ccctcactattgact

SEQ ID NO: 158667 - DNA, 15 bp, Homo sapiens
gccctcactattgac

SEQ ID NO: 158668 - DNA, 15 bp, Homo sapiens
agccctcactattga

SEQ ID NO: 158669 - DNA, 15 bp, Homo sapiens
cagccctcactattg

SEQ ID NO: 158670 - DNA, 15 bp, Homo sapiens
tcagccctcactatt

SEQ ID NO: 158671 - DNA, 15 bp, Homo sapiens
ctcagccctcactat

SEQ ID NO: 158672 - DNA, 15 bp, Homo sapiens
actcagccctcacta

SEQ ID NO: 158673 - DNA, 15 bp, Homo sapiens
aactcagccctcact

SEQ ID NO: 158674 - DNA, 15 bp, Homo sapiens
taactcagccctcac

SEQ ID NO: 158675 - DNA, 15 bp, Homo sapiens
ctaactcagccctca

SEQ ID NO: 158676 - DNA, 15 bp, Homo sapiens
cctaactcagccctc

SEQ ID NO: 158677 - DNA, 15 bp, Homo sapiens
tcctaactcagccct

SEQ ID NO: 158678 - DNA, 15 bp, Homo sapiens
ctcctaactcagccc

SEQ ID NO: 158679 - DNA, 15 bp, Homo sapiens
tctcctaactcagcc

SEQ ID NO: 158680 - DNA, 15 bp, Homo sapiens
ctctcctaactcagc

SEQ ID NO: 158681 - DNA, 15 bp, Homo sapiens
actctcctaactcag

SEQ ID NO: 158682 - DNA, 15 bp, Homo sapiens
aactctcctaactca

SEQ ID NO: 158683 - DNA, 15 bp, Homo sapiens
gaactctcctaactc

SEQ ID NO: 158684 - DNA, 15 bp, Homo sapiens
agaactctcctaact

SEQ ID NO: 158685 - DNA, 15 bp, Homo sapiens
gagaactctcctaac

SEQ ID NO: 158686 - DNA, 15 bp, Homo sapiens
agagaactctcctaa

SEQ ID NO: 158687 - DNA, 15 bp, Homo sapiens
cagagaactctccta

SEQ ID NO: 158688 - DNA, 15 bp, Homo sapiens
acagagaactctcct

SEQ ID NO: 158689 - DNA, 15 bp, Homo sapiens
tacagagaactctcc

SEQ ID NO: 158690 - DNA, 15 bp, Homo sapiens
gtacagagaactctc

SEQ ID NO: 158691 - DNA, 15 bp, Homo sapiens
agtacagagaactct

SEQ ID NO: 158692 - DNA, 15 bp, Homo sapiens
aagtacagagaactc

SEQ ID NO: 158693 - DNA, 15 bp, Homo sapiens
gaagtacagagaact

SEQ ID NO: 158694 - DNA, 15 bp, Homo sapiens
ggaagtacagagaac

SEQ ID NO: 158695 - DNA, 15 bp, Homo sapiens
gggaagtacagagaa

SEQ ID NO: 158696 - DNA, 15 bp, Homo sapiens
agggaagtacagaga

SEQ ID NO: 158697 - DNA, 15 bp, Homo sapiens
tagggaagtacagag

SEQ ID NO: 158698 - DNA, 15 bp, Homo sapiens
ctagggaagtacaga

SEQ ID NO: 158699 - DNA, 15 bp, Homo sapiens
tctagggaagtacag

SEQ ID NO: 158700 - DNA, 15 bp, Homo sapiens
ctctagggaagtaca

SEQ ID NO: 158701 - DNA, 15 bp, Homo sapiens
tctctagggaagtac

SEQ ID NO: 158702 - DNA, 15 bp, Homo sapiens
atctctagggaagta

SEQ ID NO: 158703 - DNA, 15 bp, Homo sapiens
aatctctagggaagt

SEQ ID NO: 158704 - DNA, 15 bp, Homo sapiens
aaatctctagggaag

SEQ ID NO: 158705 - DNA, 15 bp, Homo sapiens
gaaatctctagggaa

SEQ ID NO: 158706 - DNA, 15 bp, Homo sapiens
ggaaatctctaggga

SEQ ID NO: 158707 - DNA, 15 bp, Homo sapiens
tggaaatctctaggg

SEQ ID NO: 158708 - DNA, 15 bp, Homo sapiens
ctggaaatctctagg

SEQ ID NO: 158709 - DNA, 15 bp, Homo sapiens
gctggaaatctctag

SEQ ID NO: 158710 - DNA, 15 bp, Homo sapiens
ggctggaaatctcta

SEQ ID NO: 158711 - DNA, 15 bp, Homo sapiens
tggctggaaatctct

SEQ ID NO: 158712 - DNA, 15 bp, Homo sapiens
atggctggaaatctc

SEQ ID NO: 158713 - DNA, 15 bp, Homo sapiens
gatggctggaaatct

SEQ ID NO: 158714 - DNA, 15 bp, Homo sapiens
agatggctggaaatc

SEQ ID NO: 158715 - DNA, 15 bp, Homo sapiens
tagatggctggaaat

SEQ ID NO: 158716 - DNA, 15 bp, Homo sapiens
ttagatggctggaaa

SEQ ID NO: 158717 - DNA, 15 bp, Homo sapiens
cttagatggctggaa

SEQ ID NO: 158718 - DNA, 15 bp, Homo sapiens
gcttagatggctgga

SEQ ID NO: 158719 - DNA, 15 bp, Homo sapiens
tgcttagatggctgg

SEQ ID NO: 158720 - DNA, 15 bp, Homo sapiens
atgcttagatggctg

SEQ ID NO: 158721 - DNA, 15 bp, Homo sapiens
tatgcttagatggct

SEQ ID NO: 158722 - DNA, 15 bp, Homo sapiens
gtatgcttagatggc

SEQ ID NO: 158723 - DNA, 15 bp, Homo sapiens
cgtatgcttagatgg

SEQ ID NO: 158724 - DNA, 15 bp, Homo sapiens
acgtatgcttagatg

SEQ ID NO: 158725 - DNA, 15 bp, Homo sapiens
cacgtatgcttagat

SEQ ID NO: 158726 - DNA, 15 bp, Homo sapiens
acacgtatgcttaga

SEQ ID NO: 158727 - DNA, 15 bp, Homo sapiens
cacacgtatgcttag

SEQ ID NO: 158728 - DNA, 15 bp, Homo sapiens
tcacacgtatgctta

SEQ ID NO: 158729 - DNA, 15 bp, Homo sapiens
ctcacacgtatgctt

SEQ ID NO: 158730 - DNA, 15 bp, Homo sapiens
actcacacgtatgct

SEQ ID NO: 158731 - DNA, 15 bp, Homo sapiens
aactcacacgtatgc

SEQ ID NO: 158732 - DNA, 15 bp, Homo sapiens
gaactcacacgtatg

SEQ ID NO: 158733 - DNA, 15 bp, Homo sapiens
agaactcacacgtat

SEQ ID NO: 158734 - DNA, 15 bp, Homo sapiens
aagaactcacacgta

SEQ ID NO: 158735 - DNA, 15 bp, Homo sapiens
caagaactcacacgt

SEQ ID NO: 158736 - DNA, 15 bp, Homo sapiens
gcaagaactcacacg

SEQ ID NO: 158737 - DNA, 15 bp, Homo sapiens
agcaagaactcacac

SEQ ID NO: 158738 - DNA, 15 bp, Homo sapiens
aagcaagaactcaca

SEQ ID NO: 158739 - DNA, 15 bp, Homo sapiens
aaagcaagaactcac

SEQ ID NO: 158740 - DNA, 15 bp, Homo sapiens
caaagcaagaactca

SEQ ID NO: 158741 - DNA, 15 bp, Homo sapiens
tcaaagcaagaactc

SEQ ID NO: 158742 - DNA, 15 bp, Homo sapiens
gtcaaagcaagaact

SEQ ID NO: 158743 - DNA, 15 bp, Homo sapiens
tgtcaaagcaagaac

SEQ ID NO: 158744 - DNA, 15 bp, Homo sapiens
ttgtcaaagcaagaa

SEQ ID NO: 158745 - DNA, 15 bp, Homo sapiens
tttgtcaaagcaaga

SEQ ID NO: 158746 - DNA, 15 bp, Homo sapiens
atttgtcaaagcaag

SEQ ID NO: 158747 - DNA, 15 bp, Homo sapiens
tatttgtcaaagcaa

SEQ ID NO: 158748 - DNA, 15 bp, Homo sapiens
ttatttgtcaaagca

SEQ ID NO: 158749 - DNA, 15 bp, Homo sapiens
cttatttgtcaaagc

SEQ ID NO: 158750 - DNA, 15 bp, Homo sapiens
acttatttgtcaaag

SEQ ID NO: 158751 - DNA, 15 bp, Homo sapiens
tacttatttgtcaaa

SEQ ID NO: 158752 - DNA, 15 bp, Homo sapiens
gtacttatttgtcaa

SEQ ID NO: 158753 - DNA, 15 bp, Homo sapiens
agtacttatttgtca

SEQ ID NO: 158754 - DNA, 15 bp, Homo sapiens
gagtacttatttgtc

SEQ ID NO: 158755 - DNA, 15 bp, Homo sapiens
ggagtacttatttgt

SEQ ID NO: 158756 - DNA, 15 bp, Homo sapiens
tggagtacttatttg

SEQ ID NO: 158757 - DNA, 15 bp, Homo sapiens
gtggagtacttattt

SEQ ID NO: 158758 - DNA, 15 bp, Homo sapiens
agtggagtacttatt

SEQ ID NO: 158759 - DNA, 15 bp, Homo sapiens
cagtggagtacttat

SEQ ID NO: 158760 - DNA, 15 bp, Homo sapiens
ccagtggagtactta

SEQ ID NO: 158761 - DNA, 15 bp, Homo sapiens
accagtggagtactt

SEQ ID NO: 158762 - DNA, 15 bp, Homo sapiens
taccagtggagtact

SEQ ID NO: 158763 - DNA, 15 bp, Homo sapiens
ataccagtggagtac

SEQ ID NO: 158764 - DNA, 15 bp, Homo sapiens
cataccagtggagta

SEQ ID NO: 158765 - DNA, 15 bp, Homo sapiens
gcataccagtggagt

SEQ ID NO: 158766 - DNA, 15 bp, Homo sapiens
tgcataccagtggag

SEQ ID NO: 158767 - DNA, 15 bp, Homo sapiens
gtgcataccagtgga

SEQ ID NO: 158768 - DNA, 15 bp, Homo sapiens
tgtgcataccagtgg

SEQ ID NO: 158769 - DNA, 15 bp, Homo sapiens
atgtgcataccagtg

SEQ ID NO: 158770 - DNA, 15 bp, Homo sapiens
tatgtgcataccagt

SEQ ID NO: 158771 - DNA, 15 bp, Homo sapiens
ctatgtgcataccag

SEQ ID NO: 158772 - DNA, 15 bp, Homo sapiens
tctatgtgcatacca

SEQ ID NO: 158773 - DNA, 15 bp, Homo sapiens
ttctatgtgcatacc

SEQ ID NO: 158774 - DNA, 15 bp, Homo sapiens
tttctatgtgcatac

SEQ ID NO: 158775 - DNA, 15 bp, Homo sapiens
gtttctatgtgcata

SEQ ID NO: 158776 - DNA, 15 bp, Homo sapiens
agtttctatgtgcat

SEQ ID NO: 158777 - DNA, 15 bp, Homo sapiens
aagtttctatgtgca

SEQ ID NO: 158778 - DNA, 15 bp, Homo sapiens
gaagtttctatgtgc

SEQ ID NO: 158779 - DNA, 15 bp, Homo sapiens
agaagtttctatgtg

SEQ ID NO: 158780 - DNA, 15 bp, Homo sapiens
aagaagtttctatgt

SEQ ID NO: 158781 - DNA, 15 bp, Homo sapiens
aaagaagtttctatg

SEQ ID NO: 158782 - DNA, 15 bp, Homo sapiens
gaaagaagtttctat

SEQ ID NO: 158783 - DNA, 15 bp, Homo sapiens
tgaaagaagtttcta

SEQ ID NO: 158784 - DNA, 15 bp, Homo sapiens
gtgaaagaagtttct

SEQ ID NO: 158785 - DNA, 15 bp, Homo sapiens
ggtgaaagaagtttc

SEQ ID NO: 158786 - DNA, 15 bp, Homo sapiens
aggtgaaagaagttt

SEQ ID NO: 158787 - DNA, 15 bp, Homo sapiens
caggtgaaagaagtt

SEQ ID NO: 158788 - DNA, 15 bp, Homo sapiens
acaggtgaaagaagt

SEQ ID NO: 158789 - DNA, 15 bp, Homo sapiens
cacaggtgaaagaag

SEQ ID NO: 158790 - DNA, 15 bp, Homo sapiens
ccacaggtgaaagaa

SEQ ID NO: 158791 - DNA, 15 bp, Homo sapiens
cccacaggtgaaaga

SEQ ID NO: 158792 - DNA, 15 bp, Homo sapiens
tcccacaggtgaaag

SEQ ID NO: 158793 - DNA, 15 bp, Homo sapiens
atcccacaggtgaaa

SEQ ID NO: 158794 - DNA, 15 bp, Homo sapiens
gatcccacaggtgaa

SEQ ID NO: 158795 - DNA, 15 bp, Homo sapiens
tgatcccacaggtga

SEQ ID NO: 158796 - DNA, 15 bp, Homo sapiens
atgatcccacaggtg

SEQ ID NO: 158797 - DNA, 15 bp, Homo sapiens
aatgatcccacaggt

SEQ ID NO: 158798 - DNA, 15 bp, Homo sapiens
taatgatcccacagg

SEQ ID NO: 158799 - DNA, 15 bp, Homo sapiens
ataatgatcccacag

SEQ ID NO: 158800 - DNA, 15 bp, Homo sapiens
aataatgatcccaca

SEQ ID NO: 158801 - DNA, 15 bp, Homo sapiens
taataatgatcccac

SEQ ID NO: 158802 - DNA, 15 bp, Homo sapiens
ttaataatgatccca

SEQ ID NO: 158803 - DNA, 15 bp, Homo sapiens
gttaataatgatccc

SEQ ID NO: 158804 - DNA, 15 bp, Homo sapiens
tgttaataatgatcc

SEQ ID NO: 158805 - DNA, 15 bp, Homo sapiens
atgttaataatgatc

SEQ ID NO: 158806 - DNA, 15 bp, Homo sapiens
catgttaataatgat

SEQ ID NO: 158807 - DNA, 15 bp, Homo sapiens
acatgttaataatga

SEQ ID NO: 158808 - DNA, 15 bp, Homo sapiens
aacatgttaataatg

SEQ ID NO: 158809 - DNA, 15 bp, Homo sapiens
aaacatgttaataat

SEQ ID NO: 158810 - DNA, 15 bp, Homo sapiens
aaaacatgttaataa

SEQ ID NO: 158811 - DNA, 15 bp, Homo sapiens
taaaacatgttaata

SEQ ID NO: 158812 - DNA, 15 bp, Homo sapiens
ataaaacatgttaat

SEQ ID NO: 158813 - DNA, 15 bp, Homo sapiens
cataaaacatgttaa

SEQ ID NO: 158814 - DNA, 15 bp, Homo sapiens
acataaaacatgtta

SEQ ID NO: 158815 - DNA, 15 bp, Homo sapiens
cacataaaacatgtt

SEQ ID NO: 158816 - DNA, 15 bp, Homo sapiens
ccacataaaacatgt

SEQ ID NO: 158817 - DNA, 15 bp, Homo sapiens
tccacataaaacatg

SEQ ID NO: 158818 - DNA, 15 bp, Homo sapiens
ctccacataaaacat

SEQ ID NO: 158819 - DNA, 15 bp, Homo sapiens
cctccacataaaaca

SEQ ID NO: 158820 - DNA, 15 bp, Homo sapiens
ccctccacataaaac

SEQ ID NO: 158821 - DNA, 15 bp, Homo sapiens
tccctccacataaaa

SEQ ID NO: 158822 - DNA, 15 bp, Homo sapiens
ttccctccacataaa

SEQ ID NO: 158823 - DNA, 15 bp, Homo sapiens
tttccctccacataa

SEQ ID NO: 158824 - DNA, 15 bp, Homo sapiens
ttttccctccacata

SEQ ID NO: 158825 - DNA, 15 bp, Homo sapiens
tttttccctccacat

SEQ ID NO: 158826 - DNA, 15 bp, Homo sapiens
atttttccctccaca

SEQ ID NO: 158827 - DNA, 15 bp, Homo sapiens
tatttttccctccac

SEQ ID NO: 158828 - DNA, 15 bp, Homo sapiens
ttatttttccctcca

SEQ ID NO: 158829 - DNA, 15 bp, Homo sapiens
tttatttttccctcc

SEQ ID NO: 158830 - DNA, 15 bp, Homo sapiens
ctttatttttccctc

SEQ ID NO: 158831 - DNA, 15 bp, Homo sapiens
tctttatttttccct

SEQ ID NO: 158832 - DNA, 15 bp, Homo sapiens
atctttatttttccc

SEQ ID NO: 158833 - DNA, 15 bp, Homo sapiens
aatctttatttttcc

SEQ ID NO: 158834 - DNA, 15 bp, Homo sapiens
aaatctttatttttc

SEQ ID NO: 158835 - DNA, 15 bp, Homo sapiens
aaaatctttattttt

SEQ ID NO: 158836 - DNA, 15 bp, Homo sapiens
taaaatctttatttt

SEQ ID NO: 158837 - DNA, 15 bp, Homo sapiens
ctaaaatctttattt

SEQ ID NO: 158838 - DNA, 15 bp, Homo sapiens
tctaaaatctttatt

SEQ ID NO: 158839 - DNA, 15 bp, Homo sapiens
ttctaaaatctttat

SEQ ID NO: 158840 - DNA, 15 bp, Homo sapiens
gttctaaaatcttta

SEQ ID NO: 158841 - DNA, 15 bp, Homo sapiens
agttctaaaatcttt

SEQ ID NO: 158842 - DNA, 15 bp, Homo sapiens
aagttctaaaatctt

SEQ ID NO: 158843 - DNA, 15 bp, Homo sapiens
gaagttctaaaatct

SEQ ID NO: 158844 - DNA, 15 bp, Homo sapiens
agaagttctaaaatc

SEQ ID NO: 158845 - DNA, 15 bp, Homo sapiens
aagaagttctaaaat

SEQ ID NO: 158846 - DNA, 15 bp, Homo sapiens
aaagaagttctaaaa

SEQ ID NO: 158847 - DNA, 15 bp, Homo sapiens
gaaagaagttctaaa

SEQ ID NO: 158848 - DNA, 15 bp, Homo sapiens
agaaagaagttctaa

SEQ ID NO: 158849 - DNA, 15 bp, Homo sapiens
aagaaagaagttcta

SEQ ID NO: 158850 - DNA, 15 bp, Homo sapiens
gaagaaagaagttct

SEQ ID NO: 158851 - DNA, 15 bp, Homo sapiens
ggaagaaagaagttc

SEQ ID NO: 158852 - DNA, 15 bp, Homo sapiens
gggaagaaagaagtt

SEQ ID NO: 158853 - DNA, 15 bp, Homo sapiens
agggaagaaagaagt

SEQ ID NO: 158854 - DNA, 15 bp, Homo sapiens
gagggaagaaagaag

SEQ ID NO: 158855 - DNA, 15 bp, Homo sapiens
tgagggaagaaagaa

SEQ ID NO: 158856 - DNA, 15 bp, Homo sapiens
atgagggaagaaaga

SEQ ID NO: 158857 - DNA, 15 bp, Homo sapiens
catgagggaagaaag

SEQ ID NO: 158858 - DNA, 15 bp, Homo sapiens
acatgagggaagaaa

SEQ ID NO: 158859 - DNA, 15 bp, Homo sapiens
aacatgagggaagaa

SEQ ID NO: 158860 - DNA, 15 bp, Homo sapiens
aaacatgagggaaga

SEQ ID NO: 158861 - DNA, 15 bp, Homo sapiens
aaaacatgagggaag

SEQ ID NO: 158862 - DNA, 15 bp, Homo sapiens
gaaaacatgagggaa

SEQ ID NO: 158863 - DNA, 15 bp, Homo sapiens
tgaaaacatgaggga

SEQ ID NO: 158864 - DNA, 15 bp, Homo sapiens
gtgaaaacatgaggg

SEQ ID NO: 158865 - DNA, 15 bp, Homo sapiens
agtgaaaacatgagg

SEQ ID NO: 158866 - DNA, 15 bp, Homo sapiens
gagtgaaaacatgag

SEQ ID NO: 158867 - DNA, 15 bp, Homo sapiens
ggagtgaaaacatga

SEQ ID NO: 158868 - DNA, 15 bp, Homo sapiens
tggagtgaaaacatg

SEQ ID NO: 158869 - DNA, 15 bp, Homo sapiens
atggagtgaaaacat

SEQ ID NO: 158870 - DNA, 15 bp, Homo sapiens
aatggagtgaaaaca

SEQ ID NO: 158871 - DNA, 15 bp, Homo sapiens
taatggagtgaaaac

SEQ ID NO: 158872 - DNA, 15 bp, Homo sapiens
ttaatggagtgaaaa

SEQ ID NO: 158873 - DNA, 15 bp, Homo sapiens
attaatggagtgaaa

SEQ ID NO: 158874 - DNA, 15 bp, Homo sapiens
tattaatggagtgaa

SEQ ID NO: 158875 - DNA, 15 bp, Homo sapiens
atattaatggagtga

SEQ ID NO: 158876 - DNA, 15 bp, Homo sapiens
aatattaatggagtg

SEQ ID NO: 158877 - DNA, 15 bp, Homo sapiens
taatattaatggagt

SEQ ID NO: 158878 - DNA, 15 bp, Homo sapiens
ctaatattaatggag

SEQ ID NO: 158879 - DNA, 15 bp, Homo sapiens
cctaatattaatgga

SEQ ID NO: 158880 - DNA, 15 bp, Homo sapiens
gcctaatattaatgg

SEQ ID NO: 158881 - DNA, 15 bp, Homo sapiens
agcctaatattaatg

SEQ ID NO: 158882 - DNA, 15 bp, Homo sapiens
aagcctaatattaat

SEQ ID NO: 158883 - DNA, 15 bp, Homo sapiens
taagcctaatattaa

SEQ ID NO: 158884 - DNA, 15 bp, Homo sapiens
ttaagcctaatatta

SEQ ID NO: 158885 - DNA, 15 bp, Homo sapiens
attaagcctaatatt

SEQ ID NO: 158886 - DNA, 15 bp, Homo sapiens
aattaagcctaatat

SEQ ID NO: 158887 - DNA, 15 bp, Homo sapiens
taattaagcctaata

SEQ ID NO: 158888 - DNA, 15 bp, Homo sapiens
ataattaagcctaat

SEQ ID NO: 158889 - DNA, 15 bp, Homo sapiens
aataattaagcctaa

SEQ ID NO: 158890 - DNA, 15 bp, Homo sapiens
gaataattaagccta

SEQ ID NO: 158891 - DNA, 15 bp, Homo sapiens
tgaataattaagcct

SEQ ID NO: 158892 - DNA, 15 bp, Homo sapiens
ttgaataattaagcc

SEQ ID NO: 158893 - DNA, 15 bp, Homo sapiens
tttgaataattaagc

SEQ ID NO: 158894 - DNA, 15 bp, Homo sapiens
atttgaataattaag

SEQ ID NO: 158895 - DNA, 15 bp, Homo sapiens
aatttgaataattaa

SEQ ID NO: 158896 - DNA, 15 bp, Homo sapiens
aaatttgaataatta

SEQ ID NO: 158897 - DNA, 15 bp, Homo sapiens
taaatttgaataatt

SEQ ID NO: 158898 - DNA, 15 bp, Homo sapiens
ataaatttgaataat

SEQ ID NO: 158899 - DNA, 15 bp, Homo sapiens
aataaatttgaataa

SEQ ID NO: 158900 - DNA, 15 bp, Homo sapiens
taataaatttgaata

SEQ ID NO: 158901 - DNA, 15 bp, Homo sapiens
ataataaatttgaat

SEQ ID NO: 158902 - DNA, 15 bp, Homo sapiens
tataataaatttgaa

SEQ ID NO: 158903 - DNA, 15 bp, Homo sapiens
atataataaatttga

SEQ ID NO: 158904 - DNA, 15 bp, Homo sapiens
aatataataaatttg

SEQ ID NO: 158905 - DNA, 15 bp, Homo sapiens
taatataataaattt

SEQ ID NO: 158906 - DNA, 15 bp, Homo sapiens
ctaatataataaatt

SEQ ID NO: 158907 - DNA, 15 bp, Homo sapiens
tctaatataataaat

SEQ ID NO: 158908 - DNA, 15 bp, Homo sapiens
ctctaatataataaa

SEQ ID NO: 158909 - DNA, 15 bp, Homo sapiens
actctaatataataa

SEQ ID NO: 158910 - DNA, 15 bp, Homo sapiens
gactctaatataata

SEQ ID NO: 158911 - DNA, 15 bp, Homo sapiens
agactctaatataat

SEQ ID NO: 158912 - DNA, 15 bp, Homo sapiens
aagactctaatataa

SEQ ID NO: 158913 - DNA, 15 bp, Homo sapiens
taagactctaatata

SEQ ID NO: 158914 - DNA, 15 bp, Homo sapiens
ataagactctaatat

SEQ ID NO: 158915 - DNA, 15 bp, Homo sapiens
aataagactctaata

SEQ ID NO: 158916 - DNA, 15 bp, Homo sapiens
caataagactctaat

SEQ ID NO: 158917 - DNA, 15 bp, Homo sapiens
gcaataagactctaa

SEQ ID NO: 158918 - DNA, 15 bp, Homo sapiens
agcaataagactcta

SEQ ID NO: 158919 - DNA, 15 bp, Homo sapiens
aagcaataagactct

SEQ ID NO: 158920 - DNA, 15 bp, Homo sapiens
taagcaataagactc

SEQ ID NO: 158921 - DNA, 15 bp, Homo sapiens
ttaagcaataagact

SEQ ID NO: 158922 - DNA, 15 bp, Homo sapiens
attaagcaataagac

SEQ ID NO: 158923 - DNA, 15 bp, Homo sapiens
aattaagcaataaga

SEQ ID NO: 158924 - DNA, 15 bp, Homo sapiens
aaattaagcaataag

SEQ ID NO: 158925 - DNA, 15 bp, Homo sapiens
taaattaagcaataa

SEQ ID NO: 158926 - DNA, 15 bp, Homo sapiens
ttaaattaagcaata

SEQ ID NO: 158927 - DNA, 15 bp, Homo sapiens
tttaaattaagcaat

SEQ ID NO: 158928 - DNA, 15 bp, Homo sapiens
ttttaaattaagcaa

SEQ ID NO: 158929 - DNA, 15 bp, Homo sapiens
tttttaaattaagca

SEQ ID NO: 158930 - DNA, 15 bp, Homo sapiens
ttttttaaattaagc

SEQ ID NO: 158931 - DNA, 15 bp, Homo sapiens
attttttaaattaag

SEQ ID NO: 158932 - DNA, 15 bp, Homo sapiens
aattttttaaattaa

SEQ ID NO: 158933 - DNA, 15 bp, Homo sapiens
caattttttaaatta

SEQ ID NO: 158934 - DNA, 15 bp, Homo sapiens
tcaattttttaaatt

SEQ ID NO: 158935 - DNA, 15 bp, Homo sapiens
ttcaattttttaaat

SEQ ID NO: 158936 - DNA, 15 bp, Homo sapiens
attcaattttttaaa

SEQ ID NO: 158937 - DNA, 15 bp, Homo sapiens
cattcaattttttaa

SEQ ID NO: 158938 - DNA, 15 bp, Homo sapiens
ccattcaatttttta

SEQ ID NO: 158939 - DNA, 15 bp, Homo sapiens
tccattcaatttttt

SEQ ID NO: 158940 - DNA, 15 bp, Homo sapiens
atccattcaattttt

SEQ ID NO: 158941 - DNA, 15 bp, Homo sapiens
aatccattcaatttt

SEQ ID NO: 158942 - DNA, 15 bp, Homo sapiens
taatccattcaattt

SEQ ID NO: 158943 - DNA, 15 bp, Homo sapiens
ataatccattcaatt

SEQ ID NO: 158944 - DNA, 15 bp, Homo sapiens
aataatccattcaat

SEQ ID NO: 158945 - DNA, 15 bp, Homo sapiens
taataatccattcaa

SEQ ID NO: 158946 - DNA, 15 bp, Homo sapiens
ctaataatccattca

SEQ ID NO: 158947 - DNA, 15 bp, Homo sapiens
gctaataatccattc

SEQ ID NO: 158948 - DNA, 15 bp, Homo sapiens
agctaataatccatt

SEQ ID NO: 158949 - DNA, 15 bp, Homo sapiens
aagctaataatccat

SEQ ID NO: 158950 - DNA, 15 bp, Homo sapiens
aaagctaataatcca

SEQ ID NO: 158951 - DNA, 15 bp, Homo sapiens
aaaagctaataatcc

SEQ ID NO: 158952 - DNA, 15 bp, Homo sapiens
aaaaagctaataatc

SEQ ID NO: 158953 - DNA, 15 bp, Homo sapiens
taaaaagctaataat

SEQ ID NO: 158954 - DNA, 15 bp, Homo sapiens
ttaaaaagctaataa

SEQ ID NO: 158955 - DNA, 15 bp, Homo sapiens
attaaaaagctaata

SEQ ID NO: 158956 - DNA, 15 bp, Homo sapiens
tattaaaaagctaat

SEQ ID NO: 158957 - DNA, 15 bp, Homo sapiens
ttattaaaaagctaa

SEQ ID NO: 158958 - DNA, 15 bp, Homo sapiens
tttattaaaaagcta

SEQ ID NO: 158959 - DNA, 15 bp, Homo sapiens
gtttattaaaaagct

SEQ ID NO: 158960 - DNA, 15 bp, Homo sapiens
tgtttattaaaaagc

SEQ ID NO: 158961 - DNA, 15 bp, Homo sapiens
ctgtttattaaaaag

SEQ ID NO: 158962 - DNA, 15 bp, Homo sapiens
actgtttattaaaaa

SEQ ID NO: 158963 - DNA, 15 bp, Homo sapiens
cactgtttattaaaa

SEQ ID NO: 158964 - DNA, 15 bp, Homo sapiens
tcactgtttattaaa

SEQ ID NO: 158965 - DNA, 15 bp, Homo sapiens
gtcactgtttattaa

SEQ ID NO: 158966 - DNA, 15 bp, Homo sapiens
tgtcactgtttatta

SEQ ID NO: 158967 - DNA, 15 bp, Homo sapiens
atgtcactgtttatt

SEQ ID NO: 158968 - DNA, 15 bp, Homo sapiens
aatgtcactgtttat

SEQ ID NO: 158969 - DNA, 15 bp, Homo sapiens
aaatgtcactgttta

SEQ ID NO: 158970 - DNA, 15 bp, Homo sapiens
taaatgtcactgttt

SEQ ID NO: 158971 - DNA, 15 bp, Homo sapiens
gtaaatgtcactgtt

SEQ ID NO: 158972 - DNA, 15 bp, Homo sapiens
agtaaatgtcactgt

SEQ ID NO: 158973 - DNA, 15 bp, Homo sapiens
cagtaaatgtcactg

SEQ ID NO: 158974 - DNA, 15 bp, Homo sapiens
acagtaaatgtcact

SEQ ID NO: 158975 - DNA, 15 bp, Homo sapiens
gacagtaaatgtcac

SEQ ID NO: 158976 - DNA, 15 bp, Homo sapiens
agacagtaaatgtca

SEQ ID NO: 158977 - DNA, 15 bp, Homo sapiens
tagacagtaaatgtc

SEQ ID NO: 158978 - DNA, 15 bp, Homo sapiens
gtagacagtaaatgt

SEQ ID NO: 158979 - DNA, 15 bp, Homo sapiens
agtagacagtaaatg

SEQ ID NO: 158980 - DNA, 15 bp, Homo sapiens
tagtagacagtaaat

SEQ ID NO: 158981 - DNA, 15 bp, Homo sapiens
ttagtagacagtaaa

SEQ ID NO: 158982 - DNA, 15 bp, Homo sapiens
attagtagacagtaa

SEQ ID NO: 158983 - DNA, 15 bp, Homo sapiens
cattagtagacagta

SEQ ID NO: 158984 - DNA, 15 bp, Homo sapiens
tcattagtagacagt

SEQ ID NO: 158985 - DNA, 15 bp, Homo sapiens
ctcattagtagacag

SEQ ID NO: 158986 - DNA, 15 bp, Homo sapiens
cctcattagtagaca

SEQ ID NO: 158987 - DNA, 15 bp, Homo sapiens
ccctcattagtagac

SEQ ID NO: 158988 - DNA, 15 bp, Homo sapiens
gccctcattagtaga

SEQ ID NO: 158989 - DNA, 15 bp, Homo sapiens
agccctcattagtag

SEQ ID NO: 158990 - DNA, 15 bp, Homo sapiens
gagccctcattagta

SEQ ID NO: 158991 - DNA, 15 bp, Homo sapiens
tgagccctcattagt

SEQ ID NO: 158992 - DNA, 15 bp, Homo sapiens
ttgagccctcattag

SEQ ID NO: 158993 - DNA, 15 bp, Homo sapiens
tttgagccctcatta

SEQ ID NO: 158994 - DNA, 15 bp, Homo sapiens
atttgagccctcatt

SEQ ID NO: 158995 - DNA, 15 bp, Homo sapiens
gatttgagccctcat

SEQ ID NO: 158996 - DNA, 15 bp, Homo sapiens
tgatttgagccctca

SEQ ID NO: 158997 - DNA, 15 bp, Homo sapiens
atgatttgagccctc

SEQ ID NO: 158998 - DNA, 15 bp, Homo sapiens
catgatttgagccct

SEQ ID NO: 158999 - DNA, 15 bp, Homo sapiens
acatgatttgagccc

SEQ ID NO: 159000 - DNA, 15 bp, Homo sapiens
tacatgatttgagcc

SEQ ID NO: 159001 - DNA, 15 bp, Homo sapiens
ttacatgatttgagc

SEQ ID NO: 159002 - DNA, 15 bp, Homo sapiens
attacatgatttgag

SEQ ID NO: 159003 - DNA, 15 bp, Homo sapiens
aattacatgatttga

SEQ ID NO: 159004 - DNA, 15 bp, Homo sapiens
aaattacatgatttg

SEQ ID NO: 159005 - DNA, 15 bp, Homo sapiens
taaattacatgattt

SEQ ID NO: 159006 - DNA, 15 bp, Homo sapiens
ataaattacatgatt

SEQ ID NO: 159007 - DNA, 15 bp, Homo sapiens
aataaattacatgat

SEQ ID NO: 159008 - DNA, 15 bp, Homo sapiens
caataaattacatga

SEQ ID NO: 159009 - DNA, 15 bp, Homo sapiens
gcaataaattacatg

SEQ ID NO: 159010 - DNA, 15 bp, Homo sapiens
agcaataaattacat

SEQ ID NO: 159011 - DNA, 15 bp, Homo sapiens
cagcaataaattaca

SEQ ID NO: 159012 - DNA, 15 bp, Homo sapiens
gcagcaataaattac

SEQ ID NO: 159013 - DNA, 15 bp, Homo sapiens
tgcagcaataaatta

SEQ ID NO: 159014 - DNA, 15 bp, Homo sapiens
atgcagcaataaatt

SEQ ID NO: 159015 - DNA, 15 bp, Homo sapiens
gatgcagcaataaat

SEQ ID NO: 159016 - DNA, 15 bp, Homo sapiens
agatgcagcaataaa

SEQ ID NO: 159017 - DNA, 15 bp, Homo sapiens
gagatgcagcaataa

SEQ ID NO: 159018 - DNA, 15 bp, Homo sapiens
agagatgcagcaata

SEQ ID NO: 159019 - DNA, 15 bp, Homo sapiens
tagagatgcagcaat

SEQ ID NO: 159020 - DNA, 15 bp, Homo sapiens
atagagatgcagcaa

SEQ ID NO: 159021 - DNA, 15 bp, Homo sapiens
aatagagatgcagca

SEQ ID NO: 159022 - DNA, 15 bp, Homo sapiens
aaatagagatgcagc

SEQ ID NO: 159023 - DNA, 15 bp, Homo sapiens
aaaatagagatgcag

SEQ ID NO: 159024 - DNA, 15 bp, Homo sapiens
caaaatagagatgca

SEQ ID NO: 159025 - DNA, 15 bp, Homo sapiens
acaaaatagagatgc

SEQ ID NO: 159026 - DNA, 15 bp, Homo sapiens
aacaaaatagagatg

SEQ ID NO: 159027 - DNA, 15 bp, Homo sapiens
gaacaaaatagagat

SEQ ID NO: 159028 - DNA, 15 bp, Homo sapiens
tgaacaaaatagaga

SEQ ID NO: 159029 - DNA, 15 bp, Homo sapiens
atgaacaaaatagag

SEQ ID NO: 159030 - DNA, 15 bp, Homo sapiens
catgaacaaaataga

SEQ ID NO: 159031 - DNA, 15 bp, Homo sapiens
tcatgaacaaaatag

SEQ ID NO: 159032 - DNA, 15 bp, Homo sapiens
ttcatgaacaaaata

SEQ ID NO: 159033 - DNA, 15 bp, Homo sapiens
tttcatgaacaaaat

SEQ ID NO: 159034 - DNA, 15 bp, Homo sapiens
atttcatgaacaaaa

SEQ ID NO: 159035 - DNA, 15 bp, Homo sapiens
catttcatgaacaaa

SEQ ID NO: 159036 - DNA, 15 bp, Homo sapiens
tcatttcatgaacaa

SEQ ID NO: 159037 - DNA, 15 bp, Homo sapiens
ttcatttcatgaaca

SEQ ID NO: 159038 - DNA, 15 bp, Homo sapiens
tttcatttcatgaac

SEQ ID NO: 159039 - DNA, 15 bp, Homo sapiens
gtttcatttcatgaa

SEQ ID NO: 159040 - DNA, 15 bp, Homo sapiens
tgtttcatttcatga

SEQ ID NO: 159041 - DNA, 15 bp, Homo sapiens
ctgtttcatttcatg

SEQ ID NO: 159042 - DNA, 15 bp, Homo sapiens
tctgtttcatttcat

SEQ ID NO: 159043 - DNA, 15 bp, Homo sapiens
ttctgtttcatttca

SEQ ID NO: 159044 - DNA, 15 bp, Homo sapiens
tttctgtttcatttc

SEQ ID NO: 159045 - DNA, 15 bp, Homo sapiens
atttctgtttcattt

SEQ ID NO: 159046 - DNA, 15 bp, Homo sapiens
aatttctgtttcatt

SEQ ID NO: 159047 - DNA, 15 bp, Homo sapiens
taatttctgtttcat

SEQ ID NO: 159048 - DNA, 15 bp, Homo sapiens
gtaatttctgtttca

SEQ ID NO: 159049 - DNA, 15 bp, Homo sapiens
agtaatttctgtttc

SEQ ID NO: 159050 - DNA, 15 bp, Homo sapiens
tagtaatttctgttt

SEQ ID NO: 159051 - DNA, 15 bp, Homo sapiens
gtagtaatttctgtt

SEQ ID NO: 159052 - DNA, 15 bp, Homo sapiens
ggtagtaatttctgt

SEQ ID NO: 159053 - DNA, 15 bp, Homo sapiens
aggtagtaatttctg

SEQ ID NO: 159054 - DNA, 15 bp, Homo sapiens
taggtagtaatttct

SEQ ID NO: 159055 - DNA, 15 bp, Homo sapiens
gtaggtagtaatttc

SEQ ID NO: 159056 - DNA, 15 bp, Homo sapiens
agtaggtagtaattt

SEQ ID NO: 159057 - DNA, 15 bp, Homo sapiens
aagtaggtagtaatt

SEQ ID NO: 159058 - DNA, 15 bp, Homo sapiens
caagtaggtagtaat

SEQ ID NO: 159059 - DNA, 15 bp, Homo sapiens
tcaagtaggtagtaa

SEQ ID NO: 159060 - DNA, 15 bp, Homo sapiens
ttcaagtaggtagta

SEQ ID NO: 159061 - DNA, 15 bp, Homo sapiens
tttcaagtaggtagt

SEQ ID NO: 159062 - DNA, 15 bp, Homo sapiens
gtttcaagtaggtag

SEQ ID NO: 159063 - DNA, 15 bp, Homo sapiens
agtttcaagtaggta

SEQ ID NO: 159064 - DNA, 15 bp, Homo sapiens
cagtttcaagtaggt

SEQ ID NO: 159065 - DNA, 15 bp, Homo sapiens
ccagtttcaagtagg

SEQ ID NO: 159066 - DNA, 15 bp, Homo sapiens
tccagtttcaagtag

SEQ ID NO: 159067 - DNA, 15 bp, Homo sapiens
gtccagtttcaagta

SEQ ID NO: 159068 - DNA, 15 bp, Homo sapiens
agtccagtttcaagt

SEQ ID NO: 159069 - DNA, 15 bp, Homo sapiens
aagtccagtttcaag

SEQ ID NO: 159070 - DNA, 15 bp, Homo sapiens
caagtccagtttcaa

SEQ ID NO: 159071 - DNA, 15 bp, Homo sapiens
acaagtccagtttca

SEQ ID NO: 159072 - DNA, 15 bp, Homo sapiens
aacaagtccagtttc

SEQ ID NO: 159073 - DNA, 15 bp, Homo sapiens
aaacaagtccagttt

SEQ ID NO: 159074 - DNA, 15 bp, Homo sapiens
aaaacaagtccagtt

SEQ ID NO: 159075 - DNA, 15 bp, Homo sapiens
gaaaacaagtccagt

SEQ ID NO: 159076 - DNA, 15 bp, Homo sapiens
agaaaacaagtccag

SEQ ID NO: 159077 - DNA, 15 bp, Homo sapiens
cagaaaacaagtcca

SEQ ID NO: 159078 - DNA, 15 bp, Homo sapiens
gcagaaaacaagtcc

SEQ ID NO: 159079 - DNA, 15 bp, Homo sapiens
cgcagaaaacaagtc

SEQ ID NO: 159080 - DNA, 15 bp, Homo sapiens
gcgcagaaaacaagt

SEQ ID NO: 159081 - DNA, 15 bp, Homo sapiens
agcgcagaaaacaag

SEQ ID NO: 159082 - DNA, 15 bp, Homo sapiens
gagcgcagaaaacaa

SEQ ID NO: 159083 - DNA, 15 bp, Homo sapiens
ggagcgcagaaaaca

SEQ ID NO: 159084 - DNA, 15 bp, Homo sapiens
aggagcgcagaaaac

SEQ ID NO: 159085 - DNA, 15 bp, Homo sapiens
taggagcgcagaaaa

SEQ ID NO: 159086 - DNA, 15 bp, Homo sapiens
ataggagcgcagaaa

SEQ ID NO: 159087 - DNA, 15 bp, Homo sapiens
cataggagcgcagaa

SEQ ID NO: 159088 - DNA, 15 bp, Homo sapiens
tcataggagcgcaga

SEQ ID NO: 159089 - DNA, 15 bp, Homo sapiens
ttcataggagcgcag

SEQ ID NO: 159090 - DNA, 15 bp, Homo sapiens
tttcataggagcgca

SEQ ID NO: 159091 - DNA, 15 bp, Homo sapiens
gtttcataggagcgc

SEQ ID NO: 159092 - DNA, 15 bp, Homo sapiens
agtttcataggagcg

SEQ ID NO: 159093 - DNA, 15 bp, Homo sapiens
cagtttcataggagc

SEQ ID NO: 159094 - DNA, 15 bp, Homo sapiens
tcagtttcataggag

SEQ ID NO: 159095 - DNA, 15 bp, Homo sapiens
ttcagtttcatagga

SEQ ID NO: 159096 - DNA, 15 bp, Homo sapiens
gttcagtttcatagg

SEQ ID NO: 159097 - DNA, 15 bp, Homo sapiens
tgttcagtttcatag

SEQ ID NO: 159098 - DNA, 15 bp, Homo sapiens
ctgttcagtttcata

SEQ ID NO: 159099 - DNA, 15 bp, Homo sapiens
actgttcagtttcat

SEQ ID NO: 159100 - DNA, 15 bp, Homo sapiens
cactgttcagtttca

SEQ ID NO: 159101 - DNA, 15 bp, Homo sapiens
ccactgttcagtttc

SEQ ID NO: 159102 - DNA, 15 bp, Homo sapiens
tccactgttcagttt

SEQ ID NO: 159103 - DNA, 15 bp, Homo sapiens
ctccactgttcagtt

SEQ ID NO: 159104 - DNA, 15 bp, Homo sapiens
cctccactgttcagt

SEQ ID NO: 159105 - DNA, 15 bp, Homo sapiens
ccctccactgttcag

SEQ ID NO: 159106 - DNA, 15 bp, Homo sapiens
accctccactgttca

SEQ ID NO: 159107 - DNA, 15 bp, Homo sapiens
aaccctccactgttc

SEQ ID NO: 159108 - DNA, 15 bp, Homo sapiens
caaccctccactgtt

SEQ ID NO: 159109 - DNA, 15 bp, Homo sapiens
gcaaccctccactgt

SEQ ID NO: 159110 - DNA, 15 bp, Homo sapiens
agcaaccctccactg

SEQ ID NO: 159111 - DNA, 15 bp, Homo sapiens
gagcaaccctccact

SEQ ID NO: 159112 - DNA, 15 bp, Homo sapiens
cgagcaaccctccac

SEQ ID NO: 159113 - DNA, 15 bp, Homo sapiens
acgagcaaccctcca

SEQ ID NO: 159114 - DNA, 15 bp, Homo sapiens
cacgagcaaccctcc

SEQ ID NO: 159115 - DNA, 15 bp, Homo sapiens
tcacgagcaaccctc

SEQ ID NO: 159116 - DNA, 15 bp, Homo sapiens
ttcacgagcaaccct

SEQ ID NO: 159117 - DNA, 15 bp, Homo sapiens
cttcacgagcaaccc

SEQ ID NO: 159118 - DNA, 15 bp, Homo sapiens
ccttcacgagcaacc

SEQ ID NO: 159119 - DNA, 15 bp, Homo sapiens
tccttcacgagcaac

SEQ ID NO: 159120 - DNA, 15 bp, Homo sapiens
atccttcacgagcaa

SEQ ID NO: 159121 - DNA, 15 bp, Homo sapiens
gatccttcacgagca

SEQ ID NO: 159122 - DNA, 15 bp, Homo sapiens
agatccttcacgagc

SEQ ID NO: 159123 - DNA, 15 bp, Homo sapiens
cagatccttcacgag

SEQ ID NO: 159124 - DNA, 15 bp, Homo sapiens
ccagatccttcacga

SEQ ID NO: 159125 - DNA, 15 bp, Homo sapiens
cccagatccttcacg

SEQ ID NO: 159126 - DNA, 15 bp, Homo sapiens
tcccagatccttcac

SEQ ID NO: 159127 - DNA, 15 bp, Homo sapiens
gtcccagatccttca

SEQ ID NO: 159128 - DNA, 15 bp, Homo sapiens
tgtcccagatccttc

SEQ ID NO: 159129 - DNA, 15 bp, Homo sapiens
atgtcccagatcctt

SEQ ID NO: 159130 - DNA, 15 bp, Homo sapiens
catgtcccagatcct

SEQ ID NO: 159131 - DNA, 15 bp, Homo sapiens
acatgtcccagatcc

SEQ ID NO: 159132 - DNA, 15 bp, Homo sapiens
aacatgtcccagatc

SEQ ID NO: 159133 - DNA, 15 bp, Homo sapiens
aaacatgtcccagat

SEQ ID NO: 159134 - DNA, 15 bp, Homo sapiens
gaaacatgtcccaga

SEQ ID NO: 159135 - DNA, 15 bp, Homo sapiens
tgaaacatgtcccag

SEQ ID NO: 159136 - DNA, 15 bp, Homo sapiens
atgaaacatgtccca

SEQ ID NO: 159137 - DNA, 15 bp, Homo sapiens
tatgaaacatgtccc

SEQ ID NO: 159138 - DNA, 15 bp, Homo sapiens
atatgaaacatgtcc

SEQ ID NO: 159139 - DNA, 15 bp, Homo sapiens
catatgaaacatgtc

SEQ ID NO: 159140 - DNA, 15 bp, Homo sapiens
ccatatgaaacatgt

SEQ ID NO: 159141 - DNA, 15 bp, Homo sapiens
tccatatgaaacatg

SEQ ID NO: 159142 - DNA, 15 bp, Homo sapiens
ctccatatgaaacat

SEQ ID NO: 159143 - DNA, 15 bp, Homo sapiens
gctccatatgaaaca

SEQ ID NO: 159144 - DNA, 15 bp, Homo sapiens
tgctccatatgaaac

SEQ ID NO: 159145 - DNA, 15 bp, Homo sapiens
gtgctccatatgaaa

SEQ ID NO: 159146 - DNA, 15 bp, Homo sapiens
tgtgctccatatgaa

SEQ ID NO: 159147 - DNA, 15 bp, Homo sapiens
ttgtgctccatatga

SEQ ID NO: 159148 - DNA, 15 bp, Homo sapiens
cttgtgctccatatg

SEQ ID NO: 159149 - DNA, 15 bp, Homo sapiens
tcttgtgctccatat

SEQ ID NO: 159150 - DNA, 15 bp, Homo sapiens
ttcttgtgctccata

SEQ ID NO: 159151 - DNA, 15 bp, Homo sapiens
tttcttgtgctccat

SEQ ID NO: 159152 - DNA, 15 bp, Homo sapiens
ttttcttgtgctcca

SEQ ID NO: 159153 - DNA, 15 bp, Homo sapiens
cttttcttgtgctcc

SEQ ID NO: 159154 - DNA, 15 bp, Homo sapiens
ccttttcttgtgctc

SEQ ID NO: 159155 - DNA, 15 bp, Homo sapiens
tccttttcttgtgct

SEQ ID NO: 159156 - DNA, 15 bp, Homo sapiens
gtccttttcttgtgc

SEQ ID NO: 159157 - DNA, 15 bp, Homo sapiens
cgtccttttcttgtg

SEQ ID NO: 159158 - DNA, 15 bp, Homo sapiens
acgtccttttcttgt

SEQ ID NO: 159159 - DNA, 15 bp, Homo sapiens
gacgtccttttcttg

SEQ ID NO: 159160 - DNA, 15 bp, Homo sapiens
cgacgtccttttctt

SEQ ID NO: 159161 - DNA, 15 bp, Homo sapiens
tcgacgtccttttct

SEQ ID NO: 159162 - DNA, 15 bp, Homo sapiens
ttcgacgtccttttc

SEQ ID NO: 159163 - DNA, 15 bp, Homo sapiens
gttcgacgtcctttt

SEQ ID NO: 159164 - DNA, 15 bp, Homo sapiens
tgttcgacgtccttt

SEQ ID NO: 159165 - DNA, 15 bp, Homo sapiens
atgttcgacgtcctt

SEQ ID NO: 159166 - DNA, 15 bp, Homo sapiens
catgttcgacgtcct

SEQ ID NO: 159167 - DNA, 15 bp, Homo sapiens
gcatgttcgacgtcc

SEQ ID NO: 159168 - DNA, 15 bp, Homo sapiens
tgcatgttcgacgtc

SEQ ID NO: 159169 - DNA, 15 bp, Homo sapiens
ttgcatgttcgacgt

SEQ ID NO: 159170 - DNA, 15 bp, Homo sapiens
gttgcatgttcgacg

SEQ ID NO: 159171 - DNA, 15 bp, Homo sapiens
cgttgcatgttcgac

SEQ ID NO: 159172 - DNA, 15 bp, Homo sapiens
ccgttgcatgttcga

SEQ ID NO: 159173 - DNA, 15 bp, Homo sapiens
accgttgcatgttcg

SEQ ID NO: 159174 - DNA, 15 bp, Homo sapiens
gaccgttgcatgttc

SEQ ID NO: 159175 - DNA, 15 bp, Homo sapiens
agaccgttgcatgtt

SEQ ID NO: 159176 - DNA, 15 bp, Homo sapiens
cagaccgttgcatgt

SEQ ID NO: 159177 - DNA, 15 bp, Homo sapiens
gcagaccgttgcatg

SEQ ID NO: 159178 - DNA, 15 bp, Homo sapiens
tgcagaccgttgcat

SEQ ID NO: 159179 - DNA, 15 bp, Homo sapiens
atgcagaccgttgca

SEQ ID NO: 159180 - DNA, 15 bp, Homo sapiens
gatgcagaccgttgc

SEQ ID NO: 159181 - DNA, 15 bp, Homo sapiens
ggatgcagaccgttg

SEQ ID NO: 159182 - DNA, 15 bp, Homo sapiens
tggatgcagaccgtt

SEQ ID NO: 159183 - DNA, 15 bp, Homo sapiens
ctggatgcagaccgt

SEQ ID NO: 159184 - DNA, 15 bp, Homo sapiens
cctggatgcagaccg

SEQ ID NO: 159185 - DNA, 15 bp, Homo sapiens
acctggatgcagacc

SEQ ID NO: 159186 - DNA, 15 bp, Homo sapiens
cacctggatgcagac

SEQ ID NO: 159187 - DNA, 15 bp, Homo sapiens
gcacctggatgcaga

SEQ ID NO: 159188 - DNA, 15 bp, Homo sapiens
agcacctggatgcag

SEQ ID NO: 159189 - DNA, 15 bp, Homo sapiens
tagcacctggatgca

SEQ ID NO: 159190 - DNA, 15 bp, Homo sapiens
ctagcacctggatgc

SEQ ID NO: 159191 - DNA, 15 bp, Homo sapiens
tctagcacctggatg

SEQ ID NO: 159192 - DNA, 15 bp, Homo sapiens
ttctagcacctggat

SEQ ID NO: 159193 - DNA, 15 bp, Homo sapiens
gttctagcacctgga

SEQ ID NO: 159194 - DNA, 15 bp, Homo sapiens
ggttctagcacctgg

SEQ ID NO: 159195 - DNA, 15 bp, Homo sapiens
tggttctagcacctg

SEQ ID NO: 159196 - DNA, 15 bp, Homo sapiens
atggttctagcacct

SEQ ID NO: 159197 - DNA, 15 bp, Homo sapiens
aatggttctagcacc

SEQ ID NO: 159198 - DNA, 15 bp, Homo sapiens
aaatggttctagcac

SEQ ID NO: 159199 - DNA, 15 bp, Homo sapiens
aaaatggttctagca

SEQ ID NO: 159200 - DNA, 15 bp, Homo sapiens
caaaatggttctagc

SEQ ID NO: 159201 - DNA, 15 bp, Homo sapiens
acaaaatggttctag

SEQ ID NO: 159202 - DNA, 15 bp, Homo sapiens
aacaaaatggttcta

SEQ ID NO: 159203 - DNA, 15 bp, Homo sapiens
aaacaaaatggttct

SEQ ID NO: 159204 - DNA, 15 bp, Homo sapiens
aaaacaaaatggttc

SEQ ID NO: 159205 - DNA, 15 bp, Homo sapiens
aaaaacaaaatggtt

SEQ ID NO: 159206 - DNA, 15 bp, Homo sapiens
gaaaaacaaaatggt

SEQ ID NO: 159207 - DNA, 15 bp, Homo sapiens
ggaaaaacaaaatgg

SEQ ID NO: 159208 - DNA, 15 bp, Homo sapiens
gggaaaaacaaaatg

SEQ ID NO: 159209 - DNA, 15 bp, Homo sapiens
agggaaaaacaaaat

SEQ ID NO: 159210 - DNA, 15 bp, Homo sapiens
aagggaaaaacaaaa

SEQ ID NO: 159211 - DNA, 15 bp, Homo sapiens
gaagggaaaaacaaa

SEQ ID NO: 159212 - DNA, 15 bp, Homo sapiens
tgaagggaaaaacaa

SEQ ID NO: 159213 - DNA, 15 bp, Homo sapiens
atgaagggaaaaaca

SEQ ID NO: 159214 - DNA, 15 bp, Homo sapiens
gatgaagggaaaaac

SEQ ID NO: 159215 - DNA, 15 bp, Homo sapiens
tgatgaagggaaaaa

SEQ ID NO: 159216 - DNA, 15 bp, Homo sapiens
atgatgaagggaaaa

SEQ ID NO: 159217 - DNA, 15 bp, Homo sapiens
gatgatgaagggaaa

SEQ ID NO: 159218 - DNA, 15 bp, Homo sapiens
ggatgatgaagggaa

SEQ ID NO: 159219 - DNA, 15 bp, Homo sapiens
gggatgatgaaggga

SEQ ID NO: 159220 - DNA, 15 bp, Homo sapiens
agggatgatgaaggg

SEQ ID NO: 159221 - DNA, 15 bp, Homo sapiens
tagggatgatgaagg

SEQ ID NO: 159222 - DNA, 15 bp, Homo sapiens
ctagggatgatgaag

SEQ ID NO: 159223 - DNA, 15 bp, Homo sapiens
tctagggatgatgaa

SEQ ID NO: 159224 - DNA, 15 bp, Homo sapiens
ttctagggatgatga

SEQ ID NO: 159225 - DNA, 15 bp, Homo sapiens
gttctagggatgatg

SEQ ID NO: 159226 - DNA, 15 bp, Homo sapiens
ggttctagggatgat

SEQ ID NO: 159227 - DNA, 15 bp, Homo sapiens
tggttctagggatga

SEQ ID NO: 159228 - DNA, 15 bp, Homo sapiens
ttggttctagggatg

SEQ ID NO: 159229 - DNA, 15 bp, Homo sapiens
cttggttctagggat

SEQ ID NO: 159230 - DNA, 15 bp, Homo sapiens
tcttggttctaggga

SEQ ID NO: 159231 - DNA, 15 bp, Homo sapiens
ctcttggttctaggg

SEQ ID NO: 159232 - DNA, 15 bp, Homo sapiens
actcttggttctagg

SEQ ID NO: 159233 - DNA, 15 bp, Homo sapiens
cactcttggttctag

SEQ ID NO: 159234 - DNA, 15 bp, Homo sapiens
acactcttggttcta

SEQ ID NO: 159235 - DNA, 15 bp, Homo sapiens
cacactcttggttct

SEQ ID NO: 159236 - DNA, 15 bp, Homo sapiens
ccacactcttggttc

SEQ ID NO: 159237 - DNA, 15 bp, Homo sapiens
cccacactcttggtt

SEQ ID NO: 159238 - DNA, 15 bp, Homo sapiens
acccacactcttggt

SEQ ID NO: 159239 - DNA, 15 bp, Homo sapiens
cacccacactcttgg

SEQ ID NO: 159240 - DNA, 15 bp, Homo sapiens
ccacccacactcttg

SEQ ID NO: 159241 - DNA, 15 bp, Homo sapiens
cccacccacactctt

SEQ ID NO: 159242 - DNA, 15 bp, Homo sapiens
tcccacccacactct

SEQ ID NO: 159243 - DNA, 15 bp, Homo sapiens
ttcccacccacactc

SEQ ID NO: 159244 - DNA, 15 bp, Homo sapiens
attcccacccacact

SEQ ID NO: 159245 - DNA, 15 bp, Homo sapiens
tattcccacccacac

SEQ ID NO: 159246 - DNA, 15 bp, Homo sapiens
ctattcccacccaca

SEQ ID NO: 159247 - DNA, 15 bp, Homo sapiens
gctattcccacccac

SEQ ID NO: 159248 - DNA, 15 bp, Homo sapiens
agctattcccaccca

SEQ ID NO: 159249 - DNA, 15 bp, Homo sapiens
gagctattcccaccc

SEQ ID NO: 159250 - DNA, 15 bp, Homo sapiens
tgagctattcccacc

SEQ ID NO: 159251 - DNA, 15 bp, Homo sapiens
ctgagctattcccac

SEQ ID NO: 159252 - DNA, 15 bp, Homo sapiens
actgagctattccca

SEQ ID NO: 159253 - DNA, 15 bp, Homo sapiens
tactgagctattccc

SEQ ID NO: 159254 - DNA, 15 bp, Homo sapiens
ctactgagctattcc

SEQ ID NO: 159255 - DNA, 15 bp, Homo sapiens
tctactgagctattc

SEQ ID NO: 159256 - DNA, 15 bp, Homo sapiens
ctctactgagctatt

SEQ ID NO: 159257 - DNA, 15 bp, Homo sapiens
actctactgagctat

SEQ ID NO: 159258 - DNA, 15 bp, Homo sapiens
cactctactgagcta

SEQ ID NO: 159259 - DNA, 15 bp, Homo sapiens
tcactctactgagct

SEQ ID NO: 159260 - DNA, 15 bp, Homo sapiens
gtcactctactgagc

SEQ ID NO: 159261 - DNA, 15 bp, Homo sapiens
ggtcactctactgag

SEQ ID NO: 159262 - DNA, 15 bp, Homo sapiens
tggtcactctactga

SEQ ID NO: 159263 - DNA, 15 bp, Homo sapiens
atggtcactctactg

SEQ ID NO: 159264 - DNA, 15 bp, Homo sapiens
catggtcactctact

SEQ ID NO: 159265 - DNA, 15 bp, Homo sapiens
acatggtcactctac

SEQ ID NO: 159266 - DNA, 15 bp, Homo sapiens
cacatggtcactcta

SEQ ID NO: 159267 - DNA, 15 bp, Homo sapiens
tcacatggtcactct

SEQ ID NO: 159268 - DNA, 15 bp, Homo sapiens
atcacatggtcactc

SEQ ID NO: 159269 - DNA, 15 bp, Homo sapiens
gatcacatggtcact

SEQ ID NO: 159270 - DNA, 15 bp, Homo sapiens
ggatcacatggtcac

SEQ ID NO: 159271 - DNA, 15 bp, Homo sapiens
aggatcacatggtca

SEQ ID NO: 159272 - DNA, 15 bp, Homo sapiens
caggatcacatggtc

SEQ ID NO: 159273 - DNA, 15 bp, Homo sapiens
acaggatcacatggt

SEQ ID NO: 159274 - DNA, 15 bp, Homo sapiens
cacaggatcacatgg

SEQ ID NO: 159275 - DNA, 15 bp, Homo sapiens
acacaggatcacatg

SEQ ID NO: 159276 - DNA, 15 bp, Homo sapiens
aacacaggatcacat

SEQ ID NO: 159277 - DNA, 15 bp, Homo sapiens
taacacaggatcaca

SEQ ID NO: 159278 - DNA, 15 bp, Homo sapiens
gtaacacaggatcac

SEQ ID NO: 159279 - DNA, 15 bp, Homo sapiens
tgtaacacaggatca

SEQ ID NO: 159280 - DNA, 15 bp, Homo sapiens
ttgtaacacaggatc

SEQ ID NO: 159281 - DNA, 15 bp, Homo sapiens
gttgtaacacaggat

SEQ ID NO: 159282 - DNA, 15 bp, Homo sapiens
agttgtaacacagga

SEQ ID NO: 159283 - DNA, 15 bp, Homo sapiens
cagttgtaacacagg

SEQ ID NO: 159284 - DNA, 15 bp, Homo sapiens
tcagttgtaacacag

SEQ ID NO: 159285 - DNA, 15 bp, Homo sapiens
ttcagttgtaacaca

SEQ ID NO: 159286 - DNA, 15 bp, Homo sapiens
cttcagttgtaacac

SEQ ID NO: 159287 - DNA, 15 bp, Homo sapiens
tcttcagttgtaaca

SEQ ID NO: 159288 - DNA, 15 bp, Homo sapiens
gtcttcagttgtaac

SEQ ID NO: 159289 - DNA, 15 bp, Homo sapiens
tgtcttcagttgtaa

SEQ ID NO: 159290 - DNA, 15 bp, Homo sapiens
ttgtcttcagttgta

SEQ ID NO: 159291 - DNA, 15 bp, Homo sapiens
tttgtcttcagttgt

SEQ ID NO: 159292 - DNA, 15 bp, Homo sapiens
ttttgtcttcagttg

SEQ ID NO: 159293 - DNA, 15 bp, Homo sapiens
attttgtcttcagtt

SEQ ID NO: 159294 - DNA, 15 bp, Homo sapiens
gattttgtcttcagt

SEQ ID NO: 159295 - DNA, 15 bp, Homo sapiens
agattttgtcttcag

SEQ ID NO: 159296 - DNA, 15 bp, Homo sapiens
cagattttgtcttca

SEQ ID NO: 159297 - DNA, 15 bp, Homo sapiens
ccagattttgtcttc

SEQ ID NO: 159298 - DNA, 15 bp, Homo sapiens
gccagattttgtctt

SEQ ID NO: 159299 - DNA, 15 bp, Homo sapiens
tgccagattttgtct

SEQ ID NO: 159300 - DNA, 15 bp, Homo sapiens
gtgccagattttgtc

SEQ ID NO: 159301 - DNA, 15 bp, Homo sapiens
tgtgccagattttgt

SEQ ID NO: 159302 - DNA, 15 bp, Homo sapiens
ctgtgccagattttg

SEQ ID NO: 159303 - DNA, 15 bp, Homo sapiens
tctgtgccagatttt

SEQ ID NO: 159304 - DNA, 15 bp, Homo sapiens
ctctgtgccagattt

SEQ ID NO: 159305 - DNA, 15 bp, Homo sapiens
actctgtgccagatt

SEQ ID NO: 159306 - DNA, 15 bp, Homo sapiens
gactctgtgccagat

SEQ ID NO: 159307 - DNA, 15 bp, Homo sapiens
agactctgtgccaga

SEQ ID NO: 159308 - DNA, 15 bp, Homo sapiens
gagactctgtgccag

SEQ ID NO: 159309 - DNA, 15 bp, Homo sapiens
agagactctgtgcca

SEQ ID NO: 159310 - DNA, 15 bp, Homo sapiens
gagagactctgtgcc

SEQ ID NO: 159311 - DNA, 15 bp, Homo sapiens
ggagagactctgtgc

SEQ ID NO: 159312 - DNA, 15 bp, Homo sapiens
tggagagactctgtg

SEQ ID NO: 159313 - DNA, 15 bp, Homo sapiens
ctggagagactctgt

SEQ ID NO: 159314 - DNA, 15 bp, Homo sapiens
actggagagactctg

SEQ ID NO: 159315 - DNA, 15 bp, Homo sapiens
cactggagagactct

SEQ ID NO: 159316 - DNA, 15 bp, Homo sapiens
tcactggagagactc

SEQ ID NO: 159317 - DNA, 15 bp, Homo sapiens
atcactggagagact

SEQ ID NO: 159318 - DNA, 15 bp, Homo sapiens
catcactggagagac

SEQ ID NO: 159319 - DNA, 15 bp, Homo sapiens
tcatcactggagaga

SEQ ID NO: 159320 - DNA, 15 bp, Homo sapiens
gtcatcactggagag

SEQ ID NO: 159321 - DNA, 15 bp, Homo sapiens
agtcatcactggaga

SEQ ID NO: 159322 - DNA, 15 bp, Homo sapiens
tagtcatcactggag

SEQ ID NO: 159323 - DNA, 15 bp, Homo sapiens
atagtcatcactgga

SEQ ID NO: 159324 - DNA, 15 bp, Homo sapiens
catagtcatcactgg

SEQ ID NO: 159325 - DNA, 15 bp, Homo sapiens
tcatagtcatcactg

SEQ ID NO: 159326 - DNA, 15 bp, Homo sapiens
ttcatagtcatcact

SEQ ID NO: 159327 - DNA, 15 bp, Homo sapiens
tttcatagtcatcac

SEQ ID NO: 159328 - DNA, 15 bp, Homo sapiens
gtttcatagtcatca

SEQ ID NO: 159329 - DNA, 15 bp, Homo sapiens
agtttcatagtcatc

SEQ ID NO: 159330 - DNA, 15 bp, Homo sapiens
cagtttcatagtcat

SEQ ID NO: 159331 - DNA, 15 bp, Homo sapiens
tcagtttcatagtca

SEQ ID NO: 159332 - DNA, 15 bp, Homo sapiens
gtcagtttcatagtc

SEQ ID NO: 159333 - DNA, 15 bp, Homo sapiens
agtcagtttcatagt

SEQ ID NO: 159334 - DNA, 15 bp, Homo sapiens
cagtcagtttcatag

SEQ ID NO: 159335 - DNA, 15 bp, Homo sapiens
ccagtcagtttcata

SEQ ID NO: 159336 - DNA, 15 bp, Homo sapiens
accagtcagtttcat

SEQ ID NO: 159337 - DNA, 15 bp, Homo sapiens
caccagtcagtttca

SEQ ID NO: 159338 - DNA, 15 bp, Homo sapiens
gcaccagtcagtttc

SEQ ID NO: 159339 - DNA, 15 bp, Homo sapiens
ggcaccagtcagttt

SEQ ID NO: 159340 - DNA, 15 bp, Homo sapiens
gggcaccagtcagtt

SEQ ID NO: 159341 - DNA, 15 bp, Homo sapiens
ggggcaccagtcagt

SEQ ID NO: 159342 - DNA, 15 bp, Homo sapiens
tggggcaccagtcag

SEQ ID NO: 159343 - DNA, 15 bp, Homo sapiens
atggggcaccagtca

SEQ ID NO: 159344 - DNA, 15 bp, Homo sapiens
gatggggcaccagtc

SEQ ID NO: 159345 - DNA, 15 bp, Homo sapiens
tgatggggcaccagt

SEQ ID NO: 159346 - DNA, 15 bp, Homo sapiens
ctgatggggcaccag

SEQ ID NO: 159347 - DNA, 15 bp, Homo sapiens
tctgatggggcacca

SEQ ID NO: 159348 - DNA, 15 bp, Homo sapiens
atctgatggggcacc

SEQ ID NO: 159349 - DNA, 15 bp, Homo sapiens
aatctgatggggcac

SEQ ID NO: 159350 - DNA, 15 bp, Homo sapiens
gaatctgatggggca

SEQ ID NO: 159351 - DNA, 15 bp, Homo sapiens
tgaatctgatggggc

SEQ ID NO: 159352 - DNA, 15 bp, Homo sapiens
ctgaatctgatgggg

SEQ ID NO: 159353 - DNA, 15 bp, Homo sapiens
tctgaatctgatggg

SEQ ID NO: 159354 - DNA, 15 bp, Homo sapiens
ttctgaatctgatgg

SEQ ID NO: 159355 - DNA, 15 bp, Homo sapiens
cttctgaatctgatg

SEQ ID NO: 159356 - DNA, 15 bp, Homo sapiens
acttctgaatctgat

SEQ ID NO: 159357 - DNA, 15 bp, Homo sapiens
cacttctgaatctga

SEQ ID NO: 159358 - DNA, 15 bp, Homo sapiens
ccacttctgaatctg

SEQ ID NO: 159359 - DNA, 15 bp, Homo sapiens
tccacttctgaatct

SEQ ID NO: 159360 - DNA, 15 bp, Homo sapiens
ctccacttctgaatc

SEQ ID NO: 159361 - DNA, 15 bp, Homo sapiens
tctccacttctgaat

SEQ ID NO: 159362 - DNA, 15 bp, Homo sapiens
ctctccacttctgaa

SEQ ID NO: 159363 - DNA, 15 bp, Homo sapiens
actctccacttctga

SEQ ID NO: 159364 - DNA, 15 bp, Homo sapiens
cactctccacttctg

SEQ ID NO: 159365 - DNA, 15 bp, Homo sapiens
acactctccacttct

SEQ ID NO: 159366 - DNA, 15 bp, Homo sapiens
aacactctccacttc

SEQ ID NO: 159367 - DNA, 15 bp, Homo sapiens
taacactctccactt

SEQ ID NO: 159368 - DNA, 15 bp, Homo sapiens
gtaacactctccact

SEQ ID NO: 159369 - DNA, 15 bp, Homo sapiens
tgtaacactctccac

SEQ ID NO: 159370 - DNA, 15 bp, Homo sapiens
atgtaacactctcca

SEQ ID NO: 159371 - DNA, 15 bp, Homo sapiens
tatgtaacactctcc

SEQ ID NO: 159372 - DNA, 15 bp, Homo sapiens
gtatgtaacactctc

SEQ ID NO: 159373 - DNA, 15 bp, Homo sapiens
agtatgtaacactct

SEQ ID NO: 159374 - DNA, 15 bp, Homo sapiens
cagtatgtaacactc

SEQ ID NO: 159375 - DNA, 15 bp, Homo sapiens
tcagtatgtaacact

SEQ ID NO: 159376 - DNA, 15 bp, Homo sapiens
atcagtatgtaacac

SEQ ID NO: 159377 - DNA, 15 bp, Homo sapiens
aatcagtatgtaaca

SEQ ID NO: 159378 - DNA, 15 bp, Homo sapiens
aaatcagtatgtaac

SEQ ID NO: 159379 - DNA, 15 bp, Homo sapiens
gaaatcagtatgtaa

SEQ ID NO: 159380 - DNA, 15 bp, Homo sapiens
tgaaatcagtatgta

SEQ ID NO: 159381 - DNA, 15 bp, Homo sapiens
ctgaaatcagtatgt

SEQ ID NO: 159382 - DNA, 15 bp, Homo sapiens
tctgaaatcagtatg

SEQ ID NO: 159383 - DNA, 15 bp, Homo sapiens
ttctgaaatcagtat

SEQ ID NO: 159384 - DNA, 15 bp, Homo sapiens
tttctgaaatcagta

SEQ ID NO: 159385 - DNA, 15 bp, Homo sapiens
ttttctgaaatcagt

SEQ ID NO: 159386 - DNA, 15 bp, Homo sapiens
tttttctgaaatcag

SEQ ID NO: 159387 - DNA, 15 bp, Homo sapiens
atttttctgaaatca

SEQ ID NO: 159388 - DNA, 15 bp, Homo sapiens
catttttctgaaatc

SEQ ID NO: 159389 - DNA, 15 bp, Homo sapiens
acatttttctgaaat

SEQ ID NO: 159390 - DNA, 15 bp, Homo sapiens
aacatttttctgaaa

SEQ ID NO: 159391 - DNA, 15 bp, Homo sapiens
taacatttttctgaa

SEQ ID NO: 159392 - DNA, 15 bp, Homo sapiens
ctaacatttttctga

SEQ ID NO: 159393 - DNA, 15 bp, Homo sapiens
tctaacatttttctg

SEQ ID NO: 159394 - DNA, 15 bp, Homo sapiens
atctaacatttttct

SEQ ID NO: 159395 - DNA, 15 bp, Homo sapiens
tatctaacatttttc

SEQ ID NO: 159396 - DNA, 15 bp, Homo sapiens
ttatctaacattttt

SEQ ID NO: 159397 - DNA, 15 bp, Homo sapiens
tttatctaacatttt

SEQ ID NO: 159398 - DNA, 15 bp, Homo sapiens
gtttatctaacattt

SEQ ID NO: 159399 - DNA, 15 bp, Homo sapiens
tgtttatctaacatt

SEQ ID NO: 159400 - DNA, 15 bp, Homo sapiens
atgtttatctaacat

SEQ ID NO: 159401 - DNA, 15 bp, Homo sapiens
aatgtttatctaaca

SEQ ID NO: 159402 - DNA, 15 bp, Homo sapiens
caatgtttatctaac

SEQ ID NO: 159403 - DNA, 15 bp, Homo sapiens
ccaatgtttatctaa

SEQ ID NO: 159404 - DNA, 15 bp, Homo sapiens
cccaatgtttatcta

SEQ ID NO: 159405 - DNA, 15 bp, Homo sapiens
tcccaatgtttatct

SEQ ID NO: 159406 - DNA, 15 bp, Homo sapiens
gtcccaatgtttatc

SEQ ID NO: 159407 - DNA, 15 bp, Homo sapiens
ggtcccaatgtttat

SEQ ID NO: 159408 - DNA, 15 bp, Homo sapiens
gggtcccaatgttta

SEQ ID NO: 159409 - DNA, 15 bp, Homo sapiens
agggtcccaatgttt

SEQ ID NO: 159410 - DNA, 15 bp, Homo sapiens
aagggtcccaatgtt

SEQ ID NO: 159411 - DNA, 15 bp, Homo sapiens
aaagggtcccaatgt

SEQ ID NO: 159412 - DNA, 15 bp, Homo sapiens
taaagggtcccaatg

SEQ ID NO: 159413 - DNA, 15 bp, Homo sapiens
ataaagggtcccaat

SEQ ID NO: 159414 - DNA, 15 bp, Homo sapiens
aataaagggtcccaa

SEQ ID NO: 159415 - DNA, 15 bp, Homo sapiens
taataaagggtccca

SEQ ID NO: 159416 - DNA, 15 bp, Homo sapiens
ataataaagggtccc

SEQ ID NO: 159417 - DNA, 15 bp, Homo sapiens
tataataaagggtcc

SEQ ID NO: 159418 - DNA, 15 bp, Homo sapiens
atataataaagggtc

SEQ ID NO: 159419 - DNA, 15 bp, Homo sapiens
tatataataaagggt

SEQ ID NO: 159420 - DNA, 15 bp, Homo sapiens
gtatataataaaggg

SEQ ID NO: 159421 - DNA, 15 bp, Homo sapiens
ggtatataataaagg

SEQ ID NO: 159422 - DNA, 15 bp, Homo sapiens
cggtatataataaag

SEQ ID NO: 159423 - DNA, 15 bp, Homo sapiens
ccggtatataataaa

SEQ ID NO: 159424 - DNA, 15 bp, Homo sapiens
cccggtatataataa

SEQ ID NO: 159425 - DNA, 15 bp, Homo sapiens
tcccggtatataata

SEQ ID NO: 159426 - DNA, 15 bp, Homo sapiens
ttcccggtatataat

SEQ ID NO: 159427 - DNA, 15 bp, Homo sapiens
gttcccggtatataa

SEQ ID NO: 159428 - DNA, 15 bp, Homo sapiens
tgttcccggtatata

SEQ ID NO: 159429 - DNA, 15 bp, Homo sapiens
ctgttcccggtatat

SEQ ID NO: 159430 - DNA, 15 bp, Homo sapiens
tctgttcccggtata

SEQ ID NO: 159431 - DNA, 15 bp, Homo sapiens
ttctgttcccggtat

SEQ ID NO: 159432 - DNA, 15 bp, Homo sapiens
tttctgttcccggta

SEQ ID NO: 159433 - DNA, 15 bp, Homo sapiens
ttttctgttcccggt

SEQ ID NO: 159434 - DNA, 15 bp, Homo sapiens
attttctgttcccgg

SEQ ID NO: 159435 - DNA, 15 bp, Homo sapiens
cattttctgttcccg

SEQ ID NO: 159436 - DNA, 15 bp, Homo sapiens
gcattttctgttccc

SEQ ID NO: 159437 - DNA, 15 bp, Homo sapiens
tgcattttctgttcc

SEQ ID NO: 159438 - DNA, 15 bp, Homo sapiens
atgcattttctgttc

SEQ ID NO: 159439 - DNA, 15 bp, Homo sapiens
catgcattttctgtt

SEQ ID NO: 159440 - DNA, 15 bp, Homo sapiens
acatgcattttctgt

SEQ ID NO: 159441 - DNA, 15 bp, Homo sapiens
aacatgcattttctg

SEQ ID NO: 159442 - DNA, 15 bp, Homo sapiens
caacatgcattttct

SEQ ID NO: 159443 - DNA, 15 bp, Homo sapiens
tcaacatgcattttc

SEQ ID NO: 159444 - DNA, 15 bp, Homo sapiens
atcaacatgcatttt

SEQ ID NO: 159445 - DNA, 15 bp, Homo sapiens
tatcaacatgcattt

SEQ ID NO: 159446 - DNA, 15 bp, Homo sapiens
ttatcaacatgcatt

SEQ ID NO: 159447 - DNA, 15 bp, Homo sapiens
tttatcaacatgcat

SEQ ID NO: 159448 - DNA, 15 bp, Homo sapiens
ttttatcaacatgca

SEQ ID NO: 159449 - DNA, 15 bp, Homo sapiens
cttttatcaacatgc

SEQ ID NO: 159450 - DNA, 15 bp, Homo sapiens
acttttatcaacatg

SEQ ID NO: 159451 - DNA, 15 bp, Homo sapiens
aacttttatcaacat

SEQ ID NO: 159452 - DNA, 15 bp, Homo sapiens
aaacttttatcaaca

SEQ ID NO: 159453 - DNA, 15 bp, Homo sapiens
caaacttttatcaac

SEQ ID NO: 159454 - DNA, 15 bp, Homo sapiens
ccaaacttttatcaa

SEQ ID NO: 159455 - DNA, 15 bp, Homo sapiens
cccaaacttttatca

SEQ ID NO: 159456 - DNA, 15 bp, Homo sapiens
tcccaaacttttatc

SEQ ID NO: 159457 - DNA, 15 bp, Homo sapiens
atcccaaacttttat

SEQ ID NO: 159458 - DNA, 15 bp, Homo sapiens
catcccaaactttta

SEQ ID NO: 159459 - DNA, 15 bp, Homo sapiens
acatcccaaactttt

SEQ ID NO: 159460 - DNA, 15 bp, Homo sapiens
aacatcccaaacttt

SEQ ID NO: 159461 - DNA, 15 bp, Homo sapiens
gaacatcccaaactt

SEQ ID NO: 159462 - DNA, 15 bp, Homo sapiens
ggaacatcccaaact

SEQ ID NO: 159463 - DNA, 15 bp, Homo sapiens
tggaacatcccaaac

SEQ ID NO: 159464 - DNA, 15 bp, Homo sapiens
atggaacatcccaaa

SEQ ID NO: 159465 - DNA, 15 bp, Homo sapiens
aatggaacatcccaa

SEQ ID NO: 159466 - DNA, 15 bp, Homo sapiens
aaatggaacatccca

SEQ ID NO: 159467 - DNA, 15 bp, Homo sapiens
gaaatggaacatccc

SEQ ID NO: 159468 - DNA, 15 bp, Homo sapiens
tgaaatggaacatcc

SEQ ID NO: 159469 - DNA, 15 bp, Homo sapiens
gtgaaatggaacatc

SEQ ID NO: 159470 - DNA, 15 bp, Homo sapiens
agtgaaatggaacat

SEQ ID NO: 159471 - DNA, 15 bp, Homo sapiens
gagtgaaatggaaca

SEQ ID NO: 159472 - DNA, 15 bp, Homo sapiens
agagtgaaatggaac

SEQ ID NO: 159473 - DNA, 15 bp, Homo sapiens
cagagtgaaatggaa

SEQ ID NO: 159474 - DNA, 15 bp, Homo sapiens
tcagagtgaaatgga

SEQ ID NO: 159475 - DNA, 15 bp, Homo sapiens
atcagagtgaaatgg

SEQ ID NO: 159476 - DNA, 15 bp, Homo sapiens
tatcagagtgaaatg

SEQ ID NO: 159477 - DNA, 15 bp, Homo sapiens
atatcagagtgaaat

SEQ ID NO: 159478 - DNA, 15 bp, Homo sapiens
tatatcagagtgaaa

SEQ ID NO: 159479 - DNA, 15 bp, Homo sapiens
ttatatcagagtgaa

SEQ ID NO: 159480 - DNA, 15 bp, Homo sapiens
tttatatcagagtga

SEQ ID NO: 159481 - DNA, 15 bp, Homo sapiens
ctttatatcagagtg

SEQ ID NO: 159482 - DNA, 15 bp, Homo sapiens
actttatatcagagt

SEQ ID NO: 159483 - DNA, 15 bp, Homo sapiens
cactttatatcagag

SEQ ID NO: 159484 - DNA, 15 bp, Homo sapiens
acactttatatcaga

SEQ ID NO: 159485 - DNA, 15 bp, Homo sapiens
cacactttatatcag

SEQ ID NO: 159486 - DNA, 15 bp, Homo sapiens
gcacactttatatca

SEQ ID NO: 159487 - DNA, 15 bp, Homo sapiens
cgcacactttatatc

SEQ ID NO: 159488 - DNA, 15 bp, Homo sapiens
acgcacactttatat

SEQ ID NO: 159489 - DNA, 15 bp, Homo sapiens
cacgcacactttata

SEQ ID NO: 159490 - DNA, 15 bp, Homo sapiens
ccacgcacactttat

SEQ ID NO: 159491 - DNA, 15 bp, Homo sapiens
accacgcacacttta

SEQ ID NO: 159492 - DNA, 15 bp, Homo sapiens
gaccacgcacacttt

SEQ ID NO: 159493 - DNA, 15 bp, Homo sapiens
tgaccacgcacactt

SEQ ID NO: 159494 - DNA, 15 bp, Homo sapiens
ctgaccacgcacact

SEQ ID NO: 159495 - DNA, 15 bp, Homo sapiens
tctgaccacgcacac

SEQ ID NO: 159496 - DNA, 15 bp, Homo sapiens
atctgaccacgcaca

SEQ ID NO: 159497 - DNA, 15 bp, Homo sapiens
aatctgaccacgcac

SEQ ID NO: 159498 - DNA, 15 bp, Homo sapiens
caatctgaccacgca

SEQ ID NO: 159499 - DNA, 15 bp, Homo sapiens
ccaatctgaccacgc

SEQ ID NO: 159500 - DNA, 15 bp, Homo sapiens
accaatctgaccacg

SEQ ID NO: 159501 - DNA, 15 bp, Homo sapiens
aaccaatctgaccac

SEQ ID NO: 159502 - DNA, 15 bp, Homo sapiens
aaaccaatctgacca

SEQ ID NO: 159503 - DNA, 15 bp, Homo sapiens
gaaaccaatctgacc

SEQ ID NO: 159504 - DNA, 15 bp, Homo sapiens
agaaaccaatctgac

SEQ ID NO: 159505 - DNA, 15 bp, Homo sapiens
tagaaaccaatctga

SEQ ID NO: 159506 - DNA, 15 bp, Homo sapiens
atagaaaccaatctg

SEQ ID NO: 159507 - DNA, 15 bp, Homo sapiens
aatagaaaccaatct

SEQ ID NO: 159508 - DNA, 15 bp, Homo sapiens
aaatagaaaccaatc

SEQ ID NO: 159509 - DNA, 15 bp, Homo sapiens
aaaatagaaaccaat

SEQ ID NO: 159510 - DNA, 15 bp, Homo sapiens
aaaaatagaaaccaa

SEQ ID NO: 159511 - DNA, 15 bp, Homo sapiens
caaaaatagaaacca

SEQ ID NO: 159512 - DNA, 15 bp, Homo sapiens
tcaaaaatagaaacc

SEQ ID NO: 159513 - DNA, 15 bp, Homo sapiens
atcaaaaatagaaac

SEQ ID NO: 159514 - DNA, 15 bp, Homo sapiens
tatcaaaaatagaaa

SEQ ID NO: 159515 - DNA, 15 bp, Homo sapiens
ttatcaaaaatagaa

SEQ ID NO: 159516 - DNA, 15 bp, Homo sapiens
tttatcaaaaataga

SEQ ID NO: 159517 - DNA, 15 bp, Homo sapiens
ttttatcaaaaatag

SEQ ID NO: 159518 - DNA, 15 bp, Homo sapiens
tttttatcaaaaata

SEQ ID NO: 159519 - DNA, 15 bp, Homo sapiens
atttttatcaaaaat

SEQ ID NO: 159520 - DNA, 15 bp, Homo sapiens
catttttatcaaaaa

SEQ ID NO: 159521 - DNA, 15 bp, Homo sapiens
tcatttttatcaaaa

SEQ ID NO: 159522 - DNA, 15 bp, Homo sapiens
ctcatttttatcaaa

SEQ ID NO: 159523 - DNA, 15 bp, Homo sapiens
cctcatttttatcaa

SEQ ID NO: 159524 - DNA, 15 bp, Homo sapiens
acctcatttttatca

SEQ ID NO: 159525 - DNA, 15 bp, Homo sapiens
aacctcatttttatc

SEQ ID NO: 159526 - DNA, 15 bp, Homo sapiens
gaacctcatttttat

SEQ ID NO: 159527 - DNA, 15 bp, Homo sapiens
agaacctcattttta

SEQ ID NO: 159528 - DNA, 15 bp, Homo sapiens
cagaacctcattttt

SEQ ID NO: 159529 - DNA, 15 bp, Homo sapiens
ccagaacctcatttt

SEQ ID NO: 159530 - DNA, 15 bp, Homo sapiens
tccagaacctcattt

SEQ ID NO: 159531 - DNA, 15 bp, Homo sapiens
ttccagaacctcatt

SEQ ID NO: 159532 - DNA, 15 bp, Homo sapiens
tttccagaacctcat

SEQ ID NO: 159533 - DNA, 15 bp, Homo sapiens
ctttccagaacctca

SEQ ID NO: 159534 - DNA, 15 bp, Homo sapiens
gctttccagaacctc

SEQ ID NO: 159535 - DNA, 15 bp, Homo sapiens
ggctttccagaacct

SEQ ID NO: 159536 - DNA, 15 bp, Homo sapiens
tggctttccagaacc

SEQ ID NO: 159537 - DNA, 15 bp, Homo sapiens
atggctttccagaac

SEQ ID NO: 159538 - DNA, 15 bp, Homo sapiens
aatggctttccagaa

SEQ ID NO: 159539 - DNA, 15 bp, Homo sapiens
gaatggctttccaga

SEQ ID NO: 159540 - DNA, 15 bp, Homo sapiens
agaatggctttccag

SEQ ID NO: 159541 - DNA, 15 bp, Homo sapiens
cagaatggctttcca

SEQ ID NO: 159542 - DNA, 15 bp, Homo sapiens
ccagaatggctttcc

SEQ ID NO: 159543 - DNA, 15 bp, Homo sapiens
gccagaatggctttc

SEQ ID NO: 159544 - DNA, 15 bp, Homo sapiens
agccagaatggcttt

SEQ ID NO: 159545 - DNA, 15 bp, Homo sapiens
gagccagaatggctt

SEQ ID NO: 159546 - DNA, 15 bp, Homo sapiens
tgagccagaatggct

SEQ ID NO: 159547 - DNA, 15 bp, Homo sapiens
atgagccagaatggc

SEQ ID NO: 159548 - DNA, 15 bp, Homo sapiens
catgagccagaatgg

SEQ ID NO: 159549 - DNA, 15 bp, Homo sapiens
ccatgagccagaatg

SEQ ID NO: 159550 - DNA, 15 bp, Homo sapiens
cccatgagccagaat

SEQ ID NO: 159551 - DNA, 15 bp, Homo sapiens
gcccatgagccagaa

SEQ ID NO: 159552 - DNA, 15 bp, Homo sapiens
agcccatgagccaga

SEQ ID NO: 159553 - DNA, 15 bp, Homo sapiens
aagcccatgagccag

SEQ ID NO: 159554 - DNA, 15 bp, Homo sapiens
taagcccatgagcca

SEQ ID NO: 159555 - DNA, 15 bp, Homo sapiens
ataagcccatgagcc

SEQ ID NO: 159556 - DNA, 15 bp, Homo sapiens
cataagcccatgagc

SEQ ID NO: 159557 - DNA, 15 bp, Homo sapiens
tcataagcccatgag

SEQ ID NO: 159558 - DNA, 15 bp, Homo sapiens
ctcataagcccatga

SEQ ID NO: 159559 - DNA, 15 bp, Homo sapiens
tctcataagcccatg

SEQ ID NO: 159560 - DNA, 15 bp, Homo sapiens
ttctcataagcccat

SEQ ID NO: 159561 - DNA, 15 bp, Homo sapiens
tttctcataagccca

SEQ ID NO: 159562 - DNA, 15 bp, Homo sapiens
ttttctcataagccc

SEQ ID NO: 159563 - DNA, 15 bp, Homo sapiens
tttttctcataagcc

SEQ ID NO: 159564 - DNA, 15 bp, Homo sapiens
ctttttctcataagc

SEQ ID NO: 159565 - DNA, 15 bp, Homo sapiens
cctttttctcataag

SEQ ID NO: 159566 - DNA, 15 bp, Homo sapiens
acctttttctcataa

SEQ ID NO: 159567 - DNA, 15 bp, Homo sapiens
aacctttttctcata

SEQ ID NO: 159568 - DNA, 15 bp, Homo sapiens
aaacctttttctcat

SEQ ID NO: 159569 - DNA, 15 bp, Homo sapiens
aaaacctttttctca

SEQ ID NO: 159570 - DNA, 15 bp, Homo sapiens
caaaacctttttctc

SEQ ID NO: 159571 - DNA, 15 bp, Homo sapiens
ccaaaacctttttct

SEQ ID NO: 159572 - DNA, 15 bp, Homo sapiens
tccaaaacctttttc

SEQ ID NO: 159573 - DNA, 15 bp, Homo sapiens
ttccaaaaccttttt

SEQ ID NO: 159574 - DNA, 15 bp, Homo sapiens
tttccaaaacctttt

SEQ ID NO: 159575 - DNA, 15 bp, Homo sapiens
ctttccaaaaccttt

SEQ ID NO: 159576 - DNA, 15 bp, Homo sapiens
cctttccaaaacctt

SEQ ID NO: 159577 - DNA, 15 bp, Homo sapiens
tcctttccaaaacct

SEQ ID NO: 159578 - DNA, 15 bp, Homo sapiens
ctcctttccaaaacc

SEQ ID NO: 159579 - DNA, 15 bp, Homo sapiens
actcctttccaaaac

SEQ ID NO: 159580 - DNA, 15 bp, Homo sapiens
aactcctttccaaaa

SEQ ID NO: 159581 - DNA, 15 bp, Homo sapiens
aaactcctttccaaa

SEQ ID NO: 159582 - DNA, 15 bp, Homo sapiens
aaaactcctttccaa

SEQ ID NO: 159583 - DNA, 15 bp, Homo sapiens
caaaactcctttcca

SEQ ID NO: 159584 - DNA, 15 bp, Homo sapiens
ccaaaactcctttcc

SEQ ID NO: 159585 - DNA, 15 bp, Homo sapiens
tccaaaactcctttc

SEQ ID NO: 159586 - DNA, 15 bp, Homo sapiens
ctccaaaactccttt

SEQ ID NO: 159587 - DNA, 15 bp, Homo sapiens
actccaaaactcctt

SEQ ID NO: 159588 - DNA, 15 bp, Homo sapiens
cactccaaaactcct

SEQ ID NO: 159589 - DNA, 15 bp, Homo sapiens
gcactccaaaactcc

SEQ ID NO: 159590 - DNA, 15 bp, Homo sapiens
agcactccaaaactc

SEQ ID NO: 159591 - DNA, 15 bp, Homo sapiens
gagcactccaaaact

SEQ ID NO: 159592 - DNA, 15 bp, Homo sapiens
ggagcactccaaaac

SEQ ID NO: 159593 - DNA, 15 bp, Homo sapiens
gggagcactccaaaa

SEQ ID NO: 159594 - DNA, 15 bp, Homo sapiens
ggggagcactccaaa

SEQ ID NO: 159595 - DNA, 15 bp, Homo sapiens
aggggagcactccaa

SEQ ID NO: 159596 - DNA, 15 bp, Homo sapiens
taggggagcactcca

SEQ ID NO: 159597 - DNA, 15 bp, Homo sapiens
gtaggggagcactcc

SEQ ID NO: 159598 - DNA, 15 bp, Homo sapiens
tgtaggggagcactc

SEQ ID NO: 159599 - DNA, 15 bp, Homo sapiens
ctgtaggggagcact

SEQ ID NO: 159600 - DNA, 15 bp, Homo sapiens
tctgtaggggagcac

SEQ ID NO: 159601 - DNA, 15 bp, Homo sapiens
ttctgtaggggagca

SEQ ID NO: 159602 - DNA, 15 bp, Homo sapiens
tttctgtaggggagc

SEQ ID NO: 159603 - DNA, 15 bp, Homo sapiens
atttctgtaggggag

SEQ ID NO: 159604 - DNA, 15 bp, Homo sapiens
tatttctgtagggga

SEQ ID NO: 159605 - DNA, 15 bp, Homo sapiens
ctatttctgtagggg

SEQ ID NO: 159606 - DNA, 15 bp, Homo sapiens
gctatttctgtaggg

SEQ ID NO: 159607 - DNA, 15 bp, Homo sapiens
tgctatttctgtagg

SEQ ID NO: 159608 - DNA, 15 bp, Homo sapiens
gtgctatttctgtag

SEQ ID NO: 159609 - DNA, 15 bp, Homo sapiens
agtgctatttctgta

SEQ ID NO: 159610 - DNA, 15 bp, Homo sapiens
cagtgctatttctgt

SEQ ID NO: 159611 - DNA, 15 bp, Homo sapiens
gcagtgctatttctg

SEQ ID NO: 159612 - DNA, 15 bp, Homo sapiens
agcagtgctatttct

SEQ ID NO: 159613 - DNA, 15 bp, Homo sapiens
aagcagtgctatttc

SEQ ID NO: 159614 - DNA, 15 bp, Homo sapiens
aaagcagtgctattt

SEQ ID NO: 159615 - DNA, 15 bp, Homo sapiens
aaaagcagtgctatt

SEQ ID NO: 159616 - DNA, 15 bp, Homo sapiens
aaaaagcagtgctat

SEQ ID NO: 159617 - DNA, 15 bp, Homo sapiens
taaaaagcagtgcta

SEQ ID NO: 159618 - DNA, 15 bp, Homo sapiens
ttaaaaagcagtgct

SEQ ID NO: 159619 - DNA, 15 bp, Homo sapiens
attaaaaagcagtgc

SEQ ID NO: 159620 - DNA, 15 bp, Homo sapiens
aattaaaaagcagtg

SEQ ID NO: 159621 - DNA, 15 bp, Homo sapiens
caattaaaaagcagt

SEQ ID NO: 159622 - DNA, 15 bp, Homo sapiens
acaattaaaaagcag

SEQ ID NO: 159623 - DNA, 15 bp, Homo sapiens
aacaattaaaaagca

SEQ ID NO: 159624 - DNA, 15 bp, Homo sapiens
gaacaattaaaaagc

SEQ ID NO: 159625 - DNA, 15 bp, Homo sapiens
agaacaattaaaaag

SEQ ID NO: 159626 - DNA, 15 bp, Homo sapiens
cagaacaattaaaaa

SEQ ID NO: 159627 - DNA, 15 bp, Homo sapiens
acagaacaattaaaa

SEQ ID NO: 159628 - DNA, 15 bp, Homo sapiens
gacagaacaattaaa

SEQ ID NO: 159629 - DNA, 15 bp, Homo sapiens
cgacagaacaattaa

SEQ ID NO: 159630 - DNA, 15 bp, Homo sapiens
gcgacagaacaatta

SEQ ID NO: 159631 - DNA, 15 bp, Homo sapiens
agcgacagaacaatt

SEQ ID NO: 159632 - DNA, 15 bp, Homo sapiens
tagcgacagaacaat

SEQ ID NO: 159633 - DNA, 15 bp, Homo sapiens
ctagcgacagaacaa

SEQ ID NO: 159634 - DNA, 15 bp, Homo sapiens
tctagcgacagaaca

SEQ ID NO: 159635 - DNA, 15 bp, Homo sapiens
ctctagcgacagaac

SEQ ID NO: 159636 - DNA, 15 bp, Homo sapiens
gctctagcgacagaa

SEQ ID NO: 159637 - DNA, 15 bp, Homo sapiens
ggctctagcgacaga

SEQ ID NO: 159638 - DNA, 15 bp, Homo sapiens
aggctctagcgacag

SEQ ID NO: 159639 - DNA, 15 bp, Homo sapiens
aaggctctagcgaca

SEQ ID NO: 159640 - DNA, 15 bp, Homo sapiens
caaggctctagcgac

SEQ ID NO: 159641 - DNA, 15 bp, Homo sapiens
ccaaggctctagcga

SEQ ID NO: 159642 - DNA, 15 bp, Homo sapiens
gccaaggctctagcg

SEQ ID NO: 159643 - DNA, 15 bp, Homo sapiens
ggccaaggctctagc

SEQ ID NO: 159644 - DNA, 15 bp, Homo sapiens
gggccaaggctctag

SEQ ID NO: 159645 - DNA, 15 bp, Homo sapiens
ggggccaaggctcta

SEQ ID NO: 159646 - DNA, 15 bp, Homo sapiens
tggggccaaggctct

SEQ ID NO: 159647 - DNA, 15 bp, Homo sapiens
ttggggccaaggctc

SEQ ID NO: 159648 - DNA, 15 bp, Homo sapiens
tttggggccaaggct

SEQ ID NO: 159649 - DNA, 15 bp, Homo sapiens
atttggggccaaggc

SEQ ID NO: 159650 - DNA, 15 bp, Homo sapiens
tatttggggccaagg

SEQ ID NO: 159651 - DNA, 15 bp, Homo sapiens
ttatttggggccaag

SEQ ID NO: 159652 - DNA, 15 bp, Homo sapiens
gttatttggggccaa

SEQ ID NO: 159653 - DNA, 15 bp, Homo sapiens
tgttatttggggcca

SEQ ID NO: 159654 - DNA, 15 bp, Homo sapiens
ttgttatttggggcc

SEQ ID NO: 159655 - DNA, 15 bp, Homo sapiens
attgttatttggggc

SEQ ID NO: 159656 - DNA, 15 bp, Homo sapiens
cattgttatttgggg

SEQ ID NO: 159657 - DNA, 15 bp, Homo sapiens
gcattgttatttggg

SEQ ID NO: 159658 - DNA, 15 bp, Homo sapiens
tgcattgttatttgg

SEQ ID NO: 159659 - DNA, 15 bp, Homo sapiens
atgcattgttatttg

SEQ ID NO: 159660 - DNA, 15 bp, Homo sapiens
catgcattgttattt

SEQ ID NO: 159661 - DNA, 15 bp, Homo sapiens
tcatgcattgttatt

SEQ ID NO: 159662 - DNA, 15 bp, Homo sapiens
ttcatgcattgttat

SEQ ID NO: 159663 - DNA, 15 bp, Homo sapiens
attcatgcattgtta

SEQ ID NO: 159664 - DNA, 15 bp, Homo sapiens
gattcatgcattgtt

SEQ ID NO: 159665 - DNA, 15 bp, Homo sapiens
agattcatgcattgt

SEQ ID NO: 159666 - DNA, 15 bp, Homo sapiens
gagattcatgcattg

SEQ ID NO: 159667 - DNA, 15 bp, Homo sapiens
tgagattcatgcatt

SEQ ID NO: 159668 - DNA, 15 bp, Homo sapiens
ctgagattcatgcat

SEQ ID NO: 159669 - DNA, 15 bp, Homo sapiens
actgagattcatgca

SEQ ID NO: 159670 - DNA, 15 bp, Homo sapiens
tactgagattcatgc

SEQ ID NO: 159671 - DNA, 15 bp, Homo sapiens
atactgagattcatg

SEQ ID NO: 159672 - DNA, 15 bp, Homo sapiens
aatactgagattcat

SEQ ID NO: 159673 - DNA, 15 bp, Homo sapiens
aaatactgagattca

SEQ ID NO: 159674 - DNA, 15 bp, Homo sapiens
caaatactgagattc

SEQ ID NO: 159675 - DNA, 15 bp, Homo sapiens
acaaatactgagatt

SEQ ID NO: 159676 - DNA, 15 bp, Homo sapiens
gacaaatactgagat

SEQ ID NO: 159677 - DNA, 15 bp, Homo sapiens
agacaaatactgaga

SEQ ID NO: 159678 - DNA, 15 bp, Homo sapiens
aagacaaatactgag

SEQ ID NO: 159679 - DNA, 15 bp, Homo sapiens
gaagacaaatactga

SEQ ID NO: 159680 - DNA, 15 bp, Homo sapiens
tgaagacaaatactg

SEQ ID NO: 159681 - DNA, 15 bp, Homo sapiens
ttgaagacaaatact

SEQ ID NO: 159682 - DNA, 15 bp, Homo sapiens
cttgaagacaaatac

SEQ ID NO: 159683 - DNA, 15 bp, Homo sapiens
ccttgaagacaaata

SEQ ID NO: 159684 - DNA, 15 bp, Homo sapiens
tccttgaagacaaat

SEQ ID NO: 159685 - DNA, 15 bp, Homo sapiens
ctccttgaagacaaa

SEQ ID NO: 159686 - DNA, 15 bp, Homo sapiens
gctccttgaagacaa

SEQ ID NO: 159687 - DNA, 15 bp, Homo sapiens
agctccttgaagaca

SEQ ID NO: 159688 - DNA, 15 bp, Homo sapiens
cagctccttgaagac

SEQ ID NO: 159689 - DNA, 15 bp, Homo sapiens
acagctccttgaaga

SEQ ID NO: 159690 - DNA, 15 bp, Homo sapiens
cacagctccttgaag

SEQ ID NO: 159691 - DNA, 15 bp, Homo sapiens
ccacagctccttgaa

SEQ ID NO: 159692 - DNA, 15 bp, Homo sapiens
accacagctccttga

SEQ ID NO: 159693 - DNA, 15 bp, Homo sapiens
gaccacagctccttg

SEQ ID NO: 159694 - DNA, 15 bp, Homo sapiens
agaccacagctcctt

SEQ ID NO: 159695 - DNA, 15 bp, Homo sapiens
cagaccacagctcct

SEQ ID NO: 159696 - DNA, 15 bp, Homo sapiens
tcagaccacagctcc

SEQ ID NO: 159697 - DNA, 15 bp, Homo sapiens
atcagaccacagctc

SEQ ID NO: 159698 - DNA, 15 bp, Homo sapiens
tatcagaccacagct

SEQ ID NO: 159699 - DNA, 15 bp, Homo sapiens
ctatcagaccacagc

SEQ ID NO: 159700 - DNA, 15 bp, Homo sapiens
cctatcagaccacag

SEQ ID NO: 159701 - DNA, 15 bp, Homo sapiens
tcctatcagaccaca

SEQ ID NO: 159702 - DNA, 15 bp, Homo sapiens
ctcctatcagaccac

SEQ ID NO: 159703 - DNA, 15 bp, Homo sapiens
gctcctatcagacca

SEQ ID NO: 159704 - DNA, 15 bp, Homo sapiens
tgctcctatcagacc

SEQ ID NO: 159705 - DNA, 15 bp, Homo sapiens
atgctcctatcagac

SEQ ID NO: 159706 - DNA, 15 bp, Homo sapiens
tatgctcctatcaga

SEQ ID NO: 159707 - DNA, 15 bp, Homo sapiens
atatgctcctatcag

SEQ ID NO: 159708 - DNA, 15 bp, Homo sapiens
tatatgctcctatca

SEQ ID NO: 159709 - DNA, 15 bp, Homo sapiens
ctatatgctcctatc

SEQ ID NO: 159710 - DNA, 15 bp, Homo sapiens
actatatgctcctat

SEQ ID NO: 159711 - DNA, 15 bp, Homo sapiens
tactatatgctccta

SEQ ID NO: 159712 - DNA, 15 bp, Homo sapiens
atactatatgctcct

SEQ ID NO: 159713 - DNA, 15 bp, Homo sapiens
tatactatatgctcc

SEQ ID NO: 159714 - DNA, 15 bp, Homo sapiens
gtatactatatgctc

SEQ ID NO: 159715 - DNA, 15 bp, Homo sapiens
ggtatactatatgct

SEQ ID NO: 159716 - DNA, 15 bp, Homo sapiens
aggtatactatatgc

SEQ ID NO: 159717 - DNA, 15 bp, Homo sapiens
taggtatactatatg

SEQ ID NO: 159718 - DNA, 15 bp, Homo sapiens
ataggtatactatat

SEQ ID NO: 159719 - DNA, 15 bp, Homo sapiens
tataggtatactata

SEQ ID NO: 159720 - DNA, 15 bp, Homo sapiens
atataggtatactat

SEQ ID NO: 159721 - DNA, 15 bp, Homo sapiens
catataggtatacta

SEQ ID NO: 159722 - DNA, 15 bp, Homo sapiens
ccatataggtatact

SEQ ID NO: 159723 - DNA, 15 bp, Homo sapiens
tccatataggtatac

SEQ ID NO: 159724 - DNA, 15 bp, Homo sapiens
atccatataggtata

SEQ ID NO: 159725 - DNA, 15 bp, Homo sapiens
catccatataggtat

SEQ ID NO: 159726 - DNA, 15 bp, Homo sapiens
ccatccatataggta

SEQ ID NO: 159727 - DNA, 15 bp, Homo sapiens
cccatccatataggt

SEQ ID NO: 159728 - DNA, 15 bp, Homo sapiens
acccatccatatagg

SEQ ID NO: 159729 - DNA, 15 bp, Homo sapiens
tacccatccatatag

SEQ ID NO: 159730 - DNA, 15 bp, Homo sapiens
atacccatccatata

SEQ ID NO: 159731 - DNA, 15 bp, Homo sapiens
tatacccatccatat

SEQ ID NO: 159732 - DNA, 15 bp, Homo sapiens
ttatacccatccata

SEQ ID NO: 159733 - DNA, 15 bp, Homo sapiens
gttatacccatccat

SEQ ID NO: 159734 - DNA, 15 bp, Homo sapiens
agttatacccatcca

SEQ ID NO: 159735 - DNA, 15 bp, Homo sapiens
cagttatacccatcc

SEQ ID NO: 159736 - DNA, 15 bp, Homo sapiens
tcagttatacccatc

SEQ ID NO: 159737 - DNA, 15 bp, Homo sapiens
ttcagttatacccat

SEQ ID NO: 159738 - DNA, 15 bp, Homo sapiens
cttcagttataccca

SEQ ID NO: 159739 - DNA, 15 bp, Homo sapiens
ccttcagttataccc

SEQ ID NO: 159740 - DNA, 15 bp, Homo sapiens
accttcagttatacc

SEQ ID NO: 159741 - DNA, 15 bp, Homo sapiens
caccttcagttatac

SEQ ID NO: 159742 - DNA, 15 bp, Homo sapiens
ccaccttcagttata

SEQ ID NO: 159743 - DNA, 15 bp, Homo sapiens
accaccttcagttat

SEQ ID NO: 159744 - DNA, 15 bp, Homo sapiens
caccaccttcagtta

SEQ ID NO: 159745 - DNA, 15 bp, Homo sapiens
tcaccaccttcagtt

SEQ ID NO: 159746 - DNA, 15 bp, Homo sapiens
ctcaccaccttcagt

SEQ ID NO: 159747 - DNA, 15 bp, Homo sapiens
cctcaccaccttcag

SEQ ID NO: 159748 - DNA, 15 bp, Homo sapiens
tcctcaccaccttca

SEQ ID NO: 159749 - DNA, 15 bp, Homo sapiens
gtcctcaccaccttc

SEQ ID NO: 159750 - DNA, 15 bp, Homo sapiens
ggtcctcaccacctt

SEQ ID NO: 159751 - DNA, 15 bp, Homo sapiens
aggtcctcaccacct

SEQ ID NO: 159752 - DNA, 15 bp, Homo sapiens
caggtcctcaccacc

SEQ ID NO: 159753 - DNA, 15 bp, Homo sapiens
acaggtcctcaccac

SEQ ID NO: 159754 - DNA, 15 bp, Homo sapiens
aacaggtcctcacca

SEQ ID NO: 159755 - DNA, 15 bp, Homo sapiens
aaacaggtcctcacc

SEQ ID NO: 159756 - DNA, 15 bp, Homo sapiens
aaaacaggtcctcac

SEQ ID NO: 159757 - DNA, 15 bp, Homo sapiens
aaaaacaggtcctca

SEQ ID NO: 159758 - DNA, 15 bp, Homo sapiens
taaaaacaggtcctc

SEQ ID NO: 159759 - DNA, 15 bp, Homo sapiens
ctaaaaacaggtcct

SEQ ID NO: 159760 - DNA, 15 bp, Homo sapiens
tctaaaaacaggtcc

SEQ ID NO: 159761 - DNA, 15 bp, Homo sapiens
atctaaaaacaggtc

SEQ ID NO: 159762 - DNA, 15 bp, Homo sapiens
catctaaaaacaggt

SEQ ID NO: 159763 - DNA, 15 bp, Homo sapiens
gcatctaaaaacagg

SEQ ID NO: 159764 - DNA, 15 bp, Homo sapiens
ggcatctaaaaacag

SEQ ID NO: 159765 - DNA, 15 bp, Homo sapiens
aggcatctaaaaaca

SEQ ID NO: 159766 - DNA, 15 bp, Homo sapiens
caggcatctaaaaac

SEQ ID NO: 159767 - DNA, 15 bp, Homo sapiens
tcaggcatctaaaaa

SEQ ID NO: 159768 - DNA, 15 bp, Homo sapiens
ctcaggcatctaaaa

SEQ ID NO: 159769 - DNA, 15 bp, Homo sapiens
tctcaggcatctaaa

SEQ ID NO: 159770 - DNA, 15 bp, Homo sapiens
ttctcaggcatctaa

SEQ ID NO: 159771 - DNA, 15 bp, Homo sapiens
tttctcaggcatcta

SEQ ID NO: 159772 - DNA, 15 bp, Homo sapiens
atttctcaggcatct

SEQ ID NO: 159773 - DNA, 15 bp, Homo sapiens
gatttctcaggcatc

SEQ ID NO: 159774 - DNA, 15 bp, Homo sapiens
ggatttctcaggcat

SEQ ID NO: 159775 - DNA, 15 bp, Homo sapiens
tggatttctcaggca

SEQ ID NO: 159776 - DNA, 15 bp, Homo sapiens
ttggatttctcaggc

SEQ ID NO: 159777 - DNA, 15 bp, Homo sapiens
tttggatttctcagg

SEQ ID NO: 159778 - DNA, 15 bp, Homo sapiens
ttttggatttctcag

SEQ ID NO: 159779 - DNA, 15 bp, Homo sapiens
tttttggatttctca

SEQ ID NO: 159780 - DNA, 15 bp, Homo sapiens
gtttttggatttctc

SEQ ID NO: 159781 - DNA, 15 bp, Homo sapiens
tgtttttggatttct

SEQ ID NO: 159782 - DNA, 15 bp, Homo sapiens
ttgtttttggatttc

SEQ ID NO: 159783 - DNA, 15 bp, Homo sapiens
cttgtttttggattt

SEQ ID NO: 159784 - DNA, 15 bp, Homo sapiens
tcttgtttttggatt

SEQ ID NO: 159785 - DNA, 15 bp, Homo sapiens
gtcttgtttttggat

SEQ ID NO: 159786 - DNA, 15 bp, Homo sapiens
tgtcttgtttttgga

SEQ ID NO: 159787 - DNA, 15 bp, Homo sapiens
ctgtcttgtttttgg

SEQ ID NO: 159788 - DNA, 15 bp, Homo sapiens
cctgtcttgtttttg

SEQ ID NO: 159789 - DNA, 15 bp, Homo sapiens
ccctgtcttgttttt

SEQ ID NO: 159790 - DNA, 15 bp, Homo sapiens
tccctgtcttgtttt

SEQ ID NO: 159791 - DNA, 15 bp, Homo sapiens
ttccctgtcttgttt

SEQ ID NO: 159792 - DNA, 15 bp, Homo sapiens
cttccctgtcttgtt

SEQ ID NO: 159793 - DNA, 15 bp, Homo sapiens
acttccctgtcttgt

SEQ ID NO: 159794 - DNA, 15 bp, Homo sapiens
aacttccctgtcttg

SEQ ID NO: 159795 - DNA, 15 bp, Homo sapiens
caacttccctgtctt

SEQ ID NO: 159796 - DNA, 15 bp, Homo sapiens
acaacttccctgtct

SEQ ID NO: 159797 - DNA, 15 bp, Homo sapiens
aacaacttccctgtc

SEQ ID NO: 159798 - DNA, 15 bp, Homo sapiens
gaacaacttccctgt

SEQ ID NO: 159799 - DNA, 15 bp, Homo sapiens
cgaacaacttccctg

SEQ ID NO: 159800 - DNA, 15 bp, Homo sapiens
acgaacaacttccct

SEQ ID NO: 159801 - DNA, 15 bp, Homo sapiens
gacgaacaacttccc

SEQ ID NO: 159802 - DNA, 15 bp, Homo sapiens
agacgaacaacttcc

SEQ ID NO: 159803 - DNA, 15 bp, Homo sapiens
cagacgaacaacttc

SEQ ID NO: 159804 - DNA, 15 bp, Homo sapiens
ccagacgaacaactt

SEQ ID NO: 159805 - DNA, 15 bp, Homo sapiens
cccagacgaacaact

SEQ ID NO: 159806 - DNA, 15 bp, Homo sapiens
tcccagacgaacaac

SEQ ID NO: 159807 - DNA, 15 bp, Homo sapiens
ttcccagacgaacaa

SEQ ID NO: 159808 - DNA, 15 bp, Homo sapiens
attcccagacgaaca

SEQ ID NO: 159809 - DNA, 15 bp, Homo sapiens
gattcccagacgaac

SEQ ID NO: 159810 - DNA, 15 bp, Homo sapiens
tgattcccagacgaa

SEQ ID NO: 159811 - DNA, 15 bp, Homo sapiens
atgattcccagacga

SEQ ID NO: 159812 - DNA, 15 bp, Homo sapiens
catgattcccagacg

SEQ ID NO: 159813 - DNA, 15 bp, Homo sapiens
tcatgattcccagac

SEQ ID NO: 159814 - DNA, 15 bp, Homo sapiens
ttcatgattcccaga

SEQ ID NO: 159815 - DNA, 15 bp, Homo sapiens
cttcatgattcccag

SEQ ID NO: 159816 - DNA, 15 bp, Homo sapiens
gcttcatgattccca

SEQ ID NO: 159817 - DNA, 15 bp, Homo sapiens
tgcttcatgattccc

SEQ ID NO: 159818 - DNA, 15 bp, Homo sapiens
atgcttcatgattcc

SEQ ID NO: 159819 - DNA, 15 bp, Homo sapiens
catgcttcatgattc

SEQ ID NO: 159820 - DNA, 15 bp, Homo sapiens
acatgcttcatgatt

SEQ ID NO: 159821 - DNA, 15 bp, Homo sapiens
tacatgcttcatgat

SEQ ID NO: 159822 - DNA, 15 bp, Homo sapiens
ttacatgcttcatga

SEQ ID NO: 159823 - DNA, 15 bp, Homo sapiens
tttacatgcttcatg

SEQ ID NO: 159824 - DNA, 15 bp, Homo sapiens
gtttacatgcttcat

SEQ ID NO: 159825 - DNA, 15 bp, Homo sapiens
ggtttacatgcttca

SEQ ID NO: 159826 - DNA, 15 bp, Homo sapiens
aggtttacatgcttc

SEQ ID NO: 159827 - DNA, 15 bp, Homo sapiens
taggtttacatgctt

SEQ ID NO: 159828 - DNA, 15 bp, Homo sapiens
ttaggtttacatgct

SEQ ID NO: 159829 - DNA, 15 bp, Homo sapiens
attaggtttacatgc

SEQ ID NO: 159830 - DNA, 15 bp, Homo sapiens
aattaggtttacatg

SEQ ID NO: 159831 - DNA, 15 bp, Homo sapiens
taattaggtttacat

SEQ ID NO: 159832 - DNA, 15 bp, Homo sapiens
ctaattaggtttaca

SEQ ID NO: 159833 - DNA, 15 bp, Homo sapiens
cctaattaggtttac

SEQ ID NO: 159834 - DNA, 15 bp, Homo sapiens
ccctaattaggttta

SEQ ID NO: 159835 - DNA, 15 bp, Homo sapiens
cccctaattaggttt

SEQ ID NO: 159836 - DNA, 15 bp, Homo sapiens
tcccctaattaggtt

SEQ ID NO: 159837 - DNA, 15 bp, Homo sapiens
ctcccctaattaggt

SEQ ID NO: 159838 - DNA, 15 bp, Homo sapiens
cctcccctaattagg

SEQ ID NO: 159839 - DNA, 15 bp, Homo sapiens
acctcccctaattag

SEQ ID NO: 159840 - DNA, 15 bp, Homo sapiens
cacctcccctaatta

SEQ ID NO: 159841 - DNA, 15 bp, Homo sapiens
ccacctcccctaatt

SEQ ID NO: 159842 - DNA, 15 bp, Homo sapiens
gccacctcccctaat

SEQ ID NO: 159843 - DNA, 15 bp, Homo sapiens
tgccacctcccctaa

SEQ ID NO: 159844 - DNA, 15 bp, Homo sapiens
atgccacctccccta

SEQ ID NO: 159845 - DNA, 15 bp, Homo sapiens
gatgccacctcccct

SEQ ID NO: 159846 - DNA, 15 bp, Homo sapiens
agatgccacctcccc

SEQ ID NO: 159847 - DNA, 15 bp, Homo sapiens
cagatgccacctccc

SEQ ID NO: 159848 - DNA, 15 bp, Homo sapiens
tcagatgccacctcc

SEQ ID NO: 159849 - DNA, 15 bp, Homo sapiens
atcagatgccacctc

SEQ ID NO: 159850 - DNA, 15 bp, Homo sapiens
gatcagatgccacct

SEQ ID NO: 159851 - DNA, 15 bp, Homo sapiens
agatcagatgccacc

SEQ ID NO: 159852 - DNA, 15 bp, Homo sapiens
gagatcagatgccac

SEQ ID NO: 159853 - DNA, 15 bp, Homo sapiens
tgagatcagatgcca

SEQ ID NO: 159854 - DNA, 15 bp, Homo sapiens
atgagatcagatgcc

SEQ ID NO: 159855 - DNA, 15 bp, Homo sapiens
gatgagatcagatgc

SEQ ID NO: 159856 - DNA, 15 bp, Homo sapiens
ggatgagatcagatg

SEQ ID NO: 159857 - DNA, 15 bp, Homo sapiens
aggatgagatcagat

SEQ ID NO: 159858 - DNA, 15 bp, Homo sapiens
aaggatgagatcaga

SEQ ID NO: 159859 - DNA, 15 bp, Homo sapiens
caaggatgagatcag

SEQ ID NO: 159860 - DNA, 15 bp, Homo sapiens
gcaaggatgagatca

SEQ ID NO: 159861 - DNA, 15 bp, Homo sapiens
tgcaaggatgagatc

SEQ ID NO: 159862 - DNA, 15 bp, Homo sapiens
ctgcaaggatgagat

SEQ ID NO: 159863 - DNA, 15 bp, Homo sapiens
tctgcaaggatgaga

SEQ ID NO: 159864 - DNA, 15 bp, Homo sapiens
ttctgcaaggatgag

SEQ ID NO: 159865 - DNA, 15 bp, Homo sapiens
attctgcaaggatga

SEQ ID NO: 159866 - DNA, 15 bp, Homo sapiens
tattctgcaaggatg

SEQ ID NO: 159867 - DNA, 15 bp, Homo sapiens
gtattctgcaaggat

SEQ ID NO: 159868 - DNA, 15 bp, Homo sapiens
tgtattctgcaagga

SEQ ID NO: 159869 - DNA, 15 bp, Homo sapiens
atgtattctgcaagg

SEQ ID NO: 159870 - DNA, 15 bp, Homo sapiens
tatgtattctgcaag

SEQ ID NO: 159871 - DNA, 15 bp, Homo sapiens
ttatgtattctgcaa

SEQ ID NO: 159872 - DNA, 15 bp, Homo sapiens
attatgtattctgca

SEQ ID NO: 159873 - DNA, 15 bp, Homo sapiens
aattatgtattctgc

SEQ ID NO: 159874 - DNA, 15 bp, Homo sapiens
aaattatgtattctg

SEQ ID NO: 159875 - DNA, 15 bp, Homo sapiens
aaaattatgtattct

SEQ ID NO: 159876 - DNA, 15 bp, Homo sapiens
aaaaattatgtattc

SEQ ID NO: 159877 - DNA, 15 bp, Homo sapiens
taaaaattatgtatt

SEQ ID NO: 159878 - DNA, 15 bp, Homo sapiens
ataaaaattatgtat

SEQ ID NO: 159879 - DNA, 15 bp, Homo sapiens
tataaaaattatgta

SEQ ID NO: 159880 - DNA, 15 bp, Homo sapiens
gtataaaaattatgt

SEQ ID NO: 159881 - DNA, 15 bp, Homo sapiens
tgtataaaaattatg

SEQ ID NO: 159882 - DNA, 15 bp, Homo sapiens
ttgtataaaaattat

SEQ ID NO: 159883 - DNA, 15 bp, Homo sapiens
tttgtataaaaatta

SEQ ID NO: 159884 - DNA, 15 bp, Homo sapiens
gtttgtataaaaatt

SEQ ID NO: 159885 - DNA, 15 bp, Homo sapiens
tgtttgtataaaaat

SEQ ID NO: 159886 - DNA, 15 bp, Homo sapiens
ttgtttgtataaaaa

SEQ ID NO: 159887 - DNA, 15 bp, Homo sapiens
attgtttgtataaaa

SEQ ID NO: 159888 - DNA, 15 bp, Homo sapiens
cattgtttgtataaa

SEQ ID NO: 159889 - DNA, 15 bp, Homo sapiens
acattgtttgtataa

SEQ ID NO: 159890 - DNA, 15 bp, Homo sapiens
aacattgtttgtata

SEQ ID NO: 159891 - DNA, 15 bp, Homo sapiens
caacattgtttgtat

SEQ ID NO: 159892 - DNA, 15 bp, Homo sapiens
tcaacattgtttgta

SEQ ID NO: 159893 - DNA, 15 bp, Homo sapiens
ttcaacattgtttgt

SEQ ID NO: 159894 - DNA, 15 bp, Homo sapiens
cttcaacattgtttg

SEQ ID NO: 159895 - DNA, 15 bp, Homo sapiens
tcttcaacattgttt

SEQ ID NO: 159896 - DNA, 15 bp, Homo sapiens
ctcttcaacattgtt

SEQ ID NO: 159897 - DNA, 15 bp, Homo sapiens
cctcttcaacattgt

SEQ ID NO: 159898 - DNA, 15 bp, Homo sapiens
acctcttcaacattg

SEQ ID NO: 159899 - DNA, 15 bp, Homo sapiens
cacctcttcaacatt

SEQ ID NO: 159900 - DNA, 15 bp, Homo sapiens
tcacctcttcaacat

SEQ ID NO: 159901 - DNA, 15 bp, Homo sapiens
atcacctcttcaaca

SEQ ID NO: 159902 - DNA, 15 bp, Homo sapiens
catcacctcttcaac

SEQ ID NO: 159903 - DNA, 15 bp, Homo sapiens
tcatcacctcttcaa

SEQ ID NO: 159904 - DNA, 15 bp, Homo sapiens
ctcatcacctcttca

SEQ ID NO: 159905 - DNA, 15 bp, Homo sapiens
tctcatcacctcttc

SEQ ID NO: 159906 - DNA, 15 bp, Homo sapiens
ttctcatcacctctt

SEQ ID NO: 159907 - DNA, 15 bp, Homo sapiens
gttctcatcacctct

SEQ ID NO: 159908 - DNA, 15 bp, Homo sapiens
tgttctcatcacctc

SEQ ID NO: 159909 - DNA, 15 bp, Homo sapiens
ctgttctcatcacct

SEQ ID NO: 159910 - DNA, 15 bp, Homo sapiens
tctgttctcatcacc

SEQ ID NO: 159911 - DNA, 15 bp, Homo sapiens
ttctgttctcatcac

SEQ ID NO: 159912 - DNA, 15 bp, Homo sapiens
tttctgttctcatca

SEQ ID NO: 159913 - DNA, 15 bp, Homo sapiens
ttttctgttctcatc

SEQ ID NO: 159914 - DNA, 15 bp, Homo sapiens
cttttctgttctcat

SEQ ID NO: 159915 - DNA, 15 bp, Homo sapiens
gcttttctgttctca

SEQ ID NO: 159916 - DNA, 15 bp, Homo sapiens
agcttttctgttctc

SEQ ID NO: 159917 - DNA, 15 bp, Homo sapiens
cagcttttctgttct

SEQ ID NO: 159918 - DNA, 15 bp, Homo sapiens
ccagcttttctgttc

SEQ ID NO: 159919 - DNA, 15 bp, Homo sapiens
cccagcttttctgtt

SEQ ID NO: 159920 - DNA, 15 bp, Homo sapiens
acccagcttttctgt

SEQ ID NO: 159921 - DNA, 15 bp, Homo sapiens
tacccagcttttctg

SEQ ID NO: 159922 - DNA, 15 bp, Homo sapiens
ttacccagcttttct

SEQ ID NO: 159923 - DNA, 15 bp, Homo sapiens
tttacccagcttttc

SEQ ID NO: 159924 - DNA, 15 bp, Homo sapiens
ctttacccagctttt

SEQ ID NO: 159925 - DNA, 15 bp, Homo sapiens
actttacccagcttt

SEQ ID NO: 159926 - DNA, 15 bp, Homo sapiens
cactttacccagctt

SEQ ID NO: 159927 - DNA, 15 bp, Homo sapiens
gcactttacccagct

SEQ ID NO: 159928 - DNA, 15 bp, Homo sapiens
tgcactttacccagc

SEQ ID NO: 159929 - DNA, 15 bp, Homo sapiens
ctgcactttacccag

SEQ ID NO: 159930 - DNA, 15 bp, Homo sapiens
tctgcactttaccca

SEQ ID NO: 159931 - DNA, 15 bp, Homo sapiens
ctctgcactttaccc

SEQ ID NO: 159932 - DNA, 15 bp, Homo sapiens
gctctgcactttacc

SEQ ID NO: 159933 - DNA, 15 bp, Homo sapiens
tgctctgcactttac

SEQ ID NO: 159934 - DNA, 15 bp, Homo sapiens
atgctctgcacttta

SEQ ID NO: 159935 - DNA, 15 bp, Homo sapiens
catgctctgcacttt

SEQ ID NO: 159936 - DNA, 15 bp, Homo sapiens
acatgctctgcactt

SEQ ID NO: 159937 - DNA, 15 bp, Homo sapiens
aacatgctctgcact

SEQ ID NO: 159938 - DNA, 15 bp, Homo sapiens
gaacatgctctgcac

SEQ ID NO: 159939 - DNA, 15 bp, Homo sapiens
tgaacatgctctgca

SEQ ID NO: 159940 - DNA, 15 bp, Homo sapiens
ttgaacatgctctgc

SEQ ID NO: 159941 - DNA, 15 bp, Homo sapiens
cttgaacatgctctg

SEQ ID NO: 159942 - DNA, 15 bp, Homo sapiens
ccttgaacatgctct

SEQ ID NO: 159943 - DNA, 15 bp, Homo sapiens
tccttgaacatgctc

SEQ ID NO: 159944 - DNA, 15 bp, Homo sapiens
ttccttgaacatgct

SEQ ID NO: 159945 - DNA, 15 bp, Homo sapiens
cttccttgaacatgc

SEQ ID NO: 159946 - DNA, 15 bp, Homo sapiens
ccttccttgaacatg

SEQ ID NO: 159947 - DNA, 15 bp, Homo sapiens
cccttccttgaacat

SEQ ID NO: 159948 - DNA, 15 bp, Homo sapiens
acccttccttgaaca

SEQ ID NO: 159949 - DNA, 15 bp, Homo sapiens
aacccttccttgaac

SEQ ID NO: 159950 - DNA, 15 bp, Homo sapiens
taacccttccttgaa

SEQ ID NO: 159951 - DNA, 15 bp, Homo sapiens
gtaacccttccttga

SEQ ID NO: 159952 - DNA, 15 bp, Homo sapiens
tgtaacccttccttg

SEQ ID NO: 159953 - DNA, 15 bp, Homo sapiens
ttgtaacccttcctt

SEQ ID NO: 159954 - DNA, 15 bp, Homo sapiens
tttgtaacccttcct

SEQ ID NO: 159955 - DNA, 15 bp, Homo sapiens
gtttgtaacccttcc

SEQ ID NO: 159956 - DNA, 15 bp, Homo sapiens
tgtttgtaacccttc

SEQ ID NO: 159957 - DNA, 15 bp, Homo sapiens
atgtttgtaaccctt

SEQ ID NO: 159958 - DNA, 15 bp, Homo sapiens
aatgtttgtaaccct

SEQ ID NO: 159959 - DNA, 15 bp, Homo sapiens
aaatgtttgtaaccc

SEQ ID NO: 159960 - DNA, 15 bp, Homo sapiens
gaaatgtttgtaacc

SEQ ID NO: 159961 - DNA, 15 bp, Homo sapiens
agaaatgtttgtaac

SEQ ID NO: 159962 - DNA, 15 bp, Homo sapiens
aagaaatgtttgtaa

SEQ ID NO: 159963 - DNA, 15 bp, Homo sapiens
caagaaatgtttgta

SEQ ID NO: 159964 - DNA, 15 bp, Homo sapiens
tcaagaaatgtttgt

SEQ ID NO: 159965 - DNA, 15 bp, Homo sapiens
ctcaagaaatgtttg

SEQ ID NO: 159966 - DNA, 15 bp, Homo sapiens
cctcaagaaatgttt

SEQ ID NO: 159967 - DNA, 15 bp, Homo sapiens
ccctcaagaaatgtt

SEQ ID NO: 159968 - DNA, 15 bp, Homo sapiens
gccctcaagaaatgt

SEQ ID NO: 159969 - DNA, 15 bp, Homo sapiens
ggccctcaagaaatg

SEQ ID NO: 159970 - DNA, 15 bp, Homo sapiens
aggccctcaagaaat

SEQ ID NO: 159971 - DNA, 15 bp, Homo sapiens
caggccctcaagaaa

SEQ ID NO: 159972 - DNA, 15 bp, Homo sapiens
gcaggccctcaagaa

SEQ ID NO: 159973 - DNA, 15 bp, Homo sapiens
ggcaggccctcaaga

SEQ ID NO: 159974 - DNA, 15 bp, Homo sapiens
tggcaggccctcaag

SEQ ID NO: 159975 - DNA, 15 bp, Homo sapiens
atggcaggccctcaa

SEQ ID NO: 159976 - DNA, 15 bp, Homo sapiens
catggcaggccctca

SEQ ID NO: 159977 - DNA, 15 bp, Homo sapiens
acatggcaggccctc

SEQ ID NO: 159978 - DNA, 15 bp, Homo sapiens
cacatggcaggccct

SEQ ID NO: 159979 - DNA, 15 bp, Homo sapiens
gcacatggcaggccc

SEQ ID NO: 159980 - DNA, 15 bp, Homo sapiens
tgcacatggcaggcc

SEQ ID NO: 159981 - DNA, 15 bp, Homo sapiens
gtgcacatggcaggc

SEQ ID NO: 159982 - DNA, 15 bp, Homo sapiens
tgtgcacatggcagg

SEQ ID NO: 159983 - DNA, 15 bp, Homo sapiens
ctgtgcacatggcag

SEQ ID NO: 159984 - DNA, 15 bp, Homo sapiens
cctgtgcacatggca

SEQ ID NO: 159985 - DNA, 15 bp, Homo sapiens
ccctgtgcacatggc

SEQ ID NO: 159986 - DNA, 15 bp, Homo sapiens
gccctgtgcacatgg

SEQ ID NO: 159987 - DNA, 15 bp, Homo sapiens
tgccctgtgcacatg

SEQ ID NO: 159988 - DNA, 15 bp, Homo sapiens
gtgccctgtgcacat

SEQ ID NO: 159989 - DNA, 15 bp, Homo sapiens
ggtgccctgtgcaca

SEQ ID NO: 159990 - DNA, 15 bp, Homo sapiens
tggtgccctgtgcac

SEQ ID NO: 159991 - DNA, 15 bp, Homo sapiens
ttggtgccctgtgca

SEQ ID NO: 159992 - DNA, 15 bp, Homo sapiens
attggtgccctgtgc

SEQ ID NO: 159993 - DNA, 15 bp, Homo sapiens
gattggtgccctgtg

SEQ ID NO: 159994 - DNA, 15 bp, Homo sapiens
agattggtgccctgt

SEQ ID NO: 159995 - DNA, 15 bp, Homo sapiens
tagattggtgccctg

SEQ ID NO: 159996 - DNA, 15 bp, Homo sapiens
ctagattggtgccct

SEQ ID NO: 159997 - DNA, 15 bp, Homo sapiens
actagattggtgccc

SEQ ID NO: 159998 - DNA, 15 bp, Homo sapiens
cactagattggtgcc

SEQ ID NO: 159999 - DNA, 15 bp, Homo sapiens
tcactagattggtgc

SEQ ID NO: 160000 - DNA, 15 bp, Homo sapiens
ttcactagattggtg

SEQ ID NO: 160001 - DNA, 15 bp, Homo sapiens
tttcactagattggt

SEQ ID NO: 160002 - DNA, 15 bp, Homo sapiens
ctttcactagattgg

SEQ ID NO: 160003 - DNA, 15 bp, Homo sapiens
gctttcactagattg

SEQ ID NO: 160004 - DNA, 15 bp, Homo sapiens
tgctttcactagatt

SEQ ID NO: 160005 - DNA, 15 bp, Homo sapiens
ttgctttcactagat

SEQ ID NO: 160006 - DNA, 15 bp, Homo sapiens
attgctttcactaga

SEQ ID NO: 160007 - DNA, 15 bp, Homo sapiens
gattgctttcactag

SEQ ID NO: 160008 - DNA, 15 bp, Homo sapiens
agattgctttcacta

SEQ ID NO: 160009 - DNA, 15 bp, Homo sapiens
cagattgctttcact

SEQ ID NO: 160010 - DNA, 15 bp, Homo sapiens
tcagattgctttcac

SEQ ID NO: 160011 - DNA, 15 bp, Homo sapiens
atcagattgctttca

SEQ ID NO: 160012 - DNA, 15 bp, Homo sapiens
tatcagattgctttc

SEQ ID NO: 160013 - DNA, 15 bp, Homo sapiens
ttatcagattgcttt

SEQ ID NO: 160014 - DNA, 15 bp, Homo sapiens
cttatcagattgctt

SEQ ID NO: 160015 - DNA, 15 bp, Homo sapiens
tcttatcagattgct

SEQ ID NO: 160016 - DNA, 15 bp, Homo sapiens
ctcttatcagattgc

SEQ ID NO: 160017 - DNA, 15 bp, Homo sapiens
gctcttatcagattg

SEQ ID NO: 160018 - DNA, 15 bp, Homo sapiens
agctcttatcagatt

SEQ ID NO: 160019 - DNA, 15 bp, Homo sapiens
aagctcttatcagat

SEQ ID NO: 160020 - DNA, 15 bp, Homo sapiens
caagctcttatcaga

SEQ ID NO: 160021 - DNA, 15 bp, Homo sapiens
ccaagctcttatcag

SEQ ID NO: 160022 - DNA, 15 bp, Homo sapiens
accaagctcttatca

SEQ ID NO: 160023 - DNA, 15 bp, Homo sapiens
taccaagctcttatc

SEQ ID NO: 160024 - DNA, 15 bp, Homo sapiens
gtaccaagctcttat

SEQ ID NO: 160025 - DNA, 15 bp, Homo sapiens
tgtaccaagctctta

SEQ ID NO: 160026 - DNA, 15 bp, Homo sapiens
ttgtaccaagctctt

SEQ ID NO: 160027 - DNA, 15 bp, Homo sapiens
tttgtaccaagctct

SEQ ID NO: 160028 - DNA, 15 bp, Homo sapiens
ttttgtaccaagctc

SEQ ID NO: 160029 - DNA, 15 bp, Homo sapiens
gttttgtaccaagct

SEQ ID NO: 160030 - DNA, 15 bp, Homo sapiens
ggttttgtaccaagc

SEQ ID NO: 160031 - DNA, 15 bp, Homo sapiens
tggttttgtaccaag

SEQ ID NO: 160032 - DNA, 15 bp, Homo sapiens
ttggttttgtaccaa

SEQ ID NO: 160033 - DNA, 15 bp, Homo sapiens
cttggttttgtacca

SEQ ID NO: 160034 - DNA, 15 bp, Homo sapiens
acttggttttgtacc

SEQ ID NO: 160035 - DNA, 15 bp, Homo sapiens
tacttggttttgtac

SEQ ID NO: 160036 - DNA, 15 bp, Homo sapiens
ttacttggttttgta

SEQ ID NO: 160037 - DNA, 15 bp, Homo sapiens
attacttggttttgt

SEQ ID NO: 160038 - DNA, 15 bp, Homo sapiens
tattacttggttttg

SEQ ID NO: 160039 - DNA, 15 bp, Homo sapiens
atattacttggtttt

SEQ ID NO: 160040 - DNA, 15 bp, Homo sapiens
tatattacttggttt

SEQ ID NO: 160041 - DNA, 15 bp, Homo sapiens
ctatattacttggtt

SEQ ID NO: 160042 - DNA, 15 bp, Homo sapiens
gctatattacttggt

SEQ ID NO: 160043 - DNA, 15 bp, Homo sapiens
agctatattacttgg

SEQ ID NO: 160044 - DNA, 15 bp, Homo sapiens
aagctatattacttg

SEQ ID NO: 160045 - DNA, 15 bp, Homo sapiens
caagctatattactt

SEQ ID NO: 160046 - DNA, 15 bp, Homo sapiens
acaagctatattact

SEQ ID NO: 160047 - DNA, 15 bp, Homo sapiens
cacaagctatattac

SEQ ID NO: 160048 - DNA, 15 bp, Homo sapiens
gcacaagctatatta

SEQ ID NO: 160049 - DNA, 15 bp, Homo sapiens
tgcacaagctatatt

SEQ ID NO: 160050 - DNA, 15 bp, Homo sapiens
atgcacaagctatat

SEQ ID NO: 160051 - DNA, 15 bp, Homo sapiens
aatgcacaagctata

SEQ ID NO: 160052 - DNA, 15 bp, Homo sapiens
taatgcacaagctat

SEQ ID NO: 160053 - DNA, 15 bp, Homo sapiens
gtaatgcacaagcta

SEQ ID NO: 160054 - DNA, 15 bp, Homo sapiens
ggtaatgcacaagct

SEQ ID NO: 160055 - DNA, 15 bp, Homo sapiens
aggtaatgcacaagc

SEQ ID NO: 160056 - DNA, 15 bp, Homo sapiens
aaggtaatgcacaag

SEQ ID NO: 160057 - DNA, 15 bp, Homo sapiens
gaaggtaatgcacaa

SEQ ID NO: 160058 - DNA, 15 bp, Homo sapiens
tgaaggtaatgcaca

SEQ ID NO: 160059 - DNA, 15 bp, Homo sapiens
gtgaaggtaatgcac

SEQ ID NO: 160060 - DNA, 15 bp, Homo sapiens
agtgaaggtaatgca

SEQ ID NO: 160061 - DNA, 15 bp, Homo sapiens
gagtgaaggtaatgc

SEQ ID NO: 160062 - DNA, 15 bp, Homo sapiens
ggagtgaaggtaatg

SEQ ID NO: 160063 - DNA, 15 bp, Homo sapiens
aggagtgaaggtaat

SEQ ID NO: 160064 - DNA, 15 bp, Homo sapiens
gaggagtgaaggtaa

SEQ ID NO: 160065 - DNA, 15 bp, Homo sapiens
agaggagtgaaggta

SEQ ID NO: 160066 - DNA, 15 bp, Homo sapiens
aagaggagtgaaggt

SEQ ID NO: 160067 - DNA, 15 bp, Homo sapiens
taagaggagtgaagg

SEQ ID NO: 160068 - DNA, 15 bp, Homo sapiens
gtaagaggagtgaag

SEQ ID NO: 160069 - DNA, 15 bp, Homo sapiens
agtaagaggagtgaa

SEQ ID NO: 160070 - DNA, 15 bp, Homo sapiens
gagtaagaggagtga

SEQ ID NO: 160071 - DNA, 15 bp, Homo sapiens
ggagtaagaggagtg

SEQ ID NO: 160072 - DNA, 15 bp, Homo sapiens
tggagtaagaggagt

SEQ ID NO: 160073 - DNA, 15 bp, Homo sapiens
ctggagtaagaggag

SEQ ID NO: 160074 - DNA, 15 bp, Homo sapiens
actggagtaagagga

SEQ ID NO: 160075 - DNA, 15 bp, Homo sapiens
tactggagtaagagg

SEQ ID NO: 160076 - DNA, 15 bp, Homo sapiens
ttactggagtaagag

SEQ ID NO: 160077 - DNA, 15 bp, Homo sapiens
attactggagtaaga

SEQ ID NO: 160078 - DNA, 15 bp, Homo sapiens
aattactggagtaag

SEQ ID NO: 160079 - DNA, 15 bp, Homo sapiens
aaattactggagtaa

SEQ ID NO: 160080 - DNA, 15 bp, Homo sapiens
aaaattactggagta

SEQ ID NO: 160081 - DNA, 15 bp, Homo sapiens
aaaaattactggagt

SEQ ID NO: 160082 - DNA, 15 bp, Homo sapiens
caaaaattactggag

SEQ ID NO: 160083 - DNA, 15 bp, Homo sapiens
tcaaaaattactgga

SEQ ID NO: 160084 - DNA, 15 bp, Homo sapiens
ctcaaaaattactgg

SEQ ID NO: 160085 - DNA, 15 bp, Homo sapiens
actcaaaaattactg

SEQ ID NO: 160086 - DNA, 15 bp, Homo sapiens
tactcaaaaattact

SEQ ID NO: 160087 - DNA, 15 bp, Homo sapiens
ttactcaaaaattac

SEQ ID NO: 160088 - DNA, 15 bp, Homo sapiens
tttactcaaaaatta

SEQ ID NO: 160089 - DNA, 15 bp, Homo sapiens
ttttactcaaaaatt

SEQ ID NO: 160090 - DNA, 15 bp, Homo sapiens
attttactcaaaaat

SEQ ID NO: 160091 - DNA, 15 bp, Homo sapiens
tattttactcaaaaa

SEQ ID NO: 160092 - DNA, 15 bp, Homo sapiens
ttattttactcaaaa

SEQ ID NO: 160093 - DNA, 15 bp, Homo sapiens
tttattttactcaaa

SEQ ID NO: 160094 - DNA, 15 bp, Homo sapiens
atttattttactcaa

SEQ ID NO: 160095 - DNA, 15 bp, Homo sapiens
catttattttactca

SEQ ID NO: 160096 - DNA, 15 bp, Homo sapiens
acatttattttactc

SEQ ID NO: 160097 - DNA, 15 bp, Homo sapiens
aacatttattttact

SEQ ID NO: 160098 - DNA, 15 bp, Homo sapiens
caacatttattttac

SEQ ID NO: 160099 - DNA, 15 bp, Homo sapiens
acaacatttatttta

SEQ ID NO: 160100 - DNA, 15 bp, Homo sapiens
gacaacatttatttt

SEQ ID NO: 160101 - DNA, 15 bp, Homo sapiens
agacaacatttattt

SEQ ID NO: 160102 - DNA, 15 bp, Homo sapiens
aagacaacatttatt

SEQ ID NO: 160103 - DNA, 15 bp, Homo sapiens
aaagacaacatttat

SEQ ID NO: 160104 - DNA, 15 bp, Homo sapiens
taaagacaacattta

SEQ ID NO: 160105 - DNA, 15 bp, Homo sapiens
ttaaagacaacattt

SEQ ID NO: 160106 - DNA, 15 bp, Homo sapiens
attaaagacaacatt

SEQ ID NO: 160107 - DNA, 15 bp, Homo sapiens
aattaaagacaacat

SEQ ID NO: 160108 - DNA, 15 bp, Homo sapiens
taattaaagacaaca

SEQ ID NO: 160109 - DNA, 15 bp, Homo sapiens
ataattaaagacaac

SEQ ID NO: 160110 - DNA, 15 bp, Homo sapiens
tataattaaagacaa

SEQ ID NO: 160111 - DNA, 15 bp, Homo sapiens
atataattaaagaca

SEQ ID NO: 160112 - DNA, 15 bp, Homo sapiens
aatataattaaagac

SEQ ID NO: 160113 - DNA, 15 bp, Homo sapiens
taatataattaaaga

SEQ ID NO: 160114 - DNA, 15 bp, Homo sapiens
ttaatataattaaag

SEQ ID NO: 160115 - DNA, 15 bp, Homo sapiens
attaatataattaaa

SEQ ID NO: 160116 - DNA, 15 bp, Homo sapiens
aattaatataattaa

SEQ ID NO: 160117 - DNA, 15 bp, Homo sapiens
gaattaatataatta

SEQ ID NO: 160118 - DNA, 15 bp, Homo sapiens
tgaattaatataatt

SEQ ID NO: 160119 - DNA, 15 bp, Homo sapiens
atgaattaatataat

SEQ ID NO: 160120 - DNA, 15 bp, Homo sapiens
tatgaattaatataa

SEQ ID NO: 160121 - DNA, 15 bp, Homo sapiens
gtatgaattaatata

SEQ ID NO: 160122 - DNA, 15 bp, Homo sapiens
tgtatgaattaatat

SEQ ID NO: 160123 - DNA, 15 bp, Homo sapiens
ttgtatgaattaata

SEQ ID NO: 160124 - DNA, 15 bp, Homo sapiens
gttgtatgaattaat

SEQ ID NO: 160125 - DNA, 15 bp, Homo sapiens
agttgtatgaattaa

SEQ ID NO: 160126 - DNA, 15 bp, Homo sapiens
cagttgtatgaatta

SEQ ID NO: 160127 - DNA, 15 bp, Homo sapiens
gcagttgtatgaatt

SEQ ID NO: 160128 - DNA, 15 bp, Homo sapiens
cgcagttgtatgaat

SEQ ID NO: 160129 - DNA, 15 bp, Homo sapiens
tcgcagttgtatgaa

SEQ ID NO: 160130 - DNA, 15 bp, Homo sapiens
gtcgcagttgtatga

SEQ ID NO: 160131 - DNA, 15 bp, Homo sapiens
tgtcgcagttgtatg

SEQ ID NO: 160132 - DNA, 15 bp, Homo sapiens
ttgtcgcagttgtat

SEQ ID NO: 160133 - DNA, 15 bp, Homo sapiens
gttgtcgcagttgta

SEQ ID NO: 160134 - DNA, 15 bp, Homo sapiens
cgttgtcgcagttgt

SEQ ID NO: 160135 - DNA, 15 bp, Homo sapiens
ccgttgtcgcagttg

SEQ ID NO: 160136 - DNA, 15 bp, Homo sapiens
gccgttgtcgcagtt

SEQ ID NO: 160137 - DNA, 15 bp, Homo sapiens
ggccgttgtcgcagt

SEQ ID NO: 160138 - DNA, 15 bp, Homo sapiens
aggccgttgtcgcag

SEQ ID NO: 160139 - DNA, 15 bp, Homo sapiens
caggccgttgtcgca

SEQ ID NO: 160140 - DNA, 15 bp, Homo sapiens
ccaggccgttgtcgc

SEQ ID NO: 160141 - DNA, 15 bp, Homo sapiens
accaggccgttgtcg

SEQ ID NO: 160142 - DNA, 15 bp, Homo sapiens
caccaggccgttgtc

SEQ ID NO: 160143 - DNA, 15 bp, Homo sapiens
tcaccaggccgttgt

SEQ ID NO: 160144 - DNA, 15 bp, Homo sapiens
ttcaccaggccgttg

SEQ ID NO: 160145 - DNA, 15 bp, Homo sapiens
tttcaccaggccgtt

SEQ ID NO: 160146 - DNA, 15 bp, Homo sapiens
atttcaccaggccgt

SEQ ID NO: 160147 - DNA, 15 bp, Homo sapiens
gatttcaccaggccg

SEQ ID NO: 160148 - DNA, 15 bp, Homo sapiens
tgatttcaccaggcc

SEQ ID NO: 160149 - DNA, 15 bp, Homo sapiens
ctgatttcaccaggc

SEQ ID NO: 160150 - DNA, 15 bp, Homo sapiens
actgatttcaccagg

SEQ ID NO: 160151 - DNA, 15 bp, Homo sapiens
tactgatttcaccag

SEQ ID NO: 160152 - DNA, 15 bp, Homo sapiens
gtactgatttcacca

SEQ ID NO: 160153 - DNA, 15 bp, Homo sapiens
ggtactgatttcacc

SEQ ID NO: 160154 - DNA, 15 bp, Homo sapiens
tggtactgatttcac

SEQ ID NO: 160155 - DNA, 15 bp, Homo sapiens
atggtactgatttca

SEQ ID NO: 160156 - DNA, 15 bp, Homo sapiens
catggtactgatttc

SEQ ID NO: 160157 - DNA, 15 bp, Homo sapiens
gcatggtactgattt

SEQ ID NO: 160158 - DNA, 15 bp, Homo sapiens
agcatggtactgatt

SEQ ID NO: 160159 - DNA, 15 bp, Homo sapiens
aagcatggtactgat

SEQ ID NO: 160160 - DNA, 15 bp, Homo sapiens
caagcatggtactga

SEQ ID NO: 160161 - DNA, 15 bp, Homo sapiens
acaagcatggtactg

SEQ ID NO: 160162 - DNA, 15 bp, Homo sapiens
gacaagcatggtact

SEQ ID NO: 160163 - DNA, 15 bp, Homo sapiens
ggacaagcatggtac

SEQ ID NO: 160164 - DNA, 15 bp, Homo sapiens
aggacaagcatggta

SEQ ID NO: 160165 - DNA, 15 bp, Homo sapiens
gaggacaagcatggt

SEQ ID NO: 160166 - DNA, 15 bp, Homo sapiens
tgaggacaagcatgg

SEQ ID NO: 160167 - DNA, 15 bp, Homo sapiens
atgaggacaagcatg

SEQ ID NO: 160168 - DNA, 15 bp, Homo sapiens
tatgaggacaagcat

SEQ ID NO: 160169 - DNA, 15 bp, Homo sapiens
atatgaggacaagca

SEQ ID NO: 160170 - DNA, 15 bp, Homo sapiens
catatgaggacaagc

SEQ ID NO: 160171 - DNA, 15 bp, Homo sapiens
tcatatgaggacaag

SEQ ID NO: 160172 - DNA, 15 bp, Homo sapiens
ctcatatgaggacaa

SEQ ID NO: 160173 - DNA, 15 bp, Homo sapiens
tctcatatgaggaca

SEQ ID NO: 160174 - DNA, 15 bp, Homo sapiens
ctctcatatgaggac

SEQ ID NO: 160175 - DNA, 15 bp, Homo sapiens
tctctcatatgagga

SEQ ID NO: 160176 - DNA, 15 bp, Homo sapiens
ttctctcatatgagg

SEQ ID NO: 160177 - DNA, 15 bp, Homo sapiens
cttctctcatatgag

SEQ ID NO: 160178 - DNA, 15 bp, Homo sapiens
tcttctctcatatga

SEQ ID NO: 160179 - DNA, 15 bp, Homo sapiens
ctcttctctcatatg

SEQ ID NO: 160180 - DNA, 15 bp, Homo sapiens
cctcttctctcatat

SEQ ID NO: 160181 - DNA, 15 bp, Homo sapiens
tcctcttctctcata

SEQ ID NO: 160182 - DNA, 15 bp, Homo sapiens
ttcctcttctctcat

SEQ ID NO: 160183 - DNA, 15 bp, Homo sapiens
tttcctcttctctca

SEQ ID NO: 160184 - DNA, 15 bp, Homo sapiens
gtttcctcttctctc

SEQ ID NO: 160185 - DNA, 15 bp, Homo sapiens
tgtttcctcttctct

SEQ ID NO: 160186 - DNA, 15 bp, Homo sapiens
ctgtttcctcttctc

SEQ ID NO: 160187 - DNA, 15 bp, Homo sapiens
tctgtttcctcttct

SEQ ID NO: 160188 - DNA, 15 bp, Homo sapiens
gtctgtttcctcttc

SEQ ID NO: 160189 - DNA, 15 bp, Homo sapiens
tgtctgtttcctctt

SEQ ID NO: 160190 - DNA, 15 bp, Homo sapiens
atgtctgtttcctct

SEQ ID NO: 160191 - DNA, 15 bp, Homo sapiens
aatgtctgtttcctc

SEQ ID NO: 160192 - DNA, 15 bp, Homo sapiens
aaatgtctgtttcct

SEQ ID NO: 160193 - DNA, 15 bp, Homo sapiens
aaaatgtctgtttcc

SEQ ID NO: 160194 - DNA, 15 bp, Homo sapiens
taaaatgtctgtttc

SEQ ID NO: 160195 - DNA, 15 bp, Homo sapiens
ttaaaatgtctgttt

SEQ ID NO: 160196 - DNA, 15 bp, Homo sapiens
cttaaaatgtctgtt

SEQ ID NO: 160197 - DNA, 15 bp, Homo sapiens
acttaaaatgtctgt

SEQ ID NO: 160198 - DNA, 15 bp, Homo sapiens
aacttaaaatgtctg

SEQ ID NO: 160199 - DNA, 15 bp, Homo sapiens
taacttaaaatgtct

SEQ ID NO: 160200 - DNA, 15 bp, Homo sapiens
ttaacttaaaatgtc

SEQ ID NO: 160201 - DNA, 15 bp, Homo sapiens
cttaacttaaaatgt

SEQ ID NO: 160202 - DNA, 15 bp, Homo sapiens
gcttaacttaaaatg

SEQ ID NO: 160203 - DNA, 15 bp, Homo sapiens
cgcttaacttaaaat

SEQ ID NO: 160204 - DNA, 15 bp, Homo sapiens
tcgcttaacttaaaa

SEQ ID NO: 160205 - DNA, 15 bp, Homo sapiens
gtcgcttaacttaaa

SEQ ID NO: 160206 - DNA, 15 bp, Homo sapiens
agtcgcttaacttaa

SEQ ID NO: 160207 - DNA, 15 bp, Homo sapiens
aagtcgcttaactta

SEQ ID NO: 160208 - DNA, 15 bp, Homo sapiens
caagtcgcttaactt

SEQ ID NO: 160209 - DNA, 15 bp, Homo sapiens
gcaagtcgcttaact

SEQ ID NO: 160210 - DNA, 15 bp, Homo sapiens
agcaagtcgcttaac

SEQ ID NO: 160211 - DNA, 15 bp, Homo sapiens
aagcaagtcgcttaa

SEQ ID NO: 160212 - DNA, 15 bp, Homo sapiens
gaagcaagtcgctta

SEQ ID NO: 160213 - DNA, 15 bp, Homo sapiens
tgaagcaagtcgctt

SEQ ID NO: 160214 - DNA, 15 bp, Homo sapiens
ctgaagcaagtcgct

SEQ ID NO: 160215 - DNA, 15 bp, Homo sapiens
cctgaagcaagtcgc

SEQ ID NO: 160216 - DNA, 15 bp, Homo sapiens
acctgaagcaagtcg

SEQ ID NO: 160217 - DNA, 15 bp, Homo sapiens
gacctgaagcaagtc

SEQ ID NO: 160218 - DNA, 15 bp, Homo sapiens
tgacctgaagcaagt

SEQ ID NO: 160219 - DNA, 15 bp, Homo sapiens
gtgacctgaagcaag

SEQ ID NO: 160220 - DNA, 15 bp, Homo sapiens
ggtgacctgaagcaa

SEQ ID NO: 160221 - DNA, 15 bp, Homo sapiens
gggtgacctgaagca

SEQ ID NO: 160222 - DNA, 15 bp, Homo sapiens
cgggtgacctgaagc

SEQ ID NO: 160223 - DNA, 15 bp, Homo sapiens
ccgggtgacctgaag

SEQ ID NO: 160224 - DNA, 15 bp, Homo sapiens
gccgggtgacctgaa

SEQ ID NO: 160225 - DNA, 15 bp, Homo sapiens
agccgggtgacctga

SEQ ID NO: 160226 - DNA, 15 bp, Homo sapiens
tagccgggtgacctg

SEQ ID NO: 160227 - DNA, 15 bp, Homo sapiens
ctagccgggtgacct

SEQ ID NO: 160228 - DNA, 15 bp, Homo sapiens
actagccgggtgacc

SEQ ID NO: 160229 - DNA, 15 bp, Homo sapiens
cactagccgggtgac

SEQ ID NO: 160230 - DNA, 15 bp, Homo sapiens
gcactagccgggtga

SEQ ID NO: 160231 - DNA, 15 bp, Homo sapiens
cgcactagccgggtg

SEQ ID NO: 160232 - DNA, 15 bp, Homo sapiens
acgcactagccgggt

SEQ ID NO: 160233 - DNA, 15 bp, Homo sapiens
aacgcactagccggg

SEQ ID NO: 160234 - DNA, 15 bp, Homo sapiens
caacgcactagccgg

SEQ ID NO: 160235 - DNA, 15 bp, Homo sapiens
acaacgcactagccg

SEQ ID NO: 160236 - DNA, 15 bp, Homo sapiens
cacaacgcactagcc

SEQ ID NO: 160237 - DNA, 15 bp, Homo sapiens
ccacaacgcactagc

SEQ ID NO: 160238 - DNA, 15 bp, Homo sapiens
cccacaacgcactag

SEQ ID NO: 160239 - DNA, 15 bp, Homo sapiens
ccccacaacgcacta

SEQ ID NO: 160240 - DNA, 15 bp, Homo sapiens
gccccacaacgcact

SEQ ID NO: 160241 - DNA, 15 bp, Homo sapiens
agccccacaacgcac

SEQ ID NO: 160242 - DNA, 15 bp, Homo sapiens
cagccccacaacgca

SEQ ID NO: 160243 - DNA, 15 bp, Homo sapiens
tcagccccacaacgc

SEQ ID NO: 160244 - DNA, 15 bp, Homo sapiens
ctcagccccacaacg

SEQ ID NO: 160245 - DNA, 15 bp, Homo sapiens
tctcagccccacaac

SEQ ID NO: 160246 - DNA, 15 bp, Homo sapiens
gtctcagccccacaa

SEQ ID NO: 160247 - DNA, 15 bp, Homo sapiens
agtctcagccccaca

SEQ ID NO: 160248 - DNA, 15 bp, Homo sapiens
gagtctcagccccac

SEQ ID NO: 160249 - DNA, 15 bp, Homo sapiens
tgagtctcagcccca

SEQ ID NO: 160250 - DNA, 15 bp, Homo sapiens
gtgagtctcagcccc

SEQ ID NO: 160251 - DNA, 15 bp, Homo sapiens
ggtgagtctcagccc

SEQ ID NO: 160252 - DNA, 15 bp, Homo sapiens
gggtgagtctcagcc

SEQ ID NO: 160253 - DNA, 15 bp, Homo sapiens
ggggtgagtctcagc

SEQ ID NO: 160254 - DNA, 15 bp, Homo sapiens
tggggtgagtctcag

SEQ ID NO: 160255 - DNA, 15 bp, Homo sapiens
ctggggtgagtctca

SEQ ID NO: 160256 - DNA, 15 bp, Homo sapiens
gctggggtgagtctc

SEQ ID NO: 160257 - DNA, 15 bp, Homo sapiens
ggctggggtgagtct

SEQ ID NO: 160258 - DNA, 15 bp, Homo sapiens
tggctggggtgagtc

SEQ ID NO: 160259 - DNA, 15 bp, Homo sapiens
ctggctggggtgagt

SEQ ID NO: 160260 - DNA, 15 bp, Homo sapiens
actggctggggtgag

SEQ ID NO: 160261 - DNA, 15 bp, Homo sapiens
gggatgtgagcccca

SEQ ID NO: 160262 - DNA, 15 bp, Homo sapiens
tgggatgtgagcccc

SEQ ID NO: 160263 - DNA, 15 bp, Homo sapiens
ctgggatgtgagccc

SEQ ID NO: 160264 - DNA, 15 bp, Homo sapiens
actgggatgtgagcc

SEQ ID NO: 160265 - DNA, 15 bp, Homo sapiens
cactgggatgtgagc

SEQ ID NO: 160266 - DNA, 15 bp, Homo sapiens
ccactgggatgtgag

SEQ ID NO: 160267 - DNA, 15 bp, Homo sapiens
cccactgggatgtga

SEQ ID NO: 160268 - DNA, 15 bp, Homo sapiens
tcccactgggatgtg

SEQ ID NO: 160269 - DNA, 15 bp, Homo sapiens
ctcccactgggatgt

SEQ ID NO: 160270 - DNA, 15 bp, Homo sapiens
tctcccactgggatg

SEQ ID NO: 160271 - DNA, 15 bp, Homo sapiens
atctcccactgggat

SEQ ID NO: 160272 - DNA, 15 bp, Homo sapiens
tatctcccactggga

SEQ ID NO: 160273 - DNA, 15 bp, Homo sapiens
gtatctcccactggg

SEQ ID NO: 160274 - DNA, 15 bp, Homo sapiens
tgtatctcccactgg

SEQ ID NO: 160275 - DNA, 15 bp, Homo sapiens
ctgtatctcccactg

SEQ ID NO: 160276 - DNA, 15 bp, Homo sapiens
tctgtatctcccact

SEQ ID NO: 160277 - DNA, 15 bp, Homo sapiens
gtctgtatctcccac

SEQ ID NO: 160278 - DNA, 15 bp, Homo sapiens
tgtctgtatctccca

SEQ ID NO: 160279 - DNA, 15 bp, Homo sapiens
ctgtctgtatctccc

SEQ ID NO: 160280 - DNA, 15 bp, Homo sapiens
actgtctgtatctcc

SEQ ID NO: 160281 - DNA, 15 bp, Homo sapiens
aactgtctgtatctc

SEQ ID NO: 160282 - DNA, 15 bp, Homo sapiens
taactgtctgtatct

SEQ ID NO: 160283 - DNA, 15 bp, Homo sapiens
ttaactgtctgtatc

SEQ ID NO: 160284 - DNA, 15 bp, Homo sapiens
attaactgtctgtat

SEQ ID NO: 160285 - DNA, 15 bp, Homo sapiens
cattaactgtctgta

SEQ ID NO: 160286 - DNA, 15 bp, Homo sapiens
gcattaactgtctgt

SEQ ID NO: 160287 - DNA, 15 bp, Homo sapiens
tgcattaactgtctg

SEQ ID NO: 160288 - DNA, 15 bp, Homo sapiens
gtgcattaactgtct

SEQ ID NO: 160289 - DNA, 15 bp, Homo sapiens
tgtgcattaactgtc

SEQ ID NO: 160290 - DNA, 15 bp, Homo sapiens
atgtgcattaactgt

SEQ ID NO: 160291 - DNA, 15 bp, Homo sapiens
aatgtgcattaactg

SEQ ID NO: 160292 - DNA, 15 bp, Homo sapiens
aaatgtgcattaact

SEQ ID NO: 160293 - DNA, 15 bp, Homo sapiens
aaaatgtgcattaac

SEQ ID NO: 160294 - DNA, 15 bp, Homo sapiens
taaaatgtgcattaa

SEQ ID NO: 160295 - DNA, 15 bp, Homo sapiens
ttaaaatgtgcatta

SEQ ID NO: 160296 - DNA, 15 bp, Homo sapiens
gttaaaatgtgcatt

SEQ ID NO: 160297 - DNA, 15 bp, Homo sapiens
tgttaaaatgtgcat

SEQ ID NO: 160298 - DNA, 15 bp, Homo sapiens
ttgttaaaatgtgca

SEQ ID NO: 160299 - DNA, 15 bp, Homo sapiens
tttgttaaaatgtgc

SEQ ID NO: 160300 - DNA, 15 bp, Homo sapiens
atttgttaaaatgtg

SEQ ID NO: 160301 - DNA, 15 bp, Homo sapiens
tatttgttaaaatgt

SEQ ID NO: 160302 - DNA, 15 bp, Homo sapiens
atatttgttaaaatg

SEQ ID NO: 160303 - DNA, 15 bp, Homo sapiens
tatatttgttaaaat

SEQ ID NO: 160304 - DNA, 15 bp, Homo sapiens
atatatttgttaaaa

SEQ ID NO: 160305 - DNA, 15 bp, Homo sapiens
tatatatttgttaaa

SEQ ID NO: 160306 - DNA, 15 bp, Homo sapiens
ctatatatttgttaa

SEQ ID NO: 160307 - DNA, 15 bp, Homo sapiens
cctatatatttgtta

SEQ ID NO: 160308 - DNA, 15 bp, Homo sapiens
ccctatatatttgtt

SEQ ID NO: 160309 - DNA, 15 bp, Homo sapiens
cccctatatatttgt

SEQ ID NO: 160310 - DNA, 15 bp, Homo sapiens
tcccctatatatttg

SEQ ID NO: 160311 - DNA, 15 bp, Homo sapiens
atcccctatatattt

SEQ ID NO: 160312 - DNA, 15 bp, Homo sapiens
catcccctatatatt

SEQ ID NO: 160313 - DNA, 15 bp, Homo sapiens
tcatcccctatatat

SEQ ID NO: 160314 - DNA, 15 bp, Homo sapiens
ctcatcccctatata

SEQ ID NO: 160315 - DNA, 15 bp, Homo sapiens
tctcatcccctatat

SEQ ID NO: 160316 - DNA, 15 bp, Homo sapiens
ctctcatcccctata

SEQ ID NO: 160317 - DNA, 15 bp, Homo sapiens
actctcatcccctat

SEQ ID NO: 160318 - DNA, 15 bp, Homo sapiens
gactctcatccccta

SEQ ID NO: 160319 - DNA, 15 bp, Homo sapiens
ggactctcatcccct

SEQ ID NO: 160320 - DNA, 15 bp, Homo sapiens
tggactctcatcccc

SEQ ID NO: 160321 - DNA, 15 bp, Homo sapiens
atggactctcatccc

SEQ ID NO: 160322 - DNA, 15 bp, Homo sapiens
catggactctcatcc

SEQ ID NO: 160323 - DNA, 15 bp, Homo sapiens
acatggactctcatc

SEQ ID NO: 160324 - DNA, 15 bp, Homo sapiens
gacatggactctcat

SEQ ID NO: 160325 - DNA, 15 bp, Homo sapiens
agacatggactctca

SEQ ID NO: 160326 - DNA, 15 bp, Homo sapiens
aagacatggactctc

SEQ ID NO: 160327 - DNA, 15 bp, Homo sapiens
caagacatggactct

SEQ ID NO: 160328 - DNA, 15 bp, Homo sapiens
ccaagacatggactc

SEQ ID NO: 160329 - DNA, 15 bp, Homo sapiens
cccaagacatggact

SEQ ID NO: 160330 - DNA, 15 bp, Homo sapiens
tcccaagacatggac

SEQ ID NO: 160331 - DNA, 15 bp, Homo sapiens
ctcccaagacatgga

SEQ ID NO: 160332 - DNA, 15 bp, Homo sapiens
actcccaagacatgg

SEQ ID NO: 160333 - DNA, 15 bp, Homo sapiens
cactcccaagacatg

SEQ ID NO: 160334 - DNA, 15 bp, Homo sapiens
gcactcccaagacat

SEQ ID NO: 160335 - DNA, 15 bp, Homo sapiens
ggcactcccaagaca

SEQ ID NO: 160336 - DNA, 15 bp, Homo sapiens
gggcactcccaagac

SEQ ID NO: 160337 - DNA, 15 bp, Homo sapiens
agggcactcccaaga

SEQ ID NO: 160338 - DNA, 15 bp, Homo sapiens
cagggcactcccaag

SEQ ID NO: 160339 - DNA, 15 bp, Homo sapiens
ccagggcactcccaa

SEQ ID NO: 160340 - DNA, 15 bp, Homo sapiens
gccagggcactccca

SEQ ID NO: 160341 - DNA, 15 bp, Homo sapiens
ggccagggcactccc

SEQ ID NO: 160342 - DNA, 15 bp, Homo sapiens
tggccagggcactcc

SEQ ID NO: 160343 - DNA, 15 bp, Homo sapiens
ctggccagggcactc

SEQ ID NO: 160344 - DNA, 15 bp, Homo sapiens
actggccagggcact

SEQ ID NO: 160345 - DNA, 15 bp, Homo sapiens
cactggccagggcac

SEQ ID NO: 160346 - DNA, 15 bp, Homo sapiens
ccactggccagggca

SEQ ID NO: 160347 - DNA, 15 bp, Homo sapiens
gccactggccagggc

SEQ ID NO: 160348 - DNA, 15 bp, Homo sapiens
agccactggccaggg

SEQ ID NO: 160349 - DNA, 15 bp, Homo sapiens
tagccactggccagg

SEQ ID NO: 160350 - DNA, 15 bp, Homo sapiens
ctagccactggccag

SEQ ID NO: 160351 - DNA, 15 bp, Homo sapiens
cctagccactggcca

SEQ ID NO: 160352 - DNA, 15 bp, Homo sapiens
tcctagccactggcc

SEQ ID NO: 160353 - DNA, 15 bp, Homo sapiens
ttcctagccactggc

SEQ ID NO: 160354 - DNA, 15 bp, Homo sapiens
cttcctagccactgg

SEQ ID NO: 160355 - DNA, 15 bp, Homo sapiens
acttcctagccactg

SEQ ID NO: 160356 - DNA, 15 bp, Homo sapiens
cacttcctagccact

SEQ ID NO: 160357 - DNA, 15 bp, Homo sapiens
ccacttcctagccac

SEQ ID NO: 160358 - DNA, 15 bp, Homo sapiens
accacttcctagcca

SEQ ID NO: 160359 - DNA, 15 bp, Homo sapiens
caccacttcctagcc

SEQ ID NO: 160360 - DNA, 15 bp, Homo sapiens
ccaccacttcctagc

SEQ ID NO: 160361 - DNA, 15 bp, Homo sapiens
gccaccacttcctag

SEQ ID NO: 160362 - DNA, 15 bp, Homo sapiens
tgccaccacttccta

SEQ ID NO: 160363 - DNA, 15 bp, Homo sapiens
ctgccaccacttcct

SEQ ID NO: 160364 - DNA, 15 bp, Homo sapiens
cctgccaccacttcc

SEQ ID NO: 160365 - DNA, 15 bp, Homo sapiens
acctgccaccacttc

SEQ ID NO: 160366 - DNA, 15 bp, Homo sapiens
cacctgccaccactt

SEQ ID NO: 160367 - DNA, 15 bp, Homo sapiens
ccacctgccaccact

SEQ ID NO: 160368 - DNA, 15 bp, Homo sapiens
tccacctgccaccac

SEQ ID NO: 160369 - DNA, 15 bp, Homo sapiens
atccacctgccacca

SEQ ID NO: 160370 - DNA, 15 bp, Homo sapiens
aatccacctgccacc

SEQ ID NO: 160371 - DNA, 15 bp, Homo sapiens
aaatccacctgccac

SEQ ID NO: 160372 - DNA, 15 bp, Homo sapiens
aaaatccacctgcca

SEQ ID NO: 160373 - DNA, 15 bp, Homo sapiens
gaaaatccacctgcc

SEQ ID NO: 160374 - DNA, 15 bp, Homo sapiens
agaaaatccacctgc

SEQ ID NO: 160375 - DNA, 15 bp, Homo sapiens
tagaaaatccacctg

SEQ ID NO: 160376 - DNA, 15 bp, Homo sapiens
ctagaaaatccacct

SEQ ID NO: 160377 - DNA, 15 bp, Homo sapiens
tctagaaaatccacc

SEQ ID NO: 160378 - DNA, 15 bp, Homo sapiens
atctagaaaatccac

SEQ ID NO: 160379 - DNA, 15 bp, Homo sapiens
tatctagaaaatcca

SEQ ID NO: 160380 - DNA, 15 bp, Homo sapiens
ttatctagaaaatcc

SEQ ID NO: 160381 - DNA, 15 bp, Homo sapiens
cttatctagaaaatc

SEQ ID NO: 160382 - DNA, 15 bp, Homo sapiens
ccttatctagaaaat

SEQ ID NO: 160383 - DNA, 15 bp, Homo sapiens
tccttatctagaaaa

SEQ ID NO: 160384 - DNA, 15 bp, Homo sapiens
ttccttatctagaaa

SEQ ID NO: 160385 - DNA, 15 bp, Homo sapiens
gttccttatctagaa

SEQ ID NO: 160386 - DNA, 15 bp, Homo sapiens
ggttccttatctaga

SEQ ID NO: 160387 - DNA, 15 bp, Homo sapiens
gggttccttatctag

SEQ ID NO: 160388 - DNA, 15 bp, Homo sapiens
tgggttccttatcta

SEQ ID NO: 160389 - DNA, 15 bp, Homo sapiens
ctgggttccttatct

SEQ ID NO: 160390 - DNA, 15 bp, Homo sapiens
cctgggttccttatc

SEQ ID NO: 160391 - DNA, 15 bp, Homo sapiens
tcctgggttccttat

SEQ ID NO: 160392 - DNA, 15 bp, Homo sapiens
ttcctgggttcctta

SEQ ID NO: 160393 - DNA, 15 bp, Homo sapiens
cttcctgggttcctt

SEQ ID NO: 160394 - DNA, 15 bp, Homo sapiens
ccttcctgggttcct

SEQ ID NO: 160395 - DNA, 15 bp, Homo sapiens
gccttcctgggttcc

SEQ ID NO: 160396 - DNA, 15 bp, Homo sapiens
ggccttcctgggttc

SEQ ID NO: 160397 - DNA, 15 bp, Homo sapiens
aggccttcctgggtt

SEQ ID NO: 160398 - DNA, 15 bp, Homo sapiens
gaggccttcctgggt

SEQ ID NO: 160399 - DNA, 15 bp, Homo sapiens
agaggccttcctggg

SEQ ID NO: 160400 - DNA, 15 bp, Homo sapiens
cagaggccttcctgg

SEQ ID NO: 160401 - DNA, 15 bp, Homo sapiens
tcagaggccttcctg

SEQ ID NO: 160402 - DNA, 15 bp, Homo sapiens
ctcagaggccttcct

SEQ ID NO: 160403 - DNA, 15 bp, Homo sapiens
cctcagaggccttcc

SEQ ID NO: 160404 - DNA, 15 bp, Homo sapiens
tcctcagaggccttc

SEQ ID NO: 160405 - DNA, 15 bp, Homo sapiens
ctcctcagaggcctt

SEQ ID NO: 160406 - DNA, 15 bp, Homo sapiens
cctcctcagaggcct

SEQ ID NO: 160407 - DNA, 15 bp, Homo sapiens
acctcctcagaggcc

SEQ ID NO: 160408 - DNA, 15 bp, Homo sapiens
cacctcctcagaggc

SEQ ID NO: 160409 - DNA, 15 bp, Homo sapiens
tcacctcctcagagg

SEQ ID NO: 160410 - DNA, 15 bp, Homo sapiens
gtcacctcctcagag

SEQ ID NO: 160411 - DNA, 15 bp, Homo sapiens
tgtcacctcctcaga

SEQ ID NO: 160412 - DNA, 15 bp, Homo sapiens
atgtcacctcctcag

SEQ ID NO: 160413 - DNA, 15 bp, Homo sapiens
gatgtcacctcctca

SEQ ID NO: 160414 - DNA, 15 bp, Homo sapiens
agatgtcacctcctc

SEQ ID NO: 160415 - DNA, 15 bp, Homo sapiens
cagatgtcacctcct

SEQ ID NO: 160416 - DNA, 15 bp, Homo sapiens
tcagatgtcacctcc

SEQ ID NO: 160417 - DNA, 15 bp, Homo sapiens
ctcagatgtcacctc

SEQ ID NO: 160418 - DNA, 15 bp, Homo sapiens
actcagatgtcacct

SEQ ID NO: 160419 - DNA, 15 bp, Homo sapiens
gactcagatgtcacc

SEQ ID NO: 160420 - DNA, 15 bp, Homo sapiens
ggactcagatgtcac

SEQ ID NO: 160421 - DNA, 15 bp, Homo sapiens
gggactcagatgtca

SEQ ID NO: 160422 - DNA, 15 bp, Homo sapiens
cgggactcagatgtc

SEQ ID NO: 160423 - DNA, 15 bp, Homo sapiens
tcgggactcagatgt

SEQ ID NO: 160424 - DNA, 15 bp, Homo sapiens
ctcgggactcagatg

SEQ ID NO: 160425 - DNA, 15 bp, Homo sapiens
tctcgggactcagat

SEQ ID NO: 160426 - DNA, 15 bp, Homo sapiens
ctctcgggactcaga

SEQ ID NO: 160427 - DNA, 15 bp, Homo sapiens
tctctcgggactcag

SEQ ID NO: 160428 - DNA, 15 bp, Homo sapiens
ctctctcgggactca

SEQ ID NO: 160429 - DNA, 15 bp, Homo sapiens
cctctctcgggactc

SEQ ID NO: 160430 - DNA, 15 bp, Homo sapiens
gcctctctcgggact

SEQ ID NO: 160431 - DNA, 15 bp, Homo sapiens
tgcctctctcgggac

SEQ ID NO: 160432 - DNA, 15 bp, Homo sapiens
ctgcctctctcggga

SEQ ID NO: 160433 - DNA, 15 bp, Homo sapiens
tctgcctctctcggg

SEQ ID NO: 160434 - DNA, 15 bp, Homo sapiens
ctctgcctctctcgg

SEQ ID NO: 160435 - DNA, 15 bp, Homo sapiens
gctctgcctctctcg

SEQ ID NO: 160436 - DNA, 15 bp, Homo sapiens
ggctctgcctctctc

SEQ ID NO: 160437 - DNA, 15 bp, Homo sapiens
gggctctgcctctct

SEQ ID NO: 160438 - DNA, 15 bp, Homo sapiens
agggctctgcctctc

SEQ ID NO: 160439 - DNA, 15 bp, Homo sapiens
aagggctctgcctct

SEQ ID NO: 160440 - DNA, 15 bp, Homo sapiens
caagggctctgcctc

SEQ ID NO: 160441 - DNA, 15 bp, Homo sapiens
ccaagggctctgcct

SEQ ID NO: 160442 - DNA, 15 bp, Homo sapiens
gccaagggctctgcc

SEQ ID NO: 160443 - DNA, 15 bp, Homo sapiens
cgccaagggctctgc

SEQ ID NO: 160444 - DNA, 15 bp, Homo sapiens
ccgccaagggctctg

SEQ ID NO: 160445 - DNA, 15 bp, Homo sapiens
gccgccaagggctct

SEQ ID NO: 160446 - DNA, 15 bp, Homo sapiens
agccgccaagggctc

SEQ ID NO: 160447 - DNA, 15 bp, Homo sapiens
cagccgccaagggct

SEQ ID NO: 160448 - DNA, 15 bp, Homo sapiens
ccagccgccaagggc

SEQ ID NO: 160449 - DNA, 15 bp, Homo sapiens
tccagccgccaaggg

SEQ ID NO: 160450 - DNA, 15 bp, Homo sapiens
atccagccgccaagg

SEQ ID NO: 160451 - DNA, 15 bp, Homo sapiens
tatccagccgccaag

SEQ ID NO: 160452 - DNA, 15 bp, Homo sapiens
gtatccagccgccaa

SEQ ID NO: 160453 - DNA, 15 bp, Homo sapiens
agtatccagccgcca

SEQ ID NO: 160454 - DNA, 15 bp, Homo sapiens
gagtatccagccgcc

SEQ ID NO: 160455 - DNA, 15 bp, Homo sapiens
agagtatccagccgc

SEQ ID NO: 160456 - DNA, 15 bp, Homo sapiens
cagagtatccagccg

SEQ ID NO: 160457 - DNA, 15 bp, Homo sapiens
ccagagtatccagcc

SEQ ID NO: 160458 - DNA, 15 bp, Homo sapiens
tccagagtatccagc

SEQ ID NO: 160459 - DNA, 15 bp, Homo sapiens
ctccagagtatccag

SEQ ID NO: 160460 - DNA, 15 bp, Homo sapiens
gctccagagtatcca

SEQ ID NO: 160461 - DNA, 15 bp, Homo sapiens
cgctccagagtatcc

SEQ ID NO: 160462 - DNA, 15 bp, Homo sapiens
tcgctccagagtatc

SEQ ID NO: 160463 - DNA, 15 bp, Homo sapiens
ctcgctccagagtat

SEQ ID NO: 160464 - DNA, 15 bp, Homo sapiens
tctcgctccagagta

SEQ ID NO: 160465 - DNA, 15 bp, Homo sapiens
ctctcgctccagagt

SEQ ID NO: 160466 - DNA, 15 bp, Homo sapiens
cctctcgctccagag

SEQ ID NO: 160467 - DNA, 15 bp, Homo sapiens
ccctctcgctccaga

SEQ ID NO: 160468 - DNA, 15 bp, Homo sapiens
tccctctcgctccag

SEQ ID NO: 160469 - DNA, 15 bp, Homo sapiens
ttccctctcgctcca

SEQ ID NO: 160470 - DNA, 15 bp, Homo sapiens
cttccctctcgctcc

SEQ ID NO: 160471 - DNA, 15 bp, Homo sapiens
tcttccctctcgctc

SEQ ID NO: 160472 - DNA, 15 bp, Homo sapiens
atcttccctctcgct

SEQ ID NO: 160473 - DNA, 15 bp, Homo sapiens
catcttccctctcgc

SEQ ID NO: 160474 - DNA, 15 bp, Homo sapiens
tcatcttccctctcg

SEQ ID NO: 160475 - DNA, 15 bp, Homo sapiens
ctcatcttccctctc

SEQ ID NO: 160476 - DNA, 15 bp, Homo sapiens
tctcatcttccctct

SEQ ID NO: 160477 - DNA, 15 bp, Homo sapiens
atctcatcttccctc

SEQ ID NO: 160478 - DNA, 15 bp, Homo sapiens
gatctcatcttccct

SEQ ID NO: 160479 - DNA, 15 bp, Homo sapiens
agatctcatcttccc

SEQ ID NO: 160480 - DNA, 15 bp, Homo sapiens
gagatctcatcttcc

SEQ ID NO: 160481 - DNA, 15 bp, Homo sapiens
agagatctcatcttc

SEQ ID NO: 160482 - DNA, 15 bp, Homo sapiens
aagagatctcatctt

SEQ ID NO: 160483 - DNA, 15 bp, Homo sapiens
aaagagatctcatct

SEQ ID NO: 160484 - DNA, 15 bp, Homo sapiens
gaaagagatctcatc

SEQ ID NO: 160485 - DNA, 15 bp, Homo sapiens
agaaagagatctcat

SEQ ID NO: 160486 - DNA, 15 bp, Homo sapiens
aagaaagagatctca

SEQ ID NO: 160487 - DNA, 15 bp, Homo sapiens
aaagaaagagatctc

SEQ ID NO: 160488 - DNA, 15 bp, Homo sapiens
caaagaaagagatct

SEQ ID NO: 160489 - DNA, 15 bp, Homo sapiens
acaaagaaagagatc

SEQ ID NO: 160490 - DNA, 15 bp, Homo sapiens
gacaaagaaagagat

SEQ ID NO: 160491 - DNA, 15 bp, Homo sapiens
ggacaaagaaagaga

SEQ ID NO: 160492 - DNA, 15 bp, Homo sapiens
aggacaaagaaagag

SEQ ID NO: 160493 - DNA, 15 bp, Homo sapiens
gaggacaaagaaaga

SEQ ID NO: 160494 - DNA, 15 bp, Homo sapiens
agaggacaaagaaag

SEQ ID NO: 160495 - DNA, 15 bp, Homo sapiens
aagaggacaaagaaa

SEQ ID NO: 160496 - DNA, 15 bp, Homo sapiens
gaagaggacaaagaa

SEQ ID NO: 160497 - DNA, 15 bp, Homo sapiens
tgaagaggacaaaga

SEQ ID NO: 160498 - DNA, 15 bp, Homo sapiens
ctgaagaggacaaag

SEQ ID NO: 160499 - DNA, 15 bp, Homo sapiens
cctgaagaggacaaa

SEQ ID NO: 160500 - DNA, 15 bp, Homo sapiens
gcctgaagaggacaa

SEQ ID NO: 160501 - DNA, 15 bp, Homo sapiens
agcctgaagaggaca

SEQ ID NO: 160502 - DNA, 15 bp, Homo sapiens
gagcctgaagaggac

SEQ ID NO: 160503 - DNA, 15 bp, Homo sapiens
ggagcctgaagagga

SEQ ID NO: 160504 - DNA, 15 bp, Homo sapiens
tggagcctgaagagg

SEQ ID NO: 160505 - DNA, 15 bp, Homo sapiens
ctggagcctgaagag

SEQ ID NO: 160506 - DNA, 15 bp, Homo sapiens
cctggagcctgaaga

SEQ ID NO: 160507 - DNA, 15 bp, Homo sapiens
tcctggagcctgaag

SEQ ID NO: 160508 - DNA, 15 bp, Homo sapiens
ctcctggagcctgaa

SEQ ID NO: 160509 - DNA, 15 bp, Homo sapiens
cctcctggagcctga

SEQ ID NO: 160510 - DNA, 15 bp, Homo sapiens
acctcctggagcctg

SEQ ID NO: 160511 - DNA, 15 bp, Homo sapiens
cacctcctggagcct

SEQ ID NO: 160512 - DNA, 15 bp, Homo sapiens
ccacctcctggagcc

SEQ ID NO: 160513 - DNA, 15 bp, Homo sapiens
accacctcctggagc

SEQ ID NO: 160514 - DNA, 15 bp, Homo sapiens
caccacctcctggag

SEQ ID NO: 160515 - DNA, 15 bp, Homo sapiens
tcaccacctcctgga

SEQ ID NO: 160516 - DNA, 15 bp, Homo sapiens
ctcaccacctcctgg

SEQ ID NO: 160517 - DNA, 15 bp, Homo sapiens
tctcaccacctcctg

SEQ ID NO: 160518 - DNA, 15 bp, Homo sapiens
ctctcaccacctcct

SEQ ID NO: 160519 - DNA, 15 bp, Homo sapiens
cctctcaccacctcc

SEQ ID NO: 160520 - DNA, 15 bp, Homo sapiens
acctctcaccacctc

SEQ ID NO: 160521 - DNA, 15 bp, Homo sapiens
aacctctcaccacct

SEQ ID NO: 160522 - DNA, 15 bp, Homo sapiens
caacctctcaccacc

SEQ ID NO: 160523 - DNA, 15 bp, Homo sapiens
acaacctctcaccac

SEQ ID NO: 160524 - DNA, 15 bp, Homo sapiens
gacaacctctcacca

SEQ ID NO: 160525 - DNA, 15 bp, Homo sapiens
tgacaacctctcacc

SEQ ID NO: 160526 - DNA, 15 bp, Homo sapiens
gtgacaacctctcac

SEQ ID NO: 160527 - DNA, 15 bp, Homo sapiens
agtgacaacctctca

SEQ ID NO: 160528 - DNA, 15 bp, Homo sapiens
aagtgacaacctctc

SEQ ID NO: 160529 - DNA, 15 bp, Homo sapiens
gaagtgacaacctct

SEQ ID NO: 160530 - DNA, 15 bp, Homo sapiens
agaagtgacaacctc

SEQ ID NO: 160531 - DNA, 15 bp, Homo sapiens
gagaagtgacaacct

SEQ ID NO: 160532 - DNA, 15 bp, Homo sapiens
agagaagtgacaacc

SEQ ID NO: 160533 - DNA, 15 bp, Homo sapiens
aagagaagtgacaac

SEQ ID NO: 160534 - DNA, 15 bp, Homo sapiens
gaagagaagtgacaa

SEQ ID NO: 160535 - DNA, 15 bp, Homo sapiens
agaagagaagtgaca

SEQ ID NO: 160536 - DNA, 15 bp, Homo sapiens
aagaagagaagtgac

SEQ ID NO: 160537 - DNA, 15 bp, Homo sapiens
gaagaagagaagtga

SEQ ID NO: 160538 - DNA, 15 bp, Homo sapiens
ggaagaagagaagtg

SEQ ID NO: 160539 - DNA, 15 bp, Homo sapiens
tggaagaagagaagt

SEQ ID NO: 160540 - DNA, 15 bp, Homo sapiens
ctggaagaagagaag

SEQ ID NO: 160541 - DNA, 15 bp, Homo sapiens
cctggaagaagagaa

SEQ ID NO: 160542 - DNA, 15 bp, Homo sapiens
gcctggaagaagaga

SEQ ID NO: 160543 - DNA, 15 bp, Homo sapiens
agcctggaagaagag

SEQ ID NO: 160544 - DNA, 15 bp, Homo sapiens
gagcctggaagaaga

SEQ ID NO: 160545 - DNA, 15 bp, Homo sapiens
tgagcctggaagaag

SEQ ID NO: 160546 - DNA, 15 bp, Homo sapiens
gtgagcctggaagaa

SEQ ID NO: 160547 - DNA, 15 bp, Homo sapiens
tgtgagcctggaaga

SEQ ID NO: 160548 - DNA, 15 bp, Homo sapiens
ctgtgagcctggaag

SEQ ID NO: 160549 - DNA, 15 bp, Homo sapiens
gctgtgagcctggaa

SEQ ID NO: 160550 - DNA, 15 bp, Homo sapiens
tgctgtgagcctgga

SEQ ID NO: 160551 - DNA, 15 bp, Homo sapiens
gtgctgtgagcctgg

SEQ ID NO: 160552 - DNA, 15 bp, Homo sapiens
ggtgctgtgagcctg

SEQ ID NO: 160553 - DNA, 15 bp, Homo sapiens
tggtgctgtgagcct

SEQ ID NO: 160554 - DNA, 15 bp, Homo sapiens
ctggtgctgtgagcc

SEQ ID NO: 160555 - DNA, 15 bp, Homo sapiens
gctggtgctgtgagc

SEQ ID NO: 160556 - DNA, 15 bp, Homo sapiens
tgctggtgctgtgag

SEQ ID NO: 160557 - DNA, 15 bp, Homo sapiens
ctgctggtgctgtga

SEQ ID NO: 160558 - DNA, 15 bp, Homo sapiens
gctgctggtgctgtg

SEQ ID NO: 160559 - DNA, 15 bp, Homo sapiens
ggctgctggtgctgt

SEQ ID NO: 160560 - DNA, 15 bp, Homo sapiens
aggctgctggtgctg

SEQ ID NO: 160561 - DNA, 15 bp, Homo sapiens
taggctgctggtgct

SEQ ID NO: 160562 - DNA, 15 bp, Homo sapiens
ttaggctgctggtgc

SEQ ID NO: 160563 - DNA, 15 bp, Homo sapiens
cttaggctgctggtg

SEQ ID NO: 160564 - DNA, 15 bp, Homo sapiens
tcttaggctgctggt

SEQ ID NO: 160565 - DNA, 15 bp, Homo sapiens
ctcttaggctgctgg

SEQ ID NO: 160566 - DNA, 15 bp, Homo sapiens
actcttaggctgctg

SEQ ID NO: 160567 - DNA, 15 bp, Homo sapiens
aactcttaggctgct

SEQ ID NO: 160568 - DNA, 15 bp, Homo sapiens
aaactcttaggctgc

SEQ ID NO: 160569 - DNA, 15 bp, Homo sapiens
taaactcttaggctg

SEQ ID NO: 160570 - DNA, 15 bp, Homo sapiens
gtaaactcttaggct

SEQ ID NO: 160571 - DNA, 15 bp, Homo sapiens
tgtaaactcttaggc

SEQ ID NO: 160572 - DNA, 15 bp, Homo sapiens
gtgtaaactcttagg

SEQ ID NO: 160573 - DNA, 15 bp, Homo sapiens
ggtgtaaactcttag

SEQ ID NO: 160574 - DNA, 15 bp, Homo sapiens
tggtgtaaactctta

SEQ ID NO: 160575 - DNA, 15 bp, Homo sapiens
ctggtgtaaactctt

SEQ ID NO: 160576 - DNA, 15 bp, Homo sapiens
tctggtgtaaactct

SEQ ID NO: 160577 - DNA, 15 bp, Homo sapiens
gtctggtgtaaactc

SEQ ID NO: 160578 - DNA, 15 bp, Homo sapiens
agtctggtgtaaact

SEQ ID NO: 160579 - DNA, 15 bp, Homo sapiens
aagtctggtgtaaac

SEQ ID NO: 160580 - DNA, 15 bp, Homo sapiens
aaagtctggtgtaaa

SEQ ID NO: 160581 - DNA, 15 bp, Homo sapiens
gaaagtctggtgtaa

SEQ ID NO: 160582 - DNA, 15 bp, Homo sapiens
tgaaagtctggtgta

SEQ ID NO: 160583 - DNA, 15 bp, Homo sapiens
ttgaaagtctggtgt

SEQ ID NO: 160584 - DNA, 15 bp, Homo sapiens
cttgaaagtctggtg

SEQ ID NO: 160585 - DNA, 15 bp, Homo sapiens
acttgaaagtctggt

SEQ ID NO: 160586 - DNA, 15 bp, Homo sapiens
gacttgaaagtctgg

SEQ ID NO: 160587 - DNA, 15 bp, Homo sapiens
tgacttgaaagtctg

SEQ ID NO: 160588 - DNA, 15 bp, Homo sapiens
ctgacttgaaagtct

SEQ ID NO: 160589 - DNA, 15 bp, Homo sapiens
tctgacttgaaagtc

SEQ ID NO: 160590 - DNA, 15 bp, Homo sapiens
ctctgacttgaaagt

SEQ ID NO: 160591 - DNA, 15 bp, Homo sapiens
actctgacttgaaag

SEQ ID NO: 160592 - DNA, 15 bp, Homo sapiens
gactctgacttgaaa

SEQ ID NO: 160593 - DNA, 15 bp, Homo sapiens
ggactctgacttgaa

SEQ ID NO: 160594 - DNA, 15 bp, Homo sapiens
aggactctgacttga

SEQ ID NO: 160595 - DNA, 15 bp, Homo sapiens
gaggactctgacttg

SEQ ID NO: 160596 - DNA, 15 bp, Homo sapiens
ggaggactctgactt

SEQ ID NO: 160597 - DNA, 15 bp, Homo sapiens
aggaggactctgact

SEQ ID NO: 160598 - DNA, 15 bp, Homo sapiens
gaggaggactctgac

SEQ ID NO: 160599 - DNA, 15 bp, Homo sapiens
ggaggaggactctga

SEQ ID NO: 160600 - DNA, 15 bp, Homo sapiens
gggaggaggactctg

SEQ ID NO: 160601 - DNA, 15 bp, Homo sapiens
agggaggaggactct

SEQ ID NO: 160602 - DNA, 15 bp, Homo sapiens
gagggaggaggactc

SEQ ID NO: 160603 - DNA, 15 bp, Homo sapiens
cgagggaggaggact

SEQ ID NO: 160604 - DNA, 15 bp, Homo sapiens
acgagggaggaggac

SEQ ID NO: 160605 - DNA, 15 bp, Homo sapiens
aacgagggaggagga

SEQ ID NO: 160606 - DNA, 15 bp, Homo sapiens
caacgagggaggagg

SEQ ID NO: 160607 - DNA, 15 bp, Homo sapiens
ccaacgagggaggag

SEQ ID NO: 160608 - DNA, 15 bp, Homo sapiens
cccaacgagggagga

SEQ ID NO: 160609 - DNA, 15 bp, Homo sapiens
ccccaacgagggagg

SEQ ID NO: 160610 - DNA, 15 bp, Homo sapiens
cccccaacgagggag

SEQ ID NO: 160611 - DNA, 15 bp, Homo sapiens
gcccccaacgaggga

SEQ ID NO: 160612 - DNA, 15 bp, Homo sapiens
agcccccaacgaggg

SEQ ID NO: 160613 - DNA, 15 bp, Homo sapiens
cagcccccaacgagg

SEQ ID NO: 160614 - DNA, 15 bp, Homo sapiens
gcagcccccaacgag

SEQ ID NO: 160615 - DNA, 15 bp, Homo sapiens
tgcagcccccaacga

SEQ ID NO: 160616 - DNA, 15 bp, Homo sapiens
ctgcagcccccaacg

SEQ ID NO: 160617 - DNA, 15 bp, Homo sapiens
cctgcagcccccaac

SEQ ID NO: 160618 - DNA, 15 bp, Homo sapiens
gcctgcagcccccaa

SEQ ID NO: 160619 - DNA, 15 bp, Homo sapiens
agcctgcagccccca

SEQ ID NO: 160620 - DNA, 15 bp, Homo sapiens
aagcctgcagccccc

SEQ ID NO: 160621 - DNA, 15 bp, Homo sapiens
gaagcctgcagcccc

SEQ ID NO: 160622 - DNA, 15 bp, Homo sapiens
ggaagcctgcagccc

SEQ ID NO: 160623 - DNA, 15 bp, Homo sapiens
gggaagcctgcagcc

SEQ ID NO: 160624 - DNA, 15 bp, Homo sapiens
agggaagcctgcagc

SEQ ID NO: 160625 - DNA, 15 bp, Homo sapiens
gagggaagcctgcag

SEQ ID NO: 160626 - DNA, 15 bp, Homo sapiens
tgagggaagcctgca

SEQ ID NO: 160627 - DNA, 15 bp, Homo sapiens
ctgagggaagcctgc

SEQ ID NO: 160628 - DNA, 15 bp, Homo sapiens
tctgagggaagcctg

SEQ ID NO: 160629 - DNA, 15 bp, Homo sapiens
gtctgagggaagcct

SEQ ID NO: 160630 - DNA, 15 bp, Homo sapiens
ggtctgagggaagcc

SEQ ID NO: 160631 - DNA, 15 bp, Homo sapiens
gggtctgagggaagc

SEQ ID NO: 160632 - DNA, 15 bp, Homo sapiens
agggtctgagggaag

SEQ ID NO: 160633 - DNA, 15 bp, Homo sapiens
aagggtctgagggaa

SEQ ID NO: 160634 - DNA, 15 bp, Homo sapiens
gaagggtctgaggga

SEQ ID NO: 160635 - DNA, 15 bp, Homo sapiens
agaagggtctgaggg

SEQ ID NO: 160636 - DNA, 15 bp, Homo sapiens
gagaagggtctgagg

SEQ ID NO: 160637 - DNA, 15 bp, Homo sapiens
agagaagggtctgag

SEQ ID NO: 160638 - DNA, 15 bp, Homo sapiens
tagagaagggtctga

SEQ ID NO: 160639 - DNA, 15 bp, Homo sapiens
ctagagaagggtctg

SEQ ID NO: 160640 - DNA, 15 bp, Homo sapiens
tctagagaagggtct

SEQ ID NO: 160641 - DNA, 15 bp, Homo sapiens
ctctagagaagggtc

SEQ ID NO: 160642 - DNA, 15 bp, Homo sapiens
cctctagagaagggt

SEQ ID NO: 160643 - DNA, 15 bp, Homo sapiens
ccctctagagaaggg

SEQ ID NO: 160644 - DNA, 15 bp, Homo sapiens
gccctctagagaagg

SEQ ID NO: 160645 - DNA, 15 bp, Homo sapiens
tgccctctagagaag

SEQ ID NO: 160646 - DNA, 15 bp, Homo sapiens
atgccctctagagaa

SEQ ID NO: 160647 - DNA, 15 bp, Homo sapiens
aatgccctctagaga

SEQ ID NO: 160648 - DNA, 15 bp, Homo sapiens
aaatgccctctagag

SEQ ID NO: 160649 - DNA, 15 bp, Homo sapiens
caaatgccctctaga

SEQ ID NO: 160650 - DNA, 15 bp, Homo sapiens
tcaaatgccctctag

SEQ ID NO: 160651 - DNA, 15 bp, Homo sapiens
atcaaatgccctcta

SEQ ID NO: 160652 - DNA, 15 bp, Homo sapiens
gatcaaatgccctct

SEQ ID NO: 160653 - DNA, 15 bp, Homo sapiens
ggatcaaatgccctc

SEQ ID NO: 160654 - DNA, 15 bp, Homo sapiens
gggatcaaatgccct

SEQ ID NO: 160655 - DNA, 15 bp, Homo sapiens
agggatcaaatgccc

SEQ ID NO: 160656 - DNA, 15 bp, Homo sapiens
tagggatcaaatgcc

SEQ ID NO: 160657 - DNA, 15 bp, Homo sapiens
gtagggatcaaatgc

SEQ ID NO: 160658 - DNA, 15 bp, Homo sapiens
ggtagggatcaaatg

SEQ ID NO: 160659 - DNA, 15 bp, Homo sapiens
tggtagggatcaaat

SEQ ID NO: 160660 - DNA, 15 bp, Homo sapiens
gtggtagggatcaaa

SEQ ID NO: 160661 - DNA, 15 bp, Homo sapiens
tgtggtagggatcaa

SEQ ID NO: 160662 - DNA, 15 bp, Homo sapiens
ctgtggtagggatca

SEQ ID NO: 160663 - DNA, 15 bp, Homo sapiens
cctgtggtagggatc

SEQ ID NO: 160664 - DNA, 15 bp, Homo sapiens
tcctgtggtagggat

SEQ ID NO: 160665 - DNA, 15 bp, Homo sapiens
gtcctgtggtaggga

SEQ ID NO: 160666 - DNA, 15 bp, Homo sapiens
agtcctgtggtaggg

SEQ ID NO: 160667 - DNA, 15 bp, Homo sapiens
aagtcctgtggtagg

SEQ ID NO: 160668 - DNA, 15 bp, Homo sapiens
taagtcctgtggtag

SEQ ID NO: 160669 - DNA, 15 bp, Homo sapiens
ttaagtcctgtggta

SEQ ID NO: 160670 - DNA, 15 bp, Homo sapiens
gttaagtcctgtggt

SEQ ID NO: 160671 - DNA, 15 bp, Homo sapiens
agttaagtcctgtgg

SEQ ID NO: 160672 - DNA, 15 bp, Homo sapiens
cagttaagtcctgtg

SEQ ID NO: 160673 - DNA, 15 bp, Homo sapiens
ccagttaagtcctgt

SEQ ID NO: 160674 - DNA, 15 bp, Homo sapiens
tccagttaagtcctg

SEQ ID NO: 160675 - DNA, 15 bp, Homo sapiens
ttccagttaagtcct

SEQ ID NO: 160676 - DNA, 15 bp, Homo sapiens
cttccagttaagtcc

SEQ ID NO: 160677 - DNA, 15 bp, Homo sapiens
gcttccagttaagtc

SEQ ID NO: 160678 - DNA, 15 bp, Homo sapiens
ggcttccagttaagt

SEQ ID NO: 160679 - DNA, 15 bp, Homo sapiens
gggcttccagttaag

SEQ ID NO: 160680 - DNA, 15 bp, Homo sapiens
ggggcttccagttaa

SEQ ID NO: 160681 - DNA, 15 bp, Homo sapiens
aggggcttccagtta

SEQ ID NO: 160682 - DNA, 15 bp, Homo sapiens
aaggggcttccagtt

SEQ ID NO: 160683 - DNA, 15 bp, Homo sapiens
aaaggggcttccagt

SEQ ID NO: 160684 - DNA, 15 bp, Homo sapiens
aaaaggggcttccag

SEQ ID NO: 160685 - DNA, 15 bp, Homo sapiens
aaaaaggggcttcca

SEQ ID NO: 160686 - DNA, 15 bp, Homo sapiens
caaaaaggggcttcc

SEQ ID NO: 160687 - DNA, 15 bp, Homo sapiens
tcaaaaaggggcttc

SEQ ID NO: 160688 - DNA, 15 bp, Homo sapiens
ctcaaaaaggggctt

SEQ ID NO: 160689 - DNA, 15 bp, Homo sapiens
tctcaaaaaggggct

SEQ ID NO: 160690 - DNA, 15 bp, Homo sapiens
atctcaaaaaggggc

SEQ ID NO: 160691 - DNA, 15 bp, Homo sapiens
gatctcaaaaagggg

SEQ ID NO: 160692 - DNA, 15 bp, Homo sapiens
agatctcaaaaaggg

SEQ ID NO: 160693 - DNA, 15 bp, Homo sapiens
cagatctcaaaaagg

SEQ ID NO: 160694 - DNA, 15 bp, Homo sapiens
acagatctcaaaaag

SEQ ID NO: 160695 - DNA, 15 bp, Homo sapiens
cacagatctcaaaaa

SEQ ID NO: 160696 - DNA, 15 bp, Homo sapiens
tcacagatctcaaaa

SEQ ID NO: 160697 - DNA, 15 bp, Homo sapiens
ctcacagatctcaaa

SEQ ID NO: 160698 - DNA, 15 bp, Homo sapiens
tctcacagatctcaa

SEQ ID NO: 160699 - DNA, 15 bp, Homo sapiens
atctcacagatctca

SEQ ID NO: 160700 - DNA, 15 bp, Homo sapiens
catctcacagatctc

SEQ ID NO: 160701 - DNA, 15 bp, Homo sapiens
acatctcacagatct

SEQ ID NO: 160702 - DNA, 15 bp, Homo sapiens
gacatctcacagatc

SEQ ID NO: 160703 - DNA, 15 bp, Homo sapiens
agacatctcacagat

SEQ ID NO: 160704 - DNA, 15 bp, Homo sapiens
cagacatctcacaga

SEQ ID NO: 160705 - DNA, 15 bp, Homo sapiens
ccagacatctcacag

SEQ ID NO: 160706 - DNA, 15 bp, Homo sapiens
cccagacatctcaca

SEQ ID NO: 160707 - DNA, 15 bp, Homo sapiens
tcccagacatctcac

SEQ ID NO: 160708 - DNA, 15 bp, Homo sapiens
atcccagacatctca

SEQ ID NO: 160709 - DNA, 15 bp, Homo sapiens
aatcccagacatctc

SEQ ID NO: 160710 - DNA, 15 bp, Homo sapiens
aaatcccagacatct

SEQ ID NO: 160711 - DNA, 15 bp, Homo sapiens
aaaatcccagacatc

SEQ ID NO: 160712 - DNA, 15 bp, Homo sapiens
gaaaatcccagacat

SEQ ID NO: 160713 - DNA, 15 bp, Homo sapiens
ggaaaatcccagaca

SEQ ID NO: 160714 - DNA, 15 bp, Homo sapiens
cggaaaatcccagac

SEQ ID NO: 160715 - DNA, 15 bp, Homo sapiens
ccggaaaatcccaga

SEQ ID NO: 160716 - DNA, 15 bp, Homo sapiens
gccggaaaatcccag

SEQ ID NO: 160717 - DNA, 15 bp, Homo sapiens
ggccggaaaatccca

SEQ ID NO: 160718 - DNA, 15 bp, Homo sapiens
tggccggaaaatccc

SEQ ID NO: 160719 - DNA, 15 bp, Homo sapiens
ttggccggaaaatcc

SEQ ID NO: 160720 - DNA, 15 bp, Homo sapiens
cttggccggaaaatc

SEQ ID NO: 160721 - DNA, 15 bp, Homo sapiens
tcttggccggaaaat

SEQ ID NO: 160722 - DNA, 15 bp, Homo sapiens
ttcttggccggaaaa

SEQ ID NO: 160723 - DNA, 15 bp, Homo sapiens
cttcttggccggaaa

SEQ ID NO: 160724 - DNA, 15 bp, Homo sapiens
ccttcttggccggaa

SEQ ID NO: 160725 - DNA, 15 bp, Homo sapiens
tccttcttggccgga

SEQ ID NO: 160726 - DNA, 15 bp, Homo sapiens
gtccttcttggccgg

SEQ ID NO: 160727 - DNA, 15 bp, Homo sapiens
agtccttcttggccg

SEQ ID NO: 160728 - DNA, 15 bp, Homo sapiens
aagtccttcttggcc

SEQ ID NO: 160729 - DNA, 15 bp, Homo sapiens
gaagtccttcttggc

SEQ ID NO: 160730 - DNA, 15 bp, Homo sapiens
tgaagtccttcttgg

SEQ ID NO: 160731 - DNA, 15 bp, Homo sapiens
ctgaagtccttcttg

SEQ ID NO: 160732 - DNA, 15 bp, Homo sapiens
tctgaagtccttctt

SEQ ID NO: 160733 - DNA, 15 bp, Homo sapiens
ctctgaagtccttct

SEQ ID NO: 160734 - DNA, 15 bp, Homo sapiens
tctctgaagtccttc

SEQ ID NO: 160735 - DNA, 15 bp, Homo sapiens
atctctgaagtcctt

SEQ ID NO: 160736 - DNA, 15 bp, Homo sapiens
tatctctgaagtcct

SEQ ID NO: 160737 - DNA, 15 bp, Homo sapiens
ctatctctgaagtcc

SEQ ID NO: 160738 - DNA, 15 bp, Homo sapiens
cctatctctgaagtc

SEQ ID NO: 160739 - DNA, 15 bp, Homo sapiens
gcctatctctgaagt

SEQ ID NO: 160740 - DNA, 15 bp, Homo sapiens
ggcctatctctgaag

SEQ ID NO: 160741 - DNA, 15 bp, Homo sapiens
aggcctatctctgaa

SEQ ID NO: 160742 - DNA, 15 bp, Homo sapiens
caggcctatctctga

SEQ ID NO: 160743 - DNA, 15 bp, Homo sapiens
acaggcctatctctg

SEQ ID NO: 160744 - DNA, 15 bp, Homo sapiens
gacaggcctatctct

SEQ ID NO: 160745 - DNA, 15 bp, Homo sapiens
agacaggcctatctc

SEQ ID NO: 160746 - DNA, 15 bp, Homo sapiens
aagacaggcctatct

SEQ ID NO: 160747 - DNA, 15 bp, Homo sapiens
gaagacaggcctatc

SEQ ID NO: 160748 - DNA, 15 bp, Homo sapiens
tgaagacaggcctat

SEQ ID NO: 160749 - DNA, 15 bp, Homo sapiens
atgaagacaggccta

SEQ ID NO: 160750 - DNA, 15 bp, Homo sapiens
gatgaagacaggcct

SEQ ID NO: 160751 - DNA, 15 bp, Homo sapiens
agatgaagacaggcc

SEQ ID NO: 160752 - DNA, 15 bp, Homo sapiens
gagatgaagacaggc

SEQ ID NO: 160753 - DNA, 15 bp, Homo sapiens
tgagatgaagacagg

SEQ ID NO: 160754 - DNA, 15 bp, Homo sapiens
ttgagatgaagacag

SEQ ID NO: 160755 - DNA, 15 bp, Homo sapiens
cttgagatgaagaca

SEQ ID NO: 160756 - DNA, 15 bp, Homo sapiens
tcttgagatgaagac

SEQ ID NO: 160757 - DNA, 15 bp, Homo sapiens
ttcttgagatgaaga

SEQ ID NO: 160758 - DNA, 15 bp, Homo sapiens
cttcttgagatgaag

SEQ ID NO: 160759 - DNA, 15 bp, Homo sapiens
gcttcttgagatgaa

SEQ ID NO: 160760 - DNA, 15 bp, Homo sapiens
tgcttcttgagatga

SEQ ID NO: 160761 - DNA, 15 bp, Homo sapiens
ttgcttcttgagatg

SEQ ID NO: 160762 - DNA, 15 bp, Homo sapiens
tttgcttcttgagat

SEQ ID NO: 160763 - DNA, 15 bp, Homo sapiens
ctttgcttcttgaga

SEQ ID NO: 160764 - DNA, 15 bp, Homo sapiens
gctttgcttcttgag

SEQ ID NO: 160765 - DNA, 15 bp, Homo sapiens
agctttgcttcttga

SEQ ID NO: 160766 - DNA, 15 bp, Homo sapiens
cagctttgcttcttg

SEQ ID NO: 160767 - DNA, 15 bp, Homo sapiens
tcagctttgcttctt

SEQ ID NO: 160768 - DNA, 15 bp, Homo sapiens
ttcagctttgcttct

SEQ ID NO: 160769 - DNA, 15 bp, Homo sapiens
tttcagctttgcttc

SEQ ID NO: 160770 - DNA, 15 bp, Homo sapiens
gtttcagctttgctt

SEQ ID NO: 160771 - DNA, 15 bp, Homo sapiens
ggtttcagctttgct

SEQ ID NO: 160772 - DNA, 15 bp, Homo sapiens
gggtttcagctttgc

SEQ ID NO: 160773 - DNA, 15 bp, Homo sapiens
tgggtttcagctttg

SEQ ID NO: 160774 - DNA, 15 bp, Homo sapiens
ctgggtttcagcttt

SEQ ID NO: 160775 - DNA, 15 bp, Homo sapiens
tctgggtttcagctt

SEQ ID NO: 160776 - DNA, 15 bp, Homo sapiens
ctctgggtttcagct

SEQ ID NO: 160777 - DNA, 15 bp, Homo sapiens
gctctgggtttcagc

SEQ ID NO: 160778 - DNA, 15 bp, Homo sapiens
tgctctgggtttcag

SEQ ID NO: 160779 - DNA, 15 bp, Homo sapiens
ctgctctgggtttca

SEQ ID NO: 160780 - DNA, 15 bp, Homo sapiens
actgctctgggtttc

SEQ ID NO: 160781 - DNA, 15 bp, Homo sapiens
aactgctctgggttt

SEQ ID NO: 160782 - DNA, 15 bp, Homo sapiens
caactgctctgggtt

SEQ ID NO: 160783 - DNA, 15 bp, Homo sapiens
tcaactgctctgggt

SEQ ID NO: 160784 - DNA, 15 bp, Homo sapiens
ctcaactgctctggg

SEQ ID NO: 160785 - DNA, 15 bp, Homo sapiens
actcaactgctctgg

SEQ ID NO: 160786 - DNA, 15 bp, Homo sapiens
gactcaactgctctg

SEQ ID NO: 160787 - DNA, 15 bp, Homo sapiens
ggactcaactgctct

SEQ ID NO: 160788 - DNA, 15 bp, Homo sapiens
gggactcaactgctc

SEQ ID NO: 160789 - DNA, 15 bp, Homo sapiens
agggactcaactgct

SEQ ID NO: 160790 - DNA, 15 bp, Homo sapiens
aagggactcaactgc

SEQ ID NO: 160791 - DNA, 15 bp, Homo sapiens
caagggactcaactg

SEQ ID NO: 160792 - DNA, 15 bp, Homo sapiens
ccaagggactcaact

SEQ ID NO: 160793 - DNA, 15 bp, Homo sapiens
gccaagggactcaac

SEQ ID NO: 160794 - DNA, 15 bp, Homo sapiens
ggccaagggactcaa

SEQ ID NO: 160795 - DNA, 15 bp, Homo sapiens
tggccaagggactca

SEQ ID NO: 160796 - DNA, 15 bp, Homo sapiens
gtggccaagggactc

SEQ ID NO: 160797 - DNA, 15 bp, Homo sapiens
ggtggccaagggact

SEQ ID NO: 160798 - DNA, 15 bp, Homo sapiens
cggtggccaagggac

SEQ ID NO: 160799 - DNA, 15 bp, Homo sapiens
ccggtggccaaggga

SEQ ID NO: 160800 - DNA, 15 bp, Homo sapiens
cccggtggccaaggg

SEQ ID NO: 160801 - DNA, 15 bp, Homo sapiens
gcccggtggccaagg

SEQ ID NO: 160802 - DNA, 15 bp, Homo sapiens
agcccggtggccaag

SEQ ID NO: 160803 - DNA, 15 bp, Homo sapiens
cagcccggtggccaa

SEQ ID NO: 160804 - DNA, 15 bp, Homo sapiens
tcagcccggtggcca

SEQ ID NO: 160805 - DNA, 15 bp, Homo sapiens
atcagcccggtggcc

SEQ ID NO: 160806 - DNA, 15 bp, Homo sapiens
gatcagcccggtggc

SEQ ID NO: 160807 - DNA, 15 bp, Homo sapiens
tgatcagcccggtgg

SEQ ID NO: 160808 - DNA, 15 bp, Homo sapiens
ctgatcagcccggtg

SEQ ID NO: 160809 - DNA, 15 bp, Homo sapiens
gctgatcagcccggt

SEQ ID NO: 160810 - DNA, 15 bp, Homo sapiens
cgctgatcagcccgg

SEQ ID NO: 160811 - DNA, 15 bp, Homo sapiens
ccgctgatcagcccg

SEQ ID NO: 160812 - DNA, 15 bp, Homo sapiens
gccgctgatcagccc

SEQ ID NO: 160813 - DNA, 15 bp, Homo sapiens
tgccgctgatcagcc

SEQ ID NO: 160814 - DNA, 15 bp, Homo sapiens
gtgccgctgatcagc

SEQ ID NO: 160815 - DNA, 15 bp, Homo sapiens
tgtgccgctgatcag

SEQ ID NO: 160816 - DNA, 15 bp, Homo sapiens
ctgtgccgctgatca

SEQ ID NO: 160817 - DNA, 15 bp, Homo sapiens
gctgtgccgctgatc

SEQ ID NO: 160818 - DNA, 15 bp, Homo sapiens
ggctgtgccgctgat

SEQ ID NO: 160819 - DNA, 15 bp, Homo sapiens
cggctgtgccgctga

SEQ ID NO: 160820 - DNA, 15 bp, Homo sapiens
ccggctgtgccgctg

SEQ ID NO: 160821 - DNA, 15 bp, Homo sapiens
cccggctgtgccgct

SEQ ID NO: 160822 - DNA, 15 bp, Homo sapiens
tcccggctgtgccgc

SEQ ID NO: 160823 - DNA, 15 bp, Homo sapiens
gtcccggctgtgccg

SEQ ID NO: 160824 - DNA, 15 bp, Homo sapiens
ggtcccggctgtgcc

SEQ ID NO: 160825 - DNA, 15 bp, Homo sapiens
tggtcccggctgtgc

SEQ ID NO: 160826 - DNA, 15 bp, Homo sapiens
ctggtcccggctgtg

SEQ ID NO: 160827 - DNA, 15 bp, Homo sapiens
tctggtcccggctgt

SEQ ID NO: 160828 - DNA, 15 bp, Homo sapiens
ctctggtcccggctg

SEQ ID NO: 160829 - DNA, 15 bp, Homo sapiens
actctggtcccggct

SEQ ID NO: 160830 - DNA, 15 bp, Homo sapiens
aactctggtcccggc

SEQ ID NO: 160831 - DNA, 15 bp, Homo sapiens
gaactctggtcccgg

SEQ ID NO: 160832 - DNA, 15 bp, Homo sapiens
agaactctggtcccg

SEQ ID NO: 160833 - DNA, 15 bp, Homo sapiens
cagaactctggtccc

SEQ ID NO: 160834 - DNA, 15 bp, Homo sapiens
ccagaactctggtcc

SEQ ID NO: 160835 - DNA, 15 bp, Homo sapiens
accagaactctggtc

SEQ ID NO: 160836 - DNA, 15 bp, Homo sapiens
aaccagaactctggt

SEQ ID NO: 160837 - DNA, 15 bp, Homo sapiens
aaaccagaactctgg

SEQ ID NO: 160838 - DNA, 15 bp, Homo sapiens
aaaaccagaactctg

SEQ ID NO: 160839 - DNA, 15 bp, Homo sapiens
gaaaaccagaactct

SEQ ID NO: 160840 - DNA, 15 bp, Homo sapiens
agaaaaccagaactc

SEQ ID NO: 160841 - DNA, 15 bp, Homo sapiens
cagaaaaccagaact

SEQ ID NO: 160842 - DNA, 15 bp, Homo sapiens
tcagaaaaccagaac

SEQ ID NO: 160843 - DNA, 15 bp, Homo sapiens
gtcagaaaaccagaa

SEQ ID NO: 160844 - DNA, 15 bp, Homo sapiens
ggtcagaaaaccaga

SEQ ID NO: 160845 - DNA, 15 bp, Homo sapiens
gggtcagaaaaccag

SEQ ID NO: 160846 - DNA, 15 bp, Homo sapiens
agggtcagaaaacca

SEQ ID NO: 160847 - DNA, 15 bp, Homo sapiens
aagggtcagaaaacc

SEQ ID NO: 160848 - DNA, 15 bp, Homo sapiens
taagggtcagaaaac

SEQ ID NO: 160849 - DNA, 15 bp, Homo sapiens
ctaagggtcagaaaa

SEQ ID NO: 160850 - DNA, 15 bp, Homo sapiens
tctaagggtcagaaa

SEQ ID NO: 160851 - DNA, 15 bp, Homo sapiens
ctctaagggtcagaa

SEQ ID NO: 160852 - DNA, 15 bp, Homo sapiens
gctctaagggtcaga

SEQ ID NO: 160853 - DNA, 15 bp, Homo sapiens
tgctctaagggtcag

SEQ ID NO: 160854 - DNA, 15 bp, Homo sapiens
atgctctaagggtca

SEQ ID NO: 160855 - DNA, 15 bp, Homo sapiens
catgctctaagggtc

SEQ ID NO: 160856 - DNA, 15 bp, Homo sapiens
tcatgctctaagggt

SEQ ID NO: 160857 - DNA, 15 bp, Homo sapiens
ctcatgctctaaggg

SEQ ID NO: 160858 - DNA, 15 bp, Homo sapiens
tctcatgctctaagg

SEQ ID NO: 160859 - DNA, 15 bp, Homo sapiens
atctcatgctctaag

SEQ ID NO: 160860 - DNA, 15 bp, Homo sapiens
gatctcatgctctaa

SEQ ID NO: 160861 - DNA, 15 bp, Homo sapiens
tgatctcatgctcta

SEQ ID NO: 160862 - DNA, 15 bp, Homo sapiens
gtgatctcatgctct

SEQ ID NO: 160863 - DNA, 15 bp, Homo sapiens
agtgatctcatgctc

SEQ ID NO: 160864 - DNA, 15 bp, Homo sapiens
gagtgatctcatgct

SEQ ID NO: 160865 - DNA, 15 bp, Homo sapiens
tgagtgatctcatgc

SEQ ID NO: 160866 - DNA, 15 bp, Homo sapiens
atgagtgatctcatg

SEQ ID NO: 160867 - DNA, 15 bp, Homo sapiens
gatgagtgatctcat

SEQ ID NO: 160868 - DNA, 15 bp, Homo sapiens
agatgagtgatctca

SEQ ID NO: 160869 - DNA, 15 bp, Homo sapiens
aagatgagtgatctc

SEQ ID NO: 160870 - DNA, 15 bp, Homo sapiens
gaagatgagtgatct

SEQ ID NO: 160871 - DNA, 15 bp, Homo sapiens
agaagatgagtgatc

SEQ ID NO: 160872 - DNA, 15 bp, Homo sapiens
aagaagatgagtgat

SEQ ID NO: 160873 - DNA, 15 bp, Homo sapiens
gaagaagatgagtga

SEQ ID NO: 160874 - DNA, 15 bp, Homo sapiens
agaagaagatgagtg

SEQ ID NO: 160875 - DNA, 15 bp, Homo sapiens
cagaagaagatgagt

SEQ ID NO: 160876 - DNA, 15 bp, Homo sapiens
tcagaagaagatgag

SEQ ID NO: 160877 - DNA, 15 bp, Homo sapiens
atcagaagaagatga

SEQ ID NO: 160878 - DNA, 15 bp, Homo sapiens
aatcagaagaagatg

SEQ ID NO: 160879 - DNA, 15 bp, Homo sapiens
aaatcagaagaagat

SEQ ID NO: 160880 - DNA, 15 bp, Homo sapiens
taaatcagaagaaga

SEQ ID NO: 160881 - DNA, 15 bp, Homo sapiens
ttaaatcagaagaag

SEQ ID NO: 160882 - DNA, 15 bp, Homo sapiens
attaaatcagaagaa

SEQ ID NO: 160883 - DNA, 15 bp, Homo sapiens
aattaaatcagaaga

SEQ ID NO: 160884 - DNA, 15 bp, Homo sapiens
caattaaatcagaag

SEQ ID NO: 160885 - DNA, 15 bp, Homo sapiens
ccaattaaatcagaa

SEQ ID NO: 160886 - DNA, 15 bp, Homo sapiens
cccaattaaatcaga

SEQ ID NO: 160887 - DNA, 15 bp, Homo sapiens
ccccaattaaatcag

SEQ ID NO: 160888 - DNA, 15 bp, Homo sapiens
cccccaattaaatca

SEQ ID NO: 160889 - DNA, 15 bp, Homo sapiens
tcccccaattaaatc

SEQ ID NO: 160890 - DNA, 15 bp, Homo sapiens
atcccccaattaaat

SEQ ID NO: 160891 - DNA, 15 bp, Homo sapiens
gatcccccaattaaa

SEQ ID NO: 160892 - DNA, 15 bp, Homo sapiens
agatcccccaattaa

SEQ ID NO: 160893 - DNA, 15 bp, Homo sapiens
gagatcccccaatta

SEQ ID NO: 160894 - DNA, 15 bp, Homo sapiens
tgagatcccccaatt

SEQ ID NO: 160895 - DNA, 15 bp, Homo sapiens
ctgagatcccccaat

SEQ ID NO: 160896 - DNA, 15 bp, Homo sapiens
cctgagatcccccaa

SEQ ID NO: 160897 - DNA, 15 bp, Homo sapiens
tcctgagatccccca

SEQ ID NO: 160898 - DNA, 15 bp, Homo sapiens
gtcctgagatccccc

SEQ ID NO: 160899 - DNA, 15 bp, Homo sapiens
tgtcctgagatcccc

SEQ ID NO: 160900 - DNA, 15 bp, Homo sapiens
ctgtcctgagatccc

SEQ ID NO: 160901 - DNA, 15 bp, Homo sapiens
tctgtcctgagatcc

SEQ ID NO: 160902 - DNA, 15 bp, Homo sapiens
atctgtcctgagatc

SEQ ID NO: 160903 - DNA, 15 bp, Homo sapiens
gatctgtcctgagat

SEQ ID NO: 160904 - DNA, 15 bp, Homo sapiens
tgatctgtcctgaga

SEQ ID NO: 160905 - DNA, 15 bp, Homo sapiens
ctgatctgtcctgag

SEQ ID NO: 160906 - DNA, 15 bp, Homo sapiens
gctgatctgtcctga

SEQ ID NO: 160907 - DNA, 15 bp, Homo sapiens
ggctgatctgtcctg

SEQ ID NO: 160908 - DNA, 15 bp, Homo sapiens
tggctgatctgtcct

SEQ ID NO: 160909 - DNA, 15 bp, Homo sapiens
gtggctgatctgtcc

SEQ ID NO: 160910 - DNA, 15 bp, Homo sapiens
agtggctgatctgtc

SEQ ID NO: 160911 - DNA, 15 bp, Homo sapiens
tagtggctgatctgt

SEQ ID NO: 160912 - DNA, 15 bp, Homo sapiens
ctagtggctgatctg

SEQ ID NO: 160913 - DNA, 15 bp, Homo sapiens
tctagtggctgatct

SEQ ID NO: 160914 - DNA, 15 bp, Homo sapiens
ttctagtggctgatc

SEQ ID NO: 160915 - DNA, 15 bp, Homo sapiens
attctagtggctgat

SEQ ID NO: 160916 - DNA, 15 bp, Homo sapiens
aattctagtggctga

SEQ ID NO: 160917 - DNA, 15 bp, Homo sapiens
caattctagtggctg

SEQ ID NO: 160918 - DNA, 15 bp, Homo sapiens
ccaattctagtggct

SEQ ID NO: 160919 - DNA, 15 bp, Homo sapiens
cccaattctagtggc

SEQ ID NO: 160920 - DNA, 15 bp, Homo sapiens
tcccaattctagtgg

SEQ ID NO: 160921 - DNA, 15 bp, Homo sapiens
ctcccaattctagtg

SEQ ID NO: 160922 - DNA, 15 bp, Homo sapiens
cctcccaattctagt

SEQ ID NO: 160923 - DNA, 15 bp, Homo sapiens
tcctcccaattctag

SEQ ID NO: 160924 - DNA, 15 bp, Homo sapiens
ctcctcccaattcta

SEQ ID NO: 160925 - DNA, 15 bp, Homo sapiens
cctcctcccaattct

SEQ ID NO: 160926 - DNA, 15 bp, Homo sapiens
gcctcctcccaattc

SEQ ID NO: 160927 - DNA, 15 bp, Homo sapiens
ggcctcctcccaatt

SEQ ID NO: 160928 - DNA, 15 bp, Homo sapiens
tggcctcctcccaat

SEQ ID NO: 160929 - DNA, 15 bp, Homo sapiens
atggcctcctcccaa

SEQ ID NO: 160930 - DNA, 15 bp, Homo sapiens
aatggcctcctccca

SEQ ID NO: 160931 - DNA, 15 bp, Homo sapiens
taatggcctcctccc

SEQ ID NO: 160932 - DNA, 15 bp, Homo sapiens
ttaatggcctcctcc

SEQ ID NO: 160933 - DNA, 15 bp, Homo sapiens
tttaatggcctcctc

SEQ ID NO: 160934 - DNA, 15 bp, Homo sapiens
ctttaatggcctcct

SEQ ID NO: 160935 - DNA, 15 bp, Homo sapiens
cctttaatggcctcc

SEQ ID NO: 160936 - DNA, 15 bp, Homo sapiens
tcctttaatggcctc

SEQ ID NO: 160937 - DNA, 15 bp, Homo sapiens
ttcctttaatggcct

SEQ ID NO: 160938 - DNA, 15 bp, Homo sapiens
gttcctttaatggcc

SEQ ID NO: 160939 - DNA, 15 bp, Homo sapiens
ggttcctttaatggc

SEQ ID NO: 160940 - DNA, 15 bp, Homo sapiens
gggttcctttaatgg

SEQ ID NO: 160941 - DNA, 15 bp, Homo sapiens
ggggttcctttaatg

SEQ ID NO: 160942 - DNA, 15 bp, Homo sapiens
aggggttcctttaat

SEQ ID NO: 160943 - DNA, 15 bp, Homo sapiens
aaggggttcctttaa

SEQ ID NO: 160944 - DNA, 15 bp, Homo sapiens
caaggggttccttta

SEQ ID NO: 160945 - DNA, 15 bp, Homo sapiens
ccaaggggttccttt

SEQ ID NO: 160946 - DNA, 15 bp, Homo sapiens
cccaaggggttcctt

SEQ ID NO: 160947 - DNA, 15 bp, Homo sapiens
acccaaggggttcct

SEQ ID NO: 160948 - DNA, 15 bp, Homo sapiens
gacccaaggggttcc

SEQ ID NO: 160949 - DNA, 15 bp, Homo sapiens
ggacccaaggggttc

SEQ ID NO: 160950 - DNA, 15 bp, Homo sapiens
tggacccaaggggtt

SEQ ID NO: 160951 - DNA, 15 bp, Homo sapiens
gtggacccaaggggt

SEQ ID NO: 160952 - DNA, 15 bp, Homo sapiens
tgtggacccaagggg

SEQ ID NO: 160953 - DNA, 15 bp, Homo sapiens
gtgtggacccaaggg

SEQ ID NO: 160954 - DNA, 15 bp, Homo sapiens
tgtgtggacccaagg

SEQ ID NO: 160955 - DNA, 15 bp, Homo sapiens
gtgtgtggacccaag

SEQ ID NO: 160956 - DNA, 15 bp, Homo sapiens
ggtgtgtggacccaa

SEQ ID NO: 160957 - DNA, 15 bp, Homo sapiens
tggtgtgtggaccca

SEQ ID NO: 160958 - DNA, 15 bp, Homo sapiens
gtggtgtgtggaccc

SEQ ID NO: 160959 - DNA, 15 bp, Homo sapiens
agtggtgtgtggacc

SEQ ID NO: 160960 - DNA, 15 bp, Homo sapiens
gagtggtgtgtggac

SEQ ID NO: 160961 - DNA, 15 bp, Homo sapiens
tgagtggtgtgtgga

SEQ ID NO: 160962 - DNA, 15 bp, Homo sapiens
ctgagtggtgtgtgg

SEQ ID NO: 160963 - DNA, 15 bp, Homo sapiens
cctgagtggtgtgtg

SEQ ID NO: 160964 - DNA, 15 bp, Homo sapiens
tcctgagtggtgtgt

SEQ ID NO: 160965 - DNA, 15 bp, Homo sapiens
ctcctgagtggtgtg

SEQ ID NO: 160966 - DNA, 15 bp, Homo sapiens
tctcctgagtggtgt

SEQ ID NO: 160967 - DNA, 15 bp, Homo sapiens
ttctcctgagtggtg

SEQ ID NO: 160968 - DNA, 15 bp, Homo sapiens
tttctcctgagtggt

SEQ ID NO: 160969 - DNA, 15 bp, Homo sapiens
ctttctcctgagtgg

SEQ ID NO: 160970 - DNA, 15 bp, Homo sapiens
cctttctcctgagtg

SEQ ID NO: 160971 - DNA, 15 bp, Homo sapiens
gcctttctcctgagt

SEQ ID NO: 160972 - DNA, 15 bp, Homo sapiens
ggcctttctcctgag

SEQ ID NO: 160973 - DNA, 15 bp, Homo sapiens
gggcctttctcctga

SEQ ID NO: 160974 - DNA, 15 bp, Homo sapiens
tgggcctttctcctg

SEQ ID NO: 160975 - DNA, 15 bp, Homo sapiens
gtgggcctttctcct

SEQ ID NO: 160976 - DNA, 15 bp, Homo sapiens
agtgggcctttctcc

SEQ ID NO: 160977 - DNA, 15 bp, Homo sapiens
cagtgggcctttctc

SEQ ID NO: 160978 - DNA, 15 bp, Homo sapiens
ccagtgggcctttct

SEQ ID NO: 160979 - DNA, 15 bp, Homo sapiens
accagtgggcctttc

SEQ ID NO: 160980 - DNA, 15 bp, Homo sapiens
caccagtgggccttt

SEQ ID NO: 160981 - DNA, 15 bp, Homo sapiens
tcaccagtgggcctt

SEQ ID NO: 160982 - DNA, 15 bp, Homo sapiens
ctcaccagtgggcct

SEQ ID NO: 160983 - DNA, 15 bp, Homo sapiens
cctcaccagtgggcc

SEQ ID NO: 160984 - DNA, 15 bp, Homo sapiens
gcctcaccagtgggc

SEQ ID NO: 160985 - DNA, 15 bp, Homo sapiens
ggcctcaccagtggg

SEQ ID NO: 160986 - DNA, 15 bp, Homo sapiens
tggcctcaccagtgg

SEQ ID NO: 160987 - DNA, 15 bp, Homo sapiens
ttggcctcaccagtg

SEQ ID NO: 160988 - DNA, 15 bp, Homo sapiens
tttggcctcaccagt

SEQ ID NO: 160989 - DNA, 15 bp, Homo sapiens
gtttggcctcaccag

SEQ ID NO: 160990 - DNA, 15 bp, Homo sapiens
agtttggcctcacca

SEQ ID NO: 160991 - DNA, 15 bp, Homo sapiens
tagtttggcctcacc

SEQ ID NO: 160992 - DNA, 15 bp, Homo sapiens
gtagtttggcctcac

SEQ ID NO: 160993 - DNA, 15 bp, Homo sapiens
agtagtttggcctca

SEQ ID NO: 160994 - DNA, 15 bp, Homo sapiens
aagtagtttggcctc

SEQ ID NO: 160995 - DNA, 15 bp, Homo sapiens
gaagtagtttggcct

SEQ ID NO: 160996 - DNA, 15 bp, Homo sapiens
agaagtagtttggcc

SEQ ID NO: 160997 - DNA, 15 bp, Homo sapiens
aagaagtagtttggc

SEQ ID NO: 160998 - DNA, 15 bp, Homo sapiens
aaagaagtagtttgg

SEQ ID NO: 160999 - DNA, 15 bp, Homo sapiens
caaagaagtagtttg

SEQ ID NO: 161000 - DNA, 15 bp, Homo sapiens
tcaaagaagtagttt

SEQ ID NO: 161001 - DNA, 15 bp, Homo sapiens
ttcaaagaagtagtt

SEQ ID NO: 161002 - DNA, 15 bp, Homo sapiens
cttcaaagaagtagt

SEQ ID NO: 161003 - DNA, 15 bp, Homo sapiens
tcttcaaagaagtag

SEQ ID NO: 161004 - DNA, 15 bp, Homo sapiens
ctcttcaaagaagta

SEQ ID NO: 161005 - DNA, 15 bp, Homo sapiens
cctcttcaaagaagt

SEQ ID NO: 161006 - DNA, 15 bp, Homo sapiens
gcctcttcaaagaag

SEQ ID NO: 161007 - DNA, 15 bp, Homo sapiens
agcctcttcaaagaa

SEQ ID NO: 161008 - DNA, 15 bp, Homo sapiens
aagcctcttcaaaga

SEQ ID NO: 161009 - DNA, 15 bp, Homo sapiens
gaagcctcttcaaag

SEQ ID NO: 161010 - DNA, 15 bp, Homo sapiens
agaagcctcttcaaa

SEQ ID NO: 161011 - DNA, 15 bp, Homo sapiens
gagaagcctcttcaa

SEQ ID NO: 161012 - DNA, 15 bp, Homo sapiens
agagaagcctcttca

SEQ ID NO: 161013 - DNA, 15 bp, Homo sapiens
aagagaagcctcttc

SEQ ID NO: 161014 - DNA, 15 bp, Homo sapiens
taagagaagcctctt

SEQ ID NO: 161015 - DNA, 15 bp, Homo sapiens
ctaagagaagcctct

SEQ ID NO: 161016 - DNA, 15 bp, Homo sapiens
actaagagaagcctc

SEQ ID NO: 161017 - DNA, 15 bp, Homo sapiens
tactaagagaagcct

SEQ ID NO: 161018 - DNA, 15 bp, Homo sapiens
atactaagagaagcc

SEQ ID NO: 161019 - DNA, 15 bp, Homo sapiens
gatactaagagaagc

SEQ ID NO: 161020 - DNA, 15 bp, Homo sapiens
tgatactaagagaag

SEQ ID NO: 161021 - DNA, 15 bp, Homo sapiens
gtgatactaagagaa

SEQ ID NO: 161022 - DNA, 15 bp, Homo sapiens
ggtgatactaagaga

SEQ ID NO: 161023 - DNA, 15 bp, Homo sapiens
tggtgatactaagag

SEQ ID NO: 161024 - DNA, 15 bp, Homo sapiens
ctggtgatactaaga

SEQ ID NO: 161025 - DNA, 15 bp, Homo sapiens
actggtgatactaag

SEQ ID NO: 161026 - DNA, 15 bp, Homo sapiens
cactggtgatactaa

SEQ ID NO: 161027 - DNA, 15 bp, Homo sapiens
ccactggtgatacta

SEQ ID NO: 161028 - DNA, 15 bp, Homo sapiens
accactggtgatact

SEQ ID NO: 161029 - DNA, 15 bp, Homo sapiens
caccactggtgatac

SEQ ID NO: 161030 - DNA, 15 bp, Homo sapiens
acaccactggtgata

SEQ ID NO: 161031 - DNA, 15 bp, Homo sapiens
cacaccactggtgat

SEQ ID NO: 161032 - DNA, 15 bp, Homo sapiens
acacaccactggtga

SEQ ID NO: 161033 - DNA, 15 bp, Homo sapiens
aacacaccactggtg

SEQ ID NO: 161034 - DNA, 15 bp, Homo sapiens
caacacaccactggt

SEQ ID NO: 161035 - DNA, 15 bp, Homo sapiens
gcaacacaccactgg

SEQ ID NO: 161036 - DNA, 15 bp, Homo sapiens
agcaacacaccactg

SEQ ID NO: 161037 - DNA, 15 bp, Homo sapiens
cagcaacacaccact

SEQ ID NO: 161038 - DNA, 15 bp, Homo sapiens
ccagcaacacaccac

SEQ ID NO: 161039 - DNA, 15 bp, Homo sapiens
tccagcaacacacca

SEQ ID NO: 161040 - DNA, 15 bp, Homo sapiens
ctccagcaacacacc

SEQ ID NO: 161041 - DNA, 15 bp, Homo sapiens
cctccagcaacacac

SEQ ID NO: 161042 - DNA, 15 bp, Homo sapiens
acctccagcaacaca

SEQ ID NO: 161043 - DNA, 15 bp, Homo sapiens
cacctccagcaacac

SEQ ID NO: 161044 - DNA, 15 bp, Homo sapiens
acacctccagcaaca

SEQ ID NO: 161045 - DNA, 15 bp, Homo sapiens
gacacctccagcaac

SEQ ID NO: 161046 - DNA, 15 bp, Homo sapiens
ggacacctccagcaa

SEQ ID NO: 161047 - DNA, 15 bp, Homo sapiens
tggacacctccagca

SEQ ID NO: 161048 - DNA, 15 bp, Homo sapiens
ctggacacctccagc

SEQ ID NO: 161049 - DNA, 15 bp, Homo sapiens
tctggacacctccag

SEQ ID NO: 161050 - DNA, 15 bp, Homo sapiens
ctctggacacctcca

SEQ ID NO: 161051 - DNA, 15 bp, Homo sapiens
cctctggacacctcc

SEQ ID NO: 161052 - DNA, 15 bp, Homo sapiens
gcctctggacacctc

SEQ ID NO: 161053 - DNA, 15 bp, Homo sapiens
tgcctctggacacct

SEQ ID NO: 161054 - DNA, 15 bp, Homo sapiens
gtgcctctggacacc

SEQ ID NO: 161055 - DNA, 15 bp, Homo sapiens
agtgcctctggacac

SEQ ID NO: 161056 - DNA, 15 bp, Homo sapiens
cagtgcctctggaca

SEQ ID NO: 161057 - DNA, 15 bp, Homo sapiens
acagtgcctctggac

SEQ ID NO: 161058 - DNA, 15 bp, Homo sapiens
gacagtgcctctgga

SEQ ID NO: 161059 - DNA, 15 bp, Homo sapiens
ggacagtgcctctgg

SEQ ID NO: 161060 - DNA, 15 bp, Homo sapiens
cggacagtgcctctg

SEQ ID NO: 161061 - DNA, 15 bp, Homo sapiens
tcggacagtgcctct

SEQ ID NO: 161062 - DNA, 15 bp, Homo sapiens
ttcggacagtgcctc

SEQ ID NO: 161063 - DNA, 15 bp, Homo sapiens
cttcggacagtgcct

SEQ ID NO: 161064 - DNA, 15 bp, Homo sapiens
gcttcggacagtgcc

SEQ ID NO: 161065 - DNA, 15 bp, Homo sapiens
agcttcggacagtgc

SEQ ID NO: 161066 - DNA, 15 bp, Homo sapiens
cagcttcggacagtg

SEQ ID NO: 161067 - DNA, 15 bp, Homo sapiens
gcagcttcggacagt

SEQ ID NO: 161068 - DNA, 15 bp, Homo sapiens
agcagcttcggacag

SEQ ID NO: 161069 - DNA, 15 bp, Homo sapiens
cagcagcttcggaca

SEQ ID NO: 161070 - DNA, 15 bp, Homo sapiens
ccagcagcttcggac

SEQ ID NO: 161071 - DNA, 15 bp, Homo sapiens
gccagcagcttcgga

SEQ ID NO: 161072 - DNA, 15 bp, Homo sapiens
ggccagcagcttcgg

SEQ ID NO: 161073 - DNA, 15 bp, Homo sapiens
aggccagcagcttcg

SEQ ID NO: 161074 - DNA, 15 bp, Homo sapiens
gaggccagcagcttc

SEQ ID NO: 161075 - DNA, 15 bp, Homo sapiens
agaggccagcagctt

SEQ ID NO: 161076 - DNA, 15 bp, Homo sapiens
tagaggccagcagct

SEQ ID NO: 161077 - DNA, 15 bp, Homo sapiens
ttagaggccagcagc

SEQ ID NO: 161078 - DNA, 15 bp, Homo sapiens
attagaggccagcag

SEQ ID NO: 161079 - DNA, 15 bp, Homo sapiens
gattagaggccagca

SEQ ID NO: 161080 - DNA, 15 bp, Homo sapiens
ggattagaggccagc

SEQ ID NO: 161081 - DNA, 15 bp, Homo sapiens
gggattagaggccag

SEQ ID NO: 161082 - DNA, 15 bp, Homo sapiens
tgggattagaggcca

SEQ ID NO: 161083 - DNA, 15 bp, Homo sapiens
gtgggattagaggcc

SEQ ID NO: 161084 - DNA, 15 bp, Homo sapiens
ggtgggattagaggc

SEQ ID NO: 161085 - DNA, 15 bp, Homo sapiens
tggtgggattagagg

SEQ ID NO: 161086 - DNA, 15 bp, Homo sapiens
ctggtgggattagag

SEQ ID NO: 161087 - DNA, 15 bp, Homo sapiens
actggtgggattaga

SEQ ID NO: 161088 - DNA, 15 bp, Homo sapiens
aactggtgggattag

SEQ ID NO: 161089 - DNA, 15 bp, Homo sapiens
aaactggtgggatta

SEQ ID NO: 161090 - DNA, 15 bp, Homo sapiens
taaactggtgggatt

SEQ ID NO: 161091 - DNA, 15 bp, Homo sapiens
ttaaactggtgggat

SEQ ID NO: 161092 - DNA, 15 bp, Homo sapiens
attaaactggtggga

SEQ ID NO: 161093 - DNA, 15 bp, Homo sapiens
aattaaactggtggg

SEQ ID NO: 161094 - DNA, 15 bp, Homo sapiens
aaattaaactggtgg

SEQ ID NO: 161095 - DNA, 15 bp, Homo sapiens
taaattaaactggtg

SEQ ID NO: 161096 - DNA, 15 bp, Homo sapiens
ctaaattaaactggt

SEQ ID NO: 161097 - DNA, 15 bp, Homo sapiens
gctaaattaaactgg

SEQ ID NO: 161098 - DNA, 15 bp, Homo sapiens
agctaaattaaactg

SEQ ID NO: 161099 - DNA, 15 bp, Homo sapiens
gagctaaattaaact

SEQ ID NO: 161100 - DNA, 15 bp, Homo sapiens
ggagctaaattaaac

SEQ ID NO: 161101 - DNA, 15 bp, Homo sapiens
tggagctaaattaaa

SEQ ID NO: 161102 - DNA, 15 bp, Homo sapiens
ctggagctaaattaa

SEQ ID NO: 161103 - DNA, 15 bp, Homo sapiens
actggagctaaatta

SEQ ID NO: 161104 - DNA, 15 bp, Homo sapiens
gactggagctaaatt

SEQ ID NO: 161105 - DNA, 15 bp, Homo sapiens
ggactggagctaaat

SEQ ID NO: 161106 - DNA, 15 bp, Homo sapiens
aggactggagctaaa

SEQ ID NO: 161107 - DNA, 15 bp, Homo sapiens
taggactggagctaa

SEQ ID NO: 161108 - DNA, 15 bp, Homo sapiens
ctaggactggagcta

SEQ ID NO: 161109 - DNA, 15 bp, Homo sapiens
cctaggactggagct

SEQ ID NO: 161110 - DNA, 15 bp, Homo sapiens
ccctaggactggagc

SEQ ID NO: 161111 - DNA, 15 bp, Homo sapiens
cccctaggactggag

SEQ ID NO: 161112 - DNA, 15 bp, Homo sapiens
tcccctaggactgga

SEQ ID NO: 161113 - DNA, 15 bp, Homo sapiens
ctcccctaggactgg

SEQ ID NO: 161114 - DNA, 15 bp, Homo sapiens
gctcccctaggactg

SEQ ID NO: 161115 - DNA, 15 bp, Homo sapiens
agctcccctaggact

SEQ ID NO: 161116 - DNA, 15 bp, Homo sapiens
aagctcccctaggac

SEQ ID NO: 161117 - DNA, 15 bp, Homo sapiens
aaagctcccctagga

SEQ ID NO: 161118 - DNA, 15 bp, Homo sapiens
caaagctcccctagg

SEQ ID NO: 161119 - DNA, 15 bp, Homo sapiens
gcaaagctcccctag

SEQ ID NO: 161120 - DNA, 15 bp, Homo sapiens
agcaaagctccccta

SEQ ID NO: 161121 - DNA, 15 bp, Homo sapiens
tagcaaagctcccct

SEQ ID NO: 161122 - DNA, 15 bp, Homo sapiens
ttagcaaagctcccc

SEQ ID NO: 161123 - DNA, 15 bp, Homo sapiens
attagcaaagctccc

SEQ ID NO: 161124 - DNA, 15 bp, Homo sapiens
aattagcaaagctcc

SEQ ID NO: 161125 - DNA, 15 bp, Homo sapiens
taattagcaaagctc

SEQ ID NO: 161126 - DNA, 15 bp, Homo sapiens
ataattagcaaagct

SEQ ID NO: 161127 - DNA, 15 bp, Homo sapiens
tataattagcaaagc

SEQ ID NO: 161128 - DNA, 15 bp, Homo sapiens
ctataattagcaaag

SEQ ID NO: 161129 - DNA, 15 bp, Homo sapiens
gctataattagcaaa

SEQ ID NO: 161130 - DNA, 15 bp, Homo sapiens
agctataattagcaa

SEQ ID NO: 161131 - DNA, 15 bp, Homo sapiens
tagctataattagca

SEQ ID NO: 161132 - DNA, 15 bp, Homo sapiens
ctagctataattagc

SEQ ID NO: 161133 - DNA, 15 bp, Homo sapiens
gctagctataattag

SEQ ID NO: 161134 - DNA, 15 bp, Homo sapiens
agctagctataatta

SEQ ID NO: 161135 - DNA, 15 bp, Homo sapiens
cagctagctataatt

SEQ ID NO: 161136 - DNA, 15 bp, Homo sapiens
ccagctagctataat

SEQ ID NO: 161137 - DNA, 15 bp, Homo sapiens
gccagctagctataa

SEQ ID NO: 161138 - DNA, 15 bp, Homo sapiens
ggccagctagctata

SEQ ID NO: 161139 - DNA, 15 bp, Homo sapiens
tggccagctagctat

SEQ ID NO: 161140 - DNA, 15 bp, Homo sapiens
atggccagctagcta

SEQ ID NO: 161141 - DNA, 15 bp, Homo sapiens
catggccagctagct

SEQ ID NO: 161142 - DNA, 15 bp, Homo sapiens
gcatggccagctagc

SEQ ID NO: 161143 - DNA, 15 bp, Homo sapiens
agcatggccagctag

SEQ ID NO: 161144 - DNA, 15 bp, Homo sapiens
cagcatggccagcta

SEQ ID NO: 161145 - DNA, 15 bp, Homo sapiens
ccagcatggccagct

SEQ ID NO: 161146 - DNA, 15 bp, Homo sapiens
cccagcatggccagc

SEQ ID NO: 161147 - DNA, 15 bp, Homo sapiens
tcccagcatggccag

SEQ ID NO: 161148 - DNA, 15 bp, Homo sapiens
ctcccagcatggcca

SEQ ID NO: 161149 - DNA, 15 bp, Homo sapiens
gctcccagcatggcc

SEQ ID NO: 161150 - DNA, 15 bp, Homo sapiens
agctcccagcatggc

SEQ ID NO: 161151 - DNA, 15 bp, Homo sapiens
tagctcccagcatgg

SEQ ID NO: 161152 - DNA, 15 bp, Homo sapiens
atagctcccagcatg

SEQ ID NO: 161153 - DNA, 15 bp, Homo sapiens
tatagctcccagcat

SEQ ID NO: 161154 - DNA, 15 bp, Homo sapiens
ttatagctcccagca

SEQ ID NO: 161155 - DNA, 15 bp, Homo sapiens
tttatagctcccagc

SEQ ID NO: 161156 - DNA, 15 bp, Homo sapiens
atttatagctcccag

SEQ ID NO: 161157 - DNA, 15 bp, Homo sapiens
tatttatagctccca

SEQ ID NO: 161158 - DNA, 15 bp, Homo sapiens
ctatttatagctccc

SEQ ID NO: 161159 - DNA, 15 bp, Homo sapiens
cctatttatagctcc

SEQ ID NO: 161160 - DNA, 15 bp, Homo sapiens
ccctatttatagctc

SEQ ID NO: 161161 - DNA, 15 bp, Homo sapiens
gccctatttatagct

SEQ ID NO: 161162 - DNA, 15 bp, Homo sapiens
tgccctatttatagc

SEQ ID NO: 161163 - DNA, 15 bp, Homo sapiens
ctgccctatttatag

SEQ ID NO: 161164 - DNA, 15 bp, Homo sapiens
cctgccctatttata

SEQ ID NO: 161165 - DNA, 15 bp, Homo sapiens
tcctgccctatttat

SEQ ID NO: 161166 - DNA, 15 bp, Homo sapiens
ctcctgccctattta

SEQ ID NO: 161167 - DNA, 15 bp, Homo sapiens
cctcctgccctattt

SEQ ID NO: 161168 - DNA, 15 bp, Homo sapiens
gcctcctgccctatt

SEQ ID NO: 161169 - DNA, 15 bp, Homo sapiens
tgcctcctgccctat

SEQ ID NO: 161170 - DNA, 15 bp, Homo sapiens
gtgcctcctgcccta

SEQ ID NO: 161171 - DNA, 15 bp, Homo sapiens
ggtgcctcctgccct

SEQ ID NO: 161172 - DNA, 15 bp, Homo sapiens
aggtgcctcctgccc

SEQ ID NO: 161173 - DNA, 15 bp, Homo sapiens
caggtgcctcctgcc

SEQ ID NO: 161174 - DNA, 15 bp, Homo sapiens
acaggtgcctcctgc

SEQ ID NO: 161175 - DNA, 15 bp, Homo sapiens
aacaggtgcctcctg

SEQ ID NO: 161176 - DNA, 15 bp, Homo sapiens
aaacaggtgcctcct

SEQ ID NO: 161177 - DNA, 15 bp, Homo sapiens
caaacaggtgcctcc

SEQ ID NO: 161178 - DNA, 15 bp, Homo sapiens
ccaaacaggtgcctc

SEQ ID NO: 161179 - DNA, 15 bp, Homo sapiens
accaaacaggtgcct

SEQ ID NO: 161180 - DNA, 15 bp, Homo sapiens
gaccaaacaggtgcc

SEQ ID NO: 161181 - DNA, 15 bp, Homo sapiens
ggaccaaacaggtgc

SEQ ID NO: 161182 - DNA, 15 bp, Homo sapiens
aggaccaaacaggtg

SEQ ID NO: 161183 - DNA, 15 bp, Homo sapiens
aaggaccaaacaggt

SEQ ID NO: 161184 - DNA, 15 bp, Homo sapiens
taaggaccaaacagg

SEQ ID NO: 161185 - DNA, 15 bp, Homo sapiens
gtaaggaccaaacag

SEQ ID NO: 161186 - DNA, 15 bp, Homo sapiens
agtaaggaccaaaca

SEQ ID NO: 161187 - DNA, 15 bp, Homo sapiens
cagtaaggaccaaac

SEQ ID NO: 161188 - DNA, 15 bp, Homo sapiens
ccagtaaggaccaaa

SEQ ID NO: 161189 - DNA, 15 bp, Homo sapiens
tccagtaaggaccaa

SEQ ID NO: 161190 - DNA, 15 bp, Homo sapiens
atccagtaaggacca

SEQ ID NO: 161191 - DNA, 15 bp, Homo sapiens
catccagtaaggacc

SEQ ID NO: 161192 - DNA, 15 bp, Homo sapiens
acatccagtaaggac

SEQ ID NO: 161193 - DNA, 15 bp, Homo sapiens
aacatccagtaagga

SEQ ID NO: 161194 - DNA, 15 bp, Homo sapiens
aaacatccagtaagg

SEQ ID NO: 161195 - DNA, 15 bp, Homo sapiens
taaacatccagtaag

SEQ ID NO: 161196 - DNA, 15 bp, Homo sapiens
ataaacatccagtaa

SEQ ID NO: 161197 - DNA, 15 bp, Homo sapiens
gataaacatccagta

SEQ ID NO: 161198 - DNA, 15 bp, Homo sapiens
tgataaacatccagt

SEQ ID NO: 161199 - DNA, 15 bp, Homo sapiens
ttgataaacatccag

SEQ ID NO: 161200 - DNA, 15 bp, Homo sapiens
cttgataaacatcca

SEQ ID NO: 161201 - DNA, 15 bp, Homo sapiens
ccttgataaacatcc

SEQ ID NO: 161202 - DNA, 15 bp, Homo sapiens
accttgataaacatc

SEQ ID NO: 161203 - DNA, 15 bp, Homo sapiens
taccttgataaacat

SEQ ID NO: 161204 - DNA, 15 bp, Homo sapiens
gtaccttgataaaca

SEQ ID NO: 161205 - DNA, 15 bp, Homo sapiens
ggtaccttgataaac

SEQ ID NO: 161206 - DNA, 15 bp, Homo sapiens
aggtaccttgataaa

SEQ ID NO: 161207 - DNA, 15 bp, Homo sapiens
caggtaccttgataa

SEQ ID NO: 161208 - DNA, 15 bp, Homo sapiens
gcaggtaccttgata

SEQ ID NO: 161209 - DNA, 15 bp, Homo sapiens
tgcaggtaccttgat

SEQ ID NO: 161210 - DNA, 15 bp, Homo sapiens
ctgcaggtaccttga

SEQ ID NO: 161211 - DNA, 15 bp, Homo sapiens
tctgcaggtaccttg

SEQ ID NO: 161212 - DNA, 15 bp, Homo sapiens
ctctgcaggtacctt

SEQ ID NO: 161213 - DNA, 15 bp, Homo sapiens
cctctgcaggtacct

SEQ ID NO: 161214 - DNA, 15 bp, Homo sapiens
tcctctgcaggtacc

SEQ ID NO: 161215 - DNA, 15 bp, Homo sapiens
atcctctgcaggtac

SEQ ID NO: 161216 - DNA, 15 bp, Homo sapiens
aatcctctgcaggta

SEQ ID NO: 161217 - DNA, 15 bp, Homo sapiens
aaatcctctgcaggt

SEQ ID NO: 161218 - DNA, 15 bp, Homo sapiens
caaatcctctgcagg

SEQ ID NO: 161219 - DNA, 15 bp, Homo sapiens
ccaaatcctctgcag

SEQ ID NO: 161220 - DNA, 15 bp, Homo sapiens
gccaaatcctctgca

SEQ ID NO: 161221 - DNA, 15 bp, Homo sapiens
ggccaaatcctctgc

SEQ ID NO: 161222 - DNA, 15 bp, Homo sapiens
tggccaaatcctctg

SEQ ID NO: 161223 - DNA, 15 bp, Homo sapiens
gtggccaaatcctct

SEQ ID NO: 161224 - DNA, 15 bp, Homo sapiens
agtggccaaatcctc

SEQ ID NO: 161225 - DNA, 15 bp, Homo sapiens
cagtggccaaatcct

SEQ ID NO: 161226 - DNA, 15 bp, Homo sapiens
ccagtggccaaatcc

SEQ ID NO: 161227 - DNA, 15 bp, Homo sapiens
tccagtggccaaatc

SEQ ID NO: 161228 - DNA, 15 bp, Homo sapiens
gtccagtggccaaat

SEQ ID NO: 161229 - DNA, 15 bp, Homo sapiens
agtccagtggccaaa

SEQ ID NO: 161230 - DNA, 15 bp, Homo sapiens
cagtccagtggccaa

SEQ ID NO: 161231 - DNA, 15 bp, Homo sapiens
ccagtccagtggcca

SEQ ID NO: 161232 - DNA, 15 bp, Homo sapiens
cccagtccagtggcc

SEQ ID NO: 161233 - DNA, 15 bp, Homo sapiens
acccagtccagtggc

SEQ ID NO: 161234 - DNA, 15 bp, Homo sapiens
cacccagtccagtgg

SEQ ID NO: 161235 - DNA, 15 bp, Homo sapiens
gcacccagtccagtg

SEQ ID NO: 161236 - DNA, 15 bp, Homo sapiens
tgcacccagtccagt

SEQ ID NO: 161237 - DNA, 15 bp, Homo sapiens
ttgcacccagtccag

SEQ ID NO: 161238 - DNA, 15 bp, Homo sapiens
attgcacccagtcca

SEQ ID NO: 161239 - DNA, 15 bp, Homo sapiens
cattgcacccagtcc

SEQ ID NO: 161240 - DNA, 15 bp, Homo sapiens
acattgcacccagtc

SEQ ID NO: 161241 - DNA, 15 bp, Homo sapiens
cacattgcacccagt

SEQ ID NO: 161242 - DNA, 15 bp, Homo sapiens
ccacattgcacccag

SEQ ID NO: 161243 - DNA, 15 bp, Homo sapiens
cccacattgcaccca

SEQ ID NO: 161244 - DNA, 15 bp, Homo sapiens
gcccacattgcaccc

SEQ ID NO: 161245 - DNA, 15 bp, Homo sapiens
tgcccacattgcacc

SEQ ID NO: 161246 - DNA, 15 bp, Homo sapiens
gtgcccacattgcac

SEQ ID NO: 161247 - DNA, 15 bp, Homo sapiens
tgtgcccacattgca

SEQ ID NO: 161248 - DNA, 15 bp, Homo sapiens
ctgtgcccacattgc

SEQ ID NO: 161249 - DNA, 15 bp, Homo sapiens
tctgtgcccacattg

SEQ ID NO: 161250 - DNA, 15 bp, Homo sapiens
ttctgtgcccacatt

SEQ ID NO: 161251 - DNA, 15 bp, Homo sapiens
tttctgtgcccacat

SEQ ID NO: 161252 - DNA, 15 bp, Homo sapiens
ctttctgtgcccaca

SEQ ID NO: 161253 - DNA, 15 bp, Homo sapiens
gctttctgtgcccac

SEQ ID NO: 161254 - DNA, 15 bp, Homo sapiens
tgctttctgtgccca

SEQ ID NO: 161255 - DNA, 15 bp, Homo sapiens
gtgctttctgtgccc

SEQ ID NO: 161256 - DNA, 15 bp, Homo sapiens
ggtgctttctgtgcc

SEQ ID NO: 161257 - DNA, 15 bp, Homo sapiens
aggtgctttctgtgc

SEQ ID NO: 161258 - DNA, 15 bp, Homo sapiens
aaggtgctttctgtg

SEQ ID NO: 161259 - DNA, 15 bp, Homo sapiens
caaggtgctttctgt

SEQ ID NO: 161260 - DNA, 15 bp, Homo sapiens
tcaaggtgctttctg

SEQ ID NO: 161261 - DNA, 15 bp, Homo sapiens
ttcaaggtgctttct

SEQ ID NO: 161262 - DNA, 15 bp, Homo sapiens
gttcaaggtgctttc

SEQ ID NO: 161263 - DNA, 15 bp, Homo sapiens
agttcaaggtgcttt

SEQ ID NO: 161264 - DNA, 15 bp, Homo sapiens
cagttcaaggtgctt

SEQ ID NO: 161265 - DNA, 15 bp, Homo sapiens
acagttcaaggtgct

SEQ ID NO: 161266 - DNA, 15 bp, Homo sapiens
cacagttcaaggtgc

SEQ ID NO: 161267 - DNA, 15 bp, Homo sapiens
gcacagttcaaggtg

SEQ ID NO: 161268 - DNA, 15 bp, Homo sapiens
agcacagttcaaggt

SEQ ID NO: 161269 - DNA, 15 bp, Homo sapiens
gagcacagttcaagg

SEQ ID NO: 161270 - DNA, 15 bp, Homo sapiens
agagcacagttcaag

SEQ ID NO: 161271 - DNA, 15 bp, Homo sapiens
aagagcacagttcaa

SEQ ID NO: 161272 - DNA, 15 bp, Homo sapiens
aaagagcacagttca

SEQ ID NO: 161273 - DNA, 15 bp, Homo sapiens
taaagagcacagttc

SEQ ID NO: 161274 - DNA, 15 bp, Homo sapiens
ataaagagcacagtt

SEQ ID NO: 161275 - DNA, 15 bp, Homo sapiens
aataaagagcacagt

SEQ ID NO: 161276 - DNA, 15 bp, Homo sapiens
gaataaagagcacag

SEQ ID NO: 161277 - DNA, 15 bp, Homo sapiens
tgaataaagagcaca

SEQ ID NO: 161278 - DNA, 15 bp, Homo sapiens
ctgaataaagagcac

SEQ ID NO: 161279 - DNA, 15 bp, Homo sapiens
actgaataaagagca

SEQ ID NO: 161280 - DNA, 15 bp, Homo sapiens
aactgaataaagagc

SEQ ID NO: 161281 - DNA, 15 bp, Homo sapiens
aaactgaataaagag

SEQ ID NO: 161282 - DNA, 15 bp, Homo sapiens
taaactgaataaaga

SEQ ID NO: 161283 - DNA, 15 bp, Homo sapiens
ctaaactgaataaag

SEQ ID NO: 161284 - DNA, 15 bp, Homo sapiens
cctaaactgaataaa

SEQ ID NO: 161285 - DNA, 15 bp, Homo sapiens
gcctaaactgaataa

SEQ ID NO: 161286 - DNA, 15 bp, Homo sapiens
tgcctaaactgaata

SEQ ID NO: 161287 - DNA, 15 bp, Homo sapiens
gtgcctaaactgaat

SEQ ID NO: 161288 - DNA, 15 bp, Homo sapiens
ggtgcctaaactgaa

SEQ ID NO: 161289 - DNA, 15 bp, Homo sapiens
tggtgcctaaactga

SEQ ID NO: 161290 - DNA, 15 bp, Homo sapiens
ttggtgcctaaactg

SEQ ID NO: 161291 - DNA, 15 bp, Homo sapiens
tttggtgcctaaact

SEQ ID NO: 161292 - DNA, 15 bp, Homo sapiens
ctttggtgcctaaac

SEQ ID NO: 161293 - DNA, 15 bp, Homo sapiens
gctttggtgcctaaa

SEQ ID NO: 161294 - DNA, 15 bp, Homo sapiens
ggctttggtgcctaa

SEQ ID NO: 161295 - DNA, 15 bp, Homo sapiens
tggctttggtgccta

SEQ ID NO: 161296 - DNA, 15 bp, Homo sapiens
ttggctttggtgcct

SEQ ID NO: 161297 - DNA, 15 bp, Homo sapiens
attggctttggtgcc

SEQ ID NO: 161298 - DNA, 15 bp, Homo sapiens
cattggctttggtgc

SEQ ID NO: 161299 - DNA, 15 bp, Homo sapiens
acattggctttggtg

SEQ ID NO: 161300 - DNA, 15 bp, Homo sapiens
cacattggctttggt

SEQ ID NO: 161301 - DNA, 15 bp, Homo sapiens
tcacattggctttgg

SEQ ID NO: 161302 - DNA, 15 bp, Homo sapiens
ttcacattggctttg

SEQ ID NO: 161303 - DNA, 15 bp, Homo sapiens
gttcacattggcttt

SEQ ID NO: 161304 - DNA, 15 bp, Homo sapiens
agttcacattggctt

SEQ ID NO: 161305 - DNA, 15 bp, Homo sapiens
cagttcacattggct

SEQ ID NO: 161306 - DNA, 15 bp, Homo sapiens
acagttcacattggc

SEQ ID NO: 161307 - DNA, 15 bp, Homo sapiens
cacagttcacattgg

SEQ ID NO: 161308 - DNA, 15 bp, Homo sapiens
ccacagttcacattg

SEQ ID NO: 161309 - DNA, 15 bp, Homo sapiens
tccacagttcacatt

SEQ ID NO: 161310 - DNA, 15 bp, Homo sapiens
ctccacagttcacat

SEQ ID NO: 161311 - DNA, 15 bp, Homo sapiens
cctccacagttcaca

SEQ ID NO: 161312 - DNA, 15 bp, Homo sapiens
ccctccacagttcac

SEQ ID NO: 161313 - DNA, 15 bp, Homo sapiens
cccctccacagttca

SEQ ID NO: 161314 - DNA, 15 bp, Homo sapiens
ccccctccacagttc

SEQ ID NO: 161315 - DNA, 15 bp, Homo sapiens
gccccctccacagtt

SEQ ID NO: 161316 - DNA, 15 bp, Homo sapiens
tgccccctccacagt

SEQ ID NO: 161317 - DNA, 15 bp, Homo sapiens
ctgccccctccacag

SEQ ID NO: 161318 - DNA, 15 bp, Homo sapiens
cctgccccctccaca

SEQ ID NO: 161319 - DNA, 15 bp, Homo sapiens
ccctgccccctccac

SEQ ID NO: 161320 - DNA, 15 bp, Homo sapiens
cccctgccccctcca

SEQ ID NO: 161321 - DNA, 15 bp, Homo sapiens
ccccctgccccctcc

SEQ ID NO: 161322 - DNA, 15 bp, Homo sapiens
tccccctgccccctc

SEQ ID NO: 161323 - DNA, 15 bp, Homo sapiens
atccccctgccccct

SEQ ID NO: 161324 - DNA, 15 bp, Homo sapiens
catccccctgccccc

SEQ ID NO: 161325 - DNA, 15 bp, Homo sapiens
acatccccctgcccc

SEQ ID NO: 161326 - DNA, 15 bp, Homo sapiens
gacatccccctgccc

SEQ ID NO: 161327 - DNA, 15 bp, Homo sapiens
tgacatccccctgcc

SEQ ID NO: 161328 - DNA, 15 bp, Homo sapiens
gtgacatccccctgc

SEQ ID NO: 161329 - DNA, 15 bp, Homo sapiens
ggtgacatccccctg

SEQ ID NO: 161330 - DNA, 15 bp, Homo sapiens
tggtgacatccccct

SEQ ID NO: 161331 - DNA, 15 bp, Homo sapiens
ctggtgacatccccc

SEQ ID NO: 161332 - DNA, 15 bp, Homo sapiens
gctggtgacatcccc

SEQ ID NO: 161333 - DNA, 15 bp, Homo sapiens
tgctggtgacatccc

SEQ ID NO: 161334 - DNA, 15 bp, Homo sapiens
gtgctggtgacatcc

SEQ ID NO: 161335 - DNA, 15 bp, Homo sapiens
tgtgctggtgacatc

SEQ ID NO: 161336 - DNA, 15 bp, Homo sapiens
ttgtgctggtgacat

SEQ ID NO: 161337 - DNA, 15 bp, Homo sapiens
gttgtgctggtgaca

SEQ ID NO: 161338 - DNA, 15 bp, Homo sapiens
ggttgtgctggtgac

SEQ ID NO: 161339 - DNA, 15 bp, Homo sapiens
aggttgtgctggtga

SEQ ID NO: 161340 - DNA, 15 bp, Homo sapiens
caggttgtgctggtg

SEQ ID NO: 161341 - DNA, 15 bp, Homo sapiens
ccaggttgtgctggt

SEQ ID NO: 161342 - DNA, 15 bp, Homo sapiens
tccaggttgtgctgg

SEQ ID NO: 161343 - DNA, 15 bp, Homo sapiens
ttccaggttgtgctg

SEQ ID NO: 161344 - DNA, 15 bp, Homo sapiens
tttccaggttgtgct

SEQ ID NO: 161345 - DNA, 15 bp, Homo sapiens
gtttccaggttgtgc

SEQ ID NO: 161346 - DNA, 15 bp, Homo sapiens
ggtttccaggttgtg

SEQ ID NO: 161347 - DNA, 15 bp, Homo sapiens
tggtttccaggttgt

SEQ ID NO: 161348 - DNA, 15 bp, Homo sapiens
ctggtttccaggttg

SEQ ID NO: 161349 - DNA, 15 bp, Homo sapiens
tctggtttccaggtt

SEQ ID NO: 161350 - DNA, 15 bp, Homo sapiens
gtctggtttccaggt

SEQ ID NO: 161351 - DNA, 15 bp, Homo sapiens
agtctggtttccagg

SEQ ID NO: 161352 - DNA, 15 bp, Homo sapiens
cagtctggtttccag

SEQ ID NO: 161353 - DNA, 15 bp, Homo sapiens
acagtctggtttcca

SEQ ID NO: 161354 - DNA, 15 bp, Homo sapiens
gacagtctggtttcc

SEQ ID NO: 161355 - DNA, 15 bp, Homo sapiens
tgacagtctggtttc

SEQ ID NO: 161356 - DNA, 15 bp, Homo sapiens
ctgacagtctggttt

SEQ ID NO: 161357 - DNA, 15 bp, Homo sapiens
tctgacagtctggtt

SEQ ID NO: 161358 - DNA, 15 bp, Homo sapiens
ctctgacagtctggt

SEQ ID NO: 161359 - DNA, 15 bp, Homo sapiens
actctgacagtctgg

SEQ ID NO: 161360 - DNA, 15 bp, Homo sapiens
aactctgacagtctg

SEQ ID NO: 161361 - DNA, 15 bp, Homo sapiens
gaactctgacagtct

SEQ ID NO: 161362 - DNA, 15 bp, Homo sapiens
tgaactctgacagtc

SEQ ID NO: 161363 - DNA, 15 bp, Homo sapiens
ttgaactctgacagt

SEQ ID NO: 161364 - DNA, 15 bp, Homo sapiens
tttgaactctgacag

SEQ ID NO: 161365 - DNA, 15 bp, Homo sapiens
atttgaactctgaca

SEQ ID NO: 161366 - DNA, 15 bp, Homo sapiens
aatttgaactctgac

SEQ ID NO: 161367 - DNA, 15 bp, Homo sapiens
gaatttgaactctga

SEQ ID NO: 161368 - DNA, 15 bp, Homo sapiens
agaatttgaactctg

SEQ ID NO: 161369 - DNA, 15 bp, Homo sapiens
cagaatttgaactct

SEQ ID NO: 161370 - DNA, 15 bp, Homo sapiens
ccagaatttgaactc

SEQ ID NO: 161371 - DNA, 15 bp, Homo sapiens
gccagaatttgaact

SEQ ID NO: 161372 - DNA, 15 bp, Homo sapiens
agccagaatttgaac

SEQ ID NO: 161373 - DNA, 15 bp, Homo sapiens
aagccagaatttgaa

SEQ ID NO: 161374 - DNA, 15 bp, Homo sapiens
gaagccagaatttga

SEQ ID NO: 161375 - DNA, 15 bp, Homo sapiens
tgaagccagaatttg

SEQ ID NO: 161376 - DNA, 15 bp, Homo sapiens
gtgaagccagaattt

SEQ ID NO: 161377 - DNA, 15 bp, Homo sapiens
ggtgaagccagaatt

SEQ ID NO: 161378 - DNA, 15 bp, Homo sapiens
tggtgaagccagaat

SEQ ID NO: 161379 - DNA, 15 bp, Homo sapiens
gtggtgaagccagaa

SEQ ID NO: 161380 - DNA, 15 bp, Homo sapiens
ggtggtgaagccaga

SEQ ID NO: 161381 - DNA, 15 bp, Homo sapiens
tggtggtgaagccag

SEQ ID NO: 161382 - DNA, 15 bp, Homo sapiens
ttggtggtgaagcca

SEQ ID NO: 161383 - DNA, 15 bp, Homo sapiens
gttggtggtgaagcc

SEQ ID NO: 161384 - DNA, 15 bp, Homo sapiens
agttggtggtgaagc

SEQ ID NO: 161385 - DNA, 15 bp, Homo sapiens
tagttggtggtgaag

SEQ ID NO: 161386 - DNA, 15 bp, Homo sapiens
ctagttggtggtgaa

SEQ ID NO: 161387 - DNA, 15 bp, Homo sapiens
gctagttggtggtga

SEQ ID NO: 161388 - DNA, 15 bp, Homo sapiens
agctagttggtggtg

SEQ ID NO: 161389 - DNA, 15 bp, Homo sapiens
cagctagttggtggt

SEQ ID NO: 161390 - DNA, 15 bp, Homo sapiens
ccagctagttggtgg

SEQ ID NO: 161391 - DNA, 15 bp, Homo sapiens
cccagctagttggtg

SEQ ID NO: 161392 - DNA, 15 bp, Homo sapiens
tcccagctagttggt

SEQ ID NO: 161393 - DNA, 15 bp, Homo sapiens
ctcccagctagttgg

SEQ ID NO: 161394 - DNA, 15 bp, Homo sapiens
tctcccagctagttg

SEQ ID NO: 161395 - DNA, 15 bp, Homo sapiens
gtctcccagctagtt

SEQ ID NO: 161396 - DNA, 15 bp, Homo sapiens
ggtctcccagctagt

SEQ ID NO: 161397 - DNA, 15 bp, Homo sapiens
gggtctcccagctag

SEQ ID NO: 161398 - DNA, 15 bp, Homo sapiens
agggtctcccagcta

SEQ ID NO: 161399 - DNA, 15 bp, Homo sapiens
tagggtctcccagct

SEQ ID NO: 161400 - DNA, 15 bp, Homo sapiens
ctagggtctcccagc

SEQ ID NO: 161401 - DNA, 15 bp, Homo sapiens
actagggtctcccag

SEQ ID NO: 161402 - DNA, 15 bp, Homo sapiens
aactagggtctccca

SEQ ID NO: 161403 - DNA, 15 bp, Homo sapiens
taactagggtctccc

SEQ ID NO: 161404 - DNA, 15 bp, Homo sapiens
gtaactagggtctcc

SEQ ID NO: 161405 - DNA, 15 bp, Homo sapiens
ggtaactagggtctc

SEQ ID NO: 161406 - DNA, 15 bp, Homo sapiens
gggtaactagggtct

SEQ ID NO: 161407 - DNA, 15 bp, Homo sapiens
tgggtaactagggtc

SEQ ID NO: 161408 - DNA, 15 bp, Homo sapiens
ttgggtaactagggt

SEQ ID NO: 161409 - DNA, 15 bp, Homo sapiens
cttgggtaactaggg

SEQ ID NO: 161410 - DNA, 15 bp, Homo sapiens
gcttgggtaactagg

SEQ ID NO: 161411 - DNA, 15 bp, Homo sapiens
agcttgggtaactag

SEQ ID NO: 161412 - DNA, 15 bp, Homo sapiens
gagcttgggtaacta

SEQ ID NO: 161413 - DNA, 15 bp, Homo sapiens
agagcttgggtaact

SEQ ID NO: 161414 - DNA, 15 bp, Homo sapiens
aagagcttgggtaac

SEQ ID NO: 161415 - DNA, 15 bp, Homo sapiens
aaagagcttgggtaa

SEQ ID NO: 161416 - DNA, 15 bp, Homo sapiens
caaagagcttgggta

SEQ ID NO: 161417 - DNA, 15 bp, Homo sapiens
acaaagagcttgggt

SEQ ID NO: 161418 - DNA, 15 bp, Homo sapiens
gacaaagagcttggg

SEQ ID NO: 161419 - DNA, 15 bp, Homo sapiens
ggacaaagagcttgg

SEQ ID NO: 161420 - DNA, 15 bp, Homo sapiens
aggacaaagagcttg

SEQ ID NO: 161421 - DNA, 15 bp, Homo sapiens
aaggacaaagagctt

SEQ ID NO: 161422 - DNA, 15 bp, Homo sapiens
aaaggacaaagagct

SEQ ID NO: 161423 - DNA, 15 bp, Homo sapiens
taaaggacaaagagc

SEQ ID NO: 161424 - DNA, 15 bp, Homo sapiens
ctaaaggacaaagag

SEQ ID NO: 161425 - DNA, 15 bp, Homo sapiens
actaaaggacaaaga

SEQ ID NO: 161426 - DNA, 15 bp, Homo sapiens
aactaaaggacaaag

SEQ ID NO: 161427 - DNA, 15 bp, Homo sapiens
aaactaaaggacaaa

SEQ ID NO: 161428 - DNA, 15 bp, Homo sapiens
aaaactaaaggacaa

SEQ ID NO: 161429 - DNA, 15 bp, Homo sapiens
gaaaactaaaggaca

SEQ ID NO: 161430 - DNA, 15 bp, Homo sapiens
ggaaaactaaaggac

SEQ ID NO: 161431 - DNA, 15 bp, Homo sapiens
gggaaaactaaagga

SEQ ID NO: 161432 - DNA, 15 bp, Homo sapiens
tgggaaaactaaagg

SEQ ID NO: 161433 - DNA, 15 bp, Homo sapiens
atgggaaaactaaag

SEQ ID NO: 161434 - DNA, 15 bp, Homo sapiens
gatgggaaaactaaa

SEQ ID NO: 161435 - DNA, 15 bp, Homo sapiens
agatgggaaaactaa

SEQ ID NO: 161436 - DNA, 15 bp, Homo sapiens
cagatgggaaaacta

SEQ ID NO: 161437 - DNA, 15 bp, Homo sapiens
gcagatgggaaaact

SEQ ID NO: 161438 - DNA, 15 bp, Homo sapiens
tgcagatgggaaaac

SEQ ID NO: 161439 - DNA, 15 bp, Homo sapiens
gtgcagatgggaaaa

SEQ ID NO: 161440 - DNA, 15 bp, Homo sapiens
tgtgcagatgggaaa

SEQ ID NO: 161441 - DNA, 15 bp, Homo sapiens
ttgtgcagatgggaa

SEQ ID NO: 161442 - DNA, 15 bp, Homo sapiens
attgtgcagatggga

SEQ ID NO: 161443 - DNA, 15 bp, Homo sapiens
cattgtgcagatggg

SEQ ID NO: 161444 - DNA, 15 bp, Homo sapiens
ccattgtgcagatgg

SEQ ID NO: 161445 - DNA, 15 bp, Homo sapiens
tccattgtgcagatg

SEQ ID NO: 161446 - DNA, 15 bp, Homo sapiens
ttccattgtgcagat

SEQ ID NO: 161447 - DNA, 15 bp, Homo sapiens
tttccattgtgcaga

SEQ ID NO: 161448 - DNA, 15 bp, Homo sapiens
atttccattgtgcag

SEQ ID NO: 161449 - DNA, 15 bp, Homo sapiens
gatttccattgtgca

SEQ ID NO: 161450 - DNA, 15 bp, Homo sapiens
agatttccattgtgc

SEQ ID NO: 161451 - DNA, 15 bp, Homo sapiens
tagatttccattgtg

SEQ ID NO: 161452 - DNA, 15 bp, Homo sapiens
ctagatttccattgt

SEQ ID NO: 161453 - DNA, 15 bp, Homo sapiens
tctagatttccattg

SEQ ID NO: 161454 - DNA, 15 bp, Homo sapiens
atctagatttccatt

SEQ ID NO: 161455 - DNA, 15 bp, Homo sapiens
tatctagatttccat

SEQ ID NO: 161456 - DNA, 15 bp, Homo sapiens
atatctagatttcca

SEQ ID NO: 161457 - DNA, 15 bp, Homo sapiens
aatatctagatttcc

SEQ ID NO: 161458 - DNA, 15 bp, Homo sapiens
aaatatctagatttc

SEQ ID NO: 161459 - DNA, 15 bp, Homo sapiens
taaatatctagattt

SEQ ID NO: 161460 - DNA, 15 bp, Homo sapiens
gtaaatatctagatt

SEQ ID NO: 161461 - DNA, 15 bp, Homo sapiens
tgtaaatatctagat

SEQ ID NO: 161462 - DNA, 15 bp, Homo sapiens
ttgtaaatatctaga

SEQ ID NO: 161463 - DNA, 15 bp, Homo sapiens
tttgtaaatatctag

SEQ ID NO: 161464 - DNA, 15 bp, Homo sapiens
ctttgtaaatatcta

SEQ ID NO: 161465 - DNA, 15 bp, Homo sapiens
tctttgtaaatatct

SEQ ID NO: 161466 - DNA, 15 bp, Homo sapiens
ttctttgtaaatatc

SEQ ID NO: 161467 - DNA, 15 bp, Homo sapiens
cttctttgtaaatat

SEQ ID NO: 161468 - DNA, 15 bp, Homo sapiens
ccttctttgtaaata

SEQ ID NO: 161469 - DNA, 15 bp, Homo sapiens
gccttctttgtaaat

SEQ ID NO: 161470 - DNA, 15 bp, Homo sapiens
agccttctttgtaaa

SEQ ID NO: 161471 - DNA, 15 bp, Homo sapiens
cagccttctttgtaa

SEQ ID NO: 161472 - DNA, 15 bp, Homo sapiens
acagccttctttgta

SEQ ID NO: 161473 - DNA, 15 bp, Homo sapiens
aacagccttctttgt

SEQ ID NO: 161474 - DNA, 15 bp, Homo sapiens
caacagccttctttg

SEQ ID NO: 161475 - DNA, 15 bp, Homo sapiens
acaacagccttcttt

SEQ ID NO: 161476 - DNA, 15 bp, Homo sapiens
cacaacagccttctt

SEQ ID NO: 161477 - DNA, 15 bp, Homo sapiens
tcacaacagccttct

SEQ ID NO: 161478 - DNA, 15 bp, Homo sapiens
ctcacaacagccttc

SEQ ID NO: 161479 - DNA, 15 bp, Homo sapiens
cctcacaacagcctt

SEQ ID NO: 161480 - DNA, 15 bp, Homo sapiens
tcctcacaacagcct

SEQ ID NO: 161481 - DNA, 15 bp, Homo sapiens
atcctcacaacagcc

SEQ ID NO: 161482 - DNA, 15 bp, Homo sapiens
catcctcacaacagc

SEQ ID NO: 161483 - DNA, 15 bp, Homo sapiens
ccatcctcacaacag

SEQ ID NO: 161484 - DNA, 15 bp, Homo sapiens
tccatcctcacaaca

SEQ ID NO: 161485 - DNA, 15 bp, Homo sapiens
ttccatcctcacaac

SEQ ID NO: 161486 - DNA, 15 bp, Homo sapiens
attccatcctcacaa

SEQ ID NO: 161487 - DNA, 15 bp, Homo sapiens
cattccatcctcaca

SEQ ID NO: 161488 - DNA, 15 bp, Homo sapiens
tcattccatcctcac

SEQ ID NO: 161489 - DNA, 15 bp, Homo sapiens
ctcattccatcctca

SEQ ID NO: 161490 - DNA, 15 bp, Homo sapiens
actcattccatcctc

SEQ ID NO: 161491 - DNA, 15 bp, Homo sapiens
cactcattccatcct

SEQ ID NO: 161492 - DNA, 15 bp, Homo sapiens
acactcattccatcc

SEQ ID NO: 161493 - DNA, 15 bp, Homo sapiens
tacactcattccatc

SEQ ID NO: 161494 - DNA, 15 bp, Homo sapiens
atacactcattccat

SEQ ID NO: 161495 - DNA, 15 bp, Homo sapiens
catacactcattcca

SEQ ID NO: 161496 - DNA, 15 bp, Homo sapiens
acatacactcattcc

SEQ ID NO: 161497 - DNA, 15 bp, Homo sapiens
aacatacactcattc

SEQ ID NO: 161498 - DNA, 15 bp, Homo sapiens
aaacatacactcatt

SEQ ID NO: 161499 - DNA, 15 bp, Homo sapiens
aaaacatacactcat

SEQ ID NO: 161500 - DNA, 15 bp, Homo sapiens
aaaaacatacactca

SEQ ID NO: 161501 - DNA, 15 bp, Homo sapiens
taaaaacatacactc

SEQ ID NO: 161502 - DNA, 15 bp, Homo sapiens
ataaaaacatacact

SEQ ID NO: 161503 - DNA, 15 bp, Homo sapiens
gataaaaacatacac

SEQ ID NO: 161504 - DNA, 15 bp, Homo sapiens
agataaaaacataca

SEQ ID NO: 161505 - DNA, 15 bp, Homo sapiens
tagataaaaacatac

SEQ ID NO: 161506 - DNA, 15 bp, Homo sapiens
atagataaaaacata

SEQ ID NO: 161507 - DNA, 15 bp, Homo sapiens
tatagataaaaacat

SEQ ID NO: 161508 - DNA, 15 bp, Homo sapiens
gtatagataaaaaca

SEQ ID NO: 161509 - DNA, 15 bp, Homo sapiens
tgtatagataaaaac

SEQ ID NO: 161510 - DNA, 15 bp, Homo sapiens
atgtatagataaaaa

SEQ ID NO: 161511 - DNA, 15 bp, Homo sapiens
tatgtatagataaaa

SEQ ID NO: 161512 - DNA, 15 bp, Homo sapiens
ttatgtatagataaa

SEQ ID NO: 161513 - DNA, 15 bp, Homo sapiens
cttatgtatagataa

SEQ ID NO: 161514 - DNA, 15 bp, Homo sapiens
acttatgtatagata

SEQ ID NO: 161515 - DNA, 15 bp, Homo sapiens
aacttatgtatagat

SEQ ID NO: 161516 - DNA, 15 bp, Homo sapiens
taacttatgtataga

SEQ ID NO: 161517 - DNA, 15 bp, Homo sapiens
gtaacttatgtatag

SEQ ID NO: 161518 - DNA, 15 bp, Homo sapiens
cgtaacttatgtata

SEQ ID NO: 161519 - DNA, 15 bp, Homo sapiens
acgtaacttatgtat

SEQ ID NO: 161520 - DNA, 15 bp, Homo sapiens
tacgtaacttatgta

SEQ ID NO: 161521 - DNA, 15 bp, Homo sapiens
atacgtaacttatgt

SEQ ID NO: 161522 - DNA, 15 bp, Homo sapiens
catacgtaacttatg

SEQ ID NO: 161523 - DNA, 15 bp, Homo sapiens
acatacgtaacttat

SEQ ID NO: 161524 - DNA, 15 bp, Homo sapiens
cacatacgtaactta

SEQ ID NO: 161525 - DNA, 15 bp, Homo sapiens
acacatacgtaactt

SEQ ID NO: 161526 - DNA, 15 bp, Homo sapiens
cacacatacgtaact

SEQ ID NO: 161527 - DNA, 15 bp, Homo sapiens
acacacatacgtaac

SEQ ID NO: 161528 - DNA, 15 bp, Homo sapiens
tacacacatacgtaa

SEQ ID NO: 161529 - DNA, 15 bp, Homo sapiens
atacacacatacgta

SEQ ID NO: 161530 - DNA, 15 bp, Homo sapiens
tatacacacatacgt

SEQ ID NO: 161531 - DNA, 15 bp, Homo sapiens
atatacacacatacg

SEQ ID NO: 161532 - DNA, 15 bp, Homo sapiens
tatatacacacatac

SEQ ID NO: 161533 - DNA, 15 bp, Homo sapiens
atatatacacacata

SEQ ID NO: 161534 - DNA, 15 bp, Homo sapiens
catatatacacacat

SEQ ID NO: 161535 - DNA, 15 bp, Homo sapiens
acatatatacacaca

SEQ ID NO: 161536 - DNA, 15 bp, Homo sapiens
cacatatatacacac

SEQ ID NO: 161537 - DNA, 15 bp, Homo sapiens
acacatatatacaca

SEQ ID NO: 161538 - DNA, 15 bp, Homo sapiens
tacacatatatacac

SEQ ID NO: 161539 - DNA, 15 bp, Homo sapiens
atacacatatataca

SEQ ID NO: 161540 - DNA, 15 bp, Homo sapiens
tatacacatatatac

SEQ ID NO: 161541 - DNA, 15 bp, Homo sapiens
gtatacacatatata

SEQ ID NO: 161542 - DNA, 15 bp, Homo sapiens
tgtatacacatatat

SEQ ID NO: 161543 - DNA, 15 bp, Homo sapiens
gtgtatacacatata

SEQ ID NO: 161544 - DNA, 15 bp, Homo sapiens
tgtgtatacacatat

SEQ ID NO: 161545 - DNA, 15 bp, Homo sapiens
atgtgtatacacata

SEQ ID NO: 161546 - DNA, 15 bp, Homo sapiens
catgtgtatacacat

SEQ ID NO: 161547 - DNA, 15 bp, Homo sapiens
acatgtgtatacaca

SEQ ID NO: 161548 - DNA, 15 bp, Homo sapiens
tacatgtgtatacac

SEQ ID NO: 161549 - DNA, 15 bp, Homo sapiens
ctacatgtgtataca

SEQ ID NO: 161550 - DNA, 15 bp, Homo sapiens
actacatgtgtatac

SEQ ID NO: 161551 - DNA, 15 bp, Homo sapiens
aactacatgtgtata

SEQ ID NO: 161552 - DNA, 15 bp, Homo sapiens
aaactacatgtgtat

SEQ ID NO: 161553 - DNA, 15 bp, Homo sapiens
taaactacatgtgta

SEQ ID NO: 161554 - DNA, 15 bp, Homo sapiens
ctaaactacatgtgt

SEQ ID NO: 161555 - DNA, 15 bp, Homo sapiens
tctaaactacatgtg

SEQ ID NO: 161556 - DNA, 15 bp, Homo sapiens
ctctaaactacatgt

SEQ ID NO: 161557 - DNA, 15 bp, Homo sapiens
actctaaactacatg

SEQ ID NO: 161558 - DNA, 15 bp, Homo sapiens
aactctaaactacat

SEQ ID NO: 161559 - DNA, 15 bp, Homo sapiens
caactctaaactaca

SEQ ID NO: 161560 - DNA, 15 bp, Homo sapiens
gcaactctaaactac

SEQ ID NO: 161561 - DNA, 15 bp, Homo sapiens
ggcaactctaaacta

SEQ ID NO: 161562 - DNA, 15 bp, Homo sapiens
aggcaactctaaact

SEQ ID NO: 161563 - DNA, 15 bp, Homo sapiens
caggcaactctaaac

SEQ ID NO: 161564 - DNA, 15 bp, Homo sapiens
ccaggcaactctaaa

SEQ ID NO: 161565 - DNA, 15 bp, Homo sapiens
accaggcaactctaa

SEQ ID NO: 161566 - DNA, 15 bp, Homo sapiens
caccaggcaactcta

SEQ ID NO: 161567 - DNA, 15 bp, Homo sapiens
acaccaggcaactct

SEQ ID NO: 161568 - DNA, 15 bp, Homo sapiens
tacaccaggcaactc

SEQ ID NO: 161569 - DNA, 15 bp, Homo sapiens
atacaccaggcaact

SEQ ID NO: 161570 - DNA, 15 bp, Homo sapiens
aatacaccaggcaac

SEQ ID NO: 161571 - DNA, 15 bp, Homo sapiens
taatacaccaggcaa

SEQ ID NO: 161572 - DNA, 15 bp, Homo sapiens
ttaatacaccaggca

SEQ ID NO: 161573 - DNA, 15 bp, Homo sapiens
cttaatacaccaggc

SEQ ID NO: 161574 - DNA, 15 bp, Homo sapiens
acttaatacaccagg

SEQ ID NO: 161575 - DNA, 15 bp, Homo sapiens
cacttaatacaccag

SEQ ID NO: 161576 - DNA, 15 bp, Homo sapiens
gcacttaatacacca

SEQ ID NO: 161577 - DNA, 15 bp, Homo sapiens
tgcacttaatacacc

SEQ ID NO: 161578 - DNA, 15 bp, Homo sapiens
ttgcacttaatacac

SEQ ID NO: 161579 - DNA, 15 bp, Homo sapiens
attgcacttaataca

SEQ ID NO: 161580 - DNA, 15 bp, Homo sapiens
aattgcacttaatac

SEQ ID NO: 161581 - DNA, 15 bp, Homo sapiens
taattgcacttaata

SEQ ID NO: 161582 - DNA, 15 bp, Homo sapiens
ataattgcacttaat

SEQ ID NO: 161583 - DNA, 15 bp, Homo sapiens
tataattgcacttaa

SEQ ID NO: 161584 - DNA, 15 bp, Homo sapiens
atataattgcactta

SEQ ID NO: 161585 - DNA, 15 bp, Homo sapiens
aatataattgcactt

SEQ ID NO: 161586 - DNA, 15 bp, Homo sapiens
caatataattgcact

SEQ ID NO: 161587 - DNA, 15 bp, Homo sapiens
gcaatataattgcac

SEQ ID NO: 161588 - DNA, 15 bp, Homo sapiens
agcaatataattgca

SEQ ID NO: 161589 - DNA, 15 bp, Homo sapiens
aagcaatataattgc

SEQ ID NO: 161590 - DNA, 15 bp, Homo sapiens
caagcaatataattg

SEQ ID NO: 161591 - DNA, 15 bp, Homo sapiens
tcaagcaatataatt

SEQ ID NO: 161592 - DNA, 15 bp, Homo sapiens
atcaagcaatataat

SEQ ID NO: 161593 - DNA, 15 bp, Homo sapiens
catcaagcaatataa

SEQ ID NO: 161594 - DNA, 15 bp, Homo sapiens
acatcaagcaatata

SEQ ID NO: 161595 - DNA, 15 bp, Homo sapiens
aacatcaagcaatat

SEQ ID NO: 161596 - DNA, 15 bp, Homo sapiens
taacatcaagcaata

SEQ ID NO: 161597 - DNA, 15 bp, Homo sapiens
ataacatcaagcaat

SEQ ID NO: 161598 - DNA, 15 bp, Homo sapiens
aataacatcaagcaa

SEQ ID NO: 161599 - DNA, 15 bp, Homo sapiens
aaataacatcaagca

SEQ ID NO: 161600 - DNA, 15 bp, Homo sapiens
taaataacatcaagc

SEQ ID NO: 161601 - DNA, 15 bp, Homo sapiens
ataaataacatcaag

SEQ ID NO: 161602 - DNA, 15 bp, Homo sapiens
aataaataacatcaa

SEQ ID NO: 161603 - DNA, 15 bp, Homo sapiens
taataaataacatca

SEQ ID NO: 161604 - DNA, 15 bp, Homo sapiens
gtaataaataacatc

SEQ ID NO: 161605 - DNA, 15 bp, Homo sapiens
ggtaataaataacat

SEQ ID NO: 161606 - DNA, 15 bp, Homo sapiens
tggtaataaataaca

SEQ ID NO: 161607 - DNA, 15 bp, Homo sapiens
atggtaataaataac

SEQ ID NO: 161608 - DNA, 15 bp, Homo sapiens
tatggtaataaataa

SEQ ID NO: 161609 - DNA, 15 bp, Homo sapiens
atatggtaataaata

SEQ ID NO: 161610 - DNA, 15 bp, Homo sapiens
catatggtaataaat

SEQ ID NO: 161611 - DNA, 15 bp, Homo sapiens
tcatatggtaataaa

SEQ ID NO: 161612 - DNA, 15 bp, Homo sapiens
ttcatatggtaataa

SEQ ID NO: 161613 - DNA, 15 bp, Homo sapiens
tttcatatggtaata

SEQ ID NO: 161614 - DNA, 15 bp, Homo sapiens
atttcatatggtaat

SEQ ID NO: 161615 - DNA, 15 bp, Homo sapiens
catttcatatggtaa

SEQ ID NO: 161616 - DNA, 15 bp, Homo sapiens
ccatttcatatggta

SEQ ID NO: 161617 - DNA, 15 bp, Homo sapiens
gccatttcatatggt

SEQ ID NO: 161618 - DNA, 15 bp, Homo sapiens
ggccatttcatatgg

SEQ ID NO: 161619 - DNA, 15 bp, Homo sapiens
aggccatttcatatg

SEQ ID NO: 161620 - DNA, 15 bp, Homo sapiens
caggccatttcatat

SEQ ID NO: 161621 - DNA, 15 bp, Homo sapiens
tcaggccatttcata

SEQ ID NO: 161622 - DNA, 15 bp, Homo sapiens
ctcaggccatttcat

SEQ ID NO: 161623 - DNA, 15 bp, Homo sapiens
cctcaggccatttca

SEQ ID NO: 161624 - DNA, 15 bp, Homo sapiens
tcctcaggccatttc

SEQ ID NO: 161625 - DNA, 15 bp, Homo sapiens
gtcctcaggccattt

SEQ ID NO: 161626 - DNA, 15 bp, Homo sapiens
cgtcctcaggccatt

SEQ ID NO: 161627 - DNA, 15 bp, Homo sapiens
ccgtcctcaggccat

SEQ ID NO: 161628 - DNA, 15 bp, Homo sapiens
cccgtcctcaggcca

SEQ ID NO: 161629 - DNA, 15 bp, Homo sapiens
tcccgtcctcaggcc

SEQ ID NO: 161630 - DNA, 15 bp, Homo sapiens
gtcccgtcctcaggc

SEQ ID NO: 161631 - DNA, 15 bp, Homo sapiens
ggtcccgtcctcagg

SEQ ID NO: 161632 - DNA, 15 bp, Homo sapiens
tggtcccgtcctcag

SEQ ID NO: 161633 - DNA, 15 bp, Homo sapiens
atggtcccgtcctca

SEQ ID NO: 161634 - DNA, 15 bp, Homo sapiens
gatggtcccgtcctc

SEQ ID NO: 161635 - DNA, 15 bp, Homo sapiens
agatggtcccgtcct

SEQ ID NO: 161636 - DNA, 15 bp, Homo sapiens
aagatggtcccgtcc

SEQ ID NO: 161637 - DNA, 15 bp, Homo sapiens
caagatggtcccgtc

SEQ ID NO: 161638 - DNA, 15 bp, Homo sapiens
gcaagatggtcccgt

SEQ ID NO: 161639 - DNA, 15 bp, Homo sapiens
tgcaagatggtcccg

SEQ ID NO: 161640 - DNA, 15 bp, Homo sapiens
atgcaagatggtccc

SEQ ID NO: 161641 - DNA, 15 bp, Homo sapiens
tatgcaagatggtcc

SEQ ID NO: 161642 - DNA, 15 bp, Homo sapiens
ctatgcaagatggtc

SEQ ID NO: 161643 - DNA, 15 bp, Homo sapiens
tctatgcaagatggt

SEQ ID NO: 161644 - DNA, 15 bp, Homo sapiens
ttctatgcaagatgg

SEQ ID NO: 161645 - DNA, 15 bp, Homo sapiens
tttctatgcaagatg

SEQ ID NO: 161646 - DNA, 15 bp, Homo sapiens
gtttctatgcaagat

SEQ ID NO: 161647 - DNA, 15 bp, Homo sapiens
ggtttctatgcaaga

SEQ ID NO: 161648 - DNA, 15 bp, Homo sapiens
aggtttctatgcaag

SEQ ID NO: 161649 - DNA, 15 bp, Homo sapiens
caggtttctatgcaa

SEQ ID NO: 161650 - DNA, 15 bp, Homo sapiens
ccaggtttctatgca

SEQ ID NO: 161651 - DNA, 15 bp, Homo sapiens
tccaggtttctatgc

SEQ ID NO: 161652 - DNA, 15 bp, Homo sapiens
atccaggtttctatg

SEQ ID NO: 161653 - DNA, 15 bp, Homo sapiens
gatccaggtttctat

SEQ ID NO: 161654 - DNA, 15 bp, Homo sapiens
agatccaggtttcta

SEQ ID NO: 161655 - DNA, 15 bp, Homo sapiens
aagatccaggtttct

SEQ ID NO: 161656 - DNA, 15 bp, Homo sapiens
caagatccaggtttc

SEQ ID NO: 161657 - DNA, 15 bp, Homo sapiens
ccaagatccaggttt

SEQ ID NO: 161658 - DNA, 15 bp, Homo sapiens
tccaagatccaggtt

SEQ ID NO: 161659 - DNA, 15 bp, Homo sapiens
ttccaagatccaggt

SEQ ID NO: 161660 - DNA, 15 bp, Homo sapiens
cttccaagatccagg

SEQ ID NO: 161661 - DNA, 15 bp, Homo sapiens
ccttccaagatccag

SEQ ID NO: 161662 - DNA, 15 bp, Homo sapiens
tccttccaagatcca

SEQ ID NO: 161663 - DNA, 15 bp, Homo sapiens
ctccttccaagatcc

SEQ ID NO: 161664 - DNA, 15 bp, Homo sapiens
cctccttccaagatc

SEQ ID NO: 161665 - DNA, 15 bp, Homo sapiens
gcctccttccaagat

SEQ ID NO: 161666 - DNA, 15 bp, Homo sapiens
agcctccttccaaga

SEQ ID NO: 161667 - DNA, 15 bp, Homo sapiens
cagcctccttccaag

SEQ ID NO: 161668 - DNA, 15 bp, Homo sapiens
tcagcctccttccaa

SEQ ID NO: 161669 - DNA, 15 bp, Homo sapiens
ctcagcctccttcca

SEQ ID NO: 161670 - DNA, 15 bp, Homo sapiens
actcagcctccttcc

SEQ ID NO: 161671 - DNA, 15 bp, Homo sapiens
gactcagcctccttc

SEQ ID NO: 161672 - DNA, 15 bp, Homo sapiens
agactcagcctcctt

SEQ ID NO: 161673 - DNA, 15 bp, Homo sapiens
gagactcagcctcct

SEQ ID NO: 161674 - DNA, 15 bp, Homo sapiens
cgagactcagcctcc

SEQ ID NO: 161675 - DNA, 15 bp, Homo sapiens
ccgagactcagcctc

SEQ ID NO: 161676 - DNA, 15 bp, Homo sapiens
accgagactcagcct

SEQ ID NO: 161677 - DNA, 15 bp, Homo sapiens
gaccgagactcagcc

SEQ ID NO: 161678 - DNA, 15 bp, Homo sapiens
agaccgagactcagc

SEQ ID NO: 161679 - DNA, 15 bp, Homo sapiens
gagaccgagactcag

SEQ ID NO: 161680 - DNA, 15 bp, Homo sapiens
agagaccgagactca

SEQ ID NO: 161681 - DNA, 15 bp, Homo sapiens
gagagaccgagactc

SEQ ID NO: 161682 - DNA, 15 bp, Homo sapiens
ggagagaccgagact

SEQ ID NO: 161683 - DNA, 15 bp, Homo sapiens
gggagagaccgagac

SEQ ID NO: 161684 - DNA, 15 bp, Homo sapiens
cgggagagaccgaga

SEQ ID NO: 161685 - DNA, 15 bp, Homo sapiens
ccgggagagaccgag

SEQ ID NO: 161686 - DNA, 15 bp, Homo sapiens
accgggagagaccga

SEQ ID NO: 161687 - DNA, 15 bp, Homo sapiens
gaccgggagagaccg

SEQ ID NO: 161688 - DNA, 15 bp, Homo sapiens
ggaccgggagagacc

SEQ ID NO: 161689 - DNA, 15 bp, Homo sapiens
aggaccgggagagac

SEQ ID NO: 161690 - DNA, 15 bp, Homo sapiens
aaggaccgggagaga

SEQ ID NO: 161691 - DNA, 15 bp, Homo sapiens
caaggaccgggagag

SEQ ID NO: 161692 - DNA, 15 bp, Homo sapiens
tcaaggaccgggaga

SEQ ID NO: 161693 - DNA, 15 bp, Homo sapiens
atcaaggaccgggag

SEQ ID NO: 161694 - DNA, 15 bp, Homo sapiens
catcaaggaccggga

SEQ ID NO: 161695 - DNA, 15 bp, Homo sapiens
tcatcaaggaccggg

SEQ ID NO: 161696 - DNA, 15 bp, Homo sapiens
ctcatcaaggaccgg

SEQ ID NO: 161697 - DNA, 15 bp, Homo sapiens
cctcatcaaggaccg

SEQ ID NO: 161698 - DNA, 15 bp, Homo sapiens
gcctcatcaaggacc

SEQ ID NO: 161699 - DNA, 15 bp, Homo sapiens
tgcctcatcaaggac

SEQ ID NO: 161700 - DNA, 15 bp, Homo sapiens
ttgcctcatcaagga

SEQ ID NO: 161701 - DNA, 15 bp, Homo sapiens
cttgcctcatcaagg

SEQ ID NO: 161702 - DNA, 15 bp, Homo sapiens
acttgcctcatcaag

SEQ ID NO: 161703 - DNA, 15 bp, Homo sapiens
aacttgcctcatcaa

SEQ ID NO: 161704 - DNA, 15 bp, Homo sapiens
taacttgcctcatca

SEQ ID NO: 161705 - DNA, 15 bp, Homo sapiens
ttaacttgcctcatc

SEQ ID NO: 161706 - DNA, 15 bp, Homo sapiens
cttaacttgcctcat

SEQ ID NO: 161707 - DNA, 15 bp, Homo sapiens
acttaacttgcctca

SEQ ID NO: 161708 - DNA, 15 bp, Homo sapiens
cacttaacttgcctc

SEQ ID NO: 161709 - DNA, 15 bp, Homo sapiens
gcacttaacttgcct

SEQ ID NO: 161710 - DNA, 15 bp, Homo sapiens
ggcacttaacttgcc

SEQ ID NO: 161711 - DNA, 15 bp, Homo sapiens
aggcacttaacttgc

SEQ ID NO: 161712 - DNA, 15 bp, Homo sapiens
gaggcacttaacttg

SEQ ID NO: 161713 - DNA, 15 bp, Homo sapiens
tgaggcacttaactt

SEQ ID NO: 161714 - DNA, 15 bp, Homo sapiens
atgaggcacttaact

SEQ ID NO: 161715 - DNA, 15 bp, Homo sapiens
gatgaggcacttaac

SEQ ID NO: 161716 - DNA, 15 bp, Homo sapiens
agatgaggcacttaa

SEQ ID NO: 161717 - DNA, 15 bp, Homo sapiens
aagatgaggcactta

SEQ ID NO: 161718 - DNA, 15 bp, Homo sapiens
aaagatgaggcactt

SEQ ID NO: 161719 - DNA, 15 bp, Homo sapiens
taaagatgaggcact

SEQ ID NO: 161720 - DNA, 15 bp, Homo sapiens
ctaaagatgaggcac

SEQ ID NO: 161721 - DNA, 15 bp, Homo sapiens
cctaaagatgaggca

SEQ ID NO: 161722 - DNA, 15 bp, Homo sapiens
gcctaaagatgaggc

SEQ ID NO: 161723 - DNA, 15 bp, Homo sapiens
tgcctaaagatgagg

SEQ ID NO: 161724 - DNA, 15 bp, Homo sapiens
ctgcctaaagatgag

SEQ ID NO: 161725 - DNA, 15 bp, Homo sapiens
actgcctaaagatga

SEQ ID NO: 161726 - DNA, 15 bp, Homo sapiens
aactgcctaaagatg

SEQ ID NO: 161727 - DNA, 15 bp, Homo sapiens
taactgcctaaagat

SEQ ID NO: 161728 - DNA, 15 bp, Homo sapiens
ttaactgcctaaaga

SEQ ID NO: 161729 - DNA, 15 bp, Homo sapiens
cttaactgcctaaag

SEQ ID NO: 161730 - DNA, 15 bp, Homo sapiens
ccttaactgcctaaa

SEQ ID NO: 161731 - DNA, 15 bp, Homo sapiens
gccttaactgcctaa

SEQ ID NO: 161732 - DNA, 15 bp, Homo sapiens
tgccttaactgccta

SEQ ID NO: 161733 - DNA, 15 bp, Homo sapiens
ttgccttaactgcct

SEQ ID NO: 161734 - DNA, 15 bp, Homo sapiens
cttgccttaactgcc

SEQ ID NO: 161735 - DNA, 15 bp, Homo sapiens
acttgccttaactgc

SEQ ID NO: 161736 - DNA, 15 bp, Homo sapiens
aacttgccttaactg

SEQ ID NO: 161737 - DNA, 15 bp, Homo sapiens
taacttgccttaact

SEQ ID NO: 161738 - DNA, 15 bp, Homo sapiens
ttaacttgccttaac

SEQ ID NO: 161739 - DNA, 15 bp, Homo sapiens
gttaacttgccttaa

SEQ ID NO: 161740 - DNA, 15 bp, Homo sapiens
agttaacttgcctta

SEQ ID NO: 161741 - DNA, 15 bp, Homo sapiens
cagttaacttgcctt

SEQ ID NO: 161742 - DNA, 15 bp, Homo sapiens
gcagttaacttgcct

SEQ ID NO: 161743 - DNA, 15 bp, Homo sapiens
agcagttaacttgcc

SEQ ID NO: 161744 - DNA, 15 bp, Homo sapiens
aagcagttaacttgc

SEQ ID NO: 161745 - DNA, 15 bp, Homo sapiens
gaagcagttaacttg

SEQ ID NO: 161746 - DNA, 15 bp, Homo sapiens
tgaagcagttaactt

SEQ ID NO: 161747 - DNA, 15 bp, Homo sapiens
ttgaagcagttaact

SEQ ID NO: 161748 - DNA, 15 bp, Homo sapiens
gttgaagcagttaac

SEQ ID NO: 161749 - DNA, 15 bp, Homo sapiens
agttgaagcagttaa

SEQ ID NO: 161750 - DNA, 15 bp, Homo sapiens
tagttgaagcagtta

SEQ ID NO: 161751 - DNA, 15 bp, Homo sapiens
gtagttgaagcagtt

SEQ ID NO: 161752 - DNA, 15 bp, Homo sapiens
tgtagttgaagcagt

SEQ ID NO: 161753 - DNA, 15 bp, Homo sapiens
atgtagttgaagcag

SEQ ID NO: 161754 - DNA, 15 bp, Homo sapiens
catgtagttgaagca

SEQ ID NO: 161755 - DNA, 15 bp, Homo sapiens
ccatgtagttgaagc

SEQ ID NO: 161756 - DNA, 15 bp, Homo sapiens
gccatgtagttgaag

SEQ ID NO: 161757 - DNA, 15 bp, Homo sapiens
tgccatgtagttgaa

SEQ ID NO: 161758 - DNA, 15 bp, Homo sapiens
ctgccatgtagttga

SEQ ID NO: 161759 - DNA, 15 bp, Homo sapiens
actgccatgtagttg

SEQ ID NO: 161760 - DNA, 15 bp, Homo sapiens
aactgccatgtagtt

SEQ ID NO: 161761 - DNA, 15 bp, Homo sapiens
taactgccatgtagt

SEQ ID NO: 161762 - DNA, 15 bp, Homo sapiens
ttaactgccatgtag

SEQ ID NO: 161763 - DNA, 15 bp, Homo sapiens
cttaactgccatgta

SEQ ID NO: 161764 - DNA, 15 bp, Homo sapiens
tcttaactgccatgt

SEQ ID NO: 161765 - DNA, 15 bp, Homo sapiens
ctcttaactgccatg

SEQ ID NO: 161766 - DNA, 15 bp, Homo sapiens
tctcttaactgccat

SEQ ID NO: 161767 - DNA, 15 bp, Homo sapiens
ctctcttaactgcca

SEQ ID NO: 161768 - DNA, 15 bp, Homo sapiens
actctcttaactgcc

SEQ ID NO: 161769 - DNA, 15 bp, Homo sapiens
cactctcttaactgc

SEQ ID NO: 161770 - DNA, 15 bp, Homo sapiens
acactctcttaactg

SEQ ID NO: 161771 - DNA, 15 bp, Homo sapiens
cacactctcttaact

SEQ ID NO: 161772 - DNA, 15 bp, Homo sapiens
tcacactctcttaac

SEQ ID NO: 161773 - DNA, 15 bp, Homo sapiens
ctcacactctcttaa

SEQ ID NO: 161774 - DNA, 15 bp, Homo sapiens
gctcacactctctta

SEQ ID NO: 161775 - DNA, 15 bp, Homo sapiens
ggctcacactctctt

SEQ ID NO: 161776 - DNA, 15 bp, Homo sapiens
cggctcacactctct

SEQ ID NO: 161777 - DNA, 15 bp, Homo sapiens
ccggctcacactctc

SEQ ID NO: 161778 - DNA, 15 bp, Homo sapiens
cccggctcacactct

SEQ ID NO: 161779 - DNA, 15 bp, Homo sapiens
gcccggctcacactc

SEQ ID NO: 161780 - DNA, 15 bp, Homo sapiens
cgcccggctcacact

SEQ ID NO: 161781 - DNA, 15 bp, Homo sapiens
acgcccggctcacac

SEQ ID NO: 161782 - DNA, 15 bp, Homo sapiens
cacgcccggctcaca

SEQ ID NO: 161783 - DNA, 15 bp, Homo sapiens
ccacgcccggctcac

SEQ ID NO: 161784 - DNA, 15 bp, Homo sapiens
accacgcccggctca

SEQ ID NO: 161785 - DNA, 15 bp, Homo sapiens
caccacgcccggctc

SEQ ID NO: 161786 - DNA, 15 bp, Homo sapiens
ccaccacgcccggct

SEQ ID NO: 161787 - DNA, 15 bp, Homo sapiens
gccaccacgcccggc

SEQ ID NO: 161788 - DNA, 15 bp, Homo sapiens
agccaccacgcccgg

SEQ ID NO: 161789 - DNA, 15 bp, Homo sapiens
gagccaccacgcccg

SEQ ID NO: 161790 - DNA, 15 bp, Homo sapiens
tgagccaccacgccc

SEQ ID NO: 161791 - DNA, 15 bp, Homo sapiens
gtgagccaccacgcc

SEQ ID NO: 161792 - DNA, 15 bp, Homo sapiens
cgtgagccaccacgc

SEQ ID NO: 161793 - DNA, 15 bp, Homo sapiens
gcgtgagccaccacg

SEQ ID NO: 161794 - DNA, 15 bp, Homo sapiens
gcaggcgtgagccac

SEQ ID NO: 161795 - DNA, 15 bp, Homo sapiens
tgcaggcgtgagcca

SEQ ID NO: 161796 - DNA, 15 bp, Homo sapiens
ttgcaggcgtgagcc

SEQ ID NO: 161797 - DNA, 15 bp, Homo sapiens
attgcaggcgtgagc

SEQ ID NO: 161798 - DNA, 15 bp, Homo sapiens
gattgcaggcgtgag

SEQ ID NO: 161799 - DNA, 15 bp, Homo sapiens
ggattgcaggcgtga

SEQ ID NO: 161800 - DNA, 15 bp, Homo sapiens
gggattgcaggcgtg

SEQ ID NO: 161801 - DNA, 15 bp, Homo sapiens
tgggattgcaggcgt

SEQ ID NO: 161802 - DNA, 15 bp, Homo sapiens
ctgggattgcaggcg

SEQ ID NO: 161803 - DNA, 15 bp, Homo sapiens
gctgggattgcaggc

SEQ ID NO: 161804 - DNA, 15 bp, Homo sapiens
tgctgggattgcagg

SEQ ID NO: 161805 - DNA, 15 bp, Homo sapiens
gtgctgggattgcag

SEQ ID NO: 161806 - DNA, 15 bp, Homo sapiens
agtgctgggattgca

SEQ ID NO: 161807 - DNA, 15 bp, Homo sapiens
aagtgctgggattgc

SEQ ID NO: 161808 - DNA, 15 bp, Homo sapiens
aaagtgctgggattg

SEQ ID NO: 161809 - DNA, 15 bp, Homo sapiens
cggcctcccaaagtg

SEQ ID NO: 161810 - DNA, 15 bp, Homo sapiens
tcggcctcccaaagt

SEQ ID NO: 161811 - DNA, 15 bp, Homo sapiens
ctcggcctcccaaag

SEQ ID NO: 161812 - DNA, 15 bp, Homo sapiens
cctcggcctcccaaa

SEQ ID NO: 161813 - DNA, 15 bp, Homo sapiens
gcctcggcctcccaa

SEQ ID NO: 161814 - DNA, 15 bp, Homo sapiens
cgcctcggcctccca

SEQ ID NO: 161815 - DNA, 15 bp, Homo sapiens
tcgcctcggcctccc

SEQ ID NO: 161816 - DNA, 15 bp, Homo sapiens
ctcgcctcggcctcc

SEQ ID NO: 161817 - DNA, 15 bp, Homo sapiens
actcgcctcggcctc

SEQ ID NO: 161818 - DNA, 15 bp, Homo sapiens
cactcgcctcggcct

SEQ ID NO: 161819 - DNA, 15 bp, Homo sapiens
ccactcgcctcggcc

SEQ ID NO: 161820 - DNA, 15 bp, Homo sapiens
tccactcgcctcggc

SEQ ID NO: 161821 - DNA, 15 bp, Homo sapiens
atccactcgcctcgg

SEQ ID NO: 161822 - DNA, 15 bp, Homo sapiens
gatccactcgcctcg

SEQ ID NO: 161823 - DNA, 15 bp, Homo sapiens
tgatccactcgcctc

SEQ ID NO: 161824 - DNA, 15 bp, Homo sapiens
gtgatccactcgcct

SEQ ID NO: 161825 - DNA, 15 bp, Homo sapiens
tgtgatccactcgcc

SEQ ID NO: 161826 - DNA, 15 bp, Homo sapiens
ttgtgatccactcgc

SEQ ID NO: 161827 - DNA, 15 bp, Homo sapiens
cttgtgatccactcg

SEQ ID NO: 161828 - DNA, 15 bp, Homo sapiens
ccttgtgatccactc

SEQ ID NO: 161829 - DNA, 15 bp, Homo sapiens
accttgtgatccact

SEQ ID NO: 161830 - DNA, 15 bp, Homo sapiens
gaccttgtgatccac

SEQ ID NO: 161831 - DNA, 15 bp, Homo sapiens
tgaccttgtgatcca

SEQ ID NO: 161832 - DNA, 15 bp, Homo sapiens
ctgaccttgtgatcc

SEQ ID NO: 161833 - DNA, 15 bp, Homo sapiens
cctgaccttgtgatc

SEQ ID NO: 161834 - DNA, 15 bp, Homo sapiens
tcctgaccttgtgat

SEQ ID NO: 161835 - DNA, 15 bp, Homo sapiens
ctcctgaccttgtga

SEQ ID NO: 161836 - DNA, 15 bp, Homo sapiens
actcctgaccttgtg

SEQ ID NO: 161837 - DNA, 15 bp, Homo sapiens
aactcctgaccttgt

SEQ ID NO: 161838 - DNA, 15 bp, Homo sapiens
gaactcctgaccttg

SEQ ID NO: 161839 - DNA, 15 bp, Homo sapiens
tgaactcctgacctt

SEQ ID NO: 161840 - DNA, 15 bp, Homo sapiens
ttgaactcctgacct

SEQ ID NO: 161841 - DNA, 15 bp, Homo sapiens
cttgaactcctgacc

SEQ ID NO: 161842 - DNA, 15 bp, Homo sapiens
tcttgaactcctgac

SEQ ID NO: 161843 - DNA, 15 bp, Homo sapiens
gtcttgaactcctga

SEQ ID NO: 161844 - DNA, 15 bp, Homo sapiens
ggtcttgaactcctg

SEQ ID NO: 161845 - DNA, 15 bp, Homo sapiens
tggtcttgaactcct

SEQ ID NO: 161846 - DNA, 15 bp, Homo sapiens
ctggtcttgaactcc

SEQ ID NO: 161847 - DNA, 15 bp, Homo sapiens
gctggtcttgaactc

SEQ ID NO: 161848 - DNA, 15 bp, Homo sapiens
ggctggtcttgaact

SEQ ID NO: 161849 - DNA, 15 bp, Homo sapiens
aggctggtcttgaac

SEQ ID NO: 161850 - DNA, 15 bp, Homo sapiens
cttggccaggctggt

SEQ ID NO: 161851 - DNA, 15 bp, Homo sapiens
tcttggccaggctgg

SEQ ID NO: 161852 - DNA, 15 bp, Homo sapiens
atcttggccaggctg

SEQ ID NO: 161853 - DNA, 15 bp, Homo sapiens
catcttggccaggct

SEQ ID NO: 161854 - DNA, 15 bp, Homo sapiens
ccatcttggccaggc

SEQ ID NO: 161855 - DNA, 15 bp, Homo sapiens
accatcttggccagg

SEQ ID NO: 161856 - DNA, 15 bp, Homo sapiens
caccatcttggccag

SEQ ID NO: 161857 - DNA, 15 bp, Homo sapiens
tcaccatcttggcca

SEQ ID NO: 161858 - DNA, 15 bp, Homo sapiens
ttcaccatcttggcc

SEQ ID NO: 161859 - DNA, 15 bp, Homo sapiens
tttcaccatcttggc

SEQ ID NO: 161860 - DNA, 15 bp, Homo sapiens
gtttcaccatcttgg

SEQ ID NO: 161861 - DNA, 15 bp, Homo sapiens
ggtttcaccatcttg

SEQ ID NO: 161862 - DNA, 15 bp, Homo sapiens
gggtttcaccatctt

SEQ ID NO: 161863 - DNA, 15 bp, Homo sapiens
ggggtttcaccatct

SEQ ID NO: 161864 - DNA, 15 bp, Homo sapiens
gggggtttcaccatc

SEQ ID NO: 161865 - DNA, 15 bp, Homo sapiens
cgggggtttcaccat

SEQ ID NO: 161866 - DNA, 15 bp, Homo sapiens
acgggggtttcacca

SEQ ID NO: 161867 - DNA, 15 bp, Homo sapiens
gacgggggtttcacc

SEQ ID NO: 161868 - DNA, 15 bp, Homo sapiens
agacgggggtttcac

SEQ ID NO: 161869 - DNA, 15 bp, Homo sapiens
gagacgggggtttca

SEQ ID NO: 161870 - DNA, 15 bp, Homo sapiens
agagacgggggtttc

SEQ ID NO: 161871 - DNA, 15 bp, Homo sapiens
tagagacgggggttt

SEQ ID NO: 161872 - DNA, 15 bp, Homo sapiens
gtagagacgggggtt

SEQ ID NO: 161873 - DNA, 15 bp, Homo sapiens
agtagagacgggggt

SEQ ID NO: 161874 - DNA, 15 bp, Homo sapiens
tagtagagacggggg

SEQ ID NO: 161875 - DNA, 15 bp, Homo sapiens
ttagtagagacgggg

SEQ ID NO: 161876 - DNA, 15 bp, Homo sapiens
tttagtagagacggg

SEQ ID NO: 161877 - DNA, 15 bp, Homo sapiens
ttttagtagagacgg

SEQ ID NO: 161878 - DNA, 15 bp, Homo sapiens
tttttagtagagacg

SEQ ID NO: 161879 - DNA, 15 bp, Homo sapiens
tttttttgtattttt

SEQ ID NO: 161880 - DNA, 15 bp, Homo sapiens
atttttttgtatttt

SEQ ID NO: 161881 - DNA, 15 bp, Homo sapiens
aatttttttgtattt

SEQ ID NO: 161882 - DNA, 15 bp, Homo sapiens
taatttttttgtatt

SEQ ID NO: 161883 - DNA, 15 bp, Homo sapiens
ctaatttttttgtat

SEQ ID NO: 161884 - DNA, 15 bp, Homo sapiens
gctaatttttttgta

SEQ ID NO: 161885 - DNA, 15 bp, Homo sapiens
ggctaatttttttgt

SEQ ID NO: 161886 - DNA, 15 bp, Homo sapiens
cggctaatttttttg

SEQ ID NO: 161887 - DNA, 15 bp, Homo sapiens
ccggctaattttttt

SEQ ID NO: 161888 - DNA, 15 bp, Homo sapiens
cccggctaatttttt

SEQ ID NO: 161889 - DNA, 15 bp, Homo sapiens
ccatgcccggctaat

SEQ ID NO: 161890 - DNA, 15 bp, Homo sapiens
accatgcccggctaa

SEQ ID NO: 161891 - DNA, 15 bp, Homo sapiens
caccatgcccggcta

SEQ ID NO: 161892 - DNA, 15 bp, Homo sapiens
ccaccatgcccggct

SEQ ID NO: 161893 - DNA, 15 bp, Homo sapiens
accaccatgcccggc

SEQ ID NO: 161894 - DNA, 15 bp, Homo sapiens
caccaccatgcccgg

SEQ ID NO: 161895 - DNA, 15 bp, Homo sapiens
ccaccaccatgcccg

SEQ ID NO: 161896 - DNA, 15 bp, Homo sapiens
cccaccaccatgccc

SEQ ID NO: 161897 - DNA, 15 bp, Homo sapiens
gcccaccaccatgcc

SEQ ID NO: 161898 - DNA, 15 bp, Homo sapiens
cgcccaccaccatgc

SEQ ID NO: 161899 - DNA, 15 bp, Homo sapiens
gcgcccaccaccatg

SEQ ID NO: 161900 - DNA, 15 bp, Homo sapiens
ggcgcccaccaccat

SEQ ID NO: 161901 - DNA, 15 bp, Homo sapiens
aggcgcccaccacca

SEQ ID NO: 161902 - DNA, 15 bp, Homo sapiens
caggcgcccaccacc

SEQ ID NO: 161903 - DNA, 15 bp, Homo sapiens
acaggcgcccaccac

SEQ ID NO: 161904 - DNA, 15 bp, Homo sapiens
tacaggcgcccacca

SEQ ID NO: 161905 - DNA, 15 bp, Homo sapiens
ttacaggcgcccacc

SEQ ID NO: 161906 - DNA, 15 bp, Homo sapiens
attacaggcgcccac

SEQ ID NO: 161907 - DNA, 15 bp, Homo sapiens
gattacaggcgccca

SEQ ID NO: 161908 - DNA, 15 bp, Homo sapiens
ggattacaggcgccc

SEQ ID NO: 161909 - DNA, 15 bp, Homo sapiens
gggattacaggcgcc

SEQ ID NO: 161910 - DNA, 15 bp, Homo sapiens
tgggattacaggcgc

SEQ ID NO: 161911 - DNA, 15 bp, Homo sapiens
ggctgggattacagg

SEQ ID NO: 161912 - DNA, 15 bp, Homo sapiens
tggctgggattacag

SEQ ID NO: 161913 - DNA, 15 bp, Homo sapiens
gtggctgggattaca

SEQ ID NO: 161914 - DNA, 15 bp, Homo sapiens
agtggctgggattac

SEQ ID NO: 161915 - DNA, 15 bp, Homo sapiens
gagtggctgggatta

SEQ ID NO: 161916 - DNA, 15 bp, Homo sapiens
cgagtggctgggatt

SEQ ID NO: 161917 - DNA, 15 bp, Homo sapiens
ccgagtggctgggat

SEQ ID NO: 161918 - DNA, 15 bp, Homo sapiens
cccgagtggctggga

SEQ ID NO: 161919 - DNA, 15 bp, Homo sapiens
tcccgagtggctggg

SEQ ID NO: 161920 - DNA, 15 bp, Homo sapiens
ctcccgagtggctgg

SEQ ID NO: 161921 - DNA, 15 bp, Homo sapiens
cctcccgagtggctg

SEQ ID NO: 161922 - DNA, 15 bp, Homo sapiens
gcctcccgagtggct

SEQ ID NO: 161923 - DNA, 15 bp, Homo sapiens
agcctcccgagtggc

SEQ ID NO: 161924 - DNA, 15 bp, Homo sapiens
cagcctcccgagtgg

SEQ ID NO: 161925 - DNA, 15 bp, Homo sapiens
tcagcctcccgagtg

SEQ ID NO: 161926 - DNA, 15 bp, Homo sapiens
ctcagcctcccgagt

SEQ ID NO: 161927 - DNA, 15 bp, Homo sapiens
cctcagcctcccgag

SEQ ID NO: 161928 - DNA, 15 bp, Homo sapiens
gcctcagcctcccga

SEQ ID NO: 161929 - DNA, 15 bp, Homo sapiens
tgcctcagcctcccg

SEQ ID NO: 161930 - DNA, 15 bp, Homo sapiens
tctgcctcagcctcc

SEQ ID NO: 161931 - DNA, 15 bp, Homo sapiens
ctctgcctcagcctc

SEQ ID NO: 161932 - DNA, 15 bp, Homo sapiens
tctctgcctcagcct

SEQ ID NO: 161933 - DNA, 15 bp, Homo sapiens
ttctctgcctcagcc

SEQ ID NO: 161934 - DNA, 15 bp, Homo sapiens
attctctgcctcagc

SEQ ID NO: 161935 - DNA, 15 bp, Homo sapiens
aattctctgcctcag

SEQ ID NO: 161936 - DNA, 15 bp, Homo sapiens
caattctctgcctca

SEQ ID NO: 161937 - DNA, 15 bp, Homo sapiens
gcaattctctgcctc

SEQ ID NO: 161938 - DNA, 15 bp, Homo sapiens
agcaattctctgcct

SEQ ID NO: 161939 - DNA, 15 bp, Homo sapiens
aagcaattctctgcc

SEQ ID NO: 161940 - DNA, 15 bp, Homo sapiens
caagcaattctctgc

SEQ ID NO: 161941 - DNA, 15 bp, Homo sapiens
tcaagcaattctctg

SEQ ID NO: 161942 - DNA, 15 bp, Homo sapiens
ttcaagcaattctct

SEQ ID NO: 161943 - DNA, 15 bp, Homo sapiens
gggttcaagcaattc

SEQ ID NO: 161944 - DNA, 15 bp, Homo sapiens
cgggttcaagcaatt

SEQ ID NO: 161945 - DNA, 15 bp, Homo sapiens
ccgggttcaagcaat

SEQ ID NO: 161946 - DNA, 15 bp, Homo sapiens
cccgggttcaagcaa

SEQ ID NO: 161947 - DNA, 15 bp, Homo sapiens
tcccgggttcaagca

SEQ ID NO: 161948 - DNA, 15 bp, Homo sapiens
ctcccgggttcaagc

SEQ ID NO: 161949 - DNA, 15 bp, Homo sapiens
cctcccgggttcaag

SEQ ID NO: 161950 - DNA, 15 bp, Homo sapiens
gcctcccgggttcaa

SEQ ID NO: 161951 - DNA, 15 bp, Homo sapiens
caacctctgcctccc

SEQ ID NO: 161952 - DNA, 15 bp, Homo sapiens
gcaacctctgcctcc

SEQ ID NO: 161953 - DNA, 15 bp, Homo sapiens
tgcaacctctgcctc

SEQ ID NO: 161954 - DNA, 15 bp, Homo sapiens
ctgcaacctctgcct

SEQ ID NO: 161955 - DNA, 15 bp, Homo sapiens
actgcaacctctgcc

SEQ ID NO: 161956 - DNA, 15 bp, Homo sapiens
cactgcaacctctgc

SEQ ID NO: 161957 - DNA, 15 bp, Homo sapiens
tcactgcaacctctg

SEQ ID NO: 161958 - DNA, 15 bp, Homo sapiens
ctcactgcaacctct

SEQ ID NO: 161959 - DNA, 15 bp, Homo sapiens
gctcactgcaacctc

SEQ ID NO: 161960 - DNA, 15 bp, Homo sapiens
ggctcactgcaacct

SEQ ID NO: 161961 - DNA, 15 bp, Homo sapiens
cctcggctcactgca

SEQ ID NO: 161962 - DNA, 15 bp, Homo sapiens
tcctcggctcactgc

SEQ ID NO: 161963 - DNA, 15 bp, Homo sapiens
ttcctcggctcactg

SEQ ID NO: 161964 - DNA, 15 bp, Homo sapiens
tttcctcggctcact

SEQ ID NO: 161965 - DNA, 15 bp, Homo sapiens
ctttcctcggctcac

SEQ ID NO: 161966 - DNA, 15 bp, Homo sapiens
tctttcctcggctca

SEQ ID NO: 161967 - DNA, 15 bp, Homo sapiens
ttctttcctcggctc

SEQ ID NO: 161968 - DNA, 15 bp, Homo sapiens
tttctttcctcggct

SEQ ID NO: 161969 - DNA, 15 bp, Homo sapiens
ttttctttcctcggc

SEQ ID NO: 161970 - DNA, 15 bp, Homo sapiens
tttttctttcctcgg

SEQ ID NO: 161971 - DNA, 15 bp, Homo sapiens
ttttttctttcctcg

SEQ ID NO: 161972 - DNA, 15 bp, Homo sapiens
tttttttctttcctc

SEQ ID NO: 161973 - DNA, 15 bp, Homo sapiens
ttttttttctttcct

SEQ ID NO: 161974 - DNA, 15 bp, Homo sapiens
tttttttttctttcc

SEQ ID NO: 161975 - DNA, 15 bp, Homo sapiens
ctttttttttctttc

SEQ ID NO: 161976 - DNA, 15 bp, Homo sapiens
tctttttttttcttt

SEQ ID NO: 161977 - DNA, 15 bp, Homo sapiens
ctctttttttttctt

SEQ ID NO: 161978 - DNA, 15 bp, Homo sapiens
tctctttttttttct

SEQ ID NO: 161979 - DNA, 15 bp, Homo sapiens
ctctctttttttttc

SEQ ID NO: 161980 - DNA, 15 bp, Homo sapiens
actctcttttttttt

SEQ ID NO: 161981 - DNA, 15 bp, Homo sapiens
cactctctttttttt

SEQ ID NO: 161982 - DNA, 15 bp, Homo sapiens
acactctcttttttt

SEQ ID NO: 161983 - DNA, 15 bp, Homo sapiens
cacactctctttttt

SEQ ID NO: 161984 - DNA, 15 bp, Homo sapiens
acacactctcttttt

SEQ ID NO: 161985 - DNA, 15 bp, Homo sapiens
tacacactctctttt

SEQ ID NO: 161986 - DNA, 15 bp, Homo sapiens
ctacacactctcttt

SEQ ID NO: 161987 - DNA, 15 bp, Homo sapiens
cctacacactctctt

SEQ ID NO: 161988 - DNA, 15 bp, Homo sapiens
gcctacacactctct

SEQ ID NO: 161989 - DNA, 15 bp, Homo sapiens
agcctacacactctc

SEQ ID NO: 161990 - DNA, 15 bp, Homo sapiens
gagcctacacactct

SEQ ID NO: 161991 - DNA, 15 bp, Homo sapiens
cgagcctacacactc

SEQ ID NO: 161992 - DNA, 15 bp, Homo sapiens
acgagcctacacact

SEQ ID NO: 161993 - DNA, 15 bp, Homo sapiens
gacgagcctacacac

SEQ ID NO: 161994 - DNA, 15 bp, Homo sapiens
tgacgagcctacaca

SEQ ID NO: 161995 - DNA, 15 bp, Homo sapiens
ttgacgagcctacac

SEQ ID NO: 161996 - DNA, 15 bp, Homo sapiens
gttgacgagcctaca

SEQ ID NO: 161997 - DNA, 15 bp, Homo sapiens
tgttgacgagcctac

SEQ ID NO: 161998 - DNA, 15 bp, Homo sapiens
atgttgacgagccta

SEQ ID NO: 161999 - DNA, 15 bp, Homo sapiens
catgttgacgagcct

SEQ ID NO: 162000 - DNA, 15 bp, Homo sapiens
ccatgttgacgagcc

SEQ ID NO: 162001 - DNA, 15 bp, Homo sapiens
cccatgttgacgagc

SEQ ID NO: 162002 - DNA, 15 bp, Homo sapiens
ccccatgttgacgag

SEQ ID NO: 162003 - DNA, 15 bp, Homo sapiens
accccatgttgacga

SEQ ID NO: 162004 - DNA, 15 bp, Homo sapiens
gaccccatgttgacg

SEQ ID NO: 162005 - DNA, 15 bp, Homo sapiens
tgaccccatgttgac

SEQ ID NO: 162006 - DNA, 15 bp, Homo sapiens
ctgaccccatgttga

SEQ ID NO: 162007 - DNA, 15 bp, Homo sapiens
actgaccccatgttg

SEQ ID NO: 162008 - DNA, 15 bp, Homo sapiens
aactgaccccatgtt

SEQ ID NO: 162009 - DNA, 15 bp, Homo sapiens
taactgaccccatgt

SEQ ID NO: 162010 - DNA, 15 bp, Homo sapiens
gtaactgaccccatg

SEQ ID NO: 162011 - DNA, 15 bp, Homo sapiens
agtaactgaccccat

SEQ ID NO: 162012 - DNA, 15 bp, Homo sapiens
cagtaactgacccca

SEQ ID NO: 162013 - DNA, 15 bp, Homo sapiens
gcagtaactgacccc

SEQ ID NO: 162014 - DNA, 15 bp, Homo sapiens
agcagtaactgaccc

SEQ ID NO: 162015 - DNA, 15 bp, Homo sapiens
cagcagtaactgacc

SEQ ID NO: 162016 - DNA, 15 bp, Homo sapiens
acagcagtaactgac

SEQ ID NO: 162017 - DNA, 15 bp, Homo sapiens
aacagcagtaactga

SEQ ID NO: 162018 - DNA, 15 bp, Homo sapiens
taacagcagtaactg

SEQ ID NO: 162019 - DNA, 15 bp, Homo sapiens
gtaacagcagtaact

SEQ ID NO: 162020 - DNA, 15 bp, Homo sapiens
ggtaacagcagtaac

SEQ ID NO: 162021 - DNA, 15 bp, Homo sapiens
aggtaacagcagtaa

SEQ ID NO: 162022 - DNA, 15 bp, Homo sapiens
gaggtaacagcagta

SEQ ID NO: 162023 - DNA, 15 bp, Homo sapiens
ggaggtaacagcagt

SEQ ID NO: 162024 - DNA, 15 bp, Homo sapiens
aggaggtaacagcag

SEQ ID NO: 162025 - DNA, 15 bp, Homo sapiens
caggaggtaacagca

SEQ ID NO: 162026 - DNA, 15 bp, Homo sapiens
acaggaggtaacagc

SEQ ID NO: 162027 - DNA, 15 bp, Homo sapiens
aacaggaggtaacag

SEQ ID NO: 162028 - DNA, 15 bp, Homo sapiens
aaacaggaggtaaca

SEQ ID NO: 162029 - DNA, 15 bp, Homo sapiens
caaacaggaggtaac

SEQ ID NO: 162030 - DNA, 15 bp, Homo sapiens
ccaaacaggaggtaa

SEQ ID NO: 162031 - DNA, 15 bp, Homo sapiens
gccaaacaggaggta

SEQ ID NO: 162032 - DNA, 15 bp, Homo sapiens
tgccaaacaggaggt

SEQ ID NO: 162033 - DNA, 15 bp, Homo sapiens
atgccaaacaggagg

SEQ ID NO: 162034 - DNA, 15 bp, Homo sapiens
catgccaaacaggag

SEQ ID NO: 162035 - DNA, 15 bp, Homo sapiens
gcatgccaaacagga

SEQ ID NO: 162036 - DNA, 15 bp, Homo sapiens
agcatgccaaacagg

SEQ ID NO: 162037 - DNA, 15 bp, Homo sapiens
tagcatgccaaacag

SEQ ID NO: 162038 - DNA, 15 bp, Homo sapiens
gtagcatgccaaaca

SEQ ID NO: 162039 - DNA, 15 bp, Homo sapiens
agtagcatgccaaac

SEQ ID NO: 162040 - DNA, 15 bp, Homo sapiens
aagtagcatgccaaa

SEQ ID NO: 162041 - DNA, 15 bp, Homo sapiens
gaagtagcatgccaa

SEQ ID NO: 162042 - DNA, 15 bp, Homo sapiens
tgaagtagcatgcca

SEQ ID NO: 162043 - DNA, 15 bp, Homo sapiens
gtgaagtagcatgcc

SEQ ID NO: 162044 - DNA, 15 bp, Homo sapiens
tgtgaagtagcatgc

SEQ ID NO: 162045 - DNA, 15 bp, Homo sapiens
atgtgaagtagcatg

SEQ ID NO: 162046 - DNA, 15 bp, Homo sapiens
gatgtgaagtagcat

SEQ ID NO: 162047 - DNA, 15 bp, Homo sapiens
agatgtgaagtagca

SEQ ID NO: 162048 - DNA, 15 bp, Homo sapiens
cagatgtgaagtagc

SEQ ID NO: 162049 - DNA, 15 bp, Homo sapiens
acagatgtgaagtag

SEQ ID NO: 162050 - DNA, 15 bp, Homo sapiens
tacagatgtgaagta

SEQ ID NO: 162051 - DNA, 15 bp, Homo sapiens
ttacagatgtgaagt

SEQ ID NO: 162052 - DNA, 15 bp, Homo sapiens
attacagatgtgaag

SEQ ID NO: 162053 - DNA, 15 bp, Homo sapiens
aattacagatgtgaa

SEQ ID NO: 162054 - DNA, 15 bp, Homo sapiens
gaattacagatgtga

SEQ ID NO: 162055 - DNA, 15 bp, Homo sapiens
agaattacagatgtg

SEQ ID NO: 162056 - DNA, 15 bp, Homo sapiens
gagaattacagatgt

SEQ ID NO: 162057 - DNA, 15 bp, Homo sapiens
ggagaattacagatg

SEQ ID NO: 162058 - DNA, 15 bp, Homo sapiens
tggagaattacagat

SEQ ID NO: 162059 - DNA, 15 bp, Homo sapiens
atggagaattacaga

SEQ ID NO: 162060 - DNA, 15 bp, Homo sapiens
aatggagaattacag

SEQ ID NO: 162061 - DNA, 15 bp, Homo sapiens
gaatggagaattaca

SEQ ID NO: 162062 - DNA, 15 bp, Homo sapiens
agaatggagaattac

SEQ ID NO: 162063 - DNA, 15 bp, Homo sapiens
aagaatggagaatta

SEQ ID NO: 162064 - DNA, 15 bp, Homo sapiens
gaagaatggagaatt

SEQ ID NO: 162065 - DNA, 15 bp, Homo sapiens
agaagaatggagaat

SEQ ID NO: 162066 - DNA, 15 bp, Homo sapiens
gagaagaatggagaa

SEQ ID NO: 162067 - DNA, 15 bp, Homo sapiens
ggagaagaatggaga

SEQ ID NO: 162068 - DNA, 15 bp, Homo sapiens
tggagaagaatggag

SEQ ID NO: 162069 - DNA, 15 bp, Homo sapiens
atggagaagaatgga

SEQ ID NO: 162070 - DNA, 15 bp, Homo sapiens
aatggagaagaatgg

SEQ ID NO: 162071 - DNA, 15 bp, Homo sapiens
gaatggagaagaatg

SEQ ID NO: 162072 - DNA, 15 bp, Homo sapiens
agaatggagaagaat

SEQ ID NO: 162073 - DNA, 15 bp, Homo sapiens
aagaatggagaagaa

SEQ ID NO: 162074 - DNA, 15 bp, Homo sapiens
aaagaatggagaaga

SEQ ID NO: 162075 - DNA, 15 bp, Homo sapiens
gaaagaatggagaag

SEQ ID NO: 162076 - DNA, 15 bp, Homo sapiens
ggaaagaatggagaa

SEQ ID NO: 162077 - DNA, 15 bp, Homo sapiens
aggaaagaatggaga

SEQ ID NO: 162078 - DNA, 15 bp, Homo sapiens
caggaaagaatggag

SEQ ID NO: 162079 - DNA, 15 bp, Homo sapiens
acaggaaagaatgga

SEQ ID NO: 162080 - DNA, 15 bp, Homo sapiens
aacaggaaagaatgg

SEQ ID NO: 162081 - DNA, 15 bp, Homo sapiens
taacaggaaagaatg

SEQ ID NO: 162082 - DNA, 15 bp, Homo sapiens
ttaacaggaaagaat

SEQ ID NO: 162083 - DNA, 15 bp, Homo sapiens
tttaacaggaaagaa

SEQ ID NO: 162084 - DNA, 15 bp, Homo sapiens
gtttaacaggaaaga

SEQ ID NO: 162085 - DNA, 15 bp, Homo sapiens
agtttaacaggaaag

SEQ ID NO: 162086 - DNA, 15 bp, Homo sapiens
cagtttaacaggaaa

SEQ ID NO: 162087 - DNA, 15 bp, Homo sapiens
acagtttaacaggaa

SEQ ID NO: 162088 - DNA, 15 bp, Homo sapiens
cacagtttaacagga

SEQ ID NO: 162089 - DNA, 15 bp, Homo sapiens
ccacagtttaacagg

SEQ ID NO: 162090 - DNA, 15 bp, Homo sapiens
accacagtttaacag

SEQ ID NO: 162091 - DNA, 15 bp, Homo sapiens
caccacagtttaaca

SEQ ID NO: 162092 - DNA, 15 bp, Homo sapiens
gcaccacagtttaac

SEQ ID NO: 162093 - DNA, 15 bp, Homo sapiens
ggcaccacagtttaa

SEQ ID NO: 162094 - DNA, 15 bp, Homo sapiens
tggcaccacagttta

SEQ ID NO: 162095 - DNA, 15 bp, Homo sapiens
atggcaccacagttt

SEQ ID NO: 162096 - DNA, 15 bp, Homo sapiens
tatggcaccacagtt

SEQ ID NO: 162097 - DNA, 15 bp, Homo sapiens
ctatggcaccacagt

SEQ ID NO: 162098 - DNA, 15 bp, Homo sapiens
gctatggcaccacag

SEQ ID NO: 162099 - DNA, 15 bp, Homo sapiens
tgctatggcaccaca

SEQ ID NO: 162100 - DNA, 15 bp, Homo sapiens
ttgctatggcaccac

SEQ ID NO: 162101 - DNA, 15 bp, Homo sapiens
attgctatggcacca

SEQ ID NO: 162102 - DNA, 15 bp, Homo sapiens
cattgctatggcacc

SEQ ID NO: 162103 - DNA, 15 bp, Homo sapiens
tcattgctatggcac

SEQ ID NO: 162104 - DNA, 15 bp, Homo sapiens
ctcattgctatggca

SEQ ID NO: 162105 - DNA, 15 bp, Homo sapiens
gctcattgctatggc

SEQ ID NO: 162106 - DNA, 15 bp, Homo sapiens
tgctcattgctatgg

SEQ ID NO: 162107 - DNA, 15 bp, Homo sapiens
atgctcattgctatg

SEQ ID NO: 162108 - DNA, 15 bp, Homo sapiens
aatgctcattgctat

SEQ ID NO: 162109 - DNA, 15 bp, Homo sapiens
aaatgctcattgcta

SEQ ID NO: 162110 - DNA, 15 bp, Homo sapiens
gaaatgctcattgct

SEQ ID NO: 162111 - DNA, 15 bp, Homo sapiens
tgaaatgctcattgc

SEQ ID NO: 162112 - DNA, 15 bp, Homo sapiens
atgaaatgctcattg

SEQ ID NO: 162113 - DNA, 15 bp, Homo sapiens
catgaaatgctcatt

SEQ ID NO: 162114 - DNA, 15 bp, Homo sapiens
ccatgaaatgctcat

SEQ ID NO: 162115 - DNA, 15 bp, Homo sapiens
cccatgaaatgctca

SEQ ID NO: 162116 - DNA, 15 bp, Homo sapiens
tcccatgaaatgctc

SEQ ID NO: 162117 - DNA, 15 bp, Homo sapiens
atcccatgaaatgct

SEQ ID NO: 162118 - DNA, 15 bp, Homo sapiens
aatcccatgaaatgc

SEQ ID NO: 162119 - DNA, 15 bp, Homo sapiens
aaatcccatgaaatg

SEQ ID NO: 162120 - DNA, 15 bp, Homo sapiens
gaaatcccatgaaat

SEQ ID NO: 162121 - DNA, 15 bp, Homo sapiens
tgaaatcccatgaaa

SEQ ID NO: 162122 - DNA, 15 bp, Homo sapiens
ctgaaatcccatgaa

SEQ ID NO: 162123 - DNA, 15 bp, Homo sapiens
actgaaatcccatga

SEQ ID NO: 162124 - DNA, 15 bp, Homo sapiens
cactgaaatcccatg

SEQ ID NO: 162125 - DNA, 15 bp, Homo sapiens
tcactgaaatcccat

SEQ ID NO: 162126 - DNA, 15 bp, Homo sapiens
ctcactgaaatccca

SEQ ID NO: 162127 - DNA, 15 bp, Homo sapiens
tctcactgaaatccc

SEQ ID NO: 162128 - DNA, 15 bp, Homo sapiens
ttctcactgaaatcc

SEQ ID NO: 162129 - DNA, 15 bp, Homo sapiens
attctcactgaaatc

SEQ ID NO: 162130 - DNA, 15 bp, Homo sapiens
aattctcactgaaat

SEQ ID NO: 162131 - DNA, 15 bp, Homo sapiens
caattctcactgaaa

SEQ ID NO: 162132 - DNA, 15 bp, Homo sapiens
tcaattctcactgaa

SEQ ID NO: 162133 - DNA, 15 bp, Homo sapiens
ttcaattctcactga

SEQ ID NO: 162134 - DNA, 15 bp, Homo sapiens
attcaattctcactg

SEQ ID NO: 162135 - DNA, 15 bp, Homo sapiens
cattcaattctcact

SEQ ID NO: 162136 - DNA, 15 bp, Homo sapiens
tcattcaattctcac

SEQ ID NO: 162137 - DNA, 15 bp, Homo sapiens
ttcattcaattctca

SEQ ID NO: 162138 - DNA, 15 bp, Homo sapiens
tttcattcaattctc

SEQ ID NO: 162139 - DNA, 15 bp, Homo sapiens
atttcattcaattct

SEQ ID NO: 162140 - DNA, 15 bp, Homo sapiens
tatttcattcaattc

SEQ ID NO: 162141 - DNA, 15 bp, Homo sapiens
ttatttcattcaatt

SEQ ID NO: 162142 - DNA, 15 bp, Homo sapiens
attatttcattcaat

SEQ ID NO: 162143 - DNA, 15 bp, Homo sapiens
tattatttcattcaa

SEQ ID NO: 162144 - DNA, 15 bp, Homo sapiens
gtattatttcattca

SEQ ID NO: 162145 - DNA, 15 bp, Homo sapiens
agtattatttcattc

SEQ ID NO: 162146 - DNA, 15 bp, Homo sapiens
aagtattatttcatt

SEQ ID NO: 162147 - DNA, 15 bp, Homo sapiens
caagtattatttcat

SEQ ID NO: 162148 - DNA, 15 bp, Homo sapiens
gcaagtattatttca

SEQ ID NO: 162149 - DNA, 15 bp, Homo sapiens
tgcaagtattatttc

SEQ ID NO: 162150 - DNA, 15 bp, Homo sapiens
ctgcaagtattattt

SEQ ID NO: 162151 - DNA, 15 bp, Homo sapiens
tctgcaagtattatt

SEQ ID NO: 162152 - DNA, 15 bp, Homo sapiens
ctctgcaagtattat

SEQ ID NO: 162153 - DNA, 15 bp, Homo sapiens
gctctgcaagtatta

SEQ ID NO: 162154 - DNA, 15 bp, Homo sapiens
tgctctgcaagtatt

SEQ ID NO: 162155 - DNA, 15 bp, Homo sapiens
atgctctgcaagtat

SEQ ID NO: 162156 - DNA, 15 bp, Homo sapiens
aatgctctgcaagta

SEQ ID NO: 162157 - DNA, 15 bp, Homo sapiens
aaatgctctgcaagt

SEQ ID NO: 162158 - DNA, 15 bp, Homo sapiens
gaaatgctctgcaag

SEQ ID NO: 162159 - DNA, 15 bp, Homo sapiens
tgaaatgctctgcaa

SEQ ID NO: 162160 - DNA, 15 bp, Homo sapiens
gtgaaatgctctgca

SEQ ID NO: 162161 - DNA, 15 bp, Homo sapiens
tgtgaaatgctctgc

SEQ ID NO: 162162 - DNA, 15 bp, Homo sapiens
gtgtgaaatgctctg

SEQ ID NO: 162163 - DNA, 15 bp, Homo sapiens
tgtgtgaaatgctct

SEQ ID NO: 162164 - DNA, 15 bp, Homo sapiens
ctgtgtgaaatgctc

SEQ ID NO: 162165 - DNA, 15 bp, Homo sapiens
actgtgtgaaatgct

SEQ ID NO: 162166 - DNA, 15 bp, Homo sapiens
cactgtgtgaaatgc

SEQ ID NO: 162167 - DNA, 15 bp, Homo sapiens
gcactgtgtgaaatg

SEQ ID NO: 162168 - DNA, 15 bp, Homo sapiens
ggcactgtgtgaaat

SEQ ID NO: 162169 - DNA, 15 bp, Homo sapiens
aggcactgtgtgaaa

SEQ ID NO: 162170 - DNA, 15 bp, Homo sapiens
taggcactgtgtgaa

SEQ ID NO: 162171 - DNA, 15 bp, Homo sapiens
ttaggcactgtgtga

SEQ ID NO: 162172 - DNA, 15 bp, Homo sapiens
gttaggcactgtgtg

SEQ ID NO: 162173 - DNA, 15 bp, Homo sapiens
tgttaggcactgtgt

SEQ ID NO: 162174 - DNA, 15 bp, Homo sapiens
gtgttaggcactgtg

SEQ ID NO: 162175 - DNA, 15 bp, Homo sapiens
tgtgttaggcactgt

SEQ ID NO: 162176 - DNA, 15 bp, Homo sapiens
atgtgttaggcactg

SEQ ID NO: 162177 - DNA, 15 bp, Homo sapiens
catgtgttaggcact

SEQ ID NO: 162178 - DNA, 15 bp, Homo sapiens
ccatgtgttaggcac

SEQ ID NO: 162179 - DNA, 15 bp, Homo sapiens
accatgtgttaggca

SEQ ID NO: 162180 - DNA, 15 bp, Homo sapiens
caccatgtgttaggc

SEQ ID NO: 162181 - DNA, 15 bp, Homo sapiens
gcaccatgtgttagg

SEQ ID NO: 162182 - DNA, 15 bp, Homo sapiens
tgcaccatgtgttag

SEQ ID NO: 162183 - DNA, 15 bp, Homo sapiens
atgcaccatgtgtta

SEQ ID NO: 162184 - DNA, 15 bp, Homo sapiens
catgcaccatgtgtt

SEQ ID NO: 162185 - DNA, 15 bp, Homo sapiens
ccatgcaccatgtgt

SEQ ID NO: 162186 - DNA, 15 bp, Homo sapiens
cccatgcaccatgtg

SEQ ID NO: 162187 - DNA, 15 bp, Homo sapiens
tcccatgcaccatgt

SEQ ID NO: 162188 - DNA, 15 bp, Homo sapiens
ttcccatgcaccatg

SEQ ID NO: 162189 - DNA, 15 bp, Homo sapiens
tttcccatgcaccat

SEQ ID NO: 162190 - DNA, 15 bp, Homo sapiens
gtttcccatgcacca

SEQ ID NO: 162191 - DNA, 15 bp, Homo sapiens
tgtttcccatgcacc

SEQ ID NO: 162192 - DNA, 15 bp, Homo sapiens
ctgtttcccatgcac

SEQ ID NO: 162193 - DNA, 15 bp, Homo sapiens
actgtttcccatgca

SEQ ID NO: 162194 - DNA, 15 bp, Homo sapiens
cactgtttcccatgc

SEQ ID NO: 162195 - DNA, 15 bp, Homo sapiens
acactgtttcccatg

SEQ ID NO: 162196 - DNA, 15 bp, Homo sapiens
tacactgtttcccat

SEQ ID NO: 162197 - DNA, 15 bp, Homo sapiens
ttacactgtttccca

SEQ ID NO: 162198 - DNA, 15 bp, Homo sapiens
cttacactgtttccc

SEQ ID NO: 162199 - DNA, 15 bp, Homo sapiens
gcttacactgtttcc

SEQ ID NO: 162200 - DNA, 15 bp, Homo sapiens
ggcttacactgtttc

SEQ ID NO: 162201 - DNA, 15 bp, Homo sapiens
tggcttacactgttt

SEQ ID NO: 162202 - DNA, 15 bp, Homo sapiens
atggcttacactgtt

SEQ ID NO: 162203 - DNA, 15 bp, Homo sapiens
aatggcttacactgt

SEQ ID NO: 162204 - DNA, 15 bp, Homo sapiens
caatggcttacactg

SEQ ID NO: 162205 - DNA, 15 bp, Homo sapiens
acaatggcttacact

SEQ ID NO: 162206 - DNA, 15 bp, Homo sapiens
gacaatggcttacac

SEQ ID NO: 162207 - DNA, 15 bp, Homo sapiens
cgacaatggcttaca

SEQ ID NO: 162208 - DNA, 15 bp, Homo sapiens
acgacaatggcttac

SEQ ID NO: 162209 - DNA, 15 bp, Homo sapiens
gacgacaatggctta

SEQ ID NO: 162210 - DNA, 15 bp, Homo sapiens
ggacgacaatggctt

SEQ ID NO: 162211 - DNA, 15 bp, Homo sapiens
aggacgacaatggct

SEQ ID NO: 162212 - DNA, 15 bp, Homo sapiens
aaggacgacaatggc

SEQ ID NO: 162213 - DNA, 15 bp, Homo sapiens
gaaggacgacaatgg

SEQ ID NO: 162214 - DNA, 15 bp, Homo sapiens
ggaaggacgacaatg

SEQ ID NO: 162215 - DNA, 15 bp, Homo sapiens
aggaaggacgacaat

SEQ ID NO: 162216 - DNA, 15 bp, Homo sapiens
gaggaaggacgacaa

SEQ ID NO: 162217 - DNA, 15 bp, Homo sapiens
ggaggaaggacgaca

SEQ ID NO: 162218 - DNA, 15 bp, Homo sapiens
aggaggaaggacgac

SEQ ID NO: 162219 - DNA, 15 bp, Homo sapiens
gaggaggaaggacga

SEQ ID NO: 162220 - DNA, 15 bp, Homo sapiens
ggaggaggaaggacg

SEQ ID NO: 162221 - DNA, 15 bp, Homo sapiens
gggaggaggaaggac

SEQ ID NO: 162222 - DNA, 15 bp, Homo sapiens
cgggaggaggaagga

SEQ ID NO: 162223 - DNA, 15 bp, Homo sapiens
acgggaggaggaagg

SEQ ID NO: 162224 - DNA, 15 bp, Homo sapiens
aacgggaggaggaag

SEQ ID NO: 162225 - DNA, 15 bp, Homo sapiens
taacgggaggaggaa

SEQ ID NO: 162226 - DNA, 15 bp, Homo sapiens
ttaacgggaggagga

SEQ ID NO: 162227 - DNA, 15 bp, Homo sapiens
tttaacgggaggagg

SEQ ID NO: 162228 - DNA, 15 bp, Homo sapiens
atttaacgggaggag

SEQ ID NO: 162229 - DNA, 15 bp, Homo sapiens
catttaacgggagga

SEQ ID NO: 162230 - DNA, 15 bp, Homo sapiens
tcatttaacgggagg

SEQ ID NO: 162231 - DNA, 15 bp, Homo sapiens
gtcatttaacgggag

SEQ ID NO: 162232 - DNA, 15 bp, Homo sapiens
agtcatttaacggga

SEQ ID NO: 162233 - DNA, 15 bp, Homo sapiens
aagtcatttaacggg

SEQ ID NO: 162234 - DNA, 15 bp, Homo sapiens
caagtcatttaacgg

SEQ ID NO: 162235 - DNA, 15 bp, Homo sapiens
ccaagtcatttaacg

SEQ ID NO: 162236 - DNA, 15 bp, Homo sapiens
tccaagtcatttaac

SEQ ID NO: 162237 - DNA, 15 bp, Homo sapiens
gtccaagtcatttaa

SEQ ID NO: 162238 - DNA, 15 bp, Homo sapiens
tgtccaagtcattta

SEQ ID NO: 162239 - DNA, 15 bp, Homo sapiens
ctgtccaagtcattt

SEQ ID NO: 162240 - DNA, 15 bp, Homo sapiens
cctgtccaagtcatt

SEQ ID NO: 162241 - DNA, 15 bp, Homo sapiens
acctgtccaagtcat

SEQ ID NO: 162242 - DNA, 15 bp, Homo sapiens
aacctgtccaagtca

SEQ ID NO: 162243 - DNA, 15 bp, Homo sapiens
taacctgtccaagtc

SEQ ID NO: 162244 - DNA, 15 bp, Homo sapiens
gtaacctgtccaagt

SEQ ID NO: 162245 - DNA, 15 bp, Homo sapiens
ggtaacctgtccaag

SEQ ID NO: 162246 - DNA, 15 bp, Homo sapiens
tggtaacctgtccaa

SEQ ID NO: 162247 - DNA, 15 bp, Homo sapiens
ctggtaacctgtcca

SEQ ID NO: 162248 - DNA, 15 bp, Homo sapiens
gctggtaacctgtcc

SEQ ID NO: 162249 - DNA, 15 bp, Homo sapiens
tgctggtaacctgtc

SEQ ID NO: 162250 - DNA, 15 bp, Homo sapiens
atgctggtaacctgt

SEQ ID NO: 162251 - DNA, 15 bp, Homo sapiens
gatgctggtaacctg

SEQ ID NO: 162252 - DNA, 15 bp, Homo sapiens
agatgctggtaacct

SEQ ID NO: 162253 - DNA, 15 bp, Homo sapiens
gagatgctggtaacc

SEQ ID NO: 162254 - DNA, 15 bp, Homo sapiens
cgagatgctggtaac

SEQ ID NO: 162255 - DNA, 15 bp, Homo sapiens
tcgagatgctggtaa

SEQ ID NO: 162256 - DNA, 15 bp, Homo sapiens
ctcgagatgctggta

SEQ ID NO: 162257 - DNA, 15 bp, Homo sapiens
cctcgagatgctggt

SEQ ID NO: 162258 - DNA, 15 bp, Homo sapiens
gcctcgagatgctgg

SEQ ID NO: 162259 - DNA, 15 bp, Homo sapiens
agcctcgagatgctg

SEQ ID NO: 162260 - DNA, 15 bp, Homo sapiens
aagcctcgagatgct

SEQ ID NO: 162261 - DNA, 15 bp, Homo sapiens
caagcctcgagatgc

SEQ ID NO: 162262 - DNA, 15 bp, Homo sapiens
tcaagcctcgagatg

SEQ ID NO: 162263 - DNA, 15 bp, Homo sapiens
atcaagcctcgagat

SEQ ID NO: 162264 - DNA, 15 bp, Homo sapiens
tatcaagcctcgaga

SEQ ID NO: 162265 - DNA, 15 bp, Homo sapiens
atatcaagcctcgag

SEQ ID NO: 162266 - DNA, 15 bp, Homo sapiens
gatatcaagcctcga

SEQ ID NO: 162267 - DNA, 15 bp, Homo sapiens
ggatatcaagcctcg

SEQ ID NO: 162268 - DNA, 15 bp, Homo sapiens
aggatatcaagcctc

SEQ ID NO: 162269 - DNA, 15 bp, Homo sapiens
caggatatcaagcct

SEQ ID NO: 162270 - DNA, 15 bp, Homo sapiens
acaggatatcaagcc

SEQ ID NO: 162271 - DNA, 15 bp, Homo sapiens
tacaggatatcaagc

SEQ ID NO: 162272 - DNA, 15 bp, Homo sapiens
ctacaggatatcaag

SEQ ID NO: 162273 - DNA, 15 bp, Homo sapiens
gctacaggatatcaa

SEQ ID NO: 162274 - DNA, 15 bp, Homo sapiens
agctacaggatatca

SEQ ID NO: 162275 - DNA, 15 bp, Homo sapiens
gagctacaggatatc

SEQ ID NO: 162276 - DNA, 15 bp, Homo sapiens
agagctacaggatat

SEQ ID NO: 162277 - DNA, 15 bp, Homo sapiens
gagagctacaggata

SEQ ID NO: 162278 - DNA, 15 bp, Homo sapiens
agagagctacaggat

SEQ ID NO: 162279 - DNA, 15 bp, Homo sapiens
tagagagctacagga

SEQ ID NO: 162280 - DNA, 15 bp, Homo sapiens
ctagagagctacagg

SEQ ID NO: 162281 - DNA, 15 bp, Homo sapiens
cctagagagctacag

SEQ ID NO: 162282 - DNA, 15 bp, Homo sapiens
gcctagagagctaca

SEQ ID NO: 162283 - DNA, 15 bp, Homo sapiens
agcctagagagctac

SEQ ID NO: 162284 - DNA, 15 bp, Homo sapiens
tagcctagagagcta

SEQ ID NO: 162285 - DNA, 15 bp, Homo sapiens
ctagcctagagagct

SEQ ID NO: 162286 - DNA, 15 bp, Homo sapiens
tctagcctagagagc

SEQ ID NO: 162287 - DNA, 15 bp, Homo sapiens
ctctagcctagagag

SEQ ID NO: 162288 - DNA, 15 bp, Homo sapiens
tctctagcctagaga

SEQ ID NO: 162289 - DNA, 15 bp, Homo sapiens
ttctctagcctagag

SEQ ID NO: 162290 - DNA, 15 bp, Homo sapiens
attctctagcctaga

SEQ ID NO: 162291 - DNA, 15 bp, Homo sapiens
cattctctagcctag

SEQ ID NO: 162292 - DNA, 15 bp, Homo sapiens
ccattctctagccta

SEQ ID NO: 162293 - DNA, 15 bp, Homo sapiens
cccattctctagcct

SEQ ID NO: 162294 - DNA, 15 bp, Homo sapiens
tcccattctctagcc

SEQ ID NO: 162295 - DNA, 15 bp, Homo sapiens
gtcccattctctagc

SEQ ID NO: 162296 - DNA, 15 bp, Homo sapiens
ggtcccattctctag

SEQ ID NO: 162297 - DNA, 15 bp, Homo sapiens
tggtcccattctcta

SEQ ID NO: 162298 - DNA, 15 bp, Homo sapiens
ctggtcccattctct

SEQ ID NO: 162299 - DNA, 15 bp, Homo sapiens
actggtcccattctc

SEQ ID NO: 162300 - DNA, 15 bp, Homo sapiens
cactggtcccattct

SEQ ID NO: 162301 - DNA, 15 bp, Homo sapiens
ccactggtcccattc

SEQ ID NO: 162302 - DNA, 15 bp, Homo sapiens
gccactggtcccatt

SEQ ID NO: 162303 - DNA, 15 bp, Homo sapiens
agccactggtcccat

SEQ ID NO: 162304 - DNA, 15 bp, Homo sapiens
aagccactggtccca

SEQ ID NO: 162305 - DNA, 15 bp, Homo sapiens
taagccactggtccc

SEQ ID NO: 162306 - DNA, 15 bp, Homo sapiens
ctaagccactggtcc

SEQ ID NO: 162307 - DNA, 15 bp, Homo sapiens
tctaagccactggtc

SEQ ID NO: 162308 - DNA, 15 bp, Homo sapiens
ctctaagccactggt

SEQ ID NO: 162309 - DNA, 15 bp, Homo sapiens
cctctaagccactgg

SEQ ID NO: 162310 - DNA, 15 bp, Homo sapiens
ccctctaagccactg

SEQ ID NO: 162311 - DNA, 15 bp, Homo sapiens
gccctctaagccact

SEQ ID NO: 162312 - DNA, 15 bp, Homo sapiens
tgccctctaagccac

SEQ ID NO: 162313 - DNA, 15 bp, Homo sapiens
ctgccctctaagcca

SEQ ID NO: 162314 - DNA, 15 bp, Homo sapiens
tctgccctctaagcc

SEQ ID NO: 162315 - DNA, 15 bp, Homo sapiens
ttctgccctctaagc

SEQ ID NO: 162316 - DNA, 15 bp, Homo sapiens
cttctgccctctaag

SEQ ID NO: 162317 - DNA, 15 bp, Homo sapiens
ccttctgccctctaa

SEQ ID NO: 162318 - DNA, 15 bp, Homo sapiens
gccttctgccctcta

SEQ ID NO: 162319 - DNA, 15 bp, Homo sapiens
agccttctgccctct

SEQ ID NO: 162320 - DNA, 15 bp, Homo sapiens
tagccttctgccctc

SEQ ID NO: 162321 - DNA, 15 bp, Homo sapiens
ctagccttctgccct

SEQ ID NO: 162322 - DNA, 15 bp, Homo sapiens
gctagccttctgccc

SEQ ID NO: 162323 - DNA, 15 bp, Homo sapiens
tgctagccttctgcc

SEQ ID NO: 162324 - DNA, 15 bp, Homo sapiens
ctgctagccttctgc

SEQ ID NO: 162325 - DNA, 15 bp, Homo sapiens
actgctagccttctg

SEQ ID NO: 162326 - DNA, 15 bp, Homo sapiens
gactgctagccttct

SEQ ID NO: 162327 - DNA, 15 bp, Homo sapiens
ggactgctagccttc

SEQ ID NO: 162328 - DNA, 15 bp, Homo sapiens
aggactgctagcctt

SEQ ID NO: 162329 - DNA, 15 bp, Homo sapiens
caggactgctagcct

SEQ ID NO: 162330 - DNA, 15 bp, Homo sapiens
tcaggactgctagcc

SEQ ID NO: 162331 - DNA, 15 bp, Homo sapiens
ctcaggactgctagc

SEQ ID NO: 162332 - DNA, 15 bp, Homo sapiens
tctcaggactgctag

SEQ ID NO: 162333 - DNA, 15 bp, Homo sapiens
gtctcaggactgcta

SEQ ID NO: 162334 - DNA, 15 bp, Homo sapiens
ggtctcaggactgct

SEQ ID NO: 162335 - DNA, 15 bp, Homo sapiens
gggtctcaggactgc

SEQ ID NO: 162336 - DNA, 15 bp, Homo sapiens
ggggtctcaggactg

SEQ ID NO: 162337 - DNA, 15 bp, Homo sapiens
aggggtctcaggact

SEQ ID NO: 162338 - DNA, 15 bp, Homo sapiens
caggggtctcaggac

SEQ ID NO: 162339 - DNA, 15 bp, Homo sapiens
ccaggggtctcagga

SEQ ID NO: 162340 - DNA, 15 bp, Homo sapiens
gccaggggtctcagg

SEQ ID NO: 162341 - DNA, 15 bp, Homo sapiens
ggccaggggtctcag

SEQ ID NO: 162342 - DNA, 15 bp, Homo sapiens
aggccaggggtctca

SEQ ID NO: 162343 - DNA, 15 bp, Homo sapiens
caggccaggggtctc

SEQ ID NO: 162344 - DNA, 15 bp, Homo sapiens
gcaggccaggggtct

SEQ ID NO: 162345 - DNA, 15 bp, Homo sapiens
tgcaggccaggggtc

SEQ ID NO: 162346 - DNA, 15 bp, Homo sapiens
ctgcaggccaggggt

SEQ ID NO: 162347 - DNA, 15 bp, Homo sapiens
tctgcaggccagggg

SEQ ID NO: 162348 - DNA, 15 bp, Homo sapiens
atctgcaggccaggg

SEQ ID NO: 162349 - DNA, 15 bp, Homo sapiens
catctgcaggccagg

SEQ ID NO: 162350 - DNA, 15 bp, Homo sapiens
ccatctgcaggccag

SEQ ID NO: 162351 - DNA, 15 bp, Homo sapiens
cccatctgcaggcca

SEQ ID NO: 162352 - DNA, 15 bp, Homo sapiens
tcccatctgcaggcc

SEQ ID NO: 162353 - DNA, 15 bp, Homo sapiens
ttcccatctgcaggc

SEQ ID NO: 162354 - DNA, 15 bp, Homo sapiens
gttcccatctgcagg

SEQ ID NO: 162355 - DNA, 15 bp, Homo sapiens
agttcccatctgcag

SEQ ID NO: 162356 - DNA, 15 bp, Homo sapiens
cagttcccatctgca

SEQ ID NO: 162357 - DNA, 15 bp, Homo sapiens
ccagttcccatctgc

SEQ ID NO: 162358 - DNA, 15 bp, Homo sapiens
tccagttcccatctg

SEQ ID NO: 162359 - DNA, 15 bp, Homo sapiens
atccagttcccatct

SEQ ID NO: 162360 - DNA, 15 bp, Homo sapiens
gatccagttcccatc

SEQ ID NO: 162361 - DNA, 15 bp, Homo sapiens
agatccagttcccat

SEQ ID NO: 162362 - DNA, 15 bp, Homo sapiens
aagatccagttccca

SEQ ID NO: 162363 - DNA, 15 bp, Homo sapiens
gaagatccagttccc

SEQ ID NO: 162364 - DNA, 15 bp, Homo sapiens
agaagatccagttcc

SEQ ID NO: 162365 - DNA, 15 bp, Homo sapiens
aagaagatccagttc

SEQ ID NO: 162366 - DNA, 15 bp, Homo sapiens
gaagaagatccagtt

SEQ ID NO: 162367 - DNA, 15 bp, Homo sapiens
ggaagaagatccagt

SEQ ID NO: 162368 - DNA, 15 bp, Homo sapiens
aggaagaagatccag

SEQ ID NO: 162369 - DNA, 15 bp, Homo sapiens
aaggaagaagatcca

SEQ ID NO: 162370 - DNA, 15 bp, Homo sapiens
aaaggaagaagatcc

SEQ ID NO: 162371 - DNA, 15 bp, Homo sapiens
caaaggaagaagatc

SEQ ID NO: 162372 - DNA, 15 bp, Homo sapiens
gcaaaggaagaagat

SEQ ID NO: 162373 - DNA, 15 bp, Homo sapiens
tgcaaaggaagaaga

SEQ ID NO: 162374 - DNA, 15 bp, Homo sapiens
ctgcaaaggaagaag

SEQ ID NO: 162375 - DNA, 15 bp, Homo sapiens
actgcaaaggaagaa

SEQ ID NO: 162376 - DNA, 15 bp, Homo sapiens
gactgcaaaggaaga

SEQ ID NO: 162377 - DNA, 15 bp, Homo sapiens
agactgcaaaggaag

SEQ ID NO: 162378 - DNA, 15 bp, Homo sapiens
aagactgcaaaggaa

SEQ ID NO: 162379 - DNA, 15 bp, Homo sapiens
gaagactgcaaagga

SEQ ID NO: 162380 - DNA, 15 bp, Homo sapiens
agaagactgcaaagg

SEQ ID NO: 162381 - DNA, 15 bp, Homo sapiens
aagaagactgcaaag

SEQ ID NO: 162382 - DNA, 15 bp, Homo sapiens
caagaagactgcaaa

SEQ ID NO: 162383 - DNA, 15 bp, Homo sapiens
acaagaagactgcaa

SEQ ID NO: 162384 - DNA, 15 bp, Homo sapiens
aacaagaagactgca

SEQ ID NO: 162385 - DNA, 15 bp, Homo sapiens
gaacaagaagactgc

SEQ ID NO: 162386 - DNA, 15 bp, Homo sapiens
ggaacaagaagactg

SEQ ID NO: 162387 - DNA, 15 bp, Homo sapiens
tggaacaagaagact

SEQ ID NO: 162388 - DNA, 15 bp, Homo sapiens
ctggaacaagaagac

SEQ ID NO: 162389 - DNA, 15 bp, Homo sapiens
gctggaacaagaaga

SEQ ID NO: 162390 - DNA, 15 bp, Homo sapiens
agctggaacaagaag

SEQ ID NO: 162391 - DNA, 15 bp, Homo sapiens
cagctggaacaagaa

SEQ ID NO: 162392 - DNA, 15 bp, Homo sapiens
acagctggaacaaga

SEQ ID NO: 162393 - DNA, 15 bp, Homo sapiens
aacagctggaacaag

SEQ ID NO: 162394 - DNA, 15 bp, Homo sapiens
taacagctggaacaa

SEQ ID NO: 162395 - DNA, 15 bp, Homo sapiens
ctaacagctggaaca

SEQ ID NO: 162396 - DNA, 15 bp, Homo sapiens
gctaacagctggaac

SEQ ID NO: 162397 - DNA, 15 bp, Homo sapiens
cgctaacagctggaa

SEQ ID NO: 162398 - DNA, 15 bp, Homo sapiens
acgctaacagctgga

SEQ ID NO: 162399 - DNA, 15 bp, Homo sapiens
gacgctaacagctgg

SEQ ID NO: 162400 - DNA, 15 bp, Homo sapiens
tgacgctaacagctg

SEQ ID NO: 162401 - DNA, 15 bp, Homo sapiens
gtgacgctaacagct

SEQ ID NO: 162402 - DNA, 15 bp, Homo sapiens
agtgacgctaacagc

SEQ ID NO: 162403 - DNA, 15 bp, Homo sapiens
gagtgacgctaacag

SEQ ID NO: 162404 - DNA, 15 bp, Homo sapiens
ggagtgacgctaaca

SEQ ID NO: 162405 - DNA, 15 bp, Homo sapiens
aggagtgacgctaac

SEQ ID NO: 162406 - DNA, 15 bp, Homo sapiens
aaggagtgacgctaa

SEQ ID NO: 162407 - DNA, 15 bp, Homo sapiens
aaaggagtgacgcta

SEQ ID NO: 162408 - DNA, 15 bp, Homo sapiens
aaaaggagtgacgct

SEQ ID NO: 162409 - DNA, 15 bp, Homo sapiens
taaaaggagtgacgc

SEQ ID NO: 162410 - DNA, 15 bp, Homo sapiens
ctaaaaggagtgacg

SEQ ID NO: 162411 - DNA, 15 bp, Homo sapiens
tctaaaaggagtgac

SEQ ID NO: 162412 - DNA, 15 bp, Homo sapiens
ttctaaaaggagtga

SEQ ID NO: 162413 - DNA, 15 bp, Homo sapiens
attctaaaaggagtg

SEQ ID NO: 162414 - DNA, 15 bp, Homo sapiens
gattctaaaaggagt

SEQ ID NO: 162415 - DNA, 15 bp, Homo sapiens
ggattctaaaaggag

SEQ ID NO: 162416 - DNA, 15 bp, Homo sapiens
gggattctaaaagga

SEQ ID NO: 162417 - DNA, 15 bp, Homo sapiens
tgggattctaaaagg

SEQ ID NO: 162418 - DNA, 15 bp, Homo sapiens
atgggattctaaaag

SEQ ID NO: 162419 - DNA, 15 bp, Homo sapiens
catgggattctaaaa

SEQ ID NO: 162420 - DNA, 15 bp, Homo sapiens
ccatgggattctaaa

SEQ ID NO: 162421 - DNA, 15 bp, Homo sapiens
accatgggattctaa

SEQ ID NO: 162422 - DNA, 15 bp, Homo sapiens
caccatgggattcta

SEQ ID NO: 162423 - DNA, 15 bp, Homo sapiens
tcaccatgggattct

SEQ ID NO: 162424 - DNA, 15 bp, Homo sapiens
ctcaccatgggattc

SEQ ID NO: 162425 - DNA, 15 bp, Homo sapiens
gctcaccatgggatt

SEQ ID NO: 162426 - DNA, 15 bp, Homo sapiens
agctcaccatgggat

SEQ ID NO: 162427 - DNA, 15 bp, Homo sapiens
aagctcaccatggga

SEQ ID NO: 162428 - DNA, 15 bp, Homo sapiens
aaagctcaccatggg

SEQ ID NO: 162429 - DNA, 15 bp, Homo sapiens
gaaagctcaccatgg

SEQ ID NO: 162430 - DNA, 15 bp, Homo sapiens
agaaagctcaccatg

SEQ ID NO: 162431 - DNA, 15 bp, Homo sapiens
aagaaagctcaccat

SEQ ID NO: 162432 - DNA, 15 bp, Homo sapiens
caagaaagctcacca

SEQ ID NO: 162433 - DNA, 15 bp, Homo sapiens
gcaagaaagctcacc

SEQ ID NO: 162434 - DNA, 15 bp, Homo sapiens
tgcaagaaagctcac

SEQ ID NO: 162435 - DNA, 15 bp, Homo sapiens
gtgcaagaaagctca

SEQ ID NO: 162436 - DNA, 15 bp, Homo sapiens
cgtgcaagaaagctc

SEQ ID NO: 162437 - DNA, 15 bp, Homo sapiens
ccgtgcaagaaagct

SEQ ID NO: 162438 - DNA, 15 bp, Homo sapiens
gccgtgcaagaaagc

SEQ ID NO: 162439 - DNA, 15 bp, Homo sapiens
agccgtgcaagaaag

SEQ ID NO: 162440 - DNA, 15 bp, Homo sapiens
cagccgtgcaagaaa

SEQ ID NO: 162441 - DNA, 15 bp, Homo sapiens
acagccgtgcaagaa

SEQ ID NO: 162442 - DNA, 15 bp, Homo sapiens
cacagccgtgcaaga

SEQ ID NO: 162443 - DNA, 15 bp, Homo sapiens
acacagccgtgcaag

SEQ ID NO: 162444 - DNA, 15 bp, Homo sapiens
cacacagccgtgcaa

SEQ ID NO: 162445 - DNA, 15 bp, Homo sapiens
gcacacagccgtgca

SEQ ID NO: 162446 - DNA, 15 bp, Homo sapiens
agcacacagccgtgc

SEQ ID NO: 162447 - DNA, 15 bp, Homo sapiens
aagcacacagccgtg

SEQ ID NO: 162448 - DNA, 15 bp, Homo sapiens
gaagcacacagccgt

SEQ ID NO: 162449 - DNA, 15 bp, Homo sapiens
ggaagcacacagccg

SEQ ID NO: 162450 - DNA, 15 bp, Homo sapiens
aggaagcacacagcc

SEQ ID NO: 162451 - DNA, 15 bp, Homo sapiens
caggaagcacacagc

SEQ ID NO: 162452 - DNA, 15 bp, Homo sapiens
acaggaagcacacag

SEQ ID NO: 162453 - DNA, 15 bp, Homo sapiens
cacaggaagcacaca

SEQ ID NO: 162454 - DNA, 15 bp, Homo sapiens
acacaggaagcacac

SEQ ID NO: 162455 - DNA, 15 bp, Homo sapiens
aacacaggaagcaca

SEQ ID NO: 162456 - DNA, 15 bp, Homo sapiens
aaacacaggaagcac

SEQ ID NO: 162457 - DNA, 15 bp, Homo sapiens
gaaacacaggaagca

SEQ ID NO: 162458 - DNA, 15 bp, Homo sapiens
agaaacacaggaagc

SEQ ID NO: 162459 - DNA, 15 bp, Homo sapiens
cagaaacacaggaag

SEQ ID NO: 162460 - DNA, 15 bp, Homo sapiens
acagaaacacaggaa

SEQ ID NO: 162461 - DNA, 15 bp, Homo sapiens
gacagaaacacagga

SEQ ID NO: 162462 - DNA, 15 bp, Homo sapiens
tgacagaaacacagg

SEQ ID NO: 162463 - DNA, 15 bp, Homo sapiens
atgacagaaacacag

SEQ ID NO: 162464 - DNA, 15 bp, Homo sapiens
aatgacagaaacaca

SEQ ID NO: 162465 - DNA, 15 bp, Homo sapiens
caatgacagaaacac

SEQ ID NO: 162466 - DNA, 15 bp, Homo sapiens
acaatgacagaaaca

SEQ ID NO: 162467 - DNA, 15 bp, Homo sapiens
cacaatgacagaaac

SEQ ID NO: 162468 - DNA, 15 bp, Homo sapiens
gcacaatgacagaaa

SEQ ID NO: 162469 - DNA, 15 bp, Homo sapiens
ggcacaatgacagaa

SEQ ID NO: 162470 - DNA, 15 bp, Homo sapiens
gggcacaatgacaga

SEQ ID NO: 162471 - DNA, 15 bp, Homo sapiens
ggggcacaatgacag

SEQ ID NO: 162472 - DNA, 15 bp, Homo sapiens
tggggcacaatgaca

SEQ ID NO: 162473 - DNA, 15 bp, Homo sapiens
ctggggcacaatgac

SEQ ID NO: 162474 - DNA, 15 bp, Homo sapiens
gctggggcacaatga

SEQ ID NO: 162475 - DNA, 15 bp, Homo sapiens
agctggggcacaatg

SEQ ID NO: 162476 - DNA, 15 bp, Homo sapiens
cagctggggcacaat

SEQ ID NO: 162477 - DNA, 15 bp, Homo sapiens
ccagctggggcacaa

SEQ ID NO: 162478 - DNA, 15 bp, Homo sapiens
cccagctggggcaca

SEQ ID NO: 162479 - DNA, 15 bp, Homo sapiens
acccagctggggcac

SEQ ID NO: 162480 - DNA, 15 bp, Homo sapiens
gacccagctggggca

SEQ ID NO: 162481 - DNA, 15 bp, Homo sapiens
ggacccagctggggc

SEQ ID NO: 162482 - DNA, 15 bp, Homo sapiens
gggacccagctgggg

SEQ ID NO: 162483 - DNA, 15 bp, Homo sapiens
tgggacccagctggg

SEQ ID NO: 162484 - DNA, 15 bp, Homo sapiens
ttgggacccagctgg

SEQ ID NO: 162485 - DNA, 15 bp, Homo sapiens
cttgggacccagctg

SEQ ID NO: 162486 - DNA, 15 bp, Homo sapiens
gcttgggacccagct

SEQ ID NO: 162487 - DNA, 15 bp, Homo sapiens
ggcttgggacccagc

SEQ ID NO: 162488 - DNA, 15 bp, Homo sapiens
gggcttgggacccag

SEQ ID NO: 162489 - DNA, 15 bp, Homo sapiens
agggcttgggaccca

SEQ ID NO: 162490 - DNA, 15 bp, Homo sapiens
cagggcttgggaccc

SEQ ID NO: 162491 - DNA, 15 bp, Homo sapiens
tcagggcttgggacc

SEQ ID NO: 162492 - DNA, 15 bp, Homo sapiens
ctcagggcttgggac

SEQ ID NO: 162493 - DNA, 15 bp, Homo sapiens
cctcagggcttggga

SEQ ID NO: 162494 - DNA, 15 bp, Homo sapiens
tcctcagggcttggg

SEQ ID NO: 162495 - DNA, 15 bp, Homo sapiens
gtcctcagggcttgg

SEQ ID NO: 162496 - DNA, 15 bp, Homo sapiens
ggtcctcagggcttg

SEQ ID NO: 162497 - DNA, 15 bp, Homo sapiens
tggtcctcagggctt

SEQ ID NO: 162498 - DNA, 15 bp, Homo sapiens
atggtcctcagggct

SEQ ID NO: 162499 - DNA, 15 bp, Homo sapiens
tatggtcctcagggc

SEQ ID NO: 162500 - DNA, 15 bp, Homo sapiens
atatggtcctcaggg

SEQ ID NO: 162501 - DNA, 15 bp, Homo sapiens
catatggtcctcagg

SEQ ID NO: 162502 - DNA, 15 bp, Homo sapiens
gcatatggtcctcag

SEQ ID NO: 162503 - DNA, 15 bp, Homo sapiens
tgcatatggtcctca

SEQ ID NO: 162504 - DNA, 15 bp, Homo sapiens
ctgcatatggtcctc

SEQ ID NO: 162505 - DNA, 15 bp, Homo sapiens
gctgcatatggtcct

SEQ ID NO: 162506 - DNA, 15 bp, Homo sapiens
tgctgcatatggtcc

SEQ ID NO: 162507 - DNA, 15 bp, Homo sapiens
atgctgcatatggtc

SEQ ID NO: 162508 - DNA, 15 bp, Homo sapiens
catgctgcatatggt

SEQ ID NO: 162509 - DNA, 15 bp, Homo sapiens
acatgctgcatatgg

SEQ ID NO: 162510 - DNA, 15 bp, Homo sapiens
cacatgctgcatatg

SEQ ID NO: 162511 - DNA, 15 bp, Homo sapiens
ccacatgctgcatat

SEQ ID NO: 162512 - DNA, 15 bp, Homo sapiens
accacatgctgcata

SEQ ID NO: 162513 - DNA, 15 bp, Homo sapiens
caccacatgctgcat

SEQ ID NO: 162514 - DNA, 15 bp, Homo sapiens
ccaccacatgctgca

SEQ ID NO: 162515 - DNA, 15 bp, Homo sapiens
tccaccacatgctgc

SEQ ID NO: 162516 - DNA, 15 bp, Homo sapiens
gtccaccacatgctg

SEQ ID NO: 162517 - DNA, 15 bp, Homo sapiens
tgtccaccacatgct

SEQ ID NO: 162518 - DNA, 15 bp, Homo sapiens
gtgtccaccacatgc

SEQ ID NO: 162519 - DNA, 15 bp, Homo sapiens
agtgtccaccacatg

SEQ ID NO: 162520 - DNA, 15 bp, Homo sapiens
aagtgtccaccacat

SEQ ID NO: 162521 - DNA, 15 bp, Homo sapiens
taagtgtccaccaca

SEQ ID NO: 162522 - DNA, 15 bp, Homo sapiens
ctaagtgtccaccac

SEQ ID NO: 162523 - DNA, 15 bp, Homo sapiens
cctaagtgtccacca

SEQ ID NO: 162524 - DNA, 15 bp, Homo sapiens
tcctaagtgtccacc

SEQ ID NO: 162525 - DNA, 15 bp, Homo sapiens
ttcctaagtgtccac

SEQ ID NO: 162526 - DNA, 15 bp, Homo sapiens
cttcctaagtgtcca

SEQ ID NO: 162527 - DNA, 15 bp, Homo sapiens
gcttcctaagtgtcc

SEQ ID NO: 162528 - DNA, 15 bp, Homo sapiens
tgcttcctaagtgtc

SEQ ID NO: 162529 - DNA, 15 bp, Homo sapiens
gtgcttcctaagtgt

SEQ ID NO: 162530 - DNA, 15 bp, Homo sapiens
cgtgcttcctaagtg

SEQ ID NO: 162531 - DNA, 15 bp, Homo sapiens
acgtgcttcctaagt

SEQ ID NO: 162532 - DNA, 15 bp, Homo sapiens
gacgtgcttcctaag

SEQ ID NO: 162533 - DNA, 15 bp, Homo sapiens
agacgtgcttcctaa

SEQ ID NO: 162534 - DNA, 15 bp, Homo sapiens
gagacgtgcttccta

SEQ ID NO: 162535 - DNA, 15 bp, Homo sapiens
ggagacgtgcttcct

SEQ ID NO: 162536 - DNA, 15 bp, Homo sapiens
tggagacgtgcttcc

SEQ ID NO: 162537 - DNA, 15 bp, Homo sapiens
ctggagacgtgcttc

SEQ ID NO: 162538 - DNA, 15 bp, Homo sapiens
actggagacgtgctt

SEQ ID NO: 162539 - DNA, 15 bp, Homo sapiens
cactggagacgtgct

SEQ ID NO: 162540 - DNA, 15 bp, Homo sapiens
ccactggagacgtgc

SEQ ID NO: 162541 - DNA, 15 bp, Homo sapiens
tccactggagacgtg

SEQ ID NO: 162542 - DNA, 15 bp, Homo sapiens
ctccactggagacgt

SEQ ID NO: 162543 - DNA, 15 bp, Homo sapiens
cctccactggagacg

SEQ ID NO: 162544 - DNA, 15 bp, Homo sapiens
ccctccactggagac

SEQ ID NO: 162545 - DNA, 15 bp, Homo sapiens
cccctccactggaga

SEQ ID NO: 162546 - DNA, 15 bp, Homo sapiens
tcccctccactggag

SEQ ID NO: 162547 - DNA, 15 bp, Homo sapiens
gtcccctccactgga

SEQ ID NO: 162548 - DNA, 15 bp, Homo sapiens
agtcccctccactgg

SEQ ID NO: 162549 - DNA, 15 bp, Homo sapiens
aagtcccctccactg

SEQ ID NO: 162550 - DNA, 15 bp, Homo sapiens
taagtcccctccact

SEQ ID NO: 162551 - DNA, 15 bp, Homo sapiens
ttaagtcccctccac

SEQ ID NO: 162552 - DNA, 15 bp, Homo sapiens
tttaagtcccctcca

SEQ ID NO: 162553 - DNA, 15 bp, Homo sapiens
atttaagtcccctcc

SEQ ID NO: 162554 - DNA, 15 bp, Homo sapiens
catttaagtcccctc

SEQ ID NO: 162555 - DNA, 15 bp, Homo sapiens
acatttaagtcccct

SEQ ID NO: 162556 - DNA, 15 bp, Homo sapiens
gacatttaagtcccc

SEQ ID NO: 162557 - DNA, 15 bp, Homo sapiens
tgacatttaagtccc

SEQ ID NO: 162558 - DNA, 15 bp, Homo sapiens
gtgacatttaagtcc

SEQ ID NO: 162559 - DNA, 15 bp, Homo sapiens
cgtgacatttaagtc

SEQ ID NO: 162560 - DNA, 15 bp, Homo sapiens
acgtgacatttaagt

SEQ ID NO: 162561 - DNA, 15 bp, Homo sapiens
tacgtgacatttaag

SEQ ID NO: 162562 - DNA, 15 bp, Homo sapiens
ctacgtgacatttaa

SEQ ID NO: 162563 - DNA, 15 bp, Homo sapiens
actacgtgacattta

SEQ ID NO: 162564 - DNA, 15 bp, Homo sapiens
tactacgtgacattt

SEQ ID NO: 162565 - DNA, 15 bp, Homo sapiens
gtactacgtgacatt

SEQ ID NO: 162566 - DNA, 15 bp, Homo sapiens
agtactacgtgacat

SEQ ID NO: 162567 - DNA, 15 bp, Homo sapiens
cagtactacgtgaca

SEQ ID NO: 162568 - DNA, 15 bp, Homo sapiens
gcagtactacgtgac

SEQ ID NO: 162569 - DNA, 15 bp, Homo sapiens
ggcagtactacgtga

SEQ ID NO: 162570 - DNA, 15 bp, Homo sapiens
gggcagtactacgtg

SEQ ID NO: 162571 - DNA, 15 bp, Homo sapiens
ggggcagtactacgt

SEQ ID NO: 162572 - DNA, 15 bp, Homo sapiens
tggggcagtactacg

SEQ ID NO: 162573 - DNA, 15 bp, Homo sapiens
atggggcagtactac

SEQ ID NO: 162574 - DNA, 15 bp, Homo sapiens
gatggggcagtacta

SEQ ID NO: 162575 - DNA, 15 bp, Homo sapiens
tgatggggcagtact

SEQ ID NO: 162576 - DNA, 15 bp, Homo sapiens
ttgatggggcagtac

SEQ ID NO: 162577 - DNA, 15 bp, Homo sapiens
cttgatggggcagta

SEQ ID NO: 162578 - DNA, 15 bp, Homo sapiens
acttgatggggcagt

SEQ ID NO: 162579 - DNA, 15 bp, Homo sapiens
cacttgatggggcag

SEQ ID NO: 162580 - DNA, 15 bp, Homo sapiens
gcacttgatggggca

SEQ ID NO: 162581 - DNA, 15 bp, Homo sapiens
agcacttgatggggc

SEQ ID NO: 162582 - DNA, 15 bp, Homo sapiens
cagcacttgatgggg

SEQ ID NO: 162583 - DNA, 15 bp, Homo sapiens
ccagcacttgatggg

SEQ ID NO: 162584 - DNA, 15 bp, Homo sapiens
cccagcacttgatgg

SEQ ID NO: 162585 - DNA, 15 bp, Homo sapiens
tcccagcacttgatg

SEQ ID NO: 162586 - DNA, 15 bp, Homo sapiens
ctcccagcacttgat

SEQ ID NO: 162587 - DNA, 15 bp, Homo sapiens
tctcccagcacttga

SEQ ID NO: 162588 - DNA, 15 bp, Homo sapiens
ctctcccagcacttg

SEQ ID NO: 162589 - DNA, 15 bp, Homo sapiens
cctctcccagcactt

SEQ ID NO: 162590 - DNA, 15 bp, Homo sapiens
gcctctcccagcact

SEQ ID NO: 162591 - DNA, 15 bp, Homo sapiens
ggcctctcccagcac

SEQ ID NO: 162592 - DNA, 15 bp, Homo sapiens
cggcctctcccagca

SEQ ID NO: 162593 - DNA, 15 bp, Homo sapiens
tcggcctctcccagc

SEQ ID NO: 162594 - DNA, 15 bp, Homo sapiens
ctcggcctctcccag

SEQ ID NO: 162595 - DNA, 15 bp, Homo sapiens
tctcggcctctccca

SEQ ID NO: 162596 - DNA, 15 bp, Homo sapiens
ctctcggcctctccc

SEQ ID NO: 162597 - DNA, 15 bp, Homo sapiens
actctcggcctctcc

SEQ ID NO: 162598 - DNA, 15 bp, Homo sapiens
gactctcggcctctc

SEQ ID NO: 162599 - DNA, 15 bp, Homo sapiens
ggactctcggcctct

SEQ ID NO: 162600 - DNA, 15 bp, Homo sapiens
cggactctcggcctc

SEQ ID NO: 162601 - DNA, 15 bp, Homo sapiens
gcggactctcggcct

SEQ ID NO: 162602 - DNA, 15 bp, Homo sapiens
ggcggactctcggcc

SEQ ID NO: 162603 - DNA, 15 bp, Homo sapiens
aggcggactctcggc

SEQ ID NO: 162604 - DNA, 15 bp, Homo sapiens
caggcggactctcgg

SEQ ID NO: 162605 - DNA, 15 bp, Homo sapiens
gcaggcggactctcg

SEQ ID NO: 162606 - DNA, 15 bp, Homo sapiens
agcaggcggactctc

SEQ ID NO: 162607 - DNA, 15 bp, Homo sapiens
aagcaggcggactct

SEQ ID NO: 162608 - DNA, 15 bp, Homo sapiens
gaagcaggcggactc

SEQ ID NO: 162609 - DNA, 15 bp, Homo sapiens
ggaagcaggcggact

SEQ ID NO: 162610 - DNA, 15 bp, Homo sapiens
tggaagcaggcggac

SEQ ID NO: 162611 - DNA, 15 bp, Homo sapiens
ttggaagcaggcgga

SEQ ID NO: 162612 - DNA, 15 bp, Homo sapiens
cttggaagcaggcgg

SEQ ID NO: 162613 - DNA, 15 bp, Homo sapiens
tcttggaagcaggcg

SEQ ID NO: 162614 - DNA, 15 bp, Homo sapiens
atcttggaagcaggc

SEQ ID NO: 162615 - DNA, 15 bp, Homo sapiens
gatcttggaagcagg

SEQ ID NO: 162616 - DNA, 15 bp, Homo sapiens
ggatcttggaagcag

SEQ ID NO: 162617 - DNA, 15 bp, Homo sapiens
gggatcttggaagca

SEQ ID NO: 162618 - DNA, 15 bp, Homo sapiens
agggatcttggaagc

SEQ ID NO: 162619 - DNA, 15 bp, Homo sapiens
cagggatcttggaag

SEQ ID NO: 162620 - DNA, 15 bp, Homo sapiens
tcagggatcttggaa

SEQ ID NO: 162621 - DNA, 15 bp, Homo sapiens
ctcagggatcttgga

SEQ ID NO: 162622 - DNA, 15 bp, Homo sapiens
cctcagggatcttgg

SEQ ID NO: 162623 - DNA, 15 bp, Homo sapiens
acctcagggatcttg

SEQ ID NO: 162624 - DNA, 15 bp, Homo sapiens
aacctcagggatctt

SEQ ID NO: 162625 - DNA, 15 bp, Homo sapiens
aaacctcagggatct

SEQ ID NO: 162626 - DNA, 15 bp, Homo sapiens
aaaacctcagggatc

SEQ ID NO: 162627 - DNA, 15 bp, Homo sapiens
caaaacctcagggat

SEQ ID NO: 162628 - DNA, 15 bp, Homo sapiens
acaaaacctcaggga

SEQ ID NO: 162629 - DNA, 15 bp, Homo sapiens
aacaaaacctcaggg

SEQ ID NO: 162630 - DNA, 15 bp, Homo sapiens
aaacaaaacctcagg

SEQ ID NO: 162631 - DNA, 15 bp, Homo sapiens
caaacaaaacctcag

SEQ ID NO: 162632 - DNA, 15 bp, Homo sapiens
acaaacaaaacctca

SEQ ID NO: 162633 - DNA, 15 bp, Homo sapiens
aacaaacaaaacctc

SEQ ID NO: 162634 - DNA, 15 bp, Homo sapiens
caacaaacaaaacct

SEQ ID NO: 162635 - DNA, 15 bp, Homo sapiens
acaacaaacaaaacc

SEQ ID NO: 162636 - DNA, 15 bp, Homo sapiens
cacaacaaacaaaac

SEQ ID NO: 162637 - DNA, 15 bp, Homo sapiens
tcacaacaaacaaaa

SEQ ID NO: 162638 - DNA, 15 bp, Homo sapiens
gtcacaacaaacaaa

SEQ ID NO: 162639 - DNA, 15 bp, Homo sapiens
tgtcacaacaaacaa

SEQ ID NO: 162640 - DNA, 15 bp, Homo sapiens
atgtcacaacaaaca

SEQ ID NO: 162641 - DNA, 15 bp, Homo sapiens
tatgtcacaacaaac

SEQ ID NO: 162642 - DNA, 15 bp, Homo sapiens
ctatgtcacaacaaa

SEQ ID NO: 162643 - DNA, 15 bp, Homo sapiens
gctatgtcacaacaa

SEQ ID NO: 162644 - DNA, 15 bp, Homo sapiens
tgctatgtcacaaca

SEQ ID NO: 162645 - DNA, 15 bp, Homo sapiens
ttgctatgtcacaac

SEQ ID NO: 162646 - DNA, 15 bp, Homo sapiens
cttgctatgtcacaa

SEQ ID NO: 162647 - DNA, 15 bp, Homo sapiens
tcttgctatgtcaca

SEQ ID NO: 162648 - DNA, 15 bp, Homo sapiens
ctcttgctatgtcac

SEQ ID NO: 162649 - DNA, 15 bp, Homo sapiens
cctcttgctatgtca

SEQ ID NO: 162650 - DNA, 15 bp, Homo sapiens
tcctcttgctatgtc

SEQ ID NO: 162651 - DNA, 15 bp, Homo sapiens
ctcctcttgctatgt

SEQ ID NO: 162652 - DNA, 15 bp, Homo sapiens
actcctcttgctatg

SEQ ID NO: 162653 - DNA, 15 bp, Homo sapiens
aactcctcttgctat

SEQ ID NO: 162654 - DNA, 15 bp, Homo sapiens
taactcctcttgcta

SEQ ID NO: 162655 - DNA, 15 bp, Homo sapiens
ttaactcctcttgct

SEQ ID NO: 162656 - DNA, 15 bp, Homo sapiens
tttaactcctcttgc

SEQ ID NO: 162657 - DNA, 15 bp, Homo sapiens
ctttaactcctcttg

SEQ ID NO: 162658 - DNA, 15 bp, Homo sapiens
cctttaactcctctt

SEQ ID NO: 162659 - DNA, 15 bp, Homo sapiens
tcctttaactcctct

SEQ ID NO: 162660 - DNA, 15 bp, Homo sapiens
atcctttaactcctc

SEQ ID NO: 162661 - DNA, 15 bp, Homo sapiens
catcctttaactcct

SEQ ID NO: 162662 - DNA, 15 bp, Homo sapiens
ccatcctttaactcc

SEQ ID NO: 162663 - DNA, 15 bp, Homo sapiens
cccatcctttaactc

SEQ ID NO: 162664 - DNA, 15 bp, Homo sapiens
ccccatcctttaact

SEQ ID NO: 162665 - DNA, 15 bp, Homo sapiens
cccccatcctttaac

SEQ ID NO: 162666 - DNA, 15 bp, Homo sapiens
tcccccatcctttaa

SEQ ID NO: 162667 - DNA, 15 bp, Homo sapiens
atcccccatccttta

SEQ ID NO: 162668 - DNA, 15 bp, Homo sapiens
aatcccccatccttt

SEQ ID NO: 162669 - DNA, 15 bp, Homo sapiens
caatcccccatcctt

SEQ ID NO: 162670 - DNA, 15 bp, Homo sapiens
acaatcccccatcct

SEQ ID NO: 162671 - DNA, 15 bp, Homo sapiens
aacaatcccccatcc

SEQ ID NO: 162672 - DNA, 15 bp, Homo sapiens
aaacaatcccccatc

SEQ ID NO: 162673 - DNA, 15 bp, Homo sapiens
gaaacaatcccccat

SEQ ID NO: 162674 - DNA, 15 bp, Homo sapiens
cgaaacaatccccca

SEQ ID NO: 162675 - DNA, 15 bp, Homo sapiens
acgaaacaatccccc

SEQ ID NO: 162676 - DNA, 15 bp, Homo sapiens
tacgaaacaatcccc

SEQ ID NO: 162677 - DNA, 15 bp, Homo sapiens
ctacgaaacaatccc

SEQ ID NO: 162678 - DNA, 15 bp, Homo sapiens
cctacgaaacaatcc

SEQ ID NO: 162679 - DNA, 15 bp, Homo sapiens
ccctacgaaacaatc

SEQ ID NO: 162680 - DNA, 15 bp, Homo sapiens
tccctacgaaacaat

SEQ ID NO: 162681 - DNA, 15 bp, Homo sapiens
ctccctacgaaacaa

SEQ ID NO: 162682 - DNA, 15 bp, Homo sapiens
tctccctacgaaaca

SEQ ID NO: 162683 - DNA, 15 bp, Homo sapiens
ttctccctacgaaac

SEQ ID NO: 162684 - DNA, 15 bp, Homo sapiens
tttctccctacgaaa

SEQ ID NO: 162685 - DNA, 15 bp, Homo sapiens
ctttctccctacgaa

SEQ ID NO: 162686 - DNA, 15 bp, Homo sapiens
tctttctccctacga

SEQ ID NO: 162687 - DNA, 15 bp, Homo sapiens
ctctttctccctacg

SEQ ID NO: 162688 - DNA, 15 bp, Homo sapiens
tctctttctccctac

SEQ ID NO: 162689 - DNA, 15 bp, Homo sapiens
ctctctttctcccta

SEQ ID NO: 162690 - DNA, 15 bp, Homo sapiens
cctctctttctccct

SEQ ID NO: 162691 - DNA, 15 bp, Homo sapiens
gcctctctttctccc

SEQ ID NO: 162692 - DNA, 15 bp, Homo sapiens
agcctctctttctcc

SEQ ID NO: 162693 - DNA, 15 bp, Homo sapiens
tagcctctctttctc

SEQ ID NO: 162694 - DNA, 15 bp, Homo sapiens
ttagcctctctttct

SEQ ID NO: 162695 - DNA, 15 bp, Homo sapiens
cttagcctctctttc

SEQ ID NO: 162696 - DNA, 15 bp, Homo sapiens
tcttagcctctcttt

SEQ ID NO: 162697 - DNA, 15 bp, Homo sapiens
ctcttagcctctctt

SEQ ID NO: 162698 - DNA, 15 bp, Homo sapiens
cctcttagcctctct

SEQ ID NO: 162699 - DNA, 15 bp, Homo sapiens
acctcttagcctctc

SEQ ID NO: 162700 - DNA, 15 bp, Homo sapiens
tacctcttagcctct

SEQ ID NO: 162701 - DNA, 15 bp, Homo sapiens
ctacctcttagcctc

SEQ ID NO: 162702 - DNA, 15 bp, Homo sapiens
tctacctcttagcct

SEQ ID NO: 162703 - DNA, 15 bp, Homo sapiens
ctctacctcttagcc

SEQ ID NO: 162704 - DNA, 15 bp, Homo sapiens
cctctacctcttagc

SEQ ID NO: 162705 - DNA, 15 bp, Homo sapiens
acctctacctcttag

SEQ ID NO: 162706 - DNA, 15 bp, Homo sapiens
cacctctacctctta

SEQ ID NO: 162707 - DNA, 15 bp, Homo sapiens
ccacctctacctctt

SEQ ID NO: 162708 - DNA, 15 bp, Homo sapiens
cccacctctacctct

SEQ ID NO: 162709 - DNA, 15 bp, Homo sapiens
ccccacctctacctc

SEQ ID NO: 162710 - DNA, 15 bp, Homo sapiens
tccccacctctacct

SEQ ID NO: 162711 - DNA, 15 bp, Homo sapiens
gtccccacctctacc

SEQ ID NO: 162712 - DNA, 15 bp, Homo sapiens
tgtccccacctctac

SEQ ID NO: 162713 - DNA, 15 bp, Homo sapiens
ctgtccccacctcta

SEQ ID NO: 162714 - DNA, 15 bp, Homo sapiens
cctgtccccacctct

SEQ ID NO: 162715 - DNA, 15 bp, Homo sapiens
tcctgtccccacctc

SEQ ID NO: 162716 - DNA, 15 bp, Homo sapiens
atcctgtccccacct

SEQ ID NO: 162717 - DNA, 15 bp, Homo sapiens
tatcctgtccccacc

SEQ ID NO: 162718 - DNA, 15 bp, Homo sapiens
gtatcctgtccccac

SEQ ID NO: 162719 - DNA, 15 bp, Homo sapiens
ggtatcctgtcccca

SEQ ID NO: 162720 - DNA, 15 bp, Homo sapiens
aggtatcctgtcccc

SEQ ID NO: 162721 - DNA, 15 bp, Homo sapiens
caggtatcctgtccc

SEQ ID NO: 162722 - DNA, 15 bp, Homo sapiens
ccaggtatcctgtcc

SEQ ID NO: 162723 - DNA, 15 bp, Homo sapiens
cccaggtatcctgtc

SEQ ID NO: 162724 - DNA, 15 bp, Homo sapiens
acccaggtatcctgt

SEQ ID NO: 162725 - DNA, 15 bp, Homo sapiens
cacccaggtatcctg

SEQ ID NO: 162726 - DNA, 15 bp, Homo sapiens
gcacccaggtatcct

SEQ ID NO: 162727 - DNA, 15 bp, Homo sapiens
ggcacccaggtatcc

SEQ ID NO: 162728 - DNA, 15 bp, Homo sapiens
aggcacccaggtatc

SEQ ID NO: 162729 - DNA, 15 bp, Homo sapiens
aaggcacccaggtat

SEQ ID NO: 162730 - DNA, 15 bp, Homo sapiens
aaaggcacccaggta

SEQ ID NO: 162731 - DNA, 15 bp, Homo sapiens
gaaaggcacccaggt

SEQ ID NO: 162732 - DNA, 15 bp, Homo sapiens
agaaaggcacccagg

SEQ ID NO: 162733 - DNA, 15 bp, Homo sapiens
cagaaaggcacccag

SEQ ID NO: 162734 - DNA, 15 bp, Homo sapiens
ccagaaaggcaccca

SEQ ID NO: 162735 - DNA, 15 bp, Homo sapiens
cccagaaaggcaccc

SEQ ID NO: 162736 - DNA, 15 bp, Homo sapiens
tcccagaaaggcacc

SEQ ID NO: 162737 - DNA, 15 bp, Homo sapiens
ctcccagaaaggcac

SEQ ID NO: 162738 - DNA, 15 bp, Homo sapiens
tctcccagaaaggca

SEQ ID NO: 162739 - DNA, 15 bp, Homo sapiens
ctctcccagaaaggc

SEQ ID NO: 162740 - DNA, 15 bp, Homo sapiens
cctctcccagaaagg

SEQ ID NO: 162741 - DNA, 15 bp, Homo sapiens
tcctctcccagaaag

SEQ ID NO: 162742 - DNA, 15 bp, Homo sapiens
ttcctctcccagaaa

SEQ ID NO: 162743 - DNA, 15 bp, Homo sapiens
cttcctctcccagaa

SEQ ID NO: 162744 - DNA, 15 bp, Homo sapiens
acttcctctcccaga

SEQ ID NO: 162745 - DNA, 15 bp, Homo sapiens
gacttcctctcccag

SEQ ID NO: 162746 - DNA, 15 bp, Homo sapiens
agacttcctctccca

SEQ ID NO: 162747 - DNA, 15 bp, Homo sapiens
aagacttcctctccc

SEQ ID NO: 162748 - DNA, 15 bp, Homo sapiens
aaagacttcctctcc

SEQ ID NO: 162749 - DNA, 15 bp, Homo sapiens
aaaagacttcctctc

SEQ ID NO: 162750 - DNA, 15 bp, Homo sapiens
aaaaagacttcctct

SEQ ID NO: 162751 - DNA, 15 bp, Homo sapiens
gaaaaagacttcctc

SEQ ID NO: 162752 - DNA, 15 bp, Homo sapiens
agaaaaagacttcct

SEQ ID NO: 162753 - DNA, 15 bp, Homo sapiens
aagaaaaagacttcc

SEQ ID NO: 162754 - DNA, 15 bp, Homo sapiens
aaagaaaaagacttc

SEQ ID NO: 162755 - DNA, 15 bp, Homo sapiens
caaagaaaaagactt

SEQ ID NO: 162756 - DNA, 15 bp, Homo sapiens
acaaagaaaaagact

SEQ ID NO: 162757 - DNA, 15 bp, Homo sapiens
gacaaagaaaaagac

SEQ ID NO: 162758 - DNA, 15 bp, Homo sapiens
ggacaaagaaaaaga

SEQ ID NO: 162759 - DNA, 15 bp, Homo sapiens
aggacaaagaaaaag

SEQ ID NO: 162760 - DNA, 15 bp, Homo sapiens
caggacaaagaaaaa

SEQ ID NO: 162761 - DNA, 15 bp, Homo sapiens
acaggacaaagaaaa

SEQ ID NO: 162762 - DNA, 15 bp, Homo sapiens
cacaggacaaagaaa

SEQ ID NO: 162763 - DNA, 15 bp, Homo sapiens
ccacaggacaaagaa

SEQ ID NO: 162764 - DNA, 15 bp, Homo sapiens
gccacaggacaaaga

SEQ ID NO: 162765 - DNA, 15 bp, Homo sapiens
agccacaggacaaag

SEQ ID NO: 162766 - DNA, 15 bp, Homo sapiens
gagccacaggacaaa

SEQ ID NO: 162767 - DNA, 15 bp, Homo sapiens
tgagccacaggacaa

SEQ ID NO: 162768 - DNA, 15 bp, Homo sapiens
ctgagccacaggaca

SEQ ID NO: 162769 - DNA, 15 bp, Homo sapiens
tctgagccacaggac

SEQ ID NO: 162770 - DNA, 15 bp, Homo sapiens
ctctgagccacagga

SEQ ID NO: 162771 - DNA, 15 bp, Homo sapiens
gctctgagccacagg

SEQ ID NO: 162772 - DNA, 15 bp, Homo sapiens
tgctctgagccacag

SEQ ID NO: 162773 - DNA, 15 bp, Homo sapiens
ttgctctgagccaca

SEQ ID NO: 162774 - DNA, 15 bp, Homo sapiens
cttgctctgagccac

SEQ ID NO: 162775 - DNA, 15 bp, Homo sapiens
acttgctctgagcca

SEQ ID NO: 162776 - DNA, 15 bp, Homo sapiens
gacttgctctgagcc

SEQ ID NO: 162777 - DNA, 15 bp, Homo sapiens
agacttgctctgagc

SEQ ID NO: 162778 - DNA, 15 bp, Homo sapiens
gagacttgctctgag

SEQ ID NO: 162779 - DNA, 15 bp, Homo sapiens
agagacttgctctga

SEQ ID NO: 162780 - DNA, 15 bp, Homo sapiens
gagagacttgctctg

SEQ ID NO: 162781 - DNA, 15 bp, Homo sapiens
tgagagacttgctct

SEQ ID NO: 162782 - DNA, 15 bp, Homo sapiens
ctgagagacttgctc

SEQ ID NO: 162783 - DNA, 15 bp, Homo sapiens
tctgagagacttgct

SEQ ID NO: 162784 - DNA, 15 bp, Homo sapiens
ctctgagagacttgc

SEQ ID NO: 162785 - DNA, 15 bp, Homo sapiens
actctgagagacttg

SEQ ID NO: 162786 - DNA, 15 bp, Homo sapiens
cactctgagagactt

SEQ ID NO: 162787 - DNA, 15 bp, Homo sapiens
ccactctgagagact

SEQ ID NO: 162788 - DNA, 15 bp, Homo sapiens
tccactctgagagac

SEQ ID NO: 162789 - DNA, 15 bp, Homo sapiens
ctccactctgagaga

SEQ ID NO: 162790 - DNA, 15 bp, Homo sapiens
cctccactctgagag

SEQ ID NO: 162791 - DNA, 15 bp, Homo sapiens
acctccactctgaga

SEQ ID NO: 162792 - DNA, 15 bp, Homo sapiens
aacctccactctgag

SEQ ID NO: 162793 - DNA, 15 bp, Homo sapiens
aaacctccactctga

SEQ ID NO: 162794 - DNA, 15 bp, Homo sapiens
gaaacctccactctg

SEQ ID NO: 162795 - DNA, 15 bp, Homo sapiens
tgaaacctccactct

SEQ ID NO: 162796 - DNA, 15 bp, Homo sapiens
ttgaaacctccactc

SEQ ID NO: 162797 - DNA, 15 bp, Homo sapiens
cttgaaacctccact

SEQ ID NO: 162798 - DNA, 15 bp, Homo sapiens
ccttgaaacctccac

SEQ ID NO: 162799 - DNA, 15 bp, Homo sapiens
tccttgaaacctcca

SEQ ID NO: 162800 - DNA, 15 bp, Homo sapiens
ctccttgaaacctcc

SEQ ID NO: 162801 - DNA, 15 bp, Homo sapiens
cctccttgaaacctc

SEQ ID NO: 162802 - DNA, 15 bp, Homo sapiens
gcctccttgaaacct

SEQ ID NO: 162803 - DNA, 15 bp, Homo sapiens
tgcctccttgaaacc

SEQ ID NO: 162804 - DNA, 15 bp, Homo sapiens
ctgcctccttgaaac

SEQ ID NO: 162805 - DNA, 15 bp, Homo sapiens
tctgcctccttgaaa

SEQ ID NO: 162806 - DNA, 15 bp, Homo sapiens
atctgcctccttgaa

SEQ ID NO: 162807 - DNA, 15 bp, Homo sapiens
gatctgcctccttga

SEQ ID NO: 162808 - DNA, 15 bp, Homo sapiens
agatctgcctccttg

SEQ ID NO: 162809 - DNA, 15 bp, Homo sapiens
gagatctgcctcctt

SEQ ID NO: 162810 - DNA, 15 bp, Homo sapiens
agagatctgcctcct

SEQ ID NO: 162811 - DNA, 15 bp, Homo sapiens
cagagatctgcctcc

SEQ ID NO: 162812 - DNA, 15 bp, Homo sapiens
acagagatctgcctc

SEQ ID NO: 162813 - DNA, 15 bp, Homo sapiens
aacagagatctgcct

SEQ ID NO: 162814 - DNA, 15 bp, Homo sapiens
taacagagatctgcc

SEQ ID NO: 162815 - DNA, 15 bp, Homo sapiens
ctaacagagatctgc

SEQ ID NO: 162816 - DNA, 15 bp, Homo sapiens
cctaacagagatctg

SEQ ID NO: 162817 - DNA, 15 bp, Homo sapiens
ccctaacagagatct

SEQ ID NO: 162818 - DNA, 15 bp, Homo sapiens
tccctaacagagatc

SEQ ID NO: 162819 - DNA, 15 bp, Homo sapiens
ttccctaacagagat

SEQ ID NO: 162820 - DNA, 15 bp, Homo sapiens
cttccctaacagaga

SEQ ID NO: 162821 - DNA, 15 bp, Homo sapiens
ccttccctaacagag

SEQ ID NO: 162822 - DNA, 15 bp, Homo sapiens
cccttccctaacaga

SEQ ID NO: 162823 - DNA, 15 bp, Homo sapiens
gcccttccctaacag

SEQ ID NO: 162824 - DNA, 15 bp, Homo sapiens
cgcccttccctaaca

SEQ ID NO: 162825 - DNA, 15 bp, Homo sapiens
tcgcccttccctaac

SEQ ID NO: 162826 - DNA, 15 bp, Homo sapiens
ctcgcccttccctaa

SEQ ID NO: 162827 - DNA, 15 bp, Homo sapiens
actcgcccttcccta

SEQ ID NO: 162828 - DNA, 15 bp, Homo sapiens
aactcgcccttccct

SEQ ID NO: 162829 - DNA, 15 bp, Homo sapiens
caactcgcccttccc

SEQ ID NO: 162830 - DNA, 15 bp, Homo sapiens
gcaactcgcccttcc

SEQ ID NO: 162831 - DNA, 15 bp, Homo sapiens
ggcaactcgcccttc

SEQ ID NO: 162832 - DNA, 15 bp, Homo sapiens
aggcaactcgccctt

SEQ ID NO: 162833 - DNA, 15 bp, Homo sapiens
caggcaactcgccct

SEQ ID NO: 162834 - DNA, 15 bp, Homo sapiens
ccaggcaactcgccc

SEQ ID NO: 162835 - DNA, 15 bp, Homo sapiens
gccaggcaactcgcc

SEQ ID NO: 162836 - DNA, 15 bp, Homo sapiens
ggccaggcaactcgc

SEQ ID NO: 162837 - DNA, 15 bp, Homo sapiens
gggccaggcaactcg

SEQ ID NO: 162838 - DNA, 15 bp, Homo sapiens
agggccaggcaactc

SEQ ID NO: 162839 - DNA, 15 bp, Homo sapiens
tagggccaggcaact

SEQ ID NO: 162840 - DNA, 15 bp, Homo sapiens
ctagggccaggcaac

SEQ ID NO: 162841 - DNA, 15 bp, Homo sapiens
tctagggccaggcaa

SEQ ID NO: 162842 - DNA, 15 bp, Homo sapiens
gtctagggccaggca

SEQ ID NO: 162843 - DNA, 15 bp, Homo sapiens
ggtctagggccaggc

SEQ ID NO: 162844 - DNA, 15 bp, Homo sapiens
aggtctagggccagg

SEQ ID NO: 162845 - DNA, 15 bp, Homo sapiens
caggtctagggccag

SEQ ID NO: 162846 - DNA, 15 bp, Homo sapiens
gcaggtctagggcca

SEQ ID NO: 162847 - DNA, 15 bp, Homo sapiens
agcaggtctagggcc

SEQ ID NO: 162848 - DNA, 15 bp, Homo sapiens
aagcaggtctagggc

SEQ ID NO: 162849 - DNA, 15 bp, Homo sapiens
caagcaggtctaggg

SEQ ID NO: 162850 - DNA, 15 bp, Homo sapiens
tcaagcaggtctagg

SEQ ID NO: 162851 - DNA, 15 bp, Homo sapiens
ttcaagcaggtctag

SEQ ID NO: 162852 - DNA, 15 bp, Homo sapiens
cttcaagcaggtcta

SEQ ID NO: 162853 - DNA, 15 bp, Homo sapiens
acttcaagcaggtct

SEQ ID NO: 162854 - DNA, 15 bp, Homo sapiens
cacttcaagcaggtc

SEQ ID NO: 162855 - DNA, 15 bp, Homo sapiens
ccacttcaagcaggt

SEQ ID NO: 162856 - DNA, 15 bp, Homo sapiens
cccacttcaagcagg

SEQ ID NO: 162857 - DNA, 15 bp, Homo sapiens
tcccacttcaagcag

SEQ ID NO: 162858 - DNA, 15 bp, Homo sapiens
ttcccacttcaagca

SEQ ID NO: 162859 - DNA, 15 bp, Homo sapiens
cttcccacttcaagc

SEQ ID NO: 162860 - DNA, 15 bp, Homo sapiens
tcttcccacttcaag

SEQ ID NO: 162861 - DNA, 15 bp, Homo sapiens
ttcttcccacttcaa

SEQ ID NO: 162862 - DNA, 15 bp, Homo sapiens
attcttcccacttca

SEQ ID NO: 162863 - DNA, 15 bp, Homo sapiens
cattcttcccacttc

SEQ ID NO: 162864 - DNA, 15 bp, Homo sapiens
acattcttcccactt

SEQ ID NO: 162865 - DNA, 15 bp, Homo sapiens
tacattcttcccact

SEQ ID NO: 162866 - DNA, 15 bp, Homo sapiens
ctacattcttcccac

SEQ ID NO: 162867 - DNA, 15 bp, Homo sapiens
tctacattcttccca

SEQ ID NO: 162868 - DNA, 15 bp, Homo sapiens
atctacattcttccc

SEQ ID NO: 162869 - DNA, 15 bp, Homo sapiens
aatctacattcttcc

SEQ ID NO: 162870 - DNA, 15 bp, Homo sapiens
aaatctacattcttc

SEQ ID NO: 162871 - DNA, 15 bp, Homo sapiens
caaatctacattctt

SEQ ID NO: 162872 - DNA, 15 bp, Homo sapiens
ccaaatctacattct

SEQ ID NO: 162873 - DNA, 15 bp, Homo sapiens
gccaaatctacattc

SEQ ID NO: 162874 - DNA, 15 bp, Homo sapiens
tgccaaatctacatt

SEQ ID NO: 162875 - DNA, 15 bp, Homo sapiens
ctgccaaatctacat

SEQ ID NO: 162876 - DNA, 15 bp, Homo sapiens
actgccaaatctaca

SEQ ID NO: 162877 - DNA, 15 bp, Homo sapiens
gactgccaaatctac

SEQ ID NO: 162878 - DNA, 15 bp, Homo sapiens
tgactgccaaatcta

SEQ ID NO: 162879 - DNA, 15 bp, Homo sapiens
ctgactgccaaatct

SEQ ID NO: 162880 - DNA, 15 bp, Homo sapiens
cctgactgccaaatc

SEQ ID NO: 162881 - DNA, 15 bp, Homo sapiens
gcctgactgccaaat

SEQ ID NO: 162882 - DNA, 15 bp, Homo sapiens
ggcctgactgccaaa

SEQ ID NO: 162883 - DNA, 15 bp, Homo sapiens
aggcctgactgccaa

SEQ ID NO: 162884 - DNA, 15 bp, Homo sapiens
caggcctgactgcca

SEQ ID NO: 162885 - DNA, 15 bp, Homo sapiens
gcaggcctgactgcc

SEQ ID NO: 162886 - DNA, 15 bp, Homo sapiens
agcaggcctgactgc

SEQ ID NO: 162887 - DNA, 15 bp, Homo sapiens
tagcaggcctgactg

SEQ ID NO: 162888 - DNA, 15 bp, Homo sapiens
ctagcaggcctgact

SEQ ID NO: 162889 - DNA, 15 bp, Homo sapiens
actagcaggcctgac

SEQ ID NO: 162890 - DNA, 15 bp, Homo sapiens
gactagcaggcctga

SEQ ID NO: 162891 - DNA, 15 bp, Homo sapiens
agactagcaggcctg

SEQ ID NO: 162892 - DNA, 15 bp, Homo sapiens
tagactagcaggcct

SEQ ID NO: 162893 - DNA, 15 bp, Homo sapiens
ctagactagcaggcc

SEQ ID NO: 162894 - DNA, 15 bp, Homo sapiens
cctagactagcaggc

SEQ ID NO: 162895 - DNA, 15 bp, Homo sapiens
ccctagactagcagg

SEQ ID NO: 162896 - DNA, 15 bp, Homo sapiens
gccctagactagcag

SEQ ID NO: 162897 - DNA, 15 bp, Homo sapiens
ggccctagactagca

SEQ ID NO: 162898 - DNA, 15 bp, Homo sapiens
aggccctagactagc

SEQ ID NO: 162899 - DNA, 15 bp, Homo sapiens
aaggccctagactag

SEQ ID NO: 162900 - DNA, 15 bp, Homo sapiens
caaggccctagacta

SEQ ID NO: 162901 - DNA, 15 bp, Homo sapiens
acaaggccctagact

SEQ ID NO: 162902 - DNA, 15 bp, Homo sapiens
aacaaggccctagac

SEQ ID NO: 162903 - DNA, 15 bp, Homo sapiens
gaacaaggccctaga

SEQ ID NO: 162904 - DNA, 15 bp, Homo sapiens
ggaacaaggccctag

SEQ ID NO: 162905 - DNA, 15 bp, Homo sapiens
aggaacaaggcccta

SEQ ID NO: 162906 - DNA, 15 bp, Homo sapiens
gaggaacaaggccct

SEQ ID NO: 162907 - DNA, 15 bp, Homo sapiens
tgaggaacaaggccc

SEQ ID NO: 162908 - DNA, 15 bp, Homo sapiens
ctgaggaacaaggcc

SEQ ID NO: 162909 - DNA, 15 bp, Homo sapiens
tctgaggaacaaggc

SEQ ID NO: 162910 - DNA, 15 bp, Homo sapiens
gtctgaggaacaagg

SEQ ID NO: 162911 - DNA, 15 bp, Homo sapiens
cgtctgaggaacaag

SEQ ID NO: 162912 - DNA, 15 bp, Homo sapiens
ccgtctgaggaacaa

SEQ ID NO: 162913 - DNA, 15 bp, Homo sapiens
accgtctgaggaaca

SEQ ID NO: 162914 - DNA, 15 bp, Homo sapiens
caccgtctgaggaac

SEQ ID NO: 162915 - DNA, 15 bp, Homo sapiens
ccaccgtctgaggaa

SEQ ID NO: 162916 - DNA, 15 bp, Homo sapiens
accaccgtctgagga

SEQ ID NO: 162917 - DNA, 15 bp, Homo sapiens
aaccaccgtctgagg

SEQ ID NO: 162918 - DNA, 15 bp, Homo sapiens
taaccaccgtctgag

SEQ ID NO: 162919 - DNA, 15 bp, Homo sapiens
ctaaccaccgtctga

SEQ ID NO: 162920 - DNA, 15 bp, Homo sapiens
tctaaccaccgtctg

SEQ ID NO: 162921 - DNA, 15 bp, Homo sapiens
ctctaaccaccgtct

SEQ ID NO: 162922 - DNA, 15 bp, Homo sapiens
cctctaaccaccgtc

SEQ ID NO: 162923 - DNA, 15 bp, Homo sapiens
tcctctaaccaccgt

SEQ ID NO: 162924 - DNA, 15 bp, Homo sapiens
atcctctaaccaccg

SEQ ID NO: 162925 - DNA, 15 bp, Homo sapiens
gatcctctaaccacc

SEQ ID NO: 162926 - DNA, 15 bp, Homo sapiens
tgatcctctaaccac

SEQ ID NO: 162927 - DNA, 15 bp, Homo sapiens
ctgatcctctaacca

SEQ ID NO: 162928 - DNA, 15 bp, Homo sapiens
gctgatcctctaacc

SEQ ID NO: 162929 - DNA, 15 bp, Homo sapiens
tgctgatcctctaac

SEQ ID NO: 162930 - DNA, 15 bp, Homo sapiens
ctgctgatcctctaa

SEQ ID NO: 162931 - DNA, 15 bp, Homo sapiens
gctgctgatcctcta

SEQ ID NO: 162932 - DNA, 15 bp, Homo sapiens
tgctgctgatcctct

SEQ ID NO: 162933 - DNA, 15 bp, Homo sapiens
gtgctgctgatcctc

SEQ ID NO: 162934 - DNA, 15 bp, Homo sapiens
tgtgctgctgatcct

SEQ ID NO: 162935 - DNA, 15 bp, Homo sapiens
ctgtgctgctgatcc

SEQ ID NO: 162936 - DNA, 15 bp, Homo sapiens
cctgtgctgctgatc

SEQ ID NO: 162937 - DNA, 15 bp, Homo sapiens
acctgtgctgctgat

SEQ ID NO: 162938 - DNA, 15 bp, Homo sapiens
aacctgtgctgctga

SEQ ID NO: 162939 - DNA, 15 bp, Homo sapiens
gaacctgtgctgctg

SEQ ID NO: 162940 - DNA, 15 bp, Homo sapiens
ggaacctgtgctgct

SEQ ID NO: 162941 - DNA, 15 bp, Homo sapiens
tggaacctgtgctgc

SEQ ID NO: 162942 - DNA, 15 bp, Homo sapiens
gtggaacctgtgctg

SEQ ID NO: 162943 - DNA, 15 bp, Homo sapiens
ggtggaacctgtgct

SEQ ID NO: 162944 - DNA, 15 bp, Homo sapiens
gggtggaacctgtgc

SEQ ID NO: 162945 - DNA, 15 bp, Homo sapiens
tgggtggaacctgtg

SEQ ID NO: 162946 - DNA, 15 bp, Homo sapiens
ttgggtggaacctgt

SEQ ID NO: 162947 - DNA, 15 bp, Homo sapiens
tttgggtggaacctg

SEQ ID NO: 162948 - DNA, 15 bp, Homo sapiens
gtttgggtggaacct

SEQ ID NO: 162949 - DNA, 15 bp, Homo sapiens
ggtttgggtggaacc

SEQ ID NO: 162950 - DNA, 15 bp, Homo sapiens
aggtttgggtggaac

SEQ ID NO: 162951 - DNA, 15 bp, Homo sapiens
gaggtttgggtggaa

SEQ ID NO: 162952 - DNA, 15 bp, Homo sapiens
ggaggtttgggtgga

SEQ ID NO: 162953 - DNA, 15 bp, Homo sapiens
aggaggtttgggtgg

SEQ ID NO: 162954 - DNA, 15 bp, Homo sapiens
caggaggtttgggtg

SEQ ID NO: 162955 - DNA, 15 bp, Homo sapiens
ccaggaggtttgggt

SEQ ID NO: 162956 - DNA, 15 bp, Homo sapiens
cccaggaggtttggg

SEQ ID NO: 162957 - DNA, 15 bp, Homo sapiens
gcccaggaggtttgg

SEQ ID NO: 162958 - DNA, 15 bp, Homo sapiens
tgcccaggaggtttg

SEQ ID NO: 162959 - DNA, 15 bp, Homo sapiens
atgcccaggaggttt

SEQ ID NO: 162960 - DNA, 15 bp, Homo sapiens
catgcccaggaggtt

SEQ ID NO: 162961 - DNA, 15 bp, Homo sapiens
tcatgcccaggaggt

SEQ ID NO: 162962 - DNA, 15 bp, Homo sapiens
ttcatgcccaggagg

SEQ ID NO: 162963 - DNA, 15 bp, Homo sapiens
attcatgcccaggag

SEQ ID NO: 162964 - DNA, 15 bp, Homo sapiens
gattcatgcccagga

SEQ ID NO: 162965 - DNA, 15 bp, Homo sapiens
agattcatgcccagg

SEQ ID NO: 162966 - DNA, 15 bp, Homo sapiens
tagattcatgcccag

SEQ ID NO: 162967 - DNA, 15 bp, Homo sapiens
ctagattcatgccca

SEQ ID NO: 162968 - DNA, 15 bp, Homo sapiens
tctagattcatgccc

SEQ ID NO: 162969 - DNA, 15 bp, Homo sapiens
atctagattcatgcc

SEQ ID NO: 162970 - DNA, 15 bp, Homo sapiens
catctagattcatgc

SEQ ID NO: 162971 - DNA, 15 bp, Homo sapiens
gcatctagattcatg

SEQ ID NO: 162972 - DNA, 15 bp, Homo sapiens
cgcatctagattcat

SEQ ID NO: 162973 - DNA, 15 bp, Homo sapiens
acgcatctagattca

SEQ ID NO: 162974 - DNA, 15 bp, Homo sapiens
gacgcatctagattc

SEQ ID NO: 162975 - DNA, 15 bp, Homo sapiens
ggacgcatctagatt

SEQ ID NO: 162976 - DNA, 15 bp, Homo sapiens
cggacgcatctagat

SEQ ID NO: 162977 - DNA, 15 bp, Homo sapiens
ccggacgcatctaga

SEQ ID NO: 162978 - DNA, 15 bp, Homo sapiens
tccggacgcatctag

SEQ ID NO: 162979 - DNA, 15 bp, Homo sapiens
atccggacgcatcta

SEQ ID NO: 162980 - DNA, 15 bp, Homo sapiens
catccggacgcatct

SEQ ID NO: 162981 - DNA, 15 bp, Homo sapiens
acatccggacgcatc

SEQ ID NO: 162982 - DNA, 15 bp, Homo sapiens
cacatccggacgcat

SEQ ID NO: 162983 - DNA, 15 bp, Homo sapiens
gcacatccggacgca

SEQ ID NO: 162984 - DNA, 15 bp, Homo sapiens
tgcacatccggacgc

SEQ ID NO: 162985 - DNA, 15 bp, Homo sapiens
gtgcacatccggacg

SEQ ID NO: 162986 - DNA, 15 bp, Homo sapiens
tgtgcacatccggac

SEQ ID NO: 162987 - DNA, 15 bp, Homo sapiens
gtgtgcacatccgga

SEQ ID NO: 162988 - DNA, 15 bp, Homo sapiens
tgtgtgcacatccgg

SEQ ID NO: 162989 - DNA, 15 bp, Homo sapiens
ctgtgtgcacatccg

SEQ ID NO: 162990 - DNA, 15 bp, Homo sapiens
tctgtgtgcacatcc

SEQ ID NO: 162991 - DNA, 15 bp, Homo sapiens
ttctgtgtgcacatc

SEQ ID NO: 162992 - DNA, 15 bp, Homo sapiens
cttctgtgtgcacat

SEQ ID NO: 162993 - DNA, 15 bp, Homo sapiens
tcttctgtgtgcaca

SEQ ID NO: 162994 - DNA, 15 bp, Homo sapiens
gtcttctgtgtgcac

SEQ ID NO: 162995 - DNA, 15 bp, Homo sapiens
agtcttctgtgtgca

SEQ ID NO: 162996 - DNA, 15 bp, Homo sapiens
cagtcttctgtgtgc

SEQ ID NO: 162997 - DNA, 15 bp, Homo sapiens
tcagtcttctgtgtg

SEQ ID NO: 162998 - DNA, 15 bp, Homo sapiens
ctcagtcttctgtgt

SEQ ID NO: 162999 - DNA, 15 bp, Homo sapiens
cctcagtcttctgtg

SEQ ID NO: 163000 - DNA, 15 bp, Homo sapiens
tcctcagtcttctgt

SEQ ID NO: 163001 - DNA, 15 bp, Homo sapiens
ctcctcagtcttctg

SEQ ID NO: 163002 - DNA, 15 bp, Homo sapiens
actcctcagtcttct

SEQ ID NO: 163003 - DNA, 15 bp, Homo sapiens
cactcctcagtcttc

SEQ ID NO: 163004 - DNA, 15 bp, Homo sapiens
gcactcctcagtctt

SEQ ID NO: 163005 - DNA, 15 bp, Homo sapiens
agcactcctcagtct

SEQ ID NO: 163006 - DNA, 15 bp, Homo sapiens
tagcactcctcagtc

SEQ ID NO: 163007 - DNA, 15 bp, Homo sapiens
atagcactcctcagt

SEQ ID NO: 163008 - DNA, 15 bp, Homo sapiens
aatagcactcctcag

SEQ ID NO: 163009 - DNA, 15 bp, Homo sapiens
gaatagcactcctca

SEQ ID NO: 163010 - DNA, 15 bp, Homo sapiens
agaatagcactcctc

SEQ ID NO: 163011 - DNA, 15 bp, Homo sapiens
tagaatagcactcct

SEQ ID NO: 163012 - DNA, 15 bp, Homo sapiens
ctagaatagcactcc

SEQ ID NO: 163013 - DNA, 15 bp, Homo sapiens
tctagaatagcactc

SEQ ID NO: 163014 - DNA, 15 bp, Homo sapiens
ttctagaatagcact

SEQ ID NO: 163015 - DNA, 15 bp, Homo sapiens
gttctagaatagcac

SEQ ID NO: 163016 - DNA, 15 bp, Homo sapiens
tgttctagaatagca

SEQ ID NO: 163017 - DNA, 15 bp, Homo sapiens
ctgttctagaatagc

SEQ ID NO: 163018 - DNA, 15 bp, Homo sapiens
tctgttctagaatag

SEQ ID NO: 163019 - DNA, 15 bp, Homo sapiens
ctctgttctagaata

SEQ ID NO: 163020 - DNA, 15 bp, Homo sapiens
gctctgttctagaat

SEQ ID NO: 163021 - DNA, 15 bp, Homo sapiens
agctctgttctagaa

SEQ ID NO: 163022 - DNA, 15 bp, Homo sapiens
aagctctgttctaga

SEQ ID NO: 163023 - DNA, 15 bp, Homo sapiens
gaagctctgttctag

SEQ ID NO: 163024 - DNA, 15 bp, Homo sapiens
agaagctctgttcta

SEQ ID NO: 163025 - DNA, 15 bp, Homo sapiens
gagaagctctgttct

SEQ ID NO: 163026 - DNA, 15 bp, Homo sapiens
tgagaagctctgttc

SEQ ID NO: 163027 - DNA, 15 bp, Homo sapiens
ttgagaagctctgtt

SEQ ID NO: 163028 - DNA, 15 bp, Homo sapiens
cttgagaagctctgt

SEQ ID NO: 163029 - DNA, 15 bp, Homo sapiens
gcttgagaagctctg

SEQ ID NO: 163030 - DNA, 15 bp, Homo sapiens
ggcttgagaagctct

SEQ ID NO: 163031 - DNA, 15 bp, Homo sapiens
tggcttgagaagctc

SEQ ID NO: 163032 - DNA, 15 bp, Homo sapiens
ctggcttgagaagct

SEQ ID NO: 163033 - DNA, 15 bp, Homo sapiens
cctggcttgagaagc

SEQ ID NO: 163034 - DNA, 15 bp, Homo sapiens
tcctggcttgagaag

SEQ ID NO: 163035 - DNA, 15 bp, Homo sapiens
ctcctggcttgagaa

SEQ ID NO: 163036 - DNA, 15 bp, Homo sapiens
gctcctggcttgaga

SEQ ID NO: 163037 - DNA, 15 bp, Homo sapiens
ggctcctggcttgag

SEQ ID NO: 163038 - DNA, 15 bp, Homo sapiens
tggctcctggcttga

SEQ ID NO: 163039 - DNA, 15 bp, Homo sapiens
atggctcctggcttg

SEQ ID NO: 163040 - DNA, 15 bp, Homo sapiens
aatggctcctggctt

SEQ ID NO: 163041 - DNA, 15 bp, Homo sapiens
gaatggctcctggct

SEQ ID NO: 163042 - DNA, 15 bp, Homo sapiens
agaatggctcctggc

SEQ ID NO: 163043 - DNA, 15 bp, Homo sapiens
gagaatggctcctgg

SEQ ID NO: 163044 - DNA, 15 bp, Homo sapiens
ggagaatggctcctg

SEQ ID NO: 163045 - DNA, 15 bp, Homo sapiens
gggagaatggctcct

SEQ ID NO: 163046 - DNA, 15 bp, Homo sapiens
ggggagaatggctcc

SEQ ID NO: 163047 - DNA, 15 bp, Homo sapiens
tggggagaatggctc

SEQ ID NO: 163048 - DNA, 15 bp, Homo sapiens
ttggggagaatggct

SEQ ID NO: 163049 - DNA, 15 bp, Homo sapiens
attggggagaatggc

SEQ ID NO: 163050 - DNA, 15 bp, Homo sapiens
gattggggagaatgg

SEQ ID NO: 163051 - DNA, 15 bp, Homo sapiens
ggattggggagaatg

SEQ ID NO: 163052 - DNA, 15 bp, Homo sapiens
tggattggggagaat

SEQ ID NO: 163053 - DNA, 15 bp, Homo sapiens
atggattggggagaa

SEQ ID NO: 163054 - DNA, 15 bp, Homo sapiens
catggattggggaga

SEQ ID NO: 163055 - DNA, 15 bp, Homo sapiens
ccatggattggggag

SEQ ID NO: 163056 - DNA, 15 bp, Homo sapiens
gccatggattgggga

SEQ ID NO: 163057 - DNA, 15 bp, Homo sapiens
agccatggattgggg

SEQ ID NO: 163058 - DNA, 15 bp, Homo sapiens
cagccatggattggg

SEQ ID NO: 163059 - DNA, 15 bp, Homo sapiens
tcagccatggattgg

SEQ ID NO: 163060 - DNA, 15 bp, Homo sapiens
ctcagccatggattg

SEQ ID NO: 163061 - DNA, 15 bp, Homo sapiens
tctcagccatggatt

SEQ ID NO: 163062 - DNA, 15 bp, Homo sapiens
ttctcagccatggat

SEQ ID NO: 163063 - DNA, 15 bp, Homo sapiens
cttctcagccatgga

SEQ ID NO: 163064 - DNA, 15 bp, Homo sapiens
gcttctcagccatgg

SEQ ID NO: 163065 - DNA, 15 bp, Homo sapiens
ggcttctcagccatg

SEQ ID NO: 163066 - DNA, 15 bp, Homo sapiens
aggcttctcagccat

SEQ ID NO: 163067 - DNA, 15 bp, Homo sapiens
taggcttctcagcca

SEQ ID NO: 163068 - DNA, 15 bp, Homo sapiens
ttaggcttctcagcc

SEQ ID NO: 163069 - DNA, 15 bp, Homo sapiens
cttaggcttctcagc

SEQ ID NO: 163070 - DNA, 15 bp, Homo sapiens
ccttaggcttctcag

SEQ ID NO: 163071 - DNA, 15 bp, Homo sapiens
gccttaggcttctca

SEQ ID NO: 163072 - DNA, 15 bp, Homo sapiens
agccttaggcttctc

SEQ ID NO: 163073 - DNA, 15 bp, Homo sapiens
tagccttaggcttct

SEQ ID NO: 163074 - DNA, 15 bp, Homo sapiens
ctagccttaggcttc

SEQ ID NO: 163075 - DNA, 15 bp, Homo sapiens
tctagccttaggctt

SEQ ID NO: 163076 - DNA, 15 bp, Homo sapiens
ttctagccttaggct

SEQ ID NO: 163077 - DNA, 15 bp, Homo sapiens
tttctagccttaggc

SEQ ID NO: 163078 - DNA, 15 bp, Homo sapiens
gtttctagccttagg

SEQ ID NO: 163079 - DNA, 15 bp, Homo sapiens
tgtttctagccttag

SEQ ID NO: 163080 - DNA, 15 bp, Homo sapiens
atgtttctagcctta

SEQ ID NO: 163081 - DNA, 15 bp, Homo sapiens
catgtttctagcctt

SEQ ID NO: 163082 - DNA, 15 bp, Homo sapiens
ccatgtttctagcct

SEQ ID NO: 163083 - DNA, 15 bp, Homo sapiens
cccatgtttctagcc

SEQ ID NO: 163084 - DNA, 15 bp, Homo sapiens
gcccatgtttctagc

SEQ ID NO: 163085 - DNA, 15 bp, Homo sapiens
ggcccatgtttctag

SEQ ID NO: 163086 - DNA, 15 bp, Homo sapiens
aggcccatgtttcta

SEQ ID NO: 163087 - DNA, 15 bp, Homo sapiens
aaggcccatgtttct

SEQ ID NO: 163088 - DNA, 15 bp, Homo sapiens
caaggcccatgtttc

SEQ ID NO: 163089 - DNA, 15 bp, Homo sapiens
tcaaggcccatgttt

SEQ ID NO: 163090 - DNA, 15 bp, Homo sapiens
ctcaaggcccatgtt

SEQ ID NO: 163091 - DNA, 15 bp, Homo sapiens
gctcaaggcccatgt

SEQ ID NO: 163092 - DNA, 15 bp, Homo sapiens
tgctcaaggcccatg

SEQ ID NO: 163093 - DNA, 15 bp, Homo sapiens
gtgctcaaggcccat

SEQ ID NO: 163094 - DNA, 15 bp, Homo sapiens
agtgctcaaggccca

SEQ ID NO: 163095 - DNA, 15 bp, Homo sapiens
cagtgctcaaggccc

SEQ ID NO: 163096 - DNA, 15 bp, Homo sapiens
ccagtgctcaaggcc

SEQ ID NO: 163097 - DNA, 15 bp, Homo sapiens
tccagtgctcaaggc

SEQ ID NO: 163098 - DNA, 15 bp, Homo sapiens
atccagtgctcaagg

SEQ ID NO: 163099 - DNA, 15 bp, Homo sapiens
gatccagtgctcaag

SEQ ID NO: 163100 - DNA, 15 bp, Homo sapiens
agatccagtgctcaa

SEQ ID NO: 163101 - DNA, 15 bp, Homo sapiens
gagatccagtgctca

SEQ ID NO: 163102 - DNA, 15 bp, Homo sapiens
tgagatccagtgctc

SEQ ID NO: 163103 - DNA, 15 bp, Homo sapiens
ttgagatccagtgct

SEQ ID NO: 163104 - DNA, 15 bp, Homo sapiens
tttgagatccagtgc

SEQ ID NO: 163105 - DNA, 15 bp, Homo sapiens
ctttgagatccagtg

SEQ ID NO: 163106 - DNA, 15 bp, Homo sapiens
gctttgagatccagt

SEQ ID NO: 163107 - DNA, 15 bp, Homo sapiens
agctttgagatccag

SEQ ID NO: 163108 - DNA, 15 bp, Homo sapiens
gagctttgagatcca

SEQ ID NO: 163109 - DNA, 15 bp, Homo sapiens
agagctttgagatcc

SEQ ID NO: 163110 - DNA, 15 bp, Homo sapiens
tagagctttgagatc

SEQ ID NO: 163111 - DNA, 15 bp, Homo sapiens
ctagagctttgagat

SEQ ID NO: 163112 - DNA, 15 bp, Homo sapiens
actagagctttgaga

SEQ ID NO: 163113 - DNA, 15 bp, Homo sapiens
aactagagctttgag

SEQ ID NO: 163114 - DNA, 15 bp, Homo sapiens
aaactagagctttga

SEQ ID NO: 163115 - DNA, 15 bp, Homo sapiens
gaaactagagctttg

SEQ ID NO: 163116 - DNA, 15 bp, Homo sapiens
ggaaactagagcttt

SEQ ID NO: 163117 - DNA, 15 bp, Homo sapiens
aggaaactagagctt

SEQ ID NO: 163118 - DNA, 15 bp, Homo sapiens
gaggaaactagagct

SEQ ID NO: 163119 - DNA, 15 bp, Homo sapiens
agaggaaactagagc

SEQ ID NO: 163120 - DNA, 15 bp, Homo sapiens
gagaggaaactagag

SEQ ID NO: 163121 - DNA, 15 bp, Homo sapiens
agagaggaaactaga

SEQ ID NO: 163122 - DNA, 15 bp, Homo sapiens
cagagaggaaactag

SEQ ID NO: 163123 - DNA, 15 bp, Homo sapiens
ccagagaggaaacta

SEQ ID NO: 163124 - DNA, 15 bp, Homo sapiens
tccagagaggaaact

SEQ ID NO: 163125 - DNA, 15 bp, Homo sapiens
gtccagagaggaaac

SEQ ID NO: 163126 - DNA, 15 bp, Homo sapiens
ggtccagagaggaaa

SEQ ID NO: 163127 - DNA, 15 bp, Homo sapiens
tggtccagagaggaa

SEQ ID NO: 163128 - DNA, 15 bp, Homo sapiens
ctggtccagagagga

SEQ ID NO: 163129 - DNA, 15 bp, Homo sapiens
actggtccagagagg

SEQ ID NO: 163130 - DNA, 15 bp, Homo sapiens
tactggtccagagag

SEQ ID NO: 163131 - DNA, 15 bp, Homo sapiens
ctactggtccagaga

SEQ ID NO: 163132 - DNA, 15 bp, Homo sapiens
gctactggtccagag

SEQ ID NO: 163133 - DNA, 15 bp, Homo sapiens
tgctactggtccaga

SEQ ID NO: 163134 - DNA, 15 bp, Homo sapiens
atgctactggtccag

SEQ ID NO: 163135 - DNA, 15 bp, Homo sapiens
gatgctactggtcca

SEQ ID NO: 163136 - DNA, 15 bp, Homo sapiens
tgatgctactggtcc

SEQ ID NO: 163137 - DNA, 15 bp, Homo sapiens
ctgatgctactggtc

SEQ ID NO: 163138 - DNA, 15 bp, Homo sapiens
gctgatgctactggt

SEQ ID NO: 163139 - DNA, 15 bp, Homo sapiens
ggctgatgctactgg

SEQ ID NO: 163140 - DNA, 15 bp, Homo sapiens
aggctgatgctactg

SEQ ID NO: 163141 - DNA, 15 bp, Homo sapiens
gaggctgatgctact

SEQ ID NO: 163142 - DNA, 15 bp, Homo sapiens
tgaggctgatgctac

SEQ ID NO: 163143 - DNA, 15 bp, Homo sapiens
gtgaggctgatgcta

SEQ ID NO: 163144 - DNA, 15 bp, Homo sapiens
ggtgaggctgatgct

SEQ ID NO: 163145 - DNA, 15 bp, Homo sapiens
aggtgaggctgatgc

SEQ ID NO: 163146 - DNA, 15 bp, Homo sapiens
caggtgaggctgatg

SEQ ID NO: 163147 - DNA, 15 bp, Homo sapiens
ccaggtgaggctgat

SEQ ID NO: 163148 - DNA, 15 bp, Homo sapiens
cccaggtgaggctga

SEQ ID NO: 163149 - DNA, 15 bp, Homo sapiens
tcccaggtgaggctg

SEQ ID NO: 163150 - DNA, 15 bp, Homo sapiens
ctcccaggtgaggct

SEQ ID NO: 163151 - DNA, 15 bp, Homo sapiens
gctcccaggtgaggc

SEQ ID NO: 163152 - DNA, 15 bp, Homo sapiens
agctcccaggtgagg

SEQ ID NO: 163153 - DNA, 15 bp, Homo sapiens
aagctcccaggtgag

SEQ ID NO: 163154 - DNA, 15 bp, Homo sapiens
caagctcccaggtga

SEQ ID NO: 163155 - DNA, 15 bp, Homo sapiens
acaagctcccaggtg

SEQ ID NO: 163156 - DNA, 15 bp, Homo sapiens
aacaagctcccaggt

SEQ ID NO: 163157 - DNA, 15 bp, Homo sapiens
caacaagctcccagg

SEQ ID NO: 163158 - DNA, 15 bp, Homo sapiens
ccaacaagctcccag

SEQ ID NO: 163159 - DNA, 15 bp, Homo sapiens
tccaacaagctccca

SEQ ID NO: 163160 - DNA, 15 bp, Homo sapiens
ttccaacaagctccc

SEQ ID NO: 163161 - DNA, 15 bp, Homo sapiens
tttccaacaagctcc

SEQ ID NO: 163162 - DNA, 15 bp, Homo sapiens
atttccaacaagctc

SEQ ID NO: 163163 - DNA, 15 bp, Homo sapiens
catttccaacaagct

SEQ ID NO: 163164 - DNA, 15 bp, Homo sapiens
ccatttccaacaagc

SEQ ID NO: 163165 - DNA, 15 bp, Homo sapiens
tccatttccaacaag

SEQ ID NO: 163166 - DNA, 15 bp, Homo sapiens
ttccatttccaacaa

SEQ ID NO: 163167 - DNA, 15 bp, Homo sapiens
tttccatttccaaca

SEQ ID NO: 163168 - DNA, 15 bp, Homo sapiens
atttccatttccaac

SEQ ID NO: 163169 - DNA, 15 bp, Homo sapiens
aatttccatttccaa

SEQ ID NO: 163170 - DNA, 15 bp, Homo sapiens
gaatttccatttcca

SEQ ID NO: 163171 - DNA, 15 bp, Homo sapiens
tgaatttccatttcc

SEQ ID NO: 163172 - DNA, 15 bp, Homo sapiens
ctgaatttccatttc

SEQ ID NO: 163173 - DNA, 15 bp, Homo sapiens
tctgaatttccattt

SEQ ID NO: 163174 - DNA, 15 bp, Homo sapiens
ctctgaatttccatt

SEQ ID NO: 163175 - DNA, 15 bp, Homo sapiens
cctctgaatttccat

SEQ ID NO: 163176 - DNA, 15 bp, Homo sapiens
gcctctgaatttcca

SEQ ID NO: 163177 - DNA, 15 bp, Homo sapiens
ggcctctgaatttcc

SEQ ID NO: 163178 - DNA, 15 bp, Homo sapiens
gggcctctgaatttc

SEQ ID NO: 163179 - DNA, 15 bp, Homo sapiens
tgggcctctgaattt

SEQ ID NO: 163180 - DNA, 15 bp, Homo sapiens
ttgggcctctgaatt

SEQ ID NO: 163181 - DNA, 15 bp, Homo sapiens
gttgggcctctgaat

SEQ ID NO: 163182 - DNA, 15 bp, Homo sapiens
ggttgggcctctgaa

SEQ ID NO: 163183 - DNA, 15 bp, Homo sapiens
gggttgggcctctga

SEQ ID NO: 163184 - DNA, 15 bp, Homo sapiens
ggggttgggcctctg

SEQ ID NO: 163185 - DNA, 15 bp, Homo sapiens
gggggttgggcctct

SEQ ID NO: 163186 - DNA, 15 bp, Homo sapiens
tgggggttgggcctc

SEQ ID NO: 163187 - DNA, 15 bp, Homo sapiens
ttgggggttgggcct

SEQ ID NO: 163188 - DNA, 15 bp, Homo sapiens
cttgggggttgggcc

SEQ ID NO: 163189 - DNA, 15 bp, Homo sapiens
acttgggggttgggc

SEQ ID NO: 163190 - DNA, 15 bp, Homo sapiens
gacttgggggttggg

SEQ ID NO: 163191 - DNA, 15 bp, Homo sapiens
tgacttgggggttgg

SEQ ID NO: 163192 - DNA, 15 bp, Homo sapiens
ctgacttgggggttg

SEQ ID NO: 163193 - DNA, 15 bp, Homo sapiens
cctgacttgggggtt

SEQ ID NO: 163194 - DNA, 15 bp, Homo sapiens
ccctgacttgggggt

SEQ ID NO: 163195 - DNA, 15 bp, Homo sapiens
tccctgacttggggg

SEQ ID NO: 163196 - DNA, 15 bp, Homo sapiens
gtccctgacttgggg

SEQ ID NO: 163197 - DNA, 15 bp, Homo sapiens
agtccctgacttggg

SEQ ID NO: 163198 - DNA, 15 bp, Homo sapiens
gagtccctgacttgg

SEQ ID NO: 163199 - DNA, 15 bp, Homo sapiens
ggagtccctgacttg

SEQ ID NO: 163200 - DNA, 15 bp, Homo sapiens
gggagtccctgactt

SEQ ID NO: 163201 - DNA, 15 bp, Homo sapiens
ggggagtccctgact

SEQ ID NO: 163202 - DNA, 15 bp, Homo sapiens
aggggagtccctgac

SEQ ID NO: 163203 - DNA, 15 bp, Homo sapiens
gaggggagtccctga

SEQ ID NO: 163204 - DNA, 15 bp, Homo sapiens
agaggggagtccctg

SEQ ID NO: 163205 - DNA, 15 bp, Homo sapiens
cagaggggagtccct

SEQ ID NO: 163206 - DNA, 15 bp, Homo sapiens
ccagaggggagtccc

SEQ ID NO: 163207 - DNA, 15 bp, Homo sapiens
cccagaggggagtcc

SEQ ID NO: 163208 - DNA, 15 bp, Homo sapiens
ccccagaggggagtc

SEQ ID NO: 163209 - DNA, 15 bp, Homo sapiens
cccccagaggggagt

SEQ ID NO: 163210 - DNA, 15 bp, Homo sapiens
acccccagaggggag

SEQ ID NO: 163211 - DNA, 15 bp, Homo sapiens
cacccccagagggga

SEQ ID NO: 163212 - DNA, 15 bp, Homo sapiens
ccacccccagagggg

SEQ ID NO: 163213 - DNA, 15 bp, Homo sapiens
cccacccccagaggg

SEQ ID NO: 163214 - DNA, 15 bp, Homo sapiens
ccccacccccagagg

SEQ ID NO: 163215 - DNA, 15 bp, Homo sapiens
gccccacccccagag

SEQ ID NO: 163216 - DNA, 15 bp, Homo sapiens
ggccccacccccaga

SEQ ID NO: 163217 - DNA, 15 bp, Homo sapiens
gggccccacccccag

SEQ ID NO: 163218 - DNA, 15 bp, Homo sapiens
tgggccccaccccca

SEQ ID NO: 163219 - DNA, 15 bp, Homo sapiens
ctgggccccaccccc

SEQ ID NO: 163220 - DNA, 15 bp, Homo sapiens
cctgggccccacccc

SEQ ID NO: 163221 - DNA, 15 bp, Homo sapiens
ccctgggccccaccc

SEQ ID NO: 163222 - DNA, 15 bp, Homo sapiens
gccctgggccccacc

SEQ ID NO: 163223 - DNA, 15 bp, Homo sapiens
agccctgggccccac

SEQ ID NO: 163224 - DNA, 15 bp, Homo sapiens
gagccctgggcccca

SEQ ID NO: 163225 - DNA, 15 bp, Homo sapiens
agagccctgggcccc

SEQ ID NO: 163226 - DNA, 15 bp, Homo sapiens
tagagccctgggccc

SEQ ID NO: 163227 - DNA, 15 bp, Homo sapiens
atagagccctgggcc

SEQ ID NO: 163228 - DNA, 15 bp, Homo sapiens
aatagagccctgggc

SEQ ID NO: 163229 - DNA, 15 bp, Homo sapiens
aaatagagccctggg

SEQ ID NO: 163230 - DNA, 15 bp, Homo sapiens
aaaatagagccctgg

SEQ ID NO: 163231 - DNA, 15 bp, Homo sapiens
taaaatagagccctg

SEQ ID NO: 163232 - DNA, 15 bp, Homo sapiens
ttaaaatagagccct

SEQ ID NO: 163233 - DNA, 15 bp, Homo sapiens
gttaaaatagagccc

SEQ ID NO: 163234 - DNA, 15 bp, Homo sapiens
agttaaaatagagcc

SEQ ID NO: 163235 - DNA, 15 bp, Homo sapiens
cagttaaaatagagc

SEQ ID NO: 163236 - DNA, 15 bp, Homo sapiens
ccagttaaaatagag

SEQ ID NO: 163237 - DNA, 15 bp, Homo sapiens
gccagttaaaataga

SEQ ID NO: 163238 - DNA, 15 bp, Homo sapiens
ggccagttaaaatag

SEQ ID NO: 163239 - DNA, 15 bp, Homo sapiens
aggccagttaaaata

SEQ ID NO: 163240 - DNA, 15 bp, Homo sapiens
aaggccagttaaaat

SEQ ID NO: 163241 - DNA, 15 bp, Homo sapiens
gaaggccagttaaaa

SEQ ID NO: 163242 - DNA, 15 bp, Homo sapiens
ggaaggccagttaaa

SEQ ID NO: 163243 - DNA, 15 bp, Homo sapiens
tggaaggccagttaa

SEQ ID NO: 163244 - DNA, 15 bp, Homo sapiens
ctggaaggccagtta

SEQ ID NO: 163245 - DNA, 15 bp, Homo sapiens
actggaaggccagtt

SEQ ID NO: 163246 - DNA, 15 bp, Homo sapiens
cactggaaggccagt

SEQ ID NO: 163247 - DNA, 15 bp, Homo sapiens
ccactggaaggccag

SEQ ID NO: 163248 - DNA, 15 bp, Homo sapiens
gccactggaaggcca

SEQ ID NO: 163249 - DNA, 15 bp, Homo sapiens
agccactggaaggcc

SEQ ID NO: 163250 - DNA, 15 bp, Homo sapiens
gagccactggaaggc

SEQ ID NO: 163251 - DNA, 15 bp, Homo sapiens
agagccactggaagg

SEQ ID NO: 163252 - DNA, 15 bp, Homo sapiens
cagagccactggaag

SEQ ID NO: 163253 - DNA, 15 bp, Homo sapiens
tcagagccactggaa

SEQ ID NO: 163254 - DNA, 15 bp, Homo sapiens
ctcagagccactgga

SEQ ID NO: 163255 - DNA, 15 bp, Homo sapiens
cctcagagccactgg

SEQ ID NO: 163256 - DNA, 15 bp, Homo sapiens
gcctcagagccactg

SEQ ID NO: 163257 - DNA, 15 bp, Homo sapiens
tgcctcagagccact

SEQ ID NO: 163258 - DNA, 15 bp, Homo sapiens
gtgcctcagagccac

SEQ ID NO: 163259 - DNA, 15 bp, Homo sapiens
ggtgcctcagagcca

SEQ ID NO: 163260 - DNA, 15 bp, Homo sapiens
tggtgcctcagagcc

SEQ ID NO: 163261 - DNA, 15 bp, Homo sapiens
ctggtgcctcagagc

SEQ ID NO: 163262 - DNA, 15 bp, Homo sapiens
actggtgcctcagag

SEQ ID NO: 163263 - DNA, 15 bp, Homo sapiens
cactggtgcctcaga

SEQ ID NO: 163264 - DNA, 15 bp, Homo sapiens
tcactggtgcctcag

SEQ ID NO: 163265 - DNA, 15 bp, Homo sapiens
ctcactggtgcctca

SEQ ID NO: 163266 - DNA, 15 bp, Homo sapiens
tctcactggtgcctc

SEQ ID NO: 163267 - DNA, 15 bp, Homo sapiens
atctcactggtgcct

SEQ ID NO: 163268 - DNA, 15 bp, Homo sapiens
gatctcactggtgcc

SEQ ID NO: 163269 - DNA, 15 bp, Homo sapiens
cgatctcactggtgc

SEQ ID NO: 163270 - DNA, 15 bp, Homo sapiens
tcgatctcactggtg

SEQ ID NO: 163271 - DNA, 15 bp, Homo sapiens
atcgatctcactggt

SEQ ID NO: 163272 - DNA, 15 bp, Homo sapiens
tatcgatctcactgg

SEQ ID NO: 163273 - DNA, 15 bp, Homo sapiens
ttatcgatctcactg

SEQ ID NO: 163274 - DNA, 15 bp, Homo sapiens
gttatcgatctcact

SEQ ID NO: 163275 - DNA, 15 bp, Homo sapiens
ggttatcgatctcac

SEQ ID NO: 163276 - DNA, 15 bp, Homo sapiens
tggttatcgatctca

SEQ ID NO: 163277 - DNA, 15 bp, Homo sapiens
ttggttatcgatctc

SEQ ID NO: 163278 - DNA, 15 bp, Homo sapiens
cttggttatcgatct

SEQ ID NO: 163279 - DNA, 15 bp, Homo sapiens
tcttggttatcgatc

SEQ ID NO: 163280 - DNA, 15 bp, Homo sapiens
ctcttggttatcgat

SEQ ID NO: 163281 - DNA, 15 bp, Homo sapiens
gctcttggttatcga

SEQ ID NO: 163282 - DNA, 15 bp, Homo sapiens
ggctcttggttatcg

SEQ ID NO: 163283 - DNA, 15 bp, Homo sapiens
tggctcttggttatc

SEQ ID NO: 163284 - DNA, 15 bp, Homo sapiens
ctggctcttggttat

SEQ ID NO: 163285 - DNA, 15 bp, Homo sapiens
tctggctcttggtta

SEQ ID NO: 163286 - DNA, 15 bp, Homo sapiens
ctctggctcttggtt

SEQ ID NO: 163287 - DNA, 15 bp, Homo sapiens
gctctggctcttggt

SEQ ID NO: 163288 - DNA, 15 bp, Homo sapiens
tgctctggctcttgg

SEQ ID NO: 163289 - DNA, 15 bp, Homo sapiens
gtgctctggctcttg

SEQ ID NO: 163290 - DNA, 15 bp, Homo sapiens
ggtgctctggctctt

SEQ ID NO: 163291 - DNA, 15 bp, Homo sapiens
aggtgctctggctct

SEQ ID NO: 163292 - DNA, 15 bp, Homo sapiens
caggtgctctggctc

SEQ ID NO: 163293 - DNA, 15 bp, Homo sapiens
gcaggtgctctggct

SEQ ID NO: 163294 - DNA, 15 bp, Homo sapiens
tgcaggtgctctggc

SEQ ID NO: 163295 - DNA, 15 bp, Homo sapiens
gtgcaggtgctctgg

SEQ ID NO: 163296 - DNA, 15 bp, Homo sapiens
cgtgcaggtgctctg

SEQ ID NO: 163297 - DNA, 15 bp, Homo sapiens
acgtgcaggtgctct

SEQ ID NO: 163298 - DNA, 15 bp, Homo sapiens
aacgtgcaggtgctc

SEQ ID NO: 163299 - DNA, 15 bp, Homo sapiens
caacgtgcaggtgct

SEQ ID NO: 163300 - DNA, 15 bp, Homo sapiens
ccaacgtgcaggtgc

SEQ ID NO: 163301 - DNA, 15 bp, Homo sapiens
tccaacgtgcaggtg

SEQ ID NO: 163302 - DNA, 15 bp, Homo sapiens
ttccaacgtgcaggt

SEQ ID NO: 163303 - DNA, 15 bp, Homo sapiens
tttccaacgtgcagg

SEQ ID NO: 163304 - DNA, 15 bp, Homo sapiens
gtttccaacgtgcag

SEQ ID NO: 163305 - DNA, 15 bp, Homo sapiens
agtttccaacgtgca

SEQ ID NO: 163306 - DNA, 15 bp, Homo sapiens
gagtttccaacgtgc

SEQ ID NO: 163307 - DNA, 15 bp, Homo sapiens
ggagtttccaacgtg

SEQ ID NO: 163308 - DNA, 15 bp, Homo sapiens
aggagtttccaacgt

SEQ ID NO: 163309 - DNA, 15 bp, Homo sapiens
caggagtttccaacg

SEQ ID NO: 163310 - DNA, 15 bp, Homo sapiens
ccaggagtttccaac

SEQ ID NO: 163311 - DNA, 15 bp, Homo sapiens
cccaggagtttccaa

SEQ ID NO: 163312 - DNA, 15 bp, Homo sapiens
ccccaggagtttcca

SEQ ID NO: 163313 - DNA, 15 bp, Homo sapiens
tccccaggagtttcc

SEQ ID NO: 163314 - DNA, 15 bp, Homo sapiens
ctccccaggagtttc

SEQ ID NO: 163315 - DNA, 15 bp, Homo sapiens
tctccccaggagttt

SEQ ID NO: 163316 - DNA, 15 bp, Homo sapiens
atctccccaggagtt

SEQ ID NO: 163317 - DNA, 15 bp, Homo sapiens
tatctccccaggagt

SEQ ID NO: 163318 - DNA, 15 bp, Homo sapiens
ttatctccccaggag

SEQ ID NO: 163319 - DNA, 15 bp, Homo sapiens
tttatctccccagga

SEQ ID NO: 163320 - DNA, 15 bp, Homo sapiens
ctttatctccccagg

SEQ ID NO: 163321 - DNA, 15 bp, Homo sapiens
gctttatctccccag

SEQ ID NO: 163322 - DNA, 15 bp, Homo sapiens
tgctttatctcccca

SEQ ID NO: 163323 - DNA, 15 bp, Homo sapiens
ttgctttatctcccc

SEQ ID NO: 163324 - DNA, 15 bp, Homo sapiens
tttgctttatctccc

SEQ ID NO: 163325 - DNA, 15 bp, Homo sapiens
atttgctttatctcc

SEQ ID NO: 163326 - DNA, 15 bp, Homo sapiens
catttgctttatctc

SEQ ID NO: 163327 - DNA, 15 bp, Homo sapiens
gcatttgctttatct

SEQ ID NO: 163328 - DNA, 15 bp, Homo sapiens
agcatttgctttatc

SEQ ID NO: 163329 - DNA, 15 bp, Homo sapiens
aagcatttgctttat

SEQ ID NO: 163330 - DNA, 15 bp, Homo sapiens
caagcatttgcttta

SEQ ID NO: 163331 - DNA, 15 bp, Homo sapiens
ccaagcatttgcttt

SEQ ID NO: 163332 - DNA, 15 bp, Homo sapiens
tccaagcatttgctt

SEQ ID NO: 163333 - DNA, 15 bp, Homo sapiens
ttccaagcatttgct

SEQ ID NO: 163334 - DNA, 15 bp, Homo sapiens
gttccaagcatttgc

SEQ ID NO: 163335 - DNA, 15 bp, Homo sapiens
tgttccaagcatttg

SEQ ID NO: 163336 - DNA, 15 bp, Homo sapiens
ttgttccaagcattt

SEQ ID NO: 163337 - DNA, 15 bp, Homo sapiens
tttgttccaagcatt

SEQ ID NO: 163338 - DNA, 15 bp, Homo sapiens
atttgttccaagcat

SEQ ID NO: 163339 - DNA, 15 bp, Homo sapiens
gatttgttccaagca

SEQ ID NO: 163340 - DNA, 15 bp, Homo sapiens
ggatttgttccaagc

SEQ ID NO: 163341 - DNA, 15 bp, Homo sapiens
cggatttgttccaag

SEQ ID NO: 163342 - DNA, 15 bp, Homo sapiens
tcggatttgttccaa

SEQ ID NO: 163343 - DNA, 15 bp, Homo sapiens
ttcggatttgttcca

SEQ ID NO: 163344 - DNA, 15 bp, Homo sapiens
attcggatttgttcc

SEQ ID NO: 163345 - DNA, 15 bp, Homo sapiens
tattcggatttgttc

SEQ ID NO: 163346 - DNA, 15 bp, Homo sapiens
ctattcggatttgtt

SEQ ID NO: 163347 - DNA, 15 bp, Homo sapiens
gctattcggatttgt

SEQ ID NO: 163348 - DNA, 15 bp, Homo sapiens
ggctattcggatttg

SEQ ID NO: 163349 - DNA, 15 bp, Homo sapiens
aggctattcggattt

SEQ ID NO: 163350 - DNA, 15 bp, Homo sapiens
gaggctattcggatt

SEQ ID NO: 163351 - DNA, 15 bp, Homo sapiens
agaggctattcggat

SEQ ID NO: 163352 - DNA, 15 bp, Homo sapiens
cagaggctattcgga

SEQ ID NO: 163353 - DNA, 15 bp, Homo sapiens
ccagaggctattcgg

SEQ ID NO: 163354 - DNA, 15 bp, Homo sapiens
cccagaggctattcg

SEQ ID NO: 163355 - DNA, 15 bp, Homo sapiens
acccagaggctattc

SEQ ID NO: 163356 - DNA, 15 bp, Homo sapiens
tacccagaggctatt

SEQ ID NO: 163357 - DNA, 15 bp, Homo sapiens
atacccagaggctat

SEQ ID NO: 163358 - DNA, 15 bp, Homo sapiens
catacccagaggcta

SEQ ID NO: 163359 - DNA, 15 bp, Homo sapiens
ccatacccagaggct

SEQ ID NO: 163360 - DNA, 15 bp, Homo sapiens
gccatacccagaggc

SEQ ID NO: 163361 - DNA, 15 bp, Homo sapiens
tgccatacccagagg

SEQ ID NO: 163362 - DNA, 15 bp, Homo sapiens
ctgccatacccagag

SEQ ID NO: 163363 - DNA, 15 bp, Homo sapiens
cctgccatacccaga

SEQ ID NO: 163364 - DNA, 15 bp, Homo sapiens
ccctgccatacccag

SEQ ID NO: 163365 - DNA, 15 bp, Homo sapiens
tccctgccataccca

SEQ ID NO: 163366 - DNA, 15 bp, Homo sapiens
gtccctgccataccc

SEQ ID NO: 163367 - DNA, 15 bp, Homo sapiens
agtccctgccatacc

SEQ ID NO: 163368 - DNA, 15 bp, Homo sapiens
gagtccctgccatac

SEQ ID NO: 163369 - DNA, 15 bp, Homo sapiens
agagtccctgccata

SEQ ID NO: 163370 - DNA, 15 bp, Homo sapiens
cagagtccctgccat

SEQ ID NO: 163371 - DNA, 15 bp, Homo sapiens
ccagagtccctgcca

SEQ ID NO: 163372 - DNA, 15 bp, Homo sapiens
cccagagtccctgcc

SEQ ID NO: 163373 - DNA, 15 bp, Homo sapiens
tcccagagtccctgc

SEQ ID NO: 163374 - DNA, 15 bp, Homo sapiens
ttcccagagtccctg

SEQ ID NO: 163375 - DNA, 15 bp, Homo sapiens
gttcccagagtccct

SEQ ID NO: 163376 - DNA, 15 bp, Homo sapiens
agttcccagagtccc

SEQ ID NO: 163377 - DNA, 15 bp, Homo sapiens
aagttcccagagtcc

SEQ ID NO: 163378 - DNA, 15 bp, Homo sapiens
gaagttcccagagtc

SEQ ID NO: 163379 - DNA, 15 bp, Homo sapiens
tgaagttcccagagt

SEQ ID NO: 163380 - DNA, 15 bp, Homo sapiens
ctgaagttcccagag

SEQ ID NO: 163381 - DNA, 15 bp, Homo sapiens
tctgaagttcccaga

SEQ ID NO: 163382 - DNA, 15 bp, Homo sapiens
atctgaagttcccag

SEQ ID NO: 163383 - DNA, 15 bp, Homo sapiens
catctgaagttccca

SEQ ID NO: 163384 - DNA, 15 bp, Homo sapiens
gcatctgaagttccc

SEQ ID NO: 163385 - DNA, 15 bp, Homo sapiens
agcatctgaagttcc

SEQ ID NO: 163386 - DNA, 15 bp, Homo sapiens
gagcatctgaagttc

SEQ ID NO: 163387 - DNA, 15 bp, Homo sapiens
ggagcatctgaagtt

SEQ ID NO: 163388 - DNA, 15 bp, Homo sapiens
gggagcatctgaagt

SEQ ID NO: 163389 - DNA, 15 bp, Homo sapiens
ggggagcatctgaag

SEQ ID NO: 163390 - DNA, 15 bp, Homo sapiens
cggggagcatctgaa

SEQ ID NO: 163391 - DNA, 15 bp, Homo sapiens
ccggggagcatctga

SEQ ID NO: 163392 - DNA, 15 bp, Homo sapiens
cccggggagcatctg

SEQ ID NO: 163393 - DNA, 15 bp, Homo sapiens
acccggggagcatct

SEQ ID NO: 163394 - DNA, 15 bp, Homo sapiens
cacccggggagcatc

SEQ ID NO: 163395 - DNA, 15 bp, Homo sapiens
tcacccggggagcat

SEQ ID NO: 163396 - DNA, 15 bp, Homo sapiens
atcacccggggagca

SEQ ID NO: 163397 - DNA, 15 bp, Homo sapiens
gatcacccggggagc

SEQ ID NO: 163398 - DNA, 15 bp, Homo sapiens
ggatcacccggggag

SEQ ID NO: 163399 - DNA, 15 bp, Homo sapiens
aggatcacccgggga

SEQ ID NO: 163400 - DNA, 15 bp, Homo sapiens
taggatcacccgggg

SEQ ID NO: 163401 - DNA, 15 bp, Homo sapiens
ttaggatcacccggg

SEQ ID NO: 163402 - DNA, 15 bp, Homo sapiens
attaggatcacccgg

SEQ ID NO: 163403 - DNA, 15 bp, Homo sapiens
cattaggatcacccg

SEQ ID NO: 163404 - DNA, 15 bp, Homo sapiens
acattaggatcaccc

SEQ ID NO: 163405 - DNA, 15 bp, Homo sapiens
cacattaggatcacc

SEQ ID NO: 163406 - DNA, 15 bp, Homo sapiens
gcacattaggatcac

SEQ ID NO: 163407 - DNA, 15 bp, Homo sapiens
tgcacattaggatca

SEQ ID NO: 163408 - DNA, 15 bp, Homo sapiens
ctgcacattaggatc

SEQ ID NO: 163409 - DNA, 15 bp, Homo sapiens
gctgcacattaggat

SEQ ID NO: 163410 - DNA, 15 bp, Homo sapiens
ggctgcacattagga

SEQ ID NO: 163411 - DNA, 15 bp, Homo sapiens
tggctgcacattagg

SEQ ID NO: 163412 - DNA, 15 bp, Homo sapiens
ttggctgcacattag

SEQ ID NO: 163413 - DNA, 15 bp, Homo sapiens
attggctgcacatta

SEQ ID NO: 163414 - DNA, 15 bp, Homo sapiens
tattggctgcacatt

SEQ ID NO: 163415 - DNA, 15 bp, Homo sapiens
atattggctgcacat

SEQ ID NO: 163416 - DNA, 15 bp, Homo sapiens
aatattggctgcaca

SEQ ID NO: 163417 - DNA, 15 bp, Homo sapiens
caatattggctgcac

SEQ ID NO: 163418 - DNA, 15 bp, Homo sapiens
gcaatattggctgca

SEQ ID NO: 163419 - DNA, 15 bp, Homo sapiens
cgcaatattggctgc

SEQ ID NO: 163420 - DNA, 15 bp, Homo sapiens
tcgcaatattggctg

SEQ ID NO: 163421 - DNA, 15 bp, Homo sapiens
ttcgcaatattggct

SEQ ID NO: 163422 - DNA, 15 bp, Homo sapiens
gttcgcaatattggc

SEQ ID NO: 163423 - DNA, 15 bp, Homo sapiens
ggttcgcaatattgg

SEQ ID NO: 163424 - DNA, 15 bp, Homo sapiens
tggttcgcaatattg

SEQ ID NO: 163425 - DNA, 15 bp, Homo sapiens
ctggttcgcaatatt

SEQ ID NO: 163426 - DNA, 15 bp, Homo sapiens
gctggttcgcaatat

SEQ ID NO: 163427 - DNA, 15 bp, Homo sapiens
tgctggttcgcaata

SEQ ID NO: 163428 - DNA, 15 bp, Homo sapiens
atgctggttcgcaat

SEQ ID NO: 163429 - DNA, 15 bp, Homo sapiens
aatgctggttcgcaa

SEQ ID NO: 163430 - DNA, 15 bp, Homo sapiens
aaatgctggttcgca

SEQ ID NO: 163431 - DNA, 15 bp, Homo sapiens
aaaatgctggttcgc

SEQ ID NO: 163432 - DNA, 15 bp, Homo sapiens
taaaatgctggttcg

SEQ ID NO: 163433 - DNA, 15 bp, Homo sapiens
ctaaaatgctggttc

SEQ ID NO: 163434 - DNA, 15 bp, Homo sapiens
cctaaaatgctggtt

SEQ ID NO: 163435 - DNA, 15 bp, Homo sapiens
gcctaaaatgctggt

SEQ ID NO: 163436 - DNA, 15 bp, Homo sapiens
ggcctaaaatgctgg

SEQ ID NO: 163437 - DNA, 15 bp, Homo sapiens
aggcctaaaatgctg

SEQ ID NO: 163438 - DNA, 15 bp, Homo sapiens
caggcctaaaatgct

SEQ ID NO: 163439 - DNA, 15 bp, Homo sapiens
acaggcctaaaatgc

SEQ ID NO: 163440 - DNA, 15 bp, Homo sapiens
cacaggcctaaaatg

SEQ ID NO: 163441 - DNA, 15 bp, Homo sapiens
tcacaggcctaaaat

SEQ ID NO: 163442 - DNA, 15 bp, Homo sapiens
ttcacaggcctaaaa

SEQ ID NO: 163443 - DNA, 15 bp, Homo sapiens
gttcacaggcctaaa

SEQ ID NO: 163444 - DNA, 15 bp, Homo sapiens
agttcacaggcctaa

SEQ ID NO: 163445 - DNA, 15 bp, Homo sapiens
tagttcacaggccta

SEQ ID NO: 163446 - DNA, 15 bp, Homo sapiens
ttagttcacaggcct

SEQ ID NO: 163447 - DNA, 15 bp, Homo sapiens
tttagttcacaggcc

SEQ ID NO: 163448 - DNA, 15 bp, Homo sapiens
atttagttcacaggc

SEQ ID NO: 163449 - DNA, 15 bp, Homo sapiens
gatttagttcacagg

SEQ ID NO: 163450 - DNA, 15 bp, Homo sapiens
agatttagttcacag

SEQ ID NO: 163451 - DNA, 15 bp, Homo sapiens
gagatttagttcaca

SEQ ID NO: 163452 - DNA, 15 bp, Homo sapiens
tgagatttagttcac

SEQ ID NO: 163453 - DNA, 15 bp, Homo sapiens
ctgagatttagttca

SEQ ID NO: 163454 - DNA, 15 bp, Homo sapiens
gctgagatttagttc

SEQ ID NO: 163455 - DNA, 15 bp, Homo sapiens
cgctgagatttagtt

SEQ ID NO: 163456 - DNA, 15 bp, Homo sapiens
acgctgagatttagt

SEQ ID NO: 163457 - DNA, 15 bp, Homo sapiens
aacgctgagatttag

SEQ ID NO: 163458 - DNA, 15 bp, Homo sapiens
gaacgctgagattta

SEQ ID NO: 163459 - DNA, 15 bp, Homo sapiens
agaacgctgagattt

SEQ ID NO: 163460 - DNA, 15 bp, Homo sapiens
gagaacgctgagatt

SEQ ID NO: 163461 - DNA, 15 bp, Homo sapiens
tgagaacgctgagat

SEQ ID NO: 163462 - DNA, 15 bp, Homo sapiens
ctgagaacgctgaga

SEQ ID NO: 163463 - DNA, 15 bp, Homo sapiens
gctgagaacgctgag

SEQ ID NO: 163464 - DNA, 15 bp, Homo sapiens
agctgagaacgctga

SEQ ID NO: 163465 - DNA, 15 bp, Homo sapiens
tagctgagaacgctg

SEQ ID NO: 163466 - DNA, 15 bp, Homo sapiens
atagctgagaacgct

SEQ ID NO: 163467 - DNA, 15 bp, Homo sapiens
gatagctgagaacgc

SEQ ID NO: 163468 - DNA, 15 bp, Homo sapiens
tgatagctgagaacg

SEQ ID NO: 163469 - DNA, 15 bp, Homo sapiens
ctgatagctgagaac

SEQ ID NO: 163470 - DNA, 15 bp, Homo sapiens
actgatagctgagaa

SEQ ID NO: 163471 - DNA, 15 bp, Homo sapiens
aactgatagctgaga

SEQ ID NO: 163472 - DNA, 15 bp, Homo sapiens
caactgatagctgag

SEQ ID NO: 163473 - DNA, 15 bp, Homo sapiens
ccaactgatagctga

SEQ ID NO: 163474 - DNA, 15 bp, Homo sapiens
cccaactgatagctg

SEQ ID NO: 163475 - DNA, 15 bp, Homo sapiens
acccaactgatagct

SEQ ID NO: 163476 - DNA, 15 bp, Homo sapiens
tacccaactgatagc

SEQ ID NO: 163477 - DNA, 15 bp, Homo sapiens
ctacccaactgatag

SEQ ID NO: 163478 - DNA, 15 bp, Homo sapiens
tctacccaactgata

SEQ ID NO: 163479 - DNA, 15 bp, Homo sapiens
gtctacccaactgat

SEQ ID NO: 163480 - DNA, 15 bp, Homo sapiens
agtctacccaactga

SEQ ID NO: 163481 - DNA, 15 bp, Homo sapiens
tagtctacccaactg

SEQ ID NO: 163482 - DNA, 15 bp, Homo sapiens
ttagtctacccaact

SEQ ID NO: 163483 - DNA, 15 bp, Homo sapiens
gttagtctacccaac

SEQ ID NO: 163484 - DNA, 15 bp, Homo sapiens
ggttagtctacccaa

SEQ ID NO: 163485 - DNA, 15 bp, Homo sapiens
aggttagtctaccca

SEQ ID NO: 163486 - DNA, 15 bp, Homo sapiens
gaggttagtctaccc

SEQ ID NO: 163487 - DNA, 15 bp, Homo sapiens
agaggttagtctacc

SEQ ID NO: 163488 - DNA, 15 bp, Homo sapiens
cagaggttagtctac

SEQ ID NO: 163489 - DNA, 15 bp, Homo sapiens
acagaggttagtcta

SEQ ID NO: 163490 - DNA, 15 bp, Homo sapiens
aacagaggttagtct

SEQ ID NO: 163491 - DNA, 15 bp, Homo sapiens
aaacagaggttagtc

SEQ ID NO: 163492 - DNA, 15 bp, Homo sapiens
caaacagaggttagt

SEQ ID NO: 163493 - DNA, 15 bp, Homo sapiens
gcaaacagaggttag

SEQ ID NO: 163494 - DNA, 15 bp, Homo sapiens
ggcaaacagaggtta

SEQ ID NO: 163495 - DNA, 15 bp, Homo sapiens
aggcaaacagaggtt

SEQ ID NO: 163496 - DNA, 15 bp, Homo sapiens
caggcaaacagaggt

SEQ ID NO: 163497 - DNA, 15 bp, Homo sapiens
gcaggcaaacagagg

SEQ ID NO: 163498 - DNA, 15 bp, Homo sapiens
ggcaggcaaacagag

SEQ ID NO: 163499 - DNA, 15 bp, Homo sapiens
tggcaggcaaacaga

SEQ ID NO: 163500 - DNA, 15 bp, Homo sapiens
ctggcaggcaaacag

SEQ ID NO: 163501 - DNA, 15 bp, Homo sapiens
actggcaggcaaaca

SEQ ID NO: 163502 - DNA, 15 bp, Homo sapiens
cactggcaggcaaac

SEQ ID NO: 163503 - DNA, 15 bp, Homo sapiens
tcactggcaggcaaa

SEQ ID NO: 163504 - DNA, 15 bp, Homo sapiens
atcactggcaggcaa

SEQ ID NO: 163505 - DNA, 15 bp, Homo sapiens
catcactggcaggca

SEQ ID NO: 163506 - DNA, 15 bp, Homo sapiens
ccatcactggcaggc

SEQ ID NO: 163507 - DNA, 15 bp, Homo sapiens
cccatcactggcagg

SEQ ID NO: 163508 - DNA, 15 bp, Homo sapiens
tcccatcactggcag

SEQ ID NO: 163509 - DNA, 15 bp, Homo sapiens
ttcccatcactggca

SEQ ID NO: 163510 - DNA, 15 bp, Homo sapiens
cttcccatcactggc

SEQ ID NO: 163511 - DNA, 15 bp, Homo sapiens
ccttcccatcactgg

SEQ ID NO: 163512 - DNA, 15 bp, Homo sapiens
accttcccatcactg

SEQ ID NO: 163513 - DNA, 15 bp, Homo sapiens
caccttcccatcact

SEQ ID NO: 163514 - DNA, 15 bp, Homo sapiens
gcaccttcccatcac

SEQ ID NO: 163515 - DNA, 15 bp, Homo sapiens
ggcaccttcccatca

SEQ ID NO: 163516 - DNA, 15 bp, Homo sapiens
aggcaccttcccatc

SEQ ID NO: 163517 - DNA, 15 bp, Homo sapiens
aaggcaccttcccat

SEQ ID NO: 163518 - DNA, 15 bp, Homo sapiens
caaggcaccttccca

SEQ ID NO: 163519 - DNA, 15 bp, Homo sapiens
ccaaggcaccttccc

SEQ ID NO: 163520 - DNA, 15 bp, Homo sapiens
cccaaggcaccttcc

SEQ ID NO: 163521 - DNA, 15 bp, Homo sapiens
ccccaaggcaccttc

SEQ ID NO: 163522 - DNA, 15 bp, Homo sapiens
tccccaaggcacctt

SEQ ID NO: 163523 - DNA, 15 bp, Homo sapiens
ctccccaaggcacct

SEQ ID NO: 163524 - DNA, 15 bp, Homo sapiens
gctccccaaggcacc

SEQ ID NO: 163525 - DNA, 15 bp, Homo sapiens
tgctccccaaggcac

SEQ ID NO: 163526 - DNA, 15 bp, Homo sapiens
atgctccccaaggca

SEQ ID NO: 163527 - DNA, 15 bp, Homo sapiens
aatgctccccaaggc

SEQ ID NO: 163528 - DNA, 15 bp, Homo sapiens
taatgctccccaagg

SEQ ID NO: 163529 - DNA, 15 bp, Homo sapiens
ttaatgctccccaag

SEQ ID NO: 163530 - DNA, 15 bp, Homo sapiens
cttaatgctccccaa

SEQ ID NO: 163531 - DNA, 15 bp, Homo sapiens
tcttaatgctcccca

SEQ ID NO: 163532 - DNA, 15 bp, Homo sapiens
gtcttaatgctcccc

SEQ ID NO: 163533 - DNA, 15 bp, Homo sapiens
agtcttaatgctccc

SEQ ID NO: 163534 - DNA, 15 bp, Homo sapiens
aagtcttaatgctcc

SEQ ID NO: 163535 - DNA, 15 bp, Homo sapiens
taagtcttaatgctc

SEQ ID NO: 163536 - DNA, 15 bp, Homo sapiens
ctaagtcttaatgct

SEQ ID NO: 163537 - DNA, 15 bp, Homo sapiens
gctaagtcttaatgc

SEQ ID NO: 163538 - DNA, 15 bp, Homo sapiens
agctaagtcttaatg

SEQ ID NO: 163539 - DNA, 15 bp, Homo sapiens
gagctaagtcttaat

SEQ ID NO: 163540 - DNA, 15 bp, Homo sapiens
ggagctaagtcttaa

SEQ ID NO: 163541 - DNA, 15 bp, Homo sapiens
gggagctaagtctta

SEQ ID NO: 163542 - DNA, 15 bp, Homo sapiens
agggagctaagtctt

SEQ ID NO: 163543 - DNA, 15 bp, Homo sapiens
cagggagctaagtct

SEQ ID NO: 163544 - DNA, 15 bp, Homo sapiens
ccagggagctaagtc

SEQ ID NO: 163545 - DNA, 15 bp, Homo sapiens
cccagggagctaagt

SEQ ID NO: 163546 - DNA, 15 bp, Homo sapiens
acccagggagctaag

SEQ ID NO: 163547 - DNA, 15 bp, Homo sapiens
aacccagggagctaa

SEQ ID NO: 163548 - DNA, 15 bp, Homo sapiens
gaacccagggagcta

SEQ ID NO: 163549 - DNA, 15 bp, Homo sapiens
agaacccagggagct

SEQ ID NO: 163550 - DNA, 15 bp, Homo sapiens
cagaacccagggagc

SEQ ID NO: 163551 - DNA, 15 bp, Homo sapiens
ccagaacccagggag

SEQ ID NO: 163552 - DNA, 15 bp, Homo sapiens
tccagaacccaggga

SEQ ID NO: 163553 - DNA, 15 bp, Homo sapiens
ttccagaacccaggg

SEQ ID NO: 163554 - DNA, 15 bp, Homo sapiens
cttccagaacccagg

SEQ ID NO: 163555 - DNA, 15 bp, Homo sapiens
ccttccagaacccag

SEQ ID NO: 163556 - DNA, 15 bp, Homo sapiens
gccttccagaaccca

SEQ ID NO: 163557 - DNA, 15 bp, Homo sapiens
tgccttccagaaccc

SEQ ID NO: 163558 - DNA, 15 bp, Homo sapiens
gtgccttccagaacc

SEQ ID NO: 163559 - DNA, 15 bp, Homo sapiens
tgtgccttccagaac

SEQ ID NO: 163560 - DNA, 15 bp, Homo sapiens
gtgtgccttccagaa

SEQ ID NO: 163561 - DNA, 15 bp, Homo sapiens
ggtgtgccttccaga

SEQ ID NO: 163562 - DNA, 15 bp, Homo sapiens
tggtgtgccttccag

SEQ ID NO: 163563 - DNA, 15 bp, Homo sapiens
ctggtgtgccttcca

SEQ ID NO: 163564 - DNA, 15 bp, Homo sapiens
tctggtgtgccttcc

SEQ ID NO: 163565 - DNA, 15 bp, Homo sapiens
ttctggtgtgccttc

SEQ ID NO: 163566 - DNA, 15 bp, Homo sapiens
tttctggtgtgcctt

SEQ ID NO: 163567 - DNA, 15 bp, Homo sapiens
ctttctggtgtgcct

SEQ ID NO: 163568 - DNA, 15 bp, Homo sapiens
actttctggtgtgcc

SEQ ID NO: 163569 - DNA, 15 bp, Homo sapiens
cactttctggtgtgc

SEQ ID NO: 163570 - DNA, 15 bp, Homo sapiens
ccactttctggtgtg

SEQ ID NO: 163571 - DNA, 15 bp, Homo sapiens
cccactttctggtgt

SEQ ID NO: 163572 - DNA, 15 bp, Homo sapiens
gcccactttctggtg

SEQ ID NO: 163573 - DNA, 15 bp, Homo sapiens
agcccactttctggt

SEQ ID NO: 163574 - DNA, 15 bp, Homo sapiens
aagcccactttctgg

SEQ ID NO: 163575 - DNA, 15 bp, Homo sapiens
gaagcccactttctg

SEQ ID NO: 163576 - DNA, 15 bp, Homo sapiens
ggaagcccactttct

SEQ ID NO: 163577 - DNA, 15 bp, Homo sapiens
tggaagcccactttc

SEQ ID NO: 163578 - DNA, 15 bp, Homo sapiens
atggaagcccacttt

SEQ ID NO: 163579 - DNA, 15 bp, Homo sapiens
gatggaagcccactt

SEQ ID NO: 163580 - DNA, 15 bp, Homo sapiens
agatggaagcccact

SEQ ID NO: 163581 - DNA, 15 bp, Homo sapiens
cagatggaagcccac

SEQ ID NO: 163582 - DNA, 15 bp, Homo sapiens
acagatggaagccca

SEQ ID NO: 163583 - DNA, 15 bp, Homo sapiens
gacagatggaagccc

SEQ ID NO: 163584 - DNA, 15 bp, Homo sapiens
ggacagatggaagcc

SEQ ID NO: 163585 - DNA, 15 bp, Homo sapiens
tggacagatggaagc

SEQ ID NO: 163586 - DNA, 15 bp, Homo sapiens
ctggacagatggaag

SEQ ID NO: 163587 - DNA, 15 bp, Homo sapiens
tctggacagatggaa

SEQ ID NO: 163588 - DNA, 15 bp, Homo sapiens
ttctggacagatgga

SEQ ID NO: 163589 - DNA, 15 bp, Homo sapiens
tttctggacagatgg

SEQ ID NO: 163590 - DNA, 15 bp, Homo sapiens
ctttctggacagatg

SEQ ID NO: 163591 - DNA, 15 bp, Homo sapiens
cctttctggacagat

SEQ ID NO: 163592 - DNA, 15 bp, Homo sapiens
acctttctggacaga

SEQ ID NO: 163593 - DNA, 15 bp, Homo sapiens
cacctttctggacag

SEQ ID NO: 163594 - DNA, 15 bp, Homo sapiens
gcacctttctggaca

SEQ ID NO: 163595 - DNA, 15 bp, Homo sapiens
tgcacctttctggac

SEQ ID NO: 163596 - DNA, 15 bp, Homo sapiens
ctgcacctttctgga

SEQ ID NO: 163597 - DNA, 15 bp, Homo sapiens
gctgcacctttctgg

SEQ ID NO: 163598 - DNA, 15 bp, Homo sapiens
ggctgcacctttctg

SEQ ID NO: 163599 - DNA, 15 bp, Homo sapiens
tggctgcacctttct

SEQ ID NO: 163600 - DNA, 15 bp, Homo sapiens
ttggctgcacctttc

SEQ ID NO: 163601 - DNA, 15 bp, Homo sapiens
cttggctgcaccttt

SEQ ID NO: 163602 - DNA, 15 bp, Homo sapiens
tcttggctgcacctt

SEQ ID NO: 163603 - DNA, 15 bp, Homo sapiens
atcttggctgcacct

SEQ ID NO: 163604 - DNA, 15 bp, Homo sapiens
aatcttggctgcacc

SEQ ID NO: 163605 - DNA, 15 bp, Homo sapiens
gaatcttggctgcac

SEQ ID NO: 163606 - DNA, 15 bp, Homo sapiens
ggaatcttggctgca

SEQ ID NO: 163607 - DNA, 15 bp, Homo sapiens
gggaatcttggctgc

SEQ ID NO: 163608 - DNA, 15 bp, Homo sapiens
cgggaatcttggctg

SEQ ID NO: 163609 - DNA, 15 bp, Homo sapiens
acgggaatcttggct

SEQ ID NO: 163610 - DNA, 15 bp, Homo sapiens
aacgggaatcttggc

SEQ ID NO: 163611 - DNA, 15 bp, Homo sapiens
aaacgggaatcttgg

SEQ ID NO: 163612 - DNA, 15 bp, Homo sapiens
aaaacgggaatcttg

SEQ ID NO: 163613 - DNA, 15 bp, Homo sapiens
caaaacgggaatctt

SEQ ID NO: 163614 - DNA, 15 bp, Homo sapiens
ccaaaacgggaatct

SEQ ID NO: 163615 - DNA, 15 bp, Homo sapiens
tccaaaacgggaatc

SEQ ID NO: 163616 - DNA, 15 bp, Homo sapiens
ctccaaaacgggaat

SEQ ID NO: 163617 - DNA, 15 bp, Homo sapiens
cctccaaaacgggaa

SEQ ID NO: 163618 - DNA, 15 bp, Homo sapiens
tcctccaaaacggga

SEQ ID NO: 163619 - DNA, 15 bp, Homo sapiens
ctcctccaaaacggg

SEQ ID NO: 163620 - DNA, 15 bp, Homo sapiens
cctcctccaaaacgg

SEQ ID NO: 163621 - DNA, 15 bp, Homo sapiens
gcctcctccaaaacg

SEQ ID NO: 163622 - DNA, 15 bp, Homo sapiens
tgcctcctccaaaac

SEQ ID NO: 163623 - DNA, 15 bp, Homo sapiens
ctgcctcctccaaaa

SEQ ID NO: 163624 - DNA, 15 bp, Homo sapiens
cctgcctcctccaaa

SEQ ID NO: 163625 - DNA, 15 bp, Homo sapiens
tcctgcctcctccaa

SEQ ID NO: 163626 - DNA, 15 bp, Homo sapiens
atcctgcctcctcca

SEQ ID NO: 163627 - DNA, 15 bp, Homo sapiens
aatcctgcctcctcc

SEQ ID NO: 163628 - DNA, 15 bp, Homo sapiens
caatcctgcctcctc

SEQ ID NO: 163629 - DNA, 15 bp, Homo sapiens
ccaatcctgcctcct

SEQ ID NO: 163630 - DNA, 15 bp, Homo sapiens
tccaatcctgcctcc

SEQ ID NO: 163631 - DNA, 15 bp, Homo sapiens
atccaatcctgcctc

SEQ ID NO: 163632 - DNA, 15 bp, Homo sapiens
catccaatcctgcct

SEQ ID NO: 163633 - DNA, 15 bp, Homo sapiens
gcatccaatcctgcc

SEQ ID NO: 163634 - DNA, 15 bp, Homo sapiens
ggcatccaatcctgc

SEQ ID NO: 163635 - DNA, 15 bp, Homo sapiens
gggcatccaatcctg

SEQ ID NO: 163636 - DNA, 15 bp, Homo sapiens
cgggcatccaatcct

SEQ ID NO: 163637 - DNA, 15 bp, Homo sapiens
gcgggcatccaatcc

SEQ ID NO: 163638 - DNA, 15 bp, Homo sapiens
ggcgggcatccaatc

SEQ ID NO: 163639 - DNA, 15 bp, Homo sapiens
tggcgggcatccaat

SEQ ID NO: 163640 - DNA, 15 bp, Homo sapiens
atggcgggcatccaa

SEQ ID NO: 163641 - DNA, 15 bp, Homo sapiens
catggcgggcatcca

SEQ ID NO: 163642 - DNA, 15 bp, Homo sapiens
ccatggcgggcatcc

SEQ ID NO: 163643 - DNA, 15 bp, Homo sapiens
gccatggcgggcatc

SEQ ID NO: 163644 - DNA, 15 bp, Homo sapiens
ggccatggcgggcat

SEQ ID NO: 163645 - DNA, 15 bp, Homo sapiens
aggccatggcgggca

SEQ ID NO: 163646 - DNA, 15 bp, Homo sapiens
gaggccatggcgggc

SEQ ID NO: 163647 - DNA, 15 bp, Homo sapiens
tgaggccatggcggg

SEQ ID NO: 163648 - DNA, 15 bp, Homo sapiens
ctgaggccatggcgg

SEQ ID NO: 163649 - DNA, 15 bp, Homo sapiens
cctgaggccatggcg

SEQ ID NO: 163650 - DNA, 15 bp, Homo sapiens
acctgaggccatggc

SEQ ID NO: 163651 - DNA, 15 bp, Homo sapiens
cacctgaggccatgg

SEQ ID NO: 163652 - DNA, 15 bp, Homo sapiens
ccacctgaggccatg

SEQ ID NO: 163653 - DNA, 15 bp, Homo sapiens
tccacctgaggccat

SEQ ID NO: 163654 - DNA, 15 bp, Homo sapiens
ttccacctgaggcca

SEQ ID NO: 163655 - DNA, 15 bp, Homo sapiens
attccacctgaggcc

SEQ ID NO: 163656 - DNA, 15 bp, Homo sapiens
aattccacctgaggc

SEQ ID NO: 163657 - DNA, 15 bp, Homo sapiens
caattccacctgagg

SEQ ID NO: 163658 - DNA, 15 bp, Homo sapiens
gcaattccacctgag

SEQ ID NO: 163659 - DNA, 15 bp, Homo sapiens
tgcaattccacctga

SEQ ID NO: 163660 - DNA, 15 bp, Homo sapiens
ttgcaattccacctg

SEQ ID NO: 163661 - DNA, 15 bp, Homo sapiens
attgcaattccacct

SEQ ID NO: 163662 - DNA, 15 bp, Homo sapiens
cattgcaattccacc

SEQ ID NO: 163663 - DNA, 15 bp, Homo sapiens
acattgcaattccac

SEQ ID NO: 163664 - DNA, 15 bp, Homo sapiens
cacattgcaattcca

SEQ ID NO: 163665 - DNA, 15 bp, Homo sapiens
ccacattgcaattcc

SEQ ID NO: 163666 - DNA, 15 bp, Homo sapiens
accacattgcaattc

SEQ ID NO: 163667 - DNA, 15 bp, Homo sapiens
caccacattgcaatt

SEQ ID NO: 163668 - DNA, 15 bp, Homo sapiens
ccaccacattgcaat

SEQ ID NO: 163669 - DNA, 15 bp, Homo sapiens
gccaccacattgcaa

SEQ ID NO: 163670 - DNA, 15 bp, Homo sapiens
agccaccacattgca

SEQ ID NO: 163671 - DNA, 15 bp, Homo sapiens
cagccaccacattgc

SEQ ID NO: 163672 - DNA, 15 bp, Homo sapiens
acagccaccacattg

SEQ ID NO: 163673 - DNA, 15 bp, Homo sapiens
aacagccaccacatt

SEQ ID NO: 163674 - DNA, 15 bp, Homo sapiens
aaacagccaccacat

SEQ ID NO: 163675 - DNA, 15 bp, Homo sapiens
caaacagccaccaca

SEQ ID NO: 163676 - DNA, 15 bp, Homo sapiens
ccaaacagccaccac

SEQ ID NO: 163677 - DNA, 15 bp, Homo sapiens
accaaacagccacca

SEQ ID NO: 163678 - DNA, 15 bp, Homo sapiens
gaccaaacagccacc

SEQ ID NO: 163679 - DNA, 15 bp, Homo sapiens
ggaccaaacagccac

SEQ ID NO: 163680 - DNA, 15 bp, Homo sapiens
tggaccaaacagcca

SEQ ID NO: 163681 - DNA, 15 bp, Homo sapiens
ttggaccaaacagcc

SEQ ID NO: 163682 - DNA, 15 bp, Homo sapiens
cttggaccaaacagc

SEQ ID NO: 163683 - DNA, 15 bp, Homo sapiens
acttggaccaaacag

SEQ ID NO: 163684 - DNA, 15 bp, Homo sapiens
tacttggaccaaaca

SEQ ID NO: 163685 - DNA, 15 bp, Homo sapiens
gtacttggaccaaac

SEQ ID NO: 163686 - DNA, 15 bp, Homo sapiens
agtacttggaccaaa

SEQ ID NO: 163687 - DNA, 15 bp, Homo sapiens
tagtacttggaccaa

SEQ ID NO: 163688 - DNA, 15 bp, Homo sapiens
ttagtacttggacca

SEQ ID NO: 163689 - DNA, 15 bp, Homo sapiens
cttagtacttggacc

SEQ ID NO: 163690 - DNA, 15 bp, Homo sapiens
acttagtacttggac

SEQ ID NO: 163691 - DNA, 15 bp, Homo sapiens
cacttagtacttgga

SEQ ID NO: 163692 - DNA, 15 bp, Homo sapiens
gcacttagtacttgg

SEQ ID NO: 163693 - DNA, 15 bp, Homo sapiens
agcacttagtacttg

SEQ ID NO: 163694 - DNA, 15 bp, Homo sapiens
cagcacttagtactt

SEQ ID NO: 163695 - DNA, 15 bp, Homo sapiens
acagcacttagtact

SEQ ID NO: 163696 - DNA, 15 bp, Homo sapiens
tacagcacttagtac

SEQ ID NO: 163697 - DNA, 15 bp, Homo sapiens
ttacagcacttagta

SEQ ID NO: 163698 - DNA, 15 bp, Homo sapiens
tttacagcacttagt

SEQ ID NO: 163699 - DNA, 15 bp, Homo sapiens
ctttacagcacttag

SEQ ID NO: 163700 - DNA, 15 bp, Homo sapiens
tctttacagcactta

SEQ ID NO: 163701 - DNA, 15 bp, Homo sapiens
gtctttacagcactt

SEQ ID NO: 163702 - DNA, 15 bp, Homo sapiens
cgtctttacagcact

SEQ ID NO: 163703 - DNA, 15 bp, Homo sapiens
tcgtctttacagcac

SEQ ID NO: 163704 - DNA, 15 bp, Homo sapiens
atcgtctttacagca

SEQ ID NO: 163705 - DNA, 15 bp, Homo sapiens
tatcgtctttacagc

SEQ ID NO: 163706 - DNA, 15 bp, Homo sapiens
ttatcgtctttacag

SEQ ID NO: 163707 - DNA, 15 bp, Homo sapiens
gttatcgtctttaca

SEQ ID NO: 163708 - DNA, 15 bp, Homo sapiens
ggttatcgtctttac

SEQ ID NO: 163709 - DNA, 15 bp, Homo sapiens
aggttatcgtcttta

SEQ ID NO: 163710 - DNA, 15 bp, Homo sapiens
caggttatcgtcttt

SEQ ID NO: 163711 - DNA, 15 bp, Homo sapiens
gcaggttatcgtctt

SEQ ID NO: 163712 - DNA, 15 bp, Homo sapiens
agcaggttatcgtct

SEQ ID NO: 163713 - DNA, 15 bp, Homo sapiens
gagcaggttatcgtc

SEQ ID NO: 163714 - DNA, 15 bp, Homo sapiens
agagcaggttatcgt

SEQ ID NO: 163715 - DNA, 15 bp, Homo sapiens
cagagcaggttatcg

SEQ ID NO: 163716 - DNA, 15 bp, Homo sapiens
ccagagcaggttatc

SEQ ID NO: 163717 - DNA, 15 bp, Homo sapiens
tccagagcaggttat

SEQ ID NO: 163718 - DNA, 15 bp, Homo sapiens
ttccagagcaggtta

SEQ ID NO: 163719 - DNA, 15 bp, Homo sapiens
tttccagagcaggtt

SEQ ID NO: 163720 - DNA, 15 bp, Homo sapiens
ttttccagagcaggt

SEQ ID NO: 163721 - DNA, 15 bp, Homo sapiens
cttttccagagcagg

SEQ ID NO: 163722 - DNA, 15 bp, Homo sapiens
ccttttccagagcag

SEQ ID NO: 163723 - DNA, 15 bp, Homo sapiens
tccttttccagagca

SEQ ID NO: 163724 - DNA, 15 bp, Homo sapiens
ttccttttccagagc

SEQ ID NO: 163725 - DNA, 15 bp, Homo sapiens
tttccttttccagag

SEQ ID NO: 163726 - DNA, 15 bp, Homo sapiens
atttccttttccaga

SEQ ID NO: 163727 - DNA, 15 bp, Homo sapiens
gatttccttttccag

SEQ ID NO: 163728 - DNA, 15 bp, Homo sapiens
cgatttccttttcca

SEQ ID NO: 163729 - DNA, 15 bp, Homo sapiens
gcgatttccttttcc

SEQ ID NO: 163730 - DNA, 15 bp, Homo sapiens
agcgatttccttttc

SEQ ID NO: 163731 - DNA, 15 bp, Homo sapiens
tagcgatttcctttt

SEQ ID NO: 163732 - DNA, 15 bp, Homo sapiens
ctagcgatttccttt

SEQ ID NO: 163733 - DNA, 15 bp, Homo sapiens
actagcgatttcctt

SEQ ID NO: 163734 - DNA, 15 bp, Homo sapiens
cactagcgatttcct

SEQ ID NO: 163735 - DNA, 15 bp, Homo sapiens
gcactagcgatttcc

SEQ ID NO: 163736 - DNA, 15 bp, Homo sapiens
ggcactagcgatttc

SEQ ID NO: 163737 - DNA, 15 bp, Homo sapiens
aggcactagcgattt

SEQ ID NO: 163738 - DNA, 15 bp, Homo sapiens
aaggcactagcgatt

SEQ ID NO: 163739 - DNA, 15 bp, Homo sapiens
caaggcactagcgat

SEQ ID NO: 163740 - DNA, 15 bp, Homo sapiens
tcaaggcactagcga

SEQ ID NO: 163741 - DNA, 15 bp, Homo sapiens
ctcaaggcactagcg

SEQ ID NO: 163742 - DNA, 15 bp, Homo sapiens
tctcaaggcactagc

SEQ ID NO: 163743 - DNA, 15 bp, Homo sapiens
ctctcaaggcactag

SEQ ID NO: 163744 - DNA, 15 bp, Homo sapiens
tctctcaaggcacta

SEQ ID NO: 163745 - DNA, 15 bp, Homo sapiens
ttctctcaaggcact

SEQ ID NO: 163746 - DNA, 15 bp, Homo sapiens
gttctctcaaggcac

SEQ ID NO: 163747 - DNA, 15 bp, Homo sapiens
tgttctctcaaggca

SEQ ID NO: 163748 - DNA, 15 bp, Homo sapiens
ctgttctctcaaggc

SEQ ID NO: 163749 - DNA, 15 bp, Homo sapiens
actgttctctcaagg

SEQ ID NO: 163750 - DNA, 15 bp, Homo sapiens
aactgttctctcaag

SEQ ID NO: 163751 - DNA, 15 bp, Homo sapiens
gaactgttctctcaa

SEQ ID NO: 163752 - DNA, 15 bp, Homo sapiens
tgaactgttctctca

SEQ ID NO: 163753 - DNA, 15 bp, Homo sapiens
atgaactgttctctc

SEQ ID NO: 163754 - DNA, 15 bp, Homo sapiens
catgaactgttctct

SEQ ID NO: 163755 - DNA, 15 bp, Homo sapiens
gcatgaactgttctc

SEQ ID NO: 163756 - DNA, 15 bp, Homo sapiens
tgcatgaactgttct

SEQ ID NO: 163757 - DNA, 15 bp, Homo sapiens
atgcatgaactgttc

SEQ ID NO: 163758 - DNA, 15 bp, Homo sapiens
aatgcatgaactgtt

SEQ ID NO: 163759 - DNA, 15 bp, Homo sapiens
gaatgcatgaactgt

SEQ ID NO: 163760 - DNA, 15 bp, Homo sapiens
agaatgcatgaactg

SEQ ID NO: 163761 - DNA, 15 bp, Homo sapiens
gagaatgcatgaact

SEQ ID NO: 163762 - DNA, 15 bp, Homo sapiens
ggagaatgcatgaac

SEQ ID NO: 163763 - DNA, 15 bp, Homo sapiens
aggagaatgcatgaa

SEQ ID NO: 163764 - DNA, 15 bp, Homo sapiens
gaggagaatgcatga

SEQ ID NO: 163765 - DNA, 15 bp, Homo sapiens
ggaggagaatgcatg

SEQ ID NO: 163766 - DNA, 15 bp, Homo sapiens
aggaggagaatgcat

SEQ ID NO: 163767 - DNA, 15 bp, Homo sapiens
gaggaggagaatgca

SEQ ID NO: 163768 - DNA, 15 bp, Homo sapiens
agaggaggagaatgc

SEQ ID NO: 163769 - DNA, 15 bp, Homo sapiens
aagaggaggagaatg

SEQ ID NO: 163770 - DNA, 15 bp, Homo sapiens
caagaggaggagaat

SEQ ID NO: 163771 - DNA, 15 bp, Homo sapiens
acaagaggaggagaa

SEQ ID NO: 163772 - DNA, 15 bp, Homo sapiens
cacaagaggaggaga

SEQ ID NO: 163773 - DNA, 15 bp, Homo sapiens
gcacaagaggaggag

SEQ ID NO: 163774 - DNA, 15 bp, Homo sapiens
agcacaagaggagga

SEQ ID NO: 163775 - DNA, 15 bp, Homo sapiens
aagcacaagaggagg

SEQ ID NO: 163776 - DNA, 15 bp, Homo sapiens
gaagcacaagaggag

SEQ ID NO: 163777 - DNA, 15 bp, Homo sapiens
ggaagcacaagagga

SEQ ID NO: 163778 - DNA, 15 bp, Homo sapiens
gggaagcacaagagg

SEQ ID NO: 163779 - DNA, 15 bp, Homo sapiens
tgggaagcacaagag

SEQ ID NO: 163780 - DNA, 15 bp, Homo sapiens
ctgggaagcacaaga

SEQ ID NO: 163781 - DNA, 15 bp, Homo sapiens
gctgggaagcacaag

SEQ ID NO: 163782 - DNA, 15 bp, Homo sapiens
ggctgggaagcacaa

SEQ ID NO: 163783 - DNA, 15 bp, Homo sapiens
aggctgggaagcaca

SEQ ID NO: 163784 - DNA, 15 bp, Homo sapiens
gaggctgggaagcac

SEQ ID NO: 163785 - DNA, 15 bp, Homo sapiens
agaggctgggaagca

SEQ ID NO: 163786 - DNA, 15 bp, Homo sapiens
cagaggctgggaagc

SEQ ID NO: 163787 - DNA, 15 bp, Homo sapiens
gcagaggctgggaag

SEQ ID NO: 163788 - DNA, 15 bp, Homo sapiens
ggcagaggctgggaa

SEQ ID NO: 163789 - DNA, 15 bp, Homo sapiens
tggcagaggctggga

SEQ ID NO: 163790 - DNA, 15 bp, Homo sapiens
gtggcagaggctggg

SEQ ID NO: 163791 - DNA, 15 bp, Homo sapiens
ggtggcagaggctgg

SEQ ID NO: 163792 - DNA, 15 bp, Homo sapiens
tggtggcagaggctg

SEQ ID NO: 163793 - DNA, 15 bp, Homo sapiens
gtggtggcagaggct

SEQ ID NO: 163794 - DNA, 15 bp, Homo sapiens
agtggtggcagaggc

SEQ ID NO: 163795 - DNA, 15 bp, Homo sapiens
cagtggtggcagagg

SEQ ID NO: 163796 - DNA, 15 bp, Homo sapiens
gcagtggtggcagag

SEQ ID NO: 163797 - DNA, 15 bp, Homo sapiens
agcagtggtggcaga

SEQ ID NO: 163798 - DNA, 15 bp, Homo sapiens
aagcagtggtggcag

SEQ ID NO: 163799 - DNA, 15 bp, Homo sapiens
taagcagtggtggca

SEQ ID NO: 163800 - DNA, 15 bp, Homo sapiens
ttaagcagtggtggc

SEQ ID NO: 163801 - DNA, 15 bp, Homo sapiens
attaagcagtggtgg

SEQ ID NO: 163802 - DNA, 15 bp, Homo sapiens
aattaagcagtggtg

SEQ ID NO: 163803 - DNA, 15 bp, Homo sapiens
gaattaagcagtggt

SEQ ID NO: 163804 - DNA, 15 bp, Homo sapiens
agaattaagcagtgg

SEQ ID NO: 163805 - DNA, 15 bp, Homo sapiens
cagaattaagcagtg

SEQ ID NO: 163806 - DNA, 15 bp, Homo sapiens
ccagaattaagcagt

SEQ ID NO: 163807 - DNA, 15 bp, Homo sapiens
cccagaattaagcag

SEQ ID NO: 163808 - DNA, 15 bp, Homo sapiens
ccccagaattaagca

SEQ ID NO: 163809 - DNA, 15 bp, Homo sapiens
gccccagaattaagc

SEQ ID NO: 163810 - DNA, 15 bp, Homo sapiens
agccccagaattaag

SEQ ID NO: 163811 - DNA, 15 bp, Homo sapiens
aagccccagaattaa

SEQ ID NO: 163812 - DNA, 15 bp, Homo sapiens
taagccccagaatta

SEQ ID NO: 163813 - DNA, 15 bp, Homo sapiens
gtaagccccagaatt

SEQ ID NO: 163814 - DNA, 15 bp, Homo sapiens
ggtaagccccagaat

SEQ ID NO: 163815 - DNA, 15 bp, Homo sapiens
aggtaagccccagaa

SEQ ID NO: 163816 - DNA, 15 bp, Homo sapiens
aaggtaagccccaga

SEQ ID NO: 163817 - DNA, 15 bp, Homo sapiens
aaaggtaagccccag

SEQ ID NO: 163818 - DNA, 15 bp, Homo sapiens
taaaggtaagcccca

SEQ ID NO: 163819 - DNA, 15 bp, Homo sapiens
ctaaaggtaagcccc

SEQ ID NO: 163820 - DNA, 15 bp, Homo sapiens
actaaaggtaagccc

SEQ ID NO: 163821 - DNA, 15 bp, Homo sapiens
cactaaaggtaagcc

SEQ ID NO: 163822 - DNA, 15 bp, Homo sapiens
tcactaaaggtaagc

SEQ ID NO: 163823 - DNA, 15 bp, Homo sapiens
ctcactaaaggtaag

SEQ ID NO: 163824 - DNA, 15 bp, Homo sapiens
cctcactaaaggtaa

SEQ ID NO: 163825 - DNA, 15 bp, Homo sapiens
acctcactaaaggta

SEQ ID NO: 163826 - DNA, 15 bp, Homo sapiens
gacctcactaaaggt

SEQ ID NO: 163827 - DNA, 15 bp, Homo sapiens
tgacctcactaaagg

SEQ ID NO: 163828 - DNA, 15 bp, Homo sapiens
atgacctcactaaag

SEQ ID NO: 163829 - DNA, 15 bp, Homo sapiens
aatgacctcactaaa

SEQ ID NO: 163830 - DNA, 15 bp, Homo sapiens
aaatgacctcactaa

SEQ ID NO: 163831 - DNA, 15 bp, Homo sapiens
caaatgacctcacta

SEQ ID NO: 163832 - DNA, 15 bp, Homo sapiens
gcaaatgacctcact

SEQ ID NO: 163833 - DNA, 15 bp, Homo sapiens
ggcaaatgacctcac

SEQ ID NO: 163834 - DNA, 15 bp, Homo sapiens
gggcaaatgacctca

SEQ ID NO: 163835 - DNA, 15 bp, Homo sapiens
agggcaaatgacctc

SEQ ID NO: 163836 - DNA, 15 bp, Homo sapiens
cagggcaaatgacct

SEQ ID NO: 163837 - DNA, 15 bp, Homo sapiens
acagggcaaatgacc

SEQ ID NO: 163838 - DNA, 15 bp, Homo sapiens
tacagggcaaatgac

SEQ ID NO: 163839 - DNA, 15 bp, Homo sapiens
atacagggcaaatga

SEQ ID NO: 163840 - DNA, 15 bp, Homo sapiens
aatacagggcaaatg

SEQ ID NO: 163841 - DNA, 15 bp, Homo sapiens
gaatacagggcaaat

SEQ ID NO: 163842 - DNA, 15 bp, Homo sapiens
tgaatacagggcaaa

SEQ ID NO: 163843 - DNA, 15 bp, Homo sapiens
ctgaatacagggcaa

SEQ ID NO: 163844 - DNA, 15 bp, Homo sapiens
cctgaatacagggca

SEQ ID NO: 163845 - DNA, 15 bp, Homo sapiens
ccctgaatacagggc

SEQ ID NO: 163846 - DNA, 15 bp, Homo sapiens
tccctgaatacaggg

SEQ ID NO: 163847 - DNA, 15 bp, Homo sapiens
ctccctgaatacagg

SEQ ID NO: 163848 - DNA, 15 bp, Homo sapiens
gctccctgaatacag

SEQ ID NO: 163849 - DNA, 15 bp, Homo sapiens
agctccctgaataca

SEQ ID NO: 163850 - DNA, 15 bp, Homo sapiens
cagctccctgaatac

SEQ ID NO: 163851 - DNA, 15 bp, Homo sapiens
tcagctccctgaata

SEQ ID NO: 163852 - DNA, 15 bp, Homo sapiens
atcagctccctgaat

SEQ ID NO: 163853 - DNA, 15 bp, Homo sapiens
catcagctccctgaa

SEQ ID NO: 163854 - DNA, 15 bp, Homo sapiens
gcatcagctccctga

SEQ ID NO: 163855 - DNA, 15 bp, Homo sapiens
agcatcagctccctg

SEQ ID NO: 163856 - DNA, 15 bp, Homo sapiens
cagcatcagctccct

SEQ ID NO: 163857 - DNA, 15 bp, Homo sapiens
acagcatcagctccc

SEQ ID NO: 163858 - DNA, 15 bp, Homo sapiens
gacagcatcagctcc

SEQ ID NO: 163859 - DNA, 15 bp, Homo sapiens
tgacagcatcagctc

SEQ ID NO: 163860 - DNA, 15 bp, Homo sapiens
ctgacagcatcagct

SEQ ID NO: 163861 - DNA, 15 bp, Homo sapiens
gctgacagcatcagc

SEQ ID NO: 163862 - DNA, 15 bp, Homo sapiens
tgctgacagcatcag

SEQ ID NO: 163863 - DNA, 15 bp, Homo sapiens
gtgctgacagcatca

SEQ ID NO: 163864 - DNA, 15 bp, Homo sapiens
agtgctgacagcatc

SEQ ID NO: 163865 - DNA, 15 bp, Homo sapiens
cagtgctgacagcat

SEQ ID NO: 163866 - DNA, 15 bp, Homo sapiens
acagtgctgacagca

SEQ ID NO: 163867 - DNA, 15 bp, Homo sapiens
gacagtgctgacagc

SEQ ID NO: 163868 - DNA, 15 bp, Homo sapiens
ggacagtgctgacag

SEQ ID NO: 163869 - DNA, 15 bp, Homo sapiens
aggacagtgctgaca

SEQ ID NO: 163870 - DNA, 15 bp, Homo sapiens
taggacagtgctgac

SEQ ID NO: 163871 - DNA, 15 bp, Homo sapiens
ctaggacagtgctga

SEQ ID NO: 163872 - DNA, 15 bp, Homo sapiens
gctaggacagtgctg

SEQ ID NO: 163873 - DNA, 15 bp, Homo sapiens
tgctaggacagtgct

SEQ ID NO: 163874 - DNA, 15 bp, Homo sapiens
atgctaggacagtgc

SEQ ID NO: 163875 - DNA, 15 bp, Homo sapiens
aatgctaggacagtg

SEQ ID NO: 163876 - DNA, 15 bp, Homo sapiens
caatgctaggacagt

SEQ ID NO: 163877 - DNA, 15 bp, Homo sapiens
ccaatgctaggacag

SEQ ID NO: 163878 - DNA, 15 bp, Homo sapiens
tccaatgctaggaca

SEQ ID NO: 163879 - DNA, 15 bp, Homo sapiens
ttccaatgctaggac

SEQ ID NO: 163880 - DNA, 15 bp, Homo sapiens
gttccaatgctagga

SEQ ID NO: 163881 - DNA, 15 bp, Homo sapiens
cgttccaatgctagg

SEQ ID NO: 163882 - DNA, 15 bp, Homo sapiens
ccgttccaatgctag

SEQ ID NO: 163883 - DNA, 15 bp, Homo sapiens
accgttccaatgcta

SEQ ID NO: 163884 - DNA, 15 bp, Homo sapiens
caccgttccaatgct

SEQ ID NO: 163885 - DNA, 15 bp, Homo sapiens
ccaccgttccaatgc

SEQ ID NO: 163886 - DNA, 15 bp, Homo sapiens
cccaccgttccaatg

SEQ ID NO: 163887 - DNA, 15 bp, Homo sapiens
ccccaccgttccaat

SEQ ID NO: 163888 - DNA, 15 bp, Homo sapiens
gccccaccgttccaa

SEQ ID NO: 163889 - DNA, 15 bp, Homo sapiens
agccccaccgttcca

SEQ ID NO: 163890 - DNA, 15 bp, Homo sapiens
cagccccaccgttcc

SEQ ID NO: 163891 - DNA, 15 bp, Homo sapiens
acagccccaccgttc

SEQ ID NO: 163892 - DNA, 15 bp, Homo sapiens
aacagccccaccgtt

SEQ ID NO: 163893 - DNA, 15 bp, Homo sapiens
caacagccccaccgt

SEQ ID NO: 163894 - DNA, 15 bp, Homo sapiens
ccaacagccccaccg

SEQ ID NO: 163895 - DNA, 15 bp, Homo sapiens
cccaacagccccacc

SEQ ID NO: 163896 - DNA, 15 bp, Homo sapiens
ccccaacagccccac

SEQ ID NO: 163897 - DNA, 15 bp, Homo sapiens
tccccaacagcccca

SEQ ID NO: 163898 - DNA, 15 bp, Homo sapiens
ctccccaacagcccc

SEQ ID NO: 163899 - DNA, 15 bp, Homo sapiens
gctccccaacagccc

SEQ ID NO: 163900 - DNA, 15 bp, Homo sapiens
agctccccaacagcc

SEQ ID NO: 163901 - DNA, 15 bp, Homo sapiens
cagctccccaacagc

SEQ ID NO: 163902 - DNA, 15 bp, Homo sapiens
ccagctccccaacag

SEQ ID NO: 163903 - DNA, 15 bp, Homo sapiens
gccagctccccaaca

SEQ ID NO: 163904 - DNA, 15 bp, Homo sapiens
ggccagctccccaac

SEQ ID NO: 163905 - DNA, 15 bp, Homo sapiens
cggccagctccccaa

SEQ ID NO: 163906 - DNA, 15 bp, Homo sapiens
ccggccagctcccca

SEQ ID NO: 163907 - DNA, 15 bp, Homo sapiens
gccggccagctcccc

SEQ ID NO: 163908 - DNA, 15 bp, Homo sapiens
agccggccagctccc

SEQ ID NO: 163909 - DNA, 15 bp, Homo sapiens
gagccggccagctcc

SEQ ID NO: 163910 - DNA, 15 bp, Homo sapiens
cgagccggccagctc

SEQ ID NO: 163911 - DNA, 15 bp, Homo sapiens
acgagccggccagct

SEQ ID NO: 163912 - DNA, 15 bp, Homo sapiens
aacgagccggccagc

SEQ ID NO: 163913 - DNA, 15 bp, Homo sapiens
gaacgagccggccag

SEQ ID NO: 163914 - DNA, 15 bp, Homo sapiens
agaacgagccggcca

SEQ ID NO: 163915 - DNA, 15 bp, Homo sapiens
cagaacgagccggcc

SEQ ID NO: 163916 - DNA, 15 bp, Homo sapiens
ccagaacgagccggc

SEQ ID NO: 163917 - DNA, 15 bp, Homo sapiens
cccagaacgagccgg

SEQ ID NO: 163918 - DNA, 15 bp, Homo sapiens
gcccagaacgagccg

SEQ ID NO: 163919 - DNA, 15 bp, Homo sapiens
tgcccagaacgagcc

SEQ ID NO: 163920 - DNA, 15 bp, Homo sapiens
gtgcccagaacgagc

SEQ ID NO: 163921 - DNA, 15 bp, Homo sapiens
agtgcccagaacgag

SEQ ID NO: 163922 - DNA, 15 bp, Homo sapiens
cagtgcccagaacga

SEQ ID NO: 163923 - DNA, 15 bp, Homo sapiens
ccagtgcccagaacg

SEQ ID NO: 163924 - DNA, 15 bp, Homo sapiens
accagtgcccagaac

SEQ ID NO: 163925 - DNA, 15 bp, Homo sapiens
caccagtgcccagaa

SEQ ID NO: 163926 - DNA, 15 bp, Homo sapiens
ccaccagtgcccaga

SEQ ID NO: 163927 - DNA, 15 bp, Homo sapiens
tccaccagtgcccag

SEQ ID NO: 163928 - DNA, 15 bp, Homo sapiens
ctccaccagtgccca

SEQ ID NO: 163929 - DNA, 15 bp, Homo sapiens
cctccaccagtgccc

SEQ ID NO: 163930 - DNA, 15 bp, Homo sapiens
gcctccaccagtgcc

SEQ ID NO: 163931 - DNA, 15 bp, Homo sapiens
tgcctccaccagtgc

SEQ ID NO: 163932 - DNA, 15 bp, Homo sapiens
ttgcctccaccagtg

SEQ ID NO: 163933 - DNA, 15 bp, Homo sapiens
cttgcctccaccagt

SEQ ID NO: 163934 - DNA, 15 bp, Homo sapiens
tcttgcctccaccag

SEQ ID NO: 163935 - DNA, 15 bp, Homo sapiens
ttcttgcctccacca

SEQ ID NO: 163936 - DNA, 15 bp, Homo sapiens
attcttgcctccacc

SEQ ID NO: 163937 - DNA, 15 bp, Homo sapiens
cattcttgcctccac

SEQ ID NO: 163938 - DNA, 15 bp, Homo sapiens
tcattcttgcctcca

SEQ ID NO: 163939 - DNA, 15 bp, Homo sapiens
ctcattcttgcctcc

SEQ ID NO: 163940 - DNA, 15 bp, Homo sapiens
cctcattcttgcctc

SEQ ID NO: 163941 - DNA, 15 bp, Homo sapiens
acctcattcttgcct

SEQ ID NO: 163942 - DNA, 15 bp, Homo sapiens
aacctcattcttgcc

SEQ ID NO: 163943 - DNA, 15 bp, Homo sapiens
aaacctcattcttgc

SEQ ID NO: 163944 - DNA, 15 bp, Homo sapiens
taaacctcattcttg

SEQ ID NO: 163945 - DNA, 15 bp, Homo sapiens
ctaaacctcattctt

SEQ ID NO: 163946 - DNA, 15 bp, Homo sapiens
tctaaacctcattct

SEQ ID NO: 163947 - DNA, 15 bp, Homo sapiens
ctctaaacctcattc

SEQ ID NO: 163948 - DNA, 15 bp, Homo sapiens
tctctaaacctcatt

SEQ ID NO: 163949 - DNA, 15 bp, Homo sapiens
ttctctaaacctcat

SEQ ID NO: 163950 - DNA, 15 bp, Homo sapiens
tttctctaaacctca

SEQ ID NO: 163951 - DNA, 15 bp, Homo sapiens
atttctctaaacctc

SEQ ID NO: 163952 - DNA, 15 bp, Homo sapiens
tatttctctaaacct

SEQ ID NO: 163953 - DNA, 15 bp, Homo sapiens
atatttctctaaacc

SEQ ID NO: 163954 - DNA, 15 bp, Homo sapiens
aatatttctctaaac

SEQ ID NO: 163955 - DNA, 15 bp, Homo sapiens
aaatatttctctaaa

SEQ ID NO: 163956 - DNA, 15 bp, Homo sapiens
taaatatttctctaa

SEQ ID NO: 163957 - DNA, 15 bp, Homo sapiens
gtaaatatttctcta

SEQ ID NO: 163958 - DNA, 15 bp, Homo sapiens
ggtaaatatttctct

SEQ ID NO: 163959 - DNA, 15 bp, Homo sapiens
gggtaaatatttctc

SEQ ID NO: 163960 - DNA, 15 bp, Homo sapiens
tgggtaaatatttct

SEQ ID NO: 163961 - DNA, 15 bp, Homo sapiens
ttgggtaaatatttc

SEQ ID NO: 163962 - DNA, 15 bp, Homo sapiens
tttgggtaaatattt

SEQ ID NO: 163963 - DNA, 15 bp, Homo sapiens
ctttgggtaaatatt

SEQ ID NO: 163964 - DNA, 15 bp, Homo sapiens
actttgggtaaatat

SEQ ID NO: 163965 - DNA, 15 bp, Homo sapiens
tactttgggtaaata

SEQ ID NO: 163966 - DNA, 15 bp, Homo sapiens
ttactttgggtaaat

SEQ ID NO: 163967 - DNA, 15 bp, Homo sapiens
attactttgggtaaa

SEQ ID NO: 163968 - DNA, 15 bp, Homo sapiens
gattactttgggtaa

SEQ ID NO: 163969 - DNA, 15 bp, Homo sapiens
ggattactttgggta

SEQ ID NO: 163970 - DNA, 15 bp, Homo sapiens
gggattactttgggt

SEQ ID NO: 163971 - DNA, 15 bp, Homo sapiens
agggattactttggg

SEQ ID NO: 163972 - DNA, 15 bp, Homo sapiens
aagggattactttgg

SEQ ID NO: 163973 - DNA, 15 bp, Homo sapiens
aaagggattactttg

SEQ ID NO: 163974 - DNA, 15 bp, Homo sapiens
caaagggattacttt

SEQ ID NO: 163975 - DNA, 15 bp, Homo sapiens
gcaaagggattactt

SEQ ID NO: 163976 - DNA, 15 bp, Homo sapiens
agcaaagggattact

SEQ ID NO: 163977 - DNA, 15 bp, Homo sapiens
tagcaaagggattac

SEQ ID NO: 163978 - DNA, 15 bp, Homo sapiens
atagcaaagggatta

SEQ ID NO: 163979 - DNA, 15 bp, Homo sapiens
catagcaaagggatt

SEQ ID NO: 163980 - DNA, 15 bp, Homo sapiens
gcatagcaaagggat

SEQ ID NO: 163981 - DNA, 15 bp, Homo sapiens
ggcatagcaaaggga

SEQ ID NO: 163982 - DNA, 15 bp, Homo sapiens
tggcatagcaaaggg

SEQ ID NO: 163983 - DNA, 15 bp, Homo sapiens
gtggcatagcaaagg

SEQ ID NO: 163984 - DNA, 15 bp, Homo sapiens
agtggcatagcaaag

SEQ ID NO: 163985 - DNA, 15 bp, Homo sapiens
cagtggcatagcaaa

SEQ ID NO: 163986 - DNA, 15 bp, Homo sapiens
gcagtggcatagcaa

SEQ ID NO: 163987 - DNA, 15 bp, Homo sapiens
ggcagtggcatagca

SEQ ID NO: 163988 - DNA, 15 bp, Homo sapiens
gggcagtggcatagc

SEQ ID NO: 163989 - DNA, 15 bp, Homo sapiens
tgggcagtggcatag

SEQ ID NO: 163990 - DNA, 15 bp, Homo sapiens
atgggcagtggcata

SEQ ID NO: 163991 - DNA, 15 bp, Homo sapiens
gatgggcagtggcat

SEQ ID NO: 163992 - DNA, 15 bp, Homo sapiens
agatgggcagtggca

SEQ ID NO: 163993 - DNA, 15 bp, Homo sapiens
gagatgggcagtggc

SEQ ID NO: 163994 - DNA, 15 bp, Homo sapiens
ggagatgggcagtgg

SEQ ID NO: 163995 - DNA, 15 bp, Homo sapiens
gggagatgggcagtg

SEQ ID NO: 163996 - DNA, 15 bp, Homo sapiens
tgggagatgggcagt

SEQ ID NO: 163997 - DNA, 15 bp, Homo sapiens
ctgggagatgggcag

SEQ ID NO: 163998 - DNA, 15 bp, Homo sapiens
cctgggagatgggca

SEQ ID NO: 163999 - DNA, 15 bp, Homo sapiens
tcctgggagatgggc

SEQ ID NO: 164000 - DNA, 15 bp, Homo sapiens
ctcctgggagatggg

SEQ ID NO: 164001 - DNA, 15 bp, Homo sapiens
cctcctgggagatgg

SEQ ID NO: 164002 - DNA, 15 bp, Homo sapiens
gcctcctgggagatg

SEQ ID NO: 164003 - DNA, 15 bp, Homo sapiens
agcctcctgggagat

SEQ ID NO: 164004 - DNA, 15 bp, Homo sapiens
cagcctcctgggaga

SEQ ID NO: 164005 - DNA, 15 bp, Homo sapiens
ccagcctcctgggag

SEQ ID NO: 164006 - DNA, 15 bp, Homo sapiens
cccagcctcctggga

SEQ ID NO: 164007 - DNA, 15 bp, Homo sapiens
gcccagcctcctggg

SEQ ID NO: 164008 - DNA, 15 bp, Homo sapiens
tgcccagcctcctgg

SEQ ID NO: 164009 - DNA, 15 bp, Homo sapiens
ttgcccagcctcctg

SEQ ID NO: 164010 - DNA, 15 bp, Homo sapiens
gttgcccagcctcct

SEQ ID NO: 164011 - DNA, 15 bp, Homo sapiens
tgttgcccagcctcc

SEQ ID NO: 164012 - DNA, 15 bp, Homo sapiens
ttgttgcccagcctc

SEQ ID NO: 164013 - DNA, 15 bp, Homo sapiens
tttgttgcccagcct

SEQ ID NO: 164014 - DNA, 15 bp, Homo sapiens
gtttgttgcccagcc

SEQ ID NO: 164015 - DNA, 15 bp, Homo sapiens
tgtttgttgcccagc

SEQ ID NO: 164016 - DNA, 15 bp, Homo sapiens
gtgtttgttgcccag

SEQ ID NO: 164017 - DNA, 15 bp, Homo sapiens
tgtgtttgttgccca

SEQ ID NO: 164018 - DNA, 15 bp, Homo sapiens
ctgtgtttgttgccc

SEQ ID NO: 164019 - DNA, 15 bp, Homo sapiens
cctgtgtttgttgcc

SEQ ID NO: 164020 - DNA, 15 bp, Homo sapiens
ccctgtgtttgttgc

SEQ ID NO: 164021 - DNA, 15 bp, Homo sapiens
accctgtgtttgttg

SEQ ID NO: 164022 - DNA, 15 bp, Homo sapiens
aaccctgtgtttgtt

SEQ ID NO: 164023 - DNA, 15 bp, Homo sapiens
gaaccctgtgtttgt

SEQ ID NO: 164024 - DNA, 15 bp, Homo sapiens
agaaccctgtgtttg

SEQ ID NO: 164025 - DNA, 15 bp, Homo sapiens
cagaaccctgtgttt

SEQ ID NO: 164026 - DNA, 15 bp, Homo sapiens
ccagaaccctgtgtt

SEQ ID NO: 164027 - DNA, 15 bp, Homo sapiens
accagaaccctgtgt

SEQ ID NO: 164028 - DNA, 15 bp, Homo sapiens
gaccagaaccctgtg

SEQ ID NO: 164029 - DNA, 15 bp, Homo sapiens
tgaccagaaccctgt

SEQ ID NO: 164030 - DNA, 15 bp, Homo sapiens
atgaccagaaccctg

SEQ ID NO: 164031 - DNA, 15 bp, Homo sapiens
gatgaccagaaccct

SEQ ID NO: 164032 - DNA, 15 bp, Homo sapiens
tgatgaccagaaccc

SEQ ID NO: 164033 - DNA, 15 bp, Homo sapiens
atgatgaccagaacc

SEQ ID NO: 164034 - DNA, 15 bp, Homo sapiens
aatgatgaccagaac

SEQ ID NO: 164035 - DNA, 15 bp, Homo sapiens
aaatgatgaccagaa

SEQ ID NO: 164036 - DNA, 15 bp, Homo sapiens
taaatgatgaccaga

SEQ ID NO: 164037 - DNA, 15 bp, Homo sapiens
ataaatgatgaccag

SEQ ID NO: 164038 - DNA, 15 bp, Homo sapiens
aataaatgatgacca

SEQ ID NO: 164039 - DNA, 15 bp, Homo sapiens
caataaatgatgacc

SEQ ID NO: 164040 - DNA, 15 bp, Homo sapiens
tcaataaatgatgac

SEQ ID NO: 164041 - DNA, 15 bp, Homo sapiens
ctcaataaatgatga

SEQ ID NO: 164042 - DNA, 15 bp, Homo sapiens
cctcaataaatgatg

SEQ ID NO: 164043 - DNA, 15 bp, Homo sapiens
ccctcaataaatgat

SEQ ID NO: 164044 - DNA, 15 bp, Homo sapiens
cccctcaataaatga

SEQ ID NO: 164045 - DNA, 15 bp, Homo sapiens
tcccctcaataaatg

SEQ ID NO: 164046 - DNA, 15 bp, Homo sapiens
gtcccctcaataaat

SEQ ID NO: 164047 - DNA, 15 bp, Homo sapiens
tgtcccctcaataaa

SEQ ID NO: 164048 - DNA, 15 bp, Homo sapiens
ttgtcccctcaataa

SEQ ID NO: 164049 - DNA, 15 bp, Homo sapiens
cttgtcccctcaata

SEQ ID NO: 164050 - DNA, 15 bp, Homo sapiens
gcttgtcccctcaat

SEQ ID NO: 164051 - DNA, 15 bp, Homo sapiens
agcttgtcccctcaa

SEQ ID NO: 164052 - DNA, 15 bp, Homo sapiens
aagcttgtcccctca

SEQ ID NO: 164053 - DNA, 15 bp, Homo sapiens
aaagcttgtcccctc

SEQ ID NO: 164054 - DNA, 15 bp, Homo sapiens
caaagcttgtcccct

SEQ ID NO: 164055 - DNA, 15 bp, Homo sapiens
gcaaagcttgtcccc

SEQ ID NO: 164056 - DNA, 15 bp, Homo sapiens
ggcaaagcttgtccc

SEQ ID NO: 164057 - DNA, 15 bp, Homo sapiens
aggcaaagcttgtcc

SEQ ID NO: 164058 - DNA, 15 bp, Homo sapiens
gaggcaaagcttgtc

SEQ ID NO: 164059 - DNA, 15 bp, Homo sapiens
ggaggcaaagcttgt

SEQ ID NO: 164060 - DNA, 15 bp, Homo sapiens
gggaggcaaagcttg

SEQ ID NO: 164061 - DNA, 15 bp, Homo sapiens
tgggaggcaaagctt

SEQ ID NO: 164062 - DNA, 15 bp, Homo sapiens
ttgggaggcaaagct

SEQ ID NO: 164063 - DNA, 15 bp, Homo sapiens
cttgggaggcaaagc

SEQ ID NO: 164064 - DNA, 15 bp, Homo sapiens
ccttgggaggcaaag

SEQ ID NO: 164065 - DNA, 15 bp, Homo sapiens
cccttgggaggcaaa

SEQ ID NO: 164066 - DNA, 15 bp, Homo sapiens
gcccttgggaggcaa

SEQ ID NO: 164067 - DNA, 15 bp, Homo sapiens
agcccttgggaggca

SEQ ID NO: 164068 - DNA, 15 bp, Homo sapiens
tagcccttgggaggc

SEQ ID NO: 164069 - DNA, 15 bp, Homo sapiens
ctagcccttgggagg

SEQ ID NO: 164070 - DNA, 15 bp, Homo sapiens
cctagcccttgggag

SEQ ID NO: 164071 - DNA, 15 bp, Homo sapiens
tcctagcccttggga

SEQ ID NO: 164072 - DNA, 15 bp, Homo sapiens
ctcctagcccttggg

SEQ ID NO: 164073 - DNA, 15 bp, Homo sapiens
cctcctagcccttgg

SEQ ID NO: 164074 - DNA, 15 bp, Homo sapiens
tcctcctagcccttg

SEQ ID NO: 164075 - DNA, 15 bp, Homo sapiens
ctcctcctagccctt

SEQ ID NO: 164076 - DNA, 15 bp, Homo sapiens
cctcctcctagccct

SEQ ID NO: 164077 - DNA, 15 bp, Homo sapiens
gcctcctcctagccc

SEQ ID NO: 164078 - DNA, 15 bp, Homo sapiens
tgcctcctcctagcc

SEQ ID NO: 164079 - DNA, 15 bp, Homo sapiens
ctgcctcctcctagc

SEQ ID NO: 164080 - DNA, 15 bp, Homo sapiens
cctgcctcctcctag

SEQ ID NO: 164081 - DNA, 15 bp, Homo sapiens
tcctgcctcctccta

SEQ ID NO: 164082 - DNA, 15 bp, Homo sapiens
ttcctgcctcctcct

SEQ ID NO: 164083 - DNA, 15 bp, Homo sapiens
gttcctgcctcctcc

SEQ ID NO: 164084 - DNA, 15 bp, Homo sapiens
tgttcctgcctcctc

SEQ ID NO: 164085 - DNA, 15 bp, Homo sapiens
ttgttcctgcctcct

SEQ ID NO: 164086 - DNA, 15 bp, Homo sapiens
tttgttcctgcctcc

SEQ ID NO: 164087 - DNA, 15 bp, Homo sapiens
ctttgttcctgcctc

SEQ ID NO: 164088 - DNA, 15 bp, Homo sapiens
cctttgttcctgcct

SEQ ID NO: 164089 - DNA, 15 bp, Homo sapiens
ccctttgttcctgcc

SEQ ID NO: 164090 - DNA, 15 bp, Homo sapiens
accctttgttcctgc

SEQ ID NO: 164091 - DNA, 15 bp, Homo sapiens
caccctttgttcctg

SEQ ID NO: 164092 - DNA, 15 bp, Homo sapiens
ccaccctttgttcct

SEQ ID NO: 164093 - DNA, 15 bp, Homo sapiens
accaccctttgttcc

SEQ ID NO: 164094 - DNA, 15 bp, Homo sapiens
caccaccctttgttc

SEQ ID NO: 164095 - DNA, 15 bp, Homo sapiens
ccaccaccctttgtt

SEQ ID NO: 164096 - DNA, 15 bp, Homo sapiens
accaccaccctttgt

SEQ ID NO: 164097 - DNA, 15 bp, Homo sapiens
taccaccaccctttg

SEQ ID NO: 164098 - DNA, 15 bp, Homo sapiens
gtaccaccacccttt

SEQ ID NO: 164099 - DNA, 15 bp, Homo sapiens
cgtaccaccaccctt

SEQ ID NO: 164100 - DNA, 15 bp, Homo sapiens
tcgtaccaccaccct

SEQ ID NO: 164101 - DNA, 15 bp, Homo sapiens
atcgtaccaccaccc

SEQ ID NO: 164102 - DNA, 15 bp, Homo sapiens
gatcgtaccaccacc

SEQ ID NO: 164103 - DNA, 15 bp, Homo sapiens
agatcgtaccaccac

SEQ ID NO: 164104 - DNA, 15 bp, Homo sapiens
cagatcgtaccacca

SEQ ID NO: 164105 - DNA, 15 bp, Homo sapiens
acagatcgtaccacc

SEQ ID NO: 164106 - DNA, 15 bp, Homo sapiens
cacagatcgtaccac

SEQ ID NO: 164107 - DNA, 15 bp, Homo sapiens
ccacagatcgtacca

SEQ ID NO: 164108 - DNA, 15 bp, Homo sapiens
accacagatcgtacc

SEQ ID NO: 164109 - DNA, 15 bp, Homo sapiens
gaccacagatcgtac

SEQ ID NO: 164110 - DNA, 15 bp, Homo sapiens
ggaccacagatcgta

SEQ ID NO: 164111 - DNA, 15 bp, Homo sapiens
gggaccacagatcgt

SEQ ID NO: 164112 - DNA, 15 bp, Homo sapiens
tgggaccacagatcg

SEQ ID NO: 164113 - DNA, 15 bp, Homo sapiens
ctgggaccacagatc

SEQ ID NO: 164114 - DNA, 15 bp, Homo sapiens
gctgggaccacagat

SEQ ID NO: 164115 - DNA, 15 bp, Homo sapiens
ggctgggaccacaga

SEQ ID NO: 164116 - DNA, 15 bp, Homo sapiens
gggctgggaccacag

SEQ ID NO: 164117 - DNA, 15 bp, Homo sapiens
ggggctgggaccaca

SEQ ID NO: 164118 - DNA, 15 bp, Homo sapiens
aggggctgggaccac

SEQ ID NO: 164119 - DNA, 15 bp, Homo sapiens
caggggctgggacca

SEQ ID NO: 164120 - DNA, 15 bp, Homo sapiens
gcaggggctgggacc

SEQ ID NO: 164121 - DNA, 15 bp, Homo sapiens
tgcaggggctgggac

SEQ ID NO: 164122 - DNA, 15 bp, Homo sapiens
ctgcaggggctggga

SEQ ID NO: 164123 - DNA, 15 bp, Homo sapiens
actgcaggggctggg

SEQ ID NO: 164124 - DNA, 15 bp, Homo sapiens
cactgcaggggctgg

SEQ ID NO: 164125 - DNA, 15 bp, Homo sapiens
ccactgcaggggctg

SEQ ID NO: 164126 - DNA, 15 bp, Homo sapiens
accactgcaggggct

SEQ ID NO: 164127 - DNA, 15 bp, Homo sapiens
gaccactgcaggggc

SEQ ID NO: 164128 - DNA, 15 bp, Homo sapiens
tgaccactgcagggg

SEQ ID NO: 164129 - DNA, 15 bp, Homo sapiens
ctgaccactgcaggg

SEQ ID NO: 164130 - DNA, 15 bp, Homo sapiens
cctgaccactgcagg

SEQ ID NO: 164131 - DNA, 15 bp, Homo sapiens
gcctgaccactgcag

SEQ ID NO: 164132 - DNA, 15 bp, Homo sapiens
ggcctgaccactgca

SEQ ID NO: 164133 - DNA, 15 bp, Homo sapiens
gggcctgaccactgc

SEQ ID NO: 164134 - DNA, 15 bp, Homo sapiens
agggcctgaccactg

SEQ ID NO: 164135 - DNA, 15 bp, Homo sapiens
cagggcctgaccact

SEQ ID NO: 164136 - DNA, 15 bp, Homo sapiens
ccagggcctgaccac

SEQ ID NO: 164137 - DNA, 15 bp, Homo sapiens
cccagggcctgacca

SEQ ID NO: 164138 - DNA, 15 bp, Homo sapiens
ccccagggcctgacc

SEQ ID NO: 164139 - DNA, 15 bp, Homo sapiens
gccccagggcctgac

SEQ ID NO: 164140 - DNA, 15 bp, Homo sapiens
ggccccagggcctga

SEQ ID NO: 164141 - DNA, 15 bp, Homo sapiens
aggccccagggcctg

SEQ ID NO: 164142 - DNA, 15 bp, Homo sapiens
gaggccccagggcct

SEQ ID NO: 164143 - DNA, 15 bp, Homo sapiens
ggaggccccagggcc

SEQ ID NO: 164144 - DNA, 15 bp, Homo sapiens
aggaggccccagggc

SEQ ID NO: 164145 - DNA, 15 bp, Homo sapiens
caggaggccccaggg

SEQ ID NO: 164146 - DNA, 15 bp, Homo sapiens
tcaggaggccccagg

SEQ ID NO: 164147 - DNA, 15 bp, Homo sapiens
ttcaggaggccccag

SEQ ID NO: 164148 - DNA, 15 bp, Homo sapiens
tttcaggaggcccca

SEQ ID NO: 164149 - DNA, 15 bp, Homo sapiens
ctttcaggaggcccc

SEQ ID NO: 164150 - DNA, 15 bp, Homo sapiens
gctttcaggaggccc

SEQ ID NO: 164151 - DNA, 15 bp, Homo sapiens
ggctttcaggaggcc

SEQ ID NO: 164152 - DNA, 15 bp, Homo sapiens
tggctttcaggaggc

SEQ ID NO: 164153 - DNA, 15 bp, Homo sapiens
atggctttcaggagg

SEQ ID NO: 164154 - DNA, 15 bp, Homo sapiens
gatggctttcaggag

SEQ ID NO: 164155 - DNA, 15 bp, Homo sapiens
tgatggctttcagga

SEQ ID NO: 164156 - DNA, 15 bp, Homo sapiens
ctgatggctttcagg

SEQ ID NO: 164157 - DNA, 15 bp, Homo sapiens
gctgatggctttcag

SEQ ID NO: 164158 - DNA, 15 bp, Homo sapiens
agctgatggctttca

SEQ ID NO: 164159 - DNA, 15 bp, Homo sapiens
gagctgatggctttc

SEQ ID NO: 164160 - DNA, 15 bp, Homo sapiens
ggagctgatggcttt

SEQ ID NO: 164161 - DNA, 15 bp, Homo sapiens
gggagctgatggctt

SEQ ID NO: 164162 - DNA, 15 bp, Homo sapiens
tgggagctgatggct

SEQ ID NO: 164163 - DNA, 15 bp, Homo sapiens
gtgggagctgatggc

SEQ ID NO: 164164 - DNA, 15 bp, Homo sapiens
agtgggagctgatgg

SEQ ID NO: 164165 - DNA, 15 bp, Homo sapiens
gagtgggagctgatg

SEQ ID NO: 164166 - DNA, 15 bp, Homo sapiens
ggagtgggagctgat

SEQ ID NO: 164167 - DNA, 15 bp, Homo sapiens
tggagtgggagctga

SEQ ID NO: 164168 - DNA, 15 bp, Homo sapiens
ttggagtgggagctg

SEQ ID NO: 164169 - DNA, 15 bp, Homo sapiens
cttggagtgggagct

SEQ ID NO: 164170 - DNA, 15 bp, Homo sapiens
gcttggagtgggagc

SEQ ID NO: 164171 - DNA, 15 bp, Homo sapiens
tgcttggagtgggag

SEQ ID NO: 164172 - DNA, 15 bp, Homo sapiens
ctgcttggagtggga

SEQ ID NO: 164173 - DNA, 15 bp, Homo sapiens
cctgcttggagtggg

SEQ ID NO: 164174 - DNA, 15 bp, Homo sapiens
gcctgcttggagtgg

SEQ ID NO: 164175 - DNA, 15 bp, Homo sapiens
agcctgcttggagtg

SEQ ID NO: 164176 - DNA, 15 bp, Homo sapiens
cagcctgcttggagt

SEQ ID NO: 164177 - DNA, 15 bp, Homo sapiens
gcagcctgcttggag

SEQ ID NO: 164178 - DNA, 15 bp, Homo sapiens
tgcagcctgcttgga

SEQ ID NO: 164179 - DNA, 15 bp, Homo sapiens
atgcagcctgcttgg

SEQ ID NO: 164180 - DNA, 15 bp, Homo sapiens
catgcagcctgcttg

SEQ ID NO: 164181 - DNA, 15 bp, Homo sapiens
acatgcagcctgctt

SEQ ID NO: 164182 - DNA, 15 bp, Homo sapiens
cacatgcagcctgct

SEQ ID NO: 164183 - DNA, 15 bp, Homo sapiens
gcacatgcagcctgc

SEQ ID NO: 164184 - DNA, 15 bp, Homo sapiens
tgcacatgcagcctg

SEQ ID NO: 164185 - DNA, 15 bp, Homo sapiens
ttgcacatgcagcct

SEQ ID NO: 164186 - DNA, 15 bp, Homo sapiens
tttgcacatgcagcc

SEQ ID NO: 164187 - DNA, 15 bp, Homo sapiens
ttttgcacatgcagc

SEQ ID NO: 164188 - DNA, 15 bp, Homo sapiens
attttgcacatgcag

SEQ ID NO: 164189 - DNA, 15 bp, Homo sapiens
cattttgcacatgca

SEQ ID NO: 164190 - DNA, 15 bp, Homo sapiens
tcattttgcacatgc

SEQ ID NO: 164191 - DNA, 15 bp, Homo sapiens
ttcattttgcacatg

SEQ ID NO: 164192 - DNA, 15 bp, Homo sapiens
attcattttgcacat

SEQ ID NO: 164193 - DNA, 15 bp, Homo sapiens
tattcattttgcaca

SEQ ID NO: 164194 - DNA, 15 bp, Homo sapiens
gtattcattttgcac

SEQ ID NO: 164195 - DNA, 15 bp, Homo sapiens
agtattcattttgca

SEQ ID NO: 164196 - DNA, 15 bp, Homo sapiens
cagtattcattttgc

SEQ ID NO: 164197 - DNA, 15 bp, Homo sapiens
ccagtattcattttg

SEQ ID NO: 164198 - DNA, 15 bp, Homo sapiens
tccagtattcatttt

SEQ ID NO: 164199 - DNA, 15 bp, Homo sapiens
atccagtattcattt

SEQ ID NO: 164200 - DNA, 15 bp, Homo sapiens
aatccagtattcatt

SEQ ID NO: 164201 - DNA, 15 bp, Homo sapiens
gaatccagtattcat

SEQ ID NO: 164202 - DNA, 15 bp, Homo sapiens
tgaatccagtattca

SEQ ID NO: 164203 - DNA, 15 bp, Homo sapiens
ttgaatccagtattc

SEQ ID NO: 164204 - DNA, 15 bp, Homo sapiens
tttgaatccagtatt

SEQ ID NO: 164205 - DNA, 15 bp, Homo sapiens
ttttgaatccagtat

SEQ ID NO: 164206 - DNA, 15 bp, Homo sapiens
cttttgaatccagta

SEQ ID NO: 164207 - DNA, 15 bp, Homo sapiens
gcttttgaatccagt

SEQ ID NO: 164208 - DNA, 15 bp, Homo sapiens
tgcttttgaatccag

SEQ ID NO: 164209 - DNA, 15 bp, Homo sapiens
atgcttttgaatcca

SEQ ID NO: 164210 - DNA, 15 bp, Homo sapiens
gatgcttttgaatcc

SEQ ID NO: 164211 - DNA, 15 bp, Homo sapiens
tgatgcttttgaatc

SEQ ID NO: 164212 - DNA, 15 bp, Homo sapiens
atgatgcttttgaat

SEQ ID NO: 164213 - DNA, 15 bp, Homo sapiens
catgatgcttttgaa

SEQ ID NO: 164214 - DNA, 15 bp, Homo sapiens
tcatgatgcttttga

SEQ ID NO: 164215 - DNA, 15 bp, Homo sapiens
ttcatgatgcttttg

SEQ ID NO: 164216 - DNA, 15 bp, Homo sapiens
cttcatgatgctttt

SEQ ID NO: 164217 - DNA, 15 bp, Homo sapiens
gcttcatgatgcttt

SEQ ID NO: 164218 - DNA, 15 bp, Homo sapiens
tgcttcatgatgctt

SEQ ID NO: 164219 - DNA, 15 bp, Homo sapiens
gtgcttcatgatgct

SEQ ID NO: 164220 - DNA, 15 bp, Homo sapiens
ggtgcttcatgatgc

SEQ ID NO: 164221 - DNA, 15 bp, Homo sapiens
tggtgcttcatgatg

SEQ ID NO: 164222 - DNA, 15 bp, Homo sapiens
ctggtgcttcatgat

SEQ ID NO: 164223 - DNA, 15 bp, Homo sapiens
tctggtgcttcatga

SEQ ID NO: 164224 - DNA, 15 bp, Homo sapiens
gtctggtgcttcatg

SEQ ID NO: 164225 - DNA, 15 bp, Homo sapiens
tgtctggtgcttcat

SEQ ID NO: 164226 - DNA, 15 bp, Homo sapiens
atgtctggtgcttca

SEQ ID NO: 164227 - DNA, 15 bp, Homo sapiens
catgtctggtgcttc

SEQ ID NO: 164228 - DNA, 15 bp, Homo sapiens
ccatgtctggtgctt

SEQ ID NO: 164229 - DNA, 15 bp, Homo sapiens
tccatgtctggtgct

SEQ ID NO: 164230 - DNA, 15 bp, Homo sapiens
ttccatgtctggtgc

SEQ ID NO: 164231 - DNA, 15 bp, Homo sapiens
tttccatgtctggtg

SEQ ID NO: 164232 - DNA, 15 bp, Homo sapiens
ctttccatgtctggt

SEQ ID NO: 164233 - DNA, 15 bp, Homo sapiens
gctttccatgtctgg

SEQ ID NO: 164234 - DNA, 15 bp, Homo sapiens
tgctttccatgtctg

SEQ ID NO: 164235 - DNA, 15 bp, Homo sapiens
atgctttccatgtct

SEQ ID NO: 164236 - DNA, 15 bp, Homo sapiens
aatgctttccatgtc

SEQ ID NO: 164237 - DNA, 15 bp, Homo sapiens
gaatgctttccatgt

SEQ ID NO: 164238 - DNA, 15 bp, Homo sapiens
tgaatgctttccatg

SEQ ID NO: 164239 - DNA, 15 bp, Homo sapiens
atgaatgctttccat

SEQ ID NO: 164240 - DNA, 15 bp, Homo sapiens
tatgaatgctttcca

SEQ ID NO: 164241 - DNA, 15 bp, Homo sapiens
ctatgaatgctttcc

SEQ ID NO: 164242 - DNA, 15 bp, Homo sapiens
actatgaatgctttc

SEQ ID NO: 164243 - DNA, 15 bp, Homo sapiens
gactatgaatgcttt

SEQ ID NO: 164244 - DNA, 15 bp, Homo sapiens
agactatgaatgctt

SEQ ID NO: 164245 - DNA, 15 bp, Homo sapiens
aagactatgaatgct

SEQ ID NO: 164246 - DNA, 15 bp, Homo sapiens
caagactatgaatgc

SEQ ID NO: 164247 - DNA, 15 bp, Homo sapiens
acaagactatgaatg

SEQ ID NO: 164248 - DNA, 15 bp, Homo sapiens
gacaagactatgaat

SEQ ID NO: 164249 - DNA, 15 bp, Homo sapiens
agacaagactatgaa

SEQ ID NO: 164250 - DNA, 15 bp, Homo sapiens
aagacaagactatga

SEQ ID NO: 164251 - DNA, 15 bp, Homo sapiens
taagacaagactatg

SEQ ID NO: 164252 - DNA, 15 bp, Homo sapiens
ctaagacaagactat

SEQ ID NO: 164253 - DNA, 15 bp, Homo sapiens
tctaagacaagacta

SEQ ID NO: 164254 - DNA, 15 bp, Homo sapiens
ctctaagacaagact

SEQ ID NO: 164255 - DNA, 15 bp, Homo sapiens
cctctaagacaagac

SEQ ID NO: 164256 - DNA, 15 bp, Homo sapiens
gcctctaagacaaga

SEQ ID NO: 164257 - DNA, 15 bp, Homo sapiens
tgcctctaagacaag

SEQ ID NO: 164258 - DNA, 15 bp, Homo sapiens
ttgcctctaagacaa

SEQ ID NO: 164259 - DNA, 15 bp, Homo sapiens
tttgcctctaagaca

SEQ ID NO: 164260 - DNA, 15 bp, Homo sapiens
ttttgcctctaagac

SEQ ID NO: 164261 - DNA, 15 bp, Homo sapiens
attttgcctctaaga

SEQ ID NO: 164262 - DNA, 15 bp, Homo sapiens
aattttgcctctaag

SEQ ID NO: 164263 - DNA, 15 bp, Homo sapiens
taattttgcctctaa

SEQ ID NO: 164264 - DNA, 15 bp, Homo sapiens
ataattttgcctcta

SEQ ID NO: 164265 - DNA, 15 bp, Homo sapiens
tataattttgcctct

SEQ ID NO: 164266 - DNA, 15 bp, Homo sapiens
atataattttgcctc

SEQ ID NO: 164267 - DNA, 15 bp, Homo sapiens
catataattttgcct

SEQ ID NO: 164268 - DNA, 15 bp, Homo sapiens
ccatataattttgcc

SEQ ID NO: 164269 - DNA, 15 bp, Homo sapiens
gccatataattttgc

SEQ ID NO: 164270 - DNA, 15 bp, Homo sapiens
tgccatataattttg

SEQ ID NO: 164271 - DNA, 15 bp, Homo sapiens
gtgccatataatttt

SEQ ID NO: 164272 - DNA, 15 bp, Homo sapiens
agtgccatataattt

SEQ ID NO: 164273 - DNA, 15 bp, Homo sapiens
aagtgccatataatt

SEQ ID NO: 164274 - DNA, 15 bp, Homo sapiens
taagtgccatataat

SEQ ID NO: 164275 - DNA, 15 bp, Homo sapiens
gtaagtgccatataa

SEQ ID NO: 164276 - DNA, 15 bp, Homo sapiens
tgtaagtgccatata

SEQ ID NO: 164277 - DNA, 15 bp, Homo sapiens
ctgtaagtgccatat

SEQ ID NO: 164278 - DNA, 15 bp, Homo sapiens
actgtaagtgccata

SEQ ID NO: 164279 - DNA, 15 bp, Homo sapiens
cactgtaagtgccat

SEQ ID NO: 164280 - DNA, 15 bp, Homo sapiens
acactgtaagtgcca

SEQ ID NO: 164281 - DNA, 15 bp, Homo sapiens
cacactgtaagtgcc

SEQ ID NO: 164282 - DNA, 15 bp, Homo sapiens
acacactgtaagtgc

SEQ ID NO: 164283 - DNA, 15 bp, Homo sapiens
aacacactgtaagtg

SEQ ID NO: 164284 - DNA, 15 bp, Homo sapiens
caacacactgtaagt

SEQ ID NO: 164285 - DNA, 15 bp, Homo sapiens
ccaacacactgtaag

SEQ ID NO: 164286 - DNA, 15 bp, Homo sapiens
cccaacacactgtaa

SEQ ID NO: 164287 - DNA, 15 bp, Homo sapiens
acccaacacactgta

SEQ ID NO: 164288 - DNA, 15 bp, Homo sapiens
cacccaacacactgt

SEQ ID NO: 164289 - DNA, 15 bp, Homo sapiens
gaacctgggaggcaa

SEQ ID NO: 164290 - DNA, 15 bp, Homo sapiens
tgaacctgggaggca

SEQ ID NO: 164291 - DNA, 15 bp, Homo sapiens
acttgaacctgggag

SEQ ID NO: 164292 - DNA, 15 bp, Homo sapiens
aagaatcacttgaac

SEQ ID NO: 164293 - DNA, 15 bp, Homo sapiens
gaagaatcacttgaa

SEQ ID NO: 164294 - DNA, 15 bp, Homo sapiens
agaagaatcacttga

SEQ ID NO: 164295 - DNA, 15 bp, Homo sapiens
cagaagaatcacttg

SEQ ID NO: 164296 - DNA, 15 bp, Homo sapiens
acagaagaatcactt

SEQ ID NO: 164297 - DNA, 15 bp, Homo sapiens
gacagaagaatcact

SEQ ID NO: 164298 - DNA, 15 bp, Homo sapiens
agacagaagaatcac

SEQ ID NO: 164299 - DNA, 15 bp, Homo sapiens
gagacagaagaatca

SEQ ID NO: 164300 - DNA, 15 bp, Homo sapiens
tgagacagaagaatc

SEQ ID NO: 164301 - DNA, 15 bp, Homo sapiens
ctgagacagaagaat

SEQ ID NO: 164302 - DNA, 15 bp, Homo sapiens
gctgagacagaagaa

SEQ ID NO: 164303 - DNA, 15 bp, Homo sapiens
ggctgagacagaaga

SEQ ID NO: 164304 - DNA, 15 bp, Homo sapiens
aggctgagacagaag

SEQ ID NO: 164305 - DNA, 15 bp, Homo sapiens
gaggctgagacagaa

SEQ ID NO: 164306 - DNA, 15 bp, Homo sapiens
ggaggctgagacaga

SEQ ID NO: 164307 - DNA, 15 bp, Homo sapiens
tggaggctgagacag

SEQ ID NO: 164308 - DNA, 15 bp, Homo sapiens
ctggaggctgagaca

SEQ ID NO: 164309 - DNA, 15 bp, Homo sapiens
tctggaggctgagac

SEQ ID NO: 164310 - DNA, 15 bp, Homo sapiens
ctctggaggctgaga

SEQ ID NO: 164311 - DNA, 15 bp, Homo sapiens
actctggaggctgag

SEQ ID NO: 164312 - DNA, 15 bp, Homo sapiens
tactctggaggctga

SEQ ID NO: 164313 - DNA, 15 bp, Homo sapiens
ctactctggaggctg

SEQ ID NO: 164314 - DNA, 15 bp, Homo sapiens
actactctggaggct

SEQ ID NO: 164315 - DNA, 15 bp, Homo sapiens
aactactctggaggc

SEQ ID NO: 164316 - DNA, 15 bp, Homo sapiens
caactactctggagg

SEQ ID NO: 164317 - DNA, 15 bp, Homo sapiens
ccaactactctggag

SEQ ID NO: 164318 - DNA, 15 bp, Homo sapiens
cccaactactctgga

SEQ ID NO: 164319 - DNA, 15 bp, Homo sapiens
tcccaactactctgg

SEQ ID NO: 164320 - DNA, 15 bp, Homo sapiens
atcccaactactctg

SEQ ID NO: 164321 - DNA, 15 bp, Homo sapiens
aatcccaactactct

SEQ ID NO: 164322 - DNA, 15 bp, Homo sapiens
taatcccaactactc

SEQ ID NO: 164323 - DNA, 15 bp, Homo sapiens
gtaatcccaactact

SEQ ID NO: 164324 - DNA, 15 bp, Homo sapiens
tgtaatcccaactac

SEQ ID NO: 164325 - DNA, 15 bp, Homo sapiens
ctgtaatcccaacta

SEQ ID NO: 164326 - DNA, 15 bp, Homo sapiens
cctgtaatcccaact

SEQ ID NO: 164327 - DNA, 15 bp, Homo sapiens
tgcctgtaatcccaa

SEQ ID NO: 164328 - DNA, 15 bp, Homo sapiens
aggtggcacatgcct

SEQ ID NO: 164329 - DNA, 15 bp, Homo sapiens
caggtggcacatgcc

SEQ ID NO: 164330 - DNA, 15 bp, Homo sapiens
acaggtggcacatgc

SEQ ID NO: 164331 - DNA, 15 bp, Homo sapiens
tacaggtggcacatg

SEQ ID NO: 164332 - DNA, 15 bp, Homo sapiens
ttacaggtggcacat

SEQ ID NO: 164333 - DNA, 15 bp, Homo sapiens
tttacaggtggcaca

SEQ ID NO: 164334 - DNA, 15 bp, Homo sapiens
ttttacaggtggcac

SEQ ID NO: 164335 - DNA, 15 bp, Homo sapiens
tttttacaggtggca

SEQ ID NO: 164336 - DNA, 15 bp, Homo sapiens
ttttttacaggtggc

SEQ ID NO: 164337 - DNA, 15 bp, Homo sapiens
tttttttacaggtgg

SEQ ID NO: 164338 - DNA, 15 bp, Homo sapiens
ttttttttacaggtg

SEQ ID NO: 164339 - DNA, 15 bp, Homo sapiens
attttttttacaggt

SEQ ID NO: 164340 - DNA, 15 bp, Homo sapiens
tattttttttacagg

SEQ ID NO: 164341 - DNA, 15 bp, Homo sapiens
gtattttttttacag

SEQ ID NO: 164342 - DNA, 15 bp, Homo sapiens
ggtattttttttaca

SEQ ID NO: 164343 - DNA, 15 bp, Homo sapiens
aggtattttttttac

SEQ ID NO: 164344 - DNA, 15 bp, Homo sapiens
caggtatttttttta

SEQ ID NO: 164345 - DNA, 15 bp, Homo sapiens
ccaggtatttttttt

SEQ ID NO: 164346 - DNA, 15 bp, Homo sapiens
gccaggtattttttt

SEQ ID NO: 164347 - DNA, 15 bp, Homo sapiens
agccaggtatttttt

SEQ ID NO: 164348 - DNA, 15 bp, Homo sapiens
tagccaggtattttt

SEQ ID NO: 164349 - DNA, 15 bp, Homo sapiens
ttagccaggtatttt

SEQ ID NO: 164350 - DNA, 15 bp, Homo sapiens
attagccaggtattt

SEQ ID NO: 164351 - DNA, 15 bp, Homo sapiens
aattagccaggtatt

SEQ ID NO: 164352 - DNA, 15 bp, Homo sapiens
aaattagccaggtat

SEQ ID NO: 164353 - DNA, 15 bp, Homo sapiens
aaaattagccaggta

SEQ ID NO: 164354 - DNA, 15 bp, Homo sapiens
tatggtgaaacccca

SEQ ID NO: 164355 - DNA, 15 bp, Homo sapiens
atatggtgaaacccc

SEQ ID NO: 164356 - DNA, 15 bp, Homo sapiens
aatatggtgaaaccc

SEQ ID NO: 164357 - DNA, 15 bp, Homo sapiens
caatatggtgaaacc

SEQ ID NO: 164358 - DNA, 15 bp, Homo sapiens
gcaatatggtgaaac

SEQ ID NO: 164359 - DNA, 15 bp, Homo sapiens
ggcaatatggtgaaa

SEQ ID NO: 164360 - DNA, 15 bp, Homo sapiens
gggcaatatggtgaa

SEQ ID NO: 164361 - DNA, 15 bp, Homo sapiens
tgggcaatatggtga

SEQ ID NO: 164362 - DNA, 15 bp, Homo sapiens
ctgggcaatatggtg

SEQ ID NO: 164363 - DNA, 15 bp, Homo sapiens
cctgggcaatatggt

SEQ ID NO: 164364 - DNA, 15 bp, Homo sapiens
gcctgggcaatatgg

SEQ ID NO: 164365 - DNA, 15 bp, Homo sapiens
agcctgggcaatatg

SEQ ID NO: 164366 - DNA, 15 bp, Homo sapiens
cagcctgggcaatat

SEQ ID NO: 164367 - DNA, 15 bp, Homo sapiens
ccagcctgggcaata

SEQ ID NO: 164368 - DNA, 15 bp, Homo sapiens
accagcctgggcaat

SEQ ID NO: 164369 - DNA, 15 bp, Homo sapiens
cttgaggtcaggagt

SEQ ID NO: 164370 - DNA, 15 bp, Homo sapiens
acttgaggtcaggag

SEQ ID NO: 164371 - DNA, 15 bp, Homo sapiens
cacttgaggtcagga

SEQ ID NO: 164372 - DNA, 15 bp, Homo sapiens
tcacttgaggtcagg

SEQ ID NO: 164373 - DNA, 15 bp, Homo sapiens
atcacttgaggtcag

SEQ ID NO: 164374 - DNA, 15 bp, Homo sapiens
gatcacttgaggtca

SEQ ID NO: 164375 - DNA, 15 bp, Homo sapiens
agatcacttgaggtc

SEQ ID NO: 164376 - DNA, 15 bp, Homo sapiens
cagatcacttgaggt

SEQ ID NO: 164377 - DNA, 15 bp, Homo sapiens
acagatcacttgagg

SEQ ID NO: 164378 - DNA, 15 bp, Homo sapiens
gacagatcacttgag

SEQ ID NO: 164379 - DNA, 15 bp, Homo sapiens
ggacagatcacttga

SEQ ID NO: 164380 - DNA, 15 bp, Homo sapiens
cggacagatcacttg

SEQ ID NO: 164381 - DNA, 15 bp, Homo sapiens
gcggacagatcactt

SEQ ID NO: 164382 - DNA, 15 bp, Homo sapiens
ggcggacagatcact

SEQ ID NO: 164383 - DNA, 15 bp, Homo sapiens
aggcggacagatcac

SEQ ID NO: 164384 - DNA, 15 bp, Homo sapiens
gaggcggacagatca

SEQ ID NO: 164385 - DNA, 15 bp, Homo sapiens
cgaggcggacagatc

SEQ ID NO: 164386 - DNA, 15 bp, Homo sapiens
ccgaggcggacagat

SEQ ID NO: 164387 - DNA, 15 bp, Homo sapiens
gccgaggcggacaga

SEQ ID NO: 164388 - DNA, 15 bp, Homo sapiens
ggccgaggcggacag

SEQ ID NO: 164389 - DNA, 15 bp, Homo sapiens
aggccgaggcggaca

SEQ ID NO: 164390 - DNA, 15 bp, Homo sapiens
gaggccgaggcggac

SEQ ID NO: 164391 - DNA, 15 bp, Homo sapiens
ggaggccgaggcgga

SEQ ID NO: 164392 - DNA, 15 bp, Homo sapiens
gagcactttgggagg

SEQ ID NO: 164393 - DNA, 15 bp, Homo sapiens
cgagcactttgggag

SEQ ID NO: 164394 - DNA, 15 bp, Homo sapiens
acgagcactttggga

SEQ ID NO: 164395 - DNA, 15 bp, Homo sapiens
cacgagcactttggg

SEQ ID NO: 164396 - DNA, 15 bp, Homo sapiens
acacgagcactttgg

SEQ ID NO: 164397 - DNA, 15 bp, Homo sapiens
aacacgagcactttg

SEQ ID NO: 164398 - DNA, 15 bp, Homo sapiens
taacacgagcacttt

SEQ ID NO: 164399 - DNA, 15 bp, Homo sapiens
gtaacacgagcactt

SEQ ID NO: 164400 - DNA, 15 bp, Homo sapiens
tgtaacacgagcact

SEQ ID NO: 164401 - DNA, 15 bp, Homo sapiens
ctgtaacacgagcac

SEQ ID NO: 164402 - DNA, 15 bp, Homo sapiens
cctgtaacacgagca

SEQ ID NO: 164403 - DNA, 15 bp, Homo sapiens
gcctgtaacacgagc

SEQ ID NO: 164404 - DNA, 15 bp, Homo sapiens
tgcctgtaacacgag

SEQ ID NO: 164405 - DNA, 15 bp, Homo sapiens
atgcctgtaacacga

SEQ ID NO: 164406 - DNA, 15 bp, Homo sapiens
catgcctgtaacacg

SEQ ID NO: 164407 - DNA, 15 bp, Homo sapiens
tcatgcctgtaacac

SEQ ID NO: 164408 - DNA, 15 bp, Homo sapiens
ctcatgcctgtaaca

SEQ ID NO: 164409 - DNA, 15 bp, Homo sapiens
gctcatgcctgtaac

SEQ ID NO: 164410 - DNA, 15 bp, Homo sapiens
tggtggctcatgcct

SEQ ID NO: 164411 - DNA, 15 bp, Homo sapiens
atggtggctcatgcc

SEQ ID NO: 164412 - DNA, 15 bp, Homo sapiens
catggtggctcatgc

SEQ ID NO: 164413 - DNA, 15 bp, Homo sapiens
gcatggtggctcatg

SEQ ID NO: 164414 - DNA, 15 bp, Homo sapiens
ggcatggtggctcat

SEQ ID NO: 164415 - DNA, 15 bp, Homo sapiens
aggcatggtggctca

SEQ ID NO: 164416 - DNA, 15 bp, Homo sapiens
caggcatggtggctc

SEQ ID NO: 164417 - DNA, 15 bp, Homo sapiens
ccaggcatggtggct

SEQ ID NO: 164418 - DNA, 15 bp, Homo sapiens
gccaggcatggtggc

SEQ ID NO: 164419 - DNA, 15 bp, Homo sapiens
ggccaggcatggtgg

SEQ ID NO: 164420 - DNA, 15 bp, Homo sapiens
tggccaggcatggtg

SEQ ID NO: 164421 - DNA, 15 bp, Homo sapiens
atggccaggcatggt

SEQ ID NO: 164422 - DNA, 15 bp, Homo sapiens
catggccaggcatgg

SEQ ID NO: 164423 - DNA, 15 bp, Homo sapiens
tcatggccaggcatg

SEQ ID NO: 164424 - DNA, 15 bp, Homo sapiens
ttcatggccaggcat

SEQ ID NO: 164425 - DNA, 15 bp, Homo sapiens
tttcatggccaggca

SEQ ID NO: 164426 - DNA, 15 bp, Homo sapiens
atttcatggccaggc

SEQ ID NO: 164427 - DNA, 15 bp, Homo sapiens
gatttcatggccagg

SEQ ID NO: 164428 - DNA, 15 bp, Homo sapiens
tgatttcatggccag

SEQ ID NO: 164429 - DNA, 15 bp, Homo sapiens
gtgatttcatggcca

SEQ ID NO: 164430 - DNA, 15 bp, Homo sapiens
ggtgatttcatggcc

SEQ ID NO: 164431 - DNA, 15 bp, Homo sapiens
aggtgatttcatggc

SEQ ID NO: 164432 - DNA, 15 bp, Homo sapiens
aaggtgatttcatgg

SEQ ID NO: 164433 - DNA, 15 bp, Homo sapiens
caaaggtgatttcat

SEQ ID NO: 164434 - DNA, 15 bp, Homo sapiens
tcaaaggtgatttca

SEQ ID NO: 164435 - DNA, 15 bp, Homo sapiens
atcaaaggtgatttc

SEQ ID NO: 164436 - DNA, 15 bp, Homo sapiens
gatcaaaggtgattt

SEQ ID NO: 164437 - DNA, 15 bp, Homo sapiens
tgatcaaaggtgatt

SEQ ID NO: 164438 - DNA, 15 bp, Homo sapiens
ctgatcaaaggtgat

SEQ ID NO: 164439 - DNA, 15 bp, Homo sapiens
gctgatcaaaggtga

SEQ ID NO: 164440 - DNA, 15 bp, Homo sapiens
cgctgatcaaaggtg

SEQ ID NO: 164441 - DNA, 15 bp, Homo sapiens
acgctgatcaaaggt

SEQ ID NO: 164442 - DNA, 15 bp, Homo sapiens
cacgctgatcaaagg

SEQ ID NO: 164443 - DNA, 15 bp, Homo sapiens
ccacgctgatcaaag

SEQ ID NO: 164444 - DNA, 15 bp, Homo sapiens
accacgctgatcaaa

SEQ ID NO: 164445 - DNA, 15 bp, Homo sapiens
caccacgctgatcaa

SEQ ID NO: 164446 - DNA, 15 bp, Homo sapiens
tcaccacgctgatca

SEQ ID NO: 164447 - DNA, 15 bp, Homo sapiens
ctcaccacgctgatc

SEQ ID NO: 164448 - DNA, 15 bp, Homo sapiens
tctcaccacgctgat

SEQ ID NO: 164449 - DNA, 15 bp, Homo sapiens
ctctcaccacgctga

SEQ ID NO: 164450 - DNA, 15 bp, Homo sapiens
gctctcaccacgctg

SEQ ID NO: 164451 - DNA, 15 bp, Homo sapiens
ggctctcaccacgct

SEQ ID NO: 164452 - DNA, 15 bp, Homo sapiens
tggctctcaccacgc

SEQ ID NO: 164453 - DNA, 15 bp, Homo sapiens
gtggctctcaccacg

SEQ ID NO: 164454 - DNA, 15 bp, Homo sapiens
agtggctctcaccac

SEQ ID NO: 164455 - DNA, 15 bp, Homo sapiens
aagtggctctcacca

SEQ ID NO: 164456 - DNA, 15 bp, Homo sapiens
gaagtggctctcacc

SEQ ID NO: 164457 - DNA, 15 bp, Homo sapiens
tgaagtggctctcac

SEQ ID NO: 164458 - DNA, 15 bp, Homo sapiens
ctgaagtggctctca

SEQ ID NO: 164459 - DNA, 15 bp, Homo sapiens
cctgaagtggctctc

SEQ ID NO: 164460 - DNA, 15 bp, Homo sapiens
gcctgaagtggctct

SEQ ID NO: 164461 - DNA, 15 bp, Homo sapiens
agcctgaagtggctc

SEQ ID NO: 164462 - DNA, 15 bp, Homo sapiens
cagcctgaagtggct

SEQ ID NO: 164463 - DNA, 15 bp, Homo sapiens
gcagcctgaagtggc

SEQ ID NO: 164464 - DNA, 15 bp, Homo sapiens
tgcagcctgaagtgg

SEQ ID NO: 164465 - DNA, 15 bp, Homo sapiens
atgcagcctgaagtg

SEQ ID NO: 164466 - DNA, 15 bp, Homo sapiens
tatgcagcctgaagt

SEQ ID NO: 164467 - DNA, 15 bp, Homo sapiens
gtatgcagcctgaag

SEQ ID NO: 164468 - DNA, 15 bp, Homo sapiens
tgtatgcagcctgaa

SEQ ID NO: 164469 - DNA, 15 bp, Homo sapiens
ttgtatgcagcctga

SEQ ID NO: 164470 - DNA, 15 bp, Homo sapiens
tttgtatgcagcctg

SEQ ID NO: 164471 - DNA, 15 bp, Homo sapiens
ctttgtatgcagcct

SEQ ID NO: 164472 - DNA, 15 bp, Homo sapiens
gctttgtatgcagcc

SEQ ID NO: 164473 - DNA, 15 bp, Homo sapiens
ggctttgtatgcagc

SEQ ID NO: 164474 - DNA, 15 bp, Homo sapiens
aggctttgtatgcag

SEQ ID NO: 164475 - DNA, 15 bp, Homo sapiens
aaggctttgtatgca

SEQ ID NO: 164476 - DNA, 15 bp, Homo sapiens
gaaggctttgtatgc

SEQ ID NO: 164477 - DNA, 15 bp, Homo sapiens
ggaaggctttgtatg

SEQ ID NO: 164478 - DNA, 15 bp, Homo sapiens
aggaaggctttgtat

SEQ ID NO: 164479 - DNA, 15 bp, Homo sapiens
gaggaaggctttgta

SEQ ID NO: 164480 - DNA, 15 bp, Homo sapiens
agaggaaggctttgt

SEQ ID NO: 164481 - DNA, 15 bp, Homo sapiens
aagaggaaggctttg

SEQ ID NO: 164482 - DNA, 15 bp, Homo sapiens
caagaggaaggcttt

SEQ ID NO: 164483 - DNA, 15 bp, Homo sapiens
gcaagaggaaggctt

SEQ ID NO: 164484 - DNA, 15 bp, Homo sapiens
tgcaagaggaaggct

SEQ ID NO: 164485 - DNA, 15 bp, Homo sapiens
ctgcaagaggaaggc

SEQ ID NO: 164486 - DNA, 15 bp, Homo sapiens
cctgcaagaggaagg

SEQ ID NO: 164487 - DNA, 15 bp, Homo sapiens
tcctgcaagaggaag

SEQ ID NO: 164488 - DNA, 15 bp, Homo sapiens
ttcctgcaagaggaa

SEQ ID NO: 164489 - DNA, 15 bp, Homo sapiens
cttcctgcaagagga

SEQ ID NO: 164490 - DNA, 15 bp, Homo sapiens
gcttcctgcaagagg

SEQ ID NO: 164491 - DNA, 15 bp, Homo sapiens
ggcttcctgcaagag

SEQ ID NO: 164492 - DNA, 15 bp, Homo sapiens
aggcttcctgcaaga

SEQ ID NO: 164493 - DNA, 15 bp, Homo sapiens
aaggcttcctgcaag

SEQ ID NO: 164494 - DNA, 15 bp, Homo sapiens
aaaggcttcctgcaa

SEQ ID NO: 164495 - DNA, 15 bp, Homo sapiens
taaaggcttcctgca

SEQ ID NO: 164496 - DNA, 15 bp, Homo sapiens
ataaaggcttcctgc

SEQ ID NO: 164497 - DNA, 15 bp, Homo sapiens
aataaaggcttcctg

SEQ ID NO: 164498 - DNA, 15 bp, Homo sapiens
caataaaggcttcct

SEQ ID NO: 164499 - DNA, 15 bp, Homo sapiens
tcaataaaggcttcc

SEQ ID NO: 164500 - DNA, 15 bp, Homo sapiens
atcaataaaggcttc

SEQ ID NO: 164501 - DNA, 15 bp, Homo sapiens
aatcaataaaggctt

SEQ ID NO: 164502 - DNA, 15 bp, Homo sapiens
caatcaataaaggct

SEQ ID NO: 164503 - DNA, 15 bp, Homo sapiens
gcaatcaataaaggc

SEQ ID NO: 164504 - DNA, 15 bp, Homo sapiens
tgcaatcaataaagg

SEQ ID NO: 164505 - DNA, 15 bp, Homo sapiens
gtgcaatcaataaag

SEQ ID NO: 164506 - DNA, 15 bp, Homo sapiens
agtgcaatcaataaa

SEQ ID NO: 164507 - DNA, 15 bp, Homo sapiens
cagtgcaatcaataa

SEQ ID NO: 164508 - DNA, 15 bp, Homo sapiens
acagtgcaatcaata

SEQ ID NO: 164509 - DNA, 15 bp, Homo sapiens
gacagtgcaatcaat

SEQ ID NO: 164510 - DNA, 15 bp, Homo sapiens
tgacagtgcaatcaa

SEQ ID NO: 164511 - DNA, 15 bp, Homo sapiens
gtgacagtgcaatca

SEQ ID NO: 164512 - DNA, 15 bp, Homo sapiens
agtgacagtgcaatc

SEQ ID NO: 164513 - DNA, 15 bp, Homo sapiens
cagtgacagtgcaat

SEQ ID NO: 164514 - DNA, 15 bp, Homo sapiens
acagtgacagtgcaa

SEQ ID NO: 164515 - DNA, 15 bp, Homo sapiens
cacagtgacagtgca

SEQ ID NO: 164516 - DNA, 15 bp, Homo sapiens
tcacagtgacagtgc

SEQ ID NO: 164517 - DNA, 15 bp, Homo sapiens
ttcacagtgacagtg

SEQ ID NO: 164518 - DNA, 15 bp, Homo sapiens
attcacagtgacagt

SEQ ID NO: 164519 - DNA, 15 bp, Homo sapiens
aattcacagtgacag

SEQ ID NO: 164520 - DNA, 15 bp, Homo sapiens
gaattcacagtgaca

SEQ ID NO: 164521 - DNA, 15 bp, Homo sapiens
tgaattcacagtgac

SEQ ID NO: 164522 - DNA, 15 bp, Homo sapiens
gtgaattcacagtga

SEQ ID NO: 164523 - DNA, 15 bp, Homo sapiens
agtgaattcacagtg

SEQ ID NO: 164524 - DNA, 15 bp, Homo sapiens
gagtgaattcacagt

SEQ ID NO: 164525 - DNA, 15 bp, Homo sapiens
agagtgaattcacag

SEQ ID NO: 164526 - DNA, 15 bp, Homo sapiens
aagagtgaattcaca

SEQ ID NO: 164527 - DNA, 15 bp, Homo sapiens
gaagagtgaattcac

SEQ ID NO: 164528 - DNA, 15 bp, Homo sapiens
agaagagtgaattca

SEQ ID NO: 164529 - DNA, 15 bp, Homo sapiens
gagaagagtgaattc

SEQ ID NO: 164530 - DNA, 15 bp, Homo sapiens
agagaagagtgaatt

SEQ ID NO: 164531 - DNA, 15 bp, Homo sapiens
cagagaagagtgaat

SEQ ID NO: 164532 - DNA, 15 bp, Homo sapiens
ccagagaagagtgaa

SEQ ID NO: 164533 - DNA, 15 bp, Homo sapiens
tccagagaagagtga

SEQ ID NO: 164534 - DNA, 15 bp, Homo sapiens
ctccagagaagagtg

SEQ ID NO: 164535 - DNA, 15 bp, Homo sapiens
cctccagagaagagt

SEQ ID NO: 164536 - DNA, 15 bp, Homo sapiens
gcctccagagaagag

SEQ ID NO: 164537 - DNA, 15 bp, Homo sapiens
agcctccagagaaga

SEQ ID NO: 164538 - DNA, 15 bp, Homo sapiens
cagcctccagagaag

SEQ ID NO: 164539 - DNA, 15 bp, Homo sapiens
ccagcctccagagaa

SEQ ID NO: 164540 - DNA, 15 bp, Homo sapiens
accagcctccagaga

SEQ ID NO: 164541 - DNA, 15 bp, Homo sapiens
caccagcctccagag

SEQ ID NO: 164542 - DNA, 15 bp, Homo sapiens
tcaccagcctccaga

SEQ ID NO: 164543 - DNA, 15 bp, Homo sapiens
ttcaccagcctccag

SEQ ID NO: 164544 - DNA, 15 bp, Homo sapiens
attcaccagcctcca

SEQ ID NO: 164545 - DNA, 15 bp, Homo sapiens
gattcaccagcctcc

SEQ ID NO: 164546 - DNA, 15 bp, Homo sapiens
ggattcaccagcctc

SEQ ID NO: 164547 - DNA, 15 bp, Homo sapiens
aggattcaccagcct

SEQ ID NO: 164548 - DNA, 15 bp, Homo sapiens
gaggattcaccagcc

SEQ ID NO: 164549 - DNA, 15 bp, Homo sapiens
tgaggattcaccagc

SEQ ID NO: 164550 - DNA, 15 bp, Homo sapiens
atgaggattcaccag

SEQ ID NO: 164551 - DNA, 15 bp, Homo sapiens
gatgaggattcacca

SEQ ID NO: 164552 - DNA, 15 bp, Homo sapiens
agatgaggattcacc

SEQ ID NO: 164553 - DNA, 15 bp, Homo sapiens
gagatgaggattcac

SEQ ID NO: 164554 - DNA, 15 bp, Homo sapiens
agagatgaggattca

SEQ ID NO: 164555 - DNA, 15 bp, Homo sapiens
cagagatgaggattc

SEQ ID NO: 164556 - DNA, 15 bp, Homo sapiens
acagagatgaggatt

SEQ ID NO: 164557 - DNA, 15 bp, Homo sapiens
aacagagatgaggat

SEQ ID NO: 164558 - DNA, 15 bp, Homo sapiens
gaacagagatgagga

SEQ ID NO: 164559 - DNA, 15 bp, Homo sapiens
agaacagagatgagg

SEQ ID NO: 164560 - DNA, 15 bp, Homo sapiens
aagaacagagatgag

SEQ ID NO: 164561 - DNA, 15 bp, Homo sapiens
gaagaacagagatga

SEQ ID NO: 164562 - DNA, 15 bp, Homo sapiens
agaagaacagagatg

SEQ ID NO: 164563 - DNA, 15 bp, Homo sapiens
gagaagaacagagat

SEQ ID NO: 164564 - DNA, 15 bp, Homo sapiens
agagaagaacagaga

SEQ ID NO: 164565 - DNA, 15 bp, Homo sapiens
aagagaagaacagag

SEQ ID NO: 164566 - DNA, 15 bp, Homo sapiens
aaagagaagaacaga

SEQ ID NO: 164567 - DNA, 15 bp, Homo sapiens
aaaagagaagaacag

SEQ ID NO: 164568 - DNA, 15 bp, Homo sapiens
aaaaagagaagaaca

SEQ ID NO: 164569 - DNA, 15 bp, Homo sapiens
caaaaagagaagaac

SEQ ID NO: 164570 - DNA, 15 bp, Homo sapiens
acaaaaagagaagaa

SEQ ID NO: 164571 - DNA, 15 bp, Homo sapiens
aacaaaaagagaaga

SEQ ID NO: 164572 - DNA, 15 bp, Homo sapiens
gaacaaaaagagaag

SEQ ID NO: 164573 - DNA, 15 bp, Homo sapiens
ggaacaaaaagagaa

SEQ ID NO: 164574 - DNA, 15 bp, Homo sapiens
aggaacaaaaagaga

SEQ ID NO: 164575 - DNA, 15 bp, Homo sapiens
aaggaacaaaaagag

SEQ ID NO: 164576 - DNA, 15 bp, Homo sapiens
caaggaacaaaaaga

SEQ ID NO: 164577 - DNA, 15 bp, Homo sapiens
acaaggaacaaaaag

SEQ ID NO: 164578 - DNA, 15 bp, Homo sapiens
aacaaggaacaaaaa

SEQ ID NO: 164579 - DNA, 15 bp, Homo sapiens
aaacaaggaacaaaa

SEQ ID NO: 164580 - DNA, 15 bp, Homo sapiens
aaaacaaggaacaaa

SEQ ID NO: 164581 - DNA, 15 bp, Homo sapiens
gaaaacaaggaacaa

SEQ ID NO: 164582 - DNA, 15 bp, Homo sapiens
agaaaacaaggaaca

SEQ ID NO: 164583 - DNA, 15 bp, Homo sapiens
cagaaaacaaggaac

SEQ ID NO: 164584 - DNA, 15 bp, Homo sapiens
gcagaaaacaaggaa

SEQ ID NO: 164585 - DNA, 15 bp, Homo sapiens
ggcagaaaacaagga

SEQ ID NO: 164586 - DNA, 15 bp, Homo sapiens
gggcagaaaacaagg

SEQ ID NO: 164587 - DNA, 15 bp, Homo sapiens
cgggcagaaaacaag

SEQ ID NO: 164588 - DNA, 15 bp, Homo sapiens
ccgggcagaaaacaa

SEQ ID NO: 164589 - DNA, 15 bp, Homo sapiens
accgggcagaaaaca

SEQ ID NO: 164590 - DNA, 15 bp, Homo sapiens
taccgggcagaaaac

SEQ ID NO: 164591 - DNA, 15 bp, Homo sapiens
ataccgggcagaaaa

SEQ ID NO: 164592 - DNA, 15 bp, Homo sapiens
tataccgggcagaaa

SEQ ID NO: 164593 - DNA, 15 bp, Homo sapiens
ttataccgggcagaa

SEQ ID NO: 164594 - DNA, 15 bp, Homo sapiens
attataccgggcaga

SEQ ID NO: 164595 - DNA, 15 bp, Homo sapiens
aattataccgggcag

SEQ ID NO: 164596 - DNA, 15 bp, Homo sapiens
gaattataccgggca

SEQ ID NO: 164597 - DNA, 15 bp, Homo sapiens
tgaattataccgggc

SEQ ID NO: 164598 - DNA, 15 bp, Homo sapiens
gtgaattataccggg

SEQ ID NO: 164599 - DNA, 15 bp, Homo sapiens
agtgaattataccgg

SEQ ID NO: 164600 - DNA, 15 bp, Homo sapiens
aagtgaattataccg

SEQ ID NO: 164601 - DNA, 15 bp, Homo sapiens
aaagtgaattatacc

SEQ ID NO: 164602 - DNA, 15 bp, Homo sapiens
gaaagtgaattatac

SEQ ID NO: 164603 - DNA, 15 bp, Homo sapiens
agaaagtgaattata

SEQ ID NO: 164604 - DNA, 15 bp, Homo sapiens
aagaaagtgaattat

SEQ ID NO: 164605 - DNA, 15 bp, Homo sapiens
aaagaaagtgaatta

SEQ ID NO: 164606 - DNA, 15 bp, Homo sapiens
aaaagaaagtgaatt

SEQ ID NO: 164607 - DNA, 15 bp, Homo sapiens
taaaagaaagtgaat

SEQ ID NO: 164608 - DNA, 15 bp, Homo sapiens
ataaaagaaagtgaa

SEQ ID NO: 164609 - DNA, 15 bp, Homo sapiens
aataaaagaaagtga

SEQ ID NO: 164610 - DNA, 15 bp, Homo sapiens
caataaaagaaagtg

SEQ ID NO: 164611 - DNA, 15 bp, Homo sapiens
gcaataaaagaaagt

SEQ ID NO: 164612 - DNA, 15 bp, Homo sapiens
ggcaataaaagaaag

SEQ ID NO: 164613 - DNA, 15 bp, Homo sapiens
tggcaataaaagaaa

SEQ ID NO: 164614 - DNA, 15 bp, Homo sapiens
ttggcaataaaagaa

SEQ ID NO: 164615 - DNA, 15 bp, Homo sapiens
attggcaataaaaga

SEQ ID NO: 164616 - DNA, 15 bp, Homo sapiens
tattggcaataaaag

SEQ ID NO: 164617 - DNA, 15 bp, Homo sapiens
atattggcaataaaa

SEQ ID NO: 164618 - DNA, 15 bp, Homo sapiens
gatattggcaataaa

SEQ ID NO: 164619 - DNA, 15 bp, Homo sapiens
agatattggcaataa

SEQ ID NO: 164620 - DNA, 15 bp, Homo sapiens
gagatattggcaata

SEQ ID NO: 164621 - DNA, 15 bp, Homo sapiens
agagatattggcaat

SEQ ID NO: 164622 - DNA, 15 bp, Homo sapiens
aagagatattggcaa

SEQ ID NO: 164623 - DNA, 15 bp, Homo sapiens
caagagatattggca

SEQ ID NO: 164624 - DNA, 15 bp, Homo sapiens
ccaagagatattggc

SEQ ID NO: 164625 - DNA, 15 bp, Homo sapiens
tccaagagatattgg

SEQ ID NO: 164626 - DNA, 15 bp, Homo sapiens
gtccaagagatattg

SEQ ID NO: 164627 - DNA, 15 bp, Homo sapiens
agtccaagagatatt

SEQ ID NO: 164628 - DNA, 15 bp, Homo sapiens
aagtccaagagatat

SEQ ID NO: 164629 - DNA, 15 bp, Homo sapiens
aaagtccaagagata

SEQ ID NO: 164630 - DNA, 15 bp, Homo sapiens
taaagtccaagagat

SEQ ID NO: 164631 - DNA, 15 bp, Homo sapiens
ctaaagtccaagaga

SEQ ID NO: 164632 - DNA, 15 bp, Homo sapiens
gctaaagtccaagag

SEQ ID NO: 164633 - DNA, 15 bp, Homo sapiens
ggctaaagtccaaga

SEQ ID NO: 164634 - DNA, 15 bp, Homo sapiens
gggctaaagtccaag

SEQ ID NO: 164635 - DNA, 15 bp, Homo sapiens
ggggctaaagtccaa

SEQ ID NO: 164636 - DNA, 15 bp, Homo sapiens
tggggctaaagtcca

SEQ ID NO: 164637 - DNA, 15 bp, Homo sapiens
ttggggctaaagtcc

SEQ ID NO: 164638 - DNA, 15 bp, Homo sapiens
cttggggctaaagtc

SEQ ID NO: 164639 - DNA, 15 bp, Homo sapiens
ccttggggctaaagt

SEQ ID NO: 164640 - DNA, 15 bp, Homo sapiens
tccttggggctaaag

SEQ ID NO: 164641 - DNA, 15 bp, Homo sapiens
ttccttggggctaaa

SEQ ID NO: 164642 - DNA, 15 bp, Homo sapiens
gttccttggggctaa

SEQ ID NO: 164643 - DNA, 15 bp, Homo sapiens
tgttccttggggcta

SEQ ID NO: 164644 - DNA, 15 bp, Homo sapiens
atgttccttggggct

SEQ ID NO: 164645 - DNA, 15 bp, Homo sapiens
tatgttccttggggc

SEQ ID NO: 164646 - DNA, 15 bp, Homo sapiens
gtatgttccttgggg

SEQ ID NO: 164647 - DNA, 15 bp, Homo sapiens
ggtatgttccttggg

SEQ ID NO: 164648 - DNA, 15 bp, Homo sapiens
tggtatgttccttgg

SEQ ID NO: 164649 - DNA, 15 bp, Homo sapiens
gtggtatgttccttg

SEQ ID NO: 164650 - DNA, 15 bp, Homo sapiens
tgtggtatgttcctt

SEQ ID NO: 164651 - DNA, 15 bp, Homo sapiens
gtgtggtatgttcct

SEQ ID NO: 164652 - DNA, 15 bp, Homo sapiens
agtgtggtatgttcc

SEQ ID NO: 164653 - DNA, 15 bp, Homo sapiens
cagtgtggtatgttc

SEQ ID NO: 164654 - DNA, 15 bp, Homo sapiens
gcagtgtggtatgtt

SEQ ID NO: 164655 - DNA, 15 bp, Homo sapiens
ggcagtgtggtatgt

SEQ ID NO: 164656 - DNA, 15 bp, Homo sapiens
aggcagtgtggtatg

SEQ ID NO: 164657 - DNA, 15 bp, Homo sapiens
caggcagtgtggtat

SEQ ID NO: 164658 - DNA, 15 bp, Homo sapiens
ccaggcagtgtggta

SEQ ID NO: 164659 - DNA, 15 bp, Homo sapiens
gccaggcagtgtggt

SEQ ID NO: 164660 - DNA, 15 bp, Homo sapiens
tgccaggcagtgtgg

SEQ ID NO: 164661 - DNA, 15 bp, Homo sapiens
gtgccaggcagtgtg

SEQ ID NO: 164662 - DNA, 15 bp, Homo sapiens
agtgccaggcagtgt

SEQ ID NO: 164663 - DNA, 15 bp, Homo sapiens
cagtgccaggcagtg

SEQ ID NO: 164664 - DNA, 15 bp, Homo sapiens
acagtgccaggcagt

SEQ ID NO: 164665 - DNA, 15 bp, Homo sapiens
cacagtgccaggcag

SEQ ID NO: 164666 - DNA, 15 bp, Homo sapiens
gcacagtgccaggca

SEQ ID NO: 164667 - DNA, 15 bp, Homo sapiens
ggcacagtgccaggc

SEQ ID NO: 164668 - DNA, 15 bp, Homo sapiens
tggcacagtgccagg

SEQ ID NO: 164669 - DNA, 15 bp, Homo sapiens
atggcacagtgccag

SEQ ID NO: 164670 - DNA, 15 bp, Homo sapiens
catggcacagtgcca

SEQ ID NO: 164671 - DNA, 15 bp, Homo sapiens
acatggcacagtgcc

SEQ ID NO: 164672 - DNA, 15 bp, Homo sapiens
cacatggcacagtgc

SEQ ID NO: 164673 - DNA, 15 bp, Homo sapiens
gcacatggcacagtg

SEQ ID NO: 164674 - DNA, 15 bp, Homo sapiens
ggcacatggcacagt

SEQ ID NO: 164675 - DNA, 15 bp, Homo sapiens
aggcacatggcacag

SEQ ID NO: 164676 - DNA, 15 bp, Homo sapiens
taggcacatggcaca

SEQ ID NO: 164677 - DNA, 15 bp, Homo sapiens
ttaggcacatggcac

SEQ ID NO: 164678 - DNA, 15 bp, Homo sapiens
attaggcacatggca

SEQ ID NO: 164679 - DNA, 15 bp, Homo sapiens
tattaggcacatggc

SEQ ID NO: 164680 - DNA, 15 bp, Homo sapiens
ttattaggcacatgg

SEQ ID NO: 164681 - DNA, 15 bp, Homo sapiens
attattaggcacatg

SEQ ID NO: 164682 - DNA, 15 bp, Homo sapiens
tattattaggcacat

SEQ ID NO: 164683 - DNA, 15 bp, Homo sapiens
ttattattaggcaca

SEQ ID NO: 164684 - DNA, 15 bp, Homo sapiens
cttattattaggcac

SEQ ID NO: 164685 - DNA, 15 bp, Homo sapiens
ccttattattaggca

SEQ ID NO: 164686 - DNA, 15 bp, Homo sapiens
tccttattattaggc

SEQ ID NO: 164687 - DNA, 15 bp, Homo sapiens
ctccttattattagg

SEQ ID NO: 164688 - DNA, 15 bp, Homo sapiens
cctccttattattag

SEQ ID NO: 164689 - DNA, 15 bp, Homo sapiens
acctccttattatta

SEQ ID NO: 164690 - DNA, 15 bp, Homo sapiens
tacctccttattatt

SEQ ID NO: 164691 - DNA, 15 bp, Homo sapiens
gtacctccttattat

SEQ ID NO: 164692 - DNA, 15 bp, Homo sapiens
tgtacctccttatta

SEQ ID NO: 164693 - DNA, 15 bp, Homo sapiens
atgtacctccttatt

SEQ ID NO: 164694 - DNA, 15 bp, Homo sapiens
aatgtacctccttat

SEQ ID NO: 164695 - DNA, 15 bp, Homo sapiens
aaatgtacctcctta

SEQ ID NO: 164696 - DNA, 15 bp, Homo sapiens
taaatgtacctcctt

SEQ ID NO: 164697 - DNA, 15 bp, Homo sapiens
ataaatgtacctcct

SEQ ID NO: 164698 - DNA, 15 bp, Homo sapiens
tataaatgtacctcc

SEQ ID NO: 164699 - DNA, 15 bp, Homo sapiens
atataaatgtacctc

SEQ ID NO: 164700 - DNA, 15 bp, Homo sapiens
aatataaatgtacct

SEQ ID NO: 164701 - DNA, 15 bp, Homo sapiens
caatataaatgtacc

SEQ ID NO: 164702 - DNA, 15 bp, Homo sapiens
tcaatataaatgtac

SEQ ID NO: 164703 - DNA, 15 bp, Homo sapiens
ctcaatataaatgta

SEQ ID NO: 164704 - DNA, 15 bp, Homo sapiens
gctcaatataaatgt

SEQ ID NO: 164705 - DNA, 15 bp, Homo sapiens
agctcaatataaatg

SEQ ID NO: 164706 - DNA, 15 bp, Homo sapiens
gagctcaatataaat

SEQ ID NO: 164707 - DNA, 15 bp, Homo sapiens
agagctcaatataaa

SEQ ID NO: 164708 - DNA, 15 bp, Homo sapiens
cagagctcaatataa

SEQ ID NO: 164709 - DNA, 15 bp, Homo sapiens
tcagagctcaatata

SEQ ID NO: 164710 - DNA, 15 bp, Homo sapiens
atcagagctcaatat

SEQ ID NO: 164711 - DNA, 15 bp, Homo sapiens
aatcagagctcaata

SEQ ID NO: 164712 - DNA, 15 bp, Homo sapiens
gaatcagagctcaat

SEQ ID NO: 164713 - DNA, 15 bp, Homo sapiens
agaatcagagctcaa

SEQ ID NO: 164714 - DNA, 15 bp, Homo sapiens
cagaatcagagctca

SEQ ID NO: 164715 - DNA, 15 bp, Homo sapiens
tcagaatcagagctc

SEQ ID NO: 164716 - DNA, 15 bp, Homo sapiens
ttcagaatcagagct

SEQ ID NO: 164717 - DNA, 15 bp, Homo sapiens
cttcagaatcagagc

SEQ ID NO: 164718 - DNA, 15 bp, Homo sapiens
gcttcagaatcagag

SEQ ID NO: 164719 - DNA, 15 bp, Homo sapiens
ggcttcagaatcaga

SEQ ID NO: 164720 - DNA, 15 bp, Homo sapiens
aggcttcagaatcag

SEQ ID NO: 164721 - DNA, 15 bp, Homo sapiens
caggcttcagaatca

SEQ ID NO: 164722 - DNA, 15 bp, Homo sapiens
acaggcttcagaatc

SEQ ID NO: 164723 - DNA, 15 bp, Homo sapiens
aacaggcttcagaat

SEQ ID NO: 164724 - DNA, 15 bp, Homo sapiens
gaacaggcttcagaa

SEQ ID NO: 164725 - DNA, 15 bp, Homo sapiens
tgaacaggcttcaga

SEQ ID NO: 164726 - DNA, 15 bp, Homo sapiens
gtgaacaggcttcag

SEQ ID NO: 164727 - DNA, 15 bp, Homo sapiens
tgtgaacaggcttca

SEQ ID NO: 164728 - DNA, 15 bp, Homo sapiens
atgtgaacaggcttc

SEQ ID NO: 164729 - DNA, 15 bp, Homo sapiens
gatgtgaacaggctt

SEQ ID NO: 164730 - DNA, 15 bp, Homo sapiens
agatgtgaacaggct

SEQ ID NO: 164731 - DNA, 15 bp, Homo sapiens
cagatgtgaacaggc

SEQ ID NO: 164732 - DNA, 15 bp, Homo sapiens
acagatgtgaacagg

SEQ ID NO: 164733 - DNA, 15 bp, Homo sapiens
cacagatgtgaacag

SEQ ID NO: 164734 - DNA, 15 bp, Homo sapiens
tcacagatgtgaaca

SEQ ID NO: 164735 - DNA, 15 bp, Homo sapiens
atcacagatgtgaac

SEQ ID NO: 164736 - DNA, 15 bp, Homo sapiens
aatcacagatgtgaa

SEQ ID NO: 164737 - DNA, 15 bp, Homo sapiens
gaatcacagatgtga

SEQ ID NO: 164738 - DNA, 15 bp, Homo sapiens
ggaatcacagatgtg

SEQ ID NO: 164739 - DNA, 15 bp, Homo sapiens
gggaatcacagatgt

SEQ ID NO: 164740 - DNA, 15 bp, Homo sapiens
ggggaatcacagatg

SEQ ID NO: 164741 - DNA, 15 bp, Homo sapiens
aggggaatcacagat

SEQ ID NO: 164742 - DNA, 15 bp, Homo sapiens
aaggggaatcacaga

SEQ ID NO: 164743 - DNA, 15 bp, Homo sapiens
taaggggaatcacag

SEQ ID NO: 164744 - DNA, 15 bp, Homo sapiens
gtaaggggaatcaca

SEQ ID NO: 164745 - DNA, 15 bp, Homo sapiens
agtaaggggaatcac

SEQ ID NO: 164746 - DNA, 15 bp, Homo sapiens
aagtaaggggaatca

SEQ ID NO: 164747 - DNA, 15 bp, Homo sapiens
aaagtaaggggaatc

SEQ ID NO: 164748 - DNA, 15 bp, Homo sapiens
caaagtaaggggaat

SEQ ID NO: 164749 - DNA, 15 bp, Homo sapiens
gcaaagtaaggggaa

SEQ ID NO: 164750 - DNA, 15 bp, Homo sapiens
tgcaaagtaagggga

SEQ ID NO: 164751 - DNA, 15 bp, Homo sapiens
atgcaaagtaagggg

SEQ ID NO: 164752 - DNA, 15 bp, Homo sapiens
tatgcaaagtaaggg

SEQ ID NO: 164753 - DNA, 15 bp, Homo sapiens
ttatgcaaagtaagg

SEQ ID NO: 164754 - DNA, 15 bp, Homo sapiens
gttatgcaaagtaag

SEQ ID NO: 164755 - DNA, 15 bp, Homo sapiens
tgttatgcaaagtaa

SEQ ID NO: 164756 - DNA, 15 bp, Homo sapiens
ctgttatgcaaagta

SEQ ID NO: 164757 - DNA, 15 bp, Homo sapiens
gctgttatgcaaagt

SEQ ID NO: 164758 - DNA, 15 bp, Homo sapiens
agctgttatgcaaag

SEQ ID NO: 164759 - DNA, 15 bp, Homo sapiens
gagctgttatgcaaa

SEQ ID NO: 164760 - DNA, 15 bp, Homo sapiens
agagctgttatgcaa

SEQ ID NO: 164761 - DNA, 15 bp, Homo sapiens
gagagctgttatgca

SEQ ID NO: 164762 - DNA, 15 bp, Homo sapiens
agagagctgttatgc

SEQ ID NO: 164763 - DNA, 15 bp, Homo sapiens
cagagagctgttatg

SEQ ID NO: 164764 - DNA, 15 bp, Homo sapiens
ccagagagctgttat

SEQ ID NO: 164765 - DNA, 15 bp, Homo sapiens
cccagagagctgtta

SEQ ID NO: 164766 - DNA, 15 bp, Homo sapiens
tcccagagagctgtt

SEQ ID NO: 164767 - DNA, 15 bp, Homo sapiens
gtcccagagagctgt

SEQ ID NO: 164768 - DNA, 15 bp, Homo sapiens
tgtcccagagagctg

SEQ ID NO: 164769 - DNA, 15 bp, Homo sapiens
ctgtcccagagagct

SEQ ID NO: 164770 - DNA, 15 bp, Homo sapiens
cctgtcccagagagc

SEQ ID NO: 164771 - DNA, 15 bp, Homo sapiens
acctgtcccagagag

SEQ ID NO: 164772 - DNA, 15 bp, Homo sapiens
cacctgtcccagaga

SEQ ID NO: 164773 - DNA, 15 bp, Homo sapiens
ccacctgtcccagag

SEQ ID NO: 164774 - DNA, 15 bp, Homo sapiens
cccacctgtcccaga

SEQ ID NO: 164775 - DNA, 15 bp, Homo sapiens
tcccacctgtcccag

SEQ ID NO: 164776 - DNA, 15 bp, Homo sapiens
gtcccacctgtccca

SEQ ID NO: 164777 - DNA, 15 bp, Homo sapiens
tgtcccacctgtccc

SEQ ID NO: 164778 - DNA, 15 bp, Homo sapiens
ttgtcccacctgtcc

SEQ ID NO: 164779 - DNA, 15 bp, Homo sapiens
tttgtcccacctgtc

SEQ ID NO: 164780 - DNA, 15 bp, Homo sapiens
atttgtcccacctgt

SEQ ID NO: 164781 - DNA, 15 bp, Homo sapiens
catttgtcccacctg

SEQ ID NO: 164782 - DNA, 15 bp, Homo sapiens
acatttgtcccacct

SEQ ID NO: 164783 - DNA, 15 bp, Homo sapiens
cacatttgtcccacc

SEQ ID NO: 164784 - DNA, 15 bp, Homo sapiens
tcacatttgtcccac

SEQ ID NO: 164785 - DNA, 15 bp, Homo sapiens
atcacatttgtccca

SEQ ID NO: 164786 - DNA, 15 bp, Homo sapiens
tatcacatttgtccc

SEQ ID NO: 164787 - DNA, 15 bp, Homo sapiens
ttatcacatttgtcc

SEQ ID NO: 164788 - DNA, 15 bp, Homo sapiens
cttatcacatttgtc

SEQ ID NO: 164789 - DNA, 15 bp, Homo sapiens
gcttatcacatttgt

SEQ ID NO: 164790 - DNA, 15 bp, Homo sapiens
ggcttatcacatttg

SEQ ID NO: 164791 - DNA, 15 bp, Homo sapiens
gggcttatcacattt

SEQ ID NO: 164792 - DNA, 15 bp, Homo sapiens
ggggcttatcacatt

SEQ ID NO: 164793 - DNA, 15 bp, Homo sapiens
tggggcttatcacat

SEQ ID NO: 164794 - DNA, 15 bp, Homo sapiens
ctggggcttatcaca

SEQ ID NO: 164795 - DNA, 15 bp, Homo sapiens
actggggcttatcac

SEQ ID NO: 164796 - DNA, 15 bp, Homo sapiens
gactggggcttatca

SEQ ID NO: 164797 - DNA, 15 bp, Homo sapiens
agactggggcttatc

SEQ ID NO: 164798 - DNA, 15 bp, Homo sapiens
cagactggggcttat

SEQ ID NO: 164799 - DNA, 15 bp, Homo sapiens
gcagactggggctta

SEQ ID NO: 164800 - DNA, 15 bp, Homo sapiens
tgcagactggggctt

SEQ ID NO: 164801 - DNA, 15 bp, Homo sapiens
ctgcagactggggct

SEQ ID NO: 164802 - DNA, 15 bp, Homo sapiens
tctgcagactggggc

SEQ ID NO: 164803 - DNA, 15 bp, Homo sapiens
ctctgcagactgggg

SEQ ID NO: 164804 - DNA, 15 bp, Homo sapiens
gctctgcagactggg

SEQ ID NO: 164805 - DNA, 15 bp, Homo sapiens
tgctctgcagactgg

SEQ ID NO: 164806 - DNA, 15 bp, Homo sapiens
ttgctctgcagactg

SEQ ID NO: 164807 - DNA, 15 bp, Homo sapiens
cttgctctgcagact

SEQ ID NO: 164808 - DNA, 15 bp, Homo sapiens
tcttgctctgcagac

SEQ ID NO: 164809 - DNA, 15 bp, Homo sapiens
ctcttgctctgcaga

SEQ ID NO: 164810 - DNA, 15 bp, Homo sapiens
tctcttgctctgcag

SEQ ID NO: 164811 - DNA, 15 bp, Homo sapiens
gtctcttgctctgca

SEQ ID NO: 164812 - DNA, 15 bp, Homo sapiens
cgtctcttgctctgc

SEQ ID NO: 164813 - DNA, 15 bp, Homo sapiens
tcgtctcttgctctg

SEQ ID NO: 164814 - DNA, 15 bp, Homo sapiens
gtcgtctcttgctct

SEQ ID NO: 164815 - DNA, 15 bp, Homo sapiens
agtcgtctcttgctc

SEQ ID NO: 164816 - DNA, 15 bp, Homo sapiens
aagtcgtctcttgct

SEQ ID NO: 164817 - DNA, 15 bp, Homo sapiens
caagtcgtctcttgc

SEQ ID NO: 164818 - DNA, 15 bp, Homo sapiens
gcaagtcgtctcttg

SEQ ID NO: 164819 - DNA, 15 bp, Homo sapiens
agcaagtcgtctctt

SEQ ID NO: 164820 - DNA, 15 bp, Homo sapiens
aagcaagtcgtctct

SEQ ID NO: 164821 - DNA, 15 bp, Homo sapiens
taagcaagtcgtctc

SEQ ID NO: 164822 - DNA, 15 bp, Homo sapiens
ataagcaagtcgtct

SEQ ID NO: 164823 - DNA, 15 bp, Homo sapiens
cataagcaagtcgtc

SEQ ID NO: 164824 - DNA, 15 bp, Homo sapiens
ccataagcaagtcgt

SEQ ID NO: 164825 - DNA, 15 bp, Homo sapiens
cccataagcaagtcg

SEQ ID NO: 164826 - DNA, 15 bp, Homo sapiens
gcccataagcaagtc

SEQ ID NO: 164827 - DNA, 15 bp, Homo sapiens
tgcccataagcaagt

SEQ ID NO: 164828 - DNA, 15 bp, Homo sapiens
gtgcccataagcaag

SEQ ID NO: 164829 - DNA, 15 bp, Homo sapiens
tgtgcccataagcaa

SEQ ID NO: 164830 - DNA, 15 bp, Homo sapiens
gtgtgcccataagca

SEQ ID NO: 164831 - DNA, 15 bp, Homo sapiens
tgtgtgcccataagc

SEQ ID NO: 164832 - DNA, 15 bp, Homo sapiens
ctgtgtgcccataag

SEQ ID NO: 164833 - DNA, 15 bp, Homo sapiens
actgtgtgcccataa

SEQ ID NO: 164834 - DNA, 15 bp, Homo sapiens
aactgtgtgcccata

SEQ ID NO: 164835 - DNA, 15 bp, Homo sapiens
gaactgtgtgcccat

SEQ ID NO: 164836 - DNA, 15 bp, Homo sapiens
tgaactgtgtgccca

SEQ ID NO: 164837 - DNA, 15 bp, Homo sapiens
atgaactgtgtgccc

SEQ ID NO: 164838 - DNA, 15 bp, Homo sapiens
tatgaactgtgtgcc

SEQ ID NO: 164839 - DNA, 15 bp, Homo sapiens
ttatgaactgtgtgc

SEQ ID NO: 164840 - DNA, 15 bp, Homo sapiens
cttatgaactgtgtg

SEQ ID NO: 164841 - DNA, 15 bp, Homo sapiens
acttatgaactgtgt

SEQ ID NO: 164842 - DNA, 15 bp, Homo sapiens
cacttatgaactgtg

SEQ ID NO: 164843 - DNA, 15 bp, Homo sapiens
ccacttatgaactgt

SEQ ID NO: 164844 - DNA, 15 bp, Homo sapiens
gccacttatgaactg

SEQ ID NO: 164845 - DNA, 15 bp, Homo sapiens
tgccacttatgaact

SEQ ID NO: 164846 - DNA, 15 bp, Homo sapiens
ctgccacttatgaac

SEQ ID NO: 164847 - DNA, 15 bp, Homo sapiens
tctgccacttatgaa

SEQ ID NO: 164848 - DNA, 15 bp, Homo sapiens
ctctgccacttatga

SEQ ID NO: 164849 - DNA, 15 bp, Homo sapiens
gctctgccacttatg

SEQ ID NO: 164850 - DNA, 15 bp, Homo sapiens
ggctctgccacttat

SEQ ID NO: 164851 - DNA, 15 bp, Homo sapiens
cggctctgccactta

SEQ ID NO: 164852 - DNA, 15 bp, Homo sapiens
ccggctctgccactt

SEQ ID NO: 164853 - DNA, 15 bp, Homo sapiens
cccggctctgccact

SEQ ID NO: 164854 - DNA, 15 bp, Homo sapiens
tcccggctctgccac

SEQ ID NO: 164855 - DNA, 15 bp, Homo sapiens
gtcccggctctgcca

SEQ ID NO: 164856 - DNA, 15 bp, Homo sapiens
ggtcccggctctgcc

SEQ ID NO: 164857 - DNA, 15 bp, Homo sapiens
tggtcccggctctgc

SEQ ID NO: 164858 - DNA, 15 bp, Homo sapiens
ctggtcccggctctg

SEQ ID NO: 164859 - DNA, 15 bp, Homo sapiens
cctggtcccggctct

SEQ ID NO: 164860 - DNA, 15 bp, Homo sapiens
ccctggtcccggctc

SEQ ID NO: 164861 - DNA, 15 bp, Homo sapiens
tccctggtcccggct

SEQ ID NO: 164862 - DNA, 15 bp, Homo sapiens
gtccctggtcccggc

SEQ ID NO: 164863 - DNA, 15 bp, Homo sapiens
agtccctggtcccgg

SEQ ID NO: 164864 - DNA, 15 bp, Homo sapiens
cagtccctggtcccg

SEQ ID NO: 164865 - DNA, 15 bp, Homo sapiens
ccagtccctggtccc

SEQ ID NO: 164866 - DNA, 15 bp, Homo sapiens
tccagtccctggtcc

SEQ ID NO: 164867 - DNA, 15 bp, Homo sapiens
ctccagtccctggtc

SEQ ID NO: 164868 - DNA, 15 bp, Homo sapiens
actccagtccctggt

SEQ ID NO: 164869 - DNA, 15 bp, Homo sapiens
gactccagtccctgg

SEQ ID NO: 164870 - DNA, 15 bp, Homo sapiens
agactccagtccctg

SEQ ID NO: 164871 - DNA, 15 bp, Homo sapiens
aagactccagtccct

SEQ ID NO: 164872 - DNA, 15 bp, Homo sapiens
caagactccagtccc

SEQ ID NO: 164873 - DNA, 15 bp, Homo sapiens
gcaagactccagtcc

SEQ ID NO: 164874 - DNA, 15 bp, Homo sapiens
ggcaagactccagtc

SEQ ID NO: 164875 - DNA, 15 bp, Homo sapiens
cggcaagactccagt

SEQ ID NO: 164876 - DNA, 15 bp, Homo sapiens
acggcaagactccag

SEQ ID NO: 164877 - DNA, 15 bp, Homo sapiens
cacggcaagactcca

SEQ ID NO: 164878 - DNA, 15 bp, Homo sapiens
ccacggcaagactcc

SEQ ID NO: 164879 - DNA, 15 bp, Homo sapiens
cccacggcaagactc

SEQ ID NO: 164880 - DNA, 15 bp, Homo sapiens
acccacggcaagact

SEQ ID NO: 164881 - DNA, 15 bp, Homo sapiens
cacccacggcaagac

SEQ ID NO: 164882 - DNA, 15 bp, Homo sapiens
acacccacggcaaga

SEQ ID NO: 164883 - DNA, 15 bp, Homo sapiens
cacacccacggcaag

SEQ ID NO: 164884 - DNA, 15 bp, Homo sapiens
gcacacccacggcaa

SEQ ID NO: 164885 - DNA, 15 bp, Homo sapiens
agcacacccacggca

SEQ ID NO: 164886 - DNA, 15 bp, Homo sapiens
tagcacacccacggc

SEQ ID NO: 164887 - DNA, 15 bp, Homo sapiens
gtagcacacccacgg

SEQ ID NO: 164888 - DNA, 15 bp, Homo sapiens
cgtagcacacccacg

SEQ ID NO: 164889 - DNA, 15 bp, Homo sapiens
gcgtagcacacccac

SEQ ID NO: 164890 - DNA, 15 bp, Homo sapiens
cgcgtagcacaccca

SEQ ID NO: 164891 - DNA, 15 bp, Homo sapiens
ccgcgtagcacaccc

SEQ ID NO: 164892 - DNA, 15 bp, Homo sapiens
gccgcgtagcacacc

SEQ ID NO: 164893 - DNA, 15 bp, Homo sapiens
ggccgcgtagcacac

SEQ ID NO: 164894 - DNA, 15 bp, Homo sapiens
gggccgcgtagcaca

SEQ ID NO: 164895 - DNA, 15 bp, Homo sapiens
ggggccgcgtagcac

SEQ ID NO: 164896 - DNA, 15 bp, Homo sapiens
tggggccgcgtagca

SEQ ID NO: 164897 - DNA, 15 bp, Homo sapiens
gtggggccgcgtagc

SEQ ID NO: 164898 - DNA, 15 bp, Homo sapiens
tgtggggccgcgtag

SEQ ID NO: 164899 - DNA, 15 bp, Homo sapiens
ctgtggggccgcgta

SEQ ID NO: 164900 - DNA, 15 bp, Homo sapiens
tctgtggggccgcgt

SEQ ID NO: 164901 - DNA, 15 bp, Homo sapiens
ttctgtggggccgcg

SEQ ID NO: 164902 - DNA, 15 bp, Homo sapiens
cttctgtggggccgc

SEQ ID NO: 164903 - DNA, 15 bp, Homo sapiens
ccttctgtggggccg

SEQ ID NO: 164904 - DNA, 15 bp, Homo sapiens
tccttctgtggggcc

SEQ ID NO: 164905 - DNA, 15 bp, Homo sapiens
atccttctgtggggc

SEQ ID NO: 164906 - DNA, 15 bp, Homo sapiens
catccttctgtgggg

SEQ ID NO: 164907 - DNA, 15 bp, Homo sapiens
ccatccttctgtggg

SEQ ID NO: 164908 - DNA, 15 bp, Homo sapiens
tccatccttctgtgg

SEQ ID NO: 164909 - DNA, 15 bp, Homo sapiens
atccatccttctgtg

SEQ ID NO: 164910 - DNA, 15 bp, Homo sapiens
catccatccttctgt

SEQ ID NO: 164911 - DNA, 15 bp, Homo sapiens
gcatccatccttctg

SEQ ID NO: 164912 - DNA, 15 bp, Homo sapiens
tgcatccatccttct

SEQ ID NO: 164913 - DNA, 15 bp, Homo sapiens
atgcatccatccttc

SEQ ID NO: 164914 - DNA, 15 bp, Homo sapiens
catgcatccatcctt

SEQ ID NO: 164915 - DNA, 15 bp, Homo sapiens
ccatgcatccatcct

SEQ ID NO: 164916 - DNA, 15 bp, Homo sapiens
tccatgcatccatcc

SEQ ID NO: 164917 - DNA, 15 bp, Homo sapiens
ctccatgcatccatc

SEQ ID NO: 164918 - DNA, 15 bp, Homo sapiens
actccatgcatccat

SEQ ID NO: 164919 - DNA, 15 bp, Homo sapiens
gactccatgcatcca

SEQ ID NO: 164920 - DNA, 15 bp, Homo sapiens
ggactccatgcatcc

SEQ ID NO: 164921 - DNA, 15 bp, Homo sapiens
gggactccatgcatc

SEQ ID NO: 164922 - DNA, 15 bp, Homo sapiens
tgggactccatgcat

SEQ ID NO: 164923 - DNA, 15 bp, Homo sapiens
atgggactccatgca

SEQ ID NO: 164924 - DNA, 15 bp, Homo sapiens
aatgggactccatgc

SEQ ID NO: 164925 - DNA, 15 bp, Homo sapiens
aaatgggactccatg

SEQ ID NO: 164926 - DNA, 15 bp, Homo sapiens
aaaatgggactccat

SEQ ID NO: 164927 - DNA, 15 bp, Homo sapiens
caaaatgggactcca

SEQ ID NO: 164928 - DNA, 15 bp, Homo sapiens
acaaaatgggactcc

SEQ ID NO: 164929 - DNA, 15 bp, Homo sapiens
cacaaaatgggactc

SEQ ID NO: 164930 - DNA, 15 bp, Homo sapiens
ccacaaaatgggact

SEQ ID NO: 164931 - DNA, 15 bp, Homo sapiens
tccacaaaatgggac

SEQ ID NO: 164932 - DNA, 15 bp, Homo sapiens
gtccacaaaatggga

SEQ ID NO: 164933 - DNA, 15 bp, Homo sapiens
agtccacaaaatggg

SEQ ID NO: 164934 - DNA, 15 bp, Homo sapiens
gagtccacaaaatgg

SEQ ID NO: 164935 - DNA, 15 bp, Homo sapiens
ggagtccacaaaatg

SEQ ID NO: 164936 - DNA, 15 bp, Homo sapiens
gggagtccacaaaat

SEQ ID NO: 164937 - DNA, 15 bp, Homo sapiens
ggggagtccacaaaa

SEQ ID NO: 164938 - DNA, 15 bp, Homo sapiens
gggggagtccacaaa

SEQ ID NO: 164939 - DNA, 15 bp, Homo sapiens
ggggggagtccacaa

SEQ ID NO: 164940 - DNA, 15 bp, Homo sapiens
aggggggagtccaca

SEQ ID NO: 164941 - DNA, 15 bp, Homo sapiens
caggggggagtccac

SEQ ID NO: 164942 - DNA, 15 bp, Homo sapiens
ccaggggggagtcca

SEQ ID NO: 164943 - DNA, 15 bp, Homo sapiens
cccaggggggagtcc

SEQ ID NO: 164944 - DNA, 15 bp, Homo sapiens
gcccaggggggagtc

SEQ ID NO: 164945 - DNA, 15 bp, Homo sapiens
ggcccaggggggagt

SEQ ID NO: 164946 - DNA, 15 bp, Homo sapiens
aggcccaggggggag

SEQ ID NO: 164947 - DNA, 15 bp, Homo sapiens
caggcccagggggga

SEQ ID NO: 164948 - DNA, 15 bp, Homo sapiens
gcaggcccagggggg

SEQ ID NO: 164949 - DNA, 15 bp, Homo sapiens
tgcaggcccaggggg

SEQ ID NO: 164950 - DNA, 15 bp, Homo sapiens
ttgcaggcccagggg

SEQ ID NO: 164951 - DNA, 15 bp, Homo sapiens
attgcaggcccaggg

SEQ ID NO: 164952 - DNA, 15 bp, Homo sapiens
cattgcaggcccagg

SEQ ID NO: 164953 - DNA, 15 bp, Homo sapiens
acattgcaggcccag

SEQ ID NO: 164954 - DNA, 15 bp, Homo sapiens
cacattgcaggccca

SEQ ID NO: 164955 - DNA, 15 bp, Homo sapiens
acacattgcaggccc

SEQ ID NO: 164956 - DNA, 15 bp, Homo sapiens
tacacattgcaggcc

SEQ ID NO: 164957 - DNA, 15 bp, Homo sapiens
ctacacattgcaggc

SEQ ID NO: 164958 - DNA, 15 bp, Homo sapiens
cctacacattgcagg

SEQ ID NO: 164959 - DNA, 15 bp, Homo sapiens
ccctacacattgcag

SEQ ID NO: 164960 - DNA, 15 bp, Homo sapiens
tccctacacattgca

SEQ ID NO: 164961 - DNA, 15 bp, Homo sapiens
atccctacacattgc

SEQ ID NO: 164962 - DNA, 15 bp, Homo sapiens
catccctacacattg

SEQ ID NO: 164963 - DNA, 15 bp, Homo sapiens
acatccctacacatt

SEQ ID NO: 164964 - DNA, 15 bp, Homo sapiens
cacatccctacacat

SEQ ID NO: 164965 - DNA, 15 bp, Homo sapiens
acacatccctacaca

SEQ ID NO: 164966 - DNA, 15 bp, Homo sapiens
aacacatccctacac

SEQ ID NO: 164967 - DNA, 15 bp, Homo sapiens
taacacatccctaca

SEQ ID NO: 164968 - DNA, 15 bp, Homo sapiens
ctaacacatccctac

SEQ ID NO: 164969 - DNA, 15 bp, Homo sapiens
cctaacacatcccta

SEQ ID NO: 164970 - DNA, 15 bp, Homo sapiens
ccctaacacatccct

SEQ ID NO: 164971 - DNA, 15 bp, Homo sapiens
cccctaacacatccc

SEQ ID NO: 164972 - DNA, 15 bp, Homo sapiens
tcccctaacacatcc

SEQ ID NO: 164973 - DNA, 15 bp, Homo sapiens
ctcccctaacacatc

SEQ ID NO: 164974 - DNA, 15 bp, Homo sapiens
cctcccctaacacat

SEQ ID NO: 164975 - DNA, 15 bp, Homo sapiens
tcctcccctaacaca

SEQ ID NO: 164976 - DNA, 15 bp, Homo sapiens
atcctcccctaacac

SEQ ID NO: 164977 - DNA, 15 bp, Homo sapiens
catcctcccctaaca

SEQ ID NO: 164978 - DNA, 15 bp, Homo sapiens
tcatcctcccctaac

SEQ ID NO: 164979 - DNA, 15 bp, Homo sapiens
ctcatcctcccctaa

SEQ ID NO: 164980 - DNA, 15 bp, Homo sapiens
tctcatcctccccta

SEQ ID NO: 164981 - DNA, 15 bp, Homo sapiens
ctctcatcctcccct

SEQ ID NO: 164982 - DNA, 15 bp, Homo sapiens
cctctcatcctcccc

SEQ ID NO: 164983 - DNA, 15 bp, Homo sapiens
ccctctcatcctccc

SEQ ID NO: 164984 - DNA, 15 bp, Homo sapiens
gccctctcatcctcc

SEQ ID NO: 164985 - DNA, 15 bp, Homo sapiens
tgccctctcatcctc

SEQ ID NO: 164986 - DNA, 15 bp, Homo sapiens
ttgccctctcatcct

SEQ ID NO: 164987 - DNA, 15 bp, Homo sapiens
cttgccctctcatcc

SEQ ID NO: 164988 - DNA, 15 bp, Homo sapiens
tcttgccctctcatc

SEQ ID NO: 164989 - DNA, 15 bp, Homo sapiens
ctcttgccctctcat

SEQ ID NO: 164990 - DNA, 15 bp, Homo sapiens
cctcttgccctctca

SEQ ID NO: 164991 - DNA, 15 bp, Homo sapiens
ccctcttgccctctc

SEQ ID NO: 164992 - DNA, 15 bp, Homo sapiens
cccctcttgccctct

SEQ ID NO: 164993 - DNA, 15 bp, Homo sapiens
ccccctcttgccctc

SEQ ID NO: 164994 - DNA, 15 bp, Homo sapiens
tccccctcttgccct

SEQ ID NO: 164995 - DNA, 15 bp, Homo sapiens
atccccctcttgccc

SEQ ID NO: 164996 - DNA, 15 bp, Homo sapiens
gatccccctcttgcc

SEQ ID NO: 164997 - DNA, 15 bp, Homo sapiens
agatccccctcttgc

SEQ ID NO: 164998 - DNA, 15 bp, Homo sapiens
cagatccccctcttg

SEQ ID NO: 164999 - DNA, 15 bp, Homo sapiens
acagatccccctctt

SEQ ID NO: 165000 - DNA, 15 bp, Homo sapiens
cacagatccccctct

SEQ ID NO: 165001 - DNA, 15 bp, Homo sapiens
ccacagatccccctc

SEQ ID NO: 165002 - DNA, 15 bp, Homo sapiens
gccacagatccccct

SEQ ID NO: 165003 - DNA, 15 bp, Homo sapiens
agccacagatccccc

SEQ ID NO: 165004 - DNA, 15 bp, Homo sapiens
tagccacagatcccc

SEQ ID NO: 165005 - DNA, 15 bp, Homo sapiens
ctagccacagatccc

SEQ ID NO: 165006 - DNA, 15 bp, Homo sapiens
tctagccacagatcc

SEQ ID NO: 165007 - DNA, 15 bp, Homo sapiens
ttctagccacagatc

SEQ ID NO: 165008 - DNA, 15 bp, Homo sapiens
attctagccacagat

SEQ ID NO: 165009 - DNA, 15 bp, Homo sapiens
aattctagccacaga

SEQ ID NO: 165010 - DNA, 15 bp, Homo sapiens
gaattctagccacag

SEQ ID NO: 165011 - DNA, 15 bp, Homo sapiens
ggaattctagccaca

SEQ ID NO: 165012 - DNA, 15 bp, Homo sapiens
cggaattctagccac

SEQ ID NO: 165013 - DNA, 15 bp, Homo sapiens
ccggaattctagcca

SEQ ID NO: 165014 - DNA, 15 bp, Homo sapiens
tccggaattctagcc

SEQ ID NO: 165015 - DNA, 15 bp, Homo sapiens
ctccggaattctagc

SEQ ID NO: 165016 - DNA, 15 bp, Homo sapiens
cctccggaattctag

SEQ ID NO: 165017 - DNA, 15 bp, Homo sapiens
acctccggaattcta

SEQ ID NO: 165018 - DNA, 15 bp, Homo sapiens
aacctccggaattct

SEQ ID NO: 165019 - DNA, 15 bp, Homo sapiens
gaacctccggaattc

SEQ ID NO: 165020 - DNA, 15 bp, Homo sapiens
cgaacctccggaatt

SEQ ID NO: 165021 - DNA, 15 bp, Homo sapiens
acgaacctccggaat

SEQ ID NO: 165022 - DNA, 15 bp, Homo sapiens
aacgaacctccggaa

SEQ ID NO: 165023 - DNA, 15 bp, Homo sapiens
caacgaacctccgga

SEQ ID NO: 165024 - DNA, 15 bp, Homo sapiens
ccaacgaacctccgg

SEQ ID NO: 165025 - DNA, 15 bp, Homo sapiens
tccaacgaacctccg

SEQ ID NO: 165026 - DNA, 15 bp, Homo sapiens
ttccaacgaacctcc

SEQ ID NO: 165027 - DNA, 15 bp, Homo sapiens
gttccaacgaacctc

SEQ ID NO: 165028 - DNA, 15 bp, Homo sapiens
ggttccaacgaacct

SEQ ID NO: 165029 - DNA, 15 bp, Homo sapiens
tggttccaacgaacc

SEQ ID NO: 165030 - DNA, 15 bp, Homo sapiens
ctggttccaacgaac

SEQ ID NO: 165031 - DNA, 15 bp, Homo sapiens
cctggttccaacgaa

SEQ ID NO: 165032 - DNA, 15 bp, Homo sapiens
ccctggttccaacga

SEQ ID NO: 165033 - DNA, 15 bp, Homo sapiens
tccctggttccaacg

SEQ ID NO: 165034 - DNA, 15 bp, Homo sapiens
ctccctggttccaac

SEQ ID NO: 165035 - DNA, 15 bp, Homo sapiens
cctccctggttccaa

SEQ ID NO: 165036 - DNA, 15 bp, Homo sapiens
acctccctggttcca

SEQ ID NO: 165037 - DNA, 15 bp, Homo sapiens
tacctccctggttcc

SEQ ID NO: 165038 - DNA, 15 bp, Homo sapiens
gtacctccctggttc

SEQ ID NO: 165039 - DNA, 15 bp, Homo sapiens
tgtacctccctggtt

SEQ ID NO: 165040 - DNA, 15 bp, Homo sapiens
atgtacctccctggt

SEQ ID NO: 165041 - DNA, 15 bp, Homo sapiens
catgtacctccctgg

SEQ ID NO: 165042 - DNA, 15 bp, Homo sapiens
ccatgtacctccctg

SEQ ID NO: 165043 - DNA, 15 bp, Homo sapiens
cccatgtacctccct

SEQ ID NO: 165044 - DNA, 15 bp, Homo sapiens
ccccatgtacctccc

SEQ ID NO: 165045 - DNA, 15 bp, Homo sapiens
accccatgtacctcc

SEQ ID NO: 165046 - DNA, 15 bp, Homo sapiens
caccccatgtacctc

SEQ ID NO: 165047 - DNA, 15 bp, Homo sapiens
tcaccccatgtacct

SEQ ID NO: 165048 - DNA, 15 bp, Homo sapiens
gtcaccccatgtacc

SEQ ID NO: 165049 - DNA, 15 bp, Homo sapiens
agtcaccccatgtac

SEQ ID NO: 165050 - DNA, 15 bp, Homo sapiens
aagtcaccccatgta

SEQ ID NO: 165051 - DNA, 15 bp, Homo sapiens
caagtcaccccatgt

SEQ ID NO: 165052 - DNA, 15 bp, Homo sapiens
tcaagtcaccccatg

SEQ ID NO: 165053 - DNA, 15 bp, Homo sapiens
ttcaagtcaccccat

SEQ ID NO: 165054 - DNA, 15 bp, Homo sapiens
gttcaagtcacccca

SEQ ID NO: 165055 - DNA, 15 bp, Homo sapiens
ggttcaagtcacccc

SEQ ID NO: 165056 - DNA, 15 bp, Homo sapiens
gggttcaagtcaccc

SEQ ID NO: 165057 - DNA, 15 bp, Homo sapiens
ggggttcaagtcacc

SEQ ID NO: 165058 - DNA, 15 bp, Homo sapiens
tggggttcaagtcac

SEQ ID NO: 165059 - DNA, 15 bp, Homo sapiens
ttggggttcaagtca

SEQ ID NO: 165060 - DNA, 15 bp, Homo sapiens
tttggggttcaagtc

SEQ ID NO: 165061 - DNA, 15 bp, Homo sapiens
atttggggttcaagt

SEQ ID NO: 165062 - DNA, 15 bp, Homo sapiens
gatttggggttcaag

SEQ ID NO: 165063 - DNA, 15 bp, Homo sapiens
agatttggggttcaa

SEQ ID NO: 165064 - DNA, 15 bp, Homo sapiens
aagatttggggttca

SEQ ID NO: 165065 - DNA, 15 bp, Homo sapiens
aaagatttggggttc

SEQ ID NO: 165066 - DNA, 15 bp, Homo sapiens
aaaagatttggggtt

SEQ ID NO: 165067 - DNA, 15 bp, Homo sapiens
gaaaagatttggggt

SEQ ID NO: 165068 - DNA, 15 bp, Homo sapiens
tgaaaagatttgggg

SEQ ID NO: 165069 - DNA, 15 bp, Homo sapiens
atgaaaagatttggg

SEQ ID NO: 165070 - DNA, 15 bp, Homo sapiens
gatgaaaagatttgg

SEQ ID NO: 165071 - DNA, 15 bp, Homo sapiens
agatgaaaagatttg

SEQ ID NO: 165072 - DNA, 15 bp, Homo sapiens
tagatgaaaagattt

SEQ ID NO: 165073 - DNA, 15 bp, Homo sapiens
ctagatgaaaagatt

SEQ ID NO: 165074 - DNA, 15 bp, Homo sapiens
cctagatgaaaagat

SEQ ID NO: 165075 - DNA, 15 bp, Homo sapiens
gcctagatgaaaaga

SEQ ID NO: 165076 - DNA, 15 bp, Homo sapiens
tgcctagatgaaaag

SEQ ID NO: 165077 - DNA, 15 bp, Homo sapiens
atgcctagatgaaaa

SEQ ID NO: 165078 - DNA, 15 bp, Homo sapiens
catgcctagatgaaa

SEQ ID NO: 165079 - DNA, 15 bp, Homo sapiens
tcatgcctagatgaa

SEQ ID NO: 165080 - DNA, 15 bp, Homo sapiens
gtcatgcctagatga

SEQ ID NO: 165081 - DNA, 15 bp, Homo sapiens
tgtcatgcctagatg

SEQ ID NO: 165082 - DNA, 15 bp, Homo sapiens
gtgtcatgcctagat

SEQ ID NO: 165083 - DNA, 15 bp, Homo sapiens
agtgtcatgcctaga

SEQ ID NO: 165084 - DNA, 15 bp, Homo sapiens
gagtgtcatgcctag

SEQ ID NO: 165085 - DNA, 15 bp, Homo sapiens
ggagtgtcatgccta

SEQ ID NO: 165086 - DNA, 15 bp, Homo sapiens
gggagtgtcatgcct

SEQ ID NO: 165087 - DNA, 15 bp, Homo sapiens
agggagtgtcatgcc

SEQ ID NO: 165088 - DNA, 15 bp, Homo sapiens
aagggagtgtcatgc

SEQ ID NO: 165089 - DNA, 15 bp, Homo sapiens
aaagggagtgtcatg

SEQ ID NO: 165090 - DNA, 15 bp, Homo sapiens
aaaagggagtgtcat

SEQ ID NO: 165091 - DNA, 15 bp, Homo sapiens
aaaaagggagtgtca

SEQ ID NO: 165092 - DNA, 15 bp, Homo sapiens
gaaaaagggagtgtc

SEQ ID NO: 165093 - DNA, 15 bp, Homo sapiens
ggaaaaagggagtgt

SEQ ID NO: 165094 - DNA, 15 bp, Homo sapiens
aggaaaaagggagtg

SEQ ID NO: 165095 - DNA, 15 bp, Homo sapiens
gaggaaaaagggagt

SEQ ID NO: 165096 - DNA, 15 bp, Homo sapiens
agaggaaaaagggag

SEQ ID NO: 165097 - DNA, 15 bp, Homo sapiens
tagaggaaaaaggga

SEQ ID NO: 165098 - DNA, 15 bp, Homo sapiens
atagaggaaaaaggg

SEQ ID NO: 165099 - DNA, 15 bp, Homo sapiens
catagaggaaaaagg

SEQ ID NO: 165100 - DNA, 15 bp, Homo sapiens
ccatagaggaaaaag

SEQ ID NO: 165101 - DNA, 15 bp, Homo sapiens
tccatagaggaaaaa

SEQ ID NO: 165102 - DNA, 15 bp, Homo sapiens
ctccatagaggaaaa

SEQ ID NO: 165103 - DNA, 15 bp, Homo sapiens
tctccatagaggaaa

SEQ ID NO: 165104 - DNA, 15 bp, Homo sapiens
gtctccatagaggaa

SEQ ID NO: 165105 - DNA, 15 bp, Homo sapiens
agtctccatagagga

SEQ ID NO: 165106 - DNA, 15 bp, Homo sapiens
cagtctccatagagg

SEQ ID NO: 165107 - DNA, 15 bp, Homo sapiens
ccagtctccatagag

SEQ ID NO: 165108 - DNA, 15 bp, Homo sapiens
cccagtctccataga

SEQ ID NO: 165109 - DNA, 15 bp, Homo sapiens
tcccagtctccatag

SEQ ID NO: 165110 - DNA, 15 bp, Homo sapiens
ttcccagtctccata

SEQ ID NO: 165111 - DNA, 15 bp, Homo sapiens
attcccagtctccat

SEQ ID NO: 165112 - DNA, 15 bp, Homo sapiens
tattcccagtctcca

SEQ ID NO: 165113 - DNA, 15 bp, Homo sapiens
ctattcccagtctcc

SEQ ID NO: 165114 - DNA, 15 bp, Homo sapiens
gctattcccagtctc

SEQ ID NO: 165115 - DNA, 15 bp, Homo sapiens
tgctattcccagtct

SEQ ID NO: 165116 - DNA, 15 bp, Homo sapiens
ctgctattcccagtc

SEQ ID NO: 165117 - DNA, 15 bp, Homo sapiens
cctgctattcccagt

SEQ ID NO: 165118 - DNA, 15 bp, Homo sapiens
tcctgctattcccag

SEQ ID NO: 165119 - DNA, 15 bp, Homo sapiens
atcctgctattccca

SEQ ID NO: 165120 - DNA, 15 bp, Homo sapiens
catcctgctattccc

SEQ ID NO: 165121 - DNA, 15 bp, Homo sapiens
ccatcctgctattcc

SEQ ID NO: 165122 - DNA, 15 bp, Homo sapiens
tccatcctgctattc

SEQ ID NO: 165123 - DNA, 15 bp, Homo sapiens
ctccatcctgctatt

SEQ ID NO: 165124 - DNA, 15 bp, Homo sapiens
cctccatcctgctat

SEQ ID NO: 165125 - DNA, 15 bp, Homo sapiens
ccctccatcctgcta

SEQ ID NO: 165126 - DNA, 15 bp, Homo sapiens
tccctccatcctgct

SEQ ID NO: 165127 - DNA, 15 bp, Homo sapiens
ctccctccatcctgc

SEQ ID NO: 165128 - DNA, 15 bp, Homo sapiens
cctccctccatcctg

SEQ ID NO: 165129 - DNA, 15 bp, Homo sapiens
ccctccctccatcct

SEQ ID NO: 165130 - DNA, 15 bp, Homo sapiens
accctccctccatcc

SEQ ID NO: 165131 - DNA, 15 bp, Homo sapiens
taccctccctccatc

SEQ ID NO: 165132 - DNA, 15 bp, Homo sapiens
ctaccctccctccat

SEQ ID NO: 165133 - DNA, 15 bp, Homo sapiens
tctaccctccctcca

SEQ ID NO: 165134 - DNA, 15 bp, Homo sapiens
ttctaccctccctcc

SEQ ID NO: 165135 - DNA, 15 bp, Homo sapiens
cttctaccctccctc

SEQ ID NO: 165136 - DNA, 15 bp, Homo sapiens
ccttctaccctccct

SEQ ID NO: 165137 - DNA, 15 bp, Homo sapiens
tccttctaccctccc

SEQ ID NO: 165138 - DNA, 15 bp, Homo sapiens
ctccttctaccctcc

SEQ ID NO: 165139 - DNA, 15 bp, Homo sapiens
actccttctaccctc

SEQ ID NO: 165140 - DNA, 15 bp, Homo sapiens
tactccttctaccct

SEQ ID NO: 165141 - DNA, 15 bp, Homo sapiens
ctactccttctaccc

SEQ ID NO: 165142 - DNA, 15 bp, Homo sapiens
tctactccttctacc

SEQ ID NO: 165143 - DNA, 15 bp, Homo sapiens
ctctactccttctac

SEQ ID NO: 165144 - DNA, 15 bp, Homo sapiens
cctctactccttcta

SEQ ID NO: 165145 - DNA, 15 bp, Homo sapiens
tcctctactccttct

SEQ ID NO: 165146 - DNA, 15 bp, Homo sapiens
ctcctctactccttc

SEQ ID NO: 165147 - DNA, 15 bp, Homo sapiens
actcctctactcctt

SEQ ID NO: 165148 - DNA, 15 bp, Homo sapiens
gactcctctactcct

SEQ ID NO: 165149 - DNA, 15 bp, Homo sapiens
tgactcctctactcc

SEQ ID NO: 165150 - DNA, 15 bp, Homo sapiens
ctgactcctctactc

SEQ ID NO: 165151 - DNA, 15 bp, Homo sapiens
actgactcctctact

SEQ ID NO: 165152 - DNA, 15 bp, Homo sapiens
cactgactcctctac

SEQ ID NO: 165153 - DNA, 15 bp, Homo sapiens
acactgactcctcta

SEQ ID NO: 165154 - DNA, 15 bp, Homo sapiens
aacactgactcctct

SEQ ID NO: 165155 - DNA, 15 bp, Homo sapiens
caacactgactcctc

SEQ ID NO: 165156 - DNA, 15 bp, Homo sapiens
ccaacactgactcct

SEQ ID NO: 165157 - DNA, 15 bp, Homo sapiens
cccaacactgactcc

SEQ ID NO: 165158 - DNA, 15 bp, Homo sapiens
ccccaacactgactc

SEQ ID NO: 165159 - DNA, 15 bp, Homo sapiens
gccccaacactgact

SEQ ID NO: 165160 - DNA, 15 bp, Homo sapiens
agccccaacactgac

SEQ ID NO: 165161 - DNA, 15 bp, Homo sapiens
tagccccaacactga

SEQ ID NO: 165162 - DNA, 15 bp, Homo sapiens
ctagccccaacactg

SEQ ID NO: 165163 - DNA, 15 bp, Homo sapiens
cctagccccaacact

SEQ ID NO: 165164 - DNA, 15 bp, Homo sapiens
ccctagccccaacac

SEQ ID NO: 165165 - DNA, 15 bp, Homo sapiens
gccctagccccaaca

SEQ ID NO: 165166 - DNA, 15 bp, Homo sapiens
agccctagccccaac

SEQ ID NO: 165167 - DNA, 15 bp, Homo sapiens
cagccctagccccaa

SEQ ID NO: 165168 - DNA, 15 bp, Homo sapiens
ccagccctagcccca

SEQ ID NO: 165169 - DNA, 15 bp, Homo sapiens
cccagccctagcccc

SEQ ID NO: 165170 - DNA, 15 bp, Homo sapiens
tcccagccctagccc

SEQ ID NO: 165171 - DNA, 15 bp, Homo sapiens
ctcccagccctagcc

SEQ ID NO: 165172 - DNA, 15 bp, Homo sapiens
cctcccagccctagc

SEQ ID NO: 165173 - DNA, 15 bp, Homo sapiens
ccctcccagccctag

SEQ ID NO: 165174 - DNA, 15 bp, Homo sapiens
tccctcccagcccta

SEQ ID NO: 165175 - DNA, 15 bp, Homo sapiens
gtccctcccagccct

SEQ ID NO: 165176 - DNA, 15 bp, Homo sapiens
cgtccctcccagccc

SEQ ID NO: 165177 - DNA, 15 bp, Homo sapiens
ccgtccctcccagcc

SEQ ID NO: 165178 - DNA, 15 bp, Homo sapiens
cccgtccctcccagc

SEQ ID NO: 165179 - DNA, 15 bp, Homo sapiens
ccccgtccctcccag

SEQ ID NO: 165180 - DNA, 15 bp, Homo sapiens
accccgtccctccca

SEQ ID NO: 165181 - DNA, 15 bp, Homo sapiens
taccccgtccctccc

SEQ ID NO: 165182 - DNA, 15 bp, Homo sapiens
ctaccccgtccctcc

SEQ ID NO: 165183 - DNA, 15 bp, Homo sapiens
tctaccccgtccctc

SEQ ID NO: 165184 - DNA, 15 bp, Homo sapiens
ttctaccccgtccct

SEQ ID NO: 165185 - DNA, 15 bp, Homo sapiens
cttctaccccgtccc

SEQ ID NO: 165186 - DNA, 15 bp, Homo sapiens
tcttctaccccgtcc

SEQ ID NO: 165187 - DNA, 15 bp, Homo sapiens
ctcttctaccccgtc

SEQ ID NO: 165188 - DNA, 15 bp, Homo sapiens
tctcttctaccccgt

SEQ ID NO: 165189 - DNA, 15 bp, Homo sapiens
ctctcttctaccccg

SEQ ID NO: 165190 - DNA, 15 bp, Homo sapiens
gctctcttctacccc

SEQ ID NO: 165191 - DNA, 15 bp, Homo sapiens
tgctctcttctaccc

SEQ ID NO: 165192 - DNA, 15 bp, Homo sapiens
ttgctctcttctacc

SEQ ID NO: 165193 - DNA, 15 bp, Homo sapiens
cttgctctcttctac

SEQ ID NO: 165194 - DNA, 15 bp, Homo sapiens
acttgctctcttcta

SEQ ID NO: 165195 - DNA, 15 bp, Homo sapiens
aacttgctctcttct

SEQ ID NO: 165196 - DNA, 15 bp, Homo sapiens
gaacttgctctcttc

SEQ ID NO: 165197 - DNA, 15 bp, Homo sapiens
agaacttgctctctt

SEQ ID NO: 165198 - DNA, 15 bp, Homo sapiens
cagaacttgctctct

SEQ ID NO: 165199 - DNA, 15 bp, Homo sapiens
ccagaacttgctctc

SEQ ID NO: 165200 - DNA, 15 bp, Homo sapiens
cccagaacttgctct

SEQ ID NO: 165201 - DNA, 15 bp, Homo sapiens
ccccagaacttgctc

SEQ ID NO: 165202 - DNA, 15 bp, Homo sapiens
tccccagaacttgct

SEQ ID NO: 165203 - DNA, 15 bp, Homo sapiens
gtccccagaacttgc

SEQ ID NO: 165204 - DNA, 15 bp, Homo sapiens
tgtccccagaacttg

SEQ ID NO: 165205 - DNA, 15 bp, Homo sapiens
ctgtccccagaactt

SEQ ID NO: 165206 - DNA, 15 bp, Homo sapiens
tctgtccccagaact

SEQ ID NO: 165207 - DNA, 15 bp, Homo sapiens
ctctgtccccagaac

SEQ ID NO: 165208 - DNA, 15 bp, Homo sapiens
cctctgtccccagaa

SEQ ID NO: 165209 - DNA, 15 bp, Homo sapiens
ccctctgtccccaga

SEQ ID NO: 165210 - DNA, 15 bp, Homo sapiens
gccctctgtccccag

SEQ ID NO: 165211 - DNA, 15 bp, Homo sapiens
tgccctctgtcccca

SEQ ID NO: 165212 - DNA, 15 bp, Homo sapiens
ctgccctctgtcccc

SEQ ID NO: 165213 - DNA, 15 bp, Homo sapiens
actgccctctgtccc

SEQ ID NO: 165214 - DNA, 15 bp, Homo sapiens
gactgccctctgtcc

SEQ ID NO: 165215 - DNA, 15 bp, Homo sapiens
tgactgccctctgtc

SEQ ID NO: 165216 - DNA, 15 bp, Homo sapiens
ctgactgccctctgt

SEQ ID NO: 165217 - DNA, 15 bp, Homo sapiens
cctgactgccctctg

SEQ ID NO: 165218 - DNA, 15 bp, Homo sapiens
tcctgactgccctct

SEQ ID NO: 165219 - DNA, 15 bp, Homo sapiens
ctcctgactgccctc

SEQ ID NO: 165220 - DNA, 15 bp, Homo sapiens
tctcctgactgccct

SEQ ID NO: 165221 - DNA, 15 bp, Homo sapiens
gtctcctgactgccc

SEQ ID NO: 165222 - DNA, 15 bp, Homo sapiens
ggtctcctgactgcc

SEQ ID NO: 165223 - DNA, 15 bp, Homo sapiens
aggtctcctgactgc

SEQ ID NO: 165224 - DNA, 15 bp, Homo sapiens
caggtctcctgactg

SEQ ID NO: 165225 - DNA, 15 bp, Homo sapiens
acaggtctcctgact

SEQ ID NO: 165226 - DNA, 15 bp, Homo sapiens
gacaggtctcctgac

SEQ ID NO: 165227 - DNA, 15 bp, Homo sapiens
tgacaggtctcctga

SEQ ID NO: 165228 - DNA, 15 bp, Homo sapiens
ctgacaggtctcctg

SEQ ID NO: 165229 - DNA, 15 bp, Homo sapiens
actgacaggtctcct

SEQ ID NO: 165230 - DNA, 15 bp, Homo sapiens
aactgacaggtctcc

SEQ ID NO: 165231 - DNA, 15 bp, Homo sapiens
gaactgacaggtctc

SEQ ID NO: 165232 - DNA, 15 bp, Homo sapiens
agaactgacaggtct

SEQ ID NO: 165233 - DNA, 15 bp, Homo sapiens
gagaactgacaggtc

SEQ ID NO: 165234 - DNA, 15 bp, Homo sapiens
agagaactgacaggt

SEQ ID NO: 165235 - DNA, 15 bp, Homo sapiens
gagagaactgacagg

SEQ ID NO: 165236 - DNA, 15 bp, Homo sapiens
agagagaactgacag

SEQ ID NO: 165237 - DNA, 15 bp, Homo sapiens
cagagagaactgaca

SEQ ID NO: 165238 - DNA, 15 bp, Homo sapiens
ccagagagaactgac

SEQ ID NO: 165239 - DNA, 15 bp, Homo sapiens
cccagagagaactga

SEQ ID NO: 165240 - DNA, 15 bp, Homo sapiens
acccagagagaactg

SEQ ID NO: 165241 - DNA, 15 bp, Homo sapiens
tacccagagagaact

SEQ ID NO: 165242 - DNA, 15 bp, Homo sapiens
ctacccagagagaac

SEQ ID NO: 165243 - DNA, 15 bp, Homo sapiens
gctacccagagagaa

SEQ ID NO: 165244 - DNA, 15 bp, Homo sapiens
ggctacccagagaga

SEQ ID NO: 165245 - DNA, 15 bp, Homo sapiens
aggctacccagagag

SEQ ID NO: 165246 - DNA, 15 bp, Homo sapiens
caggctacccagaga

SEQ ID NO: 165247 - DNA, 15 bp, Homo sapiens
ccaggctacccagag

SEQ ID NO: 165248 - DNA, 15 bp, Homo sapiens
tccaggctacccaga

SEQ ID NO: 165249 - DNA, 15 bp, Homo sapiens
gtccaggctacccag

SEQ ID NO: 165250 - DNA, 15 bp, Homo sapiens
agtccaggctaccca

SEQ ID NO: 165251 - DNA, 15 bp, Homo sapiens
gagtccaggctaccc

SEQ ID NO: 165252 - DNA, 15 bp, Homo sapiens
agagtccaggctacc

SEQ ID NO: 165253 - DNA, 15 bp, Homo sapiens
gagagtccaggctac

SEQ ID NO: 165254 - DNA, 15 bp, Homo sapiens
cgagagtccaggcta

SEQ ID NO: 165255 - DNA, 15 bp, Homo sapiens
tcgagagtccaggct

SEQ ID NO: 165256 - DNA, 15 bp, Homo sapiens
ctcgagagtccaggc

SEQ ID NO: 165257 - DNA, 15 bp, Homo sapiens
tctcgagagtccagg

SEQ ID NO: 165258 - DNA, 15 bp, Homo sapiens
ctctcgagagtccag

SEQ ID NO: 165259 - DNA, 15 bp, Homo sapiens
cctctcgagagtcca

SEQ ID NO: 165260 - DNA, 15 bp, Homo sapiens
tcctctcgagagtcc

SEQ ID NO: 165261 - DNA, 15 bp, Homo sapiens
gtcctctcgagagtc

SEQ ID NO: 165262 - DNA, 15 bp, Homo sapiens
agtcctctcgagagt

SEQ ID NO: 165263 - DNA, 15 bp, Homo sapiens
cagtcctctcgagag

SEQ ID NO: 165264 - DNA, 15 bp, Homo sapiens
tcagtcctctcgaga

SEQ ID NO: 165265 - DNA, 15 bp, Homo sapiens
ttcagtcctctcgag

SEQ ID NO: 165266 - DNA, 15 bp, Homo sapiens
tttcagtcctctcga

SEQ ID NO: 165267 - DNA, 15 bp, Homo sapiens
atttcagtcctctcg

SEQ ID NO: 165268 - DNA, 15 bp, Homo sapiens
catttcagtcctctc

SEQ ID NO: 165269 - DNA, 15 bp, Homo sapiens
gcatttcagtcctct

SEQ ID NO: 165270 - DNA, 15 bp, Homo sapiens
tgcatttcagtcctc

SEQ ID NO: 165271 - DNA, 15 bp, Homo sapiens
atgcatttcagtcct

SEQ ID NO: 165272 - DNA, 15 bp, Homo sapiens
gatgcatttcagtcc

SEQ ID NO: 165273 - DNA, 15 bp, Homo sapiens
tgatgcatttcagtc

SEQ ID NO: 165274 - DNA, 15 bp, Homo sapiens
ttgatgcatttcagt

SEQ ID NO: 165275 - DNA, 15 bp, Homo sapiens
tttgatgcatttcag

SEQ ID NO: 165276 - DNA, 15 bp, Homo sapiens
ctttgatgcatttca

SEQ ID NO: 165277 - DNA, 15 bp, Homo sapiens
cctttgatgcatttc

SEQ ID NO: 165278 - DNA, 15 bp, Homo sapiens
tcctttgatgcattt

SEQ ID NO: 165279 - DNA, 15 bp, Homo sapiens
atcctttgatgcatt

SEQ ID NO: 165280 - DNA, 15 bp, Homo sapiens
catcctttgatgcat

SEQ ID NO: 165281 - DNA, 15 bp, Homo sapiens
ccatcctttgatgca

SEQ ID NO: 165282 - DNA, 15 bp, Homo sapiens
cccatcctttgatgc

SEQ ID NO: 165283 - DNA, 15 bp, Homo sapiens
acccatcctttgatg

SEQ ID NO: 165284 - DNA, 15 bp, Homo sapiens
tacccatcctttgat

SEQ ID NO: 165285 - DNA, 15 bp, Homo sapiens
ttacccatcctttga

SEQ ID NO: 165286 - DNA, 15 bp, Homo sapiens
attacccatcctttg

SEQ ID NO: 165287 - DNA, 15 bp, Homo sapiens
cattacccatccttt

SEQ ID NO: 165288 - DNA, 15 bp, Homo sapiens
tcattacccatcctt

SEQ ID NO: 165289 - DNA, 15 bp, Homo sapiens
ttcattacccatcct

SEQ ID NO: 165290 - DNA, 15 bp, Homo sapiens
tttcattacccatcc

SEQ ID NO: 165291 - DNA, 15 bp, Homo sapiens
ttttcattacccatc

SEQ ID NO: 165292 - DNA, 15 bp, Homo sapiens
tttttcattacccat

SEQ ID NO: 165293 - DNA, 15 bp, Homo sapiens
ttttttcattaccca

SEQ ID NO: 165294 - DNA, 15 bp, Homo sapiens
attttttcattaccc

SEQ ID NO: 165295 - DNA, 15 bp, Homo sapiens
cattttttcattacc

SEQ ID NO: 165296 - DNA, 15 bp, Homo sapiens
ccattttttcattac

SEQ ID NO: 165297 - DNA, 15 bp, Homo sapiens
accattttttcatta

SEQ ID NO: 165298 - DNA, 15 bp, Homo sapiens
caccattttttcatt

SEQ ID NO: 165299 - DNA, 15 bp, Homo sapiens
tcaccattttttcat

SEQ ID NO: 165300 - DNA, 15 bp, Homo sapiens
atcaccattttttca

SEQ ID NO: 165301 - DNA, 15 bp, Homo sapiens
catcaccattttttc

SEQ ID NO: 165302 - DNA, 15 bp, Homo sapiens
tcatcaccatttttt

SEQ ID NO: 165303 - DNA, 15 bp, Homo sapiens
ctcatcaccattttt

SEQ ID NO: 165304 - DNA, 15 bp, Homo sapiens
cctcatcaccatttt

SEQ ID NO: 165305 - DNA, 15 bp, Homo sapiens
tcctcatcaccattt

SEQ ID NO: 165306 - DNA, 15 bp, Homo sapiens
gtcctcatcaccatt

SEQ ID NO: 165307 - DNA, 15 bp, Homo sapiens
cgtcctcatcaccat

SEQ ID NO: 165308 - DNA, 15 bp, Homo sapiens
ccgtcctcatcacca

SEQ ID NO: 165309 - DNA, 15 bp, Homo sapiens
cccgtcctcatcacc

SEQ ID NO: 165310 - DNA, 15 bp, Homo sapiens
acccgtcctcatcac

SEQ ID NO: 165311 - DNA, 15 bp, Homo sapiens
aacccgtcctcatca

SEQ ID NO: 165312 - DNA, 15 bp, Homo sapiens
caacccgtcctcatc

SEQ ID NO: 165313 - DNA, 15 bp, Homo sapiens
gcaacccgtcctcat

SEQ ID NO: 165314 - DNA, 15 bp, Homo sapiens
ggcaacccgtcctca

SEQ ID NO: 165315 - DNA, 15 bp, Homo sapiens
aggcaacccgtcctc

SEQ ID NO: 165316 - DNA, 15 bp, Homo sapiens
aaggcaacccgtcct

SEQ ID NO: 165317 - DNA, 15 bp, Homo sapiens
taaggcaacccgtcc

SEQ ID NO: 165318 - DNA, 15 bp, Homo sapiens
ataaggcaacccgtc

SEQ ID NO: 165319 - DNA, 15 bp, Homo sapiens
gataaggcaacccgt

SEQ ID NO: 165320 - DNA, 15 bp, Homo sapiens
tgataaggcaacccg

SEQ ID NO: 165321 - DNA, 15 bp, Homo sapiens
gtgataaggcaaccc

SEQ ID NO: 165322 - DNA, 15 bp, Homo sapiens
ggtgataaggcaacc

SEQ ID NO: 165323 - DNA, 15 bp, Homo sapiens
gggtgataaggcaac

SEQ ID NO: 165324 - DNA, 15 bp, Homo sapiens
tgggtgataaggcaa

SEQ ID NO: 165325 - DNA, 15 bp, Homo sapiens
ctgggtgataaggca

SEQ ID NO: 165326 - DNA, 15 bp, Homo sapiens
tctgggtgataaggc

SEQ ID NO: 165327 - DNA, 15 bp, Homo sapiens
ttctgggtgataagg

SEQ ID NO: 165328 - DNA, 15 bp, Homo sapiens
cttctgggtgataag

SEQ ID NO: 165329 - DNA, 15 bp, Homo sapiens
ccttctgggtgataa

SEQ ID NO: 165330 - DNA, 15 bp, Homo sapiens
cccttctgggtgata

SEQ ID NO: 165331 - DNA, 15 bp, Homo sapiens
tcccttctgggtgat

SEQ ID NO: 165332 - DNA, 15 bp, Homo sapiens
ctcccttctgggtga

SEQ ID NO: 165333 - DNA, 15 bp, Homo sapiens
cctcccttctgggtg

SEQ ID NO: 165334 - DNA, 15 bp, Homo sapiens
tcctcccttctgggt

SEQ ID NO: 165335 - DNA, 15 bp, Homo sapiens
ttcctcccttctggg

SEQ ID NO: 165336 - DNA, 15 bp, Homo sapiens
tttcctcccttctgg

SEQ ID NO: 165337 - DNA, 15 bp, Homo sapiens
ttttcctcccttctg

SEQ ID NO: 165338 - DNA, 15 bp, Homo sapiens
cttttcctcccttct

SEQ ID NO: 165339 - DNA, 15 bp, Homo sapiens
gcttttcctcccttc

SEQ ID NO: 165340 - DNA, 15 bp, Homo sapiens
agcttttcctccctt

SEQ ID NO: 165341 - DNA, 15 bp, Homo sapiens
aagcttttcctccct

SEQ ID NO: 165342 - DNA, 15 bp, Homo sapiens
gaagcttttcctccc

SEQ ID NO: 165343 - DNA, 15 bp, Homo sapiens
tgaagcttttcctcc

SEQ ID NO: 165344 - DNA, 15 bp, Homo sapiens
ctgaagcttttcctc

SEQ ID NO: 165345 - DNA, 15 bp, Homo sapiens
cctgaagcttttcct

SEQ ID NO: 165346 - DNA, 15 bp, Homo sapiens
gcctgaagcttttcc

SEQ ID NO: 165347 - DNA, 15 bp, Homo sapiens
ggcctgaagcttttc

SEQ ID NO: 165348 - DNA, 15 bp, Homo sapiens
gggcctgaagctttt

SEQ ID NO: 165349 - DNA, 15 bp, Homo sapiens
tgggcctgaagcttt

SEQ ID NO: 165350 - DNA, 15 bp, Homo sapiens
ttgggcctgaagctt

SEQ ID NO: 165351 - DNA, 15 bp, Homo sapiens
gttgggcctgaagct

SEQ ID NO: 165352 - DNA, 15 bp, Homo sapiens
ggttgggcctgaagc

SEQ ID NO: 165353 - DNA, 15 bp, Homo sapiens
tggttgggcctgaag

SEQ ID NO: 165354 - DNA, 15 bp, Homo sapiens
atggttgggcctgaa

SEQ ID NO: 165355 - DNA, 15 bp, Homo sapiens
gatggttgggcctga

SEQ ID NO: 165356 - DNA, 15 bp, Homo sapiens
ggatggttgggcctg

SEQ ID NO: 165357 - DNA, 15 bp, Homo sapiens
aggatggttgggcct

SEQ ID NO: 165358 - DNA, 15 bp, Homo sapiens
caggatggttgggcc

SEQ ID NO: 165359 - DNA, 15 bp, Homo sapiens
gcaggatggttgggc

SEQ ID NO: 165360 - DNA, 15 bp, Homo sapiens
agcaggatggttggg

SEQ ID NO: 165361 - DNA, 15 bp, Homo sapiens
aagcaggatggttgg

SEQ ID NO: 165362 - DNA, 15 bp, Homo sapiens
taagcaggatggttg

SEQ ID NO: 165363 - DNA, 15 bp, Homo sapiens
ttaagcaggatggtt

SEQ ID NO: 165364 - DNA, 15 bp, Homo sapiens
tttaagcaggatggt

SEQ ID NO: 165365 - DNA, 15 bp, Homo sapiens
gtttaagcaggatgg

SEQ ID NO: 165366 - DNA, 15 bp, Homo sapiens
tgtttaagcaggatg

SEQ ID NO: 165367 - DNA, 15 bp, Homo sapiens
atgtttaagcaggat

SEQ ID NO: 165368 - DNA, 15 bp, Homo sapiens
aatgtttaagcagga

SEQ ID NO: 165369 - DNA, 15 bp, Homo sapiens
aaatgtttaagcagg

SEQ ID NO: 165370 - DNA, 15 bp, Homo sapiens
caaatgtttaagcag

SEQ ID NO: 165371 - DNA, 15 bp, Homo sapiens
tcaaatgtttaagca

SEQ ID NO: 165372 - DNA, 15 bp, Homo sapiens
ctcaaatgtttaagc

SEQ ID NO: 165373 - DNA, 15 bp, Homo sapiens
tctcaaatgtttaag

SEQ ID NO: 165374 - DNA, 15 bp, Homo sapiens
ttctcaaatgtttaa

SEQ ID NO: 165375 - DNA, 15 bp, Homo sapiens
attctcaaatgttta

SEQ ID NO: 165376 - DNA, 15 bp, Homo sapiens
aattctcaaatgttt

SEQ ID NO: 165377 - DNA, 15 bp, Homo sapiens
gaattctcaaatgtt

SEQ ID NO: 165378 - DNA, 15 bp, Homo sapiens
agaattctcaaatgt

SEQ ID NO: 165379 - DNA, 15 bp, Homo sapiens
tagaattctcaaatg

SEQ ID NO: 165380 - DNA, 15 bp, Homo sapiens
atagaattctcaaat

SEQ ID NO: 165381 - DNA, 15 bp, Homo sapiens
catagaattctcaaa

SEQ ID NO: 165382 - DNA, 15 bp, Homo sapiens
gcatagaattctcaa

SEQ ID NO: 165383 - DNA, 15 bp, Homo sapiens
cgcatagaattctca

SEQ ID NO: 165384 - DNA, 15 bp, Homo sapiens
ccgcatagaattctc

SEQ ID NO: 165385 - DNA, 15 bp, Homo sapiens
accgcatagaattct

SEQ ID NO: 165386 - DNA, 15 bp, Homo sapiens
aaccgcatagaattc

SEQ ID NO: 165387 - DNA, 15 bp, Homo sapiens
gaaccgcatagaatt

SEQ ID NO: 165388 - DNA, 15 bp, Homo sapiens
agaaccgcatagaat

SEQ ID NO: 165389 - DNA, 15 bp, Homo sapiens
aagaaccgcatagaa

SEQ ID NO: 165390 - DNA, 15 bp, Homo sapiens
aaagaaccgcataga

SEQ ID NO: 165391 - DNA, 15 bp, Homo sapiens
aaaagaaccgcatag

SEQ ID NO: 165392 - DNA, 15 bp, Homo sapiens
taaaagaaccgcata

SEQ ID NO: 165393 - DNA, 15 bp, Homo sapiens
ttaaaagaaccgcat

SEQ ID NO: 165394 - DNA, 15 bp, Homo sapiens
cttaaaagaaccgca

SEQ ID NO: 165395 - DNA, 15 bp, Homo sapiens
acttaaaagaaccgc

SEQ ID NO: 165396 - DNA, 15 bp, Homo sapiens
tacttaaaagaaccg

SEQ ID NO: 165397 - DNA, 15 bp, Homo sapiens
atacttaaaagaacc

SEQ ID NO: 165398 - DNA, 15 bp, Homo sapiens
aatacttaaaagaac

SEQ ID NO: 165399 - DNA, 15 bp, Homo sapiens
aaatacttaaaagaa

SEQ ID NO: 165400 - DNA, 15 bp, Homo sapiens
taaatacttaaaaga

SEQ ID NO: 165401 - DNA, 15 bp, Homo sapiens
ctaaatacttaaaag

SEQ ID NO: 165402 - DNA, 15 bp, Homo sapiens
tctaaatacttaaaa

SEQ ID NO: 165403 - DNA, 15 bp, Homo sapiens
ctctaaatacttaaa

SEQ ID NO: 165404 - DNA, 15 bp, Homo sapiens
cctctaaatacttaa

SEQ ID NO: 165405 - DNA, 15 bp, Homo sapiens
acctctaaatactta

SEQ ID NO: 165406 - DNA, 15 bp, Homo sapiens
tacctctaaatactt

SEQ ID NO: 165407 - DNA, 15 bp, Homo sapiens
gtacctctaaatact

SEQ ID NO: 165408 - DNA, 15 bp, Homo sapiens
agtacctctaaatac

SEQ ID NO: 165409 - DNA, 15 bp, Homo sapiens
cagtacctctaaata

SEQ ID NO: 165410 - DNA, 15 bp, Homo sapiens
ccagtacctctaaat

SEQ ID NO: 165411 - DNA, 15 bp, Homo sapiens
cccagtacctctaaa

SEQ ID NO: 165412 - DNA, 15 bp, Homo sapiens
ccccagtacctctaa

SEQ ID NO: 165413 - DNA, 15 bp, Homo sapiens
tccccagtacctcta

SEQ ID NO: 165414 - DNA, 15 bp, Homo sapiens
gtccccagtacctct

SEQ ID NO: 165415 - DNA, 15 bp, Homo sapiens
tgtccccagtacctc

SEQ ID NO: 165416 - DNA, 15 bp, Homo sapiens
ttgtccccagtacct

SEQ ID NO: 165417 - DNA, 15 bp, Homo sapiens
attgtccccagtacc

SEQ ID NO: 165418 - DNA, 15 bp, Homo sapiens
cattgtccccagtac

SEQ ID NO: 165419 - DNA, 15 bp, Homo sapiens
acattgtccccagta

SEQ ID NO: 165420 - DNA, 15 bp, Homo sapiens
cacattgtccccagt

SEQ ID NO: 165421 - DNA, 15 bp, Homo sapiens
acacattgtccccag

SEQ ID NO: 165422 - DNA, 15 bp, Homo sapiens
gacacattgtcccca

SEQ ID NO: 165423 - DNA, 15 bp, Homo sapiens
ggacacattgtcccc

SEQ ID NO: 165424 - DNA, 15 bp, Homo sapiens
tggacacattgtccc

SEQ ID NO: 165425 - DNA, 15 bp, Homo sapiens
ctggacacattgtcc

SEQ ID NO: 165426 - DNA, 15 bp, Homo sapiens
tctggacacattgtc

SEQ ID NO: 165427 - DNA, 15 bp, Homo sapiens
ttctggacacattgt

SEQ ID NO: 165428 - DNA, 15 bp, Homo sapiens
tttctggacacattg

SEQ ID NO: 165429 - DNA, 15 bp, Homo sapiens
ctttctggacacatt

SEQ ID NO: 165430 - DNA, 15 bp, Homo sapiens
actttctggacacat

SEQ ID NO: 165431 - DNA, 15 bp, Homo sapiens
cactttctggacaca

SEQ ID NO: 165432 - DNA, 15 bp, Homo sapiens
ccactttctggacac

SEQ ID NO: 165433 - DNA, 15 bp, Homo sapiens
tccactttctggaca

SEQ ID NO: 165434 - DNA, 15 bp, Homo sapiens
ttccactttctggac

SEQ ID NO: 165435 - DNA, 15 bp, Homo sapiens
attccactttctgga

SEQ ID NO: 165436 - DNA, 15 bp, Homo sapiens
gattccactttctgg

SEQ ID NO: 165437 - DNA, 15 bp, Homo sapiens
ggattccactttctg

SEQ ID NO: 165438 - DNA, 15 bp, Homo sapiens
gggattccactttct

SEQ ID NO: 165439 - DNA, 15 bp, Homo sapiens
tgggattccactttc

SEQ ID NO: 165440 - DNA, 15 bp, Homo sapiens
ctgggattccacttt

SEQ ID NO: 165441 - DNA, 15 bp, Homo sapiens
gctgggattccactt

SEQ ID NO: 165442 - DNA, 15 bp, Homo sapiens
agctgggattccact

SEQ ID NO: 165443 - DNA, 15 bp, Homo sapiens
gagctgggattccac

SEQ ID NO: 165444 - DNA, 15 bp, Homo sapiens
ggagctgggattcca

SEQ ID NO: 165445 - DNA, 15 bp, Homo sapiens
aggagctgggattcc

SEQ ID NO: 165446 - DNA, 15 bp, Homo sapiens
aaggagctgggattc

SEQ ID NO: 165447 - DNA, 15 bp, Homo sapiens
gaaggagctgggatt

SEQ ID NO: 165448 - DNA, 15 bp, Homo sapiens
agaaggagctgggat

SEQ ID NO: 165449 - DNA, 15 bp, Homo sapiens
gagaaggagctggga

SEQ ID NO: 165450 - DNA, 15 bp, Homo sapiens
tgagaaggagctggg

SEQ ID NO: 165451 - DNA, 15 bp, Homo sapiens
gtgagaaggagctgg

SEQ ID NO: 165452 - DNA, 15 bp, Homo sapiens
ggtgagaaggagctg

SEQ ID NO: 165453 - DNA, 15 bp, Homo sapiens
gggtgagaaggagct

SEQ ID NO: 165454 - DNA, 15 bp, Homo sapiens
ggggtgagaaggagc

SEQ ID NO: 165455 - DNA, 15 bp, Homo sapiens
cggggtgagaaggag

SEQ ID NO: 165456 - DNA, 15 bp, Homo sapiens
ccggggtgagaagga

SEQ ID NO: 165457 - DNA, 15 bp, Homo sapiens
gccggggtgagaagg

SEQ ID NO: 165458 - DNA, 15 bp, Homo sapiens
agccggggtgagaag

SEQ ID NO: 165459 - DNA, 15 bp, Homo sapiens
tagccggggtgagaa

SEQ ID NO: 165460 - DNA, 15 bp, Homo sapiens
atagccggggtgaga

SEQ ID NO: 165461 - DNA, 15 bp, Homo sapiens
aatagccggggtgag

SEQ ID NO: 165462 - DNA, 15 bp, Homo sapiens
caatagccggggtga

SEQ ID NO: 165463 - DNA, 15 bp, Homo sapiens
tcaatagccggggtg

SEQ ID NO: 165464 - DNA, 15 bp, Homo sapiens
atcaatagccggggt

SEQ ID NO: 165465 - DNA, 15 bp, Homo sapiens
aatcaatagccgggg

SEQ ID NO: 165466 - DNA, 15 bp, Homo sapiens
aaatcaatagccggg

SEQ ID NO: 165467 - DNA, 15 bp, Homo sapiens
aaaatcaatagccgg

SEQ ID NO: 165468 - DNA, 15 bp, Homo sapiens
aaaaatcaatagccg

SEQ ID NO: 165469 - DNA, 15 bp, Homo sapiens
caaaaatcaatagcc

SEQ ID NO: 165470 - DNA, 15 bp, Homo sapiens
ccaaaaatcaatagc

SEQ ID NO: 165471 - DNA, 15 bp, Homo sapiens
gccaaaaatcaatag

SEQ ID NO: 165472 - DNA, 15 bp, Homo sapiens
ggccaaaaatcaata

SEQ ID NO: 165473 - DNA, 15 bp, Homo sapiens
aggccaaaaatcaat

SEQ ID NO: 165474 - DNA, 15 bp, Homo sapiens
aaggccaaaaatcaa

SEQ ID NO: 165475 - DNA, 15 bp, Homo sapiens
caaggccaaaaatca

SEQ ID NO: 165476 - DNA, 15 bp, Homo sapiens
gcaaggccaaaaatc

SEQ ID NO: 165477 - DNA, 15 bp, Homo sapiens
tgcaaggccaaaaat

SEQ ID NO: 165478 - DNA, 15 bp, Homo sapiens
ttgcaaggccaaaaa

SEQ ID NO: 165479 - DNA, 15 bp, Homo sapiens
attgcaaggccaaaa

SEQ ID NO: 165480 - DNA, 15 bp, Homo sapiens
aattgcaaggccaaa

SEQ ID NO: 165481 - DNA, 15 bp, Homo sapiens
taattgcaaggccaa

SEQ ID NO: 165482 - DNA, 15 bp, Homo sapiens
gtaattgcaaggcca

SEQ ID NO: 165483 - DNA, 15 bp, Homo sapiens
agtaattgcaaggcc

SEQ ID NO: 165484 - DNA, 15 bp, Homo sapiens
cagtaattgcaaggc

SEQ ID NO: 165485 - DNA, 15 bp, Homo sapiens
gcagtaattgcaagg

SEQ ID NO: 165486 - DNA, 15 bp, Homo sapiens
tgcagtaattgcaag

SEQ ID NO: 165487 - DNA, 15 bp, Homo sapiens
ctgcagtaattgcaa

SEQ ID NO: 165488 - DNA, 15 bp, Homo sapiens
tctgcagtaattgca

SEQ ID NO: 165489 - DNA, 15 bp, Homo sapiens
ctctgcagtaattgc

SEQ ID NO: 165490 - DNA, 15 bp, Homo sapiens
cctctgcagtaattg

SEQ ID NO: 165491 - DNA, 15 bp, Homo sapiens
acctctgcagtaatt

SEQ ID NO: 165492 - DNA, 15 bp, Homo sapiens
cacctctgcagtaat

SEQ ID NO: 165493 - DNA, 15 bp, Homo sapiens
gcacctctgcagtaa

SEQ ID NO: 165494 - DNA, 15 bp, Homo sapiens
agcacctctgcagta

SEQ ID NO: 165495 - DNA, 15 bp, Homo sapiens
cagcacctctgcagt

SEQ ID NO: 165496 - DNA, 15 bp, Homo sapiens
gcagcacctctgcag

SEQ ID NO: 165497 - DNA, 15 bp, Homo sapiens
ggcagcacctctgca

SEQ ID NO: 165498 - DNA, 15 bp, Homo sapiens
aggcagcacctctgc

SEQ ID NO: 165499 - DNA, 15 bp, Homo sapiens
gaggcagcacctctg

SEQ ID NO: 165500 - DNA, 15 bp, Homo sapiens
agaggcagcacctct

SEQ ID NO: 165501 - DNA, 15 bp, Homo sapiens
cagaggcagcacctc

SEQ ID NO: 165502 - DNA, 15 bp, Homo sapiens
acagaggcagcacct

SEQ ID NO: 165503 - DNA, 15 bp, Homo sapiens
cacagaggcagcacc

SEQ ID NO: 165504 - DNA, 15 bp, Homo sapiens
tcacagaggcagcac

SEQ ID NO: 165505 - DNA, 15 bp, Homo sapiens
ttcacagaggcagca

SEQ ID NO: 165506 - DNA, 15 bp, Homo sapiens
gttcacagaggcagc

SEQ ID NO: 165507 - DNA, 15 bp, Homo sapiens
tgttcacagaggcag

SEQ ID NO: 165508 - DNA, 15 bp, Homo sapiens
gtgttcacagaggca

SEQ ID NO: 165509 - DNA, 15 bp, Homo sapiens
agtgttcacagaggc

SEQ ID NO: 165510 - DNA, 15 bp, Homo sapiens
tagtgttcacagagg

SEQ ID NO: 165511 - DNA, 15 bp, Homo sapiens
atagtgttcacagag

SEQ ID NO: 165512 - DNA, 15 bp, Homo sapiens
aatagtgttcacaga

SEQ ID NO: 165513 - DNA, 15 bp, Homo sapiens
taatagtgttcacag

SEQ ID NO: 165514 - DNA, 15 bp, Homo sapiens
ctaatagtgttcaca

SEQ ID NO: 165515 - DNA, 15 bp, Homo sapiens
actaatagtgttcac

SEQ ID NO: 165516 - DNA, 15 bp, Homo sapiens
cactaatagtgttca

SEQ ID NO: 165517 - DNA, 15 bp, Homo sapiens
gcactaatagtgttc

SEQ ID NO: 165518 - DNA, 15 bp, Homo sapiens
agcactaatagtgtt

SEQ ID NO: 165519 - DNA, 15 bp, Homo sapiens
tagcactaatagtgt

SEQ ID NO: 165520 - DNA, 15 bp, Homo sapiens
ctagcactaatagtg

SEQ ID NO: 165521 - DNA, 15 bp, Homo sapiens
actagcactaatagt

SEQ ID NO: 165522 - DNA, 15 bp, Homo sapiens
aactagcactaatag

SEQ ID NO: 165523 - DNA, 15 bp, Homo sapiens
caactagcactaata

SEQ ID NO: 165524 - DNA, 15 bp, Homo sapiens
ccaactagcactaat

SEQ ID NO: 165525 - DNA, 15 bp, Homo sapiens
tccaactagcactaa

SEQ ID NO: 165526 - DNA, 15 bp, Homo sapiens
ttccaactagcacta

SEQ ID NO: 165527 - DNA, 15 bp, Homo sapiens
tttccaactagcact

SEQ ID NO: 165528 - DNA, 15 bp, Homo sapiens
ctttccaactagcac

SEQ ID NO: 165529 - DNA, 15 bp, Homo sapiens
gctttccaactagca

SEQ ID NO: 165530 - DNA, 15 bp, Homo sapiens
agctttccaactagc

SEQ ID NO: 165531 - DNA, 15 bp, Homo sapiens
aagctttccaactag

SEQ ID NO: 165532 - DNA, 15 bp, Homo sapiens
caagctttccaacta

SEQ ID NO: 165533 - DNA, 15 bp, Homo sapiens
tcaagctttccaact

SEQ ID NO: 165534 - DNA, 15 bp, Homo sapiens
ctcaagctttccaac

SEQ ID NO: 165535 - DNA, 15 bp, Homo sapiens
gctcaagctttccaa

SEQ ID NO: 165536 - DNA, 15 bp, Homo sapiens
agctcaagctttcca

SEQ ID NO: 165537 - DNA, 15 bp, Homo sapiens
aagctcaagctttcc

SEQ ID NO: 165538 - DNA, 15 bp, Homo sapiens
aaagctcaagctttc

SEQ ID NO: 165539 - DNA, 15 bp, Homo sapiens
aaaagctcaagcttt

SEQ ID NO: 165540 - DNA, 15 bp, Homo sapiens
caaaagctcaagctt

SEQ ID NO: 165541 - DNA, 15 bp, Homo sapiens
tcaaaagctcaagct

SEQ ID NO: 165542 - DNA, 15 bp, Homo sapiens
ttcaaaagctcaagc

SEQ ID NO: 165543 - DNA, 15 bp, Homo sapiens
cttcaaaagctcaag

SEQ ID NO: 165544 - DNA, 15 bp, Homo sapiens
gcttcaaaagctcaa

SEQ ID NO: 165545 - DNA, 15 bp, Homo sapiens
agcttcaaaagctca

SEQ ID NO: 165546 - DNA, 15 bp, Homo sapiens
aagcttcaaaagctc

SEQ ID NO: 165547 - DNA, 15 bp, Homo sapiens
taagcttcaaaagct

SEQ ID NO: 165548 - DNA, 15 bp, Homo sapiens
ctaagcttcaaaagc

SEQ ID NO: 165549 - DNA, 15 bp, Homo sapiens
gctaagcttcaaaag

SEQ ID NO: 165550 - DNA, 15 bp, Homo sapiens
agctaagcttcaaaa

SEQ ID NO: 165551 - DNA, 15 bp, Homo sapiens
cagctaagcttcaaa

SEQ ID NO: 165552 - DNA, 15 bp, Homo sapiens
acagctaagcttcaa

SEQ ID NO: 165553 - DNA, 15 bp, Homo sapiens
aacagctaagcttca

SEQ ID NO: 165554 - DNA, 15 bp, Homo sapiens
aaacagctaagcttc

SEQ ID NO: 165555 - DNA, 15 bp, Homo sapiens
caaacagctaagctt

SEQ ID NO: 165556 - DNA, 15 bp, Homo sapiens
tcaaacagctaagct

SEQ ID NO: 165557 - DNA, 15 bp, Homo sapiens
ctcaaacagctaagc

SEQ ID NO: 165558 - DNA, 15 bp, Homo sapiens
gctcaaacagctaag

SEQ ID NO: 165559 - DNA, 15 bp, Homo sapiens
agctcaaacagctaa

SEQ ID NO: 165560 - DNA, 15 bp, Homo sapiens
tagctcaaacagcta

SEQ ID NO: 165561 - DNA, 15 bp, Homo sapiens
gtagctcaaacagct

SEQ ID NO: 165562 - DNA, 15 bp, Homo sapiens
ggtagctcaaacagc

SEQ ID NO: 165563 - DNA, 15 bp, Homo sapiens
aggtagctcaaacag

SEQ ID NO: 165564 - DNA, 15 bp, Homo sapiens
taggtagctcaaaca

SEQ ID NO: 165565 - DNA, 15 bp, Homo sapiens
gtaggtagctcaaac

SEQ ID NO: 165566 - DNA, 15 bp, Homo sapiens
cgtaggtagctcaaa

SEQ ID NO: 165567 - DNA, 15 bp, Homo sapiens
ccgtaggtagctcaa

SEQ ID NO: 165568 - DNA, 15 bp, Homo sapiens
cccgtaggtagctca

SEQ ID NO: 165569 - DNA, 15 bp, Homo sapiens
acccgtaggtagctc

SEQ ID NO: 165570 - DNA, 15 bp, Homo sapiens
aacccgtaggtagct

SEQ ID NO: 165571 - DNA, 15 bp, Homo sapiens
aaacccgtaggtagc

SEQ ID NO: 165572 - DNA, 15 bp, Homo sapiens
caaacccgtaggtag

SEQ ID NO: 165573 - DNA, 15 bp, Homo sapiens
ccaaacccgtaggta

SEQ ID NO: 165574 - DNA, 15 bp, Homo sapiens
tccaaacccgtaggt

SEQ ID NO: 165575 - DNA, 15 bp, Homo sapiens
ttccaaacccgtagg

SEQ ID NO: 165576 - DNA, 15 bp, Homo sapiens
tttccaaacccgtag

SEQ ID NO: 165577 - DNA, 15 bp, Homo sapiens
ttttccaaacccgta

SEQ ID NO: 165578 - DNA, 15 bp, Homo sapiens
tttttccaaacccgt

SEQ ID NO: 165579 - DNA, 15 bp, Homo sapiens
ttttttccaaacccg

SEQ ID NO: 165580 - DNA, 15 bp, Homo sapiens
tttttttccaaaccc

SEQ ID NO: 165581 - DNA, 15 bp, Homo sapiens
ttttttttccaaacc

SEQ ID NO: 165582 - DNA, 15 bp, Homo sapiens
tttttttttccaaac

SEQ ID NO: 165583 - DNA, 15 bp, Homo sapiens
ctttttttttccaaa

SEQ ID NO: 165584 - DNA, 15 bp, Homo sapiens
tctttttttttccaa

SEQ ID NO: 165585 - DNA, 15 bp, Homo sapiens
ttctttttttttcca

SEQ ID NO: 165586 - DNA, 15 bp, Homo sapiens
attctttttttttcc

SEQ ID NO: 165587 - DNA, 15 bp, Homo sapiens
gattctttttttttc

SEQ ID NO: 165588 - DNA, 15 bp, Homo sapiens
agattcttttttttt

SEQ ID NO: 165589 - DNA, 15 bp, Homo sapiens
aagattctttttttt

SEQ ID NO: 165590 - DNA, 15 bp, Homo sapiens
taagattcttttttt

SEQ ID NO: 165591 - DNA, 15 bp, Homo sapiens
gtaagattctttttt

SEQ ID NO: 165592 - DNA, 15 bp, Homo sapiens
ggtaagattcttttt

SEQ ID NO: 165593 - DNA, 15 bp, Homo sapiens
tggtaagattctttt

SEQ ID NO: 165594 - DNA, 15 bp, Homo sapiens
atggtaagattcttt

SEQ ID NO: 165595 - DNA, 15 bp, Homo sapiens
catggtaagattctt

SEQ ID NO: 165596 - DNA, 15 bp, Homo sapiens
acatggtaagattct

SEQ ID NO: 165597 - DNA, 15 bp, Homo sapiens
cacatggtaagattc

SEQ ID NO: 165598 - DNA, 15 bp, Homo sapiens
acacatggtaagatt

SEQ ID NO: 165599 - DNA, 15 bp, Homo sapiens
aacacatggtaagat

SEQ ID NO: 165600 - DNA, 15 bp, Homo sapiens
aaacacatggtaaga

SEQ ID NO: 165601 - DNA, 15 bp, Homo sapiens
gaaacacatggtaag

SEQ ID NO: 165602 - DNA, 15 bp, Homo sapiens
agaaacacatggtaa

SEQ ID NO: 165603 - DNA, 15 bp, Homo sapiens
aagaaacacatggta

SEQ ID NO: 165604 - DNA, 15 bp, Homo sapiens
aaagaaacacatggt

SEQ ID NO: 165605 - DNA, 15 bp, Homo sapiens
taaagaaacacatgg

SEQ ID NO: 165606 - DNA, 15 bp, Homo sapiens
ctaaagaaacacatg

SEQ ID NO: 165607 - DNA, 15 bp, Homo sapiens
gctaaagaaacacat

SEQ ID NO: 165608 - DNA, 15 bp, Homo sapiens
ggctaaagaaacaca

SEQ ID NO: 165609 - DNA, 15 bp, Homo sapiens
aggctaaagaaacac

SEQ ID NO: 165610 - DNA, 15 bp, Homo sapiens
caggctaaagaaaca

SEQ ID NO: 165611 - DNA, 15 bp, Homo sapiens
ccaggctaaagaaac

SEQ ID NO: 165612 - DNA, 15 bp, Homo sapiens
cccaggctaaagaaa

SEQ ID NO: 165613 - DNA, 15 bp, Homo sapiens
gcccaggctaaagaa

SEQ ID NO: 165614 - DNA, 15 bp, Homo sapiens
tgcccaggctaaaga

SEQ ID NO: 165615 - DNA, 15 bp, Homo sapiens
atgcccaggctaaag

SEQ ID NO: 165616 - DNA, 15 bp, Homo sapiens
catgcccaggctaaa

SEQ ID NO: 165617 - DNA, 15 bp, Homo sapiens
tcatgcccaggctaa

SEQ ID NO: 165618 - DNA, 15 bp, Homo sapiens
ttcatgcccaggcta

SEQ ID NO: 165619 - DNA, 15 bp, Homo sapiens
attcatgcccaggct

SEQ ID NO: 165620 - DNA, 15 bp, Homo sapiens
gattcatgcccaggc

SEQ ID NO: 165621 - DNA, 15 bp, Homo sapiens
tgattcatgcccagg

SEQ ID NO: 165622 - DNA, 15 bp, Homo sapiens
ttgattcatgcccag

SEQ ID NO: 165623 - DNA, 15 bp, Homo sapiens
tttgattcatgccca

SEQ ID NO: 165624 - DNA, 15 bp, Homo sapiens
ttttgattcatgccc

SEQ ID NO: 165625 - DNA, 15 bp, Homo sapiens
tttttgattcatgcc

SEQ ID NO: 165626 - DNA, 15 bp, Homo sapiens
atttttgattcatgc

SEQ ID NO: 165627 - DNA, 15 bp, Homo sapiens
tatttttgattcatg

SEQ ID NO: 165628 - DNA, 15 bp, Homo sapiens
ctatttttgattcat

SEQ ID NO: 165629 - DNA, 15 bp, Homo sapiens
actatttttgattca

SEQ ID NO: 165630 - DNA, 15 bp, Homo sapiens
aactatttttgattc

SEQ ID NO: 165631 - DNA, 15 bp, Homo sapiens
caactatttttgatt

SEQ ID NO: 165632 - DNA, 15 bp, Homo sapiens
tcaactatttttgat

SEQ ID NO: 165633 - DNA, 15 bp, Homo sapiens
ttcaactatttttga

SEQ ID NO: 165634 - DNA, 15 bp, Homo sapiens
gttcaactatttttg

SEQ ID NO: 165635 - DNA, 15 bp, Homo sapiens
agttcaactattttt

SEQ ID NO: 165636 - DNA, 15 bp, Homo sapiens
aagttcaactatttt

SEQ ID NO: 165637 - DNA, 15 bp, Homo sapiens
aaagttcaactattt

SEQ ID NO: 165638 - DNA, 15 bp, Homo sapiens
aaaagttcaactatt

SEQ ID NO: 165639 - DNA, 15 bp, Homo sapiens
aaaaagttcaactat

SEQ ID NO: 165640 - DNA, 15 bp, Homo sapiens
aaaaaagttcaacta

SEQ ID NO: 165641 - DNA, 15 bp, Homo sapiens
aaaaaaagttcaact

SEQ ID NO: 165642 - DNA, 15 bp, Homo sapiens
aaaaaaaagttcaac

SEQ ID NO: 165643 - DNA, 15 bp, Homo sapiens
aaaaaaaaagttcaa

SEQ ID NO: 165644 - DNA, 15 bp, Homo sapiens
aaaaaaaaaagttca

SEQ ID NO: 165645 - DNA, 15 bp, Homo sapiens
aaaaaaaaaaagttc

SEQ ID NO: 165646 - DNA, 15 bp, Homo sapiens
caaaaaaaaaaaagt

SEQ ID NO: 165647 - DNA, 15 bp, Homo sapiens
gcaaaaaaaaaaaag

SEQ ID NO: 165648 - DNA, 15 bp, Homo sapiens
agcaaaaaaaaaaaa

SEQ ID NO: 165649 - DNA, 15 bp, Homo sapiens
gagcaaaaaaaaaaa

SEQ ID NO: 165650 - DNA, 15 bp, Homo sapiens
tgagcaaaaaaaaaa

SEQ ID NO: 165651 - DNA, 15 bp, Homo sapiens
ttgagcaaaaaaaaa

SEQ ID NO: 165652 - DNA, 15 bp, Homo sapiens
cttgagcaaaaaaaa

SEQ ID NO: 165653 - DNA, 15 bp, Homo sapiens
acttgagcaaaaaaa

SEQ ID NO: 165654 - DNA, 15 bp, Homo sapiens
gacttgagcaaaaaa

SEQ ID NO: 165655 - DNA, 15 bp, Homo sapiens
agacttgagcaaaaa

SEQ ID NO: 165656 - DNA, 15 bp, Homo sapiens
gagacttgagcaaaa

SEQ ID NO: 165657 - DNA, 15 bp, Homo sapiens
tgagacttgagcaaa

SEQ ID NO: 165658 - DNA, 15 bp, Homo sapiens
ttgagacttgagcaa

SEQ ID NO: 165659 - DNA, 15 bp, Homo sapiens
cttgagacttgagca

SEQ ID NO: 165660 - DNA, 15 bp, Homo sapiens
acttgagacttgagc

SEQ ID NO: 165661 - DNA, 15 bp, Homo sapiens
aacttgagacttgag

SEQ ID NO: 165662 - DNA, 15 bp, Homo sapiens
aaacttgagacttga

SEQ ID NO: 165663 - DNA, 15 bp, Homo sapiens
taaacttgagacttg

SEQ ID NO: 165664 - DNA, 15 bp, Homo sapiens
ttaaacttgagactt

SEQ ID NO: 165665 - DNA, 15 bp, Homo sapiens
tttaaacttgagact

SEQ ID NO: 165666 - DNA, 15 bp, Homo sapiens
ttttaaacttgagac

SEQ ID NO: 165667 - DNA, 15 bp, Homo sapiens
tttttaaacttgaga

SEQ ID NO: 165668 - DNA, 15 bp, Homo sapiens
atttttaaacttgag

SEQ ID NO: 165669 - DNA, 15 bp, Homo sapiens
tatttttaaacttga

SEQ ID NO: 165670 - DNA, 15 bp, Homo sapiens
ttatttttaaacttg

SEQ ID NO: 165671 - DNA, 15 bp, Homo sapiens
tttatttttaaactt

SEQ ID NO: 165672 - DNA, 15 bp, Homo sapiens
ttttatttttaaact

SEQ ID NO: 165673 - DNA, 15 bp, Homo sapiens
tttttatttttaaac

SEQ ID NO: 165674 - DNA, 15 bp, Homo sapiens
ttttttatttttaaa

SEQ ID NO: 165675 - DNA, 15 bp, Homo sapiens
cttttttatttttaa

SEQ ID NO: 165676 - DNA, 15 bp, Homo sapiens
acttttttattttta

SEQ ID NO: 165677 - DNA, 15 bp, Homo sapiens
gacttttttattttt

SEQ ID NO: 165678 - DNA, 15 bp, Homo sapiens
tgacttttttatttt

SEQ ID NO: 165679 - DNA, 15 bp, Homo sapiens
gtgacttttttattt

SEQ ID NO: 165680 - DNA, 15 bp, Homo sapiens
ggtgacttttttatt

SEQ ID NO: 165681 - DNA, 15 bp, Homo sapiens
aggtgacttttttat

SEQ ID NO: 165682 - DNA, 15 bp, Homo sapiens
aaggtgactttttta

SEQ ID NO: 165683 - DNA, 15 bp, Homo sapiens
aaaggtgactttttt

SEQ ID NO: 165684 - DNA, 15 bp, Homo sapiens
caaaggtgacttttt

SEQ ID NO: 165685 - DNA, 15 bp, Homo sapiens
ccaaaggtgactttt

SEQ ID NO: 165686 - DNA, 15 bp, Homo sapiens
cccaaaggtgacttt

SEQ ID NO: 165687 - DNA, 15 bp, Homo sapiens
gcccaaaggtgactt

SEQ ID NO: 165688 - DNA, 15 bp, Homo sapiens
agcccaaaggtgact

SEQ ID NO: 165689 - DNA, 15 bp, Homo sapiens
cagcccaaaggtgac

SEQ ID NO: 165690 - DNA, 15 bp, Homo sapiens
tcagcccaaaggtga

SEQ ID NO: 165691 - DNA, 15 bp, Homo sapiens
ctcagcccaaaggtg

SEQ ID NO: 165692 - DNA, 15 bp, Homo sapiens
tctcagcccaaaggt

SEQ ID NO: 165693 - DNA, 15 bp, Homo sapiens
atctcagcccaaagg

SEQ ID NO: 165694 - DNA, 15 bp, Homo sapiens
gatctcagcccaaag

SEQ ID NO: 165695 - DNA, 15 bp, Homo sapiens
tgatctcagcccaaa

SEQ ID NO: 165696 - DNA, 15 bp, Homo sapiens
ttgatctcagcccaa

SEQ ID NO: 165697 - DNA, 15 bp, Homo sapiens
cttgatctcagccca

SEQ ID NO: 165698 - DNA, 15 bp, Homo sapiens
tcttgatctcagccc

SEQ ID NO: 165699 - DNA, 15 bp, Homo sapiens
ttcttgatctcagcc

SEQ ID NO: 165700 - DNA, 15 bp, Homo sapiens
attcttgatctcagc

SEQ ID NO: 165701 - DNA, 15 bp, Homo sapiens
cattcttgatctcag

SEQ ID NO: 165702 - DNA, 15 bp, Homo sapiens
ccattcttgatctca

SEQ ID NO: 165703 - DNA, 15 bp, Homo sapiens
tccattcttgatctc

SEQ ID NO: 165704 - DNA, 15 bp, Homo sapiens
ttccattcttgatct

SEQ ID NO: 165705 - DNA, 15 bp, Homo sapiens
tttccattcttgatc

SEQ ID NO: 165706 - DNA, 15 bp, Homo sapiens
ttttccattcttgat

SEQ ID NO: 165707 - DNA, 15 bp, Homo sapiens
attttccattcttga

SEQ ID NO: 165708 - DNA, 15 bp, Homo sapiens
aattttccattcttg

SEQ ID NO: 165709 - DNA, 15 bp, Homo sapiens
aaattttccattctt

SEQ ID NO: 165710 - DNA, 15 bp, Homo sapiens
gaaattttccattct

SEQ ID NO: 165711 - DNA, 15 bp, Homo sapiens
tgaaattttccattc

SEQ ID NO: 165712 - DNA, 15 bp, Homo sapiens
ctgaaattttccatt

SEQ ID NO: 165713 - DNA, 15 bp, Homo sapiens
cctgaaattttccat

SEQ ID NO: 165714 - DNA, 15 bp, Homo sapiens
ccctgaaattttcca

SEQ ID NO: 165715 - DNA, 15 bp, Homo sapiens
gccctgaaattttcc

SEQ ID NO: 165716 - DNA, 15 bp, Homo sapiens
tgccctgaaattttc

SEQ ID NO: 165717 - DNA, 15 bp, Homo sapiens
atgccctgaaatttt

SEQ ID NO: 165718 - DNA, 15 bp, Homo sapiens
tatgccctgaaattt

SEQ ID NO: 165719 - DNA, 15 bp, Homo sapiens
ctatgccctgaaatt

SEQ ID NO: 165720 - DNA, 15 bp, Homo sapiens
gctatgccctgaaat

SEQ ID NO: 165721 - DNA, 15 bp, Homo sapiens
cgctatgccctgaaa

SEQ ID NO: 165722 - DNA, 15 bp, Homo sapiens
acgctatgccctgaa

SEQ ID NO: 165723 - DNA, 15 bp, Homo sapiens
tacgctatgccctga

SEQ ID NO: 165724 - DNA, 15 bp, Homo sapiens
ttacgctatgccctg

SEQ ID NO: 165725 - DNA, 15 bp, Homo sapiens
attacgctatgccct

SEQ ID NO: 165726 - DNA, 15 bp, Homo sapiens
aattacgctatgccc

SEQ ID NO: 165727 - DNA, 15 bp, Homo sapiens
aaattacgctatgcc

SEQ ID NO: 165728 - DNA, 15 bp, Homo sapiens
aaaattacgctatgc

SEQ ID NO: 165729 - DNA, 15 bp, Homo sapiens
aaaaattacgctatg

SEQ ID NO: 165730 - DNA, 15 bp, Homo sapiens
aaaaaattacgctat

SEQ ID NO: 165731 - DNA, 15 bp, Homo sapiens
gaaaaaattacgcta

SEQ ID NO: 165732 - DNA, 15 bp, Homo sapiens
ggaaaaaattacgct

SEQ ID NO: 165733 - DNA, 15 bp, Homo sapiens
gggaaaaaattacgc

SEQ ID NO: 165734 - DNA, 15 bp, Homo sapiens
ggggaaaaaattacg

SEQ ID NO: 165735 - DNA, 15 bp, Homo sapiens
tggggaaaaaattac

SEQ ID NO: 165736 - DNA, 15 bp, Homo sapiens
atggggaaaaaatta

SEQ ID NO: 165737 - DNA, 15 bp, Homo sapiens
gatggggaaaaaatt

SEQ ID NO: 165738 - DNA, 15 bp, Homo sapiens
agatggggaaaaaat

SEQ ID NO: 165739 - DNA, 15 bp, Homo sapiens
cagatggggaaaaaa

SEQ ID NO: 165740 - DNA, 15 bp, Homo sapiens
acagatggggaaaaa

SEQ ID NO: 165741 - DNA, 15 bp, Homo sapiens
aacagatggggaaaa

SEQ ID NO: 165742 - DNA, 15 bp, Homo sapiens
gaacagatggggaaa

SEQ ID NO: 165743 - DNA, 15 bp, Homo sapiens
agaacagatggggaa

SEQ ID NO: 165744 - DNA, 15 bp, Homo sapiens
cagaacagatgggga

SEQ ID NO: 165745 - DNA, 15 bp, Homo sapiens
ccagaacagatgggg

SEQ ID NO: 165746 - DNA, 15 bp, Homo sapiens
cccagaacagatggg

SEQ ID NO: 165747 - DNA, 15 bp, Homo sapiens
gcccagaacagatgg

SEQ ID NO: 165748 - DNA, 15 bp, Homo sapiens
tgcccagaacagatg

SEQ ID NO: 165749 - DNA, 15 bp, Homo sapiens
ttgcccagaacagat

SEQ ID NO: 165750 - DNA, 15 bp, Homo sapiens
cttgcccagaacaga

SEQ ID NO: 165751 - DNA, 15 bp, Homo sapiens
ccttgcccagaacag

SEQ ID NO: 165752 - DNA, 15 bp, Homo sapiens
cccttgcccagaaca

SEQ ID NO: 165753 - DNA, 15 bp, Homo sapiens
tcccttgcccagaac

SEQ ID NO: 165754 - DNA, 15 bp, Homo sapiens
atcccttgcccagaa

SEQ ID NO: 165755 - DNA, 15 bp, Homo sapiens
catcccttgcccaga

SEQ ID NO: 165756 - DNA, 15 bp, Homo sapiens
tcatcccttgcccag

SEQ ID NO: 165757 - DNA, 15 bp, Homo sapiens
atcatcccttgccca

SEQ ID NO: 165758 - DNA, 15 bp, Homo sapiens
tatcatcccttgccc

SEQ ID NO: 165759 - DNA, 15 bp, Homo sapiens
ttatcatcccttgcc

SEQ ID NO: 165760 - DNA, 15 bp, Homo sapiens
tttatcatcccttgc

SEQ ID NO: 165761 - DNA, 15 bp, Homo sapiens
ctttatcatcccttg

SEQ ID NO: 165762 - DNA, 15 bp, Homo sapiens
gctttatcatccctt

SEQ ID NO: 165763 - DNA, 15 bp, Homo sapiens
tgctttatcatccct

SEQ ID NO: 165764 - DNA, 15 bp, Homo sapiens
atgctttatcatccc

SEQ ID NO: 165765 - DNA, 15 bp, Homo sapiens
aatgctttatcatcc

SEQ ID NO: 165766 - DNA, 15 bp, Homo sapiens
gaatgctttatcatc

SEQ ID NO: 165767 - DNA, 15 bp, Homo sapiens
agaatgctttatcat

SEQ ID NO: 165768 - DNA, 15 bp, Homo sapiens
cagaatgctttatca

SEQ ID NO: 165769 - DNA, 15 bp, Homo sapiens
acagaatgctttatc

SEQ ID NO: 165770 - DNA, 15 bp, Homo sapiens
aacagaatgctttat

SEQ ID NO: 165771 - DNA, 15 bp, Homo sapiens
caacagaatgcttta

SEQ ID NO: 165772 - DNA, 15 bp, Homo sapiens
ccaacagaatgcttt

SEQ ID NO: 165773 - DNA, 15 bp, Homo sapiens
tccaacagaatgctt

SEQ ID NO: 165774 - DNA, 15 bp, Homo sapiens
ttccaacagaatgct

SEQ ID NO: 165775 - DNA, 15 bp, Homo sapiens
cttccaacagaatgc

SEQ ID NO: 165776 - DNA, 15 bp, Homo sapiens
tcttccaacagaatg

SEQ ID NO: 165777 - DNA, 15 bp, Homo sapiens
atcttccaacagaat

SEQ ID NO: 165778 - DNA, 15 bp, Homo sapiens
aatcttccaacagaa

SEQ ID NO: 165779 - DNA, 15 bp, Homo sapiens
caatcttccaacaga

SEQ ID NO: 165780 - DNA, 15 bp, Homo sapiens
acaatcttccaacag

SEQ ID NO: 165781 - DNA, 15 bp, Homo sapiens
cacaatcttccaaca

SEQ ID NO: 165782 - DNA, 15 bp, Homo sapiens
acacaatcttccaac

SEQ ID NO: 165783 - DNA, 15 bp, Homo sapiens
cacacaatcttccaa

SEQ ID NO: 165784 - DNA, 15 bp, Homo sapiens
acacacaatcttcca

SEQ ID NO: 165785 - DNA, 15 bp, Homo sapiens
tacacacaatcttcc

SEQ ID NO: 165786 - DNA, 15 bp, Homo sapiens
ttacacacaatcttc

SEQ ID NO: 165787 - DNA, 15 bp, Homo sapiens
cttacacacaatctt

SEQ ID NO: 165788 - DNA, 15 bp, Homo sapiens
gcttacacacaatct

SEQ ID NO: 165789 - DNA, 15 bp, Homo sapiens
tgcttacacacaatc

SEQ ID NO: 165790 - DNA, 15 bp, Homo sapiens
atgcttacacacaat

SEQ ID NO: 165791 - DNA, 15 bp, Homo sapiens
gatgcttacacacaa

SEQ ID NO: 165792 - DNA, 15 bp, Homo sapiens
tgatgcttacacaca

SEQ ID NO: 165793 - DNA, 15 bp, Homo sapiens
ttgatgcttacacac

SEQ ID NO: 165794 - DNA, 15 bp, Homo sapiens
gttgatgcttacaca

SEQ ID NO: 165795 - DNA, 15 bp, Homo sapiens
ggttgatgcttacac

SEQ ID NO: 165796 - DNA, 15 bp, Homo sapiens
tggttgatgcttaca

SEQ ID NO: 165797 - DNA, 15 bp, Homo sapiens
atggttgatgcttac

SEQ ID NO: 165798 - DNA, 15 bp, Homo sapiens
catggttgatgctta

SEQ ID NO: 165799 - DNA, 15 bp, Homo sapiens
tcatggttgatgctt

SEQ ID NO: 165800 - DNA, 15 bp, Homo sapiens
ctcatggttgatgct

SEQ ID NO: 165801 - DNA, 15 bp, Homo sapiens
actcatggttgatgc

SEQ ID NO: 165802 - DNA, 15 bp, Homo sapiens
gactcatggttgatg

SEQ ID NO: 165803 - DNA, 15 bp, Homo sapiens
agactcatggttgat

SEQ ID NO: 165804 - DNA, 15 bp, Homo sapiens
gagactcatggttga

SEQ ID NO: 165805 - DNA, 15 bp, Homo sapiens
tgagactcatggttg

SEQ ID NO: 165806 - DNA, 15 bp, Homo sapiens
gtgagactcatggtt

SEQ ID NO: 165807 - DNA, 15 bp, Homo sapiens
agtgagactcatggt

SEQ ID NO: 165808 - DNA, 15 bp, Homo sapiens
tagtgagactcatgg

SEQ ID NO: 165809 - DNA, 15 bp, Homo sapiens
gtagtgagactcatg

SEQ ID NO: 165810 - DNA, 15 bp, Homo sapiens
agtagtgagactcat

SEQ ID NO: 165811 - DNA, 15 bp, Homo sapiens
aagtagtgagactca

SEQ ID NO: 165812 - DNA, 15 bp, Homo sapiens
aaagtagtgagactc

SEQ ID NO: 165813 - DNA, 15 bp, Homo sapiens
taaagtagtgagact

SEQ ID NO: 165814 - DNA, 15 bp, Homo sapiens
ataaagtagtgagac

SEQ ID NO: 165815 - DNA, 15 bp, Homo sapiens
aataaagtagtgaga

SEQ ID NO: 165816 - DNA, 15 bp, Homo sapiens
caataaagtagtgag

SEQ ID NO: 165817 - DNA, 15 bp, Homo sapiens
gcaataaagtagtga

SEQ ID NO: 165818 - DNA, 15 bp, Homo sapiens
cgcaataaagtagtg

SEQ ID NO: 165819 - DNA, 15 bp, Homo sapiens
acgcaataaagtagt

SEQ ID NO: 165820 - DNA, 15 bp, Homo sapiens
aacgcaataaagtag

SEQ ID NO: 165821 - DNA, 15 bp, Homo sapiens
caacgcaataaagta

SEQ ID NO: 165822 - DNA, 15 bp, Homo sapiens
gcaacgcaataaagt

SEQ ID NO: 165823 - DNA, 15 bp, Homo sapiens
tgcaacgcaataaag

SEQ ID NO: 165824 - DNA, 15 bp, Homo sapiens
ttgcaacgcaataaa

SEQ ID NO: 165825 - DNA, 15 bp, Homo sapiens
attgcaacgcaataa

SEQ ID NO: 165826 - DNA, 15 bp, Homo sapiens
cattgcaacgcaata

SEQ ID NO: 165827 - DNA, 15 bp, Homo sapiens
acattgcaacgcaat

SEQ ID NO: 165828 - DNA, 15 bp, Homo sapiens
gacattgcaacgcaa

SEQ ID NO: 165829 - DNA, 15 bp, Homo sapiens
agacattgcaacgca

SEQ ID NO: 165830 - DNA, 15 bp, Homo sapiens
tagacattgcaacgc

SEQ ID NO: 165831 - DNA, 15 bp, Homo sapiens
gtagacattgcaacg

SEQ ID NO: 165832 - DNA, 15 bp, Homo sapiens
agtagacattgcaac

SEQ ID NO: 165833 - DNA, 15 bp, Homo sapiens
aagtagacattgcaa

SEQ ID NO: 165834 - DNA, 15 bp, Homo sapiens
aaagtagacattgca

SEQ ID NO: 165835 - DNA, 15 bp, Homo sapiens
caaagtagacattgc

SEQ ID NO: 165836 - DNA, 15 bp, Homo sapiens
acaaagtagacattg

SEQ ID NO: 165837 - DNA, 15 bp, Homo sapiens
aacaaagtagacatt

SEQ ID NO: 165838 - DNA, 15 bp, Homo sapiens
taacaaagtagacat

SEQ ID NO: 165839 - DNA, 15 bp, Homo sapiens
ttaacaaagtagaca

SEQ ID NO: 165840 - DNA, 15 bp, Homo sapiens
cttaacaaagtagac

SEQ ID NO: 165841 - DNA, 15 bp, Homo sapiens
tcttaacaaagtaga

SEQ ID NO: 165842 - DNA, 15 bp, Homo sapiens
atcttaacaaagtag

SEQ ID NO: 165843 - DNA, 15 bp, Homo sapiens
catcttaacaaagta

SEQ ID NO: 165844 - DNA, 15 bp, Homo sapiens
acatcttaacaaagt

SEQ ID NO: 165845 - DNA, 15 bp, Homo sapiens
gacatcttaacaaag

SEQ ID NO: 165846 - DNA, 15 bp, Homo sapiens
agacatcttaacaaa

SEQ ID NO: 165847 - DNA, 15 bp, Homo sapiens
aagacatcttaacaa

SEQ ID NO: 165848 - DNA, 15 bp, Homo sapiens
caagacatcttaaca

SEQ ID NO: 165849 - DNA, 15 bp, Homo sapiens
tcaagacatcttaac

SEQ ID NO: 165850 - DNA, 15 bp, Homo sapiens
ttcaagacatcttaa

SEQ ID NO: 165851 - DNA, 15 bp, Homo sapiens
tttcaagacatctta

SEQ ID NO: 165852 - DNA, 15 bp, Homo sapiens
ctttcaagacatctt

SEQ ID NO: 165853 - DNA, 15 bp, Homo sapiens
tctttcaagacatct

SEQ ID NO: 165854 - DNA, 15 bp, Homo sapiens
ttctttcaagacatc

SEQ ID NO: 165855 - DNA, 15 bp, Homo sapiens
tttctttcaagacat

SEQ ID NO: 165856 - DNA, 15 bp, Homo sapiens
ctttctttcaagaca

SEQ ID NO: 165857 - DNA, 15 bp, Homo sapiens
tctttctttcaagac

SEQ ID NO: 165858 - DNA, 15 bp, Homo sapiens
gtctttctttcaaga

SEQ ID NO: 165859 - DNA, 15 bp, Homo sapiens
agtctttctttcaag

SEQ ID NO: 165860 - DNA, 15 bp, Homo sapiens
aagtctttctttcaa

SEQ ID NO: 165861 - DNA, 15 bp, Homo sapiens
gaagtctttctttca

SEQ ID NO: 165862 - DNA, 15 bp, Homo sapiens
agaagtctttctttc

SEQ ID NO: 165863 - DNA, 15 bp, Homo sapiens
aagaagtctttcttt

SEQ ID NO: 165864 - DNA, 15 bp, Homo sapiens
gaagaagtctttctt

SEQ ID NO: 165865 - DNA, 15 bp, Homo sapiens
ggaagaagtctttct

SEQ ID NO: 165866 - DNA, 15 bp, Homo sapiens
tggaagaagtctttc

SEQ ID NO: 165867 - DNA, 15 bp, Homo sapiens
atggaagaagtcttt

SEQ ID NO: 165868 - DNA, 15 bp, Homo sapiens
gatggaagaagtctt

SEQ ID NO: 165869 - DNA, 15 bp, Homo sapiens
ggatggaagaagtct

SEQ ID NO: 165870 - DNA, 15 bp, Homo sapiens
aggatggaagaagtc

SEQ ID NO: 165871 - DNA, 15 bp, Homo sapiens
gaggatggaagaagt

SEQ ID NO: 165872 - DNA, 15 bp, Homo sapiens
ggaggatggaagaag

SEQ ID NO: 165873 - DNA, 15 bp, Homo sapiens
aggaggatggaagaa

SEQ ID NO: 165874 - DNA, 15 bp, Homo sapiens
caggaggatggaaga

SEQ ID NO: 165875 - DNA, 15 bp, Homo sapiens
ccaggaggatggaag

SEQ ID NO: 165876 - DNA, 15 bp, Homo sapiens
gccaggaggatggaa

SEQ ID NO: 165877 - DNA, 15 bp, Homo sapiens
tgccaggaggatgga

SEQ ID NO: 165878 - DNA, 15 bp, Homo sapiens
gtgccaggaggatgg

SEQ ID NO: 165879 - DNA, 15 bp, Homo sapiens
tgtgccaggaggatg

SEQ ID NO: 165880 - DNA, 15 bp, Homo sapiens
ttgtgccaggaggat

SEQ ID NO: 165881 - DNA, 15 bp, Homo sapiens
gttgtgccaggagga

SEQ ID NO: 165882 - DNA, 15 bp, Homo sapiens
agttgtgccaggagg

SEQ ID NO: 165883 - DNA, 15 bp, Homo sapiens
cagttgtgccaggag

SEQ ID NO: 165884 - DNA, 15 bp, Homo sapiens
tcagttgtgccagga

SEQ ID NO: 165885 - DNA, 15 bp, Homo sapiens
ttcagttgtgccagg

SEQ ID NO: 165886 - DNA, 15 bp, Homo sapiens
attcagttgtgccag

SEQ ID NO: 165887 - DNA, 15 bp, Homo sapiens
cattcagttgtgcca

SEQ ID NO: 165888 - DNA, 15 bp, Homo sapiens
acattcagttgtgcc

SEQ ID NO: 165889 - DNA, 15 bp, Homo sapiens
cacattcagttgtgc

SEQ ID NO: 165890 - DNA, 15 bp, Homo sapiens
gcacattcagttgtg

SEQ ID NO: 165891 - DNA, 15 bp, Homo sapiens
agcacattcagttgt

SEQ ID NO: 165892 - DNA, 15 bp, Homo sapiens
aagcacattcagttg

SEQ ID NO: 165893 - DNA, 15 bp, Homo sapiens
caagcacattcagtt

SEQ ID NO: 165894 - DNA, 15 bp, Homo sapiens
ccaagcacattcagt

SEQ ID NO: 165895 - DNA, 15 bp, Homo sapiens
accaagcacattcag

SEQ ID NO: 165896 - DNA, 15 bp, Homo sapiens
taccaagcacattca

SEQ ID NO: 165897 - DNA, 15 bp, Homo sapiens
ataccaagcacattc

SEQ ID NO: 165898 - DNA, 15 bp, Homo sapiens
cataccaagcacatt

SEQ ID NO: 165899 - DNA, 15 bp, Homo sapiens
ccataccaagcacat

SEQ ID NO: 165900 - DNA, 15 bp, Homo sapiens
cccataccaagcaca

SEQ ID NO: 165901 - DNA, 15 bp, Homo sapiens
ccccataccaagcac

SEQ ID NO: 165902 - DNA, 15 bp, Homo sapiens
tccccataccaagca

SEQ ID NO: 165903 - DNA, 15 bp, Homo sapiens
ctccccataccaagc

SEQ ID NO: 165904 - DNA, 15 bp, Homo sapiens
tctccccataccaag

SEQ ID NO: 165905 - DNA, 15 bp, Homo sapiens
gtctccccataccaa

SEQ ID NO: 165906 - DNA, 15 bp, Homo sapiens
cgtctccccatacca

SEQ ID NO: 165907 - DNA, 15 bp, Homo sapiens
acgtctccccatacc

SEQ ID NO: 165908 - DNA, 15 bp, Homo sapiens
cacgtctccccatac

SEQ ID NO: 165909 - DNA, 15 bp, Homo sapiens
acacgtctccccata

SEQ ID NO: 165910 - DNA, 15 bp, Homo sapiens
gacacgtctccccat

SEQ ID NO: 165911 - DNA, 15 bp, Homo sapiens
agacacgtctcccca

SEQ ID NO: 165912 - DNA, 15 bp, Homo sapiens
tagacacgtctcccc

SEQ ID NO: 165913 - DNA, 15 bp, Homo sapiens
ttagacacgtctccc

SEQ ID NO: 165914 - DNA, 15 bp, Homo sapiens
gttagacacgtctcc

SEQ ID NO: 165915 - DNA, 15 bp, Homo sapiens
agttagacacgtctc

SEQ ID NO: 165916 - DNA, 15 bp, Homo sapiens
cagttagacacgtct

SEQ ID NO: 165917 - DNA, 15 bp, Homo sapiens
tcagttagacacgtc

SEQ ID NO: 165918 - DNA, 15 bp, Homo sapiens
ttcagttagacacgt

SEQ ID NO: 165919 - DNA, 15 bp, Homo sapiens
attcagttagacacg

SEQ ID NO: 165920 - DNA, 15 bp, Homo sapiens
gattcagttagacac

SEQ ID NO: 165921 - DNA, 15 bp, Homo sapiens
agattcagttagaca

SEQ ID NO: 165922 - DNA, 15 bp, Homo sapiens
tagattcagttagac

SEQ ID NO: 165923 - DNA, 15 bp, Homo sapiens
ttagattcagttaga

SEQ ID NO: 165924 - DNA, 15 bp, Homo sapiens
cttagattcagttag

SEQ ID NO: 165925 - DNA, 15 bp, Homo sapiens
gcttagattcagtta

SEQ ID NO: 165926 - DNA, 15 bp, Homo sapiens
tgcttagattcagtt

SEQ ID NO: 165927 - DNA, 15 bp, Homo sapiens
ttgcttagattcagt

SEQ ID NO: 165928 - DNA, 15 bp, Homo sapiens
gttgcttagattcag

SEQ ID NO: 165929 - DNA, 15 bp, Homo sapiens
agttgcttagattca

SEQ ID NO: 165930 - DNA, 15 bp, Homo sapiens
tagttgcttagattc

SEQ ID NO: 165931 - DNA, 15 bp, Homo sapiens
ttagttgcttagatt

SEQ ID NO: 165932 - DNA, 15 bp, Homo sapiens
attagttgcttagat

SEQ ID NO: 165933 - DNA, 15 bp, Homo sapiens
aattagttgcttaga

SEQ ID NO: 165934 - DNA, 15 bp, Homo sapiens
caattagttgcttag

SEQ ID NO: 165935 - DNA, 15 bp, Homo sapiens
ccaattagttgctta

SEQ ID NO: 165936 - DNA, 15 bp, Homo sapiens
tccaattagttgctt

SEQ ID NO: 165937 - DNA, 15 bp, Homo sapiens
ttccaattagttgct

SEQ ID NO: 165938 - DNA, 15 bp, Homo sapiens
attccaattagttgc

SEQ ID NO: 165939 - DNA, 15 bp, Homo sapiens
tattccaattagttg

SEQ ID NO: 165940 - DNA, 15 bp, Homo sapiens
ctattccaattagtt

SEQ ID NO: 165941 - DNA, 15 bp, Homo sapiens
cctattccaattagt

SEQ ID NO: 165942 - DNA, 15 bp, Homo sapiens
gcctattccaattag

SEQ ID NO: 165943 - DNA, 15 bp, Homo sapiens
tgcctattccaatta

SEQ ID NO: 165944 - DNA, 15 bp, Homo sapiens
ttgcctattccaatt

SEQ ID NO: 165945 - DNA, 15 bp, Homo sapiens
tttgcctattccaat

SEQ ID NO: 165946 - DNA, 15 bp, Homo sapiens
ctttgcctattccaa

SEQ ID NO: 165947 - DNA, 15 bp, Homo sapiens
cctttgcctattcca

SEQ ID NO: 165948 - DNA, 15 bp, Homo sapiens
tcctttgcctattcc

SEQ ID NO: 165949 - DNA, 15 bp, Homo sapiens
ctcctttgcctattc

SEQ ID NO: 165950 - DNA, 15 bp, Homo sapiens
cctcctttgcctatt

SEQ ID NO: 165951 - DNA, 15 bp, Homo sapiens
tcctcctttgcctat

SEQ ID NO: 165952 - DNA, 15 bp, Homo sapiens
ttcctcctttgccta

SEQ ID NO: 165953 - DNA, 15 bp, Homo sapiens
cttcctcctttgcct

SEQ ID NO: 165954 - DNA, 15 bp, Homo sapiens
acttcctcctttgcc

SEQ ID NO: 165955 - DNA, 15 bp, Homo sapiens
cacttcctcctttgc

SEQ ID NO: 165956 - DNA, 15 bp, Homo sapiens
tcacttcctcctttg

SEQ ID NO: 165957 - DNA, 15 bp, Homo sapiens
atcacttcctccttt

SEQ ID NO: 165958 - DNA, 15 bp, Homo sapiens
catcacttcctcctt

SEQ ID NO: 165959 - DNA, 15 bp, Homo sapiens
tcatcacttcctcct

SEQ ID NO: 165960 - DNA, 15 bp, Homo sapiens
ttcatcacttcctcc

SEQ ID NO: 165961 - DNA, 15 bp, Homo sapiens
tttcatcacttcctc

SEQ ID NO: 165962 - DNA, 15 bp, Homo sapiens
ctttcatcacttcct

SEQ ID NO: 165963 - DNA, 15 bp, Homo sapiens
actttcatcacttcc

SEQ ID NO: 165964 - DNA, 15 bp, Homo sapiens
cactttcatcacttc

SEQ ID NO: 165965 - DNA, 15 bp, Homo sapiens
tcactttcatcactt

SEQ ID NO: 165966 - DNA, 15 bp, Homo sapiens
ttcactttcatcact

SEQ ID NO: 165967 - DNA, 15 bp, Homo sapiens
cttcactttcatcac

SEQ ID NO: 165968 - DNA, 15 bp, Homo sapiens
gcttcactttcatca

SEQ ID NO: 165969 - DNA, 15 bp, Homo sapiens
agcttcactttcatc

SEQ ID NO: 165970 - DNA, 15 bp, Homo sapiens
cagcttcactttcat

SEQ ID NO: 165971 - DNA, 15 bp, Homo sapiens
gcagcttcactttca

SEQ ID NO: 165972 - DNA, 15 bp, Homo sapiens
tgcagcttcactttc

SEQ ID NO: 165973 - DNA, 15 bp, Homo sapiens
ctgcagcttcacttt

SEQ ID NO: 165974 - DNA, 15 bp, Homo sapiens
actgcagcttcactt

SEQ ID NO: 165975 - DNA, 15 bp, Homo sapiens
aactgcagcttcact

SEQ ID NO: 165976 - DNA, 15 bp, Homo sapiens
aaactgcagcttcac

SEQ ID NO: 165977 - DNA, 15 bp, Homo sapiens
gaaactgcagcttca

SEQ ID NO: 165978 - DNA, 15 bp, Homo sapiens
agaaactgcagcttc

SEQ ID NO: 165979 - DNA, 15 bp, Homo sapiens
cagaaactgcagctt

SEQ ID NO: 165980 - DNA, 15 bp, Homo sapiens
gcagaaactgcagct

SEQ ID NO: 165981 - DNA, 15 bp, Homo sapiens
tgcagaaactgcagc

SEQ ID NO: 165982 - DNA, 15 bp, Homo sapiens
ttgcagaaactgcag

SEQ ID NO: 165983 - DNA, 15 bp, Homo sapiens
tttgcagaaactgca

SEQ ID NO: 165984 - DNA, 15 bp, Homo sapiens
ctttgcagaaactgc

SEQ ID NO: 165985 - DNA, 15 bp, Homo sapiens
cctttgcagaaactg

SEQ ID NO: 165986 - DNA, 15 bp, Homo sapiens
acctttgcagaaact

SEQ ID NO: 165987 - DNA, 15 bp, Homo sapiens
cacctttgcagaaac

SEQ ID NO: 165988 - DNA, 15 bp, Homo sapiens
ccacctttgcagaaa

SEQ ID NO: 165989 - DNA, 15 bp, Homo sapiens
gccacctttgcagaa

SEQ ID NO: 165990 - DNA, 15 bp, Homo sapiens
agccacctttgcaga

SEQ ID NO: 165991 - DNA, 15 bp, Homo sapiens
aagccacctttgcag

SEQ ID NO: 165992 - DNA, 15 bp, Homo sapiens
aaagccacctttgca

SEQ ID NO: 165993 - DNA, 15 bp, Homo sapiens
taaagccacctttgc

SEQ ID NO: 165994 - DNA, 15 bp, Homo sapiens
ataaagccacctttg

SEQ ID NO: 165995 - DNA, 15 bp, Homo sapiens
aataaagccaccttt

SEQ ID NO: 165996 - DNA, 15 bp, Homo sapiens
caataaagccacctt

SEQ ID NO: 165997 - DNA, 15 bp, Homo sapiens
acaataaagccacct

SEQ ID NO: 165998 - DNA, 15 bp, Homo sapiens
tacaataaagccacc

SEQ ID NO: 165999 - DNA, 15 bp, Homo sapiens
atacaataaagccac

SEQ ID NO: 166000 - DNA, 15 bp, Homo sapiens
tatacaataaagcca

SEQ ID NO: 166001 - DNA, 15 bp, Homo sapiens
ttatacaataaagcc

SEQ ID NO: 166002 - DNA, 15 bp, Homo sapiens
cttatacaataaagc

SEQ ID NO: 166003 - DNA, 15 bp, Homo sapiens
ccttatacaataaag

SEQ ID NO: 166004 - DNA, 15 bp, Homo sapiens
accttatacaataaa

SEQ ID NO: 166005 - DNA, 15 bp, Homo sapiens
caccttatacaataa

SEQ ID NO: 166006 - DNA, 15 bp, Homo sapiens
gcaccttatacaata

SEQ ID NO: 166007 - DNA, 15 bp, Homo sapiens
tgcaccttatacaat

SEQ ID NO: 166008 - DNA, 15 bp, Homo sapiens
ctgcaccttatacaa

SEQ ID NO: 166009 - DNA, 15 bp, Homo sapiens
cctgcaccttataca

SEQ ID NO: 166010 - DNA, 15 bp, Homo sapiens
acctgcaccttatac

SEQ ID NO: 166011 - DNA, 15 bp, Homo sapiens
aacctgcaccttata

SEQ ID NO: 166012 - DNA, 15 bp, Homo sapiens
taacctgcaccttat

SEQ ID NO: 166013 - DNA, 15 bp, Homo sapiens
ataacctgcacctta

SEQ ID NO: 166014 - DNA, 15 bp, Homo sapiens
aataacctgcacctt

SEQ ID NO: 166015 - DNA, 15 bp, Homo sapiens
taataacctgcacct

SEQ ID NO: 166016 - DNA, 15 bp, Homo sapiens
gtaataacctgcacc

SEQ ID NO: 166017 - DNA, 15 bp, Homo sapiens
ggtaataacctgcac

SEQ ID NO: 166018 - DNA, 15 bp, Homo sapiens
gggtaataacctgca

SEQ ID NO: 166019 - DNA, 15 bp, Homo sapiens
ggggtaataacctgc

SEQ ID NO: 166020 - DNA, 15 bp, Homo sapiens
tggggtaataacctg

SEQ ID NO: 166021 - DNA, 15 bp, Homo sapiens
ttggggtaataacct

SEQ ID NO: 166022 - DNA, 15 bp, Homo sapiens
tttggggtaataacc

SEQ ID NO: 166023 - DNA, 15 bp, Homo sapiens
atttggggtaataac

SEQ ID NO: 166024 - DNA, 15 bp, Homo sapiens
catttggggtaataa

SEQ ID NO: 166025 - DNA, 15 bp, Homo sapiens
tcatttggggtaata

SEQ ID NO: 166026 - DNA, 15 bp, Homo sapiens
atcatttggggtaat

SEQ ID NO: 166027 - DNA, 15 bp, Homo sapiens
gatcatttggggtaa

SEQ ID NO: 166028 - DNA, 15 bp, Homo sapiens
tgatcatttggggta

SEQ ID NO: 166029 - DNA, 15 bp, Homo sapiens
ttgatcatttggggt

SEQ ID NO: 166030 - DNA, 15 bp, Homo sapiens
attgatcatttgggg

SEQ ID NO: 166031 - DNA, 15 bp, Homo sapiens
aattgatcatttggg

SEQ ID NO: 166032 - DNA, 15 bp, Homo sapiens
taattgatcatttgg

SEQ ID NO: 166033 - DNA, 15 bp, Homo sapiens
gtaattgatcatttg

SEQ ID NO: 166034 - DNA, 15 bp, Homo sapiens
agtaattgatcattt

SEQ ID NO: 166035 - DNA, 15 bp, Homo sapiens
tagtaattgatcatt

SEQ ID NO: 166036 - DNA, 15 bp, Homo sapiens
ttagtaattgatcat

SEQ ID NO: 166037 - DNA, 15 bp, Homo sapiens
tttagtaattgatca

SEQ ID NO: 166038 - DNA, 15 bp, Homo sapiens
ctttagtaattgatc

SEQ ID NO: 166039 - DNA, 15 bp, Homo sapiens
actttagtaattgat

SEQ ID NO: 166040 - DNA, 15 bp, Homo sapiens
aactttagtaattga

SEQ ID NO: 166041 - DNA, 15 bp, Homo sapiens
gaactttagtaattg

SEQ ID NO: 166042 - DNA, 15 bp, Homo sapiens
agaactttagtaatt

SEQ ID NO: 166043 - DNA, 15 bp, Homo sapiens
cagaactttagtaat

SEQ ID NO: 166044 - DNA, 15 bp, Homo sapiens
ccagaactttagtaa

SEQ ID NO: 166045 - DNA, 15 bp, Homo sapiens
tccagaactttagta

SEQ ID NO: 166046 - DNA, 15 bp, Homo sapiens
atccagaactttagt

SEQ ID NO: 166047 - DNA, 15 bp, Homo sapiens
aatccagaactttag

SEQ ID NO: 166048 - DNA, 15 bp, Homo sapiens
caatccagaacttta

SEQ ID NO: 166049 - DNA, 15 bp, Homo sapiens
ccaatccagaacttt

SEQ ID NO: 166050 - DNA, 15 bp, Homo sapiens
cccaatccagaactt

SEQ ID NO: 166051 - DNA, 15 bp, Homo sapiens
gcccaatccagaact

SEQ ID NO: 166052 - DNA, 15 bp, Homo sapiens
tgcccaatccagaac

SEQ ID NO: 166053 - DNA, 15 bp, Homo sapiens
ctgcccaatccagaa

SEQ ID NO: 166054 - DNA, 15 bp, Homo sapiens
actgcccaatccaga

SEQ ID NO: 166055 - DNA, 15 bp, Homo sapiens
cactgcccaatccag

SEQ ID NO: 166056 - DNA, 15 bp, Homo sapiens
tcactgcccaatcca

SEQ ID NO: 166057 - DNA, 15 bp, Homo sapiens
gtcactgcccaatcc

SEQ ID NO: 166058 - DNA, 15 bp, Homo sapiens
tgtcactgcccaatc

SEQ ID NO: 166059 - DNA, 15 bp, Homo sapiens
ttgtcactgcccaat

SEQ ID NO: 166060 - DNA, 15 bp, Homo sapiens
cttgtcactgcccaa

SEQ ID NO: 166061 - DNA, 15 bp, Homo sapiens
acttgtcactgccca

SEQ ID NO: 166062 - DNA, 15 bp, Homo sapiens
cacttgtcactgccc

SEQ ID NO: 166063 - DNA, 15 bp, Homo sapiens
acacttgtcactgcc

SEQ ID NO: 166064 - DNA, 15 bp, Homo sapiens
gacacttgtcactgc

SEQ ID NO: 166065 - DNA, 15 bp, Homo sapiens
agacacttgtcactg

SEQ ID NO: 166066 - DNA, 15 bp, Homo sapiens
tagacacttgtcact

SEQ ID NO: 166067 - DNA, 15 bp, Homo sapiens
ctagacacttgtcac

SEQ ID NO: 166068 - DNA, 15 bp, Homo sapiens
tctagacacttgtca

SEQ ID NO: 166069 - DNA, 15 bp, Homo sapiens
ctctagacacttgtc

SEQ ID NO: 166070 - DNA, 15 bp, Homo sapiens
cctctagacacttgt

SEQ ID NO: 166071 - DNA, 15 bp, Homo sapiens
ccctctagacacttg

SEQ ID NO: 166072 - DNA, 15 bp, Homo sapiens
tccctctagacactt

SEQ ID NO: 166073 - DNA, 15 bp, Homo sapiens
ttccctctagacact

SEQ ID NO: 166074 - DNA, 15 bp, Homo sapiens
attccctctagacac

SEQ ID NO: 166075 - DNA, 15 bp, Homo sapiens
cattccctctagaca

SEQ ID NO: 166076 - DNA, 15 bp, Homo sapiens
gcattccctctagac

SEQ ID NO: 166077 - DNA, 15 bp, Homo sapiens
agcattccctctaga

SEQ ID NO: 166078 - DNA, 15 bp, Homo sapiens
cagcattccctctag

SEQ ID NO: 166079 - DNA, 15 bp, Homo sapiens
ccagcattccctcta

SEQ ID NO: 166080 - DNA, 15 bp, Homo sapiens
cccagcattccctct

SEQ ID NO: 166081 - DNA, 15 bp, Homo sapiens
gcccagcattccctc

SEQ ID NO: 166082 - DNA, 15 bp, Homo sapiens
ggcccagcattccct

SEQ ID NO: 166083 - DNA, 15 bp, Homo sapiens
aggcccagcattccc

SEQ ID NO: 166084 - DNA, 15 bp, Homo sapiens
taggcccagcattcc

SEQ ID NO: 166085 - DNA, 15 bp, Homo sapiens
ctaggcccagcattc

SEQ ID NO: 166086 - DNA, 15 bp, Homo sapiens
cctaggcccagcatt

SEQ ID NO: 166087 - DNA, 15 bp, Homo sapiens
ccctaggcccagcat

SEQ ID NO: 166088 - DNA, 15 bp, Homo sapiens
tccctaggcccagca

SEQ ID NO: 166089 - DNA, 15 bp, Homo sapiens
ttccctaggcccagc

SEQ ID NO: 166090 - DNA, 15 bp, Homo sapiens
attccctaggcccag

SEQ ID NO: 166091 - DNA, 15 bp, Homo sapiens
aattccctaggccca

SEQ ID NO: 166092 - DNA, 15 bp, Homo sapiens
caattccctaggccc

SEQ ID NO: 166093 - DNA, 15 bp, Homo sapiens
gcaattccctaggcc

SEQ ID NO: 166094 - DNA, 15 bp, Homo sapiens
tgcaattccctaggc

SEQ ID NO: 166095 - DNA, 15 bp, Homo sapiens
atgcaattccctagg

SEQ ID NO: 166096 - DNA, 15 bp, Homo sapiens
aatgcaattccctag

SEQ ID NO: 166097 - DNA, 15 bp, Homo sapiens
caatgcaattcccta

SEQ ID NO: 166098 - DNA, 15 bp, Homo sapiens
acaatgcaattccct

SEQ ID NO: 166099 - DNA, 15 bp, Homo sapiens
gacaatgcaattccc

SEQ ID NO: 166100 - DNA, 15 bp, Homo sapiens
tgacaatgcaattcc

SEQ ID NO: 166101 - DNA, 15 bp, Homo sapiens
atgacaatgcaattc

SEQ ID NO: 166102 - DNA, 15 bp, Homo sapiens
catgacaatgcaatt

SEQ ID NO: 166103 - DNA, 15 bp, Homo sapiens
acatgacaatgcaat

SEQ ID NO: 166104 - DNA, 15 bp, Homo sapiens
cacatgacaatgcaa

SEQ ID NO: 166105 - DNA, 15 bp, Homo sapiens
tcacatgacaatgca

SEQ ID NO: 166106 - DNA, 15 bp, Homo sapiens
ctcacatgacaatgc

SEQ ID NO: 166107 - DNA, 15 bp, Homo sapiens
tctcacatgacaatg

SEQ ID NO: 166108 - DNA, 15 bp, Homo sapiens
ttctcacatgacaat

SEQ ID NO: 166109 - DNA, 15 bp, Homo sapiens
attctcacatgacaa

SEQ ID NO: 166110 - DNA, 15 bp, Homo sapiens
tattctcacatgaca

SEQ ID NO: 166111 - DNA, 15 bp, Homo sapiens
ttattctcacatgac

SEQ ID NO: 166112 - DNA, 15 bp, Homo sapiens
cttattctcacatga

SEQ ID NO: 166113 - DNA, 15 bp, Homo sapiens
ccttattctcacatg

SEQ ID NO: 166114 - DNA, 15 bp, Homo sapiens
gccttattctcacat

SEQ ID NO: 166115 - DNA, 15 bp, Homo sapiens
agccttattctcaca

SEQ ID NO: 166116 - DNA, 15 bp, Homo sapiens
cagccttattctcac

SEQ ID NO: 166117 - DNA, 15 bp, Homo sapiens
ccagccttattctca

SEQ ID NO: 166118 - DNA, 15 bp, Homo sapiens
cccagccttattctc

SEQ ID NO: 166119 - DNA, 15 bp, Homo sapiens
ccccagccttattct

SEQ ID NO: 166120 - DNA, 15 bp, Homo sapiens
gccccagccttattc

SEQ ID NO: 166121 - DNA, 15 bp, Homo sapiens
ggccccagccttatt

SEQ ID NO: 166122 - DNA, 15 bp, Homo sapiens
tggccccagccttat

SEQ ID NO: 166123 - DNA, 15 bp, Homo sapiens
gtggccccagcctta

SEQ ID NO: 166124 - DNA, 15 bp, Homo sapiens
ggtggccccagcctt

SEQ ID NO: 166125 - DNA, 15 bp, Homo sapiens
aggtggccccagcct

SEQ ID NO: 166126 - DNA, 15 bp, Homo sapiens
aaggtggccccagcc

SEQ ID NO: 166127 - DNA, 15 bp, Homo sapiens
aaaggtggccccagc

SEQ ID NO: 166128 - DNA, 15 bp, Homo sapiens
taaaggtggccccag

SEQ ID NO: 166129 - DNA, 15 bp, Homo sapiens
gtaaaggtggcccca

SEQ ID NO: 166130 - DNA, 15 bp, Homo sapiens
tgtaaaggtggcccc

SEQ ID NO: 166131 - DNA, 15 bp, Homo sapiens
atgtaaaggtggccc

SEQ ID NO: 166132 - DNA, 15 bp, Homo sapiens
aatgtaaaggtggcc

SEQ ID NO: 166133 - DNA, 15 bp, Homo sapiens
aaatgtaaaggtggc

SEQ ID NO: 166134 - DNA, 15 bp, Homo sapiens
aaaatgtaaaggtgg

SEQ ID NO: 166135 - DNA, 15 bp, Homo sapiens
gaaaatgtaaaggtg

SEQ ID NO: 166136 - DNA, 15 bp, Homo sapiens
tgaaaatgtaaaggt

SEQ ID NO: 166137 - DNA, 15 bp, Homo sapiens
atgaaaatgtaaagg

SEQ ID NO: 166138 - DNA, 15 bp, Homo sapiens
aatgaaaatgtaaag

SEQ ID NO: 166139 - DNA, 15 bp, Homo sapiens
taatgaaaatgtaaa

SEQ ID NO: 166140 - DNA, 15 bp, Homo sapiens
ttaatgaaaatgtaa

SEQ ID NO: 166141 - DNA, 15 bp, Homo sapiens
tttaatgaaaatgta

SEQ ID NO: 166142 - DNA, 15 bp, Homo sapiens
ttttaatgaaaatgt

SEQ ID NO: 166143 - DNA, 15 bp, Homo sapiens
tttttaatgaaaatg

SEQ ID NO: 166144 - DNA, 15 bp, Homo sapiens
ttttttaatgaaaat

SEQ ID NO: 166145 - DNA, 15 bp, Homo sapiens
tttttttaatgaaaa

SEQ ID NO: 166146 - DNA, 15 bp, Homo sapiens
ctttttttaatgaaa

SEQ ID NO: 166147 - DNA, 15 bp, Homo sapiens
tctttttttaatgaa

SEQ ID NO: 166148 - DNA, 15 bp, Homo sapiens
atctttttttaatga

SEQ ID NO: 166149 - DNA, 15 bp, Homo sapiens
gatctttttttaatg

SEQ ID NO: 166150 - DNA, 15 bp, Homo sapiens
agatctttttttaat

SEQ ID NO: 166151 - DNA, 15 bp, Homo sapiens
cagatctttttttaa

SEQ ID NO: 166152 - DNA, 15 bp, Homo sapiens
ccagatcttttttta

SEQ ID NO: 166153 - DNA, 15 bp, Homo sapiens
tccagatcttttttt

SEQ ID NO: 166154 - DNA, 15 bp, Homo sapiens
gtccagatctttttt

SEQ ID NO: 166155 - DNA, 15 bp, Homo sapiens
tgtccagatcttttt

SEQ ID NO: 166156 - DNA, 15 bp, Homo sapiens
ctgtccagatctttt

SEQ ID NO: 166157 - DNA, 15 bp, Homo sapiens
actgtccagatcttt

SEQ ID NO: 166158 - DNA, 15 bp, Homo sapiens
tactgtccagatctt

SEQ ID NO: 166159 - DNA, 15 bp, Homo sapiens
gtactgtccagatct

SEQ ID NO: 166160 - DNA, 15 bp, Homo sapiens
agtactgtccagatc

SEQ ID NO: 166161 - DNA, 15 bp, Homo sapiens
aagtactgtccagat

SEQ ID NO: 166162 - DNA, 15 bp, Homo sapiens
caagtactgtccaga

SEQ ID NO: 166163 - DNA, 15 bp, Homo sapiens
tcaagtactgtccag

SEQ ID NO: 166164 - DNA, 15 bp, Homo sapiens
gtcaagtactgtcca

SEQ ID NO: 166165 - DNA, 15 bp, Homo sapiens
agtcaagtactgtcc

SEQ ID NO: 166166 - DNA, 15 bp, Homo sapiens
cagtcaagtactgtc

SEQ ID NO: 166167 - DNA, 15 bp, Homo sapiens
acagtcaagtactgt

SEQ ID NO: 166168 - DNA, 15 bp, Homo sapiens
cacagtcaagtactg

SEQ ID NO: 166169 - DNA, 15 bp, Homo sapiens
ccacagtcaagtact

SEQ ID NO: 166170 - DNA, 15 bp, Homo sapiens
accacagtcaagtac

SEQ ID NO: 166171 - DNA, 15 bp, Homo sapiens
taccacagtcaagta

SEQ ID NO: 166172 - DNA, 15 bp, Homo sapiens
ctaccacagtcaagt

SEQ ID NO: 166173 - DNA, 15 bp, Homo sapiens
actaccacagtcaag

SEQ ID NO: 166174 - DNA, 15 bp, Homo sapiens
tactaccacagtcaa

SEQ ID NO: 166175 - DNA, 15 bp, Homo sapiens
ctactaccacagtca

SEQ ID NO: 166176 - DNA, 15 bp, Homo sapiens
tctactaccacagtc

SEQ ID NO: 166177 - DNA, 15 bp, Homo sapiens
gtctactaccacagt

SEQ ID NO: 166178 - DNA, 15 bp, Homo sapiens
agtctactaccacag

SEQ ID NO: 166179 - DNA, 15 bp, Homo sapiens
aagtctactaccaca

SEQ ID NO: 166180 - DNA, 15 bp, Homo sapiens
aaagtctactaccac

SEQ ID NO: 166181 - DNA, 15 bp, Homo sapiens
caaagtctactacca

SEQ ID NO: 166182 - DNA, 15 bp, Homo sapiens
acaaagtctactacc

SEQ ID NO: 166183 - DNA, 15 bp, Homo sapiens
tacaaagtctactac

SEQ ID NO: 166184 - DNA, 15 bp, Homo sapiens
ttacaaagtctacta

SEQ ID NO: 166185 - DNA, 15 bp, Homo sapiens
tttacaaagtctact

SEQ ID NO: 166186 - DNA, 15 bp, Homo sapiens
ctttacaaagtctac

SEQ ID NO: 166187 - DNA, 15 bp, Homo sapiens
cctttacaaagtcta

SEQ ID NO: 166188 - DNA, 15 bp, Homo sapiens
acctttacaaagtct

SEQ ID NO: 166189 - DNA, 15 bp, Homo sapiens
aacctttacaaagtc

SEQ ID NO: 166190 - DNA, 15 bp, Homo sapiens
taacctttacaaagt

SEQ ID NO: 166191 - DNA, 15 bp, Homo sapiens
ataacctttacaaag

SEQ ID NO: 166192 - DNA, 15 bp, Homo sapiens
aataacctttacaaa

SEQ ID NO: 166193 - DNA, 15 bp, Homo sapiens
taataacctttacaa

SEQ ID NO: 166194 - DNA, 15 bp, Homo sapiens
ataataacctttaca

SEQ ID NO: 166195 - DNA, 15 bp, Homo sapiens
cataataacctttac

SEQ ID NO: 166196 - DNA, 15 bp, Homo sapiens
ccataataaccttta

SEQ ID NO: 166197 - DNA, 15 bp, Homo sapiens
accataataaccttt

SEQ ID NO: 166198 - DNA, 15 bp, Homo sapiens
aaccataataacctt

SEQ ID NO: 166199 - DNA, 15 bp, Homo sapiens
taaccataataacct

SEQ ID NO: 166200 - DNA, 15 bp, Homo sapiens
gtaaccataataacc

SEQ ID NO: 166201 - DNA, 15 bp, Homo sapiens
tgtaaccataataac

SEQ ID NO: 166202 - DNA, 15 bp, Homo sapiens
ctgtaaccataataa

SEQ ID NO: 166203 - DNA, 15 bp, Homo sapiens
gctgtaaccataata

SEQ ID NO: 166204 - DNA, 15 bp, Homo sapiens
agctgtaaccataat

SEQ ID NO: 166205 - DNA, 15 bp, Homo sapiens
aagctgtaaccataa

SEQ ID NO: 166206 - DNA, 15 bp, Homo sapiens
aaagctgtaaccata

SEQ ID NO: 166207 - DNA, 15 bp, Homo sapiens
caaagctgtaaccat

SEQ ID NO: 166208 - DNA, 15 bp, Homo sapiens
acaaagctgtaacca

SEQ ID NO: 166209 - DNA, 15 bp, Homo sapiens
aacaaagctgtaacc

SEQ ID NO: 166210 - DNA, 15 bp, Homo sapiens
aaacaaagctgtaac

SEQ ID NO: 166211 - DNA, 15 bp, Homo sapiens
caaacaaagctgtaa

SEQ ID NO: 166212 - DNA, 15 bp, Homo sapiens
gcaaacaaagctgta

SEQ ID NO: 166213 - DNA, 15 bp, Homo sapiens
agcaaacaaagctgt

SEQ ID NO: 166214 - DNA, 15 bp, Homo sapiens
aagcaaacaaagctg

SEQ ID NO: 166215 - DNA, 15 bp, Homo sapiens
caagcaaacaaagct

SEQ ID NO: 166216 - DNA, 15 bp, Homo sapiens
tcaagcaaacaaagc

SEQ ID NO: 166217 - DNA, 15 bp, Homo sapiens
ctcaagcaaacaaag

SEQ ID NO: 166218 - DNA, 15 bp, Homo sapiens
tctcaagcaaacaaa

SEQ ID NO: 166219 - DNA, 15 bp, Homo sapiens
atctcaagcaaacaa

SEQ ID NO: 166220 - DNA, 15 bp, Homo sapiens
gatctcaagcaaaca

SEQ ID NO: 166221 - DNA, 15 bp, Homo sapiens
ggatctcaagcaaac

SEQ ID NO: 166222 - DNA, 15 bp, Homo sapiens
aggatctcaagcaaa

SEQ ID NO: 166223 - DNA, 15 bp, Homo sapiens
gaggatctcaagcaa

SEQ ID NO: 166224 - DNA, 15 bp, Homo sapiens
agaggatctcaagca

SEQ ID NO: 166225 - DNA, 15 bp, Homo sapiens
tagaggatctcaagc

SEQ ID NO: 166226 - DNA, 15 bp, Homo sapiens
atagaggatctcaag

SEQ ID NO: 166227 - DNA, 15 bp, Homo sapiens
aatagaggatctcaa

SEQ ID NO: 166228 - DNA, 15 bp, Homo sapiens
aaatagaggatctca

SEQ ID NO: 166229 - DNA, 15 bp, Homo sapiens
aaaatagaggatctc

SEQ ID NO: 166230 - DNA, 15 bp, Homo sapiens
aaaaatagaggatct

SEQ ID NO: 166231 - DNA, 15 bp, Homo sapiens
taaaaatagaggatc

SEQ ID NO: 166232 - DNA, 15 bp, Homo sapiens
ataaaaatagaggat

SEQ ID NO: 166233 - DNA, 15 bp, Homo sapiens
tataaaaatagagga

SEQ ID NO: 166234 - DNA, 15 bp, Homo sapiens
ctataaaaatagagg

SEQ ID NO: 166235 - DNA, 15 bp, Homo sapiens
actataaaaatagag

SEQ ID NO: 166236 - DNA, 15 bp, Homo sapiens
aactataaaaataga

SEQ ID NO: 166237 - DNA, 15 bp, Homo sapiens
gaactataaaaatag

SEQ ID NO: 166238 - DNA, 15 bp, Homo sapiens
tgaactataaaaata

SEQ ID NO: 166239 - DNA, 15 bp, Homo sapiens
ttgaactataaaaat

SEQ ID NO: 166240 - DNA, 15 bp, Homo sapiens
attgaactataaaaa

SEQ ID NO: 166241 - DNA, 15 bp, Homo sapiens
tattgaactataaaa

SEQ ID NO: 166242 - DNA, 15 bp, Homo sapiens
atattgaactataaa

SEQ ID NO: 166243 - DNA, 15 bp, Homo sapiens
aatattgaactataa

SEQ ID NO: 166244 - DNA, 15 bp, Homo sapiens
taatattgaactata

SEQ ID NO: 166245 - DNA, 15 bp, Homo sapiens
ataatattgaactat

SEQ ID NO: 166246 - DNA, 15 bp, Homo sapiens
aataatattgaacta

SEQ ID NO: 166247 - DNA, 15 bp, Homo sapiens
taataatattgaact

SEQ ID NO: 166248 - DNA, 15 bp, Homo sapiens
ttaataatattgaac

SEQ ID NO: 166249 - DNA, 15 bp, Homo sapiens
cttaataatattgaa

SEQ ID NO: 166250 - DNA, 15 bp, Homo sapiens
ccttaataatattga

SEQ ID NO: 166251 - DNA, 15 bp, Homo sapiens
accttaataatattg

SEQ ID NO: 166252 - DNA, 15 bp, Homo sapiens
taccttaataatatt

SEQ ID NO: 166253 - DNA, 15 bp, Homo sapiens
ataccttaataatat

SEQ ID NO: 166254 - DNA, 15 bp, Homo sapiens
cataccttaataata

SEQ ID NO: 166255 - DNA, 15 bp, Homo sapiens
tcataccttaataat

SEQ ID NO: 166256 - DNA, 15 bp, Homo sapiens
ttcataccttaataa

SEQ ID NO: 166257 - DNA, 15 bp, Homo sapiens
cttcataccttaata

SEQ ID NO: 166258 - DNA, 15 bp, Homo sapiens
tcttcataccttaat

SEQ ID NO: 166259 - DNA, 15 bp, Homo sapiens
ttcttcataccttaa

SEQ ID NO: 166260 - DNA, 15 bp, Homo sapiens
tttcttcatacctta

SEQ ID NO: 166261 - DNA, 15 bp, Homo sapiens
gtttcttcatacctt

SEQ ID NO: 166262 - DNA, 15 bp, Homo sapiens
agtttcttcatacct

SEQ ID NO: 166263 - DNA, 15 bp, Homo sapiens
cagtttcttcatacc

SEQ ID NO: 166264 - DNA, 15 bp, Homo sapiens
acagtttcttcatac

SEQ ID NO: 166265 - DNA, 15 bp, Homo sapiens
aacagtttcttcata

SEQ ID NO: 166266 - DNA, 15 bp, Homo sapiens
aaacagtttcttcat

SEQ ID NO: 166267 - DNA, 15 bp, Homo sapiens
aaaacagtttcttca

SEQ ID NO: 166268 - DNA, 15 bp, Homo sapiens
taaaacagtttcttc

SEQ ID NO: 166269 - DNA, 15 bp, Homo sapiens
ataaaacagtttctt

SEQ ID NO: 166270 - DNA, 15 bp, Homo sapiens
cataaaacagtttct

SEQ ID NO: 166271 - DNA, 15 bp, Homo sapiens
ccataaaacagtttc

SEQ ID NO: 166272 - DNA, 15 bp, Homo sapiens
tccataaaacagttt

SEQ ID NO: 166273 - DNA, 15 bp, Homo sapiens
atccataaaacagtt

SEQ ID NO: 166274 - DNA, 15 bp, Homo sapiens
catccataaaacagt

SEQ ID NO: 166275 - DNA, 15 bp, Homo sapiens
acatccataaaacag

SEQ ID NO: 166276 - DNA, 15 bp, Homo sapiens
gacatccataaaaca

SEQ ID NO: 166277 - DNA, 15 bp, Homo sapiens
tgacatccataaaac

SEQ ID NO: 166278 - DNA, 15 bp, Homo sapiens
ctgacatccataaaa

SEQ ID NO: 166279 - DNA, 15 bp, Homo sapiens
actgacatccataaa

SEQ ID NO: 166280 - DNA, 15 bp, Homo sapiens
aactgacatccataa

SEQ ID NO: 166281 - DNA, 15 bp, Homo sapiens
aaactgacatccata

SEQ ID NO: 166282 - DNA, 15 bp, Homo sapiens
aaaactgacatccat

SEQ ID NO: 166283 - DNA, 15 bp, Homo sapiens
taaaactgacatcca

SEQ ID NO: 166284 - DNA, 15 bp, Homo sapiens
gtaaaactgacatcc

SEQ ID NO: 166285 - DNA, 15 bp, Homo sapiens
agtaaaactgacatc

SEQ ID NO: 166286 - DNA, 15 bp, Homo sapiens
cagtaaaactgacat

SEQ ID NO: 166287 - DNA, 15 bp, Homo sapiens
acagtaaaactgaca

SEQ ID NO: 166288 - DNA, 15 bp, Homo sapiens
aacagtaaaactgac

SEQ ID NO: 166289 - DNA, 15 bp, Homo sapiens
aaacagtaaaactga

SEQ ID NO: 166290 - DNA, 15 bp, Homo sapiens
gaaacagtaaaactg

SEQ ID NO: 166291 - DNA, 15 bp, Homo sapiens
agaaacagtaaaact

SEQ ID NO: 166292 - DNA, 15 bp, Homo sapiens
cagaaacagtaaaac

SEQ ID NO: 166293 - DNA, 15 bp, Homo sapiens
tcagaaacagtaaaa

SEQ ID NO: 166294 - DNA, 15 bp, Homo sapiens
gtcagaaacagtaaa

SEQ ID NO: 166295 - DNA, 15 bp, Homo sapiens
tgtcagaaacagtaa

SEQ ID NO: 166296 - DNA, 15 bp, Homo sapiens
ttgtcagaaacagta

SEQ ID NO: 166297 - DNA, 15 bp, Homo sapiens
gttgtcagaaacagt

SEQ ID NO: 166298 - DNA, 15 bp, Homo sapiens
tgttgtcagaaacag

SEQ ID NO: 166299 - DNA, 15 bp, Homo sapiens
ctgttgtcagaaaca

SEQ ID NO: 166300 - DNA, 15 bp, Homo sapiens
gctgttgtcagaaac

SEQ ID NO: 166301 - DNA, 15 bp, Homo sapiens
agctgttgtcagaaa

SEQ ID NO: 166302 - DNA, 15 bp, Homo sapiens
aagctgttgtcagaa

SEQ ID NO: 166303 - DNA, 15 bp, Homo sapiens
caagctgttgtcaga

SEQ ID NO: 166304 - DNA, 15 bp, Homo sapiens
gcaagctgttgtcag

SEQ ID NO: 166305 - DNA, 15 bp, Homo sapiens
cgcaagctgttgtca

SEQ ID NO: 166306 - DNA, 15 bp, Homo sapiens
tcgcaagctgttgtc

SEQ ID NO: 166307 - DNA, 15 bp, Homo sapiens
ctcgcaagctgttgt

SEQ ID NO: 166308 - DNA, 15 bp, Homo sapiens
cctcgcaagctgttg

SEQ ID NO: 166309 - DNA, 15 bp, Homo sapiens
tcctcgcaagctgtt

SEQ ID NO: 166310 - DNA, 15 bp, Homo sapiens
ttcctcgcaagctgt

SEQ ID NO: 166311 - DNA, 15 bp, Homo sapiens
cttcctcgcaagctg

SEQ ID NO: 166312 - DNA, 15 bp, Homo sapiens
acttcctcgcaagct

SEQ ID NO: 166313 - DNA, 15 bp, Homo sapiens
tacttcctcgcaagc

SEQ ID NO: 166314 - DNA, 15 bp, Homo sapiens
atacttcctcgcaag

SEQ ID NO: 166315 - DNA, 15 bp, Homo sapiens
tatacttcctcgcaa

SEQ ID NO: 166316 - DNA, 15 bp, Homo sapiens
gtatacttcctcgca

SEQ ID NO: 166317 - DNA, 15 bp, Homo sapiens
tgtatacttcctcgc

SEQ ID NO: 166318 - DNA, 15 bp, Homo sapiens
atgtatacttcctcg

SEQ ID NO: 166319 - DNA, 15 bp, Homo sapiens
aatgtatacttcctc

SEQ ID NO: 166320 - DNA, 15 bp, Homo sapiens
aaatgtatacttcct

SEQ ID NO: 166321 - DNA, 15 bp, Homo sapiens
caaatgtatacttcc

SEQ ID NO: 166322 - DNA, 15 bp, Homo sapiens
acaaatgtatacttc

SEQ ID NO: 166323 - DNA, 15 bp, Homo sapiens
cacaaatgtatactt

SEQ ID NO: 166324 - DNA, 15 bp, Homo sapiens
gcacaaatgtatact

SEQ ID NO: 166325 - DNA, 15 bp, Homo sapiens
tgcacaaatgtatac

SEQ ID NO: 166326 - DNA, 15 bp, Homo sapiens
ttgcacaaatgtata

SEQ ID NO: 166327 - DNA, 15 bp, Homo sapiens
gttgcacaaatgtat

SEQ ID NO: 166328 - DNA, 15 bp, Homo sapiens
tgttgcacaaatgta

SEQ ID NO: 166329 - DNA, 15 bp, Homo sapiens
ctgttgcacaaatgt

SEQ ID NO: 166330 - DNA, 15 bp, Homo sapiens
tctgttgcacaaatg

SEQ ID NO: 166331 - DNA, 15 bp, Homo sapiens
gtctgttgcacaaat

SEQ ID NO: 166332 - DNA, 15 bp, Homo sapiens
ggtctgttgcacaaa

SEQ ID NO: 166333 - DNA, 15 bp, Homo sapiens
cggtctgttgcacaa

SEQ ID NO: 166334 - DNA, 15 bp, Homo sapiens
gcggtctgttgcaca

SEQ ID NO: 166335 - DNA, 15 bp, Homo sapiens
agcggtctgttgcac

SEQ ID NO: 166336 - DNA, 15 bp, Homo sapiens
aagcggtctgttgca

SEQ ID NO: 166337 - DNA, 15 bp, Homo sapiens
aaagcggtctgttgc

SEQ ID NO: 166338 - DNA, 15 bp, Homo sapiens
caaagcggtctgttg

SEQ ID NO: 166339 - DNA, 15 bp, Homo sapiens
ccaaagcggtctgtt

SEQ ID NO: 166340 - DNA, 15 bp, Homo sapiens
tccaaagcggtctgt

SEQ ID NO: 166341 - DNA, 15 bp, Homo sapiens
atccaaagcggtctg

SEQ ID NO: 166342 - DNA, 15 bp, Homo sapiens
catccaaagcggtct

SEQ ID NO: 166343 - DNA, 15 bp, Homo sapiens
acatccaaagcggtc

SEQ ID NO: 166344 - DNA, 15 bp, Homo sapiens
aacatccaaagcggt

SEQ ID NO: 166345 - DNA, 15 bp, Homo sapiens
taacatccaaagcgg

SEQ ID NO: 166346 - DNA, 15 bp, Homo sapiens
ttaacatccaaagcg

SEQ ID NO: 166347 - DNA, 15 bp, Homo sapiens
attaacatccaaagc

SEQ ID NO: 166348 - DNA, 15 bp, Homo sapiens
aattaacatccaaag

SEQ ID NO: 166349 - DNA, 15 bp, Homo sapiens
gaattaacatccaaa

SEQ ID NO: 166350 - DNA, 15 bp, Homo sapiens
agaattaacatccaa

SEQ ID NO: 166351 - DNA, 15 bp, Homo sapiens
tagaattaacatcca

SEQ ID NO: 166352 - DNA, 15 bp, Homo sapiens
ttagaattaacatcc

SEQ ID NO: 166353 - DNA, 15 bp, Homo sapiens
tttagaattaacatc

SEQ ID NO: 166354 - DNA, 15 bp, Homo sapiens
atttagaattaacat

SEQ ID NO: 166355 - DNA, 15 bp, Homo sapiens
aatttagaattaaca

SEQ ID NO: 166356 - DNA, 15 bp, Homo sapiens
aaatttagaattaac

SEQ ID NO: 166357 - DNA, 15 bp, Homo sapiens
taaatttagaattaa

SEQ ID NO: 166358 - DNA, 15 bp, Homo sapiens
ctaaatttagaatta

SEQ ID NO: 166359 - DNA, 15 bp, Homo sapiens
tctaaatttagaatt

SEQ ID NO: 166360 - DNA, 15 bp, Homo sapiens
ttctaaatttagaat

SEQ ID NO: 166361 - DNA, 15 bp, Homo sapiens
cttctaaatttagaa

SEQ ID NO: 166362 - DNA, 15 bp, Homo sapiens
gcttctaaatttaga

SEQ ID NO: 166363 - DNA, 15 bp, Homo sapiens
ggcttctaaatttag

SEQ ID NO: 166364 - DNA, 15 bp, Homo sapiens
cggcttctaaattta

SEQ ID NO: 166365 - DNA, 15 bp, Homo sapiens
gcggcttctaaattt

SEQ ID NO: 166366 - DNA, 15 bp, Homo sapiens
ggcggcttctaaatt

SEQ ID NO: 166367 - DNA, 15 bp, Homo sapiens
aggcggcttctaaat

SEQ ID NO: 166368 - DNA, 15 bp, Homo sapiens
aaggcggcttctaaa

SEQ ID NO: 166369 - DNA, 15 bp, Homo sapiens
gaaggcggcttctaa

SEQ ID NO: 166370 - DNA, 15 bp, Homo sapiens
tgaaggcggcttcta

SEQ ID NO: 166371 - DNA, 15 bp, Homo sapiens
ttgaaggcggcttct

SEQ ID NO: 166372 - DNA, 15 bp, Homo sapiens
attgaaggcggcttc

SEQ ID NO: 166373 - DNA, 15 bp, Homo sapiens
cattgaaggcggctt

SEQ ID NO: 166374 - DNA, 15 bp, Homo sapiens
ccattgaaggcggct

SEQ ID NO: 166375 - DNA, 15 bp, Homo sapiens
cccattgaaggcggc

SEQ ID NO: 166376 - DNA, 15 bp, Homo sapiens
acccattgaaggcgg

SEQ ID NO: 166377 - DNA, 15 bp, Homo sapiens
cacccattgaaggcg

SEQ ID NO: 166378 - DNA, 15 bp, Homo sapiens
acacccattgaaggc

SEQ ID NO: 166379 - DNA, 15 bp, Homo sapiens
cacacccattgaagg

SEQ ID NO: 166380 - DNA, 15 bp, Homo sapiens
ccacacccattgaag

SEQ ID NO: 166381 - DNA, 15 bp, Homo sapiens
tccacacccattgaa

SEQ ID NO: 166382 - DNA, 15 bp, Homo sapiens
ttccacacccattga

SEQ ID NO: 166383 - DNA, 15 bp, Homo sapiens
tttccacacccattg

SEQ ID NO: 166384 - DNA, 15 bp, Homo sapiens
atttccacacccatt

SEQ ID NO: 166385 - DNA, 15 bp, Homo sapiens
gatttccacacccat

SEQ ID NO: 166386 - DNA, 15 bp, Homo sapiens
tgatttccacaccca

SEQ ID NO: 166387 - DNA, 15 bp, Homo sapiens
ctgatttccacaccc

SEQ ID NO: 166388 - DNA, 15 bp, Homo sapiens
actgatttccacacc

SEQ ID NO: 166389 - DNA, 15 bp, Homo sapiens
aactgatttccacac

SEQ ID NO: 166390 - DNA, 15 bp, Homo sapiens
taactgatttccaca

SEQ ID NO: 166391 - DNA, 15 bp, Homo sapiens
gtaactgatttccac

SEQ ID NO: 166392 - DNA, 15 bp, Homo sapiens
tgtaactgatttcca

SEQ ID NO: 166393 - DNA, 15 bp, Homo sapiens
gtgtaactgatttcc

SEQ ID NO: 166394 - DNA, 15 bp, Homo sapiens
tgtgtaactgatttc

SEQ ID NO: 166395 - DNA, 15 bp, Homo sapiens
ttgtgtaactgattt

SEQ ID NO: 166396 - DNA, 15 bp, Homo sapiens
tttgtgtaactgatt

SEQ ID NO: 166397 - DNA, 15 bp, Homo sapiens
ttttgtgtaactgat

SEQ ID NO: 166398 - DNA, 15 bp, Homo sapiens
attttgtgtaactga

SEQ ID NO: 166399 - DNA, 15 bp, Homo sapiens
aattttgtgtaactg

SEQ ID NO: 166400 - DNA, 15 bp, Homo sapiens
gaattttgtgtaact

SEQ ID NO: 166401 - DNA, 15 bp, Homo sapiens
tgaattttgtgtaac

SEQ ID NO: 166402 - DNA, 15 bp, Homo sapiens
ctgaattttgtgtaa

SEQ ID NO: 166403 - DNA, 15 bp, Homo sapiens
cctgaattttgtgta

SEQ ID NO: 166404 - DNA, 15 bp, Homo sapiens
acctgaattttgtgt

SEQ ID NO: 166405 - DNA, 15 bp, Homo sapiens
cacctgaattttgtg

SEQ ID NO: 166406 - DNA, 15 bp, Homo sapiens
gcacctgaattttgt

SEQ ID NO: 166407 - DNA, 15 bp, Homo sapiens
agcacctgaattttg

SEQ ID NO: 166408 - DNA, 15 bp, Homo sapiens
aagcacctgaatttt

SEQ ID NO: 166409 - DNA, 15 bp, Homo sapiens
taagcacctgaattt

SEQ ID NO: 166410 - DNA, 15 bp, Homo sapiens
gtaagcacctgaatt

SEQ ID NO: 166411 - DNA, 15 bp, Homo sapiens
agtaagcacctgaat

SEQ ID NO: 166412 - DNA, 15 bp, Homo sapiens
tagtaagcacctgaa

SEQ ID NO: 166413 - DNA, 15 bp, Homo sapiens
ttagtaagcacctga

SEQ ID NO: 166414 - DNA, 15 bp, Homo sapiens
tttagtaagcacctg

SEQ ID NO: 166415 - DNA, 15 bp, Homo sapiens
ttttagtaagcacct

SEQ ID NO: 166416 - DNA, 15 bp, Homo sapiens
tttttagtaagcacc

SEQ ID NO: 166417 - DNA, 15 bp, Homo sapiens
ttttttagtaagcac

SEQ ID NO: 166418 - DNA, 15 bp, Homo sapiens
tttttttagtaagca

SEQ ID NO: 166419 - DNA, 15 bp, Homo sapiens
ttttttttagtaagc

SEQ ID NO: 166420 - DNA, 15 bp, Homo sapiens
attttttttagtaag

SEQ ID NO: 166421 - DNA, 15 bp, Homo sapiens
gattttttttagtaa

SEQ ID NO: 166422 - DNA, 15 bp, Homo sapiens
agattttttttagta

SEQ ID NO: 166423 - DNA, 15 bp, Homo sapiens
cagattttttttagt

SEQ ID NO: 166424 - DNA, 15 bp, Homo sapiens
tcagattttttttag

SEQ ID NO: 166425 - DNA, 15 bp, Homo sapiens
ttcagatttttttta

SEQ ID NO: 166426 - DNA, 15 bp, Homo sapiens
attcagatttttttt

SEQ ID NO: 166427 - DNA, 15 bp, Homo sapiens
tattcagattttttt

SEQ ID NO: 166428 - DNA, 15 bp, Homo sapiens
atattcagatttttt

SEQ ID NO: 166429 - DNA, 15 bp, Homo sapiens
gatattcagattttt

SEQ ID NO: 166430 - DNA, 15 bp, Homo sapiens
ggatattcagatttt

SEQ ID NO: 166431 - DNA, 15 bp, Homo sapiens
tggatattcagattt

SEQ ID NO: 166432 - DNA, 15 bp, Homo sapiens
atggatattcagatt

SEQ ID NO: 166433 - DNA, 15 bp, Homo sapiens
catggatattcagat

SEQ ID NO: 166434 - DNA, 15 bp, Homo sapiens
tcatggatattcaga

SEQ ID NO: 166435 - DNA, 15 bp, Homo sapiens
ttcatggatattcag

SEQ ID NO: 166436 - DNA, 15 bp, Homo sapiens
cttcatggatattca

SEQ ID NO: 166437 - DNA, 15 bp, Homo sapiens
gcttcatggatattc

SEQ ID NO: 166438 - DNA, 15 bp, Homo sapiens
agcttcatggatatt

SEQ ID NO: 166439 - DNA, 15 bp, Homo sapiens
aagcttcatggatat

SEQ ID NO: 166440 - DNA, 15 bp, Homo sapiens
caagcttcatggata

SEQ ID NO: 166441 - DNA, 15 bp, Homo sapiens
acaagcttcatggat

SEQ ID NO: 166442 - DNA, 15 bp, Homo sapiens
tacaagcttcatgga

SEQ ID NO: 166443 - DNA, 15 bp, Homo sapiens
atacaagcttcatgg

SEQ ID NO: 166444 - DNA, 15 bp, Homo sapiens
catacaagcttcatg

SEQ ID NO: 166445 - DNA, 15 bp, Homo sapiens
ccatacaagcttcat

SEQ ID NO: 166446 - DNA, 15 bp, Homo sapiens
accatacaagcttca

SEQ ID NO: 166447 - DNA, 15 bp, Homo sapiens
gaccatacaagcttc

SEQ ID NO: 166448 - DNA, 15 bp, Homo sapiens
ggaccatacaagctt

SEQ ID NO: 166449 - DNA, 15 bp, Homo sapiens
gggaccatacaagct

SEQ ID NO: 166450 - DNA, 15 bp, Homo sapiens
agggaccatacaagc

SEQ ID NO: 166451 - DNA, 15 bp, Homo sapiens
cagggaccatacaag

SEQ ID NO: 166452 - DNA, 15 bp, Homo sapiens
ccagggaccatacaa

SEQ ID NO: 166453 - DNA, 15 bp, Homo sapiens
accagggaccataca

SEQ ID NO: 166454 - DNA, 15 bp, Homo sapiens
caccagggaccatac

SEQ ID NO: 166455 - DNA, 15 bp, Homo sapiens
ccaccagggaccata

SEQ ID NO: 166456 - DNA, 15 bp, Homo sapiens
tccaccagggaccat

SEQ ID NO: 166457 - DNA, 15 bp, Homo sapiens
ttccaccagggacca

SEQ ID NO: 166458 - DNA, 15 bp, Homo sapiens
gttccaccagggacc

SEQ ID NO: 166459 - DNA, 15 bp, Homo sapiens
agttccaccagggac

SEQ ID NO: 166460 - DNA, 15 bp, Homo sapiens
aagttccaccaggga

SEQ ID NO: 166461 - DNA, 15 bp, Homo sapiens
aaagttccaccaggg

SEQ ID NO: 166462 - DNA, 15 bp, Homo sapiens
caaagttccaccagg

SEQ ID NO: 166463 - DNA, 15 bp, Homo sapiens
tcaaagttccaccag

SEQ ID NO: 166464 - DNA, 15 bp, Homo sapiens
ctcaaagttccacca

SEQ ID NO: 166465 - DNA, 15 bp, Homo sapiens
gctcaaagttccacc

SEQ ID NO: 166466 - DNA, 15 bp, Homo sapiens
tgctcaaagttccac

SEQ ID NO: 166467 - DNA, 15 bp, Homo sapiens
ctgctcaaagttcca

SEQ ID NO: 166468 - DNA, 15 bp, Homo sapiens
gctgctcaaagttcc

SEQ ID NO: 166469 - DNA, 15 bp, Homo sapiens
agctgctcaaagttc

SEQ ID NO: 166470 - DNA, 15 bp, Homo sapiens
cagctgctcaaagtt

SEQ ID NO: 166471 - DNA, 15 bp, Homo sapiens
tcagctgctcaaagt

SEQ ID NO: 166472 - DNA, 15 bp, Homo sapiens
ctcagctgctcaaag

SEQ ID NO: 166473 - DNA, 15 bp, Homo sapiens
gctcagctgctcaaa

SEQ ID NO: 166474 - DNA, 15 bp, Homo sapiens
ggctcagctgctcaa

SEQ ID NO: 166475 - DNA, 15 bp, Homo sapiens
aggctcagctgctca

SEQ ID NO: 166476 - DNA, 15 bp, Homo sapiens
gaggctcagctgctc

SEQ ID NO: 166477 - DNA, 15 bp, Homo sapiens
agaggctcagctgct

SEQ ID NO: 166478 - DNA, 15 bp, Homo sapiens
gagaggctcagctgc

SEQ ID NO: 166479 - DNA, 15 bp, Homo sapiens
agagaggctcagctg

SEQ ID NO: 166480 - DNA, 15 bp, Homo sapiens
cagagaggctcagct

SEQ ID NO: 166481 - DNA, 15 bp, Homo sapiens
tcagagaggctcagc

SEQ ID NO: 166482 - DNA, 15 bp, Homo sapiens
ttcagagaggctcag

SEQ ID NO: 166483 - DNA, 15 bp, Homo sapiens
cttcagagaggctca

SEQ ID NO: 166484 - DNA, 15 bp, Homo sapiens
tcttcagagaggctc

SEQ ID NO: 166485 - DNA, 15 bp, Homo sapiens
atcttcagagaggct

SEQ ID NO: 166486 - DNA, 15 bp, Homo sapiens
gatcttcagagaggc

SEQ ID NO: 166487 - DNA, 15 bp, Homo sapiens
ggatcttcagagagg

SEQ ID NO: 166488 - DNA, 15 bp, Homo sapiens
aggatcttcagagag

SEQ ID NO: 166489 - DNA, 15 bp, Homo sapiens
caggatcttcagaga

SEQ ID NO: 166490 - DNA, 15 bp, Homo sapiens
tcaggatcttcagag

SEQ ID NO: 166491 - DNA, 15 bp, Homo sapiens
ctcaggatcttcaga

SEQ ID NO: 166492 - DNA, 15 bp, Homo sapiens
cctcaggatcttcag

SEQ ID NO: 166493 - DNA, 15 bp, Homo sapiens
acctcaggatcttca

SEQ ID NO: 166494 - DNA, 15 bp, Homo sapiens
aacctcaggatcttc

SEQ ID NO: 166495 - DNA, 15 bp, Homo sapiens
caacctcaggatctt

SEQ ID NO: 166496 - DNA, 15 bp, Homo sapiens
acaacctcaggatct

SEQ ID NO: 166497 - DNA, 15 bp, Homo sapiens
gacaacctcaggatc

SEQ ID NO: 166498 - DNA, 15 bp, Homo sapiens
tgacaacctcaggat

SEQ ID NO: 166499 - DNA, 15 bp, Homo sapiens
ctgacaacctcagga

SEQ ID NO: 166500 - DNA, 15 bp, Homo sapiens
cctgacaacctcagg

SEQ ID NO: 166501 - DNA, 15 bp, Homo sapiens
ccctgacaacctcag

SEQ ID NO: 166502 - DNA, 15 bp, Homo sapiens
accctgacaacctca

SEQ ID NO: 166503 - DNA, 15 bp, Homo sapiens
caccctgacaacctc

SEQ ID NO: 166504 - DNA, 15 bp, Homo sapiens
acaccctgacaacct

SEQ ID NO: 166505 - DNA, 15 bp, Homo sapiens
cacaccctgacaacc

SEQ ID NO: 166506 - DNA, 15 bp, Homo sapiens
ccacaccctgacaac

SEQ ID NO: 166507 - DNA, 15 bp, Homo sapiens
gccacaccctgacaa

SEQ ID NO: 166508 - DNA, 15 bp, Homo sapiens
tgccacaccctgaca

SEQ ID NO: 166509 - DNA, 15 bp, Homo sapiens
gtgccacaccctgac

SEQ ID NO: 166510 - DNA, 15 bp, Homo sapiens
tgtgccacaccctga

SEQ ID NO: 166511 - DNA, 15 bp, Homo sapiens
ctgtgccacaccctg

SEQ ID NO: 166512 - DNA, 15 bp, Homo sapiens
gctgtgccacaccct

SEQ ID NO: 166513 - DNA, 15 bp, Homo sapiens
tgctgtgccacaccc

SEQ ID NO: 166514 - DNA, 15 bp, Homo sapiens
ctgctgtgccacacc

SEQ ID NO: 166515 - DNA, 15 bp, Homo sapiens
gctgctgtgccacac

SEQ ID NO: 166516 - DNA, 15 bp, Homo sapiens
agctgctgtgccaca

SEQ ID NO: 166517 - DNA, 15 bp, Homo sapiens
cagctgctgtgccac

SEQ ID NO: 166518 - DNA, 15 bp, Homo sapiens
ccagctgctgtgcca

SEQ ID NO: 166519 - DNA, 15 bp, Homo sapiens
cccagctgctgtgcc

SEQ ID NO: 166520 - DNA, 15 bp, Homo sapiens
ccccagctgctgtgc

SEQ ID NO: 166521 - DNA, 15 bp, Homo sapiens
cccccagctgctgtg

SEQ ID NO: 166522 - DNA, 15 bp, Homo sapiens
gcccccagctgctgt

SEQ ID NO: 166523 - DNA, 15 bp, Homo sapiens
agcccccagctgctg

SEQ ID NO: 166524 - DNA, 15 bp, Homo sapiens
cagcccccagctgct

SEQ ID NO: 166525 - DNA, 15 bp, Homo sapiens
ccagcccccagctgc

SEQ ID NO: 166526 - DNA, 15 bp, Homo sapiens
cccagcccccagctg

SEQ ID NO: 166527 - DNA, 15 bp, Homo sapiens
gcccagcccccagct

SEQ ID NO: 166528 - DNA, 15 bp, Homo sapiens
ggcccagcccccagc

SEQ ID NO: 166529 - DNA, 15 bp, Homo sapiens
gggcccagcccccag

SEQ ID NO: 166530 - DNA, 15 bp, Homo sapiens
ggggcccagccccca

SEQ ID NO: 166531 - DNA, 15 bp, Homo sapiens
cggggcccagccccc

SEQ ID NO: 166532 - DNA, 15 bp, Homo sapiens
acggggcccagcccc

SEQ ID NO: 166533 - DNA, 15 bp, Homo sapiens
cacggggcccagccc

SEQ ID NO: 166534 - DNA, 15 bp, Homo sapiens
gcacggggcccagcc

SEQ ID NO: 166535 - DNA, 15 bp, Homo sapiens
tgcacggggcccagc

SEQ ID NO: 166536 - DNA, 15 bp, Homo sapiens
atgcacggggcccag

SEQ ID NO: 166537 - DNA, 15 bp, Homo sapiens
catgcacggggccca

SEQ ID NO: 166538 - DNA, 15 bp, Homo sapiens
gcatgcacggggccc

SEQ ID NO: 166539 - DNA, 15 bp, Homo sapiens
tgcatgcacggggcc

SEQ ID NO: 166540 - DNA, 15 bp, Homo sapiens
gtgcatgcacggggc

SEQ ID NO: 166541 - DNA, 15 bp, Homo sapiens
tgtgcatgcacgggg

SEQ ID NO: 166542 - DNA, 15 bp, Homo sapiens
atgtgcatgcacggg

SEQ ID NO: 166543 - DNA, 15 bp, Homo sapiens
gatgtgcatgcacgg

SEQ ID NO: 166544 - DNA, 15 bp, Homo sapiens
tgatgtgcatgcacg

SEQ ID NO: 166545 - DNA, 15 bp, Homo sapiens
ctgatgtgcatgcac

SEQ ID NO: 166546 - DNA, 15 bp, Homo sapiens
gctgatgtgcatgca

SEQ ID NO: 166547 - DNA, 15 bp, Homo sapiens
tgctgatgtgcatgc

SEQ ID NO: 166548 - DNA, 15 bp, Homo sapiens
atgctgatgtgcatg

SEQ ID NO: 166549 - DNA, 15 bp, Homo sapiens
gatgctgatgtgcat

SEQ ID NO: 166550 - DNA, 15 bp, Homo sapiens
agatgctgatgtgca

SEQ ID NO: 166551 - DNA, 15 bp, Homo sapiens
cagatgctgatgtgc

SEQ ID NO: 166552 - DNA, 15 bp, Homo sapiens
acagatgctgatgtg

SEQ ID NO: 166553 - DNA, 15 bp, Homo sapiens
cacagatgctgatgt

SEQ ID NO: 166554 - DNA, 15 bp, Homo sapiens
acacagatgctgatg

SEQ ID NO: 166555 - DNA, 15 bp, Homo sapiens
tacacagatgctgat

SEQ ID NO: 166556 - DNA, 15 bp, Homo sapiens
atacacagatgctga

SEQ ID NO: 166557 - DNA, 15 bp, Homo sapiens
aatacacagatgctg

SEQ ID NO: 166558 - DNA, 15 bp, Homo sapiens
caatacacagatgct

SEQ ID NO: 166559 - DNA, 15 bp, Homo sapiens
tcaatacacagatgc

SEQ ID NO: 166560 - DNA, 15 bp, Homo sapiens
ttcaatacacagatg

SEQ ID NO: 166561 - DNA, 15 bp, Homo sapiens
attcaatacacagat

SEQ ID NO: 166562 - DNA, 15 bp, Homo sapiens
tattcaatacacaga

SEQ ID NO: 166563 - DNA, 15 bp, Homo sapiens
atattcaatacacag

SEQ ID NO: 166564 - DNA, 15 bp, Homo sapiens
tatattcaatacaca

SEQ ID NO: 166565 - DNA, 15 bp, Homo sapiens
ttatattcaatacac

SEQ ID NO: 166566 - DNA, 15 bp, Homo sapiens
attatattcaataca

SEQ ID NO: 166567 - DNA, 15 bp, Homo sapiens
gattatattcaatac

SEQ ID NO: 166568 - DNA, 15 bp, Homo sapiens
tgattatattcaata

SEQ ID NO: 166569 - DNA, 15 bp, Homo sapiens
ctgattatattcaat

SEQ ID NO: 166570 - DNA, 15 bp, Homo sapiens
gctgattatattcaa

SEQ ID NO: 166571 - DNA, 15 bp, Homo sapiens
tgctgattatattca

SEQ ID NO: 166572 - DNA, 15 bp, Homo sapiens
gtgctgattatattc

SEQ ID NO: 166573 - DNA, 15 bp, Homo sapiens
tgtgctgattatatt

SEQ ID NO: 166574 - DNA, 15 bp, Homo sapiens
ctgtgctgattatat

SEQ ID NO: 166575 - DNA, 15 bp, Homo sapiens
tctgtgctgattata

SEQ ID NO: 166576 - DNA, 15 bp, Homo sapiens
atctgtgctgattat

SEQ ID NO: 166577 - DNA, 15 bp, Homo sapiens
tatctgtgctgatta

SEQ ID NO: 166578 - DNA, 15 bp, Homo sapiens
ctatctgtgctgatt

SEQ ID NO: 166579 - DNA, 15 bp, Homo sapiens
cctatctgtgctgat

SEQ ID NO: 166580 - DNA, 15 bp, Homo sapiens
ccctatctgtgctga

SEQ ID NO: 166581 - DNA, 15 bp, Homo sapiens
tccctatctgtgctg

SEQ ID NO: 166582 - DNA, 15 bp, Homo sapiens
ttccctatctgtgct

SEQ ID NO: 166583 - DNA, 15 bp, Homo sapiens
cttccctatctgtgc

SEQ ID NO: 166584 - DNA, 15 bp, Homo sapiens
tcttccctatctgtg

SEQ ID NO: 166585 - DNA, 15 bp, Homo sapiens
ttcttccctatctgt

SEQ ID NO: 166586 - DNA, 15 bp, Homo sapiens
tttcttccctatctg

SEQ ID NO: 166587 - DNA, 15 bp, Homo sapiens
gtttcttccctatct

SEQ ID NO: 166588 - DNA, 15 bp, Homo sapiens
tgtttcttccctatc

SEQ ID NO: 166589 - DNA, 15 bp, Homo sapiens
ttgtttcttccctat

SEQ ID NO: 166590 - DNA, 15 bp, Homo sapiens
tttgtttcttcccta

SEQ ID NO: 166591 - DNA, 15 bp, Homo sapiens
gtttgtttcttccct

SEQ ID NO: 166592 - DNA, 15 bp, Homo sapiens
ggtttgtttcttccc

SEQ ID NO: 166593 - DNA, 15 bp, Homo sapiens
tggtttgtttcttcc

SEQ ID NO: 166594 - DNA, 15 bp, Homo sapiens
gtggtttgtttcttc

SEQ ID NO: 166595 - DNA, 15 bp, Homo sapiens
ggtggtttgtttctt

SEQ ID NO: 166596 - DNA, 15 bp, Homo sapiens
tggtggtttgtttct

SEQ ID NO: 166597 - DNA, 15 bp, Homo sapiens
gtggtggtttgtttc

SEQ ID NO: 166598 - DNA, 15 bp, Homo sapiens
ggtggtggtttgttt

SEQ ID NO: 166599 - DNA, 15 bp, Homo sapiens
tggtggtggtttgtt

SEQ ID NO: 166600 - DNA, 15 bp, Homo sapiens
gtggtggtggtttgt

SEQ ID NO: 166601 - DNA, 15 bp, Homo sapiens
ggtggtggtggtttg

SEQ ID NO: 166602 - DNA, 15 bp, Homo sapiens
tggtggtggtggttt

SEQ ID NO: 166603 - DNA, 15 bp, Homo sapiens
ttggtggtggtggtt

SEQ ID NO: 166604 - DNA, 15 bp, Homo sapiens
tttggtggtggtggt

SEQ ID NO: 166605 - DNA, 15 bp, Homo sapiens
gtttggtggtggtgg

SEQ ID NO: 166606 - DNA, 15 bp, Homo sapiens
tgtttggtggtggtg

SEQ ID NO: 166607 - DNA, 15 bp, Homo sapiens
gtgtttggtggtggt

SEQ ID NO: 166608 - DNA, 15 bp, Homo sapiens
ggtgtttggtggtgg

SEQ ID NO: 166609 - DNA, 15 bp, Homo sapiens
gggtgtttggtggtg

SEQ ID NO: 166610 - DNA, 15 bp, Homo sapiens
agggtgtttggtggt

SEQ ID NO: 166611 - DNA, 15 bp, Homo sapiens
tagggtgtttggtgg

SEQ ID NO: 166612 - DNA, 15 bp, Homo sapiens
ttagggtgtttggtg

SEQ ID NO: 166613 - DNA, 15 bp, Homo sapiens
cttagggtgtttggt

SEQ ID NO: 166614 - DNA, 15 bp, Homo sapiens
acttagggtgtttgg

SEQ ID NO: 166615 - DNA, 15 bp, Homo sapiens
tacttagggtgtttg

SEQ ID NO: 166616 - DNA, 15 bp, Homo sapiens
gtacttagggtgttt

SEQ ID NO: 166617 - DNA, 15 bp, Homo sapiens
ggtacttagggtgtt

SEQ ID NO: 166618 - DNA, 15 bp, Homo sapiens
tggtacttagggtgt

SEQ ID NO: 166619 - DNA, 15 bp, Homo sapiens
ttggtacttagggtg

SEQ ID NO: 166620 - DNA, 15 bp, Homo sapiens
attggtacttagggt

SEQ ID NO: 166621 - DNA, 15 bp, Homo sapiens
gattggtacttaggg

SEQ ID NO: 166622 - DNA, 15 bp, Homo sapiens
agattggtacttagg

SEQ ID NO: 166623 - DNA, 15 bp, Homo sapiens
cagattggtacttag

SEQ ID NO: 166624 - DNA, 15 bp, Homo sapiens
ccagattggtactta

SEQ ID NO: 166625 - DNA, 15 bp, Homo sapiens
cccagattggtactt

SEQ ID NO: 166626 - DNA, 15 bp, Homo sapiens
gcccagattggtact

SEQ ID NO: 166627 - DNA, 15 bp, Homo sapiens
tgcccagattggtac

SEQ ID NO: 166628 - DNA, 15 bp, Homo sapiens
atgcccagattggta

SEQ ID NO: 166629 - DNA, 15 bp, Homo sapiens
gatgcccagattggt

SEQ ID NO: 166630 - DNA, 15 bp, Homo sapiens
agatgcccagattgg

SEQ ID NO: 166631 - DNA, 15 bp, Homo sapiens
cagatgcccagattg

SEQ ID NO: 166632 - DNA, 15 bp, Homo sapiens
ccagatgcccagatt

SEQ ID NO: 166633 - DNA, 15 bp, Homo sapiens
cccagatgcccagat

SEQ ID NO: 166634 - DNA, 15 bp, Homo sapiens
gcccagatgcccaga

SEQ ID NO: 166635 - DNA, 15 bp, Homo sapiens
tgcccagatgcccag

SEQ ID NO: 166636 - DNA, 15 bp, Homo sapiens
gtgcccagatgccca

SEQ ID NO: 166637 - DNA, 15 bp, Homo sapiens
ggtgcccagatgccc

SEQ ID NO: 166638 - DNA, 15 bp, Homo sapiens
gggtgcccagatgcc

SEQ ID NO: 166639 - DNA, 15 bp, Homo sapiens
agggtgcccagatgc

SEQ ID NO: 166640 - DNA, 15 bp, Homo sapiens
cagggtgcccagatg

SEQ ID NO: 166641 - DNA, 15 bp, Homo sapiens
ccagggtgcccagat

SEQ ID NO: 166642 - DNA, 15 bp, Homo sapiens
tccagggtgcccaga

SEQ ID NO: 166643 - DNA, 15 bp, Homo sapiens
atccagggtgcccag

SEQ ID NO: 166644 - DNA, 15 bp, Homo sapiens
aatccagggtgccca

SEQ ID NO: 166645 - DNA, 15 bp, Homo sapiens
aaatccagggtgccc

SEQ ID NO: 166646 - DNA, 15 bp, Homo sapiens
aaaatccagggtgcc

SEQ ID NO: 166647 - DNA, 15 bp, Homo sapiens
gaaaatccagggtgc

SEQ ID NO: 166648 - DNA, 15 bp, Homo sapiens
tgaaaatccagggtg

SEQ ID NO: 166649 - DNA, 15 bp, Homo sapiens
atgaaaatccagggt

SEQ ID NO: 166650 - DNA, 15 bp, Homo sapiens
aatgaaaatccaggg

SEQ ID NO: 166651 - DNA, 15 bp, Homo sapiens
aaatgaaaatccagg

SEQ ID NO: 166652 - DNA, 15 bp, Homo sapiens
aaaatgaaaatccag

SEQ ID NO: 166653 - DNA, 15 bp, Homo sapiens
caaaatgaaaatcca

SEQ ID NO: 166654 - DNA, 15 bp, Homo sapiens
tcaaaatgaaaatcc

SEQ ID NO: 166655 - DNA, 15 bp, Homo sapiens
gtcaaaatgaaaatc

SEQ ID NO: 166656 - DNA, 15 bp, Homo sapiens
agtcaaaatgaaaat

SEQ ID NO: 166657 - DNA, 15 bp, Homo sapiens
gagtcaaaatgaaaa

SEQ ID NO: 166658 - DNA, 15 bp, Homo sapiens
agagtcaaaatgaaa

SEQ ID NO: 166659 - DNA, 15 bp, Homo sapiens
cagagtcaaaatgaa

SEQ ID NO: 166660 - DNA, 15 bp, Homo sapiens
acagagtcaaaatga

SEQ ID NO: 166661 - DNA, 15 bp, Homo sapiens
gacagagtcaaaatg

SEQ ID NO: 166662 - DNA, 15 bp, Homo sapiens
tgacagagtcaaaat

SEQ ID NO: 166663 - DNA, 15 bp, Homo sapiens
atgacagagtcaaaa

SEQ ID NO: 166664 - DNA, 15 bp, Homo sapiens
aatgacagagtcaaa

SEQ ID NO: 166665 - DNA, 15 bp, Homo sapiens
aaatgacagagtcaa

SEQ ID NO: 166666 - DNA, 15 bp, Homo sapiens
taaatgacagagtca

SEQ ID NO: 166667 - DNA, 15 bp, Homo sapiens
gtaaatgacagagtc

SEQ ID NO: 166668 - DNA, 15 bp, Homo sapiens
agtaaatgacagagt

SEQ ID NO: 166669 - DNA, 15 bp, Homo sapiens
tagtaaatgacagag

SEQ ID NO: 166670 - DNA, 15 bp, Homo sapiens
ctagtaaatgacaga

SEQ ID NO: 166671 - DNA, 15 bp, Homo sapiens
actagtaaatgacag

SEQ ID NO: 166672 - DNA, 15 bp, Homo sapiens
aactagtaaatgaca

SEQ ID NO: 166673 - DNA, 15 bp, Homo sapiens
gaactagtaaatgac

SEQ ID NO: 166674 - DNA, 15 bp, Homo sapiens
agaactagtaaatga

SEQ ID NO: 166675 - DNA, 15 bp, Homo sapiens
gagaactagtaaatg

SEQ ID NO: 166676 - DNA, 15 bp, Homo sapiens
agagaactagtaaat

SEQ ID NO: 166677 - DNA, 15 bp, Homo sapiens
cagagaactagtaaa

SEQ ID NO: 166678 - DNA, 15 bp, Homo sapiens
tcagagaactagtaa

SEQ ID NO: 166679 - DNA, 15 bp, Homo sapiens
gtcagagaactagta

SEQ ID NO: 166680 - DNA, 15 bp, Homo sapiens
ggtcagagaactagt

SEQ ID NO: 166681 - DNA, 15 bp, Homo sapiens
aggtcagagaactag

SEQ ID NO: 166682 - DNA, 15 bp, Homo sapiens
aaggtcagagaacta

SEQ ID NO: 166683 - DNA, 15 bp, Homo sapiens
caaggtcagagaact

SEQ ID NO: 166684 - DNA, 15 bp, Homo sapiens
ccaaggtcagagaac

SEQ ID NO: 166685 - DNA, 15 bp, Homo sapiens
cccaaggtcagagaa

SEQ ID NO: 166686 - DNA, 15 bp, Homo sapiens
gcccaaggtcagaga

SEQ ID NO: 166687 - DNA, 15 bp, Homo sapiens
tgcccaaggtcagag

SEQ ID NO: 166688 - DNA, 15 bp, Homo sapiens
gtgcccaaggtcaga

SEQ ID NO: 166689 - DNA, 15 bp, Homo sapiens
ggtgcccaaggtcag

SEQ ID NO: 166690 - DNA, 15 bp, Homo sapiens
tggtgcccaaggtca

SEQ ID NO: 166691 - DNA, 15 bp, Homo sapiens
atggtgcccaaggtc

SEQ ID NO: 166692 - DNA, 15 bp, Homo sapiens
catggtgcccaaggt

SEQ ID NO: 166693 - DNA, 15 bp, Homo sapiens
gcatggtgcccaagg

SEQ ID NO: 166694 - DNA, 15 bp, Homo sapiens
agcatggtgcccaag

SEQ ID NO: 166695 - DNA, 15 bp, Homo sapiens
aagcatggtgcccaa

SEQ ID NO: 166696 - DNA, 15 bp, Homo sapiens
aaagcatggtgccca

SEQ ID NO: 166697 - DNA, 15 bp, Homo sapiens
caaagcatggtgccc

SEQ ID NO: 166698 - DNA, 15 bp, Homo sapiens
gcaaagcatggtgcc

SEQ ID NO: 166699 - DNA, 15 bp, Homo sapiens
tgcaaagcatggtgc

SEQ ID NO: 166700 - DNA, 15 bp, Homo sapiens
atgcaaagcatggtg

SEQ ID NO: 166701 - DNA, 15 bp, Homo sapiens
tatgcaaagcatggt

SEQ ID NO: 166702 - DNA, 15 bp, Homo sapiens
ctatgcaaagcatgg

SEQ ID NO: 166703 - DNA, 15 bp, Homo sapiens
gctatgcaaagcatg

SEQ ID NO: 166704 - DNA, 15 bp, Homo sapiens
tgctatgcaaagcat

SEQ ID NO: 166705 - DNA, 15 bp, Homo sapiens
ctgctatgcaaagca

SEQ ID NO: 166706 - DNA, 15 bp, Homo sapiens
gctgctatgcaaagc

SEQ ID NO: 166707 - DNA, 15 bp, Homo sapiens
ggctgctatgcaaag

SEQ ID NO: 166708 - DNA, 15 bp, Homo sapiens
aggctgctatgcaaa

SEQ ID NO: 166709 - DNA, 15 bp, Homo sapiens
aaggctgctatgcaa

SEQ ID NO: 166710 - DNA, 15 bp, Homo sapiens
caaggctgctatgca

SEQ ID NO: 166711 - DNA, 15 bp, Homo sapiens
ccaaggctgctatgc

SEQ ID NO: 166712 - DNA, 15 bp, Homo sapiens
accaaggctgctatg

SEQ ID NO: 166713 - DNA, 15 bp, Homo sapiens
aaccaaggctgctat

SEQ ID NO: 166714 - DNA, 15 bp, Homo sapiens
aaaccaaggctgcta

SEQ ID NO: 166715 - DNA, 15 bp, Homo sapiens
gaaaccaaggctgct

SEQ ID NO: 166716 - DNA, 15 bp, Homo sapiens
ggaaaccaaggctgc

SEQ ID NO: 166717 - DNA, 15 bp, Homo sapiens
aggaaaccaaggctg

SEQ ID NO: 166718 - DNA, 15 bp, Homo sapiens
gaggaaaccaaggct

SEQ ID NO: 166719 - DNA, 15 bp, Homo sapiens
tgaggaaaccaaggc

SEQ ID NO: 166720 - DNA, 15 bp, Homo sapiens
atgaggaaaccaagg

SEQ ID NO: 166721 - DNA, 15 bp, Homo sapiens
aatgaggaaaccaag

SEQ ID NO: 166722 - DNA, 15 bp, Homo sapiens
caatgaggaaaccaa

SEQ ID NO: 166723 - DNA, 15 bp, Homo sapiens
ccaatgaggaaacca

SEQ ID NO: 166724 - DNA, 15 bp, Homo sapiens
accaatgaggaaacc

SEQ ID NO: 166725 - DNA, 15 bp, Homo sapiens
taccaatgaggaaac

SEQ ID NO: 166726 - DNA, 15 bp, Homo sapiens
ttaccaatgaggaaa

SEQ ID NO: 166727 - DNA, 15 bp, Homo sapiens
tttaccaatgaggaa

SEQ ID NO: 166728 - DNA, 15 bp, Homo sapiens
ttttaccaatgagga

SEQ ID NO: 166729 - DNA, 15 bp, Homo sapiens
attttaccaatgagg

SEQ ID NO: 166730 - DNA, 15 bp, Homo sapiens
cattttaccaatgag

SEQ ID NO: 166731 - DNA, 15 bp, Homo sapiens
tcattttaccaatga

SEQ ID NO: 166732 - DNA, 15 bp, Homo sapiens
ctcattttaccaatg

SEQ ID NO: 166733 - DNA, 15 bp, Homo sapiens
cctcattttaccaat

SEQ ID NO: 166734 - DNA, 15 bp, Homo sapiens
gcctcattttaccaa

SEQ ID NO: 166735 - DNA, 15 bp, Homo sapiens
agcctcattttacca

SEQ ID NO: 166736 - DNA, 15 bp, Homo sapiens
cagcctcattttacc

SEQ ID NO: 166737 - DNA, 15 bp, Homo sapiens
acagcctcattttac

SEQ ID NO: 166738 - DNA, 15 bp, Homo sapiens
aacagcctcatttta

SEQ ID NO: 166739 - DNA, 15 bp, Homo sapiens
caacagcctcatttt

SEQ ID NO: 166740 - DNA, 15 bp, Homo sapiens
tcaacagcctcattt

SEQ ID NO: 166741 - DNA, 15 bp, Homo sapiens
ttcaacagcctcatt

SEQ ID NO: 166742 - DNA, 15 bp, Homo sapiens
attcaacagcctcat

SEQ ID NO: 166743 - DNA, 15 bp, Homo sapiens
aattcaacagcctca

SEQ ID NO: 166744 - DNA, 15 bp, Homo sapiens
gaattcaacagcctc

SEQ ID NO: 166745 - DNA, 15 bp, Homo sapiens
agaattcaacagcct

SEQ ID NO: 166746 - DNA, 15 bp, Homo sapiens
tagaattcaacagcc

SEQ ID NO: 166747 - DNA, 15 bp, Homo sapiens
atagaattcaacagc

SEQ ID NO: 166748 - DNA, 15 bp, Homo sapiens
tatagaattcaacag

SEQ ID NO: 166749 - DNA, 15 bp, Homo sapiens
atatagaattcaaca

SEQ ID NO: 166750 - DNA, 15 bp, Homo sapiens
catatagaattcaac

SEQ ID NO: 166751 - DNA, 15 bp, Homo sapiens
ccatatagaattcaa

SEQ ID NO: 166752 - DNA, 15 bp, Homo sapiens
gccatatagaattca

SEQ ID NO: 166753 - DNA, 15 bp, Homo sapiens
agccatatagaattc

SEQ ID NO: 166754 - DNA, 15 bp, Homo sapiens
gagccatatagaatt

SEQ ID NO: 166755 - DNA, 15 bp, Homo sapiens
tgagccatatagaat

SEQ ID NO: 166756 - DNA, 15 bp, Homo sapiens
ttgagccatatagaa

SEQ ID NO: 166757 - DNA, 15 bp, Homo sapiens
cttgagccatataga

SEQ ID NO: 166758 - DNA, 15 bp, Homo sapiens
tcttgagccatatag

SEQ ID NO: 166759 - DNA, 15 bp, Homo sapiens
ctcttgagccatata

SEQ ID NO: 166760 - DNA, 15 bp, Homo sapiens
actcttgagccatat

SEQ ID NO: 166761 - DNA, 15 bp, Homo sapiens
aactcttgagccata

SEQ ID NO: 166762 - DNA, 15 bp, Homo sapiens
gaactcttgagccat

SEQ ID NO: 166763 - DNA, 15 bp, Homo sapiens
agaactcttgagcca

SEQ ID NO: 166764 - DNA, 15 bp, Homo sapiens
aagaactcttgagcc

SEQ ID NO: 166765 - DNA, 15 bp, Homo sapiens
aaagaactcttgagc

SEQ ID NO: 166766 - DNA, 15 bp, Homo sapiens
gaaagaactcttgag

SEQ ID NO: 166767 - DNA, 15 bp, Homo sapiens
ggaaagaactcttga

SEQ ID NO: 166768 - DNA, 15 bp, Homo sapiens
tggaaagaactcttg

SEQ ID NO: 166769 - DNA, 15 bp, Homo sapiens
ctggaaagaactctt

SEQ ID NO: 166770 - DNA, 15 bp, Homo sapiens
gctggaaagaactct

SEQ ID NO: 166771 - DNA, 15 bp, Homo sapiens
ggctggaaagaactc

SEQ ID NO: 166772 - DNA, 15 bp, Homo sapiens
gggctggaaagaact

SEQ ID NO: 166773 - DNA, 15 bp, Homo sapiens
ggggctggaaagaac

SEQ ID NO: 166774 - DNA, 15 bp, Homo sapiens
cggggctggaaagaa

SEQ ID NO: 166775 - DNA, 15 bp, Homo sapiens
tcggggctggaaaga

SEQ ID NO: 166776 - DNA, 15 bp, Homo sapiens
ttcggggctggaaag

SEQ ID NO: 166777 - DNA, 15 bp, Homo sapiens
tttcggggctggaaa

SEQ ID NO: 166778 - DNA, 15 bp, Homo sapiens
gtttcggggctggaa

SEQ ID NO: 166779 - DNA, 15 bp, Homo sapiens
tgtttcggggctgga

SEQ ID NO: 166780 - DNA, 15 bp, Homo sapiens
atgtttcggggctgg

SEQ ID NO: 166781 - DNA, 15 bp, Homo sapiens
catgtttcggggctg

SEQ ID NO: 166782 - DNA, 15 bp, Homo sapiens
gcatgtttcggggct

SEQ ID NO: 166783 - DNA, 15 bp, Homo sapiens
tgcatgtttcggggc

SEQ ID NO: 166784 - DNA, 15 bp, Homo sapiens
ttgcatgtttcgggg

SEQ ID NO: 166785 - DNA, 15 bp, Homo sapiens
tttgcatgtttcggg

SEQ ID NO: 166786 - DNA, 15 bp, Homo sapiens
ttttgcatgtttcgg

SEQ ID NO: 166787 - DNA, 15 bp, Homo sapiens
tttttgcatgtttcg

SEQ ID NO: 166788 - DNA, 15 bp, Homo sapiens
atttttgcatgtttc

SEQ ID NO: 166789 - DNA, 15 bp, Homo sapiens
aatttttgcatgttt

SEQ ID NO: 166790 - DNA, 15 bp, Homo sapiens
gaatttttgcatgtt

SEQ ID NO: 166791 - DNA, 15 bp, Homo sapiens
tgaatttttgcatgt

SEQ ID NO: 166792 - DNA, 15 bp, Homo sapiens
ctgaatttttgcatg

SEQ ID NO: 166793 - DNA, 15 bp, Homo sapiens
actgaatttttgcat

SEQ ID NO: 166794 - DNA, 15 bp, Homo sapiens
aactgaatttttgca

SEQ ID NO: 166795 - DNA, 15 bp, Homo sapiens
aaactgaatttttgc

SEQ ID NO: 166796 - DNA, 15 bp, Homo sapiens
gaaactgaatttttg

SEQ ID NO: 166797 - DNA, 15 bp, Homo sapiens
cgaaactgaattttt

SEQ ID NO: 166798 - DNA, 15 bp, Homo sapiens
tcgaaactgaatttt

SEQ ID NO: 166799 - DNA, 15 bp, Homo sapiens
gtcgaaactgaattt

SEQ ID NO: 166800 - DNA, 15 bp, Homo sapiens
agtcgaaactgaatt

SEQ ID NO: 166801 - DNA, 15 bp, Homo sapiens
tagtcgaaactgaat

SEQ ID NO: 166802 - DNA, 15 bp, Homo sapiens
ttagtcgaaactgaa

SEQ ID NO: 166803 - DNA, 15 bp, Homo sapiens
cttagtcgaaactga

SEQ ID NO: 166804 - DNA, 15 bp, Homo sapiens
tcttagtcgaaactg

SEQ ID NO: 166805 - DNA, 15 bp, Homo sapiens
ctcttagtcgaaact

SEQ ID NO: 166806 - DNA, 15 bp, Homo sapiens
gctcttagtcgaaac

SEQ ID NO: 166807 - DNA, 15 bp, Homo sapiens
agctcttagtcgaaa

SEQ ID NO: 166808 - DNA, 15 bp, Homo sapiens
aagctcttagtcgaa

SEQ ID NO: 166809 - DNA, 15 bp, Homo sapiens
aaagctcttagtcga

SEQ ID NO: 166810 - DNA, 15 bp, Homo sapiens
taaagctcttagtcg

SEQ ID NO: 166811 - DNA, 15 bp, Homo sapiens
ctaaagctcttagtc

SEQ ID NO: 166812 - DNA, 15 bp, Homo sapiens
gctaaagctcttagt

SEQ ID NO: 166813 - DNA, 15 bp, Homo sapiens
tgctaaagctcttag

SEQ ID NO: 166814 - DNA, 15 bp, Homo sapiens
gtgctaaagctctta

SEQ ID NO: 166815 - DNA, 15 bp, Homo sapiens
agtgctaaagctctt

SEQ ID NO: 166816 - DNA, 15 bp, Homo sapiens
cagtgctaaagctct

SEQ ID NO: 166817 - DNA, 15 bp, Homo sapiens
acagtgctaaagctc

SEQ ID NO: 166818 - DNA, 15 bp, Homo sapiens
gacagtgctaaagct

SEQ ID NO: 166819 - DNA, 15 bp, Homo sapiens
agacagtgctaaagc

SEQ ID NO: 166820 - DNA, 15 bp, Homo sapiens
aagacagtgctaaag

SEQ ID NO: 166821 - DNA, 15 bp, Homo sapiens
taagacagtgctaaa

SEQ ID NO: 166822 - DNA, 15 bp, Homo sapiens
ataagacagtgctaa

SEQ ID NO: 166823 - DNA, 15 bp, Homo sapiens
gataagacagtgcta

SEQ ID NO: 166824 - DNA, 15 bp, Homo sapiens
agataagacagtgct

SEQ ID NO: 166825 - DNA, 15 bp, Homo sapiens
aagataagacagtgc

SEQ ID NO: 166826 - DNA, 15 bp, Homo sapiens
caagataagacagtg

SEQ ID NO: 166827 - DNA, 15 bp, Homo sapiens
ccaagataagacagt

SEQ ID NO: 166828 - DNA, 15 bp, Homo sapiens
gccaagataagacag

SEQ ID NO: 166829 - DNA, 15 bp, Homo sapiens
agccaagataagaca

SEQ ID NO: 166830 - DNA, 15 bp, Homo sapiens
cagccaagataagac

SEQ ID NO: 166831 - DNA, 15 bp, Homo sapiens
acagccaagataaga

SEQ ID NO: 166832 - DNA, 15 bp, Homo sapiens
aacagccaagataag

SEQ ID NO: 166833 - DNA, 15 bp, Homo sapiens
aaacagccaagataa

SEQ ID NO: 166834 - DNA, 15 bp, Homo sapiens
caaacagccaagata

SEQ ID NO: 166835 - DNA, 15 bp, Homo sapiens
gcaaacagccaagat

SEQ ID NO: 166836 - DNA, 15 bp, Homo sapiens
tgcaaacagccaaga

SEQ ID NO: 166837 - DNA, 15 bp, Homo sapiens
ctgcaaacagccaag

SEQ ID NO: 166838 - DNA, 15 bp, Homo sapiens
actgcaaacagccaa

SEQ ID NO: 166839 - DNA, 15 bp, Homo sapiens
cactgcaaacagcca

SEQ ID NO: 166840 - DNA, 15 bp, Homo sapiens
ccactgcaaacagcc

SEQ ID NO: 166841 - DNA, 15 bp, Homo sapiens
gccactgcaaacagc

SEQ ID NO: 166842 - DNA, 15 bp, Homo sapiens
ggccactgcaaacag

SEQ ID NO: 166843 - DNA, 15 bp, Homo sapiens
tggccactgcaaaca

SEQ ID NO: 166844 - DNA, 15 bp, Homo sapiens
ttggccactgcaaac

SEQ ID NO: 166845 - DNA, 15 bp, Homo sapiens
tttggccactgcaaa

SEQ ID NO: 166846 - DNA, 15 bp, Homo sapiens
ttttggccactgcaa

SEQ ID NO: 166847 - DNA, 15 bp, Homo sapiens
attttggccactgca

SEQ ID NO: 166848 - DNA, 15 bp, Homo sapiens
aattttggccactgc

SEQ ID NO: 166849 - DNA, 15 bp, Homo sapiens
caattttggccactg

SEQ ID NO: 166850 - DNA, 15 bp, Homo sapiens
tcaattttggccact

SEQ ID NO: 166851 - DNA, 15 bp, Homo sapiens
atcaattttggccac

SEQ ID NO: 166852 - DNA, 15 bp, Homo sapiens
tatcaattttggcca

SEQ ID NO: 166853 - DNA, 15 bp, Homo sapiens
ttatcaattttggcc

SEQ ID NO: 166854 - DNA, 15 bp, Homo sapiens
gttatcaattttggc

SEQ ID NO: 166855 - DNA, 15 bp, Homo sapiens
tgttatcaattttgg

SEQ ID NO: 166856 - DNA, 15 bp, Homo sapiens
atgttatcaattttg

SEQ ID NO: 166857 - DNA, 15 bp, Homo sapiens
tatgttatcaatttt

SEQ ID NO: 166858 - DNA, 15 bp, Homo sapiens
atatgttatcaattt

SEQ ID NO: 166859 - DNA, 15 bp, Homo sapiens
aatatgttatcaatt

SEQ ID NO: 166860 - DNA, 15 bp, Homo sapiens
caatatgttatcaat

SEQ ID NO: 166861 - DNA, 15 bp, Homo sapiens
ccaatatgttatcaa

SEQ ID NO: 166862 - DNA, 15 bp, Homo sapiens
tccaatatgttatca

SEQ ID NO: 166863 - DNA, 15 bp, Homo sapiens
ttccaatatgttatc

SEQ ID NO: 166864 - DNA, 15 bp, Homo sapiens
tttccaatatgttat

SEQ ID NO: 166865 - DNA, 15 bp, Homo sapiens
ttttccaatatgtta

SEQ ID NO: 166866 - DNA, 15 bp, Homo sapiens
gttttccaatatgtt

SEQ ID NO: 166867 - DNA, 15 bp, Homo sapiens
agttttccaatatgt

SEQ ID NO: 166868 - DNA, 15 bp, Homo sapiens
aagttttccaatatg

SEQ ID NO: 166869 - DNA, 15 bp, Homo sapiens
gaagttttccaatat

SEQ ID NO: 166870 - DNA, 15 bp, Homo sapiens
ggaagttttccaata

SEQ ID NO: 166871 - DNA, 15 bp, Homo sapiens
gggaagttttccaat

SEQ ID NO: 166872 - DNA, 15 bp, Homo sapiens
agggaagttttccaa

SEQ ID NO: 166873 - DNA, 15 bp, Homo sapiens
cagggaagttttcca

SEQ ID NO: 166874 - DNA, 15 bp, Homo sapiens
gcagggaagttttcc

SEQ ID NO: 166875 - DNA, 15 bp, Homo sapiens
agcagggaagttttc

SEQ ID NO: 166876 - DNA, 15 bp, Homo sapiens
cagcagggaagtttt

SEQ ID NO: 166877 - DNA, 15 bp, Homo sapiens
tcagcagggaagttt

SEQ ID NO: 166878 - DNA, 15 bp, Homo sapiens
atcagcagggaagtt

SEQ ID NO: 166879 - DNA, 15 bp, Homo sapiens
aatcagcagggaagt

SEQ ID NO: 166880 - DNA, 15 bp, Homo sapiens
taatcagcagggaag

SEQ ID NO: 166881 - DNA, 15 bp, Homo sapiens
ttaatcagcagggaa

SEQ ID NO: 166882 - DNA, 15 bp, Homo sapiens
tttaatcagcaggga

SEQ ID NO: 166883 - DNA, 15 bp, Homo sapiens
ttttaatcagcaggg

SEQ ID NO: 166884 - DNA, 15 bp, Homo sapiens
attttaatcagcagg

SEQ ID NO: 166885 - DNA, 15 bp, Homo sapiens
tattttaatcagcag

SEQ ID NO: 166886 - DNA, 15 bp, Homo sapiens
ctattttaatcagca

SEQ ID NO: 166887 - DNA, 15 bp, Homo sapiens
tctattttaatcagc

SEQ ID NO: 166888 - DNA, 15 bp, Homo sapiens
gtctattttaatcag

SEQ ID NO: 166889 - DNA, 15 bp, Homo sapiens
tgtctattttaatca

SEQ ID NO: 166890 - DNA, 15 bp, Homo sapiens
atgtctattttaatc

SEQ ID NO: 166891 - DNA, 15 bp, Homo sapiens
aatgtctattttaat

SEQ ID NO: 166892 - DNA, 15 bp, Homo sapiens
caatgtctattttaa

SEQ ID NO: 166893 - DNA, 15 bp, Homo sapiens
gcaatgtctatttta

SEQ ID NO: 166894 - DNA, 15 bp, Homo sapiens
ggcaatgtctatttt

SEQ ID NO: 166895 - DNA, 15 bp, Homo sapiens
gggcaatgtctattt

SEQ ID NO: 166896 - DNA, 15 bp, Homo sapiens
agggcaatgtctatt

SEQ ID NO: 166897 - DNA, 15 bp, Homo sapiens
tagggcaatgtctat

SEQ ID NO: 166898 - DNA, 15 bp, Homo sapiens
ttagggcaatgtcta

SEQ ID NO: 166899 - DNA, 15 bp, Homo sapiens
cttagggcaatgtct

SEQ ID NO: 166900 - DNA, 15 bp, Homo sapiens
acttagggcaatgtc

SEQ ID NO: 166901 - DNA, 15 bp, Homo sapiens
cacttagggcaatgt

SEQ ID NO: 166902 - DNA, 15 bp, Homo sapiens
gcacttagggcaatg

SEQ ID NO: 166903 - DNA, 15 bp, Homo sapiens
agcacttagggcaat

SEQ ID NO: 166904 - DNA, 15 bp, Homo sapiens
cagcacttagggcaa

SEQ ID NO: 166905 - DNA, 15 bp, Homo sapiens
acagcacttagggca

SEQ ID NO: 166906 - DNA, 15 bp, Homo sapiens
cacagcacttagggc

SEQ ID NO: 166907 - DNA, 15 bp, Homo sapiens
tcacagcacttaggg

SEQ ID NO: 166908 - DNA, 15 bp, Homo sapiens
ctcacagcacttagg

SEQ ID NO: 166909 - DNA, 15 bp, Homo sapiens
actcacagcacttag

SEQ ID NO: 166910 - DNA, 15 bp, Homo sapiens
cactcacagcactta

SEQ ID NO: 166911 - DNA, 15 bp, Homo sapiens
acactcacagcactt

SEQ ID NO: 166912 - DNA, 15 bp, Homo sapiens
gacactcacagcact

SEQ ID NO: 166913 - DNA, 15 bp, Homo sapiens
ggacactcacagcac

SEQ ID NO: 166914 - DNA, 15 bp, Homo sapiens
gggacactcacagca

SEQ ID NO: 166915 - DNA, 15 bp, Homo sapiens
agggacactcacagc

SEQ ID NO: 166916 - DNA, 15 bp, Homo sapiens
cagggacactcacag

SEQ ID NO: 166917 - DNA, 15 bp, Homo sapiens
acagggacactcaca

SEQ ID NO: 166918 - DNA, 15 bp, Homo sapiens
aacagggacactcac

SEQ ID NO: 166919 - DNA, 15 bp, Homo sapiens
taacagggacactca

SEQ ID NO: 166920 - DNA, 15 bp, Homo sapiens
gtaacagggacactc

SEQ ID NO: 166921 - DNA, 15 bp, Homo sapiens
ggtaacagggacact

SEQ ID NO: 166922 - DNA, 15 bp, Homo sapiens
aggtaacagggacac

SEQ ID NO: 166923 - DNA, 15 bp, Homo sapiens
aaggtaacagggaca

SEQ ID NO: 166924 - DNA, 15 bp, Homo sapiens
taaggtaacagggac

SEQ ID NO: 166925 - DNA, 15 bp, Homo sapiens
ataaggtaacaggga

SEQ ID NO: 166926 - DNA, 15 bp, Homo sapiens
gataaggtaacaggg

SEQ ID NO: 166927 - DNA, 15 bp, Homo sapiens
ggataaggtaacagg

SEQ ID NO: 166928 - DNA, 15 bp, Homo sapiens
gggataaggtaacag

SEQ ID NO: 166929 - DNA, 15 bp, Homo sapiens
agggataaggtaaca

SEQ ID NO: 166930 - DNA, 15 bp, Homo sapiens
aagggataaggtaac

SEQ ID NO: 166931 - DNA, 15 bp, Homo sapiens
gaagggataaggtaa

SEQ ID NO: 166932 - DNA, 15 bp, Homo sapiens
agaagggataaggta

SEQ ID NO: 166933 - DNA, 15 bp, Homo sapiens
gagaagggataaggt

SEQ ID NO: 166934 - DNA, 15 bp, Homo sapiens
agagaagggataagg

SEQ ID NO: 166935 - DNA, 15 bp, Homo sapiens
cagagaagggataag

SEQ ID NO: 166936 - DNA, 15 bp, Homo sapiens
tcagagaagggataa

SEQ ID NO: 166937 - DNA, 15 bp, Homo sapiens
ttcagagaagggata

SEQ ID NO: 166938 - DNA, 15 bp, Homo sapiens
tttcagagaagggat

SEQ ID NO: 166939 - DNA, 15 bp, Homo sapiens
gtttcagagaaggga

SEQ ID NO: 166940 - DNA, 15 bp, Homo sapiens
ggtttcagagaaggg

SEQ ID NO: 166941 - DNA, 15 bp, Homo sapiens
gggtttcagagaagg

SEQ ID NO: 166942 - DNA, 15 bp, Homo sapiens
agggtttcagagaag

SEQ ID NO: 166943 - DNA, 15 bp, Homo sapiens
gagggtttcagagaa

SEQ ID NO: 166944 - DNA, 15 bp, Homo sapiens
agagggtttcagaga

SEQ ID NO: 166945 - DNA, 15 bp, Homo sapiens
cagagggtttcagag

SEQ ID NO: 166946 - DNA, 15 bp, Homo sapiens
ccagagggtttcaga

SEQ ID NO: 166947 - DNA, 15 bp, Homo sapiens
cccagagggtttcag

SEQ ID NO: 166948 - DNA, 15 bp, Homo sapiens
acccagagggtttca

SEQ ID NO: 166949 - DNA, 15 bp, Homo sapiens
aacccagagggtttc

SEQ ID NO: 166950 - DNA, 15 bp, Homo sapiens
aaacccagagggttt

SEQ ID NO: 166951 - DNA, 15 bp, Homo sapiens
gaaacccagagggtt

SEQ ID NO: 166952 - DNA, 15 bp, Homo sapiens
ggaaacccagagggt

SEQ ID NO: 166953 - DNA, 15 bp, Homo sapiens
gggaaacccagaggg

SEQ ID NO: 166954 - DNA, 15 bp, Homo sapiens
ggggaaacccagagg

SEQ ID NO: 166955 - DNA, 15 bp, Homo sapiens
aggggaaacccagag

SEQ ID NO: 166956 - DNA, 15 bp, Homo sapiens
aaggggaaacccaga

SEQ ID NO: 166957 - DNA, 15 bp, Homo sapiens
caaggggaaacccag

SEQ ID NO: 166958 - DNA, 15 bp, Homo sapiens
tcaaggggaaaccca

SEQ ID NO: 166959 - DNA, 15 bp, Homo sapiens
ttcaaggggaaaccc

SEQ ID NO: 166960 - DNA, 15 bp, Homo sapiens
cttcaaggggaaacc

SEQ ID NO: 166961 - DNA, 15 bp, Homo sapiens
gcttcaaggggaaac

SEQ ID NO: 166962 - DNA, 15 bp, Homo sapiens
tgcttcaaggggaaa

SEQ ID NO: 166963 - DNA, 15 bp, Homo sapiens
ctgcttcaaggggaa

SEQ ID NO: 166964 - DNA, 15 bp, Homo sapiens
gctgcttcaagggga

SEQ ID NO: 166965 - DNA, 15 bp, Homo sapiens
ggctgcttcaagggg

SEQ ID NO: 166966 - DNA, 15 bp, Homo sapiens
gggctgcttcaaggg

SEQ ID NO: 166967 - DNA, 15 bp, Homo sapiens
ggggctgcttcaagg

SEQ ID NO: 166968 - DNA, 15 bp, Homo sapiens
aggggctgcttcaag

SEQ ID NO: 166969 - DNA, 15 bp, Homo sapiens
taggggctgcttcaa

SEQ ID NO: 166970 - DNA, 15 bp, Homo sapiens
ttaggggctgcttca

SEQ ID NO: 166971 - DNA, 15 bp, Homo sapiens
tttaggggctgcttc

SEQ ID NO: 166972 - DNA, 15 bp, Homo sapiens
ttttaggggctgctt

SEQ ID NO: 166973 - DNA, 15 bp, Homo sapiens
attttaggggctgct

SEQ ID NO: 166974 - DNA, 15 bp, Homo sapiens
cattttaggggctgc

SEQ ID NO: 166975 - DNA, 15 bp, Homo sapiens
ccattttaggggctg

SEQ ID NO: 166976 - DNA, 15 bp, Homo sapiens
gccattttaggggct

SEQ ID NO: 166977 - DNA, 15 bp, Homo sapiens
agccattttaggggc

SEQ ID NO: 166978 - DNA, 15 bp, Homo sapiens
gagccattttagggg

SEQ ID NO: 166979 - DNA, 15 bp, Homo sapiens
tgagccattttaggg

SEQ ID NO: 166980 - DNA, 15 bp, Homo sapiens
ctgagccattttagg

SEQ ID NO: 166981 - DNA, 15 bp, Homo sapiens
actgagccattttag

SEQ ID NO: 166982 - DNA, 15 bp, Homo sapiens
aactgagccatttta

SEQ ID NO: 166983 - DNA, 15 bp, Homo sapiens
aaactgagccatttt

SEQ ID NO: 166984 - DNA, 15 bp, Homo sapiens
gaaactgagccattt

SEQ ID NO: 166985 - DNA, 15 bp, Homo sapiens
ggaaactgagccatt

SEQ ID NO: 166986 - DNA, 15 bp, Homo sapiens
tggaaactgagccat

SEQ ID NO: 166987 - DNA, 15 bp, Homo sapiens
ctggaaactgagcca

SEQ ID NO: 166988 - DNA, 15 bp, Homo sapiens
gctggaaactgagcc

SEQ ID NO: 166989 - DNA, 15 bp, Homo sapiens
tgctggaaactgagc

SEQ ID NO: 166990 - DNA, 15 bp, Homo sapiens
atgctggaaactgag

SEQ ID NO: 166991 - DNA, 15 bp, Homo sapiens
tatgctggaaactga

SEQ ID NO: 166992 - DNA, 15 bp, Homo sapiens
ctatgctggaaactg

SEQ ID NO: 166993 - DNA, 15 bp, Homo sapiens
gctatgctggaaact

SEQ ID NO: 166994 - DNA, 15 bp, Homo sapiens
tgctatgctggaaac

SEQ ID NO: 166995 - DNA, 15 bp, Homo sapiens
ctgctatgctggaaa

SEQ ID NO: 166996 - DNA, 15 bp, Homo sapiens
cctgctatgctggaa

SEQ ID NO: 166997 - DNA, 15 bp, Homo sapiens
tcctgctatgctgga

SEQ ID NO: 166998 - DNA, 15 bp, Homo sapiens
ctcctgctatgctgg

SEQ ID NO: 166999 - DNA, 15 bp, Homo sapiens
cctcctgctatgctg

SEQ ID NO: 167000 - DNA, 15 bp, Homo sapiens
acctcctgctatgct

SEQ ID NO: 167001 - DNA, 15 bp, Homo sapiens
gacctcctgctatgc

SEQ ID NO: 167002 - DNA, 15 bp, Homo sapiens
agacctcctgctatg

SEQ ID NO: 167003 - DNA, 15 bp, Homo sapiens
gagacctcctgctat

SEQ ID NO: 167004 - DNA, 15 bp, Homo sapiens
ggagacctcctgcta

SEQ ID NO: 167005 - DNA, 15 bp, Homo sapiens
tggagacctcctgct

SEQ ID NO: 167006 - DNA, 15 bp, Homo sapiens
ctggagacctcctgc

SEQ ID NO: 167007 - DNA, 15 bp, Homo sapiens
gctggagacctcctg

SEQ ID NO: 167008 - DNA, 15 bp, Homo sapiens
ggctggagacctcct

SEQ ID NO: 167009 - DNA, 15 bp, Homo sapiens
aggctggagacctcc

SEQ ID NO: 167010 - DNA, 15 bp, Homo sapiens
taggctggagacctc

SEQ ID NO: 167011 - DNA, 15 bp, Homo sapiens
ctaggctggagacct

SEQ ID NO: 167012 - DNA, 15 bp, Homo sapiens
gctaggctggagacc

SEQ ID NO: 167013 - DNA, 15 bp, Homo sapiens
ggctaggctggagac

SEQ ID NO: 167014 - DNA, 15 bp, Homo sapiens
tggctaggctggaga

SEQ ID NO: 167015 - DNA, 15 bp, Homo sapiens
ttggctaggctggag

SEQ ID NO: 167016 - DNA, 15 bp, Homo sapiens
attggctaggctgga

SEQ ID NO: 167017 - DNA, 15 bp, Homo sapiens
cattggctaggctgg

SEQ ID NO: 167018 - DNA, 15 bp, Homo sapiens
ccattggctaggctg

SEQ ID NO: 167019 - DNA, 15 bp, Homo sapiens
accattggctaggct

SEQ ID NO: 167020 - DNA, 15 bp, Homo sapiens
caccattggctaggc

SEQ ID NO: 167021 - DNA, 15 bp, Homo sapiens
gcaccattggctagg

SEQ ID NO: 167022 - DNA, 15 bp, Homo sapiens
ggcaccattggctag

SEQ ID NO: 167023 - DNA, 15 bp, Homo sapiens
gggcaccattggcta

SEQ ID NO: 167024 - DNA, 15 bp, Homo sapiens
ggggcaccattggct

SEQ ID NO: 167025 - DNA, 15 bp, Homo sapiens
aggggcaccattggc

SEQ ID NO: 167026 - DNA, 15 bp, Homo sapiens
aaggggcaccattgg

SEQ ID NO: 167027 - DNA, 15 bp, Homo sapiens
caaggggcaccattg

SEQ ID NO: 167028 - DNA, 15 bp, Homo sapiens
acaaggggcaccatt

SEQ ID NO: 167029 - DNA, 15 bp, Homo sapiens
cacaaggggcaccat

SEQ ID NO: 167030 - DNA, 15 bp, Homo sapiens
tcacaaggggcacca

SEQ ID NO: 167031 - DNA, 15 bp, Homo sapiens
ttcacaaggggcacc

SEQ ID NO: 167032 - DNA, 15 bp, Homo sapiens
cttcacaaggggcac

SEQ ID NO: 167033 - DNA, 15 bp, Homo sapiens
ccttcacaaggggca

SEQ ID NO: 167034 - DNA, 15 bp, Homo sapiens
accttcacaaggggc

SEQ ID NO: 167035 - DNA, 15 bp, Homo sapiens
gaccttcacaagggg

SEQ ID NO: 167036 - DNA, 15 bp, Homo sapiens
tgaccttcacaaggg

SEQ ID NO: 167037 - DNA, 15 bp, Homo sapiens
atgaccttcacaagg

SEQ ID NO: 167038 - DNA, 15 bp, Homo sapiens
catgaccttcacaag

SEQ ID NO: 167039 - DNA, 15 bp, Homo sapiens
ccatgaccttcacaa

SEQ ID NO: 167040 - DNA, 15 bp, Homo sapiens
tccatgaccttcaca

SEQ ID NO: 167041 - DNA, 15 bp, Homo sapiens
gtccatgaccttcac

SEQ ID NO: 167042 - DNA, 15 bp, Homo sapiens
ggtccatgaccttca

SEQ ID NO: 167043 - DNA, 15 bp, Homo sapiens
aggtccatgaccttc

SEQ ID NO: 167044 - DNA, 15 bp, Homo sapiens
caggtccatgacctt

SEQ ID NO: 167045 - DNA, 15 bp, Homo sapiens
gcaggtccatgacct

SEQ ID NO: 167046 - DNA, 15 bp, Homo sapiens
ggcaggtccatgacc

SEQ ID NO: 167047 - DNA, 15 bp, Homo sapiens
aggcaggtccatgac

SEQ ID NO: 167048 - DNA, 15 bp, Homo sapiens
aaggcaggtccatga

SEQ ID NO: 167049 - DNA, 15 bp, Homo sapiens
taaggcaggtccatg

SEQ ID NO: 167050 - DNA, 15 bp, Homo sapiens
gtaaggcaggtccat

SEQ ID NO: 167051 - DNA, 15 bp, Homo sapiens
ggtaaggcaggtcca

SEQ ID NO: 167052 - DNA, 15 bp, Homo sapiens
gggtaaggcaggtcc

SEQ ID NO: 167053 - DNA, 15 bp, Homo sapiens
tgggtaaggcaggtc

SEQ ID NO: 167054 - DNA, 15 bp, Homo sapiens
atgggtaaggcaggt

SEQ ID NO: 167055 - DNA, 15 bp, Homo sapiens
aatgggtaaggcagg

SEQ ID NO: 167056 - DNA, 15 bp, Homo sapiens
caatgggtaaggcag

SEQ ID NO: 167057 - DNA, 15 bp, Homo sapiens
acaatgggtaaggca

SEQ ID NO: 167058 - DNA, 15 bp, Homo sapiens
aacaatgggtaaggc

SEQ ID NO: 167059 - DNA, 15 bp, Homo sapiens
taacaatgggtaagg

SEQ ID NO: 167060 - DNA, 15 bp, Homo sapiens
ttaacaatgggtaag

SEQ ID NO: 167061 - DNA, 15 bp, Homo sapiens
tttaacaatgggtaa

SEQ ID NO: 167062 - DNA, 15 bp, Homo sapiens
atttaacaatgggta

SEQ ID NO: 167063 - DNA, 15 bp, Homo sapiens
catttaacaatgggt

SEQ ID NO: 167064 - DNA, 15 bp, Homo sapiens
acatttaacaatggg

SEQ ID NO: 167065 - DNA, 15 bp, Homo sapiens
aacatttaacaatgg

SEQ ID NO: 167066 - DNA, 15 bp, Homo sapiens
aaacatttaacaatg

SEQ ID NO: 167067 - DNA, 15 bp, Homo sapiens
aaaacatttaacaat

SEQ ID NO: 167068 - DNA, 15 bp, Homo sapiens
gaaaacatttaacaa

SEQ ID NO: 167069 - DNA, 15 bp, Homo sapiens
ggaaaacatttaaca

SEQ ID NO: 167070 - DNA, 15 bp, Homo sapiens
tggaaaacatttaac

SEQ ID NO: 167071 - DNA, 15 bp, Homo sapiens
atggaaaacatttaa

SEQ ID NO: 167072 - DNA, 15 bp, Homo sapiens
gatggaaaacattta

SEQ ID NO: 167073 - DNA, 15 bp, Homo sapiens
ggatggaaaacattt

SEQ ID NO: 167074 - DNA, 15 bp, Homo sapiens
gggatggaaaacatt

SEQ ID NO: 167075 - DNA, 15 bp, Homo sapiens
agggatggaaaacat

SEQ ID NO: 167076 - DNA, 15 bp, Homo sapiens
gagggatggaaaaca

SEQ ID NO: 167077 - DNA, 15 bp, Homo sapiens
agagggatggaaaac

SEQ ID NO: 167078 - DNA, 15 bp, Homo sapiens
cagagggatggaaaa

SEQ ID NO: 167079 - DNA, 15 bp, Homo sapiens
ccagagggatggaaa

SEQ ID NO: 167080 - DNA, 15 bp, Homo sapiens
accagagggatggaa

SEQ ID NO: 167081 - DNA, 15 bp, Homo sapiens
caccagagggatgga

SEQ ID NO: 167082 - DNA, 15 bp, Homo sapiens
acaccagagggatgg

SEQ ID NO: 167083 - DNA, 15 bp, Homo sapiens
tacaccagagggatg

SEQ ID NO: 167084 - DNA, 15 bp, Homo sapiens
gtacaccagagggat

SEQ ID NO: 167085 - DNA, 15 bp, Homo sapiens
cgtacaccagaggga

SEQ ID NO: 167086 - DNA, 15 bp, Homo sapiens
acgtacaccagaggg

SEQ ID NO: 167087 - DNA, 15 bp, Homo sapiens
cacgtacaccagagg

SEQ ID NO: 167088 - DNA, 15 bp, Homo sapiens
ccacgtacaccagag

SEQ ID NO: 167089 - DNA, 15 bp, Homo sapiens
tccacgtacaccaga

SEQ ID NO: 167090 - DNA, 15 bp, Homo sapiens
ctccacgtacaccag

SEQ ID NO: 167091 - DNA, 15 bp, Homo sapiens
tctccacgtacacca

SEQ ID NO: 167092 - DNA, 15 bp, Homo sapiens
ctctccacgtacacc

SEQ ID NO: 167093 - DNA, 15 bp, Homo sapiens
gctctccacgtacac

SEQ ID NO: 167094 - DNA, 15 bp, Homo sapiens
agctctccacgtaca

SEQ ID NO: 167095 - DNA, 15 bp, Homo sapiens
aagctctccacgtac

SEQ ID NO: 167096 - DNA, 15 bp, Homo sapiens
gaagctctccacgta

SEQ ID NO: 167097 - DNA, 15 bp, Homo sapiens
agaagctctccacgt

SEQ ID NO: 167098 - DNA, 15 bp, Homo sapiens
cagaagctctccacg

SEQ ID NO: 167099 - DNA, 15 bp, Homo sapiens
ccagaagctctccac

SEQ ID NO: 167100 - DNA, 15 bp, Homo sapiens
cccagaagctctcca

SEQ ID NO: 167101 - DNA, 15 bp, Homo sapiens
acccagaagctctcc

SEQ ID NO: 167102 - DNA, 15 bp, Homo sapiens
cacccagaagctctc

SEQ ID NO: 167103 - DNA, 15 bp, Homo sapiens
ccacccagaagctct

SEQ ID NO: 167104 - DNA, 15 bp, Homo sapiens
tccacccagaagctc

SEQ ID NO: 167105 - DNA, 15 bp, Homo sapiens
ctccacccagaagct

SEQ ID NO: 167106 - DNA, 15 bp, Homo sapiens
actccacccagaagc

SEQ ID NO: 167107 - DNA, 15 bp, Homo sapiens
cactccacccagaag

SEQ ID NO: 167108 - DNA, 15 bp, Homo sapiens
ccactccacccagaa

SEQ ID NO: 167109 - DNA, 15 bp, Homo sapiens
tccactccacccaga

SEQ ID NO: 167110 - DNA, 15 bp, Homo sapiens
gtccactccacccag

SEQ ID NO: 167111 - DNA, 15 bp, Homo sapiens
tgtccactccaccca

SEQ ID NO: 167112 - DNA, 15 bp, Homo sapiens
gtgtccactccaccc

SEQ ID NO: 167113 - DNA, 15 bp, Homo sapiens
tgtgtccactccacc

SEQ ID NO: 167114 - DNA, 15 bp, Homo sapiens
ttgtgtccactccac

SEQ ID NO: 167115 - DNA, 15 bp, Homo sapiens
tttgtgtccactcca

SEQ ID NO: 167116 - DNA, 15 bp, Homo sapiens
atttgtgtccactcc

SEQ ID NO: 167117 - DNA, 15 bp, Homo sapiens
catttgtgtccactc

SEQ ID NO: 167118 - DNA, 15 bp, Homo sapiens
tcatttgtgtccact

SEQ ID NO: 167119 - DNA, 15 bp, Homo sapiens
atcatttgtgtccac

SEQ ID NO: 167120 - DNA, 15 bp, Homo sapiens
aatcatttgtgtcca

SEQ ID NO: 167121 - DNA, 15 bp, Homo sapiens
aaatcatttgtgtcc

SEQ ID NO: 167122 - DNA, 15 bp, Homo sapiens
taaatcatttgtgtc

SEQ ID NO: 167123 - DNA, 15 bp, Homo sapiens
ttaaatcatttgtgt

SEQ ID NO: 167124 - DNA, 15 bp, Homo sapiens
gttaaatcatttgtg

SEQ ID NO: 167125 - DNA, 15 bp, Homo sapiens
agttaaatcatttgt

SEQ ID NO: 167126 - DNA, 15 bp, Homo sapiens
aagttaaatcatttg

SEQ ID NO: 167127 - DNA, 15 bp, Homo sapiens
aaagttaaatcattt

SEQ ID NO: 167128 - DNA, 15 bp, Homo sapiens
gaaagttaaatcatt

SEQ ID NO: 167129 - DNA, 15 bp, Homo sapiens
ggaaagttaaatcat

SEQ ID NO: 167130 - DNA, 15 bp, Homo sapiens
gggaaagttaaatca

SEQ ID NO: 167131 - DNA, 15 bp, Homo sapiens
cgggaaagttaaatc

SEQ ID NO: 167132 - DNA, 15 bp, Homo sapiens
tcgggaaagttaaat

SEQ ID NO: 167133 - DNA, 15 bp, Homo sapiens
ctcgggaaagttaaa

SEQ ID NO: 167134 - DNA, 15 bp, Homo sapiens
actcgggaaagttaa

SEQ ID NO: 167135 - DNA, 15 bp, Homo sapiens
gactcgggaaagtta

SEQ ID NO: 167136 - DNA, 15 bp, Homo sapiens
agactcgggaaagtt

SEQ ID NO: 167137 - DNA, 15 bp, Homo sapiens
gagactcgggaaagt

SEQ ID NO: 167138 - DNA, 15 bp, Homo sapiens
agagactcgggaaag

SEQ ID NO: 167139 - DNA, 15 bp, Homo sapiens
cagagactcgggaaa

SEQ ID NO: 167140 - DNA, 15 bp, Homo sapiens
gcagagactcgggaa

SEQ ID NO: 167141 - DNA, 15 bp, Homo sapiens
agcagagactcggga

SEQ ID NO: 167142 - DNA, 15 bp, Homo sapiens
aagcagagactcggg

SEQ ID NO: 167143 - DNA, 15 bp, Homo sapiens
gaagcagagactcgg

SEQ ID NO: 167144 - DNA, 15 bp, Homo sapiens
agaagcagagactcg

SEQ ID NO: 167145 - DNA, 15 bp, Homo sapiens
cagaagcagagactc

SEQ ID NO: 167146 - DNA, 15 bp, Homo sapiens
gcagaagcagagact

SEQ ID NO: 167147 - DNA, 15 bp, Homo sapiens
cgcagaagcagagac

SEQ ID NO: 167148 - DNA, 15 bp, Homo sapiens
gcgcagaagcagaga

SEQ ID NO: 167149 - DNA, 15 bp, Homo sapiens
ggcgcagaagcagag

SEQ ID NO: 167150 - DNA, 15 bp, Homo sapiens
tggcgcagaagcaga

SEQ ID NO: 167151 - DNA, 15 bp, Homo sapiens
ctggcgcagaagcag

SEQ ID NO: 167152 - DNA, 15 bp, Homo sapiens
tctggcgcagaagca

SEQ ID NO: 167153 - DNA, 15 bp, Homo sapiens
ttctggcgcagaagc

SEQ ID NO: 167154 - DNA, 15 bp, Homo sapiens
tttctggcgcagaag

SEQ ID NO: 167155 - DNA, 15 bp, Homo sapiens
ctttctggcgcagaa

SEQ ID NO: 167156 - DNA, 15 bp, Homo sapiens
actttctggcgcaga

SEQ ID NO: 167157 - DNA, 15 bp, Homo sapiens
cactttctggcgcag

SEQ ID NO: 167158 - DNA, 15 bp, Homo sapiens
ccactttctggcgca

SEQ ID NO: 167159 - DNA, 15 bp, Homo sapiens
tccactttctggcgc

SEQ ID NO: 167160 - DNA, 15 bp, Homo sapiens
ttccactttctggcg

SEQ ID NO: 167161 - DNA, 15 bp, Homo sapiens
cttccactttctggc

SEQ ID NO: 167162 - DNA, 15 bp, Homo sapiens
ccttccactttctgg

SEQ ID NO: 167163 - DNA, 15 bp, Homo sapiens
tccttccactttctg

SEQ ID NO: 167164 - DNA, 15 bp, Homo sapiens
ttccttccactttct

SEQ ID NO: 167165 - DNA, 15 bp, Homo sapiens
attccttccactttc

SEQ ID NO: 167166 - DNA, 15 bp, Homo sapiens
gattccttccacttt

SEQ ID NO: 167167 - DNA, 15 bp, Homo sapiens
tgattccttccactt

SEQ ID NO: 167168 - DNA, 15 bp, Homo sapiens
atgattccttccact

SEQ ID NO: 167169 - DNA, 15 bp, Homo sapiens
tatgattccttccac

SEQ ID NO: 167170 - DNA, 15 bp, Homo sapiens
ttatgattccttcca

SEQ ID NO: 167171 - DNA, 15 bp, Homo sapiens
gttatgattccttcc

SEQ ID NO: 167172 - DNA, 15 bp, Homo sapiens
ggttatgattccttc

SEQ ID NO: 167173 - DNA, 15 bp, Homo sapiens
tggttatgattcctt

SEQ ID NO: 167174 - DNA, 15 bp, Homo sapiens
ctggttatgattcct

SEQ ID NO: 167175 - DNA, 15 bp, Homo sapiens
actggttatgattcc

SEQ ID NO: 167176 - DNA, 15 bp, Homo sapiens
cactggttatgattc

SEQ ID NO: 167177 - DNA, 15 bp, Homo sapiens
acactggttatgatt

SEQ ID NO: 167178 - DNA, 15 bp, Homo sapiens
tacactggttatgat

SEQ ID NO: 167179 - DNA, 15 bp, Homo sapiens
ctacactggttatga

SEQ ID NO: 167180 - DNA, 15 bp, Homo sapiens
actacactggttatg

SEQ ID NO: 167181 - DNA, 15 bp, Homo sapiens
cactacactggttat

SEQ ID NO: 167182 - DNA, 15 bp, Homo sapiens
ccactacactggtta

SEQ ID NO: 167183 - DNA, 15 bp, Homo sapiens
tccactacactggtt

SEQ ID NO: 167184 - DNA, 15 bp, Homo sapiens
ctccactacactggt

SEQ ID NO: 167185 - DNA, 15 bp, Homo sapiens
cctccactacactgg

SEQ ID NO: 167186 - DNA, 15 bp, Homo sapiens
acctccactacactg

SEQ ID NO: 167187 - DNA, 15 bp, Homo sapiens
tacctccactacact

SEQ ID NO: 167188 - DNA, 15 bp, Homo sapiens
ttacctccactacac

SEQ ID NO: 167189 - DNA, 15 bp, Homo sapiens
attacctccactaca

SEQ ID NO: 167190 - DNA, 15 bp, Homo sapiens
aattacctccactac

SEQ ID NO: 167191 - DNA, 15 bp, Homo sapiens
taattacctccacta

SEQ ID NO: 167192 - DNA, 15 bp, Homo sapiens
ctaattacctccact

SEQ ID NO: 167193 - DNA, 15 bp, Homo sapiens
cctaattacctccac

SEQ ID NO: 167194 - DNA, 15 bp, Homo sapiens
tcctaattacctcca

SEQ ID NO: 167195 - DNA, 15 bp, Homo sapiens
ctcctaattacctcc

SEQ ID NO: 167196 - DNA, 15 bp, Homo sapiens
cctcctaattacctc

SEQ ID NO: 167197 - DNA, 15 bp, Homo sapiens
ccctcctaattacct

SEQ ID NO: 167198 - DNA, 15 bp, Homo sapiens
accctcctaattacc

SEQ ID NO: 167199 - DNA, 15 bp, Homo sapiens
gaccctcctaattac

SEQ ID NO: 167200 - DNA, 15 bp, Homo sapiens
ggaccctcctaatta

SEQ ID NO: 167201 - DNA, 15 bp, Homo sapiens
tggaccctcctaatt

SEQ ID NO: 167202 - DNA, 15 bp, Homo sapiens
ttggaccctcctaat

SEQ ID NO: 167203 - DNA, 15 bp, Homo sapiens
tttggaccctcctaa

SEQ ID NO: 167204 - DNA, 15 bp, Homo sapiens
ctttggaccctccta

SEQ ID NO: 167205 - DNA, 15 bp, Homo sapiens
gctttggaccctcct

SEQ ID NO: 167206 - DNA, 15 bp, Homo sapiens
agctttggaccctcc

SEQ ID NO: 167207 - DNA, 15 bp, Homo sapiens
aagctttggaccctc

SEQ ID NO: 167208 - DNA, 15 bp, Homo sapiens
caagctttggaccct

SEQ ID NO: 167209 - DNA, 15 bp, Homo sapiens
ccaagctttggaccc

SEQ ID NO: 167210 - DNA, 15 bp, Homo sapiens
tccaagctttggacc

SEQ ID NO: 167211 - DNA, 15 bp, Homo sapiens
gtccaagctttggac

SEQ ID NO: 167212 - DNA, 15 bp, Homo sapiens
ggtccaagctttgga

SEQ ID NO: 167213 - DNA, 15 bp, Homo sapiens
tggtccaagctttgg

SEQ ID NO: 167214 - DNA, 15 bp, Homo sapiens
atggtccaagctttg

SEQ ID NO: 167215 - DNA, 15 bp, Homo sapiens
gatggtccaagcttt

SEQ ID NO: 167216 - DNA, 15 bp, Homo sapiens
agatggtccaagctt

SEQ ID NO: 167217 - DNA, 15 bp, Homo sapiens
cagatggtccaagct

SEQ ID NO: 167218 - DNA, 15 bp, Homo sapiens
ccagatggtccaagc

SEQ ID NO: 167219 - DNA, 15 bp, Homo sapiens
cccagatggtccaag

SEQ ID NO: 167220 - DNA, 15 bp, Homo sapiens
acccagatggtccaa

SEQ ID NO: 167221 - DNA, 15 bp, Homo sapiens
aacccagatggtcca

SEQ ID NO: 167222 - DNA, 15 bp, Homo sapiens
gaacccagatggtcc

SEQ ID NO: 167223 - DNA, 15 bp, Homo sapiens
tgaacccagatggtc

SEQ ID NO: 167224 - DNA, 15 bp, Homo sapiens
ttgaacccagatggt

SEQ ID NO: 167225 - DNA, 15 bp, Homo sapiens
tttgaacccagatgg

SEQ ID NO: 167226 - DNA, 15 bp, Homo sapiens
gtttgaacccagatg

SEQ ID NO: 167227 - DNA, 15 bp, Homo sapiens
ggtttgaacccagat

SEQ ID NO: 167228 - DNA, 15 bp, Homo sapiens
gggtttgaacccaga

SEQ ID NO: 167229 - DNA, 15 bp, Homo sapiens
agggtttgaacccag

SEQ ID NO: 167230 - DNA, 15 bp, Homo sapiens
cagggtttgaaccca

SEQ ID NO: 167231 - DNA, 15 bp, Homo sapiens
ccagggtttgaaccc

SEQ ID NO: 167232 - DNA, 15 bp, Homo sapiens
gccagggtttgaacc

SEQ ID NO: 167233 - DNA, 15 bp, Homo sapiens
ggccagggtttgaac

SEQ ID NO: 167234 - DNA, 15 bp, Homo sapiens
gggccagggtttgaa

SEQ ID NO: 167235 - DNA, 15 bp, Homo sapiens
ggggccagggtttga

SEQ ID NO: 167236 - DNA, 15 bp, Homo sapiens
tggggccagggtttg

SEQ ID NO: 167237 - DNA, 15 bp, Homo sapiens
gtggggccagggttt

SEQ ID NO: 167238 - DNA, 15 bp, Homo sapiens
ggtggggccagggtt

SEQ ID NO: 167239 - DNA, 15 bp, Homo sapiens
tggtggggccagggt

SEQ ID NO: 167240 - DNA, 15 bp, Homo sapiens
gtggtggggccaggg

SEQ ID NO: 167241 - DNA, 15 bp, Homo sapiens
agtggtggggccagg

SEQ ID NO: 167242 - DNA, 15 bp, Homo sapiens
aagtggtggggccag

SEQ ID NO: 167243 - DNA, 15 bp, Homo sapiens
taagtggtggggcca

SEQ ID NO: 167244 - DNA, 15 bp, Homo sapiens
ctaagtggtggggcc

SEQ ID NO: 167245 - DNA, 15 bp, Homo sapiens
actaagtggtggggc

SEQ ID NO: 167246 - DNA, 15 bp, Homo sapiens
tactaagtggtgggg

SEQ ID NO: 167247 - DNA, 15 bp, Homo sapiens
atactaagtggtggg

SEQ ID NO: 167248 - DNA, 15 bp, Homo sapiens
gatactaagtggtgg

SEQ ID NO: 167249 - DNA, 15 bp, Homo sapiens
agatactaagtggtg

SEQ ID NO: 167250 - DNA, 15 bp, Homo sapiens
tagatactaagtggt

SEQ ID NO: 167251 - DNA, 15 bp, Homo sapiens
atagatactaagtgg

SEQ ID NO: 167252 - DNA, 15 bp, Homo sapiens
catagatactaagtg

SEQ ID NO: 167253 - DNA, 15 bp, Homo sapiens
acatagatactaagt

SEQ ID NO: 167254 - DNA, 15 bp, Homo sapiens
cacatagatactaag

SEQ ID NO: 167255 - DNA, 15 bp, Homo sapiens
tcacatagatactaa

SEQ ID NO: 167256 - DNA, 15 bp, Homo sapiens
ctcacatagatacta

SEQ ID NO: 167257 - DNA, 15 bp, Homo sapiens
actcacatagatact

SEQ ID NO: 167258 - DNA, 15 bp, Homo sapiens
cactcacatagatac

SEQ ID NO: 167259 - DNA, 15 bp, Homo sapiens
acactcacatagata

SEQ ID NO: 167260 - DNA, 15 bp, Homo sapiens
cacactcacatagat

SEQ ID NO: 167261 - DNA, 15 bp, Homo sapiens
ccacactcacataga

SEQ ID NO: 167262 - DNA, 15 bp, Homo sapiens
cccacactcacatag

SEQ ID NO: 167263 - DNA, 15 bp, Homo sapiens
gcccacactcacata

SEQ ID NO: 167264 - DNA, 15 bp, Homo sapiens
tgcccacactcacat

SEQ ID NO: 167265 - DNA, 15 bp, Homo sapiens
atgcccacactcaca

SEQ ID NO: 167266 - DNA, 15 bp, Homo sapiens
catgcccacactcac

SEQ ID NO: 167267 - DNA, 15 bp, Homo sapiens
acatgcccacactca

SEQ ID NO: 167268 - DNA, 15 bp, Homo sapiens
gacatgcccacactc

SEQ ID NO: 167269 - DNA, 15 bp, Homo sapiens
tgacatgcccacact

SEQ ID NO: 167270 - DNA, 15 bp, Homo sapiens
ctgacatgcccacac

SEQ ID NO: 167271 - DNA, 15 bp, Homo sapiens
cctgacatgcccaca

SEQ ID NO: 167272 - DNA, 15 bp, Homo sapiens
acctgacatgcccac

SEQ ID NO: 167273 - DNA, 15 bp, Homo sapiens
tacctgacatgccca

SEQ ID NO: 167274 - DNA, 15 bp, Homo sapiens
ctacctgacatgccc

SEQ ID NO: 167275 - DNA, 15 bp, Homo sapiens
gctacctgacatgcc

SEQ ID NO: 167276 - DNA, 15 bp, Homo sapiens
ggctacctgacatgc

SEQ ID NO: 167277 - DNA, 15 bp, Homo sapiens
aggctacctgacatg

SEQ ID NO: 167278 - DNA, 15 bp, Homo sapiens
aaggctacctgacat

SEQ ID NO: 167279 - DNA, 15 bp, Homo sapiens
aaaggctacctgaca

SEQ ID NO: 167280 - DNA, 15 bp, Homo sapiens
gaaaggctacctgac

SEQ ID NO: 167281 - DNA, 15 bp, Homo sapiens
agaaaggctacctga

SEQ ID NO: 167282 - DNA, 15 bp, Homo sapiens
aagaaaggctacctg

SEQ ID NO: 167283 - DNA, 15 bp, Homo sapiens
taagaaaggctacct

SEQ ID NO: 167284 - DNA, 15 bp, Homo sapiens
gtaagaaaggctacc

SEQ ID NO: 167285 - DNA, 15 bp, Homo sapiens
ggtaagaaaggctac

SEQ ID NO: 167286 - DNA, 15 bp, Homo sapiens
aggtaagaaaggcta

SEQ ID NO: 167287 - DNA, 15 bp, Homo sapiens
gaggtaagaaaggct

SEQ ID NO: 167288 - DNA, 15 bp, Homo sapiens
tgaggtaagaaaggc

SEQ ID NO: 167289 - DNA, 15 bp, Homo sapiens
ttgaggtaagaaagg

SEQ ID NO: 167290 - DNA, 15 bp, Homo sapiens
attgaggtaagaaag

SEQ ID NO: 167291 - DNA, 15 bp, Homo sapiens
aattgaggtaagaaa

SEQ ID NO: 167292 - DNA, 15 bp, Homo sapiens
gaattgaggtaagaa

SEQ ID NO: 167293 - DNA, 15 bp, Homo sapiens
tgaattgaggtaaga

SEQ ID NO: 167294 - DNA, 15 bp, Homo sapiens
atgaattgaggtaag

SEQ ID NO: 167295 - DNA, 15 bp, Homo sapiens
tatgaattgaggtaa

SEQ ID NO: 167296 - DNA, 15 bp, Homo sapiens
ttatgaattgaggta

SEQ ID NO: 167297 - DNA, 15 bp, Homo sapiens
attatgaattgaggt

SEQ ID NO: 167298 - DNA, 15 bp, Homo sapiens
gattatgaattgagg

SEQ ID NO: 167299 - DNA, 15 bp, Homo sapiens
ggattatgaattgag

SEQ ID NO: 167300 - DNA, 15 bp, Homo sapiens
cggattatgaattga

SEQ ID NO: 167301 - DNA, 15 bp, Homo sapiens
gcggattatgaattg

SEQ ID NO: 167302 - DNA, 15 bp, Homo sapiens
tgcggattatgaatt

SEQ ID NO: 167303 - DNA, 15 bp, Homo sapiens
ttgcggattatgaat

SEQ ID NO: 167304 - DNA, 15 bp, Homo sapiens
tttgcggattatgaa

SEQ ID NO: 167305 - DNA, 15 bp, Homo sapiens
ctttgcggattatga

SEQ ID NO: 167306 - DNA, 15 bp, Homo sapiens
actttgcggattatg

SEQ ID NO: 167307 - DNA, 15 bp, Homo sapiens
cactttgcggattat

SEQ ID NO: 167308 - DNA, 15 bp, Homo sapiens
ccactttgcggatta

SEQ ID NO: 167309 - DNA, 15 bp, Homo sapiens
cccactttgcggatt

SEQ ID NO: 167310 - DNA, 15 bp, Homo sapiens
ccccactttgcggat

SEQ ID NO: 167311 - DNA, 15 bp, Homo sapiens
tccccactttgcgga

SEQ ID NO: 167312 - DNA, 15 bp, Homo sapiens
atccccactttgcgg

SEQ ID NO: 167313 - DNA, 15 bp, Homo sapiens
catccccactttgcg

SEQ ID NO: 167314 - DNA, 15 bp, Homo sapiens
tcatccccactttgc

SEQ ID NO: 167315 - DNA, 15 bp, Homo sapiens
ctcatccccactttg

SEQ ID NO: 167316 - DNA, 15 bp, Homo sapiens
tctcatccccacttt

SEQ ID NO: 167317 - DNA, 15 bp, Homo sapiens
ttctcatccccactt

SEQ ID NO: 167318 - DNA, 15 bp, Homo sapiens
attctcatccccact

SEQ ID NO: 167319 - DNA, 15 bp, Homo sapiens
tattctcatccccac

SEQ ID NO: 167320 - DNA, 15 bp, Homo sapiens
ctattctcatcccca

SEQ ID NO: 167321 - DNA, 15 bp, Homo sapiens
gctattctcatcccc

SEQ ID NO: 167322 - DNA, 15 bp, Homo sapiens
tgctattctcatccc

SEQ ID NO: 167323 - DNA, 15 bp, Homo sapiens
gtgctattctcatcc

SEQ ID NO: 167324 - DNA, 15 bp, Homo sapiens
ggtgctattctcatc

SEQ ID NO: 167325 - DNA, 15 bp, Homo sapiens
tggtgctattctcat

SEQ ID NO: 167326 - DNA, 15 bp, Homo sapiens
ttggtgctattctca

SEQ ID NO: 167327 - DNA, 15 bp, Homo sapiens
gttggtgctattctc

SEQ ID NO: 167328 - DNA, 15 bp, Homo sapiens
agttggtgctattct

SEQ ID NO: 167329 - DNA, 15 bp, Homo sapiens
cagttggtgctattc

SEQ ID NO: 167330 - DNA, 15 bp, Homo sapiens
acagttggtgctatt

SEQ ID NO: 167331 - DNA, 15 bp, Homo sapiens
tacagttggtgctat

SEQ ID NO: 167332 - DNA, 15 bp, Homo sapiens
atacagttggtgcta

SEQ ID NO: 167333 - DNA, 15 bp, Homo sapiens
gatacagttggtgct

SEQ ID NO: 167334 - DNA, 15 bp, Homo sapiens
tgatacagttggtgc

SEQ ID NO: 167335 - DNA, 15 bp, Homo sapiens
ttgatacagttggtg

SEQ ID NO: 167336 - DNA, 15 bp, Homo sapiens
cttgatacagttggt

SEQ ID NO: 167337 - DNA, 15 bp, Homo sapiens
gcttgatacagttgg

SEQ ID NO: 167338 - DNA, 15 bp, Homo sapiens
agcttgatacagttg

SEQ ID NO: 167339 - DNA, 15 bp, Homo sapiens
cagcttgatacagtt

SEQ ID NO: 167340 - DNA, 15 bp, Homo sapiens
tcagcttgatacagt

SEQ ID NO: 167341 - DNA, 15 bp, Homo sapiens
atcagcttgatacag

SEQ ID NO: 167342 - DNA, 15 bp, Homo sapiens
catcagcttgataca

SEQ ID NO: 167343 - DNA, 15 bp, Homo sapiens
tcatcagcttgatac

SEQ ID NO: 167344 - DNA, 15 bp, Homo sapiens
atcatcagcttgata

SEQ ID NO: 167345 - DNA, 15 bp, Homo sapiens
catcatcagcttgat

SEQ ID NO: 167346 - DNA, 15 bp, Homo sapiens
tcatcatcagcttga

SEQ ID NO: 167347 - DNA, 15 bp, Homo sapiens
ctcatcatcagcttg

SEQ ID NO: 167348 - DNA, 15 bp, Homo sapiens
tctcatcatcagctt

SEQ ID NO: 167349 - DNA, 15 bp, Homo sapiens
atctcatcatcagct

SEQ ID NO: 167350 - DNA, 15 bp, Homo sapiens
gatctcatcatcagc

SEQ ID NO: 167351 - DNA, 15 bp, Homo sapiens
tgatctcatcatcag

SEQ ID NO: 167352 - DNA, 15 bp, Homo sapiens
ttgatctcatcatca

SEQ ID NO: 167353 - DNA, 15 bp, Homo sapiens
tttgatctcatcatc

SEQ ID NO: 167354 - DNA, 15 bp, Homo sapiens
atttgatctcatcat

SEQ ID NO: 167355 - DNA, 15 bp, Homo sapiens
tatttgatctcatca

SEQ ID NO: 167356 - DNA, 15 bp, Homo sapiens
ttatttgatctcatc

SEQ ID NO: 167357 - DNA, 15 bp, Homo sapiens
gttatttgatctcat

SEQ ID NO: 167358 - DNA, 15 bp, Homo sapiens
tgttatttgatctca

SEQ ID NO: 167359 - DNA, 15 bp, Homo sapiens
gtgttatttgatctc

SEQ ID NO: 167360 - DNA, 15 bp, Homo sapiens
tgtgttatttgatct

SEQ ID NO: 167361 - DNA, 15 bp, Homo sapiens
gtgtgttatttgatc

SEQ ID NO: 167362 - DNA, 15 bp, Homo sapiens
tgtgtgttatttgat

SEQ ID NO: 167363 - DNA, 15 bp, Homo sapiens
ttgtgtgttatttga

SEQ ID NO: 167364 - DNA, 15 bp, Homo sapiens
tttgtgtgttatttg

SEQ ID NO: 167365 - DNA, 15 bp, Homo sapiens
ttttgtgtgttattt

SEQ ID NO: 167366 - DNA, 15 bp, Homo sapiens
attttgtgtgttatt

SEQ ID NO: 167367 - DNA, 15 bp, Homo sapiens
aattttgtgtgttat

SEQ ID NO: 167368 - DNA, 15 bp, Homo sapiens
gaattttgtgtgtta

SEQ ID NO: 167369 - DNA, 15 bp, Homo sapiens
agaattttgtgtgtt

SEQ ID NO: 167370 - DNA, 15 bp, Homo sapiens
aagaattttgtgtgt

SEQ ID NO: 167371 - DNA, 15 bp, Homo sapiens
taagaattttgtgtg

SEQ ID NO: 167372 - DNA, 15 bp, Homo sapiens
ctaagaattttgtgt

SEQ ID NO: 167373 - DNA, 15 bp, Homo sapiens
tctaagaattttgtg

SEQ ID NO: 167374 - DNA, 15 bp, Homo sapiens
ttctaagaattttgt

SEQ ID NO: 167375 - DNA, 15 bp, Homo sapiens
attctaagaattttg

SEQ ID NO: 167376 - DNA, 15 bp, Homo sapiens
tattctaagaatttt

SEQ ID NO: 167377 - DNA, 15 bp, Homo sapiens
ctattctaagaattt

SEQ ID NO: 167378 - DNA, 15 bp, Homo sapiens
tctattctaagaatt

SEQ ID NO: 167379 - DNA, 15 bp, Homo sapiens
ttctattctaagaat

SEQ ID NO: 167380 - DNA, 15 bp, Homo sapiens
attctattctaagaa

SEQ ID NO: 167381 - DNA, 15 bp, Homo sapiens
tattctattctaaga

SEQ ID NO: 167382 - DNA, 15 bp, Homo sapiens
ttattctattctaag

SEQ ID NO: 167383 - DNA, 15 bp, Homo sapiens
cttattctattctaa

SEQ ID NO: 167384 - DNA, 15 bp, Homo sapiens
gcttattctattcta

SEQ ID NO: 167385 - DNA, 15 bp, Homo sapiens
tgcttattctattct

SEQ ID NO: 167386 - DNA, 15 bp, Homo sapiens
gtgcttattctattc

SEQ ID NO: 167387 - DNA, 15 bp, Homo sapiens
agtgcttattctatt

SEQ ID NO: 167388 - DNA, 15 bp, Homo sapiens
cagtgcttattctat

SEQ ID NO: 167389 - DNA, 15 bp, Homo sapiens
acagtgcttattcta

SEQ ID NO: 167390 - DNA, 15 bp, Homo sapiens
tacagtgcttattct

SEQ ID NO: 167391 - DNA, 15 bp, Homo sapiens
ctacagtgcttattc

SEQ ID NO: 167392 - DNA, 15 bp, Homo sapiens
tctacagtgcttatt

SEQ ID NO: 167393 - DNA, 15 bp, Homo sapiens
ttctacagtgcttat

SEQ ID NO: 167394 - DNA, 15 bp, Homo sapiens
cttctacagtgctta

SEQ ID NO: 167395 - DNA, 15 bp, Homo sapiens
acttctacagtgctt

SEQ ID NO: 167396 - DNA, 15 bp, Homo sapiens
cacttctacagtgct

SEQ ID NO: 167397 - DNA, 15 bp, Homo sapiens
tcacttctacagtgc

SEQ ID NO: 167398 - DNA, 15 bp, Homo sapiens
atcacttctacagtg

SEQ ID NO: 167399 - DNA, 15 bp, Homo sapiens
tatcacttctacagt

SEQ ID NO: 167400 - DNA, 15 bp, Homo sapiens
ctatcacttctacag

SEQ ID NO: 167401 - DNA, 15 bp, Homo sapiens
gctatcacttctaca

SEQ ID NO: 167402 - DNA, 15 bp, Homo sapiens
agctatcacttctac

SEQ ID NO: 167403 - DNA, 15 bp, Homo sapiens
gagctatcacttcta

SEQ ID NO: 167404 - DNA, 15 bp, Homo sapiens
agagctatcacttct

SEQ ID NO: 167405 - DNA, 15 bp, Homo sapiens
cagagctatcacttc

SEQ ID NO: 167406 - DNA, 15 bp, Homo sapiens
acagagctatcactt

SEQ ID NO: 167407 - DNA, 15 bp, Homo sapiens
cacagagctatcact

SEQ ID NO: 167408 - DNA, 15 bp, Homo sapiens
acacagagctatcac

SEQ ID NO: 167409 - DNA, 15 bp, Homo sapiens
tacacagagctatca

SEQ ID NO: 167410 - DNA, 15 bp, Homo sapiens
atacacagagctatc

SEQ ID NO: 167411 - DNA, 15 bp, Homo sapiens
catacacagagctat

SEQ ID NO: 167412 - DNA, 15 bp, Homo sapiens
acatacacagagcta

SEQ ID NO: 167413 - DNA, 15 bp, Homo sapiens
gacatacacagagct

SEQ ID NO: 167414 - DNA, 15 bp, Homo sapiens
tgacatacacagagc

SEQ ID NO: 167415 - DNA, 15 bp, Homo sapiens
atgacatacacagag

SEQ ID NO: 167416 - DNA, 15 bp, Homo sapiens
aatgacatacacaga

SEQ ID NO: 167417 - DNA, 15 bp, Homo sapiens
taatgacatacacag

SEQ ID NO: 167418 - DNA, 15 bp, Homo sapiens
ttaatgacatacaca

SEQ ID NO: 167419 - DNA, 15 bp, Homo sapiens
attaatgacatacac

SEQ ID NO: 167420 - DNA, 15 bp, Homo sapiens
tattaatgacataca

SEQ ID NO: 167421 - DNA, 15 bp, Homo sapiens
gtattaatgacatac

SEQ ID NO: 167422 - DNA, 15 bp, Homo sapiens
tgtattaatgacata

SEQ ID NO: 167423 - DNA, 15 bp, Homo sapiens
atgtattaatgacat

SEQ ID NO: 167424 - DNA, 15 bp, Homo sapiens
aatgtattaatgaca

SEQ ID NO: 167425 - DNA, 15 bp, Homo sapiens
gaatgtattaatgac

SEQ ID NO: 167426 - DNA, 15 bp, Homo sapiens
tgaatgtattaatga

SEQ ID NO: 167427 - DNA, 15 bp, Homo sapiens
gtgaatgtattaatg

SEQ ID NO: 167428 - DNA, 15 bp, Homo sapiens
agtgaatgtattaat

SEQ ID NO: 167429 - DNA, 15 bp, Homo sapiens
cagtgaatgtattaa

SEQ ID NO: 167430 - DNA, 15 bp, Homo sapiens
ccagtgaatgtatta

SEQ ID NO: 167431 - DNA, 15 bp, Homo sapiens
accagtgaatgtatt

SEQ ID NO: 167432 - DNA, 15 bp, Homo sapiens
taccagtgaatgtat

SEQ ID NO: 167433 - DNA, 15 bp, Homo sapiens
ataccagtgaatgta

SEQ ID NO: 167434 - DNA, 15 bp, Homo sapiens
gataccagtgaatgt

SEQ ID NO: 167435 - DNA, 15 bp, Homo sapiens
tgataccagtgaatg

SEQ ID NO: 167436 - DNA, 15 bp, Homo sapiens
gtgataccagtgaat

SEQ ID NO: 167437 - DNA, 15 bp, Homo sapiens
agtgataccagtgaa

SEQ ID NO: 167438 - DNA, 15 bp, Homo sapiens
cagtgataccagtga

SEQ ID NO: 167439 - DNA, 15 bp, Homo sapiens
tcagtgataccagtg

SEQ ID NO: 167440 - DNA, 15 bp, Homo sapiens
ttcagtgataccagt

SEQ ID NO: 167441 - DNA, 15 bp, Homo sapiens
gttcagtgataccag

SEQ ID NO: 167442 - DNA, 15 bp, Homo sapiens
agttcagtgatacca

SEQ ID NO: 167443 - DNA, 15 bp, Homo sapiens
aagttcagtgatacc

SEQ ID NO: 167444 - DNA, 15 bp, Homo sapiens
aaagttcagtgatac

SEQ ID NO: 167445 - DNA, 15 bp, Homo sapiens
taaagttcagtgata

SEQ ID NO: 167446 - DNA, 15 bp, Homo sapiens
ataaagttcagtgat

SEQ ID NO: 167447 - DNA, 15 bp, Homo sapiens
aataaagttcagtga

SEQ ID NO: 167448 - DNA, 15 bp, Homo sapiens
aaataaagttcagtg

SEQ ID NO: 167449 - DNA, 15 bp, Homo sapiens
aaaataaagttcagt

SEQ ID NO: 167450 - DNA, 15 bp, Homo sapiens
taaaataaagttcag

SEQ ID NO: 167451 - DNA, 15 bp, Homo sapiens
ataaaataaagttca

SEQ ID NO: 167452 - DNA, 15 bp, Homo sapiens
tataaaataaagttc

SEQ ID NO: 167453 - DNA, 15 bp, Homo sapiens
atataaaataaagtt

SEQ ID NO: 167454 - DNA, 15 bp, Homo sapiens
gatataaaataaagt

SEQ ID NO: 167455 - DNA, 15 bp, Homo sapiens
tgatataaaataaag

SEQ ID NO: 167456 - DNA, 15 bp, Homo sapiens
ttgatataaaataaa

SEQ ID NO: 167457 - DNA, 15 bp, Homo sapiens
cttgatataaaataa

SEQ ID NO: 167458 - DNA, 15 bp, Homo sapiens
acttgatataaaata

SEQ ID NO: 167459 - DNA, 15 bp, Homo sapiens
cacttgatataaaat

SEQ ID NO: 167460 - DNA, 15 bp, Homo sapiens
tcacttgatataaaa

SEQ ID NO: 167461 - DNA, 15 bp, Homo sapiens
ctcacttgatataaa

SEQ ID NO: 167462 - DNA, 15 bp, Homo sapiens
tctcacttgatataa

SEQ ID NO: 167463 - DNA, 15 bp, Homo sapiens
atctcacttgatata

SEQ ID NO: 167464 - DNA, 15 bp, Homo sapiens
tatctcacttgatat

SEQ ID NO: 167465 - DNA, 15 bp, Homo sapiens
ttatctcacttgata

SEQ ID NO: 167466 - DNA, 15 bp, Homo sapiens
gttatctcacttgat

SEQ ID NO: 167467 - DNA, 15 bp, Homo sapiens
agttatctcacttga

SEQ ID NO: 167468 - DNA, 15 bp, Homo sapiens
tagttatctcacttg

SEQ ID NO: 167469 - DNA, 15 bp, Homo sapiens
gtagttatctcactt

SEQ ID NO: 167470 - DNA, 15 bp, Homo sapiens
agtagttatctcact

SEQ ID NO: 167471 - DNA, 15 bp, Homo sapiens
tagtagttatctcac

SEQ ID NO: 167472 - DNA, 15 bp, Homo sapiens
atagtagttatctca

SEQ ID NO: 167473 - DNA, 15 bp, Homo sapiens
tatagtagttatctc

SEQ ID NO: 167474 - DNA, 15 bp, Homo sapiens
gtatagtagttatct

SEQ ID NO: 167475 - DNA, 15 bp, Homo sapiens
ggtatagtagttatc

SEQ ID NO: 167476 - DNA, 15 bp, Homo sapiens
tggtatagtagttat

SEQ ID NO: 167477 - DNA, 15 bp, Homo sapiens
atggtatagtagtta

SEQ ID NO: 167478 - DNA, 15 bp, Homo sapiens
gatggtatagtagtt

SEQ ID NO: 167479 - DNA, 15 bp, Homo sapiens
ggatggtatagtagt

SEQ ID NO: 167480 - DNA, 15 bp, Homo sapiens
tggatggtatagtag

SEQ ID NO: 167481 - DNA, 15 bp, Homo sapiens
ctggatggtatagta

SEQ ID NO: 167482 - DNA, 15 bp, Homo sapiens
cctggatggtatagt

SEQ ID NO: 167483 - DNA, 15 bp, Homo sapiens
ccctggatggtatag

SEQ ID NO: 167484 - DNA, 15 bp, Homo sapiens
tccctggatggtata

SEQ ID NO: 167485 - DNA, 15 bp, Homo sapiens
ctccctggatggtat

SEQ ID NO: 167486 - DNA, 15 bp, Homo sapiens
tctccctggatggta

SEQ ID NO: 167487 - DNA, 15 bp, Homo sapiens
atctccctggatggt

SEQ ID NO: 167488 - DNA, 15 bp, Homo sapiens
tatctccctggatgg

SEQ ID NO: 167489 - DNA, 15 bp, Homo sapiens
ttatctccctggatg

SEQ ID NO: 167490 - DNA, 15 bp, Homo sapiens
attatctccctggat

SEQ ID NO: 167491 - DNA, 15 bp, Homo sapiens
cattatctccctgga

SEQ ID NO: 167492 - DNA, 15 bp, Homo sapiens
acattatctccctgg

SEQ ID NO: 167493 - DNA, 15 bp, Homo sapiens
cacattatctccctg

SEQ ID NO: 167494 - DNA, 15 bp, Homo sapiens
acacattatctccct

SEQ ID NO: 167495 - DNA, 15 bp, Homo sapiens
cacacattatctccc

SEQ ID NO: 167496 - DNA, 15 bp, Homo sapiens
acacacattatctcc

SEQ ID NO: 167497 - DNA, 15 bp, Homo sapiens
cacacacattatctc

SEQ ID NO: 167498 - DNA, 15 bp, Homo sapiens
tcacacacattatct

SEQ ID NO: 167499 - DNA, 15 bp, Homo sapiens
ttcacacacattatc

SEQ ID NO: 167500 - DNA, 15 bp, Homo sapiens
cttcacacacattat

SEQ ID NO: 167501 - DNA, 15 bp, Homo sapiens
gcttcacacacatta

SEQ ID NO: 167502 - DNA, 15 bp, Homo sapiens
ggcttcacacacatt

SEQ ID NO: 167503 - DNA, 15 bp, Homo sapiens
gggcttcacacacat

SEQ ID NO: 167504 - DNA, 15 bp, Homo sapiens
tgggcttcacacaca

SEQ ID NO: 167505 - DNA, 15 bp, Homo sapiens
atgggcttcacacac

SEQ ID NO: 167506 - DNA, 15 bp, Homo sapiens
tatgggcttcacaca

SEQ ID NO: 167507 - DNA, 15 bp, Homo sapiens
ctatgggcttcacac

SEQ ID NO: 167508 - DNA, 15 bp, Homo sapiens
gctatgggcttcaca

SEQ ID NO: 167509 - DNA, 15 bp, Homo sapiens
tgctatgggcttcac

SEQ ID NO: 167510 - DNA, 15 bp, Homo sapiens
gtgctatgggcttca

SEQ ID NO: 167511 - DNA, 15 bp, Homo sapiens
tgtgctatgggcttc

SEQ ID NO: 167512 - DNA, 15 bp, Homo sapiens
ttgtgctatgggctt

SEQ ID NO: 167513 - DNA, 15 bp, Homo sapiens
attgtgctatgggct

SEQ ID NO: 167514 - DNA, 15 bp, Homo sapiens
cattgtgctatgggc

SEQ ID NO: 167515 - DNA, 15 bp, Homo sapiens
gcattgtgctatggg

SEQ ID NO: 167516 - DNA, 15 bp, Homo sapiens
agcattgtgctatgg

SEQ ID NO: 167517 - DNA, 15 bp, Homo sapiens
aagcattgtgctatg

SEQ ID NO: 167518 - DNA, 15 bp, Homo sapiens
caagcattgtgctat

SEQ ID NO: 167519 - DNA, 15 bp, Homo sapiens
tcaagcattgtgcta

SEQ ID NO: 167520 - DNA, 15 bp, Homo sapiens
gtcaagcattgtgct

SEQ ID NO: 167521 - DNA, 15 bp, Homo sapiens
tgtcaagcattgtgc

SEQ ID NO: 167522 - DNA, 15 bp, Homo sapiens
ttgtcaagcattgtg

SEQ ID NO: 167523 - DNA, 15 bp, Homo sapiens
tttgtcaagcattgt

SEQ ID NO: 167524 - DNA, 15 bp, Homo sapiens
atttgtcaagcattg

SEQ ID NO: 167525 - DNA, 15 bp, Homo sapiens
tatttgtcaagcatt

SEQ ID NO: 167526 - DNA, 15 bp, Homo sapiens
ctatttgtcaagcat

SEQ ID NO: 167527 - DNA, 15 bp, Homo sapiens
actatttgtcaagca

SEQ ID NO: 167528 - DNA, 15 bp, Homo sapiens
aactatttgtcaagc

SEQ ID NO: 167529 - DNA, 15 bp, Homo sapiens
aaactatttgtcaag

SEQ ID NO: 167530 - DNA, 15 bp, Homo sapiens
aaaactatttgtcaa

SEQ ID NO: 167531 - DNA, 15 bp, Homo sapiens
gaaaactatttgtca

SEQ ID NO: 167532 - DNA, 15 bp, Homo sapiens
tgaaaactatttgtc

SEQ ID NO: 167533 - DNA, 15 bp, Homo sapiens
ctgaaaactatttgt

SEQ ID NO: 167534 - DNA, 15 bp, Homo sapiens
cctgaaaactatttg

SEQ ID NO: 167535 - DNA, 15 bp, Homo sapiens
ccctgaaaactattt

SEQ ID NO: 167536 - DNA, 15 bp, Homo sapiens
tccctgaaaactatt

SEQ ID NO: 167537 - DNA, 15 bp, Homo sapiens
ttccctgaaaactat

SEQ ID NO: 167538 - DNA, 15 bp, Homo sapiens
attccctgaaaacta

SEQ ID NO: 167539 - DNA, 15 bp, Homo sapiens
cattccctgaaaact

SEQ ID NO: 167540 - DNA, 15 bp, Homo sapiens
acattccctgaaaac

SEQ ID NO: 167541 - DNA, 15 bp, Homo sapiens
aacattccctgaaaa

SEQ ID NO: 167542 - DNA, 15 bp, Homo sapiens
taacattccctgaaa

SEQ ID NO: 167543 - DNA, 15 bp, Homo sapiens
ctaacattccctgaa

SEQ ID NO: 167544 - DNA, 15 bp, Homo sapiens
gctaacattccctga

SEQ ID NO: 167545 - DNA, 15 bp, Homo sapiens
agctaacattccctg

SEQ ID NO: 167546 - DNA, 15 bp, Homo sapiens
aagctaacattccct

SEQ ID NO: 167547 - DNA, 15 bp, Homo sapiens
gaagctaacattccc

SEQ ID NO: 167548 - DNA, 15 bp, Homo sapiens
agaagctaacattcc

SEQ ID NO: 167549 - DNA, 15 bp, Homo sapiens
tagaagctaacattc

SEQ ID NO: 167550 - DNA, 15 bp, Homo sapiens
atagaagctaacatt

SEQ ID NO: 167551 - DNA, 15 bp, Homo sapiens
gatagaagctaacat

SEQ ID NO: 167552 - DNA, 15 bp, Homo sapiens
agatagaagctaaca

SEQ ID NO: 167553 - DNA, 15 bp, Homo sapiens
tagatagaagctaac

SEQ ID NO: 167554 - DNA, 15 bp, Homo sapiens
ttagatagaagctaa

SEQ ID NO: 167555 - DNA, 15 bp, Homo sapiens
cttagatagaagcta

SEQ ID NO: 167556 - DNA, 15 bp, Homo sapiens
gcttagatagaagct

SEQ ID NO: 167557 - DNA, 15 bp, Homo sapiens
tgcttagatagaagc

SEQ ID NO: 167558 - DNA, 15 bp, Homo sapiens
ctgcttagatagaag

SEQ ID NO: 167559 - DNA, 15 bp, Homo sapiens
cctgcttagatagaa

SEQ ID NO: 167560 - DNA, 15 bp, Homo sapiens
acctgcttagataga

SEQ ID NO: 167561 - DNA, 15 bp, Homo sapiens
gacctgcttagatag

SEQ ID NO: 167562 - DNA, 15 bp, Homo sapiens
ggacctgcttagata

SEQ ID NO: 167563 - DNA, 15 bp, Homo sapiens
gggacctgcttagat

SEQ ID NO: 167564 - DNA, 15 bp, Homo sapiens
tgggacctgcttaga

SEQ ID NO: 167565 - DNA, 15 bp, Homo sapiens
atgggacctgcttag

SEQ ID NO: 167566 - DNA, 15 bp, Homo sapiens
aatgggacctgctta

SEQ ID NO: 167567 - DNA, 15 bp, Homo sapiens
caatgggacctgctt

SEQ ID NO: 167568 - DNA, 15 bp, Homo sapiens
ccaatgggacctgct

SEQ ID NO: 167569 - DNA, 15 bp, Homo sapiens
tccaatgggacctgc

SEQ ID NO: 167570 - DNA, 15 bp, Homo sapiens
ttccaatgggacctg

SEQ ID NO: 167571 - DNA, 15 bp, Homo sapiens
tttccaatgggacct

SEQ ID NO: 167572 - DNA, 15 bp, Homo sapiens
ttttccaatgggacc

SEQ ID NO: 167573 - DNA, 15 bp, Homo sapiens
tttttccaatgggac

SEQ ID NO: 167574 - DNA, 15 bp, Homo sapiens
ttttttccaatggga

SEQ ID NO: 167575 - DNA, 15 bp, Homo sapiens
tttttttccaatggg

SEQ ID NO: 167576 - DNA, 15 bp, Homo sapiens
ttttttttccaatgg

SEQ ID NO: 167577 - DNA, 15 bp, Homo sapiens
tttttttttccaatg

SEQ ID NO: 167578 - DNA, 15 bp, Homo sapiens
ttttttttttccaat

SEQ ID NO: 167579 - DNA, 15 bp, Homo sapiens
tttttttttttccaa

SEQ ID NO: 167580 - DNA, 15 bp, Homo sapiens
ctttttttttttcca

SEQ ID NO: 167581 - DNA, 15 bp, Homo sapiens
actttttttttttcc

SEQ ID NO: 167582 - DNA, 15 bp, Homo sapiens
aactttttttttttc

SEQ ID NO: 167583 - DNA, 15 bp, Homo sapiens
caacttttttttttt

SEQ ID NO: 167584 - DNA, 15 bp, Homo sapiens
acaactttttttttt

SEQ ID NO: 167585 - DNA, 15 bp, Homo sapiens
tacaacttttttttt

SEQ ID NO: 167586 - DNA, 15 bp, Homo sapiens
atacaactttttttt

SEQ ID NO: 167587 - DNA, 15 bp, Homo sapiens
aatacaacttttttt

SEQ ID NO: 167588 - DNA, 15 bp, Homo sapiens
aaatacaactttttt

SEQ ID NO: 167589 - DNA, 15 bp, Homo sapiens
aaaatacaacttttt

SEQ ID NO: 167590 - DNA, 15 bp, Homo sapiens
aaaaatacaactttt

SEQ ID NO: 167591 - DNA, 15 bp, Homo sapiens
taaaaatacaacttt

SEQ ID NO: 167592 - DNA, 15 bp, Homo sapiens
ataaaaatacaactt

SEQ ID NO: 167593 - DNA, 15 bp, Homo sapiens
tataaaaatacaact

SEQ ID NO: 167594 - DNA, 15 bp, Homo sapiens
atataaaaatacaac

SEQ ID NO: 167595 - DNA, 15 bp, Homo sapiens
tatataaaaatacaa

SEQ ID NO: 167596 - DNA, 15 bp, Homo sapiens
ctatataaaaataca

SEQ ID NO: 167597 - DNA, 15 bp, Homo sapiens
actatataaaaatac

SEQ ID NO: 167598 - DNA, 15 bp, Homo sapiens
aactatataaaaata

SEQ ID NO: 167599 - DNA, 15 bp, Homo sapiens
gaactatataaaaat

SEQ ID NO: 167600 - DNA, 15 bp, Homo sapiens
agaactatataaaaa

SEQ ID NO: 167601 - DNA, 15 bp, Homo sapiens
tagaactatataaaa

SEQ ID NO: 167602 - DNA, 15 bp, Homo sapiens
ctagaactatataaa

SEQ ID NO: 167603 - DNA, 15 bp, Homo sapiens
actagaactatataa

SEQ ID NO: 167604 - DNA, 15 bp, Homo sapiens
aactagaactatata

SEQ ID NO: 167605 - DNA, 15 bp, Homo sapiens
taactagaactatat

SEQ ID NO: 167606 - DNA, 15 bp, Homo sapiens
ctaactagaactata

SEQ ID NO: 167607 - DNA, 15 bp, Homo sapiens
actaactagaactat

SEQ ID NO: 167608 - DNA, 15 bp, Homo sapiens
aactaactagaacta

SEQ ID NO: 167609 - DNA, 15 bp, Homo sapiens
aaactaactagaact

SEQ ID NO: 167610 - DNA, 15 bp, Homo sapiens
gaaactaactagaac

SEQ ID NO: 167611 - DNA, 15 bp, Homo sapiens
agaaactaactagaa

SEQ ID NO: 167612 - DNA, 15 bp, Homo sapiens
gagaaactaactaga

SEQ ID NO: 167613 - DNA, 15 bp, Homo sapiens
tgagaaactaactag

SEQ ID NO: 167614 - DNA, 15 bp, Homo sapiens
atgagaaactaacta

SEQ ID NO: 167615 - DNA, 15 bp, Homo sapiens
gatgagaaactaact

SEQ ID NO: 167616 - DNA, 15 bp, Homo sapiens
agatgagaaactaac

SEQ ID NO: 167617 - DNA, 15 bp, Homo sapiens
cagatgagaaactaa

SEQ ID NO: 167618 - DNA, 15 bp, Homo sapiens
acagatgagaaacta

SEQ ID NO: 167619 - DNA, 15 bp, Homo sapiens
cacagatgagaaact

SEQ ID NO: 167620 - DNA, 15 bp, Homo sapiens
tcacagatgagaaac

SEQ ID NO: 167621 - DNA, 15 bp, Homo sapiens
atcacagatgagaaa

SEQ ID NO: 167622 - DNA, 15 bp, Homo sapiens
gatcacagatgagaa

SEQ ID NO: 167623 - DNA, 15 bp, Homo sapiens
agatcacagatgaga

SEQ ID NO: 167624 - DNA, 15 bp, Homo sapiens
tagatcacagatgag

SEQ ID NO: 167625 - DNA, 15 bp, Homo sapiens
atagatcacagatga

SEQ ID NO: 167626 - DNA, 15 bp, Homo sapiens
catagatcacagatg

SEQ ID NO: 167627 - DNA, 15 bp, Homo sapiens
gcatagatcacagat

SEQ ID NO: 167628 - DNA, 15 bp, Homo sapiens
agcatagatcacaga

SEQ ID NO: 167629 - DNA, 15 bp, Homo sapiens
tagcatagatcacag

SEQ ID NO: 167630 - DNA, 15 bp, Homo sapiens
atagcatagatcaca

SEQ ID NO: 167631 - DNA, 15 bp, Homo sapiens
aatagcatagatcac

SEQ ID NO: 167632 - DNA, 15 bp, Homo sapiens
aaatagcatagatca

SEQ ID NO: 167633 - DNA, 15 bp, Homo sapiens
aaaatagcatagatc

SEQ ID NO: 167634 - DNA, 15 bp, Homo sapiens
aaaaatagcatagat

SEQ ID NO: 167635 - DNA, 15 bp, Homo sapiens
taaaaatagcataga

SEQ ID NO: 167636 - DNA, 15 bp, Homo sapiens
ttaaaaatagcatag

SEQ ID NO: 167637 - DNA, 15 bp, Homo sapiens
attaaaaatagcata

SEQ ID NO: 167638 - DNA, 15 bp, Homo sapiens
aattaaaaatagcat

SEQ ID NO: 167639 - DNA, 15 bp, Homo sapiens
caattaaaaatagca

SEQ ID NO: 167640 - DNA, 15 bp, Homo sapiens
tcaattaaaaatagc

SEQ ID NO: 167641 - DNA, 15 bp, Homo sapiens
ttcaattaaaaatag

SEQ ID NO: 167642 - DNA, 15 bp, Homo sapiens
tttcaattaaaaata

SEQ ID NO: 167643 - DNA, 15 bp, Homo sapiens
ttttcaattaaaaat

SEQ ID NO: 167644 - DNA, 15 bp, Homo sapiens
tttttcaattaaaaa

SEQ ID NO: 167645 - DNA, 15 bp, Homo sapiens
ttttttcaattaaaa

SEQ ID NO: 167646 - DNA, 15 bp, Homo sapiens
tttttttcaattaaa

SEQ ID NO: 167647 - DNA, 15 bp, Homo sapiens
ttttttttcaattaa

SEQ ID NO: 167648 - DNA, 15 bp, Homo sapiens
tttttttttcaatta

SEQ ID NO: 167649 - DNA, 15 bp, Homo sapiens
ttttttttttcaatt

SEQ ID NO: 167650 - DNA, 15 bp, Homo sapiens
cttttttttttcaat

SEQ ID NO: 167651 - DNA, 15 bp, Homo sapiens
acttttttttttcaa

SEQ ID NO: 167652 - DNA, 15 bp, Homo sapiens
cacttttttttttca

SEQ ID NO: 167653 - DNA, 15 bp, Homo sapiens
acacttttttttttc

SEQ ID NO: 167654 - DNA, 15 bp, Homo sapiens
aaacacttttttttt

SEQ ID NO: 167655 - DNA, 15 bp, Homo sapiens
gaaacactttttttt

SEQ ID NO: 167656 - DNA, 15 bp, Homo sapiens
ggaaacacttttttt

SEQ ID NO: 167657 - DNA, 15 bp, Homo sapiens
tggaaacactttttt

SEQ ID NO: 167658 - DNA, 15 bp, Homo sapiens
atggaaacacttttt

SEQ ID NO: 167659 - DNA, 15 bp, Homo sapiens
tatggaaacactttt

SEQ ID NO: 167660 - DNA, 15 bp, Homo sapiens
gtatggaaacacttt

SEQ ID NO: 167661 - DNA, 15 bp, Homo sapiens
tgtatggaaacactt

SEQ ID NO: 167662 - DNA, 15 bp, Homo sapiens
atgtatggaaacact

SEQ ID NO: 167663 - DNA, 15 bp, Homo sapiens
aatgtatggaaacac

SEQ ID NO: 167664 - DNA, 15 bp, Homo sapiens
caatgtatggaaaca

SEQ ID NO: 167665 - DNA, 15 bp, Homo sapiens
acaatgtatggaaac

SEQ ID NO: 167666 - DNA, 15 bp, Homo sapiens
gacaatgtatggaaa

SEQ ID NO: 167667 - DNA, 15 bp, Homo sapiens
tgacaatgtatggaa

SEQ ID NO: 167668 - DNA, 15 bp, Homo sapiens
ctgacaatgtatgga

SEQ ID NO: 167669 - DNA, 15 bp, Homo sapiens
cctgacaatgtatgg

SEQ ID NO: 167670 - DNA, 15 bp, Homo sapiens
tcctgacaatgtatg

SEQ ID NO: 167671 - DNA, 15 bp, Homo sapiens
ctcctgacaatgtat

SEQ ID NO: 167672 - DNA, 15 bp, Homo sapiens
cctcctgacaatgta

SEQ ID NO: 167673 - DNA, 15 bp, Homo sapiens
tcctcctgacaatgt

SEQ ID NO: 167674 - DNA, 15 bp, Homo sapiens
ctcctcctgacaatg

SEQ ID NO: 167675 - DNA, 15 bp, Homo sapiens
gctcctcctgacaat

SEQ ID NO: 167676 - DNA, 15 bp, Homo sapiens
ggctcctcctgacaa

SEQ ID NO: 167677 - DNA, 15 bp, Homo sapiens
cggctcctcctgaca

SEQ ID NO: 167678 - DNA, 15 bp, Homo sapiens
acggctcctcctgac

SEQ ID NO: 167679 - DNA, 15 bp, Homo sapiens
aacggctcctcctga

SEQ ID NO: 167680 - DNA, 15 bp, Homo sapiens
gaacggctcctcctg

SEQ ID NO: 167681 - DNA, 15 bp, Homo sapiens
ggaacggctcctcct

SEQ ID NO: 167682 - DNA, 15 bp, Homo sapiens
gggaacggctcctcc

SEQ ID NO: 167683 - DNA, 15 bp, Homo sapiens
ggggaacggctcctc

SEQ ID NO: 167684 - DNA, 15 bp, Homo sapiens
aggggaacggctcct

SEQ ID NO: 167685 - DNA, 15 bp, Homo sapiens
caggggaacggctcc

SEQ ID NO: 167686 - DNA, 15 bp, Homo sapiens
acaggggaacggctc

SEQ ID NO: 167687 - DNA, 15 bp, Homo sapiens
gacaggggaacggct

SEQ ID NO: 167688 - DNA, 15 bp, Homo sapiens
ggacaggggaacggc

SEQ ID NO: 167689 - DNA, 15 bp, Homo sapiens
gggacaggggaacgg

SEQ ID NO: 167690 - DNA, 15 bp, Homo sapiens
tgggacaggggaacg

SEQ ID NO: 167691 - DNA, 15 bp, Homo sapiens
ctgggacaggggaac

SEQ ID NO: 167692 - DNA, 15 bp, Homo sapiens
gctgggacaggggaa

SEQ ID NO: 167693 - DNA, 15 bp, Homo sapiens
ggctgggacagggga

SEQ ID NO: 167694 - DNA, 15 bp, Homo sapiens
aggctgggacagggg

SEQ ID NO: 167695 - DNA, 15 bp, Homo sapiens
gaggctgggacaggg

SEQ ID NO: 167696 - DNA, 15 bp, Homo sapiens
agaggctgggacagg

SEQ ID NO: 167697 - DNA, 15 bp, Homo sapiens
gagaggctgggacag

SEQ ID NO: 167698 - DNA, 15 bp, Homo sapiens
tgagaggctgggaca

SEQ ID NO: 167699 - DNA, 15 bp, Homo sapiens
gtgagaggctgggac

SEQ ID NO: 167700 - DNA, 15 bp, Homo sapiens
tgtgagaggctggga

SEQ ID NO: 167701 - DNA, 15 bp, Homo sapiens
ttgtgagaggctggg

SEQ ID NO: 167702 - DNA, 15 bp, Homo sapiens
tttgtgagaggctgg

SEQ ID NO: 167703 - DNA, 15 bp, Homo sapiens
ctttgtgagaggctg

SEQ ID NO: 167704 - DNA, 15 bp, Homo sapiens
gctttgtgagaggct

SEQ ID NO: 167705 - DNA, 15 bp, Homo sapiens
tgctttgtgagaggc

SEQ ID NO: 167706 - DNA, 15 bp, Homo sapiens
gtgctttgtgagagg

SEQ ID NO: 167707 - DNA, 15 bp, Homo sapiens
tgtgctttgtgagag

SEQ ID NO: 167708 - DNA, 15 bp, Homo sapiens
gtgtgctttgtgaga

SEQ ID NO: 167709 - DNA, 15 bp, Homo sapiens
ggtgtgctttgtgag

SEQ ID NO: 167710 - DNA, 15 bp, Homo sapiens
gggtgtgctttgtga

SEQ ID NO: 167711 - DNA, 15 bp, Homo sapiens
agggtgtgctttgtg

SEQ ID NO: 167712 - DNA, 15 bp, Homo sapiens
gagggtgtgctttgt

SEQ ID NO: 167713 - DNA, 15 bp, Homo sapiens
tgagggtgtgctttg

SEQ ID NO: 167714 - DNA, 15 bp, Homo sapiens
gtgagggtgtgcttt

SEQ ID NO: 167715 - DNA, 15 bp, Homo sapiens
agtgagggtgtgctt

SEQ ID NO: 167716 - DNA, 15 bp, Homo sapiens
gagtgagggtgtgct

SEQ ID NO: 167717 - DNA, 15 bp, Homo sapiens
ggagtgagggtgtgc

SEQ ID NO: 167718 - DNA, 15 bp, Homo sapiens
gggagtgagggtgtg

SEQ ID NO: 167719 - DNA, 15 bp, Homo sapiens
agggagtgagggtgt

SEQ ID NO: 167720 - DNA, 15 bp, Homo sapiens
gagggagtgagggtg

SEQ ID NO: 167721 - DNA, 15 bp, Homo sapiens
tgagggagtgagggt

SEQ ID NO: 167722 - DNA, 15 bp, Homo sapiens
atgagggagtgaggg

SEQ ID NO: 167723 - DNA, 15 bp, Homo sapiens
aatgagggagtgagg

SEQ ID NO: 167724 - DNA, 15 bp, Homo sapiens
aaatgagggagtgag

SEQ ID NO: 167725 - DNA, 15 bp, Homo sapiens
aaaatgagggagtga

SEQ ID NO: 167726 - DNA, 15 bp, Homo sapiens
aaaaatgagggagtg

SEQ ID NO: 167727 - DNA, 15 bp, Homo sapiens
gaaaaatgagggagt

SEQ ID NO: 167728 - DNA, 15 bp, Homo sapiens
ggaaaaatgagggag

SEQ ID NO: 167729 - DNA, 15 bp, Homo sapiens
tggaaaaatgaggga

SEQ ID NO: 167730 - DNA, 15 bp, Homo sapiens
ctggaaaaatgaggg

SEQ ID NO: 167731 - DNA, 15 bp, Homo sapiens
actggaaaaatgagg

SEQ ID NO: 167732 - DNA, 15 bp, Homo sapiens
tactggaaaaatgag

SEQ ID NO: 167733 - DNA, 15 bp, Homo sapiens
ctactggaaaaatga

SEQ ID NO: 167734 - DNA, 15 bp, Homo sapiens
actactggaaaaatg

SEQ ID NO: 167735 - DNA, 15 bp, Homo sapiens
gactactggaaaaat

SEQ ID NO: 167736 - DNA, 15 bp, Homo sapiens
ggactactggaaaaa

SEQ ID NO: 167737 - DNA, 15 bp, Homo sapiens
gggactactggaaaa

SEQ ID NO: 167738 - DNA, 15 bp, Homo sapiens
tgggactactggaaa

SEQ ID NO: 167739 - DNA, 15 bp, Homo sapiens
ctgggactactggaa

SEQ ID NO: 167740 - DNA, 15 bp, Homo sapiens
cctgggactactgga

SEQ ID NO: 167741 - DNA, 15 bp, Homo sapiens
ccctgggactactgg

SEQ ID NO: 167742 - DNA, 15 bp, Homo sapiens
gccctgggactactg

SEQ ID NO: 167743 - DNA, 15 bp, Homo sapiens
agccctgggactact

SEQ ID NO: 167744 - DNA, 15 bp, Homo sapiens
tagccctgggactac

SEQ ID NO: 167745 - DNA, 15 bp, Homo sapiens
ctagccctgggacta

SEQ ID NO: 167746 - DNA, 15 bp, Homo sapiens
tctagccctgggact

SEQ ID NO: 167747 - DNA, 15 bp, Homo sapiens
gtctagccctgggac

SEQ ID NO: 167748 - DNA, 15 bp, Homo sapiens
ggtctagccctggga

SEQ ID NO: 167749 - DNA, 15 bp, Homo sapiens
tggtctagccctggg

SEQ ID NO: 167750 - DNA, 15 bp, Homo sapiens
gtggtctagccctgg

SEQ ID NO: 167751 - DNA, 15 bp, Homo sapiens
ggtggtctagccctg

SEQ ID NO: 167752 - DNA, 15 bp, Homo sapiens
aggtggtctagccct

SEQ ID NO: 167753 - DNA, 15 bp, Homo sapiens
caggtggtctagccc

SEQ ID NO: 167754 - DNA, 15 bp, Homo sapiens
acaggtggtctagcc

SEQ ID NO: 167755 - DNA, 15 bp, Homo sapiens
tacaggtggtctagc

SEQ ID NO: 167756 - DNA, 15 bp, Homo sapiens
ctacaggtggtctag

SEQ ID NO: 167757 - DNA, 15 bp, Homo sapiens
tctacaggtggtcta

SEQ ID NO: 167758 - DNA, 15 bp, Homo sapiens
ctctacaggtggtct

SEQ ID NO: 167759 - DNA, 15 bp, Homo sapiens
tctctacaggtggtc

SEQ ID NO: 167760 - DNA, 15 bp, Homo sapiens
gtctctacaggtggt

SEQ ID NO: 167761 - DNA, 15 bp, Homo sapiens
tgtctctacaggtgg

SEQ ID NO: 167762 - DNA, 15 bp, Homo sapiens
ctgtctctacaggtg

SEQ ID NO: 167763 - DNA, 15 bp, Homo sapiens
cctgtctctacaggt

SEQ ID NO: 167764 - DNA, 15 bp, Homo sapiens
tcctgtctctacagg

SEQ ID NO: 167765 - DNA, 15 bp, Homo sapiens
ttcctgtctctacag

SEQ ID NO: 167766 - DNA, 15 bp, Homo sapiens
cttcctgtctctaca

SEQ ID NO: 167767 - DNA, 15 bp, Homo sapiens
gcttcctgtctctac

SEQ ID NO: 167768 - DNA, 15 bp, Homo sapiens
ggcttcctgtctcta

SEQ ID NO: 167769 - DNA, 15 bp, Homo sapiens
aggcttcctgtctct

SEQ ID NO: 167770 - DNA, 15 bp, Homo sapiens
caggcttcctgtctc

SEQ ID NO: 167771 - DNA, 15 bp, Homo sapiens
gcaggcttcctgtct

SEQ ID NO: 167772 - DNA, 15 bp, Homo sapiens
ggcaggcttcctgtc

SEQ ID NO: 167773 - DNA, 15 bp, Homo sapiens
aggcaggcttcctgt

SEQ ID NO: 167774 - DNA, 15 bp, Homo sapiens
taggcaggcttcctg

SEQ ID NO: 167775 - DNA, 15 bp, Homo sapiens
ttaggcaggcttcct

SEQ ID NO: 167776 - DNA, 15 bp, Homo sapiens
tttaggcaggcttcc

SEQ ID NO: 167777 - DNA, 15 bp, Homo sapiens
ctttaggcaggcttc

SEQ ID NO: 167778 - DNA, 15 bp, Homo sapiens
tctttaggcaggctt

SEQ ID NO: 167779 - DNA, 15 bp, Homo sapiens
ctctttaggcaggct

SEQ ID NO: 167780 - DNA, 15 bp, Homo sapiens
gctctttaggcaggc

SEQ ID NO: 167781 - DNA, 15 bp, Homo sapiens
tgctctttaggcagg

SEQ ID NO: 167782 - DNA, 15 bp, Homo sapiens
ctgctctttaggcag

SEQ ID NO: 167783 - DNA, 15 bp, Homo sapiens
tctgctctttaggca

SEQ ID NO: 167784 - DNA, 15 bp, Homo sapiens
ttctgctctttaggc

SEQ ID NO: 167785 - DNA, 15 bp, Homo sapiens
cttctgctctttagg

SEQ ID NO: 167786 - DNA, 15 bp, Homo sapiens
gcttctgctctttag

SEQ ID NO: 167787 - DNA, 15 bp, Homo sapiens
tgcttctgctcttta

SEQ ID NO: 167788 - DNA, 15 bp, Homo sapiens
atgcttctgctcttt

SEQ ID NO: 167789 - DNA, 15 bp, Homo sapiens
gatgcttctgctctt

SEQ ID NO: 167790 - DNA, 15 bp, Homo sapiens
agatgcttctgctct

SEQ ID NO: 167791 - DNA, 15 bp, Homo sapiens
cagatgcttctgctc

SEQ ID NO: 167792 - DNA, 15 bp, Homo sapiens
gcagatgcttctgct

SEQ ID NO: 167793 - DNA, 15 bp, Homo sapiens
agcagatgcttctgc

SEQ ID NO: 167794 - DNA, 15 bp, Homo sapiens
gagcagatgcttctg

SEQ ID NO: 167795 - DNA, 15 bp, Homo sapiens
tgagcagatgcttct

SEQ ID NO: 167796 - DNA, 15 bp, Homo sapiens
ctgagcagatgcttc

SEQ ID NO: 167797 - DNA, 15 bp, Homo sapiens
tctgagcagatgctt

SEQ ID NO: 167798 - DNA, 15 bp, Homo sapiens
ttctgagcagatgct

SEQ ID NO: 167799 - DNA, 15 bp, Homo sapiens
tttctgagcagatgc

SEQ ID NO: 167800 - DNA, 15 bp, Homo sapiens
ctttctgagcagatg

SEQ ID NO: 167801 - DNA, 15 bp, Homo sapiens
tctttctgagcagat

SEQ ID NO: 167802 - DNA, 15 bp, Homo sapiens
atctttctgagcaga

SEQ ID NO: 167803 - DNA, 15 bp, Homo sapiens
gatctttctgagcag

SEQ ID NO: 167804 - DNA, 15 bp, Homo sapiens
agatctttctgagca

SEQ ID NO: 167805 - DNA, 15 bp, Homo sapiens
tagatctttctgagc

SEQ ID NO: 167806 - DNA, 15 bp, Homo sapiens
ctagatctttctgag

SEQ ID NO: 167807 - DNA, 15 bp, Homo sapiens
actagatctttctga

SEQ ID NO: 167808 - DNA, 15 bp, Homo sapiens
aactagatctttctg

SEQ ID NO: 167809 - DNA, 15 bp, Homo sapiens
caactagatctttct

SEQ ID NO: 167810 - DNA, 15 bp, Homo sapiens
acaactagatctttc

SEQ ID NO: 167811 - DNA, 15 bp, Homo sapiens
aacaactagatcttt

SEQ ID NO: 167812 - DNA, 15 bp, Homo sapiens
aaacaactagatctt

SEQ ID NO: 167813 - DNA, 15 bp, Homo sapiens
caaacaactagatct

SEQ ID NO: 167814 - DNA, 15 bp, Homo sapiens
gcaaacaactagatc

SEQ ID NO: 167815 - DNA, 15 bp, Homo sapiens
agcaaacaactagat

SEQ ID NO: 167816 - DNA, 15 bp, Homo sapiens
cagcaaacaactaga

SEQ ID NO: 167817 - DNA, 15 bp, Homo sapiens
ccagcaaacaactag

SEQ ID NO: 167818 - DNA, 15 bp, Homo sapiens
tccagcaaacaacta

SEQ ID NO: 167819 - DNA, 15 bp, Homo sapiens
ctccagcaaacaact

SEQ ID NO: 167820 - DNA, 15 bp, Homo sapiens
gctccagcaaacaac

SEQ ID NO: 167821 - DNA, 15 bp, Homo sapiens
ggctccagcaaacaa

SEQ ID NO: 167822 - DNA, 15 bp, Homo sapiens
aggctccagcaaaca

SEQ ID NO: 167823 - DNA, 15 bp, Homo sapiens
gaggctccagcaaac

SEQ ID NO: 167824 - DNA, 15 bp, Homo sapiens
tgaggctccagcaaa

SEQ ID NO: 167825 - DNA, 15 bp, Homo sapiens
ctgaggctccagcaa

SEQ ID NO: 167826 - DNA, 15 bp, Homo sapiens
gctgaggctccagca

SEQ ID NO: 167827 - DNA, 15 bp, Homo sapiens
agctgaggctccagc

SEQ ID NO: 167828 - DNA, 15 bp, Homo sapiens
aagctgaggctccag

SEQ ID NO: 167829 - DNA, 15 bp, Homo sapiens
caagctgaggctcca

SEQ ID NO: 167830 - DNA, 15 bp, Homo sapiens
tcaagctgaggctcc

SEQ ID NO: 167831 - DNA, 15 bp, Homo sapiens
ttcaagctgaggctc

SEQ ID NO: 167832 - DNA, 15 bp, Homo sapiens
cttcaagctgaggct

SEQ ID NO: 167833 - DNA, 15 bp, Homo sapiens
tcttcaagctgaggc

SEQ ID NO: 167834 - DNA, 15 bp, Homo sapiens
ttcttcaagctgagg

SEQ ID NO: 167835 - DNA, 15 bp, Homo sapiens
cttcttcaagctgag

SEQ ID NO: 167836 - DNA, 15 bp, Homo sapiens
ccttcttcaagctga

SEQ ID NO: 167837 - DNA, 15 bp, Homo sapiens
gccttcttcaagctg

SEQ ID NO: 167838 - DNA, 15 bp, Homo sapiens
agccttcttcaagct

SEQ ID NO: 167839 - DNA, 15 bp, Homo sapiens
gagccttcttcaagc

SEQ ID NO: 167840 - DNA, 15 bp, Homo sapiens
ggagccttcttcaag

SEQ ID NO: 167841 - DNA, 15 bp, Homo sapiens
tggagccttcttcaa

SEQ ID NO: 167842 - DNA, 15 bp, Homo sapiens
ttggagccttcttca

SEQ ID NO: 167843 - DNA, 15 bp, Homo sapiens
cttggagccttcttc

SEQ ID NO: 167844 - DNA, 15 bp, Homo sapiens
acttggagccttctt

SEQ ID NO: 167845 - DNA, 15 bp, Homo sapiens
aacttggagccttct

SEQ ID NO: 167846 - DNA, 15 bp, Homo sapiens
aaacttggagccttc

SEQ ID NO: 167847 - DNA, 15 bp, Homo sapiens
taaacttggagcctt

SEQ ID NO: 167848 - DNA, 15 bp, Homo sapiens
ataaacttggagcct

SEQ ID NO: 167849 - DNA, 15 bp, Homo sapiens
aataaacttggagcc

SEQ ID NO: 167850 - DNA, 15 bp, Homo sapiens
taataaacttggagc

SEQ ID NO: 167851 - DNA, 15 bp, Homo sapiens
ataataaacttggag

SEQ ID NO: 167852 - DNA, 15 bp, Homo sapiens
tataataaacttgga

SEQ ID NO: 167853 - DNA, 15 bp, Homo sapiens
ttataataaacttgg

SEQ ID NO: 167854 - DNA, 15 bp, Homo sapiens
tttataataaacttg

SEQ ID NO: 167855 - DNA, 15 bp, Homo sapiens
ctttataataaactt

SEQ ID NO: 167856 - DNA, 15 bp, Homo sapiens
actttataataaact

SEQ ID NO: 167857 - DNA, 15 bp, Homo sapiens
gactttataataaac

SEQ ID NO: 167858 - DNA, 15 bp, Homo sapiens
ggactttataataaa

SEQ ID NO: 167859 - DNA, 15 bp, Homo sapiens
gggactttataataa

SEQ ID NO: 167860 - DNA, 15 bp, Homo sapiens
tgggactttataata

SEQ ID NO: 167861 - DNA, 15 bp, Homo sapiens
ctgggactttataat

SEQ ID NO: 167862 - DNA, 15 bp, Homo sapiens
gctgggactttataa

SEQ ID NO: 167863 - DNA, 15 bp, Homo sapiens
ggctgggactttata

SEQ ID NO: 167864 - DNA, 15 bp, Homo sapiens
tggctgggactttat

SEQ ID NO: 167865 - DNA, 15 bp, Homo sapiens
gtggctgggacttta

SEQ ID NO: 167866 - DNA, 15 bp, Homo sapiens
tgtggctgggacttt

SEQ ID NO: 167867 - DNA, 15 bp, Homo sapiens
gtgtggctgggactt

SEQ ID NO: 167868 - DNA, 15 bp, Homo sapiens
tgtgtggctgggact

SEQ ID NO: 167869 - DNA, 15 bp, Homo sapiens
ctgtgtggctgggac

SEQ ID NO: 167870 - DNA, 15 bp, Homo sapiens
actgtgtggctggga

SEQ ID NO: 167871 - DNA, 15 bp, Homo sapiens
aactgtgtggctggg

SEQ ID NO: 167872 - DNA, 15 bp, Homo sapiens
aaactgtgtggctgg

SEQ ID NO: 167873 - DNA, 15 bp, Homo sapiens
caaactgtgtggctg

SEQ ID NO: 167874 - DNA, 15 bp, Homo sapiens
gcaaactgtgtggct

SEQ ID NO: 167875 - DNA, 15 bp, Homo sapiens
agcaaactgtgtggc

SEQ ID NO: 167876 - DNA, 15 bp, Homo sapiens
aagcaaactgtgtgg

SEQ ID NO: 167877 - DNA, 15 bp, Homo sapiens
caagcaaactgtgtg

SEQ ID NO: 167878 - DNA, 15 bp, Homo sapiens
tcaagcaaactgtgt

SEQ ID NO: 167879 - DNA, 15 bp, Homo sapiens
ctcaagcaaactgtg

SEQ ID NO: 167880 - DNA, 15 bp, Homo sapiens
tctcaagcaaactgt

SEQ ID NO: 167881 - DNA, 15 bp, Homo sapiens
gtctcaagcaaactg

SEQ ID NO: 167882 - DNA, 15 bp, Homo sapiens
agtctcaagcaaact

SEQ ID NO: 167883 - DNA, 15 bp, Homo sapiens
aagtctcaagcaaac

SEQ ID NO: 167884 - DNA, 15 bp, Homo sapiens
aaagtctcaagcaaa

SEQ ID NO: 167885 - DNA, 15 bp, Homo sapiens
taaagtctcaagcaa

SEQ ID NO: 167886 - DNA, 15 bp, Homo sapiens
ataaagtctcaagca

SEQ ID NO: 167887 - DNA, 15 bp, Homo sapiens
tataaagtctcaagc

SEQ ID NO: 167888 - DNA, 15 bp, Homo sapiens
ttataaagtctcaag

SEQ ID NO: 167889 - DNA, 15 bp, Homo sapiens
tttataaagtctcaa

SEQ ID NO: 167890 - DNA, 15 bp, Homo sapiens
ctttataaagtctca

SEQ ID NO: 167891 - DNA, 15 bp, Homo sapiens
tctttataaagtctc

SEQ ID NO: 167892 - DNA, 15 bp, Homo sapiens
ctctttataaagtct

SEQ ID NO: 167893 - DNA, 15 bp, Homo sapiens
tctctttataaagtc

SEQ ID NO: 167894 - DNA, 15 bp, Homo sapiens
ctctctttataaagt

SEQ ID NO: 167895 - DNA, 15 bp, Homo sapiens
tctctctttataaag

SEQ ID NO: 167896 - DNA, 15 bp, Homo sapiens
ttctctctttataaa

SEQ ID NO: 167897 - DNA, 15 bp, Homo sapiens
attctctctttataa

SEQ ID NO: 167898 - DNA, 15 bp, Homo sapiens
cattctctctttata

SEQ ID NO: 167899 - DNA, 15 bp, Homo sapiens
tcattctctctttat

SEQ ID NO: 167900 - DNA, 15 bp, Homo sapiens
ctcattctctcttta

SEQ ID NO: 167901 - DNA, 15 bp, Homo sapiens
tctcattctctcttt

SEQ ID NO: 167902 - DNA, 15 bp, Homo sapiens
atctcattctctctt

SEQ ID NO: 167903 - DNA, 15 bp, Homo sapiens
catctcattctctct

SEQ ID NO: 167904 - DNA, 15 bp, Homo sapiens
acatctcattctctc

SEQ ID NO: 167905 - DNA, 15 bp, Homo sapiens
tacatctcattctct

SEQ ID NO: 167906 - DNA, 15 bp, Homo sapiens
ctacatctcattctc

SEQ ID NO: 167907 - DNA, 15 bp, Homo sapiens
tctacatctcattct

SEQ ID NO: 167908 - DNA, 15 bp, Homo sapiens
ctctacatctcattc

SEQ ID NO: 167909 - DNA, 15 bp, Homo sapiens
cctctacatctcatt

SEQ ID NO: 167910 - DNA, 15 bp, Homo sapiens
gcctctacatctcat

SEQ ID NO: 167911 - DNA, 15 bp, Homo sapiens
agcctctacatctca

SEQ ID NO: 167912 - DNA, 15 bp, Homo sapiens
cagcctctacatctc

SEQ ID NO: 167913 - DNA, 15 bp, Homo sapiens
ccagcctctacatct

SEQ ID NO: 167914 - DNA, 15 bp, Homo sapiens
cccagcctctacatc

SEQ ID NO: 167915 - DNA, 15 bp, Homo sapiens
gcccagcctctacat

SEQ ID NO: 167916 - DNA, 15 bp, Homo sapiens
ggcccagcctctaca

SEQ ID NO: 167917 - DNA, 15 bp, Homo sapiens
gggcccagcctctac

SEQ ID NO: 167918 - DNA, 15 bp, Homo sapiens
tgggcccagcctcta

SEQ ID NO: 167919 - DNA, 15 bp, Homo sapiens
ttgggcccagcctct

SEQ ID NO: 167920 - DNA, 15 bp, Homo sapiens
tttgggcccagcctc

SEQ ID NO: 167921 - DNA, 15 bp, Homo sapiens
gtttgggcccagcct

SEQ ID NO: 167922 - DNA, 15 bp, Homo sapiens
ggtttgggcccagcc

SEQ ID NO: 167923 - DNA, 15 bp, Homo sapiens
gggtttgggcccagc

SEQ ID NO: 167924 - DNA, 15 bp, Homo sapiens
tgggtttgggcccag

SEQ ID NO: 167925 - DNA, 15 bp, Homo sapiens
gtgggtttgggccca

SEQ ID NO: 167926 - DNA, 15 bp, Homo sapiens
agtgggtttgggccc

SEQ ID NO: 167927 - DNA, 15 bp, Homo sapiens
tagtgggtttgggcc

SEQ ID NO: 167928 - DNA, 15 bp, Homo sapiens
gtagtgggtttgggc

SEQ ID NO: 167929 - DNA, 15 bp, Homo sapiens
ggtagtgggtttggg

SEQ ID NO: 167930 - DNA, 15 bp, Homo sapiens
tggtagtgggtttgg

SEQ ID NO: 167931 - DNA, 15 bp, Homo sapiens
ctggtagtgggtttg

SEQ ID NO: 167932 - DNA, 15 bp, Homo sapiens
cctggtagtgggttt

SEQ ID NO: 167933 - DNA, 15 bp, Homo sapiens
gcctggtagtgggtt

SEQ ID NO: 167934 - DNA, 15 bp, Homo sapiens
agcctggtagtgggt

SEQ ID NO: 167935 - DNA, 15 bp, Homo sapiens
cagcctggtagtggg

SEQ ID NO: 167936 - DNA, 15 bp, Homo sapiens
acagcctggtagtgg

SEQ ID NO: 167937 - DNA, 15 bp, Homo sapiens
cacagcctggtagtg

SEQ ID NO: 167938 - DNA, 15 bp, Homo sapiens
ccacagcctggtagt

SEQ ID NO: 167939 - DNA, 15 bp, Homo sapiens
cccacagcctggtag

SEQ ID NO: 167940 - DNA, 15 bp, Homo sapiens
tcccacagcctggta

SEQ ID NO: 167941 - DNA, 15 bp, Homo sapiens
ttcccacagcctggt

SEQ ID NO: 167942 - DNA, 15 bp, Homo sapiens
attcccacagcctgg

SEQ ID NO: 167943 - DNA, 15 bp, Homo sapiens
cattcccacagcctg

SEQ ID NO: 167944 - DNA, 15 bp, Homo sapiens
ccattcccacagcct

SEQ ID NO: 167945 - DNA, 15 bp, Homo sapiens
cccattcccacagcc

SEQ ID NO: 167946 - DNA, 15 bp, Homo sapiens
ccccattcccacagc

SEQ ID NO: 167947 - DNA, 15 bp, Homo sapiens
cccccattcccacag

SEQ ID NO: 167948 - DNA, 15 bp, Homo sapiens
tcccccattcccaca

SEQ ID NO: 167949 - DNA, 15 bp, Homo sapiens
atcccccattcccac

SEQ ID NO: 167950 - DNA, 15 bp, Homo sapiens
catcccccattccca

SEQ ID NO: 167951 - DNA, 15 bp, Homo sapiens
ccatcccccattccc

SEQ ID NO: 167952 - DNA, 15 bp, Homo sapiens
cccatcccccattcc

SEQ ID NO: 167953 - DNA, 15 bp, Homo sapiens
ccccatcccccattc

SEQ ID NO: 167954 - DNA, 15 bp, Homo sapiens
accccatcccccatt

SEQ ID NO: 167955 - DNA, 15 bp, Homo sapiens
caccccatcccccat

SEQ ID NO: 167956 - DNA, 15 bp, Homo sapiens
gcaccccatccccca

SEQ ID NO: 167957 - DNA, 15 bp, Homo sapiens
agcaccccatccccc

SEQ ID NO: 167958 - DNA, 15 bp, Homo sapiens
aagcaccccatcccc

SEQ ID NO: 167959 - DNA, 15 bp, Homo sapiens
caagcaccccatccc

SEQ ID NO: 167960 - DNA, 15 bp, Homo sapiens
ccaagcaccccatcc

SEQ ID NO: 167961 - DNA, 15 bp, Homo sapiens
gccaagcaccccatc

SEQ ID NO: 167962 - DNA, 15 bp, Homo sapiens
agccaagcaccccat

SEQ ID NO: 167963 - DNA, 15 bp, Homo sapiens
cagccaagcacccca

SEQ ID NO: 167964 - DNA, 15 bp, Homo sapiens
ccagccaagcacccc

SEQ ID NO: 167965 - DNA, 15 bp, Homo sapiens
gccagccaagcaccc

SEQ ID NO: 167966 - DNA, 15 bp, Homo sapiens
tgccagccaagcacc

SEQ ID NO: 167967 - DNA, 15 bp, Homo sapiens
atgccagccaagcac

SEQ ID NO: 167968 - DNA, 15 bp, Homo sapiens
gatgccagccaagca

SEQ ID NO: 167969 - DNA, 15 bp, Homo sapiens
agatgccagccaagc

SEQ ID NO: 167970 - DNA, 15 bp, Homo sapiens
gagatgccagccaag

SEQ ID NO: 167971 - DNA, 15 bp, Homo sapiens
agagatgccagccaa

SEQ ID NO: 167972 - DNA, 15 bp, Homo sapiens
aagagatgccagcca

SEQ ID NO: 167973 - DNA, 15 bp, Homo sapiens
gaagagatgccagcc

SEQ ID NO: 167974 - DNA, 15 bp, Homo sapiens
agaagagatgccagc

SEQ ID NO: 167975 - DNA, 15 bp, Homo sapiens
gagaagagatgccag

SEQ ID NO: 167976 - DNA, 15 bp, Homo sapiens
tgagaagagatgcca

SEQ ID NO: 167977 - DNA, 15 bp, Homo sapiens
ctgagaagagatgcc

SEQ ID NO: 167978 - DNA, 15 bp, Homo sapiens
cctgagaagagatgc

SEQ ID NO: 167979 - DNA, 15 bp, Homo sapiens
ccctgagaagagatg

SEQ ID NO: 167980 - DNA, 15 bp, Homo sapiens
gccctgagaagagat

SEQ ID NO: 167981 - DNA, 15 bp, Homo sapiens
ggccctgagaagaga

SEQ ID NO: 167982 - DNA, 15 bp, Homo sapiens
aggccctgagaagag

SEQ ID NO: 167983 - DNA, 15 bp, Homo sapiens
gaggccctgagaaga

SEQ ID NO: 167984 - DNA, 15 bp, Homo sapiens
ggaggccctgagaag

SEQ ID NO: 167985 - DNA, 15 bp, Homo sapiens
aggaggccctgagaa

SEQ ID NO: 167986 - DNA, 15 bp, Homo sapiens
caggaggccctgaga

SEQ ID NO: 167987 - DNA, 15 bp, Homo sapiens
ccaggaggccctgag

SEQ ID NO: 167988 - DNA, 15 bp, Homo sapiens
accaggaggccctga

SEQ ID NO: 167989 - DNA, 15 bp, Homo sapiens
gaccaggaggccctg

SEQ ID NO: 167990 - DNA, 15 bp, Homo sapiens
tgaccaggaggccct

SEQ ID NO: 167991 - DNA, 15 bp, Homo sapiens
ctgaccaggaggccc

SEQ ID NO: 167992 - DNA, 15 bp, Homo sapiens
gctgaccaggaggcc

SEQ ID NO: 167993 - DNA, 15 bp, Homo sapiens
ggctgaccaggaggc

SEQ ID NO: 167994 - DNA, 15 bp, Homo sapiens
aggctgaccaggagg

SEQ ID NO: 167995 - DNA, 15 bp, Homo sapiens
gaggctgaccaggag

SEQ ID NO: 167996 - DNA, 15 bp, Homo sapiens
tgaggctgaccagga

SEQ ID NO: 167997 - DNA, 15 bp, Homo sapiens
ctgaggctgaccagg

SEQ ID NO: 167998 - DNA, 15 bp, Homo sapiens
cctgaggctgaccag

SEQ ID NO: 167999 - DNA, 15 bp, Homo sapiens
tcctgaggctgacca

SEQ ID NO: 168000 - DNA, 15 bp, Homo sapiens
ctcctgaggctgacc

SEQ ID NO: 168001 - DNA, 15 bp, Homo sapiens
tctcctgaggctgac

SEQ ID NO: 168002 - DNA, 15 bp, Homo sapiens
atctcctgaggctga

SEQ ID NO: 168003 - DNA, 15 bp, Homo sapiens
gatctcctgaggctg

SEQ ID NO: 168004 - DNA, 15 bp, Homo sapiens
agatctcctgaggct

SEQ ID NO: 168005 - DNA, 15 bp, Homo sapiens
tagatctcctgaggc

SEQ ID NO: 168006 - DNA, 15 bp, Homo sapiens
ctagatctcctgagg

SEQ ID NO: 168007 - DNA, 15 bp, Homo sapiens
actagatctcctgag

SEQ ID NO: 168008 - DNA, 15 bp, Homo sapiens
cactagatctcctga

SEQ ID NO: 168009 - DNA, 15 bp, Homo sapiens
gcactagatctcctg

SEQ ID NO: 168010 - DNA, 15 bp, Homo sapiens
agcactagatctcct

SEQ ID NO: 168011 - DNA, 15 bp, Homo sapiens
tagcactagatctcc

SEQ ID NO: 168012 - DNA, 15 bp, Homo sapiens
ttagcactagatctc

SEQ ID NO: 168013 - DNA, 15 bp, Homo sapiens
cttagcactagatct

SEQ ID NO: 168014 - DNA, 15 bp, Homo sapiens
ccttagcactagatc

SEQ ID NO: 168015 - DNA, 15 bp, Homo sapiens
cccttagcactagat

SEQ ID NO: 168016 - DNA, 15 bp, Homo sapiens
acccttagcactaga

SEQ ID NO: 168017 - DNA, 15 bp, Homo sapiens
aacccttagcactag

SEQ ID NO: 168018 - DNA, 15 bp, Homo sapiens
taacccttagcacta

SEQ ID NO: 168019 - DNA, 15 bp, Homo sapiens
gtaacccttagcact

SEQ ID NO: 168020 - DNA, 15 bp, Homo sapiens
agtaacccttagcac

SEQ ID NO: 168021 - DNA, 15 bp, Homo sapiens
gagtaacccttagca

SEQ ID NO: 168022 - DNA, 15 bp, Homo sapiens
agagtaacccttagc

SEQ ID NO: 168023 - DNA, 15 bp, Homo sapiens
cagagtaacccttag

SEQ ID NO: 168024 - DNA, 15 bp, Homo sapiens
gcagagtaaccctta

SEQ ID NO: 168025 - DNA, 15 bp, Homo sapiens
agcagagtaaccctt

SEQ ID NO: 168026 - DNA, 15 bp, Homo sapiens
cagcagagtaaccct

SEQ ID NO: 168027 - DNA, 15 bp, Homo sapiens
ccagcagagtaaccc

SEQ ID NO: 168028 - DNA, 15 bp, Homo sapiens
cccagcagagtaacc

SEQ ID NO: 168029 - DNA, 15 bp, Homo sapiens
ccccagcagagtaac

SEQ ID NO: 168030 - DNA, 15 bp, Homo sapiens
tccccagcagagtaa

SEQ ID NO: 168031 - DNA, 15 bp, Homo sapiens
ttccccagcagagta

SEQ ID NO: 168032 - DNA, 15 bp, Homo sapiens
tttccccagcagagt

SEQ ID NO: 168033 - DNA, 15 bp, Homo sapiens
ttttccccagcagag

SEQ ID NO: 168034 - DNA, 15 bp, Homo sapiens
attttccccagcaga

SEQ ID NO: 168035 - DNA, 15 bp, Homo sapiens
gattttccccagcag

SEQ ID NO: 168036 - DNA, 15 bp, Homo sapiens
agattttccccagca

SEQ ID NO: 168037 - DNA, 15 bp, Homo sapiens
gagattttccccagc

SEQ ID NO: 168038 - DNA, 15 bp, Homo sapiens
tgagattttccccag

SEQ ID NO: 168039 - DNA, 15 bp, Homo sapiens
ttgagattttcccca

SEQ ID NO: 168040 - DNA, 15 bp, Homo sapiens
attgagattttcccc

SEQ ID NO: 168041 - DNA, 15 bp, Homo sapiens
cattgagattttccc

SEQ ID NO: 168042 - DNA, 15 bp, Homo sapiens
ccattgagattttcc

SEQ ID NO: 168043 - DNA, 15 bp, Homo sapiens
gccattgagattttc

SEQ ID NO: 168044 - DNA, 15 bp, Homo sapiens
tgccattgagatttt

SEQ ID NO: 168045 - DNA, 15 bp, Homo sapiens
gtgccattgagattt

SEQ ID NO: 168046 - DNA, 15 bp, Homo sapiens
agtgccattgagatt

SEQ ID NO: 168047 - DNA, 15 bp, Homo sapiens
tagtgccattgagat

SEQ ID NO: 168048 - DNA, 15 bp, Homo sapiens
ctagtgccattgaga

SEQ ID NO: 168049 - DNA, 15 bp, Homo sapiens
tctagtgccattgag

SEQ ID NO: 168050 - DNA, 15 bp, Homo sapiens
ctctagtgccattga

SEQ ID NO: 168051 - DNA, 15 bp, Homo sapiens
tctctagtgccattg

SEQ ID NO: 168052 - DNA, 15 bp, Homo sapiens
gtctctagtgccatt

SEQ ID NO: 168053 - DNA, 15 bp, Homo sapiens
ggtctctagtgccat

SEQ ID NO: 168054 - DNA, 15 bp, Homo sapiens
tggtctctagtgcca

SEQ ID NO: 168055 - DNA, 15 bp, Homo sapiens
gtggtctctagtgcc

SEQ ID NO: 168056 - DNA, 15 bp, Homo sapiens
agtggtctctagtgc

SEQ ID NO: 168057 - DNA, 15 bp, Homo sapiens
aagtggtctctagtg

SEQ ID NO: 168058 - DNA, 15 bp, Homo sapiens
caagtggtctctagt

SEQ ID NO: 168059 - DNA, 15 bp, Homo sapiens
tcaagtggtctctag

SEQ ID NO: 168060 - DNA, 15 bp, Homo sapiens
ctcaagtggtctcta

SEQ ID NO: 168061 - DNA, 15 bp, Homo sapiens
gctcaagtggtctct

SEQ ID NO: 168062 - DNA, 15 bp, Homo sapiens
tgctcaagtggtctc

SEQ ID NO: 168063 - DNA, 15 bp, Homo sapiens
gtgctcaagtggtct

SEQ ID NO: 168064 - DNA, 15 bp, Homo sapiens
tgtgctcaagtggtc

SEQ ID NO: 168065 - DNA, 15 bp, Homo sapiens
ctgtgctcaagtggt

SEQ ID NO: 168066 - DNA, 15 bp, Homo sapiens
gctgtgctcaagtgg

SEQ ID NO: 168067 - DNA, 15 bp, Homo sapiens
agctgtgctcaagtg

SEQ ID NO: 168068 - DNA, 15 bp, Homo sapiens
gagctgtgctcaagt

SEQ ID NO: 168069 - DNA, 15 bp, Homo sapiens
agagctgtgctcaag

SEQ ID NO: 168070 - DNA, 15 bp, Homo sapiens
aagagctgtgctcaa

SEQ ID NO: 168071 - DNA, 15 bp, Homo sapiens
taagagctgtgctca

SEQ ID NO: 168072 - DNA, 15 bp, Homo sapiens
ctaagagctgtgctc

SEQ ID NO: 168073 - DNA, 15 bp, Homo sapiens
cctaagagctgtgct

SEQ ID NO: 168074 - DNA, 15 bp, Homo sapiens
tcctaagagctgtgc

SEQ ID NO: 168075 - DNA, 15 bp, Homo sapiens
ttcctaagagctgtg

SEQ ID NO: 168076 - DNA, 15 bp, Homo sapiens
gttcctaagagctgt

SEQ ID NO: 168077 - DNA, 15 bp, Homo sapiens
agttcctaagagctg

SEQ ID NO: 168078 - DNA, 15 bp, Homo sapiens
cagttcctaagagct

SEQ ID NO: 168079 - DNA, 15 bp, Homo sapiens
tcagttcctaagagc

SEQ ID NO: 168080 - DNA, 15 bp, Homo sapiens
ctcagttcctaagag

SEQ ID NO: 168081 - DNA, 15 bp, Homo sapiens
cctcagttcctaaga

SEQ ID NO: 168082 - DNA, 15 bp, Homo sapiens
tcctcagttcctaag

SEQ ID NO: 168083 - DNA, 15 bp, Homo sapiens
ctcctcagttcctaa

SEQ ID NO: 168084 - DNA, 15 bp, Homo sapiens
gctcctcagttccta

SEQ ID NO: 168085 - DNA, 15 bp, Homo sapiens
ggctcctcagttcct

SEQ ID NO: 168086 - DNA, 15 bp, Homo sapiens
tggctcctcagttcc

SEQ ID NO: 168087 - DNA, 15 bp, Homo sapiens
ctggctcctcagttc

SEQ ID NO: 168088 - DNA, 15 bp, Homo sapiens
gctggctcctcagtt

SEQ ID NO: 168089 - DNA, 15 bp, Homo sapiens
agctggctcctcagt

SEQ ID NO: 168090 - DNA, 15 bp, Homo sapiens
tagctggctcctcag

SEQ ID NO: 168091 - DNA, 15 bp, Homo sapiens
gtagctggctcctca

SEQ ID NO: 168092 - DNA, 15 bp, Homo sapiens
agtagctggctcctc

SEQ ID NO: 168093 - DNA, 15 bp, Homo sapiens
aagtagctggctcct

SEQ ID NO: 168094 - DNA, 15 bp, Homo sapiens
taagtagctggctcc

SEQ ID NO: 168095 - DNA, 15 bp, Homo sapiens
ctaagtagctggctc

SEQ ID NO: 168096 - DNA, 15 bp, Homo sapiens
gctaagtagctggct

SEQ ID NO: 168097 - DNA, 15 bp, Homo sapiens
tgctaagtagctggc

SEQ ID NO: 168098 - DNA, 15 bp, Homo sapiens
atgctaagtagctgg

SEQ ID NO: 168099 - DNA, 15 bp, Homo sapiens
gatgctaagtagctg

SEQ ID NO: 168100 - DNA, 15 bp, Homo sapiens
ggatgctaagtagct

SEQ ID NO: 168101 - DNA, 15 bp, Homo sapiens
gggatgctaagtagc

SEQ ID NO: 168102 - DNA, 15 bp, Homo sapiens
tgggatgctaagtag

SEQ ID NO: 168103 - DNA, 15 bp, Homo sapiens
ctgggatgctaagta

SEQ ID NO: 168104 - DNA, 15 bp, Homo sapiens
tctgggatgctaagt

SEQ ID NO: 168105 - DNA, 15 bp, Homo sapiens
ttctgggatgctaag

SEQ ID NO: 168106 - DNA, 15 bp, Homo sapiens
attctgggatgctaa

SEQ ID NO: 168107 - DNA, 15 bp, Homo sapiens
gattctgggatgcta

SEQ ID NO: 168108 - DNA, 15 bp, Homo sapiens
ggattctgggatgct

SEQ ID NO: 168109 - DNA, 15 bp, Homo sapiens
gggattctgggatgc

SEQ ID NO: 168110 - DNA, 15 bp, Homo sapiens
tgggattctgggatg

SEQ ID NO: 168111 - DNA, 15 bp, Homo sapiens
ttgggattctgggat

SEQ ID NO: 168112 - DNA, 15 bp, Homo sapiens
attgggattctggga

SEQ ID NO: 168113 - DNA, 15 bp, Homo sapiens
cattgggattctggg

SEQ ID NO: 168114 - DNA, 15 bp, Homo sapiens
gcattgggattctgg

SEQ ID NO: 168115 - DNA, 15 bp, Homo sapiens
ggcattgggattctg

SEQ ID NO: 168116 - DNA, 15 bp, Homo sapiens
gggcattgggattct

SEQ ID NO: 168117 - DNA, 15 bp, Homo sapiens
tgggcattgggattc

SEQ ID NO: 168118 - DNA, 15 bp, Homo sapiens
atgggcattgggatt

SEQ ID NO: 168119 - DNA, 15 bp, Homo sapiens
catgggcattgggat

SEQ ID NO: 168120 - DNA, 15 bp, Homo sapiens
ccatgggcattggga

SEQ ID NO: 168121 - DNA, 15 bp, Homo sapiens
gccatgggcattggg

SEQ ID NO: 168122 - DNA, 15 bp, Homo sapiens
ggccatgggcattgg

SEQ ID NO: 168123 - DNA, 15 bp, Homo sapiens
tggccatgggcattg

SEQ ID NO: 168124 - DNA, 15 bp, Homo sapiens
ctggccatgggcatt

SEQ ID NO: 168125 - DNA, 15 bp, Homo sapiens
tctggccatgggcat

SEQ ID NO: 168126 - DNA, 15 bp, Homo sapiens
ctctggccatgggca

SEQ ID NO: 168127 - DNA, 15 bp, Homo sapiens
gctctggccatgggc

SEQ ID NO: 168128 - DNA, 15 bp, Homo sapiens
ggctctggccatggg

SEQ ID NO: 168129 - DNA, 15 bp, Homo sapiens
tggctctggccatgg

SEQ ID NO: 168130 - DNA, 15 bp, Homo sapiens
ctggctctggccatg

SEQ ID NO: 168131 - DNA, 15 bp, Homo sapiens
tctggctctggccat

SEQ ID NO: 168132 - DNA, 15 bp, Homo sapiens
ctctggctctggcca

SEQ ID NO: 168133 - DNA, 15 bp, Homo sapiens
gctctggctctggcc

SEQ ID NO: 168134 - DNA, 15 bp, Homo sapiens
agctctggctctggc

SEQ ID NO: 168135 - DNA, 15 bp, Homo sapiens
cagctctggctctgg

SEQ ID NO: 168136 - DNA, 15 bp, Homo sapiens
gcagctctggctctg

SEQ ID NO: 168137 - DNA, 15 bp, Homo sapiens
agcagctctggctct

SEQ ID NO: 168138 - DNA, 15 bp, Homo sapiens
aagcagctctggctc

SEQ ID NO: 168139 - DNA, 15 bp, Homo sapiens
taagcagctctggct

SEQ ID NO: 168140 - DNA, 15 bp, Homo sapiens
ctaagcagctctggc

SEQ ID NO: 168141 - DNA, 15 bp, Homo sapiens
tctaagcagctctgg

SEQ ID NO: 168142 - DNA, 15 bp, Homo sapiens
ttctaagcagctctg

SEQ ID NO: 168143 - DNA, 15 bp, Homo sapiens
cttctaagcagctct

SEQ ID NO: 168144 - DNA, 15 bp, Homo sapiens
tcttctaagcagctc

SEQ ID NO: 168145 - DNA, 15 bp, Homo sapiens
ttcttctaagcagct

SEQ ID NO: 168146 - DNA, 15 bp, Homo sapiens
tttcttctaagcagc

SEQ ID NO: 168147 - DNA, 15 bp, Homo sapiens
ttttcttctaagcag

SEQ ID NO: 168148 - DNA, 15 bp, Homo sapiens
cttttcttctaagca

SEQ ID NO: 168149 - DNA, 15 bp, Homo sapiens
gcttttcttctaagc

SEQ ID NO: 168150 - DNA, 15 bp, Homo sapiens
tgcttttcttctaag

SEQ ID NO: 168151 - DNA, 15 bp, Homo sapiens
ttgcttttcttctaa

SEQ ID NO: 168152 - DNA, 15 bp, Homo sapiens
tttgcttttcttcta

SEQ ID NO: 168153 - DNA, 15 bp, Homo sapiens
ctttgcttttcttct

SEQ ID NO: 168154 - DNA, 15 bp, Homo sapiens
actttgcttttcttc

SEQ ID NO: 168155 - DNA, 15 bp, Homo sapiens
gactttgcttttctt

SEQ ID NO: 168156 - DNA, 15 bp, Homo sapiens
ggactttgcttttct

SEQ ID NO: 168157 - DNA, 15 bp, Homo sapiens
cggactttgcttttc

SEQ ID NO: 168158 - DNA, 15 bp, Homo sapiens
gcggactttgctttt

SEQ ID NO: 168159 - DNA, 15 bp, Homo sapiens
tgcggactttgcttt

SEQ ID NO: 168160 - DNA, 15 bp, Homo sapiens
ctgcggactttgctt

SEQ ID NO: 168161 - DNA, 15 bp, Homo sapiens
cctgcggactttgct

SEQ ID NO: 168162 - DNA, 15 bp, Homo sapiens
gcctgcggactttgc

SEQ ID NO: 168163 - DNA, 15 bp, Homo sapiens
agcctgcggactttg

SEQ ID NO: 168164 - DNA, 15 bp, Homo sapiens
cagcctgcggacttt

SEQ ID NO: 168165 - DNA, 15 bp, Homo sapiens
gcagcctgcggactt

SEQ ID NO: 168166 - DNA, 15 bp, Homo sapiens
tgcagcctgcggact

SEQ ID NO: 168167 - DNA, 15 bp, Homo sapiens
atgcagcctgcggac

SEQ ID NO: 168168 - DNA, 15 bp, Homo sapiens
catgcagcctgcgga

SEQ ID NO: 168169 - DNA, 15 bp, Homo sapiens
ccatgcagcctgcgg

SEQ ID NO: 168170 - DNA, 15 bp, Homo sapiens
tccatgcagcctgcg

SEQ ID NO: 168171 - DNA, 15 bp, Homo sapiens
gtccatgcagcctgc

SEQ ID NO: 168172 - DNA, 15 bp, Homo sapiens
agtccatgcagcctg

SEQ ID NO: 168173 - DNA, 15 bp, Homo sapiens
cagtccatgcagcct

SEQ ID NO: 168174 - DNA, 15 bp, Homo sapiens
tcagtccatgcagcc

SEQ ID NO: 168175 - DNA, 15 bp, Homo sapiens
ctcagtccatgcagc

SEQ ID NO: 168176 - DNA, 15 bp, Homo sapiens
tctcagtccatgcag

SEQ ID NO: 168177 - DNA, 15 bp, Homo sapiens
ttctcagtccatgca

SEQ ID NO: 168178 - DNA, 15 bp, Homo sapiens
gttctcagtccatgc

SEQ ID NO: 168179 - DNA, 15 bp, Homo sapiens
ggttctcagtccatg

SEQ ID NO: 168180 - DNA, 15 bp, Homo sapiens
tggttctcagtccat

SEQ ID NO: 168181 - DNA, 15 bp, Homo sapiens
gtggttctcagtcca

SEQ ID NO: 168182 - DNA, 15 bp, Homo sapiens
ggtggttctcagtcc

SEQ ID NO: 168183 - DNA, 15 bp, Homo sapiens
aggtggttctcagtc

SEQ ID NO: 168184 - DNA, 15 bp, Homo sapiens
gaggtggttctcagt

SEQ ID NO: 168185 - DNA, 15 bp, Homo sapiens
tgaggtggttctcag

SEQ ID NO: 168186 - DNA, 15 bp, Homo sapiens
gtgaggtggttctca

SEQ ID NO: 168187 - DNA, 15 bp, Homo sapiens
ggtgaggtggttctc

SEQ ID NO: 168188 - DNA, 15 bp, Homo sapiens
aggtgaggtggttct

SEQ ID NO: 168189 - DNA, 15 bp, Homo sapiens
caggtgaggtggttc

SEQ ID NO: 168190 - DNA, 15 bp, Homo sapiens
ccaggtgaggtggtt

SEQ ID NO: 168191 - DNA, 15 bp, Homo sapiens
gccaggtgaggtggt

SEQ ID NO: 168192 - DNA, 15 bp, Homo sapiens
agccaggtgaggtgg

SEQ ID NO: 168193 - DNA, 15 bp, Homo sapiens
cagccaggtgaggtg

SEQ ID NO: 168194 - DNA, 15 bp, Homo sapiens
gcagccaggtgaggt

SEQ ID NO: 168195 - DNA, 15 bp, Homo sapiens
tgcagccaggtgagg

SEQ ID NO: 168196 - DNA, 15 bp, Homo sapiens
gtgcagccaggtgag

SEQ ID NO: 168197 - DNA, 15 bp, Homo sapiens
tgtgcagccaggtga

SEQ ID NO: 168198 - DNA, 15 bp, Homo sapiens
atgtgcagccaggtg

SEQ ID NO: 168199 - DNA, 15 bp, Homo sapiens
aatgtgcagccaggt

SEQ ID NO: 168200 - DNA, 15 bp, Homo sapiens
gaatgtgcagccagg

SEQ ID NO: 168201 - DNA, 15 bp, Homo sapiens
agaatgtgcagccag

SEQ ID NO: 168202 - DNA, 15 bp, Homo sapiens
gagaatgtgcagcca

SEQ ID NO: 168203 - DNA, 15 bp, Homo sapiens
agagaatgtgcagcc

SEQ ID NO: 168204 - DNA, 15 bp, Homo sapiens
cagagaatgtgcagc

SEQ ID NO: 168205 - DNA, 15 bp, Homo sapiens
tcagagaatgtgcag

SEQ ID NO: 168206 - DNA, 15 bp, Homo sapiens
ctcagagaatgtgca

SEQ ID NO: 168207 - DNA, 15 bp, Homo sapiens
actcagagaatgtgc

SEQ ID NO: 168208 - DNA, 15 bp, Homo sapiens
cactcagagaatgtg

SEQ ID NO: 168209 - DNA, 15 bp, Homo sapiens
ccactcagagaatgt

SEQ ID NO: 168210 - DNA, 15 bp, Homo sapiens
gccactcagagaatg

SEQ ID NO: 168211 - DNA, 15 bp, Homo sapiens
ggccactcagagaat

SEQ ID NO: 168212 - DNA, 15 bp, Homo sapiens
aggccactcagagaa

SEQ ID NO: 168213 - DNA, 15 bp, Homo sapiens
aaggccactcagaga

SEQ ID NO: 168214 - DNA, 15 bp, Homo sapiens
caaggccactcagag

SEQ ID NO: 168215 - DNA, 15 bp, Homo sapiens
tcaaggccactcaga

SEQ ID NO: 168216 - DNA, 15 bp, Homo sapiens
gtcaaggccactcag

SEQ ID NO: 168217 - DNA, 15 bp, Homo sapiens
ggtcaaggccactca

SEQ ID NO: 168218 - DNA, 15 bp, Homo sapiens
tggtcaaggccactc

SEQ ID NO: 168219 - DNA, 15 bp, Homo sapiens
atggtcaaggccact

SEQ ID NO: 168220 - DNA, 15 bp, Homo sapiens
catggtcaaggccac

SEQ ID NO: 168221 - DNA, 15 bp, Homo sapiens
gcatggtcaaggcca

SEQ ID NO: 168222 - DNA, 15 bp, Homo sapiens
agcatggtcaaggcc

SEQ ID NO: 168223 - DNA, 15 bp, Homo sapiens
cagcatggtcaaggc

SEQ ID NO: 168224 - DNA, 15 bp, Homo sapiens
acagcatggtcaagg

SEQ ID NO: 168225 - DNA, 15 bp, Homo sapiens
aacagcatggtcaag

SEQ ID NO: 168226 - DNA, 15 bp, Homo sapiens
gaacagcatggtcaa

SEQ ID NO: 168227 - DNA, 15 bp, Homo sapiens
agaacagcatggtca

SEQ ID NO: 168228 - DNA, 15 bp, Homo sapiens
gagaacagcatggtc

SEQ ID NO: 168229 - DNA, 15 bp, Homo sapiens
agagaacagcatggt

SEQ ID NO: 168230 - DNA, 15 bp, Homo sapiens
cagagaacagcatgg

SEQ ID NO: 168231 - DNA, 15 bp, Homo sapiens
tcagagaacagcatg

SEQ ID NO: 168232 - DNA, 15 bp, Homo sapiens
ctcagagaacagcat

SEQ ID NO: 168233 - DNA, 15 bp, Homo sapiens
gctcagagaacagca

SEQ ID NO: 168234 - DNA, 15 bp, Homo sapiens
ggctcagagaacagc

SEQ ID NO: 168235 - DNA, 15 bp, Homo sapiens
aggctcagagaacag

SEQ ID NO: 168236 - DNA, 15 bp, Homo sapiens
gaggctcagagaaca

SEQ ID NO: 168237 - DNA, 15 bp, Homo sapiens
tgaggctcagagaac

SEQ ID NO: 168238 - DNA, 15 bp, Homo sapiens
ctgaggctcagagaa

SEQ ID NO: 168239 - DNA, 15 bp, Homo sapiens
actgaggctcagaga

SEQ ID NO: 168240 - DNA, 15 bp, Homo sapiens
aactgaggctcagag

SEQ ID NO: 168241 - DNA, 15 bp, Homo sapiens
aaactgaggctcaga

SEQ ID NO: 168242 - DNA, 15 bp, Homo sapiens
gaaactgaggctcag

SEQ ID NO: 168243 - DNA, 15 bp, Homo sapiens
aggaaactgaggctc

SEQ ID NO: 168244 - DNA, 15 bp, Homo sapiens
tgatgaggaaactga

SEQ ID NO: 168245 - DNA, 15 bp, Homo sapiens
ttgatgaggaaactg

SEQ ID NO: 168246 - DNA, 15 bp, Homo sapiens
attgatgaggaaact

SEQ ID NO: 168247 - DNA, 15 bp, Homo sapiens
cattgatgaggaaac

SEQ ID NO: 168248 - DNA, 15 bp, Homo sapiens
tcattgatgaggaaa

SEQ ID NO: 168249 - DNA, 15 bp, Homo sapiens
atcattgatgaggaa

SEQ ID NO: 168250 - DNA, 15 bp, Homo sapiens
tatcattgatgagga

SEQ ID NO: 168251 - DNA, 15 bp, Homo sapiens
ctatcattgatgagg

SEQ ID NO: 168252 - DNA, 15 bp, Homo sapiens
tctatcattgatgag

SEQ ID NO: 168253 - DNA, 15 bp, Homo sapiens
ctctatcattgatga

SEQ ID NO: 168254 - DNA, 15 bp, Homo sapiens
actctatcattgatg

SEQ ID NO: 168255 - DNA, 15 bp, Homo sapiens
cactctatcattgat

SEQ ID NO: 168256 - DNA, 15 bp, Homo sapiens
ccactctatcattga

SEQ ID NO: 168257 - DNA, 15 bp, Homo sapiens
tccactctatcattg

SEQ ID NO: 168258 - DNA, 15 bp, Homo sapiens
ctccactctatcatt

SEQ ID NO: 168259 - DNA, 15 bp, Homo sapiens
actccactctatcat

SEQ ID NO: 168260 - DNA, 15 bp, Homo sapiens
aactccactctatca

SEQ ID NO: 168261 - DNA, 15 bp, Homo sapiens
acctctgtgtggctt

SEQ ID NO: 168262 - DNA, 15 bp, Homo sapiens
cacctctgtgtggct

SEQ ID NO: 168263 - DNA, 15 bp, Homo sapiens
ccacctctgtgtggc

SEQ ID NO: 168264 - DNA, 15 bp, Homo sapiens
cccacctctgtgtgg

SEQ ID NO: 168265 - DNA, 15 bp, Homo sapiens
gcccacctctgtgtg

SEQ ID NO: 168266 - DNA, 15 bp, Homo sapiens
ggcccacctctgtgt

SEQ ID NO: 168267 - DNA, 15 bp, Homo sapiens
gggcccacctctgtg

SEQ ID NO: 168268 - DNA, 15 bp, Homo sapiens
cgggcccacctctgt

SEQ ID NO: 168269 - DNA, 15 bp, Homo sapiens
ccgggcccacctctg

SEQ ID NO: 168270 - DNA, 15 bp, Homo sapiens
accgggcccacctct

SEQ ID NO: 168271 - DNA, 15 bp, Homo sapiens
aaccgggcccacctc

SEQ ID NO: 168272 - DNA, 15 bp, Homo sapiens
caaccgggcccacct

SEQ ID NO: 168273 - DNA, 15 bp, Homo sapiens
ccaaccgggcccacc

SEQ ID NO: 168274 - DNA, 15 bp, Homo sapiens
cccaaccgggcccac

SEQ ID NO: 168275 - DNA, 15 bp, Homo sapiens
gcccaaccgggccca

SEQ ID NO: 168276 - DNA, 15 bp, Homo sapiens
tgcccaaccgggccc

SEQ ID NO: 168277 - DNA, 15 bp, Homo sapiens
ctgcccaaccgggcc

SEQ ID NO: 168278 - DNA, 15 bp, Homo sapiens
gctgcccaaccgggc

SEQ ID NO: 168279 - DNA, 15 bp, Homo sapiens
ggctgcccaaccggg

SEQ ID NO: 168280 - DNA, 15 bp, Homo sapiens
aggctgcccaaccgg

SEQ ID NO: 168281 - DNA, 15 bp, Homo sapiens
caggctgcccaaccg

SEQ ID NO: 168282 - DNA, 15 bp, Homo sapiens
acaggctgcccaacc

SEQ ID NO: 168283 - DNA, 15 bp, Homo sapiens
gacaggctgcccaac

SEQ ID NO: 168284 - DNA, 15 bp, Homo sapiens
agacaggctgcccaa

SEQ ID NO: 168285 - DNA, 15 bp, Homo sapiens
aagacaggctgccca

SEQ ID NO: 168286 - DNA, 15 bp, Homo sapiens
caagacaggctgccc

SEQ ID NO: 168287 - DNA, 15 bp, Homo sapiens
ccaagacaggctgcc

SEQ ID NO: 168288 - DNA, 15 bp, Homo sapiens
cccaagacaggctgc

SEQ ID NO: 168289 - DNA, 15 bp, Homo sapiens
acccaagacaggctg

SEQ ID NO: 168290 - DNA, 15 bp, Homo sapiens
cacccaagacaggct

SEQ ID NO: 168291 - DNA, 15 bp, Homo sapiens
tcacccaagacaggc

SEQ ID NO: 168292 - DNA, 15 bp, Homo sapiens
ctcacccaagacagg

SEQ ID NO: 168293 - DNA, 15 bp, Homo sapiens
actcacccaagacag

SEQ ID NO: 168294 - DNA, 15 bp, Homo sapiens
aactcacccaagaca

SEQ ID NO: 168295 - DNA, 15 bp, Homo sapiens
aaactcacccaagac

SEQ ID NO: 168296 - DNA, 15 bp, Homo sapiens
caaactcacccaaga

SEQ ID NO: 168297 - DNA, 15 bp, Homo sapiens
ccaaactcacccaag

SEQ ID NO: 168298 - DNA, 15 bp, Homo sapiens
cccaaactcacccaa

SEQ ID NO: 168299 - DNA, 15 bp, Homo sapiens
acccaaactcaccca

SEQ ID NO: 168300 - DNA, 15 bp, Homo sapiens
aacccaaactcaccc

SEQ ID NO: 168301 - DNA, 15 bp, Homo sapiens
taacccaaactcacc

SEQ ID NO: 168302 - DNA, 15 bp, Homo sapiens
gtaacccaaactcac

SEQ ID NO: 168303 - DNA, 15 bp, Homo sapiens
agtaacccaaactca

SEQ ID NO: 168304 - DNA, 15 bp, Homo sapiens
cagtaacccaaactc

SEQ ID NO: 168305 - DNA, 15 bp, Homo sapiens
acagtaacccaaact

SEQ ID NO: 168306 - DNA, 15 bp, Homo sapiens
tacagtaacccaaac

SEQ ID NO: 168307 - DNA, 15 bp, Homo sapiens
ttacagtaacccaaa

SEQ ID NO: 168308 - DNA, 15 bp, Homo sapiens
tttacagtaacccaa

SEQ ID NO: 168309 - DNA, 15 bp, Homo sapiens
ttttacagtaaccca

SEQ ID NO: 168310 - DNA, 15 bp, Homo sapiens
cttttacagtaaccc

SEQ ID NO: 168311 - DNA, 15 bp, Homo sapiens
gcttttacagtaacc

SEQ ID NO: 168312 - DNA, 15 bp, Homo sapiens
agcttttacagtaac

SEQ ID NO: 168313 - DNA, 15 bp, Homo sapiens
gagcttttacagtaa

SEQ ID NO: 168314 - DNA, 15 bp, Homo sapiens
tgagcttttacagta

SEQ ID NO: 168315 - DNA, 15 bp, Homo sapiens
ctgagcttttacagt

SEQ ID NO: 168316 - DNA, 15 bp, Homo sapiens
tctgagcttttacag

SEQ ID NO: 168317 - DNA, 15 bp, Homo sapiens
gtctgagcttttaca

SEQ ID NO: 168318 - DNA, 15 bp, Homo sapiens
tgtctgagcttttac

SEQ ID NO: 168319 - DNA, 15 bp, Homo sapiens
gtgtctgagctttta

SEQ ID NO: 168320 - DNA, 15 bp, Homo sapiens
agtgtctgagctttt

SEQ ID NO: 168321 - DNA, 15 bp, Homo sapiens
aagtgtctgagcttt

SEQ ID NO: 168322 - DNA, 15 bp, Homo sapiens
caagtgtctgagctt

SEQ ID NO: 168323 - DNA, 15 bp, Homo sapiens
ccaagtgtctgagct

SEQ ID NO: 168324 - DNA, 15 bp, Homo sapiens
cccaagtgtctgagc

SEQ ID NO: 168325 - DNA, 15 bp, Homo sapiens
acccaagtgtctgag

SEQ ID NO: 168326 - DNA, 15 bp, Homo sapiens
aacccaagtgtctga

SEQ ID NO: 168327 - DNA, 15 bp, Homo sapiens
gaacccaagtgtctg

SEQ ID NO: 168328 - DNA, 15 bp, Homo sapiens
agaacccaagtgtct

SEQ ID NO: 168329 - DNA, 15 bp, Homo sapiens
aagaacccaagtgtc

SEQ ID NO: 168330 - DNA, 15 bp, Homo sapiens
caagaacccaagtgt

SEQ ID NO: 168331 - DNA, 15 bp, Homo sapiens
ccaagaacccaagtg

SEQ ID NO: 168332 - DNA, 15 bp, Homo sapiens
gccaagaacccaagt

SEQ ID NO: 168333 - DNA, 15 bp, Homo sapiens
agccaagaacccaag

SEQ ID NO: 168334 - DNA, 15 bp, Homo sapiens
gagccaagaacccaa

SEQ ID NO: 168335 - DNA, 15 bp, Homo sapiens
agagccaagaaccca

SEQ ID NO: 168336 - DNA, 15 bp, Homo sapiens
cagagccaagaaccc

SEQ ID NO: 168337 - DNA, 15 bp, Homo sapiens
acagagccaagaacc

SEQ ID NO: 168338 - DNA, 15 bp, Homo sapiens
tacagagccaagaac

SEQ ID NO: 168339 - DNA, 15 bp, Homo sapiens
atacagagccaagaa

SEQ ID NO: 168340 - DNA, 15 bp, Homo sapiens
catacagagccaaga

SEQ ID NO: 168341 - DNA, 15 bp, Homo sapiens
gcatacagagccaag

SEQ ID NO: 168342 - DNA, 15 bp, Homo sapiens
ggcatacagagccaa

SEQ ID NO: 168343 - DNA, 15 bp, Homo sapiens
gggcatacagagcca

SEQ ID NO: 168344 - DNA, 15 bp, Homo sapiens
agggcatacagagcc

SEQ ID NO: 168345 - DNA, 15 bp, Homo sapiens
gagggcatacagagc

SEQ ID NO: 168346 - DNA, 15 bp, Homo sapiens
ggagggcatacagag

SEQ ID NO: 168347 - DNA, 15 bp, Homo sapiens
gggagggcatacaga

SEQ ID NO: 168348 - DNA, 15 bp, Homo sapiens
agggagggcatacag

SEQ ID NO: 168349 - DNA, 15 bp, Homo sapiens
gagggagggcataca

SEQ ID NO: 168350 - DNA, 15 bp, Homo sapiens
ggagggagggcatac

SEQ ID NO: 168351 - DNA, 15 bp, Homo sapiens
gggagggagggcata

SEQ ID NO: 168352 - DNA, 15 bp, Homo sapiens
agggagggagggcat

SEQ ID NO: 168353 - DNA, 15 bp, Homo sapiens
cagggagggagggca

SEQ ID NO: 168354 - DNA, 15 bp, Homo sapiens
acagggagggagggc

SEQ ID NO: 168355 - DNA, 15 bp, Homo sapiens
gacagggagggaggg

SEQ ID NO: 168356 - DNA, 15 bp, Homo sapiens
agacagggagggagg

SEQ ID NO: 168357 - DNA, 15 bp, Homo sapiens
aagacagggagggag

SEQ ID NO: 168358 - DNA, 15 bp, Homo sapiens
gaagacagggaggga

SEQ ID NO: 168359 - DNA, 15 bp, Homo sapiens
ggaagacagggaggg

SEQ ID NO: 168360 - DNA, 15 bp, Homo sapiens
aggaagacagggagg

SEQ ID NO: 168361 - DNA, 15 bp, Homo sapiens
taggaagacagggag

SEQ ID NO: 168362 - DNA, 15 bp, Homo sapiens
ttaggaagacaggga

SEQ ID NO: 168363 - DNA, 15 bp, Homo sapiens
tttaggaagacaggg

SEQ ID NO: 168364 - DNA, 15 bp, Homo sapiens
ctttaggaagacagg

SEQ ID NO: 168365 - DNA, 15 bp, Homo sapiens
gctttaggaagacag

SEQ ID NO: 168366 - DNA, 15 bp, Homo sapiens
ggctttaggaagaca

SEQ ID NO: 168367 - DNA, 15 bp, Homo sapiens
tggctttaggaagac

SEQ ID NO: 168368 - DNA, 15 bp, Homo sapiens
ttggctttaggaaga

SEQ ID NO: 168369 - DNA, 15 bp, Homo sapiens
cttggctttaggaag

SEQ ID NO: 168370 - DNA, 15 bp, Homo sapiens
tcttggctttaggaa

SEQ ID NO: 168371 - DNA, 15 bp, Homo sapiens
ttcttggctttagga

SEQ ID NO: 168372 - DNA, 15 bp, Homo sapiens
tttcttggctttagg

SEQ ID NO: 168373 - DNA, 15 bp, Homo sapiens
ttttcttggctttag

SEQ ID NO: 168374 - DNA, 15 bp, Homo sapiens
tttttcttggcttta

SEQ ID NO: 168375 - DNA, 15 bp, Homo sapiens
atttttcttggcttt

SEQ ID NO: 168376 - DNA, 15 bp, Homo sapiens
catttttcttggctt

SEQ ID NO: 168377 - DNA, 15 bp, Homo sapiens
tcatttttcttggct

SEQ ID NO: 168378 - DNA, 15 bp, Homo sapiens
ttcatttttcttggc

SEQ ID NO: 168379 - DNA, 15 bp, Homo sapiens
tttcatttttcttgg

SEQ ID NO: 168380 - DNA, 15 bp, Homo sapiens
ctttcatttttcttg

SEQ ID NO: 168381 - DNA, 15 bp, Homo sapiens
cctttcatttttctt

SEQ ID NO: 168382 - DNA, 15 bp, Homo sapiens
gcctttcatttttct

SEQ ID NO: 168383 - DNA, 15 bp, Homo sapiens
cgcctttcatttttc

SEQ ID NO: 168384 - DNA, 15 bp, Homo sapiens
tcgcctttcattttt

SEQ ID NO: 168385 - DNA, 15 bp, Homo sapiens
ctcgcctttcatttt

SEQ ID NO: 168386 - DNA, 15 bp, Homo sapiens
cctcgcctttcattt

SEQ ID NO: 168387 - DNA, 15 bp, Homo sapiens
ccctcgcctttcatt

SEQ ID NO: 168388 - DNA, 15 bp, Homo sapiens
gccctcgcctttcat

SEQ ID NO: 168389 - DNA, 15 bp, Homo sapiens
agccctcgcctttca

SEQ ID NO: 168390 - DNA, 15 bp, Homo sapiens
cagccctcgcctttc

SEQ ID NO: 168391 - DNA, 15 bp, Homo sapiens
acagccctcgccttt

SEQ ID NO: 168392 - DNA, 15 bp, Homo sapiens
gacagccctcgcctt

SEQ ID NO: 168393 - DNA, 15 bp, Homo sapiens
agacagccctcgcct

SEQ ID NO: 168394 - DNA, 15 bp, Homo sapiens
cagacagccctcgcc

SEQ ID NO: 168395 - DNA, 15 bp, Homo sapiens
tcagacagccctcgc

SEQ ID NO: 168396 - DNA, 15 bp, Homo sapiens
ttcagacagccctcg

SEQ ID NO: 168397 - DNA, 15 bp, Homo sapiens
gttcagacagccctc

SEQ ID NO: 168398 - DNA, 15 bp, Homo sapiens
agttcagacagccct

SEQ ID NO: 168399 - DNA, 15 bp, Homo sapiens
tagttcagacagccc

SEQ ID NO: 168400 - DNA, 15 bp, Homo sapiens
ctagttcagacagcc

SEQ ID NO: 168401 - DNA, 15 bp, Homo sapiens
cctagttcagacagc

SEQ ID NO: 168402 - DNA, 15 bp, Homo sapiens
ccctagttcagacag

SEQ ID NO: 168403 - DNA, 15 bp, Homo sapiens
accctagttcagaca

SEQ ID NO: 168404 - DNA, 15 bp, Homo sapiens
caccctagttcagac

SEQ ID NO: 168405 - DNA, 15 bp, Homo sapiens
acaccctagttcaga

SEQ ID NO: 168406 - DNA, 15 bp, Homo sapiens
cacaccctagttcag

SEQ ID NO: 168407 - DNA, 15 bp, Homo sapiens
tcacaccctagttca

SEQ ID NO: 168408 - DNA, 15 bp, Homo sapiens
atcacaccctagttc

SEQ ID NO: 168409 - DNA, 15 bp, Homo sapiens
tatcacaccctagtt

SEQ ID NO: 168410 - DNA, 15 bp, Homo sapiens
atatcacaccctagt

SEQ ID NO: 168411 - DNA, 15 bp, Homo sapiens
aatatcacaccctag

SEQ ID NO: 168412 - DNA, 15 bp, Homo sapiens
aaatatcacacccta

SEQ ID NO: 168413 - DNA, 15 bp, Homo sapiens
taaatatcacaccct

SEQ ID NO: 168414 - DNA, 15 bp, Homo sapiens
ttaaatatcacaccc

SEQ ID NO: 168415 - DNA, 15 bp, Homo sapiens
cttaaatatcacacc

SEQ ID NO: 168416 - DNA, 15 bp, Homo sapiens
acttaaatatcacac

SEQ ID NO: 168417 - DNA, 15 bp, Homo sapiens
gacttaaatatcaca

SEQ ID NO: 168418 - DNA, 15 bp, Homo sapiens
agacttaaatatcac

SEQ ID NO: 168419 - DNA, 15 bp, Homo sapiens
aagacttaaatatca

SEQ ID NO: 168420 - DNA, 15 bp, Homo sapiens
taagacttaaatatc

SEQ ID NO: 168421 - DNA, 15 bp, Homo sapiens
ctaagacttaaatat

SEQ ID NO: 168422 - DNA, 15 bp, Homo sapiens
actaagacttaaata

SEQ ID NO: 168423 - DNA, 15 bp, Homo sapiens
cactaagacttaaat

SEQ ID NO: 168424 - DNA, 15 bp, Homo sapiens
ccactaagacttaaa

SEQ ID NO: 168425 - DNA, 15 bp, Homo sapiens
cccactaagacttaa

SEQ ID NO: 168426 - DNA, 15 bp, Homo sapiens
acccactaagactta

SEQ ID NO: 168427 - DNA, 15 bp, Homo sapiens
tacccactaagactt

SEQ ID NO: 168428 - DNA, 15 bp, Homo sapiens
ctacccactaagact

SEQ ID NO: 168429 - DNA, 15 bp, Homo sapiens
cctacccactaagac

SEQ ID NO: 168430 - DNA, 15 bp, Homo sapiens
acctacccactaaga

SEQ ID NO: 168431 - DNA, 15 bp, Homo sapiens
aacctacccactaag

SEQ ID NO: 168432 - DNA, 15 bp, Homo sapiens
caacctacccactaa

SEQ ID NO: 168433 - DNA, 15 bp, Homo sapiens
tcaacctacccacta

SEQ ID NO: 168434 - DNA, 15 bp, Homo sapiens
ttcaacctacccact

SEQ ID NO: 168435 - DNA, 15 bp, Homo sapiens
tttcaacctacccac

SEQ ID NO: 168436 - DNA, 15 bp, Homo sapiens
atttcaacctaccca

SEQ ID NO: 168437 - DNA, 15 bp, Homo sapiens
tatttcaacctaccc

SEQ ID NO: 168438 - DNA, 15 bp, Homo sapiens
atatttcaacctacc

SEQ ID NO: 168439 - DNA, 15 bp, Homo sapiens
tatatttcaacctac

SEQ ID NO: 168440 - DNA, 15 bp, Homo sapiens
ttatatttcaaccta

SEQ ID NO: 168441 - DNA, 15 bp, Homo sapiens
gttatatttcaacct

SEQ ID NO: 168442 - DNA, 15 bp, Homo sapiens
cgttatatttcaacc

SEQ ID NO: 168443 - DNA, 15 bp, Homo sapiens
ccgttatatttcaac

SEQ ID NO: 168444 - DNA, 15 bp, Homo sapiens
tccgttatatttcaa

SEQ ID NO: 168445 - DNA, 15 bp, Homo sapiens
ctccgttatatttca

SEQ ID NO: 168446 - DNA, 15 bp, Homo sapiens
gctccgttatatttc

SEQ ID NO: 168447 - DNA, 15 bp, Homo sapiens
ggctccgttatattt

SEQ ID NO: 168448 - DNA, 15 bp, Homo sapiens
cggctccgttatatt

SEQ ID NO: 168449 - DNA, 15 bp, Homo sapiens
acggctccgttatat

SEQ ID NO: 168450 - DNA, 15 bp, Homo sapiens
aacggctccgttata

SEQ ID NO: 168451 - DNA, 15 bp, Homo sapiens
gaacggctccgttat

SEQ ID NO: 168452 - DNA, 15 bp, Homo sapiens
agaacggctccgtta

SEQ ID NO: 168453 - DNA, 15 bp, Homo sapiens
cagaacggctccgtt

SEQ ID NO: 168454 - DNA, 15 bp, Homo sapiens
acagaacggctccgt

SEQ ID NO: 168455 - DNA, 15 bp, Homo sapiens
aacagaacggctccg

SEQ ID NO: 168456 - DNA, 15 bp, Homo sapiens
gaacagaacggctcc

SEQ ID NO: 168457 - DNA, 15 bp, Homo sapiens
tgaacagaacggctc

SEQ ID NO: 168458 - DNA, 15 bp, Homo sapiens
atgaacagaacggct

SEQ ID NO: 168459 - DNA, 15 bp, Homo sapiens
aatgaacagaacggc

SEQ ID NO: 168460 - DNA, 15 bp, Homo sapiens
caatgaacagaacgg

SEQ ID NO: 168461 - DNA, 15 bp, Homo sapiens
tcaatgaacagaacg

SEQ ID NO: 168462 - DNA, 15 bp, Homo sapiens
ctcaatgaacagaac

SEQ ID NO: 168463 - DNA, 15 bp, Homo sapiens
gctcaatgaacagaa

SEQ ID NO: 168464 - DNA, 15 bp, Homo sapiens
ggctcaatgaacaga

SEQ ID NO: 168465 - DNA, 15 bp, Homo sapiens
tggctcaatgaacag

SEQ ID NO: 168466 - DNA, 15 bp, Homo sapiens
ttggctcaatgaaca

SEQ ID NO: 168467 - DNA, 15 bp, Homo sapiens
cttggctcaatgaac

SEQ ID NO: 168468 - DNA, 15 bp, Homo sapiens
gcttggctcaatgaa

SEQ ID NO: 168469 - DNA, 15 bp, Homo sapiens
ggcttggctcaatga

SEQ ID NO: 168470 - DNA, 15 bp, Homo sapiens
aggcttggctcaatg

SEQ ID NO: 168471 - DNA, 15 bp, Homo sapiens
caggcttggctcaat

SEQ ID NO: 168472 - DNA, 15 bp, Homo sapiens
acaggcttggctcaa

SEQ ID NO: 168473 - DNA, 15 bp, Homo sapiens
cacaggcttggctca

SEQ ID NO: 168474 - DNA, 15 bp, Homo sapiens
ccacaggcttggctc

SEQ ID NO: 168475 - DNA, 15 bp, Homo sapiens
tccacaggcttggct

SEQ ID NO: 168476 - DNA, 15 bp, Homo sapiens
gtccacaggcttggc

SEQ ID NO: 168477 - DNA, 15 bp, Homo sapiens
agtccacaggcttgg

SEQ ID NO: 168478 - DNA, 15 bp, Homo sapiens
gagtccacaggcttg

SEQ ID NO: 168479 - DNA, 15 bp, Homo sapiens
ggagtccacaggctt

SEQ ID NO: 168480 - DNA, 15 bp, Homo sapiens
aggagtccacaggct

SEQ ID NO: 168481 - DNA, 15 bp, Homo sapiens
aaggagtccacaggc

SEQ ID NO: 168482 - DNA, 15 bp, Homo sapiens
taaggagtccacagg

SEQ ID NO: 168483 - DNA, 15 bp, Homo sapiens
ttaaggagtccacag

SEQ ID NO: 168484 - DNA, 15 bp, Homo sapiens
attaaggagtccaca

SEQ ID NO: 168485 - DNA, 15 bp, Homo sapiens
tattaaggagtccac

SEQ ID NO: 168486 - DNA, 15 bp, Homo sapiens
ttattaaggagtcca

SEQ ID NO: 168487 - DNA, 15 bp, Homo sapiens
attattaaggagtcc

SEQ ID NO: 168488 - DNA, 15 bp, Homo sapiens
gattattaaggagtc

SEQ ID NO: 168489 - DNA, 15 bp, Homo sapiens
ggattattaaggagt

SEQ ID NO: 168490 - DNA, 15 bp, Homo sapiens
tggattattaaggag

SEQ ID NO: 168491 - DNA, 15 bp, Homo sapiens
atggattattaagga

SEQ ID NO: 168492 - DNA, 15 bp, Homo sapiens
catggattattaagg

SEQ ID NO: 168493 - DNA, 15 bp, Homo sapiens
ccatggattattaag

SEQ ID NO: 168494 - DNA, 15 bp, Homo sapiens
accatggattattaa

SEQ ID NO: 168495 - DNA, 15 bp, Homo sapiens
gaccatggattatta

SEQ ID NO: 168496 - DNA, 15 bp, Homo sapiens
cgaccatggattatt

SEQ ID NO: 168497 - DNA, 15 bp, Homo sapiens
ccgaccatggattat

SEQ ID NO: 168498 - DNA, 15 bp, Homo sapiens
cccgaccatggatta

SEQ ID NO: 168499 - DNA, 15 bp, Homo sapiens
tcccgaccatggatt

SEQ ID NO: 168500 - DNA, 15 bp, Homo sapiens
atcccgaccatggat

SEQ ID NO: 168501 - DNA, 15 bp, Homo sapiens
aatcccgaccatgga

SEQ ID NO: 168502 - DNA, 15 bp, Homo sapiens
caatcccgaccatgg

SEQ ID NO: 168503 - DNA, 15 bp, Homo sapiens
gcaatcccgaccatg

SEQ ID NO: 168504 - DNA, 15 bp, Homo sapiens
tgcaatcccgaccat

SEQ ID NO: 168505 - DNA, 15 bp, Homo sapiens
ctgcaatcccgacca

SEQ ID NO: 168506 - DNA, 15 bp, Homo sapiens
gctgcaatcccgacc

SEQ ID NO: 168507 - DNA, 15 bp, Homo sapiens
ggctgcaatcccgac

SEQ ID NO: 168508 - DNA, 15 bp, Homo sapiens
gggctgcaatcccga

SEQ ID NO: 168509 - DNA, 15 bp, Homo sapiens
agggctgcaatcccg

SEQ ID NO: 168510 - DNA, 15 bp, Homo sapiens
cagggctgcaatccc

SEQ ID NO: 168511 - DNA, 15 bp, Homo sapiens
acagggctgcaatcc

SEQ ID NO: 168512 - DNA, 15 bp, Homo sapiens
cacagggctgcaatc

SEQ ID NO: 168513 - DNA, 15 bp, Homo sapiens
ccacagggctgcaat

SEQ ID NO: 168514 - DNA, 15 bp, Homo sapiens
cccacagggctgcaa

SEQ ID NO: 168515 - DNA, 15 bp, Homo sapiens
ccccacagggctgca

SEQ ID NO: 168516 - DNA, 15 bp, Homo sapiens
tccccacagggctgc

SEQ ID NO: 168517 - DNA, 15 bp, Homo sapiens
ctccccacagggctg

SEQ ID NO: 168518 - DNA, 15 bp, Homo sapiens
cctccccacagggct

SEQ ID NO: 168519 - DNA, 15 bp, Homo sapiens
gcctccccacagggc

SEQ ID NO: 168520 - DNA, 15 bp, Homo sapiens
tgcctccccacaggg

SEQ ID NO: 168521 - DNA, 15 bp, Homo sapiens
ctgcctccccacagg

SEQ ID NO: 168522 - DNA, 15 bp, Homo sapiens
actgcctccccacag

SEQ ID NO: 168523 - DNA, 15 bp, Homo sapiens
cactgcctccccaca

SEQ ID NO: 168524 - DNA, 15 bp, Homo sapiens
ccactgcctccccac

SEQ ID NO: 168525 - DNA, 15 bp, Homo sapiens
cccactgcctcccca

SEQ ID NO: 168526 - DNA, 15 bp, Homo sapiens
tcccactgcctcccc

SEQ ID NO: 168527 - DNA, 15 bp, Homo sapiens
ctcccactgcctccc

SEQ ID NO: 168528 - DNA, 15 bp, Homo sapiens
gctcccactgcctcc

SEQ ID NO: 168529 - DNA, 15 bp, Homo sapiens
ggctcccactgcctc

SEQ ID NO: 168530 - DNA, 15 bp, Homo sapiens
aggctcccactgcct

SEQ ID NO: 168531 - DNA, 15 bp, Homo sapiens
aaggctcccactgcc

SEQ ID NO: 168532 - DNA, 15 bp, Homo sapiens
gaaggctcccactgc

SEQ ID NO: 168533 - DNA, 15 bp, Homo sapiens
tgaaggctcccactg

SEQ ID NO: 168534 - DNA, 15 bp, Homo sapiens
ctgaaggctcccact

SEQ ID NO: 168535 - DNA, 15 bp, Homo sapiens
gctgaaggctcccac

SEQ ID NO: 168536 - DNA, 15 bp, Homo sapiens
tgctgaaggctccca

SEQ ID NO: 168537 - DNA, 15 bp, Homo sapiens
ctgctgaaggctccc

SEQ ID NO: 168538 - DNA, 15 bp, Homo sapiens
gctgctgaaggctcc

SEQ ID NO: 168539 - DNA, 15 bp, Homo sapiens
agctgctgaaggctc

SEQ ID NO: 168540 - DNA, 15 bp, Homo sapiens
aagctgctgaaggct

SEQ ID NO: 168541 - DNA, 15 bp, Homo sapiens
caagctgctgaaggc

SEQ ID NO: 168542 - DNA, 15 bp, Homo sapiens
tcaagctgctgaagg

SEQ ID NO: 168543 - DNA, 15 bp, Homo sapiens
ttcaagctgctgaag

SEQ ID NO: 168544 - DNA, 15 bp, Homo sapiens
tttcaagctgctgaa

SEQ ID NO: 168545 - DNA, 15 bp, Homo sapiens
ctttcaagctgctga

SEQ ID NO: 168546 - DNA, 15 bp, Homo sapiens
actttcaagctgctg

SEQ ID NO: 168547 - DNA, 15 bp, Homo sapiens
tactttcaagctgct

SEQ ID NO: 168548 - DNA, 15 bp, Homo sapiens
ctactttcaagctgc

SEQ ID NO: 168549 - DNA, 15 bp, Homo sapiens
tctactttcaagctg

SEQ ID NO: 168550 - DNA, 15 bp, Homo sapiens
atctactttcaagct

SEQ ID NO: 168551 - DNA, 15 bp, Homo sapiens
catctactttcaagc

SEQ ID NO: 168552 - DNA, 15 bp, Homo sapiens
acatctactttcaag

SEQ ID NO: 168553 - DNA, 15 bp, Homo sapiens
gacatctactttcaa

SEQ ID NO: 168554 - DNA, 15 bp, Homo sapiens
agacatctactttca

SEQ ID NO: 168555 - DNA, 15 bp, Homo sapiens
cagacatctactttc

SEQ ID NO: 168556 - DNA, 15 bp, Homo sapiens
ccagacatctacttt

SEQ ID NO: 168557 - DNA, 15 bp, Homo sapiens
tccagacatctactt

SEQ ID NO: 168558 - DNA, 15 bp, Homo sapiens
atccagacatctact

SEQ ID NO: 168559 - DNA, 15 bp, Homo sapiens
aatccagacatctac

SEQ ID NO: 168560 - DNA, 15 bp, Homo sapiens
gaatccagacatcta

SEQ ID NO: 168561 - DNA, 15 bp, Homo sapiens
ggaatccagacatct

SEQ ID NO: 168562 - DNA, 15 bp, Homo sapiens
tggaatccagacatc

SEQ ID NO: 168563 - DNA, 15 bp, Homo sapiens
ctggaatccagacat

SEQ ID NO: 168564 - DNA, 15 bp, Homo sapiens
cctggaatccagaca

SEQ ID NO: 168565 - DNA, 15 bp, Homo sapiens
tcctggaatccagac

SEQ ID NO: 168566 - DNA, 15 bp, Homo sapiens
ctcctggaatccaga

SEQ ID NO: 168567 - DNA, 15 bp, Homo sapiens
cctcctggaatccag

SEQ ID NO: 168568 - DNA, 15 bp, Homo sapiens
acctcctggaatcca

SEQ ID NO: 168569 - DNA, 15 bp, Homo sapiens
tacctcctggaatcc

SEQ ID NO: 168570 - DNA, 15 bp, Homo sapiens
gtacctcctggaatc

SEQ ID NO: 168571 - DNA, 15 bp, Homo sapiens
tgtacctcctggaat

SEQ ID NO: 168572 - DNA, 15 bp, Homo sapiens
ttgtacctcctggaa

SEQ ID NO: 168573 - DNA, 15 bp, Homo sapiens
cttgtacctcctgga

SEQ ID NO: 168574 - DNA, 15 bp, Homo sapiens
gcttgtacctcctgg

SEQ ID NO: 168575 - DNA, 15 bp, Homo sapiens
agcttgtacctcctg

SEQ ID NO: 168576 - DNA, 15 bp, Homo sapiens
aagcttgtacctcct

SEQ ID NO: 168577 - DNA, 15 bp, Homo sapiens
gaagcttgtacctcc

SEQ ID NO: 168578 - DNA, 15 bp, Homo sapiens
ggaagcttgtacctc

SEQ ID NO: 168579 - DNA, 15 bp, Homo sapiens
tggaagcttgtacct

SEQ ID NO: 168580 - DNA, 15 bp, Homo sapiens
ttggaagcttgtacc

SEQ ID NO: 168581 - DNA, 15 bp, Homo sapiens
cttggaagcttgtac

SEQ ID NO: 168582 - DNA, 15 bp, Homo sapiens
tcttggaagcttgta

SEQ ID NO: 168583 - DNA, 15 bp, Homo sapiens
ttcttggaagcttgt

SEQ ID NO: 168584 - DNA, 15 bp, Homo sapiens
cttcttggaagcttg

SEQ ID NO: 168585 - DNA, 15 bp, Homo sapiens
ccttcttggaagctt

SEQ ID NO: 168586 - DNA, 15 bp, Homo sapiens
tccttcttggaagct

SEQ ID NO: 168587 - DNA, 15 bp, Homo sapiens
ttccttcttggaagc

SEQ ID NO: 168588 - DNA, 15 bp, Homo sapiens
tttccttcttggaag

SEQ ID NO: 168589 - DNA, 15 bp, Homo sapiens
atttccttcttggaa

SEQ ID NO: 168590 - DNA, 15 bp, Homo sapiens
aatttccttcttgga

SEQ ID NO: 168591 - DNA, 15 bp, Homo sapiens
aaatttccttcttgg

SEQ ID NO: 168592 - DNA, 15 bp, Homo sapiens
aaaatttccttcttg

SEQ ID NO: 168593 - DNA, 15 bp, Homo sapiens
gaaaatttccttctt

SEQ ID NO: 168594 - DNA, 15 bp, Homo sapiens
cgaaaatttccttct

SEQ ID NO: 168595 - DNA, 15 bp, Homo sapiens
acgaaaatttccttc

SEQ ID NO: 168596 - DNA, 15 bp, Homo sapiens
tacgaaaatttcctt

SEQ ID NO: 168597 - DNA, 15 bp, Homo sapiens
ctacgaaaatttcct

SEQ ID NO: 168598 - DNA, 15 bp, Homo sapiens
gctacgaaaatttcc

SEQ ID NO: 168599 - DNA, 15 bp, Homo sapiens
agctacgaaaatttc

SEQ ID NO: 168600 - DNA, 15 bp, Homo sapiens
gagctacgaaaattt

SEQ ID NO: 168601 - DNA, 15 bp, Homo sapiens
tgagctacgaaaatt

SEQ ID NO: 168602 - DNA, 15 bp, Homo sapiens
atgagctacgaaaat

SEQ ID NO: 168603 - DNA, 15 bp, Homo sapiens
gatgagctacgaaaa

SEQ ID NO: 168604 - DNA, 15 bp, Homo sapiens
agatgagctacgaaa

SEQ ID NO: 168605 - DNA, 15 bp, Homo sapiens
aagatgagctacgaa

SEQ ID NO: 168606 - DNA, 15 bp, Homo sapiens
aaagatgagctacga

SEQ ID NO: 168607 - DNA, 15 bp, Homo sapiens
caaagatgagctacg

SEQ ID NO: 168608 - DNA, 15 bp, Homo sapiens
gcaaagatgagctac

SEQ ID NO: 168609 - DNA, 15 bp, Homo sapiens
tgcaaagatgagcta

SEQ ID NO: 168610 - DNA, 15 bp, Homo sapiens
gtgcaaagatgagct

SEQ ID NO: 168611 - DNA, 15 bp, Homo sapiens
tgtgcaaagatgagc

SEQ ID NO: 168612 - DNA, 15 bp, Homo sapiens
ctgtgcaaagatgag

SEQ ID NO: 168613 - DNA, 15 bp, Homo sapiens
cctgtgcaaagatga

SEQ ID NO: 168614 - DNA, 15 bp, Homo sapiens
tcctgtgcaaagatg

SEQ ID NO: 168615 - DNA, 15 bp, Homo sapiens
ttcctgtgcaaagat

SEQ ID NO: 168616 - DNA, 15 bp, Homo sapiens
cttcctgtgcaaaga

SEQ ID NO: 168617 - DNA, 15 bp, Homo sapiens
ccttcctgtgcaaag

SEQ ID NO: 168618 - DNA, 15 bp, Homo sapiens
accttcctgtgcaaa

SEQ ID NO: 168619 - DNA, 15 bp, Homo sapiens
aaccttcctgtgcaa

SEQ ID NO: 168620 - DNA, 15 bp, Homo sapiens
aaaccttcctgtgca

SEQ ID NO: 168621 - DNA, 15 bp, Homo sapiens
aaaaccttcctgtgc

SEQ ID NO: 168622 - DNA, 15 bp, Homo sapiens
taaaaccttcctgtg

SEQ ID NO: 168623 - DNA, 15 bp, Homo sapiens
ttaaaaccttcctgt

SEQ ID NO: 168624 - DNA, 15 bp, Homo sapiens
attaaaaccttcctg

SEQ ID NO: 168625 - DNA, 15 bp, Homo sapiens
cattaaaaccttcct

SEQ ID NO: 168626 - DNA, 15 bp, Homo sapiens
ccattaaaaccttcc

SEQ ID NO: 168627 - DNA, 15 bp, Homo sapiens
tccattaaaaccttc

SEQ ID NO: 168628 - DNA, 15 bp, Homo sapiens
ttccattaaaacctt

SEQ ID NO: 168629 - DNA, 15 bp, Homo sapiens
tttccattaaaacct

SEQ ID NO: 168630 - DNA, 15 bp, Homo sapiens
atttccattaaaacc

SEQ ID NO: 168631 - DNA, 15 bp, Homo sapiens
aatttccattaaaac

SEQ ID NO: 168632 - DNA, 15 bp, Homo sapiens
aaatttccattaaaa

SEQ ID NO: 168633 - DNA, 15 bp, Homo sapiens
caaatttccattaaa

SEQ ID NO: 168634 - DNA, 15 bp, Homo sapiens
tcaaatttccattaa

SEQ ID NO: 168635 - DNA, 15 bp, Homo sapiens
ttcaaatttccatta

SEQ ID NO: 168636 - DNA, 15 bp, Homo sapiens
gttcaaatttccatt

SEQ ID NO: 168637 - DNA, 15 bp, Homo sapiens
tgttcaaatttccat

SEQ ID NO: 168638 - DNA, 15 bp, Homo sapiens
gtgttcaaatttcca

SEQ ID NO: 168639 - DNA, 15 bp, Homo sapiens
agtgttcaaatttcc

SEQ ID NO: 168640 - DNA, 15 bp, Homo sapiens
gagtgttcaaatttc

SEQ ID NO: 168641 - DNA, 15 bp, Homo sapiens
ggagtgttcaaattt

SEQ ID NO: 168642 - DNA, 15 bp, Homo sapiens
aggagtgttcaaatt

SEQ ID NO: 168643 - DNA, 15 bp, Homo sapiens
taggagtgttcaaat

SEQ ID NO: 168644 - DNA, 15 bp, Homo sapiens
ctaggagtgttcaaa

SEQ ID NO: 168645 - DNA, 15 bp, Homo sapiens
actaggagtgttcaa

SEQ ID NO: 168646 - DNA, 15 bp, Homo sapiens
tactaggagtgttca

SEQ ID NO: 168647 - DNA, 15 bp, Homo sapiens
ttactaggagtgttc

SEQ ID NO: 168648 - DNA, 15 bp, Homo sapiens
tttactaggagtgtt

SEQ ID NO: 168649 - DNA, 15 bp, Homo sapiens
gtttactaggagtgt

SEQ ID NO: 168650 - DNA, 15 bp, Homo sapiens
tgtttactaggagtg

SEQ ID NO: 168651 - DNA, 15 bp, Homo sapiens
gtgtttactaggagt

SEQ ID NO: 168652 - DNA, 15 bp, Homo sapiens
ggtgtttactaggag

SEQ ID NO: 168653 - DNA, 15 bp, Homo sapiens
gggtgtttactagga

SEQ ID NO: 168654 - DNA, 15 bp, Homo sapiens
agggtgtttactagg

SEQ ID NO: 168655 - DNA, 15 bp, Homo sapiens
aagggtgtttactag

SEQ ID NO: 168656 - DNA, 15 bp, Homo sapiens
caagggtgtttacta

SEQ ID NO: 168657 - DNA, 15 bp, Homo sapiens
gcaagggtgtttact

SEQ ID NO: 168658 - DNA, 15 bp, Homo sapiens
agcaagggtgtttac

SEQ ID NO: 168659 - DNA, 15 bp, Homo sapiens
tagcaagggtgttta

SEQ ID NO: 168660 - DNA, 15 bp, Homo sapiens
atagcaagggtgttt

SEQ ID NO: 168661 - DNA, 15 bp, Homo sapiens
aatagcaagggtgtt

SEQ ID NO: 168662 - DNA, 15 bp, Homo sapiens
taatagcaagggtgt

SEQ ID NO: 168663 - DNA, 15 bp, Homo sapiens
ctaatagcaagggtg

SEQ ID NO: 168664 - DNA, 15 bp, Homo sapiens
gctaatagcaagggt

SEQ ID NO: 168665 - DNA, 15 bp, Homo sapiens
tgctaatagcaaggg

SEQ ID NO: 168666 - DNA, 15 bp, Homo sapiens
atgctaatagcaagg

SEQ ID NO: 168667 - DNA, 15 bp, Homo sapiens
gatgctaatagcaag

SEQ ID NO: 168668 - DNA, 15 bp, Homo sapiens
agatgctaatagcaa

SEQ ID NO: 168669 - DNA, 15 bp, Homo sapiens
aagatgctaatagca

SEQ ID NO: 168670 - DNA, 15 bp, Homo sapiens
aaagatgctaatagc

SEQ ID NO: 168671 - DNA, 15 bp, Homo sapiens
gaaagatgctaatag

SEQ ID NO: 168672 - DNA, 15 bp, Homo sapiens
tgaaagatgctaata

SEQ ID NO: 168673 - DNA, 15 bp, Homo sapiens
atgaaagatgctaat

SEQ ID NO: 168674 - DNA, 15 bp, Homo sapiens
aatgaaagatgctaa

SEQ ID NO: 168675 - DNA, 15 bp, Homo sapiens
aaatgaaagatgcta

SEQ ID NO: 168676 - DNA, 15 bp, Homo sapiens
aaaatgaaagatgct

SEQ ID NO: 168677 - DNA, 15 bp, Homo sapiens
caaaatgaaagatgc

SEQ ID NO: 168678 - DNA, 15 bp, Homo sapiens
tcaaaatgaaagatg

SEQ ID NO: 168679 - DNA, 15 bp, Homo sapiens
gtcaaaatgaaagat

SEQ ID NO: 168680 - DNA, 15 bp, Homo sapiens
tgtcaaaatgaaaga

SEQ ID NO: 168681 - DNA, 15 bp, Homo sapiens
ctgtcaaaatgaaag

SEQ ID NO: 168682 - DNA, 15 bp, Homo sapiens
tctgtcaaaatgaaa

SEQ ID NO: 168683 - DNA, 15 bp, Homo sapiens
ctctgtcaaaatgaa

SEQ ID NO: 168684 - DNA, 15 bp, Homo sapiens
cctctgtcaaaatga

SEQ ID NO: 168685 - DNA, 15 bp, Homo sapiens
tcctctgtcaaaatg

SEQ ID NO: 168686 - DNA, 15 bp, Homo sapiens
ctcctctgtcaaaat

SEQ ID NO: 168687 - DNA, 15 bp, Homo sapiens
actcctctgtcaaaa

SEQ ID NO: 168688 - DNA, 15 bp, Homo sapiens
aactcctctgtcaaa

SEQ ID NO: 168689 - DNA, 15 bp, Homo sapiens
aaactcctctgtcaa

SEQ ID NO: 168690 - DNA, 15 bp, Homo sapiens
aaaactcctctgtca

SEQ ID NO: 168691 - DNA, 15 bp, Homo sapiens
gaaaactcctctgtc

SEQ ID NO: 168692 - DNA, 15 bp, Homo sapiens
agaaaactcctctgt

SEQ ID NO: 168693 - DNA, 15 bp, Homo sapiens
aagaaaactcctctg

SEQ ID NO: 168694 - DNA, 15 bp, Homo sapiens
gaagaaaactcctct

SEQ ID NO: 168695 - DNA, 15 bp, Homo sapiens
ggaagaaaactcctc

SEQ ID NO: 168696 - DNA, 15 bp, Homo sapiens
aggaagaaaactcct

SEQ ID NO: 168697 - DNA, 15 bp, Homo sapiens
gaggaagaaaactcc

SEQ ID NO: 168698 - DNA, 15 bp, Homo sapiens
agaggaagaaaactc

SEQ ID NO: 168699 - DNA, 15 bp, Homo sapiens
cagaggaagaaaact

SEQ ID NO: 168700 - DNA, 15 bp, Homo sapiens
acagaggaagaaaac

SEQ ID NO: 168701 - DNA, 15 bp, Homo sapiens
aacagaggaagaaaa

SEQ ID NO: 168702 - DNA, 15 bp, Homo sapiens
gaacagaggaagaaa

SEQ ID NO: 168703 - DNA, 15 bp, Homo sapiens
agaacagaggaagaa

SEQ ID NO: 168704 - DNA, 15 bp, Homo sapiens
cagaacagaggaaga

SEQ ID NO: 168705 - DNA, 15 bp, Homo sapiens
tcagaacagaggaag

SEQ ID NO: 168706 - DNA, 15 bp, Homo sapiens
atcagaacagaggaa

SEQ ID NO: 168707 - DNA, 15 bp, Homo sapiens
catcagaacagagga

SEQ ID NO: 168708 - DNA, 15 bp, Homo sapiens
ccatcagaacagagg

SEQ ID NO: 168709 - DNA, 15 bp, Homo sapiens
cccatcagaacagag

SEQ ID NO: 168710 - DNA, 15 bp, Homo sapiens
acccatcagaacaga

SEQ ID NO: 168711 - DNA, 15 bp, Homo sapiens
aacccatcagaacag

SEQ ID NO: 168712 - DNA, 15 bp, Homo sapiens
taacccatcagaaca

SEQ ID NO: 168713 - DNA, 15 bp, Homo sapiens
ataacccatcagaac

SEQ ID NO: 168714 - DNA, 15 bp, Homo sapiens
gataacccatcagaa

SEQ ID NO: 168715 - DNA, 15 bp, Homo sapiens
ggataacccatcaga

SEQ ID NO: 168716 - DNA, 15 bp, Homo sapiens
tggataacccatcag

SEQ ID NO: 168717 - DNA, 15 bp, Homo sapiens
ctggataacccatca

SEQ ID NO: 168718 - DNA, 15 bp, Homo sapiens
cctggataacccatc

SEQ ID NO: 168719 - DNA, 15 bp, Homo sapiens
gcctggataacccat

SEQ ID NO: 168720 - DNA, 15 bp, Homo sapiens
agcctggataaccca

SEQ ID NO: 168721 - DNA, 15 bp, Homo sapiens
cagcctggataaccc

SEQ ID NO: 168722 - DNA, 15 bp, Homo sapiens
ccagcctggataacc

SEQ ID NO: 168723 - DNA, 15 bp, Homo sapiens
cccagcctggataac

SEQ ID NO: 168724 - DNA, 15 bp, Homo sapiens
gcccagcctggataa

SEQ ID NO: 168725 - DNA, 15 bp, Homo sapiens
agcccagcctggata

SEQ ID NO: 168726 - DNA, 15 bp, Homo sapiens
cagcccagcctggat

SEQ ID NO: 168727 - DNA, 15 bp, Homo sapiens
ccagcccagcctgga

SEQ ID NO: 168728 - DNA, 15 bp, Homo sapiens
cccagcccagcctgg

SEQ ID NO: 168729 - DNA, 15 bp, Homo sapiens
acccagcccagcctg

SEQ ID NO: 168730 - DNA, 15 bp, Homo sapiens
aacccagcccagcct

SEQ ID NO: 168731 - DNA, 15 bp, Homo sapiens
gaacccagcccagcc

SEQ ID NO: 168732 - DNA, 15 bp, Homo sapiens
ggaacccagcccagc

SEQ ID NO: 168733 - DNA, 15 bp, Homo sapiens
aggaacccagcccag

SEQ ID NO: 168734 - DNA, 15 bp, Homo sapiens
caggaacccagccca

SEQ ID NO: 168735 - DNA, 15 bp, Homo sapiens
acaggaacccagccc

SEQ ID NO: 168736 - DNA, 15 bp, Homo sapiens
cacaggaacccagcc

SEQ ID NO: 168737 - DNA, 15 bp, Homo sapiens
acacaggaacccagc

SEQ ID NO: 168738 - DNA, 15 bp, Homo sapiens
cacacaggaacccag

SEQ ID NO: 168739 - DNA, 15 bp, Homo sapiens
ccacacaggaaccca

SEQ ID NO: 168740 - DNA, 15 bp, Homo sapiens
tccacacaggaaccc

SEQ ID NO: 168741 - DNA, 15 bp, Homo sapiens
ctccacacaggaacc

SEQ ID NO: 168742 - DNA, 15 bp, Homo sapiens
actccacacaggaac

SEQ ID NO: 168743 - DNA, 15 bp, Homo sapiens
aactccacacaggaa

SEQ ID NO: 168744 - DNA, 15 bp, Homo sapiens
taactccacacagga

SEQ ID NO: 168745 - DNA, 15 bp, Homo sapiens
ataactccacacagg

SEQ ID NO: 168746 - DNA, 15 bp, Homo sapiens
cataactccacacag

SEQ ID NO: 168747 - DNA, 15 bp, Homo sapiens
ccataactccacaca

SEQ ID NO: 168748 - DNA, 15 bp, Homo sapiens
cccataactccacac

SEQ ID NO: 168749 - DNA, 15 bp, Homo sapiens
gcccataactccaca

SEQ ID NO: 168750 - DNA, 15 bp, Homo sapiens
agcccataactccac

SEQ ID NO: 168751 - DNA, 15 bp, Homo sapiens
gagcccataactcca

SEQ ID NO: 168752 - DNA, 15 bp, Homo sapiens
agagcccataactcc

SEQ ID NO: 168753 - DNA, 15 bp, Homo sapiens
gagagcccataactc

SEQ ID NO: 168754 - DNA, 15 bp, Homo sapiens
agagagcccataact

SEQ ID NO: 168755 - DNA, 15 bp, Homo sapiens
aagagagcccataac

SEQ ID NO: 168756 - DNA, 15 bp, Homo sapiens
aaagagagcccataa

SEQ ID NO: 168757 - DNA, 15 bp, Homo sapiens
taaagagagcccata

SEQ ID NO: 168758 - DNA, 15 bp, Homo sapiens
ctaaagagagcccat

SEQ ID NO: 168759 - DNA, 15 bp, Homo sapiens
cctaaagagagccca

SEQ ID NO: 168760 - DNA, 15 bp, Homo sapiens
ccctaaagagagccc

SEQ ID NO: 168761 - DNA, 15 bp, Homo sapiens
tccctaaagagagcc

SEQ ID NO: 168762 - DNA, 15 bp, Homo sapiens
ttccctaaagagagc

SEQ ID NO: 168763 - DNA, 15 bp, Homo sapiens
tttccctaaagagag

SEQ ID NO: 168764 - DNA, 15 bp, Homo sapiens
gtttccctaaagaga

SEQ ID NO: 168765 - DNA, 15 bp, Homo sapiens
tgtttccctaaagag

SEQ ID NO: 168766 - DNA, 15 bp, Homo sapiens
atgtttccctaaaga

SEQ ID NO: 168767 - DNA, 15 bp, Homo sapiens
aatgtttccctaaag

SEQ ID NO: 168768 - DNA, 15 bp, Homo sapiens
aaatgtttccctaaa

SEQ ID NO: 168769 - DNA, 15 bp, Homo sapiens
caaatgtttccctaa

SEQ ID NO: 168770 - DNA, 15 bp, Homo sapiens
ccaaatgtttcccta

SEQ ID NO: 168771 - DNA, 15 bp, Homo sapiens
accaaatgtttccct

SEQ ID NO: 168772 - DNA, 15 bp, Homo sapiens
caccaaatgtttccc

SEQ ID NO: 168773 - DNA, 15 bp, Homo sapiens
acaccaaatgtttcc

SEQ ID NO: 168774 - DNA, 15 bp, Homo sapiens
cacaccaaatgtttc

SEQ ID NO: 168775 - DNA, 15 bp, Homo sapiens
ccacaccaaatgttt

SEQ ID NO: 168776 - DNA, 15 bp, Homo sapiens
accacaccaaatgtt

SEQ ID NO: 168777 - DNA, 15 bp, Homo sapiens
taccacaccaaatgt

SEQ ID NO: 168778 - DNA, 15 bp, Homo sapiens
ctaccacaccaaatg

SEQ ID NO: 168779 - DNA, 15 bp, Homo sapiens
tctaccacaccaaat

SEQ ID NO: 168780 - DNA, 15 bp, Homo sapiens
ttctaccacaccaaa

SEQ ID NO: 168781 - DNA, 15 bp, Homo sapiens
tttctaccacaccaa

SEQ ID NO: 168782 - DNA, 15 bp, Homo sapiens
ctttctaccacacca

SEQ ID NO: 168783 - DNA, 15 bp, Homo sapiens
tctttctaccacacc

SEQ ID NO: 168784 - DNA, 15 bp, Homo sapiens
atctttctaccacac

SEQ ID NO: 168785 - DNA, 15 bp, Homo sapiens
gatctttctaccaca

SEQ ID NO: 168786 - DNA, 15 bp, Homo sapiens
agatctttctaccac

SEQ ID NO: 168787 - DNA, 15 bp, Homo sapiens
aagatctttctacca

SEQ ID NO: 168788 - DNA, 15 bp, Homo sapiens
caagatctttctacc

SEQ ID NO: 168789 - DNA, 15 bp, Homo sapiens
ccaagatctttctac

SEQ ID NO: 168790 - DNA, 15 bp, Homo sapiens
accaagatctttcta

SEQ ID NO: 168791 - DNA, 15 bp, Homo sapiens
aaccaagatctttct

SEQ ID NO: 168792 - DNA, 15 bp, Homo sapiens
aaaccaagatctttc

SEQ ID NO: 168793 - DNA, 15 bp, Homo sapiens
gaaaccaagatcttt

SEQ ID NO: 168794 - DNA, 15 bp, Homo sapiens
agaaaccaagatctt

SEQ ID NO: 168795 - DNA, 15 bp, Homo sapiens
cagaaaccaagatct

SEQ ID NO: 168796 - DNA, 15 bp, Homo sapiens
ccagaaaccaagatc

SEQ ID NO: 168797 - DNA, 15 bp, Homo sapiens
tccagaaaccaagat

SEQ ID NO: 168798 - DNA, 15 bp, Homo sapiens
ttccagaaaccaaga

SEQ ID NO: 168799 - DNA, 15 bp, Homo sapiens
attccagaaaccaag

SEQ ID NO: 168800 - DNA, 15 bp, Homo sapiens
cattccagaaaccaa

SEQ ID NO: 168801 - DNA, 15 bp, Homo sapiens
tcattccagaaacca

SEQ ID NO: 168802 - DNA, 15 bp, Homo sapiens
ctcattccagaaacc

SEQ ID NO: 168803 - DNA, 15 bp, Homo sapiens
tctcattccagaaac

SEQ ID NO: 168804 - DNA, 15 bp, Homo sapiens
atctcattccagaaa

SEQ ID NO: 168805 - DNA, 15 bp, Homo sapiens
aatctcattccagaa

SEQ ID NO: 168806 - DNA, 15 bp, Homo sapiens
aaatctcattccaga

SEQ ID NO: 168807 - DNA, 15 bp, Homo sapiens
caaatctcattccag

SEQ ID NO: 168808 - DNA, 15 bp, Homo sapiens
acaaatctcattcca

SEQ ID NO: 168809 - DNA, 15 bp, Homo sapiens
cacaaatctcattcc

SEQ ID NO: 168810 - DNA, 15 bp, Homo sapiens
acacaaatctcattc

SEQ ID NO: 168811 - DNA, 15 bp, Homo sapiens
gacacaaatctcatt

SEQ ID NO: 168812 - DNA, 15 bp, Homo sapiens
agacacaaatctcat

SEQ ID NO: 168813 - DNA, 15 bp, Homo sapiens
aagacacaaatctca

SEQ ID NO: 168814 - DNA, 15 bp, Homo sapiens
caagacacaaatctc

SEQ ID NO: 168815 - DNA, 15 bp, Homo sapiens
tcaagacacaaatct

SEQ ID NO: 168816 - DNA, 15 bp, Homo sapiens
gtcaagacacaaatc

SEQ ID NO: 168817 - DNA, 15 bp, Homo sapiens
ggtcaagacacaaat

SEQ ID NO: 168818 - DNA, 15 bp, Homo sapiens
tggtcaagacacaaa

SEQ ID NO: 168819 - DNA, 15 bp, Homo sapiens
atggtcaagacacaa

SEQ ID NO: 168820 - DNA, 15 bp, Homo sapiens
catggtcaagacaca

SEQ ID NO: 168821 - DNA, 15 bp, Homo sapiens
acatggtcaagacac

SEQ ID NO: 168822 - DNA, 15 bp, Homo sapiens
cacatggtcaagaca

SEQ ID NO: 168823 - DNA, 15 bp, Homo sapiens
gcacatggtcaagac

SEQ ID NO: 168824 - DNA, 15 bp, Homo sapiens
ggcacatggtcaaga

SEQ ID NO: 168825 - DNA, 15 bp, Homo sapiens
tggcacatggtcaag

SEQ ID NO: 168826 - DNA, 15 bp, Homo sapiens
atggcacatggtcaa

SEQ ID NO: 168827 - DNA, 15 bp, Homo sapiens
aatggcacatggtca

SEQ ID NO: 168828 - DNA, 15 bp, Homo sapiens
taatggcacatggtc

SEQ ID NO: 168829 - DNA, 15 bp, Homo sapiens
ttaatggcacatggt

SEQ ID NO: 168830 - DNA, 15 bp, Homo sapiens
attaatggcacatgg

SEQ ID NO: 168831 - DNA, 15 bp, Homo sapiens
aattaatggcacatg

SEQ ID NO: 168832 - DNA, 15 bp, Homo sapiens
caattaatggcacat

SEQ ID NO: 168833 - DNA, 15 bp, Homo sapiens
acaattaatggcaca

SEQ ID NO: 168834 - DNA, 15 bp, Homo sapiens
tacaattaatggcac

SEQ ID NO: 168835 - DNA, 15 bp, Homo sapiens
ctacaattaatggca

SEQ ID NO: 168836 - DNA, 15 bp, Homo sapiens
cctacaattaatggc

SEQ ID NO: 168837 - DNA, 15 bp, Homo sapiens
acctacaattaatgg

SEQ ID NO: 168838 - DNA, 15 bp, Homo sapiens
tacctacaattaatg

SEQ ID NO: 168839 - DNA, 15 bp, Homo sapiens
ttacctacaattaat

SEQ ID NO: 168840 - DNA, 15 bp, Homo sapiens
cttacctacaattaa

SEQ ID NO: 168841 - DNA, 15 bp, Homo sapiens
tcttacctacaatta

SEQ ID NO: 168842 - DNA, 15 bp, Homo sapiens
atcttacctacaatt

SEQ ID NO: 168843 - DNA, 15 bp, Homo sapiens
gatcttacctacaat

SEQ ID NO: 168844 - DNA, 15 bp, Homo sapiens
ggatcttacctacaa

SEQ ID NO: 168845 - DNA, 15 bp, Homo sapiens
aggatcttacctaca

SEQ ID NO: 168846 - DNA, 15 bp, Homo sapiens
gaggatcttacctac

SEQ ID NO: 168847 - DNA, 15 bp, Homo sapiens
tgaggatcttaccta

SEQ ID NO: 168848 - DNA, 15 bp, Homo sapiens
ctgaggatcttacct

SEQ ID NO: 168849 - DNA, 15 bp, Homo sapiens
cctgaggatcttacc

SEQ ID NO: 168850 - DNA, 15 bp, Homo sapiens
gcctgaggatcttac

SEQ ID NO: 168851 - DNA, 15 bp, Homo sapiens
tgcctgaggatctta

SEQ ID NO: 168852 - DNA, 15 bp, Homo sapiens
ttgcctgaggatctt

SEQ ID NO: 168853 - DNA, 15 bp, Homo sapiens
tttgcctgaggatct

SEQ ID NO: 168854 - DNA, 15 bp, Homo sapiens
ctttgcctgaggatc

SEQ ID NO: 168855 - DNA, 15 bp, Homo sapiens
actttgcctgaggat

SEQ ID NO: 168856 - DNA, 15 bp, Homo sapiens
gactttgcctgagga

SEQ ID NO: 168857 - DNA, 15 bp, Homo sapiens
agactttgcctgagg

SEQ ID NO: 168858 - DNA, 15 bp, Homo sapiens
aagactttgcctgag

SEQ ID NO: 168859 - DNA, 15 bp, Homo sapiens
aaagactttgcctga

SEQ ID NO: 168860 - DNA, 15 bp, Homo sapiens
caaagactttgcctg

SEQ ID NO: 168861 - DNA, 15 bp, Homo sapiens
tcaaagactttgcct

SEQ ID NO: 168862 - DNA, 15 bp, Homo sapiens
gtcaaagactttgcc

SEQ ID NO: 168863 - DNA, 15 bp, Homo sapiens
agtcaaagactttgc

SEQ ID NO: 168864 - DNA, 15 bp, Homo sapiens
aagtcaaagactttg

SEQ ID NO: 168865 - DNA, 15 bp, Homo sapiens
gaagtcaaagacttt

SEQ ID NO: 168866 - DNA, 15 bp, Homo sapiens
agaagtcaaagactt

SEQ ID NO: 168867 - DNA, 15 bp, Homo sapiens
gagaagtcaaagact

SEQ ID NO: 168868 - DNA, 15 bp, Homo sapiens
agagaagtcaaagac

SEQ ID NO: 168869 - DNA, 15 bp, Homo sapiens
cagagaagtcaaaga

SEQ ID NO: 168870 - DNA, 15 bp, Homo sapiens
tcagagaagtcaaag

SEQ ID NO: 168871 - DNA, 15 bp, Homo sapiens
ctcagagaagtcaaa

SEQ ID NO: 168872 - DNA, 15 bp, Homo sapiens
gctcagagaagtcaa

SEQ ID NO: 168873 - DNA, 15 bp, Homo sapiens
agctcagagaagtca

SEQ ID NO: 168874 - DNA, 15 bp, Homo sapiens
aagctcagagaagtc

SEQ ID NO: 168875 - DNA, 15 bp, Homo sapiens
aaagctcagagaagt

SEQ ID NO: 168876 - DNA, 15 bp, Homo sapiens
caaagctcagagaag

SEQ ID NO: 168877 - DNA, 15 bp, Homo sapiens
ccaaagctcagagaa

SEQ ID NO: 168878 - DNA, 15 bp, Homo sapiens
cccaaagctcagaga

SEQ ID NO: 168879 - DNA, 15 bp, Homo sapiens
acccaaagctcagag

SEQ ID NO: 168880 - DNA, 15 bp, Homo sapiens
gacccaaagctcaga

SEQ ID NO: 168881 - DNA, 15 bp, Homo sapiens
agacccaaagctcag

SEQ ID NO: 168882 - DNA, 15 bp, Homo sapiens
gagacccaaagctca

SEQ ID NO: 168883 - DNA, 15 bp, Homo sapiens
tgagacccaaagctc

SEQ ID NO: 168884 - DNA, 15 bp, Homo sapiens
gtgagacccaaagct

SEQ ID NO: 168885 - DNA, 15 bp, Homo sapiens
agtgagacccaaagc

SEQ ID NO: 168886 - DNA, 15 bp, Homo sapiens
cagtgagacccaaag

SEQ ID NO: 168887 - DNA, 15 bp, Homo sapiens
acagtgagacccaaa

SEQ ID NO: 168888 - DNA, 15 bp, Homo sapiens
aacagtgagacccaa

SEQ ID NO: 168889 - DNA, 15 bp, Homo sapiens
caacagtgagaccca

SEQ ID NO: 168890 - DNA, 15 bp, Homo sapiens
gcaacagtgagaccc

SEQ ID NO: 168891 - DNA, 15 bp, Homo sapiens
agcaacagtgagacc

SEQ ID NO: 168892 - DNA, 15 bp, Homo sapiens
cagcaacagtgagac

SEQ ID NO: 168893 - DNA, 15 bp, Homo sapiens
ccagcaacagtgaga

SEQ ID NO: 168894 - DNA, 15 bp, Homo sapiens
cccagcaacagtgag

SEQ ID NO: 168895 - DNA, 15 bp, Homo sapiens
acccagcaacagtga

SEQ ID NO: 168896 - DNA, 15 bp, Homo sapiens
cacccagcaacagtg

SEQ ID NO: 168897 - DNA, 15 bp, Homo sapiens
tcacccagcaacagt

SEQ ID NO: 168898 - DNA, 15 bp, Homo sapiens
atcacccagcaacag

SEQ ID NO: 168899 - DNA, 15 bp, Homo sapiens
catcacccagcaaca

SEQ ID NO: 168900 - DNA, 15 bp, Homo sapiens
ccatcacccagcaac

SEQ ID NO: 168901 - DNA, 15 bp, Homo sapiens
tccatcacccagcaa

SEQ ID NO: 168902 - DNA, 15 bp, Homo sapiens
ttccatcacccagca

SEQ ID NO: 168903 - DNA, 15 bp, Homo sapiens
attccatcacccagc

SEQ ID NO: 168904 - DNA, 15 bp, Homo sapiens
cattccatcacccag

SEQ ID NO: 168905 - DNA, 15 bp, Homo sapiens
tcattccatcaccca

SEQ ID NO: 168906 - DNA, 15 bp, Homo sapiens
ctcattccatcaccc

SEQ ID NO: 168907 - DNA, 15 bp, Homo sapiens
tctcattccatcacc

SEQ ID NO: 168908 - DNA, 15 bp, Homo sapiens
ctctcattccatcac

SEQ ID NO: 168909 - DNA, 15 bp, Homo sapiens
actctcattccatca

SEQ ID NO: 168910 - DNA, 15 bp, Homo sapiens
cactctcattccatc

SEQ ID NO: 168911 - DNA, 15 bp, Homo sapiens
ccactctcattccat

SEQ ID NO: 168912 - DNA, 15 bp, Homo sapiens
cccactctcattcca

SEQ ID NO: 168913 - DNA, 15 bp, Homo sapiens
acccactctcattcc

SEQ ID NO: 168914 - DNA, 15 bp, Homo sapiens
aacccactctcattc

SEQ ID NO: 168915 - DNA, 15 bp, Homo sapiens
aaacccactctcatt

SEQ ID NO: 168916 - DNA, 15 bp, Homo sapiens
taaacccactctcat

SEQ ID NO: 168917 - DNA, 15 bp, Homo sapiens
gtaaacccactctca

SEQ ID NO: 168918 - DNA, 15 bp, Homo sapiens
tgtaaacccactctc

SEQ ID NO: 168919 - DNA, 15 bp, Homo sapiens
ttgtaaacccactct

SEQ ID NO: 168920 - DNA, 15 bp, Homo sapiens
tttgtaaacccactc

SEQ ID NO: 168921 - DNA, 15 bp, Homo sapiens
ctttgtaaacccact

SEQ ID NO: 168922 - DNA, 15 bp, Homo sapiens
gctttgtaaacccac

SEQ ID NO: 168923 - DNA, 15 bp, Homo sapiens
tgctttgtaaaccca

SEQ ID NO: 168924 - DNA, 15 bp, Homo sapiens
gtgctttgtaaaccc

SEQ ID NO: 168925 - DNA, 15 bp, Homo sapiens
ggtgctttgtaaacc

SEQ ID NO: 168926 - DNA, 15 bp, Homo sapiens
tggtgctttgtaaac

SEQ ID NO: 168927 - DNA, 15 bp, Homo sapiens
ttggtgctttgtaaa

SEQ ID NO: 168928 - DNA, 15 bp, Homo sapiens
cttggtgctttgtaa

SEQ ID NO: 168929 - DNA, 15 bp, Homo sapiens
gcttggtgctttgta

SEQ ID NO: 168930 - DNA, 15 bp, Homo sapiens
tgcttggtgctttgt

SEQ ID NO: 168931 - DNA, 15 bp, Homo sapiens
gtgcttggtgctttg

SEQ ID NO: 168932 - DNA, 15 bp, Homo sapiens
tgtgcttggtgcttt

SEQ ID NO: 168933 - DNA, 15 bp, Homo sapiens
ctgtgcttggtgctt

SEQ ID NO: 168934 - DNA, 15 bp, Homo sapiens
tctgtgcttggtgct

SEQ ID NO: 168935 - DNA, 15 bp, Homo sapiens
ctctgtgcttggtgc

SEQ ID NO: 168936 - DNA, 15 bp, Homo sapiens
gctctgtgcttggtg

SEQ ID NO: 168937 - DNA, 15 bp, Homo sapiens
ggctctgtgcttggt

SEQ ID NO: 168938 - DNA, 15 bp, Homo sapiens
gggctctgtgcttgg

SEQ ID NO: 168939 - DNA, 15 bp, Homo sapiens
cgggctctgtgcttg

SEQ ID NO: 168940 - DNA, 15 bp, Homo sapiens
tcgggctctgtgctt

SEQ ID NO: 168941 - DNA, 15 bp, Homo sapiens
gtcgggctctgtgct

SEQ ID NO: 168942 - DNA, 15 bp, Homo sapiens
tgtcgggctctgtgc

SEQ ID NO: 168943 - DNA, 15 bp, Homo sapiens
gtgtcgggctctgtg

SEQ ID NO: 168944 - DNA, 15 bp, Homo sapiens
tgtgtcgggctctgt

SEQ ID NO: 168945 - DNA, 15 bp, Homo sapiens
atgtgtcgggctctg

SEQ ID NO: 168946 - DNA, 15 bp, Homo sapiens
tatgtgtcgggctct

SEQ ID NO: 168947 - DNA, 15 bp, Homo sapiens
ctatgtgtcgggctc

SEQ ID NO: 168948 - DNA, 15 bp, Homo sapiens
actatgtgtcgggct

SEQ ID NO: 168949 - DNA, 15 bp, Homo sapiens
tactatgtgtcgggc

SEQ ID NO: 168950 - DNA, 15 bp, Homo sapiens
ctactatgtgtcggg

SEQ ID NO: 168951 - DNA, 15 bp, Homo sapiens
cctactatgtgtcgg

SEQ ID NO: 168952 - DNA, 15 bp, Homo sapiens
acctactatgtgtcg

SEQ ID NO: 168953 - DNA, 15 bp, Homo sapiens
tacctactatgtgtc

SEQ ID NO: 168954 - DNA, 15 bp, Homo sapiens
ctacctactatgtgt

SEQ ID NO: 168955 - DNA, 15 bp, Homo sapiens
gctacctactatgtg

SEQ ID NO: 168956 - DNA, 15 bp, Homo sapiens
ggctacctactatgt

SEQ ID NO: 168957 - DNA, 15 bp, Homo sapiens
aggctacctactatg

SEQ ID NO: 168958 - DNA, 15 bp, Homo sapiens
taggctacctactat

SEQ ID NO: 168959 - DNA, 15 bp, Homo sapiens
ctaggctacctacta

SEQ ID NO: 168960 - DNA, 15 bp, Homo sapiens
tctaggctacctact

SEQ ID NO: 168961 - DNA, 15 bp, Homo sapiens
ttctaggctacctac

SEQ ID NO: 168962 - DNA, 15 bp, Homo sapiens
cttctaggctaccta

SEQ ID NO: 168963 - DNA, 15 bp, Homo sapiens
ccttctaggctacct

SEQ ID NO: 168964 - DNA, 15 bp, Homo sapiens
cccttctaggctacc

SEQ ID NO: 168965 - DNA, 15 bp, Homo sapiens
tcccttctaggctac

SEQ ID NO: 168966 - DNA, 15 bp, Homo sapiens
ttcccttctaggcta

SEQ ID NO: 168967 - DNA, 15 bp, Homo sapiens
tttcccttctaggct

SEQ ID NO: 168968 - DNA, 15 bp, Homo sapiens
ttttcccttctaggc

SEQ ID NO: 168969 - DNA, 15 bp, Homo sapiens
gttttcccttctagg

SEQ ID NO: 168970 - DNA, 15 bp, Homo sapiens
tgttttcccttctag

SEQ ID NO: 168971 - DNA, 15 bp, Homo sapiens
ctgttttcccttcta

SEQ ID NO: 168972 - DNA, 15 bp, Homo sapiens
tctgttttcccttct

SEQ ID NO: 168973 - DNA, 15 bp, Homo sapiens
ttctgttttcccttc

SEQ ID NO: 168974 - DNA, 15 bp, Homo sapiens
gttctgttttccctt

SEQ ID NO: 168975 - DNA, 15 bp, Homo sapiens
agttctgttttccct

SEQ ID NO: 168976 - DNA, 15 bp, Homo sapiens
gagttctgttttccc

SEQ ID NO: 168977 - DNA, 15 bp, Homo sapiens
ggagttctgttttcc

SEQ ID NO: 168978 - DNA, 15 bp, Homo sapiens
tggagttctgttttc

SEQ ID NO: 168979 - DNA, 15 bp, Homo sapiens
ctggagttctgtttt

SEQ ID NO: 168980 - DNA, 15 bp, Homo sapiens
actggagttctgttt

SEQ ID NO: 168981 - DNA, 15 bp, Homo sapiens
aactggagttctgtt

SEQ ID NO: 168982 - DNA, 15 bp, Homo sapiens
caactggagttctgt

SEQ ID NO: 168983 - DNA, 15 bp, Homo sapiens
gcaactggagttctg

SEQ ID NO: 168984 - DNA, 15 bp, Homo sapiens
agcaactggagttct

SEQ ID NO: 168985 - DNA, 15 bp, Homo sapiens
tagcaactggagttc

SEQ ID NO: 168986 - DNA, 15 bp, Homo sapiens
ttagcaactggagtt

SEQ ID NO: 168987 - DNA, 15 bp, Homo sapiens
attagcaactggagt

SEQ ID NO: 168988 - DNA, 15 bp, Homo sapiens
cattagcaactggag

SEQ ID NO: 168989 - DNA, 15 bp, Homo sapiens
gcattagcaactgga

SEQ ID NO: 168990 - DNA, 15 bp, Homo sapiens
ggcattagcaactgg

SEQ ID NO: 168991 - DNA, 15 bp, Homo sapiens
gggcattagcaactg

SEQ ID NO: 168992 - DNA, 15 bp, Homo sapiens
tgggcattagcaact

SEQ ID NO: 168993 - DNA, 15 bp, Homo sapiens
ctgggcattagcaac

SEQ ID NO: 168994 - DNA, 15 bp, Homo sapiens
cctgggcattagcaa

SEQ ID NO: 168995 - DNA, 15 bp, Homo sapiens
acctgggcattagca

SEQ ID NO: 168996 - DNA, 15 bp, Homo sapiens
gacctgggcattagc

SEQ ID NO: 168997 - DNA, 15 bp, Homo sapiens
agacctgggcattag

SEQ ID NO: 168998 - DNA, 15 bp, Homo sapiens
cagacctgggcatta

SEQ ID NO: 168999 - DNA, 15 bp, Homo sapiens
gcagacctgggcatt

SEQ ID NO: 169000 - DNA, 15 bp, Homo sapiens
ggcagacctgggcat

SEQ ID NO: 169001 - DNA, 15 bp, Homo sapiens
gggcagacctgggca

SEQ ID NO: 169002 - DNA, 15 bp, Homo sapiens
ggggcagacctgggc

SEQ ID NO: 169003 - DNA, 15 bp, Homo sapiens
cggggcagacctggg

SEQ ID NO: 169004 - DNA, 15 bp, Homo sapiens
gcggggcagacctgg

SEQ ID NO: 169005 - DNA, 15 bp, Homo sapiens
ggcggggcagacctg

SEQ ID NO: 169006 - DNA, 15 bp, Homo sapiens
tggcggggcagacct

SEQ ID NO: 169007 - DNA, 15 bp, Homo sapiens
atggcggggcagacc

SEQ ID NO: 169008 - DNA, 15 bp, Homo sapiens
gatggcggggcagac

SEQ ID NO: 169009 - DNA, 15 bp, Homo sapiens
agatggcggggcaga

SEQ ID NO: 169010 - DNA, 15 bp, Homo sapiens
aagatggcggggcag

SEQ ID NO: 169011 - DNA, 15 bp, Homo sapiens
aaagatggcggggca

SEQ ID NO: 169012 - DNA, 15 bp, Homo sapiens
caaagatggcggggc

SEQ ID NO: 169013 - DNA, 15 bp, Homo sapiens
ccaaagatggcgggg

SEQ ID NO: 169014 - DNA, 15 bp, Homo sapiens
cccaaagatggcggg

SEQ ID NO: 169015 - DNA, 15 bp, Homo sapiens
ccccaaagatggcgg

SEQ ID NO: 169016 - DNA, 15 bp, Homo sapiens
gccccaaagatggcg

SEQ ID NO: 169017 - DNA, 15 bp, Homo sapiens
agccccaaagatggc

SEQ ID NO: 169018 - DNA, 15 bp, Homo sapiens
cagccccaaagatgg

SEQ ID NO: 169019 - DNA, 15 bp, Homo sapiens
ccagccccaaagatg

SEQ ID NO: 169020 - DNA, 15 bp, Homo sapiens
cccagccccaaagat

SEQ ID NO: 169021 - DNA, 15 bp, Homo sapiens
acccagccccaaaga

SEQ ID NO: 169022 - DNA, 15 bp, Homo sapiens
aacccagccccaaag

SEQ ID NO: 169023 - DNA, 15 bp, Homo sapiens
taacccagccccaaa

SEQ ID NO: 169024 - DNA, 15 bp, Homo sapiens
ataacccagccccaa

SEQ ID NO: 169025 - DNA, 15 bp, Homo sapiens
gataacccagcccca

SEQ ID NO: 169026 - DNA, 15 bp, Homo sapiens
agataacccagcccc

SEQ ID NO: 169027 - DNA, 15 bp, Homo sapiens
cagataacccagccc

SEQ ID NO: 169028 - DNA, 15 bp, Homo sapiens
acagataacccagcc

SEQ ID NO: 169029 - DNA, 15 bp, Homo sapiens
cacagataacccagc

SEQ ID NO: 169030 - DNA, 15 bp, Homo sapiens
acacagataacccag

SEQ ID NO: 169031 - DNA, 15 bp, Homo sapiens
cacacagataaccca

SEQ ID NO: 169032 - DNA, 15 bp, Homo sapiens
gcacacagataaccc

SEQ ID NO: 169033 - DNA, 15 bp, Homo sapiens
agcacacagataacc

SEQ ID NO: 169034 - DNA, 15 bp, Homo sapiens
gagcacacagataac

SEQ ID NO: 169035 - DNA, 15 bp, Homo sapiens
ggagcacacagataa

SEQ ID NO: 169036 - DNA, 15 bp, Homo sapiens
gggagcacacagata

SEQ ID NO: 169037 - DNA, 15 bp, Homo sapiens
ggggagcacacagat

SEQ ID NO: 169038 - DNA, 15 bp, Homo sapiens
aggggagcacacaga

SEQ ID NO: 169039 - DNA, 15 bp, Homo sapiens
caggggagcacacag

SEQ ID NO: 169040 - DNA, 15 bp, Homo sapiens
tcaggggagcacaca

SEQ ID NO: 169041 - DNA, 15 bp, Homo sapiens
gtcaggggagcacac

SEQ ID NO: 169042 - DNA, 15 bp, Homo sapiens
tgtcaggggagcaca

SEQ ID NO: 169043 - DNA, 15 bp, Homo sapiens
ctgtcaggggagcac

SEQ ID NO: 169044 - DNA, 15 bp, Homo sapiens
cctgtcaggggagca

SEQ ID NO: 169045 - DNA, 15 bp, Homo sapiens
ccctgtcaggggagc

SEQ ID NO: 169046 - DNA, 15 bp, Homo sapiens
tccctgtcaggggag

SEQ ID NO: 169047 - DNA, 15 bp, Homo sapiens
ctccctgtcagggga

SEQ ID NO: 169048 - DNA, 15 bp, Homo sapiens
gctccctgtcagggg

SEQ ID NO: 169049 - DNA, 15 bp, Homo sapiens
ggctccctgtcaggg

SEQ ID NO: 169050 - DNA, 15 bp, Homo sapiens
tggctccctgtcagg

SEQ ID NO: 169051 - DNA, 15 bp, Homo sapiens
gtggctccctgtcag

SEQ ID NO: 169052 - DNA, 15 bp, Homo sapiens
ggtggctccctgtca

SEQ ID NO: 169053 - DNA, 15 bp, Homo sapiens
gggtggctccctgtc

SEQ ID NO: 169054 - DNA, 15 bp, Homo sapiens
tgggtggctccctgt

SEQ ID NO: 169055 - DNA, 15 bp, Homo sapiens
ctgggtggctccctg

SEQ ID NO: 169056 - DNA, 15 bp, Homo sapiens
cctgggtggctccct

SEQ ID NO: 169057 - DNA, 15 bp, Homo sapiens
tcctgggtggctccc

SEQ ID NO: 169058 - DNA, 15 bp, Homo sapiens
atcctgggtggctcc

SEQ ID NO: 169059 - DNA, 15 bp, Homo sapiens
aatcctgggtggctc

SEQ ID NO: 169060 - DNA, 15 bp, Homo sapiens
gaatcctgggtggct

SEQ ID NO: 169061 - DNA, 15 bp, Homo sapiens
tgaatcctgggtggc

SEQ ID NO: 169062 - DNA, 15 bp, Homo sapiens
gtgaatcctgggtgg

SEQ ID NO: 169063 - DNA, 15 bp, Homo sapiens
agtgaatcctgggtg

SEQ ID NO: 169064 - DNA, 15 bp, Homo sapiens
aagtgaatcctgggt

SEQ ID NO: 169065 - DNA, 15 bp, Homo sapiens
aaagtgaatcctggg

SEQ ID NO: 169066 - DNA, 15 bp, Homo sapiens
gaaagtgaatcctgg

SEQ ID NO: 169067 - DNA, 15 bp, Homo sapiens
tgaaagtgaatcctg

SEQ ID NO: 169068 - DNA, 15 bp, Homo sapiens
ttgaaagtgaatcct

SEQ ID NO: 169069 - DNA, 15 bp, Homo sapiens
tttgaaagtgaatcc

SEQ ID NO: 169070 - DNA, 15 bp, Homo sapiens
ctttgaaagtgaatc

SEQ ID NO: 169071 - DNA, 15 bp, Homo sapiens
tctttgaaagtgaat

SEQ ID NO: 169072 - DNA, 15 bp, Homo sapiens
atctttgaaagtgaa

SEQ ID NO: 169073 - DNA, 15 bp, Homo sapiens
catctttgaaagtga

SEQ ID NO: 169074 - DNA, 15 bp, Homo sapiens
ccatctttgaaagtg

SEQ ID NO: 169075 - DNA, 15 bp, Homo sapiens
cccatctttgaaagt

SEQ ID NO: 169076 - DNA, 15 bp, Homo sapiens
tcccatctttgaaag

SEQ ID NO: 169077 - DNA, 15 bp, Homo sapiens
ttcccatctttgaaa

SEQ ID NO: 169078 - DNA, 15 bp, Homo sapiens
tttcccatctttgaa

SEQ ID NO: 169079 - DNA, 15 bp, Homo sapiens
ctttcccatctttga

SEQ ID NO: 169080 - DNA, 15 bp, Homo sapiens
cctttcccatctttg

SEQ ID NO: 169081 - DNA, 15 bp, Homo sapiens
tcctttcccatcttt

SEQ ID NO: 169082 - DNA, 15 bp, Homo sapiens
ctcctttcccatctt

SEQ ID NO: 169083 - DNA, 15 bp, Homo sapiens
cctcctttcccatct

SEQ ID NO: 169084 - DNA, 15 bp, Homo sapiens
gcctcctttcccatc

SEQ ID NO: 169085 - DNA, 15 bp, Homo sapiens
ggcctcctttcccat

SEQ ID NO: 169086 - DNA, 15 bp, Homo sapiens
aggcctcctttccca

SEQ ID NO: 169087 - DNA, 15 bp, Homo sapiens
caggcctcctttccc

SEQ ID NO: 169088 - DNA, 15 bp, Homo sapiens
tcaggcctcctttcc

SEQ ID NO: 169089 - DNA, 15 bp, Homo sapiens
ttcaggcctcctttc

SEQ ID NO: 169090 - DNA, 15 bp, Homo sapiens
cttcaggcctccttt

SEQ ID NO: 169091 - DNA, 15 bp, Homo sapiens
ccttcaggcctcctt

SEQ ID NO: 169092 - DNA, 15 bp, Homo sapiens
cccttcaggcctcct

SEQ ID NO: 169093 - DNA, 15 bp, Homo sapiens
ccccttcaggcctcc

SEQ ID NO: 169094 - DNA, 15 bp, Homo sapiens
tccccttcaggcctc

SEQ ID NO: 169095 - DNA, 15 bp, Homo sapiens
gtccccttcaggcct

SEQ ID NO: 169096 - DNA, 15 bp, Homo sapiens
tgtccccttcaggcc

SEQ ID NO: 169097 - DNA, 15 bp, Homo sapiens
atgtccccttcaggc

SEQ ID NO: 169098 - DNA, 15 bp, Homo sapiens
catgtccccttcagg

SEQ ID NO: 169099 - DNA, 15 bp, Homo sapiens
gcatgtccccttcag

SEQ ID NO: 169100 - DNA, 15 bp, Homo sapiens
agcatgtccccttca

SEQ ID NO: 169101 - DNA, 15 bp, Homo sapiens
tagcatgtccccttc

SEQ ID NO: 169102 - DNA, 15 bp, Homo sapiens
gtagcatgtcccctt

SEQ ID NO: 169103 - DNA, 15 bp, Homo sapiens
ggtagcatgtcccct

SEQ ID NO: 169104 - DNA, 15 bp, Homo sapiens
tggtagcatgtcccc

SEQ ID NO: 169105 - DNA, 15 bp, Homo sapiens
gtggtagcatgtccc

SEQ ID NO: 169106 - DNA, 15 bp, Homo sapiens
cgtggtagcatgtcc

SEQ ID NO: 169107 - DNA, 15 bp, Homo sapiens
ccgtggtagcatgtc

SEQ ID NO: 169108 - DNA, 15 bp, Homo sapiens
tccgtggtagcatgt

SEQ ID NO: 169109 - DNA, 15 bp, Homo sapiens
ctccgtggtagcatg

SEQ ID NO: 169110 - DNA, 15 bp, Homo sapiens
actccgtggtagcat

SEQ ID NO: 169111 - DNA, 15 bp, Homo sapiens
cactccgtggtagca

SEQ ID NO: 169112 - DNA, 15 bp, Homo sapiens
tcactccgtggtagc

SEQ ID NO: 169113 - DNA, 15 bp, Homo sapiens
ctcactccgtggtag

SEQ ID NO: 169114 - DNA, 15 bp, Homo sapiens
gctcactccgtggta

SEQ ID NO: 169115 - DNA, 15 bp, Homo sapiens
tgctcactccgtggt

SEQ ID NO: 169116 - DNA, 15 bp, Homo sapiens
ctgctcactccgtgg

SEQ ID NO: 169117 - DNA, 15 bp, Homo sapiens
cctgctcactccgtg

SEQ ID NO: 169118 - DNA, 15 bp, Homo sapiens
gcctgctcactccgt

SEQ ID NO: 169119 - DNA, 15 bp, Homo sapiens
tgcctgctcactccg

SEQ ID NO: 169120 - DNA, 15 bp, Homo sapiens
atgcctgctcactcc

SEQ ID NO: 169121 - DNA, 15 bp, Homo sapiens
aatgcctgctcactc

SEQ ID NO: 169122 - DNA, 15 bp, Homo sapiens
gaatgcctgctcact

SEQ ID NO: 169123 - DNA, 15 bp, Homo sapiens
ggaatgcctgctcac

SEQ ID NO: 169124 - DNA, 15 bp, Homo sapiens
aggaatgcctgctca

SEQ ID NO: 169125 - DNA, 15 bp, Homo sapiens
taggaatgcctgctc

SEQ ID NO: 169126 - DNA, 15 bp, Homo sapiens
ttaggaatgcctgct

SEQ ID NO: 169127 - DNA, 15 bp, Homo sapiens
cttaggaatgcctgc

SEQ ID NO: 169128 - DNA, 15 bp, Homo sapiens
tcttaggaatgcctg

SEQ ID NO: 169129 - DNA, 15 bp, Homo sapiens
ctcttaggaatgcct

SEQ ID NO: 169130 - DNA, 15 bp, Homo sapiens
actcttaggaatgcc

SEQ ID NO: 169131 - DNA, 15 bp, Homo sapiens
gactcttaggaatgc

SEQ ID NO: 169132 - DNA, 15 bp, Homo sapiens
cgactcttaggaatg

SEQ ID NO: 169133 - DNA, 15 bp, Homo sapiens
ccgactcttaggaat

SEQ ID NO: 169134 - DNA, 15 bp, Homo sapiens
accgactcttaggaa

SEQ ID NO: 169135 - DNA, 15 bp, Homo sapiens
gaccgactcttagga

SEQ ID NO: 169136 - DNA, 15 bp, Homo sapiens
agaccgactcttagg

SEQ ID NO: 169137 - DNA, 15 bp, Homo sapiens
cagaccgactcttag

SEQ ID NO: 169138 - DNA, 15 bp, Homo sapiens
acagaccgactctta

SEQ ID NO: 169139 - DNA, 15 bp, Homo sapiens
gacagaccgactctt

SEQ ID NO: 169140 - DNA, 15 bp, Homo sapiens
ggacagaccgactct

SEQ ID NO: 169141 - DNA, 15 bp, Homo sapiens
aggacagaccgactc

SEQ ID NO: 169142 - DNA, 15 bp, Homo sapiens
aaggacagaccgact

SEQ ID NO: 169143 - DNA, 15 bp, Homo sapiens
aaaggacagaccgac

SEQ ID NO: 169144 - DNA, 15 bp, Homo sapiens
gaaaggacagaccga

SEQ ID NO: 169145 - DNA, 15 bp, Homo sapiens
ggaaaggacagaccg

SEQ ID NO: 169146 - DNA, 15 bp, Homo sapiens
aggaaaggacagacc

SEQ ID NO: 169147 - DNA, 15 bp, Homo sapiens
gaggaaaggacagac

SEQ ID NO: 169148 - DNA, 15 bp, Homo sapiens
agaggaaaggacaga

SEQ ID NO: 169149 - DNA, 15 bp, Homo sapiens
gagaggaaaggacag

SEQ ID NO: 169150 - DNA, 15 bp, Homo sapiens
ggagaggaaaggaca

SEQ ID NO: 169151 - DNA, 15 bp, Homo sapiens
gggagaggaaaggac

SEQ ID NO: 169152 - DNA, 15 bp, Homo sapiens
tgggagaggaaagga

SEQ ID NO: 169153 - DNA, 15 bp, Homo sapiens
gtgggagaggaaagg

SEQ ID NO: 169154 - DNA, 15 bp, Homo sapiens
agtgggagaggaaag

SEQ ID NO: 169155 - DNA, 15 bp, Homo sapiens
cagtgggagaggaaa

SEQ ID NO: 169156 - DNA, 15 bp, Homo sapiens
ccagtgggagaggaa

SEQ ID NO: 169157 - DNA, 15 bp, Homo sapiens
tccagtgggagagga

SEQ ID NO: 169158 - DNA, 15 bp, Homo sapiens
ctccagtgggagagg

SEQ ID NO: 169159 - DNA, 15 bp, Homo sapiens
tctccagtgggagag

SEQ ID NO: 169160 - DNA, 15 bp, Homo sapiens
atctccagtgggaga

SEQ ID NO: 169161 - DNA, 15 bp, Homo sapiens
tatctccagtgggag

SEQ ID NO: 169162 - DNA, 15 bp, Homo sapiens
gtatctccagtggga

SEQ ID NO: 169163 - DNA, 15 bp, Homo sapiens
agtatctccagtggg

SEQ ID NO: 169164 - DNA, 15 bp, Homo sapiens
gagtatctccagtgg

SEQ ID NO: 169165 - DNA, 15 bp, Homo sapiens
tgagtatctccagtg

SEQ ID NO: 169166 - DNA, 15 bp, Homo sapiens
ctgagtatctccagt

SEQ ID NO: 169167 - DNA, 15 bp, Homo sapiens
gctgagtatctccag

SEQ ID NO: 169168 - DNA, 15 bp, Homo sapiens
ggctgagtatctcca

SEQ ID NO: 169169 - DNA, 15 bp, Homo sapiens
tggctgagtatctcc

SEQ ID NO: 169170 - DNA, 15 bp, Homo sapiens
ctggctgagtatctc

SEQ ID NO: 169171 - DNA, 15 bp, Homo sapiens
actggctgagtatct

SEQ ID NO: 169172 - DNA, 15 bp, Homo sapiens
cactggctgagtatc

SEQ ID NO: 169173 - DNA, 15 bp, Homo sapiens
acactggctgagtat

SEQ ID NO: 169174 - DNA, 15 bp, Homo sapiens
cacactggctgagta

SEQ ID NO: 169175 - DNA, 15 bp, Homo sapiens
ccacactggctgagt

SEQ ID NO: 169176 - DNA, 15 bp, Homo sapiens
cccacactggctgag

SEQ ID NO: 169177 - DNA, 15 bp, Homo sapiens
ccccacactggctga

SEQ ID NO: 169178 - DNA, 15 bp, Homo sapiens
cccccacactggctg

SEQ ID NO: 169179 - DNA, 15 bp, Homo sapiens
gcccccacactggct

SEQ ID NO: 169180 - DNA, 15 bp, Homo sapiens
ggcccccacactggc

SEQ ID NO: 169181 - DNA, 15 bp, Homo sapiens
tggcccccacactgg

SEQ ID NO: 169182 - DNA, 15 bp, Homo sapiens
atggcccccacactg

SEQ ID NO: 169183 - DNA, 15 bp, Homo sapiens
catggcccccacact

SEQ ID NO: 169184 - DNA, 15 bp, Homo sapiens
gcatggcccccacac

SEQ ID NO: 169185 - DNA, 15 bp, Homo sapiens
tgcatggcccccaca

SEQ ID NO: 169186 - DNA, 15 bp, Homo sapiens
ctgcatggcccccac

SEQ ID NO: 169187 - DNA, 15 bp, Homo sapiens
gctgcatggccccca

SEQ ID NO: 169188 - DNA, 15 bp, Homo sapiens
tgctgcatggccccc

SEQ ID NO: 169189 - DNA, 15 bp, Homo sapiens
gtgctgcatggcccc

SEQ ID NO: 169190 - DNA, 15 bp, Homo sapiens
ggtgctgcatggccc

SEQ ID NO: 169191 - DNA, 15 bp, Homo sapiens
cggtgctgcatggcc

SEQ ID NO: 169192 - DNA, 15 bp, Homo sapiens
ccggtgctgcatggc

SEQ ID NO: 169193 - DNA, 15 bp, Homo sapiens
cccggtgctgcatgg

SEQ ID NO: 169194 - DNA, 15 bp, Homo sapiens
ccccggtgctgcatg

SEQ ID NO: 169195 - DNA, 15 bp, Homo sapiens
tccccggtgctgcat

SEQ ID NO: 169196 - DNA, 15 bp, Homo sapiens
ttccccggtgctgca

SEQ ID NO: 169197 - DNA, 15 bp, Homo sapiens
cttccccggtgctgc

SEQ ID NO: 169198 - DNA, 15 bp, Homo sapiens
ccttccccggtgctg

SEQ ID NO: 169199 - DNA, 15 bp, Homo sapiens
cccttccccggtgct

SEQ ID NO: 169200 - DNA, 15 bp, Homo sapiens
tcccttccccggtgc

SEQ ID NO: 169201 - DNA, 15 bp, Homo sapiens
gtcccttccccggtg

SEQ ID NO: 169202 - DNA, 15 bp, Homo sapiens
tgtcccttccccggt

SEQ ID NO: 169203 - DNA, 15 bp, Homo sapiens
gtgtcccttccccgg

SEQ ID NO: 169204 - DNA, 15 bp, Homo sapiens
tgtgtcccttccccg

SEQ ID NO: 169205 - DNA, 15 bp, Homo sapiens
atgtgtcccttcccc

SEQ ID NO: 169206 - DNA, 15 bp, Homo sapiens
catgtgtcccttccc

SEQ ID NO: 169207 - DNA, 15 bp, Homo sapiens
acatgtgtcccttcc

SEQ ID NO: 169208 - DNA, 15 bp, Homo sapiens
gacatgtgtcccttc

SEQ ID NO: 169209 - DNA, 15 bp, Homo sapiens
agacatgtgtccctt

SEQ ID NO: 169210 - DNA, 15 bp, Homo sapiens
cagacatgtgtccct

SEQ ID NO: 169211 - DNA, 15 bp, Homo sapiens
ccagacatgtgtccc

SEQ ID NO: 169212 - DNA, 15 bp, Homo sapiens
cccagacatgtgtcc

SEQ ID NO: 169213 - DNA, 15 bp, Homo sapiens
tcccagacatgtgtc

SEQ ID NO: 169214 - DNA, 15 bp, Homo sapiens
ttcccagacatgtgt

SEQ ID NO: 169215 - DNA, 15 bp, Homo sapiens
attcccagacatgtg

SEQ ID NO: 169216 - DNA, 15 bp, Homo sapiens
tattcccagacatgt

SEQ ID NO: 169217 - DNA, 15 bp, Homo sapiens
atattcccagacatg

SEQ ID NO: 169218 - DNA, 15 bp, Homo sapiens
aatattcccagacat

SEQ ID NO: 169219 - DNA, 15 bp, Homo sapiens
caatattcccagaca

SEQ ID NO: 169220 - DNA, 15 bp, Homo sapiens
ccaatattcccagac

SEQ ID NO: 169221 - DNA, 15 bp, Homo sapiens
cccaatattcccaga

SEQ ID NO: 169222 - DNA, 15 bp, Homo sapiens
ccccaatattcccag

SEQ ID NO: 169223 - DNA, 15 bp, Homo sapiens
tccccaatattccca

SEQ ID NO: 169224 - DNA, 15 bp, Homo sapiens
atccccaatattccc

SEQ ID NO: 169225 - DNA, 15 bp, Homo sapiens
tatccccaatattcc

SEQ ID NO: 169226 - DNA, 15 bp, Homo sapiens
ttatccccaatattc

SEQ ID NO: 169227 - DNA, 15 bp, Homo sapiens
gttatccccaatatt

SEQ ID NO: 169228 - DNA, 15 bp, Homo sapiens
ggttatccccaatat

SEQ ID NO: 169229 - DNA, 15 bp, Homo sapiens
aggttatccccaata

SEQ ID NO: 169230 - DNA, 15 bp, Homo sapiens
aaggttatccccaat

SEQ ID NO: 169231 - DNA, 15 bp, Homo sapiens
caaggttatccccaa

SEQ ID NO: 169232 - DNA, 15 bp, Homo sapiens
acaaggttatcccca

SEQ ID NO: 169233 - DNA, 15 bp, Homo sapiens
cacaaggttatcccc

SEQ ID NO: 169234 - DNA, 15 bp, Homo sapiens
acacaaggttatccc

SEQ ID NO: 169235 - DNA, 15 bp, Homo sapiens
cacacaaggttatcc

SEQ ID NO: 169236 - DNA, 15 bp, Homo sapiens
tcacacaaggttatc

SEQ ID NO: 169237 - DNA, 15 bp, Homo sapiens
ttcacacaaggttat

SEQ ID NO: 169238 - DNA, 15 bp, Homo sapiens
tttcacacaaggtta

SEQ ID NO: 169239 - DNA, 15 bp, Homo sapiens
atttcacacaaggtt

SEQ ID NO: 169240 - DNA, 15 bp, Homo sapiens
aatttcacacaaggt

SEQ ID NO: 169241 - DNA, 15 bp, Homo sapiens
aaatttcacacaagg

SEQ ID NO: 169242 - DNA, 15 bp, Homo sapiens
aaaatttcacacaag

SEQ ID NO: 169243 - DNA, 15 bp, Homo sapiens
aaaaatttcacacaa

SEQ ID NO: 169244 - DNA, 15 bp, Homo sapiens
gaaaaatttcacaca

SEQ ID NO: 169245 - DNA, 15 bp, Homo sapiens
tgaaaaatttcacac

SEQ ID NO: 169246 - DNA, 15 bp, Homo sapiens
ctgaaaaatttcaca

SEQ ID NO: 169247 - DNA, 15 bp, Homo sapiens
tctgaaaaatttcac

SEQ ID NO: 169248 - DNA, 15 bp, Homo sapiens
ttctgaaaaatttca

SEQ ID NO: 169249 - DNA, 15 bp, Homo sapiens
gttctgaaaaatttc

SEQ ID NO: 169250 - DNA, 15 bp, Homo sapiens
tgttctgaaaaattt

SEQ ID NO: 169251 - DNA, 15 bp, Homo sapiens
ctgttctgaaaaatt

SEQ ID NO: 169252 - DNA, 15 bp, Homo sapiens
cctgttctgaaaaat

SEQ ID NO: 169253 - DNA, 15 bp, Homo sapiens
gcctgttctgaaaaa

SEQ ID NO: 169254 - DNA, 15 bp, Homo sapiens
ggcctgttctgaaaa

SEQ ID NO: 169255 - DNA, 15 bp, Homo sapiens
cggcctgttctgaaa

SEQ ID NO: 169256 - DNA, 15 bp, Homo sapiens
ccggcctgttctgaa

SEQ ID NO: 169257 - DNA, 15 bp, Homo sapiens
gccggcctgttctga

SEQ ID NO: 169258 - DNA, 15 bp, Homo sapiens
tgccggcctgttctg

SEQ ID NO: 169259 - DNA, 15 bp, Homo sapiens
ctgccggcctgttct

SEQ ID NO: 169260 - DNA, 15 bp, Homo sapiens
actgccggcctgttc

SEQ ID NO: 169261 - DNA, 15 bp, Homo sapiens
cactgccggcctgtt

SEQ ID NO: 169262 - DNA, 15 bp, Homo sapiens
ccactgccggcctgt

SEQ ID NO: 169263 - DNA, 15 bp, Homo sapiens
gccactgccggcctg

SEQ ID NO: 169264 - DNA, 15 bp, Homo sapiens
ggccactgccggcct

SEQ ID NO: 169265 - DNA, 15 bp, Homo sapiens
aggccactgccggcc

SEQ ID NO: 169266 - DNA, 15 bp, Homo sapiens
caggccactgccggc

SEQ ID NO: 169267 - DNA, 15 bp, Homo sapiens
ccaggccactgccgg

SEQ ID NO: 169268 - DNA, 15 bp, Homo sapiens
cccaggccactgccg

SEQ ID NO: 169269 - DNA, 15 bp, Homo sapiens
tcccaggccactgcc

SEQ ID NO: 169270 - DNA, 15 bp, Homo sapiens
gtcccaggccactgc

SEQ ID NO: 169271 - DNA, 15 bp, Homo sapiens
tgtcccaggccactg

SEQ ID NO: 169272 - DNA, 15 bp, Homo sapiens
atgtcccaggccact

SEQ ID NO: 169273 - DNA, 15 bp, Homo sapiens
catgtcccaggccac

SEQ ID NO: 169274 - DNA, 15 bp, Homo sapiens
ccatgtcccaggcca

SEQ ID NO: 169275 - DNA, 15 bp, Homo sapiens
tccatgtcccaggcc

SEQ ID NO: 169276 - DNA, 15 bp, Homo sapiens
atccatgtcccaggc

SEQ ID NO: 169277 - DNA, 15 bp, Homo sapiens
tatccatgtcccagg

SEQ ID NO: 169278 - DNA, 15 bp, Homo sapiens
ctatccatgtcccag

SEQ ID NO: 169279 - DNA, 15 bp, Homo sapiens
gctatccatgtccca

SEQ ID NO: 169280 - DNA, 15 bp, Homo sapiens
agctatccatgtccc

SEQ ID NO: 169281 - DNA, 15 bp, Homo sapiens
gagctatccatgtcc

SEQ ID NO: 169282 - DNA, 15 bp, Homo sapiens
tgagctatccatgtc

SEQ ID NO: 169283 - DNA, 15 bp, Homo sapiens
ctgagctatccatgt

SEQ ID NO: 169284 - DNA, 15 bp, Homo sapiens
cctgagctatccatg

SEQ ID NO: 169285 - DNA, 15 bp, Homo sapiens
gcctgagctatccat

SEQ ID NO: 169286 - DNA, 15 bp, Homo sapiens
agcctgagctatcca

SEQ ID NO: 169287 - DNA, 15 bp, Homo sapiens
cagcctgagctatcc

SEQ ID NO: 169288 - DNA, 15 bp, Homo sapiens
gcagcctgagctatc

SEQ ID NO: 169289 - DNA, 15 bp, Homo sapiens
ggcagcctgagctat

SEQ ID NO: 169290 - DNA, 15 bp, Homo sapiens
aggcagcctgagcta

SEQ ID NO: 169291 - DNA, 15 bp, Homo sapiens
caggcagcctgagct

SEQ ID NO: 169292 - DNA, 15 bp, Homo sapiens
gcaggcagcctgagc

SEQ ID NO: 169293 - DNA, 15 bp, Homo sapiens
agcaggcagcctgag

SEQ ID NO: 169294 - DNA, 15 bp, Homo sapiens
aagcaggcagcctga

SEQ ID NO: 169295 - DNA, 15 bp, Homo sapiens
aaagcaggcagcctg

SEQ ID NO: 169296 - DNA, 15 bp, Homo sapiens
caaagcaggcagcct

SEQ ID NO: 169297 - DNA, 15 bp, Homo sapiens
gcaaagcaggcagcc

SEQ ID NO: 169298 - DNA, 15 bp, Homo sapiens
agcaaagcaggcagc

SEQ ID NO: 169299 - DNA, 15 bp, Homo sapiens
gagcaaagcaggcag

SEQ ID NO: 169300 - DNA, 15 bp, Homo sapiens
ggagcaaagcaggca

SEQ ID NO: 169301 - DNA, 15 bp, Homo sapiens
aggagcaaagcaggc

SEQ ID NO: 169302 - DNA, 15 bp, Homo sapiens
caggagcaaagcagg

SEQ ID NO: 169303 - DNA, 15 bp, Homo sapiens
acaggagcaaagcag

SEQ ID NO: 169304 - DNA, 15 bp, Homo sapiens
cacaggagcaaagca

SEQ ID NO: 169305 - DNA, 15 bp, Homo sapiens
gcacaggagcaaagc

SEQ ID NO: 169306 - DNA, 15 bp, Homo sapiens
agcacaggagcaaag

SEQ ID NO: 169307 - DNA, 15 bp, Homo sapiens
aagcacaggagcaaa

SEQ ID NO: 169308 - DNA, 15 bp, Homo sapiens
caagcacaggagcaa

SEQ ID NO: 169309 - DNA, 15 bp, Homo sapiens
acaagcacaggagca

SEQ ID NO: 169310 - DNA, 15 bp, Homo sapiens
gacaagcacaggagc

SEQ ID NO: 169311 - DNA, 15 bp, Homo sapiens
ggacaagcacaggag

SEQ ID NO: 169312 - DNA, 15 bp, Homo sapiens
aggacaagcacagga

SEQ ID NO: 169313 - DNA, 15 bp, Homo sapiens
gaggacaagcacagg

SEQ ID NO: 169314 - DNA, 15 bp, Homo sapiens
cgaggacaagcacag

SEQ ID NO: 169315 - DNA, 15 bp, Homo sapiens
acgaggacaagcaca

SEQ ID NO: 169316 - DNA, 15 bp, Homo sapiens
cacgaggacaagcac

SEQ ID NO: 169317 - DNA, 15 bp, Homo sapiens
tcacgaggacaagca

SEQ ID NO: 169318 - DNA, 15 bp, Homo sapiens
gtcacgaggacaagc

SEQ ID NO: 169319 - DNA, 15 bp, Homo sapiens
agtcacgaggacaag

SEQ ID NO: 169320 - DNA, 15 bp, Homo sapiens
aagtcacgaggacaa

SEQ ID NO: 169321 - DNA, 15 bp, Homo sapiens
taagtcacgaggaca

SEQ ID NO: 169322 - DNA, 15 bp, Homo sapiens
ctaagtcacgaggac

SEQ ID NO: 169323 - DNA, 15 bp, Homo sapiens
tctaagtcacgagga

SEQ ID NO: 169324 - DNA, 15 bp, Homo sapiens
atctaagtcacgagg

SEQ ID NO: 169325 - DNA, 15 bp, Homo sapiens
aatctaagtcacgag

SEQ ID NO: 169326 - DNA, 15 bp, Homo sapiens
gaatctaagtcacga

SEQ ID NO: 169327 - DNA, 15 bp, Homo sapiens
agaatctaagtcacg

SEQ ID NO: 169328 - DNA, 15 bp, Homo sapiens
aagaatctaagtcac

SEQ ID NO: 169329 - DNA, 15 bp, Homo sapiens
gaagaatctaagtca

SEQ ID NO: 169330 - DNA, 15 bp, Homo sapiens
tgaagaatctaagtc

SEQ ID NO: 169331 - DNA, 15 bp, Homo sapiens
ttgaagaatctaagt

SEQ ID NO: 169332 - DNA, 15 bp, Homo sapiens
cttgaagaatctaag

SEQ ID NO: 169333 - DNA, 15 bp, Homo sapiens
tcttgaagaatctaa

SEQ ID NO: 169334 - DNA, 15 bp, Homo sapiens
atcttgaagaatcta

SEQ ID NO: 169335 - DNA, 15 bp, Homo sapiens
catcttgaagaatct

SEQ ID NO: 169336 - DNA, 15 bp, Homo sapiens
ccatcttgaagaatc

SEQ ID NO: 169337 - DNA, 15 bp, Homo sapiens
tccatcttgaagaat

SEQ ID NO: 169338 - DNA, 15 bp, Homo sapiens
ctccatcttgaagaa

SEQ ID NO: 169339 - DNA, 15 bp, Homo sapiens
cctccatcttgaaga

SEQ ID NO: 169340 - DNA, 15 bp, Homo sapiens
ccctccatcttgaag

SEQ ID NO: 169341 - DNA, 15 bp, Homo sapiens
cccctccatcttgaa

SEQ ID NO: 169342 - DNA, 15 bp, Homo sapiens
gcccctccatcttga

SEQ ID NO: 169343 - DNA, 15 bp, Homo sapiens
agcccctccatcttg

SEQ ID NO: 169344 - DNA, 15 bp, Homo sapiens
gagcccctccatctt

SEQ ID NO: 169345 - DNA, 15 bp, Homo sapiens
ggagcccctccatct

SEQ ID NO: 169346 - DNA, 15 bp, Homo sapiens
gggagcccctccatc

SEQ ID NO: 169347 - DNA, 15 bp, Homo sapiens
agggagcccctccat

SEQ ID NO: 169348 - DNA, 15 bp, Homo sapiens
cagggagcccctcca

SEQ ID NO: 169349 - DNA, 15 bp, Homo sapiens
ccagggagcccctcc

SEQ ID NO: 169350 - DNA, 15 bp, Homo sapiens
gccagggagcccctc

SEQ ID NO: 169351 - DNA, 15 bp, Homo sapiens
agccagggagcccct

SEQ ID NO: 169352 - DNA, 15 bp, Homo sapiens
cagccagggagcccc

SEQ ID NO: 169353 - DNA, 15 bp, Homo sapiens
ccagccagggagccc

SEQ ID NO: 169354 - DNA, 15 bp, Homo sapiens
accagccagggagcc

SEQ ID NO: 169355 - DNA, 15 bp, Homo sapiens
gaccagccagggagc

SEQ ID NO: 169356 - DNA, 15 bp, Homo sapiens
ggaccagccagggag

SEQ ID NO: 169357 - DNA, 15 bp, Homo sapiens
gggaccagccaggga

SEQ ID NO: 169358 - DNA, 15 bp, Homo sapiens
ggggaccagccaggg

SEQ ID NO: 169359 - DNA, 15 bp, Homo sapiens
aggggaccagccagg

SEQ ID NO: 169360 - DNA, 15 bp, Homo sapiens
taggggaccagccag

SEQ ID NO: 169361 - DNA, 15 bp, Homo sapiens
gtaggggaccagcca

SEQ ID NO: 169362 - DNA, 15 bp, Homo sapiens
tgtaggggaccagcc

SEQ ID NO: 169363 - DNA, 15 bp, Homo sapiens
gtgtaggggaccagc

SEQ ID NO: 169364 - DNA, 15 bp, Homo sapiens
tgtgtaggggaccag

SEQ ID NO: 169365 - DNA, 15 bp, Homo sapiens
ttgtgtaggggacca

SEQ ID NO: 169366 - DNA, 15 bp, Homo sapiens
cttgtgtaggggacc

SEQ ID NO: 169367 - DNA, 15 bp, Homo sapiens
ccttgtgtaggggac

SEQ ID NO: 169368 - DNA, 15 bp, Homo sapiens
gccttgtgtagggga

SEQ ID NO: 169369 - DNA, 15 bp, Homo sapiens
ggccttgtgtagggg

SEQ ID NO: 169370 - DNA, 15 bp, Homo sapiens
gggccttgtgtaggg

SEQ ID NO: 169371 - DNA, 15 bp, Homo sapiens
ggggccttgtgtagg

SEQ ID NO: 169372 - DNA, 15 bp, Homo sapiens
aggggccttgtgtag

SEQ ID NO: 169373 - DNA, 15 bp, Homo sapiens
taggggccttgtgta

SEQ ID NO: 169374 - DNA, 15 bp, Homo sapiens
ataggggccttgtgt

SEQ ID NO: 169375 - DNA, 15 bp, Homo sapiens
tataggggccttgtg

SEQ ID NO: 169376 - DNA, 15 bp, Homo sapiens
atataggggccttgt

SEQ ID NO: 169377 - DNA, 15 bp, Homo sapiens
gatataggggccttg

SEQ ID NO: 169378 - DNA, 15 bp, Homo sapiens
agatataggggcctt

SEQ ID NO: 169379 - DNA, 15 bp, Homo sapiens
cagatataggggcct

SEQ ID NO: 169380 - DNA, 15 bp, Homo sapiens
acagatataggggcc

SEQ ID NO: 169381 - DNA, 15 bp, Homo sapiens
cacagatataggggc

SEQ ID NO: 169382 - DNA, 15 bp, Homo sapiens
gcacagatatagggg

SEQ ID NO: 169383 - DNA, 15 bp, Homo sapiens
agcacagatataggg

SEQ ID NO: 169384 - DNA, 15 bp, Homo sapiens
cagcacagatatagg

SEQ ID NO: 169385 - DNA, 15 bp, Homo sapiens
ccagcacagatatag

SEQ ID NO: 169386 - DNA, 15 bp, Homo sapiens
cccagcacagatata

SEQ ID NO: 169387 - DNA, 15 bp, Homo sapiens
acccagcacagatat

SEQ ID NO: 169388 - DNA, 15 bp, Homo sapiens
cacccagcacagata

SEQ ID NO: 169389 - DNA, 15 bp, Homo sapiens
ccacccagcacagat

SEQ ID NO: 169390 - DNA, 15 bp, Homo sapiens
accacccagcacaga

SEQ ID NO: 169391 - DNA, 15 bp, Homo sapiens
caccacccagcacag

SEQ ID NO: 169392 - DNA, 15 bp, Homo sapiens
ccaccacccagcaca

SEQ ID NO: 169393 - DNA, 15 bp, Homo sapiens
accaccacccagcac

SEQ ID NO: 169394 - DNA, 15 bp, Homo sapiens
aaccaccacccagca

SEQ ID NO: 169395 - DNA, 15 bp, Homo sapiens
gaaccaccacccagc

SEQ ID NO: 169396 - DNA, 15 bp, Homo sapiens
agaaccaccacccag

SEQ ID NO: 169397 - DNA, 15 bp, Homo sapiens
cagaaccaccaccca

SEQ ID NO: 169398 - DNA, 15 bp, Homo sapiens
tcagaaccaccaccc

SEQ ID NO: 169399 - DNA, 15 bp, Homo sapiens
atcagaaccaccacc

SEQ ID NO: 169400 - DNA, 15 bp, Homo sapiens
gatcagaaccaccac

SEQ ID NO: 169401 - DNA, 15 bp, Homo sapiens
ggatcagaaccacca

SEQ ID NO: 169402 - DNA, 15 bp, Homo sapiens
gggatcagaaccacc

SEQ ID NO: 169403 - DNA, 15 bp, Homo sapiens
agggatcagaaccac

SEQ ID NO: 169404 - DNA, 15 bp, Homo sapiens
aagggatcagaacca

SEQ ID NO: 169405 - DNA, 15 bp, Homo sapiens
aaagggatcagaacc

SEQ ID NO: 169406 - DNA, 15 bp, Homo sapiens
aaaagggatcagaac

SEQ ID NO: 169407 - DNA, 15 bp, Homo sapiens
aaaaagggatcagaa

SEQ ID NO: 169408 - DNA, 15 bp, Homo sapiens
gaaaaagggatcaga

SEQ ID NO: 169409 - DNA, 15 bp, Homo sapiens
ggaaaaagggatcag

SEQ ID NO: 169410 - DNA, 15 bp, Homo sapiens
gggaaaaagggatca

SEQ ID NO: 169411 - DNA, 15 bp, Homo sapiens
agggaaaaagggatc

SEQ ID NO: 169412 - DNA, 15 bp, Homo sapiens
cagggaaaaagggat

SEQ ID NO: 169413 - DNA, 15 bp, Homo sapiens
acagggaaaaaggga

SEQ ID NO: 169414 - DNA, 15 bp, Homo sapiens
cacagggaaaaaggg

SEQ ID NO: 169415 - DNA, 15 bp, Homo sapiens
ccacagggaaaaagg

SEQ ID NO: 169416 - DNA, 15 bp, Homo sapiens
cccacagggaaaaag

SEQ ID NO: 169417 - DNA, 15 bp, Homo sapiens
ccccacagggaaaaa

SEQ ID NO: 169418 - DNA, 15 bp, Homo sapiens
cccccacagggaaaa

SEQ ID NO: 169419 - DNA, 15 bp, Homo sapiens
acccccacagggaaa

SEQ ID NO: 169420 - DNA, 15 bp, Homo sapiens
cacccccacagggaa

SEQ ID NO: 169421 - DNA, 15 bp, Homo sapiens
ccacccccacaggga

SEQ ID NO: 169422 - DNA, 15 bp, Homo sapiens
tccacccccacaggg

SEQ ID NO: 169423 - DNA, 15 bp, Homo sapiens
atccacccccacagg

SEQ ID NO: 169424 - DNA, 15 bp, Homo sapiens
gatccacccccacag

SEQ ID NO: 169425 - DNA, 15 bp, Homo sapiens
tgatccacccccaca

SEQ ID NO: 169426 - DNA, 15 bp, Homo sapiens
ctgatccacccccac

SEQ ID NO: 169427 - DNA, 15 bp, Homo sapiens
tctgatccaccccca

SEQ ID NO: 169428 - DNA, 15 bp, Homo sapiens
ctctgatccaccccc

SEQ ID NO: 169429 - DNA, 15 bp, Homo sapiens
gctctgatccacccc

SEQ ID NO: 169430 - DNA, 15 bp, Homo sapiens
agctctgatccaccc

SEQ ID NO: 169431 - DNA, 15 bp, Homo sapiens
aagctctgatccacc

SEQ ID NO: 169432 - DNA, 15 bp, Homo sapiens
gaagctctgatccac

SEQ ID NO: 169433 - DNA, 15 bp, Homo sapiens
ggaagctctgatcca

SEQ ID NO: 169434 - DNA, 15 bp, Homo sapiens
aggaagctctgatcc

SEQ ID NO: 169435 - DNA, 15 bp, Homo sapiens
caggaagctctgatc

SEQ ID NO: 169436 - DNA, 15 bp, Homo sapiens
acaggaagctctgat

SEQ ID NO: 169437 - DNA, 15 bp, Homo sapiens
cacaggaagctctga

SEQ ID NO: 169438 - DNA, 15 bp, Homo sapiens
ccacaggaagctctg

SEQ ID NO: 169439 - DNA, 15 bp, Homo sapiens
gccacaggaagctct

SEQ ID NO: 169440 - DNA, 15 bp, Homo sapiens
agccacaggaagctc

SEQ ID NO: 169441 - DNA, 15 bp, Homo sapiens
aagccacaggaagct

SEQ ID NO: 169442 - DNA, 15 bp, Homo sapiens
gaagccacaggaagc

SEQ ID NO: 169443 - DNA, 15 bp, Homo sapiens
agaagccacaggaag

SEQ ID NO: 169444 - DNA, 15 bp, Homo sapiens
gagaagccacaggaa

SEQ ID NO: 169445 - DNA, 15 bp, Homo sapiens
cgagaagccacagga

SEQ ID NO: 169446 - DNA, 15 bp, Homo sapiens
ccgagaagccacagg

SEQ ID NO: 169447 - DNA, 15 bp, Homo sapiens
accgagaagccacag

SEQ ID NO: 169448 - DNA, 15 bp, Homo sapiens
caccgagaagccaca

SEQ ID NO: 169449 - DNA, 15 bp, Homo sapiens
ccaccgagaagccac

SEQ ID NO: 169450 - DNA, 15 bp, Homo sapiens
cccaccgagaagcca

SEQ ID NO: 169451 - DNA, 15 bp, Homo sapiens
ccccaccgagaagcc

SEQ ID NO: 169452 - DNA, 15 bp, Homo sapiens
gccccaccgagaagc

SEQ ID NO: 169453 - DNA, 15 bp, Homo sapiens
agccccaccgagaag

SEQ ID NO: 169454 - DNA, 15 bp, Homo sapiens
cagccccaccgagaa

SEQ ID NO: 169455 - DNA, 15 bp, Homo sapiens
ccagccccaccgaga

SEQ ID NO: 169456 - DNA, 15 bp, Homo sapiens
tccagccccaccgag

SEQ ID NO: 169457 - DNA, 15 bp, Homo sapiens
ctccagccccaccga

SEQ ID NO: 169458 - DNA, 15 bp, Homo sapiens
cctccagccccaccg

SEQ ID NO: 169459 - DNA, 15 bp, Homo sapiens
ccctccagccccacc

SEQ ID NO: 169460 - DNA, 15 bp, Homo sapiens
gccctccagccccac

SEQ ID NO: 169461 - DNA, 15 bp, Homo sapiens
ggccctccagcccca

SEQ ID NO: 169462 - DNA, 15 bp, Homo sapiens
gggccctccagcccc

SEQ ID NO: 169463 - DNA, 15 bp, Homo sapiens
agggccctccagccc

SEQ ID NO: 169464 - DNA, 15 bp, Homo sapiens
tagggccctccagcc

SEQ ID NO: 169465 - DNA, 15 bp, Homo sapiens
ctagggccctccagc

SEQ ID NO: 169466 - DNA, 15 bp, Homo sapiens
gctagggccctccag

SEQ ID NO: 169467 - DNA, 15 bp, Homo sapiens
tgctagggccctcca

SEQ ID NO: 169468 - DNA, 15 bp, Homo sapiens
gtgctagggccctcc

SEQ ID NO: 169469 - DNA, 15 bp, Homo sapiens
tgtgctagggccctc

SEQ ID NO: 169470 - DNA, 15 bp, Homo sapiens
gtgtgctagggccct

SEQ ID NO: 169471 - DNA, 15 bp, Homo sapiens
agtgtgctagggccc

SEQ ID NO: 169472 - DNA, 15 bp, Homo sapiens
cagtgtgctagggcc

SEQ ID NO: 169473 - DNA, 15 bp, Homo sapiens
acagtgtgctagggc

SEQ ID NO: 169474 - DNA, 15 bp, Homo sapiens
cacagtgtgctaggg

SEQ ID NO: 169475 - DNA, 15 bp, Homo sapiens
tcacagtgtgctagg

SEQ ID NO: 169476 - DNA, 15 bp, Homo sapiens
ttcacagtgtgctag

SEQ ID NO: 169477 - DNA, 15 bp, Homo sapiens
gttcacagtgtgcta

SEQ ID NO: 169478 - DNA, 15 bp, Homo sapiens
agttcacagtgtgct

SEQ ID NO: 169479 - DNA, 15 bp, Homo sapiens
tagttcacagtgtgc

SEQ ID NO: 169480 - DNA, 15 bp, Homo sapiens
ctagttcacagtgtg

SEQ ID NO: 169481 - DNA, 15 bp, Homo sapiens
actagttcacagtgt

SEQ ID NO: 169482 - DNA, 15 bp, Homo sapiens
cactagttcacagtg

SEQ ID NO: 169483 - DNA, 15 bp, Homo sapiens
ccactagttcacagt

SEQ ID NO: 169484 - DNA, 15 bp, Homo sapiens
cccactagttcacag

SEQ ID NO: 169485 - DNA, 15 bp, Homo sapiens
tcccactagttcaca

SEQ ID NO: 169486 - DNA, 15 bp, Homo sapiens
ctcccactagttcac

SEQ ID NO: 169487 - DNA, 15 bp, Homo sapiens
cctcccactagttca

SEQ ID NO: 169488 - DNA, 15 bp, Homo sapiens
gcctcccactagttc

SEQ ID NO: 169489 - DNA, 15 bp, Homo sapiens
tgcctcccactagtt

SEQ ID NO: 169490 - DNA, 15 bp, Homo sapiens
ctgcctcccactagt

SEQ ID NO: 169491 - DNA, 15 bp, Homo sapiens
actgcctcccactag

SEQ ID NO: 169492 - DNA, 15 bp, Homo sapiens
cactgcctcccacta

SEQ ID NO: 169493 - DNA, 15 bp, Homo sapiens
tcactgcctcccact

SEQ ID NO: 169494 - DNA, 15 bp, Homo sapiens
ctcactgcctcccac

SEQ ID NO: 169495 - DNA, 15 bp, Homo sapiens
gctcactgcctccca

SEQ ID NO: 169496 - DNA, 15 bp, Homo sapiens
agctcactgcctccc

SEQ ID NO: 169497 - DNA, 15 bp, Homo sapiens
cagctcactgcctcc

SEQ ID NO: 169498 - DNA, 15 bp, Homo sapiens
ccagctcactgcctc

SEQ ID NO: 169499 - DNA, 15 bp, Homo sapiens
cccagctcactgcct

SEQ ID NO: 169500 - DNA, 15 bp, Homo sapiens
tcccagctcactgcc

SEQ ID NO: 169501 - DNA, 15 bp, Homo sapiens
ttcccagctcactgc

SEQ ID NO: 169502 - DNA, 15 bp, Homo sapiens
attcccagctcactg

SEQ ID NO: 169503 - DNA, 15 bp, Homo sapiens
aattcccagctcact

SEQ ID NO: 169504 - DNA, 15 bp, Homo sapiens
gaattcccagctcac

SEQ ID NO: 169505 - DNA, 15 bp, Homo sapiens
tgaattcccagctca

SEQ ID NO: 169506 - DNA, 15 bp, Homo sapiens
ctgaattcccagctc

SEQ ID NO: 169507 - DNA, 15 bp, Homo sapiens
actgaattcccagct

SEQ ID NO: 169508 - DNA, 15 bp, Homo sapiens
cactgaattcccagc

SEQ ID NO: 169509 - DNA, 15 bp, Homo sapiens
ccactgaattcccag

SEQ ID NO: 169510 - DNA, 15 bp, Homo sapiens
tccactgaattccca

SEQ ID NO: 169511 - DNA, 15 bp, Homo sapiens
ctccactgaattccc

SEQ ID NO: 169512 - DNA, 15 bp, Homo sapiens
cctccactgaattcc

SEQ ID NO: 169513 - DNA, 15 bp, Homo sapiens
tcctccactgaattc

SEQ ID NO: 169514 - DNA, 15 bp, Homo sapiens
ctcctccactgaatt

SEQ ID NO: 169515 - DNA, 15 bp, Homo sapiens
cctcctccactgaat

SEQ ID NO: 169516 - DNA, 15 bp, Homo sapiens
ccctcctccactgaa

SEQ ID NO: 169517 - DNA, 15 bp, Homo sapiens
tccctcctccactga

SEQ ID NO: 169518 - DNA, 15 bp, Homo sapiens
ctccctcctccactg

SEQ ID NO: 169519 - DNA, 15 bp, Homo sapiens
tctccctcctccact

SEQ ID NO: 169520 - DNA, 15 bp, Homo sapiens
ctctccctcctccac

SEQ ID NO: 169521 - DNA, 15 bp, Homo sapiens
cctctccctcctcca

SEQ ID NO: 169522 - DNA, 15 bp, Homo sapiens
ccctctccctcctcc

SEQ ID NO: 169523 - DNA, 15 bp, Homo sapiens
tccctctccctcctc

SEQ ID NO: 169524 - DNA, 15 bp, Homo sapiens
ttccctctccctcct

SEQ ID NO: 169525 - DNA, 15 bp, Homo sapiens
attccctctccctcc

SEQ ID NO: 169526 - DNA, 15 bp, Homo sapiens
tattccctctccctc

SEQ ID NO: 169527 - DNA, 15 bp, Homo sapiens
ctattccctctccct

SEQ ID NO: 169528 - DNA, 15 bp, Homo sapiens
cctattccctctccc

SEQ ID NO: 169529 - DNA, 15 bp, Homo sapiens
tcctattccctctcc

SEQ ID NO: 169530 - DNA, 15 bp, Homo sapiens
ctcctattccctctc

SEQ ID NO: 169531 - DNA, 15 bp, Homo sapiens
cctcctattccctct

SEQ ID NO: 169532 - DNA, 15 bp, Homo sapiens
tcctcctattccctc

SEQ ID NO: 169533 - DNA, 15 bp, Homo sapiens
ctcctcctattccct

SEQ ID NO: 169534 - DNA, 15 bp, Homo sapiens
cctcctcctattccc

SEQ ID NO: 169535 - DNA, 15 bp, Homo sapiens
tcctcctcctattcc

SEQ ID NO: 169536 - DNA, 15 bp, Homo sapiens
atcctcctcctattc

SEQ ID NO: 169537 - DNA, 15 bp, Homo sapiens
catcctcctcctatt

SEQ ID NO: 169538 - DNA, 15 bp, Homo sapiens
tcatcctcctcctat

SEQ ID NO: 169539 - DNA, 15 bp, Homo sapiens
ctcatcctcctccta

SEQ ID NO: 169540 - DNA, 15 bp, Homo sapiens
cctcatcctcctcct

SEQ ID NO: 169541 - DNA, 15 bp, Homo sapiens
tcctcatcctcctcc

SEQ ID NO: 169542 - DNA, 15 bp, Homo sapiens
ctcctcatcctcctc

SEQ ID NO: 169543 - DNA, 15 bp, Homo sapiens
cctcctcatcctcct

SEQ ID NO: 169544 - DNA, 15 bp, Homo sapiens
tcctcctcatcctcc

SEQ ID NO: 169545 - DNA, 15 bp, Homo sapiens
ttcctcctcatcctc

SEQ ID NO: 169546 - DNA, 15 bp, Homo sapiens
cttcctcctcatcct

SEQ ID NO: 169547 - DNA, 15 bp, Homo sapiens
tcttcctcctcatcc

SEQ ID NO: 169548 - DNA, 15 bp, Homo sapiens
ctcttcctcctcatc

SEQ ID NO: 169549 - DNA, 15 bp, Homo sapiens
cctcttcctcctcat

SEQ ID NO: 169550 - DNA, 15 bp, Homo sapiens
tcctcttcctcctca

SEQ ID NO: 169551 - DNA, 15 bp, Homo sapiens
ctcctcttcctcctc

SEQ ID NO: 169552 - DNA, 15 bp, Homo sapiens
cctcctcttcctcct

SEQ ID NO: 169553 - DNA, 15 bp, Homo sapiens
tcctcctcttcctcc

SEQ ID NO: 169554 - DNA, 15 bp, Homo sapiens
ctcctcctcttcctc

SEQ ID NO: 169555 - DNA, 15 bp, Homo sapiens
cctcctcctcttcct

SEQ ID NO: 169556 - DNA, 15 bp, Homo sapiens
gcctcctcctcttcc

SEQ ID NO: 169557 - DNA, 15 bp, Homo sapiens
tgcctcctcctcttc

SEQ ID NO: 169558 - DNA, 15 bp, Homo sapiens
ctgcctcctcctctt

SEQ ID NO: 169559 - DNA, 15 bp, Homo sapiens
actgcctcctcctct

SEQ ID NO: 169560 - DNA, 15 bp, Homo sapiens
aactgcctcctcctc

SEQ ID NO: 169561 - DNA, 15 bp, Homo sapiens
caactgcctcctcct

SEQ ID NO: 169562 - DNA, 15 bp, Homo sapiens
tcaactgcctcctcc

SEQ ID NO: 169563 - DNA, 15 bp, Homo sapiens
ctcaactgcctcctc

SEQ ID NO: 169564 - DNA, 15 bp, Homo sapiens
tctcaactgcctcct

SEQ ID NO: 169565 - DNA, 15 bp, Homo sapiens
gtctcaactgcctcc

SEQ ID NO: 169566 - DNA, 15 bp, Homo sapiens
tgtctcaactgcctc

SEQ ID NO: 169567 - DNA, 15 bp, Homo sapiens
ctgtctcaactgcct

SEQ ID NO: 169568 - DNA, 15 bp, Homo sapiens
actgtctcaactgcc

SEQ ID NO: 169569 - DNA, 15 bp, Homo sapiens
aactgtctcaactgc

SEQ ID NO: 169570 - DNA, 15 bp, Homo sapiens
gaactgtctcaactg

SEQ ID NO: 169571 - DNA, 15 bp, Homo sapiens
agaactgtctcaact

SEQ ID NO: 169572 - DNA, 15 bp, Homo sapiens
gagaactgtctcaac

SEQ ID NO: 169573 - DNA, 15 bp, Homo sapiens
agagaactgtctcaa

SEQ ID NO: 169574 - DNA, 15 bp, Homo sapiens
gagagaactgtctca

SEQ ID NO: 169575 - DNA, 15 bp, Homo sapiens
tgagagaactgtctc

SEQ ID NO: 169576 - DNA, 15 bp, Homo sapiens
gtgagagaactgtct

SEQ ID NO: 169577 - DNA, 15 bp, Homo sapiens
agtgagagaactgtc

SEQ ID NO: 169578 - DNA, 15 bp, Homo sapiens
aagtgagagaactgt

SEQ ID NO: 169579 - DNA, 15 bp, Homo sapiens
taagtgagagaactg

SEQ ID NO: 169580 - DNA, 15 bp, Homo sapiens
ataagtgagagaact

SEQ ID NO: 169581 - DNA, 15 bp, Homo sapiens
cataagtgagagaac

SEQ ID NO: 169582 - DNA, 15 bp, Homo sapiens
gcataagtgagagaa

SEQ ID NO: 169583 - DNA, 15 bp, Homo sapiens
tgcataagtgagaga

SEQ ID NO: 169584 - DNA, 15 bp, Homo sapiens
ctgcataagtgagag

SEQ ID NO: 169585 - DNA, 15 bp, Homo sapiens
tctgcataagtgaga

SEQ ID NO: 169586 - DNA, 15 bp, Homo sapiens
ttctgcataagtgag

SEQ ID NO: 169587 - DNA, 15 bp, Homo sapiens
tttctgcataagtga

SEQ ID NO: 169588 - DNA, 15 bp, Homo sapiens
ctttctgcataagtg

SEQ ID NO: 169589 - DNA, 15 bp, Homo sapiens
actttctgcataagt

SEQ ID NO: 169590 - DNA, 15 bp, Homo sapiens
cactttctgcataag

SEQ ID NO: 169591 - DNA, 15 bp, Homo sapiens
acactttctgcataa

SEQ ID NO: 169592 - DNA, 15 bp, Homo sapiens
cacactttctgcata

SEQ ID NO: 169593 - DNA, 15 bp, Homo sapiens
acacactttctgcat

SEQ ID NO: 169594 - DNA, 15 bp, Homo sapiens
cacacactttctgca

SEQ ID NO: 169595 - DNA, 15 bp, Homo sapiens
tcacacactttctgc

SEQ ID NO: 169596 - DNA, 15 bp, Homo sapiens
atcacacactttctg

SEQ ID NO: 169597 - DNA, 15 bp, Homo sapiens
catcacacactttct

SEQ ID NO: 169598 - DNA, 15 bp, Homo sapiens
tcatcacacactttc

SEQ ID NO: 169599 - DNA, 15 bp, Homo sapiens
ttcatcacacacttt

SEQ ID NO: 169600 - DNA, 15 bp, Homo sapiens
tttcatcacacactt

SEQ ID NO: 169601 - DNA, 15 bp, Homo sapiens
ctttcatcacacact

SEQ ID NO: 169602 - DNA, 15 bp, Homo sapiens
actttcatcacacac

SEQ ID NO: 169603 - DNA, 15 bp, Homo sapiens
cactttcatcacaca

SEQ ID NO: 169604 - DNA, 15 bp, Homo sapiens
acactttcatcacac

SEQ ID NO: 169605 - DNA, 15 bp, Homo sapiens
cacactttcatcaca

SEQ ID NO: 169606 - DNA, 15 bp, Homo sapiens
acacactttcatcac

SEQ ID NO: 169607 - DNA, 15 bp, Homo sapiens
cacacactttcatca

SEQ ID NO: 169608 - DNA, 15 bp, Homo sapiens
tcacacactttcatc

SEQ ID NO: 169609 - DNA, 15 bp, Homo sapiens
atcacacactttcat

SEQ ID NO: 169610 - DNA, 15 bp, Homo sapiens
gatcacacactttca

SEQ ID NO: 169611 - DNA, 15 bp, Homo sapiens
tgatcacacactttc

SEQ ID NO: 169612 - DNA, 15 bp, Homo sapiens
gtgatcacacacttt

SEQ ID NO: 169613 - DNA, 15 bp, Homo sapiens
tgtgatcacacactt

SEQ ID NO: 169614 - DNA, 15 bp, Homo sapiens
ctgtgatcacacact

SEQ ID NO: 169615 - DNA, 15 bp, Homo sapiens
gctgtgatcacacac

SEQ ID NO: 169616 - DNA, 15 bp, Homo sapiens
ggctgtgatcacaca

SEQ ID NO: 169617 - DNA, 15 bp, Homo sapiens
tggctgtgatcacac

SEQ ID NO: 169618 - DNA, 15 bp, Homo sapiens
ctggctgtgatcaca

SEQ ID NO: 169619 - DNA, 15 bp, Homo sapiens
gctggctgtgatcac

SEQ ID NO: 169620 - DNA, 15 bp, Homo sapiens
ggctggctgtgatca

SEQ ID NO: 169621 - DNA, 15 bp, Homo sapiens
gggctggctgtgatc

SEQ ID NO: 169622 - DNA, 15 bp, Homo sapiens
ggggctggctgtgat

SEQ ID NO: 169623 - DNA, 15 bp, Homo sapiens
tggggctggctgtga

SEQ ID NO: 169624 - DNA, 15 bp, Homo sapiens
gtggggctggctgtg

SEQ ID NO: 169625 - DNA, 15 bp, Homo sapiens
tgtggggctggctgt

SEQ ID NO: 169626 - DNA, 15 bp, Homo sapiens
gtgtggggctggctg

SEQ ID NO: 169627 - DNA, 15 bp, Homo sapiens
tgtgtggggctggct

SEQ ID NO: 169628 - DNA, 15 bp, Homo sapiens
ctgtgtggggctggc

SEQ ID NO: 169629 - DNA, 15 bp, Homo sapiens
tctgtgtggggctgg

SEQ ID NO: 169630 - DNA, 15 bp, Homo sapiens
gtctgtgtggggctg

SEQ ID NO: 169631 - DNA, 15 bp, Homo sapiens
agtctgtgtggggct

SEQ ID NO: 169632 - DNA, 15 bp, Homo sapiens
aagtctgtgtggggc

SEQ ID NO: 169633 - DNA, 15 bp, Homo sapiens
aaagtctgtgtgggg

SEQ ID NO: 169634 - DNA, 15 bp, Homo sapiens
gaaagtctgtgtggg

SEQ ID NO: 169635 - DNA, 15 bp, Homo sapiens
ggaaagtctgtgtgg

SEQ ID NO: 169636 - DNA, 15 bp, Homo sapiens
aggaaagtctgtgtg

SEQ ID NO: 169637 - DNA, 15 bp, Homo sapiens
gaggaaagtctgtgt

SEQ ID NO: 169638 - DNA, 15 bp, Homo sapiens
ggaggaaagtctgtg

SEQ ID NO: 169639 - DNA, 15 bp, Homo sapiens
tggaggaaagtctgt

SEQ ID NO: 169640 - DNA, 15 bp, Homo sapiens
ttggaggaaagtctg

SEQ ID NO: 169641 - DNA, 15 bp, Homo sapiens
tttggaggaaagtct

SEQ ID NO: 169642 - DNA, 15 bp, Homo sapiens
atttggaggaaagtc

SEQ ID NO: 169643 - DNA, 15 bp, Homo sapiens
catttggaggaaagt

SEQ ID NO: 169644 - DNA, 15 bp, Homo sapiens
tcatttggaggaaag

SEQ ID NO: 169645 - DNA, 15 bp, Homo sapiens
ctcatttggaggaaa

SEQ ID NO: 169646 - DNA, 15 bp, Homo sapiens
tctcatttggaggaa

SEQ ID NO: 169647 - DNA, 15 bp, Homo sapiens
ttctcatttggagga

SEQ ID NO: 169648 - DNA, 15 bp, Homo sapiens
cttctcatttggagg

SEQ ID NO: 169649 - DNA, 15 bp, Homo sapiens
ccttctcatttggag

SEQ ID NO: 169650 - DNA, 15 bp, Homo sapiens
cccttctcatttgga

SEQ ID NO: 169651 - DNA, 15 bp, Homo sapiens
tcccttctcatttgg

SEQ ID NO: 169652 - DNA, 15 bp, Homo sapiens
ctcccttctcatttg

SEQ ID NO: 169653 - DNA, 15 bp, Homo sapiens
actcccttctcattt

SEQ ID NO: 169654 - DNA, 15 bp, Homo sapiens
cactcccttctcatt

SEQ ID NO: 169655 - DNA, 15 bp, Homo sapiens
tcactcccttctcat

SEQ ID NO: 169656 - DNA, 15 bp, Homo sapiens
ctcactcccttctca

SEQ ID NO: 169657 - DNA, 15 bp, Homo sapiens
tctcactcccttctc

SEQ ID NO: 169658 - DNA, 15 bp, Homo sapiens
ttctcactcccttct

SEQ ID NO: 169659 - DNA, 15 bp, Homo sapiens
tttctcactcccttc

SEQ ID NO: 169660 - DNA, 15 bp, Homo sapiens
ttttctcactccctt

SEQ ID NO: 169661 - DNA, 15 bp, Homo sapiens
attttctcactccct

SEQ ID NO: 169662 - DNA, 15 bp, Homo sapiens
cattttctcactccc

SEQ ID NO: 169663 - DNA, 15 bp, Homo sapiens
acattttctcactcc

SEQ ID NO: 169664 - DNA, 15 bp, Homo sapiens
tacattttctcactc

SEQ ID NO: 169665 - DNA, 15 bp, Homo sapiens
ttacattttctcact

SEQ ID NO: 169666 - DNA, 15 bp, Homo sapiens
attacattttctcac

SEQ ID NO: 169667 - DNA, 15 bp, Homo sapiens
aattacattttctca

SEQ ID NO: 169668 - DNA, 15 bp, Homo sapiens
aaattacattttctc

SEQ ID NO: 169669 - DNA, 15 bp, Homo sapiens
aaaattacattttct

SEQ ID NO: 169670 - DNA, 15 bp, Homo sapiens
taaaattacattttc

SEQ ID NO: 169671 - DNA, 15 bp, Homo sapiens
ctaaaattacatttt

SEQ ID NO: 169672 - DNA, 15 bp, Homo sapiens
actaaaattacattt

SEQ ID NO: 169673 - DNA, 15 bp, Homo sapiens
cactaaaattacatt

SEQ ID NO: 169674 - DNA, 15 bp, Homo sapiens
acactaaaattacat

SEQ ID NO: 169675 - DNA, 15 bp, Homo sapiens
gacactaaaattaca

SEQ ID NO: 169676 - DNA, 15 bp, Homo sapiens
agacactaaaattac

SEQ ID NO: 169677 - DNA, 15 bp, Homo sapiens
cagacactaaaatta

SEQ ID NO: 169678 - DNA, 15 bp, Homo sapiens
ccagacactaaaatt

SEQ ID NO: 169679 - DNA, 15 bp, Homo sapiens
gccagacactaaaat

SEQ ID NO: 169680 - DNA, 15 bp, Homo sapiens
agccagacactaaaa

SEQ ID NO: 169681 - DNA, 15 bp, Homo sapiens
aagccagacactaaa

SEQ ID NO: 169682 - DNA, 15 bp, Homo sapiens
aaagccagacactaa

SEQ ID NO: 169683 - DNA, 15 bp, Homo sapiens
aaaagccagacacta

SEQ ID NO: 169684 - DNA, 15 bp, Homo sapiens
caaaagccagacact

SEQ ID NO: 169685 - DNA, 15 bp, Homo sapiens
tcaaaagccagacac

SEQ ID NO: 169686 - DNA, 15 bp, Homo sapiens
gtcaaaagccagaca

SEQ ID NO: 169687 - DNA, 15 bp, Homo sapiens
agtcaaaagccagac

SEQ ID NO: 169688 - DNA, 15 bp, Homo sapiens
cagtcaaaagccaga

SEQ ID NO: 169689 - DNA, 15 bp, Homo sapiens
tcagtcaaaagccag

SEQ ID NO: 169690 - DNA, 15 bp, Homo sapiens
gtcagtcaaaagcca

SEQ ID NO: 169691 - DNA, 15 bp, Homo sapiens
agtcagtcaaaagcc

SEQ ID NO: 169692 - DNA, 15 bp, Homo sapiens
gagtcagtcaaaagc

SEQ ID NO: 169693 - DNA, 15 bp, Homo sapiens
ggagtcagtcaaaag

SEQ ID NO: 169694 - DNA, 15 bp, Homo sapiens
gggagtcagtcaaaa

SEQ ID NO: 169695 - DNA, 15 bp, Homo sapiens
agggagtcagtcaaa

SEQ ID NO: 169696 - DNA, 15 bp, Homo sapiens
cagggagtcagtcaa

SEQ ID NO: 169697 - DNA, 15 bp, Homo sapiens
acagggagtcagtca

SEQ ID NO: 169698 - DNA, 15 bp, Homo sapiens
cacagggagtcagtc

SEQ ID NO: 169699 - DNA, 15 bp, Homo sapiens
ccacagggagtcagt

SEQ ID NO: 169700 - DNA, 15 bp, Homo sapiens
tccacagggagtcag

SEQ ID NO: 169701 - DNA, 15 bp, Homo sapiens
ctccacagggagtca

SEQ ID NO: 169702 - DNA, 15 bp, Homo sapiens
cctccacagggagtc

SEQ ID NO: 169703 - DNA, 15 bp, Homo sapiens
acctccacagggagt

SEQ ID NO: 169704 - DNA, 15 bp, Homo sapiens
aacctccacagggag

SEQ ID NO: 169705 - DNA, 15 bp, Homo sapiens
gaacctccacaggga

SEQ ID NO: 169706 - DNA, 15 bp, Homo sapiens
ggaacctccacaggg

SEQ ID NO: 169707 - DNA, 15 bp, Homo sapiens
aggaacctccacagg

SEQ ID NO: 169708 - DNA, 15 bp, Homo sapiens
aaggaacctccacag

SEQ ID NO: 169709 - DNA, 15 bp, Homo sapiens
gaaggaacctccaca

SEQ ID NO: 169710 - DNA, 15 bp, Homo sapiens
agaaggaacctccac

SEQ ID NO: 169711 - DNA, 15 bp, Homo sapiens
cagaaggaacctcca

SEQ ID NO: 169712 - DNA, 15 bp, Homo sapiens
ccagaaggaacctcc

SEQ ID NO: 169713 - DNA, 15 bp, Homo sapiens
cccagaaggaacctc

SEQ ID NO: 169714 - DNA, 15 bp, Homo sapiens
gcccagaaggaacct

SEQ ID NO: 169715 - DNA, 15 bp, Homo sapiens
agcccagaaggaacc

SEQ ID NO: 169716 - DNA, 15 bp, Homo sapiens
cagcccagaaggaac

SEQ ID NO: 169717 - DNA, 15 bp, Homo sapiens
acagcccagaaggaa

SEQ ID NO: 169718 - DNA, 15 bp, Homo sapiens
cacagcccagaagga

SEQ ID NO: 169719 - DNA, 15 bp, Homo sapiens
ccacagcccagaagg

SEQ ID NO: 169720 - DNA, 15 bp, Homo sapiens
accacagcccagaag

SEQ ID NO: 169721 - DNA, 15 bp, Homo sapiens
caccacagcccagaa

SEQ ID NO: 169722 - DNA, 15 bp, Homo sapiens
acaccacagcccaga

SEQ ID NO: 169723 - DNA, 15 bp, Homo sapiens
aacaccacagcccag

SEQ ID NO: 169724 - DNA, 15 bp, Homo sapiens
caacaccacagccca

SEQ ID NO: 169725 - DNA, 15 bp, Homo sapiens
ccaacaccacagccc

SEQ ID NO: 169726 - DNA, 15 bp, Homo sapiens
cccaacaccacagcc

SEQ ID NO: 169727 - DNA, 15 bp, Homo sapiens
acccaacaccacagc

SEQ ID NO: 169728 - DNA, 15 bp, Homo sapiens
cacccaacaccacag

SEQ ID NO: 169729 - DNA, 15 bp, Homo sapiens
acacccaacaccaca

SEQ ID NO: 169730 - DNA, 15 bp, Homo sapiens
gacacccaacaccac

SEQ ID NO: 169731 - DNA, 15 bp, Homo sapiens
agacacccaacacca

SEQ ID NO: 169732 - DNA, 15 bp, Homo sapiens
gagacacccaacacc

SEQ ID NO: 169733 - DNA, 15 bp, Homo sapiens
agagacacccaacac

SEQ ID NO: 169734 - DNA, 15 bp, Homo sapiens
gagagacacccaaca

SEQ ID NO: 169735 - DNA, 15 bp, Homo sapiens
ggagagacacccaac

SEQ ID NO: 169736 - DNA, 15 bp, Homo sapiens
aggagagacacccaa

SEQ ID NO: 169737 - DNA, 15 bp, Homo sapiens
aaggagagacaccca

SEQ ID NO: 169738 - DNA, 15 bp, Homo sapiens
gaaggagagacaccc

SEQ ID NO: 169739 - DNA, 15 bp, Homo sapiens
ggaaggagagacacc

SEQ ID NO: 169740 - DNA, 15 bp, Homo sapiens
gggaaggagagacac

SEQ ID NO: 169741 - DNA, 15 bp, Homo sapiens
agggaaggagagaca

SEQ ID NO: 169742 - DNA, 15 bp, Homo sapiens
gagggaaggagagac

SEQ ID NO: 169743 - DNA, 15 bp, Homo sapiens
ggagggaaggagaga

SEQ ID NO: 169744 - DNA, 15 bp, Homo sapiens
tggagggaaggagag

SEQ ID NO: 169745 - DNA, 15 bp, Homo sapiens
ttggagggaaggaga

SEQ ID NO: 169746 - DNA, 15 bp, Homo sapiens
cttggagggaaggag

SEQ ID NO: 169747 - DNA, 15 bp, Homo sapiens
ccttggagggaagga

SEQ ID NO: 169748 - DNA, 15 bp, Homo sapiens
cccttggagggaagg

SEQ ID NO: 169749 - DNA, 15 bp, Homo sapiens
tcccttggagggaag

SEQ ID NO: 169750 - DNA, 15 bp, Homo sapiens
gtcccttggagggaa

SEQ ID NO: 169751 - DNA, 15 bp, Homo sapiens
tgtcccttggaggga

SEQ ID NO: 169752 - DNA, 15 bp, Homo sapiens
ctgtcccttggaggg

SEQ ID NO: 169753 - DNA, 15 bp, Homo sapiens
gctgtcccttggagg

SEQ ID NO: 169754 - DNA, 15 bp, Homo sapiens
ggctgtcccttggag

SEQ ID NO: 169755 - DNA, 15 bp, Homo sapiens
tggctgtcccttgga

SEQ ID NO: 169756 - DNA, 15 bp, Homo sapiens
ctggctgtcccttgg

SEQ ID NO: 169757 - DNA, 15 bp, Homo sapiens
cctggctgtcccttg

SEQ ID NO: 169758 - DNA, 15 bp, Homo sapiens
gcctggctgtccctt

SEQ ID NO: 169759 - DNA, 15 bp, Homo sapiens
ggcctggctgtccct

SEQ ID NO: 169760 - DNA, 15 bp, Homo sapiens
aggcctggctgtccc

SEQ ID NO: 169761 - DNA, 15 bp, Homo sapiens
caggcctggctgtcc

SEQ ID NO: 169762 - DNA, 15 bp, Homo sapiens
ccaggcctggctgtc

SEQ ID NO: 169763 - DNA, 15 bp, Homo sapiens
cccaggcctggctgt

SEQ ID NO: 169764 - DNA, 15 bp, Homo sapiens
gcccaggcctggctg

SEQ ID NO: 169765 - DNA, 15 bp, Homo sapiens
ggcccaggcctggct

SEQ ID NO: 169766 - DNA, 15 bp, Homo sapiens
aggcccaggcctggc

SEQ ID NO: 169767 - DNA, 15 bp, Homo sapiens
caggcccaggcctgg

SEQ ID NO: 169768 - DNA, 15 bp, Homo sapiens
ccaggcccaggcctg

SEQ ID NO: 169769 - DNA, 15 bp, Homo sapiens
tccaggcccaggcct

SEQ ID NO: 169770 - DNA, 15 bp, Homo sapiens
ttccaggcccaggcc

SEQ ID NO: 169771 - DNA, 15 bp, Homo sapiens
attccaggcccaggc

SEQ ID NO: 169772 - DNA, 15 bp, Homo sapiens
tattccaggcccagg

SEQ ID NO: 169773 - DNA, 15 bp, Homo sapiens
ttattccaggcccag

SEQ ID NO: 169774 - DNA, 15 bp, Homo sapiens
cttattccaggccca

SEQ ID NO: 169775 - DNA, 15 bp, Homo sapiens
acttattccaggccc

SEQ ID NO: 169776 - DNA, 15 bp, Homo sapiens
cacttattccaggcc

SEQ ID NO: 169777 - DNA, 15 bp, Homo sapiens
tcacttattccaggc

SEQ ID NO: 169778 - DNA, 15 bp, Homo sapiens
ctcacttattccagg

SEQ ID NO: 169779 - DNA, 15 bp, Homo sapiens
actcacttattccag

SEQ ID NO: 169780 - DNA, 15 bp, Homo sapiens
aactcacttattcca

SEQ ID NO: 169781 - DNA, 15 bp, Homo sapiens
gaactcacttattcc

SEQ ID NO: 169782 - DNA, 15 bp, Homo sapiens
tgaactcacttattc

SEQ ID NO: 169783 - DNA, 15 bp, Homo sapiens
ctgaactcacttatt

SEQ ID NO: 169784 - DNA, 15 bp, Homo sapiens
tctgaactcacttat

SEQ ID NO: 169785 - DNA, 15 bp, Homo sapiens
atctgaactcactta

SEQ ID NO: 169786 - DNA, 15 bp, Homo sapiens
catctgaactcactt

SEQ ID NO: 169787 - DNA, 15 bp, Homo sapiens
ccatctgaactcact

SEQ ID NO: 169788 - DNA, 15 bp, Homo sapiens
accatctgaactcac

SEQ ID NO: 169789 - DNA, 15 bp, Homo sapiens
taccatctgaactca

SEQ ID NO: 169790 - DNA, 15 bp, Homo sapiens
ttaccatctgaactc

SEQ ID NO: 169791 - DNA, 15 bp, Homo sapiens
gttaccatctgaact

SEQ ID NO: 169792 - DNA, 15 bp, Homo sapiens
agttaccatctgaac

SEQ ID NO: 169793 - DNA, 15 bp, Homo sapiens
cagttaccatctgaa

SEQ ID NO: 169794 - DNA, 15 bp, Homo sapiens
ccagttaccatctga

SEQ ID NO: 169795 - DNA, 15 bp, Homo sapiens
cccagttaccatctg

SEQ ID NO: 169796 - DNA, 15 bp, Homo sapiens
ccccagttaccatct

SEQ ID NO: 169797 - DNA, 15 bp, Homo sapiens
tccccagttaccatc

SEQ ID NO: 169798 - DNA, 15 bp, Homo sapiens
ttccccagttaccat

SEQ ID NO: 169799 - DNA, 15 bp, Homo sapiens
attccccagttacca

SEQ ID NO: 169800 - DNA, 15 bp, Homo sapiens
cattccccagttacc

SEQ ID NO: 169801 - DNA, 15 bp, Homo sapiens
ccattccccagttac

SEQ ID NO: 169802 - DNA, 15 bp, Homo sapiens
gccattccccagtta

SEQ ID NO: 169803 - DNA, 15 bp, Homo sapiens
ggccattccccagtt

SEQ ID NO: 169804 - DNA, 15 bp, Homo sapiens
tggccattccccagt

SEQ ID NO: 169805 - DNA, 15 bp, Homo sapiens
atggccattccccag

SEQ ID NO: 169806 - DNA, 15 bp, Homo sapiens
tatggccattcccca

SEQ ID NO: 169807 - DNA, 15 bp, Homo sapiens
ctatggccattcccc

SEQ ID NO: 169808 - DNA, 15 bp, Homo sapiens
cctatggccattccc

SEQ ID NO: 169809 - DNA, 15 bp, Homo sapiens
ccctatggccattcc

SEQ ID NO: 169810 - DNA, 15 bp, Homo sapiens
tccctatggccattc

SEQ ID NO: 169811 - DNA, 15 bp, Homo sapiens
ctccctatggccatt

SEQ ID NO: 169812 - DNA, 15 bp, Homo sapiens
cctccctatggccat

SEQ ID NO: 169813 - DNA, 15 bp, Homo sapiens
ccctccctatggcca

SEQ ID NO: 169814 - DNA, 15 bp, Homo sapiens
tccctccctatggcc

SEQ ID NO: 169815 - DNA, 15 bp, Homo sapiens
ctccctccctatggc

SEQ ID NO: 169816 - DNA, 15 bp, Homo sapiens
actccctccctatgg

SEQ ID NO: 169817 - DNA, 15 bp, Homo sapiens
cactccctccctatg

SEQ ID NO: 169818 - DNA, 15 bp, Homo sapiens
tcactccctccctat

SEQ ID NO: 169819 - DNA, 15 bp, Homo sapiens
ttcactccctcccta

SEQ ID NO: 169820 - DNA, 15 bp, Homo sapiens
cttcactccctccct

SEQ ID NO: 169821 - DNA, 15 bp, Homo sapiens
tcttcactccctccc

SEQ ID NO: 169822 - DNA, 15 bp, Homo sapiens
ctcttcactccctcc

SEQ ID NO: 169823 - DNA, 15 bp, Homo sapiens
gctcttcactccctc

SEQ ID NO: 169824 - DNA, 15 bp, Homo sapiens
ggctcttcactccct

SEQ ID NO: 169825 - DNA, 15 bp, Homo sapiens
cggctcttcactccc

SEQ ID NO: 169826 - DNA, 15 bp, Homo sapiens
acggctcttcactcc

SEQ ID NO: 169827 - DNA, 15 bp, Homo sapiens
cacggctcttcactc

SEQ ID NO: 169828 - DNA, 15 bp, Homo sapiens
gcacggctcttcact

SEQ ID NO: 169829 - DNA, 15 bp, Homo sapiens
ggcacggctcttcac

SEQ ID NO: 169830 - DNA, 15 bp, Homo sapiens
aggcacggctcttca

SEQ ID NO: 169831 - DNA, 15 bp, Homo sapiens
caggcacggctcttc

SEQ ID NO: 169832 - DNA, 15 bp, Homo sapiens
acaggcacggctctt

SEQ ID NO: 169833 - DNA, 15 bp, Homo sapiens
cacaggcacggctct

SEQ ID NO: 169834 - DNA, 15 bp, Homo sapiens
gcacaggcacggctc

SEQ ID NO: 169835 - DNA, 15 bp, Homo sapiens
ggcacaggcacggct

SEQ ID NO: 169836 - DNA, 15 bp, Homo sapiens
gggcacaggcacggc

SEQ ID NO: 169837 - DNA, 15 bp, Homo sapiens
ggggcacaggcacgg

SEQ ID NO: 169838 - DNA, 15 bp, Homo sapiens
tggggcacaggcacg

SEQ ID NO: 169839 - DNA, 15 bp, Homo sapiens
ctggggcacaggcac

SEQ ID NO: 169840 - DNA, 15 bp, Homo sapiens
cctggggcacaggca

SEQ ID NO: 169841 - DNA, 15 bp, Homo sapiens
ccctggggcacaggc

SEQ ID NO: 169842 - DNA, 15 bp, Homo sapiens
cccctggggcacagg

SEQ ID NO: 169843 - DNA, 15 bp, Homo sapiens
ccccctggggcacag

SEQ ID NO: 169844 - DNA, 15 bp, Homo sapiens
gccccctggggcaca

SEQ ID NO: 169845 - DNA, 15 bp, Homo sapiens
agccccctggggcac

SEQ ID NO: 169846 - DNA, 15 bp, Homo sapiens
cagccccctggggca

SEQ ID NO: 169847 - DNA, 15 bp, Homo sapiens
ccagccccctggggc

SEQ ID NO: 169848 - DNA, 15 bp, Homo sapiens
cccagccccctgggg

SEQ ID NO: 169849 - DNA, 15 bp, Homo sapiens
ccccagccccctggg

SEQ ID NO: 169850 - DNA, 15 bp, Homo sapiens
cccccagccccctgg

SEQ ID NO: 169851 - DNA, 15 bp, Homo sapiens
ccccccagccccctg

SEQ ID NO: 169852 - DNA, 15 bp, Homo sapiens
gccccccagccccct

SEQ ID NO: 169853 - DNA, 15 bp, Homo sapiens
agccccccagccccc

SEQ ID NO: 169854 - DNA, 15 bp, Homo sapiens
aagccccccagcccc

SEQ ID NO: 169855 - DNA, 15 bp, Homo sapiens
caagccccccagccc

SEQ ID NO: 169856 - DNA, 15 bp, Homo sapiens
ccaagccccccagcc

SEQ ID NO: 169857 - DNA, 15 bp, Homo sapiens
tccaagccccccagc

SEQ ID NO: 169858 - DNA, 15 bp, Homo sapiens
atccaagccccccag

SEQ ID NO: 169859 - DNA, 15 bp, Homo sapiens
aatccaagcccccca

SEQ ID NO: 169860 - DNA, 15 bp, Homo sapiens
aaatccaagcccccc

SEQ ID NO: 169861 - DNA, 15 bp, Homo sapiens
gaaatccaagccccc

SEQ ID NO: 169862 - DNA, 15 bp, Homo sapiens
tgaaatccaagcccc

SEQ ID NO: 169863 - DNA, 15 bp, Homo sapiens
ctgaaatccaagccc

SEQ ID NO: 169864 - DNA, 15 bp, Homo sapiens
cctgaaatccaagcc

SEQ ID NO: 169865 - DNA, 15 bp, Homo sapiens
tcctgaaatccaagc

SEQ ID NO: 169866 - DNA, 15 bp, Homo sapiens
gtcctgaaatccaag

SEQ ID NO: 169867 - DNA, 15 bp, Homo sapiens
tgtcctgaaatccaa

SEQ ID NO: 169868 - DNA, 15 bp, Homo sapiens
atgtcctgaaatcca

SEQ ID NO: 169869 - DNA, 15 bp, Homo sapiens
gatgtcctgaaatcc

SEQ ID NO: 169870 - DNA, 15 bp, Homo sapiens
tgatgtcctgaaatc

SEQ ID NO: 169871 - DNA, 15 bp, Homo sapiens
ctgatgtcctgaaat

SEQ ID NO: 169872 - DNA, 15 bp, Homo sapiens
cctgatgtcctgaaa

SEQ ID NO: 169873 - DNA, 15 bp, Homo sapiens
ccctgatgtcctgaa

SEQ ID NO: 169874 - DNA, 15 bp, Homo sapiens
tccctgatgtcctga

SEQ ID NO: 169875 - DNA, 15 bp, Homo sapiens
ctccctgatgtcctg

SEQ ID NO: 169876 - DNA, 15 bp, Homo sapiens
cctccctgatgtcct

SEQ ID NO: 169877 - DNA, 15 bp, Homo sapiens
acctccctgatgtcc

SEQ ID NO: 169878 - DNA, 15 bp, Homo sapiens
cacctccctgatgtc

SEQ ID NO: 169879 - DNA, 15 bp, Homo sapiens
tcacctccctgatgt

SEQ ID NO: 169880 - DNA, 15 bp, Homo sapiens
gtcacctccctgatg

SEQ ID NO: 169881 - DNA, 15 bp, Homo sapiens
tgtcacctccctgat

SEQ ID NO: 169882 - DNA, 15 bp, Homo sapiens
atgtcacctccctga

SEQ ID NO: 169883 - DNA, 15 bp, Homo sapiens
gatgtcacctccctg

SEQ ID NO: 169884 - DNA, 15 bp, Homo sapiens
tgatgtcacctccct

SEQ ID NO: 169885 - DNA, 15 bp, Homo sapiens
ttgatgtcacctccc

SEQ ID NO: 169886 - DNA, 15 bp, Homo sapiens
cttgatgtcacctcc

SEQ ID NO: 169887 - DNA, 15 bp, Homo sapiens
ccttgatgtcacctc

SEQ ID NO: 169888 - DNA, 15 bp, Homo sapiens
tccttgatgtcacct

SEQ ID NO: 169889 - DNA, 15 bp, Homo sapiens
gtccttgatgtcacc

SEQ ID NO: 169890 - DNA, 15 bp, Homo sapiens
tgtccttgatgtcac

SEQ ID NO: 169891 - DNA, 15 bp, Homo sapiens
gtgtccttgatgtca

SEQ ID NO: 169892 - DNA, 15 bp, Homo sapiens
agtgtccttgatgtc

SEQ ID NO: 169893 - DNA, 15 bp, Homo sapiens
cagtgtccttgatgt

SEQ ID NO: 169894 - DNA, 15 bp, Homo sapiens
gcagtgtccttgatg

SEQ ID NO: 169895 - DNA, 15 bp, Homo sapiens
tgcagtgtccttgat

SEQ ID NO: 169896 - DNA, 15 bp, Homo sapiens
ctgcagtgtccttga

SEQ ID NO: 169897 - DNA, 15 bp, Homo sapiens
cctgcagtgtccttg

SEQ ID NO: 169898 - DNA, 15 bp, Homo sapiens
ccctgcagtgtcctt

SEQ ID NO: 169899 - DNA, 15 bp, Homo sapiens
cccctgcagtgtcct

SEQ ID NO: 169900 - DNA, 15 bp, Homo sapiens
ccccctgcagtgtcc

SEQ ID NO: 169901 - DNA, 15 bp, Homo sapiens
cccccctgcagtgtc

SEQ ID NO: 169902 - DNA, 15 bp, Homo sapiens
tcccccctgcagtgt

SEQ ID NO: 169903 - DNA, 15 bp, Homo sapiens
atcccccctgcagtg

SEQ ID NO: 169904 - DNA, 15 bp, Homo sapiens
aatcccccctgcagt

SEQ ID NO: 169905 - DNA, 15 bp, Homo sapiens
aaatcccccctgcag

SEQ ID NO: 169906 - DNA, 15 bp, Homo sapiens
taaatcccccctgca

SEQ ID NO: 169907 - DNA, 15 bp, Homo sapiens
ctaaatcccccctgc

SEQ ID NO: 169908 - DNA, 15 bp, Homo sapiens
cctaaatcccccctg

SEQ ID NO: 169909 - DNA, 15 bp, Homo sapiens
ccctaaatcccccct

SEQ ID NO: 169910 - DNA, 15 bp, Homo sapiens
tccctaaatcccccc

SEQ ID NO: 169911 - DNA, 15 bp, Homo sapiens
gtccctaaatccccc

SEQ ID NO: 169912 - DNA, 15 bp, Homo sapiens
tgtccctaaatcccc

SEQ ID NO: 169913 - DNA, 15 bp, Homo sapiens
ctgtccctaaatccc

SEQ ID NO: 169914 - DNA, 15 bp, Homo sapiens
cctgtccctaaatcc

SEQ ID NO: 169915 - DNA, 15 bp, Homo sapiens
ccctgtccctaaatc

SEQ ID NO: 169916 - DNA, 15 bp, Homo sapiens
accctgtccctaaat

SEQ ID NO: 169917 - DNA, 15 bp, Homo sapiens
taccctgtccctaaa

SEQ ID NO: 169918 - DNA, 15 bp, Homo sapiens
ctaccctgtccctaa

SEQ ID NO: 169919 - DNA, 15 bp, Homo sapiens
actaccctgtcccta

SEQ ID NO: 169920 - DNA, 15 bp, Homo sapiens
cactaccctgtccct

SEQ ID NO: 169921 - DNA, 15 bp, Homo sapiens
ccactaccctgtccc

SEQ ID NO: 169922 - DNA, 15 bp, Homo sapiens
cccactaccctgtcc

SEQ ID NO: 169923 - DNA, 15 bp, Homo sapiens
ccccactaccctgtc

SEQ ID NO: 169924 - DNA, 15 bp, Homo sapiens
accccactaccctgt

SEQ ID NO: 169925 - DNA, 15 bp, Homo sapiens
gaccccactaccctg

SEQ ID NO: 169926 - DNA, 15 bp, Homo sapiens
tgaccccactaccct

SEQ ID NO: 169927 - DNA, 15 bp, Homo sapiens
ctgaccccactaccc

SEQ ID NO: 169928 - DNA, 15 bp, Homo sapiens
actgaccccactacc

SEQ ID NO: 169929 - DNA, 15 bp, Homo sapiens
cactgaccccactac

SEQ ID NO: 169930 - DNA, 15 bp, Homo sapiens
gcactgaccccacta

SEQ ID NO: 169931 - DNA, 15 bp, Homo sapiens
ggcactgaccccact

SEQ ID NO: 169932 - DNA, 15 bp, Homo sapiens
aggcactgaccccac

SEQ ID NO: 169933 - DNA, 15 bp, Homo sapiens
caggcactgacccca

SEQ ID NO: 169934 - DNA, 15 bp, Homo sapiens
tcaggcactgacccc

SEQ ID NO: 169935 - DNA, 15 bp, Homo sapiens
gtcaggcactgaccc

SEQ ID NO: 169936 - DNA, 15 bp, Homo sapiens
agtcaggcactgacc

SEQ ID NO: 169937 - DNA, 15 bp, Homo sapiens
gagtcaggcactgac

SEQ ID NO: 169938 - DNA, 15 bp, Homo sapiens
tgagtcaggcactga

SEQ ID NO: 169939 - DNA, 15 bp, Homo sapiens
ctgagtcaggcactg

SEQ ID NO: 169940 - DNA, 15 bp, Homo sapiens
actgagtcaggcact

SEQ ID NO: 169941 - DNA, 15 bp, Homo sapiens
gactgagtcaggcac

SEQ ID NO: 169942 - DNA, 15 bp, Homo sapiens
ggactgagtcaggca

SEQ ID NO: 169943 - DNA, 15 bp, Homo sapiens
cggactgagtcaggc

SEQ ID NO: 169944 - DNA, 15 bp, Homo sapiens
tcggactgagtcagg

SEQ ID NO: 169945 - DNA, 15 bp, Homo sapiens
ctcggactgagtcag

SEQ ID NO: 169946 - DNA, 15 bp, Homo sapiens
gctcggactgagtca

SEQ ID NO: 169947 - DNA, 15 bp, Homo sapiens
agctcggactgagtc

SEQ ID NO: 169948 - DNA, 15 bp, Homo sapiens
cagctcggactgagt

SEQ ID NO: 169949 - DNA, 15 bp, Homo sapiens
tcagctcggactgag

SEQ ID NO: 169950 - DNA, 15 bp, Homo sapiens
ctcagctcggactga

SEQ ID NO: 169951 - DNA, 15 bp, Homo sapiens
gctcagctcggactg

SEQ ID NO: 169952 - DNA, 15 bp, Homo sapiens
agctcagctcggact

SEQ ID NO: 169953 - DNA, 15 bp, Homo sapiens
tagctcagctcggac

SEQ ID NO: 169954 - DNA, 15 bp, Homo sapiens
atagctcagctcgga

SEQ ID NO: 169955 - DNA, 15 bp, Homo sapiens
tatagctcagctcgg

SEQ ID NO: 169956 - DNA, 15 bp, Homo sapiens
atatagctcagctcg

SEQ ID NO: 169957 - DNA, 15 bp, Homo sapiens
aatatagctcagctc

SEQ ID NO: 169958 - DNA, 15 bp, Homo sapiens
caatatagctcagct

SEQ ID NO: 169959 - DNA, 15 bp, Homo sapiens
ccaatatagctcagc

SEQ ID NO: 169960 - DNA, 15 bp, Homo sapiens
cccaatatagctcag

SEQ ID NO: 169961 - DNA, 15 bp, Homo sapiens
acccaatatagctca

SEQ ID NO: 169962 - DNA, 15 bp, Homo sapiens
gacccaatatagctc

SEQ ID NO: 169963 - DNA, 15 bp, Homo sapiens
agacccaatatagct

SEQ ID NO: 169964 - DNA, 15 bp, Homo sapiens
gagacccaatatagc

SEQ ID NO: 169965 - DNA, 15 bp, Homo sapiens
agagacccaatatag

SEQ ID NO: 169966 - DNA, 15 bp, Homo sapiens
cagagacccaatata

SEQ ID NO: 169967 - DNA, 15 bp, Homo sapiens
acagagacccaatat

SEQ ID NO: 169968 - DNA, 15 bp, Homo sapiens
aacagagacccaata

SEQ ID NO: 169969 - DNA, 15 bp, Homo sapiens
gaacagagacccaat

SEQ ID NO: 169970 - DNA, 15 bp, Homo sapiens
ggaacagagacccaa

SEQ ID NO: 169971 - DNA, 15 bp, Homo sapiens
aggaacagagaccca

SEQ ID NO: 169972 - DNA, 15 bp, Homo sapiens
taggaacagagaccc

SEQ ID NO: 169973 - DNA, 15 bp, Homo sapiens
gtaggaacagagacc

SEQ ID NO: 169974 - DNA, 15 bp, Homo sapiens
cgtaggaacagagac

SEQ ID NO: 169975 - DNA, 15 bp, Homo sapiens
gcgtaggaacagaga

SEQ ID NO: 169976 - DNA, 15 bp, Homo sapiens
agcgtaggaacagag

SEQ ID NO: 169977 - DNA, 15 bp, Homo sapiens
cagcgtaggaacaga

SEQ ID NO: 169978 - DNA, 15 bp, Homo sapiens
tcagcgtaggaacag

SEQ ID NO: 169979 - DNA, 15 bp, Homo sapiens
ctcagcgtaggaaca

SEQ ID NO: 169980 - DNA, 15 bp, Homo sapiens
cctcagcgtaggaac

SEQ ID NO: 169981 - DNA, 15 bp, Homo sapiens
gcctcagcgtaggaa

SEQ ID NO: 169982 - DNA, 15 bp, Homo sapiens
tgcctcagcgtagga

SEQ ID NO: 169983 - DNA, 15 bp, Homo sapiens
atgcctcagcgtagg

SEQ ID NO: 169984 - DNA, 15 bp, Homo sapiens
catgcctcagcgtag

SEQ ID NO: 169985 - DNA, 15 bp, Homo sapiens
gcatgcctcagcgta

SEQ ID NO: 169986 - DNA, 15 bp, Homo sapiens
agcatgcctcagcgt

SEQ ID NO: 169987 - DNA, 15 bp, Homo sapiens
aagcatgcctcagcg

SEQ ID NO: 169988 - DNA, 15 bp, Homo sapiens
aaagcatgcctcagc

SEQ ID NO: 169989 - DNA, 15 bp, Homo sapiens
gaaagcatgcctcag

SEQ ID NO: 169990 - DNA, 15 bp, Homo sapiens
ggaaagcatgcctca

SEQ ID NO: 169991 - DNA, 15 bp, Homo sapiens
gggaaagcatgcctc

SEQ ID NO: 169992 - DNA, 15 bp, Homo sapiens
tgggaaagcatgcct

SEQ ID NO: 169993 - DNA, 15 bp, Homo sapiens
ctgggaaagcatgcc

SEQ ID NO: 169994 - DNA, 15 bp, Homo sapiens
cctgggaaagcatgc

SEQ ID NO: 169995 - DNA, 15 bp, Homo sapiens
gcctgggaaagcatg

SEQ ID NO: 169996 - DNA, 15 bp, Homo sapiens
cgcctgggaaagcat

SEQ ID NO: 169997 - DNA, 15 bp, Homo sapiens
acgcctgggaaagca

SEQ ID NO: 169998 - DNA, 15 bp, Homo sapiens
cacgcctgggaaagc

SEQ ID NO: 169999 - DNA, 15 bp, Homo sapiens
tcacgcctgggaaag

SEQ ID NO: 170000 - DNA, 15 bp, Homo sapiens
ctcacgcctgggaaa

SEQ ID NO: 170001 - DNA, 15 bp, Homo sapiens
cctcacgcctgggaa

SEQ ID NO: 170002 - DNA, 15 bp, Homo sapiens
gcctcacgcctggga

SEQ ID NO: 170003 - DNA, 15 bp, Homo sapiens
ggcctcacgcctggg

SEQ ID NO: 170004 - DNA, 15 bp, Homo sapiens
tggcctcacgcctgg

SEQ ID NO: 170005 - DNA, 15 bp, Homo sapiens
atggcctcacgcctg

SEQ ID NO: 170006 - DNA, 15 bp, Homo sapiens
catggcctcacgcct

SEQ ID NO: 170007 - DNA, 15 bp, Homo sapiens
acatggcctcacgcc

SEQ ID NO: 170008 - DNA, 15 bp, Homo sapiens
aacatggcctcacgc

SEQ ID NO: 170009 - DNA, 15 bp, Homo sapiens
aaacatggcctcacg

SEQ ID NO: 170010 - DNA, 15 bp, Homo sapiens
aaaacatggcctcac

SEQ ID NO: 170011 - DNA, 15 bp, Homo sapiens
gaaaacatggcctca

SEQ ID NO: 170012 - DNA, 15 bp, Homo sapiens
ggaaaacatggcctc

SEQ ID NO: 170013 - DNA, 15 bp, Homo sapiens
tggaaaacatggcct

SEQ ID NO: 170014 - DNA, 15 bp, Homo sapiens
ctggaaaacatggcc

SEQ ID NO: 170015 - DNA, 15 bp, Homo sapiens
cctggaaaacatggc

SEQ ID NO: 170016 - DNA, 15 bp, Homo sapiens
gcctggaaaacatgg

SEQ ID NO: 170017 - DNA, 15 bp, Homo sapiens
ggcctggaaaacatg

SEQ ID NO: 170018 - DNA, 15 bp, Homo sapiens
tggcctggaaaacat

SEQ ID NO: 170019 - DNA, 15 bp, Homo sapiens
gtggcctggaaaaca

SEQ ID NO: 170020 - DNA, 15 bp, Homo sapiens
tgtggcctggaaaac

SEQ ID NO: 170021 - DNA, 15 bp, Homo sapiens
ctgtggcctggaaaa

SEQ ID NO: 170022 - DNA, 15 bp, Homo sapiens
actgtggcctggaaa

SEQ ID NO: 170023 - DNA, 15 bp, Homo sapiens
gactgtggcctggaa

SEQ ID NO: 170024 - DNA, 15 bp, Homo sapiens
ggactgtggcctgga

SEQ ID NO: 170025 - DNA, 15 bp, Homo sapiens
tggactgtggcctgg

SEQ ID NO: 170026 - DNA, 15 bp, Homo sapiens
gtggactgtggcctg

SEQ ID NO: 170027 - DNA, 15 bp, Homo sapiens
tgtggactgtggcct

SEQ ID NO: 170028 - DNA, 15 bp, Homo sapiens
ctgtggactgtggcc

SEQ ID NO: 170029 - DNA, 15 bp, Homo sapiens
gctgtggactgtggc

SEQ ID NO: 170030 - DNA, 15 bp, Homo sapiens
ggctgtggactgtgg

SEQ ID NO: 170031 - DNA, 15 bp, Homo sapiens
aggctgtggactgtg

SEQ ID NO: 170032 - DNA, 15 bp, Homo sapiens
gaggctgtggactgt

SEQ ID NO: 170033 - DNA, 15 bp, Homo sapiens
cgaggctgtggactg

SEQ ID NO: 170034 - DNA, 15 bp, Homo sapiens
gcgaggctgtggact

SEQ ID NO: 170035 - DNA, 15 bp, Homo sapiens
agcgaggctgtggac

SEQ ID NO: 170036 - DNA, 15 bp, Homo sapiens
cagcgaggctgtgga

SEQ ID NO: 170037 - DNA, 15 bp, Homo sapiens
gcagcgaggctgtgg

SEQ ID NO: 170038 - DNA, 15 bp, Homo sapiens
ggcagcgaggctgtg

SEQ ID NO: 170039 - DNA, 15 bp, Homo sapiens
tggcagcgaggctgt

SEQ ID NO: 170040 - DNA, 15 bp, Homo sapiens
ttggcagcgaggctg

SEQ ID NO: 170041 - DNA, 15 bp, Homo sapiens
gttggcagcgaggct

SEQ ID NO: 170042 - DNA, 15 bp, Homo sapiens
tgttggcagcgaggc

SEQ ID NO: 170043 - DNA, 15 bp, Homo sapiens
gtgttggcagcgagg

SEQ ID NO: 170044 - DNA, 15 bp, Homo sapiens
tgtgttggcagcgag

SEQ ID NO: 170045 - DNA, 15 bp, Homo sapiens
ctgtgttggcagcga

SEQ ID NO: 170046 - DNA, 15 bp, Homo sapiens
cctgtgttggcagcg

SEQ ID NO: 170047 - DNA, 15 bp, Homo sapiens
acctgtgttggcagc

SEQ ID NO: 170048 - DNA, 15 bp, Homo sapiens
cacctgtgttggcag

SEQ ID NO: 170049 - DNA, 15 bp, Homo sapiens
acacctgtgttggca

SEQ ID NO: 170050 - DNA, 15 bp, Homo sapiens
cacacctgtgttggc

SEQ ID NO: 170051 - DNA, 15 bp, Homo sapiens
gcacacctgtgttgg

SEQ ID NO: 170052 - DNA, 15 bp, Homo sapiens
tgcacacctgtgttg

SEQ ID NO: 170053 - DNA, 15 bp, Homo sapiens
atgcacacctgtgtt

SEQ ID NO: 170054 - DNA, 15 bp, Homo sapiens
aatgcacacctgtgt

SEQ ID NO: 170055 - DNA, 15 bp, Homo sapiens
aaatgcacacctgtg

SEQ ID NO: 170056 - DNA, 15 bp, Homo sapiens
aaaatgcacacctgt

SEQ ID NO: 170057 - DNA, 15 bp, Homo sapiens
caaaatgcacacctg

SEQ ID NO: 170058 - DNA, 15 bp, Homo sapiens
ccaaaatgcacacct

SEQ ID NO: 170059 - DNA, 15 bp, Homo sapiens
accaaaatgcacacc

SEQ ID NO: 170060 - DNA, 15 bp, Homo sapiens
caccaaaatgcacac

SEQ ID NO: 170061 - DNA, 15 bp, Homo sapiens
ccaccaaaatgcaca

SEQ ID NO: 170062 - DNA, 15 bp, Homo sapiens
tccaccaaaatgcac

SEQ ID NO: 170063 - DNA, 15 bp, Homo sapiens
ctccaccaaaatgca

SEQ ID NO: 170064 - DNA, 15 bp, Homo sapiens
cctccaccaaaatgc

SEQ ID NO: 170065 - DNA, 15 bp, Homo sapiens
gcctccaccaaaatg

SEQ ID NO: 170066 - DNA, 15 bp, Homo sapiens
agcctccaccaaaat

SEQ ID NO: 170067 - DNA, 15 bp, Homo sapiens
aagcctccaccaaaa

SEQ ID NO: 170068 - DNA, 15 bp, Homo sapiens
caagcctccaccaaa

SEQ ID NO: 170069 - DNA, 15 bp, Homo sapiens
gcaagcctccaccaa

SEQ ID NO: 170070 - DNA, 15 bp, Homo sapiens
agcaagcctccacca

SEQ ID NO: 170071 - DNA, 15 bp, Homo sapiens
tagcaagcctccacc

SEQ ID NO: 170072 - DNA, 15 bp, Homo sapiens
gtagcaagcctccac

SEQ ID NO: 170073 - DNA, 15 bp, Homo sapiens
ggtagcaagcctcca

SEQ ID NO: 170074 - DNA, 15 bp, Homo sapiens
gggtagcaagcctcc

SEQ ID NO: 170075 - DNA, 15 bp, Homo sapiens
agggtagcaagcctc

SEQ ID NO: 170076 - DNA, 15 bp, Homo sapiens
gagggtagcaagcct

SEQ ID NO: 170077 - DNA, 15 bp, Homo sapiens
agagggtagcaagcc

SEQ ID NO: 170078 - DNA, 15 bp, Homo sapiens
cagagggtagcaagc

SEQ ID NO: 170079 - DNA, 15 bp, Homo sapiens
acagagggtagcaag

SEQ ID NO: 170080 - DNA, 15 bp, Homo sapiens
cacagagggtagcaa

SEQ ID NO: 170081 - DNA, 15 bp, Homo sapiens
acacagagggtagca

SEQ ID NO: 170082 - DNA, 15 bp, Homo sapiens
cacacagagggtagc

SEQ ID NO: 170083 - DNA, 15 bp, Homo sapiens
tcacacagagggtag

SEQ ID NO: 170084 - DNA, 15 bp, Homo sapiens
ttcacacagagggta

SEQ ID NO: 170085 - DNA, 15 bp, Homo sapiens
tttcacacagagggt

SEQ ID NO: 170086 - DNA, 15 bp, Homo sapiens
gtttcacacagaggg

SEQ ID NO: 170087 - DNA, 15 bp, Homo sapiens
ggtttcacacagagg

SEQ ID NO: 170088 - DNA, 15 bp, Homo sapiens
tggtttcacacagag

SEQ ID NO: 170089 - DNA, 15 bp, Homo sapiens
ttggtttcacacaga

SEQ ID NO: 170090 - DNA, 15 bp, Homo sapiens
cttggtttcacacag

SEQ ID NO: 170091 - DNA, 15 bp, Homo sapiens
ccttggtttcacaca

SEQ ID NO: 170092 - DNA, 15 bp, Homo sapiens
cccttggtttcacac

SEQ ID NO: 170093 - DNA, 15 bp, Homo sapiens
tcccttggtttcaca

SEQ ID NO: 170094 - DNA, 15 bp, Homo sapiens
ctcccttggtttcac

SEQ ID NO: 170095 - DNA, 15 bp, Homo sapiens
gctcccttggtttca

SEQ ID NO: 170096 - DNA, 15 bp, Homo sapiens
tgctcccttggtttc

SEQ ID NO: 170097 - DNA, 15 bp, Homo sapiens
ctgctcccttggttt

SEQ ID NO: 170098 - DNA, 15 bp, Homo sapiens
tctgctcccttggtt

SEQ ID NO: 170099 - DNA, 15 bp, Homo sapiens
ttctgctcccttggt

SEQ ID NO: 170100 - DNA, 15 bp, Homo sapiens
attctgctcccttgg

SEQ ID NO: 170101 - DNA, 15 bp, Homo sapiens
tattctgctcccttg

SEQ ID NO: 170102 - DNA, 15 bp, Homo sapiens
atattctgctccctt

SEQ ID NO: 170103 - DNA, 15 bp, Homo sapiens
aatattctgctccct

SEQ ID NO: 170104 - DNA, 15 bp, Homo sapiens
aaatattctgctccc

SEQ ID NO: 170105 - DNA, 15 bp, Homo sapiens
gaaatattctgctcc

SEQ ID NO: 170106 - DNA, 15 bp, Homo sapiens
ggaaatattctgctc

SEQ ID NO: 170107 - DNA, 15 bp, Homo sapiens
gggaaatattctgct

SEQ ID NO: 170108 - DNA, 15 bp, Homo sapiens
agggaaatattctgc

SEQ ID NO: 170109 - DNA, 15 bp, Homo sapiens
cagggaaatattctg

SEQ ID NO: 170110 - DNA, 15 bp, Homo sapiens
tcagggaaatattct

SEQ ID NO: 170111 - DNA, 15 bp, Homo sapiens
ttcagggaaatattc

SEQ ID NO: 170112 - DNA, 15 bp, Homo sapiens
tttcagggaaatatt

SEQ ID NO: 170113 - DNA, 15 bp, Homo sapiens
atttcagggaaatat

SEQ ID NO: 170114 - DNA, 15 bp, Homo sapiens
gatttcagggaaata

SEQ ID NO: 170115 - DNA, 15 bp, Homo sapiens
cgatttcagggaaat

SEQ ID NO: 170116 - DNA, 15 bp, Homo sapiens
ccgatttcagggaaa

SEQ ID NO: 170117 - DNA, 15 bp, Homo sapiens
cccgatttcagggaa

SEQ ID NO: 170118 - DNA, 15 bp, Homo sapiens
ccccgatttcaggga

SEQ ID NO: 170119 - DNA, 15 bp, Homo sapiens
gccccgatttcaggg

SEQ ID NO: 170120 - DNA, 15 bp, Homo sapiens
agccccgatttcagg

SEQ ID NO: 170121 - DNA, 15 bp, Homo sapiens
gagccccgatttcag

SEQ ID NO: 170122 - DNA, 15 bp, Homo sapiens
ggagccccgatttca

SEQ ID NO: 170123 - DNA, 15 bp, Homo sapiens
aggagccccgatttc

SEQ ID NO: 170124 - DNA, 15 bp, Homo sapiens
caggagccccgattt

SEQ ID NO: 170125 - DNA, 15 bp, Homo sapiens
ccaggagccccgatt

SEQ ID NO: 170126 - DNA, 15 bp, Homo sapiens
tccaggagccccgat

SEQ ID NO: 170127 - DNA, 15 bp, Homo sapiens
ttccaggagccccga

SEQ ID NO: 170128 - DNA, 15 bp, Homo sapiens
gttccaggagccccg

SEQ ID NO: 170129 - DNA, 15 bp, Homo sapiens
tgttccaggagcccc

SEQ ID NO: 170130 - DNA, 15 bp, Homo sapiens
atgttccaggagccc

SEQ ID NO: 170131 - DNA, 15 bp, Homo sapiens
catgttccaggagcc

SEQ ID NO: 170132 - DNA, 15 bp, Homo sapiens
tcatgttccaggagc

SEQ ID NO: 170133 - DNA, 15 bp, Homo sapiens
gtcatgttccaggag

SEQ ID NO: 170134 - DNA, 15 bp, Homo sapiens
ggtcatgttccagga

SEQ ID NO: 170135 - DNA, 15 bp, Homo sapiens
gggtcatgttccagg

SEQ ID NO: 170136 - DNA, 15 bp, Homo sapiens
agggtcatgttccag

SEQ ID NO: 170137 - DNA, 15 bp, Homo sapiens
cagggtcatgttcca

SEQ ID NO: 170138 - DNA, 15 bp, Homo sapiens
gcagggtcatgttcc

SEQ ID NO: 170139 - DNA, 15 bp, Homo sapiens
ggcagggtcatgttc

SEQ ID NO: 170140 - DNA, 15 bp, Homo sapiens
tggcagggtcatgtt

SEQ ID NO: 170141 - DNA, 15 bp, Homo sapiens
ctggcagggtcatgt

SEQ ID NO: 170142 - DNA, 15 bp, Homo sapiens
cctggcagggtcatg

SEQ ID NO: 170143 - DNA, 15 bp, Homo sapiens
tcctggcagggtcat

SEQ ID NO: 170144 - DNA, 15 bp, Homo sapiens
ttcctggcagggtca

SEQ ID NO: 170145 - DNA, 15 bp, Homo sapiens
cttcctggcagggtc

SEQ ID NO: 170146 - DNA, 15 bp, Homo sapiens
gcttcctggcagggt

SEQ ID NO: 170147 - DNA, 15 bp, Homo sapiens
agcttcctggcaggg

SEQ ID NO: 170148 - DNA, 15 bp, Homo sapiens
gagcttcctggcagg

SEQ ID NO: 170149 - DNA, 15 bp, Homo sapiens
tgagcttcctggcag

SEQ ID NO: 170150 - DNA, 15 bp, Homo sapiens
ttgagcttcctggca

SEQ ID NO: 170151 - DNA, 15 bp, Homo sapiens
tttgagcttcctggc

SEQ ID NO: 170152 - DNA, 15 bp, Homo sapiens
ctttgagcttcctgg

SEQ ID NO: 170153 - DNA, 15 bp, Homo sapiens
actttgagcttcctg

SEQ ID NO: 170154 - DNA, 15 bp, Homo sapiens
gactttgagcttcct

SEQ ID NO: 170155 - DNA, 15 bp, Homo sapiens
ggactttgagcttcc

SEQ ID NO: 170156 - DNA, 15 bp, Homo sapiens
aggactttgagcttc

SEQ ID NO: 170157 - DNA, 15 bp, Homo sapiens
caggactttgagctt

SEQ ID NO: 170158 - DNA, 15 bp, Homo sapiens
ccaggactttgagct

SEQ ID NO: 170159 - DNA, 15 bp, Homo sapiens
cccaggactttgagc

SEQ ID NO: 170160 - DNA, 15 bp, Homo sapiens
tcccaggactttgag

SEQ ID NO: 170161 - DNA, 15 bp, Homo sapiens
ctcccaggactttga

SEQ ID NO: 170162 - DNA, 15 bp, Homo sapiens
tctcccaggactttg

SEQ ID NO: 170163 - DNA, 15 bp, Homo sapiens
ttctcccaggacttt

SEQ ID NO: 170164 - DNA, 15 bp, Homo sapiens
attctcccaggactt

SEQ ID NO: 170165 - DNA, 15 bp, Homo sapiens
tattctcccaggact

SEQ ID NO: 170166 - DNA, 15 bp, Homo sapiens
atattctcccaggac

SEQ ID NO: 170167 - DNA, 15 bp, Homo sapiens
catattctcccagga

SEQ ID NO: 170168 - DNA, 15 bp, Homo sapiens
acatattctcccagg

SEQ ID NO: 170169 - DNA, 15 bp, Homo sapiens
aacatattctcccag

SEQ ID NO: 170170 - DNA, 15 bp, Homo sapiens
gaacatattctccca

SEQ ID NO: 170171 - DNA, 15 bp, Homo sapiens
ggaacatattctccc

SEQ ID NO: 170172 - DNA, 15 bp, Homo sapiens
tggaacatattctcc

SEQ ID NO: 170173 - DNA, 15 bp, Homo sapiens
ctggaacatattctc

SEQ ID NO: 170174 - DNA, 15 bp, Homo sapiens
cctggaacatattct

SEQ ID NO: 170175 - DNA, 15 bp, Homo sapiens
gcctggaacatattc

SEQ ID NO: 170176 - DNA, 15 bp, Homo sapiens
tgcctggaacatatt

SEQ ID NO: 170177 - DNA, 15 bp, Homo sapiens
ctgcctggaacatat

SEQ ID NO: 170178 - DNA, 15 bp, Homo sapiens
cctgcctggaacata

SEQ ID NO: 170179 - DNA, 15 bp, Homo sapiens
ccctgcctggaacat

SEQ ID NO: 170180 - DNA, 15 bp, Homo sapiens
gccctgcctggaaca

SEQ ID NO: 170181 - DNA, 15 bp, Homo sapiens
ggccctgcctggaac

SEQ ID NO: 170182 - DNA, 15 bp, Homo sapiens
gggccctgcctggaa

SEQ ID NO: 170183 - DNA, 15 bp, Homo sapiens
cgggccctgcctgga

SEQ ID NO: 170184 - DNA, 15 bp, Homo sapiens
ccgggccctgcctgg

SEQ ID NO: 170185 - DNA, 15 bp, Homo sapiens
cccgggccctgcctg

SEQ ID NO: 170186 - DNA, 15 bp, Homo sapiens
ccccgggccctgcct

SEQ ID NO: 170187 - DNA, 15 bp, Homo sapiens
cccccgggccctgcc

SEQ ID NO: 170188 - DNA, 15 bp, Homo sapiens
ccccccgggccctgc

SEQ ID NO: 170189 - DNA, 15 bp, Homo sapiens
gccccccgggccctg

SEQ ID NO: 170190 - DNA, 15 bp, Homo sapiens
tgccccccgggccct

SEQ ID NO: 170191 - DNA, 15 bp, Homo sapiens
gtgccccccgggccc

SEQ ID NO: 170192 - DNA, 15 bp, Homo sapiens
ggtgccccccgggcc

SEQ ID NO: 170193 - DNA, 15 bp, Homo sapiens
aggtgccccccgggc

SEQ ID NO: 170194 - DNA, 15 bp, Homo sapiens
gaggtgccccccggg

SEQ ID NO: 170195 - DNA, 15 bp, Homo sapiens
ggaggtgccccccgg

SEQ ID NO: 170196 - DNA, 15 bp, Homo sapiens
tggaggtgccccccg

SEQ ID NO: 170197 - DNA, 15 bp, Homo sapiens
atggaggtgcccccc

SEQ ID NO: 170198 - DNA, 15 bp, Homo sapiens
catggaggtgccccc

SEQ ID NO: 170199 - DNA, 15 bp, Homo sapiens
gcatggaggtgcccc

SEQ ID NO: 170200 - DNA, 15 bp, Homo sapiens
ggcatggaggtgccc

SEQ ID NO: 170201 - DNA, 15 bp, Homo sapiens
gggcatggaggtgcc

SEQ ID NO: 170202 - DNA, 15 bp, Homo sapiens
ggggcatggaggtgc

SEQ ID NO: 170203 - DNA, 15 bp, Homo sapiens
tggggcatggaggtg

SEQ ID NO: 170204 - DNA, 15 bp, Homo sapiens
gtggggcatggaggt

SEQ ID NO: 170205 - DNA, 15 bp, Homo sapiens
agtggggcatggagg

SEQ ID NO: 170206 - DNA, 15 bp, Homo sapiens
cagtggggcatggag

SEQ ID NO: 170207 - DNA, 15 bp, Homo sapiens
gcagtggggcatgga

SEQ ID NO: 170208 - DNA, 15 bp, Homo sapiens
ggcagtggggcatgg

SEQ ID NO: 170209 - DNA, 15 bp, Homo sapiens
aggcagtggggcatg

SEQ ID NO: 170210 - DNA, 15 bp, Homo sapiens
aaggcagtggggcat

SEQ ID NO: 170211 - DNA, 15 bp, Homo sapiens
caaggcagtggggca

SEQ ID NO: 170212 - DNA, 15 bp, Homo sapiens
acaaggcagtggggc

SEQ ID NO: 170213 - DNA, 15 bp, Homo sapiens
cacaaggcagtgggg

SEQ ID NO: 170214 - DNA, 15 bp, Homo sapiens
ccacaaggcagtggg

SEQ ID NO: 170215 - DNA, 15 bp, Homo sapiens
gccacaaggcagtgg

SEQ ID NO: 170216 - DNA, 15 bp, Homo sapiens
agccacaaggcagtg

SEQ ID NO: 170217 - DNA, 15 bp, Homo sapiens
gagccacaaggcagt

SEQ ID NO: 170218 - DNA, 15 bp, Homo sapiens
ggagccacaaggcag

SEQ ID NO: 170219 - DNA, 15 bp, Homo sapiens
aggagccacaaggca

SEQ ID NO: 170220 - DNA, 15 bp, Homo sapiens
caggagccacaaggc

SEQ ID NO: 170221 - DNA, 15 bp, Homo sapiens
ccaggagccacaagg

SEQ ID NO: 170222 - DNA, 15 bp, Homo sapiens
gccaggagccacaag

SEQ ID NO: 170223 - DNA, 15 bp, Homo sapiens
tgccaggagccacaa

SEQ ID NO: 170224 - DNA, 15 bp, Homo sapiens
gtgccaggagccaca

SEQ ID NO: 170225 - DNA, 15 bp, Homo sapiens
tgtgccaggagccac

SEQ ID NO: 170226 - DNA, 15 bp, Homo sapiens
ctgtgccaggagcca

SEQ ID NO: 170227 - DNA, 15 bp, Homo sapiens
cctgtgccaggagcc

SEQ ID NO: 170228 - DNA, 15 bp, Homo sapiens
tcctgtgccaggagc

SEQ ID NO: 170229 - DNA, 15 bp, Homo sapiens
ctcctgtgccaggag

SEQ ID NO: 170230 - DNA, 15 bp, Homo sapiens
tctcctgtgccagga

SEQ ID NO: 170231 - DNA, 15 bp, Homo sapiens
atctcctgtgccagg

SEQ ID NO: 170232 - DNA, 15 bp, Homo sapiens
catctcctgtgccag

SEQ ID NO: 170233 - DNA, 15 bp, Homo sapiens
gcatctcctgtgcca

SEQ ID NO: 170234 - DNA, 15 bp, Homo sapiens
agcatctcctgtgcc

SEQ ID NO: 170235 - DNA, 15 bp, Homo sapiens
cagcatctcctgtgc

SEQ ID NO: 170236 - DNA, 15 bp, Homo sapiens
ccagcatctcctgtg

SEQ ID NO: 170237 - DNA, 15 bp, Homo sapiens
tccagcatctcctgt

SEQ ID NO: 170238 - DNA, 15 bp, Homo sapiens
gtccagcatctcctg

SEQ ID NO: 170239 - DNA, 15 bp, Homo sapiens
tgtccagcatctcct

SEQ ID NO: 170240 - DNA, 15 bp, Homo sapiens
ctgtccagcatctcc

SEQ ID NO: 170241 - DNA, 15 bp, Homo sapiens
actgtccagcatctc

SEQ ID NO: 170242 - DNA, 15 bp, Homo sapiens
tactgtccagcatct

SEQ ID NO: 170243 - DNA, 15 bp, Homo sapiens
atactgtccagcatc

SEQ ID NO: 170244 - DNA, 15 bp, Homo sapiens
tatactgtccagcat

SEQ ID NO: 170245 - DNA, 15 bp, Homo sapiens
atatactgtccagca

SEQ ID NO: 170246 - DNA, 15 bp, Homo sapiens
tatatactgtccagc

SEQ ID NO: 170247 - DNA, 15 bp, Homo sapiens
gtatatactgtccag

SEQ ID NO: 170248 - DNA, 15 bp, Homo sapiens
agtatatactgtcca

SEQ ID NO: 170249 - DNA, 15 bp, Homo sapiens
gagtatatactgtcc

SEQ ID NO: 170250 - DNA, 15 bp, Homo sapiens
agagtatatactgtc

SEQ ID NO: 170251 - DNA, 15 bp, Homo sapiens
cagagtatatactgt

SEQ ID NO: 170252 - DNA, 15 bp, Homo sapiens
gcagagtatatactg

SEQ ID NO: 170253 - DNA, 15 bp, Homo sapiens
agcagagtatatact

SEQ ID NO: 170254 - DNA, 15 bp, Homo sapiens
cagcagagtatatac

SEQ ID NO: 170255 - DNA, 15 bp, Homo sapiens
ccagcagagtatata

SEQ ID NO: 170256 - DNA, 15 bp, Homo sapiens
gccagcagagtatat

SEQ ID NO: 170257 - DNA, 15 bp, Homo sapiens
agccagcagagtata

SEQ ID NO: 170258 - DNA, 15 bp, Homo sapiens
cagccagcagagtat

SEQ ID NO: 170259 - DNA, 15 bp, Homo sapiens
ccagccagcagagta

SEQ ID NO: 170260 - DNA, 15 bp, Homo sapiens
tccagccagcagagt

SEQ ID NO: 170261 - DNA, 15 bp, Homo sapiens
gtccagccagcagag

SEQ ID NO: 170262 - DNA, 15 bp, Homo sapiens
tgtccagccagcaga

SEQ ID NO: 170263 - DNA, 15 bp, Homo sapiens
ctgtccagccagcag

SEQ ID NO: 170264 - DNA, 15 bp, Homo sapiens
cctgtccagccagca

SEQ ID NO: 170265 - DNA, 15 bp, Homo sapiens
gcctgtccagccagc

SEQ ID NO: 170266 - DNA, 15 bp, Homo sapiens
agcctgtccagccag

SEQ ID NO: 170267 - DNA, 15 bp, Homo sapiens
gagcctgtccagcca

SEQ ID NO: 170268 - DNA, 15 bp, Homo sapiens
agagcctgtccagcc

SEQ ID NO: 170269 - DNA, 15 bp, Homo sapiens
gagagcctgtccagc

SEQ ID NO: 170270 - DNA, 15 bp, Homo sapiens
tgagagcctgtccag

SEQ ID NO: 170271 - DNA, 15 bp, Homo sapiens
atgagagcctgtcca

SEQ ID NO: 170272 - DNA, 15 bp, Homo sapiens
catgagagcctgtcc

SEQ ID NO: 170273 - DNA, 15 bp, Homo sapiens
acatgagagcctgtc

SEQ ID NO: 170274 - DNA, 15 bp, Homo sapiens
gacatgagagcctgt

SEQ ID NO: 170275 - DNA, 15 bp, Homo sapiens
agacatgagagcctg

SEQ ID NO: 170276 - DNA, 15 bp, Homo sapiens
cagacatgagagcct

SEQ ID NO: 170277 - DNA, 15 bp, Homo sapiens
gcagacatgagagcc

SEQ ID NO: 170278 - DNA, 15 bp, Homo sapiens
tgcagacatgagagc

SEQ ID NO: 170279 - DNA, 15 bp, Homo sapiens
atgcagacatgagag

SEQ ID NO: 170280 - DNA, 15 bp, Homo sapiens
catgcagacatgaga

SEQ ID NO: 170281 - DNA, 15 bp, Homo sapiens
acatgcagacatgag

SEQ ID NO: 170282 - DNA, 15 bp, Homo sapiens
cacatgcagacatga

SEQ ID NO: 170283 - DNA, 15 bp, Homo sapiens
tcacatgcagacatg

SEQ ID NO: 170284 - DNA, 15 bp, Homo sapiens
ttcacatgcagacat

SEQ ID NO: 170285 - DNA, 15 bp, Homo sapiens
tttcacatgcagaca

SEQ ID NO: 170286 - DNA, 15 bp, Homo sapiens
ttttcacatgcagac

SEQ ID NO: 170287 - DNA, 15 bp, Homo sapiens
attttcacatgcaga

SEQ ID NO: 170288 - DNA, 15 bp, Homo sapiens
gattttcacatgcag

SEQ ID NO: 170289 - DNA, 15 bp, Homo sapiens
tgattttcacatgca

SEQ ID NO: 170290 - DNA, 15 bp, Homo sapiens
ctgattttcacatgc

SEQ ID NO: 170291 - DNA, 15 bp, Homo sapiens
cctgattttcacatg

SEQ ID NO: 170292 - DNA, 15 bp, Homo sapiens
acctgattttcacat

SEQ ID NO: 170293 - DNA, 15 bp, Homo sapiens
aacctgattttcaca

SEQ ID NO: 170294 - DNA, 15 bp, Homo sapiens
gaacctgattttcac

SEQ ID NO: 170295 - DNA, 15 bp, Homo sapiens
agaacctgattttca

SEQ ID NO: 170296 - DNA, 15 bp, Homo sapiens
cagaacctgattttc

SEQ ID NO: 170297 - DNA, 15 bp, Homo sapiens
ccagaacctgatttt

SEQ ID NO: 170298 - DNA, 15 bp, Homo sapiens
cccagaacctgattt

SEQ ID NO: 170299 - DNA, 15 bp, Homo sapiens
ccccagaacctgatt

SEQ ID NO: 170300 - DNA, 15 bp, Homo sapiens
tccccagaacctgat

SEQ ID NO: 170301 - DNA, 15 bp, Homo sapiens
ctccccagaacctga

SEQ ID NO: 170302 - DNA, 15 bp, Homo sapiens
actccccagaacctg

SEQ ID NO: 170303 - DNA, 15 bp, Homo sapiens
aactccccagaacct

SEQ ID NO: 170304 - DNA, 15 bp, Homo sapiens
aaactccccagaacc

SEQ ID NO: 170305 - DNA, 15 bp, Homo sapiens
taaactccccagaac

SEQ ID NO: 170306 - DNA, 15 bp, Homo sapiens
ataaactccccagaa

SEQ ID NO: 170307 - DNA, 15 bp, Homo sapiens
tataaactccccaga

SEQ ID NO: 170308 - DNA, 15 bp, Homo sapiens
ttataaactccccag

SEQ ID NO: 170309 - DNA, 15 bp, Homo sapiens
tttataaactcccca

SEQ ID NO: 170310 - DNA, 15 bp, Homo sapiens
gtttataaactcccc

SEQ ID NO: 170311 - DNA, 15 bp, Homo sapiens
ggtttataaactccc

SEQ ID NO: 170312 - DNA, 15 bp, Homo sapiens
tggtttataaactcc

SEQ ID NO: 170313 - DNA, 15 bp, Homo sapiens
ttggtttataaactc

SEQ ID NO: 170314 - DNA, 15 bp, Homo sapiens
tttggtttataaact

SEQ ID NO: 170315 - DNA, 15 bp, Homo sapiens
ctttggtttataaac

SEQ ID NO: 170316 - DNA, 15 bp, Homo sapiens
tctttggtttataaa

SEQ ID NO: 170317 - DNA, 15 bp, Homo sapiens
ttctttggtttataa

SEQ ID NO: 170318 - DNA, 15 bp, Homo sapiens
tttctttggtttata

SEQ ID NO: 170319 - DNA, 15 bp, Homo sapiens
ttttctttggtttat

SEQ ID NO: 170320 - DNA, 15 bp, Homo sapiens
gttttctttggttta

SEQ ID NO: 170321 - DNA, 15 bp, Homo sapiens
ggttttctttggttt

SEQ ID NO: 170322 - DNA, 15 bp, Homo sapiens
gggttttctttggtt

SEQ ID NO: 170323 - DNA, 15 bp, Homo sapiens
ggggttttctttggt

SEQ ID NO: 170324 - DNA, 15 bp, Homo sapiens
aggggttttctttgg

SEQ ID NO: 170325 - DNA, 15 bp, Homo sapiens
gaggggttttctttg

SEQ ID NO: 170326 - DNA, 15 bp, Homo sapiens
ggaggggttttcttt

SEQ ID NO: 170327 - DNA, 15 bp, Homo sapiens
tggaggggttttctt

SEQ ID NO: 170328 - DNA, 15 bp, Homo sapiens
gtggaggggttttct

SEQ ID NO: 170329 - DNA, 15 bp, Homo sapiens
ggtggaggggttttc

SEQ ID NO: 170330 - DNA, 15 bp, Homo sapiens
gggtggaggggtttt

SEQ ID NO: 170331 - DNA, 15 bp, Homo sapiens
tgggtggaggggttt

SEQ ID NO: 170332 - DNA, 15 bp, Homo sapiens
ctgggtggaggggtt

SEQ ID NO: 170333 - DNA, 15 bp, Homo sapiens
gctgggtggaggggt

SEQ ID NO: 170334 - DNA, 15 bp, Homo sapiens
ggctgggtggagggg

SEQ ID NO: 170335 - DNA, 15 bp, Homo sapiens
gggctgggtggaggg

SEQ ID NO: 170336 - DNA, 15 bp, Homo sapiens
tgggctgggtggagg

SEQ ID NO: 170337 - DNA, 15 bp, Homo sapiens
gtgggctgggtggag

SEQ ID NO: 170338 - DNA, 15 bp, Homo sapiens
tgtgggctgggtgga

SEQ ID NO: 170339 - DNA, 15 bp, Homo sapiens
ctgtgggctgggtgg

SEQ ID NO: 170340 - DNA, 15 bp, Homo sapiens
tctgtgggctgggtg

SEQ ID NO: 170341 - DNA, 15 bp, Homo sapiens
ctctgtgggctgggt

SEQ ID NO: 170342 - DNA, 15 bp, Homo sapiens
actctgtgggctggg

SEQ ID NO: 170343 - DNA, 15 bp, Homo sapiens
cactctgtgggctgg

SEQ ID NO: 170344 - DNA, 15 bp, Homo sapiens
gcactctgtgggctg

SEQ ID NO: 170345 - DNA, 15 bp, Homo sapiens
ggcactctgtgggct

SEQ ID NO: 170346 - DNA, 15 bp, Homo sapiens
tggcactctgtgggc

SEQ ID NO: 170347 - DNA, 15 bp, Homo sapiens
ctggcactctgtggg

SEQ ID NO: 170348 - DNA, 15 bp, Homo sapiens
gctggcactctgtgg

SEQ ID NO: 170349 - DNA, 15 bp, Homo sapiens
cgctggcactctgtg

SEQ ID NO: 170350 - DNA, 15 bp, Homo sapiens
tcgctggcactctgt

SEQ ID NO: 170351 - DNA, 15 bp, Homo sapiens
atcgctggcactctg

SEQ ID NO: 170352 - DNA, 15 bp, Homo sapiens
aatcgctggcactct

SEQ ID NO: 170353 - DNA, 15 bp, Homo sapiens
gaatcgctggcactc

SEQ ID NO: 170354 - DNA, 15 bp, Homo sapiens
ggaatcgctggcact

SEQ ID NO: 170355 - DNA, 15 bp, Homo sapiens
gggaatcgctggcac

SEQ ID NO: 170356 - DNA, 15 bp, Homo sapiens
agggaatcgctggca

SEQ ID NO: 170357 - DNA, 15 bp, Homo sapiens
gagggaatcgctggc

SEQ ID NO: 170358 - DNA, 15 bp, Homo sapiens
tgagggaatcgctgg

SEQ ID NO: 170359 - DNA, 15 bp, Homo sapiens
ctgagggaatcgctg

SEQ ID NO: 170360 - DNA, 15 bp, Homo sapiens
actgagggaatcgct

SEQ ID NO: 170361 - DNA, 15 bp, Homo sapiens
cactgagggaatcgc

SEQ ID NO: 170362 - DNA, 15 bp, Homo sapiens
tcactgagggaatcg

SEQ ID NO: 170363 - DNA, 15 bp, Homo sapiens
atcactgagggaatc

SEQ ID NO: 170364 - DNA, 15 bp, Homo sapiens
aatcactgagggaat

SEQ ID NO: 170365 - DNA, 15 bp, Homo sapiens
gaatcactgagggaa

SEQ ID NO: 170366 - DNA, 15 bp, Homo sapiens
cgaatcactgaggga

SEQ ID NO: 170367 - DNA, 15 bp, Homo sapiens
acgaatcactgaggg

SEQ ID NO: 170368 - DNA, 15 bp, Homo sapiens
cacgaatcactgagg

SEQ ID NO: 170369 - DNA, 15 bp, Homo sapiens
acacgaatcactgag

SEQ ID NO: 170370 - DNA, 15 bp, Homo sapiens
cacacgaatcactga

SEQ ID NO: 170371 - DNA, 15 bp, Homo sapiens
acacacgaatcactg

SEQ ID NO: 170372 - DNA, 15 bp, Homo sapiens
cacacacgaatcact

SEQ ID NO: 170373 - DNA, 15 bp, Homo sapiens
ccacacacgaatcac

SEQ ID NO: 170374 - DNA, 15 bp, Homo sapiens
tccacacacgaatca

SEQ ID NO: 170375 - DNA, 15 bp, Homo sapiens
ctccacacacgaatc

SEQ ID NO: 170376 - DNA, 15 bp, Homo sapiens
cctccacacacgaat

SEQ ID NO: 170377 - DNA, 15 bp, Homo sapiens
tcctccacacacgaa

SEQ ID NO: 170378 - DNA, 15 bp, Homo sapiens
atcctccacacacga

SEQ ID NO: 170379 - DNA, 15 bp, Homo sapiens
aatcctccacacacg

SEQ ID NO: 170380 - DNA, 15 bp, Homo sapiens
gaatcctccacacac

SEQ ID NO: 170381 - DNA, 15 bp, Homo sapiens
tgaatcctccacaca

SEQ ID NO: 170382 - DNA, 15 bp, Homo sapiens
gtgaatcctccacac

SEQ ID NO: 170383 - DNA, 15 bp, Homo sapiens
tgtgaatcctccaca

SEQ ID NO: 170384 - DNA, 15 bp, Homo sapiens
gtgtgaatcctccac

SEQ ID NO: 170385 - DNA, 15 bp, Homo sapiens
agtgtgaatcctcca

SEQ ID NO: 170386 - DNA, 15 bp, Homo sapiens
aagtgtgaatcctcc

SEQ ID NO: 170387 - DNA, 15 bp, Homo sapiens
caagtgtgaatcctc

SEQ ID NO: 170388 - DNA, 15 bp, Homo sapiens
ccaagtgtgaatcct

SEQ ID NO: 170389 - DNA, 15 bp, Homo sapiens
accaagtgtgaatcc

SEQ ID NO: 170390 - DNA, 15 bp, Homo sapiens
caccaagtgtgaatc

SEQ ID NO: 170391 - DNA, 15 bp, Homo sapiens
ccaccaagtgtgaat

SEQ ID NO: 170392 - DNA, 15 bp, Homo sapiens
tccaccaagtgtgaa

SEQ ID NO: 170393 - DNA, 15 bp, Homo sapiens
ttccaccaagtgtga

SEQ ID NO: 170394 - DNA, 15 bp, Homo sapiens
tttccaccaagtgtg

SEQ ID NO: 170395 - DNA, 15 bp, Homo sapiens
ttttccaccaagtgt

SEQ ID NO: 170396 - DNA, 15 bp, Homo sapiens
attttccaccaagtg

SEQ ID NO: 170397 - DNA, 15 bp, Homo sapiens
gattttccaccaagt

SEQ ID NO: 170398 - DNA, 15 bp, Homo sapiens
agattttccaccaag

SEQ ID NO: 170399 - DNA, 15 bp, Homo sapiens
tagattttccaccaa

SEQ ID NO: 170400 - DNA, 15 bp, Homo sapiens
gtagattttccacca

SEQ ID NO: 170401 - DNA, 15 bp, Homo sapiens
agtagattttccacc

SEQ ID NO: 170402 - DNA, 15 bp, Homo sapiens
aagtagattttccac

SEQ ID NO: 170403 - DNA, 15 bp, Homo sapiens
taagtagattttcca

SEQ ID NO: 170404 - DNA, 15 bp, Homo sapiens
ttaagtagattttcc

SEQ ID NO: 170405 - DNA, 15 bp, Homo sapiens
gttaagtagattttc

SEQ ID NO: 170406 - DNA, 15 bp, Homo sapiens
tgttaagtagatttt

SEQ ID NO: 170407 - DNA, 15 bp, Homo sapiens
atgttaagtagattt

SEQ ID NO: 170408 - DNA, 15 bp, Homo sapiens
aatgttaagtagatt

SEQ ID NO: 170409 - DNA, 15 bp, Homo sapiens
aaatgttaagtagat

SEQ ID NO: 170410 - DNA, 15 bp, Homo sapiens
aaaatgttaagtaga

SEQ ID NO: 170411 - DNA, 15 bp, Homo sapiens
aaaaatgttaagtag

SEQ ID NO: 170412 - DNA, 15 bp, Homo sapiens
taaaaatgttaagta

SEQ ID NO: 170413 - DNA, 15 bp, Homo sapiens
ataaaaatgttaagt

SEQ ID NO: 170414 - DNA, 15 bp, Homo sapiens
gataaaaatgttaag

SEQ ID NO: 170415 - DNA, 15 bp, Homo sapiens
ggataaaaatgttaa

SEQ ID NO: 170416 - DNA, 15 bp, Homo sapiens
aggataaaaatgtta

SEQ ID NO: 170417 - DNA, 15 bp, Homo sapiens
taggataaaaatgtt

SEQ ID NO: 170418 - DNA, 15 bp, Homo sapiens
ataggataaaaatgt

SEQ ID NO: 170419 - DNA, 15 bp, Homo sapiens
aaataggataaaaat

SEQ ID NO: 170420 - DNA, 15 bp, Homo sapiens
aaaataggataaaaa

SEQ ID NO: 170421 - DNA, 15 bp, Homo sapiens
gaaaataggataaaa

SEQ ID NO: 170422 - DNA, 15 bp, Homo sapiens
ggaaaataggataaa

SEQ ID NO: 170423 - DNA, 15 bp, Homo sapiens
gggaaaataggataa

SEQ ID NO: 170424 - DNA, 15 bp, Homo sapiens
agggaaaataggata

SEQ ID NO: 170425 - DNA, 15 bp, Homo sapiens
gagggaaaataggat

SEQ ID NO: 170426 - DNA, 15 bp, Homo sapiens
ggagggaaaatagga

SEQ ID NO: 170427 - DNA, 15 bp, Homo sapiens
tggagggaaaatagg

SEQ ID NO: 170428 - DNA, 15 bp, Homo sapiens
gtggagggaaaatag

SEQ ID NO: 170429 - DNA, 15 bp, Homo sapiens
agtggagggaaaata

SEQ ID NO: 170430 - DNA, 15 bp, Homo sapiens
gagtggagggaaaat

SEQ ID NO: 170431 - DNA, 15 bp, Homo sapiens
tgagtggagggaaaa

SEQ ID NO: 170432 - DNA, 15 bp, Homo sapiens
gtgagtggagggaaa

SEQ ID NO: 170433 - DNA, 15 bp, Homo sapiens
agtgagtggagggaa

SEQ ID NO: 170434 - DNA, 15 bp, Homo sapiens
cagtgagtggaggga

SEQ ID NO: 170435 - DNA, 15 bp, Homo sapiens
acagtgagtggaggg

SEQ ID NO: 170436 - DNA, 15 bp, Homo sapiens
gacagtgagtggagg

SEQ ID NO: 170437 - DNA, 15 bp, Homo sapiens
tgacagtgagtggag

SEQ ID NO: 170438 - DNA, 15 bp, Homo sapiens
ctgacagtgagtgga

SEQ ID NO: 170439 - DNA, 15 bp, Homo sapiens
actgacagtgagtgg

SEQ ID NO: 170440 - DNA, 15 bp, Homo sapiens
gactgacagtgagtg

SEQ ID NO: 170441 - DNA, 15 bp, Homo sapiens
ggactgacagtgagt

SEQ ID NO: 170442 - DNA, 15 bp, Homo sapiens
aggactgacagtgag

SEQ ID NO: 170443 - DNA, 15 bp, Homo sapiens
gaggactgacagtga

SEQ ID NO: 170444 - DNA, 15 bp, Homo sapiens
tgaggactgacagtg

SEQ ID NO: 170445 - DNA, 15 bp, Homo sapiens
atgaggactgacagt

SEQ ID NO: 170446 - DNA, 15 bp, Homo sapiens
catgaggactgacag

SEQ ID NO: 170447 - DNA, 15 bp, Homo sapiens
acatgaggactgaca

SEQ ID NO: 170448 - DNA, 15 bp, Homo sapiens
cacatgaggactgac

SEQ ID NO: 170449 - DNA, 15 bp, Homo sapiens
acacatgaggactga

SEQ ID NO: 170450 - DNA, 15 bp, Homo sapiens
aacacatgaggactg

SEQ ID NO: 170451 - DNA, 15 bp, Homo sapiens
taacacatgaggact

SEQ ID NO: 170452 - DNA, 15 bp, Homo sapiens
ctaacacatgaggac

SEQ ID NO: 170453 - DNA, 15 bp, Homo sapiens
cctaacacatgagga

SEQ ID NO: 170454 - DNA, 15 bp, Homo sapiens
ccctaacacatgagg

SEQ ID NO: 170455 - DNA, 15 bp, Homo sapiens
cccctaacacatgag

SEQ ID NO: 170456 - DNA, 15 bp, Homo sapiens
tcccctaacacatga

SEQ ID NO: 170457 - DNA, 15 bp, Homo sapiens
ctcccctaacacatg

SEQ ID NO: 170458 - DNA, 15 bp, Homo sapiens
actcccctaacacat

SEQ ID NO: 170459 - DNA, 15 bp, Homo sapiens
cactcccctaacaca

SEQ ID NO: 170460 - DNA, 15 bp, Homo sapiens
ccactcccctaacac

SEQ ID NO: 170461 - DNA, 15 bp, Homo sapiens
tccactcccctaaca

SEQ ID NO: 170462 - DNA, 15 bp, Homo sapiens
ttccactcccctaac

SEQ ID NO: 170463 - DNA, 15 bp, Homo sapiens
tttccactcccctaa

SEQ ID NO: 170464 - DNA, 15 bp, Homo sapiens
gtttccactccccta

SEQ ID NO: 170465 - DNA, 15 bp, Homo sapiens
agtttccactcccct

SEQ ID NO: 170466 - DNA, 15 bp, Homo sapiens
gagtttccactcccc

SEQ ID NO: 170467 - DNA, 15 bp, Homo sapiens
tgagtttccactccc

SEQ ID NO: 170468 - DNA, 15 bp, Homo sapiens
atgagtttccactcc

SEQ ID NO: 170469 - DNA, 15 bp, Homo sapiens
aatgagtttccactc

SEQ ID NO: 170470 - DNA, 15 bp, Homo sapiens
aaatgagtttccact

SEQ ID NO: 170471 - DNA, 15 bp, Homo sapiens
taaatgagtttccac

SEQ ID NO: 170472 - DNA, 15 bp, Homo sapiens
ttaaatgagtttcca

SEQ ID NO: 170473 - DNA, 15 bp, Homo sapiens
tttaaatgagtttcc

SEQ ID NO: 170474 - DNA, 15 bp, Homo sapiens
atttaaatgagtttc

SEQ ID NO: 170475 - DNA, 15 bp, Homo sapiens
tatttaaatgagttt

SEQ ID NO: 170476 - DNA, 15 bp, Homo sapiens
atatttaaatgagtt

SEQ ID NO: 170477 - DNA, 15 bp, Homo sapiens
catatttaaatgagt

SEQ ID NO: 170478 - DNA, 15 bp, Homo sapiens
tcatatttaaatgag

SEQ ID NO: 170479 - DNA, 15 bp, Homo sapiens
ctcatatttaaatga

SEQ ID NO: 170480 - DNA, 15 bp, Homo sapiens
actcatatttaaatg

SEQ ID NO: 170481 - DNA, 15 bp, Homo sapiens
gactcatatttaaat

SEQ ID NO: 170482 - DNA, 15 bp, Homo sapiens
agactcatatttaaa

SEQ ID NO: 170483 - DNA, 15 bp, Homo sapiens
tagactcatatttaa

SEQ ID NO: 170484 - DNA, 15 bp, Homo sapiens
atagactcatattta

SEQ ID NO: 170485 - DNA, 15 bp, Homo sapiens
catagactcatattt

SEQ ID NO: 170486 - DNA, 15 bp, Homo sapiens
tcatagactcatatt

SEQ ID NO: 170487 - DNA, 15 bp, Homo sapiens
ttcatagactcatat

SEQ ID NO: 170488 - DNA, 15 bp, Homo sapiens
tttcatagactcata

SEQ ID NO: 170489 - DNA, 15 bp, Homo sapiens
ttttcatagactcat

SEQ ID NO: 170490 - DNA, 15 bp, Homo sapiens
tttttcatagactca

SEQ ID NO: 170491 - DNA, 15 bp, Homo sapiens
ttttttcatagactc

SEQ ID NO: 170492 - DNA, 15 bp, Homo sapiens
attttttcatagact

SEQ ID NO: 170493 - DNA, 15 bp, Homo sapiens
aattttttcatagac

SEQ ID NO: 170494 - DNA, 15 bp, Homo sapiens
aaattttttcataga

SEQ ID NO: 170495 - DNA, 15 bp, Homo sapiens
taaattttttcatag

SEQ ID NO: 170496 - DNA, 15 bp, Homo sapiens
ttaaattttttcata

SEQ ID NO: 170497 - DNA, 15 bp, Homo sapiens
attaaattttttcat

SEQ ID NO: 170498 - DNA, 15 bp, Homo sapiens
aattaaattttttca

SEQ ID NO: 170499 - DNA, 15 bp, Homo sapiens
taattaaattttttc

SEQ ID NO: 170500 - DNA, 15 bp, Homo sapiens
ctaattaaatttttt

SEQ ID NO: 170501 - DNA, 15 bp, Homo sapiens
cctaattaaattttt

SEQ ID NO: 170502 - DNA, 15 bp, Homo sapiens
tcctaattaaatttt

SEQ ID NO: 170503 - DNA, 15 bp, Homo sapiens
ttcctaattaaattt

SEQ ID NO: 170504 - DNA, 15 bp, Homo sapiens
cttcctaattaaatt

SEQ ID NO: 170505 - DNA, 15 bp, Homo sapiens
tcttcctaattaaat

SEQ ID NO: 170506 - DNA, 15 bp, Homo sapiens
atcttcctaattaaa

SEQ ID NO: 170507 - DNA, 15 bp, Homo sapiens
tatcttcctaattaa

SEQ ID NO: 170508 - DNA, 15 bp, Homo sapiens
ttatcttcctaatta

SEQ ID NO: 170509 - DNA, 15 bp, Homo sapiens
tttatcttcctaatt

SEQ ID NO: 170510 - DNA, 15 bp, Homo sapiens
atttatcttcctaat

SEQ ID NO: 170511 - DNA, 15 bp, Homo sapiens
aatttatcttcctaa

SEQ ID NO: 170512 - DNA, 15 bp, Homo sapiens
caatttatcttccta

SEQ ID NO: 170513 - DNA, 15 bp, Homo sapiens
tcaatttatcttcct

SEQ ID NO: 170514 - DNA, 15 bp, Homo sapiens
ttcaatttatcttcc

SEQ ID NO: 170515 - DNA, 15 bp, Homo sapiens
tttcaatttatcttc

SEQ ID NO: 170516 - DNA, 15 bp, Homo sapiens
ttttcaatttatctt

SEQ ID NO: 170517 - DNA, 15 bp, Homo sapiens
tttttcaatttatct

SEQ ID NO: 170518 - DNA, 15 bp, Homo sapiens
atttttcaatttatc

SEQ ID NO: 170519 - DNA, 15 bp, Homo sapiens
catttttcaatttat

SEQ ID NO: 170520 - DNA, 15 bp, Homo sapiens
gcatttttcaattta

SEQ ID NO: 170521 - DNA, 15 bp, Homo sapiens
tgcatttttcaattt

SEQ ID NO: 170522 - DNA, 15 bp, Homo sapiens
atgcatttttcaatt

SEQ ID NO: 170523 - DNA, 15 bp, Homo sapiens
tatgcatttttcaat

SEQ ID NO: 170524 - DNA, 15 bp, Homo sapiens
atatgcatttttcaa

SEQ ID NO: 170525 - DNA, 15 bp, Homo sapiens
tatatgcatttttca

SEQ ID NO: 170526 - DNA, 15 bp, Homo sapiens
ttatatgcatttttc

SEQ ID NO: 170527 - DNA, 15 bp, Homo sapiens
attatatgcattttt

SEQ ID NO: 170528 - DNA, 15 bp, Homo sapiens
tattatatgcatttt

SEQ ID NO: 170529 - DNA, 15 bp, Homo sapiens
gtattatatgcattt

SEQ ID NO: 170530 - DNA, 15 bp, Homo sapiens
tgtattatatgcatt

SEQ ID NO: 170531 - DNA, 15 bp, Homo sapiens
atgtattatatgcat

SEQ ID NO: 170532 - DNA, 15 bp, Homo sapiens
aatgtattatatgca

SEQ ID NO: 170533 - DNA, 15 bp, Homo sapiens
aaatgtattatatgc

SEQ ID NO: 170534 - DNA, 15 bp, Homo sapiens
gaaatgtattatatg

SEQ ID NO: 170535 - DNA, 15 bp, Homo sapiens
ggaaatgtattatat

SEQ ID NO: 170536 - DNA, 15 bp, Homo sapiens
cggaaatgtattata

SEQ ID NO: 170537 - DNA, 15 bp, Homo sapiens
acggaaatgtattat

SEQ ID NO: 170538 - DNA, 15 bp, Homo sapiens
cacggaaatgtatta

SEQ ID NO: 170539 - DNA, 15 bp, Homo sapiens
acacggaaatgtatt

SEQ ID NO: 170540 - DNA, 15 bp, Homo sapiens
gacacggaaatgtat

SEQ ID NO: 170541 - DNA, 15 bp, Homo sapiens
tgacacggaaatgta

SEQ ID NO: 170542 - DNA, 15 bp, Homo sapiens
ctgacacggaaatgt

SEQ ID NO: 170543 - DNA, 15 bp, Homo sapiens
tctgacacggaaatg

SEQ ID NO: 170544 - DNA, 15 bp, Homo sapiens
gtctgacacggaaat

SEQ ID NO: 170545 - DNA, 15 bp, Homo sapiens
tgtctgacacggaaa

SEQ ID NO: 170546 - DNA, 15 bp, Homo sapiens
atgtctgacacggaa

SEQ ID NO: 170547 - DNA, 15 bp, Homo sapiens
tatgtctgacacgga

SEQ ID NO: 170548 - DNA, 15 bp, Homo sapiens
ttatgtctgacacgg

SEQ ID NO: 170549 - DNA, 15 bp, Homo sapiens
tttatgtctgacacg

SEQ ID NO: 170550 - DNA, 15 bp, Homo sapiens
atttatgtctgacac

SEQ ID NO: 170551 - DNA, 15 bp, Homo sapiens
aatttatgtctgaca

SEQ ID NO: 170552 - DNA, 15 bp, Homo sapiens
taatttatgtctgac

SEQ ID NO: 170553 - DNA, 15 bp, Homo sapiens
gtaatttatgtctga

SEQ ID NO: 170554 - DNA, 15 bp, Homo sapiens
agtaatttatgtctg

SEQ ID NO: 170555 - DNA, 15 bp, Homo sapiens
aagtaatttatgtct

SEQ ID NO: 170556 - DNA, 15 bp, Homo sapiens
aaagtaatttatgtc

SEQ ID NO: 170557 - DNA, 15 bp, Homo sapiens
taaagtaatttatgt

SEQ ID NO: 170558 - DNA, 15 bp, Homo sapiens
ataaagtaatttatg

SEQ ID NO: 170559 - DNA, 15 bp, Homo sapiens
gataaagtaatttat

SEQ ID NO: 170560 - DNA, 15 bp, Homo sapiens
ggataaagtaattta

SEQ ID NO: 170561 - DNA, 15 bp, Homo sapiens
tggataaagtaattt

SEQ ID NO: 170562 - DNA, 15 bp, Homo sapiens
gtggataaagtaatt

SEQ ID NO: 170563 - DNA, 15 bp, Homo sapiens
tgtggataaagtaat

SEQ ID NO: 170564 - DNA, 15 bp, Homo sapiens
gtgtggataaagtaa

SEQ ID NO: 170565 - DNA, 15 bp, Homo sapiens
ggtgtggataaagta

SEQ ID NO: 170566 - DNA, 15 bp, Homo sapiens
tggtgtggataaagt

SEQ ID NO: 170567 - DNA, 15 bp, Homo sapiens
gtggtgtggataaag

SEQ ID NO: 170568 - DNA, 15 bp, Homo sapiens
agtggtgtggataaa

SEQ ID NO: 170569 - DNA, 15 bp, Homo sapiens
cagtggtgtggataa

SEQ ID NO: 170570 - DNA, 15 bp, Homo sapiens
gcagtggtgtggata

SEQ ID NO: 170571 - DNA, 15 bp, Homo sapiens
tgcagtggtgtggat

SEQ ID NO: 170572 - DNA, 15 bp, Homo sapiens
gtgcagtggtgtgga

SEQ ID NO: 170573 - DNA, 15 bp, Homo sapiens
ggtgcagtggtgtgg

SEQ ID NO: 170574 - DNA, 15 bp, Homo sapiens
gggtgcagtggtgtg

SEQ ID NO: 170575 - DNA, 15 bp, Homo sapiens
ggggtgcagtggtgt

SEQ ID NO: 170576 - DNA, 15 bp, Homo sapiens
aggggtgcagtggtg

SEQ ID NO: 170577 - DNA, 15 bp, Homo sapiens
gaggggtgcagtggt

SEQ ID NO: 170578 - DNA, 15 bp, Homo sapiens
ggaggggtgcagtgg

SEQ ID NO: 170579 - DNA, 15 bp, Homo sapiens
tggaggggtgcagtg

SEQ ID NO: 170580 - DNA, 15 bp, Homo sapiens
ctggaggggtgcagt

SEQ ID NO: 170581 - DNA, 15 bp, Homo sapiens
actggaggggtgcag

SEQ ID NO: 170582 - DNA, 15 bp, Homo sapiens
aactggaggggtgca

SEQ ID NO: 170583 - DNA, 15 bp, Homo sapiens
taactggaggggtgc

SEQ ID NO: 170584 - DNA, 15 bp, Homo sapiens
ttaactggaggggtg

SEQ ID NO: 170585 - DNA, 15 bp, Homo sapiens
gttaactggaggggt

SEQ ID NO: 170586 - DNA, 15 bp, Homo sapiens
ggttaactggagggg

SEQ ID NO: 170587 - DNA, 15 bp, Homo sapiens
gggttaactggaggg

SEQ ID NO: 170588 - DNA, 15 bp, Homo sapiens
tgggttaactggagg

SEQ ID NO: 170589 - DNA, 15 bp, Homo sapiens
ctgggttaactggag

SEQ ID NO: 170590 - DNA, 15 bp, Homo sapiens
cctgggttaactgga

SEQ ID NO: 170591 - DNA, 15 bp, Homo sapiens
ccctgggttaactgg

SEQ ID NO: 170592 - DNA, 15 bp, Homo sapiens
tccctgggttaactg

SEQ ID NO: 170593 - DNA, 15 bp, Homo sapiens
ctccctgggttaact

SEQ ID NO: 170594 - DNA, 15 bp, Homo sapiens
actccctgggttaac

SEQ ID NO: 170595 - DNA, 15 bp, Homo sapiens
aactccctgggttaa

SEQ ID NO: 170596 - DNA, 15 bp, Homo sapiens
caactccctgggtta

SEQ ID NO: 170597 - DNA, 15 bp, Homo sapiens
ccaactccctgggtt

SEQ ID NO: 170598 - DNA, 15 bp, Homo sapiens
cccaactccctgggt

SEQ ID NO: 170599 - DNA, 15 bp, Homo sapiens
tcccaactccctggg

SEQ ID NO: 170600 - DNA, 15 bp, Homo sapiens
ctcccaactccctgg

SEQ ID NO: 170601 - DNA, 15 bp, Homo sapiens
actcccaactccctg

SEQ ID NO: 170602 - DNA, 15 bp, Homo sapiens
aactcccaactccct

SEQ ID NO: 170603 - DNA, 15 bp, Homo sapiens
caactcccaactccc

SEQ ID NO: 170604 - DNA, 15 bp, Homo sapiens
acaactcccaactcc

SEQ ID NO: 170605 - DNA, 15 bp, Homo sapiens
gacaactcccaactc

SEQ ID NO: 170606 - DNA, 15 bp, Homo sapiens
agacaactcccaact

SEQ ID NO: 170607 - DNA, 15 bp, Homo sapiens
cagacaactcccaac

SEQ ID NO: 170608 - DNA, 15 bp, Homo sapiens
acagacaactcccaa

SEQ ID NO: 170609 - DNA, 15 bp, Homo sapiens
cacagacaactccca

SEQ ID NO: 170610 - DNA, 15 bp, Homo sapiens
ccacagacaactccc

SEQ ID NO: 170611 - DNA, 15 bp, Homo sapiens
cccacagacaactcc

SEQ ID NO: 170612 - DNA, 15 bp, Homo sapiens
tcccacagacaactc

SEQ ID NO: 170613 - DNA, 15 bp, Homo sapiens
atcccacagacaact

SEQ ID NO: 170614 - DNA, 15 bp, Homo sapiens
catcccacagacaac

SEQ ID NO: 170615 - DNA, 15 bp, Homo sapiens
tcatcccacagacaa

SEQ ID NO: 170616 - DNA, 15 bp, Homo sapiens
ttcatcccacagaca

SEQ ID NO: 170617 - DNA, 15 bp, Homo sapiens
tttcatcccacagac

SEQ ID NO: 170618 - DNA, 15 bp, Homo sapiens
gtttcatcccacaga

SEQ ID NO: 170619 - DNA, 15 bp, Homo sapiens
ggtttcatcccacag

SEQ ID NO: 170620 - DNA, 15 bp, Homo sapiens
gggtttcatcccaca

SEQ ID NO: 170621 - DNA, 15 bp, Homo sapiens
agggtttcatcccac

SEQ ID NO: 170622 - DNA, 15 bp, Homo sapiens
gagggtttcatccca

SEQ ID NO: 170623 - DNA, 15 bp, Homo sapiens
agagggtttcatccc

SEQ ID NO: 170624 - DNA, 15 bp, Homo sapiens
aagagggtttcatcc

SEQ ID NO: 170625 - DNA, 15 bp, Homo sapiens
taagagggtttcatc

SEQ ID NO: 170626 - DNA, 15 bp, Homo sapiens
ctaagagggtttcat

SEQ ID NO: 170627 - DNA, 15 bp, Homo sapiens
cctaagagggtttca

SEQ ID NO: 170628 - DNA, 15 bp, Homo sapiens
tcctaagagggtttc

SEQ ID NO: 170629 - DNA, 15 bp, Homo sapiens
ctcctaagagggttt

SEQ ID NO: 170630 - DNA, 15 bp, Homo sapiens
tctcctaagagggtt

SEQ ID NO: 170631 - DNA, 15 bp, Homo sapiens
atctcctaagagggt

SEQ ID NO: 170632 - DNA, 15 bp, Homo sapiens
aatctcctaagaggg

SEQ ID NO: 170633 - DNA, 15 bp, Homo sapiens
aaatctcctaagagg

SEQ ID NO: 170634 - DNA, 15 bp, Homo sapiens
aaaatctcctaagag

SEQ ID NO: 170635 - DNA, 15 bp, Homo sapiens
gaaaatctcctaaga

SEQ ID NO: 170636 - DNA, 15 bp, Homo sapiens
ggaaaatctcctaag

SEQ ID NO: 170637 - DNA, 15 bp, Homo sapiens
cggaaaatctcctaa

SEQ ID NO: 170638 - DNA, 15 bp, Homo sapiens
ccggaaaatctccta

SEQ ID NO: 170639 - DNA, 15 bp, Homo sapiens
tccggaaaatctcct

SEQ ID NO: 170640 - DNA, 15 bp, Homo sapiens
ctccggaaaatctcc

SEQ ID NO: 170641 - DNA, 15 bp, Homo sapiens
cctccggaaaatctc

SEQ ID NO: 170642 - DNA, 15 bp, Homo sapiens
tcctccggaaaatct

SEQ ID NO: 170643 - DNA, 15 bp, Homo sapiens
ttcctccggaaaatc

SEQ ID NO: 170644 - DNA, 15 bp, Homo sapiens
gttcctccggaaaat

SEQ ID NO: 170645 - DNA, 15 bp, Homo sapiens
ggttcctccggaaaa

SEQ ID NO: 170646 - DNA, 15 bp, Homo sapiens
gggttcctccggaaa

SEQ ID NO: 170647 - DNA, 15 bp, Homo sapiens
tgggttcctccggaa

SEQ ID NO: 170648 - DNA, 15 bp, Homo sapiens
ttgggttcctccgga

SEQ ID NO: 170649 - DNA, 15 bp, Homo sapiens
gttgggttcctccgg

SEQ ID NO: 170650 - DNA, 15 bp, Homo sapiens
agttgggttcctccg

SEQ ID NO: 170651 - DNA, 15 bp, Homo sapiens
tagttgggttcctcc

SEQ ID NO: 170652 - DNA, 15 bp, Homo sapiens
atagttgggttcctc

SEQ ID NO: 170653 - DNA, 15 bp, Homo sapiens
aatagttgggttcct

SEQ ID NO: 170654 - DNA, 15 bp, Homo sapiens
taatagttgggttcc

SEQ ID NO: 170655 - DNA, 15 bp, Homo sapiens
ctaatagttgggttc

SEQ ID NO: 170656 - DNA, 15 bp, Homo sapiens
cctaatagttgggtt

SEQ ID NO: 170657 - DNA, 15 bp, Homo sapiens
tcctaatagttgggt

SEQ ID NO: 170658 - DNA, 15 bp, Homo sapiens
ttcctaatagttggg

SEQ ID NO: 170659 - DNA, 15 bp, Homo sapiens
gttcctaatagttgg

SEQ ID NO: 170660 - DNA, 15 bp, Homo sapiens
agttcctaatagttg

SEQ ID NO: 170661 - DNA, 15 bp, Homo sapiens
gagttcctaatagtt

SEQ ID NO: 170662 - DNA, 15 bp, Homo sapiens
ggagttcctaatagt

SEQ ID NO: 170663 - DNA, 15 bp, Homo sapiens
aggagttcctaatag

SEQ ID NO: 170664 - DNA, 15 bp, Homo sapiens
aaggagttcctaata

SEQ ID NO: 170665 - DNA, 15 bp, Homo sapiens
gaaggagttcctaat

SEQ ID NO: 170666 - DNA, 15 bp, Homo sapiens
tgaaggagttcctaa

SEQ ID NO: 170667 - DNA, 15 bp, Homo sapiens
ttgaaggagttccta

SEQ ID NO: 170668 - DNA, 15 bp, Homo sapiens
tttgaaggagttcct

SEQ ID NO: 170669 - DNA, 15 bp, Homo sapiens
ctttgaaggagttcc

SEQ ID NO: 170670 - DNA, 15 bp, Homo sapiens
gctttgaaggagttc

SEQ ID NO: 170671 - DNA, 15 bp, Homo sapiens
tgctttgaaggagtt

SEQ ID NO: 170672 - DNA, 15 bp, Homo sapiens
ctgctttgaaggagt

SEQ ID NO: 170673 - DNA, 15 bp, Homo sapiens
tctgctttgaaggag

SEQ ID NO: 170674 - DNA, 15 bp, Homo sapiens
ttctgctttgaagga

SEQ ID NO: 170675 - DNA, 15 bp, Homo sapiens
gttctgctttgaagg

SEQ ID NO: 170676 - DNA, 15 bp, Homo sapiens
agttctgctttgaag

SEQ ID NO: 170677 - DNA, 15 bp, Homo sapiens
aagttctgctttgaa

SEQ ID NO: 170678 - DNA, 15 bp, Homo sapiens
taagttctgctttga

SEQ ID NO: 170679 - DNA, 15 bp, Homo sapiens
ttaagttctgctttg

SEQ ID NO: 170680 - DNA, 15 bp, Homo sapiens
tttaagttctgcttt

SEQ ID NO: 170681 - DNA, 15 bp, Homo sapiens
atttaagttctgctt

SEQ ID NO: 170682 - DNA, 15 bp, Homo sapiens
catttaagttctgct

SEQ ID NO: 170683 - DNA, 15 bp, Homo sapiens
tcatttaagttctgc

SEQ ID NO: 170684 - DNA, 15 bp, Homo sapiens
atcatttaagttctg

SEQ ID NO: 170685 - DNA, 15 bp, Homo sapiens
tatcatttaagttct

SEQ ID NO: 170686 - DNA, 15 bp, Homo sapiens
ctatcatttaagttc

SEQ ID NO: 170687 - DNA, 15 bp, Homo sapiens
gctatcatttaagtt

SEQ ID NO: 170688 - DNA, 15 bp, Homo sapiens
tgctatcatttaagt

SEQ ID NO: 170689 - DNA, 15 bp, Homo sapiens
atgctatcatttaag

SEQ ID NO: 170690 - DNA, 15 bp, Homo sapiens
tatgctatcatttaa

SEQ ID NO: 170691 - DNA, 15 bp, Homo sapiens
atatgctatcattta

SEQ ID NO: 170692 - DNA, 15 bp, Homo sapiens
tatatgctatcattt

SEQ ID NO: 170693 - DNA, 15 bp, Homo sapiens
ctatatgctatcatt

SEQ ID NO: 170694 - DNA, 15 bp, Homo sapiens
actatatgctatcat

SEQ ID NO: 170695 - DNA, 15 bp, Homo sapiens
aactatatgctatca

SEQ ID NO: 170696 - DNA, 15 bp, Homo sapiens
taactatatgctatc

SEQ ID NO: 170697 - DNA, 15 bp, Homo sapiens
ttaactatatgctat

SEQ ID NO: 170698 - DNA, 15 bp, Homo sapiens
cttaactatatgcta

SEQ ID NO: 170699 - DNA, 15 bp, Homo sapiens
acttaactatatgct

SEQ ID NO: 170700 - DNA, 15 bp, Homo sapiens
tacttaactatatgc

SEQ ID NO: 170701 - DNA, 15 bp, Homo sapiens
gtacttaactatatg

SEQ ID NO: 170702 - DNA, 15 bp, Homo sapiens
tgtacttaactatat

SEQ ID NO: 170703 - DNA, 15 bp, Homo sapiens
atgtacttaactata

SEQ ID NO: 170704 - DNA, 15 bp, Homo sapiens
tatgtacttaactat

SEQ ID NO: 170705 - DNA, 15 bp, Homo sapiens
atatgtacttaacta

SEQ ID NO: 170706 - DNA, 15 bp, Homo sapiens
aatatgtacttaact

SEQ ID NO: 170707 - DNA, 15 bp, Homo sapiens
taatatgtacttaac

SEQ ID NO: 170708 - DNA, 15 bp, Homo sapiens
ctaatatgtacttaa

SEQ ID NO: 170709 - DNA, 15 bp, Homo sapiens
tctaatatgtactta

SEQ ID NO: 170710 - DNA, 15 bp, Homo sapiens
ttctaatatgtactt

SEQ ID NO: 170711 - DNA, 15 bp, Homo sapiens
tttctaatatgtact

SEQ ID NO: 170712 - DNA, 15 bp, Homo sapiens
gtttctaatatgtac

SEQ ID NO: 170713 - DNA, 15 bp, Homo sapiens
agtttctaatatgta

SEQ ID NO: 170714 - DNA, 15 bp, Homo sapiens
aagtttctaatatgt

SEQ ID NO: 170715 - DNA, 15 bp, Homo sapiens
gaagtttctaatatg

SEQ ID NO: 170716 - DNA, 15 bp, Homo sapiens
tgaagtttctaatat

SEQ ID NO: 170717 - DNA, 15 bp, Homo sapiens
atgaagtttctaata

SEQ ID NO: 170718 - DNA, 15 bp, Homo sapiens
catgaagtttctaat

SEQ ID NO: 170719 - DNA, 15 bp, Homo sapiens
tcatgaagtttctaa

SEQ ID NO: 170720 - DNA, 15 bp, Homo sapiens
atcatgaagtttcta

SEQ ID NO: 170721 - DNA, 15 bp, Homo sapiens
aatcatgaagtttct

SEQ ID NO: 170722 - DNA, 15 bp, Homo sapiens
gaatcatgaagtttc

SEQ ID NO: 170723 - DNA, 15 bp, Homo sapiens
ggaatcatgaagttt

SEQ ID NO: 170724 - DNA, 15 bp, Homo sapiens
tggaatcatgaagtt

SEQ ID NO: 170725 - DNA, 15 bp, Homo sapiens
atggaatcatgaagt

SEQ ID NO: 170726 - DNA, 15 bp, Homo sapiens
aatggaatcatgaag

SEQ ID NO: 170727 - DNA, 15 bp, Homo sapiens
aaatggaatcatgaa

SEQ ID NO: 170728 - DNA, 15 bp, Homo sapiens
taaatggaatcatga

SEQ ID NO: 170729 - DNA, 15 bp, Homo sapiens
ttaaatggaatcatg

SEQ ID NO: 170730 - DNA, 15 bp, Homo sapiens
tttaaatggaatcat

SEQ ID NO: 170731 - DNA, 15 bp, Homo sapiens
gtttaaatggaatca

SEQ ID NO: 170732 - DNA, 15 bp, Homo sapiens
agtttaaatggaatc

SEQ ID NO: 170733 - DNA, 15 bp, Homo sapiens
tagtttaaatggaat

SEQ ID NO: 170734 - DNA, 15 bp, Homo sapiens
ttagtttaaatggaa

SEQ ID NO: 170735 - DNA, 15 bp, Homo sapiens
attagtttaaatgga

SEQ ID NO: 170736 - DNA, 15 bp, Homo sapiens
gattagtttaaatgg

SEQ ID NO: 170737 - DNA, 15 bp, Homo sapiens
tgattagtttaaatg

SEQ ID NO: 170738 - DNA, 15 bp, Homo sapiens
atgattagtttaaat

SEQ ID NO: 170739 - DNA, 15 bp, Homo sapiens
aatgattagtttaaa

SEQ ID NO: 170740 - DNA, 15 bp, Homo sapiens
gaatgattagtttaa

SEQ ID NO: 170741 - DNA, 15 bp, Homo sapiens
tgaatgattagttta

SEQ ID NO: 170742 - DNA, 15 bp, Homo sapiens
ctgaatgattagttt

SEQ ID NO: 170743 - DNA, 15 bp, Homo sapiens
actgaatgattagtt

SEQ ID NO: 170744 - DNA, 15 bp, Homo sapiens
cactgaatgattagt

SEQ ID NO: 170745 - DNA, 15 bp, Homo sapiens
tcactgaatgattag

SEQ ID NO: 170746 - DNA, 15 bp, Homo sapiens
gtcactgaatgatta

SEQ ID NO: 170747 - DNA, 15 bp, Homo sapiens
agtcactgaatgatt

SEQ ID NO: 170748 - DNA, 15 bp, Homo sapiens
aagtcactgaatgat

SEQ ID NO: 170749 - DNA, 15 bp, Homo sapiens
gaagtcactgaatga

SEQ ID NO: 170750 - DNA, 15 bp, Homo sapiens
tgaagtcactgaatg

SEQ ID NO: 170751 - DNA, 15 bp, Homo sapiens
atgaagtcactgaat

SEQ ID NO: 170752 - DNA, 15 bp, Homo sapiens
gatgaagtcactgaa

SEQ ID NO: 170753 - DNA, 15 bp, Homo sapiens
cgatgaagtcactga

SEQ ID NO: 170754 - DNA, 15 bp, Homo sapiens
acgatgaagtcactg

SEQ ID NO: 170755 - DNA, 15 bp, Homo sapiens
cacgatgaagtcact

SEQ ID NO: 170756 - DNA, 15 bp, Homo sapiens
ccacgatgaagtcac

SEQ ID NO: 170757 - DNA, 15 bp, Homo sapiens
cccacgatgaagtca

SEQ ID NO: 170758 - DNA, 15 bp, Homo sapiens
acccacgatgaagtc

SEQ ID NO: 170759 - DNA, 15 bp, Homo sapiens
gacccacgatgaagt

SEQ ID NO: 170760 - DNA, 15 bp, Homo sapiens
tgacccacgatgaag

SEQ ID NO: 170761 - DNA, 15 bp, Homo sapiens
ctgacccacgatgaa

SEQ ID NO: 170762 - DNA, 15 bp, Homo sapiens
tctgacccacgatga

SEQ ID NO: 170763 - DNA, 15 bp, Homo sapiens
ttctgacccacgatg

SEQ ID NO: 170764 - DNA, 15 bp, Homo sapiens
tttctgacccacgat

SEQ ID NO: 170765 - DNA, 15 bp, Homo sapiens
ttttctgacccacga

SEQ ID NO: 170766 - DNA, 15 bp, Homo sapiens
tttttctgacccacg

SEQ ID NO: 170767 - DNA, 15 bp, Homo sapiens
ttttttctgacccac

SEQ ID NO: 170768 - DNA, 15 bp, Homo sapiens
attttttctgaccca

SEQ ID NO: 170769 - DNA, 15 bp, Homo sapiens
tattttttctgaccc

SEQ ID NO: 170770 - DNA, 15 bp, Homo sapiens
atattttttctgacc

SEQ ID NO: 170771 - DNA, 15 bp, Homo sapiens
catattttttctgac

SEQ ID NO: 170772 - DNA, 15 bp, Homo sapiens
gcatattttttctga

SEQ ID NO: 170773 - DNA, 15 bp, Homo sapiens
agcatattttttctg

SEQ ID NO: 170774 - DNA, 15 bp, Homo sapiens
gagcatattttttct

SEQ ID NO: 170775 - DNA, 15 bp, Homo sapiens
agagcatattttttc

SEQ ID NO: 170776 - DNA, 15 bp, Homo sapiens
gagagcatatttttt

SEQ ID NO: 170777 - DNA, 15 bp, Homo sapiens
agagagcatattttt

SEQ ID NO: 170778 - DNA, 15 bp, Homo sapiens
aagagagcatatttt

SEQ ID NO: 170779 - DNA, 15 bp, Homo sapiens
gaagagagcatattt

SEQ ID NO: 170780 - DNA, 15 bp, Homo sapiens
agaagagagcatatt

SEQ ID NO: 170781 - DNA, 15 bp, Homo sapiens
gagaagagagcatat

SEQ ID NO: 170782 - DNA, 15 bp, Homo sapiens
cgagaagagagcata

SEQ ID NO: 170783 - DNA, 15 bp, Homo sapiens
ccgagaagagagcat

SEQ ID NO: 170784 - DNA, 15 bp, Homo sapiens
accgagaagagagca

SEQ ID NO: 170785 - DNA, 15 bp, Homo sapiens
taccgagaagagagc

SEQ ID NO: 170786 - DNA, 15 bp, Homo sapiens
gtaccgagaagagag

SEQ ID NO: 170787 - DNA, 15 bp, Homo sapiens
tgtaccgagaagaga

SEQ ID NO: 170788 - DNA, 15 bp, Homo sapiens
atgtaccgagaagag

SEQ ID NO: 170789 - DNA, 15 bp, Homo sapiens
aatgtaccgagaaga

SEQ ID NO: 170790 - DNA, 15 bp, Homo sapiens
aaatgtaccgagaag

SEQ ID NO: 170791 - DNA, 15 bp, Homo sapiens
aaaatgtaccgagaa

SEQ ID NO: 170792 - DNA, 15 bp, Homo sapiens
caaaatgtaccgaga

SEQ ID NO: 170793 - DNA, 15 bp, Homo sapiens
gcaaaatgtaccgag

SEQ ID NO: 170794 - DNA, 15 bp, Homo sapiens
tgcaaaatgtaccga

SEQ ID NO: 170795 - DNA, 15 bp, Homo sapiens
gtgcaaaatgtaccg

SEQ ID NO: 170796 - DNA, 15 bp, Homo sapiens
ggtgcaaaatgtacc

SEQ ID NO: 170797 - DNA, 15 bp, Homo sapiens
aggtgcaaaatgtac

SEQ ID NO: 170798 - DNA, 15 bp, Homo sapiens
caggtgcaaaatgta

SEQ ID NO: 170799 - DNA, 15 bp, Homo sapiens
gcaggtgcaaaatgt

SEQ ID NO: 170800 - DNA, 15 bp, Homo sapiens
tgcaggtgcaaaatg

SEQ ID NO: 170801 - DNA, 15 bp, Homo sapiens
ctgcaggtgcaaaat

SEQ ID NO: 170802 - DNA, 15 bp, Homo sapiens
tctgcaggtgcaaaa

SEQ ID NO: 170803 - DNA, 15 bp, Homo sapiens
ttctgcaggtgcaaa

SEQ ID NO: 170804 - DNA, 15 bp, Homo sapiens
cttctgcaggtgcaa

SEQ ID NO: 170805 - DNA, 15 bp, Homo sapiens
ccttctgcaggtgca

SEQ ID NO: 170806 - DNA, 15 bp, Homo sapiens
tccttctgcaggtgc

SEQ ID NO: 170807 - DNA, 15 bp, Homo sapiens
atccttctgcaggtg

SEQ ID NO: 170808 - DNA, 15 bp, Homo sapiens
gatccttctgcaggt

SEQ ID NO: 170809 - DNA, 15 bp, Homo sapiens
tgatccttctgcagg

SEQ ID NO: 170810 - DNA, 15 bp, Homo sapiens
gtgatccttctgcag

SEQ ID NO: 170811 - DNA, 15 bp, Homo sapiens
agtgatccttctgca

SEQ ID NO: 170812 - DNA, 15 bp, Homo sapiens
aagtgatccttctgc

SEQ ID NO: 170813 - DNA, 15 bp, Homo sapiens
caagtgatccttctg

SEQ ID NO: 170814 - DNA, 15 bp, Homo sapiens
ccaagtgatccttct

SEQ ID NO: 170815 - DNA, 15 bp, Homo sapiens
cccaagtgatccttc

SEQ ID NO: 170816 - DNA, 15 bp, Homo sapiens
ccccaagtgatcctt

SEQ ID NO: 170817 - DNA, 15 bp, Homo sapiens
tccccaagtgatcct

SEQ ID NO: 170818 - DNA, 15 bp, Homo sapiens
ctccccaagtgatcc

SEQ ID NO: 170819 - DNA, 15 bp, Homo sapiens
cctccccaagtgatc

SEQ ID NO: 170820 - DNA, 15 bp, Homo sapiens
tcctccccaagtgat

SEQ ID NO: 170821 - DNA, 15 bp, Homo sapiens
ttcctccccaagtga

SEQ ID NO: 170822 - DNA, 15 bp, Homo sapiens
cttcctccccaagtg

SEQ ID NO: 170823 - DNA, 15 bp, Homo sapiens
tcttcctccccaagt

SEQ ID NO: 170824 - DNA, 15 bp, Homo sapiens
ttcttcctccccaag

SEQ ID NO: 170825 - DNA, 15 bp, Homo sapiens
cttcttcctccccaa

SEQ ID NO: 170826 - DNA, 15 bp, Homo sapiens
tcttcttcctcccca

SEQ ID NO: 170827 - DNA, 15 bp, Homo sapiens
atcttcttcctcccc

SEQ ID NO: 170828 - DNA, 15 bp, Homo sapiens
catcttcttcctccc

SEQ ID NO: 170829 - DNA, 15 bp, Homo sapiens
ccatcttcttcctcc

SEQ ID NO: 170830 - DNA, 15 bp, Homo sapiens
cccatcttcttcctc

SEQ ID NO: 170831 - DNA, 15 bp, Homo sapiens
ccccatcttcttcct

SEQ ID NO: 170832 - DNA, 15 bp, Homo sapiens
accccatcttcttcc

SEQ ID NO: 170833 - DNA, 15 bp, Homo sapiens
taccccatcttcttc

SEQ ID NO: 170834 - DNA, 15 bp, Homo sapiens
ctaccccatcttctt

SEQ ID NO: 170835 - DNA, 15 bp, Homo sapiens
tctaccccatcttct

SEQ ID NO: 170836 - DNA, 15 bp, Homo sapiens
atctaccccatcttc

SEQ ID NO: 170837 - DNA, 15 bp, Homo sapiens
catctaccccatctt

SEQ ID NO: 170838 - DNA, 15 bp, Homo sapiens
tcatctaccccatct

SEQ ID NO: 170839 - DNA, 15 bp, Homo sapiens
ctcatctaccccatc

SEQ ID NO: 170840 - DNA, 15 bp, Homo sapiens
cctcatctaccccat

SEQ ID NO: 170841 - DNA, 15 bp, Homo sapiens
ccctcatctacccca

SEQ ID NO: 170842 - DNA, 15 bp, Homo sapiens
accctcatctacccc

SEQ ID NO: 170843 - DNA, 15 bp, Homo sapiens
gaccctcatctaccc

SEQ ID NO: 170844 - DNA, 15 bp, Homo sapiens
tgaccctcatctacc

SEQ ID NO: 170845 - DNA, 15 bp, Homo sapiens
gtgaccctcatctac

SEQ ID NO: 170846 - DNA, 15 bp, Homo sapiens
tgtgaccctcatcta

SEQ ID NO: 170847 - DNA, 15 bp, Homo sapiens
atgtgaccctcatct

SEQ ID NO: 170848 - DNA, 15 bp, Homo sapiens
catgtgaccctcatc

SEQ ID NO: 170849 - DNA, 15 bp, Homo sapiens
tcatgtgaccctcat

SEQ ID NO: 170850 - DNA, 15 bp, Homo sapiens
atcatgtgaccctca

SEQ ID NO: 170851 - DNA, 15 bp, Homo sapiens
aatcatgtgaccctc

SEQ ID NO: 170852 - DNA, 15 bp, Homo sapiens
aaatcatgtgaccct

SEQ ID NO: 170853 - DNA, 15 bp, Homo sapiens
aaaatcatgtgaccc

SEQ ID NO: 170854 - DNA, 15 bp, Homo sapiens
aaaaatcatgtgacc

SEQ ID NO: 170855 - DNA, 15 bp, Homo sapiens
caaaaatcatgtgac

SEQ ID NO: 170856 - DNA, 15 bp, Homo sapiens
acaaaaatcatgtga

SEQ ID NO: 170857 - DNA, 15 bp, Homo sapiens
gacaaaaatcatgtg

SEQ ID NO: 170858 - DNA, 15 bp, Homo sapiens
agacaaaaatcatgt

SEQ ID NO: 170859 - DNA, 15 bp, Homo sapiens
aagacaaaaatcatg

SEQ ID NO: 170860 - DNA, 15 bp, Homo sapiens
gaagacaaaaatcat

SEQ ID NO: 170861 - DNA, 15 bp, Homo sapiens
ggaagacaaaaatca

SEQ ID NO: 170862 - DNA, 15 bp, Homo sapiens
aggaagacaaaaatc

SEQ ID NO: 170863 - DNA, 15 bp, Homo sapiens
taggaagacaaaaat

SEQ ID NO: 170864 - DNA, 15 bp, Homo sapiens
ataggaagacaaaaa

SEQ ID NO: 170865 - DNA, 15 bp, Homo sapiens
cataggaagacaaaa

SEQ ID NO: 170866 - DNA, 15 bp, Homo sapiens
acataggaagacaaa

SEQ ID NO: 170867 - DNA, 15 bp, Homo sapiens
aacataggaagacaa

SEQ ID NO: 170868 - DNA, 15 bp, Homo sapiens
caacataggaagaca

SEQ ID NO: 170869 - DNA, 15 bp, Homo sapiens
ccaacataggaagac

SEQ ID NO: 170870 - DNA, 15 bp, Homo sapiens
tccaacataggaaga

SEQ ID NO: 170871 - DNA, 15 bp, Homo sapiens
ttccaacataggaag

SEQ ID NO: 170872 - DNA, 15 bp, Homo sapiens
cttccaacataggaa

SEQ ID NO: 170873 - DNA, 15 bp, Homo sapiens
tcttccaacatagga

SEQ ID NO: 170874 - DNA, 15 bp, Homo sapiens
gtcttccaacatagg

SEQ ID NO: 170875 - DNA, 15 bp, Homo sapiens
tgtcttccaacatag

SEQ ID NO: 170876 - DNA, 15 bp, Homo sapiens
ttgtcttccaacata

SEQ ID NO: 170877 - DNA, 15 bp, Homo sapiens
attgtcttccaacat

SEQ ID NO: 170878 - DNA, 15 bp, Homo sapiens
cattgtcttccaaca

SEQ ID NO: 170879 - DNA, 15 bp, Homo sapiens
gcattgtcttccaac

SEQ ID NO: 170880 - DNA, 15 bp, Homo sapiens
agcattgtcttccaa

SEQ ID NO: 170881 - DNA, 15 bp, Homo sapiens
aagcattgtcttcca

SEQ ID NO: 170882 - DNA, 15 bp, Homo sapiens
taagcattgtcttcc

SEQ ID NO: 170883 - DNA, 15 bp, Homo sapiens
ataagcattgtcttc

SEQ ID NO: 170884 - DNA, 15 bp, Homo sapiens
cataagcattgtctt

SEQ ID NO: 170885 - DNA, 15 bp, Homo sapiens
ccataagcattgtct

SEQ ID NO: 170886 - DNA, 15 bp, Homo sapiens
tccataagcattgtc

SEQ ID NO: 170887 - DNA, 15 bp, Homo sapiens
ttccataagcattgt

SEQ ID NO: 170888 - DNA, 15 bp, Homo sapiens
cttccataagcattg

SEQ ID NO: 170889 - DNA, 15 bp, Homo sapiens
ccttccataagcatt

SEQ ID NO: 170890 - DNA, 15 bp, Homo sapiens
cccttccataagcat

SEQ ID NO: 170891 - DNA, 15 bp, Homo sapiens
ccccttccataagca

SEQ ID NO: 170892 - DNA, 15 bp, Homo sapiens
tccccttccataagc

SEQ ID NO: 170893 - DNA, 15 bp, Homo sapiens
atccccttccataag

SEQ ID NO: 170894 - DNA, 15 bp, Homo sapiens
aatccccttccataa

SEQ ID NO: 170895 - DNA, 15 bp, Homo sapiens
taatccccttccata

SEQ ID NO: 170896 - DNA, 15 bp, Homo sapiens
ctaatccccttccat

SEQ ID NO: 170897 - DNA, 15 bp, Homo sapiens
tctaatccccttcca

SEQ ID NO: 170898 - DNA, 15 bp, Homo sapiens
gtctaatccccttcc

SEQ ID NO: 170899 - DNA, 15 bp, Homo sapiens
agtctaatccccttc

SEQ ID NO: 170900 - DNA, 15 bp, Homo sapiens
aagtctaatcccctt

SEQ ID NO: 170901 - DNA, 15 bp, Homo sapiens
aaagtctaatcccct

SEQ ID NO: 170902 - DNA, 15 bp, Homo sapiens
aaaagtctaatcccc

SEQ ID NO: 170903 - DNA, 15 bp, Homo sapiens
aaaaagtctaatccc

SEQ ID NO: 170904 - DNA, 15 bp, Homo sapiens
caaaaagtctaatcc

SEQ ID NO: 170905 - DNA, 15 bp, Homo sapiens
gcaaaaagtctaatc

SEQ ID NO: 170906 - DNA, 15 bp, Homo sapiens
agcaaaaagtctaat

SEQ ID NO: 170907 - DNA, 15 bp, Homo sapiens
cagcaaaaagtctaa

SEQ ID NO: 170908 - DNA, 15 bp, Homo sapiens
acagcaaaaagtcta

SEQ ID NO: 170909 - DNA, 15 bp, Homo sapiens
cacagcaaaaagtct

SEQ ID NO: 170910 - DNA, 15 bp, Homo sapiens
acacagcaaaaagtc

SEQ ID NO: 170911 - DNA, 15 bp, Homo sapiens
gacacagcaaaaagt

SEQ ID NO: 170912 - DNA, 15 bp, Homo sapiens
ggacacagcaaaaag

SEQ ID NO: 170913 - DNA, 15 bp, Homo sapiens
gggacacagcaaaaa

SEQ ID NO: 170914 - DNA, 15 bp, Homo sapiens
ggggacacagcaaaa

SEQ ID NO: 170915 - DNA, 15 bp, Homo sapiens
tggggacacagcaaa

SEQ ID NO: 170916 - DNA, 15 bp, Homo sapiens
ctggggacacagcaa

SEQ ID NO: 170917 - DNA, 15 bp, Homo sapiens
cctggggacacagca

SEQ ID NO: 170918 - DNA, 15 bp, Homo sapiens
ccctggggacacagc

SEQ ID NO: 170919 - DNA, 15 bp, Homo sapiens
tccctggggacacag

SEQ ID NO: 170920 - DNA, 15 bp, Homo sapiens
ctccctggggacaca

SEQ ID NO: 170921 - DNA, 15 bp, Homo sapiens
gctccctggggacac

SEQ ID NO: 170922 - DNA, 15 bp, Homo sapiens
tgctccctggggaca

SEQ ID NO: 170923 - DNA, 15 bp, Homo sapiens
ctgctccctggggac

SEQ ID NO: 170924 - DNA, 15 bp, Homo sapiens
tctgctccctgggga

SEQ ID NO: 170925 - DNA, 15 bp, Homo sapiens
ctctgctccctgggg

SEQ ID NO: 170926 - DNA, 15 bp, Homo sapiens
actctgctccctggg

SEQ ID NO: 170927 - DNA, 15 bp, Homo sapiens
gactctgctccctgg

SEQ ID NO: 170928 - DNA, 15 bp, Homo sapiens
tgactctgctccctg

SEQ ID NO: 170929 - DNA, 15 bp, Homo sapiens
ctgactctgctccct

SEQ ID NO: 170930 - DNA, 15 bp, Homo sapiens
actgactctgctccc

SEQ ID NO: 170931 - DNA, 15 bp, Homo sapiens
cactgactctgctcc

SEQ ID NO: 170932 - DNA, 15 bp, Homo sapiens
gcactgactctgctc

SEQ ID NO: 170933 - DNA, 15 bp, Homo sapiens
ggcactgactctgct

SEQ ID NO: 170934 - DNA, 15 bp, Homo sapiens
tggcactgactctgc

SEQ ID NO: 170935 - DNA, 15 bp, Homo sapiens
atggcactgactctg

SEQ ID NO: 170936 - DNA, 15 bp, Homo sapiens
aatggcactgactct

SEQ ID NO: 170937 - DNA, 15 bp, Homo sapiens
caatggcactgactc

SEQ ID NO: 170938 - DNA, 15 bp, Homo sapiens
ccaatggcactgact

SEQ ID NO: 170939 - DNA, 15 bp, Homo sapiens
accaatggcactgac

SEQ ID NO: 170940 - DNA, 15 bp, Homo sapiens
aaccaatggcactga

SEQ ID NO: 170941 - DNA, 15 bp, Homo sapiens
taaccaatggcactg

SEQ ID NO: 170942 - DNA, 15 bp, Homo sapiens
ctaaccaatggcact

SEQ ID NO: 170943 - DNA, 15 bp, Homo sapiens
tctaaccaatggcac

SEQ ID NO: 170944 - DNA, 15 bp, Homo sapiens
ttctaaccaatggca

SEQ ID NO: 170945 - DNA, 15 bp, Homo sapiens
cttctaaccaatggc

SEQ ID NO: 170946 - DNA, 15 bp, Homo sapiens
acttctaaccaatgg

SEQ ID NO: 170947 - DNA, 15 bp, Homo sapiens
aacttctaaccaatg

SEQ ID NO: 170948 - DNA, 15 bp, Homo sapiens
taacttctaaccaat

SEQ ID NO: 170949 - DNA, 15 bp, Homo sapiens
ataacttctaaccaa

SEQ ID NO: 170950 - DNA, 15 bp, Homo sapiens
tataacttctaacca

SEQ ID NO: 170951 - DNA, 15 bp, Homo sapiens
ctataacttctaacc

SEQ ID NO: 170952 - DNA, 15 bp, Homo sapiens
tctataacttctaac

SEQ ID NO: 170953 - DNA, 15 bp, Homo sapiens
ttctataacttctaa

SEQ ID NO: 170954 - DNA, 15 bp, Homo sapiens
tttctataacttcta

SEQ ID NO: 170955 - DNA, 15 bp, Homo sapiens
ttttctataacttct

SEQ ID NO: 170956 - DNA, 15 bp, Homo sapiens
cttttctataacttc

SEQ ID NO: 170957 - DNA, 15 bp, Homo sapiens
acttttctataactt

SEQ ID NO: 170958 - DNA, 15 bp, Homo sapiens
cacttttctataact

SEQ ID NO: 170959 - DNA, 15 bp, Homo sapiens
ccacttttctataac

SEQ ID NO: 170960 - DNA, 15 bp, Homo sapiens
tccacttttctataa

SEQ ID NO: 170961 - DNA, 15 bp, Homo sapiens
atccacttttctata

SEQ ID NO: 170962 - DNA, 15 bp, Homo sapiens
aatccacttttctat

SEQ ID NO: 170963 - DNA, 15 bp, Homo sapiens
aaatccacttttcta

SEQ ID NO: 170964 - DNA, 15 bp, Homo sapiens
caaatccacttttct

SEQ ID NO: 170965 - DNA, 15 bp, Homo sapiens
ccaaatccacttttc

SEQ ID NO: 170966 - DNA, 15 bp, Homo sapiens
cccaaatccactttt

SEQ ID NO: 170967 - DNA, 15 bp, Homo sapiens
ccccaaatccacttt

SEQ ID NO: 170968 - DNA, 15 bp, Homo sapiens
accccaaatccactt

SEQ ID NO: 170969 - DNA, 15 bp, Homo sapiens
gaccccaaatccact

SEQ ID NO: 170970 - DNA, 15 bp, Homo sapiens
tgaccccaaatccac

SEQ ID NO: 170971 - DNA, 15 bp, Homo sapiens
ttgaccccaaatcca

SEQ ID NO: 170972 - DNA, 15 bp, Homo sapiens
attgaccccaaatcc

SEQ ID NO: 170973 - DNA, 15 bp, Homo sapiens
tattgaccccaaatc

SEQ ID NO: 170974 - DNA, 15 bp, Homo sapiens
atattgaccccaaat

SEQ ID NO: 170975 - DNA, 15 bp, Homo sapiens
catattgaccccaaa

SEQ ID NO: 170976 - DNA, 15 bp, Homo sapiens
tcatattgaccccaa

SEQ ID NO: 170977 - DNA, 15 bp, Homo sapiens
atcatattgacccca

SEQ ID NO: 170978 - DNA, 15 bp, Homo sapiens
catcatattgacccc

SEQ ID NO: 170979 - DNA, 15 bp, Homo sapiens
gcatcatattgaccc

SEQ ID NO: 170980 - DNA, 15 bp, Homo sapiens
tgcatcatattgacc

SEQ ID NO: 170981 - DNA, 15 bp, Homo sapiens
ttgcatcatattgac

SEQ ID NO: 170982 - DNA, 15 bp, Homo sapiens
attgcatcatattga

SEQ ID NO: 170983 - DNA, 15 bp, Homo sapiens
tattgcatcatattg

SEQ ID NO: 170984 - DNA, 15 bp, Homo sapiens
gtattgcatcatatt

SEQ ID NO: 170985 - DNA, 15 bp, Homo sapiens
agtattgcatcatat

SEQ ID NO: 170986 - DNA, 15 bp, Homo sapiens
aagtattgcatcata

SEQ ID NO: 170987 - DNA, 15 bp, Homo sapiens
aaagtattgcatcat

SEQ ID NO: 170988 - DNA, 15 bp, Homo sapiens
gaaagtattgcatca

SEQ ID NO: 170989 - DNA, 15 bp, Homo sapiens
agaaagtattgcatc

SEQ ID NO: 170990 - DNA, 15 bp, Homo sapiens
tagaaagtattgcat

SEQ ID NO: 170991 - DNA, 15 bp, Homo sapiens
ctagaaagtattgca

SEQ ID NO: 170992 - DNA, 15 bp, Homo sapiens
gctagaaagtattgc

SEQ ID NO: 170993 - DNA, 15 bp, Homo sapiens
tgctagaaagtattg

SEQ ID NO: 170994 - DNA, 15 bp, Homo sapiens
ttgctagaaagtatt

SEQ ID NO: 170995 - DNA, 15 bp, Homo sapiens
tttgctagaaagtat

SEQ ID NO: 170996 - DNA, 15 bp, Homo sapiens
ctttgctagaaagta

SEQ ID NO: 170997 - DNA, 15 bp, Homo sapiens
tctttgctagaaagt

SEQ ID NO: 170998 - DNA, 15 bp, Homo sapiens
ttctttgctagaaag

SEQ ID NO: 170999 - DNA, 15 bp, Homo sapiens
attctttgctagaaa

SEQ ID NO: 171000 - DNA, 15 bp, Homo sapiens
aattctttgctagaa

SEQ ID NO: 171001 - DNA, 15 bp, Homo sapiens
aaattctttgctaga

SEQ ID NO: 171002 - DNA, 15 bp, Homo sapiens
aaaattctttgctag

SEQ ID NO: 171003 - DNA, 15 bp, Homo sapiens
caaaattctttgcta

SEQ ID NO: 171004 - DNA, 15 bp, Homo sapiens
ccaaaattctttgct

SEQ ID NO: 171005 - DNA, 15 bp, Homo sapiens
accaaaattctttgc

SEQ ID NO: 171006 - DNA, 15 bp, Homo sapiens
aaccaaaattctttg

SEQ ID NO: 171007 - DNA, 15 bp, Homo sapiens
taaccaaaattcttt

SEQ ID NO: 171008 - DNA, 15 bp, Homo sapiens
ttaaccaaaattctt

SEQ ID NO: 171009 - DNA, 15 bp, Homo sapiens
tttaaccaaaattct

SEQ ID NO: 171010 - DNA, 15 bp, Homo sapiens
ttttaaccaaaattc

SEQ ID NO: 171011 - DNA, 15 bp, Homo sapiens
tttttaaccaaaatt

SEQ ID NO: 171012 - DNA, 15 bp, Homo sapiens
gtttttaaccaaaat

SEQ ID NO: 171013 - DNA, 15 bp, Homo sapiens
tgtttttaaccaaaa

SEQ ID NO: 171014 - DNA, 15 bp, Homo sapiens
gtgtttttaaccaaa

SEQ ID NO: 171015 - DNA, 15 bp, Homo sapiens
tgtgtttttaaccaa

SEQ ID NO: 171016 - DNA, 15 bp, Homo sapiens
ctgtgtttttaacca

SEQ ID NO: 171017 - DNA, 15 bp, Homo sapiens
cctgtgtttttaacc

SEQ ID NO: 171018 - DNA, 15 bp, Homo sapiens
gcctgtgtttttaac

SEQ ID NO: 171019 - DNA, 15 bp, Homo sapiens
agcctgtgtttttaa

SEQ ID NO: 171020 - DNA, 15 bp, Homo sapiens
aagcctgtgttttta

SEQ ID NO: 171021 - DNA, 15 bp, Homo sapiens
aaagcctgtgttttt

SEQ ID NO: 171022 - DNA, 15 bp, Homo sapiens
caaagcctgtgtttt

SEQ ID NO: 171023 - DNA, 15 bp, Homo sapiens
acaaagcctgtgttt

SEQ ID NO: 171024 - DNA, 15 bp, Homo sapiens
tacaaagcctgtgtt

SEQ ID NO: 171025 - DNA, 15 bp, Homo sapiens
atacaaagcctgtgt

SEQ ID NO: 171026 - DNA, 15 bp, Homo sapiens
aatacaaagcctgtg

SEQ ID NO: 171027 - DNA, 15 bp, Homo sapiens
gaatacaaagcctgt

SEQ ID NO: 171028 - DNA, 15 bp, Homo sapiens
tgaatacaaagcctg

SEQ ID NO: 171029 - DNA, 15 bp, Homo sapiens
ttgaatacaaagcct

SEQ ID NO: 171030 - DNA, 15 bp, Homo sapiens
gttgaatacaaagcc

SEQ ID NO: 171031 - DNA, 15 bp, Homo sapiens
ggttgaatacaaagc

SEQ ID NO: 171032 - DNA, 15 bp, Homo sapiens
tggttgaatacaaag

SEQ ID NO: 171033 - DNA, 15 bp, Homo sapiens
gtggttgaatacaaa

SEQ ID NO: 171034 - DNA, 15 bp, Homo sapiens
tgtggttgaatacaa

SEQ ID NO: 171035 - DNA, 15 bp, Homo sapiens
ttgtggttgaataca

SEQ ID NO: 171036 - DNA, 15 bp, Homo sapiens
attgtggttgaatac

SEQ ID NO: 171037 - DNA, 15 bp, Homo sapiens
cattgtggttgaata

SEQ ID NO: 171038 - DNA, 15 bp, Homo sapiens
tcattgtggttgaat

SEQ ID NO: 171039 - DNA, 15 bp, Homo sapiens
ttcattgtggttgaa

SEQ ID NO: 171040 - DNA, 15 bp, Homo sapiens
tttcattgtggttga

SEQ ID NO: 171041 - DNA, 15 bp, Homo sapiens
ttttcattgtggttg

SEQ ID NO: 171042 - DNA, 15 bp, Homo sapiens
cttttcattgtggtt

SEQ ID NO: 171043 - DNA, 15 bp, Homo sapiens
gcttttcattgtggt

SEQ ID NO: 171044 - DNA, 15 bp, Homo sapiens
agcttttcattgtgg

SEQ ID NO: 171045 - DNA, 15 bp, Homo sapiens
cagcttttcattgtg

SEQ ID NO: 171046 - DNA, 15 bp, Homo sapiens
tcagcttttcattgt

SEQ ID NO: 171047 - DNA, 15 bp, Homo sapiens
ttcagcttttcattg

SEQ ID NO: 171048 - DNA, 15 bp, Homo sapiens
cttcagcttttcatt

SEQ ID NO: 171049 - DNA, 15 bp, Homo sapiens
gcttcagcttttcat

SEQ ID NO: 171050 - DNA, 15 bp, Homo sapiens
ggcttcagcttttca

SEQ ID NO: 171051 - DNA, 15 bp, Homo sapiens
gggcttcagcttttc

SEQ ID NO: 171052 - DNA, 15 bp, Homo sapiens
tgggcttcagctttt

SEQ ID NO: 171053 - DNA, 15 bp, Homo sapiens
ctgggcttcagcttt

SEQ ID NO: 171054 - DNA, 15 bp, Homo sapiens
gctgggcttcagctt

SEQ ID NO: 171055 - DNA, 15 bp, Homo sapiens
agctgggcttcagct

SEQ ID NO: 171056 - DNA, 15 bp, Homo sapiens
gagctgggcttcagc

SEQ ID NO: 171057 - DNA, 15 bp, Homo sapiens
agagctgggcttcag

SEQ ID NO: 171058 - DNA, 15 bp, Homo sapiens
cagagctgggcttca

SEQ ID NO: 171059 - DNA, 15 bp, Homo sapiens
gcagagctgggcttc

SEQ ID NO: 171060 - DNA, 15 bp, Homo sapiens
tgcagagctgggctt

SEQ ID NO: 171061 - DNA, 15 bp, Homo sapiens
ttgcagagctgggct

SEQ ID NO: 171062 - DNA, 15 bp, Homo sapiens
tttgcagagctgggc

SEQ ID NO: 171063 - DNA, 15 bp, Homo sapiens
gtttgcagagctggg

SEQ ID NO: 171064 - DNA, 15 bp, Homo sapiens
agtttgcagagctgg

SEQ ID NO: 171065 - DNA, 15 bp, Homo sapiens
tagtttgcagagctg

SEQ ID NO: 171066 - DNA, 15 bp, Homo sapiens
gtagtttgcagagct

SEQ ID NO: 171067 - DNA, 15 bp, Homo sapiens
agtagtttgcagagc

SEQ ID NO: 171068 - DNA, 15 bp, Homo sapiens
tagtagtttgcagag

SEQ ID NO: 171069 - DNA, 15 bp, Homo sapiens
ctagtagtttgcaga

SEQ ID NO: 171070 - DNA, 15 bp, Homo sapiens
gctagtagtttgcag

SEQ ID NO: 171071 - DNA, 15 bp, Homo sapiens
agctagtagtttgca

SEQ ID NO: 171072 - DNA, 15 bp, Homo sapiens
cagctagtagtttgc

SEQ ID NO: 171073 - DNA, 15 bp, Homo sapiens
ccagctagtagtttg

SEQ ID NO: 171074 - DNA, 15 bp, Homo sapiens
cccagctagtagttt

SEQ ID NO: 171075 - DNA, 15 bp, Homo sapiens
ccccagctagtagtt

SEQ ID NO: 171076 - DNA, 15 bp, Homo sapiens
cccccagctagtagt

SEQ ID NO: 171077 - DNA, 15 bp, Homo sapiens
tcccccagctagtag

SEQ ID NO: 171078 - DNA, 15 bp, Homo sapiens
gtcccccagctagta

SEQ ID NO: 171079 - DNA, 15 bp, Homo sapiens
ggtcccccagctagt

SEQ ID NO: 171080 - DNA, 15 bp, Homo sapiens
aggtcccccagctag

SEQ ID NO: 171081 - DNA, 15 bp, Homo sapiens
gaggtcccccagcta

SEQ ID NO: 171082 - DNA, 15 bp, Homo sapiens
tgaggtcccccagct

SEQ ID NO: 171083 - DNA, 15 bp, Homo sapiens
ctgaggtcccccagc

SEQ ID NO: 171084 - DNA, 15 bp, Homo sapiens
cctgaggtcccccag

SEQ ID NO: 171085 - DNA, 15 bp, Homo sapiens
tcctgaggtccccca

SEQ ID NO: 171086 - DNA, 15 bp, Homo sapiens
ttcctgaggtccccc

SEQ ID NO: 171087 - DNA, 15 bp, Homo sapiens
tttcctgaggtcccc

SEQ ID NO: 171088 - DNA, 15 bp, Homo sapiens
ttttcctgaggtccc

SEQ ID NO: 171089 - DNA, 15 bp, Homo sapiens
attttcctgaggtcc

SEQ ID NO: 171090 - DNA, 15 bp, Homo sapiens
aattttcctgaggtc

SEQ ID NO: 171091 - DNA, 15 bp, Homo sapiens
aaattttcctgaggt

SEQ ID NO: 171092 - DNA, 15 bp, Homo sapiens
taaattttcctgagg

SEQ ID NO: 171093 - DNA, 15 bp, Homo sapiens
gtaaattttcctgag

SEQ ID NO: 171094 - DNA, 15 bp, Homo sapiens
agtaaattttcctga

SEQ ID NO: 171095 - DNA, 15 bp, Homo sapiens
aagtaaattttcctg

SEQ ID NO: 171096 - DNA, 15 bp, Homo sapiens
gaagtaaattttcct

SEQ ID NO: 171097 - DNA, 15 bp, Homo sapiens
agaagtaaattttcc

SEQ ID NO: 171098 - DNA, 15 bp, Homo sapiens
gagaagtaaattttc

SEQ ID NO: 171099 - DNA, 15 bp, Homo sapiens
agagaagtaaatttt

SEQ ID NO: 171100 - DNA, 15 bp, Homo sapiens
cagagaagtaaattt

SEQ ID NO: 171101 - DNA, 15 bp, Homo sapiens
ccagagaagtaaatt

SEQ ID NO: 171102 - DNA, 15 bp, Homo sapiens
cccagagaagtaaat

SEQ ID NO: 171103 - DNA, 15 bp, Homo sapiens
gcccagagaagtaaa

SEQ ID NO: 171104 - DNA, 15 bp, Homo sapiens
agcccagagaagtaa

SEQ ID NO: 171105 - DNA, 15 bp, Homo sapiens
aagcccagagaagta

SEQ ID NO: 171106 - DNA, 15 bp, Homo sapiens
gaagcccagagaagt

SEQ ID NO: 171107 - DNA, 15 bp, Homo sapiens
tgaagcccagagaag

SEQ ID NO: 171108 - DNA, 15 bp, Homo sapiens
ctgaagcccagagaa

SEQ ID NO: 171109 - DNA, 15 bp, Homo sapiens
actgaagcccagaga

SEQ ID NO: 171110 - DNA, 15 bp, Homo sapiens
gactgaagcccagag

SEQ ID NO: 171111 - DNA, 15 bp, Homo sapiens
agactgaagcccaga

SEQ ID NO: 171112 - DNA, 15 bp, Homo sapiens
gagactgaagcccag

SEQ ID NO: 171113 - DNA, 15 bp, Homo sapiens
agagactgaagccca

SEQ ID NO: 171114 - DNA, 15 bp, Homo sapiens
aagagactgaagccc

SEQ ID NO: 171115 - DNA, 15 bp, Homo sapiens
gaagagactgaagcc

SEQ ID NO: 171116 - DNA, 15 bp, Homo sapiens
tgaagagactgaagc

SEQ ID NO: 171117 - DNA, 15 bp, Homo sapiens
ttgaagagactgaag

SEQ ID NO: 171118 - DNA, 15 bp, Homo sapiens
gttgaagagactgaa

SEQ ID NO: 171119 - DNA, 15 bp, Homo sapiens
tgttgaagagactga

SEQ ID NO: 171120 - DNA, 15 bp, Homo sapiens
ctgttgaagagactg

SEQ ID NO: 171121 - DNA, 15 bp, Homo sapiens
cctgttgaagagact

SEQ ID NO: 171122 - DNA, 15 bp, Homo sapiens
tcctgttgaagagac

SEQ ID NO: 171123 - DNA, 15 bp, Homo sapiens
ttcctgttgaagaga

SEQ ID NO: 171124 - DNA, 15 bp, Homo sapiens
cttcctgttgaagag

SEQ ID NO: 171125 - DNA, 15 bp, Homo sapiens
tcttcctgttgaaga

SEQ ID NO: 171126 - DNA, 15 bp, Homo sapiens
gtcttcctgttgaag

SEQ ID NO: 171127 - DNA, 15 bp, Homo sapiens
cgtcttcctgttgaa

SEQ ID NO: 171128 - DNA, 15 bp, Homo sapiens
ccgtcttcctgttga

SEQ ID NO: 171129 - DNA, 15 bp, Homo sapiens
cccgtcttcctgttg

SEQ ID NO: 171130 - DNA, 15 bp, Homo sapiens
gcccgtcttcctgtt

SEQ ID NO: 171131 - DNA, 15 bp, Homo sapiens
tgcccgtcttcctgt

SEQ ID NO: 171132 - DNA, 15 bp, Homo sapiens
ttgcccgtcttcctg

SEQ ID NO: 171133 - DNA, 15 bp, Homo sapiens
tttgcccgtcttcct

SEQ ID NO: 171134 - DNA, 15 bp, Homo sapiens
ttttgcccgtcttcc

SEQ ID NO: 171135 - DNA, 15 bp, Homo sapiens
gttttgcccgtcttc

SEQ ID NO: 171136 - DNA, 15 bp, Homo sapiens
agttttgcccgtctt

SEQ ID NO: 171137 - DNA, 15 bp, Homo sapiens
tagttttgcccgtct

SEQ ID NO: 171138 - DNA, 15 bp, Homo sapiens
atagttttgcccgtc

SEQ ID NO: 171139 - DNA, 15 bp, Homo sapiens
tatagttttgcccgt

SEQ ID NO: 171140 - DNA, 15 bp, Homo sapiens
ctatagttttgcccg

SEQ ID NO: 171141 - DNA, 15 bp, Homo sapiens
actatagttttgccc

SEQ ID NO: 171142 - DNA, 15 bp, Homo sapiens
cactatagttttgcc

SEQ ID NO: 171143 - DNA, 15 bp, Homo sapiens
tcactatagttttgc

SEQ ID NO: 171144 - DNA, 15 bp, Homo sapiens
ttcactatagttttg

SEQ ID NO: 171145 - DNA, 15 bp, Homo sapiens
tttcactatagtttt

SEQ ID NO: 171146 - DNA, 15 bp, Homo sapiens
gtttcactatagttt

SEQ ID NO: 171147 - DNA, 15 bp, Homo sapiens
ggtttcactatagtt

SEQ ID NO: 171148 - DNA, 15 bp, Homo sapiens
aggtttcactatagt

SEQ ID NO: 171149 - DNA, 15 bp, Homo sapiens
gaggtttcactatag

SEQ ID NO: 171150 - DNA, 15 bp, Homo sapiens
tgaggtttcactata

SEQ ID NO: 171151 - DNA, 15 bp, Homo sapiens
atgaggtttcactat

SEQ ID NO: 171152 - DNA, 15 bp, Homo sapiens
tatgaggtttcacta

SEQ ID NO: 171153 - DNA, 15 bp, Homo sapiens
gtatgaggtttcact

SEQ ID NO: 171154 - DNA, 15 bp, Homo sapiens
ggtatgaggtttcac

SEQ ID NO: 171155 - DNA, 15 bp, Homo sapiens
aggtatgaggtttca

SEQ ID NO: 171156 - DNA, 15 bp, Homo sapiens
aaggtatgaggtttc

SEQ ID NO: 171157 - DNA, 15 bp, Homo sapiens
gaaggtatgaggttt

SEQ ID NO: 171158 - DNA, 15 bp, Homo sapiens
tgaaggtatgaggtt

SEQ ID NO: 171159 - DNA, 15 bp, Homo sapiens
atgaaggtatgaggt

SEQ ID NO: 171160 - DNA, 15 bp, Homo sapiens
tatgaaggtatgagg

SEQ ID NO: 171161 - DNA, 15 bp, Homo sapiens
ctatgaaggtatgag

SEQ ID NO: 171162 - DNA, 15 bp, Homo sapiens
tctatgaaggtatga

SEQ ID NO: 171163 - DNA, 15 bp, Homo sapiens
ctctatgaaggtatg

SEQ ID NO: 171164 - DNA, 15 bp, Homo sapiens
actctatgaaggtat

SEQ ID NO: 171165 - DNA, 15 bp, Homo sapiens
aactctatgaaggta

SEQ ID NO: 171166 - DNA, 15 bp, Homo sapiens
caactctatgaaggt

SEQ ID NO: 171167 - DNA, 15 bp, Homo sapiens
gcaactctatgaagg

SEQ ID NO: 171168 - DNA, 15 bp, Homo sapiens
agcaactctatgaag

SEQ ID NO: 171169 - DNA, 15 bp, Homo sapiens
gagcaactctatgaa

SEQ ID NO: 171170 - DNA, 15 bp, Homo sapiens
agagcaactctatga

SEQ ID NO: 171171 - DNA, 15 bp, Homo sapiens
cagagcaactctatg

SEQ ID NO: 171172 - DNA, 15 bp, Homo sapiens
tcagagcaactctat

SEQ ID NO: 171173 - DNA, 15 bp, Homo sapiens
ttcagagcaactcta

SEQ ID NO: 171174 - DNA, 15 bp, Homo sapiens
cttcagagcaactct

SEQ ID NO: 171175 - DNA, 15 bp, Homo sapiens
tcttcagagcaactc

SEQ ID NO: 171176 - DNA, 15 bp, Homo sapiens
atcttcagagcaact

SEQ ID NO: 171177 - DNA, 15 bp, Homo sapiens
aatcttcagagcaac

SEQ ID NO: 171178 - DNA, 15 bp, Homo sapiens
aaatcttcagagcaa

SEQ ID NO: 171179 - DNA, 15 bp, Homo sapiens
taaatcttcagagca

SEQ ID NO: 171180 - DNA, 15 bp, Homo sapiens
ttaaatcttcagagc

SEQ ID NO: 171181 - DNA, 15 bp, Homo sapiens
tttaaatcttcagag

SEQ ID NO: 171182 - DNA, 15 bp, Homo sapiens
ctttaaatcttcaga

SEQ ID NO: 171183 - DNA, 15 bp, Homo sapiens
tctttaaatcttcag

SEQ ID NO: 171184 - DNA, 15 bp, Homo sapiens
ttctttaaatcttca

SEQ ID NO: 171185 - DNA, 15 bp, Homo sapiens
attctttaaatcttc

SEQ ID NO: 171186 - DNA, 15 bp, Homo sapiens
tattctttaaatctt

SEQ ID NO: 171187 - DNA, 15 bp, Homo sapiens
gtattctttaaatct

SEQ ID NO: 171188 - DNA, 15 bp, Homo sapiens
cgtattctttaaatc

SEQ ID NO: 171189 - DNA, 15 bp, Homo sapiens
gcgtattctttaaat

SEQ ID NO: 171190 - DNA, 15 bp, Homo sapiens
agcgtattctttaaa

SEQ ID NO: 171191 - DNA, 15 bp, Homo sapiens
aagcgtattctttaa

SEQ ID NO: 171192 - DNA, 15 bp, Homo sapiens
taagcgtattcttta

SEQ ID NO: 171193 - DNA, 15 bp, Homo sapiens
ctaagcgtattcttt

SEQ ID NO: 171194 - DNA, 15 bp, Homo sapiens
gctaagcgtattctt

SEQ ID NO: 171195 - DNA, 15 bp, Homo sapiens
agctaagcgtattct

SEQ ID NO: 171196 - DNA, 15 bp, Homo sapiens
gagctaagcgtattc

SEQ ID NO: 171197 - DNA, 15 bp, Homo sapiens
tgagctaagcgtatt

SEQ ID NO: 171198 - DNA, 15 bp, Homo sapiens
gtgagctaagcgtat

SEQ ID NO: 171199 - DNA, 15 bp, Homo sapiens
tgtgagctaagcgta

SEQ ID NO: 171200 - DNA, 15 bp, Homo sapiens
ctgtgagctaagcgt

SEQ ID NO: 171201 - DNA, 15 bp, Homo sapiens
actgtgagctaagcg

SEQ ID NO: 171202 - DNA, 15 bp, Homo sapiens
aactgtgagctaagc

SEQ ID NO: 171203 - DNA, 15 bp, Homo sapiens
taactgtgagctaag

SEQ ID NO: 171204 - DNA, 15 bp, Homo sapiens
ctaactgtgagctaa

SEQ ID NO: 171205 - DNA, 15 bp, Homo sapiens
cctaactgtgagcta

SEQ ID NO: 171206 - DNA, 15 bp, Homo sapiens
ccctaactgtgagct

SEQ ID NO: 171207 - DNA, 15 bp, Homo sapiens
tccctaactgtgagc

SEQ ID NO: 171208 - DNA, 15 bp, Homo sapiens
ttccctaactgtgag

SEQ ID NO: 171209 - DNA, 15 bp, Homo sapiens
tttccctaactgtga

SEQ ID NO: 171210 - DNA, 15 bp, Homo sapiens
atttccctaactgtg

SEQ ID NO: 171211 - DNA, 15 bp, Homo sapiens
aatttccctaactgt

SEQ ID NO: 171212 - DNA, 15 bp, Homo sapiens
gaatttccctaactg

SEQ ID NO: 171213 - DNA, 15 bp, Homo sapiens
tgaatttccctaact

SEQ ID NO: 171214 - DNA, 15 bp, Homo sapiens
ctgaatttccctaac

SEQ ID NO: 171215 - DNA, 15 bp, Homo sapiens
actgaatttccctaa

SEQ ID NO: 171216 - DNA, 15 bp, Homo sapiens
cactgaatttcccta

SEQ ID NO: 171217 - DNA, 15 bp, Homo sapiens
tcactgaatttccct

SEQ ID NO: 171218 - DNA, 15 bp, Homo sapiens
ttcactgaatttccc

SEQ ID NO: 171219 - DNA, 15 bp, Homo sapiens
tttcactgaatttcc

SEQ ID NO: 171220 - DNA, 15 bp, Homo sapiens
ctttcactgaatttc

SEQ ID NO: 171221 - DNA, 15 bp, Homo sapiens
cctttcactgaattt

SEQ ID NO: 171222 - DNA, 15 bp, Homo sapiens
acctttcactgaatt

SEQ ID NO: 171223 - DNA, 15 bp, Homo sapiens
cacctttcactgaat

SEQ ID NO: 171224 - DNA, 15 bp, Homo sapiens
ccacctttcactgaa

SEQ ID NO: 171225 - DNA, 15 bp, Homo sapiens
tccacctttcactga

SEQ ID NO: 171226 - DNA, 15 bp, Homo sapiens
atccacctttcactg

SEQ ID NO: 171227 - DNA, 15 bp, Homo sapiens
tatccacctttcact

SEQ ID NO: 171228 - DNA, 15 bp, Homo sapiens
atatccacctttcac

SEQ ID NO: 171229 - DNA, 15 bp, Homo sapiens
aatatccacctttca

SEQ ID NO: 171230 - DNA, 15 bp, Homo sapiens
taatatccacctttc

SEQ ID NO: 171231 - DNA, 15 bp, Homo sapiens
ataatatccaccttt

SEQ ID NO: 171232 - DNA, 15 bp, Homo sapiens
aataatatccacctt

SEQ ID NO: 171233 - DNA, 15 bp, Homo sapiens
taataatatccacct

SEQ ID NO: 171234 - DNA, 15 bp, Homo sapiens
gtaataatatccacc

SEQ ID NO: 171235 - DNA, 15 bp, Homo sapiens
agtaataatatccac

SEQ ID NO: 171236 - DNA, 15 bp, Homo sapiens
tagtaataatatcca

SEQ ID NO: 171237 - DNA, 15 bp, Homo sapiens
ctagtaataatatcc

SEQ ID NO: 171238 - DNA, 15 bp, Homo sapiens
tctagtaataatatc

SEQ ID NO: 171239 - DNA, 15 bp, Homo sapiens
ttctagtaataatat

SEQ ID NO: 171240 - DNA, 15 bp, Homo sapiens
cttctagtaataata

SEQ ID NO: 171241 - DNA, 15 bp, Homo sapiens
tcttctagtaataat

SEQ ID NO: 171242 - DNA, 15 bp, Homo sapiens
atcttctagtaataa

SEQ ID NO: 171243 - DNA, 15 bp, Homo sapiens
tatcttctagtaata

SEQ ID NO: 171244 - DNA, 15 bp, Homo sapiens
ctatcttctagtaat

SEQ ID NO: 171245 - DNA, 15 bp, Homo sapiens
cctatcttctagtaa

SEQ ID NO: 171246 - DNA, 15 bp, Homo sapiens
ccctatcttctagta

SEQ ID NO: 171247 - DNA, 15 bp, Homo sapiens
accctatcttctagt

SEQ ID NO: 171248 - DNA, 15 bp, Homo sapiens
taccctatcttctag

SEQ ID NO: 171249 - DNA, 15 bp, Homo sapiens
ctaccctatcttcta

SEQ ID NO: 171250 - DNA, 15 bp, Homo sapiens
gctaccctatcttct

SEQ ID NO: 171251 - DNA, 15 bp, Homo sapiens
tgctaccctatcttc

SEQ ID NO: 171252 - DNA, 15 bp, Homo sapiens
ctgctaccctatctt

SEQ ID NO: 171253 - DNA, 15 bp, Homo sapiens
actgctaccctatct

SEQ ID NO: 171254 - DNA, 15 bp, Homo sapiens
tactgctaccctatc

SEQ ID NO: 171255 - DNA, 15 bp, Homo sapiens
ctactgctaccctat

SEQ ID NO: 171256 - DNA, 15 bp, Homo sapiens
tctactgctacccta

SEQ ID NO: 171257 - DNA, 15 bp, Homo sapiens
ttctactgctaccct

SEQ ID NO: 171258 - DNA, 15 bp, Homo sapiens
tttctactgctaccc

SEQ ID NO: 171259 - DNA, 15 bp, Homo sapiens
ctttctactgctacc

SEQ ID NO: 171260 - DNA, 15 bp, Homo sapiens
tctttctactgctac

SEQ ID NO: 171261 - DNA, 15 bp, Homo sapiens
ttctttctactgcta

SEQ ID NO: 171262 - DNA, 15 bp, Homo sapiens
tttctttctactgct

SEQ ID NO: 171263 - DNA, 15 bp, Homo sapiens
ttttctttctactgc

SEQ ID NO: 171264 - DNA, 15 bp, Homo sapiens
attttctttctactg

SEQ ID NO: 171265 - DNA, 15 bp, Homo sapiens
aattttctttctact

SEQ ID NO: 171266 - DNA, 15 bp, Homo sapiens
aaattttctttctac

SEQ ID NO: 171267 - DNA, 15 bp, Homo sapiens
caaattttctttcta

SEQ ID NO: 171268 - DNA, 15 bp, Homo sapiens
acaaattttctttct

SEQ ID NO: 171269 - DNA, 15 bp, Homo sapiens
cacaaattttctttc

SEQ ID NO: 171270 - DNA, 15 bp, Homo sapiens
ccacaaattttcttt

SEQ ID NO: 171271 - DNA, 15 bp, Homo sapiens
accacaaattttctt

SEQ ID NO: 171272 - DNA, 15 bp, Homo sapiens
gaccacaaattttct

SEQ ID NO: 171273 - DNA, 15 bp, Homo sapiens
ggaccacaaattttc

SEQ ID NO: 171274 - DNA, 15 bp, Homo sapiens
aggaccacaaatttt

SEQ ID NO: 171275 - DNA, 15 bp, Homo sapiens
caggaccacaaattt

SEQ ID NO: 171276 - DNA, 15 bp, Homo sapiens
acaggaccacaaatt

SEQ ID NO: 171277 - DNA, 15 bp, Homo sapiens
tacaggaccacaaat

SEQ ID NO: 171278 - DNA, 15 bp, Homo sapiens
ttacaggaccacaaa

SEQ ID NO: 171279 - DNA, 15 bp, Homo sapiens
tttacaggaccacaa

SEQ ID NO: 171280 - DNA, 15 bp, Homo sapiens
ttttacaggaccaca

SEQ ID NO: 171281 - DNA, 15 bp, Homo sapiens
attttacaggaccac

SEQ ID NO: 171282 - DNA, 15 bp, Homo sapiens
aattttacaggacca

SEQ ID NO: 171283 - DNA, 15 bp, Homo sapiens
caattttacaggacc

SEQ ID NO: 171284 - DNA, 15 bp, Homo sapiens
tcaattttacaggac

SEQ ID NO: 171285 - DNA, 15 bp, Homo sapiens
ttcaattttacagga

SEQ ID NO: 171286 - DNA, 15 bp, Homo sapiens
cttcaattttacagg

SEQ ID NO: 171287 - DNA, 15 bp, Homo sapiens
acttcaattttacag

SEQ ID NO: 171288 - DNA, 15 bp, Homo sapiens
aacttcaattttaca

SEQ ID NO: 171289 - DNA, 15 bp, Homo sapiens
caacttcaattttac

SEQ ID NO: 171290 - DNA, 15 bp, Homo sapiens
gcaacttcaatttta

SEQ ID NO: 171291 - DNA, 15 bp, Homo sapiens
ggcaacttcaatttt

SEQ ID NO: 171292 - DNA, 15 bp, Homo sapiens
gggcaacttcaattt

SEQ ID NO: 171293 - DNA, 15 bp, Homo sapiens
agggcaacttcaatt

SEQ ID NO: 171294 - DNA, 15 bp, Homo sapiens
cagggcaacttcaat

SEQ ID NO: 171295 - DNA, 15 bp, Homo sapiens
gcagggcaacttcaa

SEQ ID NO: 171296 - DNA, 15 bp, Homo sapiens
tgcagggcaacttca

SEQ ID NO: 171297 - DNA, 15 bp, Homo sapiens
ctgcagggcaacttc

SEQ ID NO: 171298 - DNA, 15 bp, Homo sapiens
actgcagggcaactt

SEQ ID NO: 171299 - DNA, 15 bp, Homo sapiens
cactgcagggcaact

SEQ ID NO: 171300 - DNA, 15 bp, Homo sapiens
ccactgcagggcaac

SEQ ID NO: 171301 - DNA, 15 bp, Homo sapiens
cccactgcagggcaa

SEQ ID NO: 171302 - DNA, 15 bp, Homo sapiens
tcccactgcagggca

SEQ ID NO: 171303 - DNA, 15 bp, Homo sapiens
atcccactgcagggc

SEQ ID NO: 171304 - DNA, 15 bp, Homo sapiens
catcccactgcaggg

SEQ ID NO: 171305 - DNA, 15 bp, Homo sapiens
ccatcccactgcagg

SEQ ID NO: 171306 - DNA, 15 bp, Homo sapiens
cccatcccactgcag

SEQ ID NO: 171307 - DNA, 15 bp, Homo sapiens
ccccatcccactgca

SEQ ID NO: 171308 - DNA, 15 bp, Homo sapiens
gccccatcccactgc

SEQ ID NO: 171309 - DNA, 15 bp, Homo sapiens
tgccccatcccactg

SEQ ID NO: 171310 - DNA, 15 bp, Homo sapiens
atgccccatcccact

SEQ ID NO: 171311 - DNA, 15 bp, Homo sapiens
tatgccccatcccac

SEQ ID NO: 171312 - DNA, 15 bp, Homo sapiens
atatgccccatccca

SEQ ID NO: 171313 - DNA, 15 bp, Homo sapiens
catatgccccatccc

SEQ ID NO: 171314 - DNA, 15 bp, Homo sapiens
tcatatgccccatcc

SEQ ID NO: 171315 - DNA, 15 bp, Homo sapiens
ctcatatgccccatc

SEQ ID NO: 171316 - DNA, 15 bp, Homo sapiens
cctcatatgccccat

SEQ ID NO: 171317 - DNA, 15 bp, Homo sapiens
tcctcatatgcccca

SEQ ID NO: 171318 - DNA, 15 bp, Homo sapiens
atcctcatatgcccc

SEQ ID NO: 171319 - DNA, 15 bp, Homo sapiens
tatcctcatatgccc

SEQ ID NO: 171320 - DNA, 15 bp, Homo sapiens
ctatcctcatatgcc

SEQ ID NO: 171321 - DNA, 15 bp, Homo sapiens
actatcctcatatgc

SEQ ID NO: 171322 - DNA, 15 bp, Homo sapiens
cactatcctcatatg

SEQ ID NO: 171323 - DNA, 15 bp, Homo sapiens
tcactatcctcatat

SEQ ID NO: 171324 - DNA, 15 bp, Homo sapiens
ctcactatcctcata

SEQ ID NO: 171325 - DNA, 15 bp, Homo sapiens
actcactatcctcat

SEQ ID NO: 171326 - DNA, 15 bp, Homo sapiens
cactcactatcctca

SEQ ID NO: 171327 - DNA, 15 bp, Homo sapiens
gcactcactatcctc

SEQ ID NO: 171328 - DNA, 15 bp, Homo sapiens
agcactcactatcct

SEQ ID NO: 171329 - DNA, 15 bp, Homo sapiens
aagcactcactatcc

SEQ ID NO: 171330 - DNA, 15 bp, Homo sapiens
gaagcactcactatc

SEQ ID NO: 171331 - DNA, 15 bp, Homo sapiens
tgaagcactcactat

SEQ ID NO: 171332 - DNA, 15 bp, Homo sapiens
atgaagcactcacta

SEQ ID NO: 171333 - DNA, 15 bp, Homo sapiens
gatgaagcactcact

SEQ ID NO: 171334 - DNA, 15 bp, Homo sapiens
tgatgaagcactcac

SEQ ID NO: 171335 - DNA, 15 bp, Homo sapiens
atgatgaagcactca

SEQ ID NO: 171336 - DNA, 15 bp, Homo sapiens
gatgatgaagcactc

SEQ ID NO: 171337 - DNA, 15 bp, Homo sapiens
tgatgatgaagcact

SEQ ID NO: 171338 - DNA, 15 bp, Homo sapiens
gtgatgatgaagcac

SEQ ID NO: 171339 - DNA, 15 bp, Homo sapiens
agtgatgatgaagca

SEQ ID NO: 171340 - DNA, 15 bp, Homo sapiens
cagtgatgatgaagc

SEQ ID NO: 171341 - DNA, 15 bp, Homo sapiens
ccagtgatgatgaag

SEQ ID NO: 171342 - DNA, 15 bp, Homo sapiens
tccagtgatgatgaa

SEQ ID NO: 171343 - DNA, 15 bp, Homo sapiens
ctccagtgatgatga

SEQ ID NO: 171344 - DNA, 15 bp, Homo sapiens
tctccagtgatgatg

SEQ ID NO: 171345 - DNA, 15 bp, Homo sapiens
atctccagtgatgat

SEQ ID NO: 171346 - DNA, 15 bp, Homo sapiens
aatctccagtgatga

SEQ ID NO: 171347 - DNA, 15 bp, Homo sapiens
aaatctccagtgatg

SEQ ID NO: 171348 - DNA, 15 bp, Homo sapiens
aaaatctccagtgat

SEQ ID NO: 171349 - DNA, 15 bp, Homo sapiens
caaaatctccagtga

SEQ ID NO: 171350 - DNA, 15 bp, Homo sapiens
tcaaaatctccagtg

SEQ ID NO: 171351 - DNA, 15 bp, Homo sapiens
gtcaaaatctccagt

SEQ ID NO: 171352 - DNA, 15 bp, Homo sapiens
tgtcaaaatctccag

SEQ ID NO: 171353 - DNA, 15 bp, Homo sapiens
ctgtcaaaatctcca

SEQ ID NO: 171354 - DNA, 15 bp, Homo sapiens
gctgtcaaaatctcc

SEQ ID NO: 171355 - DNA, 15 bp, Homo sapiens
tgctgtcaaaatctc

SEQ ID NO: 171356 - DNA, 15 bp, Homo sapiens
ctgctgtcaaaatct

SEQ ID NO: 171357 - DNA, 15 bp, Homo sapiens
gctgctgtcaaaatc

SEQ ID NO: 171358 - DNA, 15 bp, Homo sapiens
agctgctgtcaaaat

SEQ ID NO: 171359 - DNA, 15 bp, Homo sapiens
aagctgctgtcaaaa

SEQ ID NO: 171360 - DNA, 15 bp, Homo sapiens
caagctgctgtcaaa

SEQ ID NO: 171361 - DNA, 15 bp, Homo sapiens
ccaagctgctgtcaa

SEQ ID NO: 171362 - DNA, 15 bp, Homo sapiens
accaagctgctgtca

SEQ ID NO: 171363 - DNA, 15 bp, Homo sapiens
caccaagctgctgtc

SEQ ID NO: 171364 - DNA, 15 bp, Homo sapiens
acaccaagctgctgt

SEQ ID NO: 171365 - DNA, 15 bp, Homo sapiens
cacaccaagctgctg

SEQ ID NO: 171366 - DNA, 15 bp, Homo sapiens
acacaccaagctgct

SEQ ID NO: 171367 - DNA, 15 bp, Homo sapiens
cacacaccaagctgc

SEQ ID NO: 171368 - DNA, 15 bp, Homo sapiens
ccacacaccaagctg

SEQ ID NO: 171369 - DNA, 15 bp, Homo sapiens
gccacacaccaagct

SEQ ID NO: 171370 - DNA, 15 bp, Homo sapiens
agccacacaccaagc

SEQ ID NO: 171371 - DNA, 15 bp, Homo sapiens
aagccacacaccaag

SEQ ID NO: 171372 - DNA, 15 bp, Homo sapiens
gaagccacacaccaa

SEQ ID NO: 171373 - DNA, 15 bp, Homo sapiens
agaagccacacacca

SEQ ID NO: 171374 - DNA, 15 bp, Homo sapiens
aagaagccacacacc

SEQ ID NO: 171375 - DNA, 15 bp, Homo sapiens
gaagaagccacacac

SEQ ID NO: 171376 - DNA, 15 bp, Homo sapiens
agaagaagccacaca

SEQ ID NO: 171377 - DNA, 15 bp, Homo sapiens
gagaagaagccacac

SEQ ID NO: 171378 - DNA, 15 bp, Homo sapiens
tgagaagaagccaca

SEQ ID NO: 171379 - DNA, 15 bp, Homo sapiens
ctgagaagaagccac

SEQ ID NO: 171380 - DNA, 15 bp, Homo sapiens
cctgagaagaagcca

SEQ ID NO: 171381 - DNA, 15 bp, Homo sapiens
tcctgagaagaagcc

SEQ ID NO: 171382 - DNA, 15 bp, Homo sapiens
ctcctgagaagaagc

SEQ ID NO: 171383 - DNA, 15 bp, Homo sapiens
actcctgagaagaag

SEQ ID NO: 171384 - DNA, 15 bp, Homo sapiens
cactcctgagaagaa

SEQ ID NO: 171385 - DNA, 15 bp, Homo sapiens
tcactcctgagaaga

SEQ ID NO: 171386 - DNA, 15 bp, Homo sapiens
atcactcctgagaag

SEQ ID NO: 171387 - DNA, 15 bp, Homo sapiens
aatcactcctgagaa

SEQ ID NO: 171388 - DNA, 15 bp, Homo sapiens
aaatcactcctgaga

SEQ ID NO: 171389 - DNA, 15 bp, Homo sapiens
aaaatcactcctgag

SEQ ID NO: 171390 - DNA, 15 bp, Homo sapiens
aaaaatcactcctga

SEQ ID NO: 171391 - DNA, 15 bp, Homo sapiens
caaaaatcactcctg

SEQ ID NO: 171392 - DNA, 15 bp, Homo sapiens
ccaaaaatcactcct

SEQ ID NO: 171393 - DNA, 15 bp, Homo sapiens
tccaaaaatcactcc

SEQ ID NO: 171394 - DNA, 15 bp, Homo sapiens
ctccaaaaatcactc

SEQ ID NO: 171395 - DNA, 15 bp, Homo sapiens
tctccaaaaatcact

SEQ ID NO: 171396 - DNA, 15 bp, Homo sapiens
atctccaaaaatcac

SEQ ID NO: 171397 - DNA, 15 bp, Homo sapiens
aatctccaaaaatca

SEQ ID NO: 171398 - DNA, 15 bp, Homo sapiens
gaatctccaaaaatc

SEQ ID NO: 171399 - DNA, 15 bp, Homo sapiens
tgaatctccaaaaat

SEQ ID NO: 171400 - DNA, 15 bp, Homo sapiens
ctgaatctccaaaaa

SEQ ID NO: 171401 - DNA, 15 bp, Homo sapiens
cctgaatctccaaaa

SEQ ID NO: 171402 - DNA, 15 bp, Homo sapiens
tcctgaatctccaaa

SEQ ID NO: 171403 - DNA, 15 bp, Homo sapiens
ttcctgaatctccaa

SEQ ID NO: 171404 - DNA, 15 bp, Homo sapiens
attcctgaatctcca

SEQ ID NO: 171405 - DNA, 15 bp, Homo sapiens
gattcctgaatctcc

SEQ ID NO: 171406 - DNA, 15 bp, Homo sapiens
tgattcctgaatctc

SEQ ID NO: 171407 - DNA, 15 bp, Homo sapiens
ctgattcctgaatct

SEQ ID NO: 171408 - DNA, 15 bp, Homo sapiens
tctgattcctgaatc

SEQ ID NO: 171409 - DNA, 15 bp, Homo sapiens
atctgattcctgaat

SEQ ID NO: 171410 - DNA, 15 bp, Homo sapiens
aatctgattcctgaa

SEQ ID NO: 171411 - DNA, 15 bp, Homo sapiens
gaatctgattcctga

SEQ ID NO: 171412 - DNA, 15 bp, Homo sapiens
ggaatctgattcctg

SEQ ID NO: 171413 - DNA, 15 bp, Homo sapiens
aggaatctgattcct

SEQ ID NO: 171414 - DNA, 15 bp, Homo sapiens
caggaatctgattcc

SEQ ID NO: 171415 - DNA, 15 bp, Homo sapiens
ccaggaatctgattc

SEQ ID NO: 171416 - DNA, 15 bp, Homo sapiens
cccaggaatctgatt

SEQ ID NO: 171417 - DNA, 15 bp, Homo sapiens
gcccaggaatctgat

SEQ ID NO: 171418 - DNA, 15 bp, Homo sapiens
agcccaggaatctga

SEQ ID NO: 171419 - DNA, 15 bp, Homo sapiens
tagcccaggaatctg

SEQ ID NO: 171420 - DNA, 15 bp, Homo sapiens
ctagcccaggaatct

SEQ ID NO: 171421 - DNA, 15 bp, Homo sapiens
tctagcccaggaatc

SEQ ID NO: 171422 - DNA, 15 bp, Homo sapiens
atctagcccaggaat

SEQ ID NO: 171423 - DNA, 15 bp, Homo sapiens
catctagcccaggaa

SEQ ID NO: 171424 - DNA, 15 bp, Homo sapiens
gcatctagcccagga

SEQ ID NO: 171425 - DNA, 15 bp, Homo sapiens
ggcatctagcccagg

SEQ ID NO: 171426 - DNA, 15 bp, Homo sapiens
cggcatctagcccag

SEQ ID NO: 171427 - DNA, 15 bp, Homo sapiens
acggcatctagccca

SEQ ID NO: 171428 - DNA, 15 bp, Homo sapiens
cacggcatctagccc

SEQ ID NO: 171429 - DNA, 15 bp, Homo sapiens
gcacggcatctagcc

SEQ ID NO: 171430 - DNA, 15 bp, Homo sapiens
agcacggcatctagc

SEQ ID NO: 171431 - DNA, 15 bp, Homo sapiens
gagcacggcatctag

SEQ ID NO: 171432 - DNA, 15 bp, Homo sapiens
agagcacggcatcta

SEQ ID NO: 171433 - DNA, 15 bp, Homo sapiens
aagagcacggcatct

SEQ ID NO: 171434 - DNA, 15 bp, Homo sapiens
gaagagcacggcatc

SEQ ID NO: 171435 - DNA, 15 bp, Homo sapiens
tgaagagcacggcat

SEQ ID NO: 171436 - DNA, 15 bp, Homo sapiens
ttgaagagcacggca

SEQ ID NO: 171437 - DNA, 15 bp, Homo sapiens
cttgaagagcacggc

SEQ ID NO: 171438 - DNA, 15 bp, Homo sapiens
acttgaagagcacgg

SEQ ID NO: 171439 - DNA, 15 bp, Homo sapiens
aacttgaagagcacg

SEQ ID NO: 171440 - DNA, 15 bp, Homo sapiens
aaacttgaagagcac

SEQ ID NO: 171441 - DNA, 15 bp, Homo sapiens
taaacttgaagagca

SEQ ID NO: 171442 - DNA, 15 bp, Homo sapiens
ctaaacttgaagagc

SEQ ID NO: 171443 - DNA, 15 bp, Homo sapiens
gctaaacttgaagag

SEQ ID NO: 171444 - DNA, 15 bp, Homo sapiens
agctaaacttgaaga

SEQ ID NO: 171445 - DNA, 15 bp, Homo sapiens
cagctaaacttgaag

SEQ ID NO: 171446 - DNA, 15 bp, Homo sapiens
acagctaaacttgaa

SEQ ID NO: 171447 - DNA, 15 bp, Homo sapiens
cacagctaaacttga

SEQ ID NO: 171448 - DNA, 15 bp, Homo sapiens
tcacagctaaacttg

SEQ ID NO: 171449 - DNA, 15 bp, Homo sapiens
gtcacagctaaactt

SEQ ID NO: 171450 - DNA, 15 bp, Homo sapiens
ggtcacagctaaact

SEQ ID NO: 171451 - DNA, 15 bp, Homo sapiens
gggtcacagctaaac

SEQ ID NO: 171452 - DNA, 15 bp, Homo sapiens
agggtcacagctaaa

SEQ ID NO: 171453 - DNA, 15 bp, Homo sapiens
gagggtcacagctaa

SEQ ID NO: 171454 - DNA, 15 bp, Homo sapiens
agagggtcacagcta

SEQ ID NO: 171455 - DNA, 15 bp, Homo sapiens
gagagggtcacagct

SEQ ID NO: 171456 - DNA, 15 bp, Homo sapiens
tgagagggtcacagc

SEQ ID NO: 171457 - DNA, 15 bp, Homo sapiens
ttgagagggtcacag

SEQ ID NO: 171458 - DNA, 15 bp, Homo sapiens
gttgagagggtcaca

SEQ ID NO: 171459 - DNA, 15 bp, Homo sapiens
ggttgagagggtcac

SEQ ID NO: 171460 - DNA, 15 bp, Homo sapiens
tggttgagagggtca

SEQ ID NO: 171461 - DNA, 15 bp, Homo sapiens
gtggttgagagggtc

SEQ ID NO: 171462 - DNA, 15 bp, Homo sapiens
agtggttgagagggt

SEQ ID NO: 171463 - DNA, 15 bp, Homo sapiens
aagtggttgagaggg

SEQ ID NO: 171464 - DNA, 15 bp, Homo sapiens
caagtggttgagagg

SEQ ID NO: 171465 - DNA, 15 bp, Homo sapiens
ccaagtggttgagag

SEQ ID NO: 171466 - DNA, 15 bp, Homo sapiens
cccaagtggttgaga

SEQ ID NO: 171467 - DNA, 15 bp, Homo sapiens
tcccaagtggttgag

SEQ ID NO: 171468 - DNA, 15 bp, Homo sapiens
ttcccaagtggttga

SEQ ID NO: 171469 - DNA, 15 bp, Homo sapiens
attcccaagtggttg

SEQ ID NO: 171470 - DNA, 15 bp, Homo sapiens
aattcccaagtggtt

SEQ ID NO: 171471 - DNA, 15 bp, Homo sapiens
aaattcccaagtggt

SEQ ID NO: 171472 - DNA, 15 bp, Homo sapiens
aaaattcccaagtgg

SEQ ID NO: 171473 - DNA, 15 bp, Homo sapiens
aaaaattcccaagtg

SEQ ID NO: 171474 - DNA, 15 bp, Homo sapiens
aaaaaattcccaagt

SEQ ID NO: 171475 - DNA, 15 bp, Homo sapiens
gaaaaaattcccaag

SEQ ID NO: 171476 - DNA, 15 bp, Homo sapiens
ggaaaaaattcccaa

SEQ ID NO: 171477 - DNA, 15 bp, Homo sapiens
aggaaaaaattccca

SEQ ID NO: 171478 - DNA, 15 bp, Homo sapiens
aaggaaaaaattccc

SEQ ID NO: 171479 - DNA, 15 bp, Homo sapiens
aaaggaaaaaattcc

SEQ ID NO: 171480 - DNA, 15 bp, Homo sapiens
taaaggaaaaaattc

SEQ ID NO: 171481 - DNA, 15 bp, Homo sapiens
ttaaaggaaaaaatt

SEQ ID NO: 171482 - DNA, 15 bp, Homo sapiens
tttaaaggaaaaaat

SEQ ID NO: 171483 - DNA, 15 bp, Homo sapiens
gtttaaaggaaaaaa

SEQ ID NO: 171484 - DNA, 15 bp, Homo sapiens
tgtttaaaggaaaaa

SEQ ID NO: 171485 - DNA, 15 bp, Homo sapiens
ttgtttaaaggaaaa

SEQ ID NO: 171486 - DNA, 15 bp, Homo sapiens
attgtttaaaggaaa

SEQ ID NO: 171487 - DNA, 15 bp, Homo sapiens
aattgtttaaaggaa

SEQ ID NO: 171488 - DNA, 15 bp, Homo sapiens
taattgtttaaagga

SEQ ID NO: 171489 - DNA, 15 bp, Homo sapiens
ataattgtttaaagg

SEQ ID NO: 171490 - DNA, 15 bp, Homo sapiens
tataattgtttaaag

SEQ ID NO: 171491 - DNA, 15 bp, Homo sapiens
ttataattgtttaaa

SEQ ID NO: 171492 - DNA, 15 bp, Homo sapiens
gttataattgtttaa

SEQ ID NO: 171493 - DNA, 15 bp, Homo sapiens
tgttataattgttta

SEQ ID NO: 171494 - DNA, 15 bp, Homo sapiens
ttgttataattgttt

SEQ ID NO: 171495 - DNA, 15 bp, Homo sapiens
attgttataattgtt

SEQ ID NO: 171496 - DNA, 15 bp, Homo sapiens
aattgttataattgt

SEQ ID NO: 171497 - DNA, 15 bp, Homo sapiens
caattgttataattg

SEQ ID NO: 171498 - DNA, 15 bp, Homo sapiens
acaattgttataatt

SEQ ID NO: 171499 - DNA, 15 bp, Homo sapiens
aacaattgttataat

SEQ ID NO: 171500 - DNA, 15 bp, Homo sapiens
aaacaattgttataa

SEQ ID NO: 171501 - DNA, 15 bp, Homo sapiens
aaaacaattgttata

SEQ ID NO: 171502 - DNA, 15 bp, Homo sapiens
aaaaacaattgttat

SEQ ID NO: 171503 - DNA, 15 bp, Homo sapiens
caaaaacaattgtta

SEQ ID NO: 171504 - DNA, 15 bp, Homo sapiens
tcaaaaacaattgtt

SEQ ID NO: 171505 - DNA, 15 bp, Homo sapiens
ttcaaaaacaattgt

SEQ ID NO: 171506 - DNA, 15 bp, Homo sapiens
tttcaaaaacaattg

SEQ ID NO: 171507 - DNA, 15 bp, Homo sapiens
ttttcaaaaacaatt

SEQ ID NO: 171508 - DNA, 15 bp, Homo sapiens
attttcaaaaacaat

SEQ ID NO: 171509 - DNA, 15 bp, Homo sapiens
tattttcaaaaacaa

SEQ ID NO: 171510 - DNA, 15 bp, Homo sapiens
atattttcaaaaaca

SEQ ID NO: 171511 - DNA, 15 bp, Homo sapiens
gatattttcaaaaac

SEQ ID NO: 171512 - DNA, 15 bp, Homo sapiens
tgatattttcaaaaa

SEQ ID NO: 171513 - DNA, 15 bp, Homo sapiens
ttgatattttcaaaa

SEQ ID NO: 171514 - DNA, 15 bp, Homo sapiens
tttgatattttcaaa

SEQ ID NO: 171515 - DNA, 15 bp, Homo sapiens
ctttgatattttcaa

SEQ ID NO: 171516 - DNA, 15 bp, Homo sapiens
actttgatattttca

SEQ ID NO: 171517 - DNA, 15 bp, Homo sapiens
aactttgatattttc

SEQ ID NO: 171518 - DNA, 15 bp, Homo sapiens
gaactttgatatttt

SEQ ID NO: 171519 - DNA, 15 bp, Homo sapiens
tgaactttgatattt

SEQ ID NO: 171520 - DNA, 15 bp, Homo sapiens
ctgaactttgatatt

SEQ ID NO: 171521 - DNA, 15 bp, Homo sapiens
tctgaactttgatat

SEQ ID NO: 171522 - DNA, 15 bp, Homo sapiens
ctctgaactttgata

SEQ ID NO: 171523 - DNA, 15 bp, Homo sapiens
tctctgaactttgat

SEQ ID NO: 171524 - DNA, 15 bp, Homo sapiens
ttctctgaactttga

SEQ ID NO: 171525 - DNA, 15 bp, Homo sapiens
cttctctgaactttg

SEQ ID NO: 171526 - DNA, 15 bp, Homo sapiens
tcttctctgaacttt

SEQ ID NO: 171527 - DNA, 15 bp, Homo sapiens
ttcttctctgaactt

SEQ ID NO: 171528 - DNA, 15 bp, Homo sapiens
tttcttctctgaact

SEQ ID NO: 171529 - DNA, 15 bp, Homo sapiens
atttcttctctgaac

SEQ ID NO: 171530 - DNA, 15 bp, Homo sapiens
aatttcttctctgaa

SEQ ID NO: 171531 - DNA, 15 bp, Homo sapiens
aaatttcttctctga

SEQ ID NO: 171532 - DNA, 15 bp, Homo sapiens
taaatttcttctctg

SEQ ID NO: 171533 - DNA, 15 bp, Homo sapiens
ttaaatttcttctct

SEQ ID NO: 171534 - DNA, 15 bp, Homo sapiens
tttaaatttcttctc

SEQ ID NO: 171535 - DNA, 15 bp, Homo sapiens
ttttaaatttcttct

SEQ ID NO: 171536 - DNA, 15 bp, Homo sapiens
tttttaaatttcttc

SEQ ID NO: 171537 - DNA, 15 bp, Homo sapiens
atttttaaatttctt

SEQ ID NO: 171538 - DNA, 15 bp, Homo sapiens
aatttttaaatttct

SEQ ID NO: 171539 - DNA, 15 bp, Homo sapiens
taatttttaaatttc

SEQ ID NO: 171540 - DNA, 15 bp, Homo sapiens
gtaatttttaaattt

SEQ ID NO: 171541 - DNA, 15 bp, Homo sapiens
agtaatttttaaatt

SEQ ID NO: 171542 - DNA, 15 bp, Homo sapiens
gagtaatttttaaat

SEQ ID NO: 171543 - DNA, 15 bp, Homo sapiens
tgagtaatttttaaa

SEQ ID NO: 171544 - DNA, 15 bp, Homo sapiens
ttgagtaatttttaa

SEQ ID NO: 171545 - DNA, 15 bp, Homo sapiens
tttgagtaattttta

SEQ ID NO: 171546 - DNA, 15 bp, Homo sapiens
ttttgagtaattttt

SEQ ID NO: 171547 - DNA, 15 bp, Homo sapiens
tttttgagtaatttt

SEQ ID NO: 171548 - DNA, 15 bp, Homo sapiens
atttttgagtaattt

SEQ ID NO: 171549 - DNA, 15 bp, Homo sapiens
gatttttgagtaatt

SEQ ID NO: 171550 - DNA, 15 bp, Homo sapiens
agatttttgagtaat

SEQ ID NO: 171551 - DNA, 15 bp, Homo sapiens
gagatttttgagtaa

SEQ ID NO: 171552 - DNA, 15 bp, Homo sapiens
tgagatttttgagta

SEQ ID NO: 171553 - DNA, 15 bp, Homo sapiens
gtgagatttttgagt

SEQ ID NO: 171554 - DNA, 15 bp, Homo sapiens
agtgagatttttgag

SEQ ID NO: 171555 - DNA, 15 bp, Homo sapiens
aagtgagatttttga

SEQ ID NO: 171556 - DNA, 15 bp, Homo sapiens
gaagtgagatttttg

SEQ ID NO: 171557 - DNA, 15 bp, Homo sapiens
ggaagtgagattttt

SEQ ID NO: 171558 - DNA, 15 bp, Homo sapiens
aggaagtgagatttt

SEQ ID NO: 171559 - DNA, 15 bp, Homo sapiens
taggaagtgagattt

SEQ ID NO: 171560 - DNA, 15 bp, Homo sapiens
ctaggaagtgagatt

SEQ ID NO: 171561 - DNA, 15 bp, Homo sapiens
tctaggaagtgagat

SEQ ID NO: 171562 - DNA, 15 bp, Homo sapiens
gtctaggaagtgaga

SEQ ID NO: 171563 - DNA, 15 bp, Homo sapiens
tgtctaggaagtgag

SEQ ID NO: 171564 - DNA, 15 bp, Homo sapiens
atgtctaggaagtga

SEQ ID NO: 171565 - DNA, 15 bp, Homo sapiens
tatgtctaggaagtg

SEQ ID NO: 171566 - DNA, 15 bp, Homo sapiens
ttatgtctaggaagt

SEQ ID NO: 171567 - DNA, 15 bp, Homo sapiens
gttatgtctaggaag

SEQ ID NO: 171568 - DNA, 15 bp, Homo sapiens
ggttatgtctaggaa

SEQ ID NO: 171569 - DNA, 15 bp, Homo sapiens
tggttatgtctagga

SEQ ID NO: 171570 - DNA, 15 bp, Homo sapiens
atggttatgtctagg

SEQ ID NO: 171571 - DNA, 15 bp, Homo sapiens
gatggttatgtctag

SEQ ID NO: 171572 - DNA, 15 bp, Homo sapiens
tgatggttatgtcta

SEQ ID NO: 171573 - DNA, 15 bp, Homo sapiens
atgatggttatgtct

SEQ ID NO: 171574 - DNA, 15 bp, Homo sapiens
catgatggttatgtc

SEQ ID NO: 171575 - DNA, 15 bp, Homo sapiens
tcatgatggttatgt

SEQ ID NO: 171576 - DNA, 15 bp, Homo sapiens
ttcatgatggttatg

SEQ ID NO: 171577 - DNA, 15 bp, Homo sapiens
gttcatgatggttat

SEQ ID NO: 171578 - DNA, 15 bp, Homo sapiens
tgttcatgatggtta

SEQ ID NO: 171579 - DNA, 15 bp, Homo sapiens
atgttcatgatggtt

SEQ ID NO: 171580 - DNA, 15 bp, Homo sapiens
aatgttcatgatggt

SEQ ID NO: 171581 - DNA, 15 bp, Homo sapiens
taatgttcatgatgg

SEQ ID NO: 171582 - DNA, 15 bp, Homo sapiens
ttaatgttcatgatg

SEQ ID NO: 171583 - DNA, 15 bp, Homo sapiens
cttaatgttcatgat

SEQ ID NO: 171584 - DNA, 15 bp, Homo sapiens
tcttaatgttcatga

SEQ ID NO: 171585 - DNA, 15 bp, Homo sapiens
ttcttaatgttcatg

SEQ ID NO: 171586 - DNA, 15 bp, Homo sapiens
tttcttaatgttcat

SEQ ID NO: 171587 - DNA, 15 bp, Homo sapiens
ttttcttaatgttca

SEQ ID NO: 171588 - DNA, 15 bp, Homo sapiens
gttttcttaatgttc

SEQ ID NO: 171589 - DNA, 15 bp, Homo sapiens
agttttcttaatgtt

SEQ ID NO: 171590 - DNA, 15 bp, Homo sapiens
gagttttcttaatgt

SEQ ID NO: 171591 - DNA, 15 bp, Homo sapiens
tgagttttcttaatg

SEQ ID NO: 171592 - DNA, 15 bp, Homo sapiens
gtgagttttcttaat

SEQ ID NO: 171593 - DNA, 15 bp, Homo sapiens
cgtgagttttcttaa

SEQ ID NO: 171594 - DNA, 15 bp, Homo sapiens
acgtgagttttctta

SEQ ID NO: 171595 - DNA, 15 bp, Homo sapiens
tacgtgagttttctt

SEQ ID NO: 171596 - DNA, 15 bp, Homo sapiens
ttacgtgagttttct

SEQ ID NO: 171597 - DNA, 15 bp, Homo sapiens
attacgtgagttttc

SEQ ID NO: 171598 - DNA, 15 bp, Homo sapiens
gattacgtgagtttt

SEQ ID NO: 171599 - DNA, 15 bp, Homo sapiens
agattacgtgagttt

SEQ ID NO: 171600 - DNA, 15 bp, Homo sapiens
gagattacgtgagtt

SEQ ID NO: 171601 - DNA, 15 bp, Homo sapiens
agagattacgtgagt

SEQ ID NO: 171602 - DNA, 15 bp, Homo sapiens
gagagattacgtgag

SEQ ID NO: 171603 - DNA, 15 bp, Homo sapiens
agagagattacgtga

SEQ ID NO: 171604 - DNA, 15 bp, Homo sapiens
tagagagattacgtg

SEQ ID NO: 171605 - DNA, 15 bp, Homo sapiens
atagagagattacgt

SEQ ID NO: 171606 - DNA, 15 bp, Homo sapiens
gatagagagattacg

SEQ ID NO: 171607 - DNA, 15 bp, Homo sapiens
tgatagagagattac

SEQ ID NO: 171608 - DNA, 15 bp, Homo sapiens
atgatagagagatta

SEQ ID NO: 171609 - DNA, 15 bp, Homo sapiens
gatgatagagagatt

SEQ ID NO: 171610 - DNA, 15 bp, Homo sapiens
tgatgatagagagat

SEQ ID NO: 171611 - DNA, 15 bp, Homo sapiens
gtgatgatagagaga

SEQ ID NO: 171612 - DNA, 15 bp, Homo sapiens
tgtgatgatagagag

SEQ ID NO: 171613 - DNA, 15 bp, Homo sapiens
gtgtgatgatagaga

SEQ ID NO: 171614 - DNA, 15 bp, Homo sapiens
tgtgtgatgatagag

SEQ ID NO: 171615 - DNA, 15 bp, Homo sapiens
gtgtgtgatgataga

SEQ ID NO: 171616 - DNA, 15 bp, Homo sapiens
tgtgtgtgatgatag

SEQ ID NO: 171617 - DNA, 15 bp, Homo sapiens
gtgtgtgtgatgata

SEQ ID NO: 171618 - DNA, 15 bp, Homo sapiens
tgtgtgtgtgatgat

SEQ ID NO: 171619 - DNA, 15 bp, Homo sapiens
gtgtgtgtgtgatga

SEQ ID NO: 171620 - DNA, 15 bp, Homo sapiens
tgtgtgtgtgtgatg

SEQ ID NO: 171621 - DNA, 15 bp, Homo sapiens
gtgtgtgtgtgtgat

SEQ ID NO: 171622 - DNA, 15 bp, Homo sapiens
tgtgtgtgtgtgtga

SEQ ID NO: 171623 - DNA, 15 bp, Homo sapiens
gtgtgtgtgtgtgtg

SEQ ID NO: 171624 - DNA, 15 bp, Homo sapiens
tgtgtgtgtgtgtgt

SEQ ID NO: 171625 - DNA, 15 bp, Homo sapiens
ctgtgtgtgtgtgtg

SEQ ID NO: 171626 - DNA, 15 bp, Homo sapiens
gctgtgtgtgtgtgt

SEQ ID NO: 171627 - DNA, 15 bp, Homo sapiens
agctgtgtgtgtgtg

SEQ ID NO: 171628 - DNA, 15 bp, Homo sapiens
cagctgtgtgtgtgt

SEQ ID NO: 171629 - DNA, 15 bp, Homo sapiens
ccagctgtgtgtgtg

SEQ ID NO: 171630 - DNA, 15 bp, Homo sapiens
tccagctgtgtgtgt

SEQ ID NO: 171631 - DNA, 15 bp, Homo sapiens
ttccagctgtgtgtg

SEQ ID NO: 171632 - DNA, 15 bp, Homo sapiens
tttccagctgtgtgt

SEQ ID NO: 171633 - DNA, 15 bp, Homo sapiens
ctttccagctgtgtg

SEQ ID NO: 171634 - DNA, 15 bp, Homo sapiens
tctttccagctgtgt

SEQ ID NO: 171635 - DNA, 15 bp, Homo sapiens
atctttccagctgtg

SEQ ID NO: 171636 - DNA, 15 bp, Homo sapiens
tatctttccagctgt

SEQ ID NO: 171637 - DNA, 15 bp, Homo sapiens
atatctttccagctg

SEQ ID NO: 171638 - DNA, 15 bp, Homo sapiens
catatctttccagct

SEQ ID NO: 171639 - DNA, 15 bp, Homo sapiens
acatatctttccagc

SEQ ID NO: 171640 - DNA, 15 bp, Homo sapiens
tacatatctttccag

SEQ ID NO: 171641 - DNA, 15 bp, Homo sapiens
ctacatatctttcca

SEQ ID NO: 171642 - DNA, 15 bp, Homo sapiens
tctacatatctttcc

SEQ ID NO: 171643 - DNA, 15 bp, Homo sapiens
atctacatatctttc

SEQ ID NO: 171644 - DNA, 15 bp, Homo sapiens
gatctacatatcttt

SEQ ID NO: 171645 - DNA, 15 bp, Homo sapiens
tgatctacatatctt

SEQ ID NO: 171646 - DNA, 15 bp, Homo sapiens
gtgatctacatatct

SEQ ID NO: 171647 - DNA, 15 bp, Homo sapiens
tgtgatctacatatc

SEQ ID NO: 171648 - DNA, 15 bp, Homo sapiens
ctgtgatctacatat

SEQ ID NO: 171649 - DNA, 15 bp, Homo sapiens
tctgtgatctacata

SEQ ID NO: 171650 - DNA, 15 bp, Homo sapiens
atctgtgatctacat

SEQ ID NO: 171651 - DNA, 15 bp, Homo sapiens
aatctgtgatctaca

SEQ ID NO: 171652 - DNA, 15 bp, Homo sapiens
caatctgtgatctac

SEQ ID NO: 171653 - DNA, 15 bp, Homo sapiens
tcaatctgtgatcta

SEQ ID NO: 171654 - DNA, 15 bp, Homo sapiens
gtcaatctgtgatct

SEQ ID NO: 171655 - DNA, 15 bp, Homo sapiens
tgtcaatctgtgatc

SEQ ID NO: 171656 - DNA, 15 bp, Homo sapiens
ctgtcaatctgtgat

SEQ ID NO: 171657 - DNA, 15 bp, Homo sapiens
cctgtcaatctgtga

SEQ ID NO: 171658 - DNA, 15 bp, Homo sapiens
tcctgtcaatctgtg

SEQ ID NO: 171659 - DNA, 15 bp, Homo sapiens
ttcctgtcaatctgt

SEQ ID NO: 171660 - DNA, 15 bp, Homo sapiens
attcctgtcaatctg

SEQ ID NO: 171661 - DNA, 15 bp, Homo sapiens
tattcctgtcaatct

SEQ ID NO: 171662 - DNA, 15 bp, Homo sapiens
ttattcctgtcaatc

SEQ ID NO: 171663 - DNA, 15 bp, Homo sapiens
attattcctgtcaat

SEQ ID NO: 171664 - DNA, 15 bp, Homo sapiens
aattattcctgtcaa

SEQ ID NO: 171665 - DNA, 15 bp, Homo sapiens
aaattattcctgtca

SEQ ID NO: 171666 - DNA, 15 bp, Homo sapiens
aaaattattcctgtc

SEQ ID NO: 171667 - DNA, 15 bp, Homo sapiens
taaaattattcctgt

SEQ ID NO: 171668 - DNA, 15 bp, Homo sapiens
ctaaaattattcctg

SEQ ID NO: 171669 - DNA, 15 bp, Homo sapiens
tctaaaattattcct

SEQ ID NO: 171670 - DNA, 15 bp, Homo sapiens
ttctaaaattattcc

SEQ ID NO: 171671 - DNA, 15 bp, Homo sapiens
attctaaaattattc

SEQ ID NO: 171672 - DNA, 15 bp, Homo sapiens
tattctaaaattatt

SEQ ID NO: 171673 - DNA, 15 bp, Homo sapiens
ttattctaaaattat

SEQ ID NO: 171674 - DNA, 15 bp, Homo sapiens
attattctaaaatta

SEQ ID NO: 171675 - DNA, 15 bp, Homo sapiens
cattattctaaaatt

SEQ ID NO: 171676 - DNA, 15 bp, Homo sapiens
ccattattctaaaat

SEQ ID NO: 171677 - DNA, 15 bp, Homo sapiens
cccattattctaaaa

SEQ ID NO: 171678 - DNA, 15 bp, Homo sapiens
tcccattattctaaa

SEQ ID NO: 171679 - DNA, 15 bp, Homo sapiens
atcccattattctaa

SEQ ID NO: 171680 - DNA, 15 bp, Homo sapiens
gatcccattattcta

SEQ ID NO: 171681 - DNA, 15 bp, Homo sapiens
tgatcccattattct

SEQ ID NO: 171682 - DNA, 15 bp, Homo sapiens
gtgatcccattattc

SEQ ID NO: 171683 - DNA, 15 bp, Homo sapiens
tgtgatcccattatt

SEQ ID NO: 171684 - DNA, 15 bp, Homo sapiens
gtgtgatcccattat

SEQ ID NO: 171685 - DNA, 15 bp, Homo sapiens
agtgtgatcccatta

SEQ ID NO: 171686 - DNA, 15 bp, Homo sapiens
gagtgtgatcccatt

SEQ ID NO: 171687 - DNA, 15 bp, Homo sapiens
agagtgtgatcccat

SEQ ID NO: 171688 - DNA, 15 bp, Homo sapiens
tagagtgtgatccca

SEQ ID NO: 171689 - DNA, 15 bp, Homo sapiens
gtagagtgtgatccc

SEQ ID NO: 171690 - DNA, 15 bp, Homo sapiens
tgtagagtgtgatcc

SEQ ID NO: 171691 - DNA, 15 bp, Homo sapiens
atgtagagtgtgatc

SEQ ID NO: 171692 - DNA, 15 bp, Homo sapiens
gatgtagagtgtgat

SEQ ID NO: 171693 - DNA, 15 bp, Homo sapiens
ggatgtagagtgtga

SEQ ID NO: 171694 - DNA, 15 bp, Homo sapiens
gggatgtagagtgtg

SEQ ID NO: 171695 - DNA, 15 bp, Homo sapiens
tgggatgtagagtgt

SEQ ID NO: 171696 - DNA, 15 bp, Homo sapiens
ttgggatgtagagtg

SEQ ID NO: 171697 - DNA, 15 bp, Homo sapiens
attgggatgtagagt

SEQ ID NO: 171698 - DNA, 15 bp, Homo sapiens
aattgggatgtagag

SEQ ID NO: 171699 - DNA, 15 bp, Homo sapiens
aaattgggatgtaga

SEQ ID NO: 171700 - DNA, 15 bp, Homo sapiens
aaaattgggatgtag

SEQ ID NO: 171701 - DNA, 15 bp, Homo sapiens
taaaattgggatgta

SEQ ID NO: 171702 - DNA, 15 bp, Homo sapiens
ttaaaattgggatgt

SEQ ID NO: 171703 - DNA, 15 bp, Homo sapiens
gttaaaattgggatg

SEQ ID NO: 171704 - DNA, 15 bp, Homo sapiens
tgttaaaattgggat

SEQ ID NO: 171705 - DNA, 15 bp, Homo sapiens
ttgttaaaattggga

SEQ ID NO: 171706 - DNA, 15 bp, Homo sapiens
tttgttaaaattggg

SEQ ID NO: 171707 - DNA, 15 bp, Homo sapiens
ctttgttaaaattgg

SEQ ID NO: 171708 - DNA, 15 bp, Homo sapiens
tctttgttaaaattg

SEQ ID NO: 171709 - DNA, 15 bp, Homo sapiens
ctctttgttaaaatt

SEQ ID NO: 171710 - DNA, 15 bp, Homo sapiens
actctttgttaaaat

SEQ ID NO: 171711 - DNA, 15 bp, Homo sapiens
tactctttgttaaaa

SEQ ID NO: 171712 - DNA, 15 bp, Homo sapiens
atactctttgttaaa

SEQ ID NO: 171713 - DNA, 15 bp, Homo sapiens
aatactctttgttaa

SEQ ID NO: 171714 - DNA, 15 bp, Homo sapiens
taatactctttgtta

SEQ ID NO: 171715 - DNA, 15 bp, Homo sapiens
ttaatactctttgtt

SEQ ID NO: 171716 - DNA, 15 bp, Homo sapiens
gttaatactctttgt

SEQ ID NO: 171717 - DNA, 15 bp, Homo sapiens
cgttaatactctttg

SEQ ID NO: 171718 - DNA, 15 bp, Homo sapiens
acgttaatactcttt

SEQ ID NO: 171719 - DNA, 15 bp, Homo sapiens
tacgttaatactctt

SEQ ID NO: 171720 - DNA, 15 bp, Homo sapiens
gtacgttaatactct

SEQ ID NO: 171721 - DNA, 15 bp, Homo sapiens
tgtacgttaatactc

SEQ ID NO: 171722 - DNA, 15 bp, Homo sapiens
atgtacgttaatact

SEQ ID NO: 171723 - DNA, 15 bp, Homo sapiens
catgtacgttaatac

SEQ ID NO: 171724 - DNA, 15 bp, Homo sapiens
ccatgtacgttaata

SEQ ID NO: 171725 - DNA, 15 bp, Homo sapiens
gccatgtacgttaat

SEQ ID NO: 171726 - DNA, 15 bp, Homo sapiens
agccatgtacgttaa

SEQ ID NO: 171727 - DNA, 15 bp, Homo sapiens
aagccatgtacgtta

SEQ ID NO: 171728 - DNA, 15 bp, Homo sapiens
taagccatgtacgtt

SEQ ID NO: 171729 - DNA, 15 bp, Homo sapiens
ttaagccatgtacgt

SEQ ID NO: 171730 - DNA, 15 bp, Homo sapiens
tttaagccatgtacg

SEQ ID NO: 171731 - DNA, 15 bp, Homo sapiens
atttaagccatgtac

SEQ ID NO: 171732 - DNA, 15 bp, Homo sapiens
aatttaagccatgta

SEQ ID NO: 171733 - DNA, 15 bp, Homo sapiens
aaatttaagccatgt

SEQ ID NO: 171734 - DNA, 15 bp, Homo sapiens
gaaatttaagccatg

SEQ ID NO: 171735 - DNA, 15 bp, Homo sapiens
agaaatttaagccat

SEQ ID NO: 171736 - DNA, 15 bp, Homo sapiens
tagaaatttaagcca

SEQ ID NO: 171737 - DNA, 15 bp, Homo sapiens
ttagaaatttaagcc

SEQ ID NO: 171738 - DNA, 15 bp, Homo sapiens
cttagaaatttaagc

SEQ ID NO: 171739 - DNA, 15 bp, Homo sapiens
tcttagaaatttaag

SEQ ID NO: 171740 - DNA, 15 bp, Homo sapiens
ctcttagaaatttaa

SEQ ID NO: 171741 - DNA, 15 bp, Homo sapiens
cctcttagaaattta

SEQ ID NO: 171742 - DNA, 15 bp, Homo sapiens
tcctcttagaaattt

SEQ ID NO: 171743 - DNA, 15 bp, Homo sapiens
ttcctcttagaaatt

SEQ ID NO: 171744 - DNA, 15 bp, Homo sapiens
tttcctcttagaaat

SEQ ID NO: 171745 - DNA, 15 bp, Homo sapiens
gtttcctcttagaaa

SEQ ID NO: 171746 - DNA, 15 bp, Homo sapiens
tgtttcctcttagaa

SEQ ID NO: 171747 - DNA, 15 bp, Homo sapiens
ttgtttcctcttaga

SEQ ID NO: 171748 - DNA, 15 bp, Homo sapiens
cttgtttcctcttag

SEQ ID NO: 171749 - DNA, 15 bp, Homo sapiens
acttgtttcctctta

SEQ ID NO: 171750 - DNA, 15 bp, Homo sapiens
tacttgtttcctctt

SEQ ID NO: 171751 - DNA, 15 bp, Homo sapiens
gtacttgtttcctct

SEQ ID NO: 171752 - DNA, 15 bp, Homo sapiens
tgtacttgtttcctc

SEQ ID NO: 171753 - DNA, 15 bp, Homo sapiens
atgtacttgtttcct

SEQ ID NO: 171754 - DNA, 15 bp, Homo sapiens
gatgtacttgtttcc

SEQ ID NO: 171755 - DNA, 15 bp, Homo sapiens
agatgtacttgtttc

SEQ ID NO: 171756 - DNA, 15 bp, Homo sapiens
tagatgtacttgttt

SEQ ID NO: 171757 - DNA, 15 bp, Homo sapiens
ttagatgtacttgtt

SEQ ID NO: 171758 - DNA, 15 bp, Homo sapiens
tttagatgtacttgt

SEQ ID NO: 171759 - DNA, 15 bp, Homo sapiens
ctttagatgtacttg

SEQ ID NO: 171760 - DNA, 15 bp, Homo sapiens
cctttagatgtactt

SEQ ID NO: 171761 - DNA, 15 bp, Homo sapiens
tcctttagatgtact

SEQ ID NO: 171762 - DNA, 15 bp, Homo sapiens
ttcctttagatgtac

SEQ ID NO: 171763 - DNA, 15 bp, Homo sapiens
cttcctttagatgta

SEQ ID NO: 171764 - DNA, 15 bp, Homo sapiens
acttcctttagatgt

SEQ ID NO: 171765 - DNA, 15 bp, Homo sapiens
aacttcctttagatg

SEQ ID NO: 171766 - DNA, 15 bp, Homo sapiens
gaacttcctttagat

SEQ ID NO: 171767 - DNA, 15 bp, Homo sapiens
agaacttcctttaga

SEQ ID NO: 171768 - DNA, 15 bp, Homo sapiens
cagaacttcctttag

SEQ ID NO: 171769 - DNA, 15 bp, Homo sapiens
tcagaacttccttta

SEQ ID NO: 171770 - DNA, 15 bp, Homo sapiens
ctcagaacttccttt

SEQ ID NO: 171771 - DNA, 15 bp, Homo sapiens
actcagaacttcctt

SEQ ID NO: 171772 - DNA, 15 bp, Homo sapiens
aactcagaacttcct

SEQ ID NO: 171773 - DNA, 15 bp, Homo sapiens
gaactcagaacttcc

SEQ ID NO: 171774 - DNA, 15 bp, Homo sapiens
agaactcagaacttc

SEQ ID NO: 171775 - DNA, 15 bp, Homo sapiens
cagaactcagaactt

SEQ ID NO: 171776 - DNA, 15 bp, Homo sapiens
ccagaactcagaact

SEQ ID NO: 171777 - DNA, 15 bp, Homo sapiens
tccagaactcagaac

SEQ ID NO: 171778 - DNA, 15 bp, Homo sapiens
ttccagaactcagaa

SEQ ID NO: 171779 - DNA, 15 bp, Homo sapiens
tttccagaactcaga

SEQ ID NO: 171780 - DNA, 15 bp, Homo sapiens
ttttccagaactcag

SEQ ID NO: 171781 - DNA, 15 bp, Homo sapiens
tttttccagaactca

SEQ ID NO: 171782 - DNA, 15 bp, Homo sapiens
atttttccagaactc

SEQ ID NO: 171783 - DNA, 15 bp, Homo sapiens
tatttttccagaact

SEQ ID NO: 171784 - DNA, 15 bp, Homo sapiens
atatttttccagaac

SEQ ID NO: 171785 - DNA, 15 bp, Homo sapiens
catatttttccagaa

SEQ ID NO: 171786 - DNA, 15 bp, Homo sapiens
acatatttttccaga

SEQ ID NO: 171787 - DNA, 15 bp, Homo sapiens
gacatatttttccag

SEQ ID NO: 171788 - DNA, 15 bp, Homo sapiens
agacatatttttcca

SEQ ID NO: 171789 - DNA, 15 bp, Homo sapiens
aagacatatttttcc

SEQ ID NO: 171790 - DNA, 15 bp, Homo sapiens
gaagacatatttttc

SEQ ID NO: 171791 - DNA, 15 bp, Homo sapiens
tgaagacatattttt

SEQ ID NO: 171792 - DNA, 15 bp, Homo sapiens
atgaagacatatttt

SEQ ID NO: 171793 - DNA, 15 bp, Homo sapiens
aatgaagacatattt

SEQ ID NO: 171794 - DNA, 15 bp, Homo sapiens
caatgaagacatatt

SEQ ID NO: 171795 - DNA, 15 bp, Homo sapiens
tcaatgaagacatat

SEQ ID NO: 171796 - DNA, 15 bp, Homo sapiens
ttcaatgaagacata

SEQ ID NO: 171797 - DNA, 15 bp, Homo sapiens
tttcaatgaagacat

SEQ ID NO: 171798 - DNA, 15 bp, Homo sapiens
atttcaatgaagaca

SEQ ID NO: 171799 - DNA, 15 bp, Homo sapiens
catttcaatgaagac

SEQ ID NO: 171800 - DNA, 15 bp, Homo sapiens
ccatttcaatgaaga

SEQ ID NO: 171801 - DNA, 15 bp, Homo sapiens
tccatttcaatgaag

SEQ ID NO: 171802 - DNA, 15 bp, Homo sapiens
atccatttcaatgaa

SEQ ID NO: 171803 - DNA, 15 bp, Homo sapiens
tatccatttcaatga

SEQ ID NO: 171804 - DNA, 15 bp, Homo sapiens
atatccatttcaatg

SEQ ID NO: 171805 - DNA, 15 bp, Homo sapiens
gatatccatttcaat

SEQ ID NO: 171806 - DNA, 15 bp, Homo sapiens
agatatccatttcaa

SEQ ID NO: 171807 - DNA, 15 bp, Homo sapiens
aagatatccatttca

SEQ ID NO: 171808 - DNA, 15 bp, Homo sapiens
aaagatatccatttc

SEQ ID NO: 171809 - DNA, 15 bp, Homo sapiens
aaaagatatccattt

SEQ ID NO: 171810 - DNA, 15 bp, Homo sapiens
taaaagatatccatt

SEQ ID NO: 171811 - DNA, 15 bp, Homo sapiens
ctaaaagatatccat

SEQ ID NO: 171812 - DNA, 15 bp, Homo sapiens
tctaaaagatatcca

SEQ ID NO: 171813 - DNA, 15 bp, Homo sapiens
ttctaaaagatatcc

SEQ ID NO: 171814 - DNA, 15 bp, Homo sapiens
cttctaaaagatatc

SEQ ID NO: 171815 - DNA, 15 bp, Homo sapiens
tcttctaaaagatat

SEQ ID NO: 171816 - DNA, 15 bp, Homo sapiens
ctcttctaaaagata

SEQ ID NO: 171817 - DNA, 15 bp, Homo sapiens
gctcttctaaaagat

SEQ ID NO: 171818 - DNA, 15 bp, Homo sapiens
agctcttctaaaaga

SEQ ID NO: 171819 - DNA, 15 bp, Homo sapiens
gagctcttctaaaag

SEQ ID NO: 171820 - DNA, 15 bp, Homo sapiens
tgagctcttctaaaa

SEQ ID NO: 171821 - DNA, 15 bp, Homo sapiens
atgagctcttctaaa

SEQ ID NO: 171822 - DNA, 15 bp, Homo sapiens
gatgagctcttctaa

SEQ ID NO: 171823 - DNA, 15 bp, Homo sapiens
tgatgagctcttcta

SEQ ID NO: 171824 - DNA, 15 bp, Homo sapiens
ttgatgagctcttct

SEQ ID NO: 171825 - DNA, 15 bp, Homo sapiens
cttgatgagctcttc

SEQ ID NO: 171826 - DNA, 15 bp, Homo sapiens
ccttgatgagctctt

SEQ ID NO: 171827 - DNA, 15 bp, Homo sapiens
accttgatgagctct

SEQ ID NO: 171828 - DNA, 15 bp, Homo sapiens
aaccttgatgagctc

SEQ ID NO: 171829 - DNA, 15 bp, Homo sapiens
taaccttgatgagct

SEQ ID NO: 171830 - DNA, 15 bp, Homo sapiens
ataaccttgatgagc

SEQ ID NO: 171831 - DNA, 15 bp, Homo sapiens
cataaccttgatgag

SEQ ID NO: 171832 - DNA, 15 bp, Homo sapiens
tcataaccttgatga

SEQ ID NO: 171833 - DNA, 15 bp, Homo sapiens
ttcataaccttgatg

SEQ ID NO: 171834 - DNA, 15 bp, Homo sapiens
tttcataaccttgat

SEQ ID NO: 171835 - DNA, 15 bp, Homo sapiens
ttttcataaccttga

SEQ ID NO: 171836 - DNA, 15 bp, Homo sapiens
tttttcataaccttg

SEQ ID NO: 171837 - DNA, 15 bp, Homo sapiens
atttttcataacctt

SEQ ID NO: 171838 - DNA, 15 bp, Homo sapiens
aatttttcataacct

SEQ ID NO: 171839 - DNA, 15 bp, Homo sapiens
aaatttttcataacc

SEQ ID NO: 171840 - DNA, 15 bp, Homo sapiens
aaaatttttcataac

SEQ ID NO: 171841 - DNA, 15 bp, Homo sapiens
taaaatttttcataa

SEQ ID NO: 171842 - DNA, 15 bp, Homo sapiens
ttaaaatttttcata

SEQ ID NO: 171843 - DNA, 15 bp, Homo sapiens
cttaaaatttttcat

SEQ ID NO: 171844 - DNA, 15 bp, Homo sapiens
tcttaaaatttttca

SEQ ID NO: 171845 - DNA, 15 bp, Homo sapiens
ttcttaaaatttttc

SEQ ID NO: 171846 - DNA, 15 bp, Homo sapiens
cttcttaaaattttt

SEQ ID NO: 171847 - DNA, 15 bp, Homo sapiens
tcttcttaaaatttt

SEQ ID NO: 171848 - DNA, 15 bp, Homo sapiens
atcttcttaaaattt

SEQ ID NO: 171849 - DNA, 15 bp, Homo sapiens
catcttcttaaaatt

SEQ ID NO: 171850 - DNA, 15 bp, Homo sapiens
ccatcttcttaaaat

SEQ ID NO: 171851 - DNA, 15 bp, Homo sapiens
tccatcttcttaaaa

SEQ ID NO: 171852 - DNA, 15 bp, Homo sapiens
ctccatcttcttaaa

SEQ ID NO: 171853 - DNA, 15 bp, Homo sapiens
actccatcttcttaa

SEQ ID NO: 171854 - DNA, 15 bp, Homo sapiens
gactccatcttctta

SEQ ID NO: 171855 - DNA, 15 bp, Homo sapiens
tgactccatcttctt

SEQ ID NO: 171856 - DNA, 15 bp, Homo sapiens
atgactccatcttct

SEQ ID NO: 171857 - DNA, 15 bp, Homo sapiens
aatgactccatcttc

SEQ ID NO: 171858 - DNA, 15 bp, Homo sapiens
caatgactccatctt

SEQ ID NO: 171859 - DNA, 15 bp, Homo sapiens
gcaatgactccatct

SEQ ID NO: 171860 - DNA, 15 bp, Homo sapiens
agcaatgactccatc

SEQ ID NO: 171861 - DNA, 15 bp, Homo sapiens
aagcaatgactccat

SEQ ID NO: 171862 - DNA, 15 bp, Homo sapiens
aaagcaatgactcca

SEQ ID NO: 171863 - DNA, 15 bp, Homo sapiens
gaaagcaatgactcc

SEQ ID NO: 171864 - DNA, 15 bp, Homo sapiens
agaaagcaatgactc

SEQ ID NO: 171865 - DNA, 15 bp, Homo sapiens
cagaaagcaatgact

SEQ ID NO: 171866 - DNA, 15 bp, Homo sapiens
acagaaagcaatgac

SEQ ID NO: 171867 - DNA, 15 bp, Homo sapiens
aacagaaagcaatga

SEQ ID NO: 171868 - DNA, 15 bp, Homo sapiens
taacagaaagcaatg

SEQ ID NO: 171869 - DNA, 15 bp, Homo sapiens
ttaacagaaagcaat

SEQ ID NO: 171870 - DNA, 15 bp, Homo sapiens
attaacagaaagcaa

SEQ ID NO: 171871 - DNA, 15 bp, Homo sapiens
tattaacagaaagca

SEQ ID NO: 171872 - DNA, 15 bp, Homo sapiens
gtattaacagaaagc

SEQ ID NO: 171873 - DNA, 15 bp, Homo sapiens
ggtattaacagaaag

SEQ ID NO: 171874 - DNA, 15 bp, Homo sapiens
aggtattaacagaaa

SEQ ID NO: 171875 - DNA, 15 bp, Homo sapiens
taggtattaacagaa

SEQ ID NO: 171876 - DNA, 15 bp, Homo sapiens
ctaggtattaacaga

SEQ ID NO: 171877 - DNA, 15 bp, Homo sapiens
actaggtattaacag

SEQ ID NO: 171878 - DNA, 15 bp, Homo sapiens
aactaggtattaaca

SEQ ID NO: 171879 - DNA, 15 bp, Homo sapiens
aaactaggtattaac

SEQ ID NO: 171880 - DNA, 15 bp, Homo sapiens
gaaactaggtattaa

SEQ ID NO: 171881 - DNA, 15 bp, Homo sapiens
tgaaactaggtatta

SEQ ID NO: 171882 - DNA, 15 bp, Homo sapiens
ttgaaactaggtatt

SEQ ID NO: 171883 - DNA, 15 bp, Homo sapiens
attgaaactaggtat

SEQ ID NO: 171884 - DNA, 15 bp, Homo sapiens
aattgaaactaggta

SEQ ID NO: 171885 - DNA, 15 bp, Homo sapiens
aaattgaaactaggt

SEQ ID NO: 171886 - DNA, 15 bp, Homo sapiens
aaaattgaaactagg

SEQ ID NO: 171887 - DNA, 15 bp, Homo sapiens
taaaattgaaactag

SEQ ID NO: 171888 - DNA, 15 bp, Homo sapiens
ctaaaattgaaacta

SEQ ID NO: 171889 - DNA, 15 bp, Homo sapiens
tctaaaattgaaact

SEQ ID NO: 171890 - DNA, 15 bp, Homo sapiens
gtctaaaattgaaac

SEQ ID NO: 171891 - DNA, 15 bp, Homo sapiens
agtctaaaattgaaa

SEQ ID NO: 171892 - DNA, 15 bp, Homo sapiens
aagtctaaaattgaa

SEQ ID NO: 171893 - DNA, 15 bp, Homo sapiens
aaagtctaaaattga

SEQ ID NO: 171894 - DNA, 15 bp, Homo sapiens
aaaagtctaaaattg

SEQ ID NO: 171895 - DNA, 15 bp, Homo sapiens
caaaagtctaaaatt

SEQ ID NO: 171896 - DNA, 15 bp, Homo sapiens
tcaaaagtctaaaat

SEQ ID NO: 171897 - DNA, 15 bp, Homo sapiens
ctcaaaagtctaaaa

SEQ ID NO: 171898 - DNA, 15 bp, Homo sapiens
gctcaaaagtctaaa

SEQ ID NO: 171899 - DNA, 15 bp, Homo sapiens
ggctcaaaagtctaa

SEQ ID NO: 171900 - DNA, 15 bp, Homo sapiens
gggctcaaaagtcta

SEQ ID NO: 171901 - DNA, 15 bp, Homo sapiens
tgggctcaaaagtct

SEQ ID NO: 171902 - DNA, 15 bp, Homo sapiens
atgggctcaaaagtc

SEQ ID NO: 171903 - DNA, 15 bp, Homo sapiens
catgggctcaaaagt

SEQ ID NO: 171904 - DNA, 15 bp, Homo sapiens
acatgggctcaaaag

SEQ ID NO: 171905 - DNA, 15 bp, Homo sapiens
aacatgggctcaaaa

SEQ ID NO: 171906 - DNA, 15 bp, Homo sapiens
taacatgggctcaaa

SEQ ID NO: 171907 - DNA, 15 bp, Homo sapiens
ataacatgggctcaa

SEQ ID NO: 171908 - DNA, 15 bp, Homo sapiens
tataacatgggctca

SEQ ID NO: 171909 - DNA, 15 bp, Homo sapiens
ttataacatgggctc

SEQ ID NO: 171910 - DNA, 15 bp, Homo sapiens
tttataacatgggct

SEQ ID NO: 171911 - DNA, 15 bp, Homo sapiens
atttataacatgggc

SEQ ID NO: 171912 - DNA, 15 bp, Homo sapiens
catttataacatggg

SEQ ID NO: 171913 - DNA, 15 bp, Homo sapiens
tcatttataacatgg

SEQ ID NO: 171914 - DNA, 15 bp, Homo sapiens
atcatttataacatg

SEQ ID NO: 171915 - DNA, 15 bp, Homo sapiens
catcatttataacat

SEQ ID NO: 171916 - DNA, 15 bp, Homo sapiens
tcatcatttataaca

SEQ ID NO: 171917 - DNA, 15 bp, Homo sapiens
ttcatcatttataac

SEQ ID NO: 171918 - DNA, 15 bp, Homo sapiens
tttcatcatttataa

SEQ ID NO: 171919 - DNA, 15 bp, Homo sapiens
ttttcatcatttata

SEQ ID NO: 171920 - DNA, 15 bp, Homo sapiens
tttttcatcatttat

SEQ ID NO: 171921 - DNA, 15 bp, Homo sapiens
ttttttcatcattta

SEQ ID NO: 171922 - DNA, 15 bp, Homo sapiens
attttttcatcattt

SEQ ID NO: 171923 - DNA, 15 bp, Homo sapiens
aattttttcatcatt

SEQ ID NO: 171924 - DNA, 15 bp, Homo sapiens
taattttttcatcat

SEQ ID NO: 171925 - DNA, 15 bp, Homo sapiens
ctaattttttcatca

SEQ ID NO: 171926 - DNA, 15 bp, Homo sapiens
gctaattttttcatc

SEQ ID NO: 171927 - DNA, 15 bp, Homo sapiens
tgctaattttttcat

SEQ ID NO: 171928 - DNA, 15 bp, Homo sapiens
ttgctaattttttca

SEQ ID NO: 171929 - DNA, 15 bp, Homo sapiens
attgctaattttttc

SEQ ID NO: 171930 - DNA, 15 bp, Homo sapiens
gattgctaatttttt

SEQ ID NO: 171931 - DNA, 15 bp, Homo sapiens
tgattgctaattttt

SEQ ID NO: 171932 - DNA, 15 bp, Homo sapiens
gtgattgctaatttt

SEQ ID NO: 171933 - DNA, 15 bp, Homo sapiens
ggtgattgctaattt

SEQ ID NO: 171934 - DNA, 15 bp, Homo sapiens
aggtgattgctaatt

SEQ ID NO: 171935 - DNA, 15 bp, Homo sapiens
caggtgattgctaat

SEQ ID NO: 171936 - DNA, 15 bp, Homo sapiens
gcaggtgattgctaa

SEQ ID NO: 171937 - DNA, 15 bp, Homo sapiens
agcaggtgattgcta

SEQ ID NO: 171938 - DNA, 15 bp, Homo sapiens
aagcaggtgattgct

SEQ ID NO: 171939 - DNA, 15 bp, Homo sapiens
gaagcaggtgattgc

SEQ ID NO: 171940 - DNA, 15 bp, Homo sapiens
agaagcaggtgattg

SEQ ID NO: 171941 - DNA, 15 bp, Homo sapiens
aagaagcaggtgatt

SEQ ID NO: 171942 - DNA, 15 bp, Homo sapiens
gaagaagcaggtgat

SEQ ID NO: 171943 - DNA, 15 bp, Homo sapiens
ggaagaagcaggtga

SEQ ID NO: 171944 - DNA, 15 bp, Homo sapiens
aggaagaagcaggtg

SEQ ID NO: 171945 - DNA, 15 bp, Homo sapiens
taggaagaagcaggt

SEQ ID NO: 171946 - DNA, 15 bp, Homo sapiens
gtaggaagaagcagg

SEQ ID NO: 171947 - DNA, 15 bp, Homo sapiens
ggtaggaagaagcag

SEQ ID NO: 171948 - DNA, 15 bp, Homo sapiens
aggtaggaagaagca

SEQ ID NO: 171949 - DNA, 15 bp, Homo sapiens
gaggtaggaagaagc

SEQ ID NO: 171950 - DNA, 15 bp, Homo sapiens
ggaggtaggaagaag

SEQ ID NO: 171951 - DNA, 15 bp, Homo sapiens
aggaggtaggaagaa

SEQ ID NO: 171952 - DNA, 15 bp, Homo sapiens
taggaggtaggaaga

SEQ ID NO: 171953 - DNA, 15 bp, Homo sapiens
gtaggaggtaggaag

SEQ ID NO: 171954 - DNA, 15 bp, Homo sapiens
ggtaggaggtaggaa

SEQ ID NO: 171955 - DNA, 15 bp, Homo sapiens
gggtaggaggtagga

SEQ ID NO: 171956 - DNA, 15 bp, Homo sapiens
ggggtaggaggtagg

SEQ ID NO: 171957 - DNA, 15 bp, Homo sapiens
gggggtaggaggtag

SEQ ID NO: 171958 - DNA, 15 bp, Homo sapiens
agggggtaggaggta

SEQ ID NO: 171959 - DNA, 15 bp, Homo sapiens
aagggggtaggaggt

SEQ ID NO: 171960 - DNA, 15 bp, Homo sapiens
aaagggggtaggagg

SEQ ID NO: 171961 - DNA, 15 bp, Homo sapiens
gaaagggggtaggag

SEQ ID NO: 171962 - DNA, 15 bp, Homo sapiens
agaaagggggtagga

SEQ ID NO: 171963 - DNA, 15 bp, Homo sapiens
aagaaagggggtagg

SEQ ID NO: 171964 - DNA, 15 bp, Homo sapiens
taagaaagggggtag

SEQ ID NO: 171965 - DNA, 15 bp, Homo sapiens
ataagaaagggggta

SEQ ID NO: 171966 - DNA, 15 bp, Homo sapiens
aataagaaagggggt

SEQ ID NO: 171967 - DNA, 15 bp, Homo sapiens
aaataagaaaggggg

SEQ ID NO: 171968 - DNA, 15 bp, Homo sapiens
aaaataagaaagggg

SEQ ID NO: 171969 - DNA, 15 bp, Homo sapiens
taaaataagaaaggg

SEQ ID NO: 171970 - DNA, 15 bp, Homo sapiens
ttaaaataagaaagg

SEQ ID NO: 171971 - DNA, 15 bp, Homo sapiens
attaaaataagaaag

SEQ ID NO: 171972 - DNA, 15 bp, Homo sapiens
aattaaaataagaaa

SEQ ID NO: 171973 - DNA, 15 bp, Homo sapiens
taattaaaataagaa

SEQ ID NO: 171974 - DNA, 15 bp, Homo sapiens
ataattaaaataaga

SEQ ID NO: 171975 - DNA, 15 bp, Homo sapiens
tataattaaaataag

SEQ ID NO: 171976 - DNA, 15 bp, Homo sapiens
ctataattaaaataa

SEQ ID NO: 171977 - DNA, 15 bp, Homo sapiens
gctataattaaaata

SEQ ID NO: 171978 - DNA, 15 bp, Homo sapiens
agctataattaaaat

SEQ ID NO: 171979 - DNA, 15 bp, Homo sapiens
aagctataattaaaa

SEQ ID NO: 171980 - DNA, 15 bp, Homo sapiens
taagctataattaaa

SEQ ID NO: 171981 - DNA, 15 bp, Homo sapiens
ataagctataattaa

SEQ ID NO: 171982 - DNA, 15 bp, Homo sapiens
aataagctataatta

SEQ ID NO: 171983 - DNA, 15 bp, Homo sapiens
aaataagctataatt

SEQ ID NO: 171984 - DNA, 15 bp, Homo sapiens
aaaataagctataat

SEQ ID NO: 171985 - DNA, 15 bp, Homo sapiens
aaaaataagctataa

SEQ ID NO: 171986 - DNA, 15 bp, Homo sapiens
taaaaataagctata

SEQ ID NO: 171987 - DNA, 15 bp, Homo sapiens
gtaaaaataagctat

SEQ ID NO: 171988 - DNA, 15 bp, Homo sapiens
tgtaaaaataagcta

SEQ ID NO: 171989 - DNA, 15 bp, Homo sapiens
atgtaaaaataagct

SEQ ID NO: 171990 - DNA, 15 bp, Homo sapiens
aatgtaaaaataagc

SEQ ID NO: 171991 - DNA, 15 bp, Homo sapiens
caatgtaaaaataag

SEQ ID NO: 171992 - DNA, 15 bp, Homo sapiens
acaatgtaaaaataa

SEQ ID NO: 171993 - DNA, 15 bp, Homo sapiens
aacaatgtaaaaata

SEQ ID NO: 171994 - DNA, 15 bp, Homo sapiens
taacaatgtaaaaat

SEQ ID NO: 171995 - DNA, 15 bp, Homo sapiens
ttaacaatgtaaaaa

SEQ ID NO: 171996 - DNA, 15 bp, Homo sapiens
cttaacaatgtaaaa

SEQ ID NO: 171997 - DNA, 15 bp, Homo sapiens
ccttaacaatgtaaa

SEQ ID NO: 171998 - DNA, 15 bp, Homo sapiens
gccttaacaatgtaa

SEQ ID NO: 171999 - DNA, 15 bp, Homo sapiens
agccttaacaatgta

SEQ ID NO: 172000 - DNA, 15 bp, Homo sapiens
cagccttaacaatgt

SEQ ID NO: 172001 - DNA, 15 bp, Homo sapiens
tcagccttaacaatg

SEQ ID NO: 172002 - DNA, 15 bp, Homo sapiens
atcagccttaacaat

SEQ ID NO: 172003 - DNA, 15 bp, Homo sapiens
tatcagccttaacaa

SEQ ID NO: 172004 - DNA, 15 bp, Homo sapiens
ttatcagccttaaca

SEQ ID NO: 172005 - DNA, 15 bp, Homo sapiens
attatcagccttaac

SEQ ID NO: 172006 - DNA, 15 bp, Homo sapiens
tattatcagccttaa

SEQ ID NO: 172007 - DNA, 15 bp, Homo sapiens
atattatcagcctta

SEQ ID NO: 172008 - DNA, 15 bp, Homo sapiens
gatattatcagcctt

SEQ ID NO: 172009 - DNA, 15 bp, Homo sapiens
agatattatcagcct

SEQ ID NO: 172010 - DNA, 15 bp, Homo sapiens
tagatattatcagcc

SEQ ID NO: 172011 - DNA, 15 bp, Homo sapiens
ttagatattatcagc

SEQ ID NO: 172012 - DNA, 15 bp, Homo sapiens
gttagatattatcag

SEQ ID NO: 172013 - DNA, 15 bp, Homo sapiens
tgttagatattatca

SEQ ID NO: 172014 - DNA, 15 bp, Homo sapiens
ttgttagatattatc

SEQ ID NO: 172015 - DNA, 15 bp, Homo sapiens
cttgttagatattat

SEQ ID NO: 172016 - DNA, 15 bp, Homo sapiens
acttgttagatatta

SEQ ID NO: 172017 - DNA, 15 bp, Homo sapiens
gacttgttagatatt

SEQ ID NO: 172018 - DNA, 15 bp, Homo sapiens
ggacttgttagatat

SEQ ID NO: 172019 - DNA, 15 bp, Homo sapiens
gggacttgttagata

SEQ ID NO: 172020 - DNA, 15 bp, Homo sapiens
agggacttgttagat

SEQ ID NO: 172021 - DNA, 15 bp, Homo sapiens
cagggacttgttaga

SEQ ID NO: 172022 - DNA, 15 bp, Homo sapiens
tcagggacttgttag

SEQ ID NO: 172023 - DNA, 15 bp, Homo sapiens
ctcagggacttgtta

SEQ ID NO: 172024 - DNA, 15 bp, Homo sapiens
actcagggacttgtt

SEQ ID NO: 172025 - DNA, 15 bp, Homo sapiens
aactcagggacttgt

SEQ ID NO: 172026 - DNA, 15 bp, Homo sapiens
caactcagggacttg

SEQ ID NO: 172027 - DNA, 15 bp, Homo sapiens
acaactcagggactt

SEQ ID NO: 172028 - DNA, 15 bp, Homo sapiens
aacaactcagggact

SEQ ID NO: 172029 - DNA, 15 bp, Homo sapiens
aaacaactcagggac

SEQ ID NO: 172030 - DNA, 15 bp, Homo sapiens
taaacaactcaggga

SEQ ID NO: 172031 - DNA, 15 bp, Homo sapiens
ctaaacaactcaggg

SEQ ID NO: 172032 - DNA, 15 bp, Homo sapiens
actaaacaactcagg

SEQ ID NO: 172033 - DNA, 15 bp, Homo sapiens
gactaaacaactcag

SEQ ID NO: 172034 - DNA, 15 bp, Homo sapiens
agactaaacaactca

SEQ ID NO: 172035 - DNA, 15 bp, Homo sapiens
gagactaaacaactc

SEQ ID NO: 172036 - DNA, 15 bp, Homo sapiens
tgagactaaacaact

SEQ ID NO: 172037 - DNA, 15 bp, Homo sapiens
ttgagactaaacaac

SEQ ID NO: 172038 - DNA, 15 bp, Homo sapiens
cttgagactaaacaa

SEQ ID NO: 172039 - DNA, 15 bp, Homo sapiens
gcttgagactaaaca

SEQ ID NO: 172040 - DNA, 15 bp, Homo sapiens
tgcttgagactaaac

SEQ ID NO: 172041 - DNA, 15 bp, Homo sapiens
atgcttgagactaaa

SEQ ID NO: 172042 - DNA, 15 bp, Homo sapiens
catgcttgagactaa

SEQ ID NO: 172043 - DNA, 15 bp, Homo sapiens
acatgcttgagacta

SEQ ID NO: 172044 - DNA, 15 bp, Homo sapiens
gacatgcttgagact

SEQ ID NO: 172045 - DNA, 15 bp, Homo sapiens
ggacatgcttgagac

SEQ ID NO: 172046 - DNA, 15 bp, Homo sapiens
gggacatgcttgaga

SEQ ID NO: 172047 - DNA, 15 bp, Homo sapiens
ggggacatgcttgag

SEQ ID NO: 172048 - DNA, 15 bp, Homo sapiens
aggggacatgcttga

SEQ ID NO: 172049 - DNA, 15 bp, Homo sapiens
taggggacatgcttg

SEQ ID NO: 172050 - DNA, 15 bp, Homo sapiens
gtaggggacatgctt

SEQ ID NO: 172051 - DNA, 15 bp, Homo sapiens
cgtaggggacatgct

SEQ ID NO: 172052 - DNA, 15 bp, Homo sapiens
acgtaggggacatgc

SEQ ID NO: 172053 - DNA, 15 bp, Homo sapiens
tacgtaggggacatg

SEQ ID NO: 172054 - DNA, 15 bp, Homo sapiens
ctacgtaggggacat

SEQ ID NO: 172055 - DNA, 15 bp, Homo sapiens
cctacgtaggggaca

SEQ ID NO: 172056 - DNA, 15 bp, Homo sapiens
tcctacgtaggggac

SEQ ID NO: 172057 - DNA, 15 bp, Homo sapiens
ttcctacgtagggga

SEQ ID NO: 172058 - DNA, 15 bp, Homo sapiens
attcctacgtagggg

SEQ ID NO: 172059 - DNA, 15 bp, Homo sapiens
aattcctacgtaggg

SEQ ID NO: 172060 - DNA, 15 bp, Homo sapiens
gaattcctacgtagg

SEQ ID NO: 172061 - DNA, 15 bp, Homo sapiens
tgaattcctacgtag

SEQ ID NO: 172062 - DNA, 15 bp, Homo sapiens
ttgaattcctacgta

SEQ ID NO: 172063 - DNA, 15 bp, Homo sapiens
attgaattcctacgt

SEQ ID NO: 172064 - DNA, 15 bp, Homo sapiens
aattgaattcctacg

SEQ ID NO: 172065 - DNA, 15 bp, Homo sapiens
aaattgaattcctac

SEQ ID NO: 172066 - DNA, 15 bp, Homo sapiens
gaaattgaattccta

SEQ ID NO: 172067 - DNA, 15 bp, Homo sapiens
ggaaattgaattcct

SEQ ID NO: 172068 - DNA, 15 bp, Homo sapiens
tggaaattgaattcc

SEQ ID NO: 172069 - DNA, 15 bp, Homo sapiens
ctggaaattgaattc

SEQ ID NO: 172070 - DNA, 15 bp, Homo sapiens
actggaaattgaatt

SEQ ID NO: 172071 - DNA, 15 bp, Homo sapiens
aactggaaattgaat

SEQ ID NO: 172072 - DNA, 15 bp, Homo sapiens
caactggaaattgaa

SEQ ID NO: 172073 - DNA, 15 bp, Homo sapiens
acaactggaaattga

SEQ ID NO: 172074 - DNA, 15 bp, Homo sapiens
tacaactggaaattg

SEQ ID NO: 172075 - DNA, 15 bp, Homo sapiens
atacaactggaaatt

SEQ ID NO: 172076 - DNA, 15 bp, Homo sapiens
aatacaactggaaat

SEQ ID NO: 172077 - DNA, 15 bp, Homo sapiens
gaatacaactggaaa

SEQ ID NO: 172078 - DNA, 15 bp, Homo sapiens
agaatacaactggaa

SEQ ID NO: 172079 - DNA, 15 bp, Homo sapiens
aagaatacaactgga

SEQ ID NO: 172080 - DNA, 15 bp, Homo sapiens
aaagaatacaactgg

SEQ ID NO: 172081 - DNA, 15 bp, Homo sapiens
gaaagaatacaactg

SEQ ID NO: 172082 - DNA, 15 bp, Homo sapiens
agaaagaatacaact

SEQ ID NO: 172083 - DNA, 15 bp, Homo sapiens
cagaaagaatacaac

SEQ ID NO: 172084 - DNA, 15 bp, Homo sapiens
acagaaagaatacaa

SEQ ID NO: 172085 - DNA, 15 bp, Homo sapiens
aacagaaagaataca

SEQ ID NO: 172086 - DNA, 15 bp, Homo sapiens
gaacagaaagaatac

SEQ ID NO: 172087 - DNA, 15 bp, Homo sapiens
agaacagaaagaata

SEQ ID NO: 172088 - DNA, 15 bp, Homo sapiens
tagaacagaaagaat

SEQ ID NO: 172089 - DNA, 15 bp, Homo sapiens
ctagaacagaaagaa

SEQ ID NO: 172090 - DNA, 15 bp, Homo sapiens
actagaacagaaaga

SEQ ID NO: 172091 - DNA, 15 bp, Homo sapiens
aactagaacagaaag

SEQ ID NO: 172092 - DNA, 15 bp, Homo sapiens
aaactagaacagaaa

SEQ ID NO: 172093 - DNA, 15 bp, Homo sapiens
taaactagaacagaa

SEQ ID NO: 172094 - DNA, 15 bp, Homo sapiens
gtaaactagaacaga

SEQ ID NO: 172095 - DNA, 15 bp, Homo sapiens
agtaaactagaacag

SEQ ID NO: 172096 - DNA, 15 bp, Homo sapiens
gagtaaactagaaca

SEQ ID NO: 172097 - DNA, 15 bp, Homo sapiens
cgagtaaactagaac

SEQ ID NO: 172098 - DNA, 15 bp, Homo sapiens
tcgagtaaactagaa

SEQ ID NO: 172099 - DNA, 15 bp, Homo sapiens
gtcgagtaaactaga

SEQ ID NO: 172100 - DNA, 15 bp, Homo sapiens
tgtcgagtaaactag

SEQ ID NO: 172101 - DNA, 15 bp, Homo sapiens
ttgtcgagtaaacta

SEQ ID NO: 172102 - DNA, 15 bp, Homo sapiens
attgtcgagtaaact

SEQ ID NO: 172103 - DNA, 15 bp, Homo sapiens
gattgtcgagtaaac

SEQ ID NO: 172104 - DNA, 15 bp, Homo sapiens
agattgtcgagtaaa

SEQ ID NO: 172105 - DNA, 15 bp, Homo sapiens
tagattgtcgagtaa

SEQ ID NO: 172106 - DNA, 15 bp, Homo sapiens
ttagattgtcgagta

SEQ ID NO: 172107 - DNA, 15 bp, Homo sapiens
tttagattgtcgagt

SEQ ID NO: 172108 - DNA, 15 bp, Homo sapiens
ttttagattgtcgag

SEQ ID NO: 172109 - DNA, 15 bp, Homo sapiens
attttagattgtcga

SEQ ID NO: 172110 - DNA, 15 bp, Homo sapiens
cattttagattgtcg

SEQ ID NO: 172111 - DNA, 15 bp, Homo sapiens
ccattttagattgtc

SEQ ID NO: 172112 - DNA, 15 bp, Homo sapiens
cccattttagattgt

SEQ ID NO: 172113 - DNA, 15 bp, Homo sapiens
tcccattttagattg

SEQ ID NO: 172114 - DNA, 15 bp, Homo sapiens
atcccattttagatt

SEQ ID NO: 172115 - DNA, 15 bp, Homo sapiens
aatcccattttagat

SEQ ID NO: 172116 - DNA, 15 bp, Homo sapiens
taatcccattttaga

SEQ ID NO: 172117 - DNA, 15 bp, Homo sapiens
ataatcccattttag

SEQ ID NO: 172118 - DNA, 15 bp, Homo sapiens
aataatcccatttta

SEQ ID NO: 172119 - DNA, 15 bp, Homo sapiens
aaataatcccatttt

SEQ ID NO: 172120 - DNA, 15 bp, Homo sapiens
aaaataatcccattt

SEQ ID NO: 172121 - DNA, 15 bp, Homo sapiens
caaaataatcccatt

SEQ ID NO: 172122 - DNA, 15 bp, Homo sapiens
ccaaaataatcccat

SEQ ID NO: 172123 - DNA, 15 bp, Homo sapiens
accaaaataatccca

SEQ ID NO: 172124 - DNA, 15 bp, Homo sapiens
gaccaaaataatccc

SEQ ID NO: 172125 - DNA, 15 bp, Homo sapiens
agaccaaaataatcc

SEQ ID NO: 172126 - DNA, 15 bp, Homo sapiens
aagaccaaaataatc

SEQ ID NO: 172127 - DNA, 15 bp, Homo sapiens
aaagaccaaaataat

SEQ ID NO: 172128 - DNA, 15 bp, Homo sapiens
caaagaccaaaataa

SEQ ID NO: 172129 - DNA, 15 bp, Homo sapiens
tcaaagaccaaaata

SEQ ID NO: 172130 - DNA, 15 bp, Homo sapiens
atcaaagaccaaaat

SEQ ID NO: 172131 - DNA, 15 bp, Homo sapiens
aatcaaagaccaaaa

SEQ ID NO: 172132 - DNA, 15 bp, Homo sapiens
aaatcaaagaccaaa

SEQ ID NO: 172133 - DNA, 15 bp, Homo sapiens
caaatcaaagaccaa

SEQ ID NO: 172134 - DNA, 15 bp, Homo sapiens
acaaatcaaagacca

SEQ ID NO: 172135 - DNA, 15 bp, Homo sapiens
aacaaatcaaagacc

SEQ ID NO: 172136 - DNA, 15 bp, Homo sapiens
aaacaaatcaaagac

SEQ ID NO: 172137 - DNA, 15 bp, Homo sapiens
aaaacaaatcaaaga

SEQ ID NO: 172138 - DNA, 15 bp, Homo sapiens
gaaaacaaatcaaag

SEQ ID NO: 172139 - DNA, 15 bp, Homo sapiens
agaaaacaaatcaaa

SEQ ID NO: 172140 - DNA, 15 bp, Homo sapiens
aagaaaacaaatcaa

SEQ ID NO: 172141 - DNA, 15 bp, Homo sapiens
aaagaaaacaaatca

SEQ ID NO: 172142 - DNA, 15 bp, Homo sapiens
caaagaaaacaaatc

SEQ ID NO: 172143 - DNA, 15 bp, Homo sapiens
tcaaagaaaacaaat

SEQ ID NO: 172144 - DNA, 15 bp, Homo sapiens
gtcaaagaaaacaaa

SEQ ID NO: 172145 - DNA, 15 bp, Homo sapiens
ggtcaaagaaaacaa

SEQ ID NO: 172146 - DNA, 15 bp, Homo sapiens
aggtcaaagaaaaca

SEQ ID NO: 172147 - DNA, 15 bp, Homo sapiens
caggtcaaagaaaac

SEQ ID NO: 172148 - DNA, 15 bp, Homo sapiens
gcaggtcaaagaaaa

SEQ ID NO: 172149 - DNA, 15 bp, Homo sapiens
agcaggtcaaagaaa

SEQ ID NO: 172150 - DNA, 15 bp, Homo sapiens
tagcaggtcaaagaa

SEQ ID NO: 172151 - DNA, 15 bp, Homo sapiens
ttagcaggtcaaaga

SEQ ID NO: 172152 - DNA, 15 bp, Homo sapiens
gttagcaggtcaaag

SEQ ID NO: 172153 - DNA, 15 bp, Homo sapiens
agttagcaggtcaaa

SEQ ID NO: 172154 - DNA, 15 bp, Homo sapiens
aagttagcaggtcaa

SEQ ID NO: 172155 - DNA, 15 bp, Homo sapiens
aaagttagcaggtca

SEQ ID NO: 172156 - DNA, 15 bp, Homo sapiens
aaaagttagcaggtc

SEQ ID NO: 172157 - DNA, 15 bp, Homo sapiens
gaaaagttagcaggt

SEQ ID NO: 172158 - DNA, 15 bp, Homo sapiens
agaaaagttagcagg

SEQ ID NO: 172159 - DNA, 15 bp, Homo sapiens
cagaaaagttagcag

SEQ ID NO: 172160 - DNA, 15 bp, Homo sapiens
tcagaaaagttagca

SEQ ID NO: 172161 - DNA, 15 bp, Homo sapiens
ttcagaaaagttagc

SEQ ID NO: 172162 - DNA, 15 bp, Homo sapiens
attcagaaaagttag

SEQ ID NO: 172163 - DNA, 15 bp, Homo sapiens
aattcagaaaagtta

SEQ ID NO: 172164 - DNA, 15 bp, Homo sapiens
gaattcagaaaagtt

SEQ ID NO: 172165 - DNA, 15 bp, Homo sapiens
tgaattcagaaaagt

SEQ ID NO: 172166 - DNA, 15 bp, Homo sapiens
atgaattcagaaaag

SEQ ID NO: 172167 - DNA, 15 bp, Homo sapiens
aatgaattcagaaaa

SEQ ID NO: 172168 - DNA, 15 bp, Homo sapiens
caatgaattcagaaa

SEQ ID NO: 172169 - DNA, 15 bp, Homo sapiens
tcaatgaattcagaa

SEQ ID NO: 172170 - DNA, 15 bp, Homo sapiens
ttcaatgaattcaga

SEQ ID NO: 172171 - DNA, 15 bp, Homo sapiens
attcaatgaattcag

SEQ ID NO: 172172 - DNA, 15 bp, Homo sapiens
tattcaatgaattca

SEQ ID NO: 172173 - DNA, 15 bp, Homo sapiens
atattcaatgaattc

SEQ ID NO: 172174 - DNA, 15 bp, Homo sapiens
tatattcaatgaatt

SEQ ID NO: 172175 - DNA, 15 bp, Homo sapiens
atatattcaatgaat

SEQ ID NO: 172176 - DNA, 15 bp, Homo sapiens
catatattcaatgaa

SEQ ID NO: 172177 - DNA, 15 bp, Homo sapiens
acatatattcaatga

SEQ ID NO: 172178 - DNA, 15 bp, Homo sapiens
aacatatattcaatg

SEQ ID NO: 172179 - DNA, 15 bp, Homo sapiens
aaacatatattcaat

SEQ ID NO: 172180 - DNA, 15 bp, Homo sapiens
aaaacatatattcaa

SEQ ID NO: 172181 - DNA, 15 bp, Homo sapiens
aaaaacatatattca

SEQ ID NO: 172182 - DNA, 15 bp, Homo sapiens
caaaaacatatattc

SEQ ID NO: 172183 - DNA, 15 bp, Homo sapiens
acaaaaacatatatt

SEQ ID NO: 172184 - DNA, 15 bp, Homo sapiens
aacaaaaacatatat

SEQ ID NO: 172185 - DNA, 15 bp, Homo sapiens
taacaaaaacatata

SEQ ID NO: 172186 - DNA, 15 bp, Homo sapiens
ttaacaaaaacatat

SEQ ID NO: 172187 - DNA, 15 bp, Homo sapiens
attaacaaaaacata

SEQ ID NO: 172188 - DNA, 15 bp, Homo sapiens
aattaacaaaaacat

SEQ ID NO: 172189 - DNA, 15 bp, Homo sapiens
aaattaacaaaaaca

SEQ ID NO: 172190 - DNA, 15 bp, Homo sapiens
gaaattaacaaaaac

SEQ ID NO: 172191 - DNA, 15 bp, Homo sapiens
agaaattaacaaaaa

SEQ ID NO: 172192 - DNA, 15 bp, Homo sapiens
aagaaattaacaaaa

SEQ ID NO: 172193 - DNA, 15 bp, Homo sapiens
gaagaaattaacaaa

SEQ ID NO: 172194 - DNA, 15 bp, Homo sapiens
agaagaaattaacaa

SEQ ID NO: 172195 - DNA, 15 bp, Homo sapiens
tagaagaaattaaca

SEQ ID NO: 172196 - DNA, 15 bp, Homo sapiens
atagaagaaattaac

SEQ ID NO: 172197 - DNA, 15 bp, Homo sapiens
tatagaagaaattaa

SEQ ID NO: 172198 - DNA, 15 bp, Homo sapiens
ctatagaagaaatta

SEQ ID NO: 172199 - DNA, 15 bp, Homo sapiens
gctatagaagaaatt

SEQ ID NO: 172200 - DNA, 15 bp, Homo sapiens
tgctatagaagaaat

SEQ ID NO: 172201 - DNA, 15 bp, Homo sapiens
atgctatagaagaaa

SEQ ID NO: 172202 - DNA, 15 bp, Homo sapiens
aatgctatagaagaa

SEQ ID NO: 172203 - DNA, 15 bp, Homo sapiens
taatgctatagaaga

SEQ ID NO: 172204 - DNA, 15 bp, Homo sapiens
ttaatgctatagaag

SEQ ID NO: 172205 - DNA, 15 bp, Homo sapiens
tttaatgctatagaa

SEQ ID NO: 172206 - DNA, 15 bp, Homo sapiens
gtttaatgctataga

SEQ ID NO: 172207 - DNA, 15 bp, Homo sapiens
tgtttaatgctatag

SEQ ID NO: 172208 - DNA, 15 bp, Homo sapiens
atgtttaatgctata

SEQ ID NO: 172209 - DNA, 15 bp, Homo sapiens
aatgtttaatgctat

SEQ ID NO: 172210 - DNA, 15 bp, Homo sapiens
aaatgtttaatgcta

SEQ ID NO: 172211 - DNA, 15 bp, Homo sapiens
caaatgtttaatgct

SEQ ID NO: 172212 - DNA, 15 bp, Homo sapiens
gcaaatgtttaatgc

SEQ ID NO: 172213 - DNA, 15 bp, Homo sapiens
tgcaaatgtttaatg

SEQ ID NO: 172214 - DNA, 15 bp, Homo sapiens
ctgcaaatgtttaat

SEQ ID NO: 172215 - DNA, 15 bp, Homo sapiens
cctgcaaatgtttaa

SEQ ID NO: 172216 - DNA, 15 bp, Homo sapiens
tcctgcaaatgttta

SEQ ID NO: 172217 - DNA, 15 bp, Homo sapiens
ttcctgcaaatgttt

SEQ ID NO: 172218 - DNA, 15 bp, Homo sapiens
attcctgcaaatgtt

SEQ ID NO: 172219 - DNA, 15 bp, Homo sapiens
aattcctgcaaatgt

SEQ ID NO: 172220 - DNA, 15 bp, Homo sapiens
aaattcctgcaaatg

SEQ ID NO: 172221 - DNA, 15 bp, Homo sapiens
aaaattcctgcaaat

SEQ ID NO: 172222 - DNA, 15 bp, Homo sapiens
gaaaattcctgcaaa

SEQ ID NO: 172223 - DNA, 15 bp, Homo sapiens
agaaaattcctgcaa

SEQ ID NO: 172224 - DNA, 15 bp, Homo sapiens
aagaaaattcctgca

SEQ ID NO: 172225 - DNA, 15 bp, Homo sapiens
aaagaaaattcctgc

SEQ ID NO: 172226 - DNA, 15 bp, Homo sapiens
caaagaaaattcctg

SEQ ID NO: 172227 - DNA, 15 bp, Homo sapiens
acaaagaaaattcct

SEQ ID NO: 172228 - DNA, 15 bp, Homo sapiens
aacaaagaaaattcc

SEQ ID NO: 172229 - DNA, 15 bp, Homo sapiens
aaacaaagaaaattc

SEQ ID NO: 172230 - DNA, 15 bp, Homo sapiens
gaaacaaagaaaatt

SEQ ID NO: 172231 - DNA, 15 bp, Homo sapiens
agaaacaaagaaaat

SEQ ID NO: 172232 - DNA, 15 bp, Homo sapiens
aagaaacaaagaaaa

SEQ ID NO: 172233 - DNA, 15 bp, Homo sapiens
aaagaaacaaagaaa

SEQ ID NO: 172234 - DNA, 15 bp, Homo sapiens
caaagaaacaaagaa

SEQ ID NO: 172235 - DNA, 15 bp, Homo sapiens
ccaaagaaacaaaga

SEQ ID NO: 172236 - DNA, 15 bp, Homo sapiens
accaaagaaacaaag

SEQ ID NO: 172237 - DNA, 15 bp, Homo sapiens
aaccaaagaaacaaa

SEQ ID NO: 172238 - DNA, 15 bp, Homo sapiens
taaccaaagaaacaa

SEQ ID NO: 172239 - DNA, 15 bp, Homo sapiens
ataaccaaagaaaca

SEQ ID NO: 172240 - DNA, 15 bp, Homo sapiens
cataaccaaagaaac

SEQ ID NO: 172241 - DNA, 15 bp, Homo sapiens
acataaccaaagaaa

SEQ ID NO: 172242 - DNA, 15 bp, Homo sapiens
aacataaccaaagaa

SEQ ID NO: 172243 - DNA, 15 bp, Homo sapiens
aaacataaccaaaga

SEQ ID NO: 172244 - DNA, 15 bp, Homo sapiens
aaaacataaccaaag

SEQ ID NO: 172245 - DNA, 15 bp, Homo sapiens
gaaaacataaccaaa

SEQ ID NO: 172246 - DNA, 15 bp, Homo sapiens
agaaaacataaccaa

SEQ ID NO: 172247 - DNA, 15 bp, Homo sapiens
aagaaaacataacca

SEQ ID NO: 172248 - DNA, 15 bp, Homo sapiens
gaagaaaacataacc

SEQ ID NO: 172249 - DNA, 15 bp, Homo sapiens
agaagaaaacataac

SEQ ID NO: 172250 - DNA, 15 bp, Homo sapiens
tagaagaaaacataa

SEQ ID NO: 172251 - DNA, 15 bp, Homo sapiens
ctagaagaaaacata

SEQ ID NO: 172252 - DNA, 15 bp, Homo sapiens
tctagaagaaaacat

SEQ ID NO: 172253 - DNA, 15 bp, Homo sapiens
ctctagaagaaaaca

SEQ ID NO: 172254 - DNA, 15 bp, Homo sapiens
tctctagaagaaaac

SEQ ID NO: 172255 - DNA, 15 bp, Homo sapiens
ctctctagaagaaaa

SEQ ID NO: 172256 - DNA, 15 bp, Homo sapiens
cctctctagaagaaa

SEQ ID NO: 172257 - DNA, 15 bp, Homo sapiens
acctctctagaagaa

SEQ ID NO: 172258 - DNA, 15 bp, Homo sapiens
aacctctctagaaga

SEQ ID NO: 172259 - DNA, 15 bp, Homo sapiens
gaacctctctagaag

SEQ ID NO: 172260 - DNA, 15 bp, Homo sapiens
agaacctctctagaa

SEQ ID NO: 172261 - DNA, 15 bp, Homo sapiens
aagaacctctctaga

SEQ ID NO: 172262 - DNA, 15 bp, Homo sapiens
gaagaacctctctag

SEQ ID NO: 172263 - DNA, 15 bp, Homo sapiens
tgaagaacctctcta

SEQ ID NO: 172264 - DNA, 15 bp, Homo sapiens
atgaagaacctctct

SEQ ID NO: 172265 - DNA, 15 bp, Homo sapiens
gatgaagaacctctc

SEQ ID NO: 172266 - DNA, 15 bp, Homo sapiens
tgatgaagaacctct

SEQ ID NO: 172267 - DNA, 15 bp, Homo sapiens
atgatgaagaacctc

SEQ ID NO: 172268 - DNA, 15 bp, Homo sapiens
gatgatgaagaacct

SEQ ID NO: 172269 - DNA, 15 bp, Homo sapiens
tgatgatgaagaacc

SEQ ID NO: 172270 - DNA, 15 bp, Homo sapiens
atgatgatgaagaac

SEQ ID NO: 172271 - DNA, 15 bp, Homo sapiens
tatgatgatgaagaa

SEQ ID NO: 172272 - DNA, 15 bp, Homo sapiens
ttatgatgatgaaga

SEQ ID NO: 172273 - DNA, 15 bp, Homo sapiens
attatgatgatgaag

SEQ ID NO: 172274 - DNA, 15 bp, Homo sapiens
tattatgatgatgaa

SEQ ID NO: 172275 - DNA, 15 bp, Homo sapiens
ctattatgatgatga

SEQ ID NO: 172276 - DNA, 15 bp, Homo sapiens
gctattatgatgatg

SEQ ID NO: 172277 - DNA, 15 bp, Homo sapiens
tgctattatgatgat

SEQ ID NO: 172278 - DNA, 15 bp, Homo sapiens
gtgctattatgatga

SEQ ID NO: 172279 - DNA, 15 bp, Homo sapiens
tgtgctattatgatg

SEQ ID NO: 172280 - DNA, 15 bp, Homo sapiens
ttgtgctattatgat

SEQ ID NO: 172281 - DNA, 15 bp, Homo sapiens
attgtgctattatga

SEQ ID NO: 172282 - DNA, 15 bp, Homo sapiens
tattgtgctattatg

SEQ ID NO: 172283 - DNA, 15 bp, Homo sapiens
atattgtgctattat

SEQ ID NO: 172284 - DNA, 15 bp, Homo sapiens
catattgtgctatta

SEQ ID NO: 172285 - DNA, 15 bp, Homo sapiens
gcatattgtgctatt

SEQ ID NO: 172286 - DNA, 15 bp, Homo sapiens
agcatattgtgctat

SEQ ID NO: 172287 - DNA, 15 bp, Homo sapiens
tagcatattgtgcta

SEQ ID NO: 172288 - DNA, 15 bp, Homo sapiens
atagcatattgtgct

SEQ ID NO: 172289 - DNA, 15 bp, Homo sapiens
aatagcatattgtgc

SEQ ID NO: 172290 - DNA, 15 bp, Homo sapiens
taatagcatattgtg

SEQ ID NO: 172291 - DNA, 15 bp, Homo sapiens
ataatagcatattgt

SEQ ID NO: 172292 - DNA, 15 bp, Homo sapiens
cataatagcatattg

SEQ ID NO: 172293 - DNA, 15 bp, Homo sapiens
acataatagcatatt

SEQ ID NO: 172294 - DNA, 15 bp, Homo sapiens
aacataatagcatat

SEQ ID NO: 172295 - DNA, 15 bp, Homo sapiens
gaacataatagcata

SEQ ID NO: 172296 - DNA, 15 bp, Homo sapiens
ggaacataatagcat

SEQ ID NO: 172297 - DNA, 15 bp, Homo sapiens
aggaacataatagca

SEQ ID NO: 172298 - DNA, 15 bp, Homo sapiens
aaggaacataatagc

SEQ ID NO: 172299 - DNA, 15 bp, Homo sapiens
taaggaacataatag

SEQ ID NO: 172300 - DNA, 15 bp, Homo sapiens
ataaggaacataata

SEQ ID NO: 172301 - DNA, 15 bp, Homo sapiens
aataaggaacataat

SEQ ID NO: 172302 - DNA, 15 bp, Homo sapiens
aaataaggaacataa

SEQ ID NO: 172303 - DNA, 15 bp, Homo sapiens
aaaataaggaacata

SEQ ID NO: 172304 - DNA, 15 bp, Homo sapiens
gaaaataaggaacat

SEQ ID NO: 172305 - DNA, 15 bp, Homo sapiens
ggaaaataaggaaca

SEQ ID NO: 172306 - DNA, 15 bp, Homo sapiens
aggaaaataaggaac

SEQ ID NO: 172307 - DNA, 15 bp, Homo sapiens
gaggaaaataaggaa

SEQ ID NO: 172308 - DNA, 15 bp, Homo sapiens
ggaggaaaataagga

SEQ ID NO: 172309 - DNA, 15 bp, Homo sapiens
aggaggaaaataagg

SEQ ID NO: 172310 - DNA, 15 bp, Homo sapiens
caggaggaaaataag

SEQ ID NO: 172311 - DNA, 15 bp, Homo sapiens
acaggaggaaaataa

SEQ ID NO: 172312 - DNA, 15 bp, Homo sapiens
tacaggaggaaaata

SEQ ID NO: 172313 - DNA, 15 bp, Homo sapiens
ctacaggaggaaaat

SEQ ID NO: 172314 - DNA, 15 bp, Homo sapiens
actacaggaggaaaa

SEQ ID NO: 172315 - DNA, 15 bp, Homo sapiens
cactacaggaggaaa

SEQ ID NO: 172316 - DNA, 15 bp, Homo sapiens
acactacaggaggaa

SEQ ID NO: 172317 - DNA, 15 bp, Homo sapiens
cacactacaggagga

SEQ ID NO: 172318 - DNA, 15 bp, Homo sapiens
acacactacaggagg

SEQ ID NO: 172319 - DNA, 15 bp, Homo sapiens
cacacactacaggag

SEQ ID NO: 172320 - DNA, 15 bp, Homo sapiens
acacacactacagga

SEQ ID NO: 172321 - DNA, 15 bp, Homo sapiens
aacacacactacagg

SEQ ID NO: 172322 - DNA, 15 bp, Homo sapiens
gaacacacactacag

SEQ ID NO: 172323 - DNA, 15 bp, Homo sapiens
tgaacacacactaca

SEQ ID NO: 172324 - DNA, 15 bp, Homo sapiens
gtgaacacacactac

SEQ ID NO: 172325 - DNA, 15 bp, Homo sapiens
tgtgaacacacacta

SEQ ID NO: 172326 - DNA, 15 bp, Homo sapiens
ttgtgaacacacact

SEQ ID NO: 172327 - DNA, 15 bp, Homo sapiens
cttgtgaacacacac

SEQ ID NO: 172328 - DNA, 15 bp, Homo sapiens
acttgtgaacacaca

SEQ ID NO: 172329 - DNA, 15 bp, Homo sapiens
cacttgtgaacacac

SEQ ID NO: 172330 - DNA, 15 bp, Homo sapiens
gcacttgtgaacaca

SEQ ID NO: 172331 - DNA, 15 bp, Homo sapiens
ggcacttgtgaacac

SEQ ID NO: 172332 - DNA, 15 bp, Homo sapiens
tggcacttgtgaaca

SEQ ID NO: 172333 - DNA, 15 bp, Homo sapiens
atggcacttgtgaac

SEQ ID NO: 172334 - DNA, 15 bp, Homo sapiens
tatggcacttgtgaa

SEQ ID NO: 172335 - DNA, 15 bp, Homo sapiens
atatggcacttgtga

SEQ ID NO: 172336 - DNA, 15 bp, Homo sapiens
aatatggcacttgtg

SEQ ID NO: 172337 - DNA, 15 bp, Homo sapiens
aaatatggcacttgt

SEQ ID NO: 172338 - DNA, 15 bp, Homo sapiens
aaaatatggcacttg

SEQ ID NO: 172339 - DNA, 15 bp, Homo sapiens
aaaaatatggcactt

SEQ ID NO: 172340 - DNA, 15 bp, Homo sapiens
aaaaaatatggcact

SEQ ID NO: 172341 - DNA, 15 bp, Homo sapiens
aaaaaaatatggcac

SEQ ID NO: 172342 - DNA, 15 bp, Homo sapiens
aaaaaaaatatggca

SEQ ID NO: 172343 - DNA, 15 bp, Homo sapiens
taaaaaaaatatggc

SEQ ID NO: 172344 - DNA, 15 bp, Homo sapiens
ataaaaaaaatatgg

SEQ ID NO: 172345 - DNA, 15 bp, Homo sapiens
gataaaaaaaatatg

SEQ ID NO: 172346 - DNA, 15 bp, Homo sapiens
agataaaaaaaatat

SEQ ID NO: 172347 - DNA, 15 bp, Homo sapiens
aagataaaaaaaata

SEQ ID NO: 172348 - DNA, 15 bp, Homo sapiens
caagataaaaaaaat

SEQ ID NO: 172349 - DNA, 15 bp, Homo sapiens
gcaagataaaaaaaa

SEQ ID NO: 172350 - DNA, 15 bp, Homo sapiens
tgcaagataaaaaaa

SEQ ID NO: 172351 - DNA, 15 bp, Homo sapiens
atgcaagataaaaaa

SEQ ID NO: 172352 - DNA, 15 bp, Homo sapiens
tatgcaagataaaaa

SEQ ID NO: 172353 - DNA, 15 bp, Homo sapiens
atatgcaagataaaa

SEQ ID NO: 172354 - DNA, 15 bp, Homo sapiens
catatgcaagataaa

SEQ ID NO: 172355 - DNA, 15 bp, Homo sapiens
acatatgcaagataa

SEQ ID NO: 172356 - DNA, 15 bp, Homo sapiens
aacatatgcaagata

SEQ ID NO: 172357 - DNA, 15 bp, Homo sapiens
aaacatatgcaagat

SEQ ID NO: 172358 - DNA, 15 bp, Homo sapiens
taaacatatgcaaga

SEQ ID NO: 172359 - DNA, 15 bp, Homo sapiens
ttaaacatatgcaag

SEQ ID NO: 172360 - DNA, 15 bp, Homo sapiens
gttaaacatatgcaa

SEQ ID NO: 172361 - DNA, 15 bp, Homo sapiens
agttaaacatatgca

SEQ ID NO: 172362 - DNA, 15 bp, Homo sapiens
aagttaaacatatgc

SEQ ID NO: 172363 - DNA, 15 bp, Homo sapiens
caagttaaacatatg

SEQ ID NO: 172364 - DNA, 15 bp, Homo sapiens
ccaagttaaacatat

SEQ ID NO: 172365 - DNA, 15 bp, Homo sapiens
cccaagttaaacata

SEQ ID NO: 172366 - DNA, 15 bp, Homo sapiens
acccaagttaaacat

SEQ ID NO: 172367 - DNA, 15 bp, Homo sapiens
tacccaagttaaaca

SEQ ID NO: 172368 - DNA, 15 bp, Homo sapiens
ctacccaagttaaac

SEQ ID NO: 172369 - DNA, 15 bp, Homo sapiens
gctacccaagttaaa

SEQ ID NO: 172370 - DNA, 15 bp, Homo sapiens
agctacccaagttaa

SEQ ID NO: 172371 - DNA, 15 bp, Homo sapiens
gagctacccaagtta

SEQ ID NO: 172372 - DNA, 15 bp, Homo sapiens
agagctacccaagtt

SEQ ID NO: 172373 - DNA, 15 bp, Homo sapiens
cagagctacccaagt

SEQ ID NO: 172374 - DNA, 15 bp, Homo sapiens
acagagctacccaag

SEQ ID NO: 172375 - DNA, 15 bp, Homo sapiens
gacagagctacccaa

SEQ ID NO: 172376 - DNA, 15 bp, Homo sapiens
ggacagagctaccca

SEQ ID NO: 172377 - DNA, 15 bp, Homo sapiens
tggacagagctaccc

SEQ ID NO: 172378 - DNA, 15 bp, Homo sapiens
gtggacagagctacc

SEQ ID NO: 172379 - DNA, 15 bp, Homo sapiens
agtggacagagctac

SEQ ID NO: 172380 - DNA, 15 bp, Homo sapiens
aagtggacagagcta

SEQ ID NO: 172381 - DNA, 15 bp, Homo sapiens
gaagtggacagagct

SEQ ID NO: 172382 - DNA, 15 bp, Homo sapiens
agaagtggacagagc

SEQ ID NO: 172383 - DNA, 15 bp, Homo sapiens
aagaagtggacagag

SEQ ID NO: 172384 - DNA, 15 bp, Homo sapiens
gaagaagtggacaga

SEQ ID NO: 172385 - DNA, 15 bp, Homo sapiens
agaagaagtggacag

SEQ ID NO: 172386 - DNA, 15 bp, Homo sapiens
tagaagaagtggaca

SEQ ID NO: 172387 - DNA, 15 bp, Homo sapiens
ttagaagaagtggac

SEQ ID NO: 172388 - DNA, 15 bp, Homo sapiens
attagaagaagtgga

SEQ ID NO: 172389 - DNA, 15 bp, Homo sapiens
gattagaagaagtgg

SEQ ID NO: 172390 - DNA, 15 bp, Homo sapiens
tgattagaagaagtg

SEQ ID NO: 172391 - DNA, 15 bp, Homo sapiens
gtgattagaagaagt

SEQ ID NO: 172392 - DNA, 15 bp, Homo sapiens
agtgattagaagaag

SEQ ID NO: 172393 - DNA, 15 bp, Homo sapiens
gagtgattagaagaa

SEQ ID NO: 172394 - DNA, 15 bp, Homo sapiens
agagtgattagaaga

SEQ ID NO: 172395 - DNA, 15 bp, Homo sapiens
cagagtgattagaag

SEQ ID NO: 172396 - DNA, 15 bp, Homo sapiens
tcagagtgattagaa

SEQ ID NO: 172397 - DNA, 15 bp, Homo sapiens
atcagagtgattaga

SEQ ID NO: 172398 - DNA, 15 bp, Homo sapiens
tatcagagtgattag

SEQ ID NO: 172399 - DNA, 15 bp, Homo sapiens
atatcagagtgatta

SEQ ID NO: 172400 - DNA, 15 bp, Homo sapiens
aatatcagagtgatt

SEQ ID NO: 172401 - DNA, 15 bp, Homo sapiens
caatatcagagtgat

SEQ ID NO: 172402 - DNA, 15 bp, Homo sapiens
tcaatatcagagtga

SEQ ID NO: 172403 - DNA, 15 bp, Homo sapiens
ctcaatatcagagtg

SEQ ID NO: 172404 - DNA, 15 bp, Homo sapiens
cctcaatatcagagt

SEQ ID NO: 172405 - DNA, 15 bp, Homo sapiens
ccctcaatatcagag

SEQ ID NO: 172406 - DNA, 15 bp, Homo sapiens
gccctcaatatcaga

SEQ ID NO: 172407 - DNA, 15 bp, Homo sapiens
tgccctcaatatcag

SEQ ID NO: 172408 - DNA, 15 bp, Homo sapiens
ttgccctcaatatca

SEQ ID NO: 172409 - DNA, 15 bp, Homo sapiens
tttgccctcaatatc

SEQ ID NO: 172410 - DNA, 15 bp, Homo sapiens
atttgccctcaatat

SEQ ID NO: 172411 - DNA, 15 bp, Homo sapiens
aatttgccctcaata

SEQ ID NO: 172412 - DNA, 15 bp, Homo sapiens
gaatttgccctcaat

SEQ ID NO: 172413 - DNA, 15 bp, Homo sapiens
agaatttgccctcaa

SEQ ID NO: 172414 - DNA, 15 bp, Homo sapiens
aagaatttgccctca

SEQ ID NO: 172415 - DNA, 15 bp, Homo sapiens
aaagaatttgccctc

SEQ ID NO: 172416 - DNA, 15 bp, Homo sapiens
taaagaatttgccct

SEQ ID NO: 172417 - DNA, 15 bp, Homo sapiens
ctaaagaatttgccc

SEQ ID NO: 172418 - DNA, 15 bp, Homo sapiens
cctaaagaatttgcc

SEQ ID NO: 172419 - DNA, 15 bp, Homo sapiens
tcctaaagaatttgc

SEQ ID NO: 172420 - DNA, 15 bp, Homo sapiens
gtcctaaagaatttg

SEQ ID NO: 172421 - DNA, 15 bp, Homo sapiens
agtcctaaagaattt

SEQ ID NO: 172422 - DNA, 15 bp, Homo sapiens
gagtcctaaagaatt

SEQ ID NO: 172423 - DNA, 15 bp, Homo sapiens
ggagtcctaaagaat

SEQ ID NO: 172424 - DNA, 15 bp, Homo sapiens
aggagtcctaaagaa

SEQ ID NO: 172425 - DNA, 15 bp, Homo sapiens
aaggagtcctaaaga

SEQ ID NO: 172426 - DNA, 15 bp, Homo sapiens
aaaggagtcctaaag

SEQ ID NO: 172427 - DNA, 15 bp, Homo sapiens
aaaaggagtcctaaa

SEQ ID NO: 172428 - DNA, 15 bp, Homo sapiens
caaaaggagtcctaa

SEQ ID NO: 172429 - DNA, 15 bp, Homo sapiens
acaaaaggagtccta

SEQ ID NO: 172430 - DNA, 15 bp, Homo sapiens
cacaaaaggagtcct

SEQ ID NO: 172431 - DNA, 15 bp, Homo sapiens
tcacaaaaggagtcc

SEQ ID NO: 172432 - DNA, 15 bp, Homo sapiens
gtcacaaaaggagtc

SEQ ID NO: 172433 - DNA, 15 bp, Homo sapiens
agtcacaaaaggagt

SEQ ID NO: 172434 - DNA, 15 bp, Homo sapiens
aagtcacaaaaggag

SEQ ID NO: 172435 - DNA, 15 bp, Homo sapiens
taagtcacaaaagga

SEQ ID NO: 172436 - DNA, 15 bp, Homo sapiens
gtaagtcacaaaagg

SEQ ID NO: 172437 - DNA, 15 bp, Homo sapiens
ggtaagtcacaaaag

SEQ ID NO: 172438 - DNA, 15 bp, Homo sapiens
aggtaagtcacaaaa

SEQ ID NO: 172439 - DNA, 15 bp, Homo sapiens
caggtaagtcacaaa

SEQ ID NO: 172440 - DNA, 15 bp, Homo sapiens
tcaggtaagtcacaa

SEQ ID NO: 172441 - DNA, 15 bp, Homo sapiens
ttcaggtaagtcaca

SEQ ID NO: 172442 - DNA, 15 bp, Homo sapiens
tttcaggtaagtcac

SEQ ID NO: 172443 - DNA, 15 bp, Homo sapiens
gtttcaggtaagtca

SEQ ID NO: 172444 - DNA, 15 bp, Homo sapiens
ggtttcaggtaagtc

SEQ ID NO: 172445 - DNA, 15 bp, Homo sapiens
aggtttcaggtaagt

SEQ ID NO: 172446 - DNA, 15 bp, Homo sapiens
gaggtttcaggtaag

SEQ ID NO: 172447 - DNA, 15 bp, Homo sapiens
agaggtttcaggtaa

SEQ ID NO: 172448 - DNA, 15 bp, Homo sapiens
cagaggtttcaggta

SEQ ID NO: 172449 - DNA, 15 bp, Homo sapiens
gcagaggtttcaggt

SEQ ID NO: 172450 - DNA, 15 bp, Homo sapiens
ggcagaggtttcagg

SEQ ID NO: 172451 - DNA, 15 bp, Homo sapiens
tggcagaggtttcag

SEQ ID NO: 172452 - DNA, 15 bp, Homo sapiens
atggcagaggtttca

SEQ ID NO: 172453 - DNA, 15 bp, Homo sapiens
catggcagaggtttc

SEQ ID NO: 172454 - DNA, 15 bp, Homo sapiens
ccatggcagaggttt

SEQ ID NO: 172455 - DNA, 15 bp, Homo sapiens
accatggcagaggtt

SEQ ID NO: 172456 - DNA, 15 bp, Homo sapiens
caccatggcagaggt

SEQ ID NO: 172457 - DNA, 15 bp, Homo sapiens
acaccatggcagagg

SEQ ID NO: 172458 - DNA, 15 bp, Homo sapiens
gacaccatggcagag

SEQ ID NO: 172459 - DNA, 15 bp, Homo sapiens
tgacaccatggcaga

SEQ ID NO: 172460 - DNA, 15 bp, Homo sapiens
ctgacaccatggcag

SEQ ID NO: 172461 - DNA, 15 bp, Homo sapiens
gctgacaccatggca

SEQ ID NO: 172462 - DNA, 15 bp, Homo sapiens
agctgacaccatggc

SEQ ID NO: 172463 - DNA, 15 bp, Homo sapiens
gagctgacaccatgg

SEQ ID NO: 172464 - DNA, 15 bp, Homo sapiens
ggagctgacaccatg

SEQ ID NO: 172465 - DNA, 15 bp, Homo sapiens
tggagctgacaccat

SEQ ID NO: 172466 - DNA, 15 bp, Homo sapiens
ctggagctgacacca

SEQ ID NO: 172467 - DNA, 15 bp, Homo sapiens
actggagctgacacc

SEQ ID NO: 172468 - DNA, 15 bp, Homo sapiens
aactggagctgacac

SEQ ID NO: 172469 - DNA, 15 bp, Homo sapiens
aaactggagctgaca

SEQ ID NO: 172470 - DNA, 15 bp, Homo sapiens
caaactggagctgac

SEQ ID NO: 172471 - DNA, 15 bp, Homo sapiens
tcaaactggagctga

SEQ ID NO: 172472 - DNA, 15 bp, Homo sapiens
ctcaaactggagctg

SEQ ID NO: 172473 - DNA, 15 bp, Homo sapiens
tctcaaactggagct

SEQ ID NO: 172474 - DNA, 15 bp, Homo sapiens
atctcaaactggagc

SEQ ID NO: 172475 - DNA, 15 bp, Homo sapiens
catctcaaactggag

SEQ ID NO: 172476 - DNA, 15 bp, Homo sapiens
gcatctcaaactgga

SEQ ID NO: 172477 - DNA, 15 bp, Homo sapiens
agcatctcaaactgg

SEQ ID NO: 172478 - DNA, 15 bp, Homo sapiens
aagcatctcaaactg

SEQ ID NO: 172479 - DNA, 15 bp, Homo sapiens
aaagcatctcaaact

SEQ ID NO: 172480 - DNA, 15 bp, Homo sapiens
gaaagcatctcaaac

SEQ ID NO: 172481 - DNA, 15 bp, Homo sapiens
agaaagcatctcaaa

SEQ ID NO: 172482 - DNA, 15 bp, Homo sapiens
cagaaagcatctcaa

SEQ ID NO: 172483 - DNA, 15 bp, Homo sapiens
tcagaaagcatctca

SEQ ID NO: 172484 - DNA, 15 bp, Homo sapiens
atcagaaagcatctc

SEQ ID NO: 172485 - DNA, 15 bp, Homo sapiens
catcagaaagcatct

SEQ ID NO: 172486 - DNA, 15 bp, Homo sapiens
gcatcagaaagcatc

SEQ ID NO: 172487 - DNA, 15 bp, Homo sapiens
ggcatcagaaagcat

SEQ ID NO: 172488 - DNA, 15 bp, Homo sapiens
aggcatcagaaagca

SEQ ID NO: 172489 - DNA, 15 bp, Homo sapiens
caggcatcagaaagc

SEQ ID NO: 172490 - DNA, 15 bp, Homo sapiens
ccaggcatcagaaag

SEQ ID NO: 172491 - DNA, 15 bp, Homo sapiens
cccaggcatcagaaa

SEQ ID NO: 172492 - DNA, 15 bp, Homo sapiens
tcccaggcatcagaa

SEQ ID NO: 172493 - DNA, 15 bp, Homo sapiens
ctcccaggcatcaga

SEQ ID NO: 172494 - DNA, 15 bp, Homo sapiens
gctcccaggcatcag

SEQ ID NO: 172495 - DNA, 15 bp, Homo sapiens
tgctcccaggcatca

SEQ ID NO: 172496 - DNA, 15 bp, Homo sapiens
atgctcccaggcatc

SEQ ID NO: 172497 - DNA, 15 bp, Homo sapiens
aatgctcccaggcat

SEQ ID NO: 172498 - DNA, 15 bp, Homo sapiens
taatgctcccaggca

SEQ ID NO: 172499 - DNA, 15 bp, Homo sapiens
ataatgctcccaggc

SEQ ID NO: 172500 - DNA, 15 bp, Homo sapiens
tataatgctcccagg

SEQ ID NO: 172501 - DNA, 15 bp, Homo sapiens
ctataatgctcccag

SEQ ID NO: 172502 - DNA, 15 bp, Homo sapiens
cctataatgctccca

SEQ ID NO: 172503 - DNA, 15 bp, Homo sapiens
ccctataatgctccc

SEQ ID NO: 172504 - DNA, 15 bp, Homo sapiens
cccctataatgctcc

SEQ ID NO: 172505 - DNA, 15 bp, Homo sapiens
tcccctataatgctc

SEQ ID NO: 172506 - DNA, 15 bp, Homo sapiens
ttcccctataatgct

SEQ ID NO: 172507 - DNA, 15 bp, Homo sapiens
gttcccctataatgc

SEQ ID NO: 172508 - DNA, 15 bp, Homo sapiens
tgttcccctataatg

SEQ ID NO: 172509 - DNA, 15 bp, Homo sapiens
atgttcccctataat

SEQ ID NO: 172510 - DNA, 15 bp, Homo sapiens
catgttcccctataa

SEQ ID NO: 172511 - DNA, 15 bp, Homo sapiens
ccatgttcccctata

SEQ ID NO: 172512 - DNA, 15 bp, Homo sapiens
cccatgttcccctat

SEQ ID NO: 172513 - DNA, 15 bp, Homo sapiens
tcccatgttccccta

SEQ ID NO: 172514 - DNA, 15 bp, Homo sapiens
ctcccatgttcccct

SEQ ID NO: 172515 - DNA, 15 bp, Homo sapiens
tctcccatgttcccc

SEQ ID NO: 172516 - DNA, 15 bp, Homo sapiens
atctcccatgttccc

SEQ ID NO: 172517 - DNA, 15 bp, Homo sapiens
catctcccatgttcc

SEQ ID NO: 172518 - DNA, 15 bp, Homo sapiens
tcatctcccatgttc

SEQ ID NO: 172519 - DNA, 15 bp, Homo sapiens
ctcatctcccatgtt

SEQ ID NO: 172520 - DNA, 15 bp, Homo sapiens
cctcatctcccatgt

SEQ ID NO: 172521 - DNA, 15 bp, Homo sapiens
ccctcatctcccatg

SEQ ID NO: 172522 - DNA, 15 bp, Homo sapiens
accctcatctcccat

SEQ ID NO: 172523 - DNA, 15 bp, Homo sapiens
caccctcatctccca

SEQ ID NO: 172524 - DNA, 15 bp, Homo sapiens
ccaccctcatctccc

SEQ ID NO: 172525 - DNA, 15 bp, Homo sapiens
accaccctcatctcc

SEQ ID NO: 172526 - DNA, 15 bp, Homo sapiens
gaccaccctcatctc

SEQ ID NO: 172527 - DNA, 15 bp, Homo sapiens
tgaccaccctcatct

SEQ ID NO: 172528 - DNA, 15 bp, Homo sapiens
ctgaccaccctcatc

SEQ ID NO: 172529 - DNA, 15 bp, Homo sapiens
tctgaccaccctcat

SEQ ID NO: 172530 - DNA, 15 bp, Homo sapiens
gtctgaccaccctca

SEQ ID NO: 172531 - DNA, 15 bp, Homo sapiens
agtctgaccaccctc

SEQ ID NO: 172532 - DNA, 15 bp, Homo sapiens
gagtctgaccaccct

SEQ ID NO: 172533 - DNA, 15 bp, Homo sapiens
tgagtctgaccaccc

SEQ ID NO: 172534 - DNA, 15 bp, Homo sapiens
ctgagtctgaccacc

SEQ ID NO: 172535 - DNA, 15 bp, Homo sapiens
tctgagtctgaccac

SEQ ID NO: 172536 - DNA, 15 bp, Homo sapiens
ctctgagtctgacca

SEQ ID NO: 172537 - DNA, 15 bp, Homo sapiens
gctctgagtctgacc

SEQ ID NO: 172538 - DNA, 15 bp, Homo sapiens
agctctgagtctgac

SEQ ID NO: 172539 - DNA, 15 bp, Homo sapiens
cagctctgagtctga

SEQ ID NO: 172540 - DNA, 15 bp, Homo sapiens
acagctctgagtctg

SEQ ID NO: 172541 - DNA, 15 bp, Homo sapiens
cacagctctgagtct

SEQ ID NO: 172542 - DNA, 15 bp, Homo sapiens
acacagctctgagtc

SEQ ID NO: 172543 - DNA, 15 bp, Homo sapiens
cacacagctctgagt

SEQ ID NO: 172544 - DNA, 15 bp, Homo sapiens
gcacacagctctgag

SEQ ID NO: 172545 - DNA, 15 bp, Homo sapiens
agcacacagctctga

SEQ ID NO: 172546 - DNA, 15 bp, Homo sapiens
gagcacacagctctg

SEQ ID NO: 172547 - DNA, 15 bp, Homo sapiens
ggagcacacagctct

SEQ ID NO: 172548 - DNA, 15 bp, Homo sapiens
aggagcacacagctc

SEQ ID NO: 172549 - DNA, 15 bp, Homo sapiens
aaggagcacacagct

SEQ ID NO: 172550 - DNA, 15 bp, Homo sapiens
aaaggagcacacagc

SEQ ID NO: 172551 - DNA, 15 bp, Homo sapiens
caaaggagcacacag

SEQ ID NO: 172552 - DNA, 15 bp, Homo sapiens
ccaaaggagcacaca

SEQ ID NO: 172553 - DNA, 15 bp, Homo sapiens
cccaaaggagcacac

SEQ ID NO: 172554 - DNA, 15 bp, Homo sapiens
acccaaaggagcaca

SEQ ID NO: 172555 - DNA, 15 bp, Homo sapiens
tacccaaaggagcac

SEQ ID NO: 172556 - DNA, 15 bp, Homo sapiens
ctacccaaaggagca

SEQ ID NO: 172557 - DNA, 15 bp, Homo sapiens
cctacccaaaggagc

SEQ ID NO: 172558 - DNA, 15 bp, Homo sapiens
tcctacccaaaggag

SEQ ID NO: 172559 - DNA, 15 bp, Homo sapiens
gtcctacccaaagga

SEQ ID NO: 172560 - DNA, 15 bp, Homo sapiens
ggtcctacccaaagg

SEQ ID NO: 172561 - DNA, 15 bp, Homo sapiens
tggtcctacccaaag

SEQ ID NO: 172562 - DNA, 15 bp, Homo sapiens
gtggtcctacccaaa

SEQ ID NO: 172563 - DNA, 15 bp, Homo sapiens
tgtggtcctacccaa

SEQ ID NO: 172564 - DNA, 15 bp, Homo sapiens
atgtggtcctaccca

SEQ ID NO: 172565 - DNA, 15 bp, Homo sapiens
aatgtggtcctaccc

SEQ ID NO: 172566 - DNA, 15 bp, Homo sapiens
aaatgtggtcctacc

SEQ ID NO: 172567 - DNA, 15 bp, Homo sapiens
taaatgtggtcctac

SEQ ID NO: 172568 - DNA, 15 bp, Homo sapiens
ttaaatgtggtccta

SEQ ID NO: 172569 - DNA, 15 bp, Homo sapiens
gttaaatgtggtcct

SEQ ID NO: 172570 - DNA, 15 bp, Homo sapiens
agttaaatgtggtcc

SEQ ID NO: 172571 - DNA, 15 bp, Homo sapiens
gagttaaatgtggtc

SEQ ID NO: 172572 - DNA, 15 bp, Homo sapiens
agagttaaatgtggt

SEQ ID NO: 172573 - DNA, 15 bp, Homo sapiens
aagagttaaatgtgg

SEQ ID NO: 172574 - DNA, 15 bp, Homo sapiens
caagagttaaatgtg

SEQ ID NO: 172575 - DNA, 15 bp, Homo sapiens
gcaagagttaaatgt

SEQ ID NO: 172576 - DNA, 15 bp, Homo sapiens
tgcaagagttaaatg

SEQ ID NO: 172577 - DNA, 15 bp, Homo sapiens
atgcaagagttaaat

SEQ ID NO: 172578 - DNA, 15 bp, Homo sapiens
catgcaagagttaaa

SEQ ID NO: 172579 - DNA, 15 bp, Homo sapiens
tcatgcaagagttaa

SEQ ID NO: 172580 - DNA, 15 bp, Homo sapiens
gtcatgcaagagtta

SEQ ID NO: 172581 - DNA, 15 bp, Homo sapiens
agtcatgcaagagtt

SEQ ID NO: 172582 - DNA, 15 bp, Homo sapiens
aagtcatgcaagagt

SEQ ID NO: 172583 - DNA, 15 bp, Homo sapiens
aaagtcatgcaagag

SEQ ID NO: 172584 - DNA, 15 bp, Homo sapiens
caaagtcatgcaaga

SEQ ID NO: 172585 - DNA, 15 bp, Homo sapiens
acaaagtcatgcaag

SEQ ID NO: 172586 - DNA, 15 bp, Homo sapiens
aacaaagtcatgcaa

SEQ ID NO: 172587 - DNA, 15 bp, Homo sapiens
taacaaagtcatgca

SEQ ID NO: 172588 - DNA, 15 bp, Homo sapiens
ttaacaaagtcatgc

SEQ ID NO: 172589 - DNA, 15 bp, Homo sapiens
tttaacaaagtcatg

SEQ ID NO: 172590 - DNA, 15 bp, Homo sapiens
atttaacaaagtcat

SEQ ID NO: 172591 - DNA, 15 bp, Homo sapiens
catttaacaaagtca

SEQ ID NO: 172592 - DNA, 15 bp, Homo sapiens
acatttaacaaagtc

SEQ ID NO: 172593 - DNA, 15 bp, Homo sapiens
cacatttaacaaagt

SEQ ID NO: 172594 - DNA, 15 bp, Homo sapiens
gcacatttaacaaag

SEQ ID NO: 172595 - DNA, 15 bp, Homo sapiens
agcacatttaacaaa

SEQ ID NO: 172596 - DNA, 15 bp, Homo sapiens
cagcacatttaacaa

SEQ ID NO: 172597 - DNA, 15 bp, Homo sapiens
acagcacatttaaca

SEQ ID NO: 172598 - DNA, 15 bp, Homo sapiens
aacagcacatttaac

SEQ ID NO: 172599 - DNA, 15 bp, Homo sapiens
gaacagcacatttaa

SEQ ID NO: 172600 - DNA, 15 bp, Homo sapiens
ggaacagcacattta

SEQ ID NO: 172601 - DNA, 15 bp, Homo sapiens
tggaacagcacattt

SEQ ID NO: 172602 - DNA, 15 bp, Homo sapiens
ctggaacagcacatt

SEQ ID NO: 172603 - DNA, 15 bp, Homo sapiens
cctggaacagcacat

SEQ ID NO: 172604 - DNA, 15 bp, Homo sapiens
ccctggaacagcaca

SEQ ID NO: 172605 - DNA, 15 bp, Homo sapiens
gccctggaacagcac

SEQ ID NO: 172606 - DNA, 15 bp, Homo sapiens
agccctggaacagca

SEQ ID NO: 172607 - DNA, 15 bp, Homo sapiens
gagccctggaacagc

SEQ ID NO: 172608 - DNA, 15 bp, Homo sapiens
tgagccctggaacag

SEQ ID NO: 172609 - DNA, 15 bp, Homo sapiens
atgagccctggaaca

SEQ ID NO: 172610 - DNA, 15 bp, Homo sapiens
aatgagccctggaac

SEQ ID NO: 172611 - DNA, 15 bp, Homo sapiens
gaatgagccctggaa

SEQ ID NO: 172612 - DNA, 15 bp, Homo sapiens
ggaatgagccctgga

SEQ ID NO: 172613 - DNA, 15 bp, Homo sapiens
tggaatgagccctgg

SEQ ID NO: 172614 - DNA, 15 bp, Homo sapiens
gtggaatgagccctg

SEQ ID NO: 172615 - DNA, 15 bp, Homo sapiens
agtggaatgagccct

SEQ ID NO: 172616 - DNA, 15 bp, Homo sapiens
tagtggaatgagccc

SEQ ID NO: 172617 - DNA, 15 bp, Homo sapiens
ttagtggaatgagcc

SEQ ID NO: 172618 - DNA, 15 bp, Homo sapiens
attagtggaatgagc

SEQ ID NO: 172619 - DNA, 15 bp, Homo sapiens
cattagtggaatgag

SEQ ID NO: 172620 - DNA, 15 bp, Homo sapiens
tcattagtggaatga

SEQ ID NO: 172621 - DNA, 15 bp, Homo sapiens
ctcattagtggaatg

SEQ ID NO: 172622 - DNA, 15 bp, Homo sapiens
cctcattagtggaat

SEQ ID NO: 172623 - DNA, 15 bp, Homo sapiens
ccctcattagtggaa

SEQ ID NO: 172624 - DNA, 15 bp, Homo sapiens
cccctcattagtgga

SEQ ID NO: 172625 - DNA, 15 bp, Homo sapiens
tcccctcattagtgg

SEQ ID NO: 172626 - DNA, 15 bp, Homo sapiens
atcccctcattagtg

SEQ ID NO: 172627 - DNA, 15 bp, Homo sapiens
tatcccctcattagt

SEQ ID NO: 172628 - DNA, 15 bp, Homo sapiens
atatcccctcattag

SEQ ID NO: 172629 - DNA, 15 bp, Homo sapiens
tatatcccctcatta

SEQ ID NO: 172630 - DNA, 15 bp, Homo sapiens
ctatatcccctcatt

SEQ ID NO: 172631 - DNA, 15 bp, Homo sapiens
cctatatcccctcat

SEQ ID NO: 172632 - DNA, 15 bp, Homo sapiens
tcctatatcccctca

SEQ ID NO: 172633 - DNA, 15 bp, Homo sapiens
ctcctatatcccctc

SEQ ID NO: 172634 - DNA, 15 bp, Homo sapiens
cctcctatatcccct

SEQ ID NO: 172635 - DNA, 15 bp, Homo sapiens
ccctcctatatcccc

SEQ ID NO: 172636 - DNA, 15 bp, Homo sapiens
cccctcctatatccc

SEQ ID NO: 172637 - DNA, 15 bp, Homo sapiens
tcccctcctatatcc

SEQ ID NO: 172638 - DNA, 15 bp, Homo sapiens
atcccctcctatatc

SEQ ID NO: 172639 - DNA, 15 bp, Homo sapiens
catcccctcctatat

SEQ ID NO: 172640 - DNA, 15 bp, Homo sapiens
acatcccctcctata

SEQ ID NO: 172641 - DNA, 15 bp, Homo sapiens
gacatcccctcctat

SEQ ID NO: 172642 - DNA, 15 bp, Homo sapiens
ggacatcccctccta

SEQ ID NO: 172643 - DNA, 15 bp, Homo sapiens
aggacatcccctcct

SEQ ID NO: 172644 - DNA, 15 bp, Homo sapiens
aaggacatcccctcc

SEQ ID NO: 172645 - DNA, 15 bp, Homo sapiens
caaggacatcccctc

SEQ ID NO: 172646 - DNA, 15 bp, Homo sapiens
gcaaggacatcccct

SEQ ID NO: 172647 - DNA, 15 bp, Homo sapiens
ggcaaggacatcccc

SEQ ID NO: 172648 - DNA, 15 bp, Homo sapiens
tggcaaggacatccc

SEQ ID NO: 172649 - DNA, 15 bp, Homo sapiens
atggcaaggacatcc

SEQ ID NO: 172650 - DNA, 15 bp, Homo sapiens
aatggcaaggacatc

SEQ ID NO: 172651 - DNA, 15 bp, Homo sapiens
aaatggcaaggacat

SEQ ID NO: 172652 - DNA, 15 bp, Homo sapiens
taaatggcaaggaca

SEQ ID NO: 172653 - DNA, 15 bp, Homo sapiens
ctaaatggcaaggac

SEQ ID NO: 172654 - DNA, 15 bp, Homo sapiens
tctaaatggcaagga

SEQ ID NO: 172655 - DNA, 15 bp, Homo sapiens
atctaaatggcaagg

SEQ ID NO: 172656 - DNA, 15 bp, Homo sapiens
catctaaatggcaag

SEQ ID NO: 172657 - DNA, 15 bp, Homo sapiens
tcatctaaatggcaa

SEQ ID NO: 172658 - DNA, 15 bp, Homo sapiens
atcatctaaatggca

SEQ ID NO: 172659 - DNA, 15 bp, Homo sapiens
gatcatctaaatggc

SEQ ID NO: 172660 - DNA, 15 bp, Homo sapiens
ggatcatctaaatgg

SEQ ID NO: 172661 - DNA, 15 bp, Homo sapiens
gggatcatctaaatg

SEQ ID NO: 172662 - DNA, 15 bp, Homo sapiens
ggggatcatctaaat

SEQ ID NO: 172663 - DNA, 15 bp, Homo sapiens
aggggatcatctaaa

SEQ ID NO: 172664 - DNA, 15 bp, Homo sapiens
gaggggatcatctaa

SEQ ID NO: 172665 - DNA, 15 bp, Homo sapiens
tgaggggatcatcta

SEQ ID NO: 172666 - DNA, 15 bp, Homo sapiens
ttgaggggatcatct

SEQ ID NO: 172667 - DNA, 15 bp, Homo sapiens
attgaggggatcatc

SEQ ID NO: 172668 - DNA, 15 bp, Homo sapiens
aattgaggggatcat

SEQ ID NO: 172669 - DNA, 15 bp, Homo sapiens
taattgaggggatca

SEQ ID NO: 172670 - DNA, 15 bp, Homo sapiens
ttaattgaggggatc

SEQ ID NO: 172671 - DNA, 15 bp, Homo sapiens
cttaattgaggggat

SEQ ID NO: 172672 - DNA, 15 bp, Homo sapiens
gcttaattgagggga

SEQ ID NO: 172673 - DNA, 15 bp, Homo sapiens
cgcttaattgagggg

SEQ ID NO: 172674 - DNA, 15 bp, Homo sapiens
acgcttaattgaggg

SEQ ID NO: 172675 - DNA, 15 bp, Homo sapiens
aacgcttaattgagg

SEQ ID NO: 172676 - DNA, 15 bp, Homo sapiens
caacgcttaattgag

SEQ ID NO: 172677 - DNA, 15 bp, Homo sapiens
tcaacgcttaattga

SEQ ID NO: 172678 - DNA, 15 bp, Homo sapiens
ctcaacgcttaattg

SEQ ID NO: 172679 - DNA, 15 bp, Homo sapiens
gctcaacgcttaatt

SEQ ID NO: 172680 - DNA, 15 bp, Homo sapiens
ggctcaacgcttaat

SEQ ID NO: 172681 - DNA, 15 bp, Homo sapiens
gggctcaacgcttaa

SEQ ID NO: 172682 - DNA, 15 bp, Homo sapiens
agggctcaacgctta

SEQ ID NO: 172683 - DNA, 15 bp, Homo sapiens
cagggctcaacgctt

SEQ ID NO: 172684 - DNA, 15 bp, Homo sapiens
ccagggctcaacgct

SEQ ID NO: 172685 - DNA, 15 bp, Homo sapiens
tccagggctcaacgc

SEQ ID NO: 172686 - DNA, 15 bp, Homo sapiens
ttccagggctcaacg

SEQ ID NO: 172687 - DNA, 15 bp, Homo sapiens
gttccagggctcaac

SEQ ID NO: 172688 - DNA, 15 bp, Homo sapiens
ggttccagggctcaa

SEQ ID NO: 172689 - DNA, 15 bp, Homo sapiens
aggttccagggctca

SEQ ID NO: 172690 - DNA, 15 bp, Homo sapiens
caggttccagggctc

SEQ ID NO: 172691 - DNA, 15 bp, Homo sapiens
acaggttccagggct

SEQ ID NO: 172692 - DNA, 15 bp, Homo sapiens
cacaggttccagggc

SEQ ID NO: 172693 - DNA, 15 bp, Homo sapiens
acacaggttccaggg

SEQ ID NO: 172694 - DNA, 15 bp, Homo sapiens
aacacaggttccagg

SEQ ID NO: 172695 - DNA, 15 bp, Homo sapiens
aaacacaggttccag

SEQ ID NO: 172696 - DNA, 15 bp, Homo sapiens
gaaacacaggttcca

SEQ ID NO: 172697 - DNA, 15 bp, Homo sapiens
agaaacacaggttcc

SEQ ID NO: 172698 - DNA, 15 bp, Homo sapiens
cagaaacacaggttc

SEQ ID NO: 172699 - DNA, 15 bp, Homo sapiens
acagaaacacaggtt

SEQ ID NO: 172700 - DNA, 15 bp, Homo sapiens
cacagaaacacaggt

SEQ ID NO: 172701 - DNA, 15 bp, Homo sapiens
tcacagaaacacagg

SEQ ID NO: 172702 - DNA, 15 bp, Homo sapiens
ctcacagaaacacag

SEQ ID NO: 172703 - DNA, 15 bp, Homo sapiens
tctcacagaaacaca

SEQ ID NO: 172704 - DNA, 15 bp, Homo sapiens
ctctcacagaaacac

SEQ ID NO: 172705 - DNA, 15 bp, Homo sapiens
tctctcacagaaaca

SEQ ID NO: 172706 - DNA, 15 bp, Homo sapiens
ttctctcacagaaac

SEQ ID NO: 172707 - DNA, 15 bp, Homo sapiens
tttctctcacagaaa

SEQ ID NO: 172708 - DNA, 15 bp, Homo sapiens
ctttctctcacagaa

SEQ ID NO: 172709 - DNA, 15 bp, Homo sapiens
tctttctctcacaga

SEQ ID NO: 172710 - DNA, 15 bp, Homo sapiens
ctctttctctcacag

SEQ ID NO: 172711 - DNA, 15 bp, Homo sapiens
tctctttctctcaca

SEQ ID NO: 172712 - DNA, 15 bp, Homo sapiens
ctctctttctctcac

SEQ ID NO: 172713 - DNA, 15 bp, Homo sapiens
tctctctttctctca

SEQ ID NO: 172714 - DNA, 15 bp, Homo sapiens
ctctctctttctctc

SEQ ID NO: 172715 - DNA, 15 bp, Homo sapiens
tctctctctttctct

SEQ ID NO: 172716 - DNA, 15 bp, Homo sapiens
ctctctctctttctc

SEQ ID NO: 172717 - DNA, 15 bp, Homo sapiens
tctctctctctttct

SEQ ID NO: 172718 - DNA, 15 bp, Homo sapiens
ttctctctctctttc

SEQ ID NO: 172719 - DNA, 15 bp, Homo sapiens
attctctctctcttt

SEQ ID NO: 172720 - DNA, 15 bp, Homo sapiens
cattctctctctctt

SEQ ID NO: 172721 - DNA, 15 bp, Homo sapiens
tcattctctctctct

SEQ ID NO: 172722 - DNA, 15 bp, Homo sapiens
ctcattctctctctc

SEQ ID NO: 172723 - DNA, 15 bp, Homo sapiens
tctcattctctctct

SEQ ID NO: 172724 - DNA, 15 bp, Homo sapiens
ctctcattctctctc

SEQ ID NO: 172725 - DNA, 15 bp, Homo sapiens
tctctcattctctct

SEQ ID NO: 172726 - DNA, 15 bp, Homo sapiens
ctctctcattctctc

SEQ ID NO: 172727 - DNA, 15 bp, Homo sapiens
tctctctcattctct

SEQ ID NO: 172728 - DNA, 15 bp, Homo sapiens
ctctctctcattctc

SEQ ID NO: 172729 - DNA, 15 bp, Homo sapiens
tctctctctcattct

SEQ ID NO: 172730 - DNA, 15 bp, Homo sapiens
ctctctctctcattc

SEQ ID NO: 172731 - DNA, 15 bp, Homo sapiens
tctctctctctcatt

SEQ ID NO: 172732 - DNA, 15 bp, Homo sapiens
ttctctctctctcat

SEQ ID NO: 172733 - DNA, 15 bp, Homo sapiens
tttctctctctctca

SEQ ID NO: 172734 - DNA, 15 bp, Homo sapiens
ctttctctctctctc

SEQ ID NO: 172735 - DNA, 15 bp, Homo sapiens
tctttctctctctct

SEQ ID NO: 172736 - DNA, 15 bp, Homo sapiens
ctctttctctctctc

SEQ ID NO: 172737 - DNA, 15 bp, Homo sapiens
tctctttctctctct

SEQ ID NO: 172738 - DNA, 15 bp, Homo sapiens
ctctctttctctctc

SEQ ID NO: 172739 - DNA, 15 bp, Homo sapiens
tctctctttctctct

SEQ ID NO: 172740 - DNA, 15 bp, Homo sapiens
actctctctctttct

SEQ ID NO: 172741 - DNA, 15 bp, Homo sapiens
gactctctctctttc

SEQ ID NO: 172742 - DNA, 15 bp, Homo sapiens
agactctctctcttt

SEQ ID NO: 172743 - DNA, 15 bp, Homo sapiens
aagactctctctctt

SEQ ID NO: 172744 - DNA, 15 bp, Homo sapiens
caagactctctctct

SEQ ID NO: 172745 - DNA, 15 bp, Homo sapiens
tcaagactctctctc

SEQ ID NO: 172746 - DNA, 15 bp, Homo sapiens
atcaagactctctct

SEQ ID NO: 172747 - DNA, 15 bp, Homo sapiens
aatcaagactctctc

SEQ ID NO: 172748 - DNA, 15 bp, Homo sapiens
caatcaagactctct

SEQ ID NO: 172749 - DNA, 15 bp, Homo sapiens
acaatcaagactctc

SEQ ID NO: 172750 - DNA, 15 bp, Homo sapiens
aacaatcaagactct

SEQ ID NO: 172751 - DNA, 15 bp, Homo sapiens
gaacaatcaagactc

SEQ ID NO: 172752 - DNA, 15 bp, Homo sapiens
tgaacaatcaagact

SEQ ID NO: 172753 - DNA, 15 bp, Homo sapiens
atgaacaatcaagac

SEQ ID NO: 172754 - DNA, 15 bp, Homo sapiens
catgaacaatcaaga

SEQ ID NO: 172755 - DNA, 15 bp, Homo sapiens
gcatgaacaatcaag

SEQ ID NO: 172756 - DNA, 15 bp, Homo sapiens
agcatgaacaatcaa

SEQ ID NO: 172757 - DNA, 15 bp, Homo sapiens
cagcatgaacaatca

SEQ ID NO: 172758 - DNA, 15 bp, Homo sapiens
gcagcatgaacaatc

SEQ ID NO: 172759 - DNA, 15 bp, Homo sapiens
agcagcatgaacaat

SEQ ID NO: 172760 - DNA, 15 bp, Homo sapiens
cagcagcatgaacaa

SEQ ID NO: 172761 - DNA, 15 bp, Homo sapiens
acagcagcatgaaca

SEQ ID NO: 172762 - DNA, 15 bp, Homo sapiens
aacagcagcatgaac

SEQ ID NO: 172763 - DNA, 15 bp, Homo sapiens
aaacagcagcatgaa

SEQ ID NO: 172764 - DNA, 15 bp, Homo sapiens
aaaacagcagcatga

SEQ ID NO: 172765 - DNA, 15 bp, Homo sapiens
taaaacagcagcatg

SEQ ID NO: 172766 - DNA, 15 bp, Homo sapiens
ataaaacagcagcat

SEQ ID NO: 172767 - DNA, 15 bp, Homo sapiens
tataaaacagcagca

SEQ ID NO: 172768 - DNA, 15 bp, Homo sapiens
ctataaaacagcagc

SEQ ID NO: 172769 - DNA, 15 bp, Homo sapiens
gctataaaacagcag

SEQ ID NO: 172770 - DNA, 15 bp, Homo sapiens
agctataaaacagca

SEQ ID NO: 172771 - DNA, 15 bp, Homo sapiens
gagctataaaacagc

SEQ ID NO: 172772 - DNA, 15 bp, Homo sapiens
agagctataaaacag

SEQ ID NO: 172773 - DNA, 15 bp, Homo sapiens
aagagctataaaaca

SEQ ID NO: 172774 - DNA, 15 bp, Homo sapiens
aaagagctataaaac

SEQ ID NO: 172775 - DNA, 15 bp, Homo sapiens
aaaagagctataaaa

SEQ ID NO: 172776 - DNA, 15 bp, Homo sapiens
aaaaagagctataaa

SEQ ID NO: 172777 - DNA, 15 bp, Homo sapiens
gaaaaagagctataa

SEQ ID NO: 172778 - DNA, 15 bp, Homo sapiens
agaaaaagagctata

SEQ ID NO: 172779 - DNA, 15 bp, Homo sapiens
tagaaaaagagctat

SEQ ID NO: 172780 - DNA, 15 bp, Homo sapiens
ttagaaaaagagcta

SEQ ID NO: 172781 - DNA, 15 bp, Homo sapiens
attagaaaaagagct

SEQ ID NO: 172782 - DNA, 15 bp, Homo sapiens
tattagaaaaagagc

SEQ ID NO: 172783 - DNA, 15 bp, Homo sapiens
ctattagaaaaagag

SEQ ID NO: 172784 - DNA, 15 bp, Homo sapiens
actattagaaaaaga

SEQ ID NO: 172785 - DNA, 15 bp, Homo sapiens
aactattagaaaaag

SEQ ID NO: 172786 - DNA, 15 bp, Homo sapiens
gaactattagaaaaa

SEQ ID NO: 172787 - DNA, 15 bp, Homo sapiens
agaactattagaaaa

SEQ ID NO: 172788 - DNA, 15 bp, Homo sapiens
gagaactattagaaa

SEQ ID NO: 172789 - DNA, 15 bp, Homo sapiens
tgagaactattagaa

SEQ ID NO: 172790 - DNA, 15 bp, Homo sapiens
ttgagaactattaga

SEQ ID NO: 172791 - DNA, 15 bp, Homo sapiens
attgagaactattag

SEQ ID NO: 172792 - DNA, 15 bp, Homo sapiens
gattgagaactatta

SEQ ID NO: 172793 - DNA, 15 bp, Homo sapiens
agattgagaactatt

SEQ ID NO: 172794 - DNA, 15 bp, Homo sapiens
cagattgagaactat

SEQ ID NO: 172795 - DNA, 15 bp, Homo sapiens
acagattgagaacta

SEQ ID NO: 172796 - DNA, 15 bp, Homo sapiens
aacagattgagaact

SEQ ID NO: 172797 - DNA, 15 bp, Homo sapiens
aaacagattgagaac

SEQ ID NO: 172798 - DNA, 15 bp, Homo sapiens
gaaacagattgagaa

SEQ ID NO: 172799 - DNA, 15 bp, Homo sapiens
ggaaacagattgaga

SEQ ID NO: 172800 - DNA, 15 bp, Homo sapiens
gggaaacagattgag

SEQ ID NO: 172801 - DNA, 15 bp, Homo sapiens
ggggaaacagattga

SEQ ID NO: 172802 - DNA, 15 bp, Homo sapiens
tggggaaacagattg

SEQ ID NO: 172803 - DNA, 15 bp, Homo sapiens
ttggggaaacagatt

SEQ ID NO: 172804 - DNA, 15 bp, Homo sapiens
gttggggaaacagat

SEQ ID NO: 172805 - DNA, 15 bp, Homo sapiens
agttggggaaacaga

SEQ ID NO: 172806 - DNA, 15 bp, Homo sapiens
gagttggggaaacag

SEQ ID NO: 172807 - DNA, 15 bp, Homo sapiens
agagttggggaaaca

SEQ ID NO: 172808 - DNA, 15 bp, Homo sapiens
gagagttggggaaac

SEQ ID NO: 172809 - DNA, 15 bp, Homo sapiens
agagagttggggaaa

SEQ ID NO: 172810 - DNA, 15 bp, Homo sapiens
gagagagttggggaa

SEQ ID NO: 172811 - DNA, 15 bp, Homo sapiens
ggagagagttgggga

SEQ ID NO: 172812 - DNA, 15 bp, Homo sapiens
cggagagagttgggg

SEQ ID NO: 172813 - DNA, 15 bp, Homo sapiens
acggagagagttggg

SEQ ID NO: 172814 - DNA, 15 bp, Homo sapiens
tacggagagagttgg

SEQ ID NO: 172815 - DNA, 15 bp, Homo sapiens
atacggagagagttg

SEQ ID NO: 172816 - DNA, 15 bp, Homo sapiens
aatacggagagagtt

SEQ ID NO: 172817 - DNA, 15 bp, Homo sapiens
taatacggagagagt

SEQ ID NO: 172818 - DNA, 15 bp, Homo sapiens
ttaatacggagagag

SEQ ID NO: 172819 - DNA, 15 bp, Homo sapiens
cttaatacggagaga

SEQ ID NO: 172820 - DNA, 15 bp, Homo sapiens
acttaatacggagag

SEQ ID NO: 172821 - DNA, 15 bp, Homo sapiens
gacttaatacggaga

SEQ ID NO: 172822 - DNA, 15 bp, Homo sapiens
tgacttaatacggag

SEQ ID NO: 172823 - DNA, 15 bp, Homo sapiens
ctgacttaatacgga

SEQ ID NO: 172824 - DNA, 15 bp, Homo sapiens
tctgacttaatacgg

SEQ ID NO: 172825 - DNA, 15 bp, Homo sapiens
ttctgacttaatacg

SEQ ID NO: 172826 - DNA, 15 bp, Homo sapiens
tttctgacttaatac

SEQ ID NO: 172827 - DNA, 15 bp, Homo sapiens
ttttctgacttaata

SEQ ID NO: 172828 - DNA, 15 bp, Homo sapiens
cttttctgacttaat

SEQ ID NO: 172829 - DNA, 15 bp, Homo sapiens
tcttttctgacttaa

SEQ ID NO: 172830 - DNA, 15 bp, Homo sapiens
ctcttttctgactta

SEQ ID NO: 172831 - DNA, 15 bp, Homo sapiens
cctcttttctgactt

SEQ ID NO: 172832 - DNA, 15 bp, Homo sapiens
tcctcttttctgact

SEQ ID NO: 172833 - DNA, 15 bp, Homo sapiens
ttcctcttttctgac

SEQ ID NO: 172834 - DNA, 15 bp, Homo sapiens
cttcctcttttctga

SEQ ID NO: 172835 - DNA, 15 bp, Homo sapiens
tcttcctcttttctg

SEQ ID NO: 172836 - DNA, 15 bp, Homo sapiens
ttcttcctcttttct

SEQ ID NO: 172837 - DNA, 15 bp, Homo sapiens
tttcttcctcttttc

SEQ ID NO: 172838 - DNA, 15 bp, Homo sapiens
atttcttcctctttt

SEQ ID NO: 172839 - DNA, 15 bp, Homo sapiens
catttcttcctcttt

SEQ ID NO: 172840 - DNA, 15 bp, Homo sapiens
tcatttcttcctctt

SEQ ID NO: 172841 - DNA, 15 bp, Homo sapiens
atcatttcttcctct

SEQ ID NO: 172842 - DNA, 15 bp, Homo sapiens
catcatttcttcctc

SEQ ID NO: 172843 - DNA, 15 bp, Homo sapiens
acatcatttcttcct

SEQ ID NO: 172844 - DNA, 15 bp, Homo sapiens
gacatcatttcttcc

SEQ ID NO: 172845 - DNA, 15 bp, Homo sapiens
tgacatcatttcttc

SEQ ID NO: 172846 - DNA, 15 bp, Homo sapiens
gtgacatcatttctt

SEQ ID NO: 172847 - DNA, 15 bp, Homo sapiens
tgtgacatcatttct

SEQ ID NO: 172848 - DNA, 15 bp, Homo sapiens
gtgtgacatcatttc

SEQ ID NO: 172849 - DNA, 15 bp, Homo sapiens
agtgtgacatcattt

SEQ ID NO: 172850 - DNA, 15 bp, Homo sapiens
gagtgtgacatcatt

SEQ ID NO: 172851 - DNA, 15 bp, Homo sapiens
tgagtgtgacatcat

SEQ ID NO: 172852 - DNA, 15 bp, Homo sapiens
gtgagtgtgacatca

SEQ ID NO: 172853 - DNA, 15 bp, Homo sapiens
tgtgagtgtgacatc

SEQ ID NO: 172854 - DNA, 15 bp, Homo sapiens
ctgtgagtgtgacat

SEQ ID NO: 172855 - DNA, 15 bp, Homo sapiens
actgtgagtgtgaca

SEQ ID NO: 172856 - DNA, 15 bp, Homo sapiens
gactgtgagtgtgac

SEQ ID NO: 172857 - DNA, 15 bp, Homo sapiens
agactgtgagtgtga

SEQ ID NO: 172858 - DNA, 15 bp, Homo sapiens
cagactgtgagtgtg

SEQ ID NO: 172859 - DNA, 15 bp, Homo sapiens
gcagactgtgagtgt

SEQ ID NO: 172860 - DNA, 15 bp, Homo sapiens
agcagactgtgagtg

SEQ ID NO: 172861 - DNA, 15 bp, Homo sapiens
aagcagactgtgagt

SEQ ID NO: 172862 - DNA, 15 bp, Homo sapiens
gaagcagactgtgag

SEQ ID NO: 172863 - DNA, 15 bp, Homo sapiens
agaagcagactgtga

SEQ ID NO: 172864 - DNA, 15 bp, Homo sapiens
gagaagcagactgtg

SEQ ID NO: 172865 - DNA, 15 bp, Homo sapiens
agagaagcagactgt

SEQ ID NO: 172866 - DNA, 15 bp, Homo sapiens
cagagaagcagactg

SEQ ID NO: 172867 - DNA, 15 bp, Homo sapiens
gcagagaagcagact

SEQ ID NO: 172868 - DNA, 15 bp, Homo sapiens
tgcagagaagcagac

SEQ ID NO: 172869 - DNA, 15 bp, Homo sapiens
ttgcagagaagcaga

SEQ ID NO: 172870 - DNA, 15 bp, Homo sapiens
tttgcagagaagcag

SEQ ID NO: 172871 - DNA, 15 bp, Homo sapiens
atttgcagagaagca

SEQ ID NO: 172872 - DNA, 15 bp, Homo sapiens
tatttgcagagaagc

SEQ ID NO: 172873 - DNA, 15 bp, Homo sapiens
atatttgcagagaag

SEQ ID NO: 172874 - DNA, 15 bp, Homo sapiens
tatatttgcagagaa

SEQ ID NO: 172875 - DNA, 15 bp, Homo sapiens
atatatttgcagaga

SEQ ID NO: 172876 - DNA, 15 bp, Homo sapiens
tatatatttgcagag

SEQ ID NO: 172877 - DNA, 15 bp, Homo sapiens
ctatatatttgcaga

SEQ ID NO: 172878 - DNA, 15 bp, Homo sapiens
actatatatttgcag

SEQ ID NO: 172879 - DNA, 15 bp, Homo sapiens
tactatatatttgca

SEQ ID NO: 172880 - DNA, 15 bp, Homo sapiens
ttactatatatttgc

SEQ ID NO: 172881 - DNA, 15 bp, Homo sapiens
attactatatatttg

SEQ ID NO: 172882 - DNA, 15 bp, Homo sapiens
aattactatatattt

SEQ ID NO: 172883 - DNA, 15 bp, Homo sapiens
taattactatatatt

SEQ ID NO: 172884 - DNA, 15 bp, Homo sapiens
ctaattactatatat

SEQ ID NO: 172885 - DNA, 15 bp, Homo sapiens
actaattactatata

SEQ ID NO: 172886 - DNA, 15 bp, Homo sapiens
cactaattactatat

SEQ ID NO: 172887 - DNA, 15 bp, Homo sapiens
tcactaattactata

SEQ ID NO: 172888 - DNA, 15 bp, Homo sapiens
ctcactaattactat

SEQ ID NO: 172889 - DNA, 15 bp, Homo sapiens
tctcactaattacta

SEQ ID NO: 172890 - DNA, 15 bp, Homo sapiens
ttctcactaattact

SEQ ID NO: 172891 - DNA, 15 bp, Homo sapiens
cttctcactaattac

SEQ ID NO: 172892 - DNA, 15 bp, Homo sapiens
acttctcactaatta

SEQ ID NO: 172893 - DNA, 15 bp, Homo sapiens
gacttctcactaatt

SEQ ID NO: 172894 - DNA, 15 bp, Homo sapiens
agacttctcactaat

SEQ ID NO: 172895 - DNA, 15 bp, Homo sapiens
tagacttctcactaa

SEQ ID NO: 172896 - DNA, 15 bp, Homo sapiens
ttagacttctcacta

SEQ ID NO: 172897 - DNA, 15 bp, Homo sapiens
tttagacttctcact

SEQ ID NO: 172898 - DNA, 15 bp, Homo sapiens
ctttagacttctcac

SEQ ID NO: 172899 - DNA, 15 bp, Homo sapiens
tctttagacttctca

SEQ ID NO: 172900 - DNA, 15 bp, Homo sapiens
atctttagacttctc

SEQ ID NO: 172901 - DNA, 15 bp, Homo sapiens
aatctttagacttct

SEQ ID NO: 172902 - DNA, 15 bp, Homo sapiens
aaatctttagacttc

SEQ ID NO: 172903 - DNA, 15 bp, Homo sapiens
aaaatctttagactt

SEQ ID NO: 172904 - DNA, 15 bp, Homo sapiens
caaaatctttagact

SEQ ID NO: 172905 - DNA, 15 bp, Homo sapiens
ccaaaatctttagac

SEQ ID NO: 172906 - DNA, 15 bp, Homo sapiens
gccaaaatctttaga

SEQ ID NO: 172907 - DNA, 15 bp, Homo sapiens
ggccaaaatctttag

SEQ ID NO: 172908 - DNA, 15 bp, Homo sapiens
aggccaaaatcttta

SEQ ID NO: 172909 - DNA, 15 bp, Homo sapiens
gaggccaaaatcttt

SEQ ID NO: 172910 - DNA, 15 bp, Homo sapiens
tgaggccaaaatctt

SEQ ID NO: 172911 - DNA, 15 bp, Homo sapiens
ctgaggccaaaatct

SEQ ID NO: 172912 - DNA, 15 bp, Homo sapiens
gctgaggccaaaatc

SEQ ID NO: 172913 - DNA, 15 bp, Homo sapiens
tgctgaggccaaaat

SEQ ID NO: 172914 - DNA, 15 bp, Homo sapiens
ttgctgaggccaaaa

SEQ ID NO: 172915 - DNA, 15 bp, Homo sapiens
attgctgaggccaaa

SEQ ID NO: 172916 - DNA, 15 bp, Homo sapiens
tattgctgaggccaa

SEQ ID NO: 172917 - DNA, 15 bp, Homo sapiens
ttattgctgaggcca

SEQ ID NO: 172918 - DNA, 15 bp, Homo sapiens
attattgctgaggcc

SEQ ID NO: 172919 - DNA, 15 bp, Homo sapiens
tattattgctgaggc

SEQ ID NO: 172920 - DNA, 15 bp, Homo sapiens
gtattattgctgagg

SEQ ID NO: 172921 - DNA, 15 bp, Homo sapiens
agtattattgctgag

SEQ ID NO: 172922 - DNA, 15 bp, Homo sapiens
aagtattattgctga

SEQ ID NO: 172923 - DNA, 15 bp, Homo sapiens
gaagtattattgctg

SEQ ID NO: 172924 - DNA, 15 bp, Homo sapiens
agaagtattattgct

SEQ ID NO: 172925 - DNA, 15 bp, Homo sapiens
cagaagtattattgc

SEQ ID NO: 172926 - DNA, 15 bp, Homo sapiens
tcagaagtattattg

SEQ ID NO: 172927 - DNA, 15 bp, Homo sapiens
ttcagaagtattatt

SEQ ID NO: 172928 - DNA, 15 bp, Homo sapiens
cttcagaagtattat

SEQ ID NO: 172929 - DNA, 15 bp, Homo sapiens
gcttcagaagtatta

SEQ ID NO: 172930 - DNA, 15 bp, Homo sapiens
tgcttcagaagtatt

SEQ ID NO: 172931 - DNA, 15 bp, Homo sapiens
atgcttcagaagtat

SEQ ID NO: 172932 - DNA, 15 bp, Homo sapiens
catgcttcagaagta

SEQ ID NO: 172933 - DNA, 15 bp, Homo sapiens
ccatgcttcagaagt

SEQ ID NO: 172934 - DNA, 15 bp, Homo sapiens
cccatgcttcagaag

SEQ ID NO: 172935 - DNA, 15 bp, Homo sapiens
ccccatgcttcagaa

SEQ ID NO: 172936 - DNA, 15 bp, Homo sapiens
accccatgcttcaga

SEQ ID NO: 172937 - DNA, 15 bp, Homo sapiens
caccccatgcttcag

SEQ ID NO: 172938 - DNA, 15 bp, Homo sapiens
ccaccccatgcttca

SEQ ID NO: 172939 - DNA, 15 bp, Homo sapiens
cccaccccatgcttc

SEQ ID NO: 172940 - DNA, 15 bp, Homo sapiens
ccccaccccatgctt

SEQ ID NO: 172941 - DNA, 15 bp, Homo sapiens
accccaccccatgct

SEQ ID NO: 172942 - DNA, 15 bp, Homo sapiens
aaccccaccccatgc

SEQ ID NO: 172943 - DNA, 15 bp, Homo sapiens
taaccccaccccatg

SEQ ID NO: 172944 - DNA, 15 bp, Homo sapiens
ctaaccccaccccat

SEQ ID NO: 172945 - DNA, 15 bp, Homo sapiens
cctaaccccacccca

SEQ ID NO: 172946 - DNA, 15 bp, Homo sapiens
tcctaaccccacccc

SEQ ID NO: 172947 - DNA, 15 bp, Homo sapiens
ttcctaaccccaccc

SEQ ID NO: 172948 - DNA, 15 bp, Homo sapiens
gttcctaaccccacc

SEQ ID NO: 172949 - DNA, 15 bp, Homo sapiens
ggttcctaaccccac

SEQ ID NO: 172950 - DNA, 15 bp, Homo sapiens
aggttcctaacccca

SEQ ID NO: 172951 - DNA, 15 bp, Homo sapiens
caggttcctaacccc

SEQ ID NO: 172952 - DNA, 15 bp, Homo sapiens
tcaggttcctaaccc

SEQ ID NO: 172953 - DNA, 15 bp, Homo sapiens
gtcaggttcctaacc

SEQ ID NO: 172954 - DNA, 15 bp, Homo sapiens
tgtcaggttcctaac

SEQ ID NO: 172955 - DNA, 15 bp, Homo sapiens
ttgtcaggttcctaa

SEQ ID NO: 172956 - DNA, 15 bp, Homo sapiens
gttgtcaggttccta

SEQ ID NO: 172957 - DNA, 15 bp, Homo sapiens
agttgtcaggttcct

SEQ ID NO: 172958 - DNA, 15 bp, Homo sapiens
aagttgtcaggttcc

SEQ ID NO: 172959 - DNA, 15 bp, Homo sapiens
gaagttgtcaggttc

SEQ ID NO: 172960 - DNA, 15 bp, Homo sapiens
agaagttgtcaggtt

SEQ ID NO: 172961 - DNA, 15 bp, Homo sapiens
cagaagttgtcaggt

SEQ ID NO: 172962 - DNA, 15 bp, Homo sapiens
gcagaagttgtcagg

SEQ ID NO: 172963 - DNA, 15 bp, Homo sapiens
ggcagaagttgtcag

SEQ ID NO: 172964 - DNA, 15 bp, Homo sapiens
tggcagaagttgtca

SEQ ID NO: 172965 - DNA, 15 bp, Homo sapiens
ttggcagaagttgtc

SEQ ID NO: 172966 - DNA, 15 bp, Homo sapiens
tttggcagaagttgt

SEQ ID NO: 172967 - DNA, 15 bp, Homo sapiens
atttggcagaagttg

SEQ ID NO: 172968 - DNA, 15 bp, Homo sapiens
gatttggcagaagtt

SEQ ID NO: 172969 - DNA, 15 bp, Homo sapiens
ggatttggcagaagt

SEQ ID NO: 172970 - DNA, 15 bp, Homo sapiens
aggatttggcagaag

SEQ ID NO: 172971 - DNA, 15 bp, Homo sapiens
caggatttggcagaa

SEQ ID NO: 172972 - DNA, 15 bp, Homo sapiens
acaggatttggcaga

SEQ ID NO: 172973 - DNA, 15 bp, Homo sapiens
aacaggatttggcag

SEQ ID NO: 172974 - DNA, 15 bp, Homo sapiens
gaacaggatttggca

SEQ ID NO: 172975 - DNA, 15 bp, Homo sapiens
ggaacaggatttggc

SEQ ID NO: 172976 - DNA, 15 bp, Homo sapiens
aggaacaggatttgg

SEQ ID NO: 172977 - DNA, 15 bp, Homo sapiens
caggaacaggatttg

SEQ ID NO: 172978 - DNA, 15 bp, Homo sapiens
gcaggaacaggattt

SEQ ID NO: 172979 - DNA, 15 bp, Homo sapiens
ggcaggaacaggatt

SEQ ID NO: 172980 - DNA, 15 bp, Homo sapiens
gggcaggaacaggat

SEQ ID NO: 172981 - DNA, 15 bp, Homo sapiens
ggggcaggaacagga

SEQ ID NO: 172982 - DNA, 15 bp, Homo sapiens
gggggcaggaacagg

SEQ ID NO: 172983 - DNA, 15 bp, Homo sapiens
tgggggcaggaacag

SEQ ID NO: 172984 - DNA, 15 bp, Homo sapiens
gtgggggcaggaaca

SEQ ID NO: 172985 - DNA, 15 bp, Homo sapiens
ggtgggggcaggaac

SEQ ID NO: 172986 - DNA, 15 bp, Homo sapiens
gggtgggggcaggaa

SEQ ID NO: 172987 - DNA, 15 bp, Homo sapiens
agggtgggggcagga

SEQ ID NO: 172988 - DNA, 15 bp, Homo sapiens
gagggtgggggcagg

SEQ ID NO: 172989 - DNA, 15 bp, Homo sapiens
tgagggtgggggcag

SEQ ID NO: 172990 - DNA, 15 bp, Homo sapiens
gtgagggtgggggca

SEQ ID NO: 172991 - DNA, 15 bp, Homo sapiens
ggtgagggtgggggc

SEQ ID NO: 172992 - DNA, 15 bp, Homo sapiens
gggtgagggtggggg

SEQ ID NO: 172993 - DNA, 15 bp, Homo sapiens
ggggtgagggtgggg

SEQ ID NO: 172994 - DNA, 15 bp, Homo sapiens
tggggtgagggtggg

SEQ ID NO: 172995 - DNA, 15 bp, Homo sapiens
ctggggtgagggtgg

SEQ ID NO: 172996 - DNA, 15 bp, Homo sapiens
cctggggtgagggtg

SEQ ID NO: 172997 - DNA, 15 bp, Homo sapiens
acctggggtgagggt

SEQ ID NO: 172998 - DNA, 15 bp, Homo sapiens
gacctggggtgaggg

SEQ ID NO: 172999 - DNA, 15 bp, Homo sapiens
agacctggggtgagg

SEQ ID NO: 173000 - DNA, 15 bp, Homo sapiens
aagacctggggtgag

SEQ ID NO: 173001 - DNA, 15 bp, Homo sapiens
aaagacctggggtga

SEQ ID NO: 173002 - DNA, 15 bp, Homo sapiens
aaaagacctggggtg

SEQ ID NO: 173003 - DNA, 15 bp, Homo sapiens
taaaagacctggggt

SEQ ID NO: 173004 - DNA, 15 bp, Homo sapiens
ctaaaagacctgggg

SEQ ID NO: 173005 - DNA, 15 bp, Homo sapiens
tctaaaagacctggg

SEQ ID NO: 173006 - DNA, 15 bp, Homo sapiens
atctaaaagacctgg

SEQ ID NO: 173007 - DNA, 15 bp, Homo sapiens
catctaaaagacctg

SEQ ID NO: 173008 - DNA, 15 bp, Homo sapiens
acatctaaaagacct

SEQ ID NO: 173009 - DNA, 15 bp, Homo sapiens
aacatctaaaagacc

SEQ ID NO: 173010 - DNA, 15 bp, Homo sapiens
caacatctaaaagac

SEQ ID NO: 173011 - DNA, 15 bp, Homo sapiens
tcaacatctaaaaga

SEQ ID NO: 173012 - DNA, 15 bp, Homo sapiens
atcaacatctaaaag

SEQ ID NO: 173013 - DNA, 15 bp, Homo sapiens
tatcaacatctaaaa

SEQ ID NO: 173014 - DNA, 15 bp, Homo sapiens
ctatcaacatctaaa

SEQ ID NO: 173015 - DNA, 15 bp, Homo sapiens
actatcaacatctaa

SEQ ID NO: 173016 - DNA, 15 bp, Homo sapiens
tactatcaacatcta

SEQ ID NO: 173017 - DNA, 15 bp, Homo sapiens
atactatcaacatct

SEQ ID NO: 173018 - DNA, 15 bp, Homo sapiens
catactatcaacatc

SEQ ID NO: 173019 - DNA, 15 bp, Homo sapiens
tcatactatcaacat

SEQ ID NO: 173020 - DNA, 15 bp, Homo sapiens
ctcatactatcaaca

SEQ ID NO: 173021 - DNA, 15 bp, Homo sapiens
actcatactatcaac

SEQ ID NO: 173022 - DNA, 15 bp, Homo sapiens
cactcatactatcaa

SEQ ID NO: 173023 - DNA, 15 bp, Homo sapiens
acactcatactatca

SEQ ID NO: 173024 - DNA, 15 bp, Homo sapiens
cacactcatactatc

SEQ ID NO: 173025 - DNA, 15 bp, Homo sapiens
acacactcatactat

SEQ ID NO: 173026 - DNA, 15 bp, Homo sapiens
cacacactcatacta

SEQ ID NO: 173027 - DNA, 15 bp, Homo sapiens
gcacacactcatact

SEQ ID NO: 173028 - DNA, 15 bp, Homo sapiens
ggcacacactcatac

SEQ ID NO: 173029 - DNA, 15 bp, Homo sapiens
tggcacacactcata

SEQ ID NO: 173030 - DNA, 15 bp, Homo sapiens
ctggcacacactcat

SEQ ID NO: 173031 - DNA, 15 bp, Homo sapiens
actggcacacactca

SEQ ID NO: 173032 - DNA, 15 bp, Homo sapiens
aactggcacacactc

SEQ ID NO: 173033 - DNA, 15 bp, Homo sapiens
gaactggcacacact

SEQ ID NO: 173034 - DNA, 15 bp, Homo sapiens
ggaactggcacacac

SEQ ID NO: 173035 - DNA, 15 bp, Homo sapiens
aggaactggcacaca

SEQ ID NO: 173036 - DNA, 15 bp, Homo sapiens
aaggaactggcacac

SEQ ID NO: 173037 - DNA, 15 bp, Homo sapiens
caaggaactggcaca

SEQ ID NO: 173038 - DNA, 15 bp, Homo sapiens
acaaggaactggcac

SEQ ID NO: 173039 - DNA, 15 bp, Homo sapiens
aacaaggaactggca

SEQ ID NO: 173040 - DNA, 15 bp, Homo sapiens
aaacaaggaactggc

SEQ ID NO: 173041 - DNA, 15 bp, Homo sapiens
caaacaaggaactgg

SEQ ID NO: 173042 - DNA, 15 bp, Homo sapiens
tcaaacaaggaactg

SEQ ID NO: 173043 - DNA, 15 bp, Homo sapiens
atcaaacaaggaact

SEQ ID NO: 173044 - DNA, 15 bp, Homo sapiens
aatcaaacaaggaac

SEQ ID NO: 173045 - DNA, 15 bp, Homo sapiens
caatcaaacaaggaa

SEQ ID NO: 173046 - DNA, 15 bp, Homo sapiens
gcaatcaaacaagga

SEQ ID NO: 173047 - DNA, 15 bp, Homo sapiens
agcaatcaaacaagg

SEQ ID NO: 173048 - DNA, 15 bp, Homo sapiens
cagcaatcaaacaag

SEQ ID NO: 173049 - DNA, 15 bp, Homo sapiens
gcagcaatcaaacaa

SEQ ID NO: 173050 - DNA, 15 bp, Homo sapiens
agcagcaatcaaaca

SEQ ID NO: 173051 - DNA, 15 bp, Homo sapiens
aagcagcaatcaaac

SEQ ID NO: 173052 - DNA, 15 bp, Homo sapiens
caagcagcaatcaaa

SEQ ID NO: 173053 - DNA, 15 bp, Homo sapiens
gcaagcagcaatcaa

SEQ ID NO: 173054 - DNA, 15 bp, Homo sapiens
agcaagcagcaatca

SEQ ID NO: 173055 - DNA, 15 bp, Homo sapiens
aagcaagcagcaatc

SEQ ID NO: 173056 - DNA, 15 bp, Homo sapiens
aaagcaagcagcaat

SEQ ID NO: 173057 - DNA, 15 bp, Homo sapiens
aaaagcaagcagcaa

SEQ ID NO: 173058 - DNA, 15 bp, Homo sapiens
gaaaagcaagcagca

SEQ ID NO: 173059 - DNA, 15 bp, Homo sapiens
agaaaagcaagcagc

SEQ ID NO: 173060 - DNA, 15 bp, Homo sapiens
gagaaaagcaagcag

SEQ ID NO: 173061 - DNA, 15 bp, Homo sapiens
ggagaaaagcaagca

SEQ ID NO: 173062 - DNA, 15 bp, Homo sapiens
aggagaaaagcaagc

SEQ ID NO: 173063 - DNA, 15 bp, Homo sapiens
aaggagaaaagcaag

SEQ ID NO: 173064 - DNA, 15 bp, Homo sapiens
gaaggagaaaagcaa

SEQ ID NO: 173065 - DNA, 15 bp, Homo sapiens
tgaaggagaaaagca

SEQ ID NO: 173066 - DNA, 15 bp, Homo sapiens
gtgaaggagaaaagc

SEQ ID NO: 173067 - DNA, 15 bp, Homo sapiens
agtgaaggagaaaag

SEQ ID NO: 173068 - DNA, 15 bp, Homo sapiens
aagtgaaggagaaaa

SEQ ID NO: 173069 - DNA, 15 bp, Homo sapiens
taagtgaaggagaaa

SEQ ID NO: 173070 - DNA, 15 bp, Homo sapiens
ataagtgaaggagaa

SEQ ID NO: 173071 - DNA, 15 bp, Homo sapiens
aataagtgaaggaga

SEQ ID NO: 173072 - DNA, 15 bp, Homo sapiens
caataagtgaaggag

SEQ ID NO: 173073 - DNA, 15 bp, Homo sapiens
ccaataagtgaagga

SEQ ID NO: 173074 - DNA, 15 bp, Homo sapiens
accaataagtgaagg

SEQ ID NO: 173075 - DNA, 15 bp, Homo sapiens
aaccaataagtgaag

SEQ ID NO: 173076 - DNA, 15 bp, Homo sapiens
aaaccaataagtgaa

SEQ ID NO: 173077 - DNA, 15 bp, Homo sapiens
aaaaccaataagtga

SEQ ID NO: 173078 - DNA, 15 bp, Homo sapiens
aaaaaccaataagtg

SEQ ID NO: 173079 - DNA, 15 bp, Homo sapiens
caaaaaccaataagt

SEQ ID NO: 173080 - DNA, 15 bp, Homo sapiens
acaaaaaccaataag

SEQ ID NO: 173081 - DNA, 15 bp, Homo sapiens
aacaaaaaccaataa

SEQ ID NO: 173082 - DNA, 15 bp, Homo sapiens
aaacaaaaaccaata

SEQ ID NO: 173083 - DNA, 15 bp, Homo sapiens
aaaacaaaaaccaat

SEQ ID NO: 173084 - DNA, 15 bp, Homo sapiens
aaaaacaaaaaccaa

SEQ ID NO: 173085 - DNA, 15 bp, Homo sapiens
aaaaaacaaaaacca

SEQ ID NO: 173086 - DNA, 15 bp, Homo sapiens
aaaaaaacaaaaacc

SEQ ID NO: 173087 - DNA, 15 bp, Homo sapiens
caaaaaaacaaaaac

SEQ ID NO: 173088 - DNA, 15 bp, Homo sapiens
acaaaaaaacaaaaa

SEQ ID NO: 173089 - DNA, 15 bp, Homo sapiens
aacaaaaaaacaaaa

SEQ ID NO: 173090 - DNA, 15 bp, Homo sapiens
aaacaaaaaaacaaa

SEQ ID NO: 173091 - DNA, 15 bp, Homo sapiens
aaaacaaaaaaacaa

SEQ ID NO: 173092 - DNA, 15 bp, Homo sapiens
caaaacaaaaaaaca

SEQ ID NO: 173093 - DNA, 15 bp, Homo sapiens
gcaaaacaaaaaaac

SEQ ID NO: 173094 - DNA, 15 bp, Homo sapiens
agcaaaacaaaaaaa

SEQ ID NO: 173095 - DNA, 15 bp, Homo sapiens
aagcaaaacaaaaaa

SEQ ID NO: 173096 - DNA, 15 bp, Homo sapiens
aaagcaaaacaaaaa

SEQ ID NO: 173097 - DNA, 15 bp, Homo sapiens
caaagcaaaacaaaa

SEQ ID NO: 173098 - DNA, 15 bp, Homo sapiens
acaaagcaaaacaaa

SEQ ID NO: 173099 - DNA, 15 bp, Homo sapiens
gacaaagcaaaacaa

SEQ ID NO: 173100 - DNA, 15 bp, Homo sapiens
agacaaagcaaaaca

SEQ ID NO: 173101 - DNA, 15 bp, Homo sapiens
cagacaaagcaaaac

SEQ ID NO: 173102 - DNA, 15 bp, Homo sapiens
tcagacaaagcaaaa

SEQ ID NO: 173103 - DNA, 15 bp, Homo sapiens
atcagacaaagcaaa

SEQ ID NO: 173104 - DNA, 15 bp, Homo sapiens
aatcagacaaagcaa

SEQ ID NO: 173105 - DNA, 15 bp, Homo sapiens
taatcagacaaagca

SEQ ID NO: 173106 - DNA, 15 bp, Homo sapiens
ataatcagacaaagc

SEQ ID NO: 173107 - DNA, 15 bp, Homo sapiens
cataatcagacaaag

SEQ ID NO: 173108 - DNA, 15 bp, Homo sapiens
acataatcagacaaa

SEQ ID NO: 173109 - DNA, 15 bp, Homo sapiens
tacataatcagacaa

SEQ ID NO: 173110 - DNA, 15 bp, Homo sapiens
atacataatcagaca

SEQ ID NO: 173111 - DNA, 15 bp, Homo sapiens
aatacataatcagac

SEQ ID NO: 173112 - DNA, 15 bp, Homo sapiens
caatacataatcaga

SEQ ID NO: 173113 - DNA, 15 bp, Homo sapiens
ccaatacataatcag

SEQ ID NO: 173114 - DNA, 15 bp, Homo sapiens
cccaatacataatca

SEQ ID NO: 173115 - DNA, 15 bp, Homo sapiens
tcccaatacataatc

SEQ ID NO: 173116 - DNA, 15 bp, Homo sapiens
gtcccaatacataat

SEQ ID NO: 173117 - DNA, 15 bp, Homo sapiens
tgtcccaatacataa

SEQ ID NO: 173118 - DNA, 15 bp, Homo sapiens
gtgtcccaatacata

SEQ ID NO: 173119 - DNA, 15 bp, Homo sapiens
agtgtcccaatacat

SEQ ID NO: 173120 - DNA, 15 bp, Homo sapiens
gagtgtcccaataca

SEQ ID NO: 173121 - DNA, 15 bp, Homo sapiens
agagtgtcccaatac

SEQ ID NO: 173122 - DNA, 15 bp, Homo sapiens
cagagtgtcccaata

SEQ ID NO: 173123 - DNA, 15 bp, Homo sapiens
gcagagtgtcccaat

SEQ ID NO: 173124 - DNA, 15 bp, Homo sapiens
ggcagagtgtcccaa

SEQ ID NO: 173125 - DNA, 15 bp, Homo sapiens
tggcagagtgtccca

SEQ ID NO: 173126 - DNA, 15 bp, Homo sapiens
atggcagagtgtccc

SEQ ID NO: 173127 - DNA, 15 bp, Homo sapiens
gatggcagagtgtcc

SEQ ID NO: 173128 - DNA, 15 bp, Homo sapiens
agatggcagagtgtc

SEQ ID NO: 173129 - DNA, 15 bp, Homo sapiens
aagatggcagagtgt

SEQ ID NO: 173130 - DNA, 15 bp, Homo sapiens
aaagatggcagagtg

SEQ ID NO: 173131 - DNA, 15 bp, Homo sapiens
gaaagatggcagagt

SEQ ID NO: 173132 - DNA, 15 bp, Homo sapiens
agaaagatggcagag

SEQ ID NO: 173133 - DNA, 15 bp, Homo sapiens
gagaaagatggcaga

SEQ ID NO: 173134 - DNA, 15 bp, Homo sapiens
ggagaaagatggcag

SEQ ID NO: 173135 - DNA, 15 bp, Homo sapiens
tggagaaagatggca

SEQ ID NO: 173136 - DNA, 15 bp, Homo sapiens
ttggagaaagatggc

SEQ ID NO: 173137 - DNA, 15 bp, Homo sapiens
tttggagaaagatgg

SEQ ID NO: 173138 - DNA, 15 bp, Homo sapiens
ttttggagaaagatg

SEQ ID NO: 173139 - DNA, 15 bp, Homo sapiens
cttttggagaaagat

SEQ ID NO: 173140 - DNA, 15 bp, Homo sapiens
gcttttggagaaaga

SEQ ID NO: 173141 - DNA, 15 bp, Homo sapiens
ggcttttggagaaag

SEQ ID NO: 173142 - DNA, 15 bp, Homo sapiens
aggcttttggagaaa

SEQ ID NO: 173143 - DNA, 15 bp, Homo sapiens
gaggcttttggagaa

SEQ ID NO: 173144 - DNA, 15 bp, Homo sapiens
ggaggcttttggaga

SEQ ID NO: 173145 - DNA, 15 bp, Homo sapiens
gggaggcttttggag

SEQ ID NO: 173146 - DNA, 15 bp, Homo sapiens
agggaggcttttgga

SEQ ID NO: 173147 - DNA, 15 bp, Homo sapiens
cagggaggcttttgg

SEQ ID NO: 173148 - DNA, 15 bp, Homo sapiens
gcagggaggcttttg

SEQ ID NO: 173149 - DNA, 15 bp, Homo sapiens
cgcagggaggctttt

SEQ ID NO: 173150 - DNA, 15 bp, Homo sapiens
acgcagggaggcttt

SEQ ID NO: 173151 - DNA, 15 bp, Homo sapiens
tacgcagggaggctt

SEQ ID NO: 173152 - DNA, 15 bp, Homo sapiens
atacgcagggaggct

SEQ ID NO: 173153 - DNA, 15 bp, Homo sapiens
gatacgcagggaggc

SEQ ID NO: 173154 - DNA, 15 bp, Homo sapiens
agatacgcagggagg

SEQ ID NO: 173155 - DNA, 15 bp, Homo sapiens
aagatacgcagggag

SEQ ID NO: 173156 - DNA, 15 bp, Homo sapiens
aaagatacgcaggga

SEQ ID NO: 173157 - DNA, 15 bp, Homo sapiens
aaaagatacgcaggg

SEQ ID NO: 173158 - DNA, 15 bp, Homo sapiens
taaaagatacgcagg

SEQ ID NO: 173159 - DNA, 15 bp, Homo sapiens
ttaaaagatacgcag

SEQ ID NO: 173160 - DNA, 15 bp, Homo sapiens
tttaaaagatacgca

SEQ ID NO: 173161 - DNA, 15 bp, Homo sapiens
ttttaaaagatacgc

SEQ ID NO: 173162 - DNA, 15 bp, Homo sapiens
tttttaaaagatacg

SEQ ID NO: 173163 - DNA, 15 bp, Homo sapiens
ttttttaaaagatac

SEQ ID NO: 173164 - DNA, 15 bp, Homo sapiens
tttttttaaaagata

SEQ ID NO: 173165 - DNA, 15 bp, Homo sapiens
atttttttaaaagat

SEQ ID NO: 173166 - DNA, 15 bp, Homo sapiens
tatttttttaaaaga

SEQ ID NO: 173167 - DNA, 15 bp, Homo sapiens
gtatttttttaaaag

SEQ ID NO: 173168 - DNA, 15 bp, Homo sapiens
tgtatttttttaaaa

SEQ ID NO: 173169 - DNA, 15 bp, Homo sapiens
ttgtatttttttaaa

SEQ ID NO: 173170 - DNA, 15 bp, Homo sapiens
attgtatttttttaa

SEQ ID NO: 173171 - DNA, 15 bp, Homo sapiens
aattgtattttttta

SEQ ID NO: 173172 - DNA, 15 bp, Homo sapiens
aaattgtattttttt

SEQ ID NO: 173173 - DNA, 15 bp, Homo sapiens
gaaattgtatttttt

SEQ ID NO: 173174 - DNA, 15 bp, Homo sapiens
ggaaattgtattttt

SEQ ID NO: 173175 - DNA, 15 bp, Homo sapiens
aggaaattgtatttt

SEQ ID NO: 173176 - DNA, 15 bp, Homo sapiens
taggaaattgtattt

SEQ ID NO: 173177 - DNA, 15 bp, Homo sapiens
ctaggaaattgtatt

SEQ ID NO: 173178 - DNA, 15 bp, Homo sapiens
cctaggaaattgtat

SEQ ID NO: 173179 - DNA, 15 bp, Homo sapiens
gcctaggaaattgta

SEQ ID NO: 173180 - DNA, 15 bp, Homo sapiens
agcctaggaaattgt

SEQ ID NO: 173181 - DNA, 15 bp, Homo sapiens
gagcctaggaaattg

SEQ ID NO: 173182 - DNA, 15 bp, Homo sapiens
tgagcctaggaaatt

SEQ ID NO: 173183 - DNA, 15 bp, Homo sapiens
ttgagcctaggaaat

SEQ ID NO: 173184 - DNA, 15 bp, Homo sapiens
gttgagcctaggaaa

SEQ ID NO: 173185 - DNA, 15 bp, Homo sapiens
tgttgagcctaggaa

SEQ ID NO: 173186 - DNA, 15 bp, Homo sapiens
gtgttgagcctagga

SEQ ID NO: 173187 - DNA, 15 bp, Homo sapiens
tgtgttgagcctagg

SEQ ID NO: 173188 - DNA, 15 bp, Homo sapiens
ctgtgttgagcctag

SEQ ID NO: 173189 - DNA, 15 bp, Homo sapiens
tctgtgttgagccta

SEQ ID NO: 173190 - DNA, 15 bp, Homo sapiens
ctctgtgttgagcct

SEQ ID NO: 173191 - DNA, 15 bp, Homo sapiens
gctctgtgttgagcc

SEQ ID NO: 173192 - DNA, 15 bp, Homo sapiens
agctctgtgttgagc

SEQ ID NO: 173193 - DNA, 15 bp, Homo sapiens
tagctctgtgttgag

SEQ ID NO: 173194 - DNA, 15 bp, Homo sapiens
atagctctgtgttga

SEQ ID NO: 173195 - DNA, 15 bp, Homo sapiens
tatagctctgtgttg

SEQ ID NO: 173196 - DNA, 15 bp, Homo sapiens
ctatagctctgtgtt

SEQ ID NO: 173197 - DNA, 15 bp, Homo sapiens
tctatagctctgtgt

SEQ ID NO: 173198 - DNA, 15 bp, Homo sapiens
ttctatagctctgtg

SEQ ID NO: 173199 - DNA, 15 bp, Homo sapiens
attctatagctctgt

SEQ ID NO: 173200 - DNA, 15 bp, Homo sapiens
aattctatagctctg

SEQ ID NO: 173201 - DNA, 15 bp, Homo sapiens
taattctatagctct

SEQ ID NO: 173202 - DNA, 15 bp, Homo sapiens
ctaattctatagctc

SEQ ID NO: 173203 - DNA, 15 bp, Homo sapiens
tctaattctatagct

SEQ ID NO: 173204 - DNA, 15 bp, Homo sapiens
atctaattctatagc

SEQ ID NO: 173205 - DNA, 15 bp, Homo sapiens
aatctaattctatag

SEQ ID NO: 173206 - DNA, 15 bp, Homo sapiens
gaatctaattctata

SEQ ID NO: 173207 - DNA, 15 bp, Homo sapiens
ggaatctaattctat

SEQ ID NO: 173208 - DNA, 15 bp, Homo sapiens
gggaatctaattcta

SEQ ID NO: 173209 - DNA, 15 bp, Homo sapiens
agggaatctaattct

SEQ ID NO: 173210 - DNA, 15 bp, Homo sapiens
aagggaatctaattc

SEQ ID NO: 173211 - DNA, 15 bp, Homo sapiens
taagggaatctaatt

SEQ ID NO: 173212 - DNA, 15 bp, Homo sapiens
ctaagggaatctaat

SEQ ID NO: 173213 - DNA, 15 bp, Homo sapiens
cctaagggaatctaa

SEQ ID NO: 173214 - DNA, 15 bp, Homo sapiens
ccctaagggaatcta

SEQ ID NO: 173215 - DNA, 15 bp, Homo sapiens
cccctaagggaatct

SEQ ID NO: 173216 - DNA, 15 bp, Homo sapiens
tcccctaagggaatc

SEQ ID NO: 173217 - DNA, 15 bp, Homo sapiens
ctcccctaagggaat

SEQ ID NO: 173218 - DNA, 15 bp, Homo sapiens
cctcccctaagggaa

SEQ ID NO: 173219 - DNA, 15 bp, Homo sapiens
ccctcccctaaggga

SEQ ID NO: 173220 - DNA, 15 bp, Homo sapiens
gccctcccctaaggg

SEQ ID NO: 173221 - DNA, 15 bp, Homo sapiens
ggccctcccctaagg

SEQ ID NO: 173222 - DNA, 15 bp, Homo sapiens
tggccctcccctaag

SEQ ID NO: 173223 - DNA, 15 bp, Homo sapiens
gtggccctcccctaa

SEQ ID NO: 173224 - DNA, 15 bp, Homo sapiens
tgtggccctccccta

SEQ ID NO: 173225 - DNA, 15 bp, Homo sapiens
ctgtggccctcccct

SEQ ID NO: 173226 - DNA, 15 bp, Homo sapiens
tctgtggccctcccc

SEQ ID NO: 173227 - DNA, 15 bp, Homo sapiens
ttctgtggccctccc

SEQ ID NO: 173228 - DNA, 15 bp, Homo sapiens
tttctgtggccctcc

SEQ ID NO: 173229 - DNA, 15 bp, Homo sapiens
atttctgtggccctc

SEQ ID NO: 173230 - DNA, 15 bp, Homo sapiens
aatttctgtggccct

SEQ ID NO: 173231 - DNA, 15 bp, Homo sapiens
aaatttctgtggccc

SEQ ID NO: 173232 - DNA, 15 bp, Homo sapiens
taaatttctgtggcc

SEQ ID NO: 173233 - DNA, 15 bp, Homo sapiens
ataaatttctgtggc

SEQ ID NO: 173234 - DNA, 15 bp, Homo sapiens
tataaatttctgtgg

SEQ ID NO: 173235 - DNA, 15 bp, Homo sapiens
atataaatttctgtg

SEQ ID NO: 173236 - DNA, 15 bp, Homo sapiens
aatataaatttctgt

SEQ ID NO: 173237 - DNA, 15 bp, Homo sapiens
aaatataaatttctg

SEQ ID NO: 173238 - DNA, 15 bp, Homo sapiens
aaaatataaatttct

SEQ ID NO: 173239 - DNA, 15 bp, Homo sapiens
aaaaatataaatttc

SEQ ID NO: 173240 - DNA, 15 bp, Homo sapiens
taaaaatataaattt

SEQ ID NO: 173241 - DNA, 15 bp, Homo sapiens
ataaaaatataaatt

SEQ ID NO: 173242 - DNA, 15 bp, Homo sapiens
tataaaaatataaat

SEQ ID NO: 173243 - DNA, 15 bp, Homo sapiens
ttataaaaatataaa

SEQ ID NO: 173244 - DNA, 15 bp, Homo sapiens
tttataaaaatataa

SEQ ID NO: 173245 - DNA, 15 bp, Homo sapiens
ttttataaaaatata

SEQ ID NO: 173246 - DNA, 15 bp, Homo sapiens
gttttataaaaatat

SEQ ID NO: 173247 - DNA, 15 bp, Homo sapiens
agttttataaaaata

SEQ ID NO: 173248 - DNA, 15 bp, Homo sapiens
aagttttataaaaat

SEQ ID NO: 173249 - DNA, 15 bp, Homo sapiens
gaagttttataaaaa

SEQ ID NO: 173250 - DNA, 15 bp, Homo sapiens
ggaagttttataaaa

SEQ ID NO: 173251 - DNA, 15 bp, Homo sapiens
tggaagttttataaa

SEQ ID NO: 173252 - DNA, 15 bp, Homo sapiens
ttggaagttttataa

SEQ ID NO: 173253 - DNA, 15 bp, Homo sapiens
cttggaagttttata

SEQ ID NO: 173254 - DNA, 15 bp, Homo sapiens
ccttggaagttttat

SEQ ID NO: 173255 - DNA, 15 bp, Homo sapiens
gccttggaagtttta

SEQ ID NO: 173256 - DNA, 15 bp, Homo sapiens
cgccttggaagtttt

SEQ ID NO: 173257 - DNA, 15 bp, Homo sapiens
acgccttggaagttt

SEQ ID NO: 173258 - DNA, 15 bp, Homo sapiens
aacgccttggaagtt

SEQ ID NO: 173259 - DNA, 15 bp, Homo sapiens
gaacgccttggaagt

SEQ ID NO: 173260 - DNA, 15 bp, Homo sapiens
agaacgccttggaag

SEQ ID NO: 173261 - DNA, 15 bp, Homo sapiens
tagaacgccttggaa

SEQ ID NO: 173262 - DNA, 15 bp, Homo sapiens
ttagaacgccttgga

SEQ ID NO: 173263 - DNA, 15 bp, Homo sapiens
gttagaacgccttgg

SEQ ID NO: 173264 - DNA, 15 bp, Homo sapiens
tgttagaacgccttg

SEQ ID NO: 173265 - DNA, 15 bp, Homo sapiens
ttgttagaacgcctt

SEQ ID NO: 173266 - DNA, 15 bp, Homo sapiens
attgttagaacgcct

SEQ ID NO: 173267 - DNA, 15 bp, Homo sapiens
gattgttagaacgcc

SEQ ID NO: 173268 - DNA, 15 bp, Homo sapiens
tgattgttagaacgc

SEQ ID NO: 173269 - DNA, 15 bp, Homo sapiens
ctgattgttagaacg

SEQ ID NO: 173270 - DNA, 15 bp, Homo sapiens
gctgattgttagaac

SEQ ID NO: 173271 - DNA, 15 bp, Homo sapiens
ggctgattgttagaa

SEQ ID NO: 173272 - DNA, 15 bp, Homo sapiens
tggctgattgttaga

SEQ ID NO: 173273 - DNA, 15 bp, Homo sapiens
ttggctgattgttag

SEQ ID NO: 173274 - DNA, 15 bp, Homo sapiens
cttggctgattgtta

SEQ ID NO: 173275 - DNA, 15 bp, Homo sapiens
acttggctgattgtt

SEQ ID NO: 173276 - DNA, 15 bp, Homo sapiens
gacttggctgattgt

SEQ ID NO: 173277 - DNA, 15 bp, Homo sapiens
agacttggctgattg

SEQ ID NO: 173278 - DNA, 15 bp, Homo sapiens
cagacttggctgatt

SEQ ID NO: 173279 - DNA, 15 bp, Homo sapiens
ccagacttggctgat

SEQ ID NO: 173280 - DNA, 15 bp, Homo sapiens
cccagacttggctga

SEQ ID NO: 173281 - DNA, 15 bp, Homo sapiens
tcccagacttggctg

SEQ ID NO: 173282 - DNA, 15 bp, Homo sapiens
atcccagacttggct

SEQ ID NO: 173283 - DNA, 15 bp, Homo sapiens
gatcccagacttggc

SEQ ID NO: 173284 - DNA, 15 bp, Homo sapiens
ggatcccagacttgg

SEQ ID NO: 173285 - DNA, 15 bp, Homo sapiens
tggatcccagacttg

SEQ ID NO: 173286 - DNA, 15 bp, Homo sapiens
atggatcccagactt

SEQ ID NO: 173287 - DNA, 15 bp, Homo sapiens
aatggatcccagact

SEQ ID NO: 173288 - DNA, 15 bp, Homo sapiens
aaatggatcccagac

SEQ ID NO: 173289 - DNA, 15 bp, Homo sapiens
aaaatggatcccaga

SEQ ID NO: 173290 - DNA, 15 bp, Homo sapiens
taaaatggatcccag

SEQ ID NO: 173291 - DNA, 15 bp, Homo sapiens
ttaaaatggatccca

SEQ ID NO: 173292 - DNA, 15 bp, Homo sapiens
cttaaaatggatccc

SEQ ID NO: 173293 - DNA, 15 bp, Homo sapiens
acttaaaatggatcc

SEQ ID NO: 173294 - DNA, 15 bp, Homo sapiens
aacttaaaatggatc

SEQ ID NO: 173295 - DNA, 15 bp, Homo sapiens
aaacttaaaatggat

SEQ ID NO: 173296 - DNA, 15 bp, Homo sapiens
gaaacttaaaatgga

SEQ ID NO: 173297 - DNA, 15 bp, Homo sapiens
ggaaacttaaaatgg

SEQ ID NO: 173298 - DNA, 15 bp, Homo sapiens
gggaaacttaaaatg

SEQ ID NO: 173299 - DNA, 15 bp, Homo sapiens
ggggaaacttaaaat

SEQ ID NO: 173300 - DNA, 15 bp, Homo sapiens
aggggaaacttaaaa

SEQ ID NO: 173301 - DNA, 15 bp, Homo sapiens
taggggaaacttaaa

SEQ ID NO: 173302 - DNA, 15 bp, Homo sapiens
ttaggggaaacttaa

SEQ ID NO: 173303 - DNA, 15 bp, Homo sapiens
cttaggggaaactta

SEQ ID NO: 173304 - DNA, 15 bp, Homo sapiens
tcttaggggaaactt

SEQ ID NO: 173305 - DNA, 15 bp, Homo sapiens
atcttaggggaaact

SEQ ID NO: 173306 - DNA, 15 bp, Homo sapiens
aatcttaggggaaac

SEQ ID NO: 173307 - DNA, 15 bp, Homo sapiens
gaatcttaggggaaa

SEQ ID NO: 173308 - DNA, 15 bp, Homo sapiens
agaatcttaggggaa

SEQ ID NO: 173309 - DNA, 15 bp, Homo sapiens
aagaatcttagggga

SEQ ID NO: 173310 - DNA, 15 bp, Homo sapiens
aaagaatcttagggg

SEQ ID NO: 173311 - DNA, 15 bp, Homo sapiens
gaaagaatcttaggg

SEQ ID NO: 173312 - DNA, 15 bp, Homo sapiens
ggaaagaatcttagg

SEQ ID NO: 173313 - DNA, 15 bp, Homo sapiens
tggaaagaatcttag

SEQ ID NO: 173314 - DNA, 15 bp, Homo sapiens
ctggaaagaatctta

SEQ ID NO: 173315 - DNA, 15 bp, Homo sapiens
actggaaagaatctt

SEQ ID NO: 173316 - DNA, 15 bp, Homo sapiens
cactggaaagaatct

SEQ ID NO: 173317 - DNA, 15 bp, Homo sapiens
gcactggaaagaatc

SEQ ID NO: 173318 - DNA, 15 bp, Homo sapiens
agcactggaaagaat

SEQ ID NO: 173319 - DNA, 15 bp, Homo sapiens
cagcactggaaagaa

SEQ ID NO: 173320 - DNA, 15 bp, Homo sapiens
tcagcactggaaaga

SEQ ID NO: 173321 - DNA, 15 bp, Homo sapiens
ctcagcactggaaag

SEQ ID NO: 173322 - DNA, 15 bp, Homo sapiens
tctcagcactggaaa

SEQ ID NO: 173323 - DNA, 15 bp, Homo sapiens
atctcagcactggaa

SEQ ID NO: 173324 - DNA, 15 bp, Homo sapiens
aatctcagcactgga

SEQ ID NO: 173325 - DNA, 15 bp, Homo sapiens
gaatctcagcactgg

SEQ ID NO: 173326 - DNA, 15 bp, Homo sapiens
agaatctcagcactg

SEQ ID NO: 173327 - DNA, 15 bp, Homo sapiens
cagaatctcagcact

SEQ ID NO: 173328 - DNA, 15 bp, Homo sapiens
acagaatctcagcac

SEQ ID NO: 173329 - DNA, 15 bp, Homo sapiens
cacagaatctcagca

SEQ ID NO: 173330 - DNA, 15 bp, Homo sapiens
ccacagaatctcagc

SEQ ID NO: 173331 - DNA, 15 bp, Homo sapiens
accacagaatctcag

SEQ ID NO: 173332 - DNA, 15 bp, Homo sapiens
aaccacagaatctca

SEQ ID NO: 173333 - DNA, 15 bp, Homo sapiens
gaaccacagaatctc

SEQ ID NO: 173334 - DNA, 15 bp, Homo sapiens
tgaaccacagaatct

SEQ ID NO: 173335 - DNA, 15 bp, Homo sapiens
atgaaccacagaatc

SEQ ID NO: 173336 - DNA, 15 bp, Homo sapiens
aatgaaccacagaat

SEQ ID NO: 173337 - DNA, 15 bp, Homo sapiens
caatgaaccacagaa

SEQ ID NO: 173338 - DNA, 15 bp, Homo sapiens
acaatgaaccacaga

SEQ ID NO: 173339 - DNA, 15 bp, Homo sapiens
cacaatgaaccacag

SEQ ID NO: 173340 - DNA, 15 bp, Homo sapiens
acacaatgaaccaca

SEQ ID NO: 173341 - DNA, 15 bp, Homo sapiens
aacacaatgaaccac

SEQ ID NO: 173342 - DNA, 15 bp, Homo sapiens
gaacacaatgaacca

SEQ ID NO: 173343 - DNA, 15 bp, Homo sapiens
agaacacaatgaacc

SEQ ID NO: 173344 - DNA, 15 bp, Homo sapiens
gagaacacaatgaac

SEQ ID NO: 173345 - DNA, 15 bp, Homo sapiens
agagaacacaatgaa

SEQ ID NO: 173346 - DNA, 15 bp, Homo sapiens
aagagaacacaatga

SEQ ID NO: 173347 - DNA, 15 bp, Homo sapiens
aaagagaacacaatg

SEQ ID NO: 173348 - DNA, 15 bp, Homo sapiens
taaagagaacacaat

SEQ ID NO: 173349 - DNA, 15 bp, Homo sapiens
ttaaagagaacacaa

SEQ ID NO: 173350 - DNA, 15 bp, Homo sapiens
cttaaagagaacaca

SEQ ID NO: 173351 - DNA, 15 bp, Homo sapiens
tcttaaagagaacac

SEQ ID NO: 173352 - DNA, 15 bp, Homo sapiens
ttcttaaagagaaca

SEQ ID NO: 173353 - DNA, 15 bp, Homo sapiens
tttcttaaagagaac

SEQ ID NO: 173354 - DNA, 15 bp, Homo sapiens
gtttcttaaagagaa

SEQ ID NO: 173355 - DNA, 15 bp, Homo sapiens
tgtttcttaaagaga

SEQ ID NO: 173356 - DNA, 15 bp, Homo sapiens
ctgtttcttaaagag

SEQ ID NO: 173357 - DNA, 15 bp, Homo sapiens
cctgtttcttaaaga

SEQ ID NO: 173358 - DNA, 15 bp, Homo sapiens
ccctgtttcttaaag

SEQ ID NO: 173359 - DNA, 15 bp, Homo sapiens
tccctgtttcttaaa

SEQ ID NO: 173360 - DNA, 15 bp, Homo sapiens
ctccctgtttcttaa

SEQ ID NO: 173361 - DNA, 15 bp, Homo sapiens
cctccctgtttctta

SEQ ID NO: 173362 - DNA, 15 bp, Homo sapiens
ccctccctgtttctt

SEQ ID NO: 173363 - DNA, 15 bp, Homo sapiens
cccctccctgtttct

SEQ ID NO: 173364 - DNA, 15 bp, Homo sapiens
ccccctccctgtttc

SEQ ID NO: 173365 - DNA, 15 bp, Homo sapiens
accccctccctgttt

SEQ ID NO: 173366 - DNA, 15 bp, Homo sapiens
caccccctccctgtt

SEQ ID NO: 173367 - DNA, 15 bp, Homo sapiens
acaccccctccctgt

SEQ ID NO: 173368 - DNA, 15 bp, Homo sapiens
aacaccccctccctg

SEQ ID NO: 173369 - DNA, 15 bp, Homo sapiens
taacaccccctccct

SEQ ID NO: 173370 - DNA, 15 bp, Homo sapiens
ctaacaccccctccc

SEQ ID NO: 173371 - DNA, 15 bp, Homo sapiens
gctaacaccccctcc

SEQ ID NO: 173372 - DNA, 15 bp, Homo sapiens
tgctaacaccccctc

SEQ ID NO: 173373 - DNA, 15 bp, Homo sapiens
gtgctaacaccccct

SEQ ID NO: 173374 - DNA, 15 bp, Homo sapiens
tgtgctaacaccccc

SEQ ID NO: 173375 - DNA, 15 bp, Homo sapiens
ctgtgctaacacccc

SEQ ID NO: 173376 - DNA, 15 bp, Homo sapiens
cctgtgctaacaccc

SEQ ID NO: 173377 - DNA, 15 bp, Homo sapiens
ccctgtgctaacacc

SEQ ID NO: 173378 - DNA, 15 bp, Homo sapiens
tccctgtgctaacac

SEQ ID NO: 173379 - DNA, 15 bp, Homo sapiens
atccctgtgctaaca

SEQ ID NO: 173380 - DNA, 15 bp, Homo sapiens
aatccctgtgctaac

SEQ ID NO: 173381 - DNA, 15 bp, Homo sapiens
gaatccctgtgctaa

SEQ ID NO: 173382 - DNA, 15 bp, Homo sapiens
agaatccctgtgcta

SEQ ID NO: 173383 - DNA, 15 bp, Homo sapiens
cagaatccctgtgct

SEQ ID NO: 173384 - DNA, 15 bp, Homo sapiens
acagaatccctgtgc

SEQ ID NO: 173385 - DNA, 15 bp, Homo sapiens
gacagaatccctgtg

SEQ ID NO: 173386 - DNA, 15 bp, Homo sapiens
tgacagaatccctgt

SEQ ID NO: 173387 - DNA, 15 bp, Homo sapiens
atgacagaatccctg

SEQ ID NO: 173388 - DNA, 15 bp, Homo sapiens
tatgacagaatccct

SEQ ID NO: 173389 - DNA, 15 bp, Homo sapiens
atatgacagaatccc

SEQ ID NO: 173390 - DNA, 15 bp, Homo sapiens
aatatgacagaatcc

SEQ ID NO: 173391 - DNA, 15 bp, Homo sapiens
gaatatgacagaatc

SEQ ID NO: 173392 - DNA, 15 bp, Homo sapiens
agaatatgacagaat

SEQ ID NO: 173393 - DNA, 15 bp, Homo sapiens
gagaatatgacagaa

SEQ ID NO: 173394 - DNA, 15 bp, Homo sapiens
tgagaatatgacaga

SEQ ID NO: 173395 - DNA, 15 bp, Homo sapiens
ctgagaatatgacag

SEQ ID NO: 173396 - DNA, 15 bp, Homo sapiens
cctgagaatatgaca

SEQ ID NO: 173397 - DNA, 15 bp, Homo sapiens
gcctgagaatatgac

SEQ ID NO: 173398 - DNA, 15 bp, Homo sapiens
tgcctgagaatatga

SEQ ID NO: 173399 - DNA, 15 bp, Homo sapiens
atgcctgagaatatg

SEQ ID NO: 173400 - DNA, 15 bp, Homo sapiens
catgcctgagaatat

SEQ ID NO: 173401 - DNA, 15 bp, Homo sapiens
ccatgcctgagaata

SEQ ID NO: 173402 - DNA, 15 bp, Homo sapiens
gccatgcctgagaat

SEQ ID NO: 173403 - DNA, 15 bp, Homo sapiens
tgccatgcctgagaa

SEQ ID NO: 173404 - DNA, 15 bp, Homo sapiens
atgccatgcctgaga

SEQ ID NO: 173405 - DNA, 15 bp, Homo sapiens
gatgccatgcctgag

SEQ ID NO: 173406 - DNA, 15 bp, Homo sapiens
ggatgccatgcctga

SEQ ID NO: 173407 - DNA, 15 bp, Homo sapiens
aggatgccatgcctg

SEQ ID NO: 173408 - DNA, 15 bp, Homo sapiens
gaggatgccatgcct

SEQ ID NO: 173409 - DNA, 15 bp, Homo sapiens
agaggatgccatgcc

SEQ ID NO: 173410 - DNA, 15 bp, Homo sapiens
gagaggatgccatgc

SEQ ID NO: 173411 - DNA, 15 bp, Homo sapiens
tgagaggatgccatg

SEQ ID NO: 173412 - DNA, 15 bp, Homo sapiens
gtgagaggatgccat

SEQ ID NO: 173413 - DNA, 15 bp, Homo sapiens
agtgagaggatgcca

SEQ ID NO: 173414 - DNA, 15 bp, Homo sapiens
tagtgagaggatgcc

SEQ ID NO: 173415 - DNA, 15 bp, Homo sapiens
atagtgagaggatgc

SEQ ID NO: 173416 - DNA, 15 bp, Homo sapiens
catagtgagaggatg

SEQ ID NO: 173417 - DNA, 15 bp, Homo sapiens
gcatagtgagaggat

SEQ ID NO: 173418 - DNA, 15 bp, Homo sapiens
tgcatagtgagagga

SEQ ID NO: 173419 - DNA, 15 bp, Homo sapiens
ctgcatagtgagagg

SEQ ID NO: 173420 - DNA, 15 bp, Homo sapiens
tctgcatagtgagag

SEQ ID NO: 173421 - DNA, 15 bp, Homo sapiens
ttctgcatagtgaga

SEQ ID NO: 173422 - DNA, 15 bp, Homo sapiens
cttctgcatagtgag

SEQ ID NO: 173423 - DNA, 15 bp, Homo sapiens
tcttctgcatagtga

SEQ ID NO: 173424 - DNA, 15 bp, Homo sapiens
ttcttctgcatagtg

SEQ ID NO: 173425 - DNA, 15 bp, Homo sapiens
cttcttctgcatagt

SEQ ID NO: 173426 - DNA, 15 bp, Homo sapiens
ccttcttctgcatag

SEQ ID NO: 173427 - DNA, 15 bp, Homo sapiens
cccttcttctgcata

SEQ ID NO: 173428 - DNA, 15 bp, Homo sapiens
gcccttcttctgcat

SEQ ID NO: 173429 - DNA, 15 bp, Homo sapiens
agcccttcttctgca

SEQ ID NO: 173430 - DNA, 15 bp, Homo sapiens
aagcccttcttctgc

SEQ ID NO: 173431 - DNA, 15 bp, Homo sapiens
taagcccttcttctg

SEQ ID NO: 173432 - DNA, 15 bp, Homo sapiens
ataagcccttcttct

SEQ ID NO: 173433 - DNA, 15 bp, Homo sapiens
cataagcccttcttc

SEQ ID NO: 173434 - DNA, 15 bp, Homo sapiens
acataagcccttctt

SEQ ID NO: 173435 - DNA, 15 bp, Homo sapiens
gacataagcccttct

SEQ ID NO: 173436 - DNA, 15 bp, Homo sapiens
agacataagcccttc

SEQ ID NO: 173437 - DNA, 15 bp, Homo sapiens
gagacataagccctt

SEQ ID NO: 173438 - DNA, 15 bp, Homo sapiens
agagacataagccct

SEQ ID NO: 173439 - DNA, 15 bp, Homo sapiens
gagagacataagccc

SEQ ID NO: 173440 - DNA, 15 bp, Homo sapiens
agagagacataagcc

SEQ ID NO: 173441 - DNA, 15 bp, Homo sapiens
aagagagacataagc

SEQ ID NO: 173442 - DNA, 15 bp, Homo sapiens
aaagagagacataag

SEQ ID NO: 173443 - DNA, 15 bp, Homo sapiens
taaagagagacataa

SEQ ID NO: 173444 - DNA, 15 bp, Homo sapiens
ataaagagagacata

SEQ ID NO: 173445 - DNA, 15 bp, Homo sapiens
cataaagagagacat

SEQ ID NO: 173446 - DNA, 15 bp, Homo sapiens
gcataaagagagaca

SEQ ID NO: 173447 - DNA, 15 bp, Homo sapiens
ggcataaagagagac

SEQ ID NO: 173448 - DNA, 15 bp, Homo sapiens
tggcataaagagaga

SEQ ID NO: 173449 - DNA, 15 bp, Homo sapiens
ttggcataaagagag

SEQ ID NO: 173450 - DNA, 15 bp, Homo sapiens
attggcataaagaga

SEQ ID NO: 173451 - DNA, 15 bp, Homo sapiens
aattggcataaagag

SEQ ID NO: 173452 - DNA, 15 bp, Homo sapiens
gaattggcataaaga

SEQ ID NO: 173453 - DNA, 15 bp, Homo sapiens
agaattggcataaag

SEQ ID NO: 173454 - DNA, 15 bp, Homo sapiens
aagaattggcataaa

SEQ ID NO: 173455 - DNA, 15 bp, Homo sapiens
gaagaattggcataa

SEQ ID NO: 173456 - DNA, 15 bp, Homo sapiens
ggaagaattggcata

SEQ ID NO: 173457 - DNA, 15 bp, Homo sapiens
aggaagaattggcat

SEQ ID NO: 173458 - DNA, 15 bp, Homo sapiens
aaggaagaattggca

SEQ ID NO: 173459 - DNA, 15 bp, Homo sapiens
aaaggaagaattggc

SEQ ID NO: 173460 - DNA, 15 bp, Homo sapiens
aaaaggaagaattgg

SEQ ID NO: 173461 - DNA, 15 bp, Homo sapiens
caaaaggaagaattg

SEQ ID NO: 173462 - DNA, 15 bp, Homo sapiens
acaaaaggaagaatt

SEQ ID NO: 173463 - DNA, 15 bp, Homo sapiens
gacaaaaggaagaat

SEQ ID NO: 173464 - DNA, 15 bp, Homo sapiens
agacaaaaggaagaa

SEQ ID NO: 173465 - DNA, 15 bp, Homo sapiens
aagacaaaaggaaga

SEQ ID NO: 173466 - DNA, 15 bp, Homo sapiens
caagacaaaaggaag

SEQ ID NO: 173467 - DNA, 15 bp, Homo sapiens
ccaagacaaaaggaa

SEQ ID NO: 173468 - DNA, 15 bp, Homo sapiens
accaagacaaaagga

SEQ ID NO: 173469 - DNA, 15 bp, Homo sapiens
gaccaagacaaaagg

SEQ ID NO: 173470 - DNA, 15 bp, Homo sapiens
ggaccaagacaaaag

SEQ ID NO: 173471 - DNA, 15 bp, Homo sapiens
tggaccaagacaaaa

SEQ ID NO: 173472 - DNA, 15 bp, Homo sapiens
atggaccaagacaaa

SEQ ID NO: 173473 - DNA, 15 bp, Homo sapiens
aatggaccaagacaa

SEQ ID NO: 173474 - DNA, 15 bp, Homo sapiens
aaatggaccaagaca

SEQ ID NO: 173475 - DNA, 15 bp, Homo sapiens
caaatggaccaagac

SEQ ID NO: 173476 - DNA, 15 bp, Homo sapiens
ccaaatggaccaaga

SEQ ID NO: 173477 - DNA, 15 bp, Homo sapiens
cccaaatggaccaag

SEQ ID NO: 173478 - DNA, 15 bp, Homo sapiens
acccaaatggaccaa

SEQ ID NO: 173479 - DNA, 15 bp, Homo sapiens
aacccaaatggacca

SEQ ID NO: 173480 - DNA, 15 bp, Homo sapiens
caacccaaatggacc

SEQ ID NO: 173481 - DNA, 15 bp, Homo sapiens
tcaacccaaatggac

SEQ ID NO: 173482 - DNA, 15 bp, Homo sapiens
atcaacccaaatgga

SEQ ID NO: 173483 - DNA, 15 bp, Homo sapiens
tatcaacccaaatgg

SEQ ID NO: 173484 - DNA, 15 bp, Homo sapiens
atatcaacccaaatg

SEQ ID NO: 173485 - DNA, 15 bp, Homo sapiens
tatatcaacccaaat

SEQ ID NO: 173486 - DNA, 15 bp, Homo sapiens
ttatatcaacccaaa

SEQ ID NO: 173487 - DNA, 15 bp, Homo sapiens
attatatcaacccaa

SEQ ID NO: 173488 - DNA, 15 bp, Homo sapiens
tattatatcaaccca

SEQ ID NO: 173489 - DNA, 15 bp, Homo sapiens
ttattatatcaaccc

SEQ ID NO: 173490 - DNA, 15 bp, Homo sapiens
tttattatatcaacc

SEQ ID NO: 173491 - DNA, 15 bp, Homo sapiens
ttttattatatcaac

SEQ ID NO: 173492 - DNA, 15 bp, Homo sapiens
tttttattatatcaa

SEQ ID NO: 173493 - DNA, 15 bp, Homo sapiens
atttttattatatca

SEQ ID NO: 173494 - DNA, 15 bp, Homo sapiens
catttttattatatc

SEQ ID NO: 173495 - DNA, 15 bp, Homo sapiens
gcatttttattatat

SEQ ID NO: 173496 - DNA, 15 bp, Homo sapiens
ggcatttttattata

SEQ ID NO: 173497 - DNA, 15 bp, Homo sapiens
aggcatttttattat

SEQ ID NO: 173498 - DNA, 15 bp, Homo sapiens
aaggcatttttatta

SEQ ID NO: 173499 - DNA, 15 bp, Homo sapiens
caaggcatttttatt

SEQ ID NO: 173500 - DNA, 15 bp, Homo sapiens
gcaaggcatttttat

SEQ ID NO: 173501 - DNA, 15 bp, Homo sapiens
tgcaaggcattttta

SEQ ID NO: 173502 - DNA, 15 bp, Homo sapiens
gtgcaaggcattttt

SEQ ID NO: 173503 - DNA, 15 bp, Homo sapiens
agtgcaaggcatttt

SEQ ID NO: 173504 - DNA, 15 bp, Homo sapiens
cagtgcaaggcattt

SEQ ID NO: 173505 - DNA, 15 bp, Homo sapiens
ccagtgcaaggcatt

SEQ ID NO: 173506 - DNA, 15 bp, Homo sapiens
cccagtgcaaggcat

SEQ ID NO: 173507 - DNA, 15 bp, Homo sapiens
acccagtgcaaggca

SEQ ID NO: 173508 - DNA, 15 bp, Homo sapiens
cacccagtgcaaggc

SEQ ID NO: 173509 - DNA, 15 bp, Homo sapiens
tcacccagtgcaagg

SEQ ID NO: 173510 - DNA, 15 bp, Homo sapiens
atcacccagtgcaag

SEQ ID NO: 173511 - DNA, 15 bp, Homo sapiens
aatcacccagtgcaa

SEQ ID NO: 173512 - DNA, 15 bp, Homo sapiens
aaatcacccagtgca

SEQ ID NO: 173513 - DNA, 15 bp, Homo sapiens
caaatcacccagtgc

SEQ ID NO: 173514 - DNA, 15 bp, Homo sapiens
gcaaatcacccagtg

SEQ ID NO: 173515 - DNA, 15 bp, Homo sapiens
tgcaaatcacccagt

SEQ ID NO: 173516 - DNA, 15 bp, Homo sapiens
ttgcaaatcacccag

SEQ ID NO: 173517 - DNA, 15 bp, Homo sapiens
tttgcaaatcaccca

SEQ ID NO: 173518 - DNA, 15 bp, Homo sapiens
gtttgcaaatcaccc

SEQ ID NO: 173519 - DNA, 15 bp, Homo sapiens
tgtttgcaaatcacc

SEQ ID NO: 173520 - DNA, 15 bp, Homo sapiens
ctgtttgcaaatcac

SEQ ID NO: 173521 - DNA, 15 bp, Homo sapiens
actgtttgcaaatca

SEQ ID NO: 173522 - DNA, 15 bp, Homo sapiens
tactgtttgcaaatc

SEQ ID NO: 173523 - DNA, 15 bp, Homo sapiens
ctactgtttgcaaat

SEQ ID NO: 173524 - DNA, 15 bp, Homo sapiens
tctactgtttgcaaa

SEQ ID NO: 173525 - DNA, 15 bp, Homo sapiens
ttctactgtttgcaa

SEQ ID NO: 173526 - DNA, 15 bp, Homo sapiens
tttctactgtttgca

SEQ ID NO: 173527 - DNA, 15 bp, Homo sapiens
atttctactgtttgc

SEQ ID NO: 173528 - DNA, 15 bp, Homo sapiens
aatttctactgtttg

SEQ ID NO: 173529 - DNA, 15 bp, Homo sapiens
aaatttctactgttt

SEQ ID NO: 173530 - DNA, 15 bp, Homo sapiens
taaatttctactgtt

SEQ ID NO: 173531 - DNA, 15 bp, Homo sapiens
ataaatttctactgt

SEQ ID NO: 173532 - DNA, 15 bp, Homo sapiens
aataaatttctactg

SEQ ID NO: 173533 - DNA, 15 bp, Homo sapiens
aaataaatttctact

SEQ ID NO: 173534 - DNA, 15 bp, Homo sapiens
gaaataaatttctac

SEQ ID NO: 173535 - DNA, 15 bp, Homo sapiens
agaaataaatttcta

SEQ ID NO: 173536 - DNA, 15 bp, Homo sapiens
gagaaataaatttct

SEQ ID NO: 173537 - DNA, 15 bp, Homo sapiens
tgagaaataaatttc

SEQ ID NO: 173538 - DNA, 15 bp, Homo sapiens
gtgagaaataaattt

SEQ ID NO: 173539 - DNA, 15 bp, Homo sapiens
tgtgagaaataaatt

SEQ ID NO: 173540 - DNA, 15 bp, Homo sapiens
ttgtgagaaataaat

SEQ ID NO: 173541 - DNA, 15 bp, Homo sapiens
attgtgagaaataaa

SEQ ID NO: 173542 - DNA, 15 bp, Homo sapiens
aattgtgagaaataa

SEQ ID NO: 173543 - DNA, 15 bp, Homo sapiens
gaattgtgagaaata

SEQ ID NO: 173544 - DNA, 15 bp, Homo sapiens
agaattgtgagaaat

SEQ ID NO: 173545 - DNA, 15 bp, Homo sapiens
cagaattgtgagaaa

SEQ ID NO: 173546 - DNA, 15 bp, Homo sapiens
ccagaattgtgagaa

SEQ ID NO: 173547 - DNA, 15 bp, Homo sapiens
tccagaattgtgaga

SEQ ID NO: 173548 - DNA, 15 bp, Homo sapiens
ctccagaattgtgag

SEQ ID NO: 173549 - DNA, 15 bp, Homo sapiens
cctccagaattgtga

SEQ ID NO: 173550 - DNA, 15 bp, Homo sapiens
tcctccagaattgtg

SEQ ID NO: 173551 - DNA, 15 bp, Homo sapiens
atcctccagaattgt

SEQ ID NO: 173552 - DNA, 15 bp, Homo sapiens
catcctccagaattg

SEQ ID NO: 173553 - DNA, 15 bp, Homo sapiens
ccatcctccagaatt

SEQ ID NO: 173554 - DNA, 15 bp, Homo sapiens
cccatcctccagaat

SEQ ID NO: 173555 - DNA, 15 bp, Homo sapiens
tcccatcctccagaa

SEQ ID NO: 173556 - DNA, 15 bp, Homo sapiens
ttcccatcctccaga

SEQ ID NO: 173557 - DNA, 15 bp, Homo sapiens
cttcccatcctccag

SEQ ID NO: 173558 - DNA, 15 bp, Homo sapiens
acttcccatcctcca

SEQ ID NO: 173559 - DNA, 15 bp, Homo sapiens
gacttcccatcctcc

SEQ ID NO: 173560 - DNA, 15 bp, Homo sapiens
ggacttcccatcctc

SEQ ID NO: 173561 - DNA, 15 bp, Homo sapiens
tggacttcccatcct

SEQ ID NO: 173562 - DNA, 15 bp, Homo sapiens
ttggacttcccatcc

SEQ ID NO: 173563 - DNA, 15 bp, Homo sapiens
cttggacttcccatc

SEQ ID NO: 173564 - DNA, 15 bp, Homo sapiens
tcttggacttcccat

SEQ ID NO: 173565 - DNA, 15 bp, Homo sapiens
atcttggacttccca

SEQ ID NO: 173566 - DNA, 15 bp, Homo sapiens
gatcttggacttccc

SEQ ID NO: 173567 - DNA, 15 bp, Homo sapiens
tgatcttggacttcc

SEQ ID NO: 173568 - DNA, 15 bp, Homo sapiens
ttgatcttggacttc

SEQ ID NO: 173569 - DNA, 15 bp, Homo sapiens
cttgatcttggactt

SEQ ID NO: 173570 - DNA, 15 bp, Homo sapiens
ccttgatcttggact

SEQ ID NO: 173571 - DNA, 15 bp, Homo sapiens
accttgatcttggac

SEQ ID NO: 173572 - DNA, 15 bp, Homo sapiens
caccttgatcttgga

SEQ ID NO: 173573 - DNA, 15 bp, Homo sapiens
gcaccttgatcttgg

SEQ ID NO: 173574 - DNA, 15 bp, Homo sapiens
agcaccttgatcttg

SEQ ID NO: 173575 - DNA, 15 bp, Homo sapiens
aagcaccttgatctt

SEQ ID NO: 173576 - DNA, 15 bp, Homo sapiens
caagcaccttgatct

SEQ ID NO: 173577 - DNA, 15 bp, Homo sapiens
acaagcaccttgatc

SEQ ID NO: 173578 - DNA, 15 bp, Homo sapiens
cacaagcaccttgat

SEQ ID NO: 173579 - DNA, 15 bp, Homo sapiens
ccacaagcaccttga

SEQ ID NO: 173580 - DNA, 15 bp, Homo sapiens
accacaagcaccttg

SEQ ID NO: 173581 - DNA, 15 bp, Homo sapiens
aaccacaagcacctt

SEQ ID NO: 173582 - DNA, 15 bp, Homo sapiens
aaaccacaagcacct

SEQ ID NO: 173583 - DNA, 15 bp, Homo sapiens
aaaaccacaagcacc

SEQ ID NO: 173584 - DNA, 15 bp, Homo sapiens
aaaaaccacaagcac

SEQ ID NO: 173585 - DNA, 15 bp, Homo sapiens
caaaaaccacaagca

SEQ ID NO: 173586 - DNA, 15 bp, Homo sapiens
ccaaaaaccacaagc

SEQ ID NO: 173587 - DNA, 15 bp, Homo sapiens
accaaaaaccacaag

SEQ ID NO: 173588 - DNA, 15 bp, Homo sapiens
taccaaaaaccacaa

SEQ ID NO: 173589 - DNA, 15 bp, Homo sapiens
ttaccaaaaaccaca

SEQ ID NO: 173590 - DNA, 15 bp, Homo sapiens
cttaccaaaaaccac

SEQ ID NO: 173591 - DNA, 15 bp, Homo sapiens
tcttaccaaaaacca

SEQ ID NO: 173592 - DNA, 15 bp, Homo sapiens
ctcttaccaaaaacc

SEQ ID NO: 173593 - DNA, 15 bp, Homo sapiens
gctcttaccaaaaac

SEQ ID NO: 173594 - DNA, 15 bp, Homo sapiens
ggctcttaccaaaaa

SEQ ID NO: 173595 - DNA, 15 bp, Homo sapiens
gggctcttaccaaaa

SEQ ID NO: 173596 - DNA, 15 bp, Homo sapiens
tgggctcttaccaaa

SEQ ID NO: 173597 - DNA, 15 bp, Homo sapiens
gtgggctcttaccaa

SEQ ID NO: 173598 - DNA, 15 bp, Homo sapiens
agtgggctcttacca

SEQ ID NO: 173599 - DNA, 15 bp, Homo sapiens
aagtgggctcttacc

SEQ ID NO: 173600 - DNA, 15 bp, Homo sapiens
gaagtgggctcttac

SEQ ID NO: 173601 - DNA, 15 bp, Homo sapiens
ggaagtgggctctta

SEQ ID NO: 173602 - DNA, 15 bp, Homo sapiens
aggaagtgggctctt

SEQ ID NO: 173603 - DNA, 15 bp, Homo sapiens
caggaagtgggctct

SEQ ID NO: 173604 - DNA, 15 bp, Homo sapiens
gcaggaagtgggctc

SEQ ID NO: 173605 - DNA, 15 bp, Homo sapiens
agcaggaagtgggct

SEQ ID NO: 173606 - DNA, 15 bp, Homo sapiens
aagcaggaagtgggc

SEQ ID NO: 173607 - DNA, 15 bp, Homo sapiens
gaagcaggaagtggg

SEQ ID NO: 173608 - DNA, 15 bp, Homo sapiens
tgaagcaggaagtgg

SEQ ID NO: 173609 - DNA, 15 bp, Homo sapiens
atgaagcaggaagtg

SEQ ID NO: 173610 - DNA, 15 bp, Homo sapiens
tatgaagcaggaagt

SEQ ID NO: 173611 - DNA, 15 bp, Homo sapiens
gtatgaagcaggaag

SEQ ID NO: 173612 - DNA, 15 bp, Homo sapiens
tgtatgaagcaggaa

SEQ ID NO: 173613 - DNA, 15 bp, Homo sapiens
atgtatgaagcagga

SEQ ID NO: 173614 - DNA, 15 bp, Homo sapiens
catgtatgaagcagg

SEQ ID NO: 173615 - DNA, 15 bp, Homo sapiens
ccatgtatgaagcag

SEQ ID NO: 173616 - DNA, 15 bp, Homo sapiens
tccatgtatgaagca

SEQ ID NO: 173617 - DNA, 15 bp, Homo sapiens
ctccatgtatgaagc

SEQ ID NO: 173618 - DNA, 15 bp, Homo sapiens
gctccatgtatgaag

SEQ ID NO: 173619 - DNA, 15 bp, Homo sapiens
ggctccatgtatgaa

SEQ ID NO: 173620 - DNA, 15 bp, Homo sapiens
aggctccatgtatga

SEQ ID NO: 173621 - DNA, 15 bp, Homo sapiens
aaggctccatgtatg

SEQ ID NO: 173622 - DNA, 15 bp, Homo sapiens
gaaggctccatgtat

SEQ ID NO: 173623 - DNA, 15 bp, Homo sapiens
agaaggctccatgta

SEQ ID NO: 173624 - DNA, 15 bp, Homo sapiens
cagaaggctccatgt

SEQ ID NO: 173625 - DNA, 15 bp, Homo sapiens
acagaaggctccatg

SEQ ID NO: 173626 - DNA, 15 bp, Homo sapiens
cacagaaggctccat

SEQ ID NO: 173627 - DNA, 15 bp, Homo sapiens
acacagaaggctcca

SEQ ID NO: 173628 - DNA, 15 bp, Homo sapiens
gacacagaaggctcc

SEQ ID NO: 173629 - DNA, 15 bp, Homo sapiens
ggacacagaaggctc

SEQ ID NO: 173630 - DNA, 15 bp, Homo sapiens
aggacacagaaggct

SEQ ID NO: 173631 - DNA, 15 bp, Homo sapiens
gaggacacagaaggc

SEQ ID NO: 173632 - DNA, 15 bp, Homo sapiens
tgaggacacagaagg

SEQ ID NO: 173633 - DNA, 15 bp, Homo sapiens
gtgaggacacagaag

SEQ ID NO: 173634 - DNA, 15 bp, Homo sapiens
tgtgaggacacagaa

SEQ ID NO: 173635 - DNA, 15 bp, Homo sapiens
atgtgaggacacaga

SEQ ID NO: 173636 - DNA, 15 bp, Homo sapiens
catgtgaggacacag

SEQ ID NO: 173637 - DNA, 15 bp, Homo sapiens
tcatgtgaggacaca

SEQ ID NO: 173638 - DNA, 15 bp, Homo sapiens
atcatgtgaggacac

SEQ ID NO: 173639 - DNA, 15 bp, Homo sapiens
catcatgtgaggaca

SEQ ID NO: 173640 - DNA, 15 bp, Homo sapiens
ccatcatgtgaggac

SEQ ID NO: 173641 - DNA, 15 bp, Homo sapiens
tccatcatgtgagga

SEQ ID NO: 173642 - DNA, 15 bp, Homo sapiens
ttccatcatgtgagg

SEQ ID NO: 173643 - DNA, 15 bp, Homo sapiens
cttccatcatgtgag

SEQ ID NO: 173644 - DNA, 15 bp, Homo sapiens
ccttccatcatgtga

SEQ ID NO: 173645 - DNA, 15 bp, Homo sapiens
cccttccatcatgtg

SEQ ID NO: 173646 - DNA, 15 bp, Homo sapiens
tcccttccatcatgt

SEQ ID NO: 173647 - DNA, 15 bp, Homo sapiens
gtcccttccatcatg

SEQ ID NO: 173648 - DNA, 15 bp, Homo sapiens
ggtcccttccatcat

SEQ ID NO: 173649 - DNA, 15 bp, Homo sapiens
tggtcccttccatca

SEQ ID NO: 173650 - DNA, 15 bp, Homo sapiens
ctggtcccttccatc

SEQ ID NO: 173651 - DNA, 15 bp, Homo sapiens
cctggtcccttccat

SEQ ID NO: 173652 - DNA, 15 bp, Homo sapiens
gcctggtcccttcca

SEQ ID NO: 173653 - DNA, 15 bp, Homo sapiens
tgcctggtcccttcc

SEQ ID NO: 173654 - DNA, 15 bp, Homo sapiens
ctgcctggtcccttc

SEQ ID NO: 173655 - DNA, 15 bp, Homo sapiens
gctgcctggtccctt

SEQ ID NO: 173656 - DNA, 15 bp, Homo sapiens
agctgcctggtccct

SEQ ID NO: 173657 - DNA, 15 bp, Homo sapiens
gagctgcctggtccc

SEQ ID NO: 173658 - DNA, 15 bp, Homo sapiens
agagctgcctggtcc

SEQ ID NO: 173659 - DNA, 15 bp, Homo sapiens
gagagctgcctggtc

SEQ ID NO: 173660 - DNA, 15 bp, Homo sapiens
agagagctgcctggt

SEQ ID NO: 173661 - DNA, 15 bp, Homo sapiens
cagagagctgcctgg

SEQ ID NO: 173662 - DNA, 15 bp, Homo sapiens
ccagagagctgcctg

SEQ ID NO: 173663 - DNA, 15 bp, Homo sapiens
cccagagagctgcct

SEQ ID NO: 173664 - DNA, 15 bp, Homo sapiens
tcccagagagctgcc

SEQ ID NO: 173665 - DNA, 15 bp, Homo sapiens
gtcccagagagctgc

SEQ ID NO: 173666 - DNA, 15 bp, Homo sapiens
ggtcccagagagctg

SEQ ID NO: 173667 - DNA, 15 bp, Homo sapiens
aggtcccagagagct

SEQ ID NO: 173668 - DNA, 15 bp, Homo sapiens
gaggtcccagagagc

SEQ ID NO: 173669 - DNA, 15 bp, Homo sapiens
agaggtcccagagag

SEQ ID NO: 173670 - DNA, 15 bp, Homo sapiens
aagaggtcccagaga

SEQ ID NO: 173671 - DNA, 15 bp, Homo sapiens
aaagaggtcccagag

SEQ ID NO: 173672 - DNA, 15 bp, Homo sapiens
aaaagaggtcccaga

SEQ ID NO: 173673 - DNA, 15 bp, Homo sapiens
taaaagaggtcccag

SEQ ID NO: 173674 - DNA, 15 bp, Homo sapiens
ataaaagaggtccca

SEQ ID NO: 173675 - DNA, 15 bp, Homo sapiens
tataaaagaggtccc

SEQ ID NO: 173676 - DNA, 15 bp, Homo sapiens
ctataaaagaggtcc

SEQ ID NO: 173677 - DNA, 15 bp, Homo sapiens
tctataaaagaggtc

SEQ ID NO: 173678 - DNA, 15 bp, Homo sapiens
ctctataaaagaggt

SEQ ID NO: 173679 - DNA, 15 bp, Homo sapiens
gctctataaaagagg

SEQ ID NO: 173680 - DNA, 15 bp, Homo sapiens
tgctctataaaagag

SEQ ID NO: 173681 - DNA, 15 bp, Homo sapiens
ctgctctataaaaga

SEQ ID NO: 173682 - DNA, 15 bp, Homo sapiens
actgctctataaaag

SEQ ID NO: 173683 - DNA, 15 bp, Homo sapiens
tactgctctataaaa

SEQ ID NO: 173684 - DNA, 15 bp, Homo sapiens
ttactgctctataaa

SEQ ID NO: 173685 - DNA, 15 bp, Homo sapiens
attactgctctataa

SEQ ID NO: 173686 - DNA, 15 bp, Homo sapiens
gattactgctctata

SEQ ID NO: 173687 - DNA, 15 bp, Homo sapiens
ggattactgctctat

SEQ ID NO: 173688 - DNA, 15 bp, Homo sapiens
gggattactgctcta

SEQ ID NO: 173689 - DNA, 15 bp, Homo sapiens
tgggattactgctct

SEQ ID NO: 173690 - DNA, 15 bp, Homo sapiens
gtgggattactgctc

SEQ ID NO: 173691 - DNA, 15 bp, Homo sapiens
agtgggattactgct

SEQ ID NO: 173692 - DNA, 15 bp, Homo sapiens
aagtgggattactgc

SEQ ID NO: 173693 - DNA, 15 bp, Homo sapiens
taagtgggattactg

SEQ ID NO: 173694 - DNA, 15 bp, Homo sapiens
ataagtgggattact

SEQ ID NO: 173695 - DNA, 15 bp, Homo sapiens
tataagtgggattac

SEQ ID NO: 173696 - DNA, 15 bp, Homo sapiens
ttataagtgggatta

SEQ ID NO: 173697 - DNA, 15 bp, Homo sapiens
cttataagtgggatt

SEQ ID NO: 173698 - DNA, 15 bp, Homo sapiens
ccttataagtgggat

SEQ ID NO: 173699 - DNA, 15 bp, Homo sapiens
cccttataagtggga

SEQ ID NO: 173700 - DNA, 15 bp, Homo sapiens
acccttataagtggg

SEQ ID NO: 173701 - DNA, 15 bp, Homo sapiens
aacccttataagtgg

SEQ ID NO: 173702 - DNA, 15 bp, Homo sapiens
taacccttataagtg

SEQ ID NO: 173703 - DNA, 15 bp, Homo sapiens
ttaacccttataagt

SEQ ID NO: 173704 - DNA, 15 bp, Homo sapiens
tttaacccttataag

SEQ ID NO: 173705 - DNA, 15 bp, Homo sapiens
ttttaacccttataa

SEQ ID NO: 173706 - DNA, 15 bp, Homo sapiens
attttaacccttata

SEQ ID NO: 173707 - DNA, 15 bp, Homo sapiens
aattttaacccttat

SEQ ID NO: 173708 - DNA, 15 bp, Homo sapiens
caattttaaccctta

SEQ ID NO: 173709 - DNA, 15 bp, Homo sapiens
gcaattttaaccctt

SEQ ID NO: 173710 - DNA, 15 bp, Homo sapiens
agcaattttaaccct

SEQ ID NO: 173711 - DNA, 15 bp, Homo sapiens
tagcaattttaaccc

SEQ ID NO: 173712 - DNA, 15 bp, Homo sapiens
gtagcaattttaacc

SEQ ID NO: 173713 - DNA, 15 bp, Homo sapiens
tgtagcaattttaac

SEQ ID NO: 173714 - DNA, 15 bp, Homo sapiens
atgtagcaattttaa

SEQ ID NO: 173715 - DNA, 15 bp, Homo sapiens
tatgtagcaatttta

SEQ ID NO: 173716 - DNA, 15 bp, Homo sapiens
atatgtagcaatttt

SEQ ID NO: 173717 - DNA, 15 bp, Homo sapiens
tatatgtagcaattt

SEQ ID NO: 173718 - DNA, 15 bp, Homo sapiens
ttatatgtagcaatt

SEQ ID NO: 173719 - DNA, 15 bp, Homo sapiens
tttatatgtagcaat

SEQ ID NO: 173720 - DNA, 15 bp, Homo sapiens
atttatatgtagcaa

SEQ ID NO: 173721 - DNA, 15 bp, Homo sapiens
aatttatatgtagca

SEQ ID NO: 173722 - DNA, 15 bp, Homo sapiens
aaatttatatgtagc

SEQ ID NO: 173723 - DNA, 15 bp, Homo sapiens
aaaatttatatgtag

SEQ ID NO: 173724 - DNA, 15 bp, Homo sapiens
aaaaatttatatgta

SEQ ID NO: 173725 - DNA, 15 bp, Homo sapiens
caaaaatttatatgt

SEQ ID NO: 173726 - DNA, 15 bp, Homo sapiens
ccaaaaatttatatg

SEQ ID NO: 173727 - DNA, 15 bp, Homo sapiens
cccaaaaatttatat

SEQ ID NO: 173728 - DNA, 15 bp, Homo sapiens
ccccaaaaatttata

SEQ ID NO: 173729 - DNA, 15 bp, Homo sapiens
tccccaaaaatttat

SEQ ID NO: 173730 - DNA, 15 bp, Homo sapiens
ctccccaaaaattta

SEQ ID NO: 173731 - DNA, 15 bp, Homo sapiens
cctccccaaaaattt

SEQ ID NO: 173732 - DNA, 15 bp, Homo sapiens
ccctccccaaaaatt

SEQ ID NO: 173733 - DNA, 15 bp, Homo sapiens
tccctccccaaaaat

SEQ ID NO: 173734 - DNA, 15 bp, Homo sapiens
gtccctccccaaaaa

SEQ ID NO: 173735 - DNA, 15 bp, Homo sapiens
tgtccctccccaaaa

SEQ ID NO: 173736 - DNA, 15 bp, Homo sapiens
gtgtccctccccaaa

SEQ ID NO: 173737 - DNA, 15 bp, Homo sapiens
tgtgtccctccccaa

SEQ ID NO: 173738 - DNA, 15 bp, Homo sapiens
ttgtgtccctcccca

SEQ ID NO: 173739 - DNA, 15 bp, Homo sapiens
tttgtgtccctcccc

SEQ ID NO: 173740 - DNA, 15 bp, Homo sapiens
atttgtgtccctccc

SEQ ID NO: 173741 - DNA, 15 bp, Homo sapiens
tatttgtgtccctcc

SEQ ID NO: 173742 - DNA, 15 bp, Homo sapiens
atatttgtgtccctc

SEQ ID NO: 173743 - DNA, 15 bp, Homo sapiens
aatatttgtgtccct

SEQ ID NO: 173744 - DNA, 15 bp, Homo sapiens
gaatatttgtgtccc

SEQ ID NO: 173745 - DNA, 15 bp, Homo sapiens
tgaatatttgtgtcc

SEQ ID NO: 173746 - DNA, 15 bp, Homo sapiens
ttgaatatttgtgtc

SEQ ID NO: 173747 - DNA, 15 bp, Homo sapiens
tttgaatatttgtgt

SEQ ID NO: 173748 - DNA, 15 bp, Homo sapiens
gtttgaatatttgtg

SEQ ID NO: 173749 - DNA, 15 bp, Homo sapiens
ggtttgaatatttgt

SEQ ID NO: 173750 - DNA, 15 bp, Homo sapiens
tggtttgaatatttg

SEQ ID NO: 173751 - DNA, 15 bp, Homo sapiens
atggtttgaatattt

SEQ ID NO: 173752 - DNA, 15 bp, Homo sapiens
aatggtttgaatatt

SEQ ID NO: 173753 - DNA, 15 bp, Homo sapiens
caatggtttgaatat

SEQ ID NO: 173754 - DNA, 15 bp, Homo sapiens
gcaatggtttgaata

SEQ ID NO: 173755 - DNA, 15 bp, Homo sapiens
tgcaatggtttgaat

SEQ ID NO: 173756 - DNA, 15 bp, Homo sapiens
ttgcaatggtttgaa

SEQ ID NO: 173757 - DNA, 15 bp, Homo sapiens
tttgcaatggtttga

SEQ ID NO: 173758 - DNA, 15 bp, Homo sapiens
ctttgcaatggtttg

SEQ ID NO: 173759 - DNA, 15 bp, Homo sapiens
cctttgcaatggttt

SEQ ID NO: 173760 - DNA, 15 bp, Homo sapiens
ccctttgcaatggtt

SEQ ID NO: 173761 - DNA, 15 bp, Homo sapiens
tccctttgcaatggt

SEQ ID NO: 173762 - DNA, 15 bp, Homo sapiens
atccctttgcaatgg

SEQ ID NO: 173763 - DNA, 15 bp, Homo sapiens
tatccctttgcaatg

SEQ ID NO: 173764 - DNA, 15 bp, Homo sapiens
ttatccctttgcaat

SEQ ID NO: 173765 - DNA, 15 bp, Homo sapiens
cttatccctttgcaa

SEQ ID NO: 173766 - DNA, 15 bp, Homo sapiens
ccttatccctttgca

SEQ ID NO: 173767 - DNA, 15 bp, Homo sapiens
accttatccctttgc

SEQ ID NO: 173768 - DNA, 15 bp, Homo sapiens
aaccttatccctttg

SEQ ID NO: 173769 - DNA, 15 bp, Homo sapiens
caaccttatcccttt

SEQ ID NO: 173770 - DNA, 15 bp, Homo sapiens
ccaaccttatccctt

SEQ ID NO: 173771 - DNA, 15 bp, Homo sapiens
tccaaccttatccct

SEQ ID NO: 173772 - DNA, 15 bp, Homo sapiens
ctccaaccttatccc

SEQ ID NO: 173773 - DNA, 15 bp, Homo sapiens
cctccaaccttatcc

SEQ ID NO: 173774 - DNA, 15 bp, Homo sapiens
tcctccaaccttatc

SEQ ID NO: 173775 - DNA, 15 bp, Homo sapiens
atcctccaaccttat

SEQ ID NO: 173776 - DNA, 15 bp, Homo sapiens
gatcctccaacctta

SEQ ID NO: 173777 - DNA, 15 bp, Homo sapiens
agatcctccaacctt

SEQ ID NO: 173778 - DNA, 15 bp, Homo sapiens
aagatcctccaacct

SEQ ID NO: 173779 - DNA, 15 bp, Homo sapiens
gaagatcctccaacc

SEQ ID NO: 173780 - DNA, 15 bp, Homo sapiens
agaagatcctccaac

SEQ ID NO: 173781 - DNA, 15 bp, Homo sapiens
gagaagatcctccaa

SEQ ID NO: 173782 - DNA, 15 bp, Homo sapiens
tgagaagatcctcca

SEQ ID NO: 173783 - DNA, 15 bp, Homo sapiens
atgagaagatcctcc

SEQ ID NO: 173784 - DNA, 15 bp, Homo sapiens
aatgagaagatcctc

SEQ ID NO: 173785 - DNA, 15 bp, Homo sapiens
aaatgagaagatcct

SEQ ID NO: 173786 - DNA, 15 bp, Homo sapiens
gaaatgagaagatcc

SEQ ID NO: 173787 - DNA, 15 bp, Homo sapiens
agaaatgagaagatc

SEQ ID NO: 173788 - DNA, 15 bp, Homo sapiens
gagaaatgagaagat

SEQ ID NO: 173789 - DNA, 15 bp, Homo sapiens
agagaaatgagaaga

SEQ ID NO: 173790 - DNA, 15 bp, Homo sapiens
aagagaaatgagaag

SEQ ID NO: 173791 - DNA, 15 bp, Homo sapiens
aaagagaaatgagaa

SEQ ID NO: 173792 - DNA, 15 bp, Homo sapiens
caaagagaaatgaga

SEQ ID NO: 173793 - DNA, 15 bp, Homo sapiens
acaaagagaaatgag

SEQ ID NO: 173794 - DNA, 15 bp, Homo sapiens
gacaaagagaaatga

SEQ ID NO: 173795 - DNA, 15 bp, Homo sapiens
tgacaaagagaaatg

SEQ ID NO: 173796 - DNA, 15 bp, Homo sapiens
gtgacaaagagaaat

SEQ ID NO: 173797 - DNA, 15 bp, Homo sapiens
tgtgacaaagagaaa

SEQ ID NO: 173798 - DNA, 15 bp, Homo sapiens
ttgtgacaaagagaa

SEQ ID NO: 173799 - DNA, 15 bp, Homo sapiens
attgtgacaaagaga

SEQ ID NO: 173800 - DNA, 15 bp, Homo sapiens
cattgtgacaaagag

SEQ ID NO: 173801 - DNA, 15 bp, Homo sapiens
tcattgtgacaaaga

SEQ ID NO: 173802 - DNA, 15 bp, Homo sapiens
gtcattgtgacaaag

SEQ ID NO: 173803 - DNA, 15 bp, Homo sapiens
ggtcattgtgacaaa

SEQ ID NO: 173804 - DNA, 15 bp, Homo sapiens
aggtcattgtgacaa

SEQ ID NO: 173805 - DNA, 15 bp, Homo sapiens
taggtcattgtgaca

SEQ ID NO: 173806 - DNA, 15 bp, Homo sapiens
ttaggtcattgtgac

SEQ ID NO: 173807 - DNA, 15 bp, Homo sapiens
tttaggtcattgtga

SEQ ID NO: 173808 - DNA, 15 bp, Homo sapiens
ctttaggtcattgtg

SEQ ID NO: 173809 - DNA, 15 bp, Homo sapiens
tctttaggtcattgt

SEQ ID NO: 173810 - DNA, 15 bp, Homo sapiens
atctttaggtcattg

SEQ ID NO: 173811 - DNA, 15 bp, Homo sapiens
tatctttaggtcatt

SEQ ID NO: 173812 - DNA, 15 bp, Homo sapiens
gtatctttaggtcat

SEQ ID NO: 173813 - DNA, 15 bp, Homo sapiens
ggtatctttaggtca

SEQ ID NO: 173814 - DNA, 15 bp, Homo sapiens
gggtatctttaggtc

SEQ ID NO: 173815 - DNA, 15 bp, Homo sapiens
agggtatctttaggt

SEQ ID NO: 173816 - DNA, 15 bp, Homo sapiens
gagggtatctttagg

SEQ ID NO: 173817 - DNA, 15 bp, Homo sapiens
ggagggtatctttag

SEQ ID NO: 173818 - DNA, 15 bp, Homo sapiens
tggagggtatcttta

SEQ ID NO: 173819 - DNA, 15 bp, Homo sapiens
atggagggtatcttt

SEQ ID NO: 173820 - DNA, 15 bp, Homo sapiens
catggagggtatctt

SEQ ID NO: 173821 - DNA, 15 bp, Homo sapiens
acatggagggtatct

SEQ ID NO: 173822 - DNA, 15 bp, Homo sapiens
aacatggagggtatc

SEQ ID NO: 173823 - DNA, 15 bp, Homo sapiens
aaacatggagggtat

SEQ ID NO: 173824 - DNA, 15 bp, Homo sapiens
aaaacatggagggta

SEQ ID NO: 173825 - DNA, 15 bp, Homo sapiens
taaaacatggagggt

SEQ ID NO: 173826 - DNA, 15 bp, Homo sapiens
ctaaaacatggaggg

SEQ ID NO: 173827 - DNA, 15 bp, Homo sapiens
gctaaaacatggagg

SEQ ID NO: 173828 - DNA, 15 bp, Homo sapiens
tgctaaaacatggag

SEQ ID NO: 173829 - DNA, 15 bp, Homo sapiens
ttgctaaaacatgga

SEQ ID NO: 173830 - DNA, 15 bp, Homo sapiens
tttgctaaaacatgg

SEQ ID NO: 173831 - DNA, 15 bp, Homo sapiens
gtttgctaaaacatg

SEQ ID NO: 173832 - DNA, 15 bp, Homo sapiens
agtttgctaaaacat

SEQ ID NO: 173833 - DNA, 15 bp, Homo sapiens
aagtttgctaaaaca

SEQ ID NO: 173834 - DNA, 15 bp, Homo sapiens
caagtttgctaaaac

SEQ ID NO: 173835 - DNA, 15 bp, Homo sapiens
gcaagtttgctaaaa

SEQ ID NO: 173836 - DNA, 15 bp, Homo sapiens
ggcaagtttgctaaa

SEQ ID NO: 173837 - DNA, 15 bp, Homo sapiens
gggcaagtttgctaa

SEQ ID NO: 173838 - DNA, 15 bp, Homo sapiens
agggcaagtttgcta

SEQ ID NO: 173839 - DNA, 15 bp, Homo sapiens
aagggcaagtttgct

SEQ ID NO: 173840 - DNA, 15 bp, Homo sapiens
caagggcaagtttgc

SEQ ID NO: 173841 - DNA, 15 bp, Homo sapiens
tcaagggcaagtttg

SEQ ID NO: 173842 - DNA, 15 bp, Homo sapiens
ctcaagggcaagttt

SEQ ID NO: 173843 - DNA, 15 bp, Homo sapiens
actcaagggcaagtt

SEQ ID NO: 173844 - DNA, 15 bp, Homo sapiens
aactcaagggcaagt

SEQ ID NO: 173845 - DNA, 15 bp, Homo sapiens
taactcaagggcaag

SEQ ID NO: 173846 - DNA, 15 bp, Homo sapiens
ctaactcaagggcaa

SEQ ID NO: 173847 - DNA, 15 bp, Homo sapiens
actaactcaagggca

SEQ ID NO: 173848 - DNA, 15 bp, Homo sapiens
cactaactcaagggc

SEQ ID NO: 173849 - DNA, 15 bp, Homo sapiens
tcactaactcaaggg

SEQ ID NO: 173850 - DNA, 15 bp, Homo sapiens
ttcactaactcaagg

SEQ ID NO: 173851 - DNA, 15 bp, Homo sapiens
attcactaactcaag

SEQ ID NO: 173852 - DNA, 15 bp, Homo sapiens
cattcactaactcaa

SEQ ID NO: 173853 - DNA, 15 bp, Homo sapiens
ccattcactaactca

SEQ ID NO: 173854 - DNA, 15 bp, Homo sapiens
tccattcactaactc

SEQ ID NO: 173855 - DNA, 15 bp, Homo sapiens
atccattcactaact

SEQ ID NO: 173856 - DNA, 15 bp, Homo sapiens
tatccattcactaac

SEQ ID NO: 173857 - DNA, 15 bp, Homo sapiens
ttatccattcactaa

SEQ ID NO: 173858 - DNA, 15 bp, Homo sapiens
cttatccattcacta

SEQ ID NO: 173859 - DNA, 15 bp, Homo sapiens
acttatccattcact

SEQ ID NO: 173860 - DNA, 15 bp, Homo sapiens
aacttatccattcac

SEQ ID NO: 173861 - DNA, 15 bp, Homo sapiens
caacttatccattca

SEQ ID NO: 173862 - DNA, 15 bp, Homo sapiens
acaacttatccattc

SEQ ID NO: 173863 - DNA, 15 bp, Homo sapiens
aacaacttatccatt

SEQ ID NO: 173864 - DNA, 15 bp, Homo sapiens
gaacaacttatccat

SEQ ID NO: 173865 - DNA, 15 bp, Homo sapiens
agaacaacttatcca

SEQ ID NO: 173866 - DNA, 15 bp, Homo sapiens
gagaacaacttatcc

SEQ ID NO: 173867 - DNA, 15 bp, Homo sapiens
tgagaacaacttatc

SEQ ID NO: 173868 - DNA, 15 bp, Homo sapiens
ttgagaacaacttat

SEQ ID NO: 173869 - DNA, 15 bp, Homo sapiens
gttgagaacaactta

SEQ ID NO: 173870 - DNA, 15 bp, Homo sapiens
agttgagaacaactt

SEQ ID NO: 173871 - DNA, 15 bp, Homo sapiens
gagttgagaacaact

SEQ ID NO: 173872 - DNA, 15 bp, Homo sapiens
agagttgagaacaac

SEQ ID NO: 173873 - DNA, 15 bp, Homo sapiens
cagagttgagaacaa

SEQ ID NO: 173874 - DNA, 15 bp, Homo sapiens
ccagagttgagaaca

SEQ ID NO: 173875 - DNA, 15 bp, Homo sapiens
gccagagttgagaac

SEQ ID NO: 173876 - DNA, 15 bp, Homo sapiens
agccagagttgagaa

SEQ ID NO: 173877 - DNA, 15 bp, Homo sapiens
cagccagagttgaga

SEQ ID NO: 173878 - DNA, 15 bp, Homo sapiens
gcagccagagttgag

SEQ ID NO: 173879 - DNA, 15 bp, Homo sapiens
tgcagccagagttga

SEQ ID NO: 173880 - DNA, 15 bp, Homo sapiens
gtgcagccagagttg

SEQ ID NO: 173881 - DNA, 15 bp, Homo sapiens
tgtgcagccagagtt

SEQ ID NO: 173882 - DNA, 15 bp, Homo sapiens
atgtgcagccagagt

SEQ ID NO: 173883 - DNA, 15 bp, Homo sapiens
aatgtgcagccagag

SEQ ID NO: 173884 - DNA, 15 bp, Homo sapiens
taatgtgcagccaga

SEQ ID NO: 173885 - DNA, 15 bp, Homo sapiens
ttaatgtgcagccag

SEQ ID NO: 173886 - DNA, 15 bp, Homo sapiens
tttaatgtgcagcca

SEQ ID NO: 173887 - DNA, 15 bp, Homo sapiens
ttttaatgtgcagcc

SEQ ID NO: 173888 - DNA, 15 bp, Homo sapiens
attttaatgtgcagc

SEQ ID NO: 173889 - DNA, 15 bp, Homo sapiens
gattttaatgtgcag

SEQ ID NO: 173890 - DNA, 15 bp, Homo sapiens
tgattttaatgtgca

SEQ ID NO: 173891 - DNA, 15 bp, Homo sapiens
gtgattttaatgtgc

SEQ ID NO: 173892 - DNA, 15 bp, Homo sapiens
agtgattttaatgtg

SEQ ID NO: 173893 - DNA, 15 bp, Homo sapiens
aagtgattttaatgt

SEQ ID NO: 173894 - DNA, 15 bp, Homo sapiens
aaagtgattttaatg

SEQ ID NO: 173895 - DNA, 15 bp, Homo sapiens
caaagtgattttaat

SEQ ID NO: 173896 - DNA, 15 bp, Homo sapiens
ccaaagtgattttaa

SEQ ID NO: 173897 - DNA, 15 bp, Homo sapiens
tccaaagtgatttta

SEQ ID NO: 173898 - DNA, 15 bp, Homo sapiens
ttccaaagtgatttt

SEQ ID NO: 173899 - DNA, 15 bp, Homo sapiens
cttccaaagtgattt

SEQ ID NO: 173900 - DNA, 15 bp, Homo sapiens
gcttccaaagtgatt

SEQ ID NO: 173901 - DNA, 15 bp, Homo sapiens
agcttccaaagtgat

SEQ ID NO: 173902 - DNA, 15 bp, Homo sapiens
aagcttccaaagtga

SEQ ID NO: 173903 - DNA, 15 bp, Homo sapiens
aaagcttccaaagtg

SEQ ID NO: 173904 - DNA, 15 bp, Homo sapiens
aaaagcttccaaagt

SEQ ID NO: 173905 - DNA, 15 bp, Homo sapiens
taaaagcttccaaag

SEQ ID NO: 173906 - DNA, 15 bp, Homo sapiens
ttaaaagcttccaaa

SEQ ID NO: 173907 - DNA, 15 bp, Homo sapiens
tttaaaagcttccaa

SEQ ID NO: 173908 - DNA, 15 bp, Homo sapiens
ttttaaaagcttcca

SEQ ID NO: 173909 - DNA, 15 bp, Homo sapiens
attttaaaagcttcc

SEQ ID NO: 173910 - DNA, 15 bp, Homo sapiens
tattttaaaagcttc

SEQ ID NO: 173911 - DNA, 15 bp, Homo sapiens
atattttaaaagctt

SEQ ID NO: 173912 - DNA, 15 bp, Homo sapiens
aatattttaaaagct

SEQ ID NO: 173913 - DNA, 15 bp, Homo sapiens
caatattttaaaagc

SEQ ID NO: 173914 - DNA, 15 bp, Homo sapiens
tcaatattttaaaag

SEQ ID NO: 173915 - DNA, 15 bp, Homo sapiens
atcaatattttaaaa

SEQ ID NO: 173916 - DNA, 15 bp, Homo sapiens
catcaatattttaaa

SEQ ID NO: 173917 - DNA, 15 bp, Homo sapiens
gcatcaatattttaa

SEQ ID NO: 173918 - DNA, 15 bp, Homo sapiens
ggcatcaatatttta

SEQ ID NO: 173919 - DNA, 15 bp, Homo sapiens
aggcatcaatatttt

SEQ ID NO: 173920 - DNA, 15 bp, Homo sapiens
caggcatcaatattt

SEQ ID NO: 173921 - DNA, 15 bp, Homo sapiens
ccaggcatcaatatt

SEQ ID NO: 173922 - DNA, 15 bp, Homo sapiens
cccaggcatcaatat

SEQ ID NO: 173923 - DNA, 15 bp, Homo sapiens
gcccaggcatcaata

SEQ ID NO: 173924 - DNA, 15 bp, Homo sapiens
ggcccaggcatcaat

SEQ ID NO: 173925 - DNA, 15 bp, Homo sapiens
aggcccaggcatcaa

SEQ ID NO: 173926 - DNA, 15 bp, Homo sapiens
gaggcccaggcatca

SEQ ID NO: 173927 - DNA, 15 bp, Homo sapiens
tgaggcccaggcatc

SEQ ID NO: 173928 - DNA, 15 bp, Homo sapiens
gtgaggcccaggcat

SEQ ID NO: 173929 - DNA, 15 bp, Homo sapiens
ggtgaggcccaggca

SEQ ID NO: 173930 - DNA, 15 bp, Homo sapiens
gggtgaggcccaggc

SEQ ID NO: 173931 - DNA, 15 bp, Homo sapiens
ggggtgaggcccagg

SEQ ID NO: 173932 - DNA, 15 bp, Homo sapiens
aggggtgaggcccag

SEQ ID NO: 173933 - DNA, 15 bp, Homo sapiens
taggggtgaggccca

SEQ ID NO: 173934 - DNA, 15 bp, Homo sapiens
ctaggggtgaggccc

SEQ ID NO: 173935 - DNA, 15 bp, Homo sapiens
cctaggggtgaggcc

SEQ ID NO: 173936 - DNA, 15 bp, Homo sapiens
gcctaggggtgaggc

SEQ ID NO: 173937 - DNA, 15 bp, Homo sapiens
tgcctaggggtgagg

SEQ ID NO: 173938 - DNA, 15 bp, Homo sapiens
atgcctaggggtgag

SEQ ID NO: 173939 - DNA, 15 bp, Homo sapiens
catgcctaggggtga

SEQ ID NO: 173940 - DNA, 15 bp, Homo sapiens
acatgcctaggggtg

SEQ ID NO: 173941 - DNA, 15 bp, Homo sapiens
cacatgcctaggggt

SEQ ID NO: 173942 - DNA, 15 bp, Homo sapiens
ccacatgcctagggg

SEQ ID NO: 173943 - DNA, 15 bp, Homo sapiens
tccacatgcctaggg

SEQ ID NO: 173944 - DNA, 15 bp, Homo sapiens
ctccacatgcctagg

SEQ ID NO: 173945 - DNA, 15 bp, Homo sapiens
actccacatgcctag

SEQ ID NO: 173946 - DNA, 15 bp, Homo sapiens
aactccacatgccta

SEQ ID NO: 173947 - DNA, 15 bp, Homo sapiens
taactccacatgcct

SEQ ID NO: 173948 - DNA, 15 bp, Homo sapiens
ttaactccacatgcc

SEQ ID NO: 173949 - DNA, 15 bp, Homo sapiens
attaactccacatgc

SEQ ID NO: 173950 - DNA, 15 bp, Homo sapiens
aattaactccacatg

SEQ ID NO: 173951 - DNA, 15 bp, Homo sapiens
caattaactccacat

SEQ ID NO: 173952 - DNA, 15 bp, Homo sapiens
ccaattaactccaca

SEQ ID NO: 173953 - DNA, 15 bp, Homo sapiens
accaattaactccac

SEQ ID NO: 173954 - DNA, 15 bp, Homo sapiens
gaccaattaactcca

SEQ ID NO: 173955 - DNA, 15 bp, Homo sapiens
agaccaattaactcc

SEQ ID NO: 173956 - DNA, 15 bp, Homo sapiens
tagaccaattaactc

SEQ ID NO: 173957 - DNA, 15 bp, Homo sapiens
ctagaccaattaact

SEQ ID NO: 173958 - DNA, 15 bp, Homo sapiens
cctagaccaattaac

SEQ ID NO: 173959 - DNA, 15 bp, Homo sapiens
ccctagaccaattaa

SEQ ID NO: 173960 - DNA, 15 bp, Homo sapiens
accctagaccaatta

SEQ ID NO: 173961 - DNA, 15 bp, Homo sapiens
taccctagaccaatt

SEQ ID NO: 173962 - DNA, 15 bp, Homo sapiens
ctaccctagaccaat

SEQ ID NO: 173963 - DNA, 15 bp, Homo sapiens
cctaccctagaccaa

SEQ ID NO: 173964 - DNA, 15 bp, Homo sapiens
ccctaccctagacca

SEQ ID NO: 173965 - DNA, 15 bp, Homo sapiens
gccctaccctagacc

SEQ ID NO: 173966 - DNA, 15 bp, Homo sapiens
ggccctaccctagac

SEQ ID NO: 173967 - DNA, 15 bp, Homo sapiens
tggccctaccctaga

SEQ ID NO: 173968 - DNA, 15 bp, Homo sapiens
ttggccctaccctag

SEQ ID NO: 173969 - DNA, 15 bp, Homo sapiens
tttggccctacccta

SEQ ID NO: 173970 - DNA, 15 bp, Homo sapiens
atttggccctaccct

SEQ ID NO: 173971 - DNA, 15 bp, Homo sapiens
gatttggccctaccc

SEQ ID NO: 173972 - DNA, 15 bp, Homo sapiens
tgatttggccctacc

SEQ ID NO: 173973 - DNA, 15 bp, Homo sapiens
gtgatttggccctac

SEQ ID NO: 173974 - DNA, 15 bp, Homo sapiens
agtgatttggcccta

SEQ ID NO: 173975 - DNA, 15 bp, Homo sapiens
cagtgatttggccct

SEQ ID NO: 173976 - DNA, 15 bp, Homo sapiens
ccagtgatttggccc

SEQ ID NO: 173977 - DNA, 15 bp, Homo sapiens
gccagtgatttggcc

SEQ ID NO: 173978 - DNA, 15 bp, Homo sapiens
ggccagtgatttggc

SEQ ID NO: 173979 - DNA, 15 bp, Homo sapiens
aggccagtgatttgg

SEQ ID NO: 173980 - DNA, 15 bp, Homo sapiens
aaggccagtgatttg

SEQ ID NO: 173981 - DNA, 15 bp, Homo sapiens
aaaggccagtgattt

SEQ ID NO: 173982 - DNA, 15 bp, Homo sapiens
aaaaggccagtgatt

SEQ ID NO: 173983 - DNA, 15 bp, Homo sapiens
gaaaaggccagtgat

SEQ ID NO: 173984 - DNA, 15 bp, Homo sapiens
agaaaaggccagtga

SEQ ID NO: 173985 - DNA, 15 bp, Homo sapiens
aagaaaaggccagtg

SEQ ID NO: 173986 - DNA, 15 bp, Homo sapiens
aaagaaaaggccagt

SEQ ID NO: 173987 - DNA, 15 bp, Homo sapiens
caaagaaaaggccag

SEQ ID NO: 173988 - DNA, 15 bp, Homo sapiens
tcaaagaaaaggcca

SEQ ID NO: 173989 - DNA, 15 bp, Homo sapiens
ctcaaagaaaaggcc

SEQ ID NO: 173990 - DNA, 15 bp, Homo sapiens
actcaaagaaaaggc

SEQ ID NO: 173991 - DNA, 15 bp, Homo sapiens
aactcaaagaaaagg

SEQ ID NO: 173992 - DNA, 15 bp, Homo sapiens
gaactcaaagaaaag

SEQ ID NO: 173993 - DNA, 15 bp, Homo sapiens
ggaactcaaagaaaa

SEQ ID NO: 173994 - DNA, 15 bp, Homo sapiens
gggaactcaaagaaa

SEQ ID NO: 173995 - DNA, 15 bp, Homo sapiens
agggaactcaaagaa

SEQ ID NO: 173996 - DNA, 15 bp, Homo sapiens
tagggaactcaaaga

SEQ ID NO: 173997 - DNA, 15 bp, Homo sapiens
ctagggaactcaaag

SEQ ID NO: 173998 - DNA, 15 bp, Homo sapiens
cctagggaactcaaa

SEQ ID NO: 173999 - DNA, 15 bp, Homo sapiens
acctagggaactcaa

SEQ ID NO: 174000 - DNA, 15 bp, Homo sapiens
cacctagggaactca

SEQ ID NO: 174001 - DNA, 15 bp, Homo sapiens
acacctagggaactc

SEQ ID NO: 174002 - DNA, 15 bp, Homo sapiens
aacacctagggaact

SEQ ID NO: 174003 - DNA, 15 bp, Homo sapiens
gaacacctagggaac

SEQ ID NO: 174004 - DNA, 15 bp, Homo sapiens
agaacacctagggaa

SEQ ID NO: 174005 - DNA, 15 bp, Homo sapiens
tagaacacctaggga

SEQ ID NO: 174006 - DNA, 15 bp, Homo sapiens
atagaacacctaggg

SEQ ID NO: 174007 - DNA, 15 bp, Homo sapiens
gatagaacacctagg

SEQ ID NO: 174008 - DNA, 15 bp, Homo sapiens
agatagaacacctag

SEQ ID NO: 174009 - DNA, 15 bp, Homo sapiens
tagatagaacaccta

SEQ ID NO: 174010 - DNA, 15 bp, Homo sapiens
ctagatagaacacct

SEQ ID NO: 174011 - DNA, 15 bp, Homo sapiens
gctagatagaacacc

SEQ ID NO: 174012 - DNA, 15 bp, Homo sapiens
cgctagatagaacac

SEQ ID NO: 174013 - DNA, 15 bp, Homo sapiens
acgctagatagaaca

SEQ ID NO: 174014 - DNA, 15 bp, Homo sapiens
cacgctagatagaac

SEQ ID NO: 174015 - DNA, 15 bp, Homo sapiens
gcacgctagatagaa

SEQ ID NO: 174016 - DNA, 15 bp, Homo sapiens
agcacgctagataga

SEQ ID NO: 174017 - DNA, 15 bp, Homo sapiens
aagcacgctagatag

SEQ ID NO: 174018 - DNA, 15 bp, Homo sapiens
gaagcacgctagata

SEQ ID NO: 174019 - DNA, 15 bp, Homo sapiens
ggaagcacgctagat

SEQ ID NO: 174020 - DNA, 15 bp, Homo sapiens
tggaagcacgctaga

SEQ ID NO: 174021 - DNA, 15 bp, Homo sapiens
ttggaagcacgctag

SEQ ID NO: 174022 - DNA, 15 bp, Homo sapiens
cttggaagcacgcta

SEQ ID NO: 174023 - DNA, 15 bp, Homo sapiens
tcttggaagcacgct

SEQ ID NO: 174024 - DNA, 15 bp, Homo sapiens
gtcttggaagcacgc

SEQ ID NO: 174025 - DNA, 15 bp, Homo sapiens
agtcttggaagcacg

SEQ ID NO: 174026 - DNA, 15 bp, Homo sapiens
cagtcttggaagcac

SEQ ID NO: 174027 - DNA, 15 bp, Homo sapiens
tcagtcttggaagca

SEQ ID NO: 174028 - DNA, 15 bp, Homo sapiens
ctcagtcttggaagc

SEQ ID NO: 174029 - DNA, 15 bp, Homo sapiens
tctcagtcttggaag

SEQ ID NO: 174030 - DNA, 15 bp, Homo sapiens
ttctcagtcttggaa

SEQ ID NO: 174031 - DNA, 15 bp, Homo sapiens
gttctcagtcttgga

SEQ ID NO: 174032 - DNA, 15 bp, Homo sapiens
ggttctcagtcttgg

SEQ ID NO: 174033 - DNA, 15 bp, Homo sapiens
tggttctcagtcttg

SEQ ID NO: 174034 - DNA, 15 bp, Homo sapiens
ctggttctcagtctt

SEQ ID NO: 174035 - DNA, 15 bp, Homo sapiens
actggttctcagtct

SEQ ID NO: 174036 - DNA, 15 bp, Homo sapiens
tactggttctcagtc

SEQ ID NO: 174037 - DNA, 15 bp, Homo sapiens
ctactggttctcagt

SEQ ID NO: 174038 - DNA, 15 bp, Homo sapiens
tctactggttctcag

SEQ ID NO: 174039 - DNA, 15 bp, Homo sapiens
atctactggttctca

SEQ ID NO: 174040 - DNA, 15 bp, Homo sapiens
aatctactggttctc

SEQ ID NO: 174041 - DNA, 15 bp, Homo sapiens
caatctactggttct

SEQ ID NO: 174042 - DNA, 15 bp, Homo sapiens
acaatctactggttc

SEQ ID NO: 174043 - DNA, 15 bp, Homo sapiens
aacaatctactggtt

SEQ ID NO: 174044 - DNA, 15 bp, Homo sapiens
gaacaatctactggt

SEQ ID NO: 174045 - DNA, 15 bp, Homo sapiens
agaacaatctactgg

SEQ ID NO: 174046 - DNA, 15 bp, Homo sapiens
aagaacaatctactg

SEQ ID NO: 174047 - DNA, 15 bp, Homo sapiens
aaagaacaatctact

SEQ ID NO: 174048 - DNA, 15 bp, Homo sapiens
gaaagaacaatctac

SEQ ID NO: 174049 - DNA, 15 bp, Homo sapiens
agaaagaacaatcta

SEQ ID NO: 174050 - DNA, 15 bp, Homo sapiens
aagaaagaacaatct

SEQ ID NO: 174051 - DNA, 15 bp, Homo sapiens
taagaaagaacaatc

SEQ ID NO: 174052 - DNA, 15 bp, Homo sapiens
ataagaaagaacaat

SEQ ID NO: 174053 - DNA, 15 bp, Homo sapiens
aataagaaagaacaa

SEQ ID NO: 174054 - DNA, 15 bp, Homo sapiens
aaataagaaagaaca

SEQ ID NO: 174055 - DNA, 15 bp, Homo sapiens
aaaataagaaagaac

SEQ ID NO: 174056 - DNA, 15 bp, Homo sapiens
aaaaataagaaagaa

SEQ ID NO: 174057 - DNA, 15 bp, Homo sapiens
aaaaaataagaaaga

SEQ ID NO: 174058 - DNA, 15 bp, Homo sapiens
aaaaaaataagaaag

SEQ ID NO: 174059 - DNA, 15 bp, Homo sapiens
ctaaaaaaataagaa

SEQ ID NO: 174060 - DNA, 15 bp, Homo sapiens
actaaaaaaataaga

SEQ ID NO: 174061 - DNA, 15 bp, Homo sapiens
cactaaaaaaataag

SEQ ID NO: 174062 - DNA, 15 bp, Homo sapiens
tcactaaaaaaataa

SEQ ID NO: 174063 - DNA, 15 bp, Homo sapiens
gtcactaaaaaaata

SEQ ID NO: 174064 - DNA, 15 bp, Homo sapiens
agtcactaaaaaaat

SEQ ID NO: 174065 - DNA, 15 bp, Homo sapiens
gagtcactaaaaaaa

SEQ ID NO: 174066 - DNA, 15 bp, Homo sapiens
tgagtcactaaaaaa

SEQ ID NO: 174067 - DNA, 15 bp, Homo sapiens
atgagtcactaaaaa

SEQ ID NO: 174068 - DNA, 15 bp, Homo sapiens
catgagtcactaaaa

SEQ ID NO: 174069 - DNA, 15 bp, Homo sapiens
tcatgagtcactaaa

SEQ ID NO: 174070 - DNA, 15 bp, Homo sapiens
atcatgagtcactaa

SEQ ID NO: 174071 - DNA, 15 bp, Homo sapiens
gatcatgagtcacta

SEQ ID NO: 174072 - DNA, 15 bp, Homo sapiens
ggatcatgagtcact

SEQ ID NO: 174073 - DNA, 15 bp, Homo sapiens
tggatcatgagtcac

SEQ ID NO: 174074 - DNA, 15 bp, Homo sapiens
atggatcatgagtca

SEQ ID NO: 174075 - DNA, 15 bp, Homo sapiens
aatggatcatgagtc

SEQ ID NO: 174076 - DNA, 15 bp, Homo sapiens
gaatggatcatgagt

SEQ ID NO: 174077 - DNA, 15 bp, Homo sapiens
agaatggatcatgag

SEQ ID NO: 174078 - DNA, 15 bp, Homo sapiens
gagaatggatcatga

SEQ ID NO: 174079 - DNA, 15 bp, Homo sapiens
ggagaatggatcatg

SEQ ID NO: 174080 - DNA, 15 bp, Homo sapiens
tggagaatggatcat

SEQ ID NO: 174081 - DNA, 15 bp, Homo sapiens
atggagaatggatca

SEQ ID NO: 174082 - DNA, 15 bp, Homo sapiens
aatggagaatggatc

SEQ ID NO: 174083 - DNA, 15 bp, Homo sapiens
aaatggagaatggat

SEQ ID NO: 174084 - DNA, 15 bp, Homo sapiens
aaaatggagaatgga

SEQ ID NO: 174085 - DNA, 15 bp, Homo sapiens
gaaaatggagaatgg

SEQ ID NO: 174086 - DNA, 15 bp, Homo sapiens
ggaaaatggagaatg

SEQ ID NO: 174087 - DNA, 15 bp, Homo sapiens
aggaaaatggagaat

SEQ ID NO: 174088 - DNA, 15 bp, Homo sapiens
aaggaaaatggagaa

SEQ ID NO: 174089 - DNA, 15 bp, Homo sapiens
taaggaaaatggaga

SEQ ID NO: 174090 - DNA, 15 bp, Homo sapiens
gtaaggaaaatggag

SEQ ID NO: 174091 - DNA, 15 bp, Homo sapiens
agtaaggaaaatgga

SEQ ID NO: 174092 - DNA, 15 bp, Homo sapiens
gagtaaggaaaatgg

SEQ ID NO: 174093 - DNA, 15 bp, Homo sapiens
ggagtaaggaaaatg

SEQ ID NO: 174094 - DNA, 15 bp, Homo sapiens
aggagtaaggaaaat

SEQ ID NO: 174095 - DNA, 15 bp, Homo sapiens
taggagtaaggaaaa

SEQ ID NO: 174096 - DNA, 15 bp, Homo sapiens
ataggagtaaggaaa

SEQ ID NO: 174097 - DNA, 15 bp, Homo sapiens
gataggagtaaggaa

SEQ ID NO: 174098 - DNA, 15 bp, Homo sapiens
agataggagtaagga

SEQ ID NO: 174099 - DNA, 15 bp, Homo sapiens
gagataggagtaagg

SEQ ID NO: 174100 - DNA, 15 bp, Homo sapiens
tgagataggagtaag

SEQ ID NO: 174101 - DNA, 15 bp, Homo sapiens
ttgagataggagtaa

SEQ ID NO: 174102 - DNA, 15 bp, Homo sapiens
cttgagataggagta

SEQ ID NO: 174103 - DNA, 15 bp, Homo sapiens
gcttgagataggagt

SEQ ID NO: 174104 - DNA, 15 bp, Homo sapiens
ggcttgagataggag

SEQ ID NO: 174105 - DNA, 15 bp, Homo sapiens
aggcttgagatagga

SEQ ID NO: 174106 - DNA, 15 bp, Homo sapiens
aaggcttgagatagg

SEQ ID NO: 174107 - DNA, 15 bp, Homo sapiens
caaggcttgagatag

SEQ ID NO: 174108 - DNA, 15 bp, Homo sapiens
tcaaggcttgagata

SEQ ID NO: 174109 - DNA, 15 bp, Homo sapiens
atcaaggcttgagat

SEQ ID NO: 174110 - DNA, 15 bp, Homo sapiens
aatcaaggcttgaga

SEQ ID NO: 174111 - DNA, 15 bp, Homo sapiens
aaatcaaggcttgag

SEQ ID NO: 174112 - DNA, 15 bp, Homo sapiens
aaaatcaaggcttga

SEQ ID NO: 174113 - DNA, 15 bp, Homo sapiens
caaaatcaaggcttg

SEQ ID NO: 174114 - DNA, 15 bp, Homo sapiens
ccaaaatcaaggctt

SEQ ID NO: 174115 - DNA, 15 bp, Homo sapiens
tccaaaatcaaggct

SEQ ID NO: 174116 - DNA, 15 bp, Homo sapiens
ttccaaaatcaaggc

SEQ ID NO: 174117 - DNA, 15 bp, Homo sapiens
gttccaaaatcaagg

SEQ ID NO: 174118 - DNA, 15 bp, Homo sapiens
tgttccaaaatcaag

SEQ ID NO: 174119 - DNA, 15 bp, Homo sapiens
atgttccaaaatcaa

SEQ ID NO: 174120 - DNA, 15 bp, Homo sapiens
catgttccaaaatca

SEQ ID NO: 174121 - DNA, 15 bp, Homo sapiens
acatgttccaaaatc

SEQ ID NO: 174122 - DNA, 15 bp, Homo sapiens
tacatgttccaaaat

SEQ ID NO: 174123 - DNA, 15 bp, Homo sapiens
gtacatgttccaaaa

SEQ ID NO: 174124 - DNA, 15 bp, Homo sapiens
agtacatgttccaaa

SEQ ID NO: 174125 - DNA, 15 bp, Homo sapiens
aagtacatgttccaa

SEQ ID NO: 174126 - DNA, 15 bp, Homo sapiens
aaagtacatgttcca

SEQ ID NO: 174127 - DNA, 15 bp, Homo sapiens
gaaagtacatgttcc

SEQ ID NO: 174128 - DNA, 15 bp, Homo sapiens
agaaagtacatgttc

SEQ ID NO: 174129 - DNA, 15 bp, Homo sapiens
tagaaagtacatgtt

SEQ ID NO: 174130 - DNA, 15 bp, Homo sapiens
gtagaaagtacatgt

SEQ ID NO: 174131 - DNA, 15 bp, Homo sapiens
tgtagaaagtacatg

SEQ ID NO: 174132 - DNA, 15 bp, Homo sapiens
gtgtagaaagtacat

SEQ ID NO: 174133 - DNA, 15 bp, Homo sapiens
tgtgtagaaagtaca

SEQ ID NO: 174134 - DNA, 15 bp, Homo sapiens
gtgtgtagaaagtac

SEQ ID NO: 174135 - DNA, 15 bp, Homo sapiens
agtgtgtagaaagta

SEQ ID NO: 174136 - DNA, 15 bp, Homo sapiens
cagtgtgtagaaagt

SEQ ID NO: 174137 - DNA, 15 bp, Homo sapiens
tcagtgtgtagaaag

SEQ ID NO: 174138 - DNA, 15 bp, Homo sapiens
ttcagtgtgtagaaa

SEQ ID NO: 174139 - DNA, 15 bp, Homo sapiens
attcagtgtgtagaa

SEQ ID NO: 174140 - DNA, 15 bp, Homo sapiens
tattcagtgtgtaga

SEQ ID NO: 174141 - DNA, 15 bp, Homo sapiens
ctattcagtgtgtag

SEQ ID NO: 174142 - DNA, 15 bp, Homo sapiens
actattcagtgtgta

SEQ ID NO: 174143 - DNA, 15 bp, Homo sapiens
aactattcagtgtgt

SEQ ID NO: 174144 - DNA, 15 bp, Homo sapiens
aaactattcagtgtg

SEQ ID NO: 174145 - DNA, 15 bp, Homo sapiens
gaaactattcagtgt

SEQ ID NO: 174146 - DNA, 15 bp, Homo sapiens
agaaactattcagtg

SEQ ID NO: 174147 - DNA, 15 bp, Homo sapiens
tagaaactattcagt

SEQ ID NO: 174148 - DNA, 15 bp, Homo sapiens
ttagaaactattcag

SEQ ID NO: 174149 - DNA, 15 bp, Homo sapiens
cttagaaactattca

SEQ ID NO: 174150 - DNA, 15 bp, Homo sapiens
ccttagaaactattc

SEQ ID NO: 174151 - DNA, 15 bp, Homo sapiens
accttagaaactatt

SEQ ID NO: 174152 - DNA, 15 bp, Homo sapiens
taccttagaaactat

SEQ ID NO: 174153 - DNA, 15 bp, Homo sapiens
ttaccttagaaacta

SEQ ID NO: 174154 - DNA, 15 bp, Homo sapiens
attaccttagaaact

SEQ ID NO: 174155 - DNA, 15 bp, Homo sapiens
cattaccttagaaac

SEQ ID NO: 174156 - DNA, 15 bp, Homo sapiens
acattaccttagaaa

SEQ ID NO: 174157 - DNA, 15 bp, Homo sapiens
aacattaccttagaa

SEQ ID NO: 174158 - DNA, 15 bp, Homo sapiens
taacattaccttaga

SEQ ID NO: 174159 - DNA, 15 bp, Homo sapiens
gtaacattaccttag

SEQ ID NO: 174160 - DNA, 15 bp, Homo sapiens
agtaacattacctta

SEQ ID NO: 174161 - DNA, 15 bp, Homo sapiens
aagtaacattacctt

SEQ ID NO: 174162 - DNA, 15 bp, Homo sapiens
taagtaacattacct

SEQ ID NO: 174163 - DNA, 15 bp, Homo sapiens
ctaagtaacattacc

SEQ ID NO: 174164 - DNA, 15 bp, Homo sapiens
tctaagtaacattac

SEQ ID NO: 174165 - DNA, 15 bp, Homo sapiens
ttctaagtaacatta

SEQ ID NO: 174166 - DNA, 15 bp, Homo sapiens
gttctaagtaacatt

SEQ ID NO: 174167 - DNA, 15 bp, Homo sapiens
tgttctaagtaacat

SEQ ID NO: 174168 - DNA, 15 bp, Homo sapiens
ttgttctaagtaaca

SEQ ID NO: 174169 - DNA, 15 bp, Homo sapiens
attgttctaagtaac

SEQ ID NO: 174170 - DNA, 15 bp, Homo sapiens
tattgttctaagtaa

SEQ ID NO: 174171 - DNA, 15 bp, Homo sapiens
ctattgttctaagta

SEQ ID NO: 174172 - DNA, 15 bp, Homo sapiens
tctattgttctaagt

SEQ ID NO: 174173 - DNA, 15 bp, Homo sapiens
ctctattgttctaag

SEQ ID NO: 174174 - DNA, 15 bp, Homo sapiens
actctattgttctaa

SEQ ID NO: 174175 - DNA, 15 bp, Homo sapiens
gactctattgttcta

SEQ ID NO: 174176 - DNA, 15 bp, Homo sapiens
tgactctattgttct

SEQ ID NO: 174177 - DNA, 15 bp, Homo sapiens
gtgactctattgttc

SEQ ID NO: 174178 - DNA, 15 bp, Homo sapiens
cgtgactctattgtt

SEQ ID NO: 174179 - DNA, 15 bp, Homo sapiens
acgtgactctattgt

SEQ ID NO: 174180 - DNA, 15 bp, Homo sapiens
tacgtgactctattg

SEQ ID NO: 174181 - DNA, 15 bp, Homo sapiens
ctacgtgactctatt

SEQ ID NO: 174182 - DNA, 15 bp, Homo sapiens
actacgtgactctat

SEQ ID NO: 174183 - DNA, 15 bp, Homo sapiens
aactacgtgactcta

SEQ ID NO: 174184 - DNA, 15 bp, Homo sapiens
aaactacgtgactct

SEQ ID NO: 174185 - DNA, 15 bp, Homo sapiens
gaaactacgtgactc

SEQ ID NO: 174186 - DNA, 15 bp, Homo sapiens
tgaaactacgtgact

SEQ ID NO: 174187 - DNA, 15 bp, Homo sapiens
ttgaaactacgtgac

SEQ ID NO: 174188 - DNA, 15 bp, Homo sapiens
cttgaaactacgtga

SEQ ID NO: 174189 - DNA, 15 bp, Homo sapiens
tcttgaaactacgtg

SEQ ID NO: 174190 - DNA, 15 bp, Homo sapiens
ttcttgaaactacgt

SEQ ID NO: 174191 - DNA, 15 bp, Homo sapiens
attcttgaaactacg

SEQ ID NO: 174192 - DNA, 15 bp, Homo sapiens
cattcttgaaactac

SEQ ID NO: 174193 - DNA, 15 bp, Homo sapiens
ccattcttgaaacta

SEQ ID NO: 174194 - DNA, 15 bp, Homo sapiens
cccattcttgaaact

SEQ ID NO: 174195 - DNA, 15 bp, Homo sapiens
gcccattcttgaaac

SEQ ID NO: 174196 - DNA, 15 bp, Homo sapiens
agcccattcttgaaa

SEQ ID NO: 174197 - DNA, 15 bp, Homo sapiens
aagcccattcttgaa

SEQ ID NO: 174198 - DNA, 15 bp, Homo sapiens
aaagcccattcttga

SEQ ID NO: 174199 - DNA, 15 bp, Homo sapiens
caaagcccattcttg

SEQ ID NO: 174200 - DNA, 15 bp, Homo sapiens
ccaaagcccattctt

SEQ ID NO: 174201 - DNA, 15 bp, Homo sapiens
tccaaagcccattct

SEQ ID NO: 174202 - DNA, 15 bp, Homo sapiens
ctccaaagcccattc

SEQ ID NO: 174203 - DNA, 15 bp, Homo sapiens
actccaaagcccatt

SEQ ID NO: 174204 - DNA, 15 bp, Homo sapiens
tactccaaagcccat

SEQ ID NO: 174205 - DNA, 15 bp, Homo sapiens
ttactccaaagccca

SEQ ID NO: 174206 - DNA, 15 bp, Homo sapiens
attactccaaagccc

SEQ ID NO: 174207 - DNA, 15 bp, Homo sapiens
tattactccaaagcc

SEQ ID NO: 174208 - DNA, 15 bp, Homo sapiens
ctattactccaaagc

SEQ ID NO: 174209 - DNA, 15 bp, Homo sapiens
tctattactccaaag

SEQ ID NO: 174210 - DNA, 15 bp, Homo sapiens
ttctattactccaaa

SEQ ID NO: 174211 - DNA, 15 bp, Homo sapiens
tttctattactccaa

SEQ ID NO: 174212 - DNA, 15 bp, Homo sapiens
atttctattactcca

SEQ ID NO: 174213 - DNA, 15 bp, Homo sapiens
gatttctattactcc

SEQ ID NO: 174214 - DNA, 15 bp, Homo sapiens
ggatttctattactc

SEQ ID NO: 174215 - DNA, 15 bp, Homo sapiens
tggatttctattact

SEQ ID NO: 174216 - DNA, 15 bp, Homo sapiens
ttggatttctattac

SEQ ID NO: 174217 - DNA, 15 bp, Homo sapiens
cttggatttctatta

SEQ ID NO: 174218 - DNA, 15 bp, Homo sapiens
acttggatttctatt

SEQ ID NO: 174219 - DNA, 15 bp, Homo sapiens
cacttggatttctat

SEQ ID NO: 174220 - DNA, 15 bp, Homo sapiens
acacttggatttcta

SEQ ID NO: 174221 - DNA, 15 bp, Homo sapiens
cacacttggatttct

SEQ ID NO: 174222 - DNA, 15 bp, Homo sapiens
ccacacttggatttc

SEQ ID NO: 174223 - DNA, 15 bp, Homo sapiens
cccacacttggattt

SEQ ID NO: 174224 - DNA, 15 bp, Homo sapiens
acccacacttggatt

SEQ ID NO: 174225 - DNA, 15 bp, Homo sapiens
gacccacacttggat

SEQ ID NO: 174226 - DNA, 15 bp, Homo sapiens
ggacccacacttgga

SEQ ID NO: 174227 - DNA, 15 bp, Homo sapiens
aggacccacacttgg

SEQ ID NO: 174228 - DNA, 15 bp, Homo sapiens
aaggacccacacttg

SEQ ID NO: 174229 - DNA, 15 bp, Homo sapiens
aaaggacccacactt

SEQ ID NO: 174230 - DNA, 15 bp, Homo sapiens
aaaaggacccacact

SEQ ID NO: 174231 - DNA, 15 bp, Homo sapiens
aaaaaggacccacac

SEQ ID NO: 174232 - DNA, 15 bp, Homo sapiens
gaaaaaggacccaca

SEQ ID NO: 174233 - DNA, 15 bp, Homo sapiens
agaaaaaggacccac

SEQ ID NO: 174234 - DNA, 15 bp, Homo sapiens
cagaaaaaggaccca

SEQ ID NO: 174235 - DNA, 15 bp, Homo sapiens
gcagaaaaaggaccc

SEQ ID NO: 174236 - DNA, 15 bp, Homo sapiens
ggcagaaaaaggacc

SEQ ID NO: 174237 - DNA, 15 bp, Homo sapiens
gggcagaaaaaggac

SEQ ID NO: 174238 - DNA, 15 bp, Homo sapiens
ggggcagaaaaagga

SEQ ID NO: 174239 - DNA, 15 bp, Homo sapiens
aggggcagaaaaagg

SEQ ID NO: 174240 - DNA, 15 bp, Homo sapiens
caggggcagaaaaag

SEQ ID NO: 174241 - DNA, 15 bp, Homo sapiens
gcaggggcagaaaaa

SEQ ID NO: 174242 - DNA, 15 bp, Homo sapiens
agcaggggcagaaaa

SEQ ID NO: 174243 - DNA, 15 bp, Homo sapiens
cagcaggggcagaaa

SEQ ID NO: 174244 - DNA, 15 bp, Homo sapiens
gcagcaggggcagaa

SEQ ID NO: 174245 - DNA, 15 bp, Homo sapiens
agcagcaggggcaga

SEQ ID NO: 174246 - DNA, 15 bp, Homo sapiens
aagcagcaggggcag

SEQ ID NO: 174247 - DNA, 15 bp, Homo sapiens
caagcagcaggggca

SEQ ID NO: 174248 - DNA, 15 bp, Homo sapiens
acaagcagcaggggc

SEQ ID NO: 174249 - DNA, 15 bp, Homo sapiens
cacaagcagcagggg

SEQ ID NO: 174250 - DNA, 15 bp, Homo sapiens
acacaagcagcaggg

SEQ ID NO: 174251 - DNA, 15 bp, Homo sapiens
cacacaagcagcagg

SEQ ID NO: 174252 - DNA, 15 bp, Homo sapiens
tcacacaagcagcag

SEQ ID NO: 174253 - DNA, 15 bp, Homo sapiens
ctcacacaagcagca

SEQ ID NO: 174254 - DNA, 15 bp, Homo sapiens
gctcacacaagcagc

SEQ ID NO: 174255 - DNA, 15 bp, Homo sapiens
agctcacacaagcag

SEQ ID NO: 174256 - DNA, 15 bp, Homo sapiens
aagctcacacaagca

SEQ ID NO: 174257 - DNA, 15 bp, Homo sapiens
caagctcacacaagc

SEQ ID NO: 174258 - DNA, 15 bp, Homo sapiens
tcaagctcacacaag

SEQ ID NO: 174259 - DNA, 15 bp, Homo sapiens
ttcaagctcacacaa

SEQ ID NO: 174260 - DNA, 15 bp, Homo sapiens
gttcaagctcacaca

SEQ ID NO: 174261 - DNA, 15 bp, Homo sapiens
tgttcaagctcacac

SEQ ID NO: 174262 - DNA, 15 bp, Homo sapiens
ttgttcaagctcaca

SEQ ID NO: 174263 - DNA, 15 bp, Homo sapiens
cttgttcaagctcac

SEQ ID NO: 174264 - DNA, 15 bp, Homo sapiens
acttgttcaagctca

SEQ ID NO: 174265 - DNA, 15 bp, Homo sapiens
tacttgttcaagctc

SEQ ID NO: 174266 - DNA, 15 bp, Homo sapiens
ttacttgttcaagct

SEQ ID NO: 174267 - DNA, 15 bp, Homo sapiens
gttacttgttcaagc

SEQ ID NO: 174268 - DNA, 15 bp, Homo sapiens
ggttacttgttcaag

SEQ ID NO: 174269 - DNA, 15 bp, Homo sapiens
aggttacttgttcaa

SEQ ID NO: 174270 - DNA, 15 bp, Homo sapiens
taggttacttgttca

SEQ ID NO: 174271 - DNA, 15 bp, Homo sapiens
ttaggttacttgttc

SEQ ID NO: 174272 - DNA, 15 bp, Homo sapiens
gttaggttacttgtt

SEQ ID NO: 174273 - DNA, 15 bp, Homo sapiens
agttaggttacttgt

SEQ ID NO: 174274 - DNA, 15 bp, Homo sapiens
aagttaggttacttg

SEQ ID NO: 174275 - DNA, 15 bp, Homo sapiens
gaagttaggttactt

SEQ ID NO: 174276 - DNA, 15 bp, Homo sapiens
agaagttaggttact

SEQ ID NO: 174277 - DNA, 15 bp, Homo sapiens
gagaagttaggttac

SEQ ID NO: 174278 - DNA, 15 bp, Homo sapiens
agagaagttaggtta

SEQ ID NO: 174279 - DNA, 15 bp, Homo sapiens
tagagaagttaggtt

SEQ ID NO: 174280 - DNA, 15 bp, Homo sapiens
atagagaagttaggt

SEQ ID NO: 174281 - DNA, 15 bp, Homo sapiens
aatagagaagttagg

SEQ ID NO: 174282 - DNA, 15 bp, Homo sapiens
aaatagagaagttag

SEQ ID NO: 174283 - DNA, 15 bp, Homo sapiens
gaaatagagaagtta

SEQ ID NO: 174284 - DNA, 15 bp, Homo sapiens
tgaaatagagaagtt

SEQ ID NO: 174285 - DNA, 15 bp, Homo sapiens
gtgaaatagagaagt

SEQ ID NO: 174286 - DNA, 15 bp, Homo sapiens
tgtgaaatagagaag

SEQ ID NO: 174287 - DNA, 15 bp, Homo sapiens
ctgtgaaatagagaa

SEQ ID NO: 174288 - DNA, 15 bp, Homo sapiens
actgtgaaatagaga

SEQ ID NO: 174289 - DNA, 15 bp, Homo sapiens
gactgtgaaatagag

SEQ ID NO: 174290 - DNA, 15 bp, Homo sapiens
agactgtgaaataga

SEQ ID NO: 174291 - DNA, 15 bp, Homo sapiens
gagactgtgaaatag

SEQ ID NO: 174292 - DNA, 15 bp, Homo sapiens
tgagactgtgaaata

SEQ ID NO: 174293 - DNA, 15 bp, Homo sapiens
atgagactgtgaaat

SEQ ID NO: 174294 - DNA, 15 bp, Homo sapiens
catgagactgtgaaa

SEQ ID NO: 174295 - DNA, 15 bp, Homo sapiens
gcatgagactgtgaa

SEQ ID NO: 174296 - DNA, 15 bp, Homo sapiens
tgcatgagactgtga

SEQ ID NO: 174297 - DNA, 15 bp, Homo sapiens
ttgcatgagactgtg

SEQ ID NO: 174298 - DNA, 15 bp, Homo sapiens
tttgcatgagactgt

SEQ ID NO: 174299 - DNA, 15 bp, Homo sapiens
ttttgcatgagactg

SEQ ID NO: 174300 - DNA, 15 bp, Homo sapiens
attttgcatgagact

SEQ ID NO: 174301 - DNA, 15 bp, Homo sapiens
tattttgcatgagac

SEQ ID NO: 174302 - DNA, 15 bp, Homo sapiens
ctattttgcatgaga

SEQ ID NO: 174303 - DNA, 15 bp, Homo sapiens
cctattttgcatgag

SEQ ID NO: 174304 - DNA, 15 bp, Homo sapiens
ccctattttgcatga

SEQ ID NO: 174305 - DNA, 15 bp, Homo sapiens
tccctattttgcatg

SEQ ID NO: 174306 - DNA, 15 bp, Homo sapiens
atccctattttgcat

SEQ ID NO: 174307 - DNA, 15 bp, Homo sapiens
aatccctattttgca

SEQ ID NO: 174308 - DNA, 15 bp, Homo sapiens
aaatccctattttgc

SEQ ID NO: 174309 - DNA, 15 bp, Homo sapiens
aaaatccctattttg

SEQ ID NO: 174310 - DNA, 15 bp, Homo sapiens
taaaatccctatttt

SEQ ID NO: 174311 - DNA, 15 bp, Homo sapiens
ttaaaatccctattt

SEQ ID NO: 174312 - DNA, 15 bp, Homo sapiens
attaaaatccctatt

SEQ ID NO: 174313 - DNA, 15 bp, Homo sapiens
aattaaaatccctat

SEQ ID NO: 174314 - DNA, 15 bp, Homo sapiens
gaattaaaatcccta

SEQ ID NO: 174315 - DNA, 15 bp, Homo sapiens
agaattaaaatccct

SEQ ID NO: 174316 - DNA, 15 bp, Homo sapiens
tagaattaaaatccc

SEQ ID NO: 174317 - DNA, 15 bp, Homo sapiens
gtagaattaaaatcc

SEQ ID NO: 174318 - DNA, 15 bp, Homo sapiens
ggtagaattaaaatc

SEQ ID NO: 174319 - DNA, 15 bp, Homo sapiens
aggtagaattaaaat

SEQ ID NO: 174320 - DNA, 15 bp, Homo sapiens
aaggtagaattaaaa

SEQ ID NO: 174321 - DNA, 15 bp, Homo sapiens
caaggtagaattaaa

SEQ ID NO: 174322 - DNA, 15 bp, Homo sapiens
gcaaggtagaattaa

SEQ ID NO: 174323 - DNA, 15 bp, Homo sapiens
tgcaaggtagaatta

SEQ ID NO: 174324 - DNA, 15 bp, Homo sapiens
atgcaaggtagaatt

SEQ ID NO: 174325 - DNA, 15 bp, Homo sapiens
aatgcaaggtagaat

SEQ ID NO: 174326 - DNA, 15 bp, Homo sapiens
caatgcaaggtagaa

SEQ ID NO: 174327 - DNA, 15 bp, Homo sapiens
acaatgcaaggtaga

SEQ ID NO: 174328 - DNA, 15 bp, Homo sapiens
aacaatgcaaggtag

SEQ ID NO: 174329 - DNA, 15 bp, Homo sapiens
aaacaatgcaaggta

SEQ ID NO: 174330 - DNA, 15 bp, Homo sapiens
aaaacaatgcaaggt

SEQ ID NO: 174331 - DNA, 15 bp, Homo sapiens
caaaacaatgcaagg

SEQ ID NO: 174332 - DNA, 15 bp, Homo sapiens
tcaaaacaatgcaag

SEQ ID NO: 174333 - DNA, 15 bp, Homo sapiens
ctcaaaacaatgcaa

SEQ ID NO: 174334 - DNA, 15 bp, Homo sapiens
cctcaaaacaatgca

SEQ ID NO: 174335 - DNA, 15 bp, Homo sapiens
tcctcaaaacaatgc

SEQ ID NO: 174336 - DNA, 15 bp, Homo sapiens
ttcctcaaaacaatg

SEQ ID NO: 174337 - DNA, 15 bp, Homo sapiens
gttcctcaaaacaat

SEQ ID NO: 174338 - DNA, 15 bp, Homo sapiens
tgttcctcaaaacaa

SEQ ID NO: 174339 - DNA, 15 bp, Homo sapiens
ttgttcctcaaaaca

SEQ ID NO: 174340 - DNA, 15 bp, Homo sapiens
tttgttcctcaaaac

SEQ ID NO: 174341 - DNA, 15 bp, Homo sapiens
ttttgttcctcaaaa

SEQ ID NO: 174342 - DNA, 15 bp, Homo sapiens
attttgttcctcaaa

SEQ ID NO: 174343 - DNA, 15 bp, Homo sapiens
aattttgttcctcaa

SEQ ID NO: 174344 - DNA, 15 bp, Homo sapiens
taattttgttcctca

SEQ ID NO: 174345 - DNA, 15 bp, Homo sapiens
ctaattttgttcctc

SEQ ID NO: 174346 - DNA, 15 bp, Homo sapiens
actaattttgttcct

SEQ ID NO: 174347 - DNA, 15 bp, Homo sapiens
aactaattttgttcc

SEQ ID NO: 174348 - DNA, 15 bp, Homo sapiens
aaactaattttgttc

SEQ ID NO: 174349 - DNA, 15 bp, Homo sapiens
gaaactaattttgtt

SEQ ID NO: 174350 - DNA, 15 bp, Homo sapiens
tgaaactaattttgt

SEQ ID NO: 174351 - DNA, 15 bp, Homo sapiens
atgaaactaattttg

SEQ ID NO: 174352 - DNA, 15 bp, Homo sapiens
tatgaaactaatttt

SEQ ID NO: 174353 - DNA, 15 bp, Homo sapiens
atatgaaactaattt

SEQ ID NO: 174354 - DNA, 15 bp, Homo sapiens
gatatgaaactaatt

SEQ ID NO: 174355 - DNA, 15 bp, Homo sapiens
tgatatgaaactaat

SEQ ID NO: 174356 - DNA, 15 bp, Homo sapiens
atgatatgaaactaa

SEQ ID NO: 174357 - DNA, 15 bp, Homo sapiens
tatgatatgaaacta

SEQ ID NO: 174358 - DNA, 15 bp, Homo sapiens
atatgatatgaaact

SEQ ID NO: 174359 - DNA, 15 bp, Homo sapiens
aatatgatatgaaac

SEQ ID NO: 174360 - DNA, 15 bp, Homo sapiens
taatatgatatgaaa

SEQ ID NO: 174361 - DNA, 15 bp, Homo sapiens
ttaatatgatatgaa

SEQ ID NO: 174362 - DNA, 15 bp, Homo sapiens
attaatatgatatga

SEQ ID NO: 174363 - DNA, 15 bp, Homo sapiens
aattaatatgatatg

SEQ ID NO: 174364 - DNA, 15 bp, Homo sapiens
taattaatatgatat

SEQ ID NO: 174365 - DNA, 15 bp, Homo sapiens
gtaattaatatgata

SEQ ID NO: 174366 - DNA, 15 bp, Homo sapiens
tgtaattaatatgat

SEQ ID NO: 174367 - DNA, 15 bp, Homo sapiens
atgtaattaatatga

SEQ ID NO: 174368 - DNA, 15 bp, Homo sapiens
catgtaattaatatg

SEQ ID NO: 174369 - DNA, 15 bp, Homo sapiens
acatgtaattaatat

SEQ ID NO: 174370 - DNA, 15 bp, Homo sapiens
aacatgtaattaata

SEQ ID NO: 174371 - DNA, 15 bp, Homo sapiens
taacatgtaattaat

SEQ ID NO: 174372 - DNA, 15 bp, Homo sapiens
gtaacatgtaattaa

SEQ ID NO: 174373 - DNA, 15 bp, Homo sapiens
tgtaacatgtaatta

SEQ ID NO: 174374 - DNA, 15 bp, Homo sapiens
gtgtaacatgtaatt

SEQ ID NO: 174375 - DNA, 15 bp, Homo sapiens
agtgtaacatgtaat

SEQ ID NO: 174376 - DNA, 15 bp, Homo sapiens
tagtgtaacatgtaa

SEQ ID NO: 174377 - DNA, 15 bp, Homo sapiens
ctagtgtaacatgta

SEQ ID NO: 174378 - DNA, 15 bp, Homo sapiens
actagtgtaacatgt

SEQ ID NO: 174379 - DNA, 15 bp, Homo sapiens
aactagtgtaacatg

SEQ ID NO: 174380 - DNA, 15 bp, Homo sapiens
aaactagtgtaacat

SEQ ID NO: 174381 - DNA, 15 bp, Homo sapiens
aaaactagtgtaaca

SEQ ID NO: 174382 - DNA, 15 bp, Homo sapiens
gaaaactagtgtaac

SEQ ID NO: 174383 - DNA, 15 bp, Homo sapiens
agaaaactagtgtaa

SEQ ID NO: 174384 - DNA, 15 bp, Homo sapiens
aagaaaactagtgta

SEQ ID NO: 174385 - DNA, 15 bp, Homo sapiens
caagaaaactagtgt

SEQ ID NO: 174386 - DNA, 15 bp, Homo sapiens
acaagaaaactagtg

SEQ ID NO: 174387 - DNA, 15 bp, Homo sapiens
cacaagaaaactagt

SEQ ID NO: 174388 - DNA, 15 bp, Homo sapiens
ccacaagaaaactag

SEQ ID NO: 174389 - DNA, 15 bp, Homo sapiens
cccacaagaaaacta

SEQ ID NO: 174390 - DNA, 15 bp, Homo sapiens
acccacaagaaaact

SEQ ID NO: 174391 - DNA, 15 bp, Homo sapiens
tacccacaagaaaac

SEQ ID NO: 174392 - DNA, 15 bp, Homo sapiens
ctacccacaagaaaa

SEQ ID NO: 174393 - DNA, 15 bp, Homo sapiens
tctacccacaagaaa

SEQ ID NO: 174394 - DNA, 15 bp, Homo sapiens
ctctacccacaagaa

SEQ ID NO: 174395 - DNA, 15 bp, Homo sapiens
actctacccacaaga

SEQ ID NO: 174396 - DNA, 15 bp, Homo sapiens
aactctacccacaag

SEQ ID NO: 174397 - DNA, 15 bp, Homo sapiens
aaactctacccacaa

SEQ ID NO: 174398 - DNA, 15 bp, Homo sapiens
aaaactctacccaca

SEQ ID NO: 174399 - DNA, 15 bp, Homo sapiens
aaaaactctacccac

SEQ ID NO: 174400 - DNA, 15 bp, Homo sapiens
gaaaaactctaccca

SEQ ID NO: 174401 - DNA, 15 bp, Homo sapiens
agaaaaactctaccc

SEQ ID NO: 174402 - DNA, 15 bp, Homo sapiens
cagaaaaactctacc

SEQ ID NO: 174403 - DNA, 15 bp, Homo sapiens
tcagaaaaactctac

SEQ ID NO: 174404 - DNA, 15 bp, Homo sapiens
gtcagaaaaactcta

SEQ ID NO: 174405 - DNA, 15 bp, Homo sapiens
tgtcagaaaaactct

SEQ ID NO: 174406 - DNA, 15 bp, Homo sapiens
atgtcagaaaaactc

SEQ ID NO: 174407 - DNA, 15 bp, Homo sapiens
tatgtcagaaaaact

SEQ ID NO: 174408 - DNA, 15 bp, Homo sapiens
atatgtcagaaaaac

SEQ ID NO: 174409 - DNA, 15 bp, Homo sapiens
aatatgtcagaaaaa

SEQ ID NO: 174410 - DNA, 15 bp, Homo sapiens
taatatgtcagaaaa

SEQ ID NO: 174411 - DNA, 15 bp, Homo sapiens
ataatatgtcagaaa

SEQ ID NO: 174412 - DNA, 15 bp, Homo sapiens
aataatatgtcagaa

SEQ ID NO: 174413 - DNA, 15 bp, Homo sapiens
aaataatatgtcaga

SEQ ID NO: 174414 - DNA, 15 bp, Homo sapiens
aaaataatatgtcag

SEQ ID NO: 174415 - DNA, 15 bp, Homo sapiens
aaaaataatatgtca

SEQ ID NO: 174416 - DNA, 15 bp, Homo sapiens
aaaaaataatatgtc

SEQ ID NO: 174417 - DNA, 15 bp, Homo sapiens
caaaaaataatatgt

SEQ ID NO: 174418 - DNA, 15 bp, Homo sapiens
acaaaaaataatatg

SEQ ID NO: 174419 - DNA, 15 bp, Homo sapiens
gacaaaaaataatat

SEQ ID NO: 174420 - DNA, 15 bp, Homo sapiens
agacaaaaaataata

SEQ ID NO: 174421 - DNA, 15 bp, Homo sapiens
aagacaaaaaataat

SEQ ID NO: 174422 - DNA, 15 bp, Homo sapiens
aaagacaaaaaataa

SEQ ID NO: 174423 - DNA, 15 bp, Homo sapiens
aaaagacaaaaaata

SEQ ID NO: 174424 - DNA, 15 bp, Homo sapiens
aaaaagacaaaaaat

SEQ ID NO: 174425 - DNA, 15 bp, Homo sapiens
taaaaagacaaaaaa

SEQ ID NO: 174426 - DNA, 15 bp, Homo sapiens
ataaaaagacaaaaa

SEQ ID NO: 174427 - DNA, 15 bp, Homo sapiens
aataaaaagacaaaa

SEQ ID NO: 174428 - DNA, 15 bp, Homo sapiens
caataaaaagacaaa

SEQ ID NO: 174429 - DNA, 15 bp, Homo sapiens
acaataaaaagacaa

SEQ ID NO: 174430 - DNA, 15 bp, Homo sapiens
gacaataaaaagaca

SEQ ID NO: 174431 - DNA, 15 bp, Homo sapiens
tgacaataaaaagac

SEQ ID NO: 174432 - DNA, 15 bp, Homo sapiens
ttgacaataaaaaga

SEQ ID NO: 174433 - DNA, 15 bp, Homo sapiens
attgacaataaaaag

SEQ ID NO: 174434 - DNA, 15 bp, Homo sapiens
gattgacaataaaaa

SEQ ID NO: 174435 - DNA, 15 bp, Homo sapiens
agattgacaataaaa

SEQ ID NO: 174436 - DNA, 15 bp, Homo sapiens
aagattgacaataaa

SEQ ID NO: 174437 - DNA, 15 bp, Homo sapiens
aaagattgacaataa

SEQ ID NO: 174438 - DNA, 15 bp, Homo sapiens
aaaagattgacaata

SEQ ID NO: 174439 - DNA, 15 bp, Homo sapiens
taaaagattgacaat

SEQ ID NO: 174440 - DNA, 15 bp, Homo sapiens
ttaaaagattgacaa

SEQ ID NO: 174441 - DNA, 15 bp, Homo sapiens
attaaaagattgaca

SEQ ID NO: 174442 - DNA, 15 bp, Homo sapiens
tattaaaagattgac

SEQ ID NO: 174443 - DNA, 15 bp, Homo sapiens
ttattaaaagattga

SEQ ID NO: 174444 - DNA, 15 bp, Homo sapiens
cttattaaaagattg

SEQ ID NO: 174445 - DNA, 15 bp, Homo sapiens
ccttattaaaagatt

SEQ ID NO: 174446 - DNA, 15 bp, Homo sapiens
gccttattaaaagat

SEQ ID NO: 174447 - DNA, 15 bp, Homo sapiens
agccttattaaaaga

SEQ ID NO: 174448 - DNA, 15 bp, Homo sapiens
aagccttattaaaag

SEQ ID NO: 174449 - DNA, 15 bp, Homo sapiens
aaagccttattaaaa

SEQ ID NO: 174450 - DNA, 15 bp, Homo sapiens
aaaagccttattaaa

SEQ ID NO: 174451 - DNA, 15 bp, Homo sapiens
gaaaagccttattaa

SEQ ID NO: 174452 - DNA, 15 bp, Homo sapiens
agaaaagccttatta

SEQ ID NO: 174453 - DNA, 15 bp, Homo sapiens
tagaaaagccttatt

SEQ ID NO: 174454 - DNA, 15 bp, Homo sapiens
atagaaaagccttat

SEQ ID NO: 174455 - DNA, 15 bp, Homo sapiens
tatagaaaagcctta

SEQ ID NO: 174456 - DNA, 15 bp, Homo sapiens
atatagaaaagcctt

SEQ ID NO: 174457 - DNA, 15 bp, Homo sapiens
catatagaaaagcct

SEQ ID NO: 174458 - DNA, 15 bp, Homo sapiens
acatatagaaaagcc

SEQ ID NO: 174459 - DNA, 15 bp, Homo sapiens
aacatatagaaaagc

SEQ ID NO: 174460 - DNA, 15 bp, Homo sapiens
aaacatatagaaaag

SEQ ID NO: 174461 - DNA, 15 bp, Homo sapiens
gaaacatatagaaaa

SEQ ID NO: 174462 - DNA, 15 bp, Homo sapiens
agaaacatatagaaa

SEQ ID NO: 174463 - DNA, 15 bp, Homo sapiens
aagaaacatatagaa

SEQ ID NO: 174464 - DNA, 15 bp, Homo sapiens
taagaaacatataga

SEQ ID NO: 174465 - DNA, 15 bp, Homo sapiens
gtaagaaacatatag

SEQ ID NO: 174466 - DNA, 15 bp, Homo sapiens
tgtaagaaacatata

SEQ ID NO: 174467 - DNA, 15 bp, Homo sapiens
ttgtaagaaacatat

SEQ ID NO: 174468 - DNA, 15 bp, Homo sapiens
attgtaagaaacata

SEQ ID NO: 174469 - DNA, 15 bp, Homo sapiens
gattgtaagaaacat

SEQ ID NO: 174470 - DNA, 15 bp, Homo sapiens
tgattgtaagaaaca

SEQ ID NO: 174471 - DNA, 15 bp, Homo sapiens
atgattgtaagaaac

SEQ ID NO: 174472 - DNA, 15 bp, Homo sapiens
gatgattgtaagaaa

SEQ ID NO: 174473 - DNA, 15 bp, Homo sapiens
tgatgattgtaagaa

SEQ ID NO: 174474 - DNA, 15 bp, Homo sapiens
ttgatgattgtaaga

SEQ ID NO: 174475 - DNA, 15 bp, Homo sapiens
tttgatgattgtaag

SEQ ID NO: 174476 - DNA, 15 bp, Homo sapiens
atttgatgattgtaa

SEQ ID NO: 174477 - DNA, 15 bp, Homo sapiens
tatttgatgattgta

SEQ ID NO: 174478 - DNA, 15 bp, Homo sapiens
ttatttgatgattgt

SEQ ID NO: 174479 - DNA, 15 bp, Homo sapiens
attatttgatgattg

SEQ ID NO: 174480 - DNA, 15 bp, Homo sapiens
aattatttgatgatt

SEQ ID NO: 174481 - DNA, 15 bp, Homo sapiens
caattatttgatgat

SEQ ID NO: 174482 - DNA, 15 bp, Homo sapiens
tcaattatttgatga

SEQ ID NO: 174483 - DNA, 15 bp, Homo sapiens
ttcaattatttgatg

SEQ ID NO: 174484 - DNA, 15 bp, Homo sapiens
attcaattatttgat

SEQ ID NO: 174485 - DNA, 15 bp, Homo sapiens
aattcaattatttga

SEQ ID NO: 174486 - DNA, 15 bp, Homo sapiens
aaattcaattatttg

SEQ ID NO: 174487 - DNA, 15 bp, Homo sapiens
aaaattcaattattt

SEQ ID NO: 174488 - DNA, 15 bp, Homo sapiens
caaaattcaattatt

SEQ ID NO: 174489 - DNA, 15 bp, Homo sapiens
acaaaattcaattat

SEQ ID NO: 174490 - DNA, 15 bp, Homo sapiens
aacaaaattcaatta

SEQ ID NO: 174491 - DNA, 15 bp, Homo sapiens
aaacaaaattcaatt

SEQ ID NO: 174492 - DNA, 15 bp, Homo sapiens
taaacaaaattcaat

SEQ ID NO: 174493 - DNA, 15 bp, Homo sapiens
ttaaacaaaattcaa

SEQ ID NO: 174494 - DNA, 15 bp, Homo sapiens
attaaacaaaattca

SEQ ID NO: 174495 - DNA, 15 bp, Homo sapiens
cattaaacaaaattc

SEQ ID NO: 174496 - DNA, 15 bp, Homo sapiens
acattaaacaaaatt

SEQ ID NO: 174497 - DNA, 15 bp, Homo sapiens
aacattaaacaaaat

SEQ ID NO: 174498 - DNA, 15 bp, Homo sapiens
aaacattaaacaaaa

SEQ ID NO: 174499 - DNA, 15 bp, Homo sapiens
aaaacattaaacaaa

SEQ ID NO: 174500 - DNA, 15 bp, Homo sapiens
gaaaacattaaacaa

SEQ ID NO: 174501 - DNA, 15 bp, Homo sapiens
tgaaaacattaaaca

SEQ ID NO: 174502 - DNA, 15 bp, Homo sapiens
atgaaaacattaaac

SEQ ID NO: 174503 - DNA, 15 bp, Homo sapiens
gatgaaaacattaaa

SEQ ID NO: 174504 - DNA, 15 bp, Homo sapiens
agatgaaaacattaa

SEQ ID NO: 174505 - DNA, 15 bp, Homo sapiens
cagatgaaaacatta

SEQ ID NO: 174506 - DNA, 15 bp, Homo sapiens
ccagatgaaaacatt

SEQ ID NO: 174507 - DNA, 15 bp, Homo sapiens
accagatgaaaacat

SEQ ID NO: 174508 - DNA, 15 bp, Homo sapiens
aaccagatgaaaaca

SEQ ID NO: 174509 - DNA, 15 bp, Homo sapiens
aaaccagatgaaaac

SEQ ID NO: 174510 - DNA, 15 bp, Homo sapiens
caaaccagatgaaaa

SEQ ID NO: 174511 - DNA, 15 bp, Homo sapiens
tcaaaccagatgaaa

SEQ ID NO: 174512 - DNA, 15 bp, Homo sapiens
atcaaaccagatgaa

SEQ ID NO: 174513 - DNA, 15 bp, Homo sapiens
tatcaaaccagatga

SEQ ID NO: 174514 - DNA, 15 bp, Homo sapiens
ttatcaaaccagatg

SEQ ID NO: 174515 - DNA, 15 bp, Homo sapiens
attatcaaaccagat

SEQ ID NO: 174516 - DNA, 15 bp, Homo sapiens
gattatcaaaccaga

SEQ ID NO: 174517 - DNA, 15 bp, Homo sapiens
agattatcaaaccag

SEQ ID NO: 174518 - DNA, 15 bp, Homo sapiens
gagattatcaaacca

SEQ ID NO: 174519 - DNA, 15 bp, Homo sapiens
agagattatcaaacc

SEQ ID NO: 174520 - DNA, 15 bp, Homo sapiens
cagagattatcaaac

SEQ ID NO: 174521 - DNA, 15 bp, Homo sapiens
acagagattatcaaa

SEQ ID NO: 174522 - DNA, 15 bp, Homo sapiens
gacagagattatcaa

SEQ ID NO: 174523 - DNA, 15 bp, Homo sapiens
agacagagattatca

SEQ ID NO: 174524 - DNA, 15 bp, Homo sapiens
aagacagagattatc

SEQ ID NO: 174525 - DNA, 15 bp, Homo sapiens
aaagacagagattat

SEQ ID NO: 174526 - DNA, 15 bp, Homo sapiens
aaaagacagagatta

SEQ ID NO: 174527 - DNA, 15 bp, Homo sapiens
taaaagacagagatt

SEQ ID NO: 174528 - DNA, 15 bp, Homo sapiens
ttaaaagacagagat

SEQ ID NO: 174529 - DNA, 15 bp, Homo sapiens
attaaaagacagaga

SEQ ID NO: 174530 - DNA, 15 bp, Homo sapiens
tattaaaagacagag

SEQ ID NO: 174531 - DNA, 15 bp, Homo sapiens
ctattaaaagacaga

SEQ ID NO: 174532 - DNA, 15 bp, Homo sapiens
cctattaaaagacag

SEQ ID NO: 174533 - DNA, 15 bp, Homo sapiens
acctattaaaagaca

SEQ ID NO: 174534 - DNA, 15 bp, Homo sapiens
tacctattaaaagac

SEQ ID NO: 174535 - DNA, 15 bp, Homo sapiens
gtacctattaaaaga

SEQ ID NO: 174536 - DNA, 15 bp, Homo sapiens
cgtacctattaaaag

SEQ ID NO: 174537 - DNA, 15 bp, Homo sapiens
acgtacctattaaaa

SEQ ID NO: 174538 - DNA, 15 bp, Homo sapiens
aacgtacctattaaa

SEQ ID NO: 174539 - DNA, 15 bp, Homo sapiens
aaacgtacctattaa

SEQ ID NO: 174540 - DNA, 15 bp, Homo sapiens
taaacgtacctatta

SEQ ID NO: 174541 - DNA, 15 bp, Homo sapiens
ttaaacgtacctatt

SEQ ID NO: 174542 - DNA, 15 bp, Homo sapiens
attaaacgtacctat

SEQ ID NO: 174543 - DNA, 15 bp, Homo sapiens
aattaaacgtaccta

SEQ ID NO: 174544 - DNA, 15 bp, Homo sapiens
gaattaaacgtacct

SEQ ID NO: 174545 - DNA, 15 bp, Homo sapiens
cgaattaaacgtacc

SEQ ID NO: 174546 - DNA, 15 bp, Homo sapiens
acgaattaaacgtac

SEQ ID NO: 174547 - DNA, 15 bp, Homo sapiens
aacgaattaaacgta

SEQ ID NO: 174548 - DNA, 15 bp, Homo sapiens
aaacgaattaaacgt

SEQ ID NO: 174549 - DNA, 15 bp, Homo sapiens
taaacgaattaaacg

SEQ ID NO: 174550 - DNA, 15 bp, Homo sapiens
ataaacgaattaaac

SEQ ID NO: 174551 - DNA, 15 bp, Homo sapiens
tataaacgaattaaa

SEQ ID NO: 174552 - DNA, 15 bp, Homo sapiens
gtataaacgaattaa

SEQ ID NO: 174553 - DNA, 15 bp, Homo sapiens
agtataaacgaatta

SEQ ID NO: 174554 - DNA, 15 bp, Homo sapiens
aagtataaacgaatt

SEQ ID NO: 174555 - DNA, 15 bp, Homo sapiens
taagtataaacgaat

SEQ ID NO: 174556 - DNA, 15 bp, Homo sapiens
ttaagtataaacgaa

SEQ ID NO: 174557 - DNA, 15 bp, Homo sapiens
attaagtataaacga

SEQ ID NO: 174558 - DNA, 15 bp, Homo sapiens
tattaagtataaacg

SEQ ID NO: 174559 - DNA, 15 bp, Homo sapiens
atattaagtataaac

SEQ ID NO: 174560 - DNA, 15 bp, Homo sapiens
tatattaagtataaa

SEQ ID NO: 174561 - DNA, 15 bp, Homo sapiens
gtatattaagtataa

SEQ ID NO: 174562 - DNA, 15 bp, Homo sapiens
agtatattaagtata

SEQ ID NO: 174563 - DNA, 15 bp, Homo sapiens
gagtatattaagtat

SEQ ID NO: 174564 - DNA, 15 bp, Homo sapiens
tgagtatattaagta

SEQ ID NO: 174565 - DNA, 15 bp, Homo sapiens
gtgagtatattaagt

SEQ ID NO: 174566 - DNA, 15 bp, Homo sapiens
agtgagtatattaag

SEQ ID NO: 174567 - DNA, 15 bp, Homo sapiens
cagtgagtatattaa

SEQ ID NO: 174568 - DNA, 15 bp, Homo sapiens
tcagtgagtatatta

SEQ ID NO: 174569 - DNA, 15 bp, Homo sapiens
atcagtgagtatatt

SEQ ID NO: 174570 - DNA, 15 bp, Homo sapiens
tatcagtgagtatat

SEQ ID NO: 174571 - DNA, 15 bp, Homo sapiens
gtatcagtgagtata

SEQ ID NO: 174572 - DNA, 15 bp, Homo sapiens
tgtatcagtgagtat

SEQ ID NO: 174573 - DNA, 15 bp, Homo sapiens
ttgtatcagtgagta

SEQ ID NO: 174574 - DNA, 15 bp, Homo sapiens
attgtatcagtgagt

SEQ ID NO: 174575 - DNA, 15 bp, Homo sapiens
tattgtatcagtgag

SEQ ID NO: 174576 - DNA, 15 bp, Homo sapiens
atattgtatcagtga

SEQ ID NO: 174577 - DNA, 15 bp, Homo sapiens
catattgtatcagtg

SEQ ID NO: 174578 - DNA, 15 bp, Homo sapiens
acatattgtatcagt

SEQ ID NO: 174579 - DNA, 15 bp, Homo sapiens
cacatattgtatcag

SEQ ID NO: 174580 - DNA, 15 bp, Homo sapiens
tcacatattgtatca

SEQ ID NO: 174581 - DNA, 15 bp, Homo sapiens
ctcacatattgtatc

SEQ ID NO: 174582 - DNA, 15 bp, Homo sapiens
actcacatattgtat

SEQ ID NO: 174583 - DNA, 15 bp, Homo sapiens
aactcacatattgta

SEQ ID NO: 174584 - DNA, 15 bp, Homo sapiens
aaactcacatattgt

SEQ ID NO: 174585 - DNA, 15 bp, Homo sapiens
aaaactcacatattg

SEQ ID NO: 174586 - DNA, 15 bp, Homo sapiens
aaaaactcacatatt

SEQ ID NO: 174587 - DNA, 15 bp, Homo sapiens
aaaaaactcacatat

SEQ ID NO: 174588 - DNA, 15 bp, Homo sapiens
gaaaaaactcacata

SEQ ID NO: 174589 - DNA, 15 bp, Homo sapiens
agaaaaaactcacat

SEQ ID NO: 174590 - DNA, 15 bp, Homo sapiens
cagaaaaaactcaca

SEQ ID NO: 174591 - DNA, 15 bp, Homo sapiens
gcagaaaaaactcac

SEQ ID NO: 174592 - DNA, 15 bp, Homo sapiens
agcagaaaaaactca

SEQ ID NO: 174593 - DNA, 15 bp, Homo sapiens
cagcagaaaaaactc

SEQ ID NO: 174594 - DNA, 15 bp, Homo sapiens
acagcagaaaaaact

SEQ ID NO: 174595 - DNA, 15 bp, Homo sapiens
aacagcagaaaaaac

SEQ ID NO: 174596 - DNA, 15 bp, Homo sapiens
aaacagcagaaaaaa

SEQ ID NO: 174597 - DNA, 15 bp, Homo sapiens
aaaacagcagaaaaa

SEQ ID NO: 174598 - DNA, 15 bp, Homo sapiens
taaaacagcagaaaa

SEQ ID NO: 174599 - DNA, 15 bp, Homo sapiens
ataaaacagcagaaa

SEQ ID NO: 174600 - DNA, 15 bp, Homo sapiens
aataaaacagcagaa

SEQ ID NO: 174601 - DNA, 15 bp, Homo sapiens
aaataaaacagcaga

SEQ ID NO: 174602 - DNA, 15 bp, Homo sapiens
aaaataaaacagcag

SEQ ID NO: 174603 - DNA, 15 bp, Homo sapiens
caaaataaaacagca

SEQ ID NO: 174604 - DNA, 15 bp, Homo sapiens
ccaaaataaaacagc

SEQ ID NO: 174605 - DNA, 15 bp, Homo sapiens
cccaaaataaaacag

SEQ ID NO: 174606 - DNA, 15 bp, Homo sapiens
acccaaaataaaaca

SEQ ID NO: 174607 - DNA, 15 bp, Homo sapiens
aacccaaaataaaac

SEQ ID NO: 174608 - DNA, 15 bp, Homo sapiens
aaacccaaaataaaa

SEQ ID NO: 174609 - DNA, 15 bp, Homo sapiens
gaaacccaaaataaa

SEQ ID NO: 174610 - DNA, 15 bp, Homo sapiens
agaaacccaaaataa

SEQ ID NO: 174611 - DNA, 15 bp, Homo sapiens
aagaaacccaaaata

SEQ ID NO: 174612 - DNA, 15 bp, Homo sapiens
aaagaaacccaaaat

SEQ ID NO: 174613 - DNA, 15 bp, Homo sapiens
caaagaaacccaaaa

SEQ ID NO: 174614 - DNA, 15 bp, Homo sapiens
gcaaagaaacccaaa

SEQ ID NO: 174615 - DNA, 15 bp, Homo sapiens
agcaaagaaacccaa

SEQ ID NO: 174616 - DNA, 15 bp, Homo sapiens
gagcaaagaaaccca

SEQ ID NO: 174617 - DNA, 15 bp, Homo sapiens
ggagcaaagaaaccc

SEQ ID NO: 174618 - DNA, 15 bp, Homo sapiens
aggagcaaagaaacc

SEQ ID NO: 174619 - DNA, 15 bp, Homo sapiens
gaggagcaaagaaac

SEQ ID NO: 174620 - DNA, 15 bp, Homo sapiens
agaggagcaaagaaa

SEQ ID NO: 174621 - DNA, 15 bp, Homo sapiens
aagaggagcaaagaa

SEQ ID NO: 174622 - DNA, 15 bp, Homo sapiens
aaagaggagcaaaga

SEQ ID NO: 174623 - DNA, 15 bp, Homo sapiens
gaaagaggagcaaag

SEQ ID NO: 174624 - DNA, 15 bp, Homo sapiens
ggaaagaggagcaaa

SEQ ID NO: 174625 - DNA, 15 bp, Homo sapiens
gggaaagaggagcaa

SEQ ID NO: 174626 - DNA, 15 bp, Homo sapiens
ggggaaagaggagca

SEQ ID NO: 174627 - DNA, 15 bp, Homo sapiens
gggggaaagaggagc

SEQ ID NO: 174628 - DNA, 15 bp, Homo sapiens
agggggaaagaggag

SEQ ID NO: 174629 - DNA, 15 bp, Homo sapiens
aagggggaaagagga

SEQ ID NO: 174630 - DNA, 15 bp, Homo sapiens
aaagggggaaagagg

SEQ ID NO: 174631 - DNA, 15 bp, Homo sapiens
gaaagggggaaagag

SEQ ID NO: 174632 - DNA, 15 bp, Homo sapiens
ggaaagggggaaaga

SEQ ID NO: 174633 - DNA, 15 bp, Homo sapiens
aggaaagggggaaag

SEQ ID NO: 174634 - DNA, 15 bp, Homo sapiens
caggaaagggggaaa

SEQ ID NO: 174635 - DNA, 15 bp, Homo sapiens
acaggaaagggggaa

SEQ ID NO: 174636 - DNA, 15 bp, Homo sapiens
gacaggaaaggggga

SEQ ID NO: 174637 - DNA, 15 bp, Homo sapiens
agacaggaaaggggg

SEQ ID NO: 174638 - DNA, 15 bp, Homo sapiens
aagacaggaaagggg

SEQ ID NO: 174639 - DNA, 15 bp, Homo sapiens
taagacaggaaaggg

SEQ ID NO: 174640 - DNA, 15 bp, Homo sapiens
ataagacaggaaagg

SEQ ID NO: 174641 - DNA, 15 bp, Homo sapiens
tataagacaggaaag

SEQ ID NO: 174642 - DNA, 15 bp, Homo sapiens
atataagacaggaaa

SEQ ID NO: 174643 - DNA, 15 bp, Homo sapiens
aatataagacaggaa

SEQ ID NO: 174644 - DNA, 15 bp, Homo sapiens
taatataagacagga

SEQ ID NO: 174645 - DNA, 15 bp, Homo sapiens
ttaatataagacagg

SEQ ID NO: 174646 - DNA, 15 bp, Homo sapiens
tttaatataagacag

SEQ ID NO: 174647 - DNA, 15 bp, Homo sapiens
ctttaatataagaca

SEQ ID NO: 174648 - DNA, 15 bp, Homo sapiens
cctttaatataagac

SEQ ID NO: 174649 - DNA, 15 bp, Homo sapiens
tcctttaatataaga

SEQ ID NO: 174650 - DNA, 15 bp, Homo sapiens
ttcctttaatataag

SEQ ID NO: 174651 - DNA, 15 bp, Homo sapiens
attcctttaatataa

SEQ ID NO: 174652 - DNA, 15 bp, Homo sapiens
aattcctttaatata

SEQ ID NO: 174653 - DNA, 15 bp, Homo sapiens
caattcctttaatat

SEQ ID NO: 174654 - DNA, 15 bp, Homo sapiens
acaattcctttaata

SEQ ID NO: 174655 - DNA, 15 bp, Homo sapiens
aacaattcctttaat

SEQ ID NO: 174656 - DNA, 15 bp, Homo sapiens
gaacaattcctttaa

SEQ ID NO: 174657 - DNA, 15 bp, Homo sapiens
ggaacaattccttta

SEQ ID NO: 174658 - DNA, 15 bp, Homo sapiens
tggaacaattccttt

SEQ ID NO: 174659 - DNA, 15 bp, Homo sapiens
atggaacaattcctt

SEQ ID NO: 174660 - DNA, 15 bp, Homo sapiens
tatggaacaattcct

SEQ ID NO: 174661 - DNA, 15 bp, Homo sapiens
atatggaacaattcc

SEQ ID NO: 174662 - DNA, 15 bp, Homo sapiens
aatatggaacaattc

SEQ ID NO: 174663 - DNA, 15 bp, Homo sapiens
aaatatggaacaatt

SEQ ID NO: 174664 - DNA, 15 bp, Homo sapiens
gaaatatggaacaat

SEQ ID NO: 174665 - DNA, 15 bp, Homo sapiens
agaaatatggaacaa

SEQ ID NO: 174666 - DNA, 15 bp, Homo sapiens
aagaaatatggaaca

SEQ ID NO: 174667 - DNA, 15 bp, Homo sapiens
gaagaaatatggaac

SEQ ID NO: 174668 - DNA, 15 bp, Homo sapiens
agaagaaatatggaa

SEQ ID NO: 174669 - DNA, 15 bp, Homo sapiens
aagaagaaatatgga

SEQ ID NO: 174670 - DNA, 15 bp, Homo sapiens
aaagaagaaatatgg

SEQ ID NO: 174671 - DNA, 15 bp, Homo sapiens
aaaagaagaaatatg

SEQ ID NO: 174672 - DNA, 15 bp, Homo sapiens
aaaaagaagaaatat

SEQ ID NO: 174673 - DNA, 15 bp, Homo sapiens
aaaaaagaagaaata

SEQ ID NO: 174674 - DNA, 15 bp, Homo sapiens
aaaaaaagaagaaat

SEQ ID NO: 174675 - DNA, 15 bp, Homo sapiens
taaaaaaagaagaaa

SEQ ID NO: 174676 - DNA, 15 bp, Homo sapiens
ttaaaaaaagaagaa

SEQ ID NO: 174677 - DNA, 15 bp, Homo sapiens
tttaaaaaaagaaga

SEQ ID NO: 174678 - DNA, 15 bp, Homo sapiens
atttaaaaaaagaag

SEQ ID NO: 174679 - DNA, 15 bp, Homo sapiens
aatttaaaaaaagaa

SEQ ID NO: 174680 - DNA, 15 bp, Homo sapiens
aaatttaaaaaaaga

SEQ ID NO: 174681 - DNA, 15 bp, Homo sapiens
aaaatttaaaaaaag

SEQ ID NO: 174682 - DNA, 15 bp, Homo sapiens
caaaatttaaaaaaa

SEQ ID NO: 174683 - DNA, 15 bp, Homo sapiens
acaaaatttaaaaaa

SEQ ID NO: 174684 - DNA, 15 bp, Homo sapiens
aacaaaatttaaaaa

SEQ ID NO: 174685 - DNA, 15 bp, Homo sapiens
caacaaaatttaaaa

SEQ ID NO: 174686 - DNA, 15 bp, Homo sapiens
ccaacaaaatttaaa

SEQ ID NO: 174687 - DNA, 15 bp, Homo sapiens
accaacaaaatttaa

SEQ ID NO: 174688 - DNA, 15 bp, Homo sapiens
aaccaacaaaattta

SEQ ID NO: 174689 - DNA, 15 bp, Homo sapiens
gaaccaacaaaattt

SEQ ID NO: 174690 - DNA, 15 bp, Homo sapiens
tgaaccaacaaaatt

SEQ ID NO: 174691 - DNA, 15 bp, Homo sapiens
atgaaccaacaaaat

SEQ ID NO: 174692 - DNA, 15 bp, Homo sapiens
tatgaaccaacaaaa

SEQ ID NO: 174693 - DNA, 15 bp, Homo sapiens
ttatgaaccaacaaa

SEQ ID NO: 174694 - DNA, 15 bp, Homo sapiens
cttatgaaccaacaa

SEQ ID NO: 174695 - DNA, 15 bp, Homo sapiens
gcttatgaaccaaca

SEQ ID NO: 174696 - DNA, 15 bp, Homo sapiens
agcttatgaaccaac

SEQ ID NO: 174697 - DNA, 15 bp, Homo sapiens
cagcttatgaaccaa

SEQ ID NO: 174698 - DNA, 15 bp, Homo sapiens
acagcttatgaacca

SEQ ID NO: 174699 - DNA, 15 bp, Homo sapiens
tacagcttatgaacc

SEQ ID NO: 174700 - DNA, 15 bp, Homo sapiens
ctacagcttatgaac

SEQ ID NO: 174701 - DNA, 15 bp, Homo sapiens
tctacagcttatgaa

SEQ ID NO: 174702 - DNA, 15 bp, Homo sapiens
atctacagcttatga

SEQ ID NO: 174703 - DNA, 15 bp, Homo sapiens
gatctacagcttatg

SEQ ID NO: 174704 - DNA, 15 bp, Homo sapiens
tgatctacagcttat

SEQ ID NO: 174705 - DNA, 15 bp, Homo sapiens
atgatctacagctta

SEQ ID NO: 174706 - DNA, 15 bp, Homo sapiens
tatgatctacagctt

SEQ ID NO: 174707 - DNA, 15 bp, Homo sapiens
atatgatctacagct

SEQ ID NO: 174708 - DNA, 15 bp, Homo sapiens
aatatgatctacagc

SEQ ID NO: 174709 - DNA, 15 bp, Homo sapiens
gaatatgatctacag

SEQ ID NO: 174710 - DNA, 15 bp, Homo sapiens
agaatatgatctaca

SEQ ID NO: 174711 - DNA, 15 bp, Homo sapiens
cagaatatgatctac

SEQ ID NO: 174712 - DNA, 15 bp, Homo sapiens
acagaatatgatcta

SEQ ID NO: 174713 - DNA, 15 bp, Homo sapiens
aacagaatatgatct

SEQ ID NO: 174714 - DNA, 15 bp, Homo sapiens
gaacagaatatgatc

SEQ ID NO: 174715 - DNA, 15 bp, Homo sapiens
agaacagaatatgat

SEQ ID NO: 174716 - DNA, 15 bp, Homo sapiens
gagaacagaatatga

SEQ ID NO: 174717 - DNA, 15 bp, Homo sapiens
ggagaacagaatatg

SEQ ID NO: 174718 - DNA, 15 bp, Homo sapiens
aggagaacagaatat

SEQ ID NO: 174719 - DNA, 15 bp, Homo sapiens
taggagaacagaata

SEQ ID NO: 174720 - DNA, 15 bp, Homo sapiens
ctaggagaacagaat

SEQ ID NO: 174721 - DNA, 15 bp, Homo sapiens
actaggagaacagaa

SEQ ID NO: 174722 - DNA, 15 bp, Homo sapiens
cactaggagaacaga

SEQ ID NO: 174723 - DNA, 15 bp, Homo sapiens
tcactaggagaacag

SEQ ID NO: 174724 - DNA, 15 bp, Homo sapiens
atcactaggagaaca

SEQ ID NO: 174725 - DNA, 15 bp, Homo sapiens
aatcactaggagaac

SEQ ID NO: 174726 - DNA, 15 bp, Homo sapiens
taatcactaggagaa

SEQ ID NO: 174727 - DNA, 15 bp, Homo sapiens
gtaatcactaggaga

SEQ ID NO: 174728 - DNA, 15 bp, Homo sapiens
agtaatcactaggag

SEQ ID NO: 174729 - DNA, 15 bp, Homo sapiens
gagtaatcactagga

SEQ ID NO: 174730 - DNA, 15 bp, Homo sapiens
agagtaatcactagg

SEQ ID NO: 174731 - DNA, 15 bp, Homo sapiens
aagagtaatcactag

SEQ ID NO: 174732 - DNA, 15 bp, Homo sapiens
aaagagtaatcacta

SEQ ID NO: 174733 - DNA, 15 bp, Homo sapiens
aaaagagtaatcact

SEQ ID NO: 174734 - DNA, 15 bp, Homo sapiens
aaaaagagtaatcac

SEQ ID NO: 174735 - DNA, 15 bp, Homo sapiens
aaaaaagagtaatca

SEQ ID NO: 174736 - DNA, 15 bp, Homo sapiens
aaaaaaagagtaatc

SEQ ID NO: 174737 - DNA, 15 bp, Homo sapiens
aaaaaaaagagtaat

SEQ ID NO: 174738 - DNA, 15 bp, Homo sapiens
aaaaaaaaagagtaa

SEQ ID NO: 174739 - DNA, 15 bp, Homo sapiens
aaaaaaaaaagagta

SEQ ID NO: 174740 - DNA, 15 bp, Homo sapiens
aaaaaaaaaaagagt

SEQ ID NO: 174741 - DNA, 15 bp, Homo sapiens
caaaaaaaaaaagag

SEQ ID NO: 174742 - DNA, 15 bp, Homo sapiens
tcaaaaaaaaaaaga

SEQ ID NO: 174743 - DNA, 15 bp, Homo sapiens
ctcaaaaaaaaaaag

SEQ ID NO: 174744 - DNA, 15 bp, Homo sapiens
ctctcaaaaaaaaaa

SEQ ID NO: 174745 - DNA, 15 bp, Homo sapiens
cctctcaaaaaaaaa

SEQ ID NO: 174746 - DNA, 15 bp, Homo sapiens
tcctctcaaaaaaaa

SEQ ID NO: 174747 - DNA, 15 bp, Homo sapiens
ttcctctcaaaaaaa

SEQ ID NO: 174748 - DNA, 15 bp, Homo sapiens
cttcctctcaaaaaa

SEQ ID NO: 174749 - DNA, 15 bp, Homo sapiens
acttcctctcaaaaa

SEQ ID NO: 174750 - DNA, 15 bp, Homo sapiens
gacttcctctcaaaa

SEQ ID NO: 174751 - DNA, 15 bp, Homo sapiens
agacttcctctcaaa

SEQ ID NO: 174752 - DNA, 15 bp, Homo sapiens
aagacttcctctcaa

SEQ ID NO: 174753 - DNA, 15 bp, Homo sapiens
caagacttcctctca

SEQ ID NO: 174754 - DNA, 15 bp, Homo sapiens
gcaagacttcctctc

SEQ ID NO: 174755 - DNA, 15 bp, Homo sapiens
agcaagacttcctct

SEQ ID NO: 174756 - DNA, 15 bp, Homo sapiens
gagcaagacttcctc

SEQ ID NO: 174757 - DNA, 15 bp, Homo sapiens
agagcaagacttcct

SEQ ID NO: 174758 - DNA, 15 bp, Homo sapiens
tagagcaagacttcc

SEQ ID NO: 174759 - DNA, 15 bp, Homo sapiens
atagagcaagacttc

SEQ ID NO: 174760 - DNA, 15 bp, Homo sapiens
aatagagcaagactt

SEQ ID NO: 174761 - DNA, 15 bp, Homo sapiens
caatagagcaagact

SEQ ID NO: 174762 - DNA, 15 bp, Homo sapiens
gcaatagagcaagac

SEQ ID NO: 174763 - DNA, 15 bp, Homo sapiens
ggcaatagagcaaga

SEQ ID NO: 174764 - DNA, 15 bp, Homo sapiens
gggcaatagagcaag

SEQ ID NO: 174765 - DNA, 15 bp, Homo sapiens
tgggcaatagagcaa

SEQ ID NO: 174766 - DNA, 15 bp, Homo sapiens
ttgggcaatagagca

SEQ ID NO: 174767 - DNA, 15 bp, Homo sapiens
cttgggcaatagagc

SEQ ID NO: 174768 - DNA, 15 bp, Homo sapiens
gcttgggcaatagag

SEQ ID NO: 174769 - DNA, 15 bp, Homo sapiens
agcttgggcaataga

SEQ ID NO: 174770 - DNA, 15 bp, Homo sapiens
cagcttgggcaatag

SEQ ID NO: 174771 - DNA, 15 bp, Homo sapiens
ccagcttgggcaata

SEQ ID NO: 174772 - DNA, 15 bp, Homo sapiens
tccagcttgggcaat

SEQ ID NO: 174773 - DNA, 15 bp, Homo sapiens
ctccagcttgggcaa

SEQ ID NO: 174774 - DNA, 15 bp, Homo sapiens
actccagcttgggca

SEQ ID NO: 174775 - DNA, 15 bp, Homo sapiens
cactccagcttgggc

SEQ ID NO: 174776 - DNA, 15 bp, Homo sapiens
gcactccagcttggg

SEQ ID NO: 174777 - DNA, 15 bp, Homo sapiens
tgcactccagcttgg

SEQ ID NO: 174778 - DNA, 15 bp, Homo sapiens
ctgcactccagcttg

SEQ ID NO: 174779 - DNA, 15 bp, Homo sapiens
actgcactccagctt

SEQ ID NO: 174780 - DNA, 15 bp, Homo sapiens
cactgcactccagct

SEQ ID NO: 174781 - DNA, 15 bp, Homo sapiens
cgcaccactgcactc

SEQ ID NO: 174782 - DNA, 15 bp, Homo sapiens
tcgcaccactgcact

SEQ ID NO: 174783 - DNA, 15 bp, Homo sapiens
atcgcaccactgcac

SEQ ID NO: 174784 - DNA, 15 bp, Homo sapiens
gatcgcaccactgca

SEQ ID NO: 174785 - DNA, 15 bp, Homo sapiens
agatcgcaccactgc

SEQ ID NO: 174786 - DNA, 15 bp, Homo sapiens
ccaagatcgcaccac

SEQ ID NO: 174787 - DNA, 15 bp, Homo sapiens
gccaagatcgcacca

SEQ ID NO: 174788 - DNA, 15 bp, Homo sapiens
agccaagatcgcacc

SEQ ID NO: 174789 - DNA, 15 bp, Homo sapiens
gagccaagatcgcac

SEQ ID NO: 174790 - DNA, 15 bp, Homo sapiens
tgagccaagatcgca

SEQ ID NO: 174791 - DNA, 15 bp, Homo sapiens
cgcagtgagccaaga

SEQ ID NO: 174792 - DNA, 15 bp, Homo sapiens
tcgcagtgagccaag

SEQ ID NO: 174793 - DNA, 15 bp, Homo sapiens
atcgcagtgagccaa

SEQ ID NO: 174794 - DNA, 15 bp, Homo sapiens
gatcgcagtgagcca

SEQ ID NO: 174795 - DNA, 15 bp, Homo sapiens
agatcgcagtgagcc

SEQ ID NO: 174796 - DNA, 15 bp, Homo sapiens
gagatcgcagtgagc

SEQ ID NO: 174797 - DNA, 15 bp, Homo sapiens
agagatcgcagtgag

SEQ ID NO: 174798 - DNA, 15 bp, Homo sapiens
cagagatcgcagtga

SEQ ID NO: 174799 - DNA, 15 bp, Homo sapiens
gcagagatcgcagtg

SEQ ID NO: 174800 - DNA, 15 bp, Homo sapiens
ggcagagatcgcagt

SEQ ID NO: 174801 - DNA, 15 bp, Homo sapiens
aggcagagatcgcag

SEQ ID NO: 174802 - DNA, 15 bp, Homo sapiens
gaggcagagatcgca

SEQ ID NO: 174803 - DNA, 15 bp, Homo sapiens
ggaggcagagatcgc

SEQ ID NO: 174804 - DNA, 15 bp, Homo sapiens
aggaggcagagatcg

SEQ ID NO: 174805 - DNA, 15 bp, Homo sapiens
caggaggcagagatc

SEQ ID NO: 174806 - DNA, 15 bp, Homo sapiens
ccaggaggcagagat

SEQ ID NO: 174807 - DNA, 15 bp, Homo sapiens
cccaggaggcagaga

SEQ ID NO: 174808 - DNA, 15 bp, Homo sapiens
acccaggaggcagag

SEQ ID NO: 174809 - DNA, 15 bp, Homo sapiens
aacccaggaggcaga

SEQ ID NO: 174810 - DNA, 15 bp, Homo sapiens
gaacccaggaggcag

SEQ ID NO: 174811 - DNA, 15 bp, Homo sapiens
tgaacccaggaggca

SEQ ID NO: 174812 - DNA, 15 bp, Homo sapiens
actactcaggaggct

SEQ ID NO: 174813 - DNA, 15 bp, Homo sapiens
aactactcaggaggc

SEQ ID NO: 174814 - DNA, 15 bp, Homo sapiens
caactactcaggagg

SEQ ID NO: 174815 - DNA, 15 bp, Homo sapiens
ccaactactcaggag

SEQ ID NO: 174816 - DNA, 15 bp, Homo sapiens
cccaactactcagga

SEQ ID NO: 174817 - DNA, 15 bp, Homo sapiens
tcccaactactcagg

SEQ ID NO: 174818 - DNA, 15 bp, Homo sapiens
atcccaactactcag

SEQ ID NO: 174819 - DNA, 15 bp, Homo sapiens
aatcccaactactca

SEQ ID NO: 174820 - DNA, 15 bp, Homo sapiens
gcacgcctgtaatcc

SEQ ID NO: 174821 - DNA, 15 bp, Homo sapiens
tgcacgcctgtaatc

SEQ ID NO: 174822 - DNA, 15 bp, Homo sapiens
gtgcacgcctgtaat

SEQ ID NO: 174823 - DNA, 15 bp, Homo sapiens
ggtgcacgcctgtaa

SEQ ID NO: 174824 - DNA, 15 bp, Homo sapiens
tggtgcacgcctgta

SEQ ID NO: 174825 - DNA, 15 bp, Homo sapiens
gtggtgcacgcctgt

SEQ ID NO: 174826 - DNA, 15 bp, Homo sapiens
ggtggtgcacgcctg

SEQ ID NO: 174827 - DNA, 15 bp, Homo sapiens
tggtggtgcacgcct

SEQ ID NO: 174828 - DNA, 15 bp, Homo sapiens
gtggtggtgcacgcc

SEQ ID NO: 174829 - DNA, 15 bp, Homo sapiens
tgtggtggtgcacgc

SEQ ID NO: 174830 - DNA, 15 bp, Homo sapiens
gtgtggtggtgcacg

SEQ ID NO: 174831 - DNA, 15 bp, Homo sapiens
agtgtggtggtgcac

SEQ ID NO: 174832 - DNA, 15 bp, Homo sapiens
gagtgtggtggtgca

SEQ ID NO: 174833 - DNA, 15 bp, Homo sapiens
tgagtgtggtggtgc

SEQ ID NO: 174834 - DNA, 15 bp, Homo sapiens
ctgagtgtggtggtg

SEQ ID NO: 174835 - DNA, 15 bp, Homo sapiens
gctgagtgtggtggt

SEQ ID NO: 174836 - DNA, 15 bp, Homo sapiens
agctgagtgtggtgg

SEQ ID NO: 174837 - DNA, 15 bp, Homo sapiens
tagctgagtgtggtg

SEQ ID NO: 174838 - DNA, 15 bp, Homo sapiens
atagctgagtgtggt

SEQ ID NO: 174839 - DNA, 15 bp, Homo sapiens
aatagctgagtgtgg

SEQ ID NO: 174840 - DNA, 15 bp, Homo sapiens
aaatagctgagtgtg

SEQ ID NO: 174841 - DNA, 15 bp, Homo sapiens
aaaatagctgagtgt

SEQ ID NO: 174842 - DNA, 15 bp, Homo sapiens
aaaaatagctgagtg

SEQ ID NO: 174843 - DNA, 15 bp, Homo sapiens
aaaaaatagctgagt

SEQ ID NO: 174844 - DNA, 15 bp, Homo sapiens
aaaaaaatagctgag

SEQ ID NO: 174845 - DNA, 15 bp, Homo sapiens
aaaaaaaatagctga

SEQ ID NO: 174846 - DNA, 15 bp, Homo sapiens
caaaaaaaatagctg

SEQ ID NO: 174847 - DNA, 15 bp, Homo sapiens
acaaaaaaaatagct

SEQ ID NO: 174848 - DNA, 15 bp, Homo sapiens
cacaaaaaaaatagc

SEQ ID NO: 174849 - DNA, 15 bp, Homo sapiens
acacaaaaaaaatag

SEQ ID NO: 174850 - DNA, 15 bp, Homo sapiens
tacacaaaaaaaata

SEQ ID NO: 174851 - DNA, 15 bp, Homo sapiens
atacacaaaaaaaat

SEQ ID NO: 174852 - DNA, 15 bp, Homo sapiens
aatacacaaaaaaaa

SEQ ID NO: 174853 - DNA, 15 bp, Homo sapiens
aaatacacaaaaaaa

SEQ ID NO: 174854 - DNA, 15 bp, Homo sapiens
aaaatacacaaaaaa

SEQ ID NO: 174855 - DNA, 15 bp, Homo sapiens
aaaaatacacaaaaa

SEQ ID NO: 174856 - DNA, 15 bp, Homo sapiens
taaaaatacacaaaa

SEQ ID NO: 174857 - DNA, 15 bp, Homo sapiens
ctaaaaatacacaaa

SEQ ID NO: 174858 - DNA, 15 bp, Homo sapiens
actaaaaatacacaa

SEQ ID NO: 174859 - DNA, 15 bp, Homo sapiens
tactaaaaatacaca

SEQ ID NO: 174860 - DNA, 15 bp, Homo sapiens
ctactaaaaatacac

SEQ ID NO: 174861 - DNA, 15 bp, Homo sapiens
actctactaaaaata

SEQ ID NO: 174862 - DNA, 15 bp, Homo sapiens
aactctactaaaaat

SEQ ID NO: 174863 - DNA, 15 bp, Homo sapiens
caactctactaaaaa

SEQ ID NO: 174864 - DNA, 15 bp, Homo sapiens
ccaactctactaaaa

SEQ ID NO: 174865 - DNA, 15 bp, Homo sapiens
cccaactctactaaa

SEQ ID NO: 174866 - DNA, 15 bp, Homo sapiens
ccccaactctactaa

SEQ ID NO: 174867 - DNA, 15 bp, Homo sapiens
accccaactctacta

SEQ ID NO: 174868 - DNA, 15 bp, Homo sapiens
aaccccaactctact

SEQ ID NO: 174869 - DNA, 15 bp, Homo sapiens
aaaccccaactctac

SEQ ID NO: 174870 - DNA, 15 bp, Homo sapiens
gaaaccccaactcta

SEQ ID NO: 174871 - DNA, 15 bp, Homo sapiens
cgaaaccccaactct

SEQ ID NO: 174872 - DNA, 15 bp, Homo sapiens
gcgaaaccccaactc

SEQ ID NO: 174873 - DNA, 15 bp, Homo sapiens
ggcgaaaccccaact

SEQ ID NO: 174874 - DNA, 15 bp, Homo sapiens
gggcgaaaccccaac

SEQ ID NO: 174875 - DNA, 15 bp, Homo sapiens
agggcgaaaccccaa

SEQ ID NO: 174876 - DNA, 15 bp, Homo sapiens
cagggcgaaacccca

SEQ ID NO: 174877 - DNA, 15 bp, Homo sapiens
acagggcgaaacccc

SEQ ID NO: 174878 - DNA, 15 bp, Homo sapiens
aacagggcgaaaccc

SEQ ID NO: 174879 - DNA, 15 bp, Homo sapiens
caacagggcgaaacc

SEQ ID NO: 174880 - DNA, 15 bp, Homo sapiens
tcaacagggcgaaac

SEQ ID NO: 174881 - DNA, 15 bp, Homo sapiens
gtcaacagggcgaaa

SEQ ID NO: 174882 - DNA, 15 bp, Homo sapiens
ggtcaacagggcgaa

SEQ ID NO: 174883 - DNA, 15 bp, Homo sapiens
tggtcaacagggcga

SEQ ID NO: 174884 - DNA, 15 bp, Homo sapiens
ctggtcaacagggcg

SEQ ID NO: 174885 - DNA, 15 bp, Homo sapiens
cctggtcaacagggc

SEQ ID NO: 174886 - DNA, 15 bp, Homo sapiens
gcctggtcaacaggg

SEQ ID NO: 174887 - DNA, 15 bp, Homo sapiens
agcctggtcaacagg

SEQ ID NO: 174888 - DNA, 15 bp, Homo sapiens
cagcctggtcaacag

SEQ ID NO: 174889 - DNA, 15 bp, Homo sapiens
ccagcctggtcaaca

SEQ ID NO: 174890 - DNA, 15 bp, Homo sapiens
accagcctggtcaac

SEQ ID NO: 174891 - DNA, 15 bp, Homo sapiens
gaccagcctggtcaa

SEQ ID NO: 174892 - DNA, 15 bp, Homo sapiens
agaccagcctggtca

SEQ ID NO: 174893 - DNA, 15 bp, Homo sapiens
gagaccagcctggtc

SEQ ID NO: 174894 - DNA, 15 bp, Homo sapiens
ggagaccagcctggt

SEQ ID NO: 174895 - DNA, 15 bp, Homo sapiens
tggagaccagcctgg

SEQ ID NO: 174896 - DNA, 15 bp, Homo sapiens
ttggagaccagcctg

SEQ ID NO: 174897 - DNA, 15 bp, Homo sapiens
gttggagaccagcct

SEQ ID NO: 174898 - DNA, 15 bp, Homo sapiens
agttggagaccagcc

SEQ ID NO: 174899 - DNA, 15 bp, Homo sapiens
gagttggagaccagc

SEQ ID NO: 174900 - DNA, 15 bp, Homo sapiens
ggagttggagaccag

SEQ ID NO: 174901 - DNA, 15 bp, Homo sapiens
aggagttggagacca

SEQ ID NO: 174902 - DNA, 15 bp, Homo sapiens
caggagttggagacc

SEQ ID NO: 174903 - DNA, 15 bp, Homo sapiens
tcaggagttggagac

SEQ ID NO: 174904 - DNA, 15 bp, Homo sapiens
gtcaggagttggaga

SEQ ID NO: 174905 - DNA, 15 bp, Homo sapiens
ggtcaggagttggag

SEQ ID NO: 174906 - DNA, 15 bp, Homo sapiens
aggtcaggagttgga

SEQ ID NO: 174907 - DNA, 15 bp, Homo sapiens
gaggtcaggagttgg

SEQ ID NO: 174908 - DNA, 15 bp, Homo sapiens
tgaggtcaggagttg

SEQ ID NO: 174909 - DNA, 15 bp, Homo sapiens
ccctgaggtcaggag

SEQ ID NO: 174910 - DNA, 15 bp, Homo sapiens
cccctgaggtcagga

SEQ ID NO: 174911 - DNA, 15 bp, Homo sapiens
tcccctgaggtcagg

SEQ ID NO: 174912 - DNA, 15 bp, Homo sapiens
atcccctgaggtcag

SEQ ID NO: 174913 - DNA, 15 bp, Homo sapiens
gatcccctgaggtca

SEQ ID NO: 174914 - DNA, 15 bp, Homo sapiens
tgatcccctgaggtc

SEQ ID NO: 174915 - DNA, 15 bp, Homo sapiens
ctgatcccctgaggt

SEQ ID NO: 174916 - DNA, 15 bp, Homo sapiens
gctgatcccctgagg

SEQ ID NO: 174917 - DNA, 15 bp, Homo sapiens
ggctgatcccctgag

SEQ ID NO: 174918 - DNA, 15 bp, Homo sapiens
gggctgatcccctga

SEQ ID NO: 174919 - DNA, 15 bp, Homo sapiens
tgggctgatcccctg

SEQ ID NO: 174920 - DNA, 15 bp, Homo sapiens
gtgggctgatcccct

SEQ ID NO: 174921 - DNA, 15 bp, Homo sapiens
ggtgggctgatcccc

SEQ ID NO: 174922 - DNA, 15 bp, Homo sapiens
aggtgggctgatccc

SEQ ID NO: 174923 - DNA, 15 bp, Homo sapiens
gaggtgggctgatcc

SEQ ID NO: 174924 - DNA, 15 bp, Homo sapiens
cgaggtgggctgatc

SEQ ID NO: 174925 - DNA, 15 bp, Homo sapiens
ccgaggtgggctgat

SEQ ID NO: 174926 - DNA, 15 bp, Homo sapiens
gccgaggtgggctga

SEQ ID NO: 174927 - DNA, 15 bp, Homo sapiens
ggccgaggtgggctg

SEQ ID NO: 174928 - DNA, 15 bp, Homo sapiens
aggccgaggtgggct

SEQ ID NO: 174929 - DNA, 15 bp, Homo sapiens
gaggccgaggtgggc

SEQ ID NO: 174930 - DNA, 15 bp, Homo sapiens
ggaggccgaggtggg

SEQ ID NO: 174931 - DNA, 15 bp, Homo sapiens
gggaggccgaggtgg

SEQ ID NO: 174932 - DNA, 15 bp, Homo sapiens
cgggaggccgaggtg

SEQ ID NO: 174933 - DNA, 15 bp, Homo sapiens
tcgggaggccgaggt

SEQ ID NO: 174934 - DNA, 15 bp, Homo sapiens
ttcgggaggccgagg

SEQ ID NO: 174935 - DNA, 15 bp, Homo sapiens
cttcgggaggccgag

SEQ ID NO: 174936 - DNA, 15 bp, Homo sapiens
acttcgggaggccga

SEQ ID NO: 174937 - DNA, 15 bp, Homo sapiens
cacttcgggaggccg

SEQ ID NO: 174938 - DNA, 15 bp, Homo sapiens
gcacttcgggaggcc

SEQ ID NO: 174939 - DNA, 15 bp, Homo sapiens
agcacttcgggaggc

SEQ ID NO: 174940 - DNA, 15 bp, Homo sapiens
cagcacttcgggagg

SEQ ID NO: 174941 - DNA, 15 bp, Homo sapiens
ccagcacttcgggag

SEQ ID NO: 174942 - DNA, 15 bp, Homo sapiens
cccagcacttcggga

SEQ ID NO: 174943 - DNA, 15 bp, Homo sapiens
tcccagcacttcggg

SEQ ID NO: 174944 - DNA, 15 bp, Homo sapiens
atcccagcacttcgg

SEQ ID NO: 174945 - DNA, 15 bp, Homo sapiens
aatcccagcacttcg

SEQ ID NO: 174946 - DNA, 15 bp, Homo sapiens
taatcccagcacttc

SEQ ID NO: 174947 - DNA, 15 bp, Homo sapiens
gggcatggtggctca

SEQ ID NO: 174948 - DNA, 15 bp, Homo sapiens
tgggcatggtggctc

SEQ ID NO: 174949 - DNA, 15 bp, Homo sapiens
ctgggcatggtggct

SEQ ID NO: 174950 - DNA, 15 bp, Homo sapiens
ggctgggcatggtgg

SEQ ID NO: 174951 - DNA, 15 bp, Homo sapiens
aggctgggcatggtg

SEQ ID NO: 174952 - DNA, 15 bp, Homo sapiens
gagaaggctgggcat

SEQ ID NO: 174953 - DNA, 15 bp, Homo sapiens
ggagaaggctgggca

SEQ ID NO: 174954 - DNA, 15 bp, Homo sapiens
aggagaaggctgggc

SEQ ID NO: 174955 - DNA, 15 bp, Homo sapiens
taggagaaggctggg

SEQ ID NO: 174956 - DNA, 15 bp, Homo sapiens
ctaggagaaggctgg

SEQ ID NO: 174957 - DNA, 15 bp, Homo sapiens
actaggagaaggctg

SEQ ID NO: 174958 - DNA, 15 bp, Homo sapiens
cactaggagaaggct

SEQ ID NO: 174959 - DNA, 15 bp, Homo sapiens
tcactaggagaaggc

SEQ ID NO: 174960 - DNA, 15 bp, Homo sapiens
atcactaggagaagg

SEQ ID NO: 174961 - DNA, 15 bp, Homo sapiens
aatcactaggagaag

SEQ ID NO: 174962 - DNA, 15 bp, Homo sapiens
taagagtaatcacta

SEQ ID NO: 174963 - DNA, 15 bp, Homo sapiens
ttaagagtaatcact

SEQ ID NO: 174964 - DNA, 15 bp, Homo sapiens
tttaagagtaatcac

SEQ ID NO: 174965 - DNA, 15 bp, Homo sapiens
atttaagagtaatca

SEQ ID NO: 174966 - DNA, 15 bp, Homo sapiens
aatttaagagtaatc

SEQ ID NO: 174967 - DNA, 15 bp, Homo sapiens
aaatttaagagtaat

SEQ ID NO: 174968 - DNA, 15 bp, Homo sapiens
aaaatttaagagtaa

SEQ ID NO: 174969 - DNA, 15 bp, Homo sapiens
aaaaatttaagagta

SEQ ID NO: 174970 - DNA, 15 bp, Homo sapiens
caaaaatttaagagt

SEQ ID NO: 174971 - DNA, 15 bp, Homo sapiens
tcaaaaatttaagag

SEQ ID NO: 174972 - DNA, 15 bp, Homo sapiens
ctcaaaaatttaaga

SEQ ID NO: 174973 - DNA, 15 bp, Homo sapiens
tctcaaaaatttaag

SEQ ID NO: 174974 - DNA, 15 bp, Homo sapiens
atctcaaaaatttaa

SEQ ID NO: 174975 - DNA, 15 bp, Homo sapiens
tatctcaaaaattta

SEQ ID NO: 174976 - DNA, 15 bp, Homo sapiens
gtatctcaaaaattt

SEQ ID NO: 174977 - DNA, 15 bp, Homo sapiens
tgtatctcaaaaatt

SEQ ID NO: 174978 - DNA, 15 bp, Homo sapiens
atgtatctcaaaaat

SEQ ID NO: 174979 - DNA, 15 bp, Homo sapiens
aatgtatctcaaaaa

SEQ ID NO: 174980 - DNA, 15 bp, Homo sapiens
aaatgtatctcaaaa

SEQ ID NO: 174981 - DNA, 15 bp, Homo sapiens
aaaatgtatctcaaa

SEQ ID NO: 174982 - DNA, 15 bp, Homo sapiens
gaaaatgtatctcaa

SEQ ID NO: 174983 - DNA, 15 bp, Homo sapiens
tgaaaatgtatctca

SEQ ID NO: 174984 - DNA, 15 bp, Homo sapiens
atgaaaatgtatctc

SEQ ID NO: 174985 - DNA, 15 bp, Homo sapiens
tatgaaaatgtatct

SEQ ID NO: 174986 - DNA, 15 bp, Homo sapiens
ttatgaaaatgtatc

SEQ ID NO: 174987 - DNA, 15 bp, Homo sapiens
attatgaaaatgtat

SEQ ID NO: 174988 - DNA, 15 bp, Homo sapiens
aattatgaaaatgta

SEQ ID NO: 174989 - DNA, 15 bp, Homo sapiens
gaattatgaaaatgt

SEQ ID NO: 174990 - DNA, 15 bp, Homo sapiens
agaattatgaaaatg

SEQ ID NO: 174991 - DNA, 15 bp, Homo sapiens
cagaattatgaaaat

SEQ ID NO: 174992 - DNA, 15 bp, Homo sapiens
ccagaattatgaaaa

SEQ ID NO: 174993 - DNA, 15 bp, Homo sapiens
cccagaattatgaaa

SEQ ID NO: 174994 - DNA, 15 bp, Homo sapiens
tcccagaattatgaa

SEQ ID NO: 174995 - DNA, 15 bp, Homo sapiens
ttcccagaattatga

SEQ ID NO: 174996 - DNA, 15 bp, Homo sapiens
gttcccagaattatg

SEQ ID NO: 174997 - DNA, 15 bp, Homo sapiens
tgttcccagaattat

SEQ ID NO: 174998 - DNA, 15 bp, Homo sapiens
atgttcccagaatta

SEQ ID NO: 174999 - DNA, 15 bp, Homo sapiens
aatgttcccagaatt

SEQ ID NO: 175000 - DNA, 15 bp, Homo sapiens
caatgttcccagaat

SEQ ID NO: 175001 - DNA, 15 bp, Homo sapiens
tcaatgttcccagaa

SEQ ID NO: 175002 - DNA, 15 bp, Homo sapiens
ttcaatgttcccaga

SEQ ID NO: 175003 - DNA, 15 bp, Homo sapiens
tttcaatgttcccag

SEQ ID NO: 175004 - DNA, 15 bp, Homo sapiens
ctttcaatgttccca

SEQ ID NO: 175005 - DNA, 15 bp, Homo sapiens
actttcaatgttccc

SEQ ID NO: 175006 - DNA, 15 bp, Homo sapiens
cactttcaatgttcc

SEQ ID NO: 175007 - DNA, 15 bp, Homo sapiens
tcactttcaatgttc

SEQ ID NO: 175008 - DNA, 15 bp, Homo sapiens
atcactttcaatgtt

SEQ ID NO: 175009 - DNA, 15 bp, Homo sapiens
tatcactttcaatgt

SEQ ID NO: 175010 - DNA, 15 bp, Homo sapiens
ttatcactttcaatg

SEQ ID NO: 175011 - DNA, 15 bp, Homo sapiens
gttatcactttcaat

SEQ ID NO: 175012 - DNA, 15 bp, Homo sapiens
tgttatcactttcaa

SEQ ID NO: 175013 - DNA, 15 bp, Homo sapiens
ctgttatcactttca

SEQ ID NO: 175014 - DNA, 15 bp, Homo sapiens
actgttatcactttc

SEQ ID NO: 175015 - DNA, 15 bp, Homo sapiens
tactgttatcacttt

SEQ ID NO: 175016 - DNA, 15 bp, Homo sapiens
atactgttatcactt

SEQ ID NO: 175017 - DNA, 15 bp, Homo sapiens
aatactgttatcact

SEQ ID NO: 175018 - DNA, 15 bp, Homo sapiens
aaatactgttatcac

SEQ ID NO: 175019 - DNA, 15 bp, Homo sapiens
aaaatactgttatca

SEQ ID NO: 175020 - DNA, 15 bp, Homo sapiens
aaaaatactgttatc

SEQ ID NO: 175021 - DNA, 15 bp, Homo sapiens
taaaaatactgttat

SEQ ID NO: 175022 - DNA, 15 bp, Homo sapiens
gtaaaaatactgtta

SEQ ID NO: 175023 - DNA, 15 bp, Homo sapiens
agtaaaaatactgtt

SEQ ID NO: 175024 - DNA, 15 bp, Homo sapiens
gagtaaaaatactgt

SEQ ID NO: 175025 - DNA, 15 bp, Homo sapiens
tgagtaaaaatactg

SEQ ID NO: 175026 - DNA, 15 bp, Homo sapiens
ttgagtaaaaatact

SEQ ID NO: 175027 - DNA, 15 bp, Homo sapiens
tttgagtaaaaatac

SEQ ID NO: 175028 - DNA, 15 bp, Homo sapiens
atttgagtaaaaata

SEQ ID NO: 175029 - DNA, 15 bp, Homo sapiens
tatttgagtaaaaat

SEQ ID NO: 175030 - DNA, 15 bp, Homo sapiens
ttatttgagtaaaaa

SEQ ID NO: 175031 - DNA, 15 bp, Homo sapiens
attatttgagtaaaa

SEQ ID NO: 175032 - DNA, 15 bp, Homo sapiens
cattatttgagtaaa

SEQ ID NO: 175033 - DNA, 15 bp, Homo sapiens
acattatttgagtaa

SEQ ID NO: 175034 - DNA, 15 bp, Homo sapiens
tacattatttgagta

SEQ ID NO: 175035 - DNA, 15 bp, Homo sapiens
atacattatttgagt

SEQ ID NO: 175036 - DNA, 15 bp, Homo sapiens
aatacattatttgag

SEQ ID NO: 175037 - DNA, 15 bp, Homo sapiens
gaatacattatttga

SEQ ID NO: 175038 - DNA, 15 bp, Homo sapiens
tgaatacattatttg

SEQ ID NO: 175039 - DNA, 15 bp, Homo sapiens
ttgaatacattattt

SEQ ID NO: 175040 - DNA, 15 bp, Homo sapiens
tttgaatacattatt

SEQ ID NO: 175041 - DNA, 15 bp, Homo sapiens
ttttgaatacattat

SEQ ID NO: 175042 - DNA, 15 bp, Homo sapiens
attttgaatacatta

SEQ ID NO: 175043 - DNA, 15 bp, Homo sapiens
tattttgaatacatt

SEQ ID NO: 175044 - DNA, 15 bp, Homo sapiens
atattttgaatacat

SEQ ID NO: 175045 - DNA, 15 bp, Homo sapiens
aatattttgaataca

SEQ ID NO: 175046 - DNA, 15 bp, Homo sapiens
gaatattttgaatac

SEQ ID NO: 175047 - DNA, 15 bp, Homo sapiens
tgaatattttgaata

SEQ ID NO: 175048 - DNA, 15 bp, Homo sapiens
ctgaatattttgaat

SEQ ID NO: 175049 - DNA, 15 bp, Homo sapiens
gctgaatattttgaa

SEQ ID NO: 175050 - DNA, 15 bp, Homo sapiens
tgctgaatattttga

SEQ ID NO: 175051 - DNA, 15 bp, Homo sapiens
gtgctgaatattttg

SEQ ID NO: 175052 - DNA, 15 bp, Homo sapiens
tgtgctgaatatttt

SEQ ID NO: 175053 - DNA, 15 bp, Homo sapiens
ttgtgctgaatattt

SEQ ID NO: 175054 - DNA, 15 bp, Homo sapiens
attgtgctgaatatt

SEQ ID NO: 175055 - DNA, 15 bp, Homo sapiens
cattgtgctgaatat

SEQ ID NO: 175056 - DNA, 15 bp, Homo sapiens
gcattgtgctgaata

SEQ ID NO: 175057 - DNA, 15 bp, Homo sapiens
ggcattgtgctgaat

SEQ ID NO: 175058 - DNA, 15 bp, Homo sapiens
aggcattgtgctgaa

SEQ ID NO: 175059 - DNA, 15 bp, Homo sapiens
caggcattgtgctga

SEQ ID NO: 175060 - DNA, 15 bp, Homo sapiens
tcaggcattgtgctg

SEQ ID NO: 175061 - DNA, 15 bp, Homo sapiens
gtcaggcattgtgct

SEQ ID NO: 175062 - DNA, 15 bp, Homo sapiens
tgtcaggcattgtgc

SEQ ID NO: 175063 - DNA, 15 bp, Homo sapiens
ctgtcaggcattgtg

SEQ ID NO: 175064 - DNA, 15 bp, Homo sapiens
actgtcaggcattgt

SEQ ID NO: 175065 - DNA, 15 bp, Homo sapiens
gactgtcaggcattg

SEQ ID NO: 175066 - DNA, 15 bp, Homo sapiens
tgactgtcaggcatt

SEQ ID NO: 175067 - DNA, 15 bp, Homo sapiens
atgactgtcaggcat

SEQ ID NO: 175068 - DNA, 15 bp, Homo sapiens
aatgactgtcaggca

SEQ ID NO: 175069 - DNA, 15 bp, Homo sapiens
taatgactgtcaggc

SEQ ID NO: 175070 - DNA, 15 bp, Homo sapiens
ttaatgactgtcagg

SEQ ID NO: 175071 - DNA, 15 bp, Homo sapiens
tttaatgactgtcag

SEQ ID NO: 175072 - DNA, 15 bp, Homo sapiens
ttttaatgactgtca

SEQ ID NO: 175073 - DNA, 15 bp, Homo sapiens
attttaatgactgtc

SEQ ID NO: 175074 - DNA, 15 bp, Homo sapiens
cattttaatgactgt

SEQ ID NO: 175075 - DNA, 15 bp, Homo sapiens
gcattttaatgactg

SEQ ID NO: 175076 - DNA, 15 bp, Homo sapiens
tgcattttaatgact

SEQ ID NO: 175077 - DNA, 15 bp, Homo sapiens
atgcattttaatgac

SEQ ID NO: 175078 - DNA, 15 bp, Homo sapiens
tatgcattttaatga

SEQ ID NO: 175079 - DNA, 15 bp, Homo sapiens
ttatgcattttaatg

SEQ ID NO: 175080 - DNA, 15 bp, Homo sapiens
attatgcattttaat

SEQ ID NO: 175081 - DNA, 15 bp, Homo sapiens
tattatgcattttaa

SEQ ID NO: 175082 - DNA, 15 bp, Homo sapiens
ttattatgcatttta

SEQ ID NO: 175083 - DNA, 15 bp, Homo sapiens
tttattatgcatttt

SEQ ID NO: 175084 - DNA, 15 bp, Homo sapiens
atttattatgcattt

SEQ ID NO: 175085 - DNA, 15 bp, Homo sapiens
aatttattatgcatt

SEQ ID NO: 175086 - DNA, 15 bp, Homo sapiens
gaatttattatgcat

SEQ ID NO: 175087 - DNA, 15 bp, Homo sapiens
ggaatttattatgca

SEQ ID NO: 175088 - DNA, 15 bp, Homo sapiens
tggaatttattatgc

SEQ ID NO: 175089 - DNA, 15 bp, Homo sapiens
ttggaatttattatg

SEQ ID NO: 175090 - DNA, 15 bp, Homo sapiens
attggaatttattat

SEQ ID NO: 175091 - DNA, 15 bp, Homo sapiens
aattggaatttatta

SEQ ID NO: 175092 - DNA, 15 bp, Homo sapiens
caattggaatttatt

SEQ ID NO: 175093 - DNA, 15 bp, Homo sapiens
gcaattggaatttat

SEQ ID NO: 175094 - DNA, 15 bp, Homo sapiens
agcaattggaattta

SEQ ID NO: 175095 - DNA, 15 bp, Homo sapiens
tagcaattggaattt

SEQ ID NO: 175096 - DNA, 15 bp, Homo sapiens
ctagcaattggaatt

SEQ ID NO: 175097 - DNA, 15 bp, Homo sapiens
actagcaattggaat

SEQ ID NO: 175098 - DNA, 15 bp, Homo sapiens
cactagcaattggaa

SEQ ID NO: 175099 - DNA, 15 bp, Homo sapiens
gcactagcaattgga

SEQ ID NO: 175100 - DNA, 15 bp, Homo sapiens
agcactagcaattgg

SEQ ID NO: 175101 - DNA, 15 bp, Homo sapiens
tagcactagcaattg

SEQ ID NO: 175102 - DNA, 15 bp, Homo sapiens
ctagcactagcaatt

SEQ ID NO: 175103 - DNA, 15 bp, Homo sapiens
actagcactagcaat

SEQ ID NO: 175104 - DNA, 15 bp, Homo sapiens
gactagcactagcaa

SEQ ID NO: 175105 - DNA, 15 bp, Homo sapiens
agactagcactagca

SEQ ID NO: 175106 - DNA, 15 bp, Homo sapiens
aagactagcactagc

SEQ ID NO: 175107 - DNA, 15 bp, Homo sapiens
taagactagcactag

SEQ ID NO: 175108 - DNA, 15 bp, Homo sapiens
gtaagactagcacta

SEQ ID NO: 175109 - DNA, 15 bp, Homo sapiens
agtaagactagcact

SEQ ID NO: 175110 - DNA, 15 bp, Homo sapiens
tagtaagactagcac

SEQ ID NO: 175111 - DNA, 15 bp, Homo sapiens
gtagtaagactagca

SEQ ID NO: 175112 - DNA, 15 bp, Homo sapiens
agtagtaagactagc

SEQ ID NO: 175113 - DNA, 15 bp, Homo sapiens
cagtagtaagactag

SEQ ID NO: 175114 - DNA, 15 bp, Homo sapiens
gcagtagtaagacta

SEQ ID NO: 175115 - DNA, 15 bp, Homo sapiens
ggcagtagtaagact

SEQ ID NO: 175116 - DNA, 15 bp, Homo sapiens
tggcagtagtaagac

SEQ ID NO: 175117 - DNA, 15 bp, Homo sapiens
ctggcagtagtaaga

SEQ ID NO: 175118 - DNA, 15 bp, Homo sapiens
gctggcagtagtaag

SEQ ID NO: 175119 - DNA, 15 bp, Homo sapiens
tgctggcagtagtaa

SEQ ID NO: 175120 - DNA, 15 bp, Homo sapiens
gtgctggcagtagta

SEQ ID NO: 175121 - DNA, 15 bp, Homo sapiens
agtgctggcagtagt

SEQ ID NO: 175122 - DNA, 15 bp, Homo sapiens
tagtgctggcagtag

SEQ ID NO: 175123 - DNA, 15 bp, Homo sapiens
gtagtgctggcagta

SEQ ID NO: 175124 - DNA, 15 bp, Homo sapiens
tgtagtgctggcagt

SEQ ID NO: 175125 - DNA, 15 bp, Homo sapiens
ttgtagtgctggcag

SEQ ID NO: 175126 - DNA, 15 bp, Homo sapiens
attgtagtgctggca

SEQ ID NO: 175127 - DNA, 15 bp, Homo sapiens
aattgtagtgctggc

SEQ ID NO: 175128 - DNA, 15 bp, Homo sapiens
taattgtagtgctgg

SEQ ID NO: 175129 - DNA, 15 bp, Homo sapiens
ttaattgtagtgctg

SEQ ID NO: 175130 - DNA, 15 bp, Homo sapiens
attaattgtagtgct

SEQ ID NO: 175131 - DNA, 15 bp, Homo sapiens
tattaattgtagtgc

SEQ ID NO: 175132 - DNA, 15 bp, Homo sapiens
atattaattgtagtg

SEQ ID NO: 175133 - DNA, 15 bp, Homo sapiens
aatattaattgtagt

SEQ ID NO: 175134 - DNA, 15 bp, Homo sapiens
taatattaattgtag

SEQ ID NO: 175135 - DNA, 15 bp, Homo sapiens
gtaatattaattgta

SEQ ID NO: 175136 - DNA, 15 bp, Homo sapiens
ggtaatattaattgt

SEQ ID NO: 175137 - DNA, 15 bp, Homo sapiens
tggtaatattaattg

SEQ ID NO: 175138 - DNA, 15 bp, Homo sapiens
atggtaatattaatt

SEQ ID NO: 175139 - DNA, 15 bp, Homo sapiens
aatggtaatattaat

SEQ ID NO: 175140 - DNA, 15 bp, Homo sapiens
aaatggtaatattaa

SEQ ID NO: 175141 - DNA, 15 bp, Homo sapiens
aaaatggtaatatta

SEQ ID NO: 175142 - DNA, 15 bp, Homo sapiens
aaaaatggtaatatt

SEQ ID NO: 175143 - DNA, 15 bp, Homo sapiens
taaaaatggtaatat

SEQ ID NO: 175144 - DNA, 15 bp, Homo sapiens
gtaaaaatggtaata

SEQ ID NO: 175145 - DNA, 15 bp, Homo sapiens
ggtaaaaatggtaat

SEQ ID NO: 175146 - DNA, 15 bp, Homo sapiens
gggtaaaaatggtaa

SEQ ID NO: 175147 - DNA, 15 bp, Homo sapiens
tgggtaaaaatggta

SEQ ID NO: 175148 - DNA, 15 bp, Homo sapiens
ttgggtaaaaatggt

SEQ ID NO: 175149 - DNA, 15 bp, Homo sapiens
tttgggtaaaaatgg

SEQ ID NO: 175150 - DNA, 15 bp, Homo sapiens
ctttgggtaaaaatg

SEQ ID NO: 175151 - DNA, 15 bp, Homo sapiens
tctttgggtaaaaat

SEQ ID NO: 175152 - DNA, 15 bp, Homo sapiens
ctctttgggtaaaaa

SEQ ID NO: 175153 - DNA, 15 bp, Homo sapiens
gctctttgggtaaaa

SEQ ID NO: 175154 - DNA, 15 bp, Homo sapiens
ggctctttgggtaaa

SEQ ID NO: 175155 - DNA, 15 bp, Homo sapiens
tggctctttgggtaa

SEQ ID NO: 175156 - DNA, 15 bp, Homo sapiens
gtggctctttgggta

SEQ ID NO: 175157 - DNA, 15 bp, Homo sapiens
agtggctctttgggt

SEQ ID NO: 175158 - DNA, 15 bp, Homo sapiens
tagtggctctttggg

SEQ ID NO: 175159 - DNA, 15 bp, Homo sapiens
ttagtggctctttgg

SEQ ID NO: 175160 - DNA, 15 bp, Homo sapiens
cttagtggctctttg

SEQ ID NO: 175161 - DNA, 15 bp, Homo sapiens
acttagtggctcttt

SEQ ID NO: 175162 - DNA, 15 bp, Homo sapiens
tacttagtggctctt

SEQ ID NO: 175163 - DNA, 15 bp, Homo sapiens
atacttagtggctct

SEQ ID NO: 175164 - DNA, 15 bp, Homo sapiens
aatacttagtggctc

SEQ ID NO: 175165 - DNA, 15 bp, Homo sapiens
taatacttagtggct

SEQ ID NO: 175166 - DNA, 15 bp, Homo sapiens
ataatacttagtggc

SEQ ID NO: 175167 - DNA, 15 bp, Homo sapiens
aataatacttagtgg

SEQ ID NO: 175168 - DNA, 15 bp, Homo sapiens
aaataatacttagtg

SEQ ID NO: 175169 - DNA, 15 bp, Homo sapiens
aaaataatacttagt

SEQ ID NO: 175170 - DNA, 15 bp, Homo sapiens
aaaaataatacttag

SEQ ID NO: 175171 - DNA, 15 bp, Homo sapiens
taaaaataatactta

SEQ ID NO: 175172 - DNA, 15 bp, Homo sapiens
ataaaaataatactt

SEQ ID NO: 175173 - DNA, 15 bp, Homo sapiens
gataaaaataatact

SEQ ID NO: 175174 - DNA, 15 bp, Homo sapiens
ggataaaaataatac

SEQ ID NO: 175175 - DNA, 15 bp, Homo sapiens
tggataaaaataata

SEQ ID NO: 175176 - DNA, 15 bp, Homo sapiens
atggataaaaataat

SEQ ID NO: 175177 - DNA, 15 bp, Homo sapiens
tatggataaaaataa

SEQ ID NO: 175178 - DNA, 15 bp, Homo sapiens
ttatggataaaaata

SEQ ID NO: 175179 - DNA, 15 bp, Homo sapiens
cttatggataaaaat

SEQ ID NO: 175180 - DNA, 15 bp, Homo sapiens
acttatggataaaaa

SEQ ID NO: 175181 - DNA, 15 bp, Homo sapiens
tacttatggataaaa

SEQ ID NO: 175182 - DNA, 15 bp, Homo sapiens
atacttatggataaa

SEQ ID NO: 175183 - DNA, 15 bp, Homo sapiens
catacttatggataa

SEQ ID NO: 175184 - DNA, 15 bp, Homo sapiens
ccatacttatggata

SEQ ID NO: 175185 - DNA, 15 bp, Homo sapiens
accatacttatggat

SEQ ID NO: 175186 - DNA, 15 bp, Homo sapiens
taccatacttatgga

SEQ ID NO: 175187 - DNA, 15 bp, Homo sapiens
ataccatacttatgg

SEQ ID NO: 175188 - DNA, 15 bp, Homo sapiens
gataccatacttatg

SEQ ID NO: 175189 - DNA, 15 bp, Homo sapiens
tgataccatacttat

SEQ ID NO: 175190 - DNA, 15 bp, Homo sapiens
ttgataccatactta

SEQ ID NO: 175191 - DNA, 15 bp, Homo sapiens
cttgataccatactt

SEQ ID NO: 175192 - DNA, 15 bp, Homo sapiens
tcttgataccatact

SEQ ID NO: 175193 - DNA, 15 bp, Homo sapiens
ttcttgataccatac

SEQ ID NO: 175194 - DNA, 15 bp, Homo sapiens
cttcttgataccata

SEQ ID NO: 175195 - DNA, 15 bp, Homo sapiens
tcttcttgataccat

SEQ ID NO: 175196 - DNA, 15 bp, Homo sapiens
atcttcttgatacca

SEQ ID NO: 175197 - DNA, 15 bp, Homo sapiens
catcttcttgatacc

SEQ ID NO: 175198 - DNA, 15 bp, Homo sapiens
tcatcttcttgatac

SEQ ID NO: 175199 - DNA, 15 bp, Homo sapiens
ttcatcttcttgata

SEQ ID NO: 175200 - DNA, 15 bp, Homo sapiens
gttcatcttcttgat

SEQ ID NO: 175201 - DNA, 15 bp, Homo sapiens
tgttcatcttcttga

SEQ ID NO: 175202 - DNA, 15 bp, Homo sapiens
atgttcatcttcttg

SEQ ID NO: 175203 - DNA, 15 bp, Homo sapiens
aatgttcatcttctt

SEQ ID NO: 175204 - DNA, 15 bp, Homo sapiens
caatgttcatcttct

SEQ ID NO: 175205 - DNA, 15 bp, Homo sapiens
acaatgttcatcttc

SEQ ID NO: 175206 - DNA, 15 bp, Homo sapiens
cacaatgttcatctt

SEQ ID NO: 175207 - DNA, 15 bp, Homo sapiens
tcacaatgttcatct

SEQ ID NO: 175208 - DNA, 15 bp, Homo sapiens
ttcacaatgttcatc

SEQ ID NO: 175209 - DNA, 15 bp, Homo sapiens
tttcacaatgttcat

SEQ ID NO: 175210 - DNA, 15 bp, Homo sapiens
ctttcacaatgttca

SEQ ID NO: 175211 - DNA, 15 bp, Homo sapiens
actttcacaatgttc

SEQ ID NO: 175212 - DNA, 15 bp, Homo sapiens
aactttcacaatgtt

SEQ ID NO: 175213 - DNA, 15 bp, Homo sapiens
taactttcacaatgt

SEQ ID NO: 175214 - DNA, 15 bp, Homo sapiens
ataactttcacaatg

SEQ ID NO: 175215 - DNA, 15 bp, Homo sapiens
tataactttcacaat

SEQ ID NO: 175216 - DNA, 15 bp, Homo sapiens
atataactttcacaa

SEQ ID NO: 175217 - DNA, 15 bp, Homo sapiens
catataactttcaca

SEQ ID NO: 175218 - DNA, 15 bp, Homo sapiens
tcatataactttcac

SEQ ID NO: 175219 - DNA, 15 bp, Homo sapiens
ttcatataactttca

SEQ ID NO: 175220 - DNA, 15 bp, Homo sapiens
gttcatataactttc

SEQ ID NO: 175221 - DNA, 15 bp, Homo sapiens
tgttcatataacttt

SEQ ID NO: 175222 - DNA, 15 bp, Homo sapiens
ttgttcatataactt

SEQ ID NO: 175223 - DNA, 15 bp, Homo sapiens
tttgttcatataact

SEQ ID NO: 175224 - DNA, 15 bp, Homo sapiens
atttgttcatataac

SEQ ID NO: 175225 - DNA, 15 bp, Homo sapiens
aatttgttcatataa

SEQ ID NO: 175226 - DNA, 15 bp, Homo sapiens
taatttgttcatata

SEQ ID NO: 175227 - DNA, 15 bp, Homo sapiens
ataatttgttcatat

SEQ ID NO: 175228 - DNA, 15 bp, Homo sapiens
tataatttgttcata

SEQ ID NO: 175229 - DNA, 15 bp, Homo sapiens
ctataatttgttcat

SEQ ID NO: 175230 - DNA, 15 bp, Homo sapiens
actataatttgttca

SEQ ID NO: 175231 - DNA, 15 bp, Homo sapiens
gactataatttgttc

SEQ ID NO: 175232 - DNA, 15 bp, Homo sapiens
agactataatttgtt

SEQ ID NO: 175233 - DNA, 15 bp, Homo sapiens
cagactataatttgt

SEQ ID NO: 175234 - DNA, 15 bp, Homo sapiens
tcagactataatttg

SEQ ID NO: 175235 - DNA, 15 bp, Homo sapiens
ttcagactataattt

SEQ ID NO: 175236 - DNA, 15 bp, Homo sapiens
gttcagactataatt

SEQ ID NO: 175237 - DNA, 15 bp, Homo sapiens
tgttcagactataat

SEQ ID NO: 175238 - DNA, 15 bp, Homo sapiens
ctgttcagactataa

SEQ ID NO: 175239 - DNA, 15 bp, Homo sapiens
actgttcagactata

SEQ ID NO: 175240 - DNA, 15 bp, Homo sapiens
cactgttcagactat

SEQ ID NO: 175241 - DNA, 15 bp, Homo sapiens
gcactgttcagacta

SEQ ID NO: 175242 - DNA, 15 bp, Homo sapiens
ggcactgttcagact

SEQ ID NO: 175243 - DNA, 15 bp, Homo sapiens
tggcactgttcagac

SEQ ID NO: 175244 - DNA, 15 bp, Homo sapiens
ctggcactgttcaga

SEQ ID NO: 175245 - DNA, 15 bp, Homo sapiens
actggcactgttcag

SEQ ID NO: 175246 - DNA, 15 bp, Homo sapiens
aactggcactgttca

SEQ ID NO: 175247 - DNA, 15 bp, Homo sapiens
aaactggcactgttc

SEQ ID NO: 175248 - DNA, 15 bp, Homo sapiens
aaaactggcactgtt

SEQ ID NO: 175249 - DNA, 15 bp, Homo sapiens
aaaaactggcactgt

SEQ ID NO: 175250 - DNA, 15 bp, Homo sapiens
gaaaaactggcactg

SEQ ID NO: 175251 - DNA, 15 bp, Homo sapiens
ggaaaaactggcact

SEQ ID NO: 175252 - DNA, 15 bp, Homo sapiens
gggaaaaactggcac

SEQ ID NO: 175253 - DNA, 15 bp, Homo sapiens
tgggaaaaactggca

SEQ ID NO: 175254 - DNA, 15 bp, Homo sapiens
ttgggaaaaactggc

SEQ ID NO: 175255 - DNA, 15 bp, Homo sapiens
tttgggaaaaactgg

SEQ ID NO: 175256 - DNA, 15 bp, Homo sapiens
ctttgggaaaaactg

SEQ ID NO: 175257 - DNA, 15 bp, Homo sapiens
cctttgggaaaaact

SEQ ID NO: 175258 - DNA, 15 bp, Homo sapiens
tcctttgggaaaaac

SEQ ID NO: 175259 - DNA, 15 bp, Homo sapiens
ctcctttgggaaaaa

SEQ ID NO: 175260 - DNA, 15 bp, Homo sapiens
actcctttgggaaaa

SEQ ID NO: 175261 - DNA, 15 bp, Homo sapiens
aactcctttgggaaa

SEQ ID NO: 175262 - DNA, 15 bp, Homo sapiens
aaactcctttgggaa

SEQ ID NO: 175263 - DNA, 15 bp, Homo sapiens
caaactcctttggga

SEQ ID NO: 175264 - DNA, 15 bp, Homo sapiens
gcaaactcctttggg

SEQ ID NO: 175265 - DNA, 15 bp, Homo sapiens
agcaaactcctttgg

SEQ ID NO: 175266 - DNA, 15 bp, Homo sapiens
gagcaaactcctttg

SEQ ID NO: 175267 - DNA, 15 bp, Homo sapiens
tgagcaaactccttt

SEQ ID NO: 175268 - DNA, 15 bp, Homo sapiens
atgagcaaactcctt

SEQ ID NO: 175269 - DNA, 15 bp, Homo sapiens
aatgagcaaactcct

SEQ ID NO: 175270 - DNA, 15 bp, Homo sapiens
aaatgagcaaactcc

SEQ ID NO: 175271 - DNA, 15 bp, Homo sapiens
caaatgagcaaactc

SEQ ID NO: 175272 - DNA, 15 bp, Homo sapiens
acaaatgagcaaact

SEQ ID NO: 175273 - DNA, 15 bp, Homo sapiens
tacaaatgagcaaac

SEQ ID NO: 175274 - DNA, 15 bp, Homo sapiens
ttacaaatgagcaaa

SEQ ID NO: 175275 - DNA, 15 bp, Homo sapiens
tttacaaatgagcaa

SEQ ID NO: 175276 - DNA, 15 bp, Homo sapiens
ttttacaaatgagca

SEQ ID NO: 175277 - DNA, 15 bp, Homo sapiens
attttacaaatgagc

SEQ ID NO: 175278 - DNA, 15 bp, Homo sapiens
cattttacaaatgag

SEQ ID NO: 175279 - DNA, 15 bp, Homo sapiens
acattttacaaatga

SEQ ID NO: 175280 - DNA, 15 bp, Homo sapiens
aacattttacaaatg

SEQ ID NO: 175281 - DNA, 15 bp, Homo sapiens
taacattttacaaat

SEQ ID NO: 175282 - DNA, 15 bp, Homo sapiens
ataacattttacaaa

SEQ ID NO: 175283 - DNA, 15 bp, Homo sapiens
tataacattttacaa

SEQ ID NO: 175284 - DNA, 15 bp, Homo sapiens
gtataacattttaca

SEQ ID NO: 175285 - DNA, 15 bp, Homo sapiens
agtataacattttac

SEQ ID NO: 175286 - DNA, 15 bp, Homo sapiens
cagtataacatttta

SEQ ID NO: 175287 - DNA, 15 bp, Homo sapiens
tcagtataacatttt

SEQ ID NO: 175288 - DNA, 15 bp, Homo sapiens
atcagtataacattt

SEQ ID NO: 175289 - DNA, 15 bp, Homo sapiens
aatcagtataacatt

SEQ ID NO: 175290 - DNA, 15 bp, Homo sapiens
taatcagtataacat

SEQ ID NO: 175291 - DNA, 15 bp, Homo sapiens
ataatcagtataaca

SEQ ID NO: 175292 - DNA, 15 bp, Homo sapiens
aataatcagtataac

SEQ ID NO: 175293 - DNA, 15 bp, Homo sapiens
gaataatcagtataa

SEQ ID NO: 175294 - DNA, 15 bp, Homo sapiens
tgaataatcagtata

SEQ ID NO: 175295 - DNA, 15 bp, Homo sapiens
ttgaataatcagtat

SEQ ID NO: 175296 - DNA, 15 bp, Homo sapiens
attgaataatcagta

SEQ ID NO: 175297 - DNA, 15 bp, Homo sapiens
cattgaataatcagt

SEQ ID NO: 175298 - DNA, 15 bp, Homo sapiens
tcattgaataatcag

SEQ ID NO: 175299 - DNA, 15 bp, Homo sapiens
ctcattgaataatca

SEQ ID NO: 175300 - DNA, 15 bp, Homo sapiens
cctcattgaataatc

SEQ ID NO: 175301 - DNA, 15 bp, Homo sapiens
acctcattgaataat

SEQ ID NO: 175302 - DNA, 15 bp, Homo sapiens
tacctcattgaataa

SEQ ID NO: 175303 - DNA, 15 bp, Homo sapiens
ttacctcattgaata

SEQ ID NO: 175304 - DNA, 15 bp, Homo sapiens
cttacctcattgaat

SEQ ID NO: 175305 - DNA, 15 bp, Homo sapiens
acttacctcattgaa

SEQ ID NO: 175306 - DNA, 15 bp, Homo sapiens
aacttacctcattga

SEQ ID NO: 175307 - DNA, 15 bp, Homo sapiens
gaacttacctcattg

SEQ ID NO: 175308 - DNA, 15 bp, Homo sapiens
agaacttacctcatt

SEQ ID NO: 175309 - DNA, 15 bp, Homo sapiens
cagaacttacctcat

SEQ ID NO: 175310 - DNA, 15 bp, Homo sapiens
gcagaacttacctca

SEQ ID NO: 175311 - DNA, 15 bp, Homo sapiens
tgcagaacttacctc

SEQ ID NO: 175312 - DNA, 15 bp, Homo sapiens
ctgcagaacttacct

SEQ ID NO: 175313 - DNA, 15 bp, Homo sapiens
tctgcagaacttacc

SEQ ID NO: 175314 - DNA, 15 bp, Homo sapiens
ctctgcagaacttac

SEQ ID NO: 175315 - DNA, 15 bp, Homo sapiens
actctgcagaactta

SEQ ID NO: 175316 - DNA, 15 bp, Homo sapiens
cactctgcagaactt

SEQ ID NO: 175317 - DNA, 15 bp, Homo sapiens
gcactctgcagaact

SEQ ID NO: 175318 - DNA, 15 bp, Homo sapiens
agcactctgcagaac

SEQ ID NO: 175319 - DNA, 15 bp, Homo sapiens
aagcactctgcagaa

SEQ ID NO: 175320 - DNA, 15 bp, Homo sapiens
taagcactctgcaga

SEQ ID NO: 175321 - DNA, 15 bp, Homo sapiens
ctaagcactctgcag

SEQ ID NO: 175322 - DNA, 15 bp, Homo sapiens
gctaagcactctgca

SEQ ID NO: 175323 - DNA, 15 bp, Homo sapiens
ggctaagcactctgc

SEQ ID NO: 175324 - DNA, 15 bp, Homo sapiens
gggctaagcactctg

SEQ ID NO: 175325 - DNA, 15 bp, Homo sapiens
tgggctaagcactct

SEQ ID NO: 175326 - DNA, 15 bp, Homo sapiens
gtgggctaagcactc

SEQ ID NO: 175327 - DNA, 15 bp, Homo sapiens
tgtgggctaagcact

SEQ ID NO: 175328 - DNA, 15 bp, Homo sapiens
ctgtgggctaagcac

SEQ ID NO: 175329 - DNA, 15 bp, Homo sapiens
actgtgggctaagca

SEQ ID NO: 175330 - DNA, 15 bp, Homo sapiens
tactgtgggctaagc

SEQ ID NO: 175331 - DNA, 15 bp, Homo sapiens
ctactgtgggctaag

SEQ ID NO: 175332 - DNA, 15 bp, Homo sapiens
cctactgtgggctaa

SEQ ID NO: 175333 - DNA, 15 bp, Homo sapiens
acctactgtgggcta

SEQ ID NO: 175334 - DNA, 15 bp, Homo sapiens
cacctactgtgggct

SEQ ID NO: 175335 - DNA, 15 bp, Homo sapiens
gcacctactgtgggc

SEQ ID NO: 175336 - DNA, 15 bp, Homo sapiens
agcacctactgtggg

SEQ ID NO: 175337 - DNA, 15 bp, Homo sapiens
gagcacctactgtgg

SEQ ID NO: 175338 - DNA, 15 bp, Homo sapiens
tgagcacctactgtg

SEQ ID NO: 175339 - DNA, 15 bp, Homo sapiens
ttgagcacctactgt

SEQ ID NO: 175340 - DNA, 15 bp, Homo sapiens
attgagcacctactg

SEQ ID NO: 175341 - DNA, 15 bp, Homo sapiens
gattgagcacctact

SEQ ID NO: 175342 - DNA, 15 bp, Homo sapiens
tgattgagcacctac

SEQ ID NO: 175343 - DNA, 15 bp, Homo sapiens
gtgattgagcaccta

SEQ ID NO: 175344 - DNA, 15 bp, Homo sapiens
agtgattgagcacct

SEQ ID NO: 175345 - DNA, 15 bp, Homo sapiens
cagtgattgagcacc

SEQ ID NO: 175346 - DNA, 15 bp, Homo sapiens
acagtgattgagcac

SEQ ID NO: 175347 - DNA, 15 bp, Homo sapiens
aacagtgattgagca

SEQ ID NO: 175348 - DNA, 15 bp, Homo sapiens
taacagtgattgagc

SEQ ID NO: 175349 - DNA, 15 bp, Homo sapiens
ctaacagtgattgag

SEQ ID NO: 175350 - DNA, 15 bp, Homo sapiens
gctaacagtgattga

SEQ ID NO: 175351 - DNA, 15 bp, Homo sapiens
ggctaacagtgattg

SEQ ID NO: 175352 - DNA, 15 bp, Homo sapiens
aggctaacagtgatt

SEQ ID NO: 175353 - DNA, 15 bp, Homo sapiens
aaggctaacagtgat

SEQ ID NO: 175354 - DNA, 15 bp, Homo sapiens
aaaggctaacagtga

SEQ ID NO: 175355 - DNA, 15 bp, Homo sapiens
taaaggctaacagtg

SEQ ID NO: 175356 - DNA, 15 bp, Homo sapiens
ataaaggctaacagt

SEQ ID NO: 175357 - DNA, 15 bp, Homo sapiens
tataaaggctaacag

SEQ ID NO: 175358 - DNA, 15 bp, Homo sapiens
atataaaggctaaca

SEQ ID NO: 175359 - DNA, 15 bp, Homo sapiens
catataaaggctaac

SEQ ID NO: 175360 - DNA, 15 bp, Homo sapiens
ccatataaaggctaa

SEQ ID NO: 175361 - DNA, 15 bp, Homo sapiens
tccatataaaggcta

SEQ ID NO: 175362 - DNA, 15 bp, Homo sapiens
atccatataaaggct

SEQ ID NO: 175363 - DNA, 15 bp, Homo sapiens
tatccatataaaggc

SEQ ID NO: 175364 - DNA, 15 bp, Homo sapiens
gtatccatataaagg

SEQ ID NO: 175365 - DNA, 15 bp, Homo sapiens
ggtatccatataaag

SEQ ID NO: 175366 - DNA, 15 bp, Homo sapiens
tggtatccatataaa

SEQ ID NO: 175367 - DNA, 15 bp, Homo sapiens
ttggtatccatataa

SEQ ID NO: 175368 - DNA, 15 bp, Homo sapiens
gttggtatccatata

SEQ ID NO: 175369 - DNA, 15 bp, Homo sapiens
ggttggtatccatat

SEQ ID NO: 175370 - DNA, 15 bp, Homo sapiens
aggttggtatccata

SEQ ID NO: 175371 - DNA, 15 bp, Homo sapiens
caggttggtatccat

SEQ ID NO: 175372 - DNA, 15 bp, Homo sapiens
ccaggttggtatcca

SEQ ID NO: 175373 - DNA, 15 bp, Homo sapiens
tccaggttggtatcc

SEQ ID NO: 175374 - DNA, 15 bp, Homo sapiens
gtccaggttggtatc

SEQ ID NO: 175375 - DNA, 15 bp, Homo sapiens
agtccaggttggtat

SEQ ID NO: 175376 - DNA, 15 bp, Homo sapiens
aagtccaggttggta

SEQ ID NO: 175377 - DNA, 15 bp, Homo sapiens
gaagtccaggttggt

SEQ ID NO: 175378 - DNA, 15 bp, Homo sapiens
ggaagtccaggttgg

SEQ ID NO: 175379 - DNA, 15 bp, Homo sapiens
gggaagtccaggttg

SEQ ID NO: 175380 - DNA, 15 bp, Homo sapiens
agggaagtccaggtt

SEQ ID NO: 175381 - DNA, 15 bp, Homo sapiens
aagggaagtccaggt

SEQ ID NO: 175382 - DNA, 15 bp, Homo sapiens
aaagggaagtccagg

SEQ ID NO: 175383 - DNA, 15 bp, Homo sapiens
aaaagggaagtccag

SEQ ID NO: 175384 - DNA, 15 bp, Homo sapiens
taaaagggaagtcca

SEQ ID NO: 175385 - DNA, 15 bp, Homo sapiens
ttaaaagggaagtcc

SEQ ID NO: 175386 - DNA, 15 bp, Homo sapiens
tttaaaagggaagtc

SEQ ID NO: 175387 - DNA, 15 bp, Homo sapiens
ttttaaaagggaagt

SEQ ID NO: 175388 - DNA, 15 bp, Homo sapiens
gttttaaaagggaag

SEQ ID NO: 175389 - DNA, 15 bp, Homo sapiens
tgttttaaaagggaa

SEQ ID NO: 175390 - DNA, 15 bp, Homo sapiens
gtgttttaaaaggga

SEQ ID NO: 175391 - DNA, 15 bp, Homo sapiens
ggtgttttaaaaggg

SEQ ID NO: 175392 - DNA, 15 bp, Homo sapiens
gggtgttttaaaagg

SEQ ID NO: 175393 - DNA, 15 bp, Homo sapiens
ggggtgttttaaaag

SEQ ID NO: 175394 - DNA, 15 bp, Homo sapiens
tggggtgttttaaaa

SEQ ID NO: 175395 - DNA, 15 bp, Homo sapiens
ctggggtgttttaaa

SEQ ID NO: 175396 - DNA, 15 bp, Homo sapiens
gctggggtgttttaa

SEQ ID NO: 175397 - DNA, 15 bp, Homo sapiens
agctggggtgtttta

SEQ ID NO: 175398 - DNA, 15 bp, Homo sapiens
aagctggggtgtttt

SEQ ID NO: 175399 - DNA, 15 bp, Homo sapiens
aaagctggggtgttt

SEQ ID NO: 175400 - DNA, 15 bp, Homo sapiens
caaagctggggtgtt

SEQ ID NO: 175401 - DNA, 15 bp, Homo sapiens
gcaaagctggggtgt

SEQ ID NO: 175402 - DNA, 15 bp, Homo sapiens
ggcaaagctggggtg

SEQ ID NO: 175403 - DNA, 15 bp, Homo sapiens
aggcaaagctggggt

SEQ ID NO: 175404 - DNA, 15 bp, Homo sapiens
aaggcaaagctgggg

SEQ ID NO: 175405 - DNA, 15 bp, Homo sapiens
taaggcaaagctggg

SEQ ID NO: 175406 - DNA, 15 bp, Homo sapiens
ataaggcaaagctgg

SEQ ID NO: 175407 - DNA, 15 bp, Homo sapiens
aataaggcaaagctg

SEQ ID NO: 175408 - DNA, 15 bp, Homo sapiens
caataaggcaaagct

SEQ ID NO: 175409 - DNA, 15 bp, Homo sapiens
gcaataaggcaaagc

SEQ ID NO: 175410 - DNA, 15 bp, Homo sapiens
agcaataaggcaaag

SEQ ID NO: 175411 - DNA, 15 bp, Homo sapiens
gagcaataaggcaaa

SEQ ID NO: 175412 - DNA, 15 bp, Homo sapiens
agagcaataaggcaa

SEQ ID NO: 175413 - DNA, 15 bp, Homo sapiens
cagagcaataaggca

SEQ ID NO: 175414 - DNA, 15 bp, Homo sapiens
gcagagcaataaggc

SEQ ID NO: 175415 - DNA, 15 bp, Homo sapiens
tgcagagcaataagg

SEQ ID NO: 175416 - DNA, 15 bp, Homo sapiens
ttgcagagcaataag

SEQ ID NO: 175417 - DNA, 15 bp, Homo sapiens
cttgcagagcaataa

SEQ ID NO: 175418 - DNA, 15 bp, Homo sapiens
gcttgcagagcaata

SEQ ID NO: 175419 - DNA, 15 bp, Homo sapiens
ggcttgcagagcaat

SEQ ID NO: 175420 - DNA, 15 bp, Homo sapiens
tggcttgcagagcaa

SEQ ID NO: 175421 - DNA, 15 bp, Homo sapiens
ctggcttgcagagca

SEQ ID NO: 175422 - DNA, 15 bp, Homo sapiens
actggcttgcagagc

SEQ ID NO: 175423 - DNA, 15 bp, Homo sapiens
aactggcttgcagag

SEQ ID NO: 175424 - DNA, 15 bp, Homo sapiens
gaactggcttgcaga

SEQ ID NO: 175425 - DNA, 15 bp, Homo sapiens
agaactggcttgcag

SEQ ID NO: 175426 - DNA, 15 bp, Homo sapiens
tagaactggcttgca

SEQ ID NO: 175427 - DNA, 15 bp, Homo sapiens
ctagaactggcttgc

SEQ ID NO: 175428 - DNA, 15 bp, Homo sapiens
cctagaactggcttg

SEQ ID NO: 175429 - DNA, 15 bp, Homo sapiens
gcctagaactggctt

SEQ ID NO: 175430 - DNA, 15 bp, Homo sapiens
tgcctagaactggct

SEQ ID NO: 175431 - DNA, 15 bp, Homo sapiens
atgcctagaactggc

SEQ ID NO: 175432 - DNA, 15 bp, Homo sapiens
catgcctagaactgg

SEQ ID NO: 175433 - DNA, 15 bp, Homo sapiens
acatgcctagaactg

SEQ ID NO: 175434 - DNA, 15 bp, Homo sapiens
cacatgcctagaact

SEQ ID NO: 175435 - DNA, 15 bp, Homo sapiens
acacatgcctagaac

SEQ ID NO: 175436 - DNA, 15 bp, Homo sapiens
gacacatgcctagaa

SEQ ID NO: 175437 - DNA, 15 bp, Homo sapiens
agacacatgcctaga

SEQ ID NO: 175438 - DNA, 15 bp, Homo sapiens
gagacacatgcctag

SEQ ID NO: 175439 - DNA, 15 bp, Homo sapiens
agagacacatgccta

SEQ ID NO: 175440 - DNA, 15 bp, Homo sapiens
aagagacacatgcct

SEQ ID NO: 175441 - DNA, 15 bp, Homo sapiens
aaagagacacatgcc

SEQ ID NO: 175442 - DNA, 15 bp, Homo sapiens
caaagagacacatgc

SEQ ID NO: 175443 - DNA, 15 bp, Homo sapiens
ccaaagagacacatg

SEQ ID NO: 175444 - DNA, 15 bp, Homo sapiens
gccaaagagacacat

SEQ ID NO: 175445 - DNA, 15 bp, Homo sapiens
agccaaagagacaca

SEQ ID NO: 175446 - DNA, 15 bp, Homo sapiens
cagccaaagagacac

SEQ ID NO: 175447 - DNA, 15 bp, Homo sapiens
acagccaaagagaca

SEQ ID NO: 175448 - DNA, 15 bp, Homo sapiens
cacagccaaagagac

SEQ ID NO: 175449 - DNA, 15 bp, Homo sapiens
tcacagccaaagaga

SEQ ID NO: 175450 - DNA, 15 bp, Homo sapiens
gtcacagccaaagag

SEQ ID NO: 175451 - DNA, 15 bp, Homo sapiens
ggtcacagccaaaga

SEQ ID NO: 175452 - DNA, 15 bp, Homo sapiens
gggtcacagccaaag

SEQ ID NO: 175453 - DNA, 15 bp, Homo sapiens
agggtcacagccaaa

SEQ ID NO: 175454 - DNA, 15 bp, Homo sapiens
cagggtcacagccaa

SEQ ID NO: 175455 - DNA, 15 bp, Homo sapiens
ccagggtcacagcca

SEQ ID NO: 175456 - DNA, 15 bp, Homo sapiens
tccagggtcacagcc

SEQ ID NO: 175457 - DNA, 15 bp, Homo sapiens
atccagggtcacagc

SEQ ID NO: 175458 - DNA, 15 bp, Homo sapiens
gatccagggtcacag

SEQ ID NO: 175459 - DNA, 15 bp, Homo sapiens
ggatccagggtcaca

SEQ ID NO: 175460 - DNA, 15 bp, Homo sapiens
tggatccagggtcac

SEQ ID NO: 175461 - DNA, 15 bp, Homo sapiens
ttggatccagggtca

SEQ ID NO: 175462 - DNA, 15 bp, Homo sapiens
tttggatccagggtc

SEQ ID NO: 175463 - DNA, 15 bp, Homo sapiens
ctttggatccagggt

SEQ ID NO: 175464 - DNA, 15 bp, Homo sapiens
gctttggatccaggg

SEQ ID NO: 175465 - DNA, 15 bp, Homo sapiens
agctttggatccagg

SEQ ID NO: 175466 - DNA, 15 bp, Homo sapiens
aagctttggatccag

SEQ ID NO: 175467 - DNA, 15 bp, Homo sapiens
aaagctttggatcca

SEQ ID NO: 175468 - DNA, 15 bp, Homo sapiens
aaaagctttggatcc

SEQ ID NO: 175469 - DNA, 15 bp, Homo sapiens
caaaagctttggatc

SEQ ID NO: 175470 - DNA, 15 bp, Homo sapiens
ccaaaagctttggat

SEQ ID NO: 175471 - DNA, 15 bp, Homo sapiens
cccaaaagctttgga

SEQ ID NO: 175472 - DNA, 15 bp, Homo sapiens
ccccaaaagctttgg

SEQ ID NO: 175473 - DNA, 15 bp, Homo sapiens
tccccaaaagctttg

SEQ ID NO: 175474 - DNA, 15 bp, Homo sapiens
gtccccaaaagcttt

SEQ ID NO: 175475 - DNA, 15 bp, Homo sapiens
agtccccaaaagctt

SEQ ID NO: 175476 - DNA, 15 bp, Homo sapiens
cagtccccaaaagct

SEQ ID NO: 175477 - DNA, 15 bp, Homo sapiens
tcagtccccaaaagc

SEQ ID NO: 175478 - DNA, 15 bp, Homo sapiens
ctcagtccccaaaag

SEQ ID NO: 175479 - DNA, 15 bp, Homo sapiens
actcagtccccaaaa

SEQ ID NO: 175480 - DNA, 15 bp, Homo sapiens
cactcagtccccaaa

SEQ ID NO: 175481 - DNA, 15 bp, Homo sapiens
acactcagtccccaa

SEQ ID NO: 175482 - DNA, 15 bp, Homo sapiens
cacactcagtcccca

SEQ ID NO: 175483 - DNA, 15 bp, Homo sapiens
ccacactcagtcccc

SEQ ID NO: 175484 - DNA, 15 bp, Homo sapiens
tccacactcagtccc

SEQ ID NO: 175485 - DNA, 15 bp, Homo sapiens
atccacactcagtcc

SEQ ID NO: 175486 - DNA, 15 bp, Homo sapiens
catccacactcagtc

SEQ ID NO: 175487 - DNA, 15 bp, Homo sapiens
acatccacactcagt

SEQ ID NO: 175488 - DNA, 15 bp, Homo sapiens
cacatccacactcag

SEQ ID NO: 175489 - DNA, 15 bp, Homo sapiens
tcacatccacactca

SEQ ID NO: 175490 - DNA, 15 bp, Homo sapiens
gtcacatccacactc

SEQ ID NO: 175491 - DNA, 15 bp, Homo sapiens
agtcacatccacact

SEQ ID NO: 175492 - DNA, 15 bp, Homo sapiens
cagtcacatccacac

SEQ ID NO: 175493 - DNA, 15 bp, Homo sapiens
gcagtcacatccaca

SEQ ID NO: 175494 - DNA, 15 bp, Homo sapiens
agcagtcacatccac

SEQ ID NO: 175495 - DNA, 15 bp, Homo sapiens
gagcagtcacatcca

SEQ ID NO: 175496 - DNA, 15 bp, Homo sapiens
agagcagtcacatcc

SEQ ID NO: 175497 - DNA, 15 bp, Homo sapiens
cagagcagtcacatc

SEQ ID NO: 175498 - DNA, 15 bp, Homo sapiens
gcagagcagtcacat

SEQ ID NO: 175499 - DNA, 15 bp, Homo sapiens
agcagagcagtcaca

SEQ ID NO: 175500 - DNA, 15 bp, Homo sapiens
gagcagagcagtcac

SEQ ID NO: 175501 - DNA, 15 bp, Homo sapiens
ggagcagagcagtca

SEQ ID NO: 175502 - DNA, 15 bp, Homo sapiens
tggagcagagcagtc

SEQ ID NO: 175503 - DNA, 15 bp, Homo sapiens
gtggagcagagcagt

SEQ ID NO: 175504 - DNA, 15 bp, Homo sapiens
ggtggagcagagcag

SEQ ID NO: 175505 - DNA, 15 bp, Homo sapiens
aggtggagcagagca

SEQ ID NO: 175506 - DNA, 15 bp, Homo sapiens
caggtggagcagagc

SEQ ID NO: 175507 - DNA, 15 bp, Homo sapiens
ccaggtggagcagag

SEQ ID NO: 175508 - DNA, 15 bp, Homo sapiens
gccaggtggagcaga

SEQ ID NO: 175509 - DNA, 15 bp, Homo sapiens
agccaggtggagcag

SEQ ID NO: 175510 - DNA, 15 bp, Homo sapiens
cagccaggtggagca

SEQ ID NO: 175511 - DNA, 15 bp, Homo sapiens
ccagccaggtggagc

SEQ ID NO: 175512 - DNA, 15 bp, Homo sapiens
cccagccaggtggag

SEQ ID NO: 175513 - DNA, 15 bp, Homo sapiens
tcccagccaggtgga

SEQ ID NO: 175514 - DNA, 15 bp, Homo sapiens
gtcccagccaggtgg

SEQ ID NO: 175515 - DNA, 15 bp, Homo sapiens
tgtcccagccaggtg

SEQ ID NO: 175516 - DNA, 15 bp, Homo sapiens
atgtcccagccaggt

SEQ ID NO: 175517 - DNA, 15 bp, Homo sapiens
tatgtcccagccagg

SEQ ID NO: 175518 - DNA, 15 bp, Homo sapiens
ctatgtcccagccag

SEQ ID NO: 175519 - DNA, 15 bp, Homo sapiens
gctatgtcccagcca

SEQ ID NO: 175520 - DNA, 15 bp, Homo sapiens
tgctatgtcccagcc

SEQ ID NO: 175521 - DNA, 15 bp, Homo sapiens
ctgctatgtcccagc

SEQ ID NO: 175522 - DNA, 15 bp, Homo sapiens
cctgctatgtcccag

SEQ ID NO: 175523 - DNA, 15 bp, Homo sapiens
tcctgctatgtccca

SEQ ID NO: 175524 - DNA, 15 bp, Homo sapiens
gtcctgctatgtccc

SEQ ID NO: 175525 - DNA, 15 bp, Homo sapiens
tgtcctgctatgtcc

SEQ ID NO: 175526 - DNA, 15 bp, Homo sapiens
ctgtcctgctatgtc

SEQ ID NO: 175527 - DNA, 15 bp, Homo sapiens
cctgtcctgctatgt

SEQ ID NO: 175528 - DNA, 15 bp, Homo sapiens
gcctgtcctgctatg

SEQ ID NO: 175529 - DNA, 15 bp, Homo sapiens
tgcctgtcctgctat

SEQ ID NO: 175530 - DNA, 15 bp, Homo sapiens
ctgcctgtcctgcta

SEQ ID NO: 175531 - DNA, 15 bp, Homo sapiens
gctgcctgtcctgct

SEQ ID NO: 175532 - DNA, 15 bp, Homo sapiens
tgctgcctgtcctgc

SEQ ID NO: 175533 - DNA, 15 bp, Homo sapiens
ttgctgcctgtcctg

SEQ ID NO: 175534 - DNA, 15 bp, Homo sapiens
gttgctgcctgtcct

SEQ ID NO: 175535 - DNA, 15 bp, Homo sapiens
ggttgctgcctgtcc

SEQ ID NO: 175536 - DNA, 15 bp, Homo sapiens
gggttgctgcctgtc

SEQ ID NO: 175537 - DNA, 15 bp, Homo sapiens
tgggttgctgcctgt

SEQ ID NO: 175538 - DNA, 15 bp, Homo sapiens
ctgggttgctgcctg

SEQ ID NO: 175539 - DNA, 15 bp, Homo sapiens
cctgggttgctgcct

SEQ ID NO: 175540 - DNA, 15 bp, Homo sapiens
acctgggttgctgcc

SEQ ID NO: 175541 - DNA, 15 bp, Homo sapiens
gacctgggttgctgc

SEQ ID NO: 175542 - DNA, 15 bp, Homo sapiens
agacctgggttgctg

SEQ ID NO: 175543 - DNA, 15 bp, Homo sapiens
cagacctgggttgct

SEQ ID NO: 175544 - DNA, 15 bp, Homo sapiens
acagacctgggttgc

SEQ ID NO: 175545 - DNA, 15 bp, Homo sapiens
cacagacctgggttg

SEQ ID NO: 175546 - DNA, 15 bp, Homo sapiens
tcacagacctgggtt

SEQ ID NO: 175547 - DNA, 15 bp, Homo sapiens
ttcacagacctgggt

SEQ ID NO: 175548 - DNA, 15 bp, Homo sapiens
tttcacagacctggg

SEQ ID NO: 175549 - DNA, 15 bp, Homo sapiens
atttcacagacctgg

SEQ ID NO: 175550 - DNA, 15 bp, Homo sapiens
gatttcacagacctg

SEQ ID NO: 175551 - DNA, 15 bp, Homo sapiens
tgatttcacagacct

SEQ ID NO: 175552 - DNA, 15 bp, Homo sapiens
ttgatttcacagacc

SEQ ID NO: 175553 - DNA, 15 bp, Homo sapiens
attgatttcacagac

SEQ ID NO: 175554 - DNA, 15 bp, Homo sapiens
gattgatttcacaga

SEQ ID NO: 175555 - DNA, 15 bp, Homo sapiens
tgattgatttcacag

SEQ ID NO: 175556 - DNA, 15 bp, Homo sapiens
atgattgatttcaca

SEQ ID NO: 175557 - DNA, 15 bp, Homo sapiens
catgattgatttcac

SEQ ID NO: 175558 - DNA, 15 bp, Homo sapiens
tcatgattgatttca

SEQ ID NO: 175559 - DNA, 15 bp, Homo sapiens
atcatgattgatttc

SEQ ID NO: 175560 - DNA, 15 bp, Homo sapiens
catcatgattgattt

SEQ ID NO: 175561 - DNA, 15 bp, Homo sapiens
tcatcatgattgatt

SEQ ID NO: 175562 - DNA, 15 bp, Homo sapiens
atcatcatgattgat

SEQ ID NO: 175563 - DNA, 15 bp, Homo sapiens
aatcatcatgattga

SEQ ID NO: 175564 - DNA, 15 bp, Homo sapiens
gaatcatcatgattg

SEQ ID NO: 175565 - DNA, 15 bp, Homo sapiens
agaatcatcatgatt

SEQ ID NO: 175566 - DNA, 15 bp, Homo sapiens
cagaatcatcatgat

SEQ ID NO: 175567 - DNA, 15 bp, Homo sapiens
ccagaatcatcatga

SEQ ID NO: 175568 - DNA, 15 bp, Homo sapiens
cccagaatcatcatg

SEQ ID NO: 175569 - DNA, 15 bp, Homo sapiens
tcccagaatcatcat

SEQ ID NO: 175570 - DNA, 15 bp, Homo sapiens
ctcccagaatcatca

SEQ ID NO: 175571 - DNA, 15 bp, Homo sapiens
cctcccagaatcatc

SEQ ID NO: 175572 - DNA, 15 bp, Homo sapiens
tcctcccagaatcat

SEQ ID NO: 175573 - DNA, 15 bp, Homo sapiens
ttcctcccagaatca

SEQ ID NO: 175574 - DNA, 15 bp, Homo sapiens
attcctcccagaatc

SEQ ID NO: 175575 - DNA, 15 bp, Homo sapiens
aattcctcccagaat

SEQ ID NO: 175576 - DNA, 15 bp, Homo sapiens
taattcctcccagaa

SEQ ID NO: 175577 - DNA, 15 bp, Homo sapiens
ataattcctcccaga

SEQ ID NO: 175578 - DNA, 15 bp, Homo sapiens
aataattcctcccag

SEQ ID NO: 175579 - DNA, 15 bp, Homo sapiens
caataattcctccca

SEQ ID NO: 175580 - DNA, 15 bp, Homo sapiens
ccaataattcctccc

SEQ ID NO: 175581 - DNA, 15 bp, Homo sapiens
accaataattcctcc

SEQ ID NO: 175582 - DNA, 15 bp, Homo sapiens
caccaataattcctc

SEQ ID NO: 175583 - DNA, 15 bp, Homo sapiens
tcaccaataattcct

SEQ ID NO: 175584 - DNA, 15 bp, Homo sapiens
ttcaccaataattcc

SEQ ID NO: 175585 - DNA, 15 bp, Homo sapiens
attcaccaataattc

SEQ ID NO: 175586 - DNA, 15 bp, Homo sapiens
aattcaccaataatt

SEQ ID NO: 175587 - DNA, 15 bp, Homo sapiens
taattcaccaataat

SEQ ID NO: 175588 - DNA, 15 bp, Homo sapiens
ctaattcaccaataa

SEQ ID NO: 175589 - DNA, 15 bp, Homo sapiens
cctaattcaccaata

SEQ ID NO: 175590 - DNA, 15 bp, Homo sapiens
ccctaattcaccaat

SEQ ID NO: 175591 - DNA, 15 bp, Homo sapiens
cccctaattcaccaa

SEQ ID NO: 175592 - DNA, 15 bp, Homo sapiens
ccccctaattcacca

SEQ ID NO: 175593 - DNA, 15 bp, Homo sapiens
tccccctaattcacc

SEQ ID NO: 175594 - DNA, 15 bp, Homo sapiens
atccccctaattcac

SEQ ID NO: 175595 - DNA, 15 bp, Homo sapiens
catccccctaattca

SEQ ID NO: 175596 - DNA, 15 bp, Homo sapiens
gcatccccctaattc

SEQ ID NO: 175597 - DNA, 15 bp, Homo sapiens
agcatccccctaatt

SEQ ID NO: 175598 - DNA, 15 bp, Homo sapiens
gagcatccccctaat

SEQ ID NO: 175599 - DNA, 15 bp, Homo sapiens
ggagcatccccctaa

SEQ ID NO: 175600 - DNA, 15 bp, Homo sapiens
tggagcatcccccta

SEQ ID NO: 175601 - DNA, 15 bp, Homo sapiens
ttggagcatccccct

SEQ ID NO: 175602 - DNA, 15 bp, Homo sapiens
cttggagcatccccc

SEQ ID NO: 175603 - DNA, 15 bp, Homo sapiens
ccttggagcatcccc

SEQ ID NO: 175604 - DNA, 15 bp, Homo sapiens
cccttggagcatccc

SEQ ID NO: 175605 - DNA, 15 bp, Homo sapiens
tcccttggagcatcc

SEQ ID NO: 175606 - DNA, 15 bp, Homo sapiens
atcccttggagcatc

SEQ ID NO: 175607 - DNA, 15 bp, Homo sapiens
catcccttggagcat

SEQ ID NO: 175608 - DNA, 15 bp, Homo sapiens
ccatcccttggagca

SEQ ID NO: 175609 - DNA, 15 bp, Homo sapiens
accatcccttggagc

SEQ ID NO: 175610 - DNA, 15 bp, Homo sapiens
gaccatcccttggag

SEQ ID NO: 175611 - DNA, 15 bp, Homo sapiens
ggaccatcccttgga

SEQ ID NO: 175612 - DNA, 15 bp, Homo sapiens
tggaccatcccttgg

SEQ ID NO: 175613 - DNA, 15 bp, Homo sapiens
ctggaccatcccttg

SEQ ID NO: 175614 - DNA, 15 bp, Homo sapiens
tctggaccatccctt

SEQ ID NO: 175615 - DNA, 15 bp, Homo sapiens
atctggaccatccct

SEQ ID NO: 175616 - DNA, 15 bp, Homo sapiens
catctggaccatccc

SEQ ID NO: 175617 - DNA, 15 bp, Homo sapiens
ccatctggaccatcc

SEQ ID NO: 175618 - DNA, 15 bp, Homo sapiens
tccatctggaccatc

SEQ ID NO: 175619 - DNA, 15 bp, Homo sapiens
ctccatctggaccat

SEQ ID NO: 175620 - DNA, 15 bp, Homo sapiens
cctccatctggacca

SEQ ID NO: 175621 - DNA, 15 bp, Homo sapiens
acctccatctggacc

SEQ ID NO: 175622 - DNA, 15 bp, Homo sapiens
tacctccatctggac

SEQ ID NO: 175623 - DNA, 15 bp, Homo sapiens
ctacctccatctgga

SEQ ID NO: 175624 - DNA, 15 bp, Homo sapiens
cctacctccatctgg

SEQ ID NO: 175625 - DNA, 15 bp, Homo sapiens
acctacctccatctg

SEQ ID NO: 175626 - DNA, 15 bp, Homo sapiens
cacctacctccatct

SEQ ID NO: 175627 - DNA, 15 bp, Homo sapiens
acacctacctccatc

SEQ ID NO: 175628 - DNA, 15 bp, Homo sapiens
tacacctacctccat

SEQ ID NO: 175629 - DNA, 15 bp, Homo sapiens
ttacacctacctcca

SEQ ID NO: 175630 - DNA, 15 bp, Homo sapiens
tttacacctacctcc

SEQ ID NO: 175631 - DNA, 15 bp, Homo sapiens
ctttacacctacctc

SEQ ID NO: 175632 - DNA, 15 bp, Homo sapiens
actttacacctacct

SEQ ID NO: 175633 - DNA, 15 bp, Homo sapiens
cactttacacctacc

SEQ ID NO: 175634 - DNA, 15 bp, Homo sapiens
ccactttacacctac

SEQ ID NO: 175635 - DNA, 15 bp, Homo sapiens
tccactttacaccta

SEQ ID NO: 175636 - DNA, 15 bp, Homo sapiens
ctccactttacacct

SEQ ID NO: 175637 - DNA, 15 bp, Homo sapiens
actccactttacacc

SEQ ID NO: 175638 - DNA, 15 bp, Homo sapiens
aactccactttacac

SEQ ID NO: 175639 - DNA, 15 bp, Homo sapiens
aaactccactttaca

SEQ ID NO: 175640 - DNA, 15 bp, Homo sapiens
aaaactccactttac

SEQ ID NO: 175641 - DNA, 15 bp, Homo sapiens
caaaactccacttta

SEQ ID NO: 175642 - DNA, 15 bp, Homo sapiens
gcaaaactccacttt

SEQ ID NO: 175643 - DNA, 15 bp, Homo sapiens
agcaaaactccactt

SEQ ID NO: 175644 - DNA, 15 bp, Homo sapiens
cagcaaaactccact

SEQ ID NO: 175645 - DNA, 15 bp, Homo sapiens
ccagcaaaactccac

SEQ ID NO: 175646 - DNA, 15 bp, Homo sapiens
tccagcaaaactcca

SEQ ID NO: 175647 - DNA, 15 bp, Homo sapiens
ttccagcaaaactcc

SEQ ID NO: 175648 - DNA, 15 bp, Homo sapiens
cttccagcaaaactc

SEQ ID NO: 175649 - DNA, 15 bp, Homo sapiens
ccttccagcaaaact

SEQ ID NO: 175650 - DNA, 15 bp, Homo sapiens
tccttccagcaaaac

SEQ ID NO: 175651 - DNA, 15 bp, Homo sapiens
ctccttccagcaaaa

SEQ ID NO: 175652 - DNA, 15 bp, Homo sapiens
actccttccagcaaa

SEQ ID NO: 175653 - DNA, 15 bp, Homo sapiens
aactccttccagcaa

SEQ ID NO: 175654 - DNA, 15 bp, Homo sapiens
caactccttccagca

SEQ ID NO: 175655 - DNA, 15 bp, Homo sapiens
acaactccttccagc

SEQ ID NO: 175656 - DNA, 15 bp, Homo sapiens
aacaactccttccag

SEQ ID NO: 175657 - DNA, 15 bp, Homo sapiens
aaacaactccttcca

SEQ ID NO: 175658 - DNA, 15 bp, Homo sapiens
aaaacaactccttcc

SEQ ID NO: 175659 - DNA, 15 bp, Homo sapiens
aaaaacaactccttc

SEQ ID NO: 175660 - DNA, 15 bp, Homo sapiens
caaaaacaactcctt

SEQ ID NO: 175661 - DNA, 15 bp, Homo sapiens
gcaaaaacaactcct

SEQ ID NO: 175662 - DNA, 15 bp, Homo sapiens
tgcaaaaacaactcc

SEQ ID NO: 175663 - DNA, 15 bp, Homo sapiens
gtgcaaaaacaactc

SEQ ID NO: 175664 - DNA, 15 bp, Homo sapiens
tgtgcaaaaacaact

SEQ ID NO: 175665 - DNA, 15 bp, Homo sapiens
ttgtgcaaaaacaac

SEQ ID NO: 175666 - DNA, 15 bp, Homo sapiens
gttgtgcaaaaacaa

SEQ ID NO: 175667 - DNA, 15 bp, Homo sapiens
tgttgtgcaaaaaca

SEQ ID NO: 175668 - DNA, 15 bp, Homo sapiens
atgttgtgcaaaaac

SEQ ID NO: 175669 - DNA, 15 bp, Homo sapiens
tatgttgtgcaaaaa

SEQ ID NO: 175670 - DNA, 15 bp, Homo sapiens
atatgttgtgcaaaa

SEQ ID NO: 175671 - DNA, 15 bp, Homo sapiens
aatatgttgtgcaaa

SEQ ID NO: 175672 - DNA, 15 bp, Homo sapiens
caatatgttgtgcaa

SEQ ID NO: 175673 - DNA, 15 bp, Homo sapiens
tcaatatgttgtgca

SEQ ID NO: 175674 - DNA, 15 bp, Homo sapiens
atcaatatgttgtgc

SEQ ID NO: 175675 - DNA, 15 bp, Homo sapiens
aatcaatatgttgtg

SEQ ID NO: 175676 - DNA, 15 bp, Homo sapiens
aaatcaatatgttgt

SEQ ID NO: 175677 - DNA, 15 bp, Homo sapiens
gaaatcaatatgttg

SEQ ID NO: 175678 - DNA, 15 bp, Homo sapiens
ggaaatcaatatgtt

SEQ ID NO: 175679 - DNA, 15 bp, Homo sapiens
aggaaatcaatatgt

SEQ ID NO: 175680 - DNA, 15 bp, Homo sapiens
aaggaaatcaatatg

SEQ ID NO: 175681 - DNA, 15 bp, Homo sapiens
caaggaaatcaatat

SEQ ID NO: 175682 - DNA, 15 bp, Homo sapiens
ccaaggaaatcaata

SEQ ID NO: 175683 - DNA, 15 bp, Homo sapiens
cccaaggaaatcaat

SEQ ID NO: 175684 - DNA, 15 bp, Homo sapiens
ccccaaggaaatcaa

SEQ ID NO: 175685 - DNA, 15 bp, Homo sapiens
accccaaggaaatca

SEQ ID NO: 175686 - DNA, 15 bp, Homo sapiens
caccccaaggaaatc

SEQ ID NO: 175687 - DNA, 15 bp, Homo sapiens
ccaccccaaggaaat

SEQ ID NO: 175688 - DNA, 15 bp, Homo sapiens
cccaccccaaggaaa

SEQ ID NO: 175689 - DNA, 15 bp, Homo sapiens
tcccaccccaaggaa

SEQ ID NO: 175690 - DNA, 15 bp, Homo sapiens
ctcccaccccaagga

SEQ ID NO: 175691 - DNA, 15 bp, Homo sapiens
tctcccaccccaagg

SEQ ID NO: 175692 - DNA, 15 bp, Homo sapiens
ttctcccaccccaag

SEQ ID NO: 175693 - DNA, 15 bp, Homo sapiens
tttctcccaccccaa

SEQ ID NO: 175694 - DNA, 15 bp, Homo sapiens
ttttctcccacccca

SEQ ID NO: 175695 - DNA, 15 bp, Homo sapiens
tttttctcccacccc

SEQ ID NO: 175696 - DNA, 15 bp, Homo sapiens
ttttttctcccaccc

SEQ ID NO: 175697 - DNA, 15 bp, Homo sapiens
cttttttctcccacc

SEQ ID NO: 175698 - DNA, 15 bp, Homo sapiens
tcttttttctcccac

SEQ ID NO: 175699 - DNA, 15 bp, Homo sapiens
ttcttttttctccca

SEQ ID NO: 175700 - DNA, 15 bp, Homo sapiens
tttcttttttctccc

SEQ ID NO: 175701 - DNA, 15 bp, Homo sapiens
gtttcttttttctcc

SEQ ID NO: 175702 - DNA, 15 bp, Homo sapiens
tgtttcttttttctc

SEQ ID NO: 175703 - DNA, 15 bp, Homo sapiens
ctgtttcttttttct

SEQ ID NO: 175704 - DNA, 15 bp, Homo sapiens
gctgtttcttttttc

SEQ ID NO: 175705 - DNA, 15 bp, Homo sapiens
tgctgtttctttttt

SEQ ID NO: 175706 - DNA, 15 bp, Homo sapiens
ctgctgtttcttttt

SEQ ID NO: 175707 - DNA, 15 bp, Homo sapiens
gctgctgtttctttt

SEQ ID NO: 175708 - DNA, 15 bp, Homo sapiens
agctgctgtttcttt

SEQ ID NO: 175709 - DNA, 15 bp, Homo sapiens
gagctgctgtttctt

SEQ ID NO: 175710 - DNA, 15 bp, Homo sapiens
agagctgctgtttct

SEQ ID NO: 175711 - DNA, 15 bp, Homo sapiens
aagagctgctgtttc

SEQ ID NO: 175712 - DNA, 15 bp, Homo sapiens
gaagagctgctgttt

SEQ ID NO: 175713 - DNA, 15 bp, Homo sapiens
cgaagagctgctgtt

SEQ ID NO: 175714 - DNA, 15 bp, Homo sapiens
gcgaagagctgctgt

SEQ ID NO: 175715 - DNA, 15 bp, Homo sapiens
agcgaagagctgctg

SEQ ID NO: 175716 - DNA, 15 bp, Homo sapiens
cagcgaagagctgct

SEQ ID NO: 175717 - DNA, 15 bp, Homo sapiens
gcagcgaagagctgc

SEQ ID NO: 175718 - DNA, 15 bp, Homo sapiens
agcagcgaagagctg

SEQ ID NO: 175719 - DNA, 15 bp, Homo sapiens
gagcagcgaagagct

SEQ ID NO: 175720 - DNA, 15 bp, Homo sapiens
agagcagcgaagagc

SEQ ID NO: 175721 - DNA, 15 bp, Homo sapiens
gagagcagcgaagag

SEQ ID NO: 175722 - DNA, 15 bp, Homo sapiens
ggagagcagcgaaga

SEQ ID NO: 175723 - DNA, 15 bp, Homo sapiens
gggagagcagcgaag

SEQ ID NO: 175724 - DNA, 15 bp, Homo sapiens
tgggagagcagcgaa

SEQ ID NO: 175725 - DNA, 15 bp, Homo sapiens
ctgggagagcagcga

SEQ ID NO: 175726 - DNA, 15 bp, Homo sapiens
tctgggagagcagcg

SEQ ID NO: 175727 - DNA, 15 bp, Homo sapiens
ctctgggagagcagc

SEQ ID NO: 175728 - DNA, 15 bp, Homo sapiens
actctgggagagcag

SEQ ID NO: 175729 - DNA, 15 bp, Homo sapiens
cactctgggagagca

SEQ ID NO: 175730 - DNA, 15 bp, Homo sapiens
ccactctgggagagc

SEQ ID NO: 175731 - DNA, 15 bp, Homo sapiens
accactctgggagag

SEQ ID NO: 175732 - DNA, 15 bp, Homo sapiens
caccactctgggaga

SEQ ID NO: 175733 - DNA, 15 bp, Homo sapiens
ccaccactctgggag

SEQ ID NO: 175734 - DNA, 15 bp, Homo sapiens
cccaccactctggga

SEQ ID NO: 175735 - DNA, 15 bp, Homo sapiens
acccaccactctggg

SEQ ID NO: 175736 - DNA, 15 bp, Homo sapiens
tacccaccactctgg

SEQ ID NO: 175737 - DNA, 15 bp, Homo sapiens
ctacccaccactctg

SEQ ID NO: 175738 - DNA, 15 bp, Homo sapiens
cctacccaccactct

SEQ ID NO: 175739 - DNA, 15 bp, Homo sapiens
tcctacccaccactc

SEQ ID NO: 175740 - DNA, 15 bp, Homo sapiens
ctcctacccaccact

SEQ ID NO: 175741 - DNA, 15 bp, Homo sapiens
tctcctacccaccac

SEQ ID NO: 175742 - DNA, 15 bp, Homo sapiens
ctctcctacccacca

SEQ ID NO: 175743 - DNA, 15 bp, Homo sapiens
cctctcctacccacc

SEQ ID NO: 175744 - DNA, 15 bp, Homo sapiens
tcctctcctacccac

SEQ ID NO: 175745 - DNA, 15 bp, Homo sapiens
gtcctctcctaccca

SEQ ID NO: 175746 - DNA, 15 bp, Homo sapiens
tgtcctctcctaccc

SEQ ID NO: 175747 - DNA, 15 bp, Homo sapiens
ctgtcctctcctacc

SEQ ID NO: 175748 - DNA, 15 bp, Homo sapiens
cctgtcctctcctac

SEQ ID NO: 175749 - DNA, 15 bp, Homo sapiens
acctgtcctctccta

SEQ ID NO: 175750 - DNA, 15 bp, Homo sapiens
cacctgtcctctcct

SEQ ID NO: 175751 - DNA, 15 bp, Homo sapiens
ccacctgtcctctcc

SEQ ID NO: 175752 - DNA, 15 bp, Homo sapiens
cccacctgtcctctc

SEQ ID NO: 175753 - DNA, 15 bp, Homo sapiens
tcccacctgtcctct

SEQ ID NO: 175754 - DNA, 15 bp, Homo sapiens
ctcccacctgtcctc

SEQ ID NO: 175755 - DNA, 15 bp, Homo sapiens
actcccacctgtcct

SEQ ID NO: 175756 - DNA, 15 bp, Homo sapiens
gactcccacctgtcc

SEQ ID NO: 175757 - DNA, 15 bp, Homo sapiens
agactcccacctgtc

SEQ ID NO: 175758 - DNA, 15 bp, Homo sapiens
cagactcccacctgt

SEQ ID NO: 175759 - DNA, 15 bp, Homo sapiens
acagactcccacctg

SEQ ID NO: 175760 - DNA, 15 bp, Homo sapiens
cacagactcccacct

SEQ ID NO: 175761 - DNA, 15 bp, Homo sapiens
ccacagactcccacc

SEQ ID NO: 175762 - DNA, 15 bp, Homo sapiens
cccacagactcccac

SEQ ID NO: 175763 - DNA, 15 bp, Homo sapiens
gcccacagactccca

SEQ ID NO: 175764 - DNA, 15 bp, Homo sapiens
ggcccacagactccc

SEQ ID NO: 175765 - DNA, 15 bp, Homo sapiens
gggcccacagactcc

SEQ ID NO: 175766 - DNA, 15 bp, Homo sapiens
ggggcccacagactc

SEQ ID NO: 175767 - DNA, 15 bp, Homo sapiens
aggggcccacagact

SEQ ID NO: 175768 - DNA, 15 bp, Homo sapiens
aaggggcccacagac

SEQ ID NO: 175769 - DNA, 15 bp, Homo sapiens
aaaggggcccacaga

SEQ ID NO: 175770 - DNA, 15 bp, Homo sapiens
taaaggggcccacag

SEQ ID NO: 175771 - DNA, 15 bp, Homo sapiens
ctaaaggggcccaca

SEQ ID NO: 175772 - DNA, 15 bp, Homo sapiens
gctaaaggggcccac

SEQ ID NO: 175773 - DNA, 15 bp, Homo sapiens
agctaaaggggccca

SEQ ID NO: 175774 - DNA, 15 bp, Homo sapiens
cagctaaaggggccc

SEQ ID NO: 175775 - DNA, 15 bp, Homo sapiens
ccagctaaaggggcc

SEQ ID NO: 175776 - DNA, 15 bp, Homo sapiens
accagctaaaggggc

SEQ ID NO: 175777 - DNA, 15 bp, Homo sapiens
aaccagctaaagggg

SEQ ID NO: 175778 - DNA, 15 bp, Homo sapiens
taaccagctaaaggg

SEQ ID NO: 175779 - DNA, 15 bp, Homo sapiens
ataaccagctaaagg

SEQ ID NO: 175780 - DNA, 15 bp, Homo sapiens
aataaccagctaaag

SEQ ID NO: 175781 - DNA, 15 bp, Homo sapiens
aaataaccagctaaa

SEQ ID NO: 175782 - DNA, 15 bp, Homo sapiens
aaaataaccagctaa

SEQ ID NO: 175783 - DNA, 15 bp, Homo sapiens
aaaaataaccagcta

SEQ ID NO: 175784 - DNA, 15 bp, Homo sapiens
aaaaaataaccagct

SEQ ID NO: 175785 - DNA, 15 bp, Homo sapiens
aaaaaaataaccagc

SEQ ID NO: 175786 - DNA, 15 bp, Homo sapiens
taaaaaaataaccag

SEQ ID NO: 175787 - DNA, 15 bp, Homo sapiens
ctaaaaaaataacca

SEQ ID NO: 175788 - DNA, 15 bp, Homo sapiens
tctaaaaaaataacc

SEQ ID NO: 175789 - DNA, 15 bp, Homo sapiens
atctaaaaaaataac

SEQ ID NO: 175790 - DNA, 15 bp, Homo sapiens
catctaaaaaaataa

SEQ ID NO: 175791 - DNA, 15 bp, Homo sapiens
acatctaaaaaaata

SEQ ID NO: 175792 - DNA, 15 bp, Homo sapiens
tacatctaaaaaaat

SEQ ID NO: 175793 - DNA, 15 bp, Homo sapiens
gtacatctaaaaaaa

SEQ ID NO: 175794 - DNA, 15 bp, Homo sapiens
ggtacatctaaaaaa

SEQ ID NO: 175795 - DNA, 15 bp, Homo sapiens
tggtacatctaaaaa

SEQ ID NO: 175796 - DNA, 15 bp, Homo sapiens
atggtacatctaaaa

SEQ ID NO: 175797 - DNA, 15 bp, Homo sapiens
gatggtacatctaaa

SEQ ID NO: 175798 - DNA, 15 bp, Homo sapiens
tgatggtacatctaa

SEQ ID NO: 175799 - DNA, 15 bp, Homo sapiens
ctgatggtacatcta

SEQ ID NO: 175800 - DNA, 15 bp, Homo sapiens
cctgatggtacatct

SEQ ID NO: 175801 - DNA, 15 bp, Homo sapiens
acctgatggtacatc

SEQ ID NO: 175802 - DNA, 15 bp, Homo sapiens
tacctgatggtacat

SEQ ID NO: 175803 - DNA, 15 bp, Homo sapiens
ctacctgatggtaca

SEQ ID NO: 175804 - DNA, 15 bp, Homo sapiens
gctacctgatggtac

SEQ ID NO: 175805 - DNA, 15 bp, Homo sapiens
agctacctgatggta

SEQ ID NO: 175806 - DNA, 15 bp, Homo sapiens
cagctacctgatggt

SEQ ID NO: 175807 - DNA, 15 bp, Homo sapiens
gcagctacctgatgg

SEQ ID NO: 175808 - DNA, 15 bp, Homo sapiens
tgcagctacctgatg

SEQ ID NO: 175809 - DNA, 15 bp, Homo sapiens
ttgcagctacctgat

SEQ ID NO: 175810 - DNA, 15 bp, Homo sapiens
gttgcagctacctga

SEQ ID NO: 175811 - DNA, 15 bp, Homo sapiens
agttgcagctacctg

SEQ ID NO: 175812 - DNA, 15 bp, Homo sapiens
cagttgcagctacct

SEQ ID NO: 175813 - DNA, 15 bp, Homo sapiens
acagttgcagctacc

SEQ ID NO: 175814 - DNA, 15 bp, Homo sapiens
tacagttgcagctac

SEQ ID NO: 175815 - DNA, 15 bp, Homo sapiens
atacagttgcagcta

SEQ ID NO: 175816 - DNA, 15 bp, Homo sapiens
aatacagttgcagct

SEQ ID NO: 175817 - DNA, 15 bp, Homo sapiens
gaatacagttgcagc

SEQ ID NO: 175818 - DNA, 15 bp, Homo sapiens
ggaatacagttgcag

SEQ ID NO: 175819 - DNA, 15 bp, Homo sapiens
gggaatacagttgca

SEQ ID NO: 175820 - DNA, 15 bp, Homo sapiens
tgggaatacagttgc

SEQ ID NO: 175821 - DNA, 15 bp, Homo sapiens
gtgggaatacagttg

SEQ ID NO: 175822 - DNA, 15 bp, Homo sapiens
agtgggaatacagtt

SEQ ID NO: 175823 - DNA, 15 bp, Homo sapiens
cagtgggaatacagt

SEQ ID NO: 175824 - DNA, 15 bp, Homo sapiens
gcagtgggaatacag

SEQ ID NO: 175825 - DNA, 15 bp, Homo sapiens
agcagtgggaataca

SEQ ID NO: 175826 - DNA, 15 bp, Homo sapiens
aagcagtgggaatac

SEQ ID NO: 175827 - DNA, 15 bp, Homo sapiens
gaagcagtgggaata

SEQ ID NO: 175828 - DNA, 15 bp, Homo sapiens
ggaagcagtgggaat

SEQ ID NO: 175829 - DNA, 15 bp, Homo sapiens
gggaagcagtgggaa

SEQ ID NO: 175830 - DNA, 15 bp, Homo sapiens
ggggaagcagtggga

SEQ ID NO: 175831 - DNA, 15 bp, Homo sapiens
tggggaagcagtggg

SEQ ID NO: 175832 - DNA, 15 bp, Homo sapiens
ctggggaagcagtgg

SEQ ID NO: 175833 - DNA, 15 bp, Homo sapiens
gctggggaagcagtg

SEQ ID NO: 175834 - DNA, 15 bp, Homo sapiens
tgctggggaagcagt

SEQ ID NO: 175835 - DNA, 15 bp, Homo sapiens
ttgctggggaagcag

SEQ ID NO: 175836 - DNA, 15 bp, Homo sapiens
attgctggggaagca

SEQ ID NO: 175837 - DNA, 15 bp, Homo sapiens
cattgctggggaagc

SEQ ID NO: 175838 - DNA, 15 bp, Homo sapiens
gcattgctggggaag

SEQ ID NO: 175839 - DNA, 15 bp, Homo sapiens
tgcattgctggggaa

SEQ ID NO: 175840 - DNA, 15 bp, Homo sapiens
ttgcattgctgggga

SEQ ID NO: 175841 - DNA, 15 bp, Homo sapiens
tttgcattgctgggg

SEQ ID NO: 175842 - DNA, 15 bp, Homo sapiens
ctttgcattgctggg

SEQ ID NO: 175843 - DNA, 15 bp, Homo sapiens
cctttgcattgctgg

SEQ ID NO: 175844 - DNA, 15 bp, Homo sapiens
ccctttgcattgctg

SEQ ID NO: 175845 - DNA, 15 bp, Homo sapiens
gccctttgcattgct

SEQ ID NO: 175846 - DNA, 15 bp, Homo sapiens
tgccctttgcattgc

SEQ ID NO: 175847 - DNA, 15 bp, Homo sapiens
ctgccctttgcattg

SEQ ID NO: 175848 - DNA, 15 bp, Homo sapiens
tctgccctttgcatt

SEQ ID NO: 175849 - DNA, 15 bp, Homo sapiens
atctgccctttgcat

SEQ ID NO: 175850 - DNA, 15 bp, Homo sapiens
aatctgccctttgca

SEQ ID NO: 175851 - DNA, 15 bp, Homo sapiens
taatctgccctttgc

SEQ ID NO: 175852 - DNA, 15 bp, Homo sapiens
gtaatctgccctttg

SEQ ID NO: 175853 - DNA, 15 bp, Homo sapiens
cgtaatctgcccttt

SEQ ID NO: 175854 - DNA, 15 bp, Homo sapiens
tcgtaatctgccctt

SEQ ID NO: 175855 - DNA, 15 bp, Homo sapiens
ttcgtaatctgccct

SEQ ID NO: 175856 - DNA, 15 bp, Homo sapiens
cttcgtaatctgccc

SEQ ID NO: 175857 - DNA, 15 bp, Homo sapiens
gcttcgtaatctgcc

SEQ ID NO: 175858 - DNA, 15 bp, Homo sapiens
tgcttcgtaatctgc

SEQ ID NO: 175859 - DNA, 15 bp, Homo sapiens
ctgcttcgtaatctg

SEQ ID NO: 175860 - DNA, 15 bp, Homo sapiens
tctgcttcgtaatct

SEQ ID NO: 175861 - DNA, 15 bp, Homo sapiens
ctctgcttcgtaatc

SEQ ID NO: 175862 - DNA, 15 bp, Homo sapiens
gctctgcttcgtaat

SEQ ID NO: 175863 - DNA, 15 bp, Homo sapiens
agctctgcttcgtaa

SEQ ID NO: 175864 - DNA, 15 bp, Homo sapiens
cagctctgcttcgta

SEQ ID NO: 175865 - DNA, 15 bp, Homo sapiens
ccagctctgcttcgt

SEQ ID NO: 175866 - DNA, 15 bp, Homo sapiens
cccagctctgcttcg

SEQ ID NO: 175867 - DNA, 15 bp, Homo sapiens
gcccagctctgcttc

SEQ ID NO: 175868 - DNA, 15 bp, Homo sapiens
agcccagctctgctt

SEQ ID NO: 175869 - DNA, 15 bp, Homo sapiens
cagcccagctctgct

SEQ ID NO: 175870 - DNA, 15 bp, Homo sapiens
ccagcccagctctgc

SEQ ID NO: 175871 - DNA, 15 bp, Homo sapiens
gccagcccagctctg

SEQ ID NO: 175872 - DNA, 15 bp, Homo sapiens
tgccagcccagctct

SEQ ID NO: 175873 - DNA, 15 bp, Homo sapiens
ctgccagcccagctc

SEQ ID NO: 175874 - DNA, 15 bp, Homo sapiens
gctgccagcccagct

SEQ ID NO: 175875 - DNA, 15 bp, Homo sapiens
tgctgccagcccagc

SEQ ID NO: 175876 - DNA, 15 bp, Homo sapiens
ttgctgccagcccag

SEQ ID NO: 175877 - DNA, 15 bp, Homo sapiens
cttgctgccagccca

SEQ ID NO: 175878 - DNA, 15 bp, Homo sapiens
acttgctgccagccc

SEQ ID NO: 175879 - DNA, 15 bp, Homo sapiens
aacttgctgccagcc

SEQ ID NO: 175880 - DNA, 15 bp, Homo sapiens
aaacttgctgccagc

SEQ ID NO: 175881 - DNA, 15 bp, Homo sapiens
aaaacttgctgccag

SEQ ID NO: 175882 - DNA, 15 bp, Homo sapiens
caaaacttgctgcca

SEQ ID NO: 175883 - DNA, 15 bp, Homo sapiens
gcaaaacttgctgcc

SEQ ID NO: 175884 - DNA, 15 bp, Homo sapiens
agcaaaacttgctgc

SEQ ID NO: 175885 - DNA, 15 bp, Homo sapiens
aagcaaaacttgctg

SEQ ID NO: 175886 - DNA, 15 bp, Homo sapiens
aaagcaaaacttgct

SEQ ID NO: 175887 - DNA, 15 bp, Homo sapiens
caaagcaaaacttgc

SEQ ID NO: 175888 - DNA, 15 bp, Homo sapiens
gcaaagcaaaacttg

SEQ ID NO: 175889 - DNA, 15 bp, Homo sapiens
agcaaagcaaaactt

SEQ ID NO: 175890 - DNA, 15 bp, Homo sapiens
aagcaaagcaaaact

SEQ ID NO: 175891 - DNA, 15 bp, Homo sapiens
aaagcaaagcaaaac

SEQ ID NO: 175892 - DNA, 15 bp, Homo sapiens
gaaagcaaagcaaaa

SEQ ID NO: 175893 - DNA, 15 bp, Homo sapiens
agaaagcaaagcaaa

SEQ ID NO: 175894 - DNA, 15 bp, Homo sapiens
gagaaagcaaagcaa

SEQ ID NO: 175895 - DNA, 15 bp, Homo sapiens
ggagaaagcaaagca

SEQ ID NO: 175896 - DNA, 15 bp, Homo sapiens
gggagaaagcaaagc

SEQ ID NO: 175897 - DNA, 15 bp, Homo sapiens
tgggagaaagcaaag

SEQ ID NO: 175898 - DNA, 15 bp, Homo sapiens
ctgggagaaagcaaa

SEQ ID NO: 175899 - DNA, 15 bp, Homo sapiens
gctgggagaaagcaa

SEQ ID NO: 175900 - DNA, 15 bp, Homo sapiens
cgctgggagaaagca

SEQ ID NO: 175901 - DNA, 15 bp, Homo sapiens
ccgctgggagaaagc

SEQ ID NO: 175902 - DNA, 15 bp, Homo sapiens
gccgctgggagaaag

SEQ ID NO: 175903 - DNA, 15 bp, Homo sapiens
agatttgtgtgccag

SEQ ID NO: 175904 - DNA, 15 bp, Homo sapiens
cagatttgtgtgcca

SEQ ID NO: 175905 - DNA, 15 bp, Homo sapiens
ccagatttgtgtgcc

SEQ ID NO: 175906 - DNA, 15 bp, Homo sapiens
cccagatttgtgtgc

SEQ ID NO: 175907 - DNA, 15 bp, Homo sapiens
ccccagatttgtgtg

SEQ ID NO: 175908 - DNA, 15 bp, Homo sapiens
tccccagatttgtgt

SEQ ID NO: 175909 - DNA, 15 bp, Homo sapiens
ttccccagatttgtg

SEQ ID NO: 175910 - DNA, 15 bp, Homo sapiens
cttccccagatttgt

SEQ ID NO: 175911 - DNA, 15 bp, Homo sapiens
tcttccccagatttg

SEQ ID NO: 175912 - DNA, 15 bp, Homo sapiens
ctcttccccagattt

SEQ ID NO: 175913 - DNA, 15 bp, Homo sapiens
actcttccccagatt

SEQ ID NO: 175914 - DNA, 15 bp, Homo sapiens
cactcttccccagat

SEQ ID NO: 175915 - DNA, 15 bp, Homo sapiens
ccactcttccccaga

SEQ ID NO: 175916 - DNA, 15 bp, Homo sapiens
accactcttccccag

SEQ ID NO: 175917 - DNA, 15 bp, Homo sapiens
caccactcttcccca

SEQ ID NO: 175918 - DNA, 15 bp, Homo sapiens
ccaccactcttcccc

SEQ ID NO: 175919 - DNA, 15 bp, Homo sapiens
cccaccactcttccc

SEQ ID NO: 175920 - DNA, 15 bp, Homo sapiens
tcccaccactcttcc

SEQ ID NO: 175921 - DNA, 15 bp, Homo sapiens
atcccaccactcttc

SEQ ID NO: 175922 - DNA, 15 bp, Homo sapiens
catcccaccactctt

SEQ ID NO: 175923 - DNA, 15 bp, Homo sapiens
gcatcccaccactct

SEQ ID NO: 175924 - DNA, 15 bp, Homo sapiens
cgcatcccaccactc

SEQ ID NO: 175925 - DNA, 15 bp, Homo sapiens
ccgcatcccaccact

SEQ ID NO: 175926 - DNA, 15 bp, Homo sapiens
cccgcatcccaccac

SEQ ID NO: 175927 - DNA, 15 bp, Homo sapiens
tcccgcatcccacca

SEQ ID NO: 175928 - DNA, 15 bp, Homo sapiens
ttcccgcatcccacc

SEQ ID NO: 175929 - DNA, 15 bp, Homo sapiens
cttcccgcatcccac

SEQ ID NO: 175930 - DNA, 15 bp, Homo sapiens
tcttcccgcatccca

SEQ ID NO: 175931 - DNA, 15 bp, Homo sapiens
ttcttcccgcatccc

SEQ ID NO: 175932 - DNA, 15 bp, Homo sapiens
tttcttcccgcatcc

SEQ ID NO: 175933 - DNA, 15 bp, Homo sapiens
ctttcttcccgcatc

SEQ ID NO: 175934 - DNA, 15 bp, Homo sapiens
tctttcttcccgcat

SEQ ID NO: 175935 - DNA, 15 bp, Homo sapiens
gtctttcttcccgca

SEQ ID NO: 175936 - DNA, 15 bp, Homo sapiens
agtctttcttcccgc

SEQ ID NO: 175937 - DNA, 15 bp, Homo sapiens
cagtctttcttcccg

SEQ ID NO: 175938 - DNA, 15 bp, Homo sapiens
ccagtctttcttccc

SEQ ID NO: 175939 - DNA, 15 bp, Homo sapiens
accagtctttcttcc

SEQ ID NO: 175940 - DNA, 15 bp, Homo sapiens
gaccagtctttcttc

SEQ ID NO: 175941 - DNA, 15 bp, Homo sapiens
ggaccagtctttctt

SEQ ID NO: 175942 - DNA, 15 bp, Homo sapiens
gggaccagtctttct

SEQ ID NO: 175943 - DNA, 15 bp, Homo sapiens
agggaccagtctttc

SEQ ID NO: 175944 - DNA, 15 bp, Homo sapiens
cagggaccagtcttt

SEQ ID NO: 175945 - DNA, 15 bp, Homo sapiens
acagggaccagtctt

SEQ ID NO: 175946 - DNA, 15 bp, Homo sapiens
tacagggaccagtct

SEQ ID NO: 175947 - DNA, 15 bp, Homo sapiens
gtacagggaccagtc

SEQ ID NO: 175948 - DNA, 15 bp, Homo sapiens
agtacagggaccagt

SEQ ID NO: 175949 - DNA, 15 bp, Homo sapiens
gagtacagggaccag

SEQ ID NO: 175950 - DNA, 15 bp, Homo sapiens
tgagtacagggacca

SEQ ID NO: 175951 - DNA, 15 bp, Homo sapiens
ttgagtacagggacc

SEQ ID NO: 175952 - DNA, 15 bp, Homo sapiens
cttgagtacagggac

SEQ ID NO: 175953 - DNA, 15 bp, Homo sapiens
ccttgagtacaggga

SEQ ID NO: 175954 - DNA, 15 bp, Homo sapiens
tccttgagtacaggg

SEQ ID NO: 175955 - DNA, 15 bp, Homo sapiens
ctccttgagtacagg

SEQ ID NO: 175956 - DNA, 15 bp, Homo sapiens
tctccttgagtacag

SEQ ID NO: 175957 - DNA, 15 bp, Homo sapiens
atctccttgagtaca

SEQ ID NO: 175958 - DNA, 15 bp, Homo sapiens
aatctccttgagtac

SEQ ID NO: 175959 - DNA, 15 bp, Homo sapiens
taatctccttgagta

SEQ ID NO: 175960 - DNA, 15 bp, Homo sapiens
ctaatctccttgagt

SEQ ID NO: 175961 - DNA, 15 bp, Homo sapiens
cctaatctccttgag

SEQ ID NO: 175962 - DNA, 15 bp, Homo sapiens
tcctaatctccttga

SEQ ID NO: 175963 - DNA, 15 bp, Homo sapiens
atcctaatctccttg

SEQ ID NO: 175964 - DNA, 15 bp, Homo sapiens
gatcctaatctcctt

SEQ ID NO: 175965 - DNA, 15 bp, Homo sapiens
ggatcctaatctcct

SEQ ID NO: 175966 - DNA, 15 bp, Homo sapiens
aggatcctaatctcc

SEQ ID NO: 175967 - DNA, 15 bp, Homo sapiens
aaggatcctaatctc

SEQ ID NO: 175968 - DNA, 15 bp, Homo sapiens
taaggatcctaatct

SEQ ID NO: 175969 - DNA, 15 bp, Homo sapiens
ctaaggatcctaatc

SEQ ID NO: 175970 - DNA, 15 bp, Homo sapiens
cctaaggatcctaat

SEQ ID NO: 175971 - DNA, 15 bp, Homo sapiens
ccctaaggatcctaa

SEQ ID NO: 175972 - DNA, 15 bp, Homo sapiens
gccctaaggatccta

SEQ ID NO: 175973 - DNA, 15 bp, Homo sapiens
agccctaaggatcct

SEQ ID NO: 175974 - DNA, 15 bp, Homo sapiens
aagccctaaggatcc

SEQ ID NO: 175975 - DNA, 15 bp, Homo sapiens
aaagccctaaggatc

SEQ ID NO: 175976 - DNA, 15 bp, Homo sapiens
aaaagccctaaggat

SEQ ID NO: 175977 - DNA, 15 bp, Homo sapiens
taaaagccctaagga

SEQ ID NO: 175978 - DNA, 15 bp, Homo sapiens
gtaaaagccctaagg

SEQ ID NO: 175979 - DNA, 15 bp, Homo sapiens
agtaaaagccctaag

SEQ ID NO: 175980 - DNA, 15 bp, Homo sapiens
aagtaaaagccctaa

SEQ ID NO: 175981 - DNA, 15 bp, Homo sapiens
gaagtaaaagcccta

SEQ ID NO: 175982 - DNA, 15 bp, Homo sapiens
ggaagtaaaagccct

SEQ ID NO: 175983 - DNA, 15 bp, Homo sapiens
tggaagtaaaagccc

SEQ ID NO: 175984 - DNA, 15 bp, Homo sapiens
ttggaagtaaaagcc

SEQ ID NO: 175985 - DNA, 15 bp, Homo sapiens
gttggaagtaaaagc

SEQ ID NO: 175986 - DNA, 15 bp, Homo sapiens
tgttggaagtaaaag

SEQ ID NO: 175987 - DNA, 15 bp, Homo sapiens
atgttggaagtaaaa

SEQ ID NO: 175988 - DNA, 15 bp, Homo sapiens
aatgttggaagtaaa

SEQ ID NO: 175989 - DNA, 15 bp, Homo sapiens
aaatgttggaagtaa

SEQ ID NO: 175990 - DNA, 15 bp, Homo sapiens
taaatgttggaagta

SEQ ID NO: 175991 - DNA, 15 bp, Homo sapiens
gtaaatgttggaagt

SEQ ID NO: 175992 - DNA, 15 bp, Homo sapiens
agtaaatgttggaag

SEQ ID NO: 175993 - DNA, 15 bp, Homo sapiens
cagtaaatgttggaa

SEQ ID NO: 175994 - DNA, 15 bp, Homo sapiens
acagtaaatgttgga

SEQ ID NO: 175995 - DNA, 15 bp, Homo sapiens
aacagtaaatgttgg

SEQ ID NO: 175996 - DNA, 15 bp, Homo sapiens
gaacagtaaatgttg

SEQ ID NO: 175997 - DNA, 15 bp, Homo sapiens
ggaacagtaaatgtt

SEQ ID NO: 175998 - DNA, 15 bp, Homo sapiens
aggaacagtaaatgt

SEQ ID NO: 175999 - DNA, 15 bp, Homo sapiens
gaggaacagtaaatg

SEQ ID NO: 176000 - DNA, 15 bp, Homo sapiens
ggaggaacagtaaat

SEQ ID NO: 176001 - DNA, 15 bp, Homo sapiens
aggaggaacagtaaa

SEQ ID NO: 176002 - DNA, 15 bp, Homo sapiens
gaggaggaacagtaa

SEQ ID NO: 176003 - DNA, 15 bp, Homo sapiens
ggaggaggaacagta

SEQ ID NO: 176004 - DNA, 15 bp, Homo sapiens
gggaggaggaacagt

SEQ ID NO: 176005 - DNA, 15 bp, Homo sapiens
cgggaggaggaacag

SEQ ID NO: 176006 - DNA, 15 bp, Homo sapiens
ccgggaggaggaaca

SEQ ID NO: 176007 - DNA, 15 bp, Homo sapiens
cccgggaggaggaac

SEQ ID NO: 176008 - DNA, 15 bp, Homo sapiens
tcccgggaggaggaa

SEQ ID NO: 176009 - DNA, 15 bp, Homo sapiens
atcccgggaggagga

SEQ ID NO: 176010 - DNA, 15 bp, Homo sapiens
catcccgggaggagg

SEQ ID NO: 176011 - DNA, 15 bp, Homo sapiens
gcatcccgggaggag

SEQ ID NO: 176012 - DNA, 15 bp, Homo sapiens
ggcatcccgggagga

SEQ ID NO: 176013 - DNA, 15 bp, Homo sapiens
aggcatcccgggagg

SEQ ID NO: 176014 - DNA, 15 bp, Homo sapiens
caggcatcccgggag

SEQ ID NO: 176015 - DNA, 15 bp, Homo sapiens
gcaggcatcccggga

SEQ ID NO: 176016 - DNA, 15 bp, Homo sapiens
ggcaggcatcccggg

SEQ ID NO: 176017 - DNA, 15 bp, Homo sapiens
aggcaggcatcccgg

SEQ ID NO: 176018 - DNA, 15 bp, Homo sapiens
aaggcaggcatcccg

SEQ ID NO: 176019 - DNA, 15 bp, Homo sapiens
gaaggcaggcatccc

SEQ ID NO: 176020 - DNA, 15 bp, Homo sapiens
ggaaggcaggcatcc

SEQ ID NO: 176021 - DNA, 15 bp, Homo sapiens
aggaaggcaggcatc

SEQ ID NO: 176022 - DNA, 15 bp, Homo sapiens
gaggaaggcaggcat

SEQ ID NO: 176023 - DNA, 15 bp, Homo sapiens
agaggaaggcaggca

SEQ ID NO: 176024 - DNA, 15 bp, Homo sapiens
aagaggaaggcaggc

SEQ ID NO: 176025 - DNA, 15 bp, Homo sapiens
caagaggaaggcagg

SEQ ID NO: 176026 - DNA, 15 bp, Homo sapiens
acaagaggaaggcag

SEQ ID NO: 176027 - DNA, 15 bp, Homo sapiens
aacaagaggaaggca

SEQ ID NO: 176028 - DNA, 15 bp, Homo sapiens
aaacaagaggaaggc

SEQ ID NO: 176029 - DNA, 15 bp, Homo sapiens
caaacaagaggaagg

SEQ ID NO: 176030 - DNA, 15 bp, Homo sapiens
ccaaacaagaggaag

SEQ ID NO: 176031 - DNA, 15 bp, Homo sapiens
gccaaacaagaggaa

SEQ ID NO: 176032 - DNA, 15 bp, Homo sapiens
agccaaacaagagga

SEQ ID NO: 176033 - DNA, 15 bp, Homo sapiens
aagccaaacaagagg

SEQ ID NO: 176034 - DNA, 15 bp, Homo sapiens
caagccaaacaagag

SEQ ID NO: 176035 - DNA, 15 bp, Homo sapiens
acaagccaaacaaga

SEQ ID NO: 176036 - DNA, 15 bp, Homo sapiens
cacaagccaaacaag

SEQ ID NO: 176037 - DNA, 15 bp, Homo sapiens
acacaagccaaacaa

SEQ ID NO: 176038 - DNA, 15 bp, Homo sapiens
aacacaagccaaaca

SEQ ID NO: 176039 - DNA, 15 bp, Homo sapiens
aaacacaagccaaac

SEQ ID NO: 176040 - DNA, 15 bp, Homo sapiens
caaacacaagccaaa

SEQ ID NO: 176041 - DNA, 15 bp, Homo sapiens
gcaaacacaagccaa

SEQ ID NO: 176042 - DNA, 15 bp, Homo sapiens
tgcaaacacaagcca

SEQ ID NO: 176043 - DNA, 15 bp, Homo sapiens
ttgcaaacacaagcc

SEQ ID NO: 176044 - DNA, 15 bp, Homo sapiens
tttgcaaacacaagc

SEQ ID NO: 176045 - DNA, 15 bp, Homo sapiens
atttgcaaacacaag

SEQ ID NO: 176046 - DNA, 15 bp, Homo sapiens
catttgcaaacacaa

SEQ ID NO: 176047 - DNA, 15 bp, Homo sapiens
tcatttgcaaacaca

SEQ ID NO: 176048 - DNA, 15 bp, Homo sapiens
ttcatttgcaaacac

SEQ ID NO: 176049 - DNA, 15 bp, Homo sapiens
cttcatttgcaaaca

SEQ ID NO: 176050 - DNA, 15 bp, Homo sapiens
gcttcatttgcaaac

SEQ ID NO: 176051 - DNA, 15 bp, Homo sapiens
tgcttcatttgcaaa

SEQ ID NO: 176052 - DNA, 15 bp, Homo sapiens
ctgcttcatttgcaa

SEQ ID NO: 176053 - DNA, 15 bp, Homo sapiens
tctgcttcatttgca

SEQ ID NO: 176054 - DNA, 15 bp, Homo sapiens
gtctgcttcatttgc

SEQ ID NO: 176055 - DNA, 15 bp, Homo sapiens
tgtctgcttcatttg

SEQ ID NO: 176056 - DNA, 15 bp, Homo sapiens
ttgtctgcttcattt

SEQ ID NO: 176057 - DNA, 15 bp, Homo sapiens
cttgtctgcttcatt

SEQ ID NO: 176058 - DNA, 15 bp, Homo sapiens
acttgtctgcttcat

SEQ ID NO: 176059 - DNA, 15 bp, Homo sapiens
aacttgtctgcttca

SEQ ID NO: 176060 - DNA, 15 bp, Homo sapiens
gaacttgtctgcttc

SEQ ID NO: 176061 - DNA, 15 bp, Homo sapiens
agaacttgtctgctt

SEQ ID NO: 176062 - DNA, 15 bp, Homo sapiens
tagaacttgtctgct

SEQ ID NO: 176063 - DNA, 15 bp, Homo sapiens
ctagaacttgtctgc

SEQ ID NO: 176064 - DNA, 15 bp, Homo sapiens
tctagaacttgtctg

SEQ ID NO: 176065 - DNA, 15 bp, Homo sapiens
ctctagaacttgtct

SEQ ID NO: 176066 - DNA, 15 bp, Homo sapiens
tctctagaacttgtc

SEQ ID NO: 176067 - DNA, 15 bp, Homo sapiens
ttctctagaacttgt

SEQ ID NO: 176068 - DNA, 15 bp, Homo sapiens
cttctctagaacttg

SEQ ID NO: 176069 - DNA, 15 bp, Homo sapiens
acttctctagaactt

SEQ ID NO: 176070 - DNA, 15 bp, Homo sapiens
aacttctctagaact

SEQ ID NO: 176071 - DNA, 15 bp, Homo sapiens
taacttctctagaac

SEQ ID NO: 176072 - DNA, 15 bp, Homo sapiens
ttaacttctctagaa

SEQ ID NO: 176073 - DNA, 15 bp, Homo sapiens
tttaacttctctaga

SEQ ID NO: 176074 - DNA, 15 bp, Homo sapiens
atttaacttctctag

SEQ ID NO: 176075 - DNA, 15 bp, Homo sapiens
catttaacttctcta

SEQ ID NO: 176076 - DNA, 15 bp, Homo sapiens
tcatttaacttctct

SEQ ID NO: 176077 - DNA, 15 bp, Homo sapiens
atcatttaacttctc

SEQ ID NO: 176078 - DNA, 15 bp, Homo sapiens
aatcatttaacttct

SEQ ID NO: 176079 - DNA, 15 bp, Homo sapiens
aaatcatttaacttc

SEQ ID NO: 176080 - DNA, 15 bp, Homo sapiens
caaatcatttaactt

SEQ ID NO: 176081 - DNA, 15 bp, Homo sapiens
acaaatcatttaact

SEQ ID NO: 176082 - DNA, 15 bp, Homo sapiens
gacaaatcatttaac

SEQ ID NO: 176083 - DNA, 15 bp, Homo sapiens
ggacaaatcatttaa

SEQ ID NO: 176084 - DNA, 15 bp, Homo sapiens
aggacaaatcattta

SEQ ID NO: 176085 - DNA, 15 bp, Homo sapiens
taggacaaatcattt

SEQ ID NO: 176086 - DNA, 15 bp, Homo sapiens
ttaggacaaatcatt

SEQ ID NO: 176087 - DNA, 15 bp, Homo sapiens
cttaggacaaatcat

SEQ ID NO: 176088 - DNA, 15 bp, Homo sapiens
acttaggacaaatca

SEQ ID NO: 176089 - DNA, 15 bp, Homo sapiens
gacttaggacaaatc

SEQ ID NO: 176090 - DNA, 15 bp, Homo sapiens
tgacttaggacaaat

SEQ ID NO: 176091 - DNA, 15 bp, Homo sapiens
atgacttaggacaaa

SEQ ID NO: 176092 - DNA, 15 bp, Homo sapiens
catgacttaggacaa

SEQ ID NO: 176093 - DNA, 15 bp, Homo sapiens
acatgacttaggaca

SEQ ID NO: 176094 - DNA, 15 bp, Homo sapiens
tacatgacttaggac

SEQ ID NO: 176095 - DNA, 15 bp, Homo sapiens
ttacatgacttagga

SEQ ID NO: 176096 - DNA, 15 bp, Homo sapiens
attacatgacttagg

SEQ ID NO: 176097 - DNA, 15 bp, Homo sapiens
gattacatgacttag

SEQ ID NO: 176098 - DNA, 15 bp, Homo sapiens
tgattacatgactta

SEQ ID NO: 176099 - DNA, 15 bp, Homo sapiens
atgattacatgactt

SEQ ID NO: 176100 - DNA, 15 bp, Homo sapiens
aatgattacatgact

SEQ ID NO: 176101 - DNA, 15 bp, Homo sapiens
caatgattacatgac

SEQ ID NO: 176102 - DNA, 15 bp, Homo sapiens
tcaatgattacatga

SEQ ID NO: 176103 - DNA, 15 bp, Homo sapiens
gtcaatgattacatg

SEQ ID NO: 176104 - DNA, 15 bp, Homo sapiens
agtcaatgattacat

SEQ ID NO: 176105 - DNA, 15 bp, Homo sapiens
tagtcaatgattaca

SEQ ID NO: 176106 - DNA, 15 bp, Homo sapiens
ctagtcaatgattac

SEQ ID NO: 176107 - DNA, 15 bp, Homo sapiens
cctagtcaatgatta

SEQ ID NO: 176108 - DNA, 15 bp, Homo sapiens
ccctagtcaatgatt

SEQ ID NO: 176109 - DNA, 15 bp, Homo sapiens
tccctagtcaatgat

SEQ ID NO: 176110 - DNA, 15 bp, Homo sapiens
ttccctagtcaatga

SEQ ID NO: 176111 - DNA, 15 bp, Homo sapiens
cttccctagtcaatg

SEQ ID NO: 176112 - DNA, 15 bp, Homo sapiens
ccttccctagtcaat

SEQ ID NO: 176113 - DNA, 15 bp, Homo sapiens
cccttccctagtcaa

SEQ ID NO: 176114 - DNA, 15 bp, Homo sapiens
tcccttccctagtca

SEQ ID NO: 176115 - DNA, 15 bp, Homo sapiens
ttcccttccctagtc

SEQ ID NO: 176116 - DNA, 15 bp, Homo sapiens
tttcccttccctagt

SEQ ID NO: 176117 - DNA, 15 bp, Homo sapiens
gtttcccttccctag

SEQ ID NO: 176118 - DNA, 15 bp, Homo sapiens
agtttcccttcccta

SEQ ID NO: 176119 - DNA, 15 bp, Homo sapiens
tagtttcccttccct

SEQ ID NO: 176120 - DNA, 15 bp, Homo sapiens
ctagtttcccttccc

SEQ ID NO: 176121 - DNA, 15 bp, Homo sapiens
tctagtttcccttcc

SEQ ID NO: 176122 - DNA, 15 bp, Homo sapiens
gtctagtttcccttc

SEQ ID NO: 176123 - DNA, 15 bp, Homo sapiens
ggtctagtttccctt

SEQ ID NO: 176124 - DNA, 15 bp, Homo sapiens
gggtctagtttccct

SEQ ID NO: 176125 - DNA, 15 bp, Homo sapiens
cgggtctagtttccc

SEQ ID NO: 176126 - DNA, 15 bp, Homo sapiens
ccgggtctagtttcc

SEQ ID NO: 176127 - DNA, 15 bp, Homo sapiens
tccgggtctagtttc

SEQ ID NO: 176128 - DNA, 15 bp, Homo sapiens
ctccgggtctagttt

SEQ ID NO: 176129 - DNA, 15 bp, Homo sapiens
gctccgggtctagtt

SEQ ID NO: 176130 - DNA, 15 bp, Homo sapiens
agctccgggtctagt

SEQ ID NO: 176131 - DNA, 15 bp, Homo sapiens
gagctccgggtctag

SEQ ID NO: 176132 - DNA, 15 bp, Homo sapiens
ggagctccgggtcta

SEQ ID NO: 176133 - DNA, 15 bp, Homo sapiens
tggagctccgggtct

SEQ ID NO: 176134 - DNA, 15 bp, Homo sapiens
ctggagctccgggtc

SEQ ID NO: 176135 - DNA, 15 bp, Homo sapiens
gctggagctccgggt

SEQ ID NO: 176136 - DNA, 15 bp, Homo sapiens
agctggagctccggg

SEQ ID NO: 176137 - DNA, 15 bp, Homo sapiens
aagctggagctccgg

SEQ ID NO: 176138 - DNA, 15 bp, Homo sapiens
gaagctggagctccg

SEQ ID NO: 176139 - DNA, 15 bp, Homo sapiens
tgaagctggagctcc

SEQ ID NO: 176140 - DNA, 15 bp, Homo sapiens
gtgaagctggagctc

SEQ ID NO: 176141 - DNA, 15 bp, Homo sapiens
cgtgaagctggagct

SEQ ID NO: 176142 - DNA, 15 bp, Homo sapiens
ccgtgaagctggagc

SEQ ID NO: 176143 - DNA, 15 bp, Homo sapiens
cccgtgaagctggag

SEQ ID NO: 176144 - DNA, 15 bp, Homo sapiens
acccgtgaagctgga

SEQ ID NO: 176145 - DNA, 15 bp, Homo sapiens
cacccgtgaagctgg

SEQ ID NO: 176146 - DNA, 15 bp, Homo sapiens
gcacccgtgaagctg

SEQ ID NO: 176147 - DNA, 15 bp, Homo sapiens
ggcacccgtgaagct

SEQ ID NO: 176148 - DNA, 15 bp, Homo sapiens
gggcacccgtgaagc

SEQ ID NO: 176149 - DNA, 15 bp, Homo sapiens
agggcacccgtgaag

SEQ ID NO: 176150 - DNA, 15 bp, Homo sapiens
aagggcacccgtgaa

SEQ ID NO: 176151 - DNA, 15 bp, Homo sapiens
aaagggcacccgtga

SEQ ID NO: 176152 - DNA, 15 bp, Homo sapiens
gaaagggcacccgtg

SEQ ID NO: 176153 - DNA, 15 bp, Homo sapiens
agaaagggcacccgt

SEQ ID NO: 176154 - DNA, 15 bp, Homo sapiens
gagaaagggcacccg

SEQ ID NO: 176155 - DNA, 15 bp, Homo sapiens
ggagaaagggcaccc

SEQ ID NO: 176156 - DNA, 15 bp, Homo sapiens
aggagaaagggcacc

SEQ ID NO: 176157 - DNA, 15 bp, Homo sapiens
caggagaaagggcac

SEQ ID NO: 176158 - DNA, 15 bp, Homo sapiens
acaggagaaagggca

SEQ ID NO: 176159 - DNA, 15 bp, Homo sapiens
cacaggagaaagggc

SEQ ID NO: 176160 - DNA, 15 bp, Homo sapiens
acacaggagaaaggg

SEQ ID NO: 176161 - DNA, 15 bp, Homo sapiens
gacacaggagaaagg

SEQ ID NO: 176162 - DNA, 15 bp, Homo sapiens
tgacacaggagaaag

SEQ ID NO: 176163 - DNA, 15 bp, Homo sapiens
atgacacaggagaaa

SEQ ID NO: 176164 - DNA, 15 bp, Homo sapiens
catgacacaggagaa

SEQ ID NO: 176165 - DNA, 15 bp, Homo sapiens
gcatgacacaggaga

SEQ ID NO: 176166 - DNA, 15 bp, Homo sapiens
tgcatgacacaggag

SEQ ID NO: 176167 - DNA, 15 bp, Homo sapiens
ctgcatgacacagga

SEQ ID NO: 176168 - DNA, 15 bp, Homo sapiens
gctgcatgacacagg

SEQ ID NO: 176169 - DNA, 15 bp, Homo sapiens
ggctgcatgacacag

SEQ ID NO: 176170 - DNA, 15 bp, Homo sapiens
cggctgcatgacaca

SEQ ID NO: 176171 - DNA, 15 bp, Homo sapiens
gcggctgcatgacac

SEQ ID NO: 176172 - DNA, 15 bp, Homo sapiens
agcggctgcatgaca

SEQ ID NO: 176173 - DNA, 15 bp, Homo sapiens
aagcggctgcatgac

SEQ ID NO: 176174 - DNA, 15 bp, Homo sapiens
gaagcggctgcatga

SEQ ID NO: 176175 - DNA, 15 bp, Homo sapiens
agaagcggctgcatg

SEQ ID NO: 176176 - DNA, 15 bp, Homo sapiens
cagaagcggctgcat

SEQ ID NO: 176177 - DNA, 15 bp, Homo sapiens
acagaagcggctgca

SEQ ID NO: 176178 - DNA, 15 bp, Homo sapiens
cacagaagcggctgc

SEQ ID NO: 176179 - DNA, 15 bp, Homo sapiens
acacagaagcggctg

SEQ ID NO: 176180 - DNA, 15 bp, Homo sapiens
cacacagaagcggct

SEQ ID NO: 176181 - DNA, 15 bp, Homo sapiens
acacacagaagcggc

SEQ ID NO: 176182 - DNA, 15 bp, Homo sapiens
aacacacagaagcgg

SEQ ID NO: 176183 - DNA, 15 bp, Homo sapiens
caacacacagaagcg

SEQ ID NO: 176184 - DNA, 15 bp, Homo sapiens
ccaacacacagaagc

SEQ ID NO: 176185 - DNA, 15 bp, Homo sapiens
gccaacacacagaag

SEQ ID NO: 176186 - DNA, 15 bp, Homo sapiens
agccaacacacagaa

SEQ ID NO: 176187 - DNA, 15 bp, Homo sapiens
tagccaacacacaga

SEQ ID NO: 176188 - DNA, 15 bp, Homo sapiens
ctagccaacacacag

SEQ ID NO: 176189 - DNA, 15 bp, Homo sapiens
actagccaacacaca

SEQ ID NO: 176190 - DNA, 15 bp, Homo sapiens
gactagccaacacac

SEQ ID NO: 176191 - DNA, 15 bp, Homo sapiens
agactagccaacaca

SEQ ID NO: 176192 - DNA, 15 bp, Homo sapiens
cagactagccaacac

SEQ ID NO: 176193 - DNA, 15 bp, Homo sapiens
gcagactagccaaca

SEQ ID NO: 176194 - DNA, 15 bp, Homo sapiens
ggcagactagccaac

SEQ ID NO: 176195 - DNA, 15 bp, Homo sapiens
gggcagactagccaa

SEQ ID NO: 176196 - DNA, 15 bp, Homo sapiens
tgggcagactagcca

SEQ ID NO: 176197 - DNA, 15 bp, Homo sapiens
ctgggcagactagcc

SEQ ID NO: 176198 - DNA, 15 bp, Homo sapiens
actgggcagactagc

SEQ ID NO: 176199 - DNA, 15 bp, Homo sapiens
tactgggcagactag

SEQ ID NO: 176200 - DNA, 15 bp, Homo sapiens
ctactgggcagacta

SEQ ID NO: 176201 - DNA, 15 bp, Homo sapiens
tctactgggcagact

SEQ ID NO: 176202 - DNA, 15 bp, Homo sapiens
gtctactgggcagac

SEQ ID NO: 176203 - DNA, 15 bp, Homo sapiens
agtctactgggcaga

SEQ ID NO: 176204 - DNA, 15 bp, Homo sapiens
gagtctactgggcag

SEQ ID NO: 176205 - DNA, 15 bp, Homo sapiens
agagtctactgggca

SEQ ID NO: 176206 - DNA, 15 bp, Homo sapiens
cagagtctactgggc

SEQ ID NO: 176207 - DNA, 15 bp, Homo sapiens
gcagagtctactggg

SEQ ID NO: 176208 - DNA, 15 bp, Homo sapiens
agcagagtctactgg

SEQ ID NO: 176209 - DNA, 15 bp, Homo sapiens
gagcagagtctactg

SEQ ID NO: 176210 - DNA, 15 bp, Homo sapiens
ggagcagagtctact

SEQ ID NO: 176211 - DNA, 15 bp, Homo sapiens
aggagcagagtctac

SEQ ID NO: 176212 - DNA, 15 bp, Homo sapiens
aaggagcagagtcta

SEQ ID NO: 176213 - DNA, 15 bp, Homo sapiens
caaggagcagagtct

SEQ ID NO: 176214 - DNA, 15 bp, Homo sapiens
ccaaggagcagagtc

SEQ ID NO: 176215 - DNA, 15 bp, Homo sapiens
cccaaggagcagagt

SEQ ID NO: 176216 - DNA, 15 bp, Homo sapiens
ccccaaggagcagag

SEQ ID NO: 176217 - DNA, 15 bp, Homo sapiens
gccccaaggagcaga

SEQ ID NO: 176218 - DNA, 15 bp, Homo sapiens
agccccaaggagcag

SEQ ID NO: 176219 - DNA, 15 bp, Homo sapiens
gagccccaaggagca

SEQ ID NO: 176220 - DNA, 15 bp, Homo sapiens
agagccccaaggagc

SEQ ID NO: 176221 - DNA, 15 bp, Homo sapiens
cagagccccaaggag

SEQ ID NO: 176222 - DNA, 15 bp, Homo sapiens
ccagagccccaagga

SEQ ID NO: 176223 - DNA, 15 bp, Homo sapiens
accagagccccaagg

SEQ ID NO: 176224 - DNA, 15 bp, Homo sapiens
aaccagagccccaag

SEQ ID NO: 176225 - DNA, 15 bp, Homo sapiens
caaccagagccccaa

SEQ ID NO: 176226 - DNA, 15 bp, Homo sapiens
acaaccagagcccca

SEQ ID NO: 176227 - DNA, 15 bp, Homo sapiens
cacaaccagagcccc

SEQ ID NO: 176228 - DNA, 15 bp, Homo sapiens
acacaaccagagccc

SEQ ID NO: 176229 - DNA, 15 bp, Homo sapiens
gacacaaccagagcc

SEQ ID NO: 176230 - DNA, 15 bp, Homo sapiens
agacacaaccagagc

SEQ ID NO: 176231 - DNA, 15 bp, Homo sapiens
cagacacaaccagag

SEQ ID NO: 176232 - DNA, 15 bp, Homo sapiens
tcagacacaaccaga

SEQ ID NO: 176233 - DNA, 15 bp, Homo sapiens
gtcagacacaaccag

SEQ ID NO: 176234 - DNA, 15 bp, Homo sapiens
ggtcagacacaacca

SEQ ID NO: 176235 - DNA, 15 bp, Homo sapiens
aggtcagacacaacc

SEQ ID NO: 176236 - DNA, 15 bp, Homo sapiens
aaggtcagacacaac

SEQ ID NO: 176237 - DNA, 15 bp, Homo sapiens
caaggtcagacacaa

SEQ ID NO: 176238 - DNA, 15 bp, Homo sapiens
acaaggtcagacaca

SEQ ID NO: 176239 - DNA, 15 bp, Homo sapiens
aacaaggtcagacac

SEQ ID NO: 176240 - DNA, 15 bp, Homo sapiens
caacaaggtcagaca

SEQ ID NO: 176241 - DNA, 15 bp, Homo sapiens
tcaacaaggtcagac

SEQ ID NO: 176242 - DNA, 15 bp, Homo sapiens
ttcaacaaggtcaga

SEQ ID NO: 176243 - DNA, 15 bp, Homo sapiens
attcaacaaggtcag

SEQ ID NO: 176244 - DNA, 15 bp, Homo sapiens
gattcaacaaggtca

SEQ ID NO: 176245 - DNA, 15 bp, Homo sapiens
ggattcaacaaggtc

SEQ ID NO: 176246 - DNA, 15 bp, Homo sapiens
gggattcaacaaggt

SEQ ID NO: 176247 - DNA, 15 bp, Homo sapiens
ggggattcaacaagg

SEQ ID NO: 176248 - DNA, 15 bp, Homo sapiens
aggggattcaacaag

SEQ ID NO: 176249 - DNA, 15 bp, Homo sapiens
caggggattcaacaa

SEQ ID NO: 176250 - DNA, 15 bp, Homo sapiens
gcaggggattcaaca

SEQ ID NO: 176251 - DNA, 15 bp, Homo sapiens
tgcaggggattcaac

SEQ ID NO: 176252 - DNA, 15 bp, Homo sapiens
atgcaggggattcaa

SEQ ID NO: 176253 - DNA, 15 bp, Homo sapiens
catgcaggggattca

SEQ ID NO: 176254 - DNA, 15 bp, Homo sapiens
acatgcaggggattc

SEQ ID NO: 176255 - DNA, 15 bp, Homo sapiens
cacatgcaggggatt

SEQ ID NO: 176256 - DNA, 15 bp, Homo sapiens
acacatgcaggggat

SEQ ID NO: 176257 - DNA, 15 bp, Homo sapiens
tacacatgcagggga

SEQ ID NO: 176258 - DNA, 15 bp, Homo sapiens
ctacacatgcagggg

SEQ ID NO: 176259 - DNA, 15 bp, Homo sapiens
actacacatgcaggg

SEQ ID NO: 176260 - DNA, 15 bp, Homo sapiens
tactacacatgcagg

SEQ ID NO: 176261 - DNA, 15 bp, Homo sapiens
atactacacatgcag

SEQ ID NO: 176262 - DNA, 15 bp, Homo sapiens
catactacacatgca

SEQ ID NO: 176263 - DNA, 15 bp, Homo sapiens
tcatactacacatgc

SEQ ID NO: 176264 - DNA, 15 bp, Homo sapiens
gtcatactacacatg

SEQ ID NO: 176265 - DNA, 15 bp, Homo sapiens
ggtcatactacacat

SEQ ID NO: 176266 - DNA, 15 bp, Homo sapiens
aggtcatactacaca

SEQ ID NO: 176267 - DNA, 15 bp, Homo sapiens
aaggtcatactacac

SEQ ID NO: 176268 - DNA, 15 bp, Homo sapiens
caaggtcatactaca

SEQ ID NO: 176269 - DNA, 15 bp, Homo sapiens
acaaggtcatactac

SEQ ID NO: 176270 - DNA, 15 bp, Homo sapiens
aacaaggtcatacta

SEQ ID NO: 176271 - DNA, 15 bp, Homo sapiens
caacaaggtcatact

SEQ ID NO: 176272 - DNA, 15 bp, Homo sapiens
ccaacaaggtcatac

SEQ ID NO: 176273 - DNA, 15 bp, Homo sapiens
cccaacaaggtcata

SEQ ID NO: 176274 - DNA, 15 bp, Homo sapiens
ccccaacaaggtcat

SEQ ID NO: 176275 - DNA, 15 bp, Homo sapiens
accccaacaaggtca

SEQ ID NO: 176276 - DNA, 15 bp, Homo sapiens
caccccaacaaggtc

SEQ ID NO: 176277 - DNA, 15 bp, Homo sapiens
acaccccaacaaggt

SEQ ID NO: 176278 - DNA, 15 bp, Homo sapiens
gacaccccaacaagg

SEQ ID NO: 176279 - DNA, 15 bp, Homo sapiens
agacaccccaacaag

SEQ ID NO: 176280 - DNA, 15 bp, Homo sapiens
gagacaccccaacaa

SEQ ID NO: 176281 - DNA, 15 bp, Homo sapiens
tgagacaccccaaca

SEQ ID NO: 176282 - DNA, 15 bp, Homo sapiens
ttgagacaccccaac

SEQ ID NO: 176283 - DNA, 15 bp, Homo sapiens
gttgagacaccccaa

SEQ ID NO: 176284 - DNA, 15 bp, Homo sapiens
tgttgagacacccca

SEQ ID NO: 176285 - DNA, 15 bp, Homo sapiens
gtgttgagacacccc

SEQ ID NO: 176286 - DNA, 15 bp, Homo sapiens
agtgttgagacaccc

SEQ ID NO: 176287 - DNA, 15 bp, Homo sapiens
cagtgttgagacacc

SEQ ID NO: 176288 - DNA, 15 bp, Homo sapiens
ccagtgttgagacac

SEQ ID NO: 176289 - DNA, 15 bp, Homo sapiens
cccagtgttgagaca

SEQ ID NO: 176290 - DNA, 15 bp, Homo sapiens
gcccagtgttgagac

SEQ ID NO: 176291 - DNA, 15 bp, Homo sapiens
tgcccagtgttgaga

SEQ ID NO: 176292 - DNA, 15 bp, Homo sapiens
atgcccagtgttgag

SEQ ID NO: 176293 - DNA, 15 bp, Homo sapiens
catgcccagtgttga

SEQ ID NO: 176294 - DNA, 15 bp, Homo sapiens
acatgcccagtgttg

SEQ ID NO: 176295 - DNA, 15 bp, Homo sapiens
aacatgcccagtgtt

SEQ ID NO: 176296 - DNA, 15 bp, Homo sapiens
taacatgcccagtgt

SEQ ID NO: 176297 - DNA, 15 bp, Homo sapiens
ctaacatgcccagtg

SEQ ID NO: 176298 - DNA, 15 bp, Homo sapiens
gctaacatgcccagt

SEQ ID NO: 176299 - DNA, 15 bp, Homo sapiens
tgctaacatgcccag

SEQ ID NO: 176300 - DNA, 15 bp, Homo sapiens
ttgctaacatgccca

SEQ ID NO: 176301 - DNA, 15 bp, Homo sapiens
gttgctaacatgccc

SEQ ID NO: 176302 - DNA, 15 bp, Homo sapiens
tgttgctaacatgcc

SEQ ID NO: 176303 - DNA, 15 bp, Homo sapiens
gtgttgctaacatgc

SEQ ID NO: 176304 - DNA, 15 bp, Homo sapiens
agtgttgctaacatg

SEQ ID NO: 176305 - DNA, 15 bp, Homo sapiens
cagtgttgctaacat

SEQ ID NO: 176306 - DNA, 15 bp, Homo sapiens
tcagtgttgctaaca

SEQ ID NO: 176307 - DNA, 15 bp, Homo sapiens
ctcagtgttgctaac

SEQ ID NO: 176308 - DNA, 15 bp, Homo sapiens
cctcagtgttgctaa

SEQ ID NO: 176309 - DNA, 15 bp, Homo sapiens
ccctcagtgttgcta

SEQ ID NO: 176310 - DNA, 15 bp, Homo sapiens
tccctcagtgttgct

SEQ ID NO: 176311 - DNA, 15 bp, Homo sapiens
atccctcagtgttgc

SEQ ID NO: 176312 - DNA, 15 bp, Homo sapiens
catccctcagtgttg

SEQ ID NO: 176313 - DNA, 15 bp, Homo sapiens
tcatccctcagtgtt

SEQ ID NO: 176314 - DNA, 15 bp, Homo sapiens
ttcatccctcagtgt

SEQ ID NO: 176315 - DNA, 15 bp, Homo sapiens
tttcatccctcagtg

SEQ ID NO: 176316 - DNA, 15 bp, Homo sapiens
ctttcatccctcagt

SEQ ID NO: 176317 - DNA, 15 bp, Homo sapiens
gctttcatccctcag

SEQ ID NO: 176318 - DNA, 15 bp, Homo sapiens
tgctttcatccctca

SEQ ID NO: 176319 - DNA, 15 bp, Homo sapiens
gtgctttcatccctc

SEQ ID NO: 176320 - DNA, 15 bp, Homo sapiens
agtgctttcatccct

SEQ ID NO: 176321 - DNA, 15 bp, Homo sapiens
cagtgctttcatccc

SEQ ID NO: 176322 - DNA, 15 bp, Homo sapiens
acagtgctttcatcc

SEQ ID NO: 176323 - DNA, 15 bp, Homo sapiens
gacagtgctttcatc

SEQ ID NO: 176324 - DNA, 15 bp, Homo sapiens
tgacagtgctttcat

SEQ ID NO: 176325 - DNA, 15 bp, Homo sapiens
atgacagtgctttca

SEQ ID NO: 176326 - DNA, 15 bp, Homo sapiens
catgacagtgctttc

SEQ ID NO: 176327 - DNA, 15 bp, Homo sapiens
gcatgacagtgcttt

SEQ ID NO: 176328 - DNA, 15 bp, Homo sapiens
ggcatgacagtgctt

SEQ ID NO: 176329 - DNA, 15 bp, Homo sapiens
gggcatgacagtgct

SEQ ID NO: 176330 - DNA, 15 bp, Homo sapiens
agggcatgacagtgc

SEQ ID NO: 176331 - DNA, 15 bp, Homo sapiens
cagggcatgacagtg

SEQ ID NO: 176332 - DNA, 15 bp, Homo sapiens
ccagggcatgacagt

SEQ ID NO: 176333 - DNA, 15 bp, Homo sapiens
tccagggcatgacag

SEQ ID NO: 176334 - DNA, 15 bp, Homo sapiens
atccagggcatgaca

SEQ ID NO: 176335 - DNA, 15 bp, Homo sapiens
catccagggcatgac

SEQ ID NO: 176336 - DNA, 15 bp, Homo sapiens
ccatccagggcatga

SEQ ID NO: 176337 - DNA, 15 bp, Homo sapiens
accatccagggcatg

SEQ ID NO: 176338 - DNA, 15 bp, Homo sapiens
gaccatccagggcat

SEQ ID NO: 176339 - DNA, 15 bp, Homo sapiens
tgaccatccagggca

SEQ ID NO: 176340 - DNA, 15 bp, Homo sapiens
ctgaccatccagggc

SEQ ID NO: 176341 - DNA, 15 bp, Homo sapiens
gctgaccatccaggg

SEQ ID NO: 176342 - DNA, 15 bp, Homo sapiens
ggctgaccatccagg

SEQ ID NO: 176343 - DNA, 15 bp, Homo sapiens
gggctgaccatccag

SEQ ID NO: 176344 - DNA, 15 bp, Homo sapiens
agggctgaccatcca

SEQ ID NO: 176345 - DNA, 15 bp, Homo sapiens
cagggctgaccatcc

SEQ ID NO: 176346 - DNA, 15 bp, Homo sapiens
ccagggctgaccatc

SEQ ID NO: 176347 - DNA, 15 bp, Homo sapiens
accagggctgaccat

SEQ ID NO: 176348 - DNA, 15 bp, Homo sapiens
aaccagggctgacca

SEQ ID NO: 176349 - DNA, 15 bp, Homo sapiens
aaaccagggctgacc

SEQ ID NO: 176350 - DNA, 15 bp, Homo sapiens
caaaccagggctgac

SEQ ID NO: 176351 - DNA, 15 bp, Homo sapiens
acaaaccagggctga

SEQ ID NO: 176352 - DNA, 15 bp, Homo sapiens
aacaaaccagggctg

SEQ ID NO: 176353 - DNA, 15 bp, Homo sapiens
caacaaaccagggct

SEQ ID NO: 176354 - DNA, 15 bp, Homo sapiens
tcaacaaaccagggc

SEQ ID NO: 176355 - DNA, 15 bp, Homo sapiens
ttcaacaaaccaggg

SEQ ID NO: 176356 - DNA, 15 bp, Homo sapiens
attcaacaaaccagg

SEQ ID NO: 176357 - DNA, 15 bp, Homo sapiens
cattcaacaaaccag

SEQ ID NO: 176358 - DNA, 15 bp, Homo sapiens
gcattcaacaaacca

SEQ ID NO: 176359 - DNA, 15 bp, Homo sapiens
tgcattcaacaaacc

SEQ ID NO: 176360 - DNA, 15 bp, Homo sapiens
gtgcattcaacaaac

SEQ ID NO: 176361 - DNA, 15 bp, Homo sapiens
cgtgcattcaacaaa

SEQ ID NO: 176362 - DNA, 15 bp, Homo sapiens
tcgtgcattcaacaa

SEQ ID NO: 176363 - DNA, 15 bp, Homo sapiens
ctcgtgcattcaaca

SEQ ID NO: 176364 - DNA, 15 bp, Homo sapiens
actcgtgcattcaac

SEQ ID NO: 176365 - DNA, 15 bp, Homo sapiens
cactcgtgcattcaa

SEQ ID NO: 176366 - DNA, 15 bp, Homo sapiens
acactcgtgcattca

SEQ ID NO: 176367 - DNA, 15 bp, Homo sapiens
aacactcgtgcattc

SEQ ID NO: 176368 - DNA, 15 bp, Homo sapiens
gaacactcgtgcatt

SEQ ID NO: 176369 - DNA, 15 bp, Homo sapiens
tgaacactcgtgcat

SEQ ID NO: 176370 - DNA, 15 bp, Homo sapiens
atgaacactcgtgca

SEQ ID NO: 176371 - DNA, 15 bp, Homo sapiens
tatgaacactcgtgc

SEQ ID NO: 176372 - DNA, 15 bp, Homo sapiens
atatgaacactcgtg

SEQ ID NO: 176373 - DNA, 15 bp, Homo sapiens
catatgaacactcgt

SEQ ID NO: 176374 - DNA, 15 bp, Homo sapiens
acatatgaacactcg

SEQ ID NO: 176375 - DNA, 15 bp, Homo sapiens
gacatatgaacactc

SEQ ID NO: 176376 - DNA, 15 bp, Homo sapiens
tgacatatgaacact

SEQ ID NO: 176377 - DNA, 15 bp, Homo sapiens
ctgacatatgaacac

SEQ ID NO: 176378 - DNA, 15 bp, Homo sapiens
tctgacatatgaaca

SEQ ID NO: 176379 - DNA, 15 bp, Homo sapiens
ttctgacatatgaac

SEQ ID NO: 176380 - DNA, 15 bp, Homo sapiens
tttctgacatatgaa

SEQ ID NO: 176381 - DNA, 15 bp, Homo sapiens
atttctgacatatga

SEQ ID NO: 176382 - DNA, 15 bp, Homo sapiens
tatttctgacatatg

SEQ ID NO: 176383 - DNA, 15 bp, Homo sapiens
gtatttctgacatat

SEQ ID NO: 176384 - DNA, 15 bp, Homo sapiens
tgtatttctgacata

SEQ ID NO: 176385 - DNA, 15 bp, Homo sapiens
atgtatttctgacat

SEQ ID NO: 176386 - DNA, 15 bp, Homo sapiens
tatgtatttctgaca

SEQ ID NO: 176387 - DNA, 15 bp, Homo sapiens
atatgtatttctgac

SEQ ID NO: 176388 - DNA, 15 bp, Homo sapiens
catatgtatttctga

SEQ ID NO: 176389 - DNA, 15 bp, Homo sapiens
gcatatgtatttctg

SEQ ID NO: 176390 - DNA, 15 bp, Homo sapiens
tgcatatgtatttct

SEQ ID NO: 176391 - DNA, 15 bp, Homo sapiens
atgcatatgtatttc

SEQ ID NO: 176392 - DNA, 15 bp, Homo sapiens
aatgcatatgtattt

SEQ ID NO: 176393 - DNA, 15 bp, Homo sapiens
gaatgcatatgtatt

SEQ ID NO: 176394 - DNA, 15 bp, Homo sapiens
tgaatgcatatgtat

SEQ ID NO: 176395 - DNA, 15 bp, Homo sapiens
gtgaatgcatatgta

SEQ ID NO: 176396 - DNA, 15 bp, Homo sapiens
agtgaatgcatatgt

SEQ ID NO: 176397 - DNA, 15 bp, Homo sapiens
gagtgaatgcatatg

SEQ ID NO: 176398 - DNA, 15 bp, Homo sapiens
agagtgaatgcatat

SEQ ID NO: 176399 - DNA, 15 bp, Homo sapiens
tagagtgaatgcata

SEQ ID NO: 176400 - DNA, 15 bp, Homo sapiens
gtagagtgaatgcat

SEQ ID NO: 176401 - DNA, 15 bp, Homo sapiens
tgtagagtgaatgca

SEQ ID NO: 176402 - DNA, 15 bp, Homo sapiens
ttgtagagtgaatgc

SEQ ID NO: 176403 - DNA, 15 bp, Homo sapiens
tttgtagagtgaatg

SEQ ID NO: 176404 - DNA, 15 bp, Homo sapiens
atttgtagagtgaat

SEQ ID NO: 176405 - DNA, 15 bp, Homo sapiens
tatttgtagagtgaa

SEQ ID NO: 176406 - DNA, 15 bp, Homo sapiens
atatttgtagagtga

SEQ ID NO: 176407 - DNA, 15 bp, Homo sapiens
aatatttgtagagtg

SEQ ID NO: 176408 - DNA, 15 bp, Homo sapiens
aaatatttgtagagt

SEQ ID NO: 176409 - DNA, 15 bp, Homo sapiens
aaaatatttgtagag

SEQ ID NO: 176410 - DNA, 15 bp, Homo sapiens
gaaaatatttgtaga

SEQ ID NO: 176411 - DNA, 15 bp, Homo sapiens
tgaaaatatttgtag

SEQ ID NO: 176412 - DNA, 15 bp, Homo sapiens
ttgaaaatatttgta

SEQ ID NO: 176413 - DNA, 15 bp, Homo sapiens
tttgaaaatatttgt

SEQ ID NO: 176414 - DNA, 15 bp, Homo sapiens
gtttgaaaatatttg

SEQ ID NO: 176415 - DNA, 15 bp, Homo sapiens
tgtttgaaaatattt

SEQ ID NO: 176416 - DNA, 15 bp, Homo sapiens
atgtttgaaaatatt

SEQ ID NO: 176417 - DNA, 15 bp, Homo sapiens
aatgtttgaaaatat

SEQ ID NO: 176418 - DNA, 15 bp, Homo sapiens
aaatgtttgaaaata

SEQ ID NO: 176419 - DNA, 15 bp, Homo sapiens
taaatgtttgaaaat

SEQ ID NO: 176420 - DNA, 15 bp, Homo sapiens
ataaatgtttgaaaa

SEQ ID NO: 176421 - DNA, 15 bp, Homo sapiens
aataaatgtttgaaa

SEQ ID NO: 176422 - DNA, 15 bp, Homo sapiens
taataaatgtttgaa

SEQ ID NO: 176423 - DNA, 15 bp, Homo sapiens
ataataaatgtttga

SEQ ID NO: 176424 - DNA, 15 bp, Homo sapiens
cataataaatgtttg

SEQ ID NO: 176425 - DNA, 15 bp, Homo sapiens
acataataaatgttt

SEQ ID NO: 176426 - DNA, 15 bp, Homo sapiens
aacataataaatgtt

SEQ ID NO: 176427 - DNA, 15 bp, Homo sapiens
gaacataataaatgt

SEQ ID NO: 176428 - DNA, 15 bp, Homo sapiens
ggaacataataaatg

SEQ ID NO: 176429 - DNA, 15 bp, Homo sapiens
gggaacataataaat

SEQ ID NO: 176430 - DNA, 15 bp, Homo sapiens
tgggaacataataaa

SEQ ID NO: 176431 - DNA, 15 bp, Homo sapiens
ctgggaacataataa

SEQ ID NO: 176432 - DNA, 15 bp, Homo sapiens
gctgggaacataata

SEQ ID NO: 176433 - DNA, 15 bp, Homo sapiens
tgctgggaacataat

SEQ ID NO: 176434 - DNA, 15 bp, Homo sapiens
atgctgggaacataa

SEQ ID NO: 176435 - DNA, 15 bp, Homo sapiens
tatgctgggaacata

SEQ ID NO: 176436 - DNA, 15 bp, Homo sapiens
ttatgctgggaacat

SEQ ID NO: 176437 - DNA, 15 bp, Homo sapiens
attatgctgggaaca

SEQ ID NO: 176438 - DNA, 15 bp, Homo sapiens
tattatgctgggaac

SEQ ID NO: 176439 - DNA, 15 bp, Homo sapiens
ctattatgctgggaa

SEQ ID NO: 176440 - DNA, 15 bp, Homo sapiens
actattatgctggga

SEQ ID NO: 176441 - DNA, 15 bp, Homo sapiens
tactattatgctggg

SEQ ID NO: 176442 - DNA, 15 bp, Homo sapiens
ctactattatgctgg

SEQ ID NO: 176443 - DNA, 15 bp, Homo sapiens
tctactattatgctg

SEQ ID NO: 176444 - DNA, 15 bp, Homo sapiens
ctctactattatgct

SEQ ID NO: 176445 - DNA, 15 bp, Homo sapiens
gctctactattatgc

SEQ ID NO: 176446 - DNA, 15 bp, Homo sapiens
agctctactattatg

SEQ ID NO: 176447 - DNA, 15 bp, Homo sapiens
aagctctactattat

SEQ ID NO: 176448 - DNA, 15 bp, Homo sapiens
gaagctctactatta

SEQ ID NO: 176449 - DNA, 15 bp, Homo sapiens
agaagctctactatt

SEQ ID NO: 176450 - DNA, 15 bp, Homo sapiens
tagaagctctactat

SEQ ID NO: 176451 - DNA, 15 bp, Homo sapiens
gtagaagctctacta

SEQ ID NO: 176452 - DNA, 15 bp, Homo sapiens
agtagaagctctact

SEQ ID NO: 176453 - DNA, 15 bp, Homo sapiens
tagtagaagctctac

SEQ ID NO: 176454 - DNA, 15 bp, Homo sapiens
atagtagaagctcta

SEQ ID NO: 176455 - DNA, 15 bp, Homo sapiens
aatagtagaagctct

SEQ ID NO: 176456 - DNA, 15 bp, Homo sapiens
caatagtagaagctc

SEQ ID NO: 176457 - DNA, 15 bp, Homo sapiens
gcaatagtagaagct

SEQ ID NO: 176458 - DNA, 15 bp, Homo sapiens
tgcaatagtagaagc

SEQ ID NO: 176459 - DNA, 15 bp, Homo sapiens
ctgcaatagtagaag

SEQ ID NO: 176460 - DNA, 15 bp, Homo sapiens
cctgcaatagtagaa

SEQ ID NO: 176461 - DNA, 15 bp, Homo sapiens
ccctgcaatagtaga

SEQ ID NO: 176462 - DNA, 15 bp, Homo sapiens
cccctgcaatagtag

SEQ ID NO: 176463 - DNA, 15 bp, Homo sapiens
tcccctgcaatagta

SEQ ID NO: 176464 - DNA, 15 bp, Homo sapiens
ctcccctgcaatagt

SEQ ID NO: 176465 - DNA, 15 bp, Homo sapiens
tctcccctgcaatag

SEQ ID NO: 176466 - DNA, 15 bp, Homo sapiens
ttctcccctgcaata

SEQ ID NO: 176467 - DNA, 15 bp, Homo sapiens
tttctcccctgcaat

SEQ ID NO: 176468 - DNA, 15 bp, Homo sapiens
ctttctcccctgcaa

SEQ ID NO: 176469 - DNA, 15 bp, Homo sapiens
actttctcccctgca

SEQ ID NO: 176470 - DNA, 15 bp, Homo sapiens
gactttctcccctgc

SEQ ID NO: 176471 - DNA, 15 bp, Homo sapiens
agactttctcccctg

SEQ ID NO: 176472 - DNA, 15 bp, Homo sapiens
aagactttctcccct

SEQ ID NO: 176473 - DNA, 15 bp, Homo sapiens
gaagactttctcccc

SEQ ID NO: 176474 - DNA, 15 bp, Homo sapiens
tgaagactttctccc

SEQ ID NO: 176475 - DNA, 15 bp, Homo sapiens
ttgaagactttctcc

SEQ ID NO: 176476 - DNA, 15 bp, Homo sapiens
attgaagactttctc

SEQ ID NO: 176477 - DNA, 15 bp, Homo sapiens
tattgaagactttct

SEQ ID NO: 176478 - DNA, 15 bp, Homo sapiens
ttattgaagactttc

SEQ ID NO: 176479 - DNA, 15 bp, Homo sapiens
tttattgaagacttt

SEQ ID NO: 176480 - DNA, 15 bp, Homo sapiens
ttttattgaagactt

SEQ ID NO: 176481 - DNA, 15 bp, Homo sapiens
cttttattgaagact

SEQ ID NO: 176482 - DNA, 15 bp, Homo sapiens
acttttattgaagac

SEQ ID NO: 176483 - DNA, 15 bp, Homo sapiens
aacttttattgaaga

SEQ ID NO: 176484 - DNA, 15 bp, Homo sapiens
taacttttattgaag

SEQ ID NO: 176485 - DNA, 15 bp, Homo sapiens
ataacttttattgaa

SEQ ID NO: 176486 - DNA, 15 bp, Homo sapiens
tataacttttattga

SEQ ID NO: 176487 - DNA, 15 bp, Homo sapiens
ctataacttttattg

SEQ ID NO: 176488 - DNA, 15 bp, Homo sapiens
tctataacttttatt

SEQ ID NO: 176489 - DNA, 15 bp, Homo sapiens
ttctataacttttat

SEQ ID NO: 176490 - DNA, 15 bp, Homo sapiens
attctataactttta

SEQ ID NO: 176491 - DNA, 15 bp, Homo sapiens
tattctataactttt

SEQ ID NO: 176492 - DNA, 15 bp, Homo sapiens
ttattctataacttt

SEQ ID NO: 176493 - DNA, 15 bp, Homo sapiens
attattctataactt

SEQ ID NO: 176494 - DNA, 15 bp, Homo sapiens
aattattctataact

SEQ ID NO: 176495 - DNA, 15 bp, Homo sapiens
taattattctataac

SEQ ID NO: 176496 - DNA, 15 bp, Homo sapiens
ttaattattctataa

SEQ ID NO: 176497 - DNA, 15 bp, Homo sapiens
attaattattctata

SEQ ID NO: 176498 - DNA, 15 bp, Homo sapiens
aattaattattctat

SEQ ID NO: 176499 - DNA, 15 bp, Homo sapiens
taattaattattcta

SEQ ID NO: 176500 - DNA, 15 bp, Homo sapiens
gtaattaattattct

SEQ ID NO: 176501 - DNA, 15 bp, Homo sapiens
tgtaattaattattc

SEQ ID NO: 176502 - DNA, 15 bp, Homo sapiens
ctgtaattaattatt

SEQ ID NO: 176503 - DNA, 15 bp, Homo sapiens
tctgtaattaattat

SEQ ID NO: 176504 - DNA, 15 bp, Homo sapiens
atctgtaattaatta

SEQ ID NO: 176505 - DNA, 15 bp, Homo sapiens
catctgtaattaatt

SEQ ID NO: 176506 - DNA, 15 bp, Homo sapiens
ccatctgtaattaat

SEQ ID NO: 176507 - DNA, 15 bp, Homo sapiens
accatctgtaattaa

SEQ ID NO: 176508 - DNA, 15 bp, Homo sapiens
taccatctgtaatta

SEQ ID NO: 176509 - DNA, 15 bp, Homo sapiens
ctaccatctgtaatt

SEQ ID NO: 176510 - DNA, 15 bp, Homo sapiens
tctaccatctgtaat

SEQ ID NO: 176511 - DNA, 15 bp, Homo sapiens
ctctaccatctgtaa

SEQ ID NO: 176512 - DNA, 15 bp, Homo sapiens
cctctaccatctgta

SEQ ID NO: 176513 - DNA, 15 bp, Homo sapiens
tcctctaccatctgt

SEQ ID NO: 176514 - DNA, 15 bp, Homo sapiens
ctcctctaccatctg

SEQ ID NO: 176515 - DNA, 15 bp, Homo sapiens
gctcctctaccatct

SEQ ID NO: 176516 - DNA, 15 bp, Homo sapiens
agctcctctaccatc

SEQ ID NO: 176517 - DNA, 15 bp, Homo sapiens
tagctcctctaccat

SEQ ID NO: 176518 - DNA, 15 bp, Homo sapiens
ttagctcctctacca

SEQ ID NO: 176519 - DNA, 15 bp, Homo sapiens
cttagctcctctacc

SEQ ID NO: 176520 - DNA, 15 bp, Homo sapiens
ccttagctcctctac

SEQ ID NO: 176521 - DNA, 15 bp, Homo sapiens
tccttagctcctcta

SEQ ID NO: 176522 - DNA, 15 bp, Homo sapiens
ttccttagctcctct

SEQ ID NO: 176523 - DNA, 15 bp, Homo sapiens
cttccttagctcctc

SEQ ID NO: 176524 - DNA, 15 bp, Homo sapiens
tcttccttagctcct

SEQ ID NO: 176525 - DNA, 15 bp, Homo sapiens
ctcttccttagctcc

SEQ ID NO: 176526 - DNA, 15 bp, Homo sapiens
tctcttccttagctc

SEQ ID NO: 176527 - DNA, 15 bp, Homo sapiens
ctctcttccttagct

SEQ ID NO: 176528 - DNA, 15 bp, Homo sapiens
actctcttccttagc

SEQ ID NO: 176529 - DNA, 15 bp, Homo sapiens
cactctcttccttag

SEQ ID NO: 176530 - DNA, 15 bp, Homo sapiens
tcactctcttcctta

SEQ ID NO: 176531 - DNA, 15 bp, Homo sapiens
atcactctcttcctt

SEQ ID NO: 176532 - DNA, 15 bp, Homo sapiens
aatcactctcttcct

SEQ ID NO: 176533 - DNA, 15 bp, Homo sapiens
aaatcactctcttcc

SEQ ID NO: 176534 - DNA, 15 bp, Homo sapiens
gaaatcactctcttc

SEQ ID NO: 176535 - DNA, 15 bp, Homo sapiens
tgaaatcactctctt

SEQ ID NO: 176536 - DNA, 15 bp, Homo sapiens
ctgaaatcactctct

SEQ ID NO: 176537 - DNA, 15 bp, Homo sapiens
cctgaaatcactctc

SEQ ID NO: 176538 - DNA, 15 bp, Homo sapiens
acctgaaatcactct

SEQ ID NO: 176539 - DNA, 15 bp, Homo sapiens
aacctgaaatcactc

SEQ ID NO: 176540 - DNA, 15 bp, Homo sapiens
caacctgaaatcact

SEQ ID NO: 176541 - DNA, 15 bp, Homo sapiens
gcaacctgaaatcac

SEQ ID NO: 176542 - DNA, 15 bp, Homo sapiens
ggcaacctgaaatca

SEQ ID NO: 176543 - DNA, 15 bp, Homo sapiens
tggcaacctgaaatc

SEQ ID NO: 176544 - DNA, 15 bp, Homo sapiens
ttggcaacctgaaat

SEQ ID NO: 176545 - DNA, 15 bp, Homo sapiens
cttggcaacctgaaa

SEQ ID NO: 176546 - DNA, 15 bp, Homo sapiens
tcttggcaacctgaa

SEQ ID NO: 176547 - DNA, 15 bp, Homo sapiens
ctcttggcaacctga

SEQ ID NO: 176548 - DNA, 15 bp, Homo sapiens
tctcttggcaacctg

SEQ ID NO: 176549 - DNA, 15 bp, Homo sapiens
ttctcttggcaacct

SEQ ID NO: 176550 - DNA, 15 bp, Homo sapiens
gttctcttggcaacc

SEQ ID NO: 176551 - DNA, 15 bp, Homo sapiens
tgttctcttggcaac

SEQ ID NO: 176552 - DNA, 15 bp, Homo sapiens
atgttctcttggcaa

SEQ ID NO: 176553 - DNA, 15 bp, Homo sapiens
tatgttctcttggca

SEQ ID NO: 176554 - DNA, 15 bp, Homo sapiens
gtatgttctcttggc

SEQ ID NO: 176555 - DNA, 15 bp, Homo sapiens
agtatgttctcttgg

SEQ ID NO: 176556 - DNA, 15 bp, Homo sapiens
gagtatgttctcttg

SEQ ID NO: 176557 - DNA, 15 bp, Homo sapiens
tgagtatgttctctt

SEQ ID NO: 176558 - DNA, 15 bp, Homo sapiens
ctgagtatgttctct

SEQ ID NO: 176559 - DNA, 15 bp, Homo sapiens
tctgagtatgttctc

SEQ ID NO: 176560 - DNA, 15 bp, Homo sapiens
ctctgagtatgttct

SEQ ID NO: 176561 - DNA, 15 bp, Homo sapiens
tctctgagtatgttc

SEQ ID NO: 176562 - DNA, 15 bp, Homo sapiens
ctctctgagtatgtt

SEQ ID NO: 176563 - DNA, 15 bp, Homo sapiens
cctctctgagtatgt

SEQ ID NO: 176564 - DNA, 15 bp, Homo sapiens
gcctctctgagtatg

SEQ ID NO: 176565 - DNA, 15 bp, Homo sapiens
tgcctctctgagtat

SEQ ID NO: 176566 - DNA, 15 bp, Homo sapiens
atgcctctctgagta

SEQ ID NO: 176567 - DNA, 15 bp, Homo sapiens
catgcctctctgagt

SEQ ID NO: 176568 - DNA, 15 bp, Homo sapiens
tcatgcctctctgag

SEQ ID NO: 176569 - DNA, 15 bp, Homo sapiens
atcatgcctctctga

SEQ ID NO: 176570 - DNA, 15 bp, Homo sapiens
tatcatgcctctctg

SEQ ID NO: 176571 - DNA, 15 bp, Homo sapiens
ctatcatgcctctct

SEQ ID NO: 176572 - DNA, 15 bp, Homo sapiens
gctatcatgcctctc

SEQ ID NO: 176573 - DNA, 15 bp, Homo sapiens
agctatcatgcctct

SEQ ID NO: 176574 - DNA, 15 bp, Homo sapiens
aagctatcatgcctc

SEQ ID NO: 176575 - DNA, 15 bp, Homo sapiens
aaagctatcatgcct

SEQ ID NO: 176576 - DNA, 15 bp, Homo sapiens
aaaagctatcatgcc

SEQ ID NO: 176577 - DNA, 15 bp, Homo sapiens
caaaagctatcatgc

SEQ ID NO: 176578 - DNA, 15 bp, Homo sapiens
ccaaaagctatcatg

SEQ ID NO: 176579 - DNA, 15 bp, Homo sapiens
cccaaaagctatcat

SEQ ID NO: 176580 - DNA, 15 bp, Homo sapiens
ccccaaaagctatca

SEQ ID NO: 176581 - DNA, 15 bp, Homo sapiens
tccccaaaagctatc

SEQ ID NO: 176582 - DNA, 15 bp, Homo sapiens
gtccccaaaagctat

SEQ ID NO: 176583 - DNA, 15 bp, Homo sapiens
ggtccccaaaagcta

SEQ ID NO: 176584 - DNA, 15 bp, Homo sapiens
gggtccccaaaagct

SEQ ID NO: 176585 - DNA, 15 bp, Homo sapiens
agggtccccaaaagc

SEQ ID NO: 176586 - DNA, 15 bp, Homo sapiens
cagggtccccaaaag

SEQ ID NO: 176587 - DNA, 15 bp, Homo sapiens
acagggtccccaaaa

SEQ ID NO: 176588 - DNA, 15 bp, Homo sapiens
gacagggtccccaaa

SEQ ID NO: 176589 - DNA, 15 bp, Homo sapiens
tgacagggtccccaa

SEQ ID NO: 176590 - DNA, 15 bp, Homo sapiens
ctgacagggtcccca

SEQ ID NO: 176591 - DNA, 15 bp, Homo sapiens
actgacagggtcccc

SEQ ID NO: 176592 - DNA, 15 bp, Homo sapiens
tactgacagggtccc

SEQ ID NO: 176593 - DNA, 15 bp, Homo sapiens
atactgacagggtcc

SEQ ID NO: 176594 - DNA, 15 bp, Homo sapiens
gatactgacagggtc

SEQ ID NO: 176595 - DNA, 15 bp, Homo sapiens
tgatactgacagggt

SEQ ID NO: 176596 - DNA, 15 bp, Homo sapiens
atgatactgacaggg

SEQ ID NO: 176597 - DNA, 15 bp, Homo sapiens
gatgatactgacagg

SEQ ID NO: 176598 - DNA, 15 bp, Homo sapiens
tgatgatactgacag

SEQ ID NO: 176599 - DNA, 15 bp, Homo sapiens
ctgatgatactgaca

SEQ ID NO: 176600 - DNA, 15 bp, Homo sapiens
cctgatgatactgac

SEQ ID NO: 176601 - DNA, 15 bp, Homo sapiens
tcctgatgatactga

SEQ ID NO: 176602 - DNA, 15 bp, Homo sapiens
atcctgatgatactg

SEQ ID NO: 176603 - DNA, 15 bp, Homo sapiens
tatcctgatgatact

SEQ ID NO: 176604 - DNA, 15 bp, Homo sapiens
ctatcctgatgatac

SEQ ID NO: 176605 - DNA, 15 bp, Homo sapiens
gctatcctgatgata

SEQ ID NO: 176606 - DNA, 15 bp, Homo sapiens
ggctatcctgatgat

SEQ ID NO: 176607 - DNA, 15 bp, Homo sapiens
gggctatcctgatga

SEQ ID NO: 176608 - DNA, 15 bp, Homo sapiens
cgggctatcctgatg

SEQ ID NO: 176609 - DNA, 15 bp, Homo sapiens
ccgggctatcctgat

SEQ ID NO: 176610 - DNA, 15 bp, Homo sapiens
tccgggctatcctga

SEQ ID NO: 176611 - DNA, 15 bp, Homo sapiens
gtccgggctatcctg

SEQ ID NO: 176612 - DNA, 15 bp, Homo sapiens
agtccgggctatcct

SEQ ID NO: 176613 - DNA, 15 bp, Homo sapiens
gagtccgggctatcc

SEQ ID NO: 176614 - DNA, 15 bp, Homo sapiens
tgagtccgggctatc

SEQ ID NO: 176615 - DNA, 15 bp, Homo sapiens
ctgagtccgggctat

SEQ ID NO: 176616 - DNA, 15 bp, Homo sapiens
tctgagtccgggcta

SEQ ID NO: 176617 - DNA, 15 bp, Homo sapiens
ttctgagtccgggct

SEQ ID NO: 176618 - DNA, 15 bp, Homo sapiens
cttctgagtccgggc

SEQ ID NO: 176619 - DNA, 15 bp, Homo sapiens
acttctgagtccggg

SEQ ID NO: 176620 - DNA, 15 bp, Homo sapiens
aacttctgagtccgg

SEQ ID NO: 176621 - DNA, 15 bp, Homo sapiens
taacttctgagtccg

SEQ ID NO: 176622 - DNA, 15 bp, Homo sapiens
ctaacttctgagtcc

SEQ ID NO: 176623 - DNA, 15 bp, Homo sapiens
actaacttctgagtc

SEQ ID NO: 176624 - DNA, 15 bp, Homo sapiens
gactaacttctgagt

SEQ ID NO: 176625 - DNA, 15 bp, Homo sapiens
agactaacttctgag

SEQ ID NO: 176626 - DNA, 15 bp, Homo sapiens
gagactaacttctga

SEQ ID NO: 176627 - DNA, 15 bp, Homo sapiens
agagactaacttctg

SEQ ID NO: 176628 - DNA, 15 bp, Homo sapiens
gagagactaacttct

SEQ ID NO: 176629 - DNA, 15 bp, Homo sapiens
tgagagactaacttc

SEQ ID NO: 176630 - DNA, 15 bp, Homo sapiens
atgagagactaactt

SEQ ID NO: 176631 - DNA, 15 bp, Homo sapiens
tatgagagactaact

SEQ ID NO: 176632 - DNA, 15 bp, Homo sapiens
ctatgagagactaac

SEQ ID NO: 176633 - DNA, 15 bp, Homo sapiens
tctatgagagactaa

SEQ ID NO: 176634 - DNA, 15 bp, Homo sapiens
ctctatgagagacta

SEQ ID NO: 176635 - DNA, 15 bp, Homo sapiens
gctctatgagagact

SEQ ID NO: 176636 - DNA, 15 bp, Homo sapiens
ggctctatgagagac

SEQ ID NO: 176637 - DNA, 15 bp, Homo sapiens
tggctctatgagaga

SEQ ID NO: 176638 - DNA, 15 bp, Homo sapiens
ttggctctatgagag

SEQ ID NO: 176639 - DNA, 15 bp, Homo sapiens
attggctctatgaga

SEQ ID NO: 176640 - DNA, 15 bp, Homo sapiens
tattggctctatgag

SEQ ID NO: 176641 - DNA, 15 bp, Homo sapiens
ctattggctctatga

SEQ ID NO: 176642 - DNA, 15 bp, Homo sapiens
cctattggctctatg

SEQ ID NO: 176643 - DNA, 15 bp, Homo sapiens
tcctattggctctat

SEQ ID NO: 176644 - DNA, 15 bp, Homo sapiens
ttcctattggctcta

SEQ ID NO: 176645 - DNA, 15 bp, Homo sapiens
cttcctattggctct

SEQ ID NO: 176646 - DNA, 15 bp, Homo sapiens
ccttcctattggctc

SEQ ID NO: 176647 - DNA, 15 bp, Homo sapiens
accttcctattggct

SEQ ID NO: 176648 - DNA, 15 bp, Homo sapiens
aaccttcctattggc

SEQ ID NO: 176649 - DNA, 15 bp, Homo sapiens
aaaccttcctattgg

SEQ ID NO: 176650 - DNA, 15 bp, Homo sapiens
aaaaccttcctattg

SEQ ID NO: 176651 - DNA, 15 bp, Homo sapiens
caaaaccttcctatt

SEQ ID NO: 176652 - DNA, 15 bp, Homo sapiens
ccaaaaccttcctat

SEQ ID NO: 176653 - DNA, 15 bp, Homo sapiens
gccaaaaccttccta

SEQ ID NO: 176654 - DNA, 15 bp, Homo sapiens
tgccaaaaccttcct

SEQ ID NO: 176655 - DNA, 15 bp, Homo sapiens
ttgccaaaaccttcc

SEQ ID NO: 176656 - DNA, 15 bp, Homo sapiens
tttgccaaaaccttc

SEQ ID NO: 176657 - DNA, 15 bp, Homo sapiens
atttgccaaaacctt

SEQ ID NO: 176658 - DNA, 15 bp, Homo sapiens
gatttgccaaaacct

SEQ ID NO: 176659 - DNA, 15 bp, Homo sapiens
agatttgccaaaacc

SEQ ID NO: 176660 - DNA, 15 bp, Homo sapiens
cagatttgccaaaac

SEQ ID NO: 176661 - DNA, 15 bp, Homo sapiens
ccagatttgccaaaa

SEQ ID NO: 176662 - DNA, 15 bp, Homo sapiens
tccagatttgccaaa

SEQ ID NO: 176663 - DNA, 15 bp, Homo sapiens
atccagatttgccaa

SEQ ID NO: 176664 - DNA, 15 bp, Homo sapiens
aatccagatttgcca

SEQ ID NO: 176665 - DNA, 15 bp, Homo sapiens
aaatccagatttgcc

SEQ ID NO: 176666 - DNA, 15 bp, Homo sapiens
aaaatccagatttgc

SEQ ID NO: 176667 - DNA, 15 bp, Homo sapiens
aaaaatccagatttg

SEQ ID NO: 176668 - DNA, 15 bp, Homo sapiens
aaaaaatccagattt

SEQ ID NO: 176669 - DNA, 15 bp, Homo sapiens
gaaaaaatccagatt

SEQ ID NO: 176670 - DNA, 15 bp, Homo sapiens
tgaaaaaatccagat

SEQ ID NO: 176671 - DNA, 15 bp, Homo sapiens
gtgaaaaaatccaga

SEQ ID NO: 176672 - DNA, 15 bp, Homo sapiens
agtgaaaaaatccag

SEQ ID NO: 176673 - DNA, 15 bp, Homo sapiens
aagtgaaaaaatcca

SEQ ID NO: 176674 - DNA, 15 bp, Homo sapiens
caagtgaaaaaatcc

SEQ ID NO: 176675 - DNA, 15 bp, Homo sapiens
gcaagtgaaaaaatc

SEQ ID NO: 176676 - DNA, 15 bp, Homo sapiens
tgcaagtgaaaaaat

SEQ ID NO: 176677 - DNA, 15 bp, Homo sapiens
atgcaagtgaaaaaa

SEQ ID NO: 176678 - DNA, 15 bp, Homo sapiens
aatgcaagtgaaaaa

SEQ ID NO: 176679 - DNA, 15 bp, Homo sapiens
gaatgcaagtgaaaa

SEQ ID NO: 176680 - DNA, 15 bp, Homo sapiens
agaatgcaagtgaaa

SEQ ID NO: 176681 - DNA, 15 bp, Homo sapiens
cagaatgcaagtgaa

SEQ ID NO: 176682 - DNA, 15 bp, Homo sapiens
ccagaatgcaagtga

SEQ ID NO: 176683 - DNA, 15 bp, Homo sapiens
accagaatgcaagtg

SEQ ID NO: 176684 - DNA, 15 bp, Homo sapiens
aaccagaatgcaagt

SEQ ID NO: 176685 - DNA, 15 bp, Homo sapiens
aaaccagaatgcaag

SEQ ID NO: 176686 - DNA, 15 bp, Homo sapiens
aaaaccagaatgcaa

SEQ ID NO: 176687 - DNA, 15 bp, Homo sapiens
caaaaccagaatgca

SEQ ID NO: 176688 - DNA, 15 bp, Homo sapiens
ccaaaaccagaatgc

SEQ ID NO: 176689 - DNA, 15 bp, Homo sapiens
accaaaaccagaatg

SEQ ID NO: 176690 - DNA, 15 bp, Homo sapiens
aaccaaaaccagaat

SEQ ID NO: 176691 - DNA, 15 bp, Homo sapiens
gaaccaaaaccagaa

SEQ ID NO: 176692 - DNA, 15 bp, Homo sapiens
agaaccaaaaccaga

SEQ ID NO: 176693 - DNA, 15 bp, Homo sapiens
cagaaccaaaaccag

SEQ ID NO: 176694 - DNA, 15 bp, Homo sapiens
gcagaaccaaaacca

SEQ ID NO: 176695 - DNA, 15 bp, Homo sapiens
agcagaaccaaaacc

SEQ ID NO: 176696 - DNA, 15 bp, Homo sapiens
tagcagaaccaaaac

SEQ ID NO: 176697 - DNA, 15 bp, Homo sapiens
atagcagaaccaaaa

SEQ ID NO: 176698 - DNA, 15 bp, Homo sapiens
aatagcagaaccaaa

SEQ ID NO: 176699 - DNA, 15 bp, Homo sapiens
caatagcagaaccaa

SEQ ID NO: 176700 - DNA, 15 bp, Homo sapiens
tcaatagcagaacca

SEQ ID NO: 176701 - DNA, 15 bp, Homo sapiens
gtcaatagcagaacc

SEQ ID NO: 176702 - DNA, 15 bp, Homo sapiens
agtcaatagcagaac

SEQ ID NO: 176703 - DNA, 15 bp, Homo sapiens
tagtcaatagcagaa

SEQ ID NO: 176704 - DNA, 15 bp, Homo sapiens
atagtcaatagcaga

SEQ ID NO: 176705 - DNA, 15 bp, Homo sapiens
gatagtcaatagcag

SEQ ID NO: 176706 - DNA, 15 bp, Homo sapiens
tgatagtcaatagca

SEQ ID NO: 176707 - DNA, 15 bp, Homo sapiens
ctgatagtcaatagc

SEQ ID NO: 176708 - DNA, 15 bp, Homo sapiens
cctgatagtcaatag

SEQ ID NO: 176709 - DNA, 15 bp, Homo sapiens
ccctgatagtcaata

SEQ ID NO: 176710 - DNA, 15 bp, Homo sapiens
accctgatagtcaat

SEQ ID NO: 176711 - DNA, 15 bp, Homo sapiens
aaccctgatagtcaa

SEQ ID NO: 176712 - DNA, 15 bp, Homo sapiens
taaccctgatagtca

SEQ ID NO: 176713 - DNA, 15 bp, Homo sapiens
gtaaccctgatagtc

SEQ ID NO: 176714 - DNA, 15 bp, Homo sapiens
agtaaccctgatagt

SEQ ID NO: 176715 - DNA, 15 bp, Homo sapiens
aagtaaccctgatag

SEQ ID NO: 176716 - DNA, 15 bp, Homo sapiens
aaagtaaccctgata

SEQ ID NO: 176717 - DNA, 15 bp, Homo sapiens
caaagtaaccctgat

SEQ ID NO: 176718 - DNA, 15 bp, Homo sapiens
tcaaagtaaccctga

SEQ ID NO: 176719 - DNA, 15 bp, Homo sapiens
ttcaaagtaaccctg

SEQ ID NO: 176720 - DNA, 15 bp, Homo sapiens
tttcaaagtaaccct

SEQ ID NO: 176721 - DNA, 15 bp, Homo sapiens
ttttcaaagtaaccc

SEQ ID NO: 176722 - DNA, 15 bp, Homo sapiens
tttttcaaagtaacc

SEQ ID NO: 176723 - DNA, 15 bp, Homo sapiens
ttttttcaaagtaac

SEQ ID NO: 176724 - DNA, 15 bp, Homo sapiens
gttttttcaaagtaa

SEQ ID NO: 176725 - DNA, 15 bp, Homo sapiens
ggttttttcaaagta

SEQ ID NO: 176726 - DNA, 15 bp, Homo sapiens
tggttttttcaaagt

SEQ ID NO: 176727 - DNA, 15 bp, Homo sapiens
atggttttttcaaag

SEQ ID NO: 176728 - DNA, 15 bp, Homo sapiens
aatggttttttcaaa

SEQ ID NO: 176729 - DNA, 15 bp, Homo sapiens
aaatggttttttcaa

SEQ ID NO: 176730 - DNA, 15 bp, Homo sapiens
caaatggttttttca

SEQ ID NO: 176731 - DNA, 15 bp, Homo sapiens
gcaaatggttttttc

SEQ ID NO: 176732 - DNA, 15 bp, Homo sapiens
agcaaatggtttttt

SEQ ID NO: 176733 - DNA, 15 bp, Homo sapiens
aagcaaatggttttt

SEQ ID NO: 176734 - DNA, 15 bp, Homo sapiens
gaagcaaatggtttt

SEQ ID NO: 176735 - DNA, 15 bp, Homo sapiens
agaagcaaatggttt

SEQ ID NO: 176736 - DNA, 15 bp, Homo sapiens
aagaagcaaatggtt

SEQ ID NO: 176737 - DNA, 15 bp, Homo sapiens
aaagaagcaaatggt

SEQ ID NO: 176738 - DNA, 15 bp, Homo sapiens
taaagaagcaaatgg

SEQ ID NO: 176739 - DNA, 15 bp, Homo sapiens
ataaagaagcaaatg

SEQ ID NO: 176740 - DNA, 15 bp, Homo sapiens
cataaagaagcaaat

SEQ ID NO: 176741 - DNA, 15 bp, Homo sapiens
acataaagaagcaaa

SEQ ID NO: 176742 - DNA, 15 bp, Homo sapiens
gacataaagaagcaa

SEQ ID NO: 176743 - DNA, 15 bp, Homo sapiens
agacataaagaagca

SEQ ID NO: 176744 - DNA, 15 bp, Homo sapiens
aagacataaagaagc

SEQ ID NO: 176745 - DNA, 15 bp, Homo sapiens
caagacataaagaag

SEQ ID NO: 176746 - DNA, 15 bp, Homo sapiens
gcaagacataaagaa

SEQ ID NO: 176747 - DNA, 15 bp, Homo sapiens
agcaagacataaaga

SEQ ID NO: 176748 - DNA, 15 bp, Homo sapiens
aagcaagacataaag

SEQ ID NO: 176749 - DNA, 15 bp, Homo sapiens
caagcaagacataaa

SEQ ID NO: 176750 - DNA, 15 bp, Homo sapiens
gcaagcaagacataa

SEQ ID NO: 176751 - DNA, 15 bp, Homo sapiens
agcaagcaagacata

SEQ ID NO: 176752 - DNA, 15 bp, Homo sapiens
aagcaagcaagacat

SEQ ID NO: 176753 - DNA, 15 bp, Homo sapiens
aaagcaagcaagaca

SEQ ID NO: 176754 - DNA, 15 bp, Homo sapiens
taaagcaagcaagac

SEQ ID NO: 176755 - DNA, 15 bp, Homo sapiens
ataaagcaagcaaga

SEQ ID NO: 176756 - DNA, 15 bp, Homo sapiens
gataaagcaagcaag

SEQ ID NO: 176757 - DNA, 15 bp, Homo sapiens
agataaagcaagcaa

SEQ ID NO: 176758 - DNA, 15 bp, Homo sapiens
cagataaagcaagca

SEQ ID NO: 176759 - DNA, 15 bp, Homo sapiens
acagataaagcaagc

SEQ ID NO: 176760 - DNA, 15 bp, Homo sapiens
tacagataaagcaag

SEQ ID NO: 176761 - DNA, 15 bp, Homo sapiens
ttacagataaagcaa

SEQ ID NO: 176762 - DNA, 15 bp, Homo sapiens
tttacagataaagca

SEQ ID NO: 176763 - DNA, 15 bp, Homo sapiens
ttttacagataaagc

SEQ ID NO: 176764 - DNA, 15 bp, Homo sapiens
attttacagataaag

SEQ ID NO: 176765 - DNA, 15 bp, Homo sapiens
cattttacagataaa

SEQ ID NO: 176766 - DNA, 15 bp, Homo sapiens
tcattttacagataa

SEQ ID NO: 176767 - DNA, 15 bp, Homo sapiens
ttcattttacagata

SEQ ID NO: 176768 - DNA, 15 bp, Homo sapiens
cttcattttacagat

SEQ ID NO: 176769 - DNA, 15 bp, Homo sapiens
tcttcattttacaga

SEQ ID NO: 176770 - DNA, 15 bp, Homo sapiens
ctcttcattttacag

SEQ ID NO: 176771 - DNA, 15 bp, Homo sapiens
cctcttcattttaca

SEQ ID NO: 176772 - DNA, 15 bp, Homo sapiens
acctcttcattttac

SEQ ID NO: 176773 - DNA, 15 bp, Homo sapiens
aacctcttcatttta

SEQ ID NO: 176774 - DNA, 15 bp, Homo sapiens
caacctcttcatttt

SEQ ID NO: 176775 - DNA, 15 bp, Homo sapiens
acaacctcttcattt

SEQ ID NO: 176776 - DNA, 15 bp, Homo sapiens
tacaacctcttcatt

SEQ ID NO: 176777 - DNA, 15 bp, Homo sapiens
ttacaacctcttcat

SEQ ID NO: 176778 - DNA, 15 bp, Homo sapiens
tttacaacctcttca

SEQ ID NO: 176779 - DNA, 15 bp, Homo sapiens
ttttacaacctcttc

SEQ ID NO: 176780 - DNA, 15 bp, Homo sapiens
attttacaacctctt

SEQ ID NO: 176781 - DNA, 15 bp, Homo sapiens
aattttacaacctct

SEQ ID NO: 176782 - DNA, 15 bp, Homo sapiens
gaattttacaacctc

SEQ ID NO: 176783 - DNA, 15 bp, Homo sapiens
agaattttacaacct

SEQ ID NO: 176784 - DNA, 15 bp, Homo sapiens
aagaattttacaacc

SEQ ID NO: 176785 - DNA, 15 bp, Homo sapiens
gaagaattttacaac

SEQ ID NO: 176786 - DNA, 15 bp, Homo sapiens
agaagaattttacaa

SEQ ID NO: 176787 - DNA, 15 bp, Homo sapiens
cagaagaattttaca

SEQ ID NO: 176788 - DNA, 15 bp, Homo sapiens
acagaagaattttac

SEQ ID NO: 176789 - DNA, 15 bp, Homo sapiens
tacagaagaatttta

SEQ ID NO: 176790 - DNA, 15 bp, Homo sapiens
ttacagaagaatttt

SEQ ID NO: 176791 - DNA, 15 bp, Homo sapiens
tttacagaagaattt

SEQ ID NO: 176792 - DNA, 15 bp, Homo sapiens
atttacagaagaatt

SEQ ID NO: 176793 - DNA, 15 bp, Homo sapiens
gatttacagaagaat

SEQ ID NO: 176794 - DNA, 15 bp, Homo sapiens
tgatttacagaagaa

SEQ ID NO: 176795 - DNA, 15 bp, Homo sapiens
atgatttacagaaga

SEQ ID NO: 176796 - DNA, 15 bp, Homo sapiens
aatgatttacagaag

SEQ ID NO: 176797 - DNA, 15 bp, Homo sapiens
aaatgatttacagaa

SEQ ID NO: 176798 - DNA, 15 bp, Homo sapiens
taaatgatttacaga

SEQ ID NO: 176799 - DNA, 15 bp, Homo sapiens
ttaaatgatttacag

SEQ ID NO: 176800 - DNA, 15 bp, Homo sapiens
attaaatgatttaca

SEQ ID NO: 176801 - DNA, 15 bp, Homo sapiens
aattaaatgatttac

SEQ ID NO: 176802 - DNA, 15 bp, Homo sapiens
taattaaatgattta

SEQ ID NO: 176803 - DNA, 15 bp, Homo sapiens
gtaattaaatgattt

SEQ ID NO: 176804 - DNA, 15 bp, Homo sapiens
ggtaattaaatgatt

SEQ ID NO: 176805 - DNA, 15 bp, Homo sapiens
tggtaattaaatgat

SEQ ID NO: 176806 - DNA, 15 bp, Homo sapiens
gtggtaattaaatga

SEQ ID NO: 176807 - DNA, 15 bp, Homo sapiens
ggtggtaattaaatg

SEQ ID NO: 176808 - DNA, 15 bp, Homo sapiens
gggtggtaattaaat

SEQ ID NO: 176809 - DNA, 15 bp, Homo sapiens
agggtggtaattaaa

SEQ ID NO: 176810 - DNA, 15 bp, Homo sapiens
gagggtggtaattaa

SEQ ID NO: 176811 - DNA, 15 bp, Homo sapiens
agagggtggtaatta

SEQ ID NO: 176812 - DNA, 15 bp, Homo sapiens
aagagggtggtaatt

SEQ ID NO: 176813 - DNA, 15 bp, Homo sapiens
gaagagggtggtaat

SEQ ID NO: 176814 - DNA, 15 bp, Homo sapiens
ggaagagggtggtaa

SEQ ID NO: 176815 - DNA, 15 bp, Homo sapiens
gggaagagggtggta

SEQ ID NO: 176816 - DNA, 15 bp, Homo sapiens
ggggaagagggtggt

SEQ ID NO: 176817 - DNA, 15 bp, Homo sapiens
gggggaagagggtgg

SEQ ID NO: 176818 - DNA, 15 bp, Homo sapiens
tgggggaagagggtg

SEQ ID NO: 176819 - DNA, 15 bp, Homo sapiens
atgggggaagagggt

SEQ ID NO: 176820 - DNA, 15 bp, Homo sapiens
catgggggaagaggg

SEQ ID NO: 176821 - DNA, 15 bp, Homo sapiens
ccatgggggaagagg

SEQ ID NO: 176822 - DNA, 15 bp, Homo sapiens
tccatgggggaagag

SEQ ID NO: 176823 - DNA, 15 bp, Homo sapiens
ttccatgggggaaga

SEQ ID NO: 176824 - DNA, 15 bp, Homo sapiens
tttccatgggggaag

SEQ ID NO: 176825 - DNA, 15 bp, Homo sapiens
gtttccatgggggaa

SEQ ID NO: 176826 - DNA, 15 bp, Homo sapiens
tgtttccatggggga

SEQ ID NO: 176827 - DNA, 15 bp, Homo sapiens
ttgtttccatggggg

SEQ ID NO: 176828 - DNA, 15 bp, Homo sapiens
tttgtttccatgggg

SEQ ID NO: 176829 - DNA, 15 bp, Homo sapiens
gtttgtttccatggg

SEQ ID NO: 176830 - DNA, 15 bp, Homo sapiens
ggtttgtttccatgg

SEQ ID NO: 176831 - DNA, 15 bp, Homo sapiens
aggtttgtttccatg

SEQ ID NO: 176832 - DNA, 15 bp, Homo sapiens
taggtttgtttccat

SEQ ID NO: 176833 - DNA, 15 bp, Homo sapiens
ctaggtttgtttcca

SEQ ID NO: 176834 - DNA, 15 bp, Homo sapiens
tctaggtttgtttcc

SEQ ID NO: 176835 - DNA, 15 bp, Homo sapiens
ttctaggtttgtttc

SEQ ID NO: 176836 - DNA, 15 bp, Homo sapiens
tttctaggtttgttt

SEQ ID NO: 176837 - DNA, 15 bp, Homo sapiens
ttttctaggtttgtt

SEQ ID NO: 176838 - DNA, 15 bp, Homo sapiens
attttctaggtttgt

SEQ ID NO: 176839 - DNA, 15 bp, Homo sapiens
gattttctaggtttg

SEQ ID NO: 176840 - DNA, 15 bp, Homo sapiens
ggattttctaggttt

SEQ ID NO: 176841 - DNA, 15 bp, Homo sapiens
aggattttctaggtt

SEQ ID NO: 176842 - DNA, 15 bp, Homo sapiens
taggattttctaggt

SEQ ID NO: 176843 - DNA, 15 bp, Homo sapiens
ttaggattttctagg

SEQ ID NO: 176844 - DNA, 15 bp, Homo sapiens
gttaggattttctag

SEQ ID NO: 176845 - DNA, 15 bp, Homo sapiens
agttaggattttcta

SEQ ID NO: 176846 - DNA, 15 bp, Homo sapiens
aagttaggattttct

SEQ ID NO: 176847 - DNA, 15 bp, Homo sapiens
aaagttaggattttc

SEQ ID NO: 176848 - DNA, 15 bp, Homo sapiens
caaagttaggatttt

SEQ ID NO: 176849 - DNA, 15 bp, Homo sapiens
gcaaagttaggattt

SEQ ID NO: 176850 - DNA, 15 bp, Homo sapiens
agcaaagttaggatt

SEQ ID NO: 176851 - DNA, 15 bp, Homo sapiens
aagcaaagttaggat

SEQ ID NO: 176852 - DNA, 15 bp, Homo sapiens
aaagcaaagttagga

SEQ ID NO: 176853 - DNA, 15 bp, Homo sapiens
taaagcaaagttagg

SEQ ID NO: 176854 - DNA, 15 bp, Homo sapiens
ttaaagcaaagttag

SEQ ID NO: 176855 - DNA, 15 bp, Homo sapiens
tttaaagcaaagtta

SEQ ID NO: 176856 - DNA, 15 bp, Homo sapiens
ttttaaagcaaagtt

SEQ ID NO: 176857 - DNA, 15 bp, Homo sapiens
tttttaaagcaaagt

SEQ ID NO: 176858 - DNA, 15 bp, Homo sapiens
atttttaaagcaaag

SEQ ID NO: 176859 - DNA, 15 bp, Homo sapiens
tatttttaaagcaaa

SEQ ID NO: 176860 - DNA, 15 bp, Homo sapiens
atatttttaaagcaa

SEQ ID NO: 176861 - DNA, 15 bp, Homo sapiens
aatatttttaaagca

SEQ ID NO: 176862 - DNA, 15 bp, Homo sapiens
gaatatttttaaagc

SEQ ID NO: 176863 - DNA, 15 bp, Homo sapiens
tgaatatttttaaag

SEQ ID NO: 176864 - DNA, 15 bp, Homo sapiens
ctgaatatttttaaa

SEQ ID NO: 176865 - DNA, 15 bp, Homo sapiens
actgaatatttttaa

SEQ ID NO: 176866 - DNA, 15 bp, Homo sapiens
tactgaatattttta

SEQ ID NO: 176867 - DNA, 15 bp, Homo sapiens
gtactgaatattttt

SEQ ID NO: 176868 - DNA, 15 bp, Homo sapiens
tgtactgaatatttt

SEQ ID NO: 176869 - DNA, 15 bp, Homo sapiens
atgtactgaatattt

SEQ ID NO: 176870 - DNA, 15 bp, Homo sapiens
catgtactgaatatt

SEQ ID NO: 176871 - DNA, 15 bp, Homo sapiens
ccatgtactgaatat

SEQ ID NO: 176872 - DNA, 15 bp, Homo sapiens
tccatgtactgaata

SEQ ID NO: 176873 - DNA, 15 bp, Homo sapiens
ttccatgtactgaat

SEQ ID NO: 176874 - DNA, 15 bp, Homo sapiens
attccatgtactgaa

SEQ ID NO: 176875 - DNA, 15 bp, Homo sapiens
tattccatgtactga

SEQ ID NO: 176876 - DNA, 15 bp, Homo sapiens
atattccatgtactg

SEQ ID NO: 176877 - DNA, 15 bp, Homo sapiens
aatattccatgtact

SEQ ID NO: 176878 - DNA, 15 bp, Homo sapiens
aaatattccatgtac

SEQ ID NO: 176879 - DNA, 15 bp, Homo sapiens
aaaatattccatgta

SEQ ID NO: 176880 - DNA, 15 bp, Homo sapiens
taaaatattccatgt

SEQ ID NO: 176881 - DNA, 15 bp, Homo sapiens
ctaaaatattccatg

SEQ ID NO: 176882 - DNA, 15 bp, Homo sapiens
actaaaatattccat

SEQ ID NO: 176883 - DNA, 15 bp, Homo sapiens
cactaaaatattcca

SEQ ID NO: 176884 - DNA, 15 bp, Homo sapiens
acactaaaatattcc

SEQ ID NO: 176885 - DNA, 15 bp, Homo sapiens
aacactaaaatattc

SEQ ID NO: 176886 - DNA, 15 bp, Homo sapiens
gaacactaaaatatt

SEQ ID NO: 176887 - DNA, 15 bp, Homo sapiens
tgaacactaaaatat

SEQ ID NO: 176888 - DNA, 15 bp, Homo sapiens
atgaacactaaaata

SEQ ID NO: 176889 - DNA, 15 bp, Homo sapiens
catgaacactaaaat

SEQ ID NO: 176890 - DNA, 15 bp, Homo sapiens
acatgaacactaaaa

SEQ ID NO: 176891 - DNA, 15 bp, Homo sapiens
aacatgaacactaaa

SEQ ID NO: 176892 - DNA, 15 bp, Homo sapiens
aaacatgaacactaa

SEQ ID NO: 176893 - DNA, 15 bp, Homo sapiens
aaaacatgaacacta

SEQ ID NO: 176894 - DNA, 15 bp, Homo sapiens
gaaaacatgaacact

SEQ ID NO: 176895 - DNA, 15 bp, Homo sapiens
agaaaacatgaacac

SEQ ID NO: 176896 - DNA, 15 bp, Homo sapiens
gagaaaacatgaaca

SEQ ID NO: 176897 - DNA, 15 bp, Homo sapiens
agagaaaacatgaac

SEQ ID NO: 176898 - DNA, 15 bp, Homo sapiens
aagagaaaacatgaa

SEQ ID NO: 176899 - DNA, 15 bp, Homo sapiens
aaagagaaaacatga

SEQ ID NO: 176900 - DNA, 15 bp, Homo sapiens
aaaagagaaaacatg

SEQ ID NO: 176901 - DNA, 15 bp, Homo sapiens
caaaagagaaaacat

SEQ ID NO: 176902 - DNA, 15 bp, Homo sapiens
tcaaaagagaaaaca

SEQ ID NO: 176903 - DNA, 15 bp, Homo sapiens
ctcaaaagagaaaac

SEQ ID NO: 176904 - DNA, 15 bp, Homo sapiens
actcaaaagagaaaa

SEQ ID NO: 176905 - DNA, 15 bp, Homo sapiens
cactcaaaagagaaa

SEQ ID NO: 176906 - DNA, 15 bp, Homo sapiens
ccactcaaaagagaa

SEQ ID NO: 176907 - DNA, 15 bp, Homo sapiens
cccactcaaaagaga

SEQ ID NO: 176908 - DNA, 15 bp, Homo sapiens
ccccactcaaaagag

SEQ ID NO: 176909 - DNA, 15 bp, Homo sapiens
accccactcaaaaga

SEQ ID NO: 176910 - DNA, 15 bp, Homo sapiens
aaccccactcaaaag

SEQ ID NO: 176911 - DNA, 15 bp, Homo sapiens
aaaccccactcaaaa

SEQ ID NO: 176912 - DNA, 15 bp, Homo sapiens
caaaccccactcaaa

SEQ ID NO: 176913 - DNA, 15 bp, Homo sapiens
ccaaaccccactcaa

SEQ ID NO: 176914 - DNA, 15 bp, Homo sapiens
gccaaaccccactca

SEQ ID NO: 176915 - DNA, 15 bp, Homo sapiens
ggccaaaccccactc

SEQ ID NO: 176916 - DNA, 15 bp, Homo sapiens
tggccaaaccccact

SEQ ID NO: 176917 - DNA, 15 bp, Homo sapiens
atggccaaaccccac

SEQ ID NO: 176918 - DNA, 15 bp, Homo sapiens
aatggccaaacccca

SEQ ID NO: 176919 - DNA, 15 bp, Homo sapiens
caatggccaaacccc

SEQ ID NO: 176920 - DNA, 15 bp, Homo sapiens
ccaatggccaaaccc

SEQ ID NO: 176921 - DNA, 15 bp, Homo sapiens
gccaatggccaaacc

SEQ ID NO: 176922 - DNA, 15 bp, Homo sapiens
agccaatggccaaac

SEQ ID NO: 176923 - DNA, 15 bp, Homo sapiens
cagccaatggccaaa

SEQ ID NO: 176924 - DNA, 15 bp, Homo sapiens
ccagccaatggccaa

SEQ ID NO: 176925 - DNA, 15 bp, Homo sapiens
accagccaatggcca

SEQ ID NO: 176926 - DNA, 15 bp, Homo sapiens
aaccagccaatggcc

SEQ ID NO: 176927 - DNA, 15 bp, Homo sapiens
gaaccagccaatggc

SEQ ID NO: 176928 - DNA, 15 bp, Homo sapiens
agaaccagccaatgg

SEQ ID NO: 176929 - DNA, 15 bp, Homo sapiens
aagaaccagccaatg

SEQ ID NO: 176930 - DNA, 15 bp, Homo sapiens
caagaaccagccaat

SEQ ID NO: 176931 - DNA, 15 bp, Homo sapiens
ccaagaaccagccaa

SEQ ID NO: 176932 - DNA, 15 bp, Homo sapiens
tccaagaaccagcca

SEQ ID NO: 176933 - DNA, 15 bp, Homo sapiens
atccaagaaccagcc

SEQ ID NO: 176934 - DNA, 15 bp, Homo sapiens
tatccaagaaccagc

SEQ ID NO: 176935 - DNA, 15 bp, Homo sapiens
ttatccaagaaccag

SEQ ID NO: 176936 - DNA, 15 bp, Homo sapiens
tttatccaagaacca

SEQ ID NO: 176937 - DNA, 15 bp, Homo sapiens
ttttatccaagaacc

SEQ ID NO: 176938 - DNA, 15 bp, Homo sapiens
attttatccaagaac

SEQ ID NO: 176939 - DNA, 15 bp, Homo sapiens
aattttatccaagaa

SEQ ID NO: 176940 - DNA, 15 bp, Homo sapiens
aaattttatccaaga

SEQ ID NO: 176941 - DNA, 15 bp, Homo sapiens
caaattttatccaag

SEQ ID NO: 176942 - DNA, 15 bp, Homo sapiens
ccaaattttatccaa

SEQ ID NO: 176943 - DNA, 15 bp, Homo sapiens
tccaaattttatcca

SEQ ID NO: 176944 - DNA, 15 bp, Homo sapiens
ctccaaattttatcc

SEQ ID NO: 176945 - DNA, 15 bp, Homo sapiens
cctccaaattttatc

SEQ ID NO: 176946 - DNA, 15 bp, Homo sapiens
ccctccaaattttat

SEQ ID NO: 176947 - DNA, 15 bp, Homo sapiens
tccctccaaatttta

SEQ ID NO: 176948 - DNA, 15 bp, Homo sapiens
ctccctccaaatttt

SEQ ID NO: 176949 - DNA, 15 bp, Homo sapiens
cctccctccaaattt

SEQ ID NO: 176950 - DNA, 15 bp, Homo sapiens
acctccctccaaatt

SEQ ID NO: 176951 - DNA, 15 bp, Homo sapiens
tacctccctccaaat

SEQ ID NO: 176952 - DNA, 15 bp, Homo sapiens
atacctccctccaaa

SEQ ID NO: 176953 - DNA, 15 bp, Homo sapiens
aatacctccctccaa

SEQ ID NO: 176954 - DNA, 15 bp, Homo sapiens
gaatacctccctcca

SEQ ID NO: 176955 - DNA, 15 bp, Homo sapiens
agaatacctccctcc

SEQ ID NO: 176956 - DNA, 15 bp, Homo sapiens
gagaatacctccctc

SEQ ID NO: 176957 - DNA, 15 bp, Homo sapiens
ggagaatacctccct

SEQ ID NO: 176958 - DNA, 15 bp, Homo sapiens
tggagaatacctccc

SEQ ID NO: 176959 - DNA, 15 bp, Homo sapiens
ctggagaatacctcc

SEQ ID NO: 176960 - DNA, 15 bp, Homo sapiens
cctggagaatacctc

SEQ ID NO: 176961 - DNA, 15 bp, Homo sapiens
gcctggagaatacct

SEQ ID NO: 176962 - DNA, 15 bp, Homo sapiens
agcctggagaatacc

SEQ ID NO: 176963 - DNA, 15 bp, Homo sapiens
aagcctggagaatac

SEQ ID NO: 176964 - DNA, 15 bp, Homo sapiens
taagcctggagaata

SEQ ID NO: 176965 - DNA, 15 bp, Homo sapiens
ttaagcctggagaat

SEQ ID NO: 176966 - DNA, 15 bp, Homo sapiens
tttaagcctggagaa

SEQ ID NO: 176967 - DNA, 15 bp, Homo sapiens
atttaagcctggaga

SEQ ID NO: 176968 - DNA, 15 bp, Homo sapiens
catttaagcctggag

SEQ ID NO: 176969 - DNA, 15 bp, Homo sapiens
tcatttaagcctgga

SEQ ID NO: 176970 - DNA, 15 bp, Homo sapiens
ctcatttaagcctgg

SEQ ID NO: 176971 - DNA, 15 bp, Homo sapiens
actcatttaagcctg

SEQ ID NO: 176972 - DNA, 15 bp, Homo sapiens
cactcatttaagcct

SEQ ID NO: 176973 - DNA, 15 bp, Homo sapiens
tcactcatttaagcc

SEQ ID NO: 176974 - DNA, 15 bp, Homo sapiens
ttcactcatttaagc

SEQ ID NO: 176975 - DNA, 15 bp, Homo sapiens
tttcactcatttaag

SEQ ID NO: 176976 - DNA, 15 bp, Homo sapiens
ttttcactcatttaa

SEQ ID NO: 176977 - DNA, 15 bp, Homo sapiens
tttttcactcattta

SEQ ID NO: 176978 - DNA, 15 bp, Homo sapiens
ctttttcactcattt

SEQ ID NO: 176979 - DNA, 15 bp, Homo sapiens
actttttcactcatt

SEQ ID NO: 176980 - DNA, 15 bp, Homo sapiens
gactttttcactcat

SEQ ID NO: 176981 - DNA, 15 bp, Homo sapiens
agactttttcactca

SEQ ID NO: 176982 - DNA, 15 bp, Homo sapiens
cagactttttcactc

SEQ ID NO: 176983 - DNA, 15 bp, Homo sapiens
ccagactttttcact

SEQ ID NO: 176984 - DNA, 15 bp, Homo sapiens
cccagactttttcac

SEQ ID NO: 176985 - DNA, 15 bp, Homo sapiens
tcccagactttttca

SEQ ID NO: 176986 - DNA, 15 bp, Homo sapiens
ttcccagactttttc

SEQ ID NO: 176987 - DNA, 15 bp, Homo sapiens
tttcccagacttttt

SEQ ID NO: 176988 - DNA, 15 bp, Homo sapiens
ttttcccagactttt

SEQ ID NO: 176989 - DNA, 15 bp, Homo sapiens
tttttcccagacttt

SEQ ID NO: 176990 - DNA, 15 bp, Homo sapiens
ttttttcccagactt

SEQ ID NO: 176991 - DNA, 15 bp, Homo sapiens
attttttcccagact

SEQ ID NO: 176992 - DNA, 15 bp, Homo sapiens
tattttttcccagac

SEQ ID NO: 176993 - DNA, 15 bp, Homo sapiens
ttattttttcccaga

SEQ ID NO: 176994 - DNA, 15 bp, Homo sapiens
tttattttttcccag

SEQ ID NO: 176995 - DNA, 15 bp, Homo sapiens
gtttattttttccca

SEQ ID NO: 176996 - DNA, 15 bp, Homo sapiens
ggtttattttttccc

SEQ ID NO: 176997 - DNA, 15 bp, Homo sapiens
tggtttattttttcc

SEQ ID NO: 176998 - DNA, 15 bp, Homo sapiens
ttggtttattttttc

SEQ ID NO: 176999 - DNA, 15 bp, Homo sapiens
gttggtttatttttt

SEQ ID NO: 177000 - DNA, 15 bp, Homo sapiens
ggttggtttattttt

SEQ ID NO: 177001 - DNA, 15 bp, Homo sapiens
gggttggtttatttt

SEQ ID NO: 177002 - DNA, 15 bp, Homo sapiens
agggttggtttattt

SEQ ID NO: 177003 - DNA, 15 bp, Homo sapiens
tagggttggtttatt

SEQ ID NO: 177004 - DNA, 15 bp, Homo sapiens
gtagggttggtttat

SEQ ID NO: 177005 - DNA, 15 bp, Homo sapiens
ggtagggttggttta

SEQ ID NO: 177006 - DNA, 15 bp, Homo sapiens
aggtagggttggttt

SEQ ID NO: 177007 - DNA, 15 bp, Homo sapiens
gaggtagggttggtt

SEQ ID NO: 177008 - DNA, 15 bp, Homo sapiens
ggaggtagggttggt

SEQ ID NO: 177009 - DNA, 15 bp, Homo sapiens
aggaggtagggttgg

SEQ ID NO: 177010 - DNA, 15 bp, Homo sapiens
aaggaggtagggttg

SEQ ID NO: 177011 - DNA, 15 bp, Homo sapiens
gaaggaggtagggtt

SEQ ID NO: 177012 - DNA, 15 bp, Homo sapiens
ggaaggaggtagggt

SEQ ID NO: 177013 - DNA, 15 bp, Homo sapiens
gggaaggaggtaggg

SEQ ID NO: 177014 - DNA, 15 bp, Homo sapiens
tgggaaggaggtagg

SEQ ID NO: 177015 - DNA, 15 bp, Homo sapiens
gtgggaaggaggtag

SEQ ID NO: 177016 - DNA, 15 bp, Homo sapiens
ggtgggaaggaggta

SEQ ID NO: 177017 - DNA, 15 bp, Homo sapiens
gggtgggaaggaggt

SEQ ID NO: 177018 - DNA, 15 bp, Homo sapiens
tgggtgggaaggagg

SEQ ID NO: 177019 - DNA, 15 bp, Homo sapiens
ttgggtgggaaggag

SEQ ID NO: 177020 - DNA, 15 bp, Homo sapiens
cttgggtgggaagga

SEQ ID NO: 177021 - DNA, 15 bp, Homo sapiens
ccttgggtgggaagg

SEQ ID NO: 177022 - DNA, 15 bp, Homo sapiens
tccttgggtgggaag

SEQ ID NO: 177023 - DNA, 15 bp, Homo sapiens
ctccttgggtgggaa

SEQ ID NO: 177024 - DNA, 15 bp, Homo sapiens
actccttgggtggga

SEQ ID NO: 177025 - DNA, 15 bp, Homo sapiens
cactccttgggtggg

SEQ ID NO: 177026 - DNA, 15 bp, Homo sapiens
acactccttgggtgg

SEQ ID NO: 177027 - DNA, 15 bp, Homo sapiens
gacactccttgggtg

SEQ ID NO: 177028 - DNA, 15 bp, Homo sapiens
ggacactccttgggt

SEQ ID NO: 177029 - DNA, 15 bp, Homo sapiens
aggacactccttggg

SEQ ID NO: 177030 - DNA, 15 bp, Homo sapiens
aaggacactccttgg

SEQ ID NO: 177031 - DNA, 15 bp, Homo sapiens
aaaggacactccttg

SEQ ID NO: 177032 - DNA, 15 bp, Homo sapiens
caaaggacactcctt

SEQ ID NO: 177033 - DNA, 15 bp, Homo sapiens
gcaaaggacactcct

SEQ ID NO: 177034 - DNA, 15 bp, Homo sapiens
tgcaaaggacactcc

SEQ ID NO: 177035 - DNA, 15 bp, Homo sapiens
atgcaaaggacactc

SEQ ID NO: 177036 - DNA, 15 bp, Homo sapiens
gatgcaaaggacact

SEQ ID NO: 177037 - DNA, 15 bp, Homo sapiens
agatgcaaaggacac

SEQ ID NO: 177038 - DNA, 15 bp, Homo sapiens
cagatgcaaaggaca

SEQ ID NO: 177039 - DNA, 15 bp, Homo sapiens
ccagatgcaaaggac

SEQ ID NO: 177040 - DNA, 15 bp, Homo sapiens
gccagatgcaaagga

SEQ ID NO: 177041 - DNA, 15 bp, Homo sapiens
tgccagatgcaaagg

SEQ ID NO: 177042 - DNA, 15 bp, Homo sapiens
atgccagatgcaaag

SEQ ID NO: 177043 - DNA, 15 bp, Homo sapiens
gatgccagatgcaaa

SEQ ID NO: 177044 - DNA, 15 bp, Homo sapiens
cgatgccagatgcaa

SEQ ID NO: 177045 - DNA, 15 bp, Homo sapiens
gcgatgccagatgca

SEQ ID NO: 177046 - DNA, 15 bp, Homo sapiens
agcgatgccagatgc

SEQ ID NO: 177047 - DNA, 15 bp, Homo sapiens
cagcgatgccagatg

SEQ ID NO: 177048 - DNA, 15 bp, Homo sapiens
acagcgatgccagat

SEQ ID NO: 177049 - DNA, 15 bp, Homo sapiens
cacagcgatgccaga

SEQ ID NO: 177050 - DNA, 15 bp, Homo sapiens
acacagcgatgccag

SEQ ID NO: 177051 - DNA, 15 bp, Homo sapiens
aacacagcgatgcca

SEQ ID NO: 177052 - DNA, 15 bp, Homo sapiens
aaacacagcgatgcc

SEQ ID NO: 177053 - DNA, 15 bp, Homo sapiens
aaaacacagcgatgc

SEQ ID NO: 177054 - DNA, 15 bp, Homo sapiens
gaaaacacagcgatg

SEQ ID NO: 177055 - DNA, 15 bp, Homo sapiens
tgaaaacacagcgat

SEQ ID NO: 177056 - DNA, 15 bp, Homo sapiens
atgaaaacacagcga

SEQ ID NO: 177057 - DNA, 15 bp, Homo sapiens
aatgaaaacacagcg

SEQ ID NO: 177058 - DNA, 15 bp, Homo sapiens
gaatgaaaacacagc

SEQ ID NO: 177059 - DNA, 15 bp, Homo sapiens
cgaatgaaaacacag

SEQ ID NO: 177060 - DNA, 15 bp, Homo sapiens
gcgaatgaaaacaca

SEQ ID NO: 177061 - DNA, 15 bp, Homo sapiens
agcgaatgaaaacac

SEQ ID NO: 177062 - DNA, 15 bp, Homo sapiens
cagcgaatgaaaaca

SEQ ID NO: 177063 - DNA, 15 bp, Homo sapiens
ccagcgaatgaaaac

SEQ ID NO: 177064 - DNA, 15 bp, Homo sapiens
accagcgaatgaaaa

SEQ ID NO: 177065 - DNA, 15 bp, Homo sapiens
gaccagcgaatgaaa

SEQ ID NO: 177066 - DNA, 15 bp, Homo sapiens
tgaccagcgaatgaa

SEQ ID NO: 177067 - DNA, 15 bp, Homo sapiens
ctgaccagcgaatga

SEQ ID NO: 177068 - DNA, 15 bp, Homo sapiens
actgaccagcgaatg

SEQ ID NO: 177069 - DNA, 15 bp, Homo sapiens
gactgaccagcgaat

SEQ ID NO: 177070 - DNA, 15 bp, Homo sapiens
ggactgaccagcgaa

SEQ ID NO: 177071 - DNA, 15 bp, Homo sapiens
gggactgaccagcga

SEQ ID NO: 177072 - DNA, 15 bp, Homo sapiens
agggactgaccagcg

SEQ ID NO: 177073 - DNA, 15 bp, Homo sapiens
gagggactgaccagc

SEQ ID NO: 177074 - DNA, 15 bp, Homo sapiens
tgagggactgaccag

SEQ ID NO: 177075 - DNA, 15 bp, Homo sapiens
atgagggactgacca

SEQ ID NO: 177076 - DNA, 15 bp, Homo sapiens
gatgagggactgacc

SEQ ID NO: 177077 - DNA, 15 bp, Homo sapiens
agatgagggactgac

SEQ ID NO: 177078 - DNA, 15 bp, Homo sapiens
cagatgagggactga

SEQ ID NO: 177079 - DNA, 15 bp, Homo sapiens
gcagatgagggactg

SEQ ID NO: 177080 - DNA, 15 bp, Homo sapiens
agcagatgagggact

SEQ ID NO: 177081 - DNA, 15 bp, Homo sapiens
cagcagatgagggac

SEQ ID NO: 177082 - DNA, 15 bp, Homo sapiens
gcagcagatgaggga

SEQ ID NO: 177083 - DNA, 15 bp, Homo sapiens
ggcagcagatgaggg

SEQ ID NO: 177084 - DNA, 15 bp, Homo sapiens
tggcagcagatgagg

SEQ ID NO: 177085 - DNA, 15 bp, Homo sapiens
ttggcagcagatgag

SEQ ID NO: 177086 - DNA, 15 bp, Homo sapiens
gttggcagcagatga

SEQ ID NO: 177087 - DNA, 15 bp, Homo sapiens
ggttggcagcagatg

SEQ ID NO: 177088 - DNA, 15 bp, Homo sapiens
aggttggcagcagat

SEQ ID NO: 177089 - DNA, 15 bp, Homo sapiens
gaggttggcagcaga

SEQ ID NO: 177090 - DNA, 15 bp, Homo sapiens
agaggttggcagcag

SEQ ID NO: 177091 - DNA, 15 bp, Homo sapiens
aagaggttggcagca

SEQ ID NO: 177092 - DNA, 15 bp, Homo sapiens
gaagaggttggcagc

SEQ ID NO: 177093 - DNA, 15 bp, Homo sapiens
ggaagaggttggcag

SEQ ID NO: 177094 - DNA, 15 bp, Homo sapiens
gggaagaggttggca

SEQ ID NO: 177095 - DNA, 15 bp, Homo sapiens
agggaagaggttggc

SEQ ID NO: 177096 - DNA, 15 bp, Homo sapiens
aagggaagaggttgg

SEQ ID NO: 177097 - DNA, 15 bp, Homo sapiens
gaagggaagaggttg

SEQ ID NO: 177098 - DNA, 15 bp, Homo sapiens
ggaagggaagaggtt

SEQ ID NO: 177099 - DNA, 15 bp, Homo sapiens
aggaagggaagaggt

SEQ ID NO: 177100 - DNA, 15 bp, Homo sapiens
caggaagggaagagg

SEQ ID NO: 177101 - DNA, 15 bp, Homo sapiens
ccaggaagggaagag

SEQ ID NO: 177102 - DNA, 15 bp, Homo sapiens
gccaggaagggaaga

SEQ ID NO: 177103 - DNA, 15 bp, Homo sapiens
agccaggaagggaag

SEQ ID NO: 177104 - DNA, 15 bp, Homo sapiens
aagccaggaagggaa

SEQ ID NO: 177105 - DNA, 15 bp, Homo sapiens
caagccaggaaggga

SEQ ID NO: 177106 - DNA, 15 bp, Homo sapiens
ccaagccaggaaggg

SEQ ID NO: 177107 - DNA, 15 bp, Homo sapiens
accaagccaggaagg

SEQ ID NO: 177108 - DNA, 15 bp, Homo sapiens
gaccaagccaggaag

SEQ ID NO: 177109 - DNA, 15 bp, Homo sapiens
tgaccaagccaggaa

SEQ ID NO: 177110 - DNA, 15 bp, Homo sapiens
ctgaccaagccagga

SEQ ID NO: 177111 - DNA, 15 bp, Homo sapiens
tctgaccaagccagg

SEQ ID NO: 177112 - DNA, 15 bp, Homo sapiens
ttctgaccaagccag

SEQ ID NO: 177113 - DNA, 15 bp, Homo sapiens
cttctgaccaagcca

SEQ ID NO: 177114 - DNA, 15 bp, Homo sapiens
ccttctgaccaagcc

SEQ ID NO: 177115 - DNA, 15 bp, Homo sapiens
accttctgaccaagc

SEQ ID NO: 177116 - DNA, 15 bp, Homo sapiens
gaccttctgaccaag

SEQ ID NO: 177117 - DNA, 15 bp, Homo sapiens
ggaccttctgaccaa

SEQ ID NO: 177118 - DNA, 15 bp, Homo sapiens
tggaccttctgacca

SEQ ID NO: 177119 - DNA, 15 bp, Homo sapiens
ctggaccttctgacc

SEQ ID NO: 177120 - DNA, 15 bp, Homo sapiens
tctggaccttctgac

SEQ ID NO: 177121 - DNA, 15 bp, Homo sapiens
ctctggaccttctga

SEQ ID NO: 177122 - DNA, 15 bp, Homo sapiens
tctctggaccttctg

SEQ ID NO: 177123 - DNA, 15 bp, Homo sapiens
ctctctggaccttct

SEQ ID NO: 177124 - DNA, 15 bp, Homo sapiens
gctctctggaccttc

SEQ ID NO: 177125 - DNA, 15 bp, Homo sapiens
ggctctctggacctt

SEQ ID NO: 177126 - DNA, 15 bp, Homo sapiens
gggctctctggacct

SEQ ID NO: 177127 - DNA, 15 bp, Homo sapiens
tgggctctctggacc

SEQ ID NO: 177128 - DNA, 15 bp, Homo sapiens
gtgggctctctggac

SEQ ID NO: 177129 - DNA, 15 bp, Homo sapiens
agtgggctctctgga

SEQ ID NO: 177130 - DNA, 15 bp, Homo sapiens
cagtgggctctctgg

SEQ ID NO: 177131 - DNA, 15 bp, Homo sapiens
acagtgggctctctg

SEQ ID NO: 177132 - DNA, 15 bp, Homo sapiens
tacagtgggctctct

SEQ ID NO: 177133 - DNA, 15 bp, Homo sapiens
gtacagtgggctctc

SEQ ID NO: 177134 - DNA, 15 bp, Homo sapiens
agtacagtgggctct

SEQ ID NO: 177135 - DNA, 15 bp, Homo sapiens
cagtacagtgggctc

SEQ ID NO: 177136 - DNA, 15 bp, Homo sapiens
ccagtacagtgggct

SEQ ID NO: 177137 - DNA, 15 bp, Homo sapiens
gccagtacagtgggc

SEQ ID NO: 177138 - DNA, 15 bp, Homo sapiens
cgccagtacagtggg

SEQ ID NO: 177139 - DNA, 15 bp, Homo sapiens
ccgccagtacagtgg

SEQ ID NO: 177140 - DNA, 15 bp, Homo sapiens
cccgccagtacagtg

SEQ ID NO: 177141 - DNA, 15 bp, Homo sapiens
ccccgccagtacagt

SEQ ID NO: 177142 - DNA, 15 bp, Homo sapiens
tccccgccagtacag

SEQ ID NO: 177143 - DNA, 15 bp, Homo sapiens
ctccccgccagtaca

SEQ ID NO: 177144 - DNA, 15 bp, Homo sapiens
tctccccgccagtac

SEQ ID NO: 177145 - DNA, 15 bp, Homo sapiens
ttctccccgccagta

SEQ ID NO: 177146 - DNA, 15 bp, Homo sapiens
attctccccgccagt

SEQ ID NO: 177147 - DNA, 15 bp, Homo sapiens
gattctccccgccag

SEQ ID NO: 177148 - DNA, 15 bp, Homo sapiens
agattctccccgcca

SEQ ID NO: 177149 - DNA, 15 bp, Homo sapiens
cagattctccccgcc

SEQ ID NO: 177150 - DNA, 15 bp, Homo sapiens
acagattctccccgc

SEQ ID NO: 177151 - DNA, 15 bp, Homo sapiens
gacagattctccccg

SEQ ID NO: 177152 - DNA, 15 bp, Homo sapiens
ggacagattctcccc

SEQ ID NO: 177153 - DNA, 15 bp, Homo sapiens
gggacagattctccc

SEQ ID NO: 177154 - DNA, 15 bp, Homo sapiens
agggacagattctcc

SEQ ID NO: 177155 - DNA, 15 bp, Homo sapiens
aagggacagattctc

SEQ ID NO: 177156 - DNA, 15 bp, Homo sapiens
aaagggacagattct

SEQ ID NO: 177157 - DNA, 15 bp, Homo sapiens
aaaagggacagattc

SEQ ID NO: 177158 - DNA, 15 bp, Homo sapiens
caaaagggacagatt

SEQ ID NO: 177159 - DNA, 15 bp, Homo sapiens
gcaaaagggacagat

SEQ ID NO: 177160 - DNA, 15 bp, Homo sapiens
cgcaaaagggacaga

SEQ ID NO: 177161 - DNA, 15 bp, Homo sapiens
gcgcaaaagggacag

SEQ ID NO: 177162 - DNA, 15 bp, Homo sapiens
tgcgcaaaagggaca

SEQ ID NO: 177163 - DNA, 15 bp, Homo sapiens
gtgcgcaaaagggac

SEQ ID NO: 177164 - DNA, 15 bp, Homo sapiens
tgtgcgcaaaaggga

SEQ ID NO: 177165 - DNA, 15 bp, Homo sapiens
atgtgcgcaaaaggg

SEQ ID NO: 177166 - DNA, 15 bp, Homo sapiens
gatgtgcgcaaaagg

SEQ ID NO: 177167 - DNA, 15 bp, Homo sapiens
tgatgtgcgcaaaag

SEQ ID NO: 177168 - DNA, 15 bp, Homo sapiens
atgatgtgcgcaaaa

SEQ ID NO: 177169 - DNA, 15 bp, Homo sapiens
aatgatgtgcgcaaa

SEQ ID NO: 177170 - DNA, 15 bp, Homo sapiens
caatgatgtgcgcaa

SEQ ID NO: 177171 - DNA, 15 bp, Homo sapiens
ccaatgatgtgcgca

SEQ ID NO: 177172 - DNA, 15 bp, Homo sapiens
cccaatgatgtgcgc

SEQ ID NO: 177173 - DNA, 15 bp, Homo sapiens
tcccaatgatgtgcg

SEQ ID NO: 177174 - DNA, 15 bp, Homo sapiens
ttcccaatgatgtgc

SEQ ID NO: 177175 - DNA, 15 bp, Homo sapiens
gttcccaatgatgtg

SEQ ID NO: 177176 - DNA, 15 bp, Homo sapiens
agttcccaatgatgt

SEQ ID NO: 177177 - DNA, 15 bp, Homo sapiens
gagttcccaatgatg

SEQ ID NO: 177178 - DNA, 15 bp, Homo sapiens
tgagttcccaatgat

SEQ ID NO: 177179 - DNA, 15 bp, Homo sapiens
ttgagttcccaatga

SEQ ID NO: 177180 - DNA, 15 bp, Homo sapiens
tttgagttcccaatg

SEQ ID NO: 177181 - DNA, 15 bp, Homo sapiens
ctttgagttcccaat

SEQ ID NO: 177182 - DNA, 15 bp, Homo sapiens
actttgagttcccaa

SEQ ID NO: 177183 - DNA, 15 bp, Homo sapiens
gactttgagttccca

SEQ ID NO: 177184 - DNA, 15 bp, Homo sapiens
tgactttgagttccc

SEQ ID NO: 177185 - DNA, 15 bp, Homo sapiens
atgactttgagttcc

SEQ ID NO: 177186 - DNA, 15 bp, Homo sapiens
gatgactttgagttc

SEQ ID NO: 177187 - DNA, 15 bp, Homo sapiens
agatgactttgagtt

SEQ ID NO: 177188 - DNA, 15 bp, Homo sapiens
gagatgactttgagt

SEQ ID NO: 177189 - DNA, 15 bp, Homo sapiens
cgagatgactttgag

SEQ ID NO: 177190 - DNA, 15 bp, Homo sapiens
acgagatgactttga

SEQ ID NO: 177191 - DNA, 15 bp, Homo sapiens
cacgagatgactttg

SEQ ID NO: 177192 - DNA, 15 bp, Homo sapiens
acacgagatgacttt

SEQ ID NO: 177193 - DNA, 15 bp, Homo sapiens
aacacgagatgactt

SEQ ID NO: 177194 - DNA, 15 bp, Homo sapiens
caacacgagatgact

SEQ ID NO: 177195 - DNA, 15 bp, Homo sapiens
ccaacacgagatgac

SEQ ID NO: 177196 - DNA, 15 bp, Homo sapiens
tccaacacgagatga

SEQ ID NO: 177197 - DNA, 15 bp, Homo sapiens
ctccaacacgagatg

SEQ ID NO: 177198 - DNA, 15 bp, Homo sapiens
actccaacacgagat

SEQ ID NO: 177199 - DNA, 15 bp, Homo sapiens
gactccaacacgaga

SEQ ID NO: 177200 - DNA, 15 bp, Homo sapiens
tgactccaacacgag

SEQ ID NO: 177201 - DNA, 15 bp, Homo sapiens
ttgactccaacacga

SEQ ID NO: 177202 - DNA, 15 bp, Homo sapiens
tttgactccaacacg

SEQ ID NO: 177203 - DNA, 15 bp, Homo sapiens
atttgactccaacac

SEQ ID NO: 177204 - DNA, 15 bp, Homo sapiens
catttgactccaaca

SEQ ID NO: 177205 - DNA, 15 bp, Homo sapiens
tcatttgactccaac

SEQ ID NO: 177206 - DNA, 15 bp, Homo sapiens
gtcatttgactccaa

SEQ ID NO: 177207 - DNA, 15 bp, Homo sapiens
cgtcatttgactcca

SEQ ID NO: 177208 - DNA, 15 bp, Homo sapiens
acgtcatttgactcc

SEQ ID NO: 177209 - DNA, 15 bp, Homo sapiens
cacgtcatttgactc

SEQ ID NO: 177210 - DNA, 15 bp, Homo sapiens
acacgtcatttgact

SEQ ID NO: 177211 - DNA, 15 bp, Homo sapiens
aacacgtcatttgac

SEQ ID NO: 177212 - DNA, 15 bp, Homo sapiens
taacacgtcatttga

SEQ ID NO: 177213 - DNA, 15 bp, Homo sapiens
ctaacacgtcatttg

SEQ ID NO: 177214 - DNA, 15 bp, Homo sapiens
gctaacacgtcattt

SEQ ID NO: 177215 - DNA, 15 bp, Homo sapiens
tgctaacacgtcatt

SEQ ID NO: 177216 - DNA, 15 bp, Homo sapiens
gtgctaacacgtcat

SEQ ID NO: 177217 - DNA, 15 bp, Homo sapiens
tgtgctaacacgtca

SEQ ID NO: 177218 - DNA, 15 bp, Homo sapiens
gtgtgctaacacgtc

SEQ ID NO: 177219 - DNA, 15 bp, Homo sapiens
cgtgtgctaacacgt

SEQ ID NO: 177220 - DNA, 15 bp, Homo sapiens
gcgtgtgctaacacg

SEQ ID NO: 177221 - DNA, 15 bp, Homo sapiens
ggcgtgtgctaacac

SEQ ID NO: 177222 - DNA, 15 bp, Homo sapiens
aggcgtgtgctaaca

SEQ ID NO: 177223 - DNA, 15 bp, Homo sapiens
caggcgtgtgctaac

SEQ ID NO: 177224 - DNA, 15 bp, Homo sapiens
gcaggcgtgtgctaa

SEQ ID NO: 177225 - DNA, 15 bp, Homo sapiens
agcaggcgtgtgcta

SEQ ID NO: 177226 - DNA, 15 bp, Homo sapiens
aagcaggcgtgtgct

SEQ ID NO: 177227 - DNA, 15 bp, Homo sapiens
caagcaggcgtgtgc

SEQ ID NO: 177228 - DNA, 15 bp, Homo sapiens
ccaagcaggcgtgtg

SEQ ID NO: 177229 - DNA, 15 bp, Homo sapiens
cccaagcaggcgtgt

SEQ ID NO: 177230 - DNA, 15 bp, Homo sapiens
ccccaagcaggcgtg

SEQ ID NO: 177231 - DNA, 15 bp, Homo sapiens
cccccaagcaggcgt

SEQ ID NO: 177232 - DNA, 15 bp, Homo sapiens
tcccccaagcaggcg

SEQ ID NO: 177233 - DNA, 15 bp, Homo sapiens
atcccccaagcaggc

SEQ ID NO: 177234 - DNA, 15 bp, Homo sapiens
gatcccccaagcagg

SEQ ID NO: 177235 - DNA, 15 bp, Homo sapiens
ggatcccccaagcag

SEQ ID NO: 177236 - DNA, 15 bp, Homo sapiens
aggatcccccaagca

SEQ ID NO: 177237 - DNA, 15 bp, Homo sapiens
gaggatcccccaagc

SEQ ID NO: 177238 - DNA, 15 bp, Homo sapiens
ggaggatcccccaag

SEQ ID NO: 177239 - DNA, 15 bp, Homo sapiens
aggaggatcccccaa

SEQ ID NO: 177240 - DNA, 15 bp, Homo sapiens
caggaggatccccca

SEQ ID NO: 177241 - DNA, 15 bp, Homo sapiens
gcaggaggatccccc

SEQ ID NO: 177242 - DNA, 15 bp, Homo sapiens
tgcaggaggatcccc

SEQ ID NO: 177243 - DNA, 15 bp, Homo sapiens
ctgcaggaggatccc

SEQ ID NO: 177244 - DNA, 15 bp, Homo sapiens
actgcaggaggatcc

SEQ ID NO: 177245 - DNA, 15 bp, Homo sapiens
aactgcaggaggatc

SEQ ID NO: 177246 - DNA, 15 bp, Homo sapiens
caactgcaggaggat

SEQ ID NO: 177247 - DNA, 15 bp, Homo sapiens
ccaactgcaggagga

SEQ ID NO: 177248 - DNA, 15 bp, Homo sapiens
gccaactgcaggagg

SEQ ID NO: 177249 - DNA, 15 bp, Homo sapiens
tgccaactgcaggag

SEQ ID NO: 177250 - DNA, 15 bp, Homo sapiens
atgccaactgcagga

SEQ ID NO: 177251 - DNA, 15 bp, Homo sapiens
tatgccaactgcagg

SEQ ID NO: 177252 - DNA, 15 bp, Homo sapiens
atatgccaactgcag

SEQ ID NO: 177253 - DNA, 15 bp, Homo sapiens
aatatgccaactgca

SEQ ID NO: 177254 - DNA, 15 bp, Homo sapiens
caatatgccaactgc

SEQ ID NO: 177255 - DNA, 15 bp, Homo sapiens
gcaatatgccaactg

SEQ ID NO: 177256 - DNA, 15 bp, Homo sapiens
cgcaatatgccaact

SEQ ID NO: 177257 - DNA, 15 bp, Homo sapiens
acgcaatatgccaac

SEQ ID NO: 177258 - DNA, 15 bp, Homo sapiens
cacgcaatatgccaa

SEQ ID NO: 177259 - DNA, 15 bp, Homo sapiens
tcacgcaatatgcca

SEQ ID NO: 177260 - DNA, 15 bp, Homo sapiens
gtcacgcaatatgcc

SEQ ID NO: 177261 - DNA, 15 bp, Homo sapiens
tgtcacgcaatatgc

SEQ ID NO: 177262 - DNA, 15 bp, Homo sapiens
gtgtcacgcaatatg

SEQ ID NO: 177263 - DNA, 15 bp, Homo sapiens
tgtgtcacgcaatat

SEQ ID NO: 177264 - DNA, 15 bp, Homo sapiens
gtgtgtcacgcaata

SEQ ID NO: 177265 - DNA, 15 bp, Homo sapiens
cgtgtgtcacgcaat

SEQ ID NO: 177266 - DNA, 15 bp, Homo sapiens
ccgtgtgtcacgcaa

SEQ ID NO: 177267 - DNA, 15 bp, Homo sapiens
cccgtgtgtcacgca

SEQ ID NO: 177268 - DNA, 15 bp, Homo sapiens
ccccgtgtgtcacgc

SEQ ID NO: 177269 - DNA, 15 bp, Homo sapiens
cccccgtgtgtcacg

SEQ ID NO: 177270 - DNA, 15 bp, Homo sapiens
ccccccgtgtgtcac

SEQ ID NO: 177271 - DNA, 15 bp, Homo sapiens
tccccccgtgtgtca

SEQ ID NO: 177272 - DNA, 15 bp, Homo sapiens
atccccccgtgtgtc

SEQ ID NO: 177273 - DNA, 15 bp, Homo sapiens
aatccccccgtgtgt

SEQ ID NO: 177274 - DNA, 15 bp, Homo sapiens
gaatccccccgtgtg

SEQ ID NO: 177275 - DNA, 15 bp, Homo sapiens
agaatccccccgtgt

SEQ ID NO: 177276 - DNA, 15 bp, Homo sapiens
gagaatccccccgtg

SEQ ID NO: 177277 - DNA, 15 bp, Homo sapiens
tgagaatccccccgt

SEQ ID NO: 177278 - DNA, 15 bp, Homo sapiens
atgagaatccccccg

SEQ ID NO: 177279 - DNA, 15 bp, Homo sapiens
gatgagaatcccccc

SEQ ID NO: 177280 - DNA, 15 bp, Homo sapiens
cgatgagaatccccc

SEQ ID NO: 177281 - DNA, 15 bp, Homo sapiens
acgatgagaatcccc

SEQ ID NO: 177282 - DNA, 15 bp, Homo sapiens
cacgatgagaatccc

SEQ ID NO: 177283 - DNA, 15 bp, Homo sapiens
gcacgatgagaatcc

SEQ ID NO: 177284 - DNA, 15 bp, Homo sapiens
agcacgatgagaatc

SEQ ID NO: 177285 - DNA, 15 bp, Homo sapiens
cagcacgatgagaat

SEQ ID NO: 177286 - DNA, 15 bp, Homo sapiens
ccagcacgatgagaa

SEQ ID NO: 177287 - DNA, 15 bp, Homo sapiens
tccagcacgatgaga

SEQ ID NO: 177288 - DNA, 15 bp, Homo sapiens
ttccagcacgatgag

SEQ ID NO: 177289 - DNA, 15 bp, Homo sapiens
attccagcacgatga

SEQ ID NO: 177290 - DNA, 15 bp, Homo sapiens
cattccagcacgatg

SEQ ID NO: 177291 - DNA, 15 bp, Homo sapiens
gcattccagcacgat

SEQ ID NO: 177292 - DNA, 15 bp, Homo sapiens
tgcattccagcacga

SEQ ID NO: 177293 - DNA, 15 bp, Homo sapiens
atgcattccagcacg

SEQ ID NO: 177294 - DNA, 15 bp, Homo sapiens
catgcattccagcac

SEQ ID NO: 177295 - DNA, 15 bp, Homo sapiens
ccatgcattccagca

SEQ ID NO: 177296 - DNA, 15 bp, Homo sapiens
gccatgcattccagc

SEQ ID NO: 177297 - DNA, 15 bp, Homo sapiens
ggccatgcattccag

SEQ ID NO: 177298 - DNA, 15 bp, Homo sapiens
tggccatgcattcca

SEQ ID NO: 177299 - DNA, 15 bp, Homo sapiens
ctggccatgcattcc

SEQ ID NO: 177300 - DNA, 15 bp, Homo sapiens
gctggccatgcattc

SEQ ID NO: 177301 - DNA, 15 bp, Homo sapiens
ggctggccatgcatt

SEQ ID NO: 177302 - DNA, 15 bp, Homo sapiens
gggctggccatgcat

SEQ ID NO: 177303 - DNA, 15 bp, Homo sapiens
ggggctggccatgca

SEQ ID NO: 177304 - DNA, 15 bp, Homo sapiens
aggggctggccatgc

SEQ ID NO: 177305 - DNA, 15 bp, Homo sapiens
aaggggctggccatg

SEQ ID NO: 177306 - DNA, 15 bp, Homo sapiens
gaaggggctggccat

SEQ ID NO: 177307 - DNA, 15 bp, Homo sapiens
agaaggggctggcca

SEQ ID NO: 177308 - DNA, 15 bp, Homo sapiens
aagaaggggctggcc

SEQ ID NO: 177309 - DNA, 15 bp, Homo sapiens
aaagaaggggctggc

SEQ ID NO: 177310 - DNA, 15 bp, Homo sapiens
gaaagaaggggctgg

SEQ ID NO: 177311 - DNA, 15 bp, Homo sapiens
agaaagaaggggctg

SEQ ID NO: 177312 - DNA, 15 bp, Homo sapiens
gagaaagaaggggct

SEQ ID NO: 177313 - DNA, 15 bp, Homo sapiens
ggagaaagaaggggc

SEQ ID NO: 177314 - DNA, 15 bp, Homo sapiens
tggagaaagaagggg

SEQ ID NO: 177315 - DNA, 15 bp, Homo sapiens
ttggagaaagaaggg

SEQ ID NO: 177316 - DNA, 15 bp, Homo sapiens
cttggagaaagaagg

SEQ ID NO: 177317 - DNA, 15 bp, Homo sapiens
gcttggagaaagaag

SEQ ID NO: 177318 - DNA, 15 bp, Homo sapiens
tgcttggagaaagaa

SEQ ID NO: 177319 - DNA, 15 bp, Homo sapiens
gtgcttggagaaaga

SEQ ID NO: 177320 - DNA, 15 bp, Homo sapiens
tgtgcttggagaaag

SEQ ID NO: 177321 - DNA, 15 bp, Homo sapiens
ctgtgcttggagaaa

SEQ ID NO: 177322 - DNA, 15 bp, Homo sapiens
actgtgcttggagaa

SEQ ID NO: 177323 - DNA, 15 bp, Homo sapiens
aactgtgcttggaga

SEQ ID NO: 177324 - DNA, 15 bp, Homo sapiens
gaactgtgcttggag

SEQ ID NO: 177325 - DNA, 15 bp, Homo sapiens
tgaactgtgcttgga

SEQ ID NO: 177326 - DNA, 15 bp, Homo sapiens
ctgaactgtgcttgg

SEQ ID NO: 177327 - DNA, 15 bp, Homo sapiens
actgaactgtgcttg

SEQ ID NO: 177328 - DNA, 15 bp, Homo sapiens
cactgaactgtgctt

SEQ ID NO: 177329 - DNA, 15 bp, Homo sapiens
gcactgaactgtgct

SEQ ID NO: 177330 - DNA, 15 bp, Homo sapiens
tgcactgaactgtgc

SEQ ID NO: 177331 - DNA, 15 bp, Homo sapiens
atgcactgaactgtg

SEQ ID NO: 177332 - DNA, 15 bp, Homo sapiens
aatgcactgaactgt

SEQ ID NO: 177333 - DNA, 15 bp, Homo sapiens
aaatgcactgaactg

SEQ ID NO: 177334 - DNA, 15 bp, Homo sapiens
aaaatgcactgaact

SEQ ID NO: 177335 - DNA, 15 bp, Homo sapiens
gaaaatgcactgaac

SEQ ID NO: 177336 - DNA, 15 bp, Homo sapiens
ggaaaatgcactgaa

SEQ ID NO: 177337 - DNA, 15 bp, Homo sapiens
gggaaaatgcactga

SEQ ID NO: 177338 - DNA, 15 bp, Homo sapiens
ggggaaaatgcactg

SEQ ID NO: 177339 - DNA, 15 bp, Homo sapiens
gggggaaaatgcact

SEQ ID NO: 177340 - DNA, 15 bp, Homo sapiens
ggggggaaaatgcac

SEQ ID NO: 177341 - DNA, 15 bp, Homo sapiens
tggggggaaaatgca

SEQ ID NO: 177342 - DNA, 15 bp, Homo sapiens
ctggggggaaaatgc

SEQ ID NO: 177343 - DNA, 15 bp, Homo sapiens
actggggggaaaatg

SEQ ID NO: 177344 - DNA, 15 bp, Homo sapiens
aactggggggaaaat

SEQ ID NO: 177345 - DNA, 15 bp, Homo sapiens
caactggggggaaaa

SEQ ID NO: 177346 - DNA, 15 bp, Homo sapiens
gcaactggggggaaa

SEQ ID NO: 177347 - DNA, 15 bp, Homo sapiens
agcaactggggggaa

SEQ ID NO: 177348 - DNA, 15 bp, Homo sapiens
cagcaactgggggga

SEQ ID NO: 177349 - DNA, 15 bp, Homo sapiens
gcagcaactgggggg

SEQ ID NO: 177350 - DNA, 15 bp, Homo sapiens
agcagcaactggggg

SEQ ID NO: 177351 - DNA, 15 bp, Homo sapiens
aagcagcaactgggg

SEQ ID NO: 177352 - DNA, 15 bp, Homo sapiens
gaagcagcaactggg

SEQ ID NO: 177353 - DNA, 15 bp, Homo sapiens
agaagcagcaactgg

SEQ ID NO: 177354 - DNA, 15 bp, Homo sapiens
gagaagcagcaactg

SEQ ID NO: 177355 - DNA, 15 bp, Homo sapiens
cgagaagcagcaact

SEQ ID NO: 177356 - DNA, 15 bp, Homo sapiens
acgagaagcagcaac

SEQ ID NO: 177357 - DNA, 15 bp, Homo sapiens
tacgagaagcagcaa

SEQ ID NO: 177358 - DNA, 15 bp, Homo sapiens
ctacgagaagcagca

SEQ ID NO: 177359 - DNA, 15 bp, Homo sapiens
cctacgagaagcagc

SEQ ID NO: 177360 - DNA, 15 bp, Homo sapiens
tcctacgagaagcag

SEQ ID NO: 177361 - DNA, 15 bp, Homo sapiens
ctcctacgagaagca

SEQ ID NO: 177362 - DNA, 15 bp, Homo sapiens
tctcctacgagaagc

SEQ ID NO: 177363 - DNA, 15 bp, Homo sapiens
atctcctacgagaag

SEQ ID NO: 177364 - DNA, 15 bp, Homo sapiens
aatctcctacgagaa

SEQ ID NO: 177365 - DNA, 15 bp, Homo sapiens
taatctcctacgaga

SEQ ID NO: 177366 - DNA, 15 bp, Homo sapiens
ataatctcctacgag

SEQ ID NO: 177367 - DNA, 15 bp, Homo sapiens
aataatctcctacga

SEQ ID NO: 177368 - DNA, 15 bp, Homo sapiens
aaataatctcctacg

SEQ ID NO: 177369 - DNA, 15 bp, Homo sapiens
gaaataatctcctac

SEQ ID NO: 177370 - DNA, 15 bp, Homo sapiens
agaaataatctccta

SEQ ID NO: 177371 - DNA, 15 bp, Homo sapiens
cagaaataatctcct

SEQ ID NO: 177372 - DNA, 15 bp, Homo sapiens
tcagaaataatctcc

SEQ ID NO: 177373 - DNA, 15 bp, Homo sapiens
atcagaaataatctc

SEQ ID NO: 177374 - DNA, 15 bp, Homo sapiens
aatcagaaataatct

SEQ ID NO: 177375 - DNA, 15 bp, Homo sapiens
gaatcagaaataatc

SEQ ID NO: 177376 - DNA, 15 bp, Homo sapiens
cgaatcagaaataat

SEQ ID NO: 177377 - DNA, 15 bp, Homo sapiens
acgaatcagaaataa

SEQ ID NO: 177378 - DNA, 15 bp, Homo sapiens
tacgaatcagaaata

SEQ ID NO: 177379 - DNA, 15 bp, Homo sapiens
atacgaatcagaaat

SEQ ID NO: 177380 - DNA, 15 bp, Homo sapiens
aatacgaatcagaaa

SEQ ID NO: 177381 - DNA, 15 bp, Homo sapiens
caatacgaatcagaa

SEQ ID NO: 177382 - DNA, 15 bp, Homo sapiens
tcaatacgaatcaga

SEQ ID NO: 177383 - DNA, 15 bp, Homo sapiens
ctcaatacgaatcag

SEQ ID NO: 177384 - DNA, 15 bp, Homo sapiens
actcaatacgaatca

SEQ ID NO: 177385 - DNA, 15 bp, Homo sapiens
aactcaatacgaatc

SEQ ID NO: 177386 - DNA, 15 bp, Homo sapiens
caactcaatacgaat

SEQ ID NO: 177387 - DNA, 15 bp, Homo sapiens
acaactcaatacgaa

SEQ ID NO: 177388 - DNA, 15 bp, Homo sapiens
aacaactcaatacga

SEQ ID NO: 177389 - DNA, 15 bp, Homo sapiens
taacaactcaatacg

SEQ ID NO: 177390 - DNA, 15 bp, Homo sapiens
gtaacaactcaatac

SEQ ID NO: 177391 - DNA, 15 bp, Homo sapiens
agtaacaactcaata

SEQ ID NO: 177392 - DNA, 15 bp, Homo sapiens
cagtaacaactcaat

SEQ ID NO: 177393 - DNA, 15 bp, Homo sapiens
ccagtaacaactcaa

SEQ ID NO: 177394 - DNA, 15 bp, Homo sapiens
tccagtaacaactca

SEQ ID NO: 177395 - DNA, 15 bp, Homo sapiens
ttccagtaacaactc

SEQ ID NO: 177396 - DNA, 15 bp, Homo sapiens
tttccagtaacaact

SEQ ID NO: 177397 - DNA, 15 bp, Homo sapiens
ttttccagtaacaac

SEQ ID NO: 177398 - DNA, 15 bp, Homo sapiens
gttttccagtaacaa

SEQ ID NO: 177399 - DNA, 15 bp, Homo sapiens
tgttttccagtaaca

SEQ ID NO: 177400 - DNA, 15 bp, Homo sapiens
gtgttttccagtaac

SEQ ID NO: 177401 - DNA, 15 bp, Homo sapiens
agtgttttccagtaa

SEQ ID NO: 177402 - DNA, 15 bp, Homo sapiens
aagtgttttccagta

SEQ ID NO: 177403 - DNA, 15 bp, Homo sapiens
gaagtgttttccagt

SEQ ID NO: 177404 - DNA, 15 bp, Homo sapiens
tgaagtgttttccag

SEQ ID NO: 177405 - DNA, 15 bp, Homo sapiens
ctgaagtgttttcca

SEQ ID NO: 177406 - DNA, 15 bp, Homo sapiens
tctgaagtgttttcc

SEQ ID NO: 177407 - DNA, 15 bp, Homo sapiens
ctctgaagtgttttc

SEQ ID NO: 177408 - DNA, 15 bp, Homo sapiens
tctctgaagtgtttt

SEQ ID NO: 177409 - DNA, 15 bp, Homo sapiens
ctctctgaagtgttt

SEQ ID NO: 177410 - DNA, 15 bp, Homo sapiens
tctctctgaagtgtt

SEQ ID NO: 177411 - DNA, 15 bp, Homo sapiens
atctctctgaagtgt

SEQ ID NO: 177412 - DNA, 15 bp, Homo sapiens
tatctctctgaagtg

SEQ ID NO: 177413 - DNA, 15 bp, Homo sapiens
ttatctctctgaagt

SEQ ID NO: 177414 - DNA, 15 bp, Homo sapiens
attatctctctgaag

SEQ ID NO: 177415 - DNA, 15 bp, Homo sapiens
cattatctctctgaa

SEQ ID NO: 177416 - DNA, 15 bp, Homo sapiens
tcattatctctctga

SEQ ID NO: 177417 - DNA, 15 bp, Homo sapiens
ctcattatctctctg

SEQ ID NO: 177418 - DNA, 15 bp, Homo sapiens
gctcattatctctct

SEQ ID NO: 177419 - DNA, 15 bp, Homo sapiens
agctcattatctctc

SEQ ID NO: 177420 - DNA, 15 bp, Homo sapiens
cagctcattatctct

SEQ ID NO: 177421 - DNA, 15 bp, Homo sapiens
ccagctcattatctc

SEQ ID NO: 177422 - DNA, 15 bp, Homo sapiens
cccagctcattatct

SEQ ID NO: 177423 - DNA, 15 bp, Homo sapiens
acccagctcattatc

SEQ ID NO: 177424 - DNA, 15 bp, Homo sapiens
tacccagctcattat

SEQ ID NO: 177425 - DNA, 15 bp, Homo sapiens
ctacccagctcatta

SEQ ID NO: 177426 - DNA, 15 bp, Homo sapiens
actacccagctcatt

SEQ ID NO: 177427 - DNA, 15 bp, Homo sapiens
aactacccagctcat

SEQ ID NO: 177428 - DNA, 15 bp, Homo sapiens
aaactacccagctca

SEQ ID NO: 177429 - DNA, 15 bp, Homo sapiens
aaaactacccagctc

SEQ ID NO: 177430 - DNA, 15 bp, Homo sapiens
gaaaactacccagct

SEQ ID NO: 177431 - DNA, 15 bp, Homo sapiens
ggaaaactacccagc

SEQ ID NO: 177432 - DNA, 15 bp, Homo sapiens
aggaaaactacccag

SEQ ID NO: 177433 - DNA, 15 bp, Homo sapiens
gaggaaaactaccca

SEQ ID NO: 177434 - DNA, 15 bp, Homo sapiens
agaggaaaactaccc

SEQ ID NO: 177435 - DNA, 15 bp, Homo sapiens
aagaggaaaactacc

SEQ ID NO: 177436 - DNA, 15 bp, Homo sapiens
gaagaggaaaactac

SEQ ID NO: 177437 - DNA, 15 bp, Homo sapiens
tgaagaggaaaacta

SEQ ID NO: 177438 - DNA, 15 bp, Homo sapiens
atgaagaggaaaact

SEQ ID NO: 177439 - DNA, 15 bp, Homo sapiens
aatgaagaggaaaac

SEQ ID NO: 177440 - DNA, 15 bp, Homo sapiens
aaatgaagaggaaaa

SEQ ID NO: 177441 - DNA, 15 bp, Homo sapiens
aaaatgaagaggaaa

SEQ ID NO: 177442 - DNA, 15 bp, Homo sapiens
aaaaatgaagaggaa

SEQ ID NO: 177443 - DNA, 15 bp, Homo sapiens
gaaaaatgaagagga

SEQ ID NO: 177444 - DNA, 15 bp, Homo sapiens
agaaaaatgaagagg

SEQ ID NO: 177445 - DNA, 15 bp, Homo sapiens
aagaaaaatgaagag

SEQ ID NO: 177446 - DNA, 15 bp, Homo sapiens
aaagaaaaatgaaga

SEQ ID NO: 177447 - DNA, 15 bp, Homo sapiens
caaagaaaaatgaag

SEQ ID NO: 177448 - DNA, 15 bp, Homo sapiens
acaaagaaaaatgaa

SEQ ID NO: 177449 - DNA, 15 bp, Homo sapiens
aacaaagaaaaatga

SEQ ID NO: 177450 - DNA, 15 bp, Homo sapiens
caacaaagaaaaatg

SEQ ID NO: 177451 - DNA, 15 bp, Homo sapiens
acaacaaagaaaaat

SEQ ID NO: 177452 - DNA, 15 bp, Homo sapiens
aacaacaaagaaaaa

SEQ ID NO: 177453 - DNA, 15 bp, Homo sapiens
caacaacaaagaaaa

SEQ ID NO: 177454 - DNA, 15 bp, Homo sapiens
acaacaacaaagaaa

SEQ ID NO: 177455 - DNA, 15 bp, Homo sapiens
aacaacaacaaagaa

SEQ ID NO: 177456 - DNA, 15 bp, Homo sapiens
caacaacaacaaaga

SEQ ID NO: 177457 - DNA, 15 bp, Homo sapiens
tcaacaacaacaaag

SEQ ID NO: 177458 - DNA, 15 bp, Homo sapiens
ttcaacaacaacaaa

SEQ ID NO: 177459 - DNA, 15 bp, Homo sapiens
attcaacaacaacaa

SEQ ID NO: 177460 - DNA, 15 bp, Homo sapiens
aattcaacaacaaca

SEQ ID NO: 177461 - DNA, 15 bp, Homo sapiens
gaattcaacaacaac

SEQ ID NO: 177462 - DNA, 15 bp, Homo sapiens
tgaattcaacaacaa

SEQ ID NO: 177463 - DNA, 15 bp, Homo sapiens
atgaattcaacaaca

SEQ ID NO: 177464 - DNA, 15 bp, Homo sapiens
tatgaattcaacaac

SEQ ID NO: 177465 - DNA, 15 bp, Homo sapiens
atatgaattcaacaa

SEQ ID NO: 177466 - DNA, 15 bp, Homo sapiens
catatgaattcaaca

SEQ ID NO: 177467 - DNA, 15 bp, Homo sapiens
ccatatgaattcaac

SEQ ID NO: 177468 - DNA, 15 bp, Homo sapiens
cccatatgaattcaa

SEQ ID NO: 177469 - DNA, 15 bp, Homo sapiens
acccatatgaattca

SEQ ID NO: 177470 - DNA, 15 bp, Homo sapiens
tacccatatgaattc

SEQ ID NO: 177471 - DNA, 15 bp, Homo sapiens
ttacccatatgaatt

SEQ ID NO: 177472 - DNA, 15 bp, Homo sapiens
gttacccatatgaat

SEQ ID NO: 177473 - DNA, 15 bp, Homo sapiens
agttacccatatgaa

SEQ ID NO: 177474 - DNA, 15 bp, Homo sapiens
cagttacccatatga

SEQ ID NO: 177475 - DNA, 15 bp, Homo sapiens
ccagttacccatatg

SEQ ID NO: 177476 - DNA, 15 bp, Homo sapiens
cccagttacccatat

SEQ ID NO: 177477 - DNA, 15 bp, Homo sapiens
gcccagttacccata

SEQ ID NO: 177478 - DNA, 15 bp, Homo sapiens
agcccagttacccat

SEQ ID NO: 177479 - DNA, 15 bp, Homo sapiens
gagcccagttaccca

SEQ ID NO: 177480 - DNA, 15 bp, Homo sapiens
agagcccagttaccc

SEQ ID NO: 177481 - DNA, 15 bp, Homo sapiens
gagagcccagttacc

SEQ ID NO: 177482 - DNA, 15 bp, Homo sapiens
ggagagcccagttac

SEQ ID NO: 177483 - DNA, 15 bp, Homo sapiens
tggagagcccagtta

SEQ ID NO: 177484 - DNA, 15 bp, Homo sapiens
gtggagagcccagtt

SEQ ID NO: 177485 - DNA, 15 bp, Homo sapiens
agtggagagcccagt

SEQ ID NO: 177486 - DNA, 15 bp, Homo sapiens
aagtggagagcccag

SEQ ID NO: 177487 - DNA, 15 bp, Homo sapiens
taagtggagagccca

SEQ ID NO: 177488 - DNA, 15 bp, Homo sapiens
gtaagtggagagccc

SEQ ID NO: 177489 - DNA, 15 bp, Homo sapiens
tgtaagtggagagcc

SEQ ID NO: 177490 - DNA, 15 bp, Homo sapiens
gtgtaagtggagagc

SEQ ID NO: 177491 - DNA, 15 bp, Homo sapiens
agtgtaagtggagag

SEQ ID NO: 177492 - DNA, 15 bp, Homo sapiens
aagtgtaagtggaga

SEQ ID NO: 177493 - DNA, 15 bp, Homo sapiens
aaagtgtaagtggag

SEQ ID NO: 177494 - DNA, 15 bp, Homo sapiens
taaagtgtaagtgga

SEQ ID NO: 177495 - DNA, 15 bp, Homo sapiens
ataaagtgtaagtgg

SEQ ID NO: 177496 - DNA, 15 bp, Homo sapiens
aataaagtgtaagtg

SEQ ID NO: 177497 - DNA, 15 bp, Homo sapiens
caataaagtgtaagt

SEQ ID NO: 177498 - DNA, 15 bp, Homo sapiens
tcaataaagtgtaag

SEQ ID NO: 177499 - DNA, 15 bp, Homo sapiens
atcaataaagtgtaa

SEQ ID NO: 177500 - DNA, 15 bp, Homo sapiens
aatcaataaagtgta

SEQ ID NO: 177501 - DNA, 15 bp, Homo sapiens
gaatcaataaagtgt

SEQ ID NO: 177502 - DNA, 15 bp, Homo sapiens
ggaatcaataaagtg

SEQ ID NO: 177503 - DNA, 15 bp, Homo sapiens
aggaatcaataaagt

SEQ ID NO: 177504 - DNA, 15 bp, Homo sapiens
caggaatcaataaag

SEQ ID NO: 177505 - DNA, 15 bp, Homo sapiens
tcaggaatcaataaa

SEQ ID NO: 177506 - DNA, 15 bp, Homo sapiens
ttcaggaatcaataa

SEQ ID NO: 177507 - DNA, 15 bp, Homo sapiens
attcaggaatcaata

SEQ ID NO: 177508 - DNA, 15 bp, Homo sapiens
aattcaggaatcaat

SEQ ID NO: 177509 - DNA, 15 bp, Homo sapiens
aaattcaggaatcaa

SEQ ID NO: 177510 - DNA, 15 bp, Homo sapiens
taaattcaggaatca

SEQ ID NO: 177511 - DNA, 15 bp, Homo sapiens
ctaaattcaggaatc

SEQ ID NO: 177512 - DNA, 15 bp, Homo sapiens
cctaaattcaggaat

SEQ ID NO: 177513 - DNA, 15 bp, Homo sapiens
ccctaaattcaggaa

SEQ ID NO: 177514 - DNA, 15 bp, Homo sapiens
gccctaaattcagga

SEQ ID NO: 177515 - DNA, 15 bp, Homo sapiens
tgccctaaattcagg

SEQ ID NO: 177516 - DNA, 15 bp, Homo sapiens
atgccctaaattcag

SEQ ID NO: 177517 - DNA, 15 bp, Homo sapiens
tatgccctaaattca

SEQ ID NO: 177518 - DNA, 15 bp, Homo sapiens
ctatgccctaaattc

SEQ ID NO: 177519 - DNA, 15 bp, Homo sapiens
gctatgccctaaatt

SEQ ID NO: 177520 - DNA, 15 bp, Homo sapiens
agctatgccctaaat

SEQ ID NO: 177521 - DNA, 15 bp, Homo sapiens
gagctatgccctaaa

SEQ ID NO: 177522 - DNA, 15 bp, Homo sapiens
agagctatgccctaa

SEQ ID NO: 177523 - DNA, 15 bp, Homo sapiens
cagagctatgcccta

SEQ ID NO: 177524 - DNA, 15 bp, Homo sapiens
acagagctatgccct

SEQ ID NO: 177525 - DNA, 15 bp, Homo sapiens
tacagagctatgccc

SEQ ID NO: 177526 - DNA, 15 bp, Homo sapiens
ttacagagctatgcc

SEQ ID NO: 177527 - DNA, 15 bp, Homo sapiens
attacagagctatgc

SEQ ID NO: 177528 - DNA, 15 bp, Homo sapiens
aattacagagctatg

SEQ ID NO: 177529 - DNA, 15 bp, Homo sapiens
caattacagagctat

SEQ ID NO: 177530 - DNA, 15 bp, Homo sapiens
ccaattacagagcta

SEQ ID NO: 177531 - DNA, 15 bp, Homo sapiens
gccaattacagagct

SEQ ID NO: 177532 - DNA, 15 bp, Homo sapiens
tgccaattacagagc

SEQ ID NO: 177533 - DNA, 15 bp, Homo sapiens
ttgccaattacagag

SEQ ID NO: 177534 - DNA, 15 bp, Homo sapiens
attgccaattacaga

SEQ ID NO: 177535 - DNA, 15 bp, Homo sapiens
aattgccaattacag

SEQ ID NO: 177536 - DNA, 15 bp, Homo sapiens
aaattgccaattaca

SEQ ID NO: 177537 - DNA, 15 bp, Homo sapiens
gaaattgccaattac

SEQ ID NO: 177538 - DNA, 15 bp, Homo sapiens
ggaaattgccaatta

SEQ ID NO: 177539 - DNA, 15 bp, Homo sapiens
aggaaattgccaatt

SEQ ID NO: 177540 - DNA, 15 bp, Homo sapiens
gaggaaattgccaat

SEQ ID NO: 177541 - DNA, 15 bp, Homo sapiens
tgaggaaattgccaa

SEQ ID NO: 177542 - DNA, 15 bp, Homo sapiens
ctgaggaaattgcca

SEQ ID NO: 177543 - DNA, 15 bp, Homo sapiens
actgaggaaattgcc

SEQ ID NO: 177544 - DNA, 15 bp, Homo sapiens
cactgaggaaattgc

SEQ ID NO: 177545 - DNA, 15 bp, Homo sapiens
gcactgaggaaattg

SEQ ID NO: 177546 - DNA, 15 bp, Homo sapiens
ggcactgaggaaatt

SEQ ID NO: 177547 - DNA, 15 bp, Homo sapiens
tggcactgaggaaat

SEQ ID NO: 177548 - DNA, 15 bp, Homo sapiens
gtggcactgaggaaa

SEQ ID NO: 177549 - DNA, 15 bp, Homo sapiens
cgtggcactgaggaa

SEQ ID NO: 177550 - DNA, 15 bp, Homo sapiens
acgtggcactgagga

SEQ ID NO: 177551 - DNA, 15 bp, Homo sapiens
cacgtggcactgagg

SEQ ID NO: 177552 - DNA, 15 bp, Homo sapiens
ccacgtggcactgag

SEQ ID NO: 177553 - DNA, 15 bp, Homo sapiens
cccacgtggcactga

SEQ ID NO: 177554 - DNA, 15 bp, Homo sapiens
gcccacgtggcactg

SEQ ID NO: 177555 - DNA, 15 bp, Homo sapiens
tgcccacgtggcact

SEQ ID NO: 177556 - DNA, 15 bp, Homo sapiens
ctgcccacgtggcac

SEQ ID NO: 177557 - DNA, 15 bp, Homo sapiens
tctgcccacgtggca

SEQ ID NO: 177558 - DNA, 15 bp, Homo sapiens
ctctgcccacgtggc

SEQ ID NO: 177559 - DNA, 15 bp, Homo sapiens
tctctgcccacgtgg

SEQ ID NO: 177560 - DNA, 15 bp, Homo sapiens
ctctctgcccacgtg

SEQ ID NO: 177561 - DNA, 15 bp, Homo sapiens
tctctctgcccacgt

SEQ ID NO: 177562 - DNA, 15 bp, Homo sapiens
ttctctctgcccacg

SEQ ID NO: 177563 - DNA, 15 bp, Homo sapiens
cttctctctgcccac

SEQ ID NO: 177564 - DNA, 15 bp, Homo sapiens
acttctctctgccca

SEQ ID NO: 177565 - DNA, 15 bp, Homo sapiens
tacttctctctgccc

SEQ ID NO: 177566 - DNA, 15 bp, Homo sapiens
gtacttctctctgcc

SEQ ID NO: 177567 - DNA, 15 bp, Homo sapiens
agtacttctctctgc

SEQ ID NO: 177568 - DNA, 15 bp, Homo sapiens
cagtacttctctctg

SEQ ID NO: 177569 - DNA, 15 bp, Homo sapiens
acagtacttctctct

SEQ ID NO: 177570 - DNA, 15 bp, Homo sapiens
cacagtacttctctc

SEQ ID NO: 177571 - DNA, 15 bp, Homo sapiens
gcacagtacttctct

SEQ ID NO: 177572 - DNA, 15 bp, Homo sapiens
ggcacagtacttctc

SEQ ID NO: 177573 - DNA, 15 bp, Homo sapiens
aggcacagtacttct

SEQ ID NO: 177574 - DNA, 15 bp, Homo sapiens
caggcacagtacttc

SEQ ID NO: 177575 - DNA, 15 bp, Homo sapiens
ccaggcacagtactt

SEQ ID NO: 177576 - DNA, 15 bp, Homo sapiens
cccaggcacagtact

SEQ ID NO: 177577 - DNA, 15 bp, Homo sapiens
ccccaggcacagtac

SEQ ID NO: 177578 - DNA, 15 bp, Homo sapiens
gccccaggcacagta

SEQ ID NO: 177579 - DNA, 15 bp, Homo sapiens
agccccaggcacagt

SEQ ID NO: 177580 - DNA, 15 bp, Homo sapiens
cagccccaggcacag

SEQ ID NO: 177581 - DNA, 15 bp, Homo sapiens
gcagccccaggcaca

SEQ ID NO: 177582 - DNA, 15 bp, Homo sapiens
agcagccccaggcac

SEQ ID NO: 177583 - DNA, 15 bp, Homo sapiens
cagcagccccaggca

SEQ ID NO: 177584 - DNA, 15 bp, Homo sapiens
tcagcagccccaggc

SEQ ID NO: 177585 - DNA, 15 bp, Homo sapiens
gtcagcagccccagg

SEQ ID NO: 177586 - DNA, 15 bp, Homo sapiens
agtcagcagccccag

SEQ ID NO: 177587 - DNA, 15 bp, Homo sapiens
gagtcagcagcccca

SEQ ID NO: 177588 - DNA, 15 bp, Homo sapiens
agagtcagcagcccc

SEQ ID NO: 177589 - DNA, 15 bp, Homo sapiens
cagagtcagcagccc

SEQ ID NO: 177590 - DNA, 15 bp, Homo sapiens
gcagagtcagcagcc

SEQ ID NO: 177591 - DNA, 15 bp, Homo sapiens
tgcagagtcagcagc

SEQ ID NO: 177592 - DNA, 15 bp, Homo sapiens
ctgcagagtcagcag

SEQ ID NO: 177593 - DNA, 15 bp, Homo sapiens
cctgcagagtcagca

SEQ ID NO: 177594 - DNA, 15 bp, Homo sapiens
tcctgcagagtcagc

SEQ ID NO: 177595 - DNA, 15 bp, Homo sapiens
gcttcctgcagagtc

SEQ ID NO: 177596 - DNA, 15 bp, Homo sapiens
agcttcctgcagagt

SEQ ID NO: 177597 - DNA, 15 bp, Homo sapiens
cagcttcctgcagag

SEQ ID NO: 177598 - DNA, 15 bp, Homo sapiens
acagcttcctgcaga

SEQ ID NO: 177599 - DNA, 15 bp, Homo sapiens
tacagcttcctgcag

SEQ ID NO: 177600 - DNA, 15 bp, Homo sapiens
ctacagcttcctgca

SEQ ID NO: 177601 - DNA, 15 bp, Homo sapiens
cctacagcttcctgc

SEQ ID NO: 177602 - DNA, 15 bp, Homo sapiens
ccctacagcttcctg

SEQ ID NO: 177603 - DNA, 15 bp, Homo sapiens
cccctacagcttcct

SEQ ID NO: 177604 - DNA, 15 bp, Homo sapiens
gcccctacagcttcc

SEQ ID NO: 177605 - DNA, 15 bp, Homo sapiens
tgcccctacagcttc

SEQ ID NO: 177606 - DNA, 15 bp, Homo sapiens
gtgcccctacagctt

SEQ ID NO: 177607 - DNA, 15 bp, Homo sapiens
agtgcccctacagct

SEQ ID NO: 177608 - DNA, 15 bp, Homo sapiens
aagtgcccctacagc

SEQ ID NO: 177609 - DNA, 15 bp, Homo sapiens
gaagtgcccctacag

SEQ ID NO: 177610 - DNA, 15 bp, Homo sapiens
ggaagtgcccctaca

SEQ ID NO: 177611 - DNA, 15 bp, Homo sapiens
aggaagtgcccctac

SEQ ID NO: 177612 - DNA, 15 bp, Homo sapiens
aaggaagtgccccta

SEQ ID NO: 177613 - DNA, 15 bp, Homo sapiens
aaaggaagtgcccct

SEQ ID NO: 177614 - DNA, 15 bp, Homo sapiens
aaaaggaagtgcccc

SEQ ID NO: 177615 - DNA, 15 bp, Homo sapiens
taaaaggaagtgccc

SEQ ID NO: 177616 - DNA, 15 bp, Homo sapiens
ctaaaaggaagtgcc

SEQ ID NO: 177617 - DNA, 15 bp, Homo sapiens
gctaaaaggaagtgc

SEQ ID NO: 177618 - DNA, 15 bp, Homo sapiens
ggctaaaaggaagtg

SEQ ID NO: 177619 - DNA, 15 bp, Homo sapiens
gggctaaaaggaagt

SEQ ID NO: 177620 - DNA, 15 bp, Homo sapiens
agggctaaaaggaag

SEQ ID NO: 177621 - DNA, 15 bp, Homo sapiens
cagggctaaaaggaa

SEQ ID NO: 177622 - DNA, 15 bp, Homo sapiens
ccagggctaaaagga

SEQ ID NO: 177623 - DNA, 15 bp, Homo sapiens
tccagggctaaaagg

SEQ ID NO: 177624 - DNA, 15 bp, Homo sapiens
gtccagggctaaaag

SEQ ID NO: 177625 - DNA, 15 bp, Homo sapiens
agtccagggctaaaa

SEQ ID NO: 177626 - DNA, 15 bp, Homo sapiens
cagtccagggctaaa

SEQ ID NO: 177627 - DNA, 15 bp, Homo sapiens
tcagtccagggctaa

SEQ ID NO: 177628 - DNA, 15 bp, Homo sapiens
gtcagtccagggcta

SEQ ID NO: 177629 - DNA, 15 bp, Homo sapiens
tgtcagtccagggct

SEQ ID NO: 177630 - DNA, 15 bp, Homo sapiens
gtgtcagtccagggc

SEQ ID NO: 177631 - DNA, 15 bp, Homo sapiens
tgtgtcagtccaggg

SEQ ID NO: 177632 - DNA, 15 bp, Homo sapiens
ctgtgtcagtccagg

SEQ ID NO: 177633 - DNA, 15 bp, Homo sapiens
gctgtgtcagtccag

SEQ ID NO: 177634 - DNA, 15 bp, Homo sapiens
agctgtgtcagtcca

SEQ ID NO: 177635 - DNA, 15 bp, Homo sapiens
cagctgtgtcagtcc

SEQ ID NO: 177636 - DNA, 15 bp, Homo sapiens
tcagctgtgtcagtc

SEQ ID NO: 177637 - DNA, 15 bp, Homo sapiens
ctcagctgtgtcagt

SEQ ID NO: 177638 - DNA, 15 bp, Homo sapiens
actcagctgtgtcag

SEQ ID NO: 177639 - DNA, 15 bp, Homo sapiens
cactcagctgtgtca

SEQ ID NO: 177640 - DNA, 15 bp, Homo sapiens
gcactcagctgtgtc

SEQ ID NO: 177641 - DNA, 15 bp, Homo sapiens
ggcactcagctgtgt

SEQ ID NO: 177642 - DNA, 15 bp, Homo sapiens
gggcactcagctgtg

SEQ ID NO: 177643 - DNA, 15 bp, Homo sapiens
cgggcactcagctgt

SEQ ID NO: 177644 - DNA, 15 bp, Homo sapiens
acgggcactcagctg

SEQ ID NO: 177645 - DNA, 15 bp, Homo sapiens
cacgggcactcagct

SEQ ID NO: 177646 - DNA, 15 bp, Homo sapiens
ccacgggcactcagc

SEQ ID NO: 177647 - DNA, 15 bp, Homo sapiens
cccacgggcactcag

SEQ ID NO: 177648 - DNA, 15 bp, Homo sapiens
gcccacgggcactca

SEQ ID NO: 177649 - DNA, 15 bp, Homo sapiens
tgcccacgggcactc

SEQ ID NO: 177650 - DNA, 15 bp, Homo sapiens
ttgcccacgggcact

SEQ ID NO: 177651 - DNA, 15 bp, Homo sapiens
cttgcccacgggcac

SEQ ID NO: 177652 - DNA, 15 bp, Homo sapiens
acttgcccacgggca

SEQ ID NO: 177653 - DNA, 15 bp, Homo sapiens
gacttgcccacgggc

SEQ ID NO: 177654 - DNA, 15 bp, Homo sapiens
ggacttgcccacggg

SEQ ID NO: 177655 - DNA, 15 bp, Homo sapiens
gggacttgcccacgg

SEQ ID NO: 177656 - DNA, 15 bp, Homo sapiens
agggacttgcccacg

SEQ ID NO: 177657 - DNA, 15 bp, Homo sapiens
aagggacttgcccac

SEQ ID NO: 177658 - DNA, 15 bp, Homo sapiens
caagggacttgccca

SEQ ID NO: 177659 - DNA, 15 bp, Homo sapiens
acaagggacttgccc

SEQ ID NO: 177660 - DNA, 15 bp, Homo sapiens
aacaagggacttgcc

SEQ ID NO: 177661 - DNA, 15 bp, Homo sapiens
caacaagggacttgc

SEQ ID NO: 177662 - DNA, 15 bp, Homo sapiens
gcaacaagggacttg

SEQ ID NO: 177663 - DNA, 15 bp, Homo sapiens
ggcaacaagggactt

SEQ ID NO: 177664 - DNA, 15 bp, Homo sapiens
aggcaacaagggact

SEQ ID NO: 177665 - DNA, 15 bp, Homo sapiens
gaggcaacaagggac

SEQ ID NO: 177666 - DNA, 15 bp, Homo sapiens
agaggcaacaaggga

SEQ ID NO: 177667 - DNA, 15 bp, Homo sapiens
aagaggcaacaaggg

SEQ ID NO: 177668 - DNA, 15 bp, Homo sapiens
aaagaggcaacaagg

SEQ ID NO: 177669 - DNA, 15 bp, Homo sapiens
gaaagaggcaacaag

SEQ ID NO: 177670 - DNA, 15 bp, Homo sapiens
agaaagaggcaacaa

SEQ ID NO: 177671 - DNA, 15 bp, Homo sapiens
aagaaagaggcaaca

SEQ ID NO: 177672 - DNA, 15 bp, Homo sapiens
caagaaagaggcaac

SEQ ID NO: 177673 - DNA, 15 bp, Homo sapiens
ccaagaaagaggcaa

SEQ ID NO: 177674 - DNA, 15 bp, Homo sapiens
gccaagaaagaggca

SEQ ID NO: 177675 - DNA, 15 bp, Homo sapiens
agccaagaaagaggc

SEQ ID NO: 177676 - DNA, 15 bp, Homo sapiens
gagccaagaaagagg

SEQ ID NO: 177677 - DNA, 15 bp, Homo sapiens
agagccaagaaagag

SEQ ID NO: 177678 - DNA, 15 bp, Homo sapiens
cagagccaagaaaga

SEQ ID NO: 177679 - DNA, 15 bp, Homo sapiens
ccagagccaagaaag

SEQ ID NO: 177680 - DNA, 15 bp, Homo sapiens
accagagccaagaaa

SEQ ID NO: 177681 - DNA, 15 bp, Homo sapiens
aaccagagccaagaa

SEQ ID NO: 177682 - DNA, 15 bp, Homo sapiens
aaaccagagccaaga

SEQ ID NO: 177683 - DNA, 15 bp, Homo sapiens
aaaaccagagccaag

SEQ ID NO: 177684 - DNA, 15 bp, Homo sapiens
aaaaaccagagccaa

SEQ ID NO: 177685 - DNA, 15 bp, Homo sapiens
gaaaaaccagagcca

SEQ ID NO: 177686 - DNA, 15 bp, Homo sapiens
ggaaaaaccagagcc

SEQ ID NO: 177687 - DNA, 15 bp, Homo sapiens
aggaaaaaccagagc

SEQ ID NO: 177688 - DNA, 15 bp, Homo sapiens
aaggaaaaaccagag

SEQ ID NO: 177689 - DNA, 15 bp, Homo sapiens
caaggaaaaaccaga

SEQ ID NO: 177690 - DNA, 15 bp, Homo sapiens
gcaaggaaaaaccag

SEQ ID NO: 177691 - DNA, 15 bp, Homo sapiens
agcaaggaaaaacca

SEQ ID NO: 177692 - DNA, 15 bp, Homo sapiens
cagcaaggaaaaacc

SEQ ID NO: 177693 - DNA, 15 bp, Homo sapiens
acagcaaggaaaaac

SEQ ID NO: 177694 - DNA, 15 bp, Homo sapiens
gacagcaaggaaaaa

SEQ ID NO: 177695 - DNA, 15 bp, Homo sapiens
agacagcaaggaaaa

SEQ ID NO: 177696 - DNA, 15 bp, Homo sapiens
aagacagcaaggaaa

SEQ ID NO: 177697 - DNA, 15 bp, Homo sapiens
caagacagcaaggaa

SEQ ID NO: 177698 - DNA, 15 bp, Homo sapiens
acaagacagcaagga

SEQ ID NO: 177699 - DNA, 15 bp, Homo sapiens
cacaagacagcaagg

SEQ ID NO: 177700 - DNA, 15 bp, Homo sapiens
tcacaagacagcaag

SEQ ID NO: 177701 - DNA, 15 bp, Homo sapiens
ctcacaagacagcaa

SEQ ID NO: 177702 - DNA, 15 bp, Homo sapiens
cctcacaagacagca

SEQ ID NO: 177703 - DNA, 15 bp, Homo sapiens
ccctcacaagacagc

SEQ ID NO: 177704 - DNA, 15 bp, Homo sapiens
cccctcacaagacag

SEQ ID NO: 177705 - DNA, 15 bp, Homo sapiens
acccctcacaagaca

SEQ ID NO: 177706 - DNA, 15 bp, Homo sapiens
gacccctcacaagac

SEQ ID NO: 177707 - DNA, 15 bp, Homo sapiens
tgacccctcacaaga

SEQ ID NO: 177708 - DNA, 15 bp, Homo sapiens
ctgacccctcacaag

SEQ ID NO: 177709 - DNA, 15 bp, Homo sapiens
tctgacccctcacaa

SEQ ID NO: 177710 - DNA, 15 bp, Homo sapiens
gtctgacccctcaca

SEQ ID NO: 177711 - DNA, 15 bp, Homo sapiens
ggtctgacccctcac

SEQ ID NO: 177712 - DNA, 15 bp, Homo sapiens
tggtctgacccctca

SEQ ID NO: 177713 - DNA, 15 bp, Homo sapiens
ctggtctgacccctc

SEQ ID NO: 177714 - DNA, 15 bp, Homo sapiens
tctggtctgacccct

SEQ ID NO: 177715 - DNA, 15 bp, Homo sapiens
atctggtctgacccc

SEQ ID NO: 177716 - DNA, 15 bp, Homo sapiens
catctggtctgaccc

SEQ ID NO: 177717 - DNA, 15 bp, Homo sapiens
tcatctggtctgacc

SEQ ID NO: 177718 - DNA, 15 bp, Homo sapiens
gtcatctggtctgac

SEQ ID NO: 177719 - DNA, 15 bp, Homo sapiens
agtcatctggtctga

SEQ ID NO: 177720 - DNA, 15 bp, Homo sapiens
aagtcatctggtctg

SEQ ID NO: 177721 - DNA, 15 bp, Homo sapiens
aaagtcatctggtct

SEQ ID NO: 177722 - DNA, 15 bp, Homo sapiens
caaagtcatctggtc

SEQ ID NO: 177723 - DNA, 15 bp, Homo sapiens
tcaaagtcatctggt

SEQ ID NO: 177724 - DNA, 15 bp, Homo sapiens
ctcaaagtcatctgg

SEQ ID NO: 177725 - DNA, 15 bp, Homo sapiens
gctcaaagtcatctg

SEQ ID NO: 177726 - DNA, 15 bp, Homo sapiens
tgctcaaagtcatct

SEQ ID NO: 177727 - DNA, 15 bp, Homo sapiens
gtgctcaaagtcatc

SEQ ID NO: 177728 - DNA, 15 bp, Homo sapiens
ggtgctcaaagtcat

SEQ ID NO: 177729 - DNA, 15 bp, Homo sapiens
tggtgctcaaagtca

SEQ ID NO: 177730 - DNA, 15 bp, Homo sapiens
ctggtgctcaaagtc

SEQ ID NO: 177731 - DNA, 15 bp, Homo sapiens
gctggtgctcaaagt

SEQ ID NO: 177732 - DNA, 15 bp, Homo sapiens
ggctggtgctcaaag

SEQ ID NO: 177733 - DNA, 15 bp, Homo sapiens
gggctggtgctcaaa

SEQ ID NO: 177734 - DNA, 15 bp, Homo sapiens
agggctggtgctcaa

SEQ ID NO: 177735 - DNA, 15 bp, Homo sapiens
aagggctggtgctca

SEQ ID NO: 177736 - DNA, 15 bp, Homo sapiens
gaagggctggtgctc

SEQ ID NO: 177737 - DNA, 15 bp, Homo sapiens
ggaagggctggtgct

SEQ ID NO: 177738 - DNA, 15 bp, Homo sapiens
tggaagggctggtgc

SEQ ID NO: 177739 - DNA, 15 bp, Homo sapiens
ctggaagggctggtg

SEQ ID NO: 177740 - DNA, 15 bp, Homo sapiens
actggaagggctggt

SEQ ID NO: 177741 - DNA, 15 bp, Homo sapiens
aactggaagggctgg

SEQ ID NO: 177742 - DNA, 15 bp, Homo sapiens
gaactggaagggctg

SEQ ID NO: 177743 - DNA, 15 bp, Homo sapiens
agaactggaagggct

SEQ ID NO: 177744 - DNA, 15 bp, Homo sapiens
aagaactggaagggc

SEQ ID NO: 177745 - DNA, 15 bp, Homo sapiens
caagaactggaaggg

SEQ ID NO: 177746 - DNA, 15 bp, Homo sapiens
tcaagaactggaagg

SEQ ID NO: 177747 - DNA, 15 bp, Homo sapiens
ttcaagaactggaag

SEQ ID NO: 177748 - DNA, 15 bp, Homo sapiens
attcaagaactggaa

SEQ ID NO: 177749 - DNA, 15 bp, Homo sapiens
aattcaagaactgga

SEQ ID NO: 177750 - DNA, 15 bp, Homo sapiens
aaattcaagaactgg

SEQ ID NO: 177751 - DNA, 15 bp, Homo sapiens
aaaattcaagaactg

SEQ ID NO: 177752 - DNA, 15 bp, Homo sapiens
gaaaattcaagaact

SEQ ID NO: 177753 - DNA, 15 bp, Homo sapiens
ggaaaattcaagaac

SEQ ID NO: 177754 - DNA, 15 bp, Homo sapiens
tggaaaattcaagaa

SEQ ID NO: 177755 - DNA, 15 bp, Homo sapiens
ctggaaaattcaaga

SEQ ID NO: 177756 - DNA, 15 bp, Homo sapiens
cctggaaaattcaag

SEQ ID NO: 177757 - DNA, 15 bp, Homo sapiens
gcctggaaaattcaa

SEQ ID NO: 177758 - DNA, 15 bp, Homo sapiens
agcctggaaaattca

SEQ ID NO: 177759 - DNA, 15 bp, Homo sapiens
tagcctggaaaattc

SEQ ID NO: 177760 - DNA, 15 bp, Homo sapiens
ctagcctggaaaatt

SEQ ID NO: 177761 - DNA, 15 bp, Homo sapiens
cctagcctggaaaat

SEQ ID NO: 177762 - DNA, 15 bp, Homo sapiens
acctagcctggaaaa

SEQ ID NO: 177763 - DNA, 15 bp, Homo sapiens
aacctagcctggaaa

SEQ ID NO: 177764 - DNA, 15 bp, Homo sapiens
caacctagcctggaa

SEQ ID NO: 177765 - DNA, 15 bp, Homo sapiens
ccaacctagcctgga

SEQ ID NO: 177766 - DNA, 15 bp, Homo sapiens
tccaacctagcctgg

SEQ ID NO: 177767 - DNA, 15 bp, Homo sapiens
ttccaacctagcctg

SEQ ID NO: 177768 - DNA, 15 bp, Homo sapiens
cttccaacctagcct

SEQ ID NO: 177769 - DNA, 15 bp, Homo sapiens
gcttccaacctagcc

SEQ ID NO: 177770 - DNA, 15 bp, Homo sapiens
ggcttccaacctagc

SEQ ID NO: 177771 - DNA, 15 bp, Homo sapiens
gggcttccaacctag

SEQ ID NO: 177772 - DNA, 15 bp, Homo sapiens
agggcttccaaccta

SEQ ID NO: 177773 - DNA, 15 bp, Homo sapiens
aagggcttccaacct

SEQ ID NO: 177774 - DNA, 15 bp, Homo sapiens
aaagggcttccaacc

SEQ ID NO: 177775 - DNA, 15 bp, Homo sapiens
aaaagggcttccaac

SEQ ID NO: 177776 - DNA, 15 bp, Homo sapiens
gaaaagggcttccaa

SEQ ID NO: 177777 - DNA, 15 bp, Homo sapiens
agaaaagggcttcca

SEQ ID NO: 177778 - DNA, 15 bp, Homo sapiens
aagaaaagggcttcc

SEQ ID NO: 177779 - DNA, 15 bp, Homo sapiens
aaagaaaagggcttc

SEQ ID NO: 177780 - DNA, 15 bp, Homo sapiens
caaagaaaagggctt

SEQ ID NO: 177781 - DNA, 15 bp, Homo sapiens
ccaaagaaaagggct

SEQ ID NO: 177782 - DNA, 15 bp, Homo sapiens
accaaagaaaagggc

SEQ ID NO: 177783 - DNA, 15 bp, Homo sapiens
caccaaagaaaaggg

SEQ ID NO: 177784 - DNA, 15 bp, Homo sapiens
ccaccaaagaaaagg

SEQ ID NO: 177785 - DNA, 15 bp, Homo sapiens
cccaccaaagaaaag

SEQ ID NO: 177786 - DNA, 15 bp, Homo sapiens
acccaccaaagaaaa

SEQ ID NO: 177787 - DNA, 15 bp, Homo sapiens
aacccaccaaagaaa

SEQ ID NO: 177788 - DNA, 15 bp, Homo sapiens
aaacccaccaaagaa

SEQ ID NO: 177789 - DNA, 15 bp, Homo sapiens
taaacccaccaaaga

SEQ ID NO: 177790 - DNA, 15 bp, Homo sapiens
ataaacccaccaaag

SEQ ID NO: 177791 - DNA, 15 bp, Homo sapiens
cataaacccaccaaa

SEQ ID NO: 177792 - DNA, 15 bp, Homo sapiens
gcataaacccaccaa

SEQ ID NO: 177793 - DNA, 15 bp, Homo sapiens
tgcataaacccacca

SEQ ID NO: 177794 - DNA, 15 bp, Homo sapiens
atgcataaacccacc

SEQ ID NO: 177795 - DNA, 15 bp, Homo sapiens
catgcataaacccac

SEQ ID NO: 177796 - DNA, 15 bp, Homo sapiens
tcatgcataaaccca

SEQ ID NO: 177797 - DNA, 15 bp, Homo sapiens
ttcatgcataaaccc

SEQ ID NO: 177798 - DNA, 15 bp, Homo sapiens
cttcatgcataaacc

SEQ ID NO: 177799 - DNA, 15 bp, Homo sapiens
ccttcatgcataaac

SEQ ID NO: 177800 - DNA, 15 bp, Homo sapiens
cccttcatgcataaa

SEQ ID NO: 177801 - DNA, 15 bp, Homo sapiens
gcccttcatgcataa

SEQ ID NO: 177802 - DNA, 15 bp, Homo sapiens
ggcccttcatgcata

SEQ ID NO: 177803 - DNA, 15 bp, Homo sapiens
cggcccttcatgcat

SEQ ID NO: 177804 - DNA, 15 bp, Homo sapiens
ccggcccttcatgca

SEQ ID NO: 177805 - DNA, 15 bp, Homo sapiens
cccggcccttcatgc

SEQ ID NO: 177806 - DNA, 15 bp, Homo sapiens
acccggcccttcatg

SEQ ID NO: 177807 - DNA, 15 bp, Homo sapiens
cacccggcccttcat

SEQ ID NO: 177808 - DNA, 15 bp, Homo sapiens
acacccggcccttca

SEQ ID NO: 177809 - DNA, 15 bp, Homo sapiens
aacacccggcccttc

SEQ ID NO: 177810 - DNA, 15 bp, Homo sapiens
aaacacccggccctt

SEQ ID NO: 177811 - DNA, 15 bp, Homo sapiens
gaaacacccggccct

SEQ ID NO: 177812 - DNA, 15 bp, Homo sapiens
agaaacacccggccc

SEQ ID NO: 177813 - DNA, 15 bp, Homo sapiens
cagaaacacccggcc

SEQ ID NO: 177814 - DNA, 15 bp, Homo sapiens
acagaaacacccggc

SEQ ID NO: 177815 - DNA, 15 bp, Homo sapiens
cacagaaacacccgg

SEQ ID NO: 177816 - DNA, 15 bp, Homo sapiens
acacagaaacacccg

SEQ ID NO: 177817 - DNA, 15 bp, Homo sapiens
aacacagaaacaccc

SEQ ID NO: 177818 - DNA, 15 bp, Homo sapiens
gaacacagaaacacc

SEQ ID NO: 177819 - DNA, 15 bp, Homo sapiens
tgaacacagaaacac

SEQ ID NO: 177820 - DNA, 15 bp, Homo sapiens
gtgaacacagaaaca

SEQ ID NO: 177821 - DNA, 15 bp, Homo sapiens
cgtgaacacagaaac

SEQ ID NO: 177822 - DNA, 15 bp, Homo sapiens
ccgtgaacacagaaa

SEQ ID NO: 177823 - DNA, 15 bp, Homo sapiens
tccgtgaacacagaa

SEQ ID NO: 177824 - DNA, 15 bp, Homo sapiens
atccgtgaacacaga

SEQ ID NO: 177825 - DNA, 15 bp, Homo sapiens
catccgtgaacacag

SEQ ID NO: 177826 - DNA, 15 bp, Homo sapiens
tcatccgtgaacaca

SEQ ID NO: 177827 - DNA, 15 bp, Homo sapiens
gtcatccgtgaacac

SEQ ID NO: 177828 - DNA, 15 bp, Homo sapiens
tgtcatccgtgaaca

SEQ ID NO: 177829 - DNA, 15 bp, Homo sapiens
gtgtcatccgtgaac

SEQ ID NO: 177830 - DNA, 15 bp, Homo sapiens
agtgtcatccgtgaa

SEQ ID NO: 177831 - DNA, 15 bp, Homo sapiens
cagtgtcatccgtga

SEQ ID NO: 177832 - DNA, 15 bp, Homo sapiens
gcagtgtcatccgtg

SEQ ID NO: 177833 - DNA, 15 bp, Homo sapiens
agcagtgtcatccgt

SEQ ID NO: 177834 - DNA, 15 bp, Homo sapiens
cagcagtgtcatccg

SEQ ID NO: 177835 - DNA, 15 bp, Homo sapiens
tcagcagtgtcatcc

SEQ ID NO: 177836 - DNA, 15 bp, Homo sapiens
atcagcagtgtcatc

SEQ ID NO: 177837 - DNA, 15 bp, Homo sapiens
gatcagcagtgtcat

SEQ ID NO: 177838 - DNA, 15 bp, Homo sapiens
ggatcagcagtgtca

SEQ ID NO: 177839 - DNA, 15 bp, Homo sapiens
gggatcagcagtgtc

SEQ ID NO: 177840 - DNA, 15 bp, Homo sapiens
tgggatcagcagtgt

SEQ ID NO: 177841 - DNA, 15 bp, Homo sapiens
atgggatcagcagtg

SEQ ID NO: 177842 - DNA, 15 bp, Homo sapiens
catgggatcagcagt

SEQ ID NO: 177843 - DNA, 15 bp, Homo sapiens
acatgggatcagcag

SEQ ID NO: 177844 - DNA, 15 bp, Homo sapiens
cacatgggatcagca

SEQ ID NO: 177845 - DNA, 15 bp, Homo sapiens
gcacatgggatcagc

SEQ ID NO: 177846 - DNA, 15 bp, Homo sapiens
agcacatgggatcag

SEQ ID NO: 177847 - DNA, 15 bp, Homo sapiens
gagcacatgggatca

SEQ ID NO: 177848 - DNA, 15 bp, Homo sapiens
agagcacatgggatc

SEQ ID NO: 177849 - DNA, 15 bp, Homo sapiens
aagagcacatgggat

SEQ ID NO: 177850 - DNA, 15 bp, Homo sapiens
caagagcacatggga

SEQ ID NO: 177851 - DNA, 15 bp, Homo sapiens
acaagagcacatggg

SEQ ID NO: 177852 - DNA, 15 bp, Homo sapiens
gacaagagcacatgg

SEQ ID NO: 177853 - DNA, 15 bp, Homo sapiens
tgacaagagcacatg

SEQ ID NO: 177854 - DNA, 15 bp, Homo sapiens
atgacaagagcacat

SEQ ID NO: 177855 - DNA, 15 bp, Homo sapiens
aatgacaagagcaca

SEQ ID NO: 177856 - DNA, 15 bp, Homo sapiens
caatgacaagagcac

SEQ ID NO: 177857 - DNA, 15 bp, Homo sapiens
acaatgacaagagca

SEQ ID NO: 177858 - DNA, 15 bp, Homo sapiens
aacaatgacaagagc

SEQ ID NO: 177859 - DNA, 15 bp, Homo sapiens
aaacaatgacaagag

SEQ ID NO: 177860 - DNA, 15 bp, Homo sapiens
aaaacaatgacaaga

SEQ ID NO: 177861 - DNA, 15 bp, Homo sapiens
gaaaacaatgacaag

SEQ ID NO: 177862 - DNA, 15 bp, Homo sapiens
ggaaaacaatgacaa

SEQ ID NO: 177863 - DNA, 15 bp, Homo sapiens
aggaaaacaatgaca

SEQ ID NO: 177864 - DNA, 15 bp, Homo sapiens
aaggaaaacaatgac

SEQ ID NO: 177865 - DNA, 15 bp, Homo sapiens
caaggaaaacaatga

SEQ ID NO: 177866 - DNA, 15 bp, Homo sapiens
ccaaggaaaacaatg

SEQ ID NO: 177867 - DNA, 15 bp, Homo sapiens
tccaaggaaaacaat

SEQ ID NO: 177868 - DNA, 15 bp, Homo sapiens
ctccaaggaaaacaa

SEQ ID NO: 177869 - DNA, 15 bp, Homo sapiens
cctccaaggaaaaca

SEQ ID NO: 177870 - DNA, 15 bp, Homo sapiens
ccctccaaggaaaac

SEQ ID NO: 177871 - DNA, 15 bp, Homo sapiens
gccctccaaggaaaa

SEQ ID NO: 177872 - DNA, 15 bp, Homo sapiens
agccctccaaggaaa

SEQ ID NO: 177873 - DNA, 15 bp, Homo sapiens
cagccctccaaggaa

SEQ ID NO: 177874 - DNA, 15 bp, Homo sapiens
tcagccctccaagga

SEQ ID NO: 177875 - DNA, 15 bp, Homo sapiens
ctcagccctccaagg

SEQ ID NO: 177876 - DNA, 15 bp, Homo sapiens
cctcagccctccaag

SEQ ID NO: 177877 - DNA, 15 bp, Homo sapiens
ccctcagccctccaa

SEQ ID NO: 177878 - DNA, 15 bp, Homo sapiens
tccctcagccctcca

SEQ ID NO: 177879 - DNA, 15 bp, Homo sapiens
atccctcagccctcc

SEQ ID NO: 177880 - DNA, 15 bp, Homo sapiens
catccctcagccctc

SEQ ID NO: 177881 - DNA, 15 bp, Homo sapiens
acatccctcagccct

SEQ ID NO: 177882 - DNA, 15 bp, Homo sapiens
cacatccctcagccc

SEQ ID NO: 177883 - DNA, 15 bp, Homo sapiens
acacatccctcagcc

SEQ ID NO: 177884 - DNA, 15 bp, Homo sapiens
cacacatccctcagc

SEQ ID NO: 177885 - DNA, 15 bp, Homo sapiens
gcacacatccctcag

SEQ ID NO: 177886 - DNA, 15 bp, Homo sapiens
agcacacatccctca

SEQ ID NO: 177887 - DNA, 15 bp, Homo sapiens
cagcacacatccctc

SEQ ID NO: 177888 - DNA, 15 bp, Homo sapiens
tcagcacacatccct

SEQ ID NO: 177889 - DNA, 15 bp, Homo sapiens
ctcagcacacatccc

SEQ ID NO: 177890 - DNA, 15 bp, Homo sapiens
actcagcacacatcc

SEQ ID NO: 177891 - DNA, 15 bp, Homo sapiens
gactcagcacacatc

SEQ ID NO: 177892 - DNA, 15 bp, Homo sapiens
tgactcagcacacat

SEQ ID NO: 177893 - DNA, 15 bp, Homo sapiens
gtgactcagcacaca

SEQ ID NO: 177894 - DNA, 15 bp, Homo sapiens
cgtgactcagcacac

SEQ ID NO: 177895 - DNA, 15 bp, Homo sapiens
gcgtgactcagcaca

SEQ ID NO: 177896 - DNA, 15 bp, Homo sapiens
tgcgtgactcagcac

SEQ ID NO: 177897 - DNA, 15 bp, Homo sapiens
gtgcgtgactcagca

SEQ ID NO: 177898 - DNA, 15 bp, Homo sapiens
tgtgcgtgactcagc

SEQ ID NO: 177899 - DNA, 15 bp, Homo sapiens
atgtgcgtgactcag

SEQ ID NO: 177900 - DNA, 15 bp, Homo sapiens
catgtgcgtgactca

SEQ ID NO: 177901 - DNA, 15 bp, Homo sapiens
gcatgtgcgtgactc

SEQ ID NO: 177902 - DNA, 15 bp, Homo sapiens
tgcatgtgcgtgact

SEQ ID NO: 177903 - DNA, 15 bp, Homo sapiens
gtgcatgtgcgtgac

SEQ ID NO: 177904 - DNA, 15 bp, Homo sapiens
tgtgcatgtgcgtga

SEQ ID NO: 177905 - DNA, 15 bp, Homo sapiens
ctgtgcatgtgcgtg

SEQ ID NO: 177906 - DNA, 15 bp, Homo sapiens
gctgtgcatgtgcgt

SEQ ID NO: 177907 - DNA, 15 bp, Homo sapiens
ggctgtgcatgtgcg

SEQ ID NO: 177908 - DNA, 15 bp, Homo sapiens
cggctgtgcatgtgc

SEQ ID NO: 177909 - DNA, 15 bp, Homo sapiens
ccggctgtgcatgtg

SEQ ID NO: 177910 - DNA, 15 bp, Homo sapiens
tccggctgtgcatgt

SEQ ID NO: 177911 - DNA, 15 bp, Homo sapiens
ctccggctgtgcatg

SEQ ID NO: 177912 - DNA, 15 bp, Homo sapiens
actccggctgtgcat

SEQ ID NO: 177913 - DNA, 15 bp, Homo sapiens
gactccggctgtgca

SEQ ID NO: 177914 - DNA, 15 bp, Homo sapiens
ggactccggctgtgc

SEQ ID NO: 177915 - DNA, 15 bp, Homo sapiens
gggactccggctgtg

SEQ ID NO: 177916 - DNA, 15 bp, Homo sapiens
agggactccggctgt

SEQ ID NO: 177917 - DNA, 15 bp, Homo sapiens
aagggactccggctg

SEQ ID NO: 177918 - DNA, 15 bp, Homo sapiens
caagggactccggct

SEQ ID NO: 177919 - DNA, 15 bp, Homo sapiens
acaagggactccggc

SEQ ID NO: 177920 - DNA, 15 bp, Homo sapiens
cacaagggactccgg

SEQ ID NO: 177921 - DNA, 15 bp, Homo sapiens
tcacaagggactccg

SEQ ID NO: 177922 - DNA, 15 bp, Homo sapiens
gtcacaagggactcc

SEQ ID NO: 177923 - DNA, 15 bp, Homo sapiens
agtcacaagggactc

SEQ ID NO: 177924 - DNA, 15 bp, Homo sapiens
tagtcacaagggact

SEQ ID NO: 177925 - DNA, 15 bp, Homo sapiens
ttagtcacaagggac

SEQ ID NO: 177926 - DNA, 15 bp, Homo sapiens
cttagtcacaaggga

SEQ ID NO: 177927 - DNA, 15 bp, Homo sapiens
gcttagtcacaaggg

SEQ ID NO: 177928 - DNA, 15 bp, Homo sapiens
agcttagtcacaagg

SEQ ID NO: 177929 - DNA, 15 bp, Homo sapiens
cagcttagtcacaag

SEQ ID NO: 177930 - DNA, 15 bp, Homo sapiens
acagcttagtcacaa

SEQ ID NO: 177931 - DNA, 15 bp, Homo sapiens
cacagcttagtcaca

SEQ ID NO: 177932 - DNA, 15 bp, Homo sapiens
gcacagcttagtcac

SEQ ID NO: 177933 - DNA, 15 bp, Homo sapiens
tgcacagcttagtca

SEQ ID NO: 177934 - DNA, 15 bp, Homo sapiens
atgcacagcttagtc

SEQ ID NO: 177935 - DNA, 15 bp, Homo sapiens
aatgcacagcttagt

SEQ ID NO: 177936 - DNA, 15 bp, Homo sapiens
aaatgcacagcttag

SEQ ID NO: 177937 - DNA, 15 bp, Homo sapiens
caaatgcacagctta

SEQ ID NO: 177938 - DNA, 15 bp, Homo sapiens
gcaaatgcacagctt

SEQ ID NO: 177939 - DNA, 15 bp, Homo sapiens
tgcaaatgcacagct

SEQ ID NO: 177940 - DNA, 15 bp, Homo sapiens
ctgcaaatgcacagc

SEQ ID NO: 177941 - DNA, 15 bp, Homo sapiens
cctgcaaatgcacag

SEQ ID NO: 177942 - DNA, 15 bp, Homo sapiens
tcctgcaaatgcaca

SEQ ID NO: 177943 - DNA, 15 bp, Homo sapiens
ctcctgcaaatgcac

SEQ ID NO: 177944 - DNA, 15 bp, Homo sapiens
gctcctgcaaatgca

SEQ ID NO: 177945 - DNA, 15 bp, Homo sapiens
cgctcctgcaaatgc

SEQ ID NO: 177946 - DNA, 15 bp, Homo sapiens
gcgctcctgcaaatg

SEQ ID NO: 177947 - DNA, 15 bp, Homo sapiens
agcgctcctgcaaat

SEQ ID NO: 177948 - DNA, 15 bp, Homo sapiens
cagcgctcctgcaaa

SEQ ID NO: 177949 - DNA, 15 bp, Homo sapiens
ccagcgctcctgcaa

SEQ ID NO: 177950 - DNA, 15 bp, Homo sapiens
gccagcgctcctgca

SEQ ID NO: 177951 - DNA, 15 bp, Homo sapiens
tgccagcgctcctgc

SEQ ID NO: 177952 - DNA, 15 bp, Homo sapiens
ctgccagcgctcctg

SEQ ID NO: 177953 - DNA, 15 bp, Homo sapiens
cctgccagcgctcct

SEQ ID NO: 177954 - DNA, 15 bp, Homo sapiens
ccctgccagcgctcc

SEQ ID NO: 177955 - DNA, 15 bp, Homo sapiens
accctgccagcgctc

SEQ ID NO: 177956 - DNA, 15 bp, Homo sapiens
gaccctgccagcgct

SEQ ID NO: 177957 - DNA, 15 bp, Homo sapiens
cgaccctgccagcgc

SEQ ID NO: 177958 - DNA, 15 bp, Homo sapiens
ccgaccctgccagcg

SEQ ID NO: 177959 - DNA, 15 bp, Homo sapiens
accgaccctgccagc

SEQ ID NO: 177960 - DNA, 15 bp, Homo sapiens
caccgaccctgccag

SEQ ID NO: 177961 - DNA, 15 bp, Homo sapiens
ccaccgaccctgcca

SEQ ID NO: 177962 - DNA, 15 bp, Homo sapiens
accaccgaccctgcc

SEQ ID NO: 177963 - DNA, 15 bp, Homo sapiens
taccaccgaccctgc

SEQ ID NO: 177964 - DNA, 15 bp, Homo sapiens
gtaccaccgaccctg

SEQ ID NO: 177965 - DNA, 15 bp, Homo sapiens
tgtaccaccgaccct

SEQ ID NO: 177966 - DNA, 15 bp, Homo sapiens
ctgtaccaccgaccc

SEQ ID NO: 177967 - DNA, 15 bp, Homo sapiens
gctgtaccaccgacc

SEQ ID NO: 177968 - DNA, 15 bp, Homo sapiens
ggctgtaccaccgac

SEQ ID NO: 177969 - DNA, 15 bp, Homo sapiens
aggctgtaccaccga

SEQ ID NO: 177970 - DNA, 15 bp, Homo sapiens
gaggctgtaccaccg

SEQ ID NO: 177971 - DNA, 15 bp, Homo sapiens
agaggctgtaccacc

SEQ ID NO: 177972 - DNA, 15 bp, Homo sapiens
cagaggctgtaccac

SEQ ID NO: 177973 - DNA, 15 bp, Homo sapiens
tcagaggctgtacca

SEQ ID NO: 177974 - DNA, 15 bp, Homo sapiens
ttcagaggctgtacc

SEQ ID NO: 177975 - DNA, 15 bp, Homo sapiens
gttcagaggctgtac

SEQ ID NO: 177976 - DNA, 15 bp, Homo sapiens
agttcagaggctgta

SEQ ID NO: 177977 - DNA, 15 bp, Homo sapiens
cagttcagaggctgt

SEQ ID NO: 177978 - DNA, 15 bp, Homo sapiens
ccagttcagaggctg

SEQ ID NO: 177979 - DNA, 15 bp, Homo sapiens
cccagttcagaggct

SEQ ID NO: 177980 - DNA, 15 bp, Homo sapiens
tcccagttcagaggc

SEQ ID NO: 177981 - DNA, 15 bp, Homo sapiens
gtcccagttcagagg

SEQ ID NO: 177982 - DNA, 15 bp, Homo sapiens
tgtcccagttcagag

SEQ ID NO: 177983 - DNA, 15 bp, Homo sapiens
ctgtcccagttcaga

SEQ ID NO: 177984 - DNA, 15 bp, Homo sapiens
gctgtcccagttcag

SEQ ID NO: 177985 - DNA, 15 bp, Homo sapiens
agctgtcccagttca

SEQ ID NO: 177986 - DNA, 15 bp, Homo sapiens
aagctgtcccagttc

SEQ ID NO: 177987 - DNA, 15 bp, Homo sapiens
caagctgtcccagtt

SEQ ID NO: 177988 - DNA, 15 bp, Homo sapiens
tcaagctgtcccagt

SEQ ID NO: 177989 - DNA, 15 bp, Homo sapiens
ttcaagctgtcccag

SEQ ID NO: 177990 - DNA, 15 bp, Homo sapiens
gttcaagctgtccca

SEQ ID NO: 177991 - DNA, 15 bp, Homo sapiens
ggttcaagctgtccc

SEQ ID NO: 177992 - DNA, 15 bp, Homo sapiens
gggttcaagctgtcc

SEQ ID NO: 177993 - DNA, 15 bp, Homo sapiens
tgggttcaagctgtc

SEQ ID NO: 177994 - DNA, 15 bp, Homo sapiens
ctgggttcaagctgt

SEQ ID NO: 177995 - DNA, 15 bp, Homo sapiens
gctgggttcaagctg

SEQ ID NO: 177996 - DNA, 15 bp, Homo sapiens
cgctgggttcaagct

SEQ ID NO: 177997 - DNA, 15 bp, Homo sapiens
acgctgggttcaagc

SEQ ID NO: 177998 - DNA, 15 bp, Homo sapiens
aacgctgggttcaag

SEQ ID NO: 177999 - DNA, 15 bp, Homo sapiens
caacgctgggttcaa

SEQ ID NO: 178000 - DNA, 15 bp, Homo sapiens
gcaacgctgggttca

SEQ ID NO: 178001 - DNA, 15 bp, Homo sapiens
ggcaacgctgggttc

SEQ ID NO: 178002 - DNA, 15 bp, Homo sapiens
aggcaacgctgggtt

SEQ ID NO: 178003 - DNA, 15 bp, Homo sapiens
caggcaacgctgggt

SEQ ID NO: 178004 - DNA, 15 bp, Homo sapiens
ccaggcaacgctggg

SEQ ID NO: 178005 - DNA, 15 bp, Homo sapiens
tccaggcaacgctgg

SEQ ID NO: 178006 - DNA, 15 bp, Homo sapiens
ctccaggcaacgctg

SEQ ID NO: 178007 - DNA, 15 bp, Homo sapiens
actccaggcaacgct

SEQ ID NO: 178008 - DNA, 15 bp, Homo sapiens
cactccaggcaacgc

SEQ ID NO: 178009 - DNA, 15 bp, Homo sapiens
ccactccaggcaacg

SEQ ID NO: 178010 - DNA, 15 bp, Homo sapiens
cccactccaggcaac

SEQ ID NO: 178011 - DNA, 15 bp, Homo sapiens
tcccactccaggcaa

SEQ ID NO: 178012 - DNA, 15 bp, Homo sapiens
ttcccactccaggca

SEQ ID NO: 178013 - DNA, 15 bp, Homo sapiens
attcccactccaggc

SEQ ID NO: 178014 - DNA, 15 bp, Homo sapiens
tattcccactccagg

SEQ ID NO: 178015 - DNA, 15 bp, Homo sapiens
ttattcccactccag

SEQ ID NO: 178016 - DNA, 15 bp, Homo sapiens
tttattcccactcca

SEQ ID NO: 178017 - DNA, 15 bp, Homo sapiens
gtttattcccactcc

SEQ ID NO: 178018 - DNA, 15 bp, Homo sapiens
ggtttattcccactc

SEQ ID NO: 178019 - DNA, 15 bp, Homo sapiens
aggtttattcccact

SEQ ID NO: 178020 - DNA, 15 bp, Homo sapiens
aaggtttattcccac

SEQ ID NO: 178021 - DNA, 15 bp, Homo sapiens
caaggtttattccca

SEQ ID NO: 178022 - DNA, 15 bp, Homo sapiens
tcaaggtttattccc

SEQ ID NO: 178023 - DNA, 15 bp, Homo sapiens
gtcaaggtttattcc

SEQ ID NO: 178024 - DNA, 15 bp, Homo sapiens
ggtcaaggtttattc

SEQ ID NO: 178025 - DNA, 15 bp, Homo sapiens
aggtcaaggtttatt

SEQ ID NO: 178026 - DNA, 15 bp, Homo sapiens
aaggtcaaggtttat

SEQ ID NO: 178027 - DNA, 15 bp, Homo sapiens
caaggtcaaggttta

SEQ ID NO: 178028 - DNA, 15 bp, Homo sapiens
gcaaggtcaaggttt

SEQ ID NO: 178029 - DNA, 15 bp, Homo sapiens
agcaaggtcaaggtt

SEQ ID NO: 178030 - DNA, 15 bp, Homo sapiens
cagcaaggtcaaggt

SEQ ID NO: 178031 - DNA, 15 bp, Homo sapiens
ccagcaaggtcaagg

SEQ ID NO: 178032 - DNA, 15 bp, Homo sapiens
gccagcaaggtcaag

SEQ ID NO: 178033 - DNA, 15 bp, Homo sapiens
cgccagcaaggtcaa

SEQ ID NO: 178034 - DNA, 15 bp, Homo sapiens
acgccagcaaggtca

SEQ ID NO: 178035 - DNA, 15 bp, Homo sapiens
cacgccagcaaggtc

SEQ ID NO: 178036 - DNA, 15 bp, Homo sapiens
ccacgccagcaaggt

SEQ ID NO: 178037 - DNA, 15 bp, Homo sapiens
cccacgccagcaagg

SEQ ID NO: 178038 - DNA, 15 bp, Homo sapiens
acccacgccagcaag

SEQ ID NO: 178039 - DNA, 15 bp, Homo sapiens
cacccacgccagcaa

SEQ ID NO: 178040 - DNA, 15 bp, Homo sapiens
tcacccacgccagca

SEQ ID NO: 178041 - DNA, 15 bp, Homo sapiens
ctcacccacgccagc

SEQ ID NO: 178042 - DNA, 15 bp, Homo sapiens
cctcacccacgccag

SEQ ID NO: 178043 - DNA, 15 bp, Homo sapiens
ccctcacccacgcca

SEQ ID NO: 178044 - DNA, 15 bp, Homo sapiens
cccctcacccacgcc

SEQ ID NO: 178045 - DNA, 15 bp, Homo sapiens
gcccctcacccacgc

SEQ ID NO: 178046 - DNA, 15 bp, Homo sapiens
tgcccctcacccacg

SEQ ID NO: 178047 - DNA, 15 bp, Homo sapiens
gtgcccctcacccac

SEQ ID NO: 178048 - DNA, 15 bp, Homo sapiens
ggtgcccctcaccca

SEQ ID NO: 178049 - DNA, 15 bp, Homo sapiens
aggtgcccctcaccc

SEQ ID NO: 178050 - DNA, 15 bp, Homo sapiens
caggtgcccctcacc

SEQ ID NO: 178051 - DNA, 15 bp, Homo sapiens
gcaggtgcccctcac

SEQ ID NO: 178052 - DNA, 15 bp, Homo sapiens
ggcaggtgcccctca

SEQ ID NO: 178053 - DNA, 15 bp, Homo sapiens
gggcaggtgcccctc

SEQ ID NO: 178054 - DNA, 15 bp, Homo sapiens
tgggcaggtgcccct

SEQ ID NO: 178055 - DNA, 15 bp, Homo sapiens
ctgggcaggtgcccc

SEQ ID NO: 178056 - DNA, 15 bp, Homo sapiens
cctgggcaggtgccc

SEQ ID NO: 178057 - DNA, 15 bp, Homo sapiens
ccctgggcaggtgcc

SEQ ID NO: 178058 - DNA, 15 bp, Homo sapiens
tccctgggcaggtgc

SEQ ID NO: 178059 - DNA, 15 bp, Homo sapiens
ctccctgggcaggtg

SEQ ID NO: 178060 - DNA, 15 bp, Homo sapiens
gctccctgggcaggt

SEQ ID NO: 178061 - DNA, 15 bp, Homo sapiens
agctccctgggcagg

SEQ ID NO: 178062 - DNA, 15 bp, Homo sapiens
tagctccctgggcag

SEQ ID NO: 178063 - DNA, 15 bp, Homo sapiens
ttagctccctgggca

SEQ ID NO: 178064 - DNA, 15 bp, Homo sapiens
gttagctccctgggc

SEQ ID NO: 178065 - DNA, 15 bp, Homo sapiens
agttagctccctggg

SEQ ID NO: 178066 - DNA, 15 bp, Homo sapiens
cagttagctccctgg

SEQ ID NO: 178067 - DNA, 15 bp, Homo sapiens
ccagttagctccctg

SEQ ID NO: 178068 - DNA, 15 bp, Homo sapiens
accagttagctccct

SEQ ID NO: 178069 - DNA, 15 bp, Homo sapiens
gaccagttagctccc

SEQ ID NO: 178070 - DNA, 15 bp, Homo sapiens
agaccagttagctcc

SEQ ID NO: 178071 - DNA, 15 bp, Homo sapiens
cagaccagttagctc

SEQ ID NO: 178072 - DNA, 15 bp, Homo sapiens
ccagaccagttagct

SEQ ID NO: 178073 - DNA, 15 bp, Homo sapiens
tccagaccagttagc

SEQ ID NO: 178074 - DNA, 15 bp, Homo sapiens
gtccagaccagttag

SEQ ID NO: 178075 - DNA, 15 bp, Homo sapiens
agtccagaccagtta

SEQ ID NO: 178076 - DNA, 15 bp, Homo sapiens
gagtccagaccagtt

SEQ ID NO: 178077 - DNA, 15 bp, Homo sapiens
tgagtccagaccagt

SEQ ID NO: 178078 - DNA, 15 bp, Homo sapiens
atgagtccagaccag

SEQ ID NO: 178079 - DNA, 15 bp, Homo sapiens
tatgagtccagacca

SEQ ID NO: 178080 - DNA, 15 bp, Homo sapiens
gtatgagtccagacc

SEQ ID NO: 178081 - DNA, 15 bp, Homo sapiens
tgtatgagtccagac

SEQ ID NO: 178082 - DNA, 15 bp, Homo sapiens
ctgtatgagtccaga

SEQ ID NO: 178083 - DNA, 15 bp, Homo sapiens
actgtatgagtccag

SEQ ID NO: 178084 - DNA, 15 bp, Homo sapiens
cactgtatgagtcca

SEQ ID NO: 178085 - DNA, 15 bp, Homo sapiens
gcactgtatgagtcc

SEQ ID NO: 178086 - DNA, 15 bp, Homo sapiens
agcactgtatgagtc

SEQ ID NO: 178087 - DNA, 15 bp, Homo sapiens
gagcactgtatgagt

SEQ ID NO: 178088 - DNA, 15 bp, Homo sapiens
agagcactgtatgag

SEQ ID NO: 178089 - DNA, 15 bp, Homo sapiens
gagagcactgtatga

SEQ ID NO: 178090 - DNA, 15 bp, Homo sapiens
ggagagcactgtatg

SEQ ID NO: 178091 - DNA, 15 bp, Homo sapiens
aggagagcactgtat

SEQ ID NO: 178092 - DNA, 15 bp, Homo sapiens
aaggagagcactgta

SEQ ID NO: 178093 - DNA, 15 bp, Homo sapiens
gaaggagagcactgt

SEQ ID NO: 178094 - DNA, 15 bp, Homo sapiens
agaaggagagcactg

SEQ ID NO: 178095 - DNA, 15 bp, Homo sapiens
cagaaggagagcact

SEQ ID NO: 178096 - DNA, 15 bp, Homo sapiens
acagaaggagagcac

SEQ ID NO: 178097 - DNA, 15 bp, Homo sapiens
gacagaaggagagca

SEQ ID NO: 178098 - DNA, 15 bp, Homo sapiens
ggacagaaggagagc

SEQ ID NO: 178099 - DNA, 15 bp, Homo sapiens
tggacagaaggagag

SEQ ID NO: 178100 - DNA, 15 bp, Homo sapiens
atggacagaaggaga

SEQ ID NO: 178101 - DNA, 15 bp, Homo sapiens
aatggacagaaggag

SEQ ID NO: 178102 - DNA, 15 bp, Homo sapiens
aaatggacagaagga

SEQ ID NO: 178103 - DNA, 15 bp, Homo sapiens
gaaatggacagaagg

SEQ ID NO: 178104 - DNA, 15 bp, Homo sapiens
tgaaatggacagaag

SEQ ID NO: 178105 - DNA, 15 bp, Homo sapiens
ctgaaatggacagaa

SEQ ID NO: 178106 - DNA, 15 bp, Homo sapiens
actgaaatggacaga

SEQ ID NO: 178107 - DNA, 15 bp, Homo sapiens
tactgaaatggacag

SEQ ID NO: 178108 - DNA, 15 bp, Homo sapiens
atactgaaatggaca

SEQ ID NO: 178109 - DNA, 15 bp, Homo sapiens
catactgaaatggac

SEQ ID NO: 178110 - DNA, 15 bp, Homo sapiens
gcatactgaaatgga

SEQ ID NO: 178111 - DNA, 15 bp, Homo sapiens
agcatactgaaatgg

SEQ ID NO: 178112 - DNA, 15 bp, Homo sapiens
cagcatactgaaatg

SEQ ID NO: 178113 - DNA, 15 bp, Homo sapiens
ccagcatactgaaat

SEQ ID NO: 178114 - DNA, 15 bp, Homo sapiens
gccagcatactgaaa

SEQ ID NO: 178115 - DNA, 15 bp, Homo sapiens
agccagcatactgaa

SEQ ID NO: 178116 - DNA, 15 bp, Homo sapiens
cagccagcatactga

SEQ ID NO: 178117 - DNA, 15 bp, Homo sapiens
acagccagcatactg

SEQ ID NO: 178118 - DNA, 15 bp, Homo sapiens
gacagccagcatact

SEQ ID NO: 178119 - DNA, 15 bp, Homo sapiens
tgacagccagcatac

SEQ ID NO: 178120 - DNA, 15 bp, Homo sapiens
ctgacagccagcata

SEQ ID NO: 178121 - DNA, 15 bp, Homo sapiens
gctgacagccagcat

SEQ ID NO: 178122 - DNA, 15 bp, Homo sapiens
agctgacagccagca

SEQ ID NO: 178123 - DNA, 15 bp, Homo sapiens
aagctgacagccagc

SEQ ID NO: 178124 - DNA, 15 bp, Homo sapiens
aaagctgacagccag

SEQ ID NO: 178125 - DNA, 15 bp, Homo sapiens
caaagctgacagcca

SEQ ID NO: 178126 - DNA, 15 bp, Homo sapiens
acaaagctgacagcc

SEQ ID NO: 178127 - DNA, 15 bp, Homo sapiens
aacaaagctgacagc

SEQ ID NO: 178128 - DNA, 15 bp, Homo sapiens
aaacaaagctgacag

SEQ ID NO: 178129 - DNA, 15 bp, Homo sapiens
taaacaaagctgaca

SEQ ID NO: 178130 - DNA, 15 bp, Homo sapiens
ataaacaaagctgac

SEQ ID NO: 178131 - DNA, 15 bp, Homo sapiens
cataaacaaagctga

SEQ ID NO: 178132 - DNA, 15 bp, Homo sapiens
gcataaacaaagctg

SEQ ID NO: 178133 - DNA, 15 bp, Homo sapiens
tgcataaacaaagct

SEQ ID NO: 178134 - DNA, 15 bp, Homo sapiens
atgcataaacaaagc

SEQ ID NO: 178135 - DNA, 15 bp, Homo sapiens
tatgcataaacaaag

SEQ ID NO: 178136 - DNA, 15 bp, Homo sapiens
ctatgcataaacaaa

SEQ ID NO: 178137 - DNA, 15 bp, Homo sapiens
tctatgcataaacaa

SEQ ID NO: 178138 - DNA, 15 bp, Homo sapiens
atctatgcataaaca

SEQ ID NO: 178139 - DNA, 15 bp, Homo sapiens
catctatgcataaac

SEQ ID NO: 178140 - DNA, 15 bp, Homo sapiens
tcatctatgcataaa

SEQ ID NO: 178141 - DNA, 15 bp, Homo sapiens
ttcatctatgcataa

SEQ ID NO: 178142 - DNA, 15 bp, Homo sapiens
attcatctatgcata

SEQ ID NO: 178143 - DNA, 15 bp, Homo sapiens
aattcatctatgcat

SEQ ID NO: 178144 - DNA, 15 bp, Homo sapiens
taattcatctatgca

SEQ ID NO: 178145 - DNA, 15 bp, Homo sapiens
gtaattcatctatgc

SEQ ID NO: 178146 - DNA, 15 bp, Homo sapiens
agtaattcatctatg

SEQ ID NO: 178147 - DNA, 15 bp, Homo sapiens
gagtaattcatctat

SEQ ID NO: 178148 - DNA, 15 bp, Homo sapiens
agagtaattcatcta

SEQ ID NO: 178149 - DNA, 15 bp, Homo sapiens
gagagtaattcatct

SEQ ID NO: 178150 - DNA, 15 bp, Homo sapiens
tgagagtaattcatc

SEQ ID NO: 178151 - DNA, 15 bp, Homo sapiens
atgagagtaattcat

SEQ ID NO: 178152 - DNA, 15 bp, Homo sapiens
aatgagagtaattca

SEQ ID NO: 178153 - DNA, 15 bp, Homo sapiens
aaatgagagtaattc

SEQ ID NO: 178154 - DNA, 15 bp, Homo sapiens
gaaatgagagtaatt

SEQ ID NO: 178155 - DNA, 15 bp, Homo sapiens
tgaaatgagagtaat

SEQ ID NO: 178156 - DNA, 15 bp, Homo sapiens
ctgaaatgagagtaa

SEQ ID NO: 178157 - DNA, 15 bp, Homo sapiens
tctgaaatgagagta

SEQ ID NO: 178158 - DNA, 15 bp, Homo sapiens
atctgaaatgagagt

SEQ ID NO: 178159 - DNA, 15 bp, Homo sapiens
aatctgaaatgagag

SEQ ID NO: 178160 - DNA, 15 bp, Homo sapiens
taatctgaaatgaga

SEQ ID NO: 178161 - DNA, 15 bp, Homo sapiens
ataatctgaaatgag

SEQ ID NO: 178162 - DNA, 15 bp, Homo sapiens
gataatctgaaatga

SEQ ID NO: 178163 - DNA, 15 bp, Homo sapiens
cgataatctgaaatg

SEQ ID NO: 178164 - DNA, 15 bp, Homo sapiens
acgataatctgaaat

SEQ ID NO: 178165 - DNA, 15 bp, Homo sapiens
cacgataatctgaaa

SEQ ID NO: 178166 - DNA, 15 bp, Homo sapiens
ccacgataatctgaa

SEQ ID NO: 178167 - DNA, 15 bp, Homo sapiens
tccacgataatctga

SEQ ID NO: 178168 - DNA, 15 bp, Homo sapiens
ttccacgataatctg

SEQ ID NO: 178169 - DNA, 15 bp, Homo sapiens
tttccacgataatct

SEQ ID NO: 178170 - DNA, 15 bp, Homo sapiens
ttttccacgataatc

SEQ ID NO: 178171 - DNA, 15 bp, Homo sapiens
attttccacgataat

SEQ ID NO: 178172 - DNA, 15 bp, Homo sapiens
gattttccacgataa

SEQ ID NO: 178173 - DNA, 15 bp, Homo sapiens
agattttccacgata

SEQ ID NO: 178174 - DNA, 15 bp, Homo sapiens
aagattttccacgat

SEQ ID NO: 178175 - DNA, 15 bp, Homo sapiens
caagattttccacga

SEQ ID NO: 178176 - DNA, 15 bp, Homo sapiens
gcaagattttccacg

SEQ ID NO: 178177 - DNA, 15 bp, Homo sapiens
agcaagattttccac

SEQ ID NO: 178178 - DNA, 15 bp, Homo sapiens
cagcaagattttcca

SEQ ID NO: 178179 - DNA, 15 bp, Homo sapiens
acagcaagattttcc

SEQ ID NO: 178180 - DNA, 15 bp, Homo sapiens
gacagcaagattttc

SEQ ID NO: 178181 - DNA, 15 bp, Homo sapiens
tgacagcaagatttt

SEQ ID NO: 178182 - DNA, 15 bp, Homo sapiens
ttgacagcaagattt

SEQ ID NO: 178183 - DNA, 15 bp, Homo sapiens
cttgacagcaagatt

SEQ ID NO: 178184 - DNA, 15 bp, Homo sapiens
acttgacagcaagat

SEQ ID NO: 178185 - DNA, 15 bp, Homo sapiens
aacttgacagcaaga

SEQ ID NO: 178186 - DNA, 15 bp, Homo sapiens
gaacttgacagcaag

SEQ ID NO: 178187 - DNA, 15 bp, Homo sapiens
agaacttgacagcaa

SEQ ID NO: 178188 - DNA, 15 bp, Homo sapiens
aagaacttgacagca

SEQ ID NO: 178189 - DNA, 15 bp, Homo sapiens
taagaacttgacagc

SEQ ID NO: 178190 - DNA, 15 bp, Homo sapiens
ctaagaacttgacag

SEQ ID NO: 178191 - DNA, 15 bp, Homo sapiens
cctaagaacttgaca

SEQ ID NO: 178192 - DNA, 15 bp, Homo sapiens
tcctaagaacttgac

SEQ ID NO: 178193 - DNA, 15 bp, Homo sapiens
gtcctaagaacttga

SEQ ID NO: 178194 - DNA, 15 bp, Homo sapiens
tgtcctaagaacttg

SEQ ID NO: 178195 - DNA, 15 bp, Homo sapiens
ctgtcctaagaactt

SEQ ID NO: 178196 - DNA, 15 bp, Homo sapiens
cctgtcctaagaact

SEQ ID NO: 178197 - DNA, 15 bp, Homo sapiens
tcctgtcctaagaac

SEQ ID NO: 178198 - DNA, 15 bp, Homo sapiens
atcctgtcctaagaa

SEQ ID NO: 178199 - DNA, 15 bp, Homo sapiens
aatcctgtcctaaga

SEQ ID NO: 178200 - DNA, 15 bp, Homo sapiens
taatcctgtcctaag

SEQ ID NO: 178201 - DNA, 15 bp, Homo sapiens
ttaatcctgtcctaa

SEQ ID NO: 178202 - DNA, 15 bp, Homo sapiens
cttaatcctgtccta

SEQ ID NO: 178203 - DNA, 15 bp, Homo sapiens
acttaatcctgtcct

SEQ ID NO: 178204 - DNA, 15 bp, Homo sapiens
tacttaatcctgtcc

SEQ ID NO: 178205 - DNA, 15 bp, Homo sapiens
ctacttaatcctgtc

SEQ ID NO: 178206 - DNA, 15 bp, Homo sapiens
tctacttaatcctgt

SEQ ID NO: 178207 - DNA, 15 bp, Homo sapiens
ttctacttaatcctg

SEQ ID NO: 178208 - DNA, 15 bp, Homo sapiens
attctacttaatcct

SEQ ID NO: 178209 - DNA, 15 bp, Homo sapiens
tattctacttaatcc

SEQ ID NO: 178210 - DNA, 15 bp, Homo sapiens
ctattctacttaatc

SEQ ID NO: 178211 - DNA, 15 bp, Homo sapiens
cctattctacttaat

SEQ ID NO: 178212 - DNA, 15 bp, Homo sapiens
acctattctacttaa

SEQ ID NO: 178213 - DNA, 15 bp, Homo sapiens
cacctattctactta

SEQ ID NO: 178214 - DNA, 15 bp, Homo sapiens
tcacctattctactt

SEQ ID NO: 178215 - DNA, 15 bp, Homo sapiens
atcacctattctact

SEQ ID NO: 178216 - DNA, 15 bp, Homo sapiens
tatcacctattctac

SEQ ID NO: 178217 - DNA, 15 bp, Homo sapiens
ttatcacctattcta

SEQ ID NO: 178218 - DNA, 15 bp, Homo sapiens
tttatcacctattct

SEQ ID NO: 178219 - DNA, 15 bp, Homo sapiens
ctttatcacctattc

SEQ ID NO: 178220 - DNA, 15 bp, Homo sapiens
cctttatcacctatt

SEQ ID NO: 178221 - DNA, 15 bp, Homo sapiens
acctttatcacctat

SEQ ID NO: 178222 - DNA, 15 bp, Homo sapiens
gacctttatcaccta

SEQ ID NO: 178223 - DNA, 15 bp, Homo sapiens
tgacctttatcacct

SEQ ID NO: 178224 - DNA, 15 bp, Homo sapiens
atgacctttatcacc

SEQ ID NO: 178225 - DNA, 15 bp, Homo sapiens
aatgacctttatcac

SEQ ID NO: 178226 - DNA, 15 bp, Homo sapiens
caatgacctttatca

SEQ ID NO: 178227 - DNA, 15 bp, Homo sapiens
ccaatgacctttatc

SEQ ID NO: 178228 - DNA, 15 bp, Homo sapiens
gccaatgacctttat

SEQ ID NO: 178229 - DNA, 15 bp, Homo sapiens
tgccaatgaccttta

SEQ ID NO: 178230 - DNA, 15 bp, Homo sapiens
atgccaatgaccttt

SEQ ID NO: 178231 - DNA, 15 bp, Homo sapiens
aatgccaatgacctt

SEQ ID NO: 178232 - DNA, 15 bp, Homo sapiens
taatgccaatgacct

SEQ ID NO: 178233 - DNA, 15 bp, Homo sapiens
ataatgccaatgacc

SEQ ID NO: 178234 - DNA, 15 bp, Homo sapiens
aataatgccaatgac

SEQ ID NO: 178235 - DNA, 15 bp, Homo sapiens
aaataatgccaatga

SEQ ID NO: 178236 - DNA, 15 bp, Homo sapiens
taaataatgccaatg

SEQ ID NO: 178237 - DNA, 15 bp, Homo sapiens
gtaaataatgccaat

SEQ ID NO: 178238 - DNA, 15 bp, Homo sapiens
tgtaaataatgccaa

SEQ ID NO: 178239 - DNA, 15 bp, Homo sapiens
ttgtaaataatgcca

SEQ ID NO: 178240 - DNA, 15 bp, Homo sapiens
attgtaaataatgcc

SEQ ID NO: 178241 - DNA, 15 bp, Homo sapiens
gattgtaaataatgc

SEQ ID NO: 178242 - DNA, 15 bp, Homo sapiens
agattgtaaataatg

SEQ ID NO: 178243 - DNA, 15 bp, Homo sapiens
gagattgtaaataat

SEQ ID NO: 178244 - DNA, 15 bp, Homo sapiens
agagattgtaaataa

SEQ ID NO: 178245 - DNA, 15 bp, Homo sapiens
aagagattgtaaata

SEQ ID NO: 178246 - DNA, 15 bp, Homo sapiens
caagagattgtaaat

SEQ ID NO: 178247 - DNA, 15 bp, Homo sapiens
tcaagagattgtaaa

SEQ ID NO: 178248 - DNA, 15 bp, Homo sapiens
gtcaagagattgtaa

SEQ ID NO: 178249 - DNA, 15 bp, Homo sapiens
agtcaagagattgta

SEQ ID NO: 178250 - DNA, 15 bp, Homo sapiens
aagtcaagagattgt

SEQ ID NO: 178251 - DNA, 15 bp, Homo sapiens
aaagtcaagagattg

SEQ ID NO: 178252 - DNA, 15 bp, Homo sapiens
gaaagtcaagagatt

SEQ ID NO: 178253 - DNA, 15 bp, Homo sapiens
tgaaagtcaagagat

SEQ ID NO: 178254 - DNA, 15 bp, Homo sapiens
atgaaagtcaagaga

SEQ ID NO: 178255 - DNA, 15 bp, Homo sapiens
aatgaaagtcaagag

SEQ ID NO: 178256 - DNA, 15 bp, Homo sapiens
gaatgaaagtcaaga

SEQ ID NO: 178257 - DNA, 15 bp, Homo sapiens
tgaatgaaagtcaag

SEQ ID NO: 178258 - DNA, 15 bp, Homo sapiens
gtgaatgaaagtcaa

SEQ ID NO: 178259 - DNA, 15 bp, Homo sapiens
ggtgaatgaaagtca

SEQ ID NO: 178260 - DNA, 15 bp, Homo sapiens
gggtgaatgaaagtc

SEQ ID NO: 178261 - DNA, 15 bp, Homo sapiens
ggggtgaatgaaagt

SEQ ID NO: 178262 - DNA, 15 bp, Homo sapiens
gggggtgaatgaaag

SEQ ID NO: 178263 - DNA, 15 bp, Homo sapiens
tgggggtgaatgaaa

SEQ ID NO: 178264 - DNA, 15 bp, Homo sapiens
atgggggtgaatgaa

SEQ ID NO: 178265 - DNA, 15 bp, Homo sapiens
gatgggggtgaatga

SEQ ID NO: 178266 - DNA, 15 bp, Homo sapiens
agatgggggtgaatg

SEQ ID NO: 178267 - DNA, 15 bp, Homo sapiens
cagatgggggtgaat

SEQ ID NO: 178268 - DNA, 15 bp, Homo sapiens
gcagatgggggtgaa

SEQ ID NO: 178269 - DNA, 15 bp, Homo sapiens
agcagatgggggtga

SEQ ID NO: 178270 - DNA, 15 bp, Homo sapiens
cagcagatgggggtg

SEQ ID NO: 178271 - DNA, 15 bp, Homo sapiens
acagcagatgggggt

SEQ ID NO: 178272 - DNA, 15 bp, Homo sapiens
tacagcagatggggg

SEQ ID NO: 178273 - DNA, 15 bp, Homo sapiens
ctacagcagatgggg

SEQ ID NO: 178274 - DNA, 15 bp, Homo sapiens
tctacagcagatggg

SEQ ID NO: 178275 - DNA, 15 bp, Homo sapiens
gtctacagcagatgg

SEQ ID NO: 178276 - DNA, 15 bp, Homo sapiens
tgtctacagcagatg

SEQ ID NO: 178277 - DNA, 15 bp, Homo sapiens
ttgtctacagcagat

SEQ ID NO: 178278 - DNA, 15 bp, Homo sapiens
cttgtctacagcaga

SEQ ID NO: 178279 - DNA, 15 bp, Homo sapiens
gcttgtctacagcag

SEQ ID NO: 178280 - DNA, 15 bp, Homo sapiens
agcttgtctacagca

SEQ ID NO: 178281 - DNA, 15 bp, Homo sapiens
cagcttgtctacagc

SEQ ID NO: 178282 - DNA, 15 bp, Homo sapiens
ccagcttgtctacag

SEQ ID NO: 178283 - DNA, 15 bp, Homo sapiens
tccagcttgtctaca

SEQ ID NO: 178284 - DNA, 15 bp, Homo sapiens
atccagcttgtctac

SEQ ID NO: 178285 - DNA, 15 bp, Homo sapiens
catccagcttgtcta

SEQ ID NO: 178286 - DNA, 15 bp, Homo sapiens
gcatccagcttgtct

SEQ ID NO: 178287 - DNA, 15 bp, Homo sapiens
agcatccagcttgtc

SEQ ID NO: 178288 - DNA, 15 bp, Homo sapiens
aagcatccagcttgt

SEQ ID NO: 178289 - DNA, 15 bp, Homo sapiens
taagcatccagcttg

SEQ ID NO: 178290 - DNA, 15 bp, Homo sapiens
gtaagcatccagctt

SEQ ID NO: 178291 - DNA, 15 bp, Homo sapiens
tgtaagcatccagct

SEQ ID NO: 178292 - DNA, 15 bp, Homo sapiens
ttgtaagcatccagc

SEQ ID NO: 178293 - DNA, 15 bp, Homo sapiens
cttgtaagcatccag

SEQ ID NO: 178294 - DNA, 15 bp, Homo sapiens
tcttgtaagcatcca

SEQ ID NO: 178295 - DNA, 15 bp, Homo sapiens
ctcttgtaagcatcc

SEQ ID NO: 178296 - DNA, 15 bp, Homo sapiens
gctcttgtaagcatc

SEQ ID NO: 178297 - DNA, 15 bp, Homo sapiens
cgctcttgtaagcat

SEQ ID NO: 178298 - DNA, 15 bp, Homo sapiens
ccgctcttgtaagca

SEQ ID NO: 178299 - DNA, 15 bp, Homo sapiens
gccgctcttgtaagc

SEQ ID NO: 178300 - DNA, 15 bp, Homo sapiens
tgccgctcttgtaag

SEQ ID NO: 178301 - DNA, 15 bp, Homo sapiens
ttgccgctcttgtaa

SEQ ID NO: 178302 - DNA, 15 bp, Homo sapiens
tttgccgctcttgta

SEQ ID NO: 178303 - DNA, 15 bp, Homo sapiens
ctttgccgctcttgt

SEQ ID NO: 178304 - DNA, 15 bp, Homo sapiens
tctttgccgctcttg

SEQ ID NO: 178305 - DNA, 15 bp, Homo sapiens
gtctttgccgctctt

SEQ ID NO: 178306 - DNA, 15 bp, Homo sapiens
agtctttgccgctct

SEQ ID NO: 178307 - DNA, 15 bp, Homo sapiens
aagtctttgccgctc

SEQ ID NO: 178308 - DNA, 15 bp, Homo sapiens
caagtctttgccgct

SEQ ID NO: 178309 - DNA, 15 bp, Homo sapiens
ccaagtctttgccgc

SEQ ID NO: 178310 - DNA, 15 bp, Homo sapiens
cccaagtctttgccg

SEQ ID NO: 178311 - DNA, 15 bp, Homo sapiens
tcccaagtctttgcc

SEQ ID NO: 178312 - DNA, 15 bp, Homo sapiens
gtcccaagtctttgc

SEQ ID NO: 178313 - DNA, 15 bp, Homo sapiens
agtcccaagtctttg

SEQ ID NO: 178314 - DNA, 15 bp, Homo sapiens
aagtcccaagtcttt

SEQ ID NO: 178315 - DNA, 15 bp, Homo sapiens
taagtcccaagtctt

SEQ ID NO: 178316 - DNA, 15 bp, Homo sapiens
ctaagtcccaagtct

SEQ ID NO: 178317 - DNA, 15 bp, Homo sapiens
tctaagtcccaagtc

SEQ ID NO: 178318 - DNA, 15 bp, Homo sapiens
ttctaagtcccaagt

SEQ ID NO: 178319 - DNA, 15 bp, Homo sapiens
attctaagtcccaag

SEQ ID NO: 178320 - DNA, 15 bp, Homo sapiens
gattctaagtcccaa

SEQ ID NO: 178321 - DNA, 15 bp, Homo sapiens
tgattctaagtccca

SEQ ID NO: 178322 - DNA, 15 bp, Homo sapiens
ctgattctaagtccc

SEQ ID NO: 178323 - DNA, 15 bp, Homo sapiens
cctgattctaagtcc

SEQ ID NO: 178324 - DNA, 15 bp, Homo sapiens
gcctgattctaagtc

SEQ ID NO: 178325 - DNA, 15 bp, Homo sapiens
tgcctgattctaagt

SEQ ID NO: 178326 - DNA, 15 bp, Homo sapiens
gtgcctgattctaag

SEQ ID NO: 178327 - DNA, 15 bp, Homo sapiens
tgtgcctgattctaa

SEQ ID NO: 178328 - DNA, 15 bp, Homo sapiens
gtgtgcctgattcta

SEQ ID NO: 178329 - DNA, 15 bp, Homo sapiens
ggtgtgcctgattct

SEQ ID NO: 178330 - DNA, 15 bp, Homo sapiens
gggtgtgcctgattc

SEQ ID NO: 178331 - DNA, 15 bp, Homo sapiens
tgggtgtgcctgatt

SEQ ID NO: 178332 - DNA, 15 bp, Homo sapiens
ttgggtgtgcctgat

SEQ ID NO: 178333 - DNA, 15 bp, Homo sapiens
cttgggtgtgcctga

SEQ ID NO: 178334 - DNA, 15 bp, Homo sapiens
acttgggtgtgcctg

SEQ ID NO: 178335 - DNA, 15 bp, Homo sapiens
aacttgggtgtgcct

SEQ ID NO: 178336 - DNA, 15 bp, Homo sapiens
aaacttgggtgtgcc

SEQ ID NO: 178337 - DNA, 15 bp, Homo sapiens
caaacttgggtgtgc

SEQ ID NO: 178338 - DNA, 15 bp, Homo sapiens
tcaaacttgggtgtg

SEQ ID NO: 178339 - DNA, 15 bp, Homo sapiens
ttcaaacttgggtgt

SEQ ID NO: 178340 - DNA, 15 bp, Homo sapiens
cttcaaacttgggtg

SEQ ID NO: 178341 - DNA, 15 bp, Homo sapiens
gcttcaaacttgggt

SEQ ID NO: 178342 - DNA, 15 bp, Homo sapiens
ggcttcaaacttggg

SEQ ID NO: 178343 - DNA, 15 bp, Homo sapiens
gggcttcaaacttgg

SEQ ID NO: 178344 - DNA, 15 bp, Homo sapiens
ggggcttcaaacttg

SEQ ID NO: 178345 - DNA, 15 bp, Homo sapiens
cggggcttcaaactt

SEQ ID NO: 178346 - DNA, 15 bp, Homo sapiens
gcggggcttcaaact

SEQ ID NO: 178347 - DNA, 15 bp, Homo sapiens
cgcggggcttcaaac

SEQ ID NO: 178348 - DNA, 15 bp, Homo sapiens
acgcggggcttcaaa

SEQ ID NO: 178349 - DNA, 15 bp, Homo sapiens
cacgcggggcttcaa

SEQ ID NO: 178350 - DNA, 15 bp, Homo sapiens
ccacgcggggcttca

SEQ ID NO: 178351 - DNA, 15 bp, Homo sapiens
accacgcggggcttc

SEQ ID NO: 178352 - DNA, 15 bp, Homo sapiens
caccacgcggggctt

SEQ ID NO: 178353 - DNA, 15 bp, Homo sapiens
gcaccacgcggggct

SEQ ID NO: 178354 - DNA, 15 bp, Homo sapiens
agcaccacgcggggc

SEQ ID NO: 178355 - DNA, 15 bp, Homo sapiens
aagcaccacgcgggg

SEQ ID NO: 178356 - DNA, 15 bp, Homo sapiens
aaagcaccacgcggg

SEQ ID NO: 178357 - DNA, 15 bp, Homo sapiens
gaaagcaccacgcgg

SEQ ID NO: 178358 - DNA, 15 bp, Homo sapiens
agaaagcaccacgcg

SEQ ID NO: 178359 - DNA, 15 bp, Homo sapiens
cagaaagcaccacgc

SEQ ID NO: 178360 - DNA, 15 bp, Homo sapiens
ccagaaagcaccacg

SEQ ID NO: 178361 - DNA, 15 bp, Homo sapiens
gccagaaagcaccac

SEQ ID NO: 178362 - DNA, 15 bp, Homo sapiens
agccagaaagcacca

SEQ ID NO: 178363 - DNA, 15 bp, Homo sapiens
cagccagaaagcacc

SEQ ID NO: 178364 - DNA, 15 bp, Homo sapiens
gcagccagaaagcac

SEQ ID NO: 178365 - DNA, 15 bp, Homo sapiens
cgcagccagaaagca

SEQ ID NO: 178366 - DNA, 15 bp, Homo sapiens
acgcagccagaaagc

SEQ ID NO: 178367 - DNA, 15 bp, Homo sapiens
gacgcagccagaaag

SEQ ID NO: 178368 - DNA, 15 bp, Homo sapiens
tgacgcagccagaaa

SEQ ID NO: 178369 - DNA, 15 bp, Homo sapiens
gtgacgcagccagaa

SEQ ID NO: 178370 - DNA, 15 bp, Homo sapiens
ggtgacgcagccaga

SEQ ID NO: 178371 - DNA, 15 bp, Homo sapiens
aggtgacgcagccag

SEQ ID NO: 178372 - DNA, 15 bp, Homo sapiens
aaggtgacgcagcca

SEQ ID NO: 178373 - DNA, 15 bp, Homo sapiens
caaggtgacgcagcc

SEQ ID NO: 178374 - DNA, 15 bp, Homo sapiens
tcaaggtgacgcagc

SEQ ID NO: 178375 - DNA, 15 bp, Homo sapiens
ttcaaggtgacgcag

SEQ ID NO: 178376 - DNA, 15 bp, Homo sapiens
gttcaaggtgacgca

SEQ ID NO: 178377 - DNA, 15 bp, Homo sapiens
cgttcaaggtgacgc

SEQ ID NO: 178378 - DNA, 15 bp, Homo sapiens
gcgttcaaggtgacg

SEQ ID NO: 178379 - DNA, 15 bp, Homo sapiens
agcgttcaaggtgac

SEQ ID NO: 178380 - DNA, 15 bp, Homo sapiens
aagcgttcaaggtga

SEQ ID NO: 178381 - DNA, 15 bp, Homo sapiens
caagcgttcaaggtg

SEQ ID NO: 178382 - DNA, 15 bp, Homo sapiens
gcaagcgttcaaggt

SEQ ID NO: 178383 - DNA, 15 bp, Homo sapiens
agcaagcgttcaagg

SEQ ID NO: 178384 - DNA, 15 bp, Homo sapiens
aagcaagcgttcaag

SEQ ID NO: 178385 - DNA, 15 bp, Homo sapiens
gaagcaagcgttcaa

SEQ ID NO: 178386 - DNA, 15 bp, Homo sapiens
ggaagcaagcgttca

SEQ ID NO: 178387 - DNA, 15 bp, Homo sapiens
gggaagcaagcgttc

SEQ ID NO: 178388 - DNA, 15 bp, Homo sapiens
ggggaagcaagcgtt

SEQ ID NO: 178389 - DNA, 15 bp, Homo sapiens
tggggaagcaagcgt

SEQ ID NO: 178390 - DNA, 15 bp, Homo sapiens
ttggggaagcaagcg

SEQ ID NO: 178391 - DNA, 15 bp, Homo sapiens
cttggggaagcaagc

SEQ ID NO: 178392 - DNA, 15 bp, Homo sapiens
acttggggaagcaag

SEQ ID NO: 178393 - DNA, 15 bp, Homo sapiens
gacttggggaagcaa

SEQ ID NO: 178394 - DNA, 15 bp, Homo sapiens
agacttggggaagca

SEQ ID NO: 178395 - DNA, 15 bp, Homo sapiens
gagacttggggaagc

SEQ ID NO: 178396 - DNA, 15 bp, Homo sapiens
cgagacttggggaag

SEQ ID NO: 178397 - DNA, 15 bp, Homo sapiens
ccgagacttggggaa

SEQ ID NO: 178398 - DNA, 15 bp, Homo sapiens
accgagacttgggga

SEQ ID NO: 178399 - DNA, 15 bp, Homo sapiens
aaccgagacttgggg

SEQ ID NO: 178400 - DNA, 15 bp, Homo sapiens
aaaccgagacttggg

SEQ ID NO: 178401 - DNA, 15 bp, Homo sapiens
aaaaccgagacttgg

SEQ ID NO: 178402 - DNA, 15 bp, Homo sapiens
aaaaaccgagacttg

SEQ ID NO: 178403 - DNA, 15 bp, Homo sapiens
gaaaaaccgagactt

SEQ ID NO: 178404 - DNA, 15 bp, Homo sapiens
agaaaaaccgagact

SEQ ID NO: 178405 - DNA, 15 bp, Homo sapiens
tagaaaaaccgagac

SEQ ID NO: 178406 - DNA, 15 bp, Homo sapiens
ttagaaaaaccgaga

SEQ ID NO: 178407 - DNA, 15 bp, Homo sapiens
tttagaaaaaccgag

SEQ ID NO: 178408 - DNA, 15 bp, Homo sapiens
ttttagaaaaaccga

SEQ ID NO: 178409 - DNA, 15 bp, Homo sapiens
attttagaaaaaccg

SEQ ID NO: 178410 - DNA, 15 bp, Homo sapiens
cattttagaaaaacc

SEQ ID NO: 178411 - DNA, 15 bp, Homo sapiens
ccattttagaaaaac

SEQ ID NO: 178412 - DNA, 15 bp, Homo sapiens
accattttagaaaaa

SEQ ID NO: 178413 - DNA, 15 bp, Homo sapiens
taccattttagaaaa

SEQ ID NO: 178414 - DNA, 15 bp, Homo sapiens
ctaccattttagaaa

SEQ ID NO: 178415 - DNA, 15 bp, Homo sapiens
cctaccattttagaa

SEQ ID NO: 178416 - DNA, 15 bp, Homo sapiens
tcctaccattttaga

SEQ ID NO: 178417 - DNA, 15 bp, Homo sapiens
ttcctaccattttag

SEQ ID NO: 178418 - DNA, 15 bp, Homo sapiens
tttcctaccatttta

SEQ ID NO: 178419 - DNA, 15 bp, Homo sapiens
gtttcctaccatttt

SEQ ID NO: 178420 - DNA, 15 bp, Homo sapiens
tgtttcctaccattt

SEQ ID NO: 178421 - DNA, 15 bp, Homo sapiens
ctgtttcctaccatt

SEQ ID NO: 178422 - DNA, 15 bp, Homo sapiens
gctgtttcctaccat

SEQ ID NO: 178423 - DNA, 15 bp, Homo sapiens
agctgtttcctacca

SEQ ID NO: 178424 - DNA, 15 bp, Homo sapiens
aagctgtttcctacc

SEQ ID NO: 178425 - DNA, 15 bp, Homo sapiens
aaagctgtttcctac

SEQ ID NO: 178426 - DNA, 15 bp, Homo sapiens
caaagctgtttccta

SEQ ID NO: 178427 - DNA, 15 bp, Homo sapiens
acaaagctgtttcct

SEQ ID NO: 178428 - DNA, 15 bp, Homo sapiens
aacaaagctgtttcc

SEQ ID NO: 178429 - DNA, 15 bp, Homo sapiens
aaacaaagctgtttc

SEQ ID NO: 178430 - DNA, 15 bp, Homo sapiens
caaacaaagctgttt

SEQ ID NO: 178431 - DNA, 15 bp, Homo sapiens
ccaaacaaagctgtt

SEQ ID NO: 178432 - DNA, 15 bp, Homo sapiens
gccaaacaaagctgt

SEQ ID NO: 178433 - DNA, 15 bp, Homo sapiens
ggccaaacaaagctg

SEQ ID NO: 178434 - DNA, 15 bp, Homo sapiens
aggccaaacaaagct

SEQ ID NO: 178435 - DNA, 15 bp, Homo sapiens
taggccaaacaaagc

SEQ ID NO: 178436 - DNA, 15 bp, Homo sapiens
ttaggccaaacaaag

SEQ ID NO: 178437 - DNA, 15 bp, Homo sapiens
cttaggccaaacaaa

SEQ ID NO: 178438 - DNA, 15 bp, Homo sapiens
tcttaggccaaacaa

SEQ ID NO: 178439 - DNA, 15 bp, Homo sapiens
ctcttaggccaaaca

SEQ ID NO: 178440 - DNA, 15 bp, Homo sapiens
cctcttaggccaaac

SEQ ID NO: 178441 - DNA, 15 bp, Homo sapiens
acctcttaggccaaa

SEQ ID NO: 178442 - DNA, 15 bp, Homo sapiens
aacctcttaggccaa

SEQ ID NO: 178443 - DNA, 15 bp, Homo sapiens
aaacctcttaggcca

SEQ ID NO: 178444 - DNA, 15 bp, Homo sapiens
caaacctcttaggcc

SEQ ID NO: 178445 - DNA, 15 bp, Homo sapiens
gcaaacctcttaggc

SEQ ID NO: 178446 - DNA, 15 bp, Homo sapiens
agcaaacctcttagg

SEQ ID NO: 178447 - DNA, 15 bp, Homo sapiens
cagcaaacctcttag

SEQ ID NO: 178448 - DNA, 15 bp, Homo sapiens
ccagcaaacctctta

SEQ ID NO: 178449 - DNA, 15 bp, Homo sapiens
accagcaaacctctt

SEQ ID NO: 178450 - DNA, 15 bp, Homo sapiens
caccagcaaacctct

SEQ ID NO: 178451 - DNA, 15 bp, Homo sapiens
ccaccagcaaacctc

SEQ ID NO: 178452 - DNA, 15 bp, Homo sapiens
tccaccagcaaacct

SEQ ID NO: 178453 - DNA, 15 bp, Homo sapiens
ctccaccagcaaacc

SEQ ID NO: 178454 - DNA, 15 bp, Homo sapiens
tctccaccagcaaac

SEQ ID NO: 178455 - DNA, 15 bp, Homo sapiens
gtctccaccagcaaa

SEQ ID NO: 178456 - DNA, 15 bp, Homo sapiens
agtctccaccagcaa

SEQ ID NO: 178457 - DNA, 15 bp, Homo sapiens
tagtctccaccagca

SEQ ID NO: 178458 - DNA, 15 bp, Homo sapiens
ttagtctccaccagc

SEQ ID NO: 178459 - DNA, 15 bp, Homo sapiens
cttagtctccaccag

SEQ ID NO: 178460 - DNA, 15 bp, Homo sapiens
acttagtctccacca

SEQ ID NO: 178461 - DNA, 15 bp, Homo sapiens
cacttagtctccacc

SEQ ID NO: 178462 - DNA, 15 bp, Homo sapiens
tcacttagtctccac

SEQ ID NO: 178463 - DNA, 15 bp, Homo sapiens
ctcacttagtctcca

SEQ ID NO: 178464 - DNA, 15 bp, Homo sapiens
gctcacttagtctcc

SEQ ID NO: 178465 - DNA, 15 bp, Homo sapiens
agctcacttagtctc

SEQ ID NO: 178466 - DNA, 15 bp, Homo sapiens
tagctcacttagtct

SEQ ID NO: 178467 - DNA, 15 bp, Homo sapiens
gtagctcacttagtc

SEQ ID NO: 178468 - DNA, 15 bp, Homo sapiens
agtagctcacttagt

SEQ ID NO: 178469 - DNA, 15 bp, Homo sapiens
cagtagctcacttag

SEQ ID NO: 178470 - DNA, 15 bp, Homo sapiens
gcagtagctcactta

SEQ ID NO: 178471 - DNA, 15 bp, Homo sapiens
agcagtagctcactt

SEQ ID NO: 178472 - DNA, 15 bp, Homo sapiens
cagcagtagctcact

SEQ ID NO: 178473 - DNA, 15 bp, Homo sapiens
acagcagtagctcac

SEQ ID NO: 178474 - DNA, 15 bp, Homo sapiens
cacagcagtagctca

SEQ ID NO: 178475 - DNA, 15 bp, Homo sapiens
acacagcagtagctc

SEQ ID NO: 178476 - DNA, 15 bp, Homo sapiens
aacacagcagtagct

SEQ ID NO: 178477 - DNA, 15 bp, Homo sapiens
aaacacagcagtagc

SEQ ID NO: 178478 - DNA, 15 bp, Homo sapiens
aaaacacagcagtag

SEQ ID NO: 178479 - DNA, 15 bp, Homo sapiens
caaaacacagcagta

SEQ ID NO: 178480 - DNA, 15 bp, Homo sapiens
gcaaaacacagcagt

SEQ ID NO: 178481 - DNA, 15 bp, Homo sapiens
ggcaaaacacagcag

SEQ ID NO: 178482 - DNA, 15 bp, Homo sapiens
tggcaaaacacagca

SEQ ID NO: 178483 - DNA, 15 bp, Homo sapiens
gtggcaaaacacagc

SEQ ID NO: 178484 - DNA, 15 bp, Homo sapiens
tgtggcaaaacacag

SEQ ID NO: 178485 - DNA, 15 bp, Homo sapiens
gtgtggcaaaacaca

SEQ ID NO: 178486 - DNA, 15 bp, Homo sapiens
ggtgtggcaaaacac

SEQ ID NO: 178487 - DNA, 15 bp, Homo sapiens
aggtgtggcaaaaca

SEQ ID NO: 178488 - DNA, 15 bp, Homo sapiens
gaggtgtggcaaaac

SEQ ID NO: 178489 - DNA, 15 bp, Homo sapiens
tgaggtgtggcaaaa

SEQ ID NO: 178490 - DNA, 15 bp, Homo sapiens
ttgaggtgtggcaaa

SEQ ID NO: 178491 - DNA, 15 bp, Homo sapiens
attgaggtgtggcaa

SEQ ID NO: 178492 - DNA, 15 bp, Homo sapiens
cattgaggtgtggca

SEQ ID NO: 178493 - DNA, 15 bp, Homo sapiens
gcattgaggtgtggc

SEQ ID NO: 178494 - DNA, 15 bp, Homo sapiens
agcattgaggtgtgg

SEQ ID NO: 178495 - DNA, 15 bp, Homo sapiens
cagcattgaggtgtg

SEQ ID NO: 178496 - DNA, 15 bp, Homo sapiens
ccagcattgaggtgt

SEQ ID NO: 178497 - DNA, 15 bp, Homo sapiens
accagcattgaggtg

SEQ ID NO: 178498 - DNA, 15 bp, Homo sapiens
caccagcattgaggt

SEQ ID NO: 178499 - DNA, 15 bp, Homo sapiens
ccaccagcattgagg

SEQ ID NO: 178500 - DNA, 15 bp, Homo sapiens
cccaccagcattgag

SEQ ID NO: 178501 - DNA, 15 bp, Homo sapiens
tcccaccagcattga

SEQ ID NO: 178502 - DNA, 15 bp, Homo sapiens
atcccaccagcattg

SEQ ID NO: 178503 - DNA, 15 bp, Homo sapiens
catcccaccagcatt

SEQ ID NO: 178504 - DNA, 15 bp, Homo sapiens
gcatcccaccagcat

SEQ ID NO: 178505 - DNA, 15 bp, Homo sapiens
tgcatcccaccagca

SEQ ID NO: 178506 - DNA, 15 bp, Homo sapiens
ttgcatcccaccagc

SEQ ID NO: 178507 - DNA, 15 bp, Homo sapiens
cttgcatcccaccag

SEQ ID NO: 178508 - DNA, 15 bp, Homo sapiens
tcttgcatcccacca

SEQ ID NO: 178509 - DNA, 15 bp, Homo sapiens
atcttgcatcccacc

SEQ ID NO: 178510 - DNA, 15 bp, Homo sapiens
catcttgcatcccac

SEQ ID NO: 178511 - DNA, 15 bp, Homo sapiens
gcatcttgcatccca

SEQ ID NO: 178512 - DNA, 15 bp, Homo sapiens
agcatcttgcatccc

SEQ ID NO: 178513 - DNA, 15 bp, Homo sapiens
aagcatcttgcatcc

SEQ ID NO: 178514 - DNA, 15 bp, Homo sapiens
aaagcatcttgcatc

SEQ ID NO: 178515 - DNA, 15 bp, Homo sapiens
caaagcatcttgcat

SEQ ID NO: 178516 - DNA, 15 bp, Homo sapiens
tcaaagcatcttgca

SEQ ID NO: 178517 - DNA, 15 bp, Homo sapiens
ctcaaagcatcttgc

SEQ ID NO: 178518 - DNA, 15 bp, Homo sapiens
cctcaaagcatcttg

SEQ ID NO: 178519 - DNA, 15 bp, Homo sapiens
tcctcaaagcatctt

SEQ ID NO: 178520 - DNA, 15 bp, Homo sapiens
ctcctcaaagcatct

SEQ ID NO: 178521 - DNA, 15 bp, Homo sapiens
cctcctcaaagcatc

SEQ ID NO: 178522 - DNA, 15 bp, Homo sapiens
ccctcctcaaagcat

SEQ ID NO: 178523 - DNA, 15 bp, Homo sapiens
tccctcctcaaagca

SEQ ID NO: 178524 - DNA, 15 bp, Homo sapiens
gtccctcctcaaagc

SEQ ID NO: 178525 - DNA, 15 bp, Homo sapiens
tgtccctcctcaaag

SEQ ID NO: 178526 - DNA, 15 bp, Homo sapiens
gtgtccctcctcaaa

SEQ ID NO: 178527 - DNA, 15 bp, Homo sapiens
tgtgtccctcctcaa

SEQ ID NO: 178528 - DNA, 15 bp, Homo sapiens
ctgtgtccctcctca

SEQ ID NO: 178529 - DNA, 15 bp, Homo sapiens
tctgtgtccctcctc

SEQ ID NO: 178530 - DNA, 15 bp, Homo sapiens
gtctgtgtccctcct

SEQ ID NO: 178531 - DNA, 15 bp, Homo sapiens
cgtctgtgtccctcc

SEQ ID NO: 178532 - DNA, 15 bp, Homo sapiens
tcgtctgtgtccctc

SEQ ID NO: 178533 - DNA, 15 bp, Homo sapiens
ttcgtctgtgtccct

SEQ ID NO: 178534 - DNA, 15 bp, Homo sapiens
attcgtctgtgtccc

SEQ ID NO: 178535 - DNA, 15 bp, Homo sapiens
aattcgtctgtgtcc

SEQ ID NO: 178536 - DNA, 15 bp, Homo sapiens
aaattcgtctgtgtc

SEQ ID NO: 178537 - DNA, 15 bp, Homo sapiens
gaaattcgtctgtgt

SEQ ID NO: 178538 - DNA, 15 bp, Homo sapiens
agaaattcgtctgtg

SEQ ID NO: 178539 - DNA, 15 bp, Homo sapiens
aagaaattcgtctgt

SEQ ID NO: 178540 - DNA, 15 bp, Homo sapiens
taagaaattcgtctg

SEQ ID NO: 178541 - DNA, 15 bp, Homo sapiens
ataagaaattcgtct

SEQ ID NO: 178542 - DNA, 15 bp, Homo sapiens
aataagaaattcgtc

SEQ ID NO: 178543 - DNA, 15 bp, Homo sapiens
taataagaaattcgt

SEQ ID NO: 178544 - DNA, 15 bp, Homo sapiens
ataataagaaattcg

SEQ ID NO: 178545 - DNA, 15 bp, Homo sapiens
tataataagaaattc

SEQ ID NO: 178546 - DNA, 15 bp, Homo sapiens
ctataataagaaatt

SEQ ID NO: 178547 - DNA, 15 bp, Homo sapiens
actataataagaaat

SEQ ID NO: 178548 - DNA, 15 bp, Homo sapiens
aactataataagaaa

SEQ ID NO: 178549 - DNA, 15 bp, Homo sapiens
caactataataagaa

SEQ ID NO: 178550 - DNA, 15 bp, Homo sapiens
acaactataataaga

SEQ ID NO: 178551 - DNA, 15 bp, Homo sapiens
cacaactataataag

SEQ ID NO: 178552 - DNA, 15 bp, Homo sapiens
acacaactataataa

SEQ ID NO: 178553 - DNA, 15 bp, Homo sapiens
tacacaactataata

SEQ ID NO: 178554 - DNA, 15 bp, Homo sapiens
atacacaactataat

SEQ ID NO: 178555 - DNA, 15 bp, Homo sapiens
aatacacaactataa

SEQ ID NO: 178556 - DNA, 15 bp, Homo sapiens
aaatacacaactata

SEQ ID NO: 178557 - DNA, 15 bp, Homo sapiens
caaatacacaactat

SEQ ID NO: 178558 - DNA, 15 bp, Homo sapiens
tcaaatacacaacta

SEQ ID NO: 178559 - DNA, 15 bp, Homo sapiens
ttcaaatacacaact

SEQ ID NO: 178560 - DNA, 15 bp, Homo sapiens
attcaaatacacaac

SEQ ID NO: 178561 - DNA, 15 bp, Homo sapiens
tattcaaatacacaa

SEQ ID NO: 178562 - DNA, 15 bp, Homo sapiens
gtattcaaatacaca

SEQ ID NO: 178563 - DNA, 15 bp, Homo sapiens
tgtattcaaatacac

SEQ ID NO: 178564 - DNA, 15 bp, Homo sapiens
gtgtattcaaataca

SEQ ID NO: 178565 - DNA, 15 bp, Homo sapiens
agtgtattcaaatac

SEQ ID NO: 178566 - DNA, 15 bp, Homo sapiens
aagtgtattcaaata

SEQ ID NO: 178567 - DNA, 15 bp, Homo sapiens
caagtgtattcaaat

SEQ ID NO: 178568 - DNA, 15 bp, Homo sapiens
acaagtgtattcaaa

SEQ ID NO: 178569 - DNA, 15 bp, Homo sapiens
cacaagtgtattcaa

SEQ ID NO: 178570 - DNA, 15 bp, Homo sapiens
ccacaagtgtattca

SEQ ID NO: 178571 - DNA, 15 bp, Homo sapiens
tccacaagtgtattc

SEQ ID NO: 178572 - DNA, 15 bp, Homo sapiens
ttccacaagtgtatt

SEQ ID NO: 178573 - DNA, 15 bp, Homo sapiens
tttccacaagtgtat

SEQ ID NO: 178574 - DNA, 15 bp, Homo sapiens
ttttccacaagtgta

SEQ ID NO: 178575 - DNA, 15 bp, Homo sapiens
tttttccacaagtgt

SEQ ID NO: 178576 - DNA, 15 bp, Homo sapiens
atttttccacaagtg

SEQ ID NO: 178577 - DNA, 15 bp, Homo sapiens
tatttttccacaagt

SEQ ID NO: 178578 - DNA, 15 bp, Homo sapiens
ctatttttccacaag

SEQ ID NO: 178579 - DNA, 15 bp, Homo sapiens
tctatttttccacaa

SEQ ID NO: 178580 - DNA, 15 bp, Homo sapiens
ttctatttttccaca

SEQ ID NO: 178581 - DNA, 15 bp, Homo sapiens
gttctatttttccac

SEQ ID NO: 178582 - DNA, 15 bp, Homo sapiens
agttctatttttcca

SEQ ID NO: 178583 - DNA, 15 bp, Homo sapiens
tagttctatttttcc

SEQ ID NO: 178584 - DNA, 15 bp, Homo sapiens
ctagttctatttttc

SEQ ID NO: 178585 - DNA, 15 bp, Homo sapiens
actagttctattttt

SEQ ID NO: 178586 - DNA, 15 bp, Homo sapiens
tactagttctatttt

SEQ ID NO: 178587 - DNA, 15 bp, Homo sapiens
gtactagttctattt

SEQ ID NO: 178588 - DNA, 15 bp, Homo sapiens
tgtactagttctatt

SEQ ID NO: 178589 - DNA, 15 bp, Homo sapiens
atgtactagttctat

SEQ ID NO: 178590 - DNA, 15 bp, Homo sapiens
gatgtactagttcta

SEQ ID NO: 178591 - DNA, 15 bp, Homo sapiens
tgatgtactagttct

SEQ ID NO: 178592 - DNA, 15 bp, Homo sapiens
ctgatgtactagttc

SEQ ID NO: 178593 - DNA, 15 bp, Homo sapiens
tctgatgtactagtt

SEQ ID NO: 178594 - DNA, 15 bp, Homo sapiens
ctctgatgtactagt

SEQ ID NO: 178595 - DNA, 15 bp, Homo sapiens
gctctgatgtactag

SEQ ID NO: 178596 - DNA, 15 bp, Homo sapiens
agctctgatgtacta

SEQ ID NO: 178597 - DNA, 15 bp, Homo sapiens
gagctctgatgtact

SEQ ID NO: 178598 - DNA, 15 bp, Homo sapiens
cgagctctgatgtac

SEQ ID NO: 178599 - DNA, 15 bp, Homo sapiens
acgagctctgatgta

SEQ ID NO: 178600 - DNA, 15 bp, Homo sapiens
cacgagctctgatgt

SEQ ID NO: 178601 - DNA, 15 bp, Homo sapiens
tcacgagctctgatg

SEQ ID NO: 178602 - DNA, 15 bp, Homo sapiens
atcacgagctctgat

SEQ ID NO: 178603 - DNA, 15 bp, Homo sapiens
aatcacgagctctga

SEQ ID NO: 178604 - DNA, 15 bp, Homo sapiens
aaatcacgagctctg

SEQ ID NO: 178605 - DNA, 15 bp, Homo sapiens
gaaatcacgagctct

SEQ ID NO: 178606 - DNA, 15 bp, Homo sapiens
tgaaatcacgagctc

SEQ ID NO: 178607 - DNA, 15 bp, Homo sapiens
gtgaaatcacgagct

SEQ ID NO: 178608 - DNA, 15 bp, Homo sapiens
tgtgaaatcacgagc

SEQ ID NO: 178609 - DNA, 15 bp, Homo sapiens
ctgtgaaatcacgag

SEQ ID NO: 178610 - DNA, 15 bp, Homo sapiens
tctgtgaaatcacga

SEQ ID NO: 178611 - DNA, 15 bp, Homo sapiens
atctgtgaaatcacg

SEQ ID NO: 178612 - DNA, 15 bp, Homo sapiens
tatctgtgaaatcac

SEQ ID NO: 178613 - DNA, 15 bp, Homo sapiens
atatctgtgaaatca

SEQ ID NO: 178614 - DNA, 15 bp, Homo sapiens
aatatctgtgaaatc

SEQ ID NO: 178615 - DNA, 15 bp, Homo sapiens
taatatctgtgaaat

SEQ ID NO: 178616 - DNA, 15 bp, Homo sapiens
ataatatctgtgaaa

SEQ ID NO: 178617 - DNA, 15 bp, Homo sapiens
aataatatctgtgaa

SEQ ID NO: 178618 - DNA, 15 bp, Homo sapiens
caataatatctgtga

SEQ ID NO: 178619 - DNA, 15 bp, Homo sapiens
gcaataatatctgtg

SEQ ID NO: 178620 - DNA, 15 bp, Homo sapiens
ggcaataatatctgt

SEQ ID NO: 178621 - DNA, 15 bp, Homo sapiens
gggcaataatatctg

SEQ ID NO: 178622 - DNA, 15 bp, Homo sapiens
tgggcaataatatct

SEQ ID NO: 178623 - DNA, 15 bp, Homo sapiens
ctgggcaataatatc

SEQ ID NO: 178624 - DNA, 15 bp, Homo sapiens
cctgggcaataatat

SEQ ID NO: 178625 - DNA, 15 bp, Homo sapiens
tcctgggcaataata

SEQ ID NO: 178626 - DNA, 15 bp, Homo sapiens
gtcctgggcaataat

SEQ ID NO: 178627 - DNA, 15 bp, Homo sapiens
tgtcctgggcaataa

SEQ ID NO: 178628 - DNA, 15 bp, Homo sapiens
ttgtcctgggcaata

SEQ ID NO: 178629 - DNA, 15 bp, Homo sapiens
attgtcctgggcaat

SEQ ID NO: 178630 - DNA, 15 bp, Homo sapiens
cattgtcctgggcaa

SEQ ID NO: 178631 - DNA, 15 bp, Homo sapiens
gcattgtcctgggca

SEQ ID NO: 178632 - DNA, 15 bp, Homo sapiens
agcattgtcctgggc

SEQ ID NO: 178633 - DNA, 15 bp, Homo sapiens
tagcattgtcctggg

SEQ ID NO: 178634 - DNA, 15 bp, Homo sapiens
ttagcattgtcctgg

SEQ ID NO: 178635 - DNA, 15 bp, Homo sapiens
attagcattgtcctg

SEQ ID NO: 178636 - DNA, 15 bp, Homo sapiens
aattagcattgtcct

SEQ ID NO: 178637 - DNA, 15 bp, Homo sapiens
aaattagcattgtcc

SEQ ID NO: 178638 - DNA, 15 bp, Homo sapiens
caaattagcattgtc

SEQ ID NO: 178639 - DNA, 15 bp, Homo sapiens
tcaaattagcattgt

SEQ ID NO: 178640 - DNA, 15 bp, Homo sapiens
ttcaaattagcattg

SEQ ID NO: 178641 - DNA, 15 bp, Homo sapiens
tttcaaattagcatt

SEQ ID NO: 178642 - DNA, 15 bp, Homo sapiens
ttttcaaattagcat

SEQ ID NO: 178643 - DNA, 15 bp, Homo sapiens
tttttcaaattagca

SEQ ID NO: 178644 - DNA, 15 bp, Homo sapiens
ttttttcaaattagc

SEQ ID NO: 178645 - DNA, 15 bp, Homo sapiens
attttttcaaattag

SEQ ID NO: 178646 - DNA, 15 bp, Homo sapiens
gattttttcaaatta

SEQ ID NO: 178647 - DNA, 15 bp, Homo sapiens
cgattttttcaaatt

SEQ ID NO: 178648 - DNA, 15 bp, Homo sapiens
tcgattttttcaaat

SEQ ID NO: 178649 - DNA, 15 bp, Homo sapiens
ctcgattttttcaaa

SEQ ID NO: 178650 - DNA, 15 bp, Homo sapiens
tctcgattttttcaa

SEQ ID NO: 178651 - DNA, 15 bp, Homo sapiens
gtctcgattttttca

SEQ ID NO: 178652 - DNA, 15 bp, Homo sapiens
tgtctcgattttttc

SEQ ID NO: 178653 - DNA, 15 bp, Homo sapiens
ttgtctcgatttttt

SEQ ID NO: 178654 - DNA, 15 bp, Homo sapiens
attgtctcgattttt

SEQ ID NO: 178655 - DNA, 15 bp, Homo sapiens
aattgtctcgatttt

SEQ ID NO: 178656 - DNA, 15 bp, Homo sapiens
aaattgtctcgattt

SEQ ID NO: 178657 - DNA, 15 bp, Homo sapiens
gaaattgtctcgatt

SEQ ID NO: 178658 - DNA, 15 bp, Homo sapiens
tgaaattgtctcgat

SEQ ID NO: 178659 - DNA, 15 bp, Homo sapiens
ttgaaattgtctcga

SEQ ID NO: 178660 - DNA, 15 bp, Homo sapiens
cttgaaattgtctcg

SEQ ID NO: 178661 - DNA, 15 bp, Homo sapiens
acttgaaattgtctc

SEQ ID NO: 178662 - DNA, 15 bp, Homo sapiens
aacttgaaattgtct

SEQ ID NO: 178663 - DNA, 15 bp, Homo sapiens
caacttgaaattgtc

SEQ ID NO: 178664 - DNA, 15 bp, Homo sapiens
tcaacttgaaattgt

SEQ ID NO: 178665 - DNA, 15 bp, Homo sapiens
atcaacttgaaattg

SEQ ID NO: 178666 - DNA, 15 bp, Homo sapiens
aatcaacttgaaatt

SEQ ID NO: 178667 - DNA, 15 bp, Homo sapiens
aaatcaacttgaaat

SEQ ID NO: 178668 - DNA, 15 bp, Homo sapiens
gaaatcaacttgaaa

SEQ ID NO: 178669 - DNA, 15 bp, Homo sapiens
tgaaatcaacttgaa

SEQ ID NO: 178670 - DNA, 15 bp, Homo sapiens
ttgaaatcaacttga

SEQ ID NO: 178671 - DNA, 15 bp, Homo sapiens
cttgaaatcaacttg

SEQ ID NO: 178672 - DNA, 15 bp, Homo sapiens
ccttgaaatcaactt

SEQ ID NO: 178673 - DNA, 15 bp, Homo sapiens
tccttgaaatcaact

SEQ ID NO: 178674 - DNA, 15 bp, Homo sapiens
atccttgaaatcaac

SEQ ID NO: 178675 - DNA, 15 bp, Homo sapiens
tatccttgaaatcaa

SEQ ID NO: 178676 - DNA, 15 bp, Homo sapiens
ttatccttgaaatca

SEQ ID NO: 178677 - DNA, 15 bp, Homo sapiens
attatccttgaaatc

SEQ ID NO: 178678 - DNA, 15 bp, Homo sapiens
tattatccttgaaat

SEQ ID NO: 178679 - DNA, 15 bp, Homo sapiens
atattatccttgaaa

SEQ ID NO: 178680 - DNA, 15 bp, Homo sapiens
catattatccttgaa

SEQ ID NO: 178681 - DNA, 15 bp, Homo sapiens
gcatattatccttga

SEQ ID NO: 178682 - DNA, 15 bp, Homo sapiens
tgcatattatccttg

SEQ ID NO: 178683 - DNA, 15 bp, Homo sapiens
gtgcatattatcctt

SEQ ID NO: 178684 - DNA, 15 bp, Homo sapiens
agtgcatattatcct

SEQ ID NO: 178685 - DNA, 15 bp, Homo sapiens
cagtgcatattatcc

SEQ ID NO: 178686 - DNA, 15 bp, Homo sapiens
tcagtgcatattatc

SEQ ID NO: 178687 - DNA, 15 bp, Homo sapiens
ttcagtgcatattat

SEQ ID NO: 178688 - DNA, 15 bp, Homo sapiens
attcagtgcatatta

SEQ ID NO: 178689 - DNA, 15 bp, Homo sapiens
tattcagtgcatatt

SEQ ID NO: 178690 - DNA, 15 bp, Homo sapiens
atattcagtgcatat

SEQ ID NO: 178691 - DNA, 15 bp, Homo sapiens
aatattcagtgcata

SEQ ID NO: 178692 - DNA, 15 bp, Homo sapiens
taatattcagtgcat

SEQ ID NO: 178693 - DNA, 15 bp, Homo sapiens
ctaatattcagtgca

SEQ ID NO: 178694 - DNA, 15 bp, Homo sapiens
actaatattcagtgc

SEQ ID NO: 178695 - DNA, 15 bp, Homo sapiens
cactaatattcagtg

SEQ ID NO: 178696 - DNA, 15 bp, Homo sapiens
gcactaatattcagt

SEQ ID NO: 178697 - DNA, 15 bp, Homo sapiens
tgcactaatattcag

SEQ ID NO: 178698 - DNA, 15 bp, Homo sapiens
ctgcactaatattca

SEQ ID NO: 178699 - DNA, 15 bp, Homo sapiens
cctgcactaatattc

SEQ ID NO: 178700 - DNA, 15 bp, Homo sapiens
gcctgcactaatatt

SEQ ID NO: 178701 - DNA, 15 bp, Homo sapiens
tgcctgcactaatat

SEQ ID NO: 178702 - DNA, 15 bp, Homo sapiens
ctgcctgcactaata

SEQ ID NO: 178703 - DNA, 15 bp, Homo sapiens
cctgcctgcactaat

SEQ ID NO: 178704 - DNA, 15 bp, Homo sapiens
gcctgcctgcactaa

SEQ ID NO: 178705 - DNA, 15 bp, Homo sapiens
tgcctgcctgcacta

SEQ ID NO: 178706 - DNA, 15 bp, Homo sapiens
ctgcctgcctgcact

SEQ ID NO: 178707 - DNA, 15 bp, Homo sapiens
cctgcctgcctgcac

SEQ ID NO: 178708 - DNA, 15 bp, Homo sapiens
gcctgcctgcctgca

SEQ ID NO: 178709 - DNA, 15 bp, Homo sapiens
cgcctgcctgcctgc

SEQ ID NO: 178710 - DNA, 15 bp, Homo sapiens
ccgcctgcctgcctg

SEQ ID NO: 178711 - DNA, 15 bp, Homo sapiens
cccgcctgcctgcct

SEQ ID NO: 178712 - DNA, 15 bp, Homo sapiens
ccccgcctgcctgcc

SEQ ID NO: 178713 - DNA, 15 bp, Homo sapiens
gccccgcctgcctgc

SEQ ID NO: 178714 - DNA, 15 bp, Homo sapiens
tgccccgcctgcctg

SEQ ID NO: 178715 - DNA, 15 bp, Homo sapiens
ctgccccgcctgcct

SEQ ID NO: 178716 - DNA, 15 bp, Homo sapiens
tctgccccgcctgcc

SEQ ID NO: 178717 - DNA, 15 bp, Homo sapiens
ttctgccccgcctgc

SEQ ID NO: 178718 - DNA, 15 bp, Homo sapiens
tttctgccccgcctg

SEQ ID NO: 178719 - DNA, 15 bp, Homo sapiens
atttctgccccgcct

SEQ ID NO: 178720 - DNA, 15 bp, Homo sapiens
gatttctgccccgcc

SEQ ID NO: 178721 - DNA, 15 bp, Homo sapiens
tgatttctgccccgc

SEQ ID NO: 178722 - DNA, 15 bp, Homo sapiens
ctgatttctgccccg

SEQ ID NO: 178723 - DNA, 15 bp, Homo sapiens
cctgatttctgcccc

SEQ ID NO: 178724 - DNA, 15 bp, Homo sapiens
tcctgatttctgccc

SEQ ID NO: 178725 - DNA, 15 bp, Homo sapiens
ttcctgatttctgcc

SEQ ID NO: 178726 - DNA, 15 bp, Homo sapiens
cttcctgatttctgc

SEQ ID NO: 178727 - DNA, 15 bp, Homo sapiens
tcttcctgatttctg

SEQ ID NO: 178728 - DNA, 15 bp, Homo sapiens
atcttcctgatttct

SEQ ID NO: 178729 - DNA, 15 bp, Homo sapiens
catcttcctgatttc

SEQ ID NO: 178730 - DNA, 15 bp, Homo sapiens
ccatcttcctgattt

SEQ ID NO: 178731 - DNA, 15 bp, Homo sapiens
cccatcttcctgatt

SEQ ID NO: 178732 - DNA, 15 bp, Homo sapiens
tcccatcttcctgat

SEQ ID NO: 178733 - DNA, 15 bp, Homo sapiens
ctcccatcttcctga

SEQ ID NO: 178734 - DNA, 15 bp, Homo sapiens
tctcccatcttcctg

SEQ ID NO: 178735 - DNA, 15 bp, Homo sapiens
ctctcccatcttcct

SEQ ID NO: 178736 - DNA, 15 bp, Homo sapiens
tctctcccatcttcc

SEQ ID NO: 178737 - DNA, 15 bp, Homo sapiens
ttctctcccatcttc

SEQ ID NO: 178738 - DNA, 15 bp, Homo sapiens
attctctcccatctt

SEQ ID NO: 178739 - DNA, 15 bp, Homo sapiens
cattctctcccatct

SEQ ID NO: 178740 - DNA, 15 bp, Homo sapiens
tcattctctcccatc

SEQ ID NO: 178741 - DNA, 15 bp, Homo sapiens
gtcattctctcccat

SEQ ID NO: 178742 - DNA, 15 bp, Homo sapiens
tgtcattctctccca

SEQ ID NO: 178743 - DNA, 15 bp, Homo sapiens
ctgtcattctctccc

SEQ ID NO: 178744 - DNA, 15 bp, Homo sapiens
tctgtcattctctcc

SEQ ID NO: 178745 - DNA, 15 bp, Homo sapiens
ttctgtcattctctc

SEQ ID NO: 178746 - DNA, 15 bp, Homo sapiens
attctgtcattctct

SEQ ID NO: 178747 - DNA, 15 bp, Homo sapiens
aattctgtcattctc

SEQ ID NO: 178748 - DNA, 15 bp, Homo sapiens
aaattctgtcattct

SEQ ID NO: 178749 - DNA, 15 bp, Homo sapiens
caaattctgtcattc

SEQ ID NO: 178750 - DNA, 15 bp, Homo sapiens
ccaaattctgtcatt

SEQ ID NO: 178751 - DNA, 15 bp, Homo sapiens
tccaaattctgtcat

SEQ ID NO: 178752 - DNA, 15 bp, Homo sapiens
ctccaaattctgtca

SEQ ID NO: 178753 - DNA, 15 bp, Homo sapiens
actccaaattctgtc

SEQ ID NO: 178754 - DNA, 15 bp, Homo sapiens
tactccaaattctgt

SEQ ID NO: 178755 - DNA, 15 bp, Homo sapiens
gtactccaaattctg

SEQ ID NO: 178756 - DNA, 15 bp, Homo sapiens
agtactccaaattct

SEQ ID NO: 178757 - DNA, 15 bp, Homo sapiens
tagtactccaaattc

SEQ ID NO: 178758 - DNA, 15 bp, Homo sapiens
gtagtactccaaatt

SEQ ID NO: 178759 - DNA, 15 bp, Homo sapiens
agtagtactccaaat

SEQ ID NO: 178760 - DNA, 15 bp, Homo sapiens
cagtagtactccaaa

SEQ ID NO: 178761 - DNA, 15 bp, Homo sapiens
tcagtagtactccaa

SEQ ID NO: 178762 - DNA, 15 bp, Homo sapiens
ctcagtagtactcca

SEQ ID NO: 178763 - DNA, 15 bp, Homo sapiens
tctcagtagtactcc

SEQ ID NO: 178764 - DNA, 15 bp, Homo sapiens
gtctcagtagtactc

SEQ ID NO: 178765 - DNA, 15 bp, Homo sapiens
ggtctcagtagtact

SEQ ID NO: 178766 - DNA, 15 bp, Homo sapiens
aggtctcagtagtac

SEQ ID NO: 178767 - DNA, 15 bp, Homo sapiens
taggtctcagtagta

SEQ ID NO: 178768 - DNA, 15 bp, Homo sapiens
gtaggtctcagtagt

SEQ ID NO: 178769 - DNA, 15 bp, Homo sapiens
tgtaggtctcagtag

SEQ ID NO: 178770 - DNA, 15 bp, Homo sapiens
gtgtaggtctcagta

SEQ ID NO: 178771 - DNA, 15 bp, Homo sapiens
agtgtaggtctcagt

SEQ ID NO: 178772 - DNA, 15 bp, Homo sapiens
tagtgtaggtctcag

SEQ ID NO: 178773 - DNA, 15 bp, Homo sapiens
gtagtgtaggtctca

SEQ ID NO: 178774 - DNA, 15 bp, Homo sapiens
tgtagtgtaggtctc

SEQ ID NO: 178775 - DNA, 15 bp, Homo sapiens
ctgtagtgtaggtct

SEQ ID NO: 178776 - DNA, 15 bp, Homo sapiens
cctgtagtgtaggtc

SEQ ID NO: 178777 - DNA, 15 bp, Homo sapiens
acctgtagtgtaggt

SEQ ID NO: 178778 - DNA, 15 bp, Homo sapiens
gacctgtagtgtagg

SEQ ID NO: 178779 - DNA, 15 bp, Homo sapiens
agacctgtagtgtag

SEQ ID NO: 178780 - DNA, 15 bp, Homo sapiens
gagacctgtagtgta

SEQ ID NO: 178781 - DNA, 15 bp, Homo sapiens
ggagacctgtagtgt

SEQ ID NO: 178782 - DNA, 15 bp, Homo sapiens
aggagacctgtagtg

SEQ ID NO: 178783 - DNA, 15 bp, Homo sapiens
taggagacctgtagt

SEQ ID NO: 178784 - DNA, 15 bp, Homo sapiens
ataggagacctgtag

SEQ ID NO: 178785 - DNA, 15 bp, Homo sapiens
tataggagacctgta

SEQ ID NO: 178786 - DNA, 15 bp, Homo sapiens
ctataggagacctgt

SEQ ID NO: 178787 - DNA, 15 bp, Homo sapiens
tctataggagacctg

SEQ ID NO: 178788 - DNA, 15 bp, Homo sapiens
ttctataggagacct

SEQ ID NO: 178789 - DNA, 15 bp, Homo sapiens
gttctataggagacc

SEQ ID NO: 178790 - DNA, 15 bp, Homo sapiens
tgttctataggagac

SEQ ID NO: 178791 - DNA, 15 bp, Homo sapiens
atgttctataggaga

SEQ ID NO: 178792 - DNA, 15 bp, Homo sapiens
catgttctataggag

SEQ ID NO: 178793 - DNA, 15 bp, Homo sapiens
acatgttctatagga

SEQ ID NO: 178794 - DNA, 15 bp, Homo sapiens
cacatgttctatagg

SEQ ID NO: 178795 - DNA, 15 bp, Homo sapiens
ccacatgttctatag

SEQ ID NO: 178796 - DNA, 15 bp, Homo sapiens
accacatgttctata

SEQ ID NO: 178797 - DNA, 15 bp, Homo sapiens
caccacatgttctat

SEQ ID NO: 178798 - DNA, 15 bp, Homo sapiens
ccaccacatgttcta

SEQ ID NO: 178799 - DNA, 15 bp, Homo sapiens
cccaccacatgttct

SEQ ID NO: 178800 - DNA, 15 bp, Homo sapiens
tcccaccacatgttc

SEQ ID NO: 178801 - DNA, 15 bp, Homo sapiens
ctcccaccacatgtt

SEQ ID NO: 178802 - DNA, 15 bp, Homo sapiens
gctcccaccacatgt

SEQ ID NO: 178803 - DNA, 15 bp, Homo sapiens
tgctcccaccacatg

SEQ ID NO: 178804 - DNA, 15 bp, Homo sapiens
ctgctcccaccacat

SEQ ID NO: 178805 - DNA, 15 bp, Homo sapiens
tctgctcccaccaca

SEQ ID NO: 178806 - DNA, 15 bp, Homo sapiens
ttctgctcccaccac

SEQ ID NO: 178807 - DNA, 15 bp, Homo sapiens
attctgctcccacca

SEQ ID NO: 178808 - DNA, 15 bp, Homo sapiens
tattctgctcccacc

SEQ ID NO: 178809 - DNA, 15 bp, Homo sapiens
ttattctgctcccac

SEQ ID NO: 178810 - DNA, 15 bp, Homo sapiens
tttattctgctccca

SEQ ID NO: 178811 - DNA, 15 bp, Homo sapiens
atttattctgctccc

SEQ ID NO: 178812 - DNA, 15 bp, Homo sapiens
catttattctgctcc

SEQ ID NO: 178813 - DNA, 15 bp, Homo sapiens
gcatttattctgctc

SEQ ID NO: 178814 - DNA, 15 bp, Homo sapiens
tgcatttattctgct

SEQ ID NO: 178815 - DNA, 15 bp, Homo sapiens
atgcatttattctgc

SEQ ID NO: 178816 - DNA, 15 bp, Homo sapiens
gatgcatttattctg

SEQ ID NO: 178817 - DNA, 15 bp, Homo sapiens
agatgcatttattct

SEQ ID NO: 178818 - DNA, 15 bp, Homo sapiens
aagatgcatttattc

SEQ ID NO: 178819 - DNA, 15 bp, Homo sapiens
aaagatgcatttatt

SEQ ID NO: 178820 - DNA, 15 bp, Homo sapiens
gaaagatgcatttat

SEQ ID NO: 178821 - DNA, 15 bp, Homo sapiens
agaaagatgcattta

SEQ ID NO: 178822 - DNA, 15 bp, Homo sapiens
gagaaagatgcattt

SEQ ID NO: 178823 - DNA, 15 bp, Homo sapiens
agagaaagatgcatt

SEQ ID NO: 178824 - DNA, 15 bp, Homo sapiens
aagagaaagatgcat

SEQ ID NO: 178825 - DNA, 15 bp, Homo sapiens
aaagagaaagatgca

SEQ ID NO: 178826 - DNA, 15 bp, Homo sapiens
caaagagaaagatgc

SEQ ID NO: 178827 - DNA, 15 bp, Homo sapiens
acaaagagaaagatg

SEQ ID NO: 178828 - DNA, 15 bp, Homo sapiens
cacaaagagaaagat

SEQ ID NO: 178829 - DNA, 15 bp, Homo sapiens
acacaaagagaaaga

SEQ ID NO: 178830 - DNA, 15 bp, Homo sapiens
gacacaaagagaaag

SEQ ID NO: 178831 - DNA, 15 bp, Homo sapiens
agacacaaagagaaa

SEQ ID NO: 178832 - DNA, 15 bp, Homo sapiens
cagacacaaagagaa

SEQ ID NO: 178833 - DNA, 15 bp, Homo sapiens
acagacacaaagaga

SEQ ID NO: 178834 - DNA, 15 bp, Homo sapiens
gacagacacaaagag

SEQ ID NO: 178835 - DNA, 15 bp, Homo sapiens
ggacagacacaaaga

SEQ ID NO: 178836 - DNA, 15 bp, Homo sapiens
aggacagacacaaag

SEQ ID NO: 178837 - DNA, 15 bp, Homo sapiens
caggacagacacaaa

SEQ ID NO: 178838 - DNA, 15 bp, Homo sapiens
ccaggacagacacaa

SEQ ID NO: 178839 - DNA, 15 bp, Homo sapiens
accaggacagacaca

SEQ ID NO: 178840 - DNA, 15 bp, Homo sapiens
taccaggacagacac

SEQ ID NO: 178841 - DNA, 15 bp, Homo sapiens
gtaccaggacagaca

SEQ ID NO: 178842 - DNA, 15 bp, Homo sapiens
tgtaccaggacagac

SEQ ID NO: 178843 - DNA, 15 bp, Homo sapiens
ttgtaccaggacaga

SEQ ID NO: 178844 - DNA, 15 bp, Homo sapiens
cttgtaccaggacag

SEQ ID NO: 178845 - DNA, 15 bp, Homo sapiens
ccttgtaccaggaca

SEQ ID NO: 178846 - DNA, 15 bp, Homo sapiens
tccttgtaccaggac

SEQ ID NO: 178847 - DNA, 15 bp, Homo sapiens
ttccttgtaccagga

SEQ ID NO: 178848 - DNA, 15 bp, Homo sapiens
attccttgtaccagg

SEQ ID NO: 178849 - DNA, 15 bp, Homo sapiens
cattccttgtaccag

SEQ ID NO: 178850 - DNA, 15 bp, Homo sapiens
acattccttgtacca

SEQ ID NO: 178851 - DNA, 15 bp, Homo sapiens
aacattccttgtacc

SEQ ID NO: 178852 - DNA, 15 bp, Homo sapiens
aaacattccttgtac

SEQ ID NO: 178853 - DNA, 15 bp, Homo sapiens
caaacattccttgta

SEQ ID NO: 178854 - DNA, 15 bp, Homo sapiens
ccaaacattccttgt

SEQ ID NO: 178855 - DNA, 15 bp, Homo sapiens
cccaaacattccttg

SEQ ID NO: 178856 - DNA, 15 bp, Homo sapiens
ccccaaacattcctt

SEQ ID NO: 178857 - DNA, 15 bp, Homo sapiens
gccccaaacattcct

SEQ ID NO: 178858 - DNA, 15 bp, Homo sapiens
tgccccaaacattcc

SEQ ID NO: 178859 - DNA, 15 bp, Homo sapiens
atgccccaaacattc

SEQ ID NO: 178860 - DNA, 15 bp, Homo sapiens
aatgccccaaacatt

SEQ ID NO: 178861 - DNA, 15 bp, Homo sapiens
caatgccccaaacat

SEQ ID NO: 178862 - DNA, 15 bp, Homo sapiens
ccaatgccccaaaca

SEQ ID NO: 178863 - DNA, 15 bp, Homo sapiens
accaatgccccaaac

SEQ ID NO: 178864 - DNA, 15 bp, Homo sapiens
taccaatgccccaaa

SEQ ID NO: 178865 - DNA, 15 bp, Homo sapiens
ataccaatgccccaa

SEQ ID NO: 178866 - DNA, 15 bp, Homo sapiens
tataccaatgcccca

SEQ ID NO: 178867 - DNA, 15 bp, Homo sapiens
ttataccaatgcccc

SEQ ID NO: 178868 - DNA, 15 bp, Homo sapiens
cttataccaatgccc

SEQ ID NO: 178869 - DNA, 15 bp, Homo sapiens
tcttataccaatgcc

SEQ ID NO: 178870 - DNA, 15 bp, Homo sapiens
ttcttataccaatgc

SEQ ID NO: 178871 - DNA, 15 bp, Homo sapiens
cttcttataccaatg

SEQ ID NO: 178872 - DNA, 15 bp, Homo sapiens
gcttcttataccaat

SEQ ID NO: 178873 - DNA, 15 bp, Homo sapiens
agcttcttataccaa

SEQ ID NO: 178874 - DNA, 15 bp, Homo sapiens
gagcttcttatacca

SEQ ID NO: 178875 - DNA, 15 bp, Homo sapiens
ggagcttcttatacc

SEQ ID NO: 178876 - DNA, 15 bp, Homo sapiens
gggagcttcttatac

SEQ ID NO: 178877 - DNA, 15 bp, Homo sapiens
tgggagcttcttata

SEQ ID NO: 178878 - DNA, 15 bp, Homo sapiens
ctgggagcttcttat

SEQ ID NO: 178879 - DNA, 15 bp, Homo sapiens
tctgggagcttctta

SEQ ID NO: 178880 - DNA, 15 bp, Homo sapiens
ctctgggagcttctt

SEQ ID NO: 178881 - DNA, 15 bp, Homo sapiens
tctctgggagcttct

SEQ ID NO: 178882 - DNA, 15 bp, Homo sapiens
ttctctgggagcttc

SEQ ID NO: 178883 - DNA, 15 bp, Homo sapiens
tttctctgggagctt

SEQ ID NO: 178884 - DNA, 15 bp, Homo sapiens
ttttctctgggagct

SEQ ID NO: 178885 - DNA, 15 bp, Homo sapiens
cttttctctgggagc

SEQ ID NO: 178886 - DNA, 15 bp, Homo sapiens
ccttttctctgggag

SEQ ID NO: 178887 - DNA, 15 bp, Homo sapiens
accttttctctggga

SEQ ID NO: 178888 - DNA, 15 bp, Homo sapiens
caccttttctctggg

SEQ ID NO: 178889 - DNA, 15 bp, Homo sapiens
tcaccttttctctgg

SEQ ID NO: 178890 - DNA, 15 bp, Homo sapiens
atcaccttttctctg

SEQ ID NO: 178891 - DNA, 15 bp, Homo sapiens
catcaccttttctct

SEQ ID NO: 178892 - DNA, 15 bp, Homo sapiens
ccatcaccttttctc

SEQ ID NO: 178893 - DNA, 15 bp, Homo sapiens
accatcaccttttct

SEQ ID NO: 178894 - DNA, 15 bp, Homo sapiens
caccatcaccttttc

SEQ ID NO: 178895 - DNA, 15 bp, Homo sapiens
tcaccatcacctttt

SEQ ID NO: 178896 - DNA, 15 bp, Homo sapiens
gtcaccatcaccttt

SEQ ID NO: 178897 - DNA, 15 bp, Homo sapiens
agtcaccatcacctt

SEQ ID NO: 178898 - DNA, 15 bp, Homo sapiens
aagtcaccatcacct

SEQ ID NO: 178899 - DNA, 15 bp, Homo sapiens
taagtcaccatcacc

SEQ ID NO: 178900 - DNA, 15 bp, Homo sapiens
ctaagtcaccatcac

SEQ ID NO: 178901 - DNA, 15 bp, Homo sapiens
gctaagtcaccatca

SEQ ID NO: 178902 - DNA, 15 bp, Homo sapiens
agctaagtcaccatc

SEQ ID NO: 178903 - DNA, 15 bp, Homo sapiens
aagctaagtcaccat

SEQ ID NO: 178904 - DNA, 15 bp, Homo sapiens
aaagctaagtcacca

SEQ ID NO: 178905 - DNA, 15 bp, Homo sapiens
caaagctaagtcacc

SEQ ID NO: 178906 - DNA, 15 bp, Homo sapiens
acaaagctaagtcac

SEQ ID NO: 178907 - DNA, 15 bp, Homo sapiens
cacaaagctaagtca

SEQ ID NO: 178908 - DNA, 15 bp, Homo sapiens
gcacaaagctaagtc

SEQ ID NO: 178909 - DNA, 15 bp, Homo sapiens
tgcacaaagctaagt

SEQ ID NO: 178910 - DNA, 15 bp, Homo sapiens
gtgcacaaagctaag

SEQ ID NO: 178911 - DNA, 15 bp, Homo sapiens
agtgcacaaagctaa

SEQ ID NO: 178912 - DNA, 15 bp, Homo sapiens
cagtgcacaaagcta

SEQ ID NO: 178913 - DNA, 15 bp, Homo sapiens
gcagtgcacaaagct

SEQ ID NO: 178914 - DNA, 15 bp, Homo sapiens
tgcagtgcacaaagc

SEQ ID NO: 178915 - DNA, 15 bp, Homo sapiens
atgcagtgcacaaag

SEQ ID NO: 178916 - DNA, 15 bp, Homo sapiens
gatgcagtgcacaaa

SEQ ID NO: 178917 - DNA, 15 bp, Homo sapiens
tgatgcagtgcacaa

SEQ ID NO: 178918 - DNA, 15 bp, Homo sapiens
gtgatgcagtgcaca

SEQ ID NO: 178919 - DNA, 15 bp, Homo sapiens
ggtgatgcagtgcac

SEQ ID NO: 178920 - DNA, 15 bp, Homo sapiens
gggtgatgcagtgca

SEQ ID NO: 178921 - DNA, 15 bp, Homo sapiens
agggtgatgcagtgc

SEQ ID NO: 178922 - DNA, 15 bp, Homo sapiens
gagggtgatgcagtg

SEQ ID NO: 178923 - DNA, 15 bp, Homo sapiens
tgagggtgatgcagt

SEQ ID NO: 178924 - DNA, 15 bp, Homo sapiens
gtgagggtgatgcag

SEQ ID NO: 178925 - DNA, 15 bp, Homo sapiens
tgtgagggtgatgca

SEQ ID NO: 178926 - DNA, 15 bp, Homo sapiens
ctgtgagggtgatgc

SEQ ID NO: 178927 - DNA, 15 bp, Homo sapiens
cctgtgagggtgatg

SEQ ID NO: 178928 - DNA, 15 bp, Homo sapiens
gcctgtgagggtgat

SEQ ID NO: 178929 - DNA, 15 bp, Homo sapiens
tgcctgtgagggtga

SEQ ID NO: 178930 - DNA, 15 bp, Homo sapiens
ttgcctgtgagggtg

SEQ ID NO: 178931 - DNA, 15 bp, Homo sapiens
gttgcctgtgagggt

SEQ ID NO: 178932 - DNA, 15 bp, Homo sapiens
cgttgcctgtgaggg

SEQ ID NO: 178933 - DNA, 15 bp, Homo sapiens
gcgttgcctgtgagg

SEQ ID NO: 178934 - DNA, 15 bp, Homo sapiens
agcgttgcctgtgag

SEQ ID NO: 178935 - DNA, 15 bp, Homo sapiens
cagcgttgcctgtga

SEQ ID NO: 178936 - DNA, 15 bp, Homo sapiens
acagcgttgcctgtg

SEQ ID NO: 178937 - DNA, 15 bp, Homo sapiens
gacagcgttgcctgt

SEQ ID NO: 178938 - DNA, 15 bp, Homo sapiens
agacagcgttgcctg

SEQ ID NO: 178939 - DNA, 15 bp, Homo sapiens
cagacagcgttgcct

SEQ ID NO: 178940 - DNA, 15 bp, Homo sapiens
gcagacagcgttgcc

SEQ ID NO: 178941 - DNA, 15 bp, Homo sapiens
agcagacagcgttgc

SEQ ID NO: 178942 - DNA, 15 bp, Homo sapiens
gagcagacagcgttg

SEQ ID NO: 178943 - DNA, 15 bp, Homo sapiens
agagcagacagcgtt

SEQ ID NO: 178944 - DNA, 15 bp, Homo sapiens
tagagcagacagcgt

SEQ ID NO: 178945 - DNA, 15 bp, Homo sapiens
ctagagcagacagcg

SEQ ID NO: 178946 - DNA, 15 bp, Homo sapiens
cctagagcagacagc

SEQ ID NO: 178947 - DNA, 15 bp, Homo sapiens
gcctagagcagacag

SEQ ID NO: 178948 - DNA, 15 bp, Homo sapiens
cgcctagagcagaca

SEQ ID NO: 178949 - DNA, 15 bp, Homo sapiens
acgcctagagcagac

SEQ ID NO: 178950 - DNA, 15 bp, Homo sapiens
cacgcctagagcaga

SEQ ID NO: 178951 - DNA, 15 bp, Homo sapiens
tcacgcctagagcag

SEQ ID NO: 178952 - DNA, 15 bp, Homo sapiens
gtcacgcctagagca

SEQ ID NO: 178953 - DNA, 15 bp, Homo sapiens
agtcacgcctagagc

SEQ ID NO: 178954 - DNA, 15 bp, Homo sapiens
aagtcacgcctagag

SEQ ID NO: 178955 - DNA, 15 bp, Homo sapiens
caagtcacgcctaga

SEQ ID NO: 178956 - DNA, 15 bp, Homo sapiens
gcaagtcacgcctag

SEQ ID NO: 178957 - DNA, 15 bp, Homo sapiens
tgcaagtcacgccta

SEQ ID NO: 178958 - DNA, 15 bp, Homo sapiens
gtgcaagtcacgcct

SEQ ID NO: 178959 - DNA, 15 bp, Homo sapiens
agtgcaagtcacgcc

SEQ ID NO: 178960 - DNA, 15 bp, Homo sapiens
tagtgcaagtcacgc

SEQ ID NO: 178961 - DNA, 15 bp, Homo sapiens
ttagtgcaagtcacg

SEQ ID NO: 178962 - DNA, 15 bp, Homo sapiens
cttagtgcaagtcac

SEQ ID NO: 178963 - DNA, 15 bp, Homo sapiens
acttagtgcaagtca

SEQ ID NO: 178964 - DNA, 15 bp, Homo sapiens
cacttagtgcaagtc

SEQ ID NO: 178965 - DNA, 15 bp, Homo sapiens
tcacttagtgcaagt

SEQ ID NO: 178966 - DNA, 15 bp, Homo sapiens
ttcacttagtgcaag

SEQ ID NO: 178967 - DNA, 15 bp, Homo sapiens
attcacttagtgcaa

SEQ ID NO: 178968 - DNA, 15 bp, Homo sapiens
cattcacttagtgca

SEQ ID NO: 178969 - DNA, 15 bp, Homo sapiens
acattcacttagtgc

SEQ ID NO: 178970 - DNA, 15 bp, Homo sapiens
cacattcacttagtg

SEQ ID NO: 178971 - DNA, 15 bp, Homo sapiens
ccacattcacttagt

SEQ ID NO: 178972 - DNA, 15 bp, Homo sapiens
tccacattcacttag

SEQ ID NO: 178973 - DNA, 15 bp, Homo sapiens
gtccacattcactta

SEQ ID NO: 178974 - DNA, 15 bp, Homo sapiens
tgtccacattcactt

SEQ ID NO: 178975 - DNA, 15 bp, Homo sapiens
ttgtccacattcact

SEQ ID NO: 178976 - DNA, 15 bp, Homo sapiens
cttgtccacattcac

SEQ ID NO: 178977 - DNA, 15 bp, Homo sapiens
tcttgtccacattca

SEQ ID NO: 178978 - DNA, 15 bp, Homo sapiens
atcttgtccacattc

SEQ ID NO: 178979 - DNA, 15 bp, Homo sapiens
catcttgtccacatt

SEQ ID NO: 178980 - DNA, 15 bp, Homo sapiens
ccatcttgtccacat

SEQ ID NO: 178981 - DNA, 15 bp, Homo sapiens
gccatcttgtccaca

SEQ ID NO: 178982 - DNA, 15 bp, Homo sapiens
ggccatcttgtccac

SEQ ID NO: 178983 - DNA, 15 bp, Homo sapiens
tggccatcttgtcca

SEQ ID NO: 178984 - DNA, 15 bp, Homo sapiens
gtggccatcttgtcc

SEQ ID NO: 178985 - DNA, 15 bp, Homo sapiens
agtggccatcttgtc

SEQ ID NO: 178986 - DNA, 15 bp, Homo sapiens
aagtggccatcttgt

SEQ ID NO: 178987 - DNA, 15 bp, Homo sapiens
aaagtggccatcttg

SEQ ID NO: 178988 - DNA, 15 bp, Homo sapiens
aaaagtggccatctt

SEQ ID NO: 178989 - DNA, 15 bp, Homo sapiens
aaaaagtggccatct

SEQ ID NO: 178990 - DNA, 15 bp, Homo sapiens
gaaaaagtggccatc

SEQ ID NO: 178991 - DNA, 15 bp, Homo sapiens
agaaaaagtggccat

SEQ ID NO: 178992 - DNA, 15 bp, Homo sapiens
tagaaaaagtggcca

SEQ ID NO: 178993 - DNA, 15 bp, Homo sapiens
ctagaaaaagtggcc

SEQ ID NO: 178994 - DNA, 15 bp, Homo sapiens
tctagaaaaagtggc

SEQ ID NO: 178995 - DNA, 15 bp, Homo sapiens
atctagaaaaagtgg

SEQ ID NO: 178996 - DNA, 15 bp, Homo sapiens
gatctagaaaaagtg

SEQ ID NO: 178997 - DNA, 15 bp, Homo sapiens
ggatctagaaaaagt

SEQ ID NO: 178998 - DNA, 15 bp, Homo sapiens
aggatctagaaaaag

SEQ ID NO: 178999 - DNA, 15 bp, Homo sapiens
aaggatctagaaaaa

SEQ ID NO: 179000 - DNA, 15 bp, Homo sapiens
gaaggatctagaaaa

SEQ ID NO: 179001 - DNA, 15 bp, Homo sapiens
agaaggatctagaaa

SEQ ID NO: 179002 - DNA, 15 bp, Homo sapiens
cagaaggatctagaa

SEQ ID NO: 179003 - DNA, 15 bp, Homo sapiens
ccagaaggatctaga

SEQ ID NO: 179004 - DNA, 15 bp, Homo sapiens
cccagaaggatctag

SEQ ID NO: 179005 - DNA, 15 bp, Homo sapiens
ccccagaaggatcta

SEQ ID NO: 179006 - DNA, 15 bp, Homo sapiens
tccccagaaggatct

SEQ ID NO: 179007 - DNA, 15 bp, Homo sapiens
ttccccagaaggatc

SEQ ID NO: 179008 - DNA, 15 bp, Homo sapiens
cttccccagaaggat

SEQ ID NO: 179009 - DNA, 15 bp, Homo sapiens
gcttccccagaagga

SEQ ID NO: 179010 - DNA, 15 bp, Homo sapiens
agcttccccagaagg

SEQ ID NO: 179011 - DNA, 15 bp, Homo sapiens
cagcttccccagaag

SEQ ID NO: 179012 - DNA, 15 bp, Homo sapiens
acagcttccccagaa

SEQ ID NO: 179013 - DNA, 15 bp, Homo sapiens
aacagcttccccaga

SEQ ID NO: 179014 - DNA, 15 bp, Homo sapiens
taacagcttccccag

SEQ ID NO: 179015 - DNA, 15 bp, Homo sapiens
ctaacagcttcccca

SEQ ID NO: 179016 - DNA, 15 bp, Homo sapiens
actaacagcttcccc

SEQ ID NO: 179017 - DNA, 15 bp, Homo sapiens
aactaacagcttccc

SEQ ID NO: 179018 - DNA, 15 bp, Homo sapiens
caactaacagcttcc

SEQ ID NO: 179019 - DNA, 15 bp, Homo sapiens
acaactaacagcttc

SEQ ID NO: 179020 - DNA, 15 bp, Homo sapiens
tacaactaacagctt

SEQ ID NO: 179021 - DNA, 15 bp, Homo sapiens
ttacaactaacagct

SEQ ID NO: 179022 - DNA, 15 bp, Homo sapiens
attacaactaacagc

SEQ ID NO: 179023 - DNA, 15 bp, Homo sapiens
tattacaactaacag

SEQ ID NO: 179024 - DNA, 15 bp, Homo sapiens
ctattacaactaaca

SEQ ID NO: 179025 - DNA, 15 bp, Homo sapiens
actattacaactaac

SEQ ID NO: 179026 - DNA, 15 bp, Homo sapiens
cactattacaactaa

SEQ ID NO: 179027 - DNA, 15 bp, Homo sapiens
acactattacaacta

SEQ ID NO: 179028 - DNA, 15 bp, Homo sapiens
aacactattacaact

SEQ ID NO: 179029 - DNA, 15 bp, Homo sapiens
taacactattacaac

SEQ ID NO: 179030 - DNA, 15 bp, Homo sapiens
ctaacactattacaa

SEQ ID NO: 179031 - DNA, 15 bp, Homo sapiens
tctaacactattaca

SEQ ID NO: 179032 - DNA, 15 bp, Homo sapiens
ttctaacactattac

SEQ ID NO: 179033 - DNA, 15 bp, Homo sapiens
gttctaacactatta

SEQ ID NO: 179034 - DNA, 15 bp, Homo sapiens
ggttctaacactatt

SEQ ID NO: 179035 - DNA, 15 bp, Homo sapiens
aggttctaacactat

SEQ ID NO: 179036 - DNA, 15 bp, Homo sapiens
taggttctaacacta

SEQ ID NO: 179037 - DNA, 15 bp, Homo sapiens
ttaggttctaacact

SEQ ID NO: 179038 - DNA, 15 bp, Homo sapiens
cttaggttctaacac

SEQ ID NO: 179039 - DNA, 15 bp, Homo sapiens
tcttaggttctaaca

SEQ ID NO: 179040 - DNA, 15 bp, Homo sapiens
ctcttaggttctaac

SEQ ID NO: 179041 - DNA, 15 bp, Homo sapiens
gctcttaggttctaa

SEQ ID NO: 179042 - DNA, 15 bp, Homo sapiens
agctcttaggttcta

SEQ ID NO: 179043 - DNA, 15 bp, Homo sapiens
tagctcttaggttct

SEQ ID NO: 179044 - DNA, 15 bp, Homo sapiens
ctagctcttaggttc

SEQ ID NO: 179045 - DNA, 15 bp, Homo sapiens
tctagctcttaggtt

SEQ ID NO: 179046 - DNA, 15 bp, Homo sapiens
ttctagctcttaggt

SEQ ID NO: 179047 - DNA, 15 bp, Homo sapiens
cttctagctcttagg

SEQ ID NO: 179048 - DNA, 15 bp, Homo sapiens
tcttctagctcttag

SEQ ID NO: 179049 - DNA, 15 bp, Homo sapiens
ctcttctagctctta

SEQ ID NO: 179050 - DNA, 15 bp, Homo sapiens
tctcttctagctctt

SEQ ID NO: 179051 - DNA, 15 bp, Homo sapiens
gtctcttctagctct

SEQ ID NO: 179052 - DNA, 15 bp, Homo sapiens
agtctcttctagctc

SEQ ID NO: 179053 - DNA, 15 bp, Homo sapiens
aagtctcttctagct

SEQ ID NO: 179054 - DNA, 15 bp, Homo sapiens
aaagtctcttctagc

SEQ ID NO: 179055 - DNA, 15 bp, Homo sapiens
caaagtctcttctag

SEQ ID NO: 179056 - DNA, 15 bp, Homo sapiens
ccaaagtctcttcta

SEQ ID NO: 179057 - DNA, 15 bp, Homo sapiens
tccaaagtctcttct

SEQ ID NO: 179058 - DNA, 15 bp, Homo sapiens
ctccaaagtctcttc

SEQ ID NO: 179059 - DNA, 15 bp, Homo sapiens
tctccaaagtctctt

SEQ ID NO: 179060 - DNA, 15 bp, Homo sapiens
atctccaaagtctct

SEQ ID NO: 179061 - DNA, 15 bp, Homo sapiens
catctccaaagtctc

SEQ ID NO: 179062 - DNA, 15 bp, Homo sapiens
tcatctccaaagtct

SEQ ID NO: 179063 - DNA, 15 bp, Homo sapiens
atcatctccaaagtc

SEQ ID NO: 179064 - DNA, 15 bp, Homo sapiens
aatcatctccaaagt

SEQ ID NO: 179065 - DNA, 15 bp, Homo sapiens
aaatcatctccaaag

SEQ ID NO: 179066 - DNA, 15 bp, Homo sapiens
taaatcatctccaaa

SEQ ID NO: 179067 - DNA, 15 bp, Homo sapiens
gtaaatcatctccaa

SEQ ID NO: 179068 - DNA, 15 bp, Homo sapiens
agtaaatcatctcca

SEQ ID NO: 179069 - DNA, 15 bp, Homo sapiens
cagtaaatcatctcc

SEQ ID NO: 179070 - DNA, 15 bp, Homo sapiens
gcagtaaatcatctc

SEQ ID NO: 179071 - DNA, 15 bp, Homo sapiens
tgcagtaaatcatct

SEQ ID NO: 179072 - DNA, 15 bp, Homo sapiens
atgcagtaaatcatc

SEQ ID NO: 179073 - DNA, 15 bp, Homo sapiens
aatgcagtaaatcat

SEQ ID NO: 179074 - DNA, 15 bp, Homo sapiens
aaatgcagtaaatca

SEQ ID NO: 179075 - DNA, 15 bp, Homo sapiens
aaaatgcagtaaatc

SEQ ID NO: 179076 - DNA, 15 bp, Homo sapiens
taaaatgcagtaaat

SEQ ID NO: 179077 - DNA, 15 bp, Homo sapiens
ataaaatgcagtaaa

SEQ ID NO: 179078 - DNA, 15 bp, Homo sapiens
cataaaatgcagtaa

SEQ ID NO: 179079 - DNA, 15 bp, Homo sapiens
acataaaatgcagta

SEQ ID NO: 179080 - DNA, 15 bp, Homo sapiens
aacataaaatgcagt

SEQ ID NO: 179081 - DNA, 15 bp, Homo sapiens
taacataaaatgcag

SEQ ID NO: 179082 - DNA, 15 bp, Homo sapiens
ctaacataaaatgca

SEQ ID NO: 179083 - DNA, 15 bp, Homo sapiens
tctaacataaaatgc

SEQ ID NO: 179084 - DNA, 15 bp, Homo sapiens
gtctaacataaaatg

SEQ ID NO: 179085 - DNA, 15 bp, Homo sapiens
agtctaacataaaat

SEQ ID NO: 179086 - DNA, 15 bp, Homo sapiens
aagtctaacataaaa

SEQ ID NO: 179087 - DNA, 15 bp, Homo sapiens
taagtctaacataaa

SEQ ID NO: 179088 - DNA, 15 bp, Homo sapiens
ctaagtctaacataa

SEQ ID NO: 179089 - DNA, 15 bp, Homo sapiens
tctaagtctaacata

SEQ ID NO: 179090 - DNA, 15 bp, Homo sapiens
gtctaagtctaacat

SEQ ID NO: 179091 - DNA, 15 bp, Homo sapiens
tgtctaagtctaaca

SEQ ID NO: 179092 - DNA, 15 bp, Homo sapiens
ttgtctaagtctaac

SEQ ID NO: 179093 - DNA, 15 bp, Homo sapiens
attgtctaagtctaa

SEQ ID NO: 179094 - DNA, 15 bp, Homo sapiens
aattgtctaagtcta

SEQ ID NO: 179095 - DNA, 15 bp, Homo sapiens
aaattgtctaagtct

SEQ ID NO: 179096 - DNA, 15 bp, Homo sapiens
aaaattgtctaagtc

SEQ ID NO: 179097 - DNA, 15 bp, Homo sapiens
aaaaattgtctaagt

SEQ ID NO: 179098 - DNA, 15 bp, Homo sapiens
aaaaaattgtctaag

SEQ ID NO: 179099 - DNA, 15 bp, Homo sapiens
aaaaaaattgtctaa

SEQ ID NO: 179100 - DNA, 15 bp, Homo sapiens
taaaaaaattgtcta

SEQ ID NO: 179101 - DNA, 15 bp, Homo sapiens
gtaaaaaaattgtct

SEQ ID NO: 179102 - DNA, 15 bp, Homo sapiens
tgtaaaaaaattgtc

SEQ ID NO: 179103 - DNA, 15 bp, Homo sapiens
ttgtaaaaaaattgt

SEQ ID NO: 179104 - DNA, 15 bp, Homo sapiens
tttgtaaaaaaattg

SEQ ID NO: 179105 - DNA, 15 bp, Homo sapiens
ttttgtaaaaaaatt

SEQ ID NO: 179106 - DNA, 15 bp, Homo sapiens
cttttgtaaaaaaat

SEQ ID NO: 179107 - DNA, 15 bp, Homo sapiens
ccttttgtaaaaaaa

SEQ ID NO: 179108 - DNA, 15 bp, Homo sapiens
cccttttgtaaaaaa

SEQ ID NO: 179109 - DNA, 15 bp, Homo sapiens
tcccttttgtaaaaa

SEQ ID NO: 179110 - DNA, 15 bp, Homo sapiens
ttcccttttgtaaaa

SEQ ID NO: 179111 - DNA, 15 bp, Homo sapiens
tttcccttttgtaaa

SEQ ID NO: 179112 - DNA, 15 bp, Homo sapiens
ttttcccttttgtaa

SEQ ID NO: 179113 - DNA, 15 bp, Homo sapiens
tttttcccttttgta

SEQ ID NO: 179114 - DNA, 15 bp, Homo sapiens
atttttcccttttgt

SEQ ID NO: 179115 - DNA, 15 bp, Homo sapiens
aatttttcccttttg

SEQ ID NO: 179116 - DNA, 15 bp, Homo sapiens
taatttttccctttt

SEQ ID NO: 179117 - DNA, 15 bp, Homo sapiens
ttaatttttcccttt

SEQ ID NO: 179118 - DNA, 15 bp, Homo sapiens
tttaatttttccctt

SEQ ID NO: 179119 - DNA, 15 bp, Homo sapiens
ttttaatttttccct

SEQ ID NO: 179120 - DNA, 15 bp, Homo sapiens
tttttaatttttccc

SEQ ID NO: 179121 - DNA, 15 bp, Homo sapiens
ctttttaatttttcc

SEQ ID NO: 179122 - DNA, 15 bp, Homo sapiens
gctttttaatttttc

SEQ ID NO: 179123 - DNA, 15 bp, Homo sapiens
ggctttttaattttt

SEQ ID NO: 179124 - DNA, 15 bp, Homo sapiens
gggctttttaatttt

SEQ ID NO: 179125 - DNA, 15 bp, Homo sapiens
ggggctttttaattt

SEQ ID NO: 179126 - DNA, 15 bp, Homo sapiens
tggggctttttaatt

SEQ ID NO: 179127 - DNA, 15 bp, Homo sapiens
ctggggctttttaat

SEQ ID NO: 179128 - DNA, 15 bp, Homo sapiens
tctggggctttttaa

SEQ ID NO: 179129 - DNA, 15 bp, Homo sapiens
ctctggggcttttta

SEQ ID NO: 179130 - DNA, 15 bp, Homo sapiens
tctctggggcttttt

SEQ ID NO: 179131 - DNA, 15 bp, Homo sapiens
ctctctggggctttt

SEQ ID NO: 179132 - DNA, 15 bp, Homo sapiens
tctctctggggcttt

SEQ ID NO: 179133 - DNA, 15 bp, Homo sapiens
gtctctctggggctt

SEQ ID NO: 179134 - DNA, 15 bp, Homo sapiens
ggtctctctggggct

SEQ ID NO: 179135 - DNA, 15 bp, Homo sapiens
aggtctctctggggc

SEQ ID NO: 179136 - DNA, 15 bp, Homo sapiens
caggtctctctgggg

SEQ ID NO: 179137 - DNA, 15 bp, Homo sapiens
ccaggtctctctggg

SEQ ID NO: 179138 - DNA, 15 bp, Homo sapiens
tccaggtctctctgg

SEQ ID NO: 179139 - DNA, 15 bp, Homo sapiens
gtccaggtctctctg

SEQ ID NO: 179140 - DNA, 15 bp, Homo sapiens
agtccaggtctctct

SEQ ID NO: 179141 - DNA, 15 bp, Homo sapiens
aagtccaggtctctc

SEQ ID NO: 179142 - DNA, 15 bp, Homo sapiens
taagtccaggtctct

SEQ ID NO: 179143 - DNA, 15 bp, Homo sapiens
gtaagtccaggtctc

SEQ ID NO: 179144 - DNA, 15 bp, Homo sapiens
agtaagtccaggtct

SEQ ID NO: 179145 - DNA, 15 bp, Homo sapiens
gagtaagtccaggtc

SEQ ID NO: 179146 - DNA, 15 bp, Homo sapiens
tgagtaagtccaggt

SEQ ID NO: 179147 - DNA, 15 bp, Homo sapiens
ttgagtaagtccagg

SEQ ID NO: 179148 - DNA, 15 bp, Homo sapiens
tttgagtaagtccag

SEQ ID NO: 179149 - DNA, 15 bp, Homo sapiens
ctttgagtaagtcca

SEQ ID NO: 179150 - DNA, 15 bp, Homo sapiens
gctttgagtaagtcc

SEQ ID NO: 179151 - DNA, 15 bp, Homo sapiens
ggctttgagtaagtc

SEQ ID NO: 179152 - DNA, 15 bp, Homo sapiens
tggctttgagtaagt

SEQ ID NO: 179153 - DNA, 15 bp, Homo sapiens
gtggctttgagtaag

SEQ ID NO: 179154 - DNA, 15 bp, Homo sapiens
tgtggctttgagtaa

SEQ ID NO: 179155 - DNA, 15 bp, Homo sapiens
gtgtggctttgagta

SEQ ID NO: 179156 - DNA, 15 bp, Homo sapiens
tgtgtggctttgagt

SEQ ID NO: 179157 - DNA, 15 bp, Homo sapiens
ttgtgtggctttgag

SEQ ID NO: 179158 - DNA, 15 bp, Homo sapiens
cttgtgtggctttga

SEQ ID NO: 179159 - DNA, 15 bp, Homo sapiens
acttgtgtggctttg

SEQ ID NO: 179160 - DNA, 15 bp, Homo sapiens
tacttgtgtggcttt

SEQ ID NO: 179161 - DNA, 15 bp, Homo sapiens
ctacttgtgtggctt

SEQ ID NO: 179162 - DNA, 15 bp, Homo sapiens
actacttgtgtggct

SEQ ID NO: 179163 - DNA, 15 bp, Homo sapiens
aactacttgtgtggc

SEQ ID NO: 179164 - DNA, 15 bp, Homo sapiens
caactacttgtgtgg

SEQ ID NO: 179165 - DNA, 15 bp, Homo sapiens
tcaactacttgtgtg

SEQ ID NO: 179166 - DNA, 15 bp, Homo sapiens
ctcaactacttgtgt

SEQ ID NO: 179167 - DNA, 15 bp, Homo sapiens
gctcaactacttgtg

SEQ ID NO: 179168 - DNA, 15 bp, Homo sapiens
tgctcaactacttgt

SEQ ID NO: 179169 - DNA, 15 bp, Homo sapiens
gtgctcaactacttg

SEQ ID NO: 179170 - DNA, 15 bp, Homo sapiens
tgtgctcaactactt

SEQ ID NO: 179171 - DNA, 15 bp, Homo sapiens
ctgtgctcaactact

SEQ ID NO: 179172 - DNA, 15 bp, Homo sapiens
actgtgctcaactac

SEQ ID NO: 179173 - DNA, 15 bp, Homo sapiens
cactgtgctcaacta

SEQ ID NO: 179174 - DNA, 15 bp, Homo sapiens
ccactgtgctcaact

SEQ ID NO: 179175 - DNA, 15 bp, Homo sapiens
gccactgtgctcaac

SEQ ID NO: 179176 - DNA, 15 bp, Homo sapiens
agccactgtgctcaa

SEQ ID NO: 179177 - DNA, 15 bp, Homo sapiens
cagccactgtgctca

SEQ ID NO: 179178 - DNA, 15 bp, Homo sapiens
tcagccactgtgctc

SEQ ID NO: 179179 - DNA, 15 bp, Homo sapiens
ctcagccactgtgct

SEQ ID NO: 179180 - DNA, 15 bp, Homo sapiens
tctcagccactgtgc

SEQ ID NO: 179181 - DNA, 15 bp, Homo sapiens
atctcagccactgtg

SEQ ID NO: 179182 - DNA, 15 bp, Homo sapiens
catctcagccactgt

SEQ ID NO: 179183 - DNA, 15 bp, Homo sapiens
tcatctcagccactg

SEQ ID NO: 179184 - DNA, 15 bp, Homo sapiens
ttcatctcagccact

SEQ ID NO: 179185 - DNA, 15 bp, Homo sapiens
attcatctcagccac

SEQ ID NO: 179186 - DNA, 15 bp, Homo sapiens
gattcatctcagcca

SEQ ID NO: 179187 - DNA, 15 bp, Homo sapiens
tgattcatctcagcc

SEQ ID NO: 179188 - DNA, 15 bp, Homo sapiens
atgattcatctcagc

SEQ ID NO: 179189 - DNA, 15 bp, Homo sapiens
aatgattcatctcag

SEQ ID NO: 179190 - DNA, 15 bp, Homo sapiens
aaatgattcatctca

SEQ ID NO: 179191 - DNA, 15 bp, Homo sapiens
aaaatgattcatctc

SEQ ID NO: 179192 - DNA, 15 bp, Homo sapiens
caaaatgattcatct

SEQ ID NO: 179193 - DNA, 15 bp, Homo sapiens
acaaaatgattcatc

SEQ ID NO: 179194 - DNA, 15 bp, Homo sapiens
cacaaaatgattcat

SEQ ID NO: 179195 - DNA, 15 bp, Homo sapiens
acacaaaatgattca

SEQ ID NO: 179196 - DNA, 15 bp, Homo sapiens
gacacaaaatgattc

SEQ ID NO: 179197 - DNA, 15 bp, Homo sapiens
agacacaaaatgatt

SEQ ID NO: 179198 - DNA, 15 bp, Homo sapiens
aagacacaaaatgat

SEQ ID NO: 179199 - DNA, 15 bp, Homo sapiens
aaagacacaaaatga

SEQ ID NO: 179200 - DNA, 15 bp, Homo sapiens
gaaagacacaaaatg

SEQ ID NO: 179201 - DNA, 15 bp, Homo sapiens
ggaaagacacaaaat

SEQ ID NO: 179202 - DNA, 15 bp, Homo sapiens
gggaaagacacaaaa

SEQ ID NO: 179203 - DNA, 15 bp, Homo sapiens
ggggaaagacacaaa

SEQ ID NO: 179204 - DNA, 15 bp, Homo sapiens
tggggaaagacacaa

SEQ ID NO: 179205 - DNA, 15 bp, Homo sapiens
ttggggaaagacaca

SEQ ID NO: 179206 - DNA, 15 bp, Homo sapiens
cttggggaaagacac

SEQ ID NO: 179207 - DNA, 15 bp, Homo sapiens
ccttggggaaagaca

SEQ ID NO: 179208 - DNA, 15 bp, Homo sapiens
tccttggggaaagac

SEQ ID NO: 179209 - DNA, 15 bp, Homo sapiens
atccttggggaaaga

SEQ ID NO: 179210 - DNA, 15 bp, Homo sapiens
gatccttggggaaag

SEQ ID NO: 179211 - DNA, 15 bp, Homo sapiens
agatccttggggaaa

SEQ ID NO: 179212 - DNA, 15 bp, Homo sapiens
gagatccttggggaa

SEQ ID NO: 179213 - DNA, 15 bp, Homo sapiens
agagatccttgggga

SEQ ID NO: 179214 - DNA, 15 bp, Homo sapiens
gagagatccttgggg

SEQ ID NO: 179215 - DNA, 15 bp, Homo sapiens
agagagatccttggg

SEQ ID NO: 179216 - DNA, 15 bp, Homo sapiens
aagagagatccttgg

SEQ ID NO: 179217 - DNA, 15 bp, Homo sapiens
aaagagagatccttg

SEQ ID NO: 179218 - DNA, 15 bp, Homo sapiens
gaaagagagatcctt

SEQ ID NO: 179219 - DNA, 15 bp, Homo sapiens
ggaaagagagatcct

SEQ ID NO: 179220 - DNA, 15 bp, Homo sapiens
aggaaagagagatcc

SEQ ID NO: 179221 - DNA, 15 bp, Homo sapiens
aaggaaagagagatc

SEQ ID NO: 179222 - DNA, 15 bp, Homo sapiens
caaggaaagagagat

SEQ ID NO: 179223 - DNA, 15 bp, Homo sapiens
acaaggaaagagaga

SEQ ID NO: 179224 - DNA, 15 bp, Homo sapiens
gacaaggaaagagag

SEQ ID NO: 179225 - DNA, 15 bp, Homo sapiens
ggacaaggaaagaga

SEQ ID NO: 179226 - DNA, 15 bp, Homo sapiens
gggacaaggaaagag

SEQ ID NO: 179227 - DNA, 15 bp, Homo sapiens
agggacaaggaaaga

SEQ ID NO: 179228 - DNA, 15 bp, Homo sapiens
gagggacaaggaaag

SEQ ID NO: 179229 - DNA, 15 bp, Homo sapiens
agagggacaaggaaa

SEQ ID NO: 179230 - DNA, 15 bp, Homo sapiens
cagagggacaaggaa

SEQ ID NO: 179231 - DNA, 15 bp, Homo sapiens
acagagggacaagga

SEQ ID NO: 179232 - DNA, 15 bp, Homo sapiens
gacagagggacaagg

SEQ ID NO: 179233 - DNA, 15 bp, Homo sapiens
agacagagggacaag

SEQ ID NO: 179234 - DNA, 15 bp, Homo sapiens
tagacagagggacaa

SEQ ID NO: 179235 - DNA, 15 bp, Homo sapiens
atagacagagggaca

SEQ ID NO: 179236 - DNA, 15 bp, Homo sapiens
gatagacagagggac

SEQ ID NO: 179237 - DNA, 15 bp, Homo sapiens
ggatagacagaggga

SEQ ID NO: 179238 - DNA, 15 bp, Homo sapiens
aggatagacagaggg

SEQ ID NO: 179239 - DNA, 15 bp, Homo sapiens
caggatagacagagg

SEQ ID NO: 179240 - DNA, 15 bp, Homo sapiens
ccaggatagacagag

SEQ ID NO: 179241 - DNA, 15 bp, Homo sapiens
accaggatagacaga

SEQ ID NO: 179242 - DNA, 15 bp, Homo sapiens
gaccaggatagacag

SEQ ID NO: 179243 - DNA, 15 bp, Homo sapiens
tgaccaggatagaca

SEQ ID NO: 179244 - DNA, 15 bp, Homo sapiens
ttgaccaggatagac

SEQ ID NO: 179245 - DNA, 15 bp, Homo sapiens
attgaccaggataga

SEQ ID NO: 179246 - DNA, 15 bp, Homo sapiens
tattgaccaggatag

SEQ ID NO: 179247 - DNA, 15 bp, Homo sapiens
ctattgaccaggata

SEQ ID NO: 179248 - DNA, 15 bp, Homo sapiens
gctattgaccaggat

SEQ ID NO: 179249 - DNA, 15 bp, Homo sapiens
tgctattgaccagga

SEQ ID NO: 179250 - DNA, 15 bp, Homo sapiens
atgctattgaccagg

SEQ ID NO: 179251 - DNA, 15 bp, Homo sapiens
gatgctattgaccag

SEQ ID NO: 179252 - DNA, 15 bp, Homo sapiens
tgatgctattgacca

SEQ ID NO: 179253 - DNA, 15 bp, Homo sapiens
atgatgctattgacc

SEQ ID NO: 179254 - DNA, 15 bp, Homo sapiens
aatgatgctattgac

SEQ ID NO: 179255 - DNA, 15 bp, Homo sapiens
caatgatgctattga

SEQ ID NO: 179256 - DNA, 15 bp, Homo sapiens
acaatgatgctattg

SEQ ID NO: 179257 - DNA, 15 bp, Homo sapiens
aacaatgatgctatt

SEQ ID NO: 179258 - DNA, 15 bp, Homo sapiens
aaacaatgatgctat

SEQ ID NO: 179259 - DNA, 15 bp, Homo sapiens
caaacaatgatgcta

SEQ ID NO: 179260 - DNA, 15 bp, Homo sapiens
tcaaacaatgatgct

SEQ ID NO: 179261 - DNA, 15 bp, Homo sapiens
ttcaaacaatgatgc

SEQ ID NO: 179262 - DNA, 15 bp, Homo sapiens
cttcaaacaatgatg

SEQ ID NO: 179263 - DNA, 15 bp, Homo sapiens
acttcaaacaatgat

SEQ ID NO: 179264 - DNA, 15 bp, Homo sapiens
cacttcaaacaatga

SEQ ID NO: 179265 - DNA, 15 bp, Homo sapiens
tcacttcaaacaatg

SEQ ID NO: 179266 - DNA, 15 bp, Homo sapiens
ctcacttcaaacaat

SEQ ID NO: 179267 - DNA, 15 bp, Homo sapiens
actcacttcaaacaa

SEQ ID NO: 179268 - DNA, 15 bp, Homo sapiens
aactcacttcaaaca

SEQ ID NO: 179269 - DNA, 15 bp, Homo sapiens
aaactcacttcaaac

SEQ ID NO: 179270 - DNA, 15 bp, Homo sapiens
aaaactcacttcaaa

SEQ ID NO: 179271 - DNA, 15 bp, Homo sapiens
aaaaactcacttcaa

SEQ ID NO: 179272 - DNA, 15 bp, Homo sapiens
caaaaactcacttca

SEQ ID NO: 179273 - DNA, 15 bp, Homo sapiens
ccaaaaactcacttc

SEQ ID NO: 179274 - DNA, 15 bp, Homo sapiens
tccaaaaactcactt

SEQ ID NO: 179275 - DNA, 15 bp, Homo sapiens
ttccaaaaactcact

SEQ ID NO: 179276 - DNA, 15 bp, Homo sapiens
gttccaaaaactcac

SEQ ID NO: 179277 - DNA, 15 bp, Homo sapiens
tgttccaaaaactca

SEQ ID NO: 179278 - DNA, 15 bp, Homo sapiens
ctgttccaaaaactc

SEQ ID NO: 179279 - DNA, 15 bp, Homo sapiens
cctgttccaaaaact

SEQ ID NO: 179280 - DNA, 15 bp, Homo sapiens
tcctgttccaaaaac

SEQ ID NO: 179281 - DNA, 15 bp, Homo sapiens
gtcctgttccaaaaa

SEQ ID NO: 179282 - DNA, 15 bp, Homo sapiens
ggtcctgttccaaaa

SEQ ID NO: 179283 - DNA, 15 bp, Homo sapiens
gggtcctgttccaaa

SEQ ID NO: 179284 - DNA, 15 bp, Homo sapiens
tgggtcctgttccaa

SEQ ID NO: 179285 - DNA, 15 bp, Homo sapiens
ctgggtcctgttcca

SEQ ID NO: 179286 - DNA, 15 bp, Homo sapiens
gctgggtcctgttcc

SEQ ID NO: 179287 - DNA, 15 bp, Homo sapiens
agctgggtcctgttc

SEQ ID NO: 179288 - DNA, 15 bp, Homo sapiens
cagctgggtcctgtt

SEQ ID NO: 179289 - DNA, 15 bp, Homo sapiens
gcagctgggtcctgt

SEQ ID NO: 179290 - DNA, 15 bp, Homo sapiens
tgcagctgggtcctg

SEQ ID NO: 179291 - DNA, 15 bp, Homo sapiens
atgcagctgggtcct

SEQ ID NO: 179292 - DNA, 15 bp, Homo sapiens
aatgcagctgggtcc

SEQ ID NO: 179293 - DNA, 15 bp, Homo sapiens
gaatgcagctgggtc

SEQ ID NO: 179294 - DNA, 15 bp, Homo sapiens
cgaatgcagctgggt

SEQ ID NO: 179295 - DNA, 15 bp, Homo sapiens
ccgaatgcagctggg

SEQ ID NO: 179296 - DNA, 15 bp, Homo sapiens
accgaatgcagctgg

SEQ ID NO: 179297 - DNA, 15 bp, Homo sapiens
caccgaatgcagctg

SEQ ID NO: 179298 - DNA, 15 bp, Homo sapiens
ccaccgaatgcagct

SEQ ID NO: 179299 - DNA, 15 bp, Homo sapiens
cccaccgaatgcagc

SEQ ID NO: 179300 - DNA, 15 bp, Homo sapiens
acccaccgaatgcag

SEQ ID NO: 179301 - DNA, 15 bp, Homo sapiens
aacccaccgaatgca

SEQ ID NO: 179302 - DNA, 15 bp, Homo sapiens
taacccaccgaatgc

SEQ ID NO: 179303 - DNA, 15 bp, Homo sapiens
ctaacccaccgaatg

SEQ ID NO: 179304 - DNA, 15 bp, Homo sapiens
actaacccaccgaat

SEQ ID NO: 179305 - DNA, 15 bp, Homo sapiens
gactaacccaccgaa

SEQ ID NO: 179306 - DNA, 15 bp, Homo sapiens
ggactaacccaccga

SEQ ID NO: 179307 - DNA, 15 bp, Homo sapiens
tggactaacccaccg

SEQ ID NO: 179308 - DNA, 15 bp, Homo sapiens
ctggactaacccacc

SEQ ID NO: 179309 - DNA, 15 bp, Homo sapiens
gctggactaacccac

SEQ ID NO: 179310 - DNA, 15 bp, Homo sapiens
tgctggactaaccca

SEQ ID NO: 179311 - DNA, 15 bp, Homo sapiens
gtgctggactaaccc

SEQ ID NO: 179312 - DNA, 15 bp, Homo sapiens
ggtgctggactaacc

SEQ ID NO: 179313 - DNA, 15 bp, Homo sapiens
tggtgctggactaac

SEQ ID NO: 179314 - DNA, 15 bp, Homo sapiens
gtggtgctggactaa

SEQ ID NO: 179315 - DNA, 15 bp, Homo sapiens
tgtggtgctggacta

SEQ ID NO: 179316 - DNA, 15 bp, Homo sapiens
ttgtggtgctggact

SEQ ID NO: 179317 - DNA, 15 bp, Homo sapiens
cttgtggtgctggac

SEQ ID NO: 179318 - DNA, 15 bp, Homo sapiens
ccttgtggtgctgga

SEQ ID NO: 179319 - DNA, 15 bp, Homo sapiens
tccttgtggtgctgg

SEQ ID NO: 179320 - DNA, 15 bp, Homo sapiens
atccttgtggtgctg

SEQ ID NO: 179321 - DNA, 15 bp, Homo sapiens
gatccttgtggtgct

SEQ ID NO: 179322 - DNA, 15 bp, Homo sapiens
agatccttgtggtgc

SEQ ID NO: 179323 - DNA, 15 bp, Homo sapiens
cagatccttgtggtg

SEQ ID NO: 179324 - DNA, 15 bp, Homo sapiens
acagatccttgtggt

SEQ ID NO: 179325 - DNA, 15 bp, Homo sapiens
gacagatccttgtgg

SEQ ID NO: 179326 - DNA, 15 bp, Homo sapiens
ggacagatccttgtg

SEQ ID NO: 179327 - DNA, 15 bp, Homo sapiens
aggacagatccttgt

SEQ ID NO: 179328 - DNA, 15 bp, Homo sapiens
aaggacagatccttg

SEQ ID NO: 179329 - DNA, 15 bp, Homo sapiens
aaaggacagatcctt

SEQ ID NO: 179330 - DNA, 15 bp, Homo sapiens
taaaggacagatcct

SEQ ID NO: 179331 - DNA, 15 bp, Homo sapiens
ctaaaggacagatcc

SEQ ID NO: 179332 - DNA, 15 bp, Homo sapiens
gctaaaggacagatc

SEQ ID NO: 179333 - DNA, 15 bp, Homo sapiens
tgctaaaggacagat

SEQ ID NO: 179334 - DNA, 15 bp, Homo sapiens
atgctaaaggacaga

SEQ ID NO: 179335 - DNA, 15 bp, Homo sapiens
aatgctaaaggacag

SEQ ID NO: 179336 - DNA, 15 bp, Homo sapiens
caatgctaaaggaca

SEQ ID NO: 179337 - DNA, 15 bp, Homo sapiens
gcaatgctaaaggac

SEQ ID NO: 179338 - DNA, 15 bp, Homo sapiens
ggcaatgctaaagga

SEQ ID NO: 179339 - DNA, 15 bp, Homo sapiens
aggcaatgctaaagg

SEQ ID NO: 179340 - DNA, 15 bp, Homo sapiens
caggcaatgctaaag

SEQ ID NO: 179341 - DNA, 15 bp, Homo sapiens
acaggcaatgctaaa

SEQ ID NO: 179342 - DNA, 15 bp, Homo sapiens
cacaggcaatgctaa

SEQ ID NO: 179343 - DNA, 15 bp, Homo sapiens
acacaggcaatgcta

SEQ ID NO: 179344 - DNA, 15 bp, Homo sapiens
gacacaggcaatgct

SEQ ID NO: 179345 - DNA, 15 bp, Homo sapiens
agacacaggcaatgc

SEQ ID NO: 179346 - DNA, 15 bp, Homo sapiens
gagacacaggcaatg

SEQ ID NO: 179347 - DNA, 15 bp, Homo sapiens
agagacacaggcaat

SEQ ID NO: 179348 - DNA, 15 bp, Homo sapiens
cagagacacaggcaa

SEQ ID NO: 179349 - DNA, 15 bp, Homo sapiens
ccagagacacaggca

SEQ ID NO: 179350 - DNA, 15 bp, Homo sapiens
gccagagacacaggc

SEQ ID NO: 179351 - DNA, 15 bp, Homo sapiens
ggccagagacacagg

SEQ ID NO: 179352 - DNA, 15 bp, Homo sapiens
aggccagagacacag

SEQ ID NO: 179353 - DNA, 15 bp, Homo sapiens
aaggccagagacaca

SEQ ID NO: 179354 - DNA, 15 bp, Homo sapiens
gaaggccagagacac

SEQ ID NO: 179355 - DNA, 15 bp, Homo sapiens
agaaggccagagaca

SEQ ID NO: 179356 - DNA, 15 bp, Homo sapiens
gagaaggccagagac

SEQ ID NO: 179357 - DNA, 15 bp, Homo sapiens
cgagaaggccagaga

SEQ ID NO: 179358 - DNA, 15 bp, Homo sapiens
acgagaaggccagag

SEQ ID NO: 179359 - DNA, 15 bp, Homo sapiens
cacgagaaggccaga

SEQ ID NO: 179360 - DNA, 15 bp, Homo sapiens
acacgagaaggccag

SEQ ID NO: 179361 - DNA, 15 bp, Homo sapiens
aacacgagaaggcca

SEQ ID NO: 179362 - DNA, 15 bp, Homo sapiens
taacacgagaaggcc

SEQ ID NO: 179363 - DNA, 15 bp, Homo sapiens
ctaacacgagaaggc

SEQ ID NO: 179364 - DNA, 15 bp, Homo sapiens
actaacacgagaagg

SEQ ID NO: 179365 - DNA, 15 bp, Homo sapiens
aactaacacgagaag

SEQ ID NO: 179366 - DNA, 15 bp, Homo sapiens
taactaacacgagaa

SEQ ID NO: 179367 - DNA, 15 bp, Homo sapiens
ctaactaacacgaga

SEQ ID NO: 179368 - DNA, 15 bp, Homo sapiens
tctaactaacacgag

SEQ ID NO: 179369 - DNA, 15 bp, Homo sapiens
ttctaactaacacga

SEQ ID NO: 179370 - DNA, 15 bp, Homo sapiens
cttctaactaacacg

SEQ ID NO: 179371 - DNA, 15 bp, Homo sapiens
tcttctaactaacac

SEQ ID NO: 179372 - DNA, 15 bp, Homo sapiens
atcttctaactaaca

SEQ ID NO: 179373 - DNA, 15 bp, Homo sapiens
aatcttctaactaac

SEQ ID NO: 179374 - DNA, 15 bp, Homo sapiens
caatcttctaactaa

SEQ ID NO: 179375 - DNA, 15 bp, Homo sapiens
tcaatcttctaacta

SEQ ID NO: 179376 - DNA, 15 bp, Homo sapiens
ctcaatcttctaact

SEQ ID NO: 179377 - DNA, 15 bp, Homo sapiens
cctcaatcttctaac

SEQ ID NO: 179378 - DNA, 15 bp, Homo sapiens
tcctcaatcttctaa

SEQ ID NO: 179379 - DNA, 15 bp, Homo sapiens
ctcctcaatcttcta

SEQ ID NO: 179380 - DNA, 15 bp, Homo sapiens
cctcctcaatcttct

SEQ ID NO: 179381 - DNA, 15 bp, Homo sapiens
gcctcctcaatcttc

SEQ ID NO: 179382 - DNA, 15 bp, Homo sapiens
tgcctcctcaatctt

SEQ ID NO: 179383 - DNA, 15 bp, Homo sapiens
ttgcctcctcaatct

SEQ ID NO: 179384 - DNA, 15 bp, Homo sapiens
gttgcctcctcaatc

SEQ ID NO: 179385 - DNA, 15 bp, Homo sapiens
ggttgcctcctcaat

SEQ ID NO: 179386 - DNA, 15 bp, Homo sapiens
tggttgcctcctcaa

SEQ ID NO: 179387 - DNA, 15 bp, Homo sapiens
atggttgcctcctca

SEQ ID NO: 179388 - DNA, 15 bp, Homo sapiens
catggttgcctcctc

SEQ ID NO: 179389 - DNA, 15 bp, Homo sapiens
acatggttgcctcct

SEQ ID NO: 179390 - DNA, 15 bp, Homo sapiens
tacatggttgcctcc

SEQ ID NO: 179391 - DNA, 15 bp, Homo sapiens
ctacatggttgcctc

SEQ ID NO: 179392 - DNA, 15 bp, Homo sapiens
tctacatggttgcct

SEQ ID NO: 179393 - DNA, 15 bp, Homo sapiens
gtctacatggttgcc

SEQ ID NO: 179394 - DNA, 15 bp, Homo sapiens
tgtctacatggttgc

SEQ ID NO: 179395 - DNA, 15 bp, Homo sapiens
gtgtctacatggttg

SEQ ID NO: 179396 - DNA, 15 bp, Homo sapiens
agtgtctacatggtt

SEQ ID NO: 179397 - DNA, 15 bp, Homo sapiens
cagtgtctacatggt

SEQ ID NO: 179398 - DNA, 15 bp, Homo sapiens
gcagtgtctacatgg

SEQ ID NO: 179399 - DNA, 15 bp, Homo sapiens
agcagtgtctacatg

SEQ ID NO: 179400 - DNA, 15 bp, Homo sapiens
cagcagtgtctacat

SEQ ID NO: 179401 - DNA, 15 bp, Homo sapiens
ccagcagtgtctaca

SEQ ID NO: 179402 - DNA, 15 bp, Homo sapiens
tccagcagtgtctac

SEQ ID NO: 179403 - DNA, 15 bp, Homo sapiens
ctccagcagtgtcta

SEQ ID NO: 179404 - DNA, 15 bp, Homo sapiens
cctccagcagtgtct

SEQ ID NO: 179405 - DNA, 15 bp, Homo sapiens
tcctccagcagtgtc

SEQ ID NO: 179406 - DNA, 15 bp, Homo sapiens
ttcctccagcagtgt

SEQ ID NO: 179407 - DNA, 15 bp, Homo sapiens
cttcctccagcagtg

SEQ ID NO: 179408 - DNA, 15 bp, Homo sapiens
tcttcctccagcagt

SEQ ID NO: 179409 - DNA, 15 bp, Homo sapiens
ctcttcctccagcag

SEQ ID NO: 179410 - DNA, 15 bp, Homo sapiens
cctcttcctccagca

SEQ ID NO: 179411 - DNA, 15 bp, Homo sapiens
tcctcttcctccagc

SEQ ID NO: 179412 - DNA, 15 bp, Homo sapiens
ttcctcttcctccag

SEQ ID NO: 179413 - DNA, 15 bp, Homo sapiens
tttcctcttcctcca

SEQ ID NO: 179414 - DNA, 15 bp, Homo sapiens
gtttcctcttcctcc

SEQ ID NO: 179415 - DNA, 15 bp, Homo sapiens
cgtttcctcttcctc

SEQ ID NO: 179416 - DNA, 15 bp, Homo sapiens
tcgtttcctcttcct

SEQ ID NO: 179417 - DNA, 15 bp, Homo sapiens
ttcgtttcctcttcc

SEQ ID NO: 179418 - DNA, 15 bp, Homo sapiens
attcgtttcctcttc

SEQ ID NO: 179419 - DNA, 15 bp, Homo sapiens
aattcgtttcctctt

SEQ ID NO: 179420 - DNA, 15 bp, Homo sapiens
aaattcgtttcctct

SEQ ID NO: 179421 - DNA, 15 bp, Homo sapiens
taaattcgtttcctc

SEQ ID NO: 179422 - DNA, 15 bp, Homo sapiens
ttaaattcgtttcct

SEQ ID NO: 179423 - DNA, 15 bp, Homo sapiens
tttaaattcgtttcc

SEQ ID NO: 179424 - DNA, 15 bp, Homo sapiens
ttttaaattcgtttc

SEQ ID NO: 179425 - DNA, 15 bp, Homo sapiens
cttttaaattcgttt

SEQ ID NO: 179426 - DNA, 15 bp, Homo sapiens
acttttaaattcgtt

SEQ ID NO: 179427 - DNA, 15 bp, Homo sapiens
gacttttaaattcgt

SEQ ID NO: 179428 - DNA, 15 bp, Homo sapiens
tgacttttaaattcg

SEQ ID NO: 179429 - DNA, 15 bp, Homo sapiens
gtgacttttaaattc

SEQ ID NO: 179430 - DNA, 15 bp, Homo sapiens
tgtgacttttaaatt

SEQ ID NO: 179431 - DNA, 15 bp, Homo sapiens
ttgtgacttttaaat

SEQ ID NO: 179432 - DNA, 15 bp, Homo sapiens
cttgtgacttttaaa

SEQ ID NO: 179433 - DNA, 15 bp, Homo sapiens
acttgtgacttttaa

SEQ ID NO: 179434 - DNA, 15 bp, Homo sapiens
aacttgtgactttta

SEQ ID NO: 179435 - DNA, 15 bp, Homo sapiens
aaacttgtgactttt

SEQ ID NO: 179436 - DNA, 15 bp, Homo sapiens
aaaacttgtgacttt

SEQ ID NO: 179437 - DNA, 15 bp, Homo sapiens
caaaacttgtgactt

SEQ ID NO: 179438 - DNA, 15 bp, Homo sapiens
ccaaaacttgtgact

SEQ ID NO: 179439 - DNA, 15 bp, Homo sapiens
gccaaaacttgtgac

SEQ ID NO: 179440 - DNA, 15 bp, Homo sapiens
ggccaaaacttgtga

SEQ ID NO: 179441 - DNA, 15 bp, Homo sapiens
aggccaaaacttgtg

SEQ ID NO: 179442 - DNA, 15 bp, Homo sapiens
gaggccaaaacttgt

SEQ ID NO: 179443 - DNA, 15 bp, Homo sapiens
tgaggccaaaacttg

SEQ ID NO: 179444 - DNA, 15 bp, Homo sapiens
ctgaggccaaaactt

SEQ ID NO: 179445 - DNA, 15 bp, Homo sapiens
tctgaggccaaaact

SEQ ID NO: 179446 - DNA, 15 bp, Homo sapiens
atctgaggccaaaac

SEQ ID NO: 179447 - DNA, 15 bp, Homo sapiens
catctgaggccaaaa

SEQ ID NO: 179448 - DNA, 15 bp, Homo sapiens
gcatctgaggccaaa

SEQ ID NO: 179449 - DNA, 15 bp, Homo sapiens
ggcatctgaggccaa

SEQ ID NO: 179450 - DNA, 15 bp, Homo sapiens
aggcatctgaggcca

SEQ ID NO: 179451 - DNA, 15 bp, Homo sapiens
caggcatctgaggcc

SEQ ID NO: 179452 - DNA, 15 bp, Homo sapiens
acaggcatctgaggc

SEQ ID NO: 179453 - DNA, 15 bp, Homo sapiens
cacaggcatctgagg

SEQ ID NO: 179454 - DNA, 15 bp, Homo sapiens
ccacaggcatctgag

SEQ ID NO: 179455 - DNA, 15 bp, Homo sapiens
accacaggcatctga

SEQ ID NO: 179456 - DNA, 15 bp, Homo sapiens
caccacaggcatctg

SEQ ID NO: 179457 - DNA, 15 bp, Homo sapiens
acaccacaggcatct

SEQ ID NO: 179458 - DNA, 15 bp, Homo sapiens
aacaccacaggcatc

SEQ ID NO: 179459 - DNA, 15 bp, Homo sapiens
caacaccacaggcat

SEQ ID NO: 179460 - DNA, 15 bp, Homo sapiens
tcaacaccacaggca

SEQ ID NO: 179461 - DNA, 15 bp, Homo sapiens
ttcaacaccacaggc

SEQ ID NO: 179462 - DNA, 15 bp, Homo sapiens
gttcaacaccacagg

SEQ ID NO: 179463 - DNA, 15 bp, Homo sapiens
tgttcaacaccacag

SEQ ID NO: 179464 - DNA, 15 bp, Homo sapiens
atgttcaacaccaca

SEQ ID NO: 179465 - DNA, 15 bp, Homo sapiens
aatgttcaacaccac

SEQ ID NO: 179466 - DNA, 15 bp, Homo sapiens
taatgttcaacacca

SEQ ID NO: 179467 - DNA, 15 bp, Homo sapiens
ataatgttcaacacc

SEQ ID NO: 179468 - DNA, 15 bp, Homo sapiens
aataatgttcaacac

SEQ ID NO: 179469 - DNA, 15 bp, Homo sapiens
taataatgttcaaca

SEQ ID NO: 179470 - DNA, 15 bp, Homo sapiens
ctaataatgttcaac

SEQ ID NO: 179471 - DNA, 15 bp, Homo sapiens
gctaataatgttcaa

SEQ ID NO: 179472 - DNA, 15 bp, Homo sapiens
agctaataatgttca

SEQ ID NO: 179473 - DNA, 15 bp, Homo sapiens
aagctaataatgttc

SEQ ID NO: 179474 - DNA, 15 bp, Homo sapiens
aaagctaataatgtt

SEQ ID NO: 179475 - DNA, 15 bp, Homo sapiens
caaagctaataatgt

SEQ ID NO: 179476 - DNA, 15 bp, Homo sapiens
acaaagctaataatg

SEQ ID NO: 179477 - DNA, 15 bp, Homo sapiens
aacaaagctaataat

SEQ ID NO: 179478 - DNA, 15 bp, Homo sapiens
caacaaagctaataa

SEQ ID NO: 179479 - DNA, 15 bp, Homo sapiens
acaacaaagctaata

SEQ ID NO: 179480 - DNA, 15 bp, Homo sapiens
gacaacaaagctaat

SEQ ID NO: 179481 - DNA, 15 bp, Homo sapiens
cgacaacaaagctaa

SEQ ID NO: 179482 - DNA, 15 bp, Homo sapiens
ccgacaacaaagcta

SEQ ID NO: 179483 - DNA, 15 bp, Homo sapiens
cccgacaacaaagct

SEQ ID NO: 179484 - DNA, 15 bp, Homo sapiens
ccccgacaacaaagc

SEQ ID NO: 179485 - DNA, 15 bp, Homo sapiens
gccccgacaacaaag

SEQ ID NO: 179486 - DNA, 15 bp, Homo sapiens
tgccccgacaacaaa

SEQ ID NO: 179487 - DNA, 15 bp, Homo sapiens
atgccccgacaacaa

SEQ ID NO: 179488 - DNA, 15 bp, Homo sapiens
catgccccgacaaca

SEQ ID NO: 179489 - DNA, 15 bp, Homo sapiens
gcatgccccgacaac

SEQ ID NO: 179490 - DNA, 15 bp, Homo sapiens
cgcatgccccgacaa

SEQ ID NO: 179491 - DNA, 15 bp, Homo sapiens
gcgcatgccccgaca

SEQ ID NO: 179492 - DNA, 15 bp, Homo sapiens
ggcgcatgccccgac

SEQ ID NO: 179493 - DNA, 15 bp, Homo sapiens
aggcgcatgccccga

SEQ ID NO: 179494 - DNA, 15 bp, Homo sapiens
caggcgcatgccccg

SEQ ID NO: 179495 - DNA, 15 bp, Homo sapiens
tcaggcgcatgcccc

SEQ ID NO: 179496 - DNA, 15 bp, Homo sapiens
gtcaggcgcatgccc

SEQ ID NO: 179497 - DNA, 15 bp, Homo sapiens
ggtcaggcgcatgcc

SEQ ID NO: 179498 - DNA, 15 bp, Homo sapiens
aggtcaggcgcatgc

SEQ ID NO: 179499 - DNA, 15 bp, Homo sapiens
gaggtcaggcgcatg

SEQ ID NO: 179500 - DNA, 15 bp, Homo sapiens
ggaggtcaggcgcat

SEQ ID NO: 179501 - DNA, 15 bp, Homo sapiens
gggaggtcaggcgca

SEQ ID NO: 179502 - DNA, 15 bp, Homo sapiens
cgggaggtcaggcgc

SEQ ID NO: 179503 - DNA, 15 bp, Homo sapiens
ccgggaggtcaggcg

SEQ ID NO: 179504 - DNA, 15 bp, Homo sapiens
tccgggaggtcaggc

SEQ ID NO: 179505 - DNA, 15 bp, Homo sapiens
ctccgggaggtcagg

SEQ ID NO: 179506 - DNA, 15 bp, Homo sapiens
actccgggaggtcag

SEQ ID NO: 179507 - DNA, 15 bp, Homo sapiens
gactccgggaggtca

SEQ ID NO: 179508 - DNA, 15 bp, Homo sapiens
agactccgggaggtc

SEQ ID NO: 179509 - DNA, 15 bp, Homo sapiens
gagactccgggaggt

SEQ ID NO: 179510 - DNA, 15 bp, Homo sapiens
tgagactccgggagg

SEQ ID NO: 179511 - DNA, 15 bp, Homo sapiens
ttgagactccgggag

SEQ ID NO: 179512 - DNA, 15 bp, Homo sapiens
attgagactccggga

SEQ ID NO: 179513 - DNA, 15 bp, Homo sapiens
aattgagactccggg

SEQ ID NO: 179514 - DNA, 15 bp, Homo sapiens
aaattgagactccgg

SEQ ID NO: 179515 - DNA, 15 bp, Homo sapiens
gaaattgagactccg

SEQ ID NO: 179516 - DNA, 15 bp, Homo sapiens
ggaaattgagactcc

SEQ ID NO: 179517 - DNA, 15 bp, Homo sapiens
aggaaattgagactc

SEQ ID NO: 179518 - DNA, 15 bp, Homo sapiens
gaggaaattgagact

SEQ ID NO: 179519 - DNA, 15 bp, Homo sapiens
ggaggaaattgagac

SEQ ID NO: 179520 - DNA, 15 bp, Homo sapiens
aggaggaaattgaga

SEQ ID NO: 179521 - DNA, 15 bp, Homo sapiens
gaggaggaaattgag

SEQ ID NO: 179522 - DNA, 15 bp, Homo sapiens
agaggaggaaattga

SEQ ID NO: 179523 - DNA, 15 bp, Homo sapiens
tagaggaggaaattg

SEQ ID NO: 179524 - DNA, 15 bp, Homo sapiens
atagaggaggaaatt

SEQ ID NO: 179525 - DNA, 15 bp, Homo sapiens
tatagaggaggaaat

SEQ ID NO: 179526 - DNA, 15 bp, Homo sapiens
ttatagaggaggaaa

SEQ ID NO: 179527 - DNA, 15 bp, Homo sapiens
cttatagaggaggaa

SEQ ID NO: 179528 - DNA, 15 bp, Homo sapiens
ccttatagaggagga

SEQ ID NO: 179529 - DNA, 15 bp, Homo sapiens
accttatagaggagg

SEQ ID NO: 179530 - DNA, 15 bp, Homo sapiens
caccttatagaggag

SEQ ID NO: 179531 - DNA, 15 bp, Homo sapiens
ccaccttatagagga

SEQ ID NO: 179532 - DNA, 15 bp, Homo sapiens
gccaccttatagagg

SEQ ID NO: 179533 - DNA, 15 bp, Homo sapiens
agccaccttatagag

SEQ ID NO: 179534 - DNA, 15 bp, Homo sapiens
aagccaccttataga

SEQ ID NO: 179535 - DNA, 15 bp, Homo sapiens
aaagccaccttatag

SEQ ID NO: 179536 - DNA, 15 bp, Homo sapiens
aaaagccaccttata

SEQ ID NO: 179537 - DNA, 15 bp, Homo sapiens
taaaagccaccttat

SEQ ID NO: 179538 - DNA, 15 bp, Homo sapiens
gtaaaagccacctta

SEQ ID NO: 179539 - DNA, 15 bp, Homo sapiens
ggtaaaagccacctt

SEQ ID NO: 179540 - DNA, 15 bp, Homo sapiens
aggtaaaagccacct

SEQ ID NO: 179541 - DNA, 15 bp, Homo sapiens
gaggtaaaagccacc

SEQ ID NO: 179542 - DNA, 15 bp, Homo sapiens
agaggtaaaagccac

SEQ ID NO: 179543 - DNA, 15 bp, Homo sapiens
cagaggtaaaagcca

SEQ ID NO: 179544 - DNA, 15 bp, Homo sapiens
gcagaggtaaaagcc

SEQ ID NO: 179545 - DNA, 15 bp, Homo sapiens
tgcagaggtaaaagc

SEQ ID NO: 179546 - DNA, 15 bp, Homo sapiens
ctgcagaggtaaaag

SEQ ID NO: 179547 - DNA, 15 bp, Homo sapiens
cctgcagaggtaaaa

SEQ ID NO: 179548 - DNA, 15 bp, Homo sapiens
acctgcagaggtaaa

SEQ ID NO: 179549 - DNA, 15 bp, Homo sapiens
aacctgcagaggtaa

SEQ ID NO: 179550 - DNA, 15 bp, Homo sapiens
aaacctgcagaggta

SEQ ID NO: 179551 - DNA, 15 bp, Homo sapiens
caaacctgcagaggt

SEQ ID NO: 179552 - DNA, 15 bp, Homo sapiens
tcaaacctgcagagg

SEQ ID NO: 179553 - DNA, 15 bp, Homo sapiens
ttcaaacctgcagag

SEQ ID NO: 179554 - DNA, 15 bp, Homo sapiens
attcaaacctgcaga

SEQ ID NO: 179555 - DNA, 15 bp, Homo sapiens
cattcaaacctgcag

SEQ ID NO: 179556 - DNA, 15 bp, Homo sapiens
tcattcaaacctgca

SEQ ID NO: 179557 - DNA, 15 bp, Homo sapiens
ctcattcaaacctgc

SEQ ID NO: 179558 - DNA, 15 bp, Homo sapiens
cctcattcaaacctg

SEQ ID NO: 179559 - DNA, 15 bp, Homo sapiens
acctcattcaaacct

SEQ ID NO: 179560 - DNA, 15 bp, Homo sapiens
tacctcattcaaacc

SEQ ID NO: 179561 - DNA, 15 bp, Homo sapiens
ttacctcattcaaac

SEQ ID NO: 179562 - DNA, 15 bp, Homo sapiens
cttacctcattcaaa

SEQ ID NO: 179563 - DNA, 15 bp, Homo sapiens
tcttacctcattcaa

SEQ ID NO: 179564 - DNA, 15 bp, Homo sapiens
ctcttacctcattca

SEQ ID NO: 179565 - DNA, 15 bp, Homo sapiens
cctcttacctcattc

SEQ ID NO: 179566 - DNA, 15 bp, Homo sapiens
acctcttacctcatt

SEQ ID NO: 179567 - DNA, 15 bp, Homo sapiens
cacctcttacctcat

SEQ ID NO: 179568 - DNA, 15 bp, Homo sapiens
ccacctcttacctca

SEQ ID NO: 179569 - DNA, 15 bp, Homo sapiens
cccacctcttacctc

SEQ ID NO: 179570 - DNA, 15 bp, Homo sapiens
ccccacctcttacct

SEQ ID NO: 179571 - DNA, 15 bp, Homo sapiens
tccccacctcttacc

SEQ ID NO: 179572 - DNA, 15 bp, Homo sapiens
ctccccacctcttac

SEQ ID NO: 179573 - DNA, 15 bp, Homo sapiens
tctccccacctctta

SEQ ID NO: 179574 - DNA, 15 bp, Homo sapiens
ctctccccacctctt

SEQ ID NO: 179575 - DNA, 15 bp, Homo sapiens
gctctccccacctct

SEQ ID NO: 179576 - DNA, 15 bp, Homo sapiens
ggctctccccacctc

SEQ ID NO: 179577 - DNA, 15 bp, Homo sapiens
aggctctccccacct

SEQ ID NO: 179578 - DNA, 15 bp, Homo sapiens
taggctctccccacc

SEQ ID NO: 179579 - DNA, 15 bp, Homo sapiens
ctaggctctccccac

SEQ ID NO: 179580 - DNA, 15 bp, Homo sapiens
actaggctctcccca

SEQ ID NO: 179581 - DNA, 15 bp, Homo sapiens
tactaggctctcccc

SEQ ID NO: 179582 - DNA, 15 bp, Homo sapiens
gtactaggctctccc

SEQ ID NO: 179583 - DNA, 15 bp, Homo sapiens
agtactaggctctcc

SEQ ID NO: 179584 - DNA, 15 bp, Homo sapiens
aagtactaggctctc

SEQ ID NO: 179585 - DNA, 15 bp, Homo sapiens
caagtactaggctct

SEQ ID NO: 179586 - DNA, 15 bp, Homo sapiens
ccaagtactaggctc

SEQ ID NO: 179587 - DNA, 15 bp, Homo sapiens
gccaagtactaggct

SEQ ID NO: 179588 - DNA, 15 bp, Homo sapiens
agccaagtactaggc

SEQ ID NO: 179589 - DNA, 15 bp, Homo sapiens
gagccaagtactagg

SEQ ID NO: 179590 - DNA, 15 bp, Homo sapiens
ggagccaagtactag

SEQ ID NO: 179591 - DNA, 15 bp, Homo sapiens
gggagccaagtacta

SEQ ID NO: 179592 - DNA, 15 bp, Homo sapiens
agggagccaagtact

SEQ ID NO: 179593 - DNA, 15 bp, Homo sapiens
aagggagccaagtac

SEQ ID NO: 179594 - DNA, 15 bp, Homo sapiens
caagggagccaagta

SEQ ID NO: 179595 - DNA, 15 bp, Homo sapiens
tcaagggagccaagt

SEQ ID NO: 179596 - DNA, 15 bp, Homo sapiens
ttcaagggagccaag

SEQ ID NO: 179597 - DNA, 15 bp, Homo sapiens
cttcaagggagccaa

SEQ ID NO: 179598 - DNA, 15 bp, Homo sapiens
tcttcaagggagcca

SEQ ID NO: 179599 - DNA, 15 bp, Homo sapiens
ttcttcaagggagcc

SEQ ID NO: 179600 - DNA, 15 bp, Homo sapiens
tttcttcaagggagc

SEQ ID NO: 179601 - DNA, 15 bp, Homo sapiens
ctttcttcaagggag

SEQ ID NO: 179602 - DNA, 15 bp, Homo sapiens
actttcttcaaggga

SEQ ID NO: 179603 - DNA, 15 bp, Homo sapiens
tactttcttcaaggg

SEQ ID NO: 179604 - DNA, 15 bp, Homo sapiens
ctactttcttcaagg

SEQ ID NO: 179605 - DNA, 15 bp, Homo sapiens
gctactttcttcaag

SEQ ID NO: 179606 - DNA, 15 bp, Homo sapiens
cgctactttcttcaa

SEQ ID NO: 179607 - DNA, 15 bp, Homo sapiens
ccgctactttcttca

SEQ ID NO: 179608 - DNA, 15 bp, Homo sapiens
tccgctactttcttc

SEQ ID NO: 179609 - DNA, 15 bp, Homo sapiens
ctccgctactttctt

SEQ ID NO: 179610 - DNA, 15 bp, Homo sapiens
tctccgctactttct

SEQ ID NO: 179611 - DNA, 15 bp, Homo sapiens
gtctccgctactttc

SEQ ID NO: 179612 - DNA, 15 bp, Homo sapiens
agtctccgctacttt

SEQ ID NO: 179613 - DNA, 15 bp, Homo sapiens
cagtctccgctactt

SEQ ID NO: 179614 - DNA, 15 bp, Homo sapiens
tcagtctccgctact

SEQ ID NO: 179615 - DNA, 15 bp, Homo sapiens
ttcagtctccgctac

SEQ ID NO: 179616 - DNA, 15 bp, Homo sapiens
attcagtctccgcta

SEQ ID NO: 179617 - DNA, 15 bp, Homo sapiens
gattcagtctccgct

SEQ ID NO: 179618 - DNA, 15 bp, Homo sapiens
ggattcagtctccgc

SEQ ID NO: 179619 - DNA, 15 bp, Homo sapiens
tggattcagtctccg

SEQ ID NO: 179620 - DNA, 15 bp, Homo sapiens
ttggattcagtctcc

SEQ ID NO: 179621 - DNA, 15 bp, Homo sapiens
cttggattcagtctc

SEQ ID NO: 179622 - DNA, 15 bp, Homo sapiens
ccttggattcagtct

SEQ ID NO: 179623 - DNA, 15 bp, Homo sapiens
gccttggattcagtc

SEQ ID NO: 179624 - DNA, 15 bp, Homo sapiens
ggccttggattcagt

SEQ ID NO: 179625 - DNA, 15 bp, Homo sapiens
tggccttggattcag

SEQ ID NO: 179626 - DNA, 15 bp, Homo sapiens
ctggccttggattca

SEQ ID NO: 179627 - DNA, 15 bp, Homo sapiens
cctggccttggattc

SEQ ID NO: 179628 - DNA, 15 bp, Homo sapiens
gcctggccttggatt

SEQ ID NO: 179629 - DNA, 15 bp, Homo sapiens
agcctggccttggat

SEQ ID NO: 179630 - DNA, 15 bp, Homo sapiens
cagcctggccttgga

SEQ ID NO: 179631 - DNA, 15 bp, Homo sapiens
acagcctggccttgg

SEQ ID NO: 179632 - DNA, 15 bp, Homo sapiens
gacagcctggccttg

SEQ ID NO: 179633 - DNA, 15 bp, Homo sapiens
ggacagcctggcctt

SEQ ID NO: 179634 - DNA, 15 bp, Homo sapiens
tggacagcctggcct

SEQ ID NO: 179635 - DNA, 15 bp, Homo sapiens
gtggacagcctggcc

SEQ ID NO: 179636 - DNA, 15 bp, Homo sapiens
agtggacagcctggc

SEQ ID NO: 179637 - DNA, 15 bp, Homo sapiens
gagtggacagcctgg

SEQ ID NO: 179638 - DNA, 15 bp, Homo sapiens
ggagtggacagcctg

SEQ ID NO: 179639 - DNA, 15 bp, Homo sapiens
tggagtggacagcct

SEQ ID NO: 179640 - DNA, 15 bp, Homo sapiens
ttggagtggacagcc

SEQ ID NO: 179641 - DNA, 15 bp, Homo sapiens
tttggagtggacagc

SEQ ID NO: 179642 - DNA, 15 bp, Homo sapiens
gtttggagtggacag

SEQ ID NO: 179643 - DNA, 15 bp, Homo sapiens
agtttggagtggaca

SEQ ID NO: 179644 - DNA, 15 bp, Homo sapiens
cagtttggagtggac

SEQ ID NO: 179645 - DNA, 15 bp, Homo sapiens
ccagtttggagtgga

SEQ ID NO: 179646 - DNA, 15 bp, Homo sapiens
cccagtttggagtgg

SEQ ID NO: 179647 - DNA, 15 bp, Homo sapiens
tcccagtttggagtg

SEQ ID NO: 179648 - DNA, 15 bp, Homo sapiens
atcccagtttggagt

SEQ ID NO: 179649 - DNA, 15 bp, Homo sapiens
aatcccagtttggag

SEQ ID NO: 179650 - DNA, 15 bp, Homo sapiens
taatcccagtttgga

SEQ ID NO: 179651 - DNA, 15 bp, Homo sapiens
ctaatcccagtttgg

SEQ ID NO: 179652 - DNA, 15 bp, Homo sapiens
cctaatcccagtttg

SEQ ID NO: 179653 - DNA, 15 bp, Homo sapiens
tcctaatcccagttt

SEQ ID NO: 179654 - DNA, 15 bp, Homo sapiens
atcctaatcccagtt

SEQ ID NO: 179655 - DNA, 15 bp, Homo sapiens
catcctaatcccagt

SEQ ID NO: 179656 - DNA, 15 bp, Homo sapiens
acatcctaatcccag

SEQ ID NO: 179657 - DNA, 15 bp, Homo sapiens
gacatcctaatccca

SEQ ID NO: 179658 - DNA, 15 bp, Homo sapiens
tgacatcctaatccc

SEQ ID NO: 179659 - DNA, 15 bp, Homo sapiens
atgacatcctaatcc

SEQ ID NO: 179660 - DNA, 15 bp, Homo sapiens
catgacatcctaatc

SEQ ID NO: 179661 - DNA, 15 bp, Homo sapiens
ccatgacatcctaat

SEQ ID NO: 179662 - DNA, 15 bp, Homo sapiens
accatgacatcctaa

SEQ ID NO: 179663 - DNA, 15 bp, Homo sapiens
aaccatgacatccta

SEQ ID NO: 179664 - DNA, 15 bp, Homo sapiens
gaaccatgacatcct

SEQ ID NO: 179665 - DNA, 15 bp, Homo sapiens
agaaccatgacatcc

SEQ ID NO: 179666 - DNA, 15 bp, Homo sapiens
aagaaccatgacatc

SEQ ID NO: 179667 - DNA, 15 bp, Homo sapiens
gaagaaccatgacat

SEQ ID NO: 179668 - DNA, 15 bp, Homo sapiens
tgaagaaccatgaca

SEQ ID NO: 179669 - DNA, 15 bp, Homo sapiens
ctgaagaaccatgac

SEQ ID NO: 179670 - DNA, 15 bp, Homo sapiens
gctgaagaaccatga

SEQ ID NO: 179671 - DNA, 15 bp, Homo sapiens
ggctgaagaaccatg

SEQ ID NO: 179672 - DNA, 15 bp, Homo sapiens
gggctgaagaaccat

SEQ ID NO: 179673 - DNA, 15 bp, Homo sapiens
ggggctgaagaacca

SEQ ID NO: 179674 - DNA, 15 bp, Homo sapiens
aggggctgaagaacc

SEQ ID NO: 179675 - DNA, 15 bp, Homo sapiens
caggggctgaagaac

SEQ ID NO: 179676 - DNA, 15 bp, Homo sapiens
tcaggggctgaagaa

SEQ ID NO: 179677 - DNA, 15 bp, Homo sapiens
gtcaggggctgaaga

SEQ ID NO: 179678 - DNA, 15 bp, Homo sapiens
agtcaggggctgaag

SEQ ID NO: 179679 - DNA, 15 bp, Homo sapiens
aagtcaggggctgaa

SEQ ID NO: 179680 - DNA, 15 bp, Homo sapiens
aaagtcaggggctga

SEQ ID NO: 179681 - DNA, 15 bp, Homo sapiens
gaaagtcaggggctg

SEQ ID NO: 179682 - DNA, 15 bp, Homo sapiens
ggaaagtcaggggct

SEQ ID NO: 179683 - DNA, 15 bp, Homo sapiens
aggaaagtcaggggc

SEQ ID NO: 179684 - DNA, 15 bp, Homo sapiens
caggaaagtcagggg

SEQ ID NO: 179685 - DNA, 15 bp, Homo sapiens
tcaggaaagtcaggg

SEQ ID NO: 179686 - DNA, 15 bp, Homo sapiens
gtcaggaaagtcagg

SEQ ID NO: 179687 - DNA, 15 bp, Homo sapiens
tgtcaggaaagtcag

SEQ ID NO: 179688 - DNA, 15 bp, Homo sapiens
ttgtcaggaaagtca

SEQ ID NO: 179689 - DNA, 15 bp, Homo sapiens
tttgtcaggaaagtc

SEQ ID NO: 179690 - DNA, 15 bp, Homo sapiens
ctttgtcaggaaagt

SEQ ID NO: 179691 - DNA, 15 bp, Homo sapiens
cctttgtcaggaaag

SEQ ID NO: 179692 - DNA, 15 bp, Homo sapiens
gcctttgtcaggaaa

SEQ ID NO: 179693 - DNA, 15 bp, Homo sapiens
ggcctttgtcaggaa

SEQ ID NO: 179694 - DNA, 15 bp, Homo sapiens
gggcctttgtcagga

SEQ ID NO: 179695 - DNA, 15 bp, Homo sapiens
tgggcctttgtcagg

SEQ ID NO: 179696 - DNA, 15 bp, Homo sapiens
gtgggcctttgtcag

SEQ ID NO: 179697 - DNA, 15 bp, Homo sapiens
cgtgggcctttgtca

SEQ ID NO: 179698 - DNA, 15 bp, Homo sapiens
acgtgggcctttgtc

SEQ ID NO: 179699 - DNA, 15 bp, Homo sapiens
cacgtgggcctttgt

SEQ ID NO: 179700 - DNA, 15 bp, Homo sapiens
ccacgtgggcctttg

SEQ ID NO: 179701 - DNA, 15 bp, Homo sapiens
cccacgtgggccttt

SEQ ID NO: 179702 - DNA, 15 bp, Homo sapiens
ccccacgtgggcctt

SEQ ID NO: 179703 - DNA, 15 bp, Homo sapiens
cccccacgtgggcct

SEQ ID NO: 179704 - DNA, 15 bp, Homo sapiens
gcccccacgtgggcc

SEQ ID NO: 179705 - DNA, 15 bp, Homo sapiens
agcccccacgtgggc

SEQ ID NO: 179706 - DNA, 15 bp, Homo sapiens
gagcccccacgtggg

SEQ ID NO: 179707 - DNA, 15 bp, Homo sapiens
agagcccccacgtgg

SEQ ID NO: 179708 - DNA, 15 bp, Homo sapiens
aagagcccccacgtg

SEQ ID NO: 179709 - DNA, 15 bp, Homo sapiens
caagagcccccacgt

SEQ ID NO: 179710 - DNA, 15 bp, Homo sapiens
ccaagagcccccacg

SEQ ID NO: 179711 - DNA, 15 bp, Homo sapiens
accaagagcccccac

SEQ ID NO: 179712 - DNA, 15 bp, Homo sapiens
aaccaagagccccca

SEQ ID NO: 179713 - DNA, 15 bp, Homo sapiens
caaccaagagccccc

SEQ ID NO: 179714 - DNA, 15 bp, Homo sapiens
ccaaccaagagcccc

SEQ ID NO: 179715 - DNA, 15 bp, Homo sapiens
gccaaccaagagccc

SEQ ID NO: 179716 - DNA, 15 bp, Homo sapiens
ggccaaccaagagcc

SEQ ID NO: 179717 - DNA, 15 bp, Homo sapiens
aggccaaccaagagc

SEQ ID NO: 179718 - DNA, 15 bp, Homo sapiens
caggccaaccaagag

SEQ ID NO: 179719 - DNA, 15 bp, Homo sapiens
ccaggccaaccaaga

SEQ ID NO: 179720 - DNA, 15 bp, Homo sapiens
accaggccaaccaag

SEQ ID NO: 179721 - DNA, 15 bp, Homo sapiens
gaccaggccaaccaa

SEQ ID NO: 179722 - DNA, 15 bp, Homo sapiens
tgaccaggccaacca

SEQ ID NO: 179723 - DNA, 15 bp, Homo sapiens
gtgaccaggccaacc

SEQ ID NO: 179724 - DNA, 15 bp, Homo sapiens
agtgaccaggccaac

SEQ ID NO: 179725 - DNA, 15 bp, Homo sapiens
gagtgaccaggccaa

SEQ ID NO: 179726 - DNA, 15 bp, Homo sapiens
agagtgaccaggcca

SEQ ID NO: 179727 - DNA, 15 bp, Homo sapiens
gagagtgaccaggcc

SEQ ID NO: 179728 - DNA, 15 bp, Homo sapiens
agagagtgaccaggc

SEQ ID NO: 179729 - DNA, 15 bp, Homo sapiens
cagagagtgaccagg

SEQ ID NO: 179730 - DNA, 15 bp, Homo sapiens
gcagagagtgaccag

SEQ ID NO: 179731 - DNA, 15 bp, Homo sapiens
agcagagagtgacca

SEQ ID NO: 179732 - DNA, 15 bp, Homo sapiens
aagcagagagtgacc

SEQ ID NO: 179733 - DNA, 15 bp, Homo sapiens
caagcagagagtgac

SEQ ID NO: 179734 - DNA, 15 bp, Homo sapiens
ccaagcagagagtga

SEQ ID NO: 179735 - DNA, 15 bp, Homo sapiens
cccaagcagagagtg

SEQ ID NO: 179736 - DNA, 15 bp, Homo sapiens
ccccaagcagagagt

SEQ ID NO: 179737 - DNA, 15 bp, Homo sapiens
accccaagcagagag

SEQ ID NO: 179738 - DNA, 15 bp, Homo sapiens
caccccaagcagaga

SEQ ID NO: 179739 - DNA, 15 bp, Homo sapiens
acaccccaagcagag

SEQ ID NO: 179740 - DNA, 15 bp, Homo sapiens
gacaccccaagcaga

SEQ ID NO: 179741 - DNA, 15 bp, Homo sapiens
ggacaccccaagcag

SEQ ID NO: 179742 - DNA, 15 bp, Homo sapiens
aggacaccccaagca

SEQ ID NO: 179743 - DNA, 15 bp, Homo sapiens
gaggacaccccaagc

SEQ ID NO: 179744 - DNA, 15 bp, Homo sapiens
tgaggacaccccaag

SEQ ID NO: 179745 - DNA, 15 bp, Homo sapiens
atgaggacaccccaa

SEQ ID NO: 179746 - DNA, 15 bp, Homo sapiens
aatgaggacacccca

SEQ ID NO: 179747 - DNA, 15 bp, Homo sapiens
gaatgaggacacccc

SEQ ID NO: 179748 - DNA, 15 bp, Homo sapiens
agaatgaggacaccc

SEQ ID NO: 179749 - DNA, 15 bp, Homo sapiens
aagaatgaggacacc

SEQ ID NO: 179750 - DNA, 15 bp, Homo sapiens
aaagaatgaggacac

SEQ ID NO: 179751 - DNA, 15 bp, Homo sapiens
aaaagaatgaggaca

SEQ ID NO: 179752 - DNA, 15 bp, Homo sapiens
gaaaagaatgaggac

SEQ ID NO: 179753 - DNA, 15 bp, Homo sapiens
ggaaaagaatgagga

SEQ ID NO: 179754 - DNA, 15 bp, Homo sapiens
gggaaaagaatgagg

SEQ ID NO: 179755 - DNA, 15 bp, Homo sapiens
agggaaaagaatgag

SEQ ID NO: 179756 - DNA, 15 bp, Homo sapiens
cagggaaaagaatga

SEQ ID NO: 179757 - DNA, 15 bp, Homo sapiens
ccagggaaaagaatg

SEQ ID NO: 179758 - DNA, 15 bp, Homo sapiens
tccagggaaaagaat

SEQ ID NO: 179759 - DNA, 15 bp, Homo sapiens
ctccagggaaaagaa

SEQ ID NO: 179760 - DNA, 15 bp, Homo sapiens
tctccagggaaaaga

SEQ ID NO: 179761 - DNA, 15 bp, Homo sapiens
ctctccagggaaaag

SEQ ID NO: 179762 - DNA, 15 bp, Homo sapiens
cctctccagggaaaa

SEQ ID NO: 179763 - DNA, 15 bp, Homo sapiens
acctctccagggaaa

SEQ ID NO: 179764 - DNA, 15 bp, Homo sapiens
aacctctccagggaa

SEQ ID NO: 179765 - DNA, 15 bp, Homo sapiens
gaacctctccaggga

SEQ ID NO: 179766 - DNA, 15 bp, Homo sapiens
agaacctctccaggg

SEQ ID NO: 179767 - DNA, 15 bp, Homo sapiens
cagaacctctccagg

SEQ ID NO: 179768 - DNA, 15 bp, Homo sapiens
ccagaacctctccag

SEQ ID NO: 179769 - DNA, 15 bp, Homo sapiens
cccagaacctctcca

SEQ ID NO: 179770 - DNA, 15 bp, Homo sapiens
atcccagaacctctc

SEQ ID NO: 179771 - DNA, 15 bp, Homo sapiens
gatcccagaacctct

SEQ ID NO: 179772 - DNA, 15 bp, Homo sapiens
tgatcccagaacctc

SEQ ID NO: 179773 - DNA, 15 bp, Homo sapiens
ctgatcccagaacct

SEQ ID NO: 179774 - DNA, 15 bp, Homo sapiens
cctgatcccagaacc

SEQ ID NO: 179775 - DNA, 15 bp, Homo sapiens
ccctgatcccagaac

SEQ ID NO: 179776 - DNA, 15 bp, Homo sapiens
cccctgatcccagaa

SEQ ID NO: 179777 - DNA, 15 bp, Homo sapiens
acccctgatcccaga

SEQ ID NO: 179778 - DNA, 15 bp, Homo sapiens
cacccctgatcccag

SEQ ID NO: 179779 - DNA, 15 bp, Homo sapiens
tcacccctgatccca

SEQ ID NO: 179780 - DNA, 15 bp, Homo sapiens
ctcacccctgatccc

SEQ ID NO: 179781 - DNA, 15 bp, Homo sapiens
tctcacccctgatcc

SEQ ID NO: 179782 - DNA, 15 bp, Homo sapiens
ttctcacccctgatc

SEQ ID NO: 179783 - DNA, 15 bp, Homo sapiens
attctcacccctgat

SEQ ID NO: 179784 - DNA, 15 bp, Homo sapiens
cattctcacccctga

SEQ ID NO: 179785 - DNA, 15 bp, Homo sapiens
ccattctcacccctg

SEQ ID NO: 179786 - DNA, 15 bp, Homo sapiens
cccattctcacccct

SEQ ID NO: 179787 - DNA, 15 bp, Homo sapiens
ccccattctcacccc

SEQ ID NO: 179788 - DNA, 15 bp, Homo sapiens
accccattctcaccc

SEQ ID NO: 179789 - DNA, 15 bp, Homo sapiens
aaccccattctcacc

SEQ ID NO: 179790 - DNA, 15 bp, Homo sapiens
taaccccattctcac

SEQ ID NO: 179791 - DNA, 15 bp, Homo sapiens
ttaaccccattctca

SEQ ID NO: 179792 - DNA, 15 bp, Homo sapiens
cttaaccccattctc

SEQ ID NO: 179793 - DNA, 15 bp, Homo sapiens
acttaaccccattct

SEQ ID NO: 179794 - DNA, 15 bp, Homo sapiens
aacttaaccccattc

SEQ ID NO: 179795 - DNA, 15 bp, Homo sapiens
taacttaaccccatt

SEQ ID NO: 179796 - DNA, 15 bp, Homo sapiens
ataacttaaccccat

SEQ ID NO: 179797 - DNA, 15 bp, Homo sapiens
gataacttaacccca

SEQ ID NO: 179798 - DNA, 15 bp, Homo sapiens
agataacttaacccc

SEQ ID NO: 179799 - DNA, 15 bp, Homo sapiens
tagataacttaaccc

SEQ ID NO: 179800 - DNA, 15 bp, Homo sapiens
ctagataacttaacc

SEQ ID NO: 179801 - DNA, 15 bp, Homo sapiens
cctagataacttaac

SEQ ID NO: 179802 - DNA, 15 bp, Homo sapiens
tcctagataacttaa

SEQ ID NO: 179803 - DNA, 15 bp, Homo sapiens
ttcctagataactta

SEQ ID NO: 179804 - DNA, 15 bp, Homo sapiens
attcctagataactt

SEQ ID NO: 179805 - DNA, 15 bp, Homo sapiens
aattcctagataact

SEQ ID NO: 179806 - DNA, 15 bp, Homo sapiens
caattcctagataac

SEQ ID NO: 179807 - DNA, 15 bp, Homo sapiens
tcaattcctagataa

SEQ ID NO: 179808 - DNA, 15 bp, Homo sapiens
ctcaattcctagata

SEQ ID NO: 179809 - DNA, 15 bp, Homo sapiens
tctcaattcctagat

SEQ ID NO: 179810 - DNA, 15 bp, Homo sapiens
ctctcaattcctaga

SEQ ID NO: 179811 - DNA, 15 bp, Homo sapiens
actctcaattcctag

SEQ ID NO: 179812 - DNA, 15 bp, Homo sapiens
gactctcaattccta

SEQ ID NO: 179813 - DNA, 15 bp, Homo sapiens
ggactctcaattcct

SEQ ID NO: 179814 - DNA, 15 bp, Homo sapiens
gggactctcaattcc

SEQ ID NO: 179815 - DNA, 15 bp, Homo sapiens
agggactctcaattc

SEQ ID NO: 179816 - DNA, 15 bp, Homo sapiens
aagggactctcaatt

SEQ ID NO: 179817 - DNA, 15 bp, Homo sapiens
gaagggactctcaat

SEQ ID NO: 179818 - DNA, 15 bp, Homo sapiens
agaagggactctcaa

SEQ ID NO: 179819 - DNA, 15 bp, Homo sapiens
aagaagggactctca

SEQ ID NO: 179820 - DNA, 15 bp, Homo sapiens
gaagaagggactctc

SEQ ID NO: 179821 - DNA, 15 bp, Homo sapiens
tgaagaagggactct

SEQ ID NO: 179822 - DNA, 15 bp, Homo sapiens
atgaagaagggactc

SEQ ID NO: 179823 - DNA, 15 bp, Homo sapiens
tatgaagaagggact

SEQ ID NO: 179824 - DNA, 15 bp, Homo sapiens
ttatgaagaagggac

SEQ ID NO: 179825 - DNA, 15 bp, Homo sapiens
gttatgaagaaggga

SEQ ID NO: 179826 - DNA, 15 bp, Homo sapiens
agttatgaagaaggg

SEQ ID NO: 179827 - DNA, 15 bp, Homo sapiens
tagttatgaagaagg

SEQ ID NO: 179828 - DNA, 15 bp, Homo sapiens
ttagttatgaagaag

SEQ ID NO: 179829 - DNA, 15 bp, Homo sapiens
attagttatgaagaa

SEQ ID NO: 179830 - DNA, 15 bp, Homo sapiens
aattagttatgaaga

SEQ ID NO: 179831 - DNA, 15 bp, Homo sapiens
aaattagttatgaag

SEQ ID NO: 179832 - DNA, 15 bp, Homo sapiens
aaaattagttatgaa

SEQ ID NO: 179833 - DNA, 15 bp, Homo sapiens
aaaaattagttatga

SEQ ID NO: 179834 - DNA, 15 bp, Homo sapiens
gaaaaattagttatg

SEQ ID NO: 179835 - DNA, 15 bp, Homo sapiens
agaaaaattagttat

SEQ ID NO: 179836 - DNA, 15 bp, Homo sapiens
aagaaaaattagtta

SEQ ID NO: 179837 - DNA, 15 bp, Homo sapiens
aaagaaaaattagtt

SEQ ID NO: 179838 - DNA, 15 bp, Homo sapiens
gaaagaaaaattagt

SEQ ID NO: 179839 - DNA, 15 bp, Homo sapiens
ggaaagaaaaattag

SEQ ID NO: 179840 - DNA, 15 bp, Homo sapiens
aggaaagaaaaatta

SEQ ID NO: 179841 - DNA, 15 bp, Homo sapiens
taggaaagaaaaatt

SEQ ID NO: 179842 - DNA, 15 bp, Homo sapiens
ataggaaagaaaaat

SEQ ID NO: 179843 - DNA, 15 bp, Homo sapiens
gataggaaagaaaaa

SEQ ID NO: 179844 - DNA, 15 bp, Homo sapiens
agataggaaagaaaa

SEQ ID NO: 179845 - DNA, 15 bp, Homo sapiens
gagataggaaagaaa

SEQ ID NO: 179846 - DNA, 15 bp, Homo sapiens
tgagataggaaagaa

SEQ ID NO: 179847 - DNA, 15 bp, Homo sapiens
atgagataggaaaga

SEQ ID NO: 179848 - DNA, 15 bp, Homo sapiens
catgagataggaaag

SEQ ID NO: 179849 - DNA, 15 bp, Homo sapiens
tcatgagataggaaa

SEQ ID NO: 179850 - DNA, 15 bp, Homo sapiens
gtcatgagataggaa

SEQ ID NO: 179851 - DNA, 15 bp, Homo sapiens
agtcatgagatagga

SEQ ID NO: 179852 - DNA, 15 bp, Homo sapiens
aagtcatgagatagg

SEQ ID NO: 179853 - DNA, 15 bp, Homo sapiens
gaagtcatgagatag

SEQ ID NO: 179854 - DNA, 15 bp, Homo sapiens
agaagtcatgagata

SEQ ID NO: 179855 - DNA, 15 bp, Homo sapiens
tagaagtcatgagat

SEQ ID NO: 179856 - DNA, 15 bp, Homo sapiens
ctagaagtcatgaga

SEQ ID NO: 179857 - DNA, 15 bp, Homo sapiens
tctagaagtcatgag

SEQ ID NO: 179858 - DNA, 15 bp, Homo sapiens
atctagaagtcatga

SEQ ID NO: 179859 - DNA, 15 bp, Homo sapiens
tatctagaagtcatg

SEQ ID NO: 179860 - DNA, 15 bp, Homo sapiens
ttatctagaagtcat

SEQ ID NO: 179861 - DNA, 15 bp, Homo sapiens
attatctagaagtca

SEQ ID NO: 179862 - DNA, 15 bp, Homo sapiens
tattatctagaagtc

SEQ ID NO: 179863 - DNA, 15 bp, Homo sapiens
ctattatctagaagt

SEQ ID NO: 179864 - DNA, 15 bp, Homo sapiens
actattatctagaag

SEQ ID NO: 179865 - DNA, 15 bp, Homo sapiens
gactattatctagaa

SEQ ID NO: 179866 - DNA, 15 bp, Homo sapiens
agactattatctaga

SEQ ID NO: 179867 - DNA, 15 bp, Homo sapiens
cagactattatctag

SEQ ID NO: 179868 - DNA, 15 bp, Homo sapiens
acagactattatcta

SEQ ID NO: 179869 - DNA, 15 bp, Homo sapiens
tacagactattatct

SEQ ID NO: 179870 - DNA, 15 bp, Homo sapiens
ctacagactattatc

SEQ ID NO: 179871 - DNA, 15 bp, Homo sapiens
actacagactattat

SEQ ID NO: 179872 - DNA, 15 bp, Homo sapiens
aactacagactatta

SEQ ID NO: 179873 - DNA, 15 bp, Homo sapiens
aaactacagactatt

SEQ ID NO: 179874 - DNA, 15 bp, Homo sapiens
aaaactacagactat

SEQ ID NO: 179875 - DNA, 15 bp, Homo sapiens
taaaactacagacta

SEQ ID NO: 179876 - DNA, 15 bp, Homo sapiens
ttaaaactacagact

SEQ ID NO: 179877 - DNA, 15 bp, Homo sapiens
gttaaaactacagac

SEQ ID NO: 179878 - DNA, 15 bp, Homo sapiens
agttaaaactacaga

SEQ ID NO: 179879 - DNA, 15 bp, Homo sapiens
gagttaaaactacag

SEQ ID NO: 179880 - DNA, 15 bp, Homo sapiens
tgagttaaaactaca

SEQ ID NO: 179881 - DNA, 15 bp, Homo sapiens
atgagttaaaactac

SEQ ID NO: 179882 - DNA, 15 bp, Homo sapiens
aatgagttaaaacta

SEQ ID NO: 179883 - DNA, 15 bp, Homo sapiens
aaatgagttaaaact

SEQ ID NO: 179884 - DNA, 15 bp, Homo sapiens
caaatgagttaaaac

SEQ ID NO: 179885 - DNA, 15 bp, Homo sapiens
acaaatgagttaaaa

SEQ ID NO: 179886 - DNA, 15 bp, Homo sapiens
aacaaatgagttaaa

SEQ ID NO: 179887 - DNA, 15 bp, Homo sapiens
taacaaatgagttaa

SEQ ID NO: 179888 - DNA, 15 bp, Homo sapiens
ataacaaatgagtta

SEQ ID NO: 179889 - DNA, 15 bp, Homo sapiens
aataacaaatgagtt

SEQ ID NO: 179890 - DNA, 15 bp, Homo sapiens
aaataacaaatgagt

SEQ ID NO: 179891 - DNA, 15 bp, Homo sapiens
taaataacaaatgag

SEQ ID NO: 179892 - DNA, 15 bp, Homo sapiens
ataaataacaaatga

SEQ ID NO: 179893 - DNA, 15 bp, Homo sapiens
tataaataacaaatg

SEQ ID NO: 179894 - DNA, 15 bp, Homo sapiens
atataaataacaaat

SEQ ID NO: 179895 - DNA, 15 bp, Homo sapiens
tatataaataacaaa

SEQ ID NO: 179896 - DNA, 15 bp, Homo sapiens
ttatataaataacaa

SEQ ID NO: 179897 - DNA, 15 bp, Homo sapiens
attatataaataaca

SEQ ID NO: 179898 - DNA, 15 bp, Homo sapiens
aattatataaataac

SEQ ID NO: 179899 - DNA, 15 bp, Homo sapiens
aaattatataaataa

SEQ ID NO: 179900 - DNA, 15 bp, Homo sapiens
gaaattatataaata

SEQ ID NO: 179901 - DNA, 15 bp, Homo sapiens
agaaattatataaat

SEQ ID NO: 179902 - DNA, 15 bp, Homo sapiens
gagaaattatataaa

SEQ ID NO: 179903 - DNA, 15 bp, Homo sapiens
agagaaattatataa

SEQ ID NO: 179904 - DNA, 15 bp, Homo sapiens
cagagaaattatata

SEQ ID NO: 179905 - DNA, 15 bp, Homo sapiens
acagagaaattatat

SEQ ID NO: 179906 - DNA, 15 bp, Homo sapiens
cacagagaaattata

SEQ ID NO: 179907 - DNA, 15 bp, Homo sapiens
gcacagagaaattat

SEQ ID NO: 179908 - DNA, 15 bp, Homo sapiens
agcacagagaaatta

SEQ ID NO: 179909 - DNA, 15 bp, Homo sapiens
gagcacagagaaatt

SEQ ID NO: 179910 - DNA, 15 bp, Homo sapiens
cgagcacagagaaat

SEQ ID NO: 179911 - DNA, 15 bp, Homo sapiens
ccgagcacagagaaa

SEQ ID NO: 179912 - DNA, 15 bp, Homo sapiens
gccgagcacagagaa

SEQ ID NO: 179913 - DNA, 15 bp, Homo sapiens
agccgagcacagaga

SEQ ID NO: 179914 - DNA, 15 bp, Homo sapiens
gagccgagcacagag

SEQ ID NO: 179915 - DNA, 15 bp, Homo sapiens
agagccgagcacaga

SEQ ID NO: 179916 - DNA, 15 bp, Homo sapiens
tagagccgagcacag

SEQ ID NO: 179917 - DNA, 15 bp, Homo sapiens
ttagagccgagcaca

SEQ ID NO: 179918 - DNA, 15 bp, Homo sapiens
cttagagccgagcac

SEQ ID NO: 179919 - DNA, 15 bp, Homo sapiens
ccttagagccgagca

SEQ ID NO: 179920 - DNA, 15 bp, Homo sapiens
cccttagagccgagc

SEQ ID NO: 179921 - DNA, 15 bp, Homo sapiens
acccttagagccgag

SEQ ID NO: 179922 - DNA, 15 bp, Homo sapiens
tacccttagagccga

SEQ ID NO: 179923 - DNA, 15 bp, Homo sapiens
atacccttagagccg

SEQ ID NO: 179924 - DNA, 15 bp, Homo sapiens
tatacccttagagcc

SEQ ID NO: 179925 - DNA, 15 bp, Homo sapiens
ttatacccttagagc

SEQ ID NO: 179926 - DNA, 15 bp, Homo sapiens
cttatacccttagag

SEQ ID NO: 179927 - DNA, 15 bp, Homo sapiens
tcttatacccttaga

SEQ ID NO: 179928 - DNA, 15 bp, Homo sapiens
ctcttatacccttag

SEQ ID NO: 179929 - DNA, 15 bp, Homo sapiens
actcttataccctta

SEQ ID NO: 179930 - DNA, 15 bp, Homo sapiens
tactcttataccctt

SEQ ID NO: 179931 - DNA, 15 bp, Homo sapiens
ttactcttataccct

SEQ ID NO: 179932 - DNA, 15 bp, Homo sapiens
tttactcttataccc

SEQ ID NO: 179933 - DNA, 15 bp, Homo sapiens
atttactcttatacc

SEQ ID NO: 179934 - DNA, 15 bp, Homo sapiens
aatttactcttatac

SEQ ID NO: 179935 - DNA, 15 bp, Homo sapiens
taatttactcttata

SEQ ID NO: 179936 - DNA, 15 bp, Homo sapiens
ctaatttactcttat

SEQ ID NO: 179937 - DNA, 15 bp, Homo sapiens
tctaatttactctta

SEQ ID NO: 179938 - DNA, 15 bp, Homo sapiens
atctaatttactctt

SEQ ID NO: 179939 - DNA, 15 bp, Homo sapiens
gatctaatttactct

SEQ ID NO: 179940 - DNA, 15 bp, Homo sapiens
agatctaatttactc

SEQ ID NO: 179941 - DNA, 15 bp, Homo sapiens
cagatctaatttact

SEQ ID NO: 179942 - DNA, 15 bp, Homo sapiens
ccagatctaatttac

SEQ ID NO: 179943 - DNA, 15 bp, Homo sapiens
gccagatctaattta

SEQ ID NO: 179944 - DNA, 15 bp, Homo sapiens
ggccagatctaattt

SEQ ID NO: 179945 - DNA, 15 bp, Homo sapiens
gggccagatctaatt

SEQ ID NO: 179946 - DNA, 15 bp, Homo sapiens
agggccagatctaat

SEQ ID NO: 179947 - DNA, 15 bp, Homo sapiens
aagggccagatctaa

SEQ ID NO: 179948 - DNA, 15 bp, Homo sapiens
caagggccagatcta

SEQ ID NO: 179949 - DNA, 15 bp, Homo sapiens
gcaagggccagatct

SEQ ID NO: 179950 - DNA, 15 bp, Homo sapiens
tgcaagggccagatc

SEQ ID NO: 179951 - DNA, 15 bp, Homo sapiens
atgcaagggccagat

SEQ ID NO: 179952 - DNA, 15 bp, Homo sapiens
catgcaagggccaga

SEQ ID NO: 179953 - DNA, 15 bp, Homo sapiens
ccatgcaagggccag

SEQ ID NO: 179954 - DNA, 15 bp, Homo sapiens
tccatgcaagggcca

SEQ ID NO: 179955 - DNA, 15 bp, Homo sapiens
ttccatgcaagggcc

SEQ ID NO: 179956 - DNA, 15 bp, Homo sapiens
cttccatgcaagggc

SEQ ID NO: 179957 - DNA, 15 bp, Homo sapiens
tcttccatgcaaggg

SEQ ID NO: 179958 - DNA, 15 bp, Homo sapiens
ttcttccatgcaagg

SEQ ID NO: 179959 - DNA, 15 bp, Homo sapiens
cttcttccatgcaag

SEQ ID NO: 179960 - DNA, 15 bp, Homo sapiens
gcttcttccatgcaa

SEQ ID NO: 179961 - DNA, 15 bp, Homo sapiens
ctctgccaggagtgc

SEQ ID NO: 179962 - DNA, 15 bp, Homo sapiens
cctctgccaggagtg

SEQ ID NO: 179963 - DNA, 15 bp, Homo sapiens
ccctctgccaggagt

SEQ ID NO: 179964 - DNA, 15 bp, Homo sapiens
tccctctgccaggag

SEQ ID NO: 179965 - DNA, 15 bp, Homo sapiens
ttccctctgccagga

SEQ ID NO: 179966 - DNA, 15 bp, Homo sapiens
attccctctgccagg

SEQ ID NO: 179967 - DNA, 15 bp, Homo sapiens
tattccctctgccag

SEQ ID NO: 179968 - DNA, 15 bp, Homo sapiens
ctattccctctgcca

SEQ ID NO: 179969 - DNA, 15 bp, Homo sapiens
gctattccctctgcc

SEQ ID NO: 179970 - DNA, 15 bp, Homo sapiens
tgctattccctctgc

SEQ ID NO: 179971 - DNA, 15 bp, Homo sapiens
gtgctattccctctg

SEQ ID NO: 179972 - DNA, 15 bp, Homo sapiens
tgtgctattccctct

SEQ ID NO: 179973 - DNA, 15 bp, Homo sapiens
ctgtgctattccctc

SEQ ID NO: 179974 - DNA, 15 bp, Homo sapiens
cctgtgctattccct

SEQ ID NO: 179975 - DNA, 15 bp, Homo sapiens
tcctgtgctattccc

SEQ ID NO: 179976 - DNA, 15 bp, Homo sapiens
ttcctgtgctattcc

SEQ ID NO: 179977 - DNA, 15 bp, Homo sapiens
tttcctgtgctattc

SEQ ID NO: 179978 - DNA, 15 bp, Homo sapiens
ctttcctgtgctatt

SEQ ID NO: 179979 - DNA, 15 bp, Homo sapiens
cctttcctgtgctat

SEQ ID NO: 179980 - DNA, 15 bp, Homo sapiens
gcctttcctgtgcta

SEQ ID NO: 179981 - DNA, 15 bp, Homo sapiens
ggcctttcctgtgct

SEQ ID NO: 179982 - DNA, 15 bp, Homo sapiens
gggcctttcctgtgc

SEQ ID NO: 179983 - DNA, 15 bp, Homo sapiens
tgggcctttcctgtg

SEQ ID NO: 179984 - DNA, 15 bp, Homo sapiens
ctgggcctttcctgt

SEQ ID NO: 179985 - DNA, 15 bp, Homo sapiens
tctgggcctttcctg

SEQ ID NO: 179986 - DNA, 15 bp, Homo sapiens
ctctgggcctttcct

SEQ ID NO: 179987 - DNA, 15 bp, Homo sapiens
cctctgggcctttcc

SEQ ID NO: 179988 - DNA, 15 bp, Homo sapiens
acctctgggcctttc

SEQ ID NO: 179989 - DNA, 15 bp, Homo sapiens
cacctctgggccttt

SEQ ID NO: 179990 - DNA, 15 bp, Homo sapiens
tcacctctgggcctt

SEQ ID NO: 179991 - DNA, 15 bp, Homo sapiens
ctcacctctgggcct

SEQ ID NO: 179992 - DNA, 15 bp, Homo sapiens
gctcacctctgggcc

SEQ ID NO: 179993 - DNA, 15 bp, Homo sapiens
agctcacctctgggc

SEQ ID NO: 179994 - DNA, 15 bp, Homo sapiens
cagctcacctctggg

SEQ ID NO: 179995 - DNA, 15 bp, Homo sapiens
ccagctcacctctgg

SEQ ID NO: 179996 - DNA, 15 bp, Homo sapiens
cccagctcacctctg

SEQ ID NO: 179997 - DNA, 15 bp, Homo sapiens
tcccagctcacctct

SEQ ID NO: 179998 - DNA, 15 bp, Homo sapiens
ttcccagctcacctc

SEQ ID NO: 179999 - DNA, 15 bp, Homo sapiens
tttcccagctcacct

SEQ ID NO: 180000 - DNA, 15 bp, Homo sapiens
gtttcccagctcacc

SEQ ID NO: 180001 - DNA, 15 bp, Homo sapiens
ggtttcccagctcac

SEQ ID NO: 180002 - DNA, 15 bp, Homo sapiens
tggtttcccagctca

SEQ ID NO: 180003 - DNA, 15 bp, Homo sapiens
gtggtttcccagctc

SEQ ID NO: 180004 - DNA, 15 bp, Homo sapiens
tgtggtttcccagct

SEQ ID NO: 180005 - DNA, 15 bp, Homo sapiens
ctgtggtttcccagc

SEQ ID NO: 180006 - DNA, 15 bp, Homo sapiens
cctgtggtttcccag

SEQ ID NO: 180007 - DNA, 15 bp, Homo sapiens
gcctgtggtttccca

SEQ ID NO: 180008 - DNA, 15 bp, Homo sapiens
tgcctgtggtttccc

SEQ ID NO: 180009 - DNA, 15 bp, Homo sapiens
ctgcctgtggtttcc

SEQ ID NO: 180010 - DNA, 15 bp, Homo sapiens
tctgcctgtggtttc

SEQ ID NO: 180011 - DNA, 15 bp, Homo sapiens
ctctgcctgtggttt

SEQ ID NO: 180012 - DNA, 15 bp, Homo sapiens
actctgcctgtggtt

SEQ ID NO: 180013 - DNA, 15 bp, Homo sapiens
cactctgcctgtggt

SEQ ID NO: 180014 - DNA, 15 bp, Homo sapiens
ccactctgcctgtgg

SEQ ID NO: 180015 - DNA, 15 bp, Homo sapiens
accactctgcctgtg

SEQ ID NO: 180016 - DNA, 15 bp, Homo sapiens
caccactctgcctgt

SEQ ID NO: 180017 - DNA, 15 bp, Homo sapiens
gcaccactctgcctg

SEQ ID NO: 180018 - DNA, 15 bp, Homo sapiens
tgcaccactctgcct

SEQ ID NO: 180019 - DNA, 15 bp, Homo sapiens
ctgcaccactctgcc

SEQ ID NO: 180020 - DNA, 15 bp, Homo sapiens
cctgcaccactctgc

SEQ ID NO: 180021 - DNA, 15 bp, Homo sapiens
ccctgcaccactctg

SEQ ID NO: 180022 - DNA, 15 bp, Homo sapiens
cccctgcaccactct

SEQ ID NO: 180023 - DNA, 15 bp, Homo sapiens
ccccctgcaccactc

SEQ ID NO: 180024 - DNA, 15 bp, Homo sapiens
tccccctgcaccact

SEQ ID NO: 180025 - DNA, 15 bp, Homo sapiens
ttccccctgcaccac

SEQ ID NO: 180026 - DNA, 15 bp, Homo sapiens
tttccccctgcacca

SEQ ID NO: 180027 - DNA, 15 bp, Homo sapiens
ttttccccctgcacc

SEQ ID NO: 180028 - DNA, 15 bp, Homo sapiens
tttttccccctgcac

SEQ ID NO: 180029 - DNA, 15 bp, Homo sapiens
ctttttccccctgca

SEQ ID NO: 180030 - DNA, 15 bp, Homo sapiens
tctttttccccctgc

SEQ ID NO: 180031 - DNA, 15 bp, Homo sapiens
ctctttttccccctg

SEQ ID NO: 180032 - DNA, 15 bp, Homo sapiens
cctctttttccccct

SEQ ID NO: 180033 - DNA, 15 bp, Homo sapiens
ccctctttttccccc

SEQ ID NO: 180034 - DNA, 15 bp, Homo sapiens
cccctctttttcccc

SEQ ID NO: 180035 - DNA, 15 bp, Homo sapiens
tcccctctttttccc

SEQ ID NO: 180036 - DNA, 15 bp, Homo sapiens
ctcccctctttttcc

SEQ ID NO: 180037 - DNA, 15 bp, Homo sapiens
cctcccctctttttc

SEQ ID NO: 180038 - DNA, 15 bp, Homo sapiens
ccctcccctcttttt

SEQ ID NO: 180039 - DNA, 15 bp, Homo sapiens
gccctcccctctttt

SEQ ID NO: 180040 - DNA, 15 bp, Homo sapiens
tgccctcccctcttt

SEQ ID NO: 180041 - DNA, 15 bp, Homo sapiens
ctgccctcccctctt

SEQ ID NO: 180042 - DNA, 15 bp, Homo sapiens
cctgccctcccctct

SEQ ID NO: 180043 - DNA, 15 bp, Homo sapiens
tcctgccctcccctc

SEQ ID NO: 180044 - DNA, 15 bp, Homo sapiens
ttcctgccctcccct

SEQ ID NO: 180045 - DNA, 15 bp, Homo sapiens
gttcctgccctcccc

SEQ ID NO: 180046 - DNA, 15 bp, Homo sapiens
tgttcctgccctccc

SEQ ID NO: 180047 - DNA, 15 bp, Homo sapiens
gtgttcctgccctcc

SEQ ID NO: 180048 - DNA, 15 bp, Homo sapiens
tgtgttcctgccctc

SEQ ID NO: 180049 - DNA, 15 bp, Homo sapiens
ctgtgttcctgccct

SEQ ID NO: 180050 - DNA, 15 bp, Homo sapiens
actgtgttcctgccc

SEQ ID NO: 180051 - DNA, 15 bp, Homo sapiens
cactgtgttcctgcc

SEQ ID NO: 180052 - DNA, 15 bp, Homo sapiens
ccactgtgttcctgc

SEQ ID NO: 180053 - DNA, 15 bp, Homo sapiens
cccactgtgttcctg

SEQ ID NO: 180054 - DNA, 15 bp, Homo sapiens
ccccactgtgttcct

SEQ ID NO: 180055 - DNA, 15 bp, Homo sapiens
cccccactgtgttcc

SEQ ID NO: 180056 - DNA, 15 bp, Homo sapiens
tcccccactgtgttc

SEQ ID NO: 180057 - DNA, 15 bp, Homo sapiens
ttcccccactgtgtt

SEQ ID NO: 180058 - DNA, 15 bp, Homo sapiens
gttcccccactgtgt

SEQ ID NO: 180059 - DNA, 15 bp, Homo sapiens
agttcccccactgtg

SEQ ID NO: 180060 - DNA, 15 bp, Homo sapiens
aagttcccccactgt

SEQ ID NO: 180061 - DNA, 15 bp, Homo sapiens
taagttcccccactg

SEQ ID NO: 180062 - DNA, 15 bp, Homo sapiens
ctaagttcccccact

SEQ ID NO: 180063 - DNA, 15 bp, Homo sapiens
actaagttcccccac

SEQ ID NO: 180064 - DNA, 15 bp, Homo sapiens
cactaagttccccca

SEQ ID NO: 180065 - DNA, 15 bp, Homo sapiens
gcactaagttccccc

SEQ ID NO: 180066 - DNA, 15 bp, Homo sapiens
tgcactaagttcccc

SEQ ID NO: 180067 - DNA, 15 bp, Homo sapiens
atgcactaagttccc

SEQ ID NO: 180068 - DNA, 15 bp, Homo sapiens
tatgcactaagttcc

SEQ ID NO: 180069 - DNA, 15 bp, Homo sapiens
ttatgcactaagttc

SEQ ID NO: 180070 - DNA, 15 bp, Homo sapiens
gttatgcactaagtt

SEQ ID NO: 180071 - DNA, 15 bp, Homo sapiens
tgttatgcactaagt

SEQ ID NO: 180072 - DNA, 15 bp, Homo sapiens
ttgttatgcactaag

SEQ ID NO: 180073 - DNA, 15 bp, Homo sapiens
gttgttatgcactaa

SEQ ID NO: 180074 - DNA, 15 bp, Homo sapiens
tgttgttatgcacta

SEQ ID NO: 180075 - DNA, 15 bp, Homo sapiens
ttgttgttatgcact

SEQ ID NO: 180076 - DNA, 15 bp, Homo sapiens
attgttgttatgcac

SEQ ID NO: 180077 - DNA, 15 bp, Homo sapiens
cattgttgttatgca

SEQ ID NO: 180078 - DNA, 15 bp, Homo sapiens
gcattgttgttatgc

SEQ ID NO: 180079 - DNA, 15 bp, Homo sapiens
ggcattgttgttatg

SEQ ID NO: 180080 - DNA, 15 bp, Homo sapiens
gggcattgttgttat

SEQ ID NO: 180081 - DNA, 15 bp, Homo sapiens
agggcattgttgtta

SEQ ID NO: 180082 - DNA, 15 bp, Homo sapiens
gagggcattgttgtt

SEQ ID NO: 180083 - DNA, 15 bp, Homo sapiens
tgagggcattgttgt

SEQ ID NO: 180084 - DNA, 15 bp, Homo sapiens
ttgagggcattgttg

SEQ ID NO: 180085 - DNA, 15 bp, Homo sapiens
gttgagggcattgtt

SEQ ID NO: 180086 - DNA, 15 bp, Homo sapiens
ggttgagggcattgt

SEQ ID NO: 180087 - DNA, 15 bp, Homo sapiens
gggttgagggcattg

SEQ ID NO: 180088 - DNA, 15 bp, Homo sapiens
agggttgagggcatt

SEQ ID NO: 180089 - DNA, 15 bp, Homo sapiens
aagggttgagggcat

SEQ ID NO: 180090 - DNA, 15 bp, Homo sapiens
aaagggttgagggca

SEQ ID NO: 180091 - DNA, 15 bp, Homo sapiens
aaaagggttgagggc

SEQ ID NO: 180092 - DNA, 15 bp, Homo sapiens
caaaagggttgaggg

SEQ ID NO: 180093 - DNA, 15 bp, Homo sapiens
gcaaaagggttgagg

SEQ ID NO: 180094 - DNA, 15 bp, Homo sapiens
ggcaaaagggttgag

SEQ ID NO: 180095 - DNA, 15 bp, Homo sapiens
aggcaaaagggttga

SEQ ID NO: 180096 - DNA, 15 bp, Homo sapiens
caggcaaaagggttg

SEQ ID NO: 180097 - DNA, 15 bp, Homo sapiens
ccaggcaaaagggtt

SEQ ID NO: 180098 - DNA, 15 bp, Homo sapiens
gccaggcaaaagggt

SEQ ID NO: 180099 - DNA, 15 bp, Homo sapiens
agccaggcaaaaggg

SEQ ID NO: 180100 - DNA, 15 bp, Homo sapiens
gagccaggcaaaagg

SEQ ID NO: 180101 - DNA, 15 bp, Homo sapiens
agagccaggcaaaag

SEQ ID NO: 180102 - DNA, 15 bp, Homo sapiens
aagagccaggcaaaa

SEQ ID NO: 180103 - DNA, 15 bp, Homo sapiens
gaagagccaggcaaa

SEQ ID NO: 180104 - DNA, 15 bp, Homo sapiens
tgaagagccaggcaa

SEQ ID NO: 180105 - DNA, 15 bp, Homo sapiens
gtgaagagccaggca

SEQ ID NO: 180106 - DNA, 15 bp, Homo sapiens
ggtgaagagccaggc

SEQ ID NO: 180107 - DNA, 15 bp, Homo sapiens
tggtgaagagccagg

SEQ ID NO: 180108 - DNA, 15 bp, Homo sapiens
gtggtgaagagccag

SEQ ID NO: 180109 - DNA, 15 bp, Homo sapiens
cgtggtgaagagcca

SEQ ID NO: 180110 - DNA, 15 bp, Homo sapiens
acgtggtgaagagcc

SEQ ID NO: 180111 - DNA, 15 bp, Homo sapiens
cacgtggtgaagagc

SEQ ID NO: 180112 - DNA, 15 bp, Homo sapiens
tcacgtggtgaagag

SEQ ID NO: 180113 - DNA, 15 bp, Homo sapiens
ctcacgtggtgaaga

SEQ ID NO: 180114 - DNA, 15 bp, Homo sapiens
tctcacgtggtgaag

SEQ ID NO: 180115 - DNA, 15 bp, Homo sapiens
ctctcacgtggtgaa

SEQ ID NO: 180116 - DNA, 15 bp, Homo sapiens
cctctcacgtggtga

SEQ ID NO: 180117 - DNA, 15 bp, Homo sapiens
tcctctcacgtggtg

SEQ ID NO: 180118 - DNA, 15 bp, Homo sapiens
gtcctctcacgtggt

SEQ ID NO: 180119 - DNA, 15 bp, Homo sapiens
agtcctctcacgtgg

SEQ ID NO: 180120 - DNA, 15 bp, Homo sapiens
gagtcctctcacgtg

SEQ ID NO: 180121 - DNA, 15 bp, Homo sapiens
tgagtcctctcacgt

SEQ ID NO: 180122 - DNA, 15 bp, Homo sapiens
ctgagtcctctcacg

SEQ ID NO: 180123 - DNA, 15 bp, Homo sapiens
cctgagtcctctcac

SEQ ID NO: 180124 - DNA, 15 bp, Homo sapiens
ccctgagtcctctca

SEQ ID NO: 180125 - DNA, 15 bp, Homo sapiens
cccctgagtcctctc

SEQ ID NO: 180126 - DNA, 15 bp, Homo sapiens
tcccctgagtcctct

SEQ ID NO: 180127 - DNA, 15 bp, Homo sapiens
ctcccctgagtcctc

SEQ ID NO: 180128 - DNA, 15 bp, Homo sapiens
tctcccctgagtcct

SEQ ID NO: 180129 - DNA, 15 bp, Homo sapiens
ttctcccctgagtcc

SEQ ID NO: 180130 - DNA, 15 bp, Homo sapiens
cttctcccctgagtc

SEQ ID NO: 180131 - DNA, 15 bp, Homo sapiens
tcttctcccctgagt

SEQ ID NO: 180132 - DNA, 15 bp, Homo sapiens
ctcttctcccctgag

SEQ ID NO: 180133 - DNA, 15 bp, Homo sapiens
actcttctcccctga

SEQ ID NO: 180134 - DNA, 15 bp, Homo sapiens
gactcttctcccctg

SEQ ID NO: 180135 - DNA, 15 bp, Homo sapiens
agactcttctcccct

SEQ ID NO: 180136 - DNA, 15 bp, Homo sapiens
cagactcttctcccc

SEQ ID NO: 180137 - DNA, 15 bp, Homo sapiens
tcagactcttctccc

SEQ ID NO: 180138 - DNA, 15 bp, Homo sapiens
ctcagactcttctcc

SEQ ID NO: 180139 - DNA, 15 bp, Homo sapiens
actcagactcttctc

SEQ ID NO: 180140 - DNA, 15 bp, Homo sapiens
cactcagactcttct

SEQ ID NO: 180141 - DNA, 15 bp, Homo sapiens
gcactcagactcttc

SEQ ID NO: 180142 - DNA, 15 bp, Homo sapiens
agcactcagactctt

SEQ ID NO: 180143 - DNA, 15 bp, Homo sapiens
cagcactcagactct

SEQ ID NO: 180144 - DNA, 15 bp, Homo sapiens
acagcactcagactc

SEQ ID NO: 180145 - DNA, 15 bp, Homo sapiens
cacagcactcagact

SEQ ID NO: 180146 - DNA, 15 bp, Homo sapiens
gcacagcactcagac

SEQ ID NO: 180147 - DNA, 15 bp, Homo sapiens
ggcacagcactcaga

SEQ ID NO: 180148 - DNA, 15 bp, Homo sapiens
gggcacagcactcag

SEQ ID NO: 180149 - DNA, 15 bp, Homo sapiens
agggcacagcactca

SEQ ID NO: 180150 - DNA, 15 bp, Homo sapiens
aagggcacagcactc

SEQ ID NO: 180151 - DNA, 15 bp, Homo sapiens
aaagggcacagcact

SEQ ID NO: 180152 - DNA, 15 bp, Homo sapiens
gaaagggcacagcac

SEQ ID NO: 180153 - DNA, 15 bp, Homo sapiens
agaaagggcacagca

SEQ ID NO: 180154 - DNA, 15 bp, Homo sapiens
cagaaagggcacagc

SEQ ID NO: 180155 - DNA, 15 bp, Homo sapiens
tcagaaagggcacag

SEQ ID NO: 180156 - DNA, 15 bp, Homo sapiens
ttcagaaagggcaca

SEQ ID NO: 180157 - DNA, 15 bp, Homo sapiens
attcagaaagggcac

SEQ ID NO: 180158 - DNA, 15 bp, Homo sapiens
aattcagaaagggca

SEQ ID NO: 180159 - DNA, 15 bp, Homo sapiens
gaattcagaaagggc

SEQ ID NO: 180160 - DNA, 15 bp, Homo sapiens
agaattcagaaaggg

SEQ ID NO: 180161 - DNA, 15 bp, Homo sapiens
aagaattcagaaagg

SEQ ID NO: 180162 - DNA, 15 bp, Homo sapiens
aaagaattcagaaag

SEQ ID NO: 180163 - DNA, 15 bp, Homo sapiens
aaaagaattcagaaa

SEQ ID NO: 180164 - DNA, 15 bp, Homo sapiens
aaaaagaattcagaa

SEQ ID NO: 180165 - DNA, 15 bp, Homo sapiens
aaaaaagaattcaga

SEQ ID NO: 180166 - DNA, 15 bp, Homo sapiens
aaaaaaagaattcag

SEQ ID NO: 180167 - DNA, 15 bp, Homo sapiens
aaaaaaaagaattca

SEQ ID NO: 180168 - DNA, 15 bp, Homo sapiens
aaaaaaaaagaattc

SEQ ID NO: 180169 - DNA, 15 bp, Homo sapiens
taaaaaaaaagaatt

SEQ ID NO: 180170 - DNA, 15 bp, Homo sapiens
ataaaaaaaaagaat

SEQ ID NO: 180171 - DNA, 15 bp, Homo sapiens
aataaaaaaaaagaa

SEQ ID NO: 180172 - DNA, 15 bp, Homo sapiens
taataaaaaaaaaga

SEQ ID NO: 180173 - DNA, 15 bp, Homo sapiens
ataataaaaaaaaag

SEQ ID NO: 180174 - DNA, 15 bp, Homo sapiens
aataataaaaaaaaa

SEQ ID NO: 180175 - DNA, 15 bp, Homo sapiens
cataataataaaaaa

SEQ ID NO: 180176 - DNA, 15 bp, Homo sapiens
ccataataataaaaa

SEQ ID NO: 180177 - DNA, 15 bp, Homo sapiens
accataataataaaa

SEQ ID NO: 180178 - DNA, 15 bp, Homo sapiens
taccataataataaa

SEQ ID NO: 180179 - DNA, 15 bp, Homo sapiens
ttaccataataataa

SEQ ID NO: 180180 - DNA, 15 bp, Homo sapiens
tttaccataataata

SEQ ID NO: 180181 - DNA, 15 bp, Homo sapiens
ttttaccataataat

SEQ ID NO: 180182 - DNA, 15 bp, Homo sapiens
attttaccataataa

SEQ ID NO: 180183 - DNA, 15 bp, Homo sapiens
tattttaccataata

SEQ ID NO: 180184 - DNA, 15 bp, Homo sapiens
atattttaccataat

SEQ ID NO: 180185 - DNA, 15 bp, Homo sapiens
tatattttaccataa

SEQ ID NO: 180186 - DNA, 15 bp, Homo sapiens
gtatattttaccata

SEQ ID NO: 180187 - DNA, 15 bp, Homo sapiens
tgtatattttaccat

SEQ ID NO: 180188 - DNA, 15 bp, Homo sapiens
gtgtatattttacca

SEQ ID NO: 180189 - DNA, 15 bp, Homo sapiens
tgtgtatattttacc

SEQ ID NO: 180190 - DNA, 15 bp, Homo sapiens
gtgtgtatattttac

SEQ ID NO: 180191 - DNA, 15 bp, Homo sapiens
agtgtgtatatttta

SEQ ID NO: 180192 - DNA, 15 bp, Homo sapiens
tagtgtgtatatttt

SEQ ID NO: 180193 - DNA, 15 bp, Homo sapiens
atagtgtgtatattt

SEQ ID NO: 180194 - DNA, 15 bp, Homo sapiens
tatagtgtgtatatt

SEQ ID NO: 180195 - DNA, 15 bp, Homo sapiens
ttatagtgtgtatat

SEQ ID NO: 180196 - DNA, 15 bp, Homo sapiens
tttatagtgtgtata

SEQ ID NO: 180197 - DNA, 15 bp, Homo sapiens
ttttatagtgtgtat

SEQ ID NO: 180198 - DNA, 15 bp, Homo sapiens
attttatagtgtgta

SEQ ID NO: 180199 - DNA, 15 bp, Homo sapiens
aattttatagtgtgt

SEQ ID NO: 180200 - DNA, 15 bp, Homo sapiens
caattttatagtgtg

SEQ ID NO: 180201 - DNA, 15 bp, Homo sapiens
tcaattttatagtgt

SEQ ID NO: 180202 - DNA, 15 bp, Homo sapiens
gtcaattttatagtg

SEQ ID NO: 180203 - DNA, 15 bp, Homo sapiens
ggtcaattttatagt

SEQ ID NO: 180204 - DNA, 15 bp, Homo sapiens
tggtcaattttatag

SEQ ID NO: 180205 - DNA, 15 bp, Homo sapiens
atggtcaattttata

SEQ ID NO: 180206 - DNA, 15 bp, Homo sapiens
aatggtcaattttat

SEQ ID NO: 180207 - DNA, 15 bp, Homo sapiens
caatggtcaatttta

SEQ ID NO: 180208 - DNA, 15 bp, Homo sapiens
acaatggtcaatttt

SEQ ID NO: 180209 - DNA, 15 bp, Homo sapiens
cacaatggtcaattt

SEQ ID NO: 180210 - DNA, 15 bp, Homo sapiens
tcacaatggtcaatt

SEQ ID NO: 180211 - DNA, 15 bp, Homo sapiens
ctcacaatggtcaat

SEQ ID NO: 180212 - DNA, 15 bp, Homo sapiens
tctcacaatggtcaa

SEQ ID NO: 180213 - DNA, 15 bp, Homo sapiens
atctcacaatggtca

SEQ ID NO: 180214 - DNA, 15 bp, Homo sapiens
aatctcacaatggtc

SEQ ID NO: 180215 - DNA, 15 bp, Homo sapiens
aaatctcacaatggt

SEQ ID NO: 180216 - DNA, 15 bp, Homo sapiens
aaaatctcacaatgg

SEQ ID NO: 180217 - DNA, 15 bp, Homo sapiens
taaaatctcacaatg

SEQ ID NO: 180218 - DNA, 15 bp, Homo sapiens
ttaaaatctcacaat

SEQ ID NO: 180219 - DNA, 15 bp, Homo sapiens
cttaaaatctcacaa

SEQ ID NO: 180220 - DNA, 15 bp, Homo sapiens
acttaaaatctcaca

SEQ ID NO: 180221 - DNA, 15 bp, Homo sapiens
tacttaaaatctcac

SEQ ID NO: 180222 - DNA, 15 bp, Homo sapiens
atacttaaaatctca

SEQ ID NO: 180223 - DNA, 15 bp, Homo sapiens
tatacttaaaatctc

SEQ ID NO: 180224 - DNA, 15 bp, Homo sapiens
gtatacttaaaatct

SEQ ID NO: 180225 - DNA, 15 bp, Homo sapiens
tgtatacttaaaatc

SEQ ID NO: 180226 - DNA, 15 bp, Homo sapiens
ttgtatacttaaaat

SEQ ID NO: 180227 - DNA, 15 bp, Homo sapiens
gttgtatacttaaaa

SEQ ID NO: 180228 - DNA, 15 bp, Homo sapiens
ggttgtatacttaaa

SEQ ID NO: 180229 - DNA, 15 bp, Homo sapiens
tggttgtatacttaa

SEQ ID NO: 180230 - DNA, 15 bp, Homo sapiens
ctggttgtatactta

SEQ ID NO: 180231 - DNA, 15 bp, Homo sapiens
tctggttgtatactt

SEQ ID NO: 180232 - DNA, 15 bp, Homo sapiens
ttctggttgtatact

SEQ ID NO: 180233 - DNA, 15 bp, Homo sapiens
attctggttgtatac

SEQ ID NO: 180234 - DNA, 15 bp, Homo sapiens
aattctggttgtata

SEQ ID NO: 180235 - DNA, 15 bp, Homo sapiens
gaattctggttgtat

SEQ ID NO: 180236 - DNA, 15 bp, Homo sapiens
agaattctggttgta

SEQ ID NO: 180237 - DNA, 15 bp, Homo sapiens
cagaattctggttgt

SEQ ID NO: 180238 - DNA, 15 bp, Homo sapiens
acagaattctggttg

SEQ ID NO: 180239 - DNA, 15 bp, Homo sapiens
aacagaattctggtt

SEQ ID NO: 180240 - DNA, 15 bp, Homo sapiens
gaacagaattctggt

SEQ ID NO: 180241 - DNA, 15 bp, Homo sapiens
tgaacagaattctgg

SEQ ID NO: 180242 - DNA, 15 bp, Homo sapiens
ttgaacagaattctg

SEQ ID NO: 180243 - DNA, 15 bp, Homo sapiens
gttgaacagaattct

SEQ ID NO: 180244 - DNA, 15 bp, Homo sapiens
ggttgaacagaattc

SEQ ID NO: 180245 - DNA, 15 bp, Homo sapiens
tggttgaacagaatt

SEQ ID NO: 180246 - DNA, 15 bp, Homo sapiens
atggttgaacagaat

SEQ ID NO: 180247 - DNA, 15 bp, Homo sapiens
gatggttgaacagaa

SEQ ID NO: 180248 - DNA, 15 bp, Homo sapiens
agatggttgaacaga

SEQ ID NO: 180249 - DNA, 15 bp, Homo sapiens
cagatggttgaacag

SEQ ID NO: 180250 - DNA, 15 bp, Homo sapiens
acagatggttgaaca

SEQ ID NO: 180251 - DNA, 15 bp, Homo sapiens
cacagatggttgaac

SEQ ID NO: 180252 - DNA, 15 bp, Homo sapiens
gcacagatggttgaa

SEQ ID NO: 180253 - DNA, 15 bp, Homo sapiens
agcacagatggttga

SEQ ID NO: 180254 - DNA, 15 bp, Homo sapiens
tagcacagatggttg

SEQ ID NO: 180255 - DNA, 15 bp, Homo sapiens
gtagcacagatggtt

SEQ ID NO: 180256 - DNA, 15 bp, Homo sapiens
agtagcacagatggt

SEQ ID NO: 180257 - DNA, 15 bp, Homo sapiens
aagtagcacagatgg

SEQ ID NO: 180258 - DNA, 15 bp, Homo sapiens
taagtagcacagatg

SEQ ID NO: 180259 - DNA, 15 bp, Homo sapiens
gtaagtagcacagat

SEQ ID NO: 180260 - DNA, 15 bp, Homo sapiens
agtaagtagcacaga

SEQ ID NO: 180261 - DNA, 15 bp, Homo sapiens
aagtaagtagcacag

SEQ ID NO: 180262 - DNA, 15 bp, Homo sapiens
gaagtaagtagcaca

SEQ ID NO: 180263 - DNA, 15 bp, Homo sapiens
ggaagtaagtagcac

SEQ ID NO: 180264 - DNA, 15 bp, Homo sapiens
tggaagtaagtagca

SEQ ID NO: 180265 - DNA, 15 bp, Homo sapiens
ctggaagtaagtagc

SEQ ID NO: 180266 - DNA, 15 bp, Homo sapiens
tctggaagtaagtag

SEQ ID NO: 180267 - DNA, 15 bp, Homo sapiens
ttctggaagtaagta

SEQ ID NO: 180268 - DNA, 15 bp, Homo sapiens
gttctggaagtaagt

SEQ ID NO: 180269 - DNA, 15 bp, Homo sapiens
ggttctggaagtaag

SEQ ID NO: 180270 - DNA, 15 bp, Homo sapiens
cggttctggaagtaa

SEQ ID NO: 180271 - DNA, 15 bp, Homo sapiens
acggttctggaagta

SEQ ID NO: 180272 - DNA, 15 bp, Homo sapiens
gacggttctggaagt

SEQ ID NO: 180273 - DNA, 15 bp, Homo sapiens
ggacggttctggaag

SEQ ID NO: 180274 - DNA, 15 bp, Homo sapiens
tggacggttctggaa

SEQ ID NO: 180275 - DNA, 15 bp, Homo sapiens
ctggacggttctgga

SEQ ID NO: 180276 - DNA, 15 bp, Homo sapiens
gctggacggttctgg

SEQ ID NO: 180277 - DNA, 15 bp, Homo sapiens
tgctggacggttctg

SEQ ID NO: 180278 - DNA, 15 bp, Homo sapiens
gtgctggacggttct

SEQ ID NO: 180279 - DNA, 15 bp, Homo sapiens
agtgctggacggttc

SEQ ID NO: 180280 - DNA, 15 bp, Homo sapiens
cagtgctggacggtt

SEQ ID NO: 180281 - DNA, 15 bp, Homo sapiens
gcagtgctggacggt

SEQ ID NO: 180282 - DNA, 15 bp, Homo sapiens
tgcagtgctggacgg

SEQ ID NO: 180283 - DNA, 15 bp, Homo sapiens
ctgcagtgctggacg

SEQ ID NO: 180284 - DNA, 15 bp, Homo sapiens
tctgcagtgctggac

SEQ ID NO: 180285 - DNA, 15 bp, Homo sapiens
atctgcagtgctgga

SEQ ID NO: 180286 - DNA, 15 bp, Homo sapiens
catctgcagtgctgg

SEQ ID NO: 180287 - DNA, 15 bp, Homo sapiens
ccatctgcagtgctg

SEQ ID NO: 180288 - DNA, 15 bp, Homo sapiens
tccatctgcagtgct

SEQ ID NO: 180289 - DNA, 15 bp, Homo sapiens
ttccatctgcagtgc

SEQ ID NO: 180290 - DNA, 15 bp, Homo sapiens
tttccatctgcagtg

SEQ ID NO: 180291 - DNA, 15 bp, Homo sapiens
gtttccatctgcagt

SEQ ID NO: 180292 - DNA, 15 bp, Homo sapiens
ggtttccatctgcag

SEQ ID NO: 180293 - DNA, 15 bp, Homo sapiens
gggtttccatctgca

SEQ ID NO: 180294 - DNA, 15 bp, Homo sapiens
agggtttccatctgc

SEQ ID NO: 180295 - DNA, 15 bp, Homo sapiens
cagggtttccatctg

SEQ ID NO: 180296 - DNA, 15 bp, Homo sapiens
ccagggtttccatct

SEQ ID NO: 180297 - DNA, 15 bp, Homo sapiens
tccagggtttccatc

SEQ ID NO: 180298 - DNA, 15 bp, Homo sapiens
gtccagggtttccat

SEQ ID NO: 180299 - DNA, 15 bp, Homo sapiens
ggtccagggtttcca

SEQ ID NO: 180300 - DNA, 15 bp, Homo sapiens
tggtccagggtttcc

SEQ ID NO: 180301 - DNA, 15 bp, Homo sapiens
ttggtccagggtttc

SEQ ID NO: 180302 - DNA, 15 bp, Homo sapiens
attggtccagggttt

SEQ ID NO: 180303 - DNA, 15 bp, Homo sapiens
cattggtccagggtt

SEQ ID NO: 180304 - DNA, 15 bp, Homo sapiens
ccattggtccagggt

SEQ ID NO: 180305 - DNA, 15 bp, Homo sapiens
cccattggtccaggg

SEQ ID NO: 180306 - DNA, 15 bp, Homo sapiens
ccccattggtccagg

SEQ ID NO: 180307 - DNA, 15 bp, Homo sapiens
tccccattggtccag

SEQ ID NO: 180308 - DNA, 15 bp, Homo sapiens
ctccccattggtcca

SEQ ID NO: 180309 - DNA, 15 bp, Homo sapiens
actccccattggtcc

SEQ ID NO: 180310 - DNA, 15 bp, Homo sapiens
gactccccattggtc

SEQ ID NO: 180311 - DNA, 15 bp, Homo sapiens
tgactccccattggt

SEQ ID NO: 180312 - DNA, 15 bp, Homo sapiens
gtgactccccattgg

SEQ ID NO: 180313 - DNA, 15 bp, Homo sapiens
agtgactccccattg

SEQ ID NO: 180314 - DNA, 15 bp, Homo sapiens
cagtgactccccatt

SEQ ID NO: 180315 - DNA, 15 bp, Homo sapiens
gcagtgactccccat

SEQ ID NO: 180316 - DNA, 15 bp, Homo sapiens
ggcagtgactcccca

SEQ ID NO: 180317 - DNA, 15 bp, Homo sapiens
cggcagtgactcccc

SEQ ID NO: 180318 - DNA, 15 bp, Homo sapiens
acggcagtgactccc

SEQ ID NO: 180319 - DNA, 15 bp, Homo sapiens
aacggcagtgactcc

SEQ ID NO: 180320 - DNA, 15 bp, Homo sapiens
gaacggcagtgactc

SEQ ID NO: 180321 - DNA, 15 bp, Homo sapiens
agaacggcagtgact

SEQ ID NO: 180322 - DNA, 15 bp, Homo sapiens
gagaacggcagtgac

SEQ ID NO: 180323 - DNA, 15 bp, Homo sapiens
agagaacggcagtga

SEQ ID NO: 180324 - DNA, 15 bp, Homo sapiens
gagagaacggcagtg

SEQ ID NO: 180325 - DNA, 15 bp, Homo sapiens
ggagagaacggcagt

SEQ ID NO: 180326 - DNA, 15 bp, Homo sapiens
aggagagaacggcag

SEQ ID NO: 180327 - DNA, 15 bp, Homo sapiens
gaggagagaacggca

SEQ ID NO: 180328 - DNA, 15 bp, Homo sapiens
ggaggagagaacggc

SEQ ID NO: 180329 - DNA, 15 bp, Homo sapiens
tggaggagagaacgg

SEQ ID NO: 180330 - DNA, 15 bp, Homo sapiens
atggaggagagaacg

SEQ ID NO: 180331 - DNA, 15 bp, Homo sapiens
gatggaggagagaac

SEQ ID NO: 180332 - DNA, 15 bp, Homo sapiens
ggatggaggagagaa

SEQ ID NO: 180333 - DNA, 15 bp, Homo sapiens
tggatggaggagaga

SEQ ID NO: 180334 - DNA, 15 bp, Homo sapiens
ctggatggaggagag

SEQ ID NO: 180335 - DNA, 15 bp, Homo sapiens
gctggatggaggaga

SEQ ID NO: 180336 - DNA, 15 bp, Homo sapiens
ggctggatggaggag

SEQ ID NO: 180337 - DNA, 15 bp, Homo sapiens
aggctggatggagga

SEQ ID NO: 180338 - DNA, 15 bp, Homo sapiens
caggctggatggagg

SEQ ID NO: 180339 - DNA, 15 bp, Homo sapiens
tcaggctggatggag

SEQ ID NO: 180340 - DNA, 15 bp, Homo sapiens
ctcaggctggatgga

SEQ ID NO: 180341 - DNA, 15 bp, Homo sapiens
tctcaggctggatgg

SEQ ID NO: 180342 - DNA, 15 bp, Homo sapiens
ttctcaggctggatg

SEQ ID NO: 180343 - DNA, 15 bp, Homo sapiens
gttctcaggctggat

SEQ ID NO: 180344 - DNA, 15 bp, Homo sapiens
ggttctcaggctgga

SEQ ID NO: 180345 - DNA, 15 bp, Homo sapiens
aggttctcaggctgg

SEQ ID NO: 180346 - DNA, 15 bp, Homo sapiens
caggttctcaggctg

SEQ ID NO: 180347 - DNA, 15 bp, Homo sapiens
acaggttctcaggct

SEQ ID NO: 180348 - DNA, 15 bp, Homo sapiens
cacaggttctcaggc

SEQ ID NO: 180349 - DNA, 15 bp, Homo sapiens
tcacaggttctcagg

SEQ ID NO: 180350 - DNA, 15 bp, Homo sapiens
atcacaggttctcag

SEQ ID NO: 180351 - DNA, 15 bp, Homo sapiens
gatcacaggttctca

SEQ ID NO: 180352 - DNA, 15 bp, Homo sapiens
agatcacaggttctc

SEQ ID NO: 180353 - DNA, 15 bp, Homo sapiens
cagatcacaggttct

SEQ ID NO: 180354 - DNA, 15 bp, Homo sapiens
gcagatcacaggttc

SEQ ID NO: 180355 - DNA, 15 bp, Homo sapiens
agcagatcacaggtt

SEQ ID NO: 180356 - DNA, 15 bp, Homo sapiens
aagcagatcacaggt

SEQ ID NO: 180357 - DNA, 15 bp, Homo sapiens
caagcagatcacagg

SEQ ID NO: 180358 - DNA, 15 bp, Homo sapiens
gcaagcagatcacag

SEQ ID NO: 180359 - DNA, 15 bp, Homo sapiens
agcaagcagatcaca

SEQ ID NO: 180360 - DNA, 15 bp, Homo sapiens
cagcaagcagatcac

SEQ ID NO: 180361 - DNA, 15 bp, Homo sapiens
gcagcaagcagatca

SEQ ID NO: 180362 - DNA, 15 bp, Homo sapiens
agcagcaagcagatc

SEQ ID NO: 180363 - DNA, 15 bp, Homo sapiens
aagcagcaagcagat

SEQ ID NO: 180364 - DNA, 15 bp, Homo sapiens
gaagcagcaagcaga

SEQ ID NO: 180365 - DNA, 15 bp, Homo sapiens
agaagcagcaagcag

SEQ ID NO: 180366 - DNA, 15 bp, Homo sapiens
aagaagcagcaagca

SEQ ID NO: 180367 - DNA, 15 bp, Homo sapiens
caagaagcagcaagc

SEQ ID NO: 180368 - DNA, 15 bp, Homo sapiens
tcaagaagcagcaag

SEQ ID NO: 180369 - DNA, 15 bp, Homo sapiens
ctcaagaagcagcaa

SEQ ID NO: 180370 - DNA, 15 bp, Homo sapiens
cctcaagaagcagca

SEQ ID NO: 180371 - DNA, 15 bp, Homo sapiens
gcctcaagaagcagc

SEQ ID NO: 180372 - DNA, 15 bp, Homo sapiens
ggcctcaagaagcag

SEQ ID NO: 180373 - DNA, 15 bp, Homo sapiens
aggcctcaagaagca

SEQ ID NO: 180374 - DNA, 15 bp, Homo sapiens
taggcctcaagaagc

SEQ ID NO: 180375 - DNA, 15 bp, Homo sapiens
ataggcctcaagaag

SEQ ID NO: 180376 - DNA, 15 bp, Homo sapiens
aataggcctcaagaa

SEQ ID NO: 180377 - DNA, 15 bp, Homo sapiens
aaataggcctcaaga

SEQ ID NO: 180378 - DNA, 15 bp, Homo sapiens
caaataggcctcaag

SEQ ID NO: 180379 - DNA, 15 bp, Homo sapiens
ccaaataggcctcaa

SEQ ID NO: 180380 - DNA, 15 bp, Homo sapiens
tccaaataggcctca

SEQ ID NO: 180381 - DNA, 15 bp, Homo sapiens
atccaaataggcctc

SEQ ID NO: 180382 - DNA, 15 bp, Homo sapiens
tatccaaataggcct

SEQ ID NO: 180383 - DNA, 15 bp, Homo sapiens
atatccaaataggcc

SEQ ID NO: 180384 - DNA, 15 bp, Homo sapiens
aatatccaaataggc

SEQ ID NO: 180385 - DNA, 15 bp, Homo sapiens
aaatatccaaatagg

SEQ ID NO: 180386 - DNA, 15 bp, Homo sapiens
gaaatatccaaatag

SEQ ID NO: 180387 - DNA, 15 bp, Homo sapiens
ggaaatatccaaata

SEQ ID NO: 180388 - DNA, 15 bp, Homo sapiens
aggaaatatccaaat

SEQ ID NO: 180389 - DNA, 15 bp, Homo sapiens
taggaaatatccaaa

SEQ ID NO: 180390 - DNA, 15 bp, Homo sapiens
ataggaaatatccaa

SEQ ID NO: 180391 - DNA, 15 bp, Homo sapiens
cataggaaatatcca

SEQ ID NO: 180392 - DNA, 15 bp, Homo sapiens
tcataggaaatatcc

SEQ ID NO: 180393 - DNA, 15 bp, Homo sapiens
ctcataggaaatatc

SEQ ID NO: 180394 - DNA, 15 bp, Homo sapiens
actcataggaaatat

SEQ ID NO: 180395 - DNA, 15 bp, Homo sapiens
tactcataggaaata

SEQ ID NO: 180396 - DNA, 15 bp, Homo sapiens
ctactcataggaaat

SEQ ID NO: 180397 - DNA, 15 bp, Homo sapiens
tctactcataggaaa

SEQ ID NO: 180398 - DNA, 15 bp, Homo sapiens
ttctactcataggaa

SEQ ID NO: 180399 - DNA, 15 bp, Homo sapiens
attctactcatagga

SEQ ID NO: 180400 - DNA, 15 bp, Homo sapiens
cattctactcatagg

SEQ ID NO: 180401 - DNA, 15 bp, Homo sapiens
tcattctactcatag

SEQ ID NO: 180402 - DNA, 15 bp, Homo sapiens
atcattctactcata

SEQ ID NO: 180403 - DNA, 15 bp, Homo sapiens
tatcattctactcat

SEQ ID NO: 180404 - DNA, 15 bp, Homo sapiens
ctatcattctactca

SEQ ID NO: 180405 - DNA, 15 bp, Homo sapiens
cctatcattctactc

SEQ ID NO: 180406 - DNA, 15 bp, Homo sapiens
tcctatcattctact

SEQ ID NO: 180407 - DNA, 15 bp, Homo sapiens
atcctatcattctac

SEQ ID NO: 180408 - DNA, 15 bp, Homo sapiens
tatcctatcattcta

SEQ ID NO: 180409 - DNA, 15 bp, Homo sapiens
atatcctatcattct

SEQ ID NO: 180410 - DNA, 15 bp, Homo sapiens
catatcctatcattc

SEQ ID NO: 180411 - DNA, 15 bp, Homo sapiens
acatatcctatcatt

SEQ ID NO: 180412 - DNA, 15 bp, Homo sapiens
cacatatcctatcat

SEQ ID NO: 180413 - DNA, 15 bp, Homo sapiens
ccacatatcctatca

SEQ ID NO: 180414 - DNA, 15 bp, Homo sapiens
gccacatatcctatc

SEQ ID NO: 180415 - DNA, 15 bp, Homo sapiens
ggccacatatcctat

SEQ ID NO: 180416 - DNA, 15 bp, Homo sapiens
aggccacatatccta

SEQ ID NO: 180417 - DNA, 15 bp, Homo sapiens
aaggccacatatcct

SEQ ID NO: 180418 - DNA, 15 bp, Homo sapiens
aaaggccacatatcc

SEQ ID NO: 180419 - DNA, 15 bp, Homo sapiens
aaaaggccacatatc

SEQ ID NO: 180420 - DNA, 15 bp, Homo sapiens
ggacacaaaaggcca

SEQ ID NO: 180421 - DNA, 15 bp, Homo sapiens
cggacacaaaaggcc

SEQ ID NO: 180422 - DNA, 15 bp, Homo sapiens
ccggacacaaaaggc

SEQ ID NO: 180423 - DNA, 15 bp, Homo sapiens
gccggacacaaaagg

SEQ ID NO: 180424 - DNA, 15 bp, Homo sapiens
agccggacacaaaag

SEQ ID NO: 180425 - DNA, 15 bp, Homo sapiens
aagccggacacaaaa

SEQ ID NO: 180426 - DNA, 15 bp, Homo sapiens
gaagccggacacaaa

SEQ ID NO: 180427 - DNA, 15 bp, Homo sapiens
agaagccggacacaa

SEQ ID NO: 180428 - DNA, 15 bp, Homo sapiens
aagaagccggacaca

SEQ ID NO: 180429 - DNA, 15 bp, Homo sapiens
gaagaagccggacac

SEQ ID NO: 180430 - DNA, 15 bp, Homo sapiens
ggaagaagccggaca

SEQ ID NO: 180431 - DNA, 15 bp, Homo sapiens
tggaagaagccggac

SEQ ID NO: 180432 - DNA, 15 bp, Homo sapiens
gtggaagaagccgga

SEQ ID NO: 180433 - DNA, 15 bp, Homo sapiens
agtggaagaagccgg

SEQ ID NO: 180434 - DNA, 15 bp, Homo sapiens
aagtggaagaagccg

SEQ ID NO: 180435 - DNA, 15 bp, Homo sapiens
taagtggaagaagcc

SEQ ID NO: 180436 - DNA, 15 bp, Homo sapiens
ctaagtggaagaagc

SEQ ID NO: 180437 - DNA, 15 bp, Homo sapiens
gctaagtggaagaag

SEQ ID NO: 180438 - DNA, 15 bp, Homo sapiens
tgctaagtggaagaa

SEQ ID NO: 180439 - DNA, 15 bp, Homo sapiens
atgctaagtggaaga

SEQ ID NO: 180440 - DNA, 15 bp, Homo sapiens
tatgctaagtggaag

SEQ ID NO: 180441 - DNA, 15 bp, Homo sapiens
ttatgctaagtggaa

SEQ ID NO: 180442 - DNA, 15 bp, Homo sapiens
attatgctaagtgga

SEQ ID NO: 180443 - DNA, 15 bp, Homo sapiens
cattatgctaagtgg

SEQ ID NO: 180444 - DNA, 15 bp, Homo sapiens
acattatgctaagtg

SEQ ID NO: 180445 - DNA, 15 bp, Homo sapiens
aacattatgctaagt

SEQ ID NO: 180446 - DNA, 15 bp, Homo sapiens
gaacattatgctaag

SEQ ID NO: 180447 - DNA, 15 bp, Homo sapiens
agaacattatgctaa

SEQ ID NO: 180448 - DNA, 15 bp, Homo sapiens
aagaacattatgcta

SEQ ID NO: 180449 - DNA, 15 bp, Homo sapiens
caagaacattatgct

SEQ ID NO: 180450 - DNA, 15 bp, Homo sapiens
tcaagaacattatgc

SEQ ID NO: 180451 - DNA, 15 bp, Homo sapiens
ctcaagaacattatg

SEQ ID NO: 180452 - DNA, 15 bp, Homo sapiens
cctcaagaacattat

SEQ ID NO: 180453 - DNA, 15 bp, Homo sapiens
acctcaagaacatta

SEQ ID NO: 180454 - DNA, 15 bp, Homo sapiens
aacctcaagaacatt

SEQ ID NO: 180455 - DNA, 15 bp, Homo sapiens
gaacctcaagaacat

SEQ ID NO: 180456 - DNA, 15 bp, Homo sapiens
tgaacctcaagaaca

SEQ ID NO: 180457 - DNA, 15 bp, Homo sapiens
gtgaacctcaagaac

SEQ ID NO: 180458 - DNA, 15 bp, Homo sapiens
ggtgaacctcaagaa

SEQ ID NO: 180459 - DNA, 15 bp, Homo sapiens
aggtgaacctcaaga

SEQ ID NO: 180460 - DNA, 15 bp, Homo sapiens
caggtgaacctcaag

SEQ ID NO: 180461 - DNA, 15 bp, Homo sapiens
acaggtgaacctcaa

SEQ ID NO: 180462 - DNA, 15 bp, Homo sapiens
cacaggtgaacctca

SEQ ID NO: 180463 - DNA, 15 bp, Homo sapiens
acacaggtgaacctc

SEQ ID NO: 180464 - DNA, 15 bp, Homo sapiens
aacacaggtgaacct

SEQ ID NO: 180465 - DNA, 15 bp, Homo sapiens
caacacaggtgaacc

SEQ ID NO: 180466 - DNA, 15 bp, Homo sapiens
acaacacaggtgaac

SEQ ID NO: 180467 - DNA, 15 bp, Homo sapiens
cacaacacaggtgaa

SEQ ID NO: 180468 - DNA, 15 bp, Homo sapiens
ccacaacacaggtga

SEQ ID NO: 180469 - DNA, 15 bp, Homo sapiens
gccacaacacaggtg

SEQ ID NO: 180470 - DNA, 15 bp, Homo sapiens
tgccacaacacaggt

SEQ ID NO: 180471 - DNA, 15 bp, Homo sapiens
atgccacaacacagg

SEQ ID NO: 180472 - DNA, 15 bp, Homo sapiens
catgccacaacacag

SEQ ID NO: 180473 - DNA, 15 bp, Homo sapiens
gcatgccacaacaca

SEQ ID NO: 180474 - DNA, 15 bp, Homo sapiens
tgcatgccacaacac

SEQ ID NO: 180475 - DNA, 15 bp, Homo sapiens
ctgcatgccacaaca

SEQ ID NO: 180476 - DNA, 15 bp, Homo sapiens
gctgcatgccacaac

SEQ ID NO: 180477 - DNA, 15 bp, Homo sapiens
tgctgcatgccacaa

SEQ ID NO: 180478 - DNA, 15 bp, Homo sapiens
ctgctgcatgccaca

SEQ ID NO: 180479 - DNA, 15 bp, Homo sapiens
actgctgcatgccac

SEQ ID NO: 180480 - DNA, 15 bp, Homo sapiens
tactgctgcatgcca

SEQ ID NO: 180481 - DNA, 15 bp, Homo sapiens
gtactgctgcatgcc

SEQ ID NO: 180482 - DNA, 15 bp, Homo sapiens
agtactgctgcatgc

SEQ ID NO: 180483 - DNA, 15 bp, Homo sapiens
gagtactgctgcatg

SEQ ID NO: 180484 - DNA, 15 bp, Homo sapiens
ggagtactgctgcat

SEQ ID NO: 180485 - DNA, 15 bp, Homo sapiens
cggagtactgctgca

SEQ ID NO: 180486 - DNA, 15 bp, Homo sapiens
acggagtactgctgc

SEQ ID NO: 180487 - DNA, 15 bp, Homo sapiens
aacggagtactgctg

SEQ ID NO: 180488 - DNA, 15 bp, Homo sapiens
gaacggagtactgct

SEQ ID NO: 180489 - DNA, 15 bp, Homo sapiens
ggaacggagtactgc

SEQ ID NO: 180490 - DNA, 15 bp, Homo sapiens
aggaacggagtactg

SEQ ID NO: 180491 - DNA, 15 bp, Homo sapiens
aaggaacggagtact

SEQ ID NO: 180492 - DNA, 15 bp, Homo sapiens
aaaggaacggagtac

SEQ ID NO: 180493 - DNA, 15 bp, Homo sapiens
taaaggaacggagta

SEQ ID NO: 180494 - DNA, 15 bp, Homo sapiens
ctaaaggaacggagt

SEQ ID NO: 180495 - DNA, 15 bp, Homo sapiens
actaaaggaacggag

SEQ ID NO: 180496 - DNA, 15 bp, Homo sapiens
aactaaaggaacgga

SEQ ID NO: 180497 - DNA, 15 bp, Homo sapiens
gaactaaaggaacgg

SEQ ID NO: 180498 - DNA, 15 bp, Homo sapiens
agaactaaaggaacg

SEQ ID NO: 180499 - DNA, 15 bp, Homo sapiens
cagaactaaaggaac

SEQ ID NO: 180500 - DNA, 15 bp, Homo sapiens
acagaactaaaggaa

SEQ ID NO: 180501 - DNA, 15 bp, Homo sapiens
cacagaactaaagga

SEQ ID NO: 180502 - DNA, 15 bp, Homo sapiens
gcacagaactaaagg

SEQ ID NO: 180503 - DNA, 15 bp, Homo sapiens
tgcacagaactaaag

SEQ ID NO: 180504 - DNA, 15 bp, Homo sapiens
atgcacagaactaaa

SEQ ID NO: 180505 - DNA, 15 bp, Homo sapiens
catgcacagaactaa

SEQ ID NO: 180506 - DNA, 15 bp, Homo sapiens
ccatgcacagaacta

SEQ ID NO: 180507 - DNA, 15 bp, Homo sapiens
gccatgcacagaact

SEQ ID NO: 180508 - DNA, 15 bp, Homo sapiens
ggccatgcacagaac

SEQ ID NO: 180509 - DNA, 15 bp, Homo sapiens
tggccatgcacagaa

SEQ ID NO: 180510 - DNA, 15 bp, Homo sapiens
gtggccatgcacaga

SEQ ID NO: 180511 - DNA, 15 bp, Homo sapiens
tgtggccatgcacag

SEQ ID NO: 180512 - DNA, 15 bp, Homo sapiens
gtgtggccatgcaca

SEQ ID NO: 180513 - DNA, 15 bp, Homo sapiens
ggtgtggccatgcac

SEQ ID NO: 180514 - DNA, 15 bp, Homo sapiens
tggtgtggccatgca

SEQ ID NO: 180515 - DNA, 15 bp, Homo sapiens
gtggtgtggccatgc

SEQ ID NO: 180516 - DNA, 15 bp, Homo sapiens
tgtggtgtggccatg

SEQ ID NO: 180517 - DNA, 15 bp, Homo sapiens
atgtggtgtggccat

SEQ ID NO: 180518 - DNA, 15 bp, Homo sapiens
aatgtggtgtggcca

SEQ ID NO: 180519 - DNA, 15 bp, Homo sapiens
aaatgtggtgtggcc

SEQ ID NO: 180520 - DNA, 15 bp, Homo sapiens
aaaatgtggtgtggc

SEQ ID NO: 180521 - DNA, 15 bp, Homo sapiens
aaaaatgtggtgtgg

SEQ ID NO: 180522 - DNA, 15 bp, Homo sapiens
gaaaaatgtggtgtg

SEQ ID NO: 180523 - DNA, 15 bp, Homo sapiens
agaaaaatgtggtgt

SEQ ID NO: 180524 - DNA, 15 bp, Homo sapiens
aagaaaaatgtggtg

SEQ ID NO: 180525 - DNA, 15 bp, Homo sapiens
taagaaaaatgtggt

SEQ ID NO: 180526 - DNA, 15 bp, Homo sapiens
ataagaaaaatgtgg

SEQ ID NO: 180527 - DNA, 15 bp, Homo sapiens
aataagaaaaatgtg

SEQ ID NO: 180528 - DNA, 15 bp, Homo sapiens
gaataagaaaaatgt

SEQ ID NO: 180529 - DNA, 15 bp, Homo sapiens
tgaataagaaaaatg

SEQ ID NO: 180530 - DNA, 15 bp, Homo sapiens
atgaataagaaaaat

SEQ ID NO: 180531 - DNA, 15 bp, Homo sapiens
tatgaataagaaaaa

SEQ ID NO: 180532 - DNA, 15 bp, Homo sapiens
gtatgaataagaaaa

SEQ ID NO: 180533 - DNA, 15 bp, Homo sapiens
tgtatgaataagaaa

SEQ ID NO: 180534 - DNA, 15 bp, Homo sapiens
atgtatgaataagaa

SEQ ID NO: 180535 - DNA, 15 bp, Homo sapiens
gatgtatgaataaga

SEQ ID NO: 180536 - DNA, 15 bp, Homo sapiens
tgatgtatgaataag

SEQ ID NO: 180537 - DNA, 15 bp, Homo sapiens
ctgatgtatgaataa

SEQ ID NO: 180538 - DNA, 15 bp, Homo sapiens
actgatgtatgaata

SEQ ID NO: 180539 - DNA, 15 bp, Homo sapiens
aactgatgtatgaat

SEQ ID NO: 180540 - DNA, 15 bp, Homo sapiens
caactgatgtatgaa

SEQ ID NO: 180541 - DNA, 15 bp, Homo sapiens
tcaactgatgtatga

SEQ ID NO: 180542 - DNA, 15 bp, Homo sapiens
atcaactgatgtatg

SEQ ID NO: 180543 - DNA, 15 bp, Homo sapiens
catcaactgatgtat

SEQ ID NO: 180544 - DNA, 15 bp, Homo sapiens
ccatcaactgatgta

SEQ ID NO: 180545 - DNA, 15 bp, Homo sapiens
tccatcaactgatgt

SEQ ID NO: 180546 - DNA, 15 bp, Homo sapiens
gtccatcaactgatg

SEQ ID NO: 180547 - DNA, 15 bp, Homo sapiens
tgtccatcaactgat

SEQ ID NO: 180548 - DNA, 15 bp, Homo sapiens
atgtccatcaactga

SEQ ID NO: 180549 - DNA, 15 bp, Homo sapiens
gatgtccatcaactg

SEQ ID NO: 180550 - DNA, 15 bp, Homo sapiens
agatgtccatcaact

SEQ ID NO: 180551 - DNA, 15 bp, Homo sapiens
cagatgtccatcaac

SEQ ID NO: 180552 - DNA, 15 bp, Homo sapiens
acagatgtccatcaa

SEQ ID NO: 180553 - DNA, 15 bp, Homo sapiens
cacagatgtccatca

SEQ ID NO: 180554 - DNA, 15 bp, Homo sapiens
acacagatgtccatc

SEQ ID NO: 180555 - DNA, 15 bp, Homo sapiens
aacacagatgtccat

SEQ ID NO: 180556 - DNA, 15 bp, Homo sapiens
caacacagatgtcca

SEQ ID NO: 180557 - DNA, 15 bp, Homo sapiens
acaacacagatgtcc

SEQ ID NO: 180558 - DNA, 15 bp, Homo sapiens
aacaacacagatgtc

SEQ ID NO: 180559 - DNA, 15 bp, Homo sapiens
aaacaacacagatgt

SEQ ID NO: 180560 - DNA, 15 bp, Homo sapiens
gaaacaacacagatg

SEQ ID NO: 180561 - DNA, 15 bp, Homo sapiens
ggaaacaacacagat

SEQ ID NO: 180562 - DNA, 15 bp, Homo sapiens
cggaaacaacacaga

SEQ ID NO: 180563 - DNA, 15 bp, Homo sapiens
gcggaaacaacacag

SEQ ID NO: 180564 - DNA, 15 bp, Homo sapiens
ggcggaaacaacaca

SEQ ID NO: 180565 - DNA, 15 bp, Homo sapiens
aggcggaaacaacac

SEQ ID NO: 180566 - DNA, 15 bp, Homo sapiens
aaggcggaaacaaca

SEQ ID NO: 180567 - DNA, 15 bp, Homo sapiens
aaaggcggaaacaac

SEQ ID NO: 180568 - DNA, 15 bp, Homo sapiens
caaaggcggaaacaa

SEQ ID NO: 180569 - DNA, 15 bp, Homo sapiens
ccaaaggcggaaaca

SEQ ID NO: 180570 - DNA, 15 bp, Homo sapiens
gccaaaggcggaaac

SEQ ID NO: 180571 - DNA, 15 bp, Homo sapiens
agccaaaggcggaaa

SEQ ID NO: 180572 - DNA, 15 bp, Homo sapiens
tagccaaaggcggaa

SEQ ID NO: 180573 - DNA, 15 bp, Homo sapiens
atagccaaaggcgga

SEQ ID NO: 180574 - DNA, 15 bp, Homo sapiens
aatagccaaaggcgg

SEQ ID NO: 180575 - DNA, 15 bp, Homo sapiens
caatagccaaaggcg

SEQ ID NO: 180576 - DNA, 15 bp, Homo sapiens
acaatagccaaaggc

SEQ ID NO: 180577 - DNA, 15 bp, Homo sapiens
cacaatagccaaagg

SEQ ID NO: 180578 - DNA, 15 bp, Homo sapiens
tcacaatagccaaag

SEQ ID NO: 180579 - DNA, 15 bp, Homo sapiens
ttcacaatagccaaa

SEQ ID NO: 180580 - DNA, 15 bp, Homo sapiens
ctattcacaatagcc

SEQ ID NO: 180581 - DNA, 15 bp, Homo sapiens
actattcacaatagc

SEQ ID NO: 180582 - DNA, 15 bp, Homo sapiens
cactattcacaatag

SEQ ID NO: 180583 - DNA, 15 bp, Homo sapiens
gcactattcacaata

SEQ ID NO: 180584 - DNA, 15 bp, Homo sapiens
gcagcactattcaca

SEQ ID NO: 180585 - DNA, 15 bp, Homo sapiens
agcagcactattcac

SEQ ID NO: 180586 - DNA, 15 bp, Homo sapiens
tagcagcactattca

SEQ ID NO: 180587 - DNA, 15 bp, Homo sapiens
atagcagcactattc

SEQ ID NO: 180588 - DNA, 15 bp, Homo sapiens
catagcagcactatt

SEQ ID NO: 180589 - DNA, 15 bp, Homo sapiens
tcatagcagcactat

SEQ ID NO: 180590 - DNA, 15 bp, Homo sapiens
ttcatagcagcacta

SEQ ID NO: 180591 - DNA, 15 bp, Homo sapiens
gttcatagcagcact

SEQ ID NO: 180592 - DNA, 15 bp, Homo sapiens
tgttcatagcagcac

SEQ ID NO: 180593 - DNA, 15 bp, Homo sapiens
gtgttcatagcagca

SEQ ID NO: 180594 - DNA, 15 bp, Homo sapiens
agtgttcatagcagc

SEQ ID NO: 180595 - DNA, 15 bp, Homo sapiens
aagtgttcatagcag

SEQ ID NO: 180596 - DNA, 15 bp, Homo sapiens
caagtgttcatagca

SEQ ID NO: 180597 - DNA, 15 bp, Homo sapiens
acaagtgttcatagc

SEQ ID NO: 180598 - DNA, 15 bp, Homo sapiens
cacaagtgttcatag

SEQ ID NO: 180599 - DNA, 15 bp, Homo sapiens
acacaagtgttcata

SEQ ID NO: 180600 - DNA, 15 bp, Homo sapiens
tacacaagtgttcat

SEQ ID NO: 180601 - DNA, 15 bp, Homo sapiens
gtacacaagtgttca

SEQ ID NO: 180602 - DNA, 15 bp, Homo sapiens
cgtacacaagtgttc

SEQ ID NO: 180603 - DNA, 15 bp, Homo sapiens
tcgtacacaagtgtt

SEQ ID NO: 180604 - DNA, 15 bp, Homo sapiens
ctcgtacacaagtgt

SEQ ID NO: 180605 - DNA, 15 bp, Homo sapiens
gctcgtacacaagtg

SEQ ID NO: 180606 - DNA, 15 bp, Homo sapiens
agctcgtacacaagt

SEQ ID NO: 180607 - DNA, 15 bp, Homo sapiens
aagctcgtacacaag

SEQ ID NO: 180608 - DNA, 15 bp, Homo sapiens
aaagctcgtacacaa

SEQ ID NO: 180609 - DNA, 15 bp, Homo sapiens
aaaagctcgtacaca

SEQ ID NO: 180610 - DNA, 15 bp, Homo sapiens
caaaagctcgtacac

SEQ ID NO: 180611 - DNA, 15 bp, Homo sapiens
acaaaagctcgtaca

SEQ ID NO: 180612 - DNA, 15 bp, Homo sapiens
aacaaaagctcgtac

SEQ ID NO: 180613 - DNA, 15 bp, Homo sapiens
caacaaaagctcgta

SEQ ID NO: 180614 - DNA, 15 bp, Homo sapiens
ccaacaaaagctcgt

SEQ ID NO: 180615 - DNA, 15 bp, Homo sapiens
accaacaaaagctcg

SEQ ID NO: 180616 - DNA, 15 bp, Homo sapiens
taccaacaaaagctc

SEQ ID NO: 180617 - DNA, 15 bp, Homo sapiens
ataccaacaaaagct

SEQ ID NO: 180618 - DNA, 15 bp, Homo sapiens
gataccaacaaaagc

SEQ ID NO: 180619 - DNA, 15 bp, Homo sapiens
agataccaacaaaag

SEQ ID NO: 180620 - DNA, 15 bp, Homo sapiens
aagataccaacaaaa

SEQ ID NO: 180621 - DNA, 15 bp, Homo sapiens
aaagataccaacaaa

SEQ ID NO: 180622 - DNA, 15 bp, Homo sapiens
aaaagataccaacaa

SEQ ID NO: 180623 - DNA, 15 bp, Homo sapiens
gaaaagataccaaca

SEQ ID NO: 180624 - DNA, 15 bp, Homo sapiens
agaaaagataccaac

SEQ ID NO: 180625 - DNA, 15 bp, Homo sapiens
aagaaaagataccaa

SEQ ID NO: 180626 - DNA, 15 bp, Homo sapiens
aaagaaaagatacca

SEQ ID NO: 180627 - DNA, 15 bp, Homo sapiens
aaaagaaaagatacc

SEQ ID NO: 180628 - DNA, 15 bp, Homo sapiens
gaaaagaaaagatac

SEQ ID NO: 180629 - DNA, 15 bp, Homo sapiens
agaaaagaaaagata

SEQ ID NO: 180630 - DNA, 15 bp, Homo sapiens
aagaaaagaaaagat

SEQ ID NO: 180631 - DNA, 15 bp, Homo sapiens
aaaagaaaagaaaag

SEQ ID NO: 180632 - DNA, 15 bp, Homo sapiens
aaaaagaaaagaaaa

SEQ ID NO: 180633 - DNA, 15 bp, Homo sapiens
aaaaaagaaaagaaa

SEQ ID NO: 180634 - DNA, 15 bp, Homo sapiens
aaaaaaagaaaagaa

SEQ ID NO: 180635 - DNA, 15 bp, Homo sapiens
aaaaaaaagaaaaga

SEQ ID NO: 180636 - DNA, 15 bp, Homo sapiens
aaaaaaaaagaaaag

SEQ ID NO: 180637 - DNA, 15 bp, Homo sapiens
aaaaaaaaaagaaaa

SEQ ID NO: 180638 - DNA, 15 bp, Homo sapiens
cccatctcaaaaaaa

SEQ ID NO: 180639 - DNA, 15 bp, Homo sapiens
gcccatctcaaaaaa

SEQ ID NO: 180640 - DNA, 15 bp, Homo sapiens
agcccatctcaaaaa

SEQ ID NO: 180641 - DNA, 15 bp, Homo sapiens
gagcccatctcaaaa

SEQ ID NO: 180642 - DNA, 15 bp, Homo sapiens
agagcccatctcaaa

SEQ ID NO: 180643 - DNA, 15 bp, Homo sapiens
gagagcccatctcaa

SEQ ID NO: 180644 - DNA, 15 bp, Homo sapiens
tgagagcccatctca

SEQ ID NO: 180645 - DNA, 15 bp, Homo sapiens
gtgagagcccatctc

SEQ ID NO: 180646 - DNA, 15 bp, Homo sapiens
agtgagagcccatct

SEQ ID NO: 180647 - DNA, 15 bp, Homo sapiens
gagtgagagcccatc

SEQ ID NO: 180648 - DNA, 15 bp, Homo sapiens
agagtgagagcccat

SEQ ID NO: 180649 - DNA, 15 bp, Homo sapiens
cagagtgagagccca

SEQ ID NO: 180650 - DNA, 15 bp, Homo sapiens
acagagtgagagccc

SEQ ID NO: 180651 - DNA, 15 bp, Homo sapiens
gacagagtgagagcc

SEQ ID NO: 180652 - DNA, 15 bp, Homo sapiens
tgacagagtgagagc

SEQ ID NO: 180653 - DNA, 15 bp, Homo sapiens
gtgacagagtgagag

SEQ ID NO: 180654 - DNA, 15 bp, Homo sapiens
ggtgacagagtgaga

SEQ ID NO: 180655 - DNA, 15 bp, Homo sapiens
gggtgacagagtgag

SEQ ID NO: 180656 - DNA, 15 bp, Homo sapiens
tgggtgacagagtga

SEQ ID NO: 180657 - DNA, 15 bp, Homo sapiens
ctgggtgacagagtg

SEQ ID NO: 180658 - DNA, 15 bp, Homo sapiens
cctgggtgacagagt

SEQ ID NO: 180659 - DNA, 15 bp, Homo sapiens
tcactgcactccagc

SEQ ID NO: 180660 - DNA, 15 bp, Homo sapiens
gtcactgcactccag

SEQ ID NO: 180661 - DNA, 15 bp, Homo sapiens
tgtcactgcactcca

SEQ ID NO: 180662 - DNA, 15 bp, Homo sapiens
gtgtcactgcactcc

SEQ ID NO: 180663 - DNA, 15 bp, Homo sapiens
tgtgtcactgcactc

SEQ ID NO: 180664 - DNA, 15 bp, Homo sapiens
ttgtgtcactgcact

SEQ ID NO: 180665 - DNA, 15 bp, Homo sapiens
attgtgtcactgcac

SEQ ID NO: 180666 - DNA, 15 bp, Homo sapiens
gattgtgtcactgca

SEQ ID NO: 180667 - DNA, 15 bp, Homo sapiens
agattgtgtcactgc

SEQ ID NO: 180668 - DNA, 15 bp, Homo sapiens
gagattgtgtcactg

SEQ ID NO: 180669 - DNA, 15 bp, Homo sapiens
tgagattgtgtcact

SEQ ID NO: 180670 - DNA, 15 bp, Homo sapiens
ctgagattgtgtcac

SEQ ID NO: 180671 - DNA, 15 bp, Homo sapiens
gctgagattgtgtca

SEQ ID NO: 180672 - DNA, 15 bp, Homo sapiens
agctgagattgtgtc

SEQ ID NO: 180673 - DNA, 15 bp, Homo sapiens
gagctgagattgtgt

SEQ ID NO: 180674 - DNA, 15 bp, Homo sapiens
tgagctgagattgtg

SEQ ID NO: 180675 - DNA, 15 bp, Homo sapiens
gtgagctgagattgt

SEQ ID NO: 180676 - DNA, 15 bp, Homo sapiens
ggcagaggttgcagt

SEQ ID NO: 180677 - DNA, 15 bp, Homo sapiens
aggcagaggttgcag

SEQ ID NO: 180678 - DNA, 15 bp, Homo sapiens
gaggcagaggttgca

SEQ ID NO: 180679 - DNA, 15 bp, Homo sapiens
ggaggcagaggttgc

SEQ ID NO: 180680 - DNA, 15 bp, Homo sapiens
aggaggcagaggttg

SEQ ID NO: 180681 - DNA, 15 bp, Homo sapiens
caggaggcagaggtt

SEQ ID NO: 180682 - DNA, 15 bp, Homo sapiens
ccaggaggcagaggt

SEQ ID NO: 180683 - DNA, 15 bp, Homo sapiens
accaggaggcagagg

SEQ ID NO: 180684 - DNA, 15 bp, Homo sapiens
aaccaggaggcagag

SEQ ID NO: 180685 - DNA, 15 bp, Homo sapiens
gaaccaggaggcaga

SEQ ID NO: 180686 - DNA, 15 bp, Homo sapiens
tgaaccaggaggcag

SEQ ID NO: 180687 - DNA, 15 bp, Homo sapiens
ttgaaccaggaggca

SEQ ID NO: 180688 - DNA, 15 bp, Homo sapiens
cttgaaccaggaggc

SEQ ID NO: 180689 - DNA, 15 bp, Homo sapiens
gcttgaaccaggagg

SEQ ID NO: 180690 - DNA, 15 bp, Homo sapiens
cgcttgaaccaggag

SEQ ID NO: 180691 - DNA, 15 bp, Homo sapiens
tcgcttgaaccagga

SEQ ID NO: 180692 - DNA, 15 bp, Homo sapiens
atcgcttgaaccagg

SEQ ID NO: 180693 - DNA, 15 bp, Homo sapiens
aatcgcttgaaccag

SEQ ID NO: 180694 - DNA, 15 bp, Homo sapiens
gaatcgcttgaacca

SEQ ID NO: 180695 - DNA, 15 bp, Homo sapiens
aactcgggaggctga

SEQ ID NO: 180696 - DNA, 15 bp, Homo sapiens
caactcgggaggctg

SEQ ID NO: 180697 - DNA, 15 bp, Homo sapiens
gcaactcgggaggct

SEQ ID NO: 180698 - DNA, 15 bp, Homo sapiens
agcaactcgggaggc

SEQ ID NO: 180699 - DNA, 15 bp, Homo sapiens
cagcaactcgggagg

SEQ ID NO: 180700 - DNA, 15 bp, Homo sapiens
ccagcaactcgggag

SEQ ID NO: 180701 - DNA, 15 bp, Homo sapiens
cccagcaactcggga

SEQ ID NO: 180702 - DNA, 15 bp, Homo sapiens
tcccagcaactcggg

SEQ ID NO: 180703 - DNA, 15 bp, Homo sapiens
atcccagcaactcgg

SEQ ID NO: 180704 - DNA, 15 bp, Homo sapiens
aatcccagcaactcg

SEQ ID NO: 180705 - DNA, 15 bp, Homo sapiens
taatcccagcaactc

SEQ ID NO: 180706 - DNA, 15 bp, Homo sapiens
gtaatcccagcaact

SEQ ID NO: 180707 - DNA, 15 bp, Homo sapiens
tgtaatcccagcaac

SEQ ID NO: 180708 - DNA, 15 bp, Homo sapiens
ctgtaatcccagcaa

SEQ ID NO: 180709 - DNA, 15 bp, Homo sapiens
tacctgtaatcccag

SEQ ID NO: 180710 - DNA, 15 bp, Homo sapiens
atacctgtaatccca

SEQ ID NO: 180711 - DNA, 15 bp, Homo sapiens
gatacctgtaatccc

SEQ ID NO: 180712 - DNA, 15 bp, Homo sapiens
ggatacctgtaatcc

SEQ ID NO: 180713 - DNA, 15 bp, Homo sapiens
cggatacctgtaatc

SEQ ID NO: 180714 - DNA, 15 bp, Homo sapiens
gcggatacctgtaat

SEQ ID NO: 180715 - DNA, 15 bp, Homo sapiens
ggcggatacctgtaa

SEQ ID NO: 180716 - DNA, 15 bp, Homo sapiens
tggcggatacctgta

SEQ ID NO: 180717 - DNA, 15 bp, Homo sapiens
atggcggatacctgt

SEQ ID NO: 180718 - DNA, 15 bp, Homo sapiens
gatggcggatacctg

SEQ ID NO: 180719 - DNA, 15 bp, Homo sapiens
tgatggcggatacct

SEQ ID NO: 180720 - DNA, 15 bp, Homo sapiens
gtgatggcggatacc

SEQ ID NO: 180721 - DNA, 15 bp, Homo sapiens
tgtgatggcggatac

SEQ ID NO: 180722 - DNA, 15 bp, Homo sapiens
gtgtgatggcggata

SEQ ID NO: 180723 - DNA, 15 bp, Homo sapiens
ggtgtgatggcggat

SEQ ID NO: 180724 - DNA, 15 bp, Homo sapiens
gggtgtgatggcgga

SEQ ID NO: 180725 - DNA, 15 bp, Homo sapiens
cgggtgtgatggcgg

SEQ ID NO: 180726 - DNA, 15 bp, Homo sapiens
ccgggtgtgatggcg

SEQ ID NO: 180727 - DNA, 15 bp, Homo sapiens
gccgggtgtgatggc

SEQ ID NO: 180728 - DNA, 15 bp, Homo sapiens
agccgggtgtgatgg

SEQ ID NO: 180729 - DNA, 15 bp, Homo sapiens
tagccgggtgtgatg

SEQ ID NO: 180730 - DNA, 15 bp, Homo sapiens
ttagccgggtgtgat

SEQ ID NO: 180731 - DNA, 15 bp, Homo sapiens
attagccgggtgtga

SEQ ID NO: 180732 - DNA, 15 bp, Homo sapiens
aattagccgggtgtg

SEQ ID NO: 180733 - DNA, 15 bp, Homo sapiens
aaattagccgggtgt

SEQ ID NO: 180734 - DNA, 15 bp, Homo sapiens
aaaattagccgggtg

SEQ ID NO: 180735 - DNA, 15 bp, Homo sapiens
aaaaattagccgggt

SEQ ID NO: 180736 - DNA, 15 bp, Homo sapiens
tgagaccagcctggc

SEQ ID NO: 180737 - DNA, 15 bp, Homo sapiens
ttgagaccagcctgg

SEQ ID NO: 180738 - DNA, 15 bp, Homo sapiens
gagtttgagaccagc

SEQ ID NO: 180739 - DNA, 15 bp, Homo sapiens
ggagtttgagaccag

SEQ ID NO: 180740 - DNA, 15 bp, Homo sapiens
aggagtttgagacca

SEQ ID NO: 180741 - DNA, 15 bp, Homo sapiens
caggagtttgagacc

SEQ ID NO: 180742 - DNA, 15 bp, Homo sapiens
tcaggagtttgagac

SEQ ID NO: 180743 - DNA, 15 bp, Homo sapiens
gtcaggagtttgaga

SEQ ID NO: 180744 - DNA, 15 bp, Homo sapiens
ggtcaggagtttgag

SEQ ID NO: 180745 - DNA, 15 bp, Homo sapiens
aggtcaggagtttga

SEQ ID NO: 180746 - DNA, 15 bp, Homo sapiens
gaggtcaggagtttg

SEQ ID NO: 180747 - DNA, 15 bp, Homo sapiens
agatcacctgaggtc

SEQ ID NO: 180748 - DNA, 15 bp, Homo sapiens
cagatcacctgaggt

SEQ ID NO: 180749 - DNA, 15 bp, Homo sapiens
gcagatcacctgagg

SEQ ID NO: 180750 - DNA, 15 bp, Homo sapiens
ggcagatcacctgag

SEQ ID NO: 180751 - DNA, 15 bp, Homo sapiens
aggcagatcacctga

SEQ ID NO: 180752 - DNA, 15 bp, Homo sapiens
caggcagatcacctg

SEQ ID NO: 180753 - DNA, 15 bp, Homo sapiens
gcaggcagatcacct

SEQ ID NO: 180754 - DNA, 15 bp, Homo sapiens
ggcaggcagatcacc

SEQ ID NO: 180755 - DNA, 15 bp, Homo sapiens
aggcaggcagatcac

SEQ ID NO: 180756 - DNA, 15 bp, Homo sapiens
gaggcaggcagatca

SEQ ID NO: 180757 - DNA, 15 bp, Homo sapiens
cgaggcaggcagatc

SEQ ID NO: 180758 - DNA, 15 bp, Homo sapiens
ccgaggcaggcagat

SEQ ID NO: 180759 - DNA, 15 bp, Homo sapiens
gccgaggcaggcaga

SEQ ID NO: 180760 - DNA, 15 bp, Homo sapiens
ggccgaggcaggcag

SEQ ID NO: 180761 - DNA, 15 bp, Homo sapiens
aggccgaggcaggca

SEQ ID NO: 180762 - DNA, 15 bp, Homo sapiens
gaggccgaggcaggc

SEQ ID NO: 180763 - DNA, 15 bp, Homo sapiens
tactttgggaggccg

SEQ ID NO: 180764 - DNA, 15 bp, Homo sapiens
gtactttgggaggcc

SEQ ID NO: 180765 - DNA, 15 bp, Homo sapiens
gtaatcccagtactt

SEQ ID NO: 180766 - DNA, 15 bp, Homo sapiens
tgtaatcccagtact

SEQ ID NO: 180767 - DNA, 15 bp, Homo sapiens
ctgtaatcccagtac

SEQ ID NO: 180768 - DNA, 15 bp, Homo sapiens
cctgtaatcccagta

SEQ ID NO: 180769 - DNA, 15 bp, Homo sapiens
gcctgtaatcccagt

SEQ ID NO: 180770 - DNA, 15 bp, Homo sapiens
ttcatgcctgtaatc

SEQ ID NO: 180771 - DNA, 15 bp, Homo sapiens
gttcatgcctgtaat

SEQ ID NO: 180772 - DNA, 15 bp, Homo sapiens
ggttcatgcctgtaa

SEQ ID NO: 180773 - DNA, 15 bp, Homo sapiens
tggttcatgcctgta

SEQ ID NO: 180774 - DNA, 15 bp, Homo sapiens
gtggttcatgcctgt

SEQ ID NO: 180775 - DNA, 15 bp, Homo sapiens
agtggttcatgcctg

SEQ ID NO: 180776 - DNA, 15 bp, Homo sapiens
cagtggttcatgcct

SEQ ID NO: 180777 - DNA, 15 bp, Homo sapiens
acagtggttcatgcc

SEQ ID NO: 180778 - DNA, 15 bp, Homo sapiens
cacagtggttcatgc

SEQ ID NO: 180779 - DNA, 15 bp, Homo sapiens
gcacagtggttcatg

SEQ ID NO: 180780 - DNA, 15 bp, Homo sapiens
ggcacagtggttcat

SEQ ID NO: 180781 - DNA, 15 bp, Homo sapiens
tggcacagtggttca

SEQ ID NO: 180782 - DNA, 15 bp, Homo sapiens
ctggcacagtggttc

SEQ ID NO: 180783 - DNA, 15 bp, Homo sapiens
cctggcacagtggtt

SEQ ID NO: 180784 - DNA, 15 bp, Homo sapiens
gcctggcacagtggt

SEQ ID NO: 180785 - DNA, 15 bp, Homo sapiens
ggcctggcacagtgg

SEQ ID NO: 180786 - DNA, 15 bp, Homo sapiens
aggcctggcacagtg

SEQ ID NO: 180787 - DNA, 15 bp, Homo sapiens
caggcctggcacagt

SEQ ID NO: 180788 - DNA, 15 bp, Homo sapiens
acaggcctggcacag

SEQ ID NO: 180789 - DNA, 15 bp, Homo sapiens
cacaggcctggcaca

SEQ ID NO: 180790 - DNA, 15 bp, Homo sapiens
acacaggcctggcac

SEQ ID NO: 180791 - DNA, 15 bp, Homo sapiens
aacacaggcctggca

SEQ ID NO: 180792 - DNA, 15 bp, Homo sapiens
aaacacaggcctggc

SEQ ID NO: 180793 - DNA, 15 bp, Homo sapiens
caaacacaggcctgg

SEQ ID NO: 180794 - DNA, 15 bp, Homo sapiens
tcaaacacaggcctg

SEQ ID NO: 180795 - DNA, 15 bp, Homo sapiens
atcaaacacaggcct

SEQ ID NO: 180796 - DNA, 15 bp, Homo sapiens
aatcaaacacaggcc

SEQ ID NO: 180797 - DNA, 15 bp, Homo sapiens
aaatcaaacacaggc

SEQ ID NO: 180798 - DNA, 15 bp, Homo sapiens
caaatcaaacacagg

SEQ ID NO: 180799 - DNA, 15 bp, Homo sapiens
ccaaatcaaacacag

SEQ ID NO: 180800 - DNA, 15 bp, Homo sapiens
cccaaatcaaacaca

SEQ ID NO: 180801 - DNA, 15 bp, Homo sapiens
ccccaaatcaaacac

SEQ ID NO: 180802 - DNA, 15 bp, Homo sapiens
accccaaatcaaaca

SEQ ID NO: 180803 - DNA, 15 bp, Homo sapiens
taccccaaatcaaac

SEQ ID NO: 180804 - DNA, 15 bp, Homo sapiens
ataccccaaatcaaa

SEQ ID NO: 180805 - DNA, 15 bp, Homo sapiens
tataccccaaatcaa

SEQ ID NO: 180806 - DNA, 15 bp, Homo sapiens
atataccccaaatca

SEQ ID NO: 180807 - DNA, 15 bp, Homo sapiens
catataccccaaatc

SEQ ID NO: 180808 - DNA, 15 bp, Homo sapiens
gcatataccccaaat

SEQ ID NO: 180809 - DNA, 15 bp, Homo sapiens
ggcatataccccaaa

SEQ ID NO: 180810 - DNA, 15 bp, Homo sapiens
aggcatataccccaa

SEQ ID NO: 180811 - DNA, 15 bp, Homo sapiens
taggcatatacccca

SEQ ID NO: 180812 - DNA, 15 bp, Homo sapiens
ctaggcatatacccc

SEQ ID NO: 180813 - DNA, 15 bp, Homo sapiens
cctaggcatataccc

SEQ ID NO: 180814 - DNA, 15 bp, Homo sapiens
tcctaggcatatacc

SEQ ID NO: 180815 - DNA, 15 bp, Homo sapiens
ttcctaggcatatac

SEQ ID NO: 180816 - DNA, 15 bp, Homo sapiens
attcctaggcatata

SEQ ID NO: 180817 - DNA, 15 bp, Homo sapiens
cattcctaggcatat

SEQ ID NO: 180818 - DNA, 15 bp, Homo sapiens
ccattcctaggcata

SEQ ID NO: 180819 - DNA, 15 bp, Homo sapiens
cccattcctaggcat

SEQ ID NO: 180820 - DNA, 15 bp, Homo sapiens
tcccattcctaggca

SEQ ID NO: 180821 - DNA, 15 bp, Homo sapiens
atcccattcctaggc

SEQ ID NO: 180822 - DNA, 15 bp, Homo sapiens
aatcccattcctagg

SEQ ID NO: 180823 - DNA, 15 bp, Homo sapiens
caatcccattcctag

SEQ ID NO: 180824 - DNA, 15 bp, Homo sapiens
gcaatcccattccta

SEQ ID NO: 180825 - DNA, 15 bp, Homo sapiens
agcaatcccattcct

SEQ ID NO: 180826 - DNA, 15 bp, Homo sapiens
tagcaatcccattcc

SEQ ID NO: 180827 - DNA, 15 bp, Homo sapiens
ctagcaatcccattc

SEQ ID NO: 180828 - DNA, 15 bp, Homo sapiens
tctagcaatcccatt

SEQ ID NO: 180829 - DNA, 15 bp, Homo sapiens
atctagcaatcccat

SEQ ID NO: 180830 - DNA, 15 bp, Homo sapiens
gatctagcaatccca

SEQ ID NO: 180831 - DNA, 15 bp, Homo sapiens
ggatctagcaatccc

SEQ ID NO: 180832 - DNA, 15 bp, Homo sapiens
aggatctagcaatcc

SEQ ID NO: 180833 - DNA, 15 bp, Homo sapiens
taggatctagcaatc

SEQ ID NO: 180834 - DNA, 15 bp, Homo sapiens
ataggatctagcaat

SEQ ID NO: 180835 - DNA, 15 bp, Homo sapiens
cataggatctagcaa

SEQ ID NO: 180836 - DNA, 15 bp, Homo sapiens
ccataggatctagca

SEQ ID NO: 180837 - DNA, 15 bp, Homo sapiens
accataggatctagc

SEQ ID NO: 180838 - DNA, 15 bp, Homo sapiens
taccataggatctag

SEQ ID NO: 180839 - DNA, 15 bp, Homo sapiens
ttaccataggatcta

SEQ ID NO: 180840 - DNA, 15 bp, Homo sapiens
attaccataggatct

SEQ ID NO: 180841 - DNA, 15 bp, Homo sapiens
cattaccataggatc

SEQ ID NO: 180842 - DNA, 15 bp, Homo sapiens
gcattaccataggat

SEQ ID NO: 180843 - DNA, 15 bp, Homo sapiens
agcattaccatagga

SEQ ID NO: 180844 - DNA, 15 bp, Homo sapiens
cagcattaccatagg

SEQ ID NO: 180845 - DNA, 15 bp, Homo sapiens
acagcattaccatag

SEQ ID NO: 180846 - DNA, 15 bp, Homo sapiens
cacagcattaccata

SEQ ID NO: 180847 - DNA, 15 bp, Homo sapiens
acacagcattaccat

SEQ ID NO: 180848 - DNA, 15 bp, Homo sapiens
aacacagcattacca

SEQ ID NO: 180849 - DNA, 15 bp, Homo sapiens
aaacacagcattacc

SEQ ID NO: 180850 - DNA, 15 bp, Homo sapiens
taaacacagcattac

SEQ ID NO: 180851 - DNA, 15 bp, Homo sapiens
ttaaacacagcatta

SEQ ID NO: 180852 - DNA, 15 bp, Homo sapiens
gttaaacacagcatt

SEQ ID NO: 180853 - DNA, 15 bp, Homo sapiens
agttaaacacagcat

SEQ ID NO: 180854 - DNA, 15 bp, Homo sapiens
aagttaaacacagca

SEQ ID NO: 180855 - DNA, 15 bp, Homo sapiens
taagttaaacacagc

SEQ ID NO: 180856 - DNA, 15 bp, Homo sapiens
ataagttaaacacag

SEQ ID NO: 180857 - DNA, 15 bp, Homo sapiens
aataagttaaacaca

SEQ ID NO: 180858 - DNA, 15 bp, Homo sapiens
caataagttaaacac

SEQ ID NO: 180859 - DNA, 15 bp, Homo sapiens
tcaataagttaaaca

SEQ ID NO: 180860 - DNA, 15 bp, Homo sapiens
ctcaataagttaaac

SEQ ID NO: 180861 - DNA, 15 bp, Homo sapiens
cctcaataagttaaa

SEQ ID NO: 180862 - DNA, 15 bp, Homo sapiens
tcctcaataagttaa

SEQ ID NO: 180863 - DNA, 15 bp, Homo sapiens
ttcctcaataagtta

SEQ ID NO: 180864 - DNA, 15 bp, Homo sapiens
tttcctcaataagtt

SEQ ID NO: 180865 - DNA, 15 bp, Homo sapiens
atttcctcaataagt

SEQ ID NO: 180866 - DNA, 15 bp, Homo sapiens
aatttcctcaataag

SEQ ID NO: 180867 - DNA, 15 bp, Homo sapiens
caatttcctcaataa

SEQ ID NO: 180868 - DNA, 15 bp, Homo sapiens
gcaatttcctcaata

SEQ ID NO: 180869 - DNA, 15 bp, Homo sapiens
agcaatttcctcaat

SEQ ID NO: 180870 - DNA, 15 bp, Homo sapiens
cagcaatttcctcaa

SEQ ID NO: 180871 - DNA, 15 bp, Homo sapiens
ccagcaatttcctca

SEQ ID NO: 180872 - DNA, 15 bp, Homo sapiens
tccagcaatttcctc

SEQ ID NO: 180873 - DNA, 15 bp, Homo sapiens
atccagcaatttcct

SEQ ID NO: 180874 - DNA, 15 bp, Homo sapiens
aatccagcaatttcc

SEQ ID NO: 180875 - DNA, 15 bp, Homo sapiens
gaatccagcaatttc

SEQ ID NO: 180876 - DNA, 15 bp, Homo sapiens
agaatccagcaattt

SEQ ID NO: 180877 - DNA, 15 bp, Homo sapiens
aagaatccagcaatt

SEQ ID NO: 180878 - DNA, 15 bp, Homo sapiens
caagaatccagcaat

SEQ ID NO: 180879 - DNA, 15 bp, Homo sapiens
tcaagaatccagcaa

SEQ ID NO: 180880 - DNA, 15 bp, Homo sapiens
ctcaagaatccagca

SEQ ID NO: 180881 - DNA, 15 bp, Homo sapiens
cctcaagaatccagc

SEQ ID NO: 180882 - DNA, 15 bp, Homo sapiens
tcctcaagaatccag

SEQ ID NO: 180883 - DNA, 15 bp, Homo sapiens
atcctcaagaatcca

SEQ ID NO: 180884 - DNA, 15 bp, Homo sapiens
catcctcaagaatcc

SEQ ID NO: 180885 - DNA, 15 bp, Homo sapiens
acatcctcaagaatc

SEQ ID NO: 180886 - DNA, 15 bp, Homo sapiens
cacatcctcaagaat

SEQ ID NO: 180887 - DNA, 15 bp, Homo sapiens
acacatcctcaagaa

SEQ ID NO: 180888 - DNA, 15 bp, Homo sapiens
aacacatcctcaaga

SEQ ID NO: 180889 - DNA, 15 bp, Homo sapiens
aaacacatcctcaag

SEQ ID NO: 180890 - DNA, 15 bp, Homo sapiens
gaaacacatcctcaa

SEQ ID NO: 180891 - DNA, 15 bp, Homo sapiens
tgaaacacatcctca

SEQ ID NO: 180892 - DNA, 15 bp, Homo sapiens
ctgaaacacatcctc

SEQ ID NO: 180893 - DNA, 15 bp, Homo sapiens
cctgaaacacatcct

SEQ ID NO: 180894 - DNA, 15 bp, Homo sapiens
acctgaaacacatcc

SEQ ID NO: 180895 - DNA, 15 bp, Homo sapiens
gacctgaaacacatc

SEQ ID NO: 180896 - DNA, 15 bp, Homo sapiens
ggacctgaaacacat

SEQ ID NO: 180897 - DNA, 15 bp, Homo sapiens
tggacctgaaacaca

SEQ ID NO: 180898 - DNA, 15 bp, Homo sapiens
gtggacctgaaacac

SEQ ID NO: 180899 - DNA, 15 bp, Homo sapiens
ggtggacctgaaaca

SEQ ID NO: 180900 - DNA, 15 bp, Homo sapiens
gggtggacctgaaac

SEQ ID NO: 180901 - DNA, 15 bp, Homo sapiens
agggtggacctgaaa

SEQ ID NO: 180902 - DNA, 15 bp, Homo sapiens
gagggtggacctgaa

SEQ ID NO: 180903 - DNA, 15 bp, Homo sapiens
agagggtggacctga

SEQ ID NO: 180904 - DNA, 15 bp, Homo sapiens
cagagggtggacctg

SEQ ID NO: 180905 - DNA, 15 bp, Homo sapiens
acagagggtggacct

SEQ ID NO: 180906 - DNA, 15 bp, Homo sapiens
aacagagggtggacc

SEQ ID NO: 180907 - DNA, 15 bp, Homo sapiens
caacagagggtggac

SEQ ID NO: 180908 - DNA, 15 bp, Homo sapiens
acaacagagggtgga

SEQ ID NO: 180909 - DNA, 15 bp, Homo sapiens
aacaacagagggtgg

SEQ ID NO: 180910 - DNA, 15 bp, Homo sapiens
caacaacagagggtg

SEQ ID NO: 180911 - DNA, 15 bp, Homo sapiens
gcaacaacagagggt

SEQ ID NO: 180912 - DNA, 15 bp, Homo sapiens
ggcaacaacagaggg

SEQ ID NO: 180913 - DNA, 15 bp, Homo sapiens
aggcaacaacagagg

SEQ ID NO: 180914 - DNA, 15 bp, Homo sapiens
aaggcaacaacagag

SEQ ID NO: 180915 - DNA, 15 bp, Homo sapiens
caaggcaacaacaga

SEQ ID NO: 180916 - DNA, 15 bp, Homo sapiens
tcaaggcaacaacag

SEQ ID NO: 180917 - DNA, 15 bp, Homo sapiens
gtcaaggcaacaaca

SEQ ID NO: 180918 - DNA, 15 bp, Homo sapiens
ggtcaaggcaacaac

SEQ ID NO: 180919 - DNA, 15 bp, Homo sapiens
aggtcaaggcaacaa

SEQ ID NO: 180920 - DNA, 15 bp, Homo sapiens
aaggtcaaggcaaca

SEQ ID NO: 180921 - DNA, 15 bp, Homo sapiens
caaggtcaaggcaac

SEQ ID NO: 180922 - DNA, 15 bp, Homo sapiens
acaaggtcaaggcaa

SEQ ID NO: 180923 - DNA, 15 bp, Homo sapiens
aacaaggtcaaggca

SEQ ID NO: 180924 - DNA, 15 bp, Homo sapiens
taacaaggtcaaggc

SEQ ID NO: 180925 - DNA, 15 bp, Homo sapiens
gtaacaaggtcaagg

SEQ ID NO: 180926 - DNA, 15 bp, Homo sapiens
agtaacaaggtcaag

SEQ ID NO: 180927 - DNA, 15 bp, Homo sapiens
aagtaacaaggtcaa

SEQ ID NO: 180928 - DNA, 15 bp, Homo sapiens
caagtaacaaggtca

SEQ ID NO: 180929 - DNA, 15 bp, Homo sapiens
gcaagtaacaaggtc

SEQ ID NO: 180930 - DNA, 15 bp, Homo sapiens
agcaagtaacaaggt

SEQ ID NO: 180931 - DNA, 15 bp, Homo sapiens
gagcaagtaacaagg

SEQ ID NO: 180932 - DNA, 15 bp, Homo sapiens
agagcaagtaacaag

SEQ ID NO: 180933 - DNA, 15 bp, Homo sapiens
cagagcaagtaacaa

SEQ ID NO: 180934 - DNA, 15 bp, Homo sapiens
acagagcaagtaaca

SEQ ID NO: 180935 - DNA, 15 bp, Homo sapiens
aacagagcaagtaac

SEQ ID NO: 180936 - DNA, 15 bp, Homo sapiens
caacagagcaagtaa

SEQ ID NO: 180937 - DNA, 15 bp, Homo sapiens
ccaacagagcaagta

SEQ ID NO: 180938 - DNA, 15 bp, Homo sapiens
cccaacagagcaagt

SEQ ID NO: 180939 - DNA, 15 bp, Homo sapiens
acccaacagagcaag

SEQ ID NO: 180940 - DNA, 15 bp, Homo sapiens
cacccaacagagcaa

SEQ ID NO: 180941 - DNA, 15 bp, Homo sapiens
gcacccaacagagca

SEQ ID NO: 180942 - DNA, 15 bp, Homo sapiens
tgcacccaacagagc

SEQ ID NO: 180943 - DNA, 15 bp, Homo sapiens
ttgcacccaacagag

SEQ ID NO: 180944 - DNA, 15 bp, Homo sapiens
cttgcacccaacaga

SEQ ID NO: 180945 - DNA, 15 bp, Homo sapiens
gcttgcacccaacag

SEQ ID NO: 180946 - DNA, 15 bp, Homo sapiens
agcttgcacccaaca

SEQ ID NO: 180947 - DNA, 15 bp, Homo sapiens
gagcttgcacccaac

SEQ ID NO: 180948 - DNA, 15 bp, Homo sapiens
agagcttgcacccaa

SEQ ID NO: 180949 - DNA, 15 bp, Homo sapiens
cagagcttgcaccca

SEQ ID NO: 180950 - DNA, 15 bp, Homo sapiens
tcagagcttgcaccc

SEQ ID NO: 180951 - DNA, 15 bp, Homo sapiens
ctcagagcttgcacc

SEQ ID NO: 180952 - DNA, 15 bp, Homo sapiens
cctcagagcttgcac

SEQ ID NO: 180953 - DNA, 15 bp, Homo sapiens
gcctcagagcttgca

SEQ ID NO: 180954 - DNA, 15 bp, Homo sapiens
tgcctcagagcttgc

SEQ ID NO: 180955 - DNA, 15 bp, Homo sapiens
atgcctcagagcttg

SEQ ID NO: 180956 - DNA, 15 bp, Homo sapiens
catgcctcagagctt

SEQ ID NO: 180957 - DNA, 15 bp, Homo sapiens
ccatgcctcagagct

SEQ ID NO: 180958 - DNA, 15 bp, Homo sapiens
cccatgcctcagagc

SEQ ID NO: 180959 - DNA, 15 bp, Homo sapiens
gcccatgcctcagag

SEQ ID NO: 180960 - DNA, 15 bp, Homo sapiens
agcccatgcctcaga

SEQ ID NO: 180961 - DNA, 15 bp, Homo sapiens
tagcccatgcctcag

SEQ ID NO: 180962 - DNA, 15 bp, Homo sapiens
ctagcccatgcctca

SEQ ID NO: 180963 - DNA, 15 bp, Homo sapiens
tctagcccatgcctc

SEQ ID NO: 180964 - DNA, 15 bp, Homo sapiens
gtctagcccatgcct

SEQ ID NO: 180965 - DNA, 15 bp, Homo sapiens
tgtctagcccatgcc

SEQ ID NO: 180966 - DNA, 15 bp, Homo sapiens
gtgtctagcccatgc

SEQ ID NO: 180967 - DNA, 15 bp, Homo sapiens
ggtgtctagcccatg

SEQ ID NO: 180968 - DNA, 15 bp, Homo sapiens
aggtgtctagcccat

SEQ ID NO: 180969 - DNA, 15 bp, Homo sapiens
aaggtgtctagccca

SEQ ID NO: 180970 - DNA, 15 bp, Homo sapiens
caaggtgtctagccc

SEQ ID NO: 180971 - DNA, 15 bp, Homo sapiens
acaaggtgtctagcc

SEQ ID NO: 180972 - DNA, 15 bp, Homo sapiens
cacaaggtgtctagc

SEQ ID NO: 180973 - DNA, 15 bp, Homo sapiens
gcacaaggtgtctag

SEQ ID NO: 180974 - DNA, 15 bp, Homo sapiens
ggcacaaggtgtcta

SEQ ID NO: 180975 - DNA, 15 bp, Homo sapiens
tggcacaaggtgtct

SEQ ID NO: 180976 - DNA, 15 bp, Homo sapiens
ctggcacaaggtgtc

SEQ ID NO: 180977 - DNA, 15 bp, Homo sapiens
cctggcacaaggtgt

SEQ ID NO: 180978 - DNA, 15 bp, Homo sapiens
acctggcacaaggtg

SEQ ID NO: 180979 - DNA, 15 bp, Homo sapiens
gacctggcacaaggt

SEQ ID NO: 180980 - DNA, 15 bp, Homo sapiens
ggacctggcacaagg

SEQ ID NO: 180981 - DNA, 15 bp, Homo sapiens
aggacctggcacaag

SEQ ID NO: 180982 - DNA, 15 bp, Homo sapiens
caggacctggcacaa

SEQ ID NO: 180983 - DNA, 15 bp, Homo sapiens
acaggacctggcaca

SEQ ID NO: 180984 - DNA, 15 bp, Homo sapiens
aacaggacctggcac

SEQ ID NO: 180985 - DNA, 15 bp, Homo sapiens
aaacaggacctggca

SEQ ID NO: 180986 - DNA, 15 bp, Homo sapiens
aaaacaggacctggc

SEQ ID NO: 180987 - DNA, 15 bp, Homo sapiens
gaaaacaggacctgg

SEQ ID NO: 180988 - DNA, 15 bp, Homo sapiens
ggaaaacaggacctg

SEQ ID NO: 180989 - DNA, 15 bp, Homo sapiens
tggaaaacaggacct

SEQ ID NO: 180990 - DNA, 15 bp, Homo sapiens
atggaaaacaggacc

SEQ ID NO: 180991 - DNA, 15 bp, Homo sapiens
gatggaaaacaggac

SEQ ID NO: 180992 - DNA, 15 bp, Homo sapiens
ggatggaaaacagga

SEQ ID NO: 180993 - DNA, 15 bp, Homo sapiens
aggatggaaaacagg

SEQ ID NO: 180994 - DNA, 15 bp, Homo sapiens
gaggatggaaaacag

SEQ ID NO: 180995 - DNA, 15 bp, Homo sapiens
tgaggatggaaaaca

SEQ ID NO: 180996 - DNA, 15 bp, Homo sapiens
gtgaggatggaaaac

SEQ ID NO: 180997 - DNA, 15 bp, Homo sapiens
tgtgaggatggaaaa

SEQ ID NO: 180998 - DNA, 15 bp, Homo sapiens
ttgtgaggatggaaa

SEQ ID NO: 180999 - DNA, 15 bp, Homo sapiens
cttgtgaggatggaa

SEQ ID NO: 181000 - DNA, 15 bp, Homo sapiens
gcttgtgaggatgga

SEQ ID NO: 181001 - DNA, 15 bp, Homo sapiens
tgcttgtgaggatgg

SEQ ID NO: 181002 - DNA, 15 bp, Homo sapiens
ttgcttgtgaggatg

SEQ ID NO: 181003 - DNA, 15 bp, Homo sapiens
gttgcttgtgaggat

SEQ ID NO: 181004 - DNA, 15 bp, Homo sapiens
ggttgcttgtgagga

SEQ ID NO: 181005 - DNA, 15 bp, Homo sapiens
gggttgcttgtgagg

SEQ ID NO: 181006 - DNA, 15 bp, Homo sapiens
ggggttgcttgtgag

SEQ ID NO: 181007 - DNA, 15 bp, Homo sapiens
tggggttgcttgtga

SEQ ID NO: 181008 - DNA, 15 bp, Homo sapiens
ctggggttgcttgtg

SEQ ID NO: 181009 - DNA, 15 bp, Homo sapiens
cctggggttgcttgt

SEQ ID NO: 181010 - DNA, 15 bp, Homo sapiens
acctggggttgcttg

SEQ ID NO: 181011 - DNA, 15 bp, Homo sapiens
cacctggggttgctt

SEQ ID NO: 181012 - DNA, 15 bp, Homo sapiens
ccacctggggttgct

SEQ ID NO: 181013 - DNA, 15 bp, Homo sapiens
accacctggggttgc

SEQ ID NO: 181014 - DNA, 15 bp, Homo sapiens
caccacctggggttg

SEQ ID NO: 181015 - DNA, 15 bp, Homo sapiens
ccaccacctggggtt

SEQ ID NO: 181016 - DNA, 15 bp, Homo sapiens
cccaccacctggggt

SEQ ID NO: 181017 - DNA, 15 bp, Homo sapiens
gcccaccacctgggg

SEQ ID NO: 181018 - DNA, 15 bp, Homo sapiens
tgcccaccacctggg

SEQ ID NO: 181019 - DNA, 15 bp, Homo sapiens
gtgcccaccacctgg

SEQ ID NO: 181020 - DNA, 15 bp, Homo sapiens
agtgcccaccacctg

SEQ ID NO: 181021 - DNA, 15 bp, Homo sapiens
gagtgcccaccacct

SEQ ID NO: 181022 - DNA, 15 bp, Homo sapiens
agagtgcccaccacc

SEQ ID NO: 181023 - DNA, 15 bp, Homo sapiens
aagagtgcccaccac

SEQ ID NO: 181024 - DNA, 15 bp, Homo sapiens
gaagagtgcccacca

SEQ ID NO: 181025 - DNA, 15 bp, Homo sapiens
agaagagtgcccacc

SEQ ID NO: 181026 - DNA, 15 bp, Homo sapiens
aagaagagtgcccac

SEQ ID NO: 181027 - DNA, 15 bp, Homo sapiens
caagaagagtgccca

SEQ ID NO: 181028 - DNA, 15 bp, Homo sapiens
ccaagaagagtgccc

SEQ ID NO: 181029 - DNA, 15 bp, Homo sapiens
accaagaagagtgcc

SEQ ID NO: 181030 - DNA, 15 bp, Homo sapiens
gaccaagaagagtgc

SEQ ID NO: 181031 - DNA, 15 bp, Homo sapiens
ggaccaagaagagtg

SEQ ID NO: 181032 - DNA, 15 bp, Homo sapiens
aggaccaagaagagt

SEQ ID NO: 181033 - DNA, 15 bp, Homo sapiens
caggaccaagaagag

SEQ ID NO: 181034 - DNA, 15 bp, Homo sapiens
ccaggaccaagaaga

SEQ ID NO: 181035 - DNA, 15 bp, Homo sapiens
accaggaccaagaag

SEQ ID NO: 181036 - DNA, 15 bp, Homo sapiens
aaccaggaccaagaa

SEQ ID NO: 181037 - DNA, 15 bp, Homo sapiens
aaaccaggaccaaga

SEQ ID NO: 181038 - DNA, 15 bp, Homo sapiens
aaaaccaggaccaag

SEQ ID NO: 181039 - DNA, 15 bp, Homo sapiens
gaaaaccaggaccaa

SEQ ID NO: 181040 - DNA, 15 bp, Homo sapiens
tgaaaaccaggacca

SEQ ID NO: 181041 - DNA, 15 bp, Homo sapiens
ctgaaaaccaggacc

SEQ ID NO: 181042 - DNA, 15 bp, Homo sapiens
tctgaaaaccaggac

SEQ ID NO: 181043 - DNA, 15 bp, Homo sapiens
atctgaaaaccagga

SEQ ID NO: 181044 - DNA, 15 bp, Homo sapiens
catctgaaaaccagg

SEQ ID NO: 181045 - DNA, 15 bp, Homo sapiens
tcatctgaaaaccag

SEQ ID NO: 181046 - DNA, 15 bp, Homo sapiens
ctcatctgaaaacca

SEQ ID NO: 181047 - DNA, 15 bp, Homo sapiens
cctcatctgaaaacc

SEQ ID NO: 181048 - DNA, 15 bp, Homo sapiens
tcctcatctgaaaac

SEQ ID NO: 181049 - DNA, 15 bp, Homo sapiens
ctcctcatctgaaaa

SEQ ID NO: 181050 - DNA, 15 bp, Homo sapiens
tctcctcatctgaaa

SEQ ID NO: 181051 - DNA, 15 bp, Homo sapiens
atctcctcatctgaa

SEQ ID NO: 181052 - DNA, 15 bp, Homo sapiens
catctcctcatctga

SEQ ID NO: 181053 - DNA, 15 bp, Homo sapiens
gcatctcctcatctg

SEQ ID NO: 181054 - DNA, 15 bp, Homo sapiens
tgcatctcctcatct

SEQ ID NO: 181055 - DNA, 15 bp, Homo sapiens
ctgcatctcctcatc

SEQ ID NO: 181056 - DNA, 15 bp, Homo sapiens
cctgcatctcctcat

SEQ ID NO: 181057 - DNA, 15 bp, Homo sapiens
gcctgcatctcctca

SEQ ID NO: 181058 - DNA, 15 bp, Homo sapiens
tgcctgcatctcctc

SEQ ID NO: 181059 - DNA, 15 bp, Homo sapiens
gtgcctgcatctcct

SEQ ID NO: 181060 - DNA, 15 bp, Homo sapiens
tgtgcctgcatctcc

SEQ ID NO: 181061 - DNA, 15 bp, Homo sapiens
ctgtgcctgcatctc

SEQ ID NO: 181062 - DNA, 15 bp, Homo sapiens
tctgtgcctgcatct

SEQ ID NO: 181063 - DNA, 15 bp, Homo sapiens
ctctgtgcctgcatc

SEQ ID NO: 181064 - DNA, 15 bp, Homo sapiens
actctgtgcctgcat

SEQ ID NO: 181065 - DNA, 15 bp, Homo sapiens
cactctgtgcctgca

SEQ ID NO: 181066 - DNA, 15 bp, Homo sapiens
ccactctgtgcctgc

SEQ ID NO: 181067 - DNA, 15 bp, Homo sapiens
accactctgtgcctg

SEQ ID NO: 181068 - DNA, 15 bp, Homo sapiens
aaccactctgtgcct

SEQ ID NO: 181069 - DNA, 15 bp, Homo sapiens
taaccactctgtgcc

SEQ ID NO: 181070 - DNA, 15 bp, Homo sapiens
ttaaccactctgtgc

SEQ ID NO: 181071 - DNA, 15 bp, Homo sapiens
cttaaccactctgtg

SEQ ID NO: 181072 - DNA, 15 bp, Homo sapiens
gcttaaccactctgt

SEQ ID NO: 181073 - DNA, 15 bp, Homo sapiens
tgcttaaccactctg

SEQ ID NO: 181074 - DNA, 15 bp, Homo sapiens
atgcttaaccactct

SEQ ID NO: 181075 - DNA, 15 bp, Homo sapiens
gatgcttaaccactc

SEQ ID NO: 181076 - DNA, 15 bp, Homo sapiens
tgatgcttaaccact

SEQ ID NO: 181077 - DNA, 15 bp, Homo sapiens
atgatgcttaaccac

SEQ ID NO: 181078 - DNA, 15 bp, Homo sapiens
tatgatgcttaacca

SEQ ID NO: 181079 - DNA, 15 bp, Homo sapiens
gtatgatgcttaacc

SEQ ID NO: 181080 - DNA, 15 bp, Homo sapiens
ggtatgatgcttaac

SEQ ID NO: 181081 - DNA, 15 bp, Homo sapiens
gggtatgatgcttaa

SEQ ID NO: 181082 - DNA, 15 bp, Homo sapiens
tgggtatgatgctta

SEQ ID NO: 181083 - DNA, 15 bp, Homo sapiens
ttgggtatgatgctt

SEQ ID NO: 181084 - DNA, 15 bp, Homo sapiens
cttgggtatgatgct

SEQ ID NO: 181085 - DNA, 15 bp, Homo sapiens
ccttgggtatgatgc

SEQ ID NO: 181086 - DNA, 15 bp, Homo sapiens
accttgggtatgatg

SEQ ID NO: 181087 - DNA, 15 bp, Homo sapiens
gaccttgggtatgat

SEQ ID NO: 181088 - DNA, 15 bp, Homo sapiens
tgaccttgggtatga

SEQ ID NO: 181089 - DNA, 15 bp, Homo sapiens
gtgaccttgggtatg

SEQ ID NO: 181090 - DNA, 15 bp, Homo sapiens
tgtgaccttgggtat

SEQ ID NO: 181091 - DNA, 15 bp, Homo sapiens
gtgtgaccttgggta

SEQ ID NO: 181092 - DNA, 15 bp, Homo sapiens
tgtgtgaccttgggt

SEQ ID NO: 181093 - DNA, 15 bp, Homo sapiens
ctgtgtgaccttggg

SEQ ID NO: 181094 - DNA, 15 bp, Homo sapiens
gctgtgtgaccttgg

SEQ ID NO: 181095 - DNA, 15 bp, Homo sapiens
agctgtgtgaccttg

SEQ ID NO: 181096 - DNA, 15 bp, Homo sapiens
aagctgtgtgacctt

SEQ ID NO: 181097 - DNA, 15 bp, Homo sapiens
caagctgtgtgacct

SEQ ID NO: 181098 - DNA, 15 bp, Homo sapiens
acaagctgtgtgacc

SEQ ID NO: 181099 - DNA, 15 bp, Homo sapiens
cacaagctgtgtgac

SEQ ID NO: 181100 - DNA, 15 bp, Homo sapiens
tcacaagctgtgtga

SEQ ID NO: 181101 - DNA, 15 bp, Homo sapiens
ctcacaagctgtgtg

SEQ ID NO: 181102 - DNA, 15 bp, Homo sapiens
actcacaagctgtgt

SEQ ID NO: 181103 - DNA, 15 bp, Homo sapiens
tactcacaagctgtg

SEQ ID NO: 181104 - DNA, 15 bp, Homo sapiens
ctactcacaagctgt

SEQ ID NO: 181105 - DNA, 15 bp, Homo sapiens
tctactcacaagctg

SEQ ID NO: 181106 - DNA, 15 bp, Homo sapiens
ctctactcacaagct

SEQ ID NO: 181107 - DNA, 15 bp, Homo sapiens
cctctactcacaagc

SEQ ID NO: 181108 - DNA, 15 bp, Homo sapiens
ccctctactcacaag

SEQ ID NO: 181109 - DNA, 15 bp, Homo sapiens
accctctactcacaa

SEQ ID NO: 181110 - DNA, 15 bp, Homo sapiens
gaccctctactcaca

SEQ ID NO: 181111 - DNA, 15 bp, Homo sapiens
agaccctctactcac

SEQ ID NO: 181112 - DNA, 15 bp, Homo sapiens
cagaccctctactca

SEQ ID NO: 181113 - DNA, 15 bp, Homo sapiens
ccagaccctctactc

SEQ ID NO: 181114 - DNA, 15 bp, Homo sapiens
cccagaccctctact

SEQ ID NO: 181115 - DNA, 15 bp, Homo sapiens
tcccagaccctctac

SEQ ID NO: 181116 - DNA, 15 bp, Homo sapiens
ttcccagaccctcta

SEQ ID NO: 181117 - DNA, 15 bp, Homo sapiens
attcccagaccctct

SEQ ID NO: 181118 - DNA, 15 bp, Homo sapiens
aattcccagaccctc

SEQ ID NO: 181119 - DNA, 15 bp, Homo sapiens
caattcccagaccct

SEQ ID NO: 181120 - DNA, 15 bp, Homo sapiens
tcaattcccagaccc

SEQ ID NO: 181121 - DNA, 15 bp, Homo sapiens
ttcaattcccagacc

SEQ ID NO: 181122 - DNA, 15 bp, Homo sapiens
gttcaattcccagac

SEQ ID NO: 181123 - DNA, 15 bp, Homo sapiens
ggttcaattcccaga

SEQ ID NO: 181124 - DNA, 15 bp, Homo sapiens
gggttcaattcccag

SEQ ID NO: 181125 - DNA, 15 bp, Homo sapiens
tgggttcaattccca

SEQ ID NO: 181126 - DNA, 15 bp, Homo sapiens
ctgggttcaattccc

SEQ ID NO: 181127 - DNA, 15 bp, Homo sapiens
tctgggttcaattcc

SEQ ID NO: 181128 - DNA, 15 bp, Homo sapiens
gtctgggttcaattc

SEQ ID NO: 181129 - DNA, 15 bp, Homo sapiens
tgtctgggttcaatt

SEQ ID NO: 181130 - DNA, 15 bp, Homo sapiens
ctgtctgggttcaat

SEQ ID NO: 181131 - DNA, 15 bp, Homo sapiens
cctgtctgggttcaa

SEQ ID NO: 181132 - DNA, 15 bp, Homo sapiens
gcctgtctgggttca

SEQ ID NO: 181133 - DNA, 15 bp, Homo sapiens
agcctgtctgggttc

SEQ ID NO: 181134 - DNA, 15 bp, Homo sapiens
cagcctgtctgggtt

SEQ ID NO: 181135 - DNA, 15 bp, Homo sapiens
acagcctgtctgggt

SEQ ID NO: 181136 - DNA, 15 bp, Homo sapiens
gacagcctgtctggg

SEQ ID NO: 181137 - DNA, 15 bp, Homo sapiens
ggacagcctgtctgg

SEQ ID NO: 181138 - DNA, 15 bp, Homo sapiens
tggacagcctgtctg

SEQ ID NO: 181139 - DNA, 15 bp, Homo sapiens
ctggacagcctgtct

SEQ ID NO: 181140 - DNA, 15 bp, Homo sapiens
tctggacagcctgtc

SEQ ID NO: 181141 - DNA, 15 bp, Homo sapiens
ctctggacagcctgt

SEQ ID NO: 181142 - DNA, 15 bp, Homo sapiens
actctggacagcctg

SEQ ID NO: 181143 - DNA, 15 bp, Homo sapiens
cactctggacagcct

SEQ ID NO: 181144 - DNA, 15 bp, Homo sapiens
gcactctggacagcc

SEQ ID NO: 181145 - DNA, 15 bp, Homo sapiens
tgcactctggacagc

SEQ ID NO: 181146 - DNA, 15 bp, Homo sapiens
ctgcactctggacag

SEQ ID NO: 181147 - DNA, 15 bp, Homo sapiens
actgcactctggaca

SEQ ID NO: 181148 - DNA, 15 bp, Homo sapiens
gactgcactctggac

SEQ ID NO: 181149 - DNA, 15 bp, Homo sapiens
agactgcactctgga

SEQ ID NO: 181150 - DNA, 15 bp, Homo sapiens
gagactgcactctgg

SEQ ID NO: 181151 - DNA, 15 bp, Homo sapiens
agagactgcactctg

SEQ ID NO: 181152 - DNA, 15 bp, Homo sapiens
gagagactgcactct

SEQ ID NO: 181153 - DNA, 15 bp, Homo sapiens
ggagagactgcactc

SEQ ID NO: 181154 - DNA, 15 bp, Homo sapiens
gggagagactgcact

SEQ ID NO: 181155 - DNA, 15 bp, Homo sapiens
ggggagagactgcac

SEQ ID NO: 181156 - DNA, 15 bp, Homo sapiens
tggggagagactgca

SEQ ID NO: 181157 - DNA, 15 bp, Homo sapiens
ttggggagagactgc

SEQ ID NO: 181158 - DNA, 15 bp, Homo sapiens
gttggggagagactg

SEQ ID NO: 181159 - DNA, 15 bp, Homo sapiens
tgttggggagagact

SEQ ID NO: 181160 - DNA, 15 bp, Homo sapiens
gtgttggggagagac

SEQ ID NO: 181161 - DNA, 15 bp, Homo sapiens
tgtgttggggagaga

SEQ ID NO: 181162 - DNA, 15 bp, Homo sapiens
gtgtgttggggagag

SEQ ID NO: 181163 - DNA, 15 bp, Homo sapiens
ggtgtgttggggaga

SEQ ID NO: 181164 - DNA, 15 bp, Homo sapiens
gggtgtgttggggag

SEQ ID NO: 181165 - DNA, 15 bp, Homo sapiens
ggggtgtgttgggga

SEQ ID NO: 181166 - DNA, 15 bp, Homo sapiens
tggggtgtgttgggg

SEQ ID NO: 181167 - DNA, 15 bp, Homo sapiens
atggggtgtgttggg

SEQ ID NO: 181168 - DNA, 15 bp, Homo sapiens
catggggtgtgttgg

SEQ ID NO: 181169 - DNA, 15 bp, Homo sapiens
ccatggggtgtgttg

SEQ ID NO: 181170 - DNA, 15 bp, Homo sapiens
accatggggtgtgtt

SEQ ID NO: 181171 - DNA, 15 bp, Homo sapiens
caccatggggtgtgt

SEQ ID NO: 181172 - DNA, 15 bp, Homo sapiens
gcaccatggggtgtg

SEQ ID NO: 181173 - DNA, 15 bp, Homo sapiens
ggcaccatggggtgt

SEQ ID NO: 181174 - DNA, 15 bp, Homo sapiens
aggcaccatggggtg

SEQ ID NO: 181175 - DNA, 15 bp, Homo sapiens
gaggcaccatggggt

SEQ ID NO: 181176 - DNA, 15 bp, Homo sapiens
tgaggcaccatgggg

SEQ ID NO: 181177 - DNA, 15 bp, Homo sapiens
ctgaggcaccatggg

SEQ ID NO: 181178 - DNA, 15 bp, Homo sapiens
tctgaggcaccatgg

SEQ ID NO: 181179 - DNA, 15 bp, Homo sapiens
ctctgaggcaccatg

SEQ ID NO: 181180 - DNA, 15 bp, Homo sapiens
tctctgaggcaccat

SEQ ID NO: 181181 - DNA, 15 bp, Homo sapiens
gtctctgaggcacca

SEQ ID NO: 181182 - DNA, 15 bp, Homo sapiens
tgtctctgaggcacc

SEQ ID NO: 181183 - DNA, 15 bp, Homo sapiens
ctgtctctgaggcac

SEQ ID NO: 181184 - DNA, 15 bp, Homo sapiens
cctgtctctgaggca

SEQ ID NO: 181185 - DNA, 15 bp, Homo sapiens
tcctgtctctgaggc

SEQ ID NO: 181186 - DNA, 15 bp, Homo sapiens
ctcctgtctctgagg

SEQ ID NO: 181187 - DNA, 15 bp, Homo sapiens
actcctgtctctgag

SEQ ID NO: 181188 - DNA, 15 bp, Homo sapiens
gactcctgtctctga

SEQ ID NO: 181189 - DNA, 15 bp, Homo sapiens
ggactcctgtctctg

SEQ ID NO: 181190 - DNA, 15 bp, Homo sapiens
gggactcctgtctct

SEQ ID NO: 181191 - DNA, 15 bp, Homo sapiens
tgggactcctgtctc

SEQ ID NO: 181192 - DNA, 15 bp, Homo sapiens
atgggactcctgtct

SEQ ID NO: 181193 - DNA, 15 bp, Homo sapiens
tatgggactcctgtc

SEQ ID NO: 181194 - DNA, 15 bp, Homo sapiens
ctatgggactcctgt

SEQ ID NO: 181195 - DNA, 15 bp, Homo sapiens
tctatgggactcctg

SEQ ID NO: 181196 - DNA, 15 bp, Homo sapiens
gtctatgggactcct

SEQ ID NO: 181197 - DNA, 15 bp, Homo sapiens
tgtctatgggactcc

SEQ ID NO: 181198 - DNA, 15 bp, Homo sapiens
ttgtctatgggactc

SEQ ID NO: 181199 - DNA, 15 bp, Homo sapiens
gttgtctatgggact

SEQ ID NO: 181200 - DNA, 15 bp, Homo sapiens
tgttgtctatgggac

SEQ ID NO: 181201 - DNA, 15 bp, Homo sapiens
atgttgtctatggga

SEQ ID NO: 181202 - DNA, 15 bp, Homo sapiens
gatgttgtctatggg

SEQ ID NO: 181203 - DNA, 15 bp, Homo sapiens
ggatgttgtctatgg

SEQ ID NO: 181204 - DNA, 15 bp, Homo sapiens
aggatgttgtctatg

SEQ ID NO: 181205 - DNA, 15 bp, Homo sapiens
caggatgttgtctat

SEQ ID NO: 181206 - DNA, 15 bp, Homo sapiens
ccaggatgttgtcta

SEQ ID NO: 181207 - DNA, 15 bp, Homo sapiens
tccaggatgttgtct

SEQ ID NO: 181208 - DNA, 15 bp, Homo sapiens
atccaggatgttgtc

SEQ ID NO: 181209 - DNA, 15 bp, Homo sapiens
catccaggatgttgt

SEQ ID NO: 181210 - DNA, 15 bp, Homo sapiens
ccatccaggatgttg

SEQ ID NO: 181211 - DNA, 15 bp, Homo sapiens
tccatccaggatgtt

SEQ ID NO: 181212 - DNA, 15 bp, Homo sapiens
ctccatccaggatgt

SEQ ID NO: 181213 - DNA, 15 bp, Homo sapiens
gctccatccaggatg

SEQ ID NO: 181214 - DNA, 15 bp, Homo sapiens
ggctccatccaggat

SEQ ID NO: 181215 - DNA, 15 bp, Homo sapiens
aggctccatccagga

SEQ ID NO: 181216 - DNA, 15 bp, Homo sapiens
caggctccatccagg

SEQ ID NO: 181217 - DNA, 15 bp, Homo sapiens
acaggctccatccag

SEQ ID NO: 181218 - DNA, 15 bp, Homo sapiens
tacaggctccatcca

SEQ ID NO: 181219 - DNA, 15 bp, Homo sapiens
ctacaggctccatcc

SEQ ID NO: 181220 - DNA, 15 bp, Homo sapiens
gctacaggctccatc

SEQ ID NO: 181221 - DNA, 15 bp, Homo sapiens
ggctacaggctccat

SEQ ID NO: 181222 - DNA, 15 bp, Homo sapiens
aggctacaggctcca

SEQ ID NO: 181223 - DNA, 15 bp, Homo sapiens
gaggctacaggctcc

SEQ ID NO: 181224 - DNA, 15 bp, Homo sapiens
ggaggctacaggctc

SEQ ID NO: 181225 - DNA, 15 bp, Homo sapiens
aggaggctacaggct

SEQ ID NO: 181226 - DNA, 15 bp, Homo sapiens
caggaggctacaggc

SEQ ID NO: 181227 - DNA, 15 bp, Homo sapiens
tcaggaggctacagg

SEQ ID NO: 181228 - DNA, 15 bp, Homo sapiens
atcaggaggctacag

SEQ ID NO: 181229 - DNA, 15 bp, Homo sapiens
catcaggaggctaca

SEQ ID NO: 181230 - DNA, 15 bp, Homo sapiens
ccatcaggaggctac

SEQ ID NO: 181231 - DNA, 15 bp, Homo sapiens
accatcaggaggcta

SEQ ID NO: 181232 - DNA, 15 bp, Homo sapiens
caccatcaggaggct

SEQ ID NO: 181233 - DNA, 15 bp, Homo sapiens
ccaccatcaggaggc

SEQ ID NO: 181234 - DNA, 15 bp, Homo sapiens
accaccatcaggagg

SEQ ID NO: 181235 - DNA, 15 bp, Homo sapiens
aaccaccatcaggag

SEQ ID NO: 181236 - DNA, 15 bp, Homo sapiens
caaccaccatcagga

SEQ ID NO: 181237 - DNA, 15 bp, Homo sapiens
ccaaccaccatcagg

SEQ ID NO: 181238 - DNA, 15 bp, Homo sapiens
tccaaccaccatcag

SEQ ID NO: 181239 - DNA, 15 bp, Homo sapiens
ctccaaccaccatca

SEQ ID NO: 181240 - DNA, 15 bp, Homo sapiens
cctccaaccaccatc

SEQ ID NO: 181241 - DNA, 15 bp, Homo sapiens
gcctccaaccaccat

SEQ ID NO: 181242 - DNA, 15 bp, Homo sapiens
agcctccaaccacca

SEQ ID NO: 181243 - DNA, 15 bp, Homo sapiens
cagcctccaaccacc

SEQ ID NO: 181244 - DNA, 15 bp, Homo sapiens
acagcctccaaccac

SEQ ID NO: 181245 - DNA, 15 bp, Homo sapiens
cacagcctccaacca

SEQ ID NO: 181246 - DNA, 15 bp, Homo sapiens
gcacagcctccaacc

SEQ ID NO: 181247 - DNA, 15 bp, Homo sapiens
cgcacagcctccaac

SEQ ID NO: 181248 - DNA, 15 bp, Homo sapiens
gcgcacagcctccaa

SEQ ID NO: 181249 - DNA, 15 bp, Homo sapiens
tgcgcacagcctcca

SEQ ID NO: 181250 - DNA, 15 bp, Homo sapiens
gtgcgcacagcctcc

SEQ ID NO: 181251 - DNA, 15 bp, Homo sapiens
tgtgcgcacagcctc

SEQ ID NO: 181252 - DNA, 15 bp, Homo sapiens
ctgtgcgcacagcct

SEQ ID NO: 181253 - DNA, 15 bp, Homo sapiens
gctgtgcgcacagcc

SEQ ID NO: 181254 - DNA, 15 bp, Homo sapiens
tgctgtgcgcacagc

SEQ ID NO: 181255 - DNA, 15 bp, Homo sapiens
atgctgtgcgcacag

SEQ ID NO: 181256 - DNA, 15 bp, Homo sapiens
catgctgtgcgcaca

SEQ ID NO: 181257 - DNA, 15 bp, Homo sapiens
ccatgctgtgcgcac

SEQ ID NO: 181258 - DNA, 15 bp, Homo sapiens
tccatgctgtgcgca

SEQ ID NO: 181259 - DNA, 15 bp, Homo sapiens
ctccatgctgtgcgc

SEQ ID NO: 181260 - DNA, 15 bp, Homo sapiens
gctccatgctgtgcg

SEQ ID NO: 181261 - DNA, 15 bp, Homo sapiens
ggctccatgctgtgc

SEQ ID NO: 181262 - DNA, 15 bp, Homo sapiens
gggctccatgctgtg

SEQ ID NO: 181263 - DNA, 15 bp, Homo sapiens
cgggctccatgctgt

SEQ ID NO: 181264 - DNA, 15 bp, Homo sapiens
tcgggctccatgctg

SEQ ID NO: 181265 - DNA, 15 bp, Homo sapiens
ctcgggctccatgct

SEQ ID NO: 181266 - DNA, 15 bp, Homo sapiens
gctcgggctccatgc

SEQ ID NO: 181267 - DNA, 15 bp, Homo sapiens
ggctcgggctccatg

SEQ ID NO: 181268 - DNA, 15 bp, Homo sapiens
tggctcgggctccat

SEQ ID NO: 181269 - DNA, 15 bp, Homo sapiens
ctggctcgggctcca

SEQ ID NO: 181270 - DNA, 15 bp, Homo sapiens
gctggctcgggctcc

SEQ ID NO: 181271 - DNA, 15 bp, Homo sapiens
ggctggctcgggctc

SEQ ID NO: 181272 - DNA, 15 bp, Homo sapiens
gggctggctcgggct

SEQ ID NO: 181273 - DNA, 15 bp, Homo sapiens
ggggctggctcgggc

SEQ ID NO: 181274 - DNA, 15 bp, Homo sapiens
aggggctggctcggg

SEQ ID NO: 181275 - DNA, 15 bp, Homo sapiens
caggggctggctcgg

SEQ ID NO: 181276 - DNA, 15 bp, Homo sapiens
ccaggggctggctcg

SEQ ID NO: 181277 - DNA, 15 bp, Homo sapiens
cccaggggctggctc

SEQ ID NO: 181278 - DNA, 15 bp, Homo sapiens
ccccaggggctggct

SEQ ID NO: 181279 - DNA, 15 bp, Homo sapiens
tccccaggggctggc

SEQ ID NO: 181280 - DNA, 15 bp, Homo sapiens
atccccaggggctgg

SEQ ID NO: 181281 - DNA, 15 bp, Homo sapiens
catccccaggggctg

SEQ ID NO: 181282 - DNA, 15 bp, Homo sapiens
tcatccccaggggct

SEQ ID NO: 181283 - DNA, 15 bp, Homo sapiens
ctcatccccaggggc

SEQ ID NO: 181284 - DNA, 15 bp, Homo sapiens
cctcatccccagggg

SEQ ID NO: 181285 - DNA, 15 bp, Homo sapiens
ccctcatccccaggg

SEQ ID NO: 181286 - DNA, 15 bp, Homo sapiens
gccctcatccccagg

SEQ ID NO: 181287 - DNA, 15 bp, Homo sapiens
agccctcatccccag

SEQ ID NO: 181288 - DNA, 15 bp, Homo sapiens
cagccctcatcccca

SEQ ID NO: 181289 - DNA, 15 bp, Homo sapiens
gcagccctcatcccc

SEQ ID NO: 181290 - DNA, 15 bp, Homo sapiens
tgcagccctcatccc

SEQ ID NO: 181291 - DNA, 15 bp, Homo sapiens
gtgcagccctcatcc

SEQ ID NO: 181292 - DNA, 15 bp, Homo sapiens
ggtgcagccctcatc

SEQ ID NO: 181293 - DNA, 15 bp, Homo sapiens
tggtgcagccctcat

SEQ ID NO: 181294 - DNA, 15 bp, Homo sapiens
ctggtgcagccctca

SEQ ID NO: 181295 - DNA, 15 bp, Homo sapiens
cctggtgcagccctc

SEQ ID NO: 181296 - DNA, 15 bp, Homo sapiens
ccctggtgcagccct

SEQ ID NO: 181297 - DNA, 15 bp, Homo sapiens
gccctggtgcagccc

SEQ ID NO: 181298 - DNA, 15 bp, Homo sapiens
ggccctggtgcagcc

SEQ ID NO: 181299 - DNA, 15 bp, Homo sapiens
gggccctggtgcagc

SEQ ID NO: 181300 - DNA, 15 bp, Homo sapiens
tgggccctggtgcag

SEQ ID NO: 181301 - DNA, 15 bp, Homo sapiens
gtgggccctggtgca

SEQ ID NO: 181302 - DNA, 15 bp, Homo sapiens
agtgggccctggtgc

SEQ ID NO: 181303 - DNA, 15 bp, Homo sapiens
gagtgggccctggtg

SEQ ID NO: 181304 - DNA, 15 bp, Homo sapiens
tgagtgggccctggt

SEQ ID NO: 181305 - DNA, 15 bp, Homo sapiens
ctgagtgggccctgg

SEQ ID NO: 181306 - DNA, 15 bp, Homo sapiens
gctgagtgggccctg

SEQ ID NO: 181307 - DNA, 15 bp, Homo sapiens
ggctgagtgggccct

SEQ ID NO: 181308 - DNA, 15 bp, Homo sapiens
tggctgagtgggccc

SEQ ID NO: 181309 - DNA, 15 bp, Homo sapiens
gtggctgagtgggcc

SEQ ID NO: 181310 - DNA, 15 bp, Homo sapiens
ggtggctgagtgggc

SEQ ID NO: 181311 - DNA, 15 bp, Homo sapiens
gggtggctgagtggg

SEQ ID NO: 181312 - DNA, 15 bp, Homo sapiens
agggtggctgagtgg

SEQ ID NO: 181313 - DNA, 15 bp, Homo sapiens
gagggtggctgagtg

SEQ ID NO: 181314 - DNA, 15 bp, Homo sapiens
ggagggtggctgagt

SEQ ID NO: 181315 - DNA, 15 bp, Homo sapiens
tggagggtggctgag

SEQ ID NO: 181316 - DNA, 15 bp, Homo sapiens
gtggagggtggctga

SEQ ID NO: 181317 - DNA, 15 bp, Homo sapiens
ggtggagggtggctg

SEQ ID NO: 181318 - DNA, 15 bp, Homo sapiens
gggtggagggtggct

SEQ ID NO: 181319 - DNA, 15 bp, Homo sapiens
agggtggagggtggc

SEQ ID NO: 181320 - DNA, 15 bp, Homo sapiens
cagggtggagggtgg

SEQ ID NO: 181321 - DNA, 15 bp, Homo sapiens
acagggtggagggtg

SEQ ID NO: 181322 - DNA, 15 bp, Homo sapiens
cacagggtggagggt

SEQ ID NO: 181323 - DNA, 15 bp, Homo sapiens
acacagggtggaggg

SEQ ID NO: 181324 - DNA, 15 bp, Homo sapiens
aacacagggtggagg

SEQ ID NO: 181325 - DNA, 15 bp, Homo sapiens
gaacacagggtggag

SEQ ID NO: 181326 - DNA, 15 bp, Homo sapiens
agaacacagggtgga

SEQ ID NO: 181327 - DNA, 15 bp, Homo sapiens
aagaacacagggtgg

SEQ ID NO: 181328 - DNA, 15 bp, Homo sapiens
aaagaacacagggtg

SEQ ID NO: 181329 - DNA, 15 bp, Homo sapiens
gaaagaacacagggt

SEQ ID NO: 181330 - DNA, 15 bp, Homo sapiens
ggaaagaacacaggg

SEQ ID NO: 181331 - DNA, 15 bp, Homo sapiens
aggaaagaacacagg

SEQ ID NO: 181332 - DNA, 15 bp, Homo sapiens
aaggaaagaacacag

SEQ ID NO: 181333 - DNA, 15 bp, Homo sapiens
caaggaaagaacaca

SEQ ID NO: 181334 - DNA, 15 bp, Homo sapiens
gcaaggaaagaacac

SEQ ID NO: 181335 - DNA, 15 bp, Homo sapiens
ggcaaggaaagaaca

SEQ ID NO: 181336 - DNA, 15 bp, Homo sapiens
aggcaaggaaagaac

SEQ ID NO: 181337 - DNA, 15 bp, Homo sapiens
aaggcaaggaaagaa

SEQ ID NO: 181338 - DNA, 15 bp, Homo sapiens
caaggcaaggaaaga

SEQ ID NO: 181339 - DNA, 15 bp, Homo sapiens
gcaaggcaaggaaag

SEQ ID NO: 181340 - DNA, 15 bp, Homo sapiens
ggcaaggcaaggaaa

SEQ ID NO: 181341 - DNA, 15 bp, Homo sapiens
aggcaaggcaaggaa

SEQ ID NO: 181342 - DNA, 15 bp, Homo sapiens
gaggcaaggcaagga

SEQ ID NO: 181343 - DNA, 15 bp, Homo sapiens
ggaggcaaggcaagg

SEQ ID NO: 181344 - DNA, 15 bp, Homo sapiens
gggaggcaaggcaag

SEQ ID NO: 181345 - DNA, 15 bp, Homo sapiens
ggggaggcaaggcaa

SEQ ID NO: 181346 - DNA, 15 bp, Homo sapiens
aggggaggcaaggca

SEQ ID NO: 181347 - DNA, 15 bp, Homo sapiens
gaggggaggcaaggc

SEQ ID NO: 181348 - DNA, 15 bp, Homo sapiens
agaggggaggcaagg

SEQ ID NO: 181349 - DNA, 15 bp, Homo sapiens
cagaggggaggcaag

SEQ ID NO: 181350 - DNA, 15 bp, Homo sapiens
gcagaggggaggcaa

SEQ ID NO: 181351 - DNA, 15 bp, Homo sapiens
tgcagaggggaggca

SEQ ID NO: 181352 - DNA, 15 bp, Homo sapiens
gtgcagaggggaggc

SEQ ID NO: 181353 - DNA, 15 bp, Homo sapiens
agtgcagaggggagg

SEQ ID NO: 181354 - DNA, 15 bp, Homo sapiens
gagtgcagaggggag

SEQ ID NO: 181355 - DNA, 15 bp, Homo sapiens
ggagtgcagagggga

SEQ ID NO: 181356 - DNA, 15 bp, Homo sapiens
aggagtgcagagggg

SEQ ID NO: 181357 - DNA, 15 bp, Homo sapiens
aaggagtgcagaggg

SEQ ID NO: 181358 - DNA, 15 bp, Homo sapiens
gaaggagtgcagagg

SEQ ID NO: 181359 - DNA, 15 bp, Homo sapiens
ggaaggagtgcagag

SEQ ID NO: 181360 - DNA, 15 bp, Homo sapiens
aggaaggagtgcaga

SEQ ID NO: 181361 - DNA, 15 bp, Homo sapiens
aaggaaggagtgcag

SEQ ID NO: 181362 - DNA, 15 bp, Homo sapiens
caaggaaggagtgca

SEQ ID NO: 181363 - DNA, 15 bp, Homo sapiens
acaaggaaggagtgc

SEQ ID NO: 181364 - DNA, 15 bp, Homo sapiens
cacaaggaaggagtg

SEQ ID NO: 181365 - DNA, 15 bp, Homo sapiens
gcacaaggaaggagt

SEQ ID NO: 181366 - DNA, 15 bp, Homo sapiens
ggcacaaggaaggag

SEQ ID NO: 181367 - DNA, 15 bp, Homo sapiens
aggcacaaggaagga

SEQ ID NO: 181368 - DNA, 15 bp, Homo sapiens
gaggcacaaggaagg

SEQ ID NO: 181369 - DNA, 15 bp, Homo sapiens
ggaggcacaaggaag

SEQ ID NO: 181370 - DNA, 15 bp, Homo sapiens
aggaggcacaaggaa

SEQ ID NO: 181371 - DNA, 15 bp, Homo sapiens
gaggaggcacaagga

SEQ ID NO: 181372 - DNA, 15 bp, Homo sapiens
ggaggaggcacaagg

SEQ ID NO: 181373 - DNA, 15 bp, Homo sapiens
aggaggaggcacaag

SEQ ID NO: 181374 - DNA, 15 bp, Homo sapiens
gaggaggaggcacaa

SEQ ID NO: 181375 - DNA, 15 bp, Homo sapiens
tgaggaggaggcaca

SEQ ID NO: 181376 - DNA, 15 bp, Homo sapiens
gtgaggaggaggcac

SEQ ID NO: 181377 - DNA, 15 bp, Homo sapiens
agtgaggaggaggca

SEQ ID NO: 181378 - DNA, 15 bp, Homo sapiens
gagtgaggaggaggc

SEQ ID NO: 181379 - DNA, 15 bp, Homo sapiens
ggagtgaggaggagg

SEQ ID NO: 181380 - DNA, 15 bp, Homo sapiens
gggagtgaggaggag

SEQ ID NO: 181381 - DNA, 15 bp, Homo sapiens
ggggagtgaggagga

SEQ ID NO: 181382 - DNA, 15 bp, Homo sapiens
tggggagtgaggagg

SEQ ID NO: 181383 - DNA, 15 bp, Homo sapiens
gtggggagtgaggag

SEQ ID NO: 181384 - DNA, 15 bp, Homo sapiens
ggtggggagtgagga

SEQ ID NO: 181385 - DNA, 15 bp, Homo sapiens
tggtggggagtgagg

SEQ ID NO: 181386 - DNA, 15 bp, Homo sapiens
ctggtggggagtgag

SEQ ID NO: 181387 - DNA, 15 bp, Homo sapiens
gctggtggggagtga

SEQ ID NO: 181388 - DNA, 15 bp, Homo sapiens
ggctggtggggagtg

SEQ ID NO: 181389 - DNA, 15 bp, Homo sapiens
aggctggtggggagt

SEQ ID NO: 181390 - DNA, 15 bp, Homo sapiens
gaggctggtggggag

SEQ ID NO: 181391 - DNA, 15 bp, Homo sapiens
tgaggctggtgggga

SEQ ID NO: 181392 - DNA, 15 bp, Homo sapiens
gtgaggctggtgggg

SEQ ID NO: 181393 - DNA, 15 bp, Homo sapiens
ggtgaggctggtggg

SEQ ID NO: 181394 - DNA, 15 bp, Homo sapiens
aggtgaggctggtgg

SEQ ID NO: 181395 - DNA, 15 bp, Homo sapiens
gaggtgaggctggtg

SEQ ID NO: 181396 - DNA, 15 bp, Homo sapiens
agaggtgaggctggt

SEQ ID NO: 181397 - DNA, 15 bp, Homo sapiens
gagaggtgaggctgg

SEQ ID NO: 181398 - DNA, 15 bp, Homo sapiens
agagaggtgaggctg

SEQ ID NO: 181399 - DNA, 15 bp, Homo sapiens
gagagaggtgaggct

SEQ ID NO: 181400 - DNA, 15 bp, Homo sapiens
agagagaggtgaggc

SEQ ID NO: 181401 - DNA, 15 bp, Homo sapiens
gagagagaggtgagg

SEQ ID NO: 181402 - DNA, 15 bp, Homo sapiens
cgagagagaggtgag

SEQ ID NO: 181403 - DNA, 15 bp, Homo sapiens
gcgagagagaggtga

SEQ ID NO: 181404 - DNA, 15 bp, Homo sapiens
agcgagagagaggtg

SEQ ID NO: 181405 - DNA, 15 bp, Homo sapiens
gagcgagagagaggt

SEQ ID NO: 181406 - DNA, 15 bp, Homo sapiens
agagcgagagagagg

SEQ ID NO: 181407 - DNA, 15 bp, Homo sapiens
gagagcgagagagag

SEQ ID NO: 181408 - DNA, 15 bp, Homo sapiens
agagagcgagagaga

SEQ ID NO: 181409 - DNA, 15 bp, Homo sapiens
gagagagcgagagag

SEQ ID NO: 181410 - DNA, 15 bp, Homo sapiens
agagagagcgagaga

SEQ ID NO: 181411 - DNA, 15 bp, Homo sapiens
gagagagagcgagag

SEQ ID NO: 181412 - DNA, 15 bp, Homo sapiens
agagagagagcgaga

SEQ ID NO: 181413 - DNA, 15 bp, Homo sapiens
aagagagagagcgag

SEQ ID NO: 181414 - DNA, 15 bp, Homo sapiens
aaagagagagagcga

SEQ ID NO: 181415 - DNA, 15 bp, Homo sapiens
gaaagagagagagcg

SEQ ID NO: 181416 - DNA, 15 bp, Homo sapiens
agaaagagagagagc

SEQ ID NO: 181417 - DNA, 15 bp, Homo sapiens
aagaaagagagagag

SEQ ID NO: 181418 - DNA, 15 bp, Homo sapiens
aaagaaagagagaga

SEQ ID NO: 181419 - DNA, 15 bp, Homo sapiens
gaaagaaagagagag

SEQ ID NO: 181420 - DNA, 15 bp, Homo sapiens
agaaagaaagagaga

SEQ ID NO: 181421 - DNA, 15 bp, Homo sapiens
gagaaagaaagagag

SEQ ID NO: 181422 - DNA, 15 bp, Homo sapiens
agagaaagaaagaga

SEQ ID NO: 181423 - DNA, 15 bp, Homo sapiens
aagagaaagaaagag

SEQ ID NO: 181424 - DNA, 15 bp, Homo sapiens
aaagagaaagaaaga

SEQ ID NO: 181425 - DNA, 15 bp, Homo sapiens
aaaagagaaagaaag

SEQ ID NO: 181426 - DNA, 15 bp, Homo sapiens
taaaagagaaagaaa

SEQ ID NO: 181427 - DNA, 15 bp, Homo sapiens
ttaaaagagaaagaa

SEQ ID NO: 181428 - DNA, 15 bp, Homo sapiens
attaaaagagaaaga

SEQ ID NO: 181429 - DNA, 15 bp, Homo sapiens
tattaaaagagaaag

SEQ ID NO: 181430 - DNA, 15 bp, Homo sapiens
ttattaaaagagaaa

SEQ ID NO: 181431 - DNA, 15 bp, Homo sapiens
tttattaaaagagaa

SEQ ID NO: 181432 - DNA, 15 bp, Homo sapiens
atttattaaaagaga

SEQ ID NO: 181433 - DNA, 15 bp, Homo sapiens
catttattaaaagag

SEQ ID NO: 181434 - DNA, 15 bp, Homo sapiens
ccatttattaaaaga

SEQ ID NO: 181435 - DNA, 15 bp, Homo sapiens
tccatttattaaaag

SEQ ID NO: 181436 - DNA, 15 bp, Homo sapiens
ttccatttattaaaa

SEQ ID NO: 181437 - DNA, 15 bp, Homo sapiens
tttccatttattaaa

SEQ ID NO: 181438 - DNA, 15 bp, Homo sapiens
atttccatttattaa

SEQ ID NO: 181439 - DNA, 15 bp, Homo sapiens
catttccatttatta

SEQ ID NO: 181440 - DNA, 15 bp, Homo sapiens
ccatttccatttatt

SEQ ID NO: 181441 - DNA, 15 bp, Homo sapiens
accatttccatttat

SEQ ID NO: 181442 - DNA, 15 bp, Homo sapiens
aaccatttccattta

SEQ ID NO: 181443 - DNA, 15 bp, Homo sapiens
aaaccatttccattt

SEQ ID NO: 181444 - DNA, 15 bp, Homo sapiens
taaaccatttccatt

SEQ ID NO: 181445 - DNA, 15 bp, Homo sapiens
ataaaccatttccat

SEQ ID NO: 181446 - DNA, 15 bp, Homo sapiens
cataaaccatttcca

SEQ ID NO: 181447 - DNA, 15 bp, Homo sapiens
ccataaaccatttcc

SEQ ID NO: 181448 - DNA, 15 bp, Homo sapiens
cccataaaccatttc

SEQ ID NO: 181449 - DNA, 15 bp, Homo sapiens
gcccataaaccattt

SEQ ID NO: 181450 - DNA, 15 bp, Homo sapiens
agcccataaaccatt

SEQ ID NO: 181451 - DNA, 15 bp, Homo sapiens
gagcccataaaccat

SEQ ID NO: 181452 - DNA, 15 bp, Homo sapiens
agagcccataaacca

SEQ ID NO: 181453 - DNA, 15 bp, Homo sapiens
aagagcccataaacc

SEQ ID NO: 181454 - DNA, 15 bp, Homo sapiens
gaagagcccataaac

SEQ ID NO: 181455 - DNA, 15 bp, Homo sapiens
agaagagcccataaa

SEQ ID NO: 181456 - DNA, 15 bp, Homo sapiens
tagaagagcccataa

SEQ ID NO: 181457 - DNA, 15 bp, Homo sapiens
ctagaagagcccata

SEQ ID NO: 181458 - DNA, 15 bp, Homo sapiens
tctagaagagcccat

SEQ ID NO: 181459 - DNA, 15 bp, Homo sapiens
ttctagaagagccca

SEQ ID NO: 181460 - DNA, 15 bp, Homo sapiens
tttctagaagagccc

SEQ ID NO: 181461 - DNA, 15 bp, Homo sapiens
atttctagaagagcc

SEQ ID NO: 181462 - DNA, 15 bp, Homo sapiens
aatttctagaagagc

SEQ ID NO: 181463 - DNA, 15 bp, Homo sapiens
caatttctagaagag

SEQ ID NO: 181464 - DNA, 15 bp, Homo sapiens
gcaatttctagaaga

SEQ ID NO: 181465 - DNA, 15 bp, Homo sapiens
tgcaatttctagaag

SEQ ID NO: 181466 - DNA, 15 bp, Homo sapiens
gtgcaatttctagaa

SEQ ID NO: 181467 - DNA, 15 bp, Homo sapiens
ggtgcaatttctaga

SEQ ID NO: 181468 - DNA, 15 bp, Homo sapiens
aggtgcaatttctag

SEQ ID NO: 181469 - DNA, 15 bp, Homo sapiens
caggtgcaatttcta

SEQ ID NO: 181470 - DNA, 15 bp, Homo sapiens
gcaggtgcaatttct

SEQ ID NO: 181471 - DNA, 15 bp, Homo sapiens
ggcaggtgcaatttc

SEQ ID NO: 181472 - DNA, 15 bp, Homo sapiens
aggcaggtgcaattt

SEQ ID NO: 181473 - DNA, 15 bp, Homo sapiens
aaggcaggtgcaatt

SEQ ID NO: 181474 - DNA, 15 bp, Homo sapiens
gaaggcaggtgcaat

SEQ ID NO: 181475 - DNA, 15 bp, Homo sapiens
agaaggcaggtgcaa

SEQ ID NO: 181476 - DNA, 15 bp, Homo sapiens
cagaaggcaggtgca

SEQ ID NO: 181477 - DNA, 15 bp, Homo sapiens
ccagaaggcaggtgc

SEQ ID NO: 181478 - DNA, 15 bp, Homo sapiens
accagaaggcaggtg

SEQ ID NO: 181479 - DNA, 15 bp, Homo sapiens
aaccagaaggcaggt

SEQ ID NO: 181480 - DNA, 15 bp, Homo sapiens
taaccagaaggcagg

SEQ ID NO: 181481 - DNA, 15 bp, Homo sapiens
ataaccagaaggcag

SEQ ID NO: 181482 - DNA, 15 bp, Homo sapiens
tataaccagaaggca

SEQ ID NO: 181483 - DNA, 15 bp, Homo sapiens
ttataaccagaaggc

SEQ ID NO: 181484 - DNA, 15 bp, Homo sapiens
gttataaccagaagg

SEQ ID NO: 181485 - DNA, 15 bp, Homo sapiens
agttataaccagaag

SEQ ID NO: 181486 - DNA, 15 bp, Homo sapiens
cagttataaccagaa

SEQ ID NO: 181487 - DNA, 15 bp, Homo sapiens
ccagttataaccaga

SEQ ID NO: 181488 - DNA, 15 bp, Homo sapiens
cccagttataaccag

SEQ ID NO: 181489 - DNA, 15 bp, Homo sapiens
ccccagttataacca

SEQ ID NO: 181490 - DNA, 15 bp, Homo sapiens
tccccagttataacc

SEQ ID NO: 181491 - DNA, 15 bp, Homo sapiens
ctccccagttataac

SEQ ID NO: 181492 - DNA, 15 bp, Homo sapiens
tctccccagttataa

SEQ ID NO: 181493 - DNA, 15 bp, Homo sapiens
ctctccccagttata

SEQ ID NO: 181494 - DNA, 15 bp, Homo sapiens
tctctccccagttat

SEQ ID NO: 181495 - DNA, 15 bp, Homo sapiens
ctctctccccagtta

SEQ ID NO: 181496 - DNA, 15 bp, Homo sapiens
tctctctccccagtt

SEQ ID NO: 181497 - DNA, 15 bp, Homo sapiens
ctctctctccccagt

SEQ ID NO: 181498 - DNA, 15 bp, Homo sapiens
tctctctctccccag

SEQ ID NO: 181499 - DNA, 15 bp, Homo sapiens
ctctctctctcccca

SEQ ID NO: 181500 - DNA, 15 bp, Homo sapiens
cctctctctctcccc

SEQ ID NO: 181501 - DNA, 15 bp, Homo sapiens
tcctctctctctccc

SEQ ID NO: 181502 - DNA, 15 bp, Homo sapiens
ttcctctctctctcc

SEQ ID NO: 181503 - DNA, 15 bp, Homo sapiens
cttcctctctctctc

SEQ ID NO: 181504 - DNA, 15 bp, Homo sapiens
tcttcctctctctct

SEQ ID NO: 181505 - DNA, 15 bp, Homo sapiens
ctcttcctctctctc

SEQ ID NO: 181506 - DNA, 15 bp, Homo sapiens
tctcttcctctctct

SEQ ID NO: 181507 - DNA, 15 bp, Homo sapiens
gtctcttcctctctc

SEQ ID NO: 181508 - DNA, 15 bp, Homo sapiens
tgtctcttcctctct

SEQ ID NO: 181509 - DNA, 15 bp, Homo sapiens
gtgtctcttcctctc

SEQ ID NO: 181510 - DNA, 15 bp, Homo sapiens
tgtgtctcttcctct

SEQ ID NO: 181511 - DNA, 15 bp, Homo sapiens
ctgtgtctcttcctc

SEQ ID NO: 181512 - DNA, 15 bp, Homo sapiens
tctgtgtctcttcct

SEQ ID NO: 181513 - DNA, 15 bp, Homo sapiens
ctctgtgtctcttcc

SEQ ID NO: 181514 - DNA, 15 bp, Homo sapiens
tctctgtgtctcttc

SEQ ID NO: 181515 - DNA, 15 bp, Homo sapiens
ttctctgtgtctctt

SEQ ID NO: 181516 - DNA, 15 bp, Homo sapiens
cttctctgtgtctct

SEQ ID NO: 181517 - DNA, 15 bp, Homo sapiens
tcttctctgtgtctc

SEQ ID NO: 181518 - DNA, 15 bp, Homo sapiens
ctcttctctgtgtct

SEQ ID NO: 181519 - DNA, 15 bp, Homo sapiens
tctcttctctgtgtc

SEQ ID NO: 181520 - DNA, 15 bp, Homo sapiens
gtctcttctctgtgt

SEQ ID NO: 181521 - DNA, 15 bp, Homo sapiens
tgtctcttctctgtg

SEQ ID NO: 181522 - DNA, 15 bp, Homo sapiens
ctgtctcttctctgt

SEQ ID NO: 181523 - DNA, 15 bp, Homo sapiens
tctgtctcttctctg

SEQ ID NO: 181524 - DNA, 15 bp, Homo sapiens
ctctgtctcttctct

SEQ ID NO: 181525 - DNA, 15 bp, Homo sapiens
tctctgtctcttctc

SEQ ID NO: 181526 - DNA, 15 bp, Homo sapiens
ctctctgtctcttct

SEQ ID NO: 181527 - DNA, 15 bp, Homo sapiens
cctctctgtctcttc

SEQ ID NO: 181528 - DNA, 15 bp, Homo sapiens
gcctctctgtctctt

SEQ ID NO: 181529 - DNA, 15 bp, Homo sapiens
ggcctctctgtctct

SEQ ID NO: 181530 - DNA, 15 bp, Homo sapiens
aggcctctctgtctc

SEQ ID NO: 181531 - DNA, 15 bp, Homo sapiens
gaggcctctctgtct

SEQ ID NO: 181532 - DNA, 15 bp, Homo sapiens
ggaggcctctctgtc

SEQ ID NO: 181533 - DNA, 15 bp, Homo sapiens
aggaggcctctctgt

SEQ ID NO: 181534 - DNA, 15 bp, Homo sapiens
aaggaggcctctctg

SEQ ID NO: 181535 - DNA, 15 bp, Homo sapiens
gaaggaggcctctct

SEQ ID NO: 181536 - DNA, 15 bp, Homo sapiens
tgaaggaggcctctc

SEQ ID NO: 181537 - DNA, 15 bp, Homo sapiens
ctgaaggaggcctct

SEQ ID NO: 181538 - DNA, 15 bp, Homo sapiens
gctgaaggaggcctc

SEQ ID NO: 181539 - DNA, 15 bp, Homo sapiens
tgctgaaggaggcct

SEQ ID NO: 181540 - DNA, 15 bp, Homo sapiens
ctgctgaaggaggcc

SEQ ID NO: 181541 - DNA, 15 bp, Homo sapiens
tctgctgaaggaggc

SEQ ID NO: 181542 - DNA, 15 bp, Homo sapiens
atctgctgaaggagg

SEQ ID NO: 181543 - DNA, 15 bp, Homo sapiens
gatctgctgaaggag

SEQ ID NO: 181544 - DNA, 15 bp, Homo sapiens
agatctgctgaagga

SEQ ID NO: 181545 - DNA, 15 bp, Homo sapiens
cagatctgctgaagg

SEQ ID NO: 181546 - DNA, 15 bp, Homo sapiens
ccagatctgctgaag

SEQ ID NO: 181547 - DNA, 15 bp, Homo sapiens
cccagatctgctgaa

SEQ ID NO: 181548 - DNA, 15 bp, Homo sapiens
acccagatctgctga

SEQ ID NO: 181549 - DNA, 15 bp, Homo sapiens
tacccagatctgctg

SEQ ID NO: 181550 - DNA, 15 bp, Homo sapiens
atacccagatctgct

SEQ ID NO: 181551 - DNA, 15 bp, Homo sapiens
catacccagatctgc

SEQ ID NO: 181552 - DNA, 15 bp, Homo sapiens
gcatacccagatctg

SEQ ID NO: 181553 - DNA, 15 bp, Homo sapiens
ggcatacccagatct

SEQ ID NO: 181554 - DNA, 15 bp, Homo sapiens
gggcatacccagatc

SEQ ID NO: 181555 - DNA, 15 bp, Homo sapiens
tgggcatacccagat

SEQ ID NO: 181556 - DNA, 15 bp, Homo sapiens
atgggcatacccaga

SEQ ID NO: 181557 - DNA, 15 bp, Homo sapiens
catgggcatacccag

SEQ ID NO: 181558 - DNA, 15 bp, Homo sapiens
ccatgggcataccca

SEQ ID NO: 181559 - DNA, 15 bp, Homo sapiens
cccatgggcataccc

SEQ ID NO: 181560 - DNA, 15 bp, Homo sapiens
tcccatgggcatacc

SEQ ID NO: 181561 - DNA, 15 bp, Homo sapiens
gtcccatgggcatac

SEQ ID NO: 181562 - DNA, 15 bp, Homo sapiens
ggtcccatgggcata

SEQ ID NO: 181563 - DNA, 15 bp, Homo sapiens
aggtcccatgggcat

SEQ ID NO: 181564 - DNA, 15 bp, Homo sapiens
gaggtcccatgggca

SEQ ID NO: 181565 - DNA, 15 bp, Homo sapiens
ggaggtcccatgggc

SEQ ID NO: 181566 - DNA, 15 bp, Homo sapiens
aggaggtcccatggg

SEQ ID NO: 181567 - DNA, 15 bp, Homo sapiens
caggaggtcccatgg

SEQ ID NO: 181568 - DNA, 15 bp, Homo sapiens
ccaggaggtcccatg

SEQ ID NO: 181569 - DNA, 15 bp, Homo sapiens
gccaggaggtcccat

SEQ ID NO: 181570 - DNA, 15 bp, Homo sapiens
ggccaggaggtccca

SEQ ID NO: 181571 - DNA, 15 bp, Homo sapiens
aggccaggaggtccc

SEQ ID NO: 181572 - DNA, 15 bp, Homo sapiens
caggccaggaggtcc

SEQ ID NO: 181573 - DNA, 15 bp, Homo sapiens
ccaggccaggaggtc

SEQ ID NO: 181574 - DNA, 15 bp, Homo sapiens
tccaggccaggaggt

SEQ ID NO: 181575 - DNA, 15 bp, Homo sapiens
gtccaggccaggagg

SEQ ID NO: 181576 - DNA, 15 bp, Homo sapiens
tgtccaggccaggag

SEQ ID NO: 181577 - DNA, 15 bp, Homo sapiens
atgtccaggccagga

SEQ ID NO: 181578 - DNA, 15 bp, Homo sapiens
gatgtccaggccagg

SEQ ID NO: 181579 - DNA, 15 bp, Homo sapiens
ggatgtccaggccag

SEQ ID NO: 181580 - DNA, 15 bp, Homo sapiens
aggatgtccaggcca

SEQ ID NO: 181581 - DNA, 15 bp, Homo sapiens
caggatgtccaggcc

SEQ ID NO: 181582 - DNA, 15 bp, Homo sapiens
ccaggatgtccaggc

SEQ ID NO: 181583 - DNA, 15 bp, Homo sapiens
accaggatgtccagg

SEQ ID NO: 181584 - DNA, 15 bp, Homo sapiens
caccaggatgtccag

SEQ ID NO: 181585 - DNA, 15 bp, Homo sapiens
ccaccaggatgtcca

SEQ ID NO: 181586 - DNA, 15 bp, Homo sapiens
accaccaggatgtcc

SEQ ID NO: 181587 - DNA, 15 bp, Homo sapiens
caccaccaggatgtc

SEQ ID NO: 181588 - DNA, 15 bp, Homo sapiens
gcaccaccaggatgt

SEQ ID NO: 181589 - DNA, 15 bp, Homo sapiens
agcaccaccaggatg

SEQ ID NO: 181590 - DNA, 15 bp, Homo sapiens
aagcaccaccaggat

SEQ ID NO: 181591 - DNA, 15 bp, Homo sapiens
aaagcaccaccagga

SEQ ID NO: 181592 - DNA, 15 bp, Homo sapiens
gaaagcaccaccagg

SEQ ID NO: 181593 - DNA, 15 bp, Homo sapiens
tgaaagcaccaccag

SEQ ID NO: 181594 - DNA, 15 bp, Homo sapiens
ctgaaagcaccacca

SEQ ID NO: 181595 - DNA, 15 bp, Homo sapiens
cctgaaagcaccacc

SEQ ID NO: 181596 - DNA, 15 bp, Homo sapiens
gcctgaaagcaccac

SEQ ID NO: 181597 - DNA, 15 bp, Homo sapiens
ggcctgaaagcacca

SEQ ID NO: 181598 - DNA, 15 bp, Homo sapiens
aggcctgaaagcacc

SEQ ID NO: 181599 - DNA, 15 bp, Homo sapiens
caggcctgaaagcac

SEQ ID NO: 181600 - DNA, 15 bp, Homo sapiens
gcaggcctgaaagca

SEQ ID NO: 181601 - DNA, 15 bp, Homo sapiens
ggcaggcctgaaagc

SEQ ID NO: 181602 - DNA, 15 bp, Homo sapiens
tggcaggcctgaaag

SEQ ID NO: 181603 - DNA, 15 bp, Homo sapiens
gtggcaggcctgaaa

SEQ ID NO: 181604 - DNA, 15 bp, Homo sapiens
tgtggcaggcctgaa

SEQ ID NO: 181605 - DNA, 15 bp, Homo sapiens
ctgtggcaggcctga

SEQ ID NO: 181606 - DNA, 15 bp, Homo sapiens
tctgtggcaggcctg

SEQ ID NO: 181607 - DNA, 15 bp, Homo sapiens
ttctgtggcaggcct

SEQ ID NO: 181608 - DNA, 15 bp, Homo sapiens
cttctgtggcaggcc

SEQ ID NO: 181609 - DNA, 15 bp, Homo sapiens
acttctgtggcaggc

SEQ ID NO: 181610 - DNA, 15 bp, Homo sapiens
cacttctgtggcagg

SEQ ID NO: 181611 - DNA, 15 bp, Homo sapiens
tcacttctgtggcag

SEQ ID NO: 181612 - DNA, 15 bp, Homo sapiens
gtcacttctgtggca

SEQ ID NO: 181613 - DNA, 15 bp, Homo sapiens
ggtcacttctgtggc

SEQ ID NO: 181614 - DNA, 15 bp, Homo sapiens
gggtcacttctgtgg

SEQ ID NO: 181615 - DNA, 15 bp, Homo sapiens
agggtcacttctgtg

SEQ ID NO: 181616 - DNA, 15 bp, Homo sapiens
cagggtcacttctgt

SEQ ID NO: 181617 - DNA, 15 bp, Homo sapiens
tcagggtcacttctg

SEQ ID NO: 181618 - DNA, 15 bp, Homo sapiens
ctcagggtcacttct

SEQ ID NO: 181619 - DNA, 15 bp, Homo sapiens
actcagggtcacttc

SEQ ID NO: 181620 - DNA, 15 bp, Homo sapiens
aactcagggtcactt

SEQ ID NO: 181621 - DNA, 15 bp, Homo sapiens
caactcagggtcact

SEQ ID NO: 181622 - DNA, 15 bp, Homo sapiens
ccaactcagggtcac

SEQ ID NO: 181623 - DNA, 15 bp, Homo sapiens
gccaactcagggtca

SEQ ID NO: 181624 - DNA, 15 bp, Homo sapiens
agccaactcagggtc

SEQ ID NO: 181625 - DNA, 15 bp, Homo sapiens
gagccaactcagggt

SEQ ID NO: 181626 - DNA, 15 bp, Homo sapiens
agagccaactcaggg

SEQ ID NO: 181627 - DNA, 15 bp, Homo sapiens
cagagccaactcagg

SEQ ID NO: 181628 - DNA, 15 bp, Homo sapiens
ccagagccaactcag

SEQ ID NO: 181629 - DNA, 15 bp, Homo sapiens
gccagagccaactca

SEQ ID NO: 181630 - DNA, 15 bp, Homo sapiens
agccagagccaactc

SEQ ID NO: 181631 - DNA, 15 bp, Homo sapiens
gagccagagccaact

SEQ ID NO: 181632 - DNA, 15 bp, Homo sapiens
agagccagagccaac

SEQ ID NO: 181633 - DNA, 15 bp, Homo sapiens
tagagccagagccaa

SEQ ID NO: 181634 - DNA, 15 bp, Homo sapiens
ttagagccagagcca

SEQ ID NO: 181635 - DNA, 15 bp, Homo sapiens
attagagccagagcc

SEQ ID NO: 181636 - DNA, 15 bp, Homo sapiens
cattagagccagagc

SEQ ID NO: 181637 - DNA, 15 bp, Homo sapiens
acattagagccagag

SEQ ID NO: 181638 - DNA, 15 bp, Homo sapiens
gacattagagccaga

SEQ ID NO: 181639 - DNA, 15 bp, Homo sapiens
agacattagagccag

SEQ ID NO: 181640 - DNA, 15 bp, Homo sapiens
cagacattagagcca

SEQ ID NO: 181641 - DNA, 15 bp, Homo sapiens
tcagacattagagcc

SEQ ID NO: 181642 - DNA, 15 bp, Homo sapiens
ctcagacattagagc

SEQ ID NO: 181643 - DNA, 15 bp, Homo sapiens
tctcagacattagag

SEQ ID NO: 181644 - DNA, 15 bp, Homo sapiens
ctctcagacattaga

SEQ ID NO: 181645 - DNA, 15 bp, Homo sapiens
actctcagacattag

SEQ ID NO: 181646 - DNA, 15 bp, Homo sapiens
cactctcagacatta

SEQ ID NO: 181647 - DNA, 15 bp, Homo sapiens
gcactctcagacatt

SEQ ID NO: 181648 - DNA, 15 bp, Homo sapiens
ggcactctcagacat

SEQ ID NO: 181649 - DNA, 15 bp, Homo sapiens
aggcactctcagaca

SEQ ID NO: 181650 - DNA, 15 bp, Homo sapiens
aaggcactctcagac

SEQ ID NO: 181651 - DNA, 15 bp, Homo sapiens
gaaggcactctcaga

SEQ ID NO: 181652 - DNA, 15 bp, Homo sapiens
agaaggcactctcag

SEQ ID NO: 181653 - DNA, 15 bp, Homo sapiens
aagaaggcactctca

SEQ ID NO: 181654 - DNA, 15 bp, Homo sapiens
gaagaaggcactctc

SEQ ID NO: 181655 - DNA, 15 bp, Homo sapiens
ggaagaaggcactct

SEQ ID NO: 181656 - DNA, 15 bp, Homo sapiens
gggaagaaggcactc

SEQ ID NO: 181657 - DNA, 15 bp, Homo sapiens
ggggaagaaggcact

SEQ ID NO: 181658 - DNA, 15 bp, Homo sapiens
aggggaagaaggcac

SEQ ID NO: 181659 - DNA, 15 bp, Homo sapiens
gaggggaagaaggca

SEQ ID NO: 181660 - DNA, 15 bp, Homo sapiens
agaggggaagaaggc

SEQ ID NO: 181661 - DNA, 15 bp, Homo sapiens
gagaggggaagaagg

SEQ ID NO: 181662 - DNA, 15 bp, Homo sapiens
ggagaggggaagaag

SEQ ID NO: 181663 - DNA, 15 bp, Homo sapiens
gggagaggggaagaa

SEQ ID NO: 181664 - DNA, 15 bp, Homo sapiens
ggggagaggggaaga

SEQ ID NO: 181665 - DNA, 15 bp, Homo sapiens
gggggagaggggaag

SEQ ID NO: 181666 - DNA, 15 bp, Homo sapiens
agggggagaggggaa

SEQ ID NO: 181667 - DNA, 15 bp, Homo sapiens
cagggggagagggga

SEQ ID NO: 181668 - DNA, 15 bp, Homo sapiens
acagggggagagggg

SEQ ID NO: 181669 - DNA, 15 bp, Homo sapiens
cacagggggagaggg

SEQ ID NO: 181670 - DNA, 15 bp, Homo sapiens
tcacagggggagagg

SEQ ID NO: 181671 - DNA, 15 bp, Homo sapiens
gtcacagggggagag

SEQ ID NO: 181672 - DNA, 15 bp, Homo sapiens
agtcacagggggaga

SEQ ID NO: 181673 - DNA, 15 bp, Homo sapiens
cagtcacagggggag

SEQ ID NO: 181674 - DNA, 15 bp, Homo sapiens
gcagtcacaggggga

SEQ ID NO: 181675 - DNA, 15 bp, Homo sapiens
ggcagtcacaggggg

SEQ ID NO: 181676 - DNA, 15 bp, Homo sapiens
aggcagtcacagggg

SEQ ID NO: 181677 - DNA, 15 bp, Homo sapiens
caggcagtcacaggg

SEQ ID NO: 181678 - DNA, 15 bp, Homo sapiens
gcaggcagtcacagg

SEQ ID NO: 181679 - DNA, 15 bp, Homo sapiens
tgcaggcagtcacag

SEQ ID NO: 181680 - DNA, 15 bp, Homo sapiens
ctgcaggcagtcaca

SEQ ID NO: 181681 - DNA, 15 bp, Homo sapiens
cctgcaggcagtcac

SEQ ID NO: 181682 - DNA, 15 bp, Homo sapiens
tcctgcaggcagtca

SEQ ID NO: 181683 - DNA, 15 bp, Homo sapiens
gtcctgcaggcagtc

SEQ ID NO: 181684 - DNA, 15 bp, Homo sapiens
tgtcctgcaggcagt

SEQ ID NO: 181685 - DNA, 15 bp, Homo sapiens
ctgtcctgcaggcag

SEQ ID NO: 181686 - DNA, 15 bp, Homo sapiens
gctgtcctgcaggca

SEQ ID NO: 181687 - DNA, 15 bp, Homo sapiens
cgctgtcctgcaggc

SEQ ID NO: 181688 - DNA, 15 bp, Homo sapiens
gcgctgtcctgcagg

SEQ ID NO: 181689 - DNA, 15 bp, Homo sapiens
tgcgctgtcctgcag

SEQ ID NO: 181690 - DNA, 15 bp, Homo sapiens
ttgcgctgtcctgca

SEQ ID NO: 181691 - DNA, 15 bp, Homo sapiens
attgcgctgtcctgc

SEQ ID NO: 181692 - DNA, 15 bp, Homo sapiens
aattgcgctgtcctg

SEQ ID NO: 181693 - DNA, 15 bp, Homo sapiens
gaattgcgctgtcct

SEQ ID NO: 181694 - DNA, 15 bp, Homo sapiens
ggaattgcgctgtcc

SEQ ID NO: 181695 - DNA, 15 bp, Homo sapiens
aggaattgcgctgtc

SEQ ID NO: 181696 - DNA, 15 bp, Homo sapiens
gaggaattgcgctgt

SEQ ID NO: 181697 - DNA, 15 bp, Homo sapiens
agaggaattgcgctg

SEQ ID NO: 181698 - DNA, 15 bp, Homo sapiens
cagaggaattgcgct

SEQ ID NO: 181699 - DNA, 15 bp, Homo sapiens
gcagaggaattgcgc

SEQ ID NO: 181700 - DNA, 15 bp, Homo sapiens
ggcagaggaattgcg

SEQ ID NO: 181701 - DNA, 15 bp, Homo sapiens
tggcagaggaattgc

SEQ ID NO: 181702 - DNA, 15 bp, Homo sapiens
atggcagaggaattg

SEQ ID NO: 181703 - DNA, 15 bp, Homo sapiens
aatggcagaggaatt

SEQ ID NO: 181704 - DNA, 15 bp, Homo sapiens
caatggcagaggaat

SEQ ID NO: 181705 - DNA, 15 bp, Homo sapiens
acaatggcagaggaa

SEQ ID NO: 181706 - DNA, 15 bp, Homo sapiens
cacaatggcagagga

SEQ ID NO: 181707 - DNA, 15 bp, Homo sapiens
acacaatggcagagg

SEQ ID NO: 181708 - DNA, 15 bp, Homo sapiens
tacacaatggcagag

SEQ ID NO: 181709 - DNA, 15 bp, Homo sapiens
ttacacaatggcaga

SEQ ID NO: 181710 - DNA, 15 bp, Homo sapiens
cttacacaatggcag

SEQ ID NO: 181711 - DNA, 15 bp, Homo sapiens
gcttacacaatggca

SEQ ID NO: 181712 - DNA, 15 bp, Homo sapiens
tgcttacacaatggc

SEQ ID NO: 181713 - DNA, 15 bp, Homo sapiens
ctgcttacacaatgg

SEQ ID NO: 181714 - DNA, 15 bp, Homo sapiens
gctgcttacacaatg

SEQ ID NO: 181715 - DNA, 15 bp, Homo sapiens
ggctgcttacacaat

SEQ ID NO: 181716 - DNA, 15 bp, Homo sapiens
gggctgcttacacaa

SEQ ID NO: 181717 - DNA, 15 bp, Homo sapiens
ggggctgcttacaca

SEQ ID NO: 181718 - DNA, 15 bp, Homo sapiens
gggggctgcttacac

SEQ ID NO: 181719 - DNA, 15 bp, Homo sapiens
tgggggctgcttaca

SEQ ID NO: 181720 - DNA, 15 bp, Homo sapiens
gtgggggctgcttac

SEQ ID NO: 181721 - DNA, 15 bp, Homo sapiens
tgtgggggctgctta

SEQ ID NO: 181722 - DNA, 15 bp, Homo sapiens
ctgtgggggctgctt

SEQ ID NO: 181723 - DNA, 15 bp, Homo sapiens
tctgtgggggctgct

SEQ ID NO: 181724 - DNA, 15 bp, Homo sapiens
atctgtgggggctgc

SEQ ID NO: 181725 - DNA, 15 bp, Homo sapiens
catctgtgggggctg

SEQ ID NO: 181726 - DNA, 15 bp, Homo sapiens
tcatctgtgggggct

SEQ ID NO: 181727 - DNA, 15 bp, Homo sapiens
atcatctgtgggggc

SEQ ID NO: 181728 - DNA, 15 bp, Homo sapiens
tatcatctgtggggg

SEQ ID NO: 181729 - DNA, 15 bp, Homo sapiens
gtatcatctgtgggg

SEQ ID NO: 181730 - DNA, 15 bp, Homo sapiens
agtatcatctgtggg

SEQ ID NO: 181731 - DNA, 15 bp, Homo sapiens
gagtatcatctgtgg

SEQ ID NO: 181732 - DNA, 15 bp, Homo sapiens
ggagtatcatctgtg

SEQ ID NO: 181733 - DNA, 15 bp, Homo sapiens
tggagtatcatctgt

SEQ ID NO: 181734 - DNA, 15 bp, Homo sapiens
atggagtatcatctg

SEQ ID NO: 181735 - DNA, 15 bp, Homo sapiens
catggagtatcatct

SEQ ID NO: 181736 - DNA, 15 bp, Homo sapiens
gcatggagtatcatc

SEQ ID NO: 181737 - DNA, 15 bp, Homo sapiens
agcatggagtatcat

SEQ ID NO: 181738 - DNA, 15 bp, Homo sapiens
tagcatggagtatca

SEQ ID NO: 181739 - DNA, 15 bp, Homo sapiens
ctagcatggagtatc

SEQ ID NO: 181740 - DNA, 15 bp, Homo sapiens
cctagcatggagtat

SEQ ID NO: 181741 - DNA, 15 bp, Homo sapiens
ccctagcatggagta

SEQ ID NO: 181742 - DNA, 15 bp, Homo sapiens
tccctagcatggagt

SEQ ID NO: 181743 - DNA, 15 bp, Homo sapiens
ttccctagcatggag

SEQ ID NO: 181744 - DNA, 15 bp, Homo sapiens
attccctagcatgga

SEQ ID NO: 181745 - DNA, 15 bp, Homo sapiens
aattccctagcatgg

SEQ ID NO: 181746 - DNA, 15 bp, Homo sapiens
taattccctagcatg

SEQ ID NO: 181747 - DNA, 15 bp, Homo sapiens
ttaattccctagcat

SEQ ID NO: 181748 - DNA, 15 bp, Homo sapiens
gttaattccctagca

SEQ ID NO: 181749 - DNA, 15 bp, Homo sapiens
agttaattccctagc

SEQ ID NO: 181750 - DNA, 15 bp, Homo sapiens
tagttaattccctag

SEQ ID NO: 181751 - DNA, 15 bp, Homo sapiens
gtagttaattcccta

SEQ ID NO: 181752 - DNA, 15 bp, Homo sapiens
agtagttaattccct

SEQ ID NO: 181753 - DNA, 15 bp, Homo sapiens
aagtagttaattccc

SEQ ID NO: 181754 - DNA, 15 bp, Homo sapiens
caagtagttaattcc

SEQ ID NO: 181755 - DNA, 15 bp, Homo sapiens
acaagtagttaattc

SEQ ID NO: 181756 - DNA, 15 bp, Homo sapiens
aacaagtagttaatt

SEQ ID NO: 181757 - DNA, 15 bp, Homo sapiens
caacaagtagttaat

SEQ ID NO: 181758 - DNA, 15 bp, Homo sapiens
tcaacaagtagttaa

SEQ ID NO: 181759 - DNA, 15 bp, Homo sapiens
ttcaacaagtagtta

SEQ ID NO: 181760 - DNA, 15 bp, Homo sapiens
tttcaacaagtagtt

SEQ ID NO: 181761 - DNA, 15 bp, Homo sapiens
ttttcaacaagtagt

SEQ ID NO: 181762 - DNA, 15 bp, Homo sapiens
cttttcaacaagtag

SEQ ID NO: 181763 - DNA, 15 bp, Homo sapiens
gcttttcaacaagta

SEQ ID NO: 181764 - DNA, 15 bp, Homo sapiens
tgcttttcaacaagt

SEQ ID NO: 181765 - DNA, 15 bp, Homo sapiens
gtgcttttcaacaag

SEQ ID NO: 181766 - DNA, 15 bp, Homo sapiens
agtgcttttcaacaa

SEQ ID NO: 181767 - DNA, 15 bp, Homo sapiens
aagtgcttttcaaca

SEQ ID NO: 181768 - DNA, 15 bp, Homo sapiens
caagtgcttttcaac

SEQ ID NO: 181769 - DNA, 15 bp, Homo sapiens
acaagtgcttttcaa

SEQ ID NO: 181770 - DNA, 15 bp, Homo sapiens
cacaagtgcttttca

SEQ ID NO: 181771 - DNA, 15 bp, Homo sapiens
acacaagtgcttttc

SEQ ID NO: 181772 - DNA, 15 bp, Homo sapiens
cacacaagtgctttt

SEQ ID NO: 181773 - DNA, 15 bp, Homo sapiens
acacacaagtgcttt

SEQ ID NO: 181774 - DNA, 15 bp, Homo sapiens
aacacacaagtgctt

SEQ ID NO: 181775 - DNA, 15 bp, Homo sapiens
gaacacacaagtgct

SEQ ID NO: 181776 - DNA, 15 bp, Homo sapiens
ggaacacacaagtgc

SEQ ID NO: 181777 - DNA, 15 bp, Homo sapiens
gggaacacacaagtg

SEQ ID NO: 181778 - DNA, 15 bp, Homo sapiens
ggggaacacacaagt

SEQ ID NO: 181779 - DNA, 15 bp, Homo sapiens
aggggaacacacaag

SEQ ID NO: 181780 - DNA, 15 bp, Homo sapiens
caggggaacacacaa

SEQ ID NO: 181781 - DNA, 15 bp, Homo sapiens
ccaggggaacacaca

SEQ ID NO: 181782 - DNA, 15 bp, Homo sapiens
gccaggggaacacac

SEQ ID NO: 181783 - DNA, 15 bp, Homo sapiens
agccaggggaacaca

SEQ ID NO: 181784 - DNA, 15 bp, Homo sapiens
cagccaggggaacac

SEQ ID NO: 181785 - DNA, 15 bp, Homo sapiens
tcagccaggggaaca

SEQ ID NO: 181786 - DNA, 15 bp, Homo sapiens
ctcagccaggggaac

SEQ ID NO: 181787 - DNA, 15 bp, Homo sapiens
cctcagccaggggaa

SEQ ID NO: 181788 - DNA, 15 bp, Homo sapiens
gcctcagccagggga

SEQ ID NO: 181789 - DNA, 15 bp, Homo sapiens
agcctcagccagggg

SEQ ID NO: 181790 - DNA, 15 bp, Homo sapiens
cagcctcagccaggg

SEQ ID NO: 181791 - DNA, 15 bp, Homo sapiens
tcagcctcagccagg

SEQ ID NO: 181792 - DNA, 15 bp, Homo sapiens
ttcagcctcagccag

SEQ ID NO: 181793 - DNA, 15 bp, Homo sapiens
tttcagcctcagcca

SEQ ID NO: 181794 - DNA, 15 bp, Homo sapiens
ctttcagcctcagcc

SEQ ID NO: 181795 - DNA, 15 bp, Homo sapiens
actttcagcctcagc

SEQ ID NO: 181796 - DNA, 15 bp, Homo sapiens
cactttcagcctcag

SEQ ID NO: 181797 - DNA, 15 bp, Homo sapiens
ccactttcagcctca

SEQ ID NO: 181798 - DNA, 15 bp, Homo sapiens
cccactttcagcctc

SEQ ID NO: 181799 - DNA, 15 bp, Homo sapiens
ccccactttcagcct

SEQ ID NO: 181800 - DNA, 15 bp, Homo sapiens
cccccactttcagcc

SEQ ID NO: 181801 - DNA, 15 bp, Homo sapiens
tcccccactttcagc

SEQ ID NO: 181802 - DNA, 15 bp, Homo sapiens
atcccccactttcag

SEQ ID NO: 181803 - DNA, 15 bp, Homo sapiens
gatcccccactttca

SEQ ID NO: 181804 - DNA, 15 bp, Homo sapiens
ggatcccccactttc

SEQ ID NO: 181805 - DNA, 15 bp, Homo sapiens
gggatcccccacttt

SEQ ID NO: 181806 - DNA, 15 bp, Homo sapiens
agggatcccccactt

SEQ ID NO: 181807 - DNA, 15 bp, Homo sapiens
cagggatcccccact

SEQ ID NO: 181808 - DNA, 15 bp, Homo sapiens
ccagggatcccccac

SEQ ID NO: 181809 - DNA, 15 bp, Homo sapiens
cccagggatccccca

SEQ ID NO: 181810 - DNA, 15 bp, Homo sapiens
ccccagggatccccc

SEQ ID NO: 181811 - DNA, 15 bp, Homo sapiens
tccccagggatcccc

SEQ ID NO: 181812 - DNA, 15 bp, Homo sapiens
ttccccagggatccc

SEQ ID NO: 181813 - DNA, 15 bp, Homo sapiens
cttccccagggatcc

SEQ ID NO: 181814 - DNA, 15 bp, Homo sapiens
ccttccccagggatc

SEQ ID NO: 181815 - DNA, 15 bp, Homo sapiens
cccttccccagggat

SEQ ID NO: 181816 - DNA, 15 bp, Homo sapiens
ccccttccccaggga

SEQ ID NO: 181817 - DNA, 15 bp, Homo sapiens
cccccttccccaggg

SEQ ID NO: 181818 - DNA, 15 bp, Homo sapiens
acccccttccccagg

SEQ ID NO: 181819 - DNA, 15 bp, Homo sapiens
cacccccttccccag

SEQ ID NO: 181820 - DNA, 15 bp, Homo sapiens
ccacccccttcccca

SEQ ID NO: 181821 - DNA, 15 bp, Homo sapiens
gccacccccttcccc

SEQ ID NO: 181822 - DNA, 15 bp, Homo sapiens
ggccacccccttccc

SEQ ID NO: 181823 - DNA, 15 bp, Homo sapiens
aggccacccccttcc

SEQ ID NO: 181824 - DNA, 15 bp, Homo sapiens
caggccacccccttc

SEQ ID NO: 181825 - DNA, 15 bp, Homo sapiens
ccaggccaccccctt

SEQ ID NO: 181826 - DNA, 15 bp, Homo sapiens
gccaggccaccccct

SEQ ID NO: 181827 - DNA, 15 bp, Homo sapiens
agccaggccaccccc

SEQ ID NO: 181828 - DNA, 15 bp, Homo sapiens
tagccaggccacccc

SEQ ID NO: 181829 - DNA, 15 bp, Homo sapiens
atagccaggccaccc

SEQ ID NO: 181830 - DNA, 15 bp, Homo sapiens
catagccaggccacc

SEQ ID NO: 181831 - DNA, 15 bp, Homo sapiens
ccatagccaggccac

SEQ ID NO: 181832 - DNA, 15 bp, Homo sapiens
tccatagccaggcca

SEQ ID NO: 181833 - DNA, 15 bp, Homo sapiens
atccatagccaggcc

SEQ ID NO: 181834 - DNA, 15 bp, Homo sapiens
catccatagccaggc

SEQ ID NO: 181835 - DNA, 15 bp, Homo sapiens
ccatccatagccagg

SEQ ID NO: 181836 - DNA, 15 bp, Homo sapiens
cccatccatagccag

SEQ ID NO: 181837 - DNA, 15 bp, Homo sapiens
ccccatccatagcca

SEQ ID NO: 181838 - DNA, 15 bp, Homo sapiens
tccccatccatagcc

SEQ ID NO: 181839 - DNA, 15 bp, Homo sapiens
ctccccatccatagc

SEQ ID NO: 181840 - DNA, 15 bp, Homo sapiens
tctccccatccatag

SEQ ID NO: 181841 - DNA, 15 bp, Homo sapiens
ttctccccatccata

SEQ ID NO: 181842 - DNA, 15 bp, Homo sapiens
cttctccccatccat

SEQ ID NO: 181843 - DNA, 15 bp, Homo sapiens
ccttctccccatcca

SEQ ID NO: 181844 - DNA, 15 bp, Homo sapiens
gccttctccccatcc

SEQ ID NO: 181845 - DNA, 15 bp, Homo sapiens
ggccttctccccatc

SEQ ID NO: 181846 - DNA, 15 bp, Homo sapiens
gggccttctccccat

SEQ ID NO: 181847 - DNA, 15 bp, Homo sapiens
agggccttctcccca

SEQ ID NO: 181848 - DNA, 15 bp, Homo sapiens
gagggccttctcccc

SEQ ID NO: 181849 - DNA, 15 bp, Homo sapiens
agagggccttctccc

SEQ ID NO: 181850 - DNA, 15 bp, Homo sapiens
cagagggccttctcc

SEQ ID NO: 181851 - DNA, 15 bp, Homo sapiens
ccagagggccttctc

SEQ ID NO: 181852 - DNA, 15 bp, Homo sapiens
cccagagggccttct

SEQ ID NO: 181853 - DNA, 15 bp, Homo sapiens
ccccagagggccttc

SEQ ID NO: 181854 - DNA, 15 bp, Homo sapiens
tccccagagggcctt

SEQ ID NO: 181855 - DNA, 15 bp, Homo sapiens
ttccccagagggcct

SEQ ID NO: 181856 - DNA, 15 bp, Homo sapiens
tttccccagagggcc

SEQ ID NO: 181857 - DNA, 15 bp, Homo sapiens
atttccccagagggc

SEQ ID NO: 181858 - DNA, 15 bp, Homo sapiens
catttccccagaggg

SEQ ID NO: 181859 - DNA, 15 bp, Homo sapiens
tcatttccccagagg

SEQ ID NO: 181860 - DNA, 15 bp, Homo sapiens
ttcatttccccagag

SEQ ID NO: 181861 - DNA, 15 bp, Homo sapiens
cttcatttccccaga

SEQ ID NO: 181862 - DNA, 15 bp, Homo sapiens
tcttcatttccccag

SEQ ID NO: 181863 - DNA, 15 bp, Homo sapiens
ctcttcatttcccca

SEQ ID NO: 181864 - DNA, 15 bp, Homo sapiens
cctcttcatttcccc

SEQ ID NO: 181865 - DNA, 15 bp, Homo sapiens
ccctcttcatttccc

SEQ ID NO: 181866 - DNA, 15 bp, Homo sapiens
cccctcttcatttcc

SEQ ID NO: 181867 - DNA, 15 bp, Homo sapiens
tcccctcttcatttc

SEQ ID NO: 181868 - DNA, 15 bp, Homo sapiens
ctcccctcttcattt

SEQ ID NO: 181869 - DNA, 15 bp, Homo sapiens
gctcccctcttcatt

SEQ ID NO: 181870 - DNA, 15 bp, Homo sapiens
ggctcccctcttcat

SEQ ID NO: 181871 - DNA, 15 bp, Homo sapiens
gggctcccctcttca

SEQ ID NO: 181872 - DNA, 15 bp, Homo sapiens
ggggctcccctcttc

SEQ ID NO: 181873 - DNA, 15 bp, Homo sapiens
tggggctcccctctt

SEQ ID NO: 181874 - DNA, 15 bp, Homo sapiens
ttggggctcccctct

SEQ ID NO: 181875 - DNA, 15 bp, Homo sapiens
cttggggctcccctc

SEQ ID NO: 181876 - DNA, 15 bp, Homo sapiens
gcttggggctcccct

SEQ ID NO: 181877 - DNA, 15 bp, Homo sapiens
ggcttggggctcccc

SEQ ID NO: 181878 - DNA, 15 bp, Homo sapiens
tggcttggggctccc

SEQ ID NO: 181879 - DNA, 15 bp, Homo sapiens
ctggcttggggctcc

SEQ ID NO: 181880 - DNA, 15 bp, Homo sapiens
actggcttggggctc

SEQ ID NO: 181881 - DNA, 15 bp, Homo sapiens
aactggcttggggct

SEQ ID NO: 181882 - DNA, 15 bp, Homo sapiens
gaactggcttggggc

SEQ ID NO: 181883 - DNA, 15 bp, Homo sapiens
cgaactggcttgggg

SEQ ID NO: 181884 - DNA, 15 bp, Homo sapiens
acgaactggcttggg

SEQ ID NO: 181885 - DNA, 15 bp, Homo sapiens
gacgaactggcttgg

SEQ ID NO: 181886 - DNA, 15 bp, Homo sapiens
ggacgaactggcttg

SEQ ID NO: 181887 - DNA, 15 bp, Homo sapiens
aggacgaactggctt

SEQ ID NO: 181888 - DNA, 15 bp, Homo sapiens
caggacgaactggct

SEQ ID NO: 181889 - DNA, 15 bp, Homo sapiens
acaggacgaactggc

SEQ ID NO: 181890 - DNA, 15 bp, Homo sapiens
cacaggacgaactgg

SEQ ID NO: 181891 - DNA, 15 bp, Homo sapiens
ccacaggacgaactg

SEQ ID NO: 181892 - DNA, 15 bp, Homo sapiens
cccacaggacgaact

SEQ ID NO: 181893 - DNA, 15 bp, Homo sapiens
tcccacaggacgaac

SEQ ID NO: 181894 - DNA, 15 bp, Homo sapiens
ctcccacaggacgaa

SEQ ID NO: 181895 - DNA, 15 bp, Homo sapiens
gctcccacaggacga

SEQ ID NO: 181896 - DNA, 15 bp, Homo sapiens
agctcccacaggacg

SEQ ID NO: 181897 - DNA, 15 bp, Homo sapiens
cagctcccacaggac

SEQ ID NO: 181898 - DNA, 15 bp, Homo sapiens
ccagctcccacagga

SEQ ID NO: 181899 - DNA, 15 bp, Homo sapiens
gccagctcccacagg

SEQ ID NO: 181900 - DNA, 15 bp, Homo sapiens
ggccagctcccacag

SEQ ID NO: 181901 - DNA, 15 bp, Homo sapiens
gggccagctcccaca

SEQ ID NO: 181902 - DNA, 15 bp, Homo sapiens
tgggccagctcccac

SEQ ID NO: 181903 - DNA, 15 bp, Homo sapiens
ctgggccagctccca

SEQ ID NO: 181904 - DNA, 15 bp, Homo sapiens
tctgggccagctccc

SEQ ID NO: 181905 - DNA, 15 bp, Homo sapiens
atctgggccagctcc

SEQ ID NO: 181906 - DNA, 15 bp, Homo sapiens
aatctgggccagctc

SEQ ID NO: 181907 - DNA, 15 bp, Homo sapiens
taatctgggccagct

SEQ ID NO: 181908 - DNA, 15 bp, Homo sapiens
ataatctgggccagc

SEQ ID NO: 181909 - DNA, 15 bp, Homo sapiens
cataatctgggccag

SEQ ID NO: 181910 - DNA, 15 bp, Homo sapiens
ccataatctgggcca

SEQ ID NO: 181911 - DNA, 15 bp, Homo sapiens
accataatctgggcc

SEQ ID NO: 181912 - DNA, 15 bp, Homo sapiens
aaccataatctgggc

SEQ ID NO: 181913 - DNA, 15 bp, Homo sapiens
gaaccataatctggg

SEQ ID NO: 181914 - DNA, 15 bp, Homo sapiens
tgaaccataatctgg

SEQ ID NO: 181915 - DNA, 15 bp, Homo sapiens
atgaaccataatctg

SEQ ID NO: 181916 - DNA, 15 bp, Homo sapiens
tatgaaccataatct

SEQ ID NO: 181917 - DNA, 15 bp, Homo sapiens
ttatgaaccataatc

SEQ ID NO: 181918 - DNA, 15 bp, Homo sapiens
attatgaaccataat

SEQ ID NO: 181919 - DNA, 15 bp, Homo sapiens
cattatgaaccataa

SEQ ID NO: 181920 - DNA, 15 bp, Homo sapiens
acattatgaaccata

SEQ ID NO: 181921 - DNA, 15 bp, Homo sapiens
tacattatgaaccat

SEQ ID NO: 181922 - DNA, 15 bp, Homo sapiens
ttacattatgaacca

SEQ ID NO: 181923 - DNA, 15 bp, Homo sapiens
tttacattatgaacc

SEQ ID NO: 181924 - DNA, 15 bp, Homo sapiens
atttacattatgaac

SEQ ID NO: 181925 - DNA, 15 bp, Homo sapiens
aatttacattatgaa

SEQ ID NO: 181926 - DNA, 15 bp, Homo sapiens
aaatttacattatga

SEQ ID NO: 181927 - DNA, 15 bp, Homo sapiens
caaatttacattatg

SEQ ID NO: 181928 - DNA, 15 bp, Homo sapiens
ccaaatttacattat

SEQ ID NO: 181929 - DNA, 15 bp, Homo sapiens
cccaaatttacatta

SEQ ID NO: 181930 - DNA, 15 bp, Homo sapiens
tcccaaatttacatt

SEQ ID NO: 181931 - DNA, 15 bp, Homo sapiens
ctcccaaatttacat

SEQ ID NO: 181932 - DNA, 15 bp, Homo sapiens
actcccaaatttaca

SEQ ID NO: 181933 - DNA, 15 bp, Homo sapiens
tactcccaaatttac

SEQ ID NO: 181934 - DNA, 15 bp, Homo sapiens
atactcccaaattta

SEQ ID NO: 181935 - DNA, 15 bp, Homo sapiens
catactcccaaattt

SEQ ID NO: 181936 - DNA, 15 bp, Homo sapiens
gcatactcccaaatt

SEQ ID NO: 181937 - DNA, 15 bp, Homo sapiens
ggcatactcccaaat

SEQ ID NO: 181938 - DNA, 15 bp, Homo sapiens
tggcatactcccaaa

SEQ ID NO: 181939 - DNA, 15 bp, Homo sapiens
ctggcatactcccaa

SEQ ID NO: 181940 - DNA, 15 bp, Homo sapiens
cctggcatactccca

SEQ ID NO: 181941 - DNA, 15 bp, Homo sapiens
ccctggcatactccc

SEQ ID NO: 181942 - DNA, 15 bp, Homo sapiens
gccctggcatactcc

SEQ ID NO: 181943 - DNA, 15 bp, Homo sapiens
ggccctggcatactc

SEQ ID NO: 181944 - DNA, 15 bp, Homo sapiens
tggccctggcatact

SEQ ID NO: 181945 - DNA, 15 bp, Homo sapiens
atggccctggcatac

SEQ ID NO: 181946 - DNA, 15 bp, Homo sapiens
tatggccctggcata

SEQ ID NO: 181947 - DNA, 15 bp, Homo sapiens
atatggccctggcat

SEQ ID NO: 181948 - DNA, 15 bp, Homo sapiens
aatatggccctggca

SEQ ID NO: 181949 - DNA, 15 bp, Homo sapiens
taatatggccctggc

SEQ ID NO: 181950 - DNA, 15 bp, Homo sapiens
ttaatatggccctgg

SEQ ID NO: 181951 - DNA, 15 bp, Homo sapiens
attaatatggccctg

SEQ ID NO: 181952 - DNA, 15 bp, Homo sapiens
tattaatatggccct

SEQ ID NO: 181953 - DNA, 15 bp, Homo sapiens
gtattaatatggccc

SEQ ID NO: 181954 - DNA, 15 bp, Homo sapiens
agtattaatatggcc

SEQ ID NO: 181955 - DNA, 15 bp, Homo sapiens
cagtattaatatggc

SEQ ID NO: 181956 - DNA, 15 bp, Homo sapiens
gcagtattaatatgg

SEQ ID NO: 181957 - DNA, 15 bp, Homo sapiens
tgcagtattaatatg

SEQ ID NO: 181958 - DNA, 15 bp, Homo sapiens
atgcagtattaatat

SEQ ID NO: 181959 - DNA, 15 bp, Homo sapiens
catgcagtattaata

SEQ ID NO: 181960 - DNA, 15 bp, Homo sapiens
tcatgcagtattaat

SEQ ID NO: 181961 - DNA, 15 bp, Homo sapiens
ctcatgcagtattaa

SEQ ID NO: 181962 - DNA, 15 bp, Homo sapiens
cctcatgcagtatta

SEQ ID NO: 181963 - DNA, 15 bp, Homo sapiens
gcctcatgcagtatt

SEQ ID NO: 181964 - DNA, 15 bp, Homo sapiens
tgcctcatgcagtat

SEQ ID NO: 181965 - DNA, 15 bp, Homo sapiens
ctgcctcatgcagta

SEQ ID NO: 181966 - DNA, 15 bp, Homo sapiens
actgcctcatgcagt

SEQ ID NO: 181967 - DNA, 15 bp, Homo sapiens
tactgcctcatgcag

SEQ ID NO: 181968 - DNA, 15 bp, Homo sapiens
ttactgcctcatgca

SEQ ID NO: 181969 - DNA, 15 bp, Homo sapiens
cttactgcctcatgc

SEQ ID NO: 181970 - DNA, 15 bp, Homo sapiens
ccttactgcctcatg

SEQ ID NO: 181971 - DNA, 15 bp, Homo sapiens
cccttactgcctcat

SEQ ID NO: 181972 - DNA, 15 bp, Homo sapiens
ccccttactgcctca

SEQ ID NO: 181973 - DNA, 15 bp, Homo sapiens
tccccttactgcctc

SEQ ID NO: 181974 - DNA, 15 bp, Homo sapiens
gtccccttactgcct

SEQ ID NO: 181975 - DNA, 15 bp, Homo sapiens
ggtccccttactgcc

SEQ ID NO: 181976 - DNA, 15 bp, Homo sapiens
aggtccccttactgc

SEQ ID NO: 181977 - DNA, 15 bp, Homo sapiens
aaggtccccttactg

SEQ ID NO: 181978 - DNA, 15 bp, Homo sapiens
caaggtccccttact

SEQ ID NO: 181979 - DNA, 15 bp, Homo sapiens
ccaaggtccccttac

SEQ ID NO: 181980 - DNA, 15 bp, Homo sapiens
cccaaggtcccctta

SEQ ID NO: 181981 - DNA, 15 bp, Homo sapiens
gcccaaggtcccctt

SEQ ID NO: 181982 - DNA, 15 bp, Homo sapiens
agcccaaggtcccct

SEQ ID NO: 181983 - DNA, 15 bp, Homo sapiens
aagcccaaggtcccc

SEQ ID NO: 181984 - DNA, 15 bp, Homo sapiens
caagcccaaggtccc

SEQ ID NO: 181985 - DNA, 15 bp, Homo sapiens
tcaagcccaaggtcc

SEQ ID NO: 181986 - DNA, 15 bp, Homo sapiens
ttcaagcccaaggtc

SEQ ID NO: 181987 - DNA, 15 bp, Homo sapiens
tttcaagcccaaggt

SEQ ID NO: 181988 - DNA, 15 bp, Homo sapiens
gtttcaagcccaagg

SEQ ID NO: 181989 - DNA, 15 bp, Homo sapiens
ggtttcaagcccaag

SEQ ID NO: 181990 - DNA, 15 bp, Homo sapiens
gggtttcaagcccaa

SEQ ID NO: 181991 - DNA, 15 bp, Homo sapiens
cgggtttcaagccca

SEQ ID NO: 181992 - DNA, 15 bp, Homo sapiens
tcgggtttcaagccc

SEQ ID NO: 181993 - DNA, 15 bp, Homo sapiens
ctcgggtttcaagcc

SEQ ID NO: 181994 - DNA, 15 bp, Homo sapiens
gctcgggtttcaagc

SEQ ID NO: 181995 - DNA, 15 bp, Homo sapiens
agctcgggtttcaag

SEQ ID NO: 181996 - DNA, 15 bp, Homo sapiens
cagctcgggtttcaa

SEQ ID NO: 181997 - DNA, 15 bp, Homo sapiens
acagctcgggtttca

SEQ ID NO: 181998 - DNA, 15 bp, Homo sapiens
cacagctcgggtttc

SEQ ID NO: 181999 - DNA, 15 bp, Homo sapiens
ccacagctcgggttt

SEQ ID NO: 182000 - DNA, 15 bp, Homo sapiens
gccacagctcgggtt

SEQ ID NO: 182001 - DNA, 15 bp, Homo sapiens
ggccacagctcgggt

SEQ ID NO: 182002 - DNA, 15 bp, Homo sapiens
aggccacagctcggg

SEQ ID NO: 182003 - DNA, 15 bp, Homo sapiens
taggccacagctcgg

SEQ ID NO: 182004 - DNA, 15 bp, Homo sapiens
ctaggccacagctcg

SEQ ID NO: 182005 - DNA, 15 bp, Homo sapiens
tctaggccacagctc

SEQ ID NO: 182006 - DNA, 15 bp, Homo sapiens
ttctaggccacagct

SEQ ID NO: 182007 - DNA, 15 bp, Homo sapiens
attctaggccacagc

SEQ ID NO: 182008 - DNA, 15 bp, Homo sapiens
cattctaggccacag

SEQ ID NO: 182009 - DNA, 15 bp, Homo sapiens
ccattctaggccaca

SEQ ID NO: 182010 - DNA, 15 bp, Homo sapiens
tccattctaggccac

SEQ ID NO: 182011 - DNA, 15 bp, Homo sapiens
ttccattctaggcca

SEQ ID NO: 182012 - DNA, 15 bp, Homo sapiens
gttccattctaggcc

SEQ ID NO: 182013 - DNA, 15 bp, Homo sapiens
agttccattctaggc

SEQ ID NO: 182014 - DNA, 15 bp, Homo sapiens
cagttccattctagg

SEQ ID NO: 182015 - DNA, 15 bp, Homo sapiens
tcagttccattctag

SEQ ID NO: 182016 - DNA, 15 bp, Homo sapiens
ttcagttccattcta

SEQ ID NO: 182017 - DNA, 15 bp, Homo sapiens
gttcagttccattct

SEQ ID NO: 182018 - DNA, 15 bp, Homo sapiens
tgttcagttccattc

SEQ ID NO: 182019 - DNA, 15 bp, Homo sapiens
ctgttcagttccatt

SEQ ID NO: 182020 - DNA, 15 bp, Homo sapiens
actgttcagttccat

SEQ ID NO: 182021 - DNA, 15 bp, Homo sapiens
cactgttcagttcca

SEQ ID NO: 182022 - DNA, 15 bp, Homo sapiens
ccactgttcagttcc

SEQ ID NO: 182023 - DNA, 15 bp, Homo sapiens
cccactgttcagttc

SEQ ID NO: 182024 - DNA, 15 bp, Homo sapiens
gcccactgttcagtt

SEQ ID NO: 182025 - DNA, 15 bp, Homo sapiens
ggcccactgttcagt

SEQ ID NO: 182026 - DNA, 15 bp, Homo sapiens
aggcccactgttcag

SEQ ID NO: 182027 - DNA, 15 bp, Homo sapiens
aaggcccactgttca

SEQ ID NO: 182028 - DNA, 15 bp, Homo sapiens
caaggcccactgttc

SEQ ID NO: 182029 - DNA, 15 bp, Homo sapiens
acaaggcccactgtt

SEQ ID NO: 182030 - DNA, 15 bp, Homo sapiens
gacaaggcccactgt

SEQ ID NO: 182031 - DNA, 15 bp, Homo sapiens
agacaaggcccactg

SEQ ID NO: 182032 - DNA, 15 bp, Homo sapiens
aagacaaggcccact

SEQ ID NO: 182033 - DNA, 15 bp, Homo sapiens
taagacaaggcccac

SEQ ID NO: 182034 - DNA, 15 bp, Homo sapiens
ttaagacaaggccca

SEQ ID NO: 182035 - DNA, 15 bp, Homo sapiens
tttaagacaaggccc

SEQ ID NO: 182036 - DNA, 15 bp, Homo sapiens
ctttaagacaaggcc

SEQ ID NO: 182037 - DNA, 15 bp, Homo sapiens
cctttaagacaaggc

SEQ ID NO: 182038 - DNA, 15 bp, Homo sapiens
ccctttaagacaagg

SEQ ID NO: 182039 - DNA, 15 bp, Homo sapiens
tccctttaagacaag

SEQ ID NO: 182040 - DNA, 15 bp, Homo sapiens
gtccctttaagacaa

SEQ ID NO: 182041 - DNA, 15 bp, Homo sapiens
tgtccctttaagaca

SEQ ID NO: 182042 - DNA, 15 bp, Homo sapiens
atgtccctttaagac

SEQ ID NO: 182043 - DNA, 15 bp, Homo sapiens
catgtccctttaaga

SEQ ID NO: 182044 - DNA, 15 bp, Homo sapiens
tcatgtccctttaag

SEQ ID NO: 182045 - DNA, 15 bp, Homo sapiens
gtcatgtccctttaa

SEQ ID NO: 182046 - DNA, 15 bp, Homo sapiens
cgtcatgtcccttta

SEQ ID NO: 182047 - DNA, 15 bp, Homo sapiens
tcgtcatgtcccttt

SEQ ID NO: 182048 - DNA, 15 bp, Homo sapiens
ctcgtcatgtccctt

SEQ ID NO: 182049 - DNA, 15 bp, Homo sapiens
gctcgtcatgtccct

SEQ ID NO: 182050 - DNA, 15 bp, Homo sapiens
agctcgtcatgtccc

SEQ ID NO: 182051 - DNA, 15 bp, Homo sapiens
gagctcgtcatgtcc

SEQ ID NO: 182052 - DNA, 15 bp, Homo sapiens
ggagctcgtcatgtc

SEQ ID NO: 182053 - DNA, 15 bp, Homo sapiens
gggagctcgtcatgt

SEQ ID NO: 182054 - DNA, 15 bp, Homo sapiens
tgggagctcgtcatg

SEQ ID NO: 182055 - DNA, 15 bp, Homo sapiens
ctgggagctcgtcat

SEQ ID NO: 182056 - DNA, 15 bp, Homo sapiens
tctgggagctcgtca

SEQ ID NO: 182057 - DNA, 15 bp, Homo sapiens
ttctgggagctcgtc

SEQ ID NO: 182058 - DNA, 15 bp, Homo sapiens
cttctgggagctcgt

SEQ ID NO: 182059 - DNA, 15 bp, Homo sapiens
acttctgggagctcg

SEQ ID NO: 182060 - DNA, 15 bp, Homo sapiens
tacttctgggagctc

SEQ ID NO: 182061 - DNA, 15 bp, Homo sapiens
atacttctgggagct

SEQ ID NO: 182062 - DNA, 15 bp, Homo sapiens
catacttctgggagc

SEQ ID NO: 182063 - DNA, 15 bp, Homo sapiens
acatacttctgggag

SEQ ID NO: 182064 - DNA, 15 bp, Homo sapiens
cacatacttctggga

SEQ ID NO: 182065 - DNA, 15 bp, Homo sapiens
acacatacttctggg

SEQ ID NO: 182066 - DNA, 15 bp, Homo sapiens
gacacatacttctgg

SEQ ID NO: 182067 - DNA, 15 bp, Homo sapiens
cgacacatacttctg

SEQ ID NO: 182068 - DNA, 15 bp, Homo sapiens
ccgacacatacttct

SEQ ID NO: 182069 - DNA, 15 bp, Homo sapiens
gccgacacatacttc

SEQ ID NO: 182070 - DNA, 15 bp, Homo sapiens
tgccgacacatactt

SEQ ID NO: 182071 - DNA, 15 bp, Homo sapiens
atgccgacacatact

SEQ ID NO: 182072 - DNA, 15 bp, Homo sapiens
aatgccgacacatac

SEQ ID NO: 182073 - DNA, 15 bp, Homo sapiens
taatgccgacacata

SEQ ID NO: 182074 - DNA, 15 bp, Homo sapiens
ataatgccgacacat

SEQ ID NO: 182075 - DNA, 15 bp, Homo sapiens
aataatgccgacaca

SEQ ID NO: 182076 - DNA, 15 bp, Homo sapiens
aaataatgccgacac

SEQ ID NO: 182077 - DNA, 15 bp, Homo sapiens
gaaataatgccgaca

SEQ ID NO: 182078 - DNA, 15 bp, Homo sapiens
ggaaataatgccgac

SEQ ID NO: 182079 - DNA, 15 bp, Homo sapiens
gggaaataatgccga

SEQ ID NO: 182080 - DNA, 15 bp, Homo sapiens
agggaaataatgccg

SEQ ID NO: 182081 - DNA, 15 bp, Homo sapiens
gagggaaataatgcc

SEQ ID NO: 182082 - DNA, 15 bp, Homo sapiens
agagggaaataatgc

SEQ ID NO: 182083 - DNA, 15 bp, Homo sapiens
tagagggaaataatg

SEQ ID NO: 182084 - DNA, 15 bp, Homo sapiens
ttagagggaaataat

SEQ ID NO: 182085 - DNA, 15 bp, Homo sapiens
attagagggaaataa

SEQ ID NO: 182086 - DNA, 15 bp, Homo sapiens
cattagagggaaata

SEQ ID NO: 182087 - DNA, 15 bp, Homo sapiens
gcattagagggaaat

SEQ ID NO: 182088 - DNA, 15 bp, Homo sapiens
agcattagagggaaa

SEQ ID NO: 182089 - DNA, 15 bp, Homo sapiens
cagcattagagggaa

SEQ ID NO: 182090 - DNA, 15 bp, Homo sapiens
acagcattagaggga

SEQ ID NO: 182091 - DNA, 15 bp, Homo sapiens
aacagcattagaggg

SEQ ID NO: 182092 - DNA, 15 bp, Homo sapiens
aaacagcattagagg

SEQ ID NO: 182093 - DNA, 15 bp, Homo sapiens
taaacagcattagag

SEQ ID NO: 182094 - DNA, 15 bp, Homo sapiens
gtaaacagcattaga

SEQ ID NO: 182095 - DNA, 15 bp, Homo sapiens
agtaaacagcattag

SEQ ID NO: 182096 - DNA, 15 bp, Homo sapiens
tagtaaacagcatta

SEQ ID NO: 182097 - DNA, 15 bp, Homo sapiens
atagtaaacagcatt

SEQ ID NO: 182098 - DNA, 15 bp, Homo sapiens
tatagtaaacagcat

SEQ ID NO: 182099 - DNA, 15 bp, Homo sapiens
atatagtaaacagca

SEQ ID NO: 182100 - DNA, 15 bp, Homo sapiens
aatatagtaaacagc

SEQ ID NO: 182101 - DNA, 15 bp, Homo sapiens
aaatatagtaaacag

SEQ ID NO: 182102 - DNA, 15 bp, Homo sapiens
caaatatagtaaaca

SEQ ID NO: 182103 - DNA, 15 bp, Homo sapiens
acaaatatagtaaac

SEQ ID NO: 182104 - DNA, 15 bp, Homo sapiens
tacaaatatagtaaa

SEQ ID NO: 182105 - DNA, 15 bp, Homo sapiens
gtacaaatatagtaa

SEQ ID NO: 182106 - DNA, 15 bp, Homo sapiens
tgtacaaatatagta

SEQ ID NO: 182107 - DNA, 15 bp, Homo sapiens
gtgtacaaatatagt

SEQ ID NO: 182108 - DNA, 15 bp, Homo sapiens
tgtgtacaaatatag

SEQ ID NO: 182109 - DNA, 15 bp, Homo sapiens
ttgtgtacaaatata

SEQ ID NO: 182110 - DNA, 15 bp, Homo sapiens
attgtgtacaaatat

SEQ ID NO: 182111 - DNA, 15 bp, Homo sapiens
cattgtgtacaaata

SEQ ID NO: 182112 - DNA, 15 bp, Homo sapiens
gcattgtgtacaaat

SEQ ID NO: 182113 - DNA, 15 bp, Homo sapiens
ggcattgtgtacaaa

SEQ ID NO: 182114 - DNA, 15 bp, Homo sapiens
gggcattgtgtacaa

SEQ ID NO: 182115 - DNA, 15 bp, Homo sapiens
ggggcattgtgtaca

SEQ ID NO: 182116 - DNA, 15 bp, Homo sapiens
gggggcattgtgtac

SEQ ID NO: 182117 - DNA, 15 bp, Homo sapiens
tgggggcattgtgta

SEQ ID NO: 182118 - DNA, 15 bp, Homo sapiens
ttgggggcattgtgt

SEQ ID NO: 182119 - DNA, 15 bp, Homo sapiens
tttgggggcattgtg

SEQ ID NO: 182120 - DNA, 15 bp, Homo sapiens
ctttgggggcattgt

SEQ ID NO: 182121 - DNA, 15 bp, Homo sapiens
cctttgggggcattg

SEQ ID NO: 182122 - DNA, 15 bp, Homo sapiens
tcctttgggggcatt

SEQ ID NO: 182123 - DNA, 15 bp, Homo sapiens
atcctttgggggcat

SEQ ID NO: 182124 - DNA, 15 bp, Homo sapiens
aatcctttgggggca

SEQ ID NO: 182125 - DNA, 15 bp, Homo sapiens
aaatcctttgggggc

SEQ ID NO: 182126 - DNA, 15 bp, Homo sapiens
caaatcctttggggg

SEQ ID NO: 182127 - DNA, 15 bp, Homo sapiens
tcaaatcctttgggg

SEQ ID NO: 182128 - DNA, 15 bp, Homo sapiens
ttcaaatcctttggg

SEQ ID NO: 182129 - DNA, 15 bp, Homo sapiens
tttcaaatcctttgg

SEQ ID NO: 182130 - DNA, 15 bp, Homo sapiens
ttttcaaatcctttg

SEQ ID NO: 182131 - DNA, 15 bp, Homo sapiens
cttttcaaatccttt

SEQ ID NO: 182132 - DNA, 15 bp, Homo sapiens
ccttttcaaatcctt

SEQ ID NO: 182133 - DNA, 15 bp, Homo sapiens
tccttttcaaatcct

SEQ ID NO: 182134 - DNA, 15 bp, Homo sapiens
ttccttttcaaatcc

SEQ ID NO: 182135 - DNA, 15 bp, Homo sapiens
tttccttttcaaatc

SEQ ID NO: 182136 - DNA, 15 bp, Homo sapiens
atttccttttcaaat

SEQ ID NO: 182137 - DNA, 15 bp, Homo sapiens
catttccttttcaaa

SEQ ID NO: 182138 - DNA, 15 bp, Homo sapiens
ccatttccttttcaa

SEQ ID NO: 182139 - DNA, 15 bp, Homo sapiens
gccatttccttttca

SEQ ID NO: 182140 - DNA, 15 bp, Homo sapiens
tgccatttccttttc

SEQ ID NO: 182141 - DNA, 15 bp, Homo sapiens
ttgccatttcctttt

SEQ ID NO: 182142 - DNA, 15 bp, Homo sapiens
attgccatttccttt

SEQ ID NO: 182143 - DNA, 15 bp, Homo sapiens
cattgccatttcctt

SEQ ID NO: 182144 - DNA, 15 bp, Homo sapiens
acattgccatttcct

SEQ ID NO: 182145 - DNA, 15 bp, Homo sapiens
tacattgccatttcc

SEQ ID NO: 182146 - DNA, 15 bp, Homo sapiens
ttacattgccatttc

SEQ ID NO: 182147 - DNA, 15 bp, Homo sapiens
attacattgccattt

SEQ ID NO: 182148 - DNA, 15 bp, Homo sapiens
tattacattgccatt

SEQ ID NO: 182149 - DNA, 15 bp, Homo sapiens
ttattacattgccat

SEQ ID NO: 182150 - DNA, 15 bp, Homo sapiens
cttattacattgcca

SEQ ID NO: 182151 - DNA, 15 bp, Homo sapiens
tcttattacattgcc

SEQ ID NO: 182152 - DNA, 15 bp, Homo sapiens
ctcttattacattgc

SEQ ID NO: 182153 - DNA, 15 bp, Homo sapiens
tctcttattacattg

SEQ ID NO: 182154 - DNA, 15 bp, Homo sapiens
ctctcttattacatt

SEQ ID NO: 182155 - DNA, 15 bp, Homo sapiens
cctctcttattacat

SEQ ID NO: 182156 - DNA, 15 bp, Homo sapiens
acctctcttattaca

SEQ ID NO: 182157 - DNA, 15 bp, Homo sapiens
tacctctcttattac

SEQ ID NO: 182158 - DNA, 15 bp, Homo sapiens
atacctctcttatta

SEQ ID NO: 182159 - DNA, 15 bp, Homo sapiens
aatacctctcttatt

SEQ ID NO: 182160 - DNA, 15 bp, Homo sapiens
aaatacctctcttat

SEQ ID NO: 182161 - DNA, 15 bp, Homo sapiens
aaaatacctctctta

SEQ ID NO: 182162 - DNA, 15 bp, Homo sapiens
aaaaatacctctctt

SEQ ID NO: 182163 - DNA, 15 bp, Homo sapiens
aaaaaatacctctct

SEQ ID NO: 182164 - DNA, 15 bp, Homo sapiens
caaaaaatacctctc

SEQ ID NO: 182165 - DNA, 15 bp, Homo sapiens
acaaaaaatacctct

SEQ ID NO: 182166 - DNA, 15 bp, Homo sapiens
aacaaaaaatacctc

SEQ ID NO: 182167 - DNA, 15 bp, Homo sapiens
caacaaaaaatacct

SEQ ID NO: 182168 - DNA, 15 bp, Homo sapiens
gcaacaaaaaatacc

SEQ ID NO: 182169 - DNA, 15 bp, Homo sapiens
tgcaacaaaaaatac

SEQ ID NO: 182170 - DNA, 15 bp, Homo sapiens
gtgcaacaaaaaata

SEQ ID NO: 182171 - DNA, 15 bp, Homo sapiens
tgtgcaacaaaaaat

SEQ ID NO: 182172 - DNA, 15 bp, Homo sapiens
atgtgcaacaaaaaa

SEQ ID NO: 182173 - DNA, 15 bp, Homo sapiens
catgtgcaacaaaaa

SEQ ID NO: 182174 - DNA, 15 bp, Homo sapiens
gcatgtgcaacaaaa

SEQ ID NO: 182175 - DNA, 15 bp, Homo sapiens
cgcatgtgcaacaaa

SEQ ID NO: 182176 - DNA, 15 bp, Homo sapiens
tcgcatgtgcaacaa

SEQ ID NO: 182177 - DNA, 15 bp, Homo sapiens
ctcgcatgtgcaaca

SEQ ID NO: 182178 - DNA, 15 bp, Homo sapiens
gctcgcatgtgcaac

SEQ ID NO: 182179 - DNA, 15 bp, Homo sapiens
tgctcgcatgtgcaa

SEQ ID NO: 182180 - DNA, 15 bp, Homo sapiens
atgctcgcatgtgca

SEQ ID NO: 182181 - DNA, 15 bp, Homo sapiens
catgctcgcatgtgc

SEQ ID NO: 182182 - DNA, 15 bp, Homo sapiens
gcatgctcgcatgtg

SEQ ID NO: 182183 - DNA, 15 bp, Homo sapiens
agcatgctcgcatgt

SEQ ID NO: 182184 - DNA, 15 bp, Homo sapiens
gagcatgctcgcatg

SEQ ID NO: 182185 - DNA, 15 bp, Homo sapiens
tgagcatgctcgcat

SEQ ID NO: 182186 - DNA, 15 bp, Homo sapiens
atgagcatgctcgca

SEQ ID NO: 182187 - DNA, 15 bp, Homo sapiens
aatgagcatgctcgc

SEQ ID NO: 182188 - DNA, 15 bp, Homo sapiens
caatgagcatgctcg

SEQ ID NO: 182189 - DNA, 15 bp, Homo sapiens
tcaatgagcatgctc

SEQ ID NO: 182190 - DNA, 15 bp, Homo sapiens
gtcaatgagcatgct

SEQ ID NO: 182191 - DNA, 15 bp, Homo sapiens
agtcaatgagcatgc

SEQ ID NO: 182192 - DNA, 15 bp, Homo sapiens
aagtcaatgagcatg

SEQ ID NO: 182193 - DNA, 15 bp, Homo sapiens
taagtcaatgagcat

SEQ ID NO: 182194 - DNA, 15 bp, Homo sapiens
ttaagtcaatgagca

SEQ ID NO: 182195 - DNA, 15 bp, Homo sapiens
attaagtcaatgagc

SEQ ID NO: 182196 - DNA, 15 bp, Homo sapiens
aattaagtcaatgag

SEQ ID NO: 182197 - DNA, 15 bp, Homo sapiens
taattaagtcaatga

SEQ ID NO: 182198 - DNA, 15 bp, Homo sapiens
ataattaagtcaatg

SEQ ID NO: 182199 - DNA, 15 bp, Homo sapiens
aataattaagtcaat

SEQ ID NO: 182200 - DNA, 15 bp, Homo sapiens
caataattaagtcaa

SEQ ID NO: 182201 - DNA, 15 bp, Homo sapiens
acaataattaagtca

SEQ ID NO: 182202 - DNA, 15 bp, Homo sapiens
aacaataattaagtc

SEQ ID NO: 182203 - DNA, 15 bp, Homo sapiens
aaacaataattaagt

SEQ ID NO: 182204 - DNA, 15 bp, Homo sapiens
gaaacaataattaag

SEQ ID NO: 182205 - DNA, 15 bp, Homo sapiens
agaaacaataattaa

SEQ ID NO: 182206 - DNA, 15 bp, Homo sapiens
aagaaacaataatta

SEQ ID NO: 182207 - DNA, 15 bp, Homo sapiens
aaagaaacaataatt

SEQ ID NO: 182208 - DNA, 15 bp, Homo sapiens
aaaagaaacaataat

SEQ ID NO: 182209 - DNA, 15 bp, Homo sapiens
caaaagaaacaataa

SEQ ID NO: 182210 - DNA, 15 bp, Homo sapiens
acaaaagaaacaata

SEQ ID NO: 182211 - DNA, 15 bp, Homo sapiens
aacaaaagaaacaat

SEQ ID NO: 182212 - DNA, 15 bp, Homo sapiens
taacaaaagaaacaa

SEQ ID NO: 182213 - DNA, 15 bp, Homo sapiens
gtaacaaaagaaaca

SEQ ID NO: 182214 - DNA, 15 bp, Homo sapiens
ggtaacaaaagaaac

SEQ ID NO: 182215 - DNA, 15 bp, Homo sapiens
aggtaacaaaagaaa

SEQ ID NO: 182216 - DNA, 15 bp, Homo sapiens
aaggtaacaaaagaa

SEQ ID NO: 182217 - DNA, 15 bp, Homo sapiens
caaggtaacaaaaga

SEQ ID NO: 182218 - DNA, 15 bp, Homo sapiens
ccaaggtaacaaaag

SEQ ID NO: 182219 - DNA, 15 bp, Homo sapiens
accaaggtaacaaaa

SEQ ID NO: 182220 - DNA, 15 bp, Homo sapiens
caccaaggtaacaaa

SEQ ID NO: 182221 - DNA, 15 bp, Homo sapiens
tcaccaaggtaacaa

SEQ ID NO: 182222 - DNA, 15 bp, Homo sapiens
ttcaccaaggtaaca

SEQ ID NO: 182223 - DNA, 15 bp, Homo sapiens
attcaccaaggtaac

SEQ ID NO: 182224 - DNA, 15 bp, Homo sapiens
aattcaccaaggtaa

SEQ ID NO: 182225 - DNA, 15 bp, Homo sapiens
taattcaccaaggta

SEQ ID NO: 182226 - DNA, 15 bp, Homo sapiens
ctaattcaccaaggt

SEQ ID NO: 182227 - DNA, 15 bp, Homo sapiens
tctaattcaccaagg

SEQ ID NO: 182228 - DNA, 15 bp, Homo sapiens
ctctaattcaccaag

SEQ ID NO: 182229 - DNA, 15 bp, Homo sapiens
tctctaattcaccaa

SEQ ID NO: 182230 - DNA, 15 bp, Homo sapiens
ctctctaattcacca

SEQ ID NO: 182231 - DNA, 15 bp, Homo sapiens
cctctctaattcacc

SEQ ID NO: 182232 - DNA, 15 bp, Homo sapiens
ccctctctaattcac

SEQ ID NO: 182233 - DNA, 15 bp, Homo sapiens
cccctctctaattca

SEQ ID NO: 182234 - DNA, 15 bp, Homo sapiens
ccccctctctaattc

SEQ ID NO: 182235 - DNA, 15 bp, Homo sapiens
tccccctctctaatt

SEQ ID NO: 182236 - DNA, 15 bp, Homo sapiens
ctccccctctctaat

SEQ ID NO: 182237 - DNA, 15 bp, Homo sapiens
tctccccctctctaa

SEQ ID NO: 182238 - DNA, 15 bp, Homo sapiens
atctccccctctcta

SEQ ID NO: 182239 - DNA, 15 bp, Homo sapiens
tatctccccctctct

SEQ ID NO: 182240 - DNA, 15 bp, Homo sapiens
atatctccccctctc

SEQ ID NO: 182241 - DNA, 15 bp, Homo sapiens
catatctccccctct

SEQ ID NO: 182242 - DNA, 15 bp, Homo sapiens
ccatatctccccctc

SEQ ID NO: 182243 - DNA, 15 bp, Homo sapiens
tccatatctccccct

SEQ ID NO: 182244 - DNA, 15 bp, Homo sapiens
ctccatatctccccc

SEQ ID NO: 182245 - DNA, 15 bp, Homo sapiens
tctccatatctcccc

SEQ ID NO: 182246 - DNA, 15 bp, Homo sapiens
ctctccatatctccc

SEQ ID NO: 182247 - DNA, 15 bp, Homo sapiens
cctctccatatctcc

SEQ ID NO: 182248 - DNA, 15 bp, Homo sapiens
ccctctccatatctc

SEQ ID NO: 182249 - DNA, 15 bp, Homo sapiens
tccctctccatatct

SEQ ID NO: 182250 - DNA, 15 bp, Homo sapiens
ctccctctccatatc

SEQ ID NO: 182251 - DNA, 15 bp, Homo sapiens
cctccctctccatat

SEQ ID NO: 182252 - DNA, 15 bp, Homo sapiens
tcctccctctccata

SEQ ID NO: 182253 - DNA, 15 bp, Homo sapiens
atcctccctctccat

SEQ ID NO: 182254 - DNA, 15 bp, Homo sapiens
catcctccctctcca

SEQ ID NO: 182255 - DNA, 15 bp, Homo sapiens
ccatcctccctctcc

SEQ ID NO: 182256 - DNA, 15 bp, Homo sapiens
cccatcctccctctc

SEQ ID NO: 182257 - DNA, 15 bp, Homo sapiens
tcccatcctccctct

SEQ ID NO: 182258 - DNA, 15 bp, Homo sapiens
ttcccatcctccctc

SEQ ID NO: 182259 - DNA, 15 bp, Homo sapiens
cttcccatcctccct

SEQ ID NO: 182260 - DNA, 15 bp, Homo sapiens
acttcccatcctccc

SEQ ID NO: 182261 - DNA, 15 bp, Homo sapiens
aacttcccatcctcc

SEQ ID NO: 182262 - DNA, 15 bp, Homo sapiens
caacttcccatcctc

SEQ ID NO: 182263 - DNA, 15 bp, Homo sapiens
ccaacttcccatcct

SEQ ID NO: 182264 - DNA, 15 bp, Homo sapiens
tccaacttcccatcc

SEQ ID NO: 182265 - DNA, 15 bp, Homo sapiens
ctccaacttcccatc

SEQ ID NO: 182266 - DNA, 15 bp, Homo sapiens
tctccaacttcccat

SEQ ID NO: 182267 - DNA, 15 bp, Homo sapiens
ctctccaacttccca

SEQ ID NO: 182268 - DNA, 15 bp, Homo sapiens
cctctccaacttccc

SEQ ID NO: 182269 - DNA, 15 bp, Homo sapiens
ccctctccaacttcc

SEQ ID NO: 182270 - DNA, 15 bp, Homo sapiens
cccctctccaacttc

SEQ ID NO: 182271 - DNA, 15 bp, Homo sapiens
ccccctctccaactt

SEQ ID NO: 182272 - DNA, 15 bp, Homo sapiens
tccccctctccaact

SEQ ID NO: 182273 - DNA, 15 bp, Homo sapiens
ttccccctctccaac

SEQ ID NO: 182274 - DNA, 15 bp, Homo sapiens
cttccccctctccaa

SEQ ID NO: 182275 - DNA, 15 bp, Homo sapiens
tcttccccctctcca

SEQ ID NO: 182276 - DNA, 15 bp, Homo sapiens
ctcttccccctctcc

SEQ ID NO: 182277 - DNA, 15 bp, Homo sapiens
tctcttccccctctc

SEQ ID NO: 182278 - DNA, 15 bp, Homo sapiens
ctctcttccccctct

SEQ ID NO: 182279 - DNA, 15 bp, Homo sapiens
tctctcttccccctc

SEQ ID NO: 182280 - DNA, 15 bp, Homo sapiens
ctctctcttccccct

SEQ ID NO: 182281 - DNA, 15 bp, Homo sapiens
tctctctcttccccc

SEQ ID NO: 182282 - DNA, 15 bp, Homo sapiens
ctctctctcttcccc

SEQ ID NO: 182283 - DNA, 15 bp, Homo sapiens
tctctctctcttccc

SEQ ID NO: 182284 - DNA, 15 bp, Homo sapiens
ctctctctctcttcc

SEQ ID NO: 182285 - DNA, 15 bp, Homo sapiens
tctctctctctcttc

SEQ ID NO: 182286 - DNA, 15 bp, Homo sapiens
ctctctctctctctt

SEQ ID NO: 182287 - DNA, 15 bp, Homo sapiens
cctctctctctctct

SEQ ID NO: 182288 - DNA, 15 bp, Homo sapiens
tcctctctctctctc

SEQ ID NO: 182289 - DNA, 15 bp, Homo sapiens
ctcctctctctctct

SEQ ID NO: 182290 - DNA, 15 bp, Homo sapiens
tctcctctctctctc

SEQ ID NO: 182291 - DNA, 15 bp, Homo sapiens
ttctcctctctctct

SEQ ID NO: 182292 - DNA, 15 bp, Homo sapiens
cttctcctctctctc

SEQ ID NO: 182293 - DNA, 15 bp, Homo sapiens
ccttctcctctctct

SEQ ID NO: 182294 - DNA, 15 bp, Homo sapiens
tccttctcctctctc

SEQ ID NO: 182295 - DNA, 15 bp, Homo sapiens
ttccttctcctctct

SEQ ID NO: 182296 - DNA, 15 bp, Homo sapiens
tttccttctcctctc

SEQ ID NO: 182297 - DNA, 15 bp, Homo sapiens
gtttccttctcctct

SEQ ID NO: 182298 - DNA, 15 bp, Homo sapiens
ggtttccttctcctc

SEQ ID NO: 182299 - DNA, 15 bp, Homo sapiens
gggtttccttctcct

SEQ ID NO: 182300 - DNA, 15 bp, Homo sapiens
tgggtttccttctcc

SEQ ID NO: 182301 - DNA, 15 bp, Homo sapiens
atgggtttccttctc

SEQ ID NO: 182302 - DNA, 15 bp, Homo sapiens
catgggtttccttct

SEQ ID NO: 182303 - DNA, 15 bp, Homo sapiens
acatgggtttccttc

SEQ ID NO: 182304 - DNA, 15 bp, Homo sapiens
gacatgggtttcctt

SEQ ID NO: 182305 - DNA, 15 bp, Homo sapiens
agacatgggtttcct

SEQ ID NO: 182306 - DNA, 15 bp, Homo sapiens
tagacatgggtttcc

SEQ ID NO: 182307 - DNA, 15 bp, Homo sapiens
gtagacatgggtttc

SEQ ID NO: 182308 - DNA, 15 bp, Homo sapiens
agtagacatgggttt

SEQ ID NO: 182309 - DNA, 15 bp, Homo sapiens
cagtagacatgggtt

SEQ ID NO: 182310 - DNA, 15 bp, Homo sapiens
acagtagacatgggt

SEQ ID NO: 182311 - DNA, 15 bp, Homo sapiens
aacagtagacatggg

SEQ ID NO: 182312 - DNA, 15 bp, Homo sapiens
taacagtagacatgg

SEQ ID NO: 182313 - DNA, 15 bp, Homo sapiens
ataacagtagacatg

SEQ ID NO: 182314 - DNA, 15 bp, Homo sapiens
aataacagtagacat

SEQ ID NO: 182315 - DNA, 15 bp, Homo sapiens
aaataacagtagaca

SEQ ID NO: 182316 - DNA, 15 bp, Homo sapiens
aaaataacagtagac

SEQ ID NO: 182317 - DNA, 15 bp, Homo sapiens
caaaataacagtaga

SEQ ID NO: 182318 - DNA, 15 bp, Homo sapiens
gcaaaataacagtag

SEQ ID NO: 182319 - DNA, 15 bp, Homo sapiens
agcaaaataacagta

SEQ ID NO: 182320 - DNA, 15 bp, Homo sapiens
cagcaaaataacagt

SEQ ID NO: 182321 - DNA, 15 bp, Homo sapiens
tcagcaaaataacag

SEQ ID NO: 182322 - DNA, 15 bp, Homo sapiens
ttcagcaaaataaca

SEQ ID NO: 182323 - DNA, 15 bp, Homo sapiens
tttcagcaaaataac

SEQ ID NO: 182324 - DNA, 15 bp, Homo sapiens
atttcagcaaaataa

SEQ ID NO: 182325 - DNA, 15 bp, Homo sapiens
gatttcagcaaaata

SEQ ID NO: 182326 - DNA, 15 bp, Homo sapiens
agatttcagcaaaat

SEQ ID NO: 182327 - DNA, 15 bp, Homo sapiens
tagatttcagcaaaa

SEQ ID NO: 182328 - DNA, 15 bp, Homo sapiens
atagatttcagcaaa

SEQ ID NO: 182329 - DNA, 15 bp, Homo sapiens
gatagatttcagcaa

SEQ ID NO: 182330 - DNA, 15 bp, Homo sapiens
agatagatttcagca

SEQ ID NO: 182331 - DNA, 15 bp, Homo sapiens
gagatagatttcagc

SEQ ID NO: 182332 - DNA, 15 bp, Homo sapiens
tgagatagatttcag

SEQ ID NO: 182333 - DNA, 15 bp, Homo sapiens
ctgagatagatttca

SEQ ID NO: 182334 - DNA, 15 bp, Homo sapiens
cgctgagatagattt

SEQ ID NO: 182335 - DNA, 15 bp, Homo sapiens
tcgctgagatagatt

SEQ ID NO: 182336 - DNA, 15 bp, Homo sapiens
ctcgctgagatagat

SEQ ID NO: 182337 - DNA, 15 bp, Homo sapiens
actcgctgagataga

SEQ ID NO: 182338 - DNA, 15 bp, Homo sapiens
tactcgctgagatag

SEQ ID NO: 182339 - DNA, 15 bp, Homo sapiens
ctactcgctgagata

SEQ ID NO: 182340 - DNA, 15 bp, Homo sapiens
cctactcgctgagat

SEQ ID NO: 182341 - DNA, 15 bp, Homo sapiens
gcctactcgctgaga

SEQ ID NO: 182342 - DNA, 15 bp, Homo sapiens
tgcctactcgctgag

SEQ ID NO: 182343 - DNA, 15 bp, Homo sapiens
ctgcctactcgctga

SEQ ID NO: 182344 - DNA, 15 bp, Homo sapiens
tctgcctactcgctg

SEQ ID NO: 182345 - DNA, 15 bp, Homo sapiens
atctgcctactcgct

SEQ ID NO: 182346 - DNA, 15 bp, Homo sapiens
aatctgcctactcgc

SEQ ID NO: 182347 - DNA, 15 bp, Homo sapiens
caatctgcctactcg

SEQ ID NO: 182348 - DNA, 15 bp, Homo sapiens
tcaatctgcctactc

SEQ ID NO: 182349 - DNA, 15 bp, Homo sapiens
ctcaatctgcctact

SEQ ID NO: 182350 - DNA, 15 bp, Homo sapiens
tctcaatctgcctac

SEQ ID NO: 182351 - DNA, 15 bp, Homo sapiens
ttctcaatctgccta

SEQ ID NO: 182352 - DNA, 15 bp, Homo sapiens
tttctcaatctgcct

SEQ ID NO: 182353 - DNA, 15 bp, Homo sapiens
atttctcaatctgcc

SEQ ID NO: 182354 - DNA, 15 bp, Homo sapiens
gatttctcaatctgc

SEQ ID NO: 182355 - DNA, 15 bp, Homo sapiens
tgatttctcaatctg

SEQ ID NO: 182356 - DNA, 15 bp, Homo sapiens
ttgatttctcaatct

SEQ ID NO: 182357 - DNA, 15 bp, Homo sapiens
cttgatttctcaatc

SEQ ID NO: 182358 - DNA, 15 bp, Homo sapiens
ccttgatttctcaat

SEQ ID NO: 182359 - DNA, 15 bp, Homo sapiens
tccttgatttctcaa

SEQ ID NO: 182360 - DNA, 15 bp, Homo sapiens
atccttgatttctca

SEQ ID NO: 182361 - DNA, 15 bp, Homo sapiens
aatccttgatttctc

SEQ ID NO: 182362 - DNA, 15 bp, Homo sapiens
gaatccttgatttct

SEQ ID NO: 182363 - DNA, 15 bp, Homo sapiens
tgaatccttgatttc

SEQ ID NO: 182364 - DNA, 15 bp, Homo sapiens
atgaatccttgattt

SEQ ID NO: 182365 - DNA, 15 bp, Homo sapiens
aatgaatccttgatt

SEQ ID NO: 182366 - DNA, 15 bp, Homo sapiens
gaatgaatccttgat

SEQ ID NO: 182367 - DNA, 15 bp, Homo sapiens
tgaatgaatccttga

SEQ ID NO: 182368 - DNA, 15 bp, Homo sapiens
gtgaatgaatccttg

SEQ ID NO: 182369 - DNA, 15 bp, Homo sapiens
tgtgaatgaatcctt

SEQ ID NO: 182370 - DNA, 15 bp, Homo sapiens
ctgtgaatgaatcct

SEQ ID NO: 182371 - DNA, 15 bp, Homo sapiens
cctgtgaatgaatcc

SEQ ID NO: 182372 - DNA, 15 bp, Homo sapiens
acctgtgaatgaatc

SEQ ID NO: 182373 - DNA, 15 bp, Homo sapiens
tacctgtgaatgaat

SEQ ID NO: 182374 - DNA, 15 bp, Homo sapiens
ctacctgtgaatgaa

SEQ ID NO: 182375 - DNA, 15 bp, Homo sapiens
tctacctgtgaatga

SEQ ID NO: 182376 - DNA, 15 bp, Homo sapiens
ttctacctgtgaatg

SEQ ID NO: 182377 - DNA, 15 bp, Homo sapiens
tttctacctgtgaat

SEQ ID NO: 182378 - DNA, 15 bp, Homo sapiens
ttttctacctgtgaa

SEQ ID NO: 182379 - DNA, 15 bp, Homo sapiens
tttttctacctgtga

SEQ ID NO: 182380 - DNA, 15 bp, Homo sapiens
ttttttctacctgtg

SEQ ID NO: 182381 - DNA, 15 bp, Homo sapiens
tttttttctacctgt

SEQ ID NO: 182382 - DNA, 15 bp, Homo sapiens
atttttttctacctg

SEQ ID NO: 182383 - DNA, 15 bp, Homo sapiens
catttttttctacct

SEQ ID NO: 182384 - DNA, 15 bp, Homo sapiens
tcatttttttctacc

SEQ ID NO: 182385 - DNA, 15 bp, Homo sapiens
ttcatttttttctac

SEQ ID NO: 182386 - DNA, 15 bp, Homo sapiens
attcatttttttcta

SEQ ID NO: 182387 - DNA, 15 bp, Homo sapiens
tattcatttttttct

SEQ ID NO: 182388 - DNA, 15 bp, Homo sapiens
ttattcatttttttc

SEQ ID NO: 182389 - DNA, 15 bp, Homo sapiens
gttattcattttttt

SEQ ID NO: 182390 - DNA, 15 bp, Homo sapiens
tgttattcatttttt

SEQ ID NO: 182391 - DNA, 15 bp, Homo sapiens
gtgttattcattttt

SEQ ID NO: 182392 - DNA, 15 bp, Homo sapiens
agtgttattcatttt

SEQ ID NO: 182393 - DNA, 15 bp, Homo sapiens
aagtgttattcattt

SEQ ID NO: 182394 - DNA, 15 bp, Homo sapiens
aaagtgttattcatt

SEQ ID NO: 182395 - DNA, 15 bp, Homo sapiens
caaagtgttattcat

SEQ ID NO: 182396 - DNA, 15 bp, Homo sapiens
tcaaagtgttattca

SEQ ID NO: 182397 - DNA, 15 bp, Homo sapiens
ttcaaagtgttattc

SEQ ID NO: 182398 - DNA, 15 bp, Homo sapiens
tttcaaagtgttatt

SEQ ID NO: 182399 - DNA, 15 bp, Homo sapiens
ctttcaaagtgttat

SEQ ID NO: 182400 - DNA, 15 bp, Homo sapiens
gctttcaaagtgtta

SEQ ID NO: 182401 - DNA, 15 bp, Homo sapiens
agctttcaaagtgtt

SEQ ID NO: 182402 - DNA, 15 bp, Homo sapiens
gagctttcaaagtgt

SEQ ID NO: 182403 - DNA, 15 bp, Homo sapiens
tgagctttcaaagtg

SEQ ID NO: 182404 - DNA, 15 bp, Homo sapiens
ctgagctttcaaagt

SEQ ID NO: 182405 - DNA, 15 bp, Homo sapiens
tctgagctttcaaag

SEQ ID NO: 182406 - DNA, 15 bp, Homo sapiens
ttctgagctttcaaa

SEQ ID NO: 182407 - DNA, 15 bp, Homo sapiens
tttctgagctttcaa

SEQ ID NO: 182408 - DNA, 15 bp, Homo sapiens
ttttctgagctttca

SEQ ID NO: 182409 - DNA, 15 bp, Homo sapiens
attttctgagctttc

SEQ ID NO: 182410 - DNA, 15 bp, Homo sapiens
gattttctgagcttt

SEQ ID NO: 182411 - DNA, 15 bp, Homo sapiens
tgattttctgagctt

SEQ ID NO: 182412 - DNA, 15 bp, Homo sapiens
ttgattttctgagct

SEQ ID NO: 182413 - DNA, 15 bp, Homo sapiens
gttgattttctgagc

SEQ ID NO: 182414 - DNA, 15 bp, Homo sapiens
tgttgattttctgag

SEQ ID NO: 182415 - DNA, 15 bp, Homo sapiens
gtgttgattttctga

SEQ ID NO: 182416 - DNA, 15 bp, Homo sapiens
tgtgttgattttctg

SEQ ID NO: 182417 - DNA, 15 bp, Homo sapiens
ttgtgttgattttct

SEQ ID NO: 182418 - DNA, 15 bp, Homo sapiens
gttgtgttgattttc

SEQ ID NO: 182419 - DNA, 15 bp, Homo sapiens
tgttgtgttgatttt

SEQ ID NO: 182420 - DNA, 15 bp, Homo sapiens
ctgttgtgttgattt

SEQ ID NO: 182421 - DNA, 15 bp, Homo sapiens
tctgttgtgttgatt

SEQ ID NO: 182422 - DNA, 15 bp, Homo sapiens
ctctgttgtgttgat

SEQ ID NO: 182423 - DNA, 15 bp, Homo sapiens
tctctgttgtgttga

SEQ ID NO: 182424 - DNA, 15 bp, Homo sapiens
ttctctgttgtgttg

SEQ ID NO: 182425 - DNA, 15 bp, Homo sapiens
attctctgttgtgtt

SEQ ID NO: 182426 - DNA, 15 bp, Homo sapiens
aattctctgttgtgt

SEQ ID NO: 182427 - DNA, 15 bp, Homo sapiens
gaattctctgttgtg

SEQ ID NO: 182428 - DNA, 15 bp, Homo sapiens
tgaattctctgttgt

SEQ ID NO: 182429 - DNA, 15 bp, Homo sapiens
ctgaattctctgttg

SEQ ID NO: 182430 - DNA, 15 bp, Homo sapiens
actgaattctctgtt

SEQ ID NO: 182431 - DNA, 15 bp, Homo sapiens
aactgaattctctgt

SEQ ID NO: 182432 - DNA, 15 bp, Homo sapiens
aaactgaattctctg

SEQ ID NO: 182433 - DNA, 15 bp, Homo sapiens
gaaactgaattctct

SEQ ID NO: 182434 - DNA, 15 bp, Homo sapiens
tgaaactgaattctc

SEQ ID NO: 182435 - DNA, 15 bp, Homo sapiens
ttgaaactgaattct

SEQ ID NO: 182436 - DNA, 15 bp, Homo sapiens
cttgaaactgaattc

SEQ ID NO: 182437 - DNA, 15 bp, Homo sapiens
ccttgaaactgaatt

SEQ ID NO: 182438 - DNA, 15 bp, Homo sapiens
accttgaaactgaat

SEQ ID NO: 182439 - DNA, 15 bp, Homo sapiens
caccttgaaactgaa

SEQ ID NO: 182440 - DNA, 15 bp, Homo sapiens
gcaccttgaaactga

SEQ ID NO: 182441 - DNA, 15 bp, Homo sapiens
ggcaccttgaaactg

SEQ ID NO: 182442 - DNA, 15 bp, Homo sapiens
tggcaccttgaaact

SEQ ID NO: 182443 - DNA, 15 bp, Homo sapiens
gtggcaccttgaaac

SEQ ID NO: 182444 - DNA, 15 bp, Homo sapiens
agtggcaccttgaaa

SEQ ID NO: 182445 - DNA, 15 bp, Homo sapiens
aagtggcaccttgaa

SEQ ID NO: 182446 - DNA, 15 bp, Homo sapiens
aaagtggcaccttga

SEQ ID NO: 182447 - DNA, 15 bp, Homo sapiens
aaaagtggcaccttg

SEQ ID NO: 182448 - DNA, 15 bp, Homo sapiens
caaaagtggcacctt

SEQ ID NO: 182449 - DNA, 15 bp, Homo sapiens
tcaaaagtggcacct

SEQ ID NO: 182450 - DNA, 15 bp, Homo sapiens
gtcaaaagtggcacc

SEQ ID NO: 182451 - DNA, 15 bp, Homo sapiens
agtcaaaagtggcac

SEQ ID NO: 182452 - DNA, 15 bp, Homo sapiens
gagtcaaaagtggca

SEQ ID NO: 182453 - DNA, 15 bp, Homo sapiens
agagtcaaaagtggc

SEQ ID NO: 182454 - DNA, 15 bp, Homo sapiens
aagagtcaaaagtgg

SEQ ID NO: 182455 - DNA, 15 bp, Homo sapiens
gaagagtcaaaagtg

SEQ ID NO: 182456 - DNA, 15 bp, Homo sapiens
agaagagtcaaaagt

SEQ ID NO: 182457 - DNA, 15 bp, Homo sapiens
cagaagagtcaaaag

SEQ ID NO: 182458 - DNA, 15 bp, Homo sapiens
gcagaagagtcaaaa

SEQ ID NO: 182459 - DNA, 15 bp, Homo sapiens
agcagaagagtcaaa

SEQ ID NO: 182460 - DNA, 15 bp, Homo sapiens
cagcagaagagtcaa

SEQ ID NO: 182461 - DNA, 15 bp, Homo sapiens
gcagcagaagagtca

SEQ ID NO: 182462 - DNA, 15 bp, Homo sapiens
agcagcagaagagtc

SEQ ID NO: 182463 - DNA, 15 bp, Homo sapiens
gagcagcagaagagt

SEQ ID NO: 182464 - DNA, 15 bp, Homo sapiens
agagcagcagaagag

SEQ ID NO: 182465 - DNA, 15 bp, Homo sapiens
aagagcagcagaaga

SEQ ID NO: 182466 - DNA, 15 bp, Homo sapiens
aaagagcagcagaag

SEQ ID NO: 182467 - DNA, 15 bp, Homo sapiens
caaagagcagcagaa

SEQ ID NO: 182468 - DNA, 15 bp, Homo sapiens
tcaaagagcagcaga

SEQ ID NO: 182469 - DNA, 15 bp, Homo sapiens
ttcaaagagcagcag

SEQ ID NO: 182470 - DNA, 15 bp, Homo sapiens
attcaaagagcagca

SEQ ID NO: 182471 - DNA, 15 bp, Homo sapiens
aattcaaagagcagc

SEQ ID NO: 182472 - DNA, 15 bp, Homo sapiens
caattcaaagagcag

SEQ ID NO: 182473 - DNA, 15 bp, Homo sapiens
tcaattcaaagagca

SEQ ID NO: 182474 - DNA, 15 bp, Homo sapiens
ctcaattcaaagagc

SEQ ID NO: 182475 - DNA, 15 bp, Homo sapiens
actcaattcaaagag

SEQ ID NO: 182476 - DNA, 15 bp, Homo sapiens
aactcaattcaaaga

SEQ ID NO: 182477 - DNA, 15 bp, Homo sapiens
gaactcaattcaaag

SEQ ID NO: 182478 - DNA, 15 bp, Homo sapiens
tgaactcaattcaaa

SEQ ID NO: 182479 - DNA, 15 bp, Homo sapiens
atgaactcaattcaa

SEQ ID NO: 182480 - DNA, 15 bp, Homo sapiens
catgaactcaattca

SEQ ID NO: 182481 - DNA, 15 bp, Homo sapiens
ccatgaactcaattc

SEQ ID NO: 182482 - DNA, 15 bp, Homo sapiens
gccatgaactcaatt

SEQ ID NO: 182483 - DNA, 15 bp, Homo sapiens
agccatgaactcaat

SEQ ID NO: 182484 - DNA, 15 bp, Homo sapiens
cagccatgaactcaa

SEQ ID NO: 182485 - DNA, 15 bp, Homo sapiens
acagccatgaactca

SEQ ID NO: 182486 - DNA, 15 bp, Homo sapiens
cacagccatgaactc

SEQ ID NO: 182487 - DNA, 15 bp, Homo sapiens
gcacagccatgaact

SEQ ID NO: 182488 - DNA, 15 bp, Homo sapiens
agcacagccatgaac

SEQ ID NO: 182489 - DNA, 15 bp, Homo sapiens
gagcacagccatgaa

SEQ ID NO: 182490 - DNA, 15 bp, Homo sapiens
tgagcacagccatga

SEQ ID NO: 182491 - DNA, 15 bp, Homo sapiens
atgagcacagccatg

SEQ ID NO: 182492 - DNA, 15 bp, Homo sapiens
gatgagcacagccat

SEQ ID NO: 182493 - DNA, 15 bp, Homo sapiens
cgatgagcacagcca

SEQ ID NO: 182494 - DNA, 15 bp, Homo sapiens
acgatgagcacagcc

SEQ ID NO: 182495 - DNA, 15 bp, Homo sapiens
gacgatgagcacagc

SEQ ID NO: 182496 - DNA, 15 bp, Homo sapiens
agacgatgagcacag

SEQ ID NO: 182497 - DNA, 15 bp, Homo sapiens
gagacgatgagcaca

SEQ ID NO: 182498 - DNA, 15 bp, Homo sapiens
ggagacgatgagcac

SEQ ID NO: 182499 - DNA, 15 bp, Homo sapiens
tggagacgatgagca

SEQ ID NO: 182500 - DNA, 15 bp, Homo sapiens
atggagacgatgagc

SEQ ID NO: 182501 - DNA, 15 bp, Homo sapiens
catggagacgatgag

SEQ ID NO: 182502 - DNA, 15 bp, Homo sapiens
ccatggagacgatga

SEQ ID NO: 182503 - DNA, 15 bp, Homo sapiens
tccatggagacgatg

SEQ ID NO: 182504 - DNA, 15 bp, Homo sapiens
ctccatggagacgat

SEQ ID NO: 182505 - DNA, 15 bp, Homo sapiens
tctccatggagacga

SEQ ID NO: 182506 - DNA, 15 bp, Homo sapiens
ttctccatggagacg

SEQ ID NO: 182507 - DNA, 15 bp, Homo sapiens
cttctccatggagac

SEQ ID NO: 182508 - DNA, 15 bp, Homo sapiens
ccttctccatggaga

SEQ ID NO: 182509 - DNA, 15 bp, Homo sapiens
cccttctccatggag

SEQ ID NO: 182510 - DNA, 15 bp, Homo sapiens
gcccttctccatgga

SEQ ID NO: 182511 - DNA, 15 bp, Homo sapiens
tgcccttctccatgg

SEQ ID NO: 182512 - DNA, 15 bp, Homo sapiens
ttgcccttctccatg

SEQ ID NO: 182513 - DNA, 15 bp, Homo sapiens
cttgcccttctccat

SEQ ID NO: 182514 - DNA, 15 bp, Homo sapiens
acttgcccttctcca

SEQ ID NO: 182515 - DNA, 15 bp, Homo sapiens
gacttgcccttctcc

SEQ ID NO: 182516 - DNA, 15 bp, Homo sapiens
tgacttgcccttctc

SEQ ID NO: 182517 - DNA, 15 bp, Homo sapiens
ctgacttgcccttct

SEQ ID NO: 182518 - DNA, 15 bp, Homo sapiens
actgacttgcccttc

SEQ ID NO: 182519 - DNA, 15 bp, Homo sapiens
cactgacttgccctt

SEQ ID NO: 182520 - DNA, 15 bp, Homo sapiens
gcactgacttgccct

SEQ ID NO: 182521 - DNA, 15 bp, Homo sapiens
ggcactgacttgccc

SEQ ID NO: 182522 - DNA, 15 bp, Homo sapiens
tggcactgacttgcc

SEQ ID NO: 182523 - DNA, 15 bp, Homo sapiens
atggcactgacttgc

SEQ ID NO: 182524 - DNA, 15 bp, Homo sapiens
aatggcactgacttg

SEQ ID NO: 182525 - DNA, 15 bp, Homo sapiens
aaatggcactgactt

SEQ ID NO: 182526 - DNA, 15 bp, Homo sapiens
gaaatggcactgact

SEQ ID NO: 182527 - DNA, 15 bp, Homo sapiens
agaaatggcactgac

SEQ ID NO: 182528 - DNA, 15 bp, Homo sapiens
aagaaatggcactga

SEQ ID NO: 182529 - DNA, 15 bp, Homo sapiens
caagaaatggcactg

SEQ ID NO: 182530 - DNA, 15 bp, Homo sapiens
acaagaaatggcact

SEQ ID NO: 182531 - DNA, 15 bp, Homo sapiens
tacaagaaatggcac

SEQ ID NO: 182532 - DNA, 15 bp, Homo sapiens
ctacaagaaatggca

SEQ ID NO: 182533 - DNA, 15 bp, Homo sapiens
cctacaagaaatggc

SEQ ID NO: 182534 - DNA, 15 bp, Homo sapiens
tcctacaagaaatgg

SEQ ID NO: 182535 - DNA, 15 bp, Homo sapiens
ttcctacaagaaatg

SEQ ID NO: 182536 - DNA, 15 bp, Homo sapiens
attcctacaagaaat

SEQ ID NO: 182537 - DNA, 15 bp, Homo sapiens
cattcctacaagaaa

SEQ ID NO: 182538 - DNA, 15 bp, Homo sapiens
tcattcctacaagaa

SEQ ID NO: 182539 - DNA, 15 bp, Homo sapiens
atcattcctacaaga

SEQ ID NO: 182540 - DNA, 15 bp, Homo sapiens
gatcattcctacaag

SEQ ID NO: 182541 - DNA, 15 bp, Homo sapiens
cgatcattcctacaa

SEQ ID NO: 182542 - DNA, 15 bp, Homo sapiens
ccgatcattcctaca

SEQ ID NO: 182543 - DNA, 15 bp, Homo sapiens
cccgatcattcctac

SEQ ID NO: 182544 - DNA, 15 bp, Homo sapiens
gcccgatcattccta

SEQ ID NO: 182545 - DNA, 15 bp, Homo sapiens
ggcccgatcattcct

SEQ ID NO: 182546 - DNA, 15 bp, Homo sapiens
tggcccgatcattcc

SEQ ID NO: 182547 - DNA, 15 bp, Homo sapiens
gtggcccgatcattc

SEQ ID NO: 182548 - DNA, 15 bp, Homo sapiens
agtggcccgatcatt

SEQ ID NO: 182549 - DNA, 15 bp, Homo sapiens
tagtggcccgatcat

SEQ ID NO: 182550 - DNA, 15 bp, Homo sapiens
ttagtggcccgatca

SEQ ID NO: 182551 - DNA, 15 bp, Homo sapiens
gttagtggcccgatc

SEQ ID NO: 182552 - DNA, 15 bp, Homo sapiens
tgttagtggcccgat

SEQ ID NO: 182553 - DNA, 15 bp, Homo sapiens
atgttagtggcccga

SEQ ID NO: 182554 - DNA, 15 bp, Homo sapiens
aatgttagtggcccg

SEQ ID NO: 182555 - DNA, 15 bp, Homo sapiens
aaatgttagtggccc

SEQ ID NO: 182556 - DNA, 15 bp, Homo sapiens
caaatgttagtggcc

SEQ ID NO: 182557 - DNA, 15 bp, Homo sapiens
acaaatgttagtggc

SEQ ID NO: 182558 - DNA, 15 bp, Homo sapiens
gacaaatgttagtgg

SEQ ID NO: 182559 - DNA, 15 bp, Homo sapiens
agacaaatgttagtg

SEQ ID NO: 182560 - DNA, 15 bp, Homo sapiens
tagacaaatgttagt

SEQ ID NO: 182561 - DNA, 15 bp, Homo sapiens
ctagacaaatgttag

SEQ ID NO: 182562 - DNA, 15 bp, Homo sapiens
tctagacaaatgtta

SEQ ID NO: 182563 - DNA, 15 bp, Homo sapiens
ttctagacaaatgtt

SEQ ID NO: 182564 - DNA, 15 bp, Homo sapiens
tttctagacaaatgt

SEQ ID NO: 182565 - DNA, 15 bp, Homo sapiens
gtttctagacaaatg

SEQ ID NO: 182566 - DNA, 15 bp, Homo sapiens
ggtttctagacaaat

SEQ ID NO: 182567 - DNA, 15 bp, Homo sapiens
tggtttctagacaaa

SEQ ID NO: 182568 - DNA, 15 bp, Homo sapiens
ttggtttctagacaa

SEQ ID NO: 182569 - DNA, 15 bp, Homo sapiens
cttggtttctagaca

SEQ ID NO: 182570 - DNA, 15 bp, Homo sapiens
gcttggtttctagac

SEQ ID NO: 182571 - DNA, 15 bp, Homo sapiens
tgcttggtttctaga

SEQ ID NO: 182572 - DNA, 15 bp, Homo sapiens
ttgcttggtttctag

SEQ ID NO: 182573 - DNA, 15 bp, Homo sapiens
gttgcttggtttcta

SEQ ID NO: 182574 - DNA, 15 bp, Homo sapiens
ggttgcttggtttct

SEQ ID NO: 182575 - DNA, 15 bp, Homo sapiens
cggttgcttggtttc

SEQ ID NO: 182576 - DNA, 15 bp, Homo sapiens
tcggttgcttggttt

SEQ ID NO: 182577 - DNA, 15 bp, Homo sapiens
ttcggttgcttggtt

SEQ ID NO: 182578 - DNA, 15 bp, Homo sapiens
tttcggttgcttggt

SEQ ID NO: 182579 - DNA, 15 bp, Homo sapiens
ttttcggttgcttgg

SEQ ID NO: 182580 - DNA, 15 bp, Homo sapiens
cttttcggttgcttg

SEQ ID NO: 182581 - DNA, 15 bp, Homo sapiens
acttttcggttgctt

SEQ ID NO: 182582 - DNA, 15 bp, Homo sapiens
cacttttcggttgct

SEQ ID NO: 182583 - DNA, 15 bp, Homo sapiens
gcacttttcggttgc

SEQ ID NO: 182584 - DNA, 15 bp, Homo sapiens
tgcacttttcggttg

SEQ ID NO: 182585 - DNA, 15 bp, Homo sapiens
ttgcacttttcggtt

SEQ ID NO: 182586 - DNA, 15 bp, Homo sapiens
tttgcacttttcggt

SEQ ID NO: 182587 - DNA, 15 bp, Homo sapiens
atttgcacttttcgg

SEQ ID NO: 182588 - DNA, 15 bp, Homo sapiens
tatttgcacttttcg

SEQ ID NO: 182589 - DNA, 15 bp, Homo sapiens
atatttgcacttttc

SEQ ID NO: 182590 - DNA, 15 bp, Homo sapiens
gatatttgcactttt

SEQ ID NO: 182591 - DNA, 15 bp, Homo sapiens
agatatttgcacttt

SEQ ID NO: 182592 - DNA, 15 bp, Homo sapiens
cagatatttgcactt

SEQ ID NO: 182593 - DNA, 15 bp, Homo sapiens
ccagatatttgcact

SEQ ID NO: 182594 - DNA, 15 bp, Homo sapiens
tccagatatttgcac

SEQ ID NO: 182595 - DNA, 15 bp, Homo sapiens
atccagatatttgca

SEQ ID NO: 182596 - DNA, 15 bp, Homo sapiens
catccagatatttgc

SEQ ID NO: 182597 - DNA, 15 bp, Homo sapiens
gcatccagatatttg

SEQ ID NO: 182598 - DNA, 15 bp, Homo sapiens
agcatccagatattt

SEQ ID NO: 182599 - DNA, 15 bp, Homo sapiens
tagcatccagatatt

SEQ ID NO: 182600 - DNA, 15 bp, Homo sapiens
atagcatccagatat

SEQ ID NO: 182601 - DNA, 15 bp, Homo sapiens
aatagcatccagata

SEQ ID NO: 182602 - DNA, 15 bp, Homo sapiens
caatagcatccagat

SEQ ID NO: 182603 - DNA, 15 bp, Homo sapiens
ccaatagcatccaga

SEQ ID NO: 182604 - DNA, 15 bp, Homo sapiens
gccaatagcatccag

SEQ ID NO: 182605 - DNA, 15 bp, Homo sapiens
agccaatagcatcca

SEQ ID NO: 182606 - DNA, 15 bp, Homo sapiens
aagccaatagcatcc

SEQ ID NO: 182607 - DNA, 15 bp, Homo sapiens
aaagccaatagcatc

SEQ ID NO: 182608 - DNA, 15 bp, Homo sapiens
aaaagccaatagcat

SEQ ID NO: 182609 - DNA, 15 bp, Homo sapiens
caaaagccaatagca

SEQ ID NO: 182610 - DNA, 15 bp, Homo sapiens
tcaaaagccaatagc

SEQ ID NO: 182611 - DNA, 15 bp, Homo sapiens
ctcaaaagccaatag

SEQ ID NO: 182612 - DNA, 15 bp, Homo sapiens
tctcaaaagccaata

SEQ ID NO: 182613 - DNA, 15 bp, Homo sapiens
ttctcaaaagccaat

SEQ ID NO: 182614 - DNA, 15 bp, Homo sapiens
tttctcaaaagccaa

SEQ ID NO: 182615 - DNA, 15 bp, Homo sapiens
ctttctcaaaagcca

SEQ ID NO: 182616 - DNA, 15 bp, Homo sapiens
tctttctcaaaagcc

SEQ ID NO: 182617 - DNA, 15 bp, Homo sapiens
ttctttctcaaaagc

SEQ ID NO: 182618 - DNA, 15 bp, Homo sapiens
tttctttctcaaaag

SEQ ID NO: 182619 - DNA, 15 bp, Homo sapiens
ctttctttctcaaaa

SEQ ID NO: 182620 - DNA, 15 bp, Homo sapiens
cctttctttctcaaa

SEQ ID NO: 182621 - DNA, 15 bp, Homo sapiens
tcctttctttctcaa

SEQ ID NO: 182622 - DNA, 15 bp, Homo sapiens
atcctttctttctca

SEQ ID NO: 182623 - DNA, 15 bp, Homo sapiens
catcctttctttctc

SEQ ID NO: 182624 - DNA, 15 bp, Homo sapiens
acatcctttctttct

SEQ ID NO: 182625 - DNA, 15 bp, Homo sapiens
gacatcctttctttc

SEQ ID NO: 182626 - DNA, 15 bp, Homo sapiens
tgacatcctttcttt

SEQ ID NO: 182627 - DNA, 15 bp, Homo sapiens
ctgacatcctttctt

SEQ ID NO: 182628 - DNA, 15 bp, Homo sapiens
cctgacatcctttct

SEQ ID NO: 182629 - DNA, 15 bp, Homo sapiens
gcctgacatcctttc

SEQ ID NO: 182630 - DNA, 15 bp, Homo sapiens
tgcctgacatccttt

SEQ ID NO: 182631 - DNA, 15 bp, Homo sapiens
atgcctgacatcctt

SEQ ID NO: 182632 - DNA, 15 bp, Homo sapiens
aatgcctgacatcct

SEQ ID NO: 182633 - DNA, 15 bp, Homo sapiens
aaatgcctgacatcc

SEQ ID NO: 182634 - DNA, 15 bp, Homo sapiens
taaatgcctgacatc

SEQ ID NO: 182635 - DNA, 15 bp, Homo sapiens
ataaatgcctgacat

SEQ ID NO: 182636 - DNA, 15 bp, Homo sapiens
aataaatgcctgaca

SEQ ID NO: 182637 - DNA, 15 bp, Homo sapiens
aaataaatgcctgac

SEQ ID NO: 182638 - DNA, 15 bp, Homo sapiens
caaataaatgcctga

SEQ ID NO: 182639 - DNA, 15 bp, Homo sapiens
tcaaataaatgcctg

SEQ ID NO: 182640 - DNA, 15 bp, Homo sapiens
ttcaaataaatgcct

SEQ ID NO: 182641 - DNA, 15 bp, Homo sapiens
tttcaaataaatgcc

SEQ ID NO: 182642 - DNA, 15 bp, Homo sapiens
ctttcaaataaatgc

SEQ ID NO: 182643 - DNA, 15 bp, Homo sapiens
cctttcaaataaatg

SEQ ID NO: 182644 - DNA, 15 bp, Homo sapiens
ccctttcaaataaat

SEQ ID NO: 182645 - DNA, 15 bp, Homo sapiens
accctttcaaataaa

SEQ ID NO: 182646 - DNA, 15 bp, Homo sapiens
taccctttcaaataa

SEQ ID NO: 182647 - DNA, 15 bp, Homo sapiens
ttaccctttcaaata

SEQ ID NO: 182648 - DNA, 15 bp, Homo sapiens
gttaccctttcaaat

SEQ ID NO: 182649 - DNA, 15 bp, Homo sapiens
ggttaccctttcaaa

SEQ ID NO: 182650 - DNA, 15 bp, Homo sapiens
aggttaccctttcaa

SEQ ID NO: 182651 - DNA, 15 bp, Homo sapiens
gaggttaccctttca

SEQ ID NO: 182652 - DNA, 15 bp, Homo sapiens
ggaggttaccctttc

SEQ ID NO: 182653 - DNA, 15 bp, Homo sapiens
tggaggttacccttt

SEQ ID NO: 182654 - DNA, 15 bp, Homo sapiens
atggaggttaccctt

SEQ ID NO: 182655 - DNA, 15 bp, Homo sapiens
gatggaggttaccct

SEQ ID NO: 182656 - DNA, 15 bp, Homo sapiens
ggatggaggttaccc

SEQ ID NO: 182657 - DNA, 15 bp, Homo sapiens
tggatggaggttacc

SEQ ID NO: 182658 - DNA, 15 bp, Homo sapiens
ctggatggaggttac

SEQ ID NO: 182659 - DNA, 15 bp, Homo sapiens
tctggatggaggtta

SEQ ID NO: 182660 - DNA, 15 bp, Homo sapiens
atctggatggaggtt

SEQ ID NO: 182661 - DNA, 15 bp, Homo sapiens
tatctggatggaggt

SEQ ID NO: 182662 - DNA, 15 bp, Homo sapiens
ctatctggatggagg

SEQ ID NO: 182663 - DNA, 15 bp, Homo sapiens
actatctggatggag

SEQ ID NO: 182664 - DNA, 15 bp, Homo sapiens
cactatctggatgga

SEQ ID NO: 182665 - DNA, 15 bp, Homo sapiens
acactatctggatgg

SEQ ID NO: 182666 - DNA, 15 bp, Homo sapiens
aacactatctggatg

SEQ ID NO: 182667 - DNA, 15 bp, Homo sapiens
caacactatctggat

SEQ ID NO: 182668 - DNA, 15 bp, Homo sapiens
acaacactatctgga

SEQ ID NO: 182669 - DNA, 15 bp, Homo sapiens
tacaacactatctgg

SEQ ID NO: 182670 - DNA, 15 bp, Homo sapiens
ctacaacactatctg

SEQ ID NO: 182671 - DNA, 15 bp, Homo sapiens
tctacaacactatct

SEQ ID NO: 182672 - DNA, 15 bp, Homo sapiens
ctctacaacactatc

SEQ ID NO: 182673 - DNA, 15 bp, Homo sapiens
gctctacaacactat

SEQ ID NO: 182674 - DNA, 15 bp, Homo sapiens
tgctctacaacacta

SEQ ID NO: 182675 - DNA, 15 bp, Homo sapiens
atgctctacaacact

SEQ ID NO: 182676 - DNA, 15 bp, Homo sapiens
aatgctctacaacac

SEQ ID NO: 182677 - DNA, 15 bp, Homo sapiens
aaatgctctacaaca

SEQ ID NO: 182678 - DNA, 15 bp, Homo sapiens
aaaatgctctacaac

SEQ ID NO: 182679 - DNA, 15 bp, Homo sapiens
gaaaatgctctacaa

SEQ ID NO: 182680 - DNA, 15 bp, Homo sapiens
agaaaatgctctaca

SEQ ID NO: 182681 - DNA, 15 bp, Homo sapiens
gagaaaatgctctac

SEQ ID NO: 182682 - DNA, 15 bp, Homo sapiens
tgagaaaatgctcta

SEQ ID NO: 182683 - DNA, 15 bp, Homo sapiens
ctgagaaaatgctct

SEQ ID NO: 182684 - DNA, 15 bp, Homo sapiens
tctgagaaaatgctc

SEQ ID NO: 182685 - DNA, 15 bp, Homo sapiens
gtctgagaaaatgct

SEQ ID NO: 182686 - DNA, 15 bp, Homo sapiens
tgtctgagaaaatgc

SEQ ID NO: 182687 - DNA, 15 bp, Homo sapiens
atgtctgagaaaatg

SEQ ID NO: 182688 - DNA, 15 bp, Homo sapiens
aatgtctgagaaaat

SEQ ID NO: 182689 - DNA, 15 bp, Homo sapiens
taatgtctgagaaaa

SEQ ID NO: 182690 - DNA, 15 bp, Homo sapiens
ctaatgtctgagaaa

SEQ ID NO: 182691 - DNA, 15 bp, Homo sapiens
tctaatgtctgagaa

SEQ ID NO: 182692 - DNA, 15 bp, Homo sapiens
ttctaatgtctgaga

SEQ ID NO: 182693 - DNA, 15 bp, Homo sapiens
tttctaatgtctgag

SEQ ID NO: 182694 - DNA, 15 bp, Homo sapiens
ctttctaatgtctga

SEQ ID NO: 182695 - DNA, 15 bp, Homo sapiens
tctttctaatgtctg

SEQ ID NO: 182696 - DNA, 15 bp, Homo sapiens
atctttctaatgtct

SEQ ID NO: 182697 - DNA, 15 bp, Homo sapiens
aatctttctaatgtc

SEQ ID NO: 182698 - DNA, 15 bp, Homo sapiens
gaatctttctaatgt

SEQ ID NO: 182699 - DNA, 15 bp, Homo sapiens
tgaatctttctaatg

SEQ ID NO: 182700 - DNA, 15 bp, Homo sapiens
ttgaatctttctaat

SEQ ID NO: 182701 - DNA, 15 bp, Homo sapiens
gttgaatctttctaa

SEQ ID NO: 182702 - DNA, 15 bp, Homo sapiens
agttgaatctttcta

SEQ ID NO: 182703 - DNA, 15 bp, Homo sapiens
cagttgaatctttct

SEQ ID NO: 182704 - DNA, 15 bp, Homo sapiens
acagttgaatctttc

SEQ ID NO: 182705 - DNA, 15 bp, Homo sapiens
cacagttgaatcttt

SEQ ID NO: 182706 - DNA, 15 bp, Homo sapiens
acacagttgaatctt

SEQ ID NO: 182707 - DNA, 15 bp, Homo sapiens
tacacagttgaatct

SEQ ID NO: 182708 - DNA, 15 bp, Homo sapiens
gtacacagttgaatc

SEQ ID NO: 182709 - DNA, 15 bp, Homo sapiens
tgtacacagttgaat

SEQ ID NO: 182710 - DNA, 15 bp, Homo sapiens
ctgtacacagttgaa

SEQ ID NO: 182711 - DNA, 15 bp, Homo sapiens
actgtacacagttga

SEQ ID NO: 182712 - DNA, 15 bp, Homo sapiens
tactgtacacagttg

SEQ ID NO: 182713 - DNA, 15 bp, Homo sapiens
ctactgtacacagtt

SEQ ID NO: 182714 - DNA, 15 bp, Homo sapiens
actactgtacacagt

SEQ ID NO: 182715 - DNA, 15 bp, Homo sapiens
aactactgtacacag

SEQ ID NO: 182716 - DNA, 15 bp, Homo sapiens
aaactactgtacaca

SEQ ID NO: 182717 - DNA, 15 bp, Homo sapiens
aaaactactgtacac

SEQ ID NO: 182718 - DNA, 15 bp, Homo sapiens
taaaactactgtaca

SEQ ID NO: 182719 - DNA, 15 bp, Homo sapiens
ctaaaactactgtac

SEQ ID NO: 182720 - DNA, 15 bp, Homo sapiens
actaaaactactgta

SEQ ID NO: 182721 - DNA, 15 bp, Homo sapiens
cactaaaactactgt

SEQ ID NO: 182722 - DNA, 15 bp, Homo sapiens
acactaaaactactg

SEQ ID NO: 182723 - DNA, 15 bp, Homo sapiens
aacactaaaactact

SEQ ID NO: 182724 - DNA, 15 bp, Homo sapiens
caacactaaaactac

SEQ ID NO: 182725 - DNA, 15 bp, Homo sapiens
tcaacactaaaacta

SEQ ID NO: 182726 - DNA, 15 bp, Homo sapiens
ctcaacactaaaact

SEQ ID NO: 182727 - DNA, 15 bp, Homo sapiens
actcaacactaaaac

SEQ ID NO: 182728 - DNA, 15 bp, Homo sapiens
cactcaacactaaaa

SEQ ID NO: 182729 - DNA, 15 bp, Homo sapiens
acactcaacactaaa

SEQ ID NO: 182730 - DNA, 15 bp, Homo sapiens
aacactcaacactaa

SEQ ID NO: 182731 - DNA, 15 bp, Homo sapiens
aaacactcaacacta

SEQ ID NO: 182732 - DNA, 15 bp, Homo sapiens
gaaacactcaacact

SEQ ID NO: 182733 - DNA, 15 bp, Homo sapiens
tgaaacactcaacac

SEQ ID NO: 182734 - DNA, 15 bp, Homo sapiens
ctgaaacactcaaca

SEQ ID NO: 182735 - DNA, 15 bp, Homo sapiens
tctgaaacactcaac

SEQ ID NO: 182736 - DNA, 15 bp, Homo sapiens
ttctgaaacactcaa

SEQ ID NO: 182737 - DNA, 15 bp, Homo sapiens
attctgaaacactca

SEQ ID NO: 182738 - DNA, 15 bp, Homo sapiens
tattctgaaacactc

SEQ ID NO: 182739 - DNA, 15 bp, Homo sapiens
atattctgaaacact

SEQ ID NO: 182740 - DNA, 15 bp, Homo sapiens
aatattctgaaacac

SEQ ID NO: 182741 - DNA, 15 bp, Homo sapiens
aaatattctgaaaca

SEQ ID NO: 182742 - DNA, 15 bp, Homo sapiens
aaaatattctgaaac

SEQ ID NO: 182743 - DNA, 15 bp, Homo sapiens
gaaaatattctgaaa

SEQ ID NO: 182744 - DNA, 15 bp, Homo sapiens
tgaaaatattctgaa

SEQ ID NO: 182745 - DNA, 15 bp, Homo sapiens
atgaaaatattctga

SEQ ID NO: 182746 - DNA, 15 bp, Homo sapiens
aatgaaaatattctg

SEQ ID NO: 182747 - DNA, 15 bp, Homo sapiens
gaatgaaaatattct

SEQ ID NO: 182748 - DNA, 15 bp, Homo sapiens
agaatgaaaatattc

SEQ ID NO: 182749 - DNA, 15 bp, Homo sapiens
aagaatgaaaatatt

SEQ ID NO: 182750 - DNA, 15 bp, Homo sapiens
aaagaatgaaaatat

SEQ ID NO: 182751 - DNA, 15 bp, Homo sapiens
gaaagaatgaaaata

SEQ ID NO: 182752 - DNA, 15 bp, Homo sapiens
ggaaagaatgaaaat

SEQ ID NO: 182753 - DNA, 15 bp, Homo sapiens
tggaaagaatgaaaa

SEQ ID NO: 182754 - DNA, 15 bp, Homo sapiens
ttggaaagaatgaaa

SEQ ID NO: 182755 - DNA, 15 bp, Homo sapiens
tttggaaagaatgaa

SEQ ID NO: 182756 - DNA, 15 bp, Homo sapiens
atttggaaagaatga

SEQ ID NO: 182757 - DNA, 15 bp, Homo sapiens
aatttggaaagaatg

SEQ ID NO: 182758 - DNA, 15 bp, Homo sapiens
caatttggaaagaat

SEQ ID NO: 182759 - DNA, 15 bp, Homo sapiens
ccaatttggaaagaa

SEQ ID NO: 182760 - DNA, 15 bp, Homo sapiens
cccaatttggaaaga

SEQ ID NO: 182761 - DNA, 15 bp, Homo sapiens
ccccaatttggaaag

SEQ ID NO: 182762 - DNA, 15 bp, Homo sapiens
cccccaatttggaaa

SEQ ID NO: 182763 - DNA, 15 bp, Homo sapiens
acccccaatttggaa

SEQ ID NO: 182764 - DNA, 15 bp, Homo sapiens
gacccccaatttgga

SEQ ID NO: 182765 - DNA, 15 bp, Homo sapiens
ggacccccaatttgg

SEQ ID NO: 182766 - DNA, 15 bp, Homo sapiens
tggacccccaatttg

SEQ ID NO: 182767 - DNA, 15 bp, Homo sapiens
gtggacccccaattt

SEQ ID NO: 182768 - DNA, 15 bp, Homo sapiens
agtggacccccaatt

SEQ ID NO: 182769 - DNA, 15 bp, Homo sapiens
tagtggacccccaat

SEQ ID NO: 182770 - DNA, 15 bp, Homo sapiens
gtagtggacccccaa

SEQ ID NO: 182771 - DNA, 15 bp, Homo sapiens
tgtagtggaccccca

SEQ ID NO: 182772 - DNA, 15 bp, Homo sapiens
atgtagtggaccccc

SEQ ID NO: 182773 - DNA, 15 bp, Homo sapiens
aatgtagtggacccc

SEQ ID NO: 182774 - DNA, 15 bp, Homo sapiens
taatgtagtggaccc

SEQ ID NO: 182775 - DNA, 15 bp, Homo sapiens
ctaatgtagtggacc

SEQ ID NO: 182776 - DNA, 15 bp, Homo sapiens
actaatgtagtggac

SEQ ID NO: 182777 - DNA, 15 bp, Homo sapiens
aactaatgtagtgga

SEQ ID NO: 182778 - DNA, 15 bp, Homo sapiens
taactaatgtagtgg

SEQ ID NO: 182779 - DNA, 15 bp, Homo sapiens
ctaactaatgtagtg

SEQ ID NO: 182780 - DNA, 15 bp, Homo sapiens
tctaactaatgtagt

SEQ ID NO: 182781 - DNA, 15 bp, Homo sapiens
atctaactaatgtag

SEQ ID NO: 182782 - DNA, 15 bp, Homo sapiens
catctaactaatgta

SEQ ID NO: 182783 - DNA, 15 bp, Homo sapiens
gcatctaactaatgt

SEQ ID NO: 182784 - DNA, 15 bp, Homo sapiens
agcatctaactaatg

SEQ ID NO: 182785 - DNA, 15 bp, Homo sapiens
aagcatctaactaat

SEQ ID NO: 182786 - DNA, 15 bp, Homo sapiens
aaagcatctaactaa

SEQ ID NO: 182787 - DNA, 15 bp, Homo sapiens
aaaagcatctaacta

SEQ ID NO: 182788 - DNA, 15 bp, Homo sapiens
caaaagcatctaact

SEQ ID NO: 182789 - DNA, 15 bp, Homo sapiens
tcaaaagcatctaac

SEQ ID NO: 182790 - DNA, 15 bp, Homo sapiens
atcaaaagcatctaa

SEQ ID NO: 182791 - DNA, 15 bp, Homo sapiens
aatcaaaagcatcta

SEQ ID NO: 182792 - DNA, 15 bp, Homo sapiens
taatcaaaagcatct

SEQ ID NO: 182793 - DNA, 15 bp, Homo sapiens
gtaatcaaaagcatc

SEQ ID NO: 182794 - DNA, 15 bp, Homo sapiens
agtaatcaaaagcat

SEQ ID NO: 182795 - DNA, 15 bp, Homo sapiens
tagtaatcaaaagca

SEQ ID NO: 182796 - DNA, 15 bp, Homo sapiens
ttagtaatcaaaagc

SEQ ID NO: 182797 - DNA, 15 bp, Homo sapiens
attagtaatcaaaag

SEQ ID NO: 182798 - DNA, 15 bp, Homo sapiens
cattagtaatcaaaa

SEQ ID NO: 182799 - DNA, 15 bp, Homo sapiens
tcattagtaatcaaa

SEQ ID NO: 182800 - DNA, 15 bp, Homo sapiens
atcattagtaatcaa

SEQ ID NO: 182801 - DNA, 15 bp, Homo sapiens
gatcattagtaatca

SEQ ID NO: 182802 - DNA, 15 bp, Homo sapiens
tgatcattagtaatc

SEQ ID NO: 182803 - DNA, 15 bp, Homo sapiens
ttgatcattagtaat

SEQ ID NO: 182804 - DNA, 15 bp, Homo sapiens
cttgatcattagtaa

SEQ ID NO: 182805 - DNA, 15 bp, Homo sapiens
tcttgatcattagta

SEQ ID NO: 182806 - DNA, 15 bp, Homo sapiens
ttcttgatcattagt

SEQ ID NO: 182807 - DNA, 15 bp, Homo sapiens
gttcttgatcattag

SEQ ID NO: 182808 - DNA, 15 bp, Homo sapiens
tgttcttgatcatta

SEQ ID NO: 182809 - DNA, 15 bp, Homo sapiens
gtgttcttgatcatt

SEQ ID NO: 182810 - DNA, 15 bp, Homo sapiens
agtgttcttgatcat

SEQ ID NO: 182811 - DNA, 15 bp, Homo sapiens
cagtgttcttgatca

SEQ ID NO: 182812 - DNA, 15 bp, Homo sapiens
tcagtgttcttgatc

SEQ ID NO: 182813 - DNA, 15 bp, Homo sapiens
gtcagtgttcttgat

SEQ ID NO: 182814 - DNA, 15 bp, Homo sapiens
agtcagtgttcttga

SEQ ID NO: 182815 - DNA, 15 bp, Homo sapiens
gagtcagtgttcttg

SEQ ID NO: 182816 - DNA, 15 bp, Homo sapiens
tgagtcagtgttctt

SEQ ID NO: 182817 - DNA, 15 bp, Homo sapiens
ttgagtcagtgttct

SEQ ID NO: 182818 - DNA, 15 bp, Homo sapiens
tttgagtcagtgttc

SEQ ID NO: 182819 - DNA, 15 bp, Homo sapiens
atttgagtcagtgtt

SEQ ID NO: 182820 - DNA, 15 bp, Homo sapiens
aatttgagtcagtgt

SEQ ID NO: 182821 - DNA, 15 bp, Homo sapiens
caatttgagtcagtg

SEQ ID NO: 182822 - DNA, 15 bp, Homo sapiens
ccaatttgagtcagt

SEQ ID NO: 182823 - DNA, 15 bp, Homo sapiens
gccaatttgagtcag

SEQ ID NO: 182824 - DNA, 15 bp, Homo sapiens
agccaatttgagtca

SEQ ID NO: 182825 - DNA, 15 bp, Homo sapiens
aagccaatttgagtc

SEQ ID NO: 182826 - DNA, 15 bp, Homo sapiens
taagccaatttgagt

SEQ ID NO: 182827 - DNA, 15 bp, Homo sapiens
ctaagccaatttgag

SEQ ID NO: 182828 - DNA, 15 bp, Homo sapiens
tctaagccaatttga

SEQ ID NO: 182829 - DNA, 15 bp, Homo sapiens
gtctaagccaatttg

SEQ ID NO: 182830 - DNA, 15 bp, Homo sapiens
tgtctaagccaattt

SEQ ID NO: 182831 - DNA, 15 bp, Homo sapiens
ctgtctaagccaatt

SEQ ID NO: 182832 - DNA, 15 bp, Homo sapiens
actgtctaagccaat

SEQ ID NO: 182833 - DNA, 15 bp, Homo sapiens
tactgtctaagccaa

SEQ ID NO: 182834 - DNA, 15 bp, Homo sapiens
ttactgtctaagcca

SEQ ID NO: 182835 - DNA, 15 bp, Homo sapiens
cttactgtctaagcc

SEQ ID NO: 182836 - DNA, 15 bp, Homo sapiens
ccttactgtctaagc

SEQ ID NO: 182837 - DNA, 15 bp, Homo sapiens
tccttactgtctaag

SEQ ID NO: 182838 - DNA, 15 bp, Homo sapiens
ttccttactgtctaa

SEQ ID NO: 182839 - DNA, 15 bp, Homo sapiens
tttccttactgtcta

SEQ ID NO: 182840 - DNA, 15 bp, Homo sapiens
atttccttactgtct

SEQ ID NO: 182841 - DNA, 15 bp, Homo sapiens
catttccttactgtc

SEQ ID NO: 182842 - DNA, 15 bp, Homo sapiens
acatttccttactgt

SEQ ID NO: 182843 - DNA, 15 bp, Homo sapiens
tacatttccttactg

SEQ ID NO: 182844 - DNA, 15 bp, Homo sapiens
atacatttccttact

SEQ ID NO: 182845 - DNA, 15 bp, Homo sapiens
gatacatttccttac

SEQ ID NO: 182846 - DNA, 15 bp, Homo sapiens
agatacatttcctta

SEQ ID NO: 182847 - DNA, 15 bp, Homo sapiens
gagatacatttcctt

SEQ ID NO: 182848 - DNA, 15 bp, Homo sapiens
ggagatacatttcct

SEQ ID NO: 182849 - DNA, 15 bp, Homo sapiens
gggagatacatttcc

SEQ ID NO: 182850 - DNA, 15 bp, Homo sapiens
tgggagatacatttc

SEQ ID NO: 182851 - DNA, 15 bp, Homo sapiens
atgggagatacattt

SEQ ID NO: 182852 - DNA, 15 bp, Homo sapiens
tatgggagatacatt

SEQ ID NO: 182853 - DNA, 15 bp, Homo sapiens
ttatgggagatacat

SEQ ID NO: 182854 - DNA, 15 bp, Homo sapiens
cttatgggagataca

SEQ ID NO: 182855 - DNA, 15 bp, Homo sapiens
tcttatgggagatac

SEQ ID NO: 182856 - DNA, 15 bp, Homo sapiens
ctcttatgggagata

SEQ ID NO: 182857 - DNA, 15 bp, Homo sapiens
tctcttatgggagat

SEQ ID NO: 182858 - DNA, 15 bp, Homo sapiens
ttctcttatgggaga

SEQ ID NO: 182859 - DNA, 15 bp, Homo sapiens
gttctcttatgggag

SEQ ID NO: 182860 - DNA, 15 bp, Homo sapiens
tgttctcttatggga

SEQ ID NO: 182861 - DNA, 15 bp, Homo sapiens
ctgttctcttatggg

SEQ ID NO: 182862 - DNA, 15 bp, Homo sapiens
tctgttctcttatgg

SEQ ID NO: 182863 - DNA, 15 bp, Homo sapiens
ctctgttctcttatg

SEQ ID NO: 182864 - DNA, 15 bp, Homo sapiens
actctgttctcttat

SEQ ID NO: 182865 - DNA, 15 bp, Homo sapiens
aactctgttctctta

SEQ ID NO: 182866 - DNA, 15 bp, Homo sapiens
caactctgttctctt

SEQ ID NO: 182867 - DNA, 15 bp, Homo sapiens
ccaactctgttctct

SEQ ID NO: 182868 - DNA, 15 bp, Homo sapiens
cccaactctgttctc

SEQ ID NO: 182869 - DNA, 15 bp, Homo sapiens
ccccaactctgttct

SEQ ID NO: 182870 - DNA, 15 bp, Homo sapiens
cccccaactctgttc

SEQ ID NO: 182871 - DNA, 15 bp, Homo sapiens
tcccccaactctgtt

SEQ ID NO: 182872 - DNA, 15 bp, Homo sapiens
ctcccccaactctgt

SEQ ID NO: 182873 - DNA, 15 bp, Homo sapiens
cctcccccaactctg

SEQ ID NO: 182874 - DNA, 15 bp, Homo sapiens
tcctcccccaactct

SEQ ID NO: 182875 - DNA, 15 bp, Homo sapiens
ttcctcccccaactc

SEQ ID NO: 182876 - DNA, 15 bp, Homo sapiens
tttcctcccccaact

SEQ ID NO: 182877 - DNA, 15 bp, Homo sapiens
ctttcctcccccaac

SEQ ID NO: 182878 - DNA, 15 bp, Homo sapiens
cctttcctcccccaa

SEQ ID NO: 182879 - DNA, 15 bp, Homo sapiens
gcctttcctccccca

SEQ ID NO: 182880 - DNA, 15 bp, Homo sapiens
agcctttcctccccc

SEQ ID NO: 182881 - DNA, 15 bp, Homo sapiens
gagcctttcctcccc

SEQ ID NO: 182882 - DNA, 15 bp, Homo sapiens
ggagcctttcctccc

SEQ ID NO: 182883 - DNA, 15 bp, Homo sapiens
tggagcctttcctcc

SEQ ID NO: 182884 - DNA, 15 bp, Homo sapiens
gtggagcctttcctc

SEQ ID NO: 182885 - DNA, 15 bp, Homo sapiens
agtggagcctttcct

SEQ ID NO: 182886 - DNA, 15 bp, Homo sapiens
tagtggagcctttcc

SEQ ID NO: 182887 - DNA, 15 bp, Homo sapiens
atagtggagcctttc

SEQ ID NO: 182888 - DNA, 15 bp, Homo sapiens
catagtggagccttt

SEQ ID NO: 182889 - DNA, 15 bp, Homo sapiens
ccatagtggagcctt

SEQ ID NO: 182890 - DNA, 15 bp, Homo sapiens
tccatagtggagcct

SEQ ID NO: 182891 - DNA, 15 bp, Homo sapiens
atccatagtggagcc

SEQ ID NO: 182892 - DNA, 15 bp, Homo sapiens
catccatagtggagc

SEQ ID NO: 182893 - DNA, 15 bp, Homo sapiens
ccatccatagtggag

SEQ ID NO: 182894 - DNA, 15 bp, Homo sapiens
tccatccatagtgga

SEQ ID NO: 182895 - DNA, 15 bp, Homo sapiens
atccatccatagtgg

SEQ ID NO: 182896 - DNA, 15 bp, Homo sapiens
gatccatccatagtg

SEQ ID NO: 182897 - DNA, 15 bp, Homo sapiens
tgatccatccatagt

SEQ ID NO: 182898 - DNA, 15 bp, Homo sapiens
ctgatccatccatag

SEQ ID NO: 182899 - DNA, 15 bp, Homo sapiens
actgatccatccata

SEQ ID NO: 182900 - DNA, 15 bp, Homo sapiens
cactgatccatccat

SEQ ID NO: 182901 - DNA, 15 bp, Homo sapiens
ccactgatccatcca

SEQ ID NO: 182902 - DNA, 15 bp, Homo sapiens
accactgatccatcc

SEQ ID NO: 182903 - DNA, 15 bp, Homo sapiens
aaccactgatccatc

SEQ ID NO: 182904 - DNA, 15 bp, Homo sapiens
gaaccactgatccat

SEQ ID NO: 182905 - DNA, 15 bp, Homo sapiens
tgaaccactgatcca

SEQ ID NO: 182906 - DNA, 15 bp, Homo sapiens
ctgaaccactgatcc

SEQ ID NO: 182907 - DNA, 15 bp, Homo sapiens
actgaaccactgatc

SEQ ID NO: 182908 - DNA, 15 bp, Homo sapiens
cactgaaccactgat

SEQ ID NO: 182909 - DNA, 15 bp, Homo sapiens
tcactgaaccactga

SEQ ID NO: 182910 - DNA, 15 bp, Homo sapiens
atcactgaaccactg

SEQ ID NO: 182911 - DNA, 15 bp, Homo sapiens
catcactgaaccact

SEQ ID NO: 182912 - DNA, 15 bp, Homo sapiens
acatcactgaaccac

SEQ ID NO: 182913 - DNA, 15 bp, Homo sapiens
cacatcactgaacca

SEQ ID NO: 182914 - DNA, 15 bp, Homo sapiens
ccacatcactgaacc

SEQ ID NO: 182915 - DNA, 15 bp, Homo sapiens
tccacatcactgaac

SEQ ID NO: 182916 - DNA, 15 bp, Homo sapiens
atccacatcactgaa

SEQ ID NO: 182917 - DNA, 15 bp, Homo sapiens
catccacatcactga

SEQ ID NO: 182918 - DNA, 15 bp, Homo sapiens
tcatccacatcactg

SEQ ID NO: 182919 - DNA, 15 bp, Homo sapiens
ctcatccacatcact

SEQ ID NO: 182920 - DNA, 15 bp, Homo sapiens
cctcatccacatcac

SEQ ID NO: 182921 - DNA, 15 bp, Homo sapiens
gcctcatccacatca

SEQ ID NO: 182922 - DNA, 15 bp, Homo sapiens
ggcctcatccacatc

SEQ ID NO: 182923 - DNA, 15 bp, Homo sapiens
gggcctcatccacat

SEQ ID NO: 182924 - DNA, 15 bp, Homo sapiens
agggcctcatccaca

SEQ ID NO: 182925 - DNA, 15 bp, Homo sapiens
cagggcctcatccac

SEQ ID NO: 182926 - DNA, 15 bp, Homo sapiens
ccagggcctcatcca

SEQ ID NO: 182927 - DNA, 15 bp, Homo sapiens
cccagggcctcatcc

SEQ ID NO: 182928 - DNA, 15 bp, Homo sapiens
gcccagggcctcatc

SEQ ID NO: 182929 - DNA, 15 bp, Homo sapiens
ggcccagggcctcat

SEQ ID NO: 182930 - DNA, 15 bp, Homo sapiens
gggcccagggcctca

SEQ ID NO: 182931 - DNA, 15 bp, Homo sapiens
agggcccagggcctc

SEQ ID NO: 182932 - DNA, 15 bp, Homo sapiens
aagggcccagggcct

SEQ ID NO: 182933 - DNA, 15 bp, Homo sapiens
aaagggcccagggcc

SEQ ID NO: 182934 - DNA, 15 bp, Homo sapiens
gaaagggcccagggc

SEQ ID NO: 182935 - DNA, 15 bp, Homo sapiens
agaaagggcccaggg

SEQ ID NO: 182936 - DNA, 15 bp, Homo sapiens
aagaaagggcccagg

SEQ ID NO: 182937 - DNA, 15 bp, Homo sapiens
aaagaaagggcccag

SEQ ID NO: 182938 - DNA, 15 bp, Homo sapiens
aaaagaaagggccca

SEQ ID NO: 182939 - DNA, 15 bp, Homo sapiens
gaaaagaaagggccc

SEQ ID NO: 182940 - DNA, 15 bp, Homo sapiens
agaaaagaaagggcc

SEQ ID NO: 182941 - DNA, 15 bp, Homo sapiens
aagaaaagaaagggc

SEQ ID NO: 182942 - DNA, 15 bp, Homo sapiens
gaagaaaagaaaggg

SEQ ID NO: 182943 - DNA, 15 bp, Homo sapiens
tgaagaaaagaaagg

SEQ ID NO: 182944 - DNA, 15 bp, Homo sapiens
gtgaagaaaagaaag

SEQ ID NO: 182945 - DNA, 15 bp, Homo sapiens
ggtgaagaaaagaaa

SEQ ID NO: 182946 - DNA, 15 bp, Homo sapiens
gggtgaagaaaagaa

SEQ ID NO: 182947 - DNA, 15 bp, Homo sapiens
agggtgaagaaaaga

SEQ ID NO: 182948 - DNA, 15 bp, Homo sapiens
tagggtgaagaaaag

SEQ ID NO: 182949 - DNA, 15 bp, Homo sapiens
gtagggtgaagaaaa

SEQ ID NO: 182950 - DNA, 15 bp, Homo sapiens
agtagggtgaagaaa

SEQ ID NO: 182951 - DNA, 15 bp, Homo sapiens
cagtagggtgaagaa

SEQ ID NO: 182952 - DNA, 15 bp, Homo sapiens
acagtagggtgaaga

SEQ ID NO: 182953 - DNA, 15 bp, Homo sapiens
gacagtagggtgaag

SEQ ID NO: 182954 - DNA, 15 bp, Homo sapiens
ggacagtagggtgaa

SEQ ID NO: 182955 - DNA, 15 bp, Homo sapiens
aggacagtagggtga

SEQ ID NO: 182956 - DNA, 15 bp, Homo sapiens
aaggacagtagggtg

SEQ ID NO: 182957 - DNA, 15 bp, Homo sapiens
taaggacagtagggt

SEQ ID NO: 182958 - DNA, 15 bp, Homo sapiens
ctaaggacagtaggg

SEQ ID NO: 182959 - DNA, 15 bp, Homo sapiens
actaaggacagtagg

SEQ ID NO: 182960 - DNA, 15 bp, Homo sapiens
cactaaggacagtag

SEQ ID NO: 182961 - DNA, 15 bp, Homo sapiens
tcactaaggacagta

SEQ ID NO: 182962 - DNA, 15 bp, Homo sapiens
gtcactaaggacagt

SEQ ID NO: 182963 - DNA, 15 bp, Homo sapiens
tgtcactaaggacag

SEQ ID NO: 182964 - DNA, 15 bp, Homo sapiens
ctgtcactaaggaca

SEQ ID NO: 182965 - DNA, 15 bp, Homo sapiens
gctgtcactaaggac

SEQ ID NO: 182966 - DNA, 15 bp, Homo sapiens
agctgtcactaagga

SEQ ID NO: 182967 - DNA, 15 bp, Homo sapiens
aagctgtcactaagg

SEQ ID NO: 182968 - DNA, 15 bp, Homo sapiens
aaagctgtcactaag

SEQ ID NO: 182969 - DNA, 15 bp, Homo sapiens
taaagctgtcactaa

SEQ ID NO: 182970 - DNA, 15 bp, Homo sapiens
ataaagctgtcacta

SEQ ID NO: 182971 - DNA, 15 bp, Homo sapiens
tataaagctgtcact

SEQ ID NO: 182972 - DNA, 15 bp, Homo sapiens
gtataaagctgtcac

SEQ ID NO: 182973 - DNA, 15 bp, Homo sapiens
ggtataaagctgtca

SEQ ID NO: 182974 - DNA, 15 bp, Homo sapiens
tggtataaagctgtc

SEQ ID NO: 182975 - DNA, 15 bp, Homo sapiens
ttggtataaagctgt

SEQ ID NO: 182976 - DNA, 15 bp, Homo sapiens
cttggtataaagctg

SEQ ID NO: 182977 - DNA, 15 bp, Homo sapiens
acttggtataaagct

SEQ ID NO: 182978 - DNA, 15 bp, Homo sapiens
gacttggtataaagc

SEQ ID NO: 182979 - DNA, 15 bp, Homo sapiens
agacttggtataaag

SEQ ID NO: 182980 - DNA, 15 bp, Homo sapiens
cagacttggtataaa

SEQ ID NO: 182981 - DNA, 15 bp, Homo sapiens
tcagacttggtataa

SEQ ID NO: 182982 - DNA, 15 bp, Homo sapiens
atcagacttggtata

SEQ ID NO: 182983 - DNA, 15 bp, Homo sapiens
aatcagacttggtat

SEQ ID NO: 182984 - DNA, 15 bp, Homo sapiens
aaatcagacttggta

SEQ ID NO: 182985 - DNA, 15 bp, Homo sapiens
gaaatcagacttggt

SEQ ID NO: 182986 - DNA, 15 bp, Homo sapiens
agaaatcagacttgg

SEQ ID NO: 182987 - DNA, 15 bp, Homo sapiens
gagaaatcagacttg

SEQ ID NO: 182988 - DNA, 15 bp, Homo sapiens
agagaaatcagactt

SEQ ID NO: 182989 - DNA, 15 bp, Homo sapiens
gagagaaatcagact

SEQ ID NO: 182990 - DNA, 15 bp, Homo sapiens
tgagagaaatcagac

SEQ ID NO: 182991 - DNA, 15 bp, Homo sapiens
atgagagaaatcaga

SEQ ID NO: 182992 - DNA, 15 bp, Homo sapiens
catgagagaaatcag

SEQ ID NO: 182993 - DNA, 15 bp, Homo sapiens
ccatgagagaaatca

SEQ ID NO: 182994 - DNA, 15 bp, Homo sapiens
gccatgagagaaatc

SEQ ID NO: 182995 - DNA, 15 bp, Homo sapiens
ggccatgagagaaat

SEQ ID NO: 182996 - DNA, 15 bp, Homo sapiens
cggccatgagagaaa

SEQ ID NO: 182997 - DNA, 15 bp, Homo sapiens
gcggccatgagagaa

SEQ ID NO: 182998 - DNA, 15 bp, Homo sapiens
tgcggccatgagaga

SEQ ID NO: 182999 - DNA, 15 bp, Homo sapiens
ttgcggccatgagag

SEQ ID NO: 183000 - DNA, 15 bp, Homo sapiens
cttgcggccatgaga

SEQ ID NO: 183001 - DNA, 15 bp, Homo sapiens
tcttgcggccatgag

SEQ ID NO: 183002 - DNA, 15 bp, Homo sapiens
atcttgcggccatga

SEQ ID NO: 183003 - DNA, 15 bp, Homo sapiens
tatcttgcggccatg

SEQ ID NO: 183004 - DNA, 15 bp, Homo sapiens
ctatcttgcggccat

SEQ ID NO: 183005 - DNA, 15 bp, Homo sapiens
gctatcttgcggcca

SEQ ID NO: 183006 - DNA, 15 bp, Homo sapiens
agctatcttgcggcc

SEQ ID NO: 183007 - DNA, 15 bp, Homo sapiens
cagctatcttgcggc

SEQ ID NO: 183008 - DNA, 15 bp, Homo sapiens
gcagctatcttgcgg

SEQ ID NO: 183009 - DNA, 15 bp, Homo sapiens
tgcagctatcttgcg

SEQ ID NO: 183010 - DNA, 15 bp, Homo sapiens
ctgcagctatcttgc

SEQ ID NO: 183011 - DNA, 15 bp, Homo sapiens
actgcagctatcttg

SEQ ID NO: 183012 - DNA, 15 bp, Homo sapiens
cactgcagctatctt

SEQ ID NO: 183013 - DNA, 15 bp, Homo sapiens
ccactgcagctatct

SEQ ID NO: 183014 - DNA, 15 bp, Homo sapiens
accactgcagctatc

SEQ ID NO: 183015 - DNA, 15 bp, Homo sapiens
aaccactgcagctat

SEQ ID NO: 183016 - DNA, 15 bp, Homo sapiens
gaaccactgcagcta

SEQ ID NO: 183017 - DNA, 15 bp, Homo sapiens
agaaccactgcagct

SEQ ID NO: 183018 - DNA, 15 bp, Homo sapiens
cagaaccactgcagc

SEQ ID NO: 183019 - DNA, 15 bp, Homo sapiens
ccagaaccactgcag

SEQ ID NO: 183020 - DNA, 15 bp, Homo sapiens
tccagaaccactgca

SEQ ID NO: 183021 - DNA, 15 bp, Homo sapiens
gtccagaaccactgc

SEQ ID NO: 183022 - DNA, 15 bp, Homo sapiens
tgtccagaaccactg

SEQ ID NO: 183023 - DNA, 15 bp, Homo sapiens
atgtccagaaccact

SEQ ID NO: 183024 - DNA, 15 bp, Homo sapiens
gatgtccagaaccac

SEQ ID NO: 183025 - DNA, 15 bp, Homo sapiens
tgatgtccagaacca

SEQ ID NO: 183026 - DNA, 15 bp, Homo sapiens
gtgatgtccagaacc

SEQ ID NO: 183027 - DNA, 15 bp, Homo sapiens
tgtgatgtccagaac

SEQ ID NO: 183028 - DNA, 15 bp, Homo sapiens
atgtgatgtccagaa

SEQ ID NO: 183029 - DNA, 15 bp, Homo sapiens
gatgtgatgtccaga

SEQ ID NO: 183030 - DNA, 15 bp, Homo sapiens
agatgtgatgtccag

SEQ ID NO: 183031 - DNA, 15 bp, Homo sapiens
cagatgtgatgtcca

SEQ ID NO: 183032 - DNA, 15 bp, Homo sapiens
ccagatgtgatgtcc

SEQ ID NO: 183033 - DNA, 15 bp, Homo sapiens
tccagatgtgatgtc

SEQ ID NO: 183034 - DNA, 15 bp, Homo sapiens
gtccagatgtgatgt

SEQ ID NO: 183035 - DNA, 15 bp, Homo sapiens
tgtccagatgtgatg

SEQ ID NO: 183036 - DNA, 15 bp, Homo sapiens
atgtccagatgtgat

SEQ ID NO: 183037 - DNA, 15 bp, Homo sapiens
catgtccagatgtga

SEQ ID NO: 183038 - DNA, 15 bp, Homo sapiens
ccatgtccagatgtg

SEQ ID NO: 183039 - DNA, 15 bp, Homo sapiens
gccatgtccagatgt

SEQ ID NO: 183040 - DNA, 15 bp, Homo sapiens
tgccatgtccagatg

SEQ ID NO: 183041 - DNA, 15 bp, Homo sapiens
ttgccatgtccagat

SEQ ID NO: 183042 - DNA, 15 bp, Homo sapiens
attgccatgtccaga

SEQ ID NO: 183043 - DNA, 15 bp, Homo sapiens
cattgccatgtccag

SEQ ID NO: 183044 - DNA, 15 bp, Homo sapiens
acattgccatgtcca

SEQ ID NO: 183045 - DNA, 15 bp, Homo sapiens
gacattgccatgtcc

SEQ ID NO: 183046 - DNA, 15 bp, Homo sapiens
ggacattgccatgtc

SEQ ID NO: 183047 - DNA, 15 bp, Homo sapiens
tggacattgccatgt

SEQ ID NO: 183048 - DNA, 15 bp, Homo sapiens
ctggacattgccatg

SEQ ID NO: 183049 - DNA, 15 bp, Homo sapiens
tctggacattgccat

SEQ ID NO: 183050 - DNA, 15 bp, Homo sapiens
ctctggacattgcca

SEQ ID NO: 183051 - DNA, 15 bp, Homo sapiens
actctggacattgcc

SEQ ID NO: 183052 - DNA, 15 bp, Homo sapiens
gactctggacattgc

SEQ ID NO: 183053 - DNA, 15 bp, Homo sapiens
tgactctggacattg

SEQ ID NO: 183054 - DNA, 15 bp, Homo sapiens
ttgactctggacatt

SEQ ID NO: 183055 - DNA, 15 bp, Homo sapiens
cttgactctggacat

SEQ ID NO: 183056 - DNA, 15 bp, Homo sapiens
ccttgactctggaca

SEQ ID NO: 183057 - DNA, 15 bp, Homo sapiens
gccttgactctggac

SEQ ID NO: 183058 - DNA, 15 bp, Homo sapiens
tgccttgactctgga

SEQ ID NO: 183059 - DNA, 15 bp, Homo sapiens
ctgccttgactctgg

SEQ ID NO: 183060 - DNA, 15 bp, Homo sapiens
cctgccttgactctg

SEQ ID NO: 183061 - DNA, 15 bp, Homo sapiens
ccctgccttgactct

SEQ ID NO: 183062 - DNA, 15 bp, Homo sapiens
tccctgccttgactc

SEQ ID NO: 183063 - DNA, 15 bp, Homo sapiens
gtccctgccttgact

SEQ ID NO: 183064 - DNA, 15 bp, Homo sapiens
ggtccctgccttgac

SEQ ID NO: 183065 - DNA, 15 bp, Homo sapiens
tggtccctgccttga

SEQ ID NO: 183066 - DNA, 15 bp, Homo sapiens
atggtccctgccttg

SEQ ID NO: 183067 - DNA, 15 bp, Homo sapiens
gatggtccctgcctt

SEQ ID NO: 183068 - DNA, 15 bp, Homo sapiens
agatggtccctgcct

SEQ ID NO: 183069 - DNA, 15 bp, Homo sapiens
gagatggtccctgcc

SEQ ID NO: 183070 - DNA, 15 bp, Homo sapiens
agagatggtccctgc

SEQ ID NO: 183071 - DNA, 15 bp, Homo sapiens
aagagatggtccctg

SEQ ID NO: 183072 - DNA, 15 bp, Homo sapiens
gaagagatggtccct

SEQ ID NO: 183073 - DNA, 15 bp, Homo sapiens
agaagagatggtccc

SEQ ID NO: 183074 - DNA, 15 bp, Homo sapiens
cagaagagatggtcc

SEQ ID NO: 183075 - DNA, 15 bp, Homo sapiens
ccagaagagatggtc

SEQ ID NO: 183076 - DNA, 15 bp, Homo sapiens
accagaagagatggt

SEQ ID NO: 183077 - DNA, 15 bp, Homo sapiens
caccagaagagatgg

SEQ ID NO: 183078 - DNA, 15 bp, Homo sapiens
tcaccagaagagatg

SEQ ID NO: 183079 - DNA, 15 bp, Homo sapiens
ctcaccagaagagat

SEQ ID NO: 183080 - DNA, 15 bp, Homo sapiens
cctcaccagaagaga

SEQ ID NO: 183081 - DNA, 15 bp, Homo sapiens
tcctcaccagaagag

SEQ ID NO: 183082 - DNA, 15 bp, Homo sapiens
gtcctcaccagaaga

SEQ ID NO: 183083 - DNA, 15 bp, Homo sapiens
agtcctcaccagaag

SEQ ID NO: 183084 - DNA, 15 bp, Homo sapiens
aagtcctcaccagaa

SEQ ID NO: 183085 - DNA, 15 bp, Homo sapiens
aaagtcctcaccaga

SEQ ID NO: 183086 - DNA, 15 bp, Homo sapiens
taaagtcctcaccag

SEQ ID NO: 183087 - DNA, 15 bp, Homo sapiens
ataaagtcctcacca

SEQ ID NO: 183088 - DNA, 15 bp, Homo sapiens
tataaagtcctcacc

SEQ ID NO: 183089 - DNA, 15 bp, Homo sapiens
atataaagtcctcac

SEQ ID NO: 183090 - DNA, 15 bp, Homo sapiens
tatataaagtcctca

SEQ ID NO: 183091 - DNA, 15 bp, Homo sapiens
atatataaagtcctc

SEQ ID NO: 183092 - DNA, 15 bp, Homo sapiens
tatatataaagtcct

SEQ ID NO: 183093 - DNA, 15 bp, Homo sapiens
ctatatataaagtcc

SEQ ID NO: 183094 - DNA, 15 bp, Homo sapiens
tctatatataaagtc

SEQ ID NO: 183095 - DNA, 15 bp, Homo sapiens
ctctatatataaagt

SEQ ID NO: 183096 - DNA, 15 bp, Homo sapiens
tctctatatataaag

SEQ ID NO: 183097 - DNA, 15 bp, Homo sapiens
ttctctatatataaa

SEQ ID NO: 183098 - DNA, 15 bp, Homo sapiens
tttctctatatataa

SEQ ID NO: 183099 - DNA, 15 bp, Homo sapiens
ttttctctatatata

SEQ ID NO: 183100 - DNA, 15 bp, Homo sapiens
attttctctatatat

SEQ ID NO: 183101 - DNA, 15 bp, Homo sapiens
gattttctctatata

SEQ ID NO: 183102 - DNA, 15 bp, Homo sapiens
agattttctctatat

SEQ ID NO: 183103 - DNA, 15 bp, Homo sapiens
aagattttctctata

SEQ ID NO: 183104 - DNA, 15 bp, Homo sapiens
aaagattttctctat

SEQ ID NO: 183105 - DNA, 15 bp, Homo sapiens
gaaagattttctcta

SEQ ID NO: 183106 - DNA, 15 bp, Homo sapiens
agaaagattttctct

SEQ ID NO: 183107 - DNA, 15 bp, Homo sapiens
gagaaagattttctc

SEQ ID NO: 183108 - DNA, 15 bp, Homo sapiens
ggagaaagattttct

SEQ ID NO: 183109 - DNA, 15 bp, Homo sapiens
tggagaaagattttc

SEQ ID NO: 183110 - DNA, 15 bp, Homo sapiens
ttggagaaagatttt

SEQ ID NO: 183111 - DNA, 15 bp, Homo sapiens
tttggagaaagattt

SEQ ID NO: 183112 - DNA, 15 bp, Homo sapiens
ctttggagaaagatt

SEQ ID NO: 183113 - DNA, 15 bp, Homo sapiens
gctttggagaaagat

SEQ ID NO: 183114 - DNA, 15 bp, Homo sapiens
ggctttggagaaaga

SEQ ID NO: 183115 - DNA, 15 bp, Homo sapiens
gggctttggagaaag

SEQ ID NO: 183116 - DNA, 15 bp, Homo sapiens
ggggctttggagaaa

SEQ ID NO: 183117 - DNA, 15 bp, Homo sapiens
gggggctttggagaa

SEQ ID NO: 183118 - DNA, 15 bp, Homo sapiens
cgggggctttggaga

SEQ ID NO: 183119 - DNA, 15 bp, Homo sapiens
tcgggggctttggag

SEQ ID NO: 183120 - DNA, 15 bp, Homo sapiens
atcgggggctttgga

SEQ ID NO: 183121 - DNA, 15 bp, Homo sapiens
tatcgggggctttgg

SEQ ID NO: 183122 - DNA, 15 bp, Homo sapiens
gtatcgggggctttg

SEQ ID NO: 183123 - DNA, 15 bp, Homo sapiens
agtatcgggggcttt

SEQ ID NO: 183124 - DNA, 15 bp, Homo sapiens
aagtatcgggggctt

SEQ ID NO: 183125 - DNA, 15 bp, Homo sapiens
gaagtatcgggggct

SEQ ID NO: 183126 - DNA, 15 bp, Homo sapiens
agaagtatcgggggc

SEQ ID NO: 183127 - DNA, 15 bp, Homo sapiens
gagaagtatcggggg

SEQ ID NO: 183128 - DNA, 15 bp, Homo sapiens
ggagaagtatcgggg

SEQ ID NO: 183129 - DNA, 15 bp, Homo sapiens
gggagaagtatcggg

SEQ ID NO: 183130 - DNA, 15 bp, Homo sapiens
tgggagaagtatcgg

SEQ ID NO: 183131 - DNA, 15 bp, Homo sapiens
atgggagaagtatcg

SEQ ID NO: 183132 - DNA, 15 bp, Homo sapiens
aatgggagaagtatc

SEQ ID NO: 183133 - DNA, 15 bp, Homo sapiens
aaatgggagaagtat

SEQ ID NO: 183134 - DNA, 15 bp, Homo sapiens
aaaatgggagaagta

SEQ ID NO: 183135 - DNA, 15 bp, Homo sapiens
aaaaatgggagaagt

SEQ ID NO: 183136 - DNA, 15 bp, Homo sapiens
gaaaaatgggagaag

SEQ ID NO: 183137 - DNA, 15 bp, Homo sapiens
agaaaaatgggagaa

SEQ ID NO: 183138 - DNA, 15 bp, Homo sapiens
gagaaaaatgggaga

SEQ ID NO: 183139 - DNA, 15 bp, Homo sapiens
tgagaaaaatgggag

SEQ ID NO: 183140 - DNA, 15 bp, Homo sapiens
atgagaaaaatggga

SEQ ID NO: 183141 - DNA, 15 bp, Homo sapiens
aatgagaaaaatggg

SEQ ID NO: 183142 - DNA, 15 bp, Homo sapiens
caatgagaaaaatgg

SEQ ID NO: 183143 - DNA, 15 bp, Homo sapiens
tcaatgagaaaaatg

SEQ ID NO: 183144 - DNA, 15 bp, Homo sapiens
gtcaatgagaaaaat

SEQ ID NO: 183145 - DNA, 15 bp, Homo sapiens
ggtcaatgagaaaaa

SEQ ID NO: 183146 - DNA, 15 bp, Homo sapiens
tggtcaatgagaaaa

SEQ ID NO: 183147 - DNA, 15 bp, Homo sapiens
ttggtcaatgagaaa

SEQ ID NO: 183148 - DNA, 15 bp, Homo sapiens
tttggtcaatgagaa

SEQ ID NO: 183149 - DNA, 15 bp, Homo sapiens
ttttggtcaatgaga

SEQ ID NO: 183150 - DNA, 15 bp, Homo sapiens
gttttggtcaatgag

SEQ ID NO: 183151 - DNA, 15 bp, Homo sapiens
ggttttggtcaatga

SEQ ID NO: 183152 - DNA, 15 bp, Homo sapiens
tggttttggtcaatg

SEQ ID NO: 183153 - DNA, 15 bp, Homo sapiens
ctggttttggtcaat

SEQ ID NO: 183154 - DNA, 15 bp, Homo sapiens
cctggttttggtcaa

SEQ ID NO: 183155 - DNA, 15 bp, Homo sapiens
gcctggttttggtca

SEQ ID NO: 183156 - DNA, 15 bp, Homo sapiens
ggcctggttttggtc

SEQ ID NO: 183157 - DNA, 15 bp, Homo sapiens
tggcctggttttggt

SEQ ID NO: 183158 - DNA, 15 bp, Homo sapiens
gtggcctggttttgg

SEQ ID NO: 183159 - DNA, 15 bp, Homo sapiens
agtggcctggttttg

SEQ ID NO: 183160 - DNA, 15 bp, Homo sapiens
aagtggcctggtttt

SEQ ID NO: 183161 - DNA, 15 bp, Homo sapiens
caagtggcctggttt

SEQ ID NO: 183162 - DNA, 15 bp, Homo sapiens
gcaagtggcctggtt

SEQ ID NO: 183163 - DNA, 15 bp, Homo sapiens
ggcaagtggcctggt

SEQ ID NO: 183164 - DNA, 15 bp, Homo sapiens
aggcaagtggcctgg

SEQ ID NO: 183165 - DNA, 15 bp, Homo sapiens
caggcaagtggcctg

SEQ ID NO: 183166 - DNA, 15 bp, Homo sapiens
ccaggcaagtggcct

SEQ ID NO: 183167 - DNA, 15 bp, Homo sapiens
gccaggcaagtggcc

SEQ ID NO: 183168 - DNA, 15 bp, Homo sapiens
agccaggcaagtggc

SEQ ID NO: 183169 - DNA, 15 bp, Homo sapiens
gagccaggcaagtgg

SEQ ID NO: 183170 - DNA, 15 bp, Homo sapiens
ggagccaggcaagtg

SEQ ID NO: 183171 - DNA, 15 bp, Homo sapiens
tggagccaggcaagt

SEQ ID NO: 183172 - DNA, 15 bp, Homo sapiens
ttggagccaggcaag

SEQ ID NO: 183173 - DNA, 15 bp, Homo sapiens
tttggagccaggcaa

SEQ ID NO: 183174 - DNA, 15 bp, Homo sapiens
atttggagccaggca

SEQ ID NO: 183175 - DNA, 15 bp, Homo sapiens
gatttggagccaggc

SEQ ID NO: 183176 - DNA, 15 bp, Homo sapiens
tgatttggagccagg

SEQ ID NO: 183177 - DNA, 15 bp, Homo sapiens
ctgatttggagccag

SEQ ID NO: 183178 - DNA, 15 bp, Homo sapiens
actgatttggagcca

SEQ ID NO: 183179 - DNA, 15 bp, Homo sapiens
gactgatttggagcc

SEQ ID NO: 183180 - DNA, 15 bp, Homo sapiens
tgactgatttggagc

SEQ ID NO: 183181 - DNA, 15 bp, Homo sapiens
ctgactgatttggag

SEQ ID NO: 183182 - DNA, 15 bp, Homo sapiens
actgactgatttgga

SEQ ID NO: 183183 - DNA, 15 bp, Homo sapiens
cactgactgatttgg

SEQ ID NO: 183184 - DNA, 15 bp, Homo sapiens
acactgactgatttg

SEQ ID NO: 183185 - DNA, 15 bp, Homo sapiens
gacactgactgattt

SEQ ID NO: 183186 - DNA, 15 bp, Homo sapiens
tgacactgactgatt

SEQ ID NO: 183187 - DNA, 15 bp, Homo sapiens
ttgacactgactgat

SEQ ID NO: 183188 - DNA, 15 bp, Homo sapiens
attgacactgactga

SEQ ID NO: 183189 - DNA, 15 bp, Homo sapiens
tattgacactgactg

SEQ ID NO: 183190 - DNA, 15 bp, Homo sapiens
ctattgacactgact

SEQ ID NO: 183191 - DNA, 15 bp, Homo sapiens
tctattgacactgac

SEQ ID NO: 183192 - DNA, 15 bp, Homo sapiens
ttctattgacactga

SEQ ID NO: 183193 - DNA, 15 bp, Homo sapiens
attctattgacactg

SEQ ID NO: 183194 - DNA, 15 bp, Homo sapiens
cattctattgacact

SEQ ID NO: 183195 - DNA, 15 bp, Homo sapiens
ccattctattgacac

SEQ ID NO: 183196 - DNA, 15 bp, Homo sapiens
cccattctattgaca

SEQ ID NO: 183197 - DNA, 15 bp, Homo sapiens
tcccattctattgac

SEQ ID NO: 183198 - DNA, 15 bp, Homo sapiens
ttcccattctattga

SEQ ID NO: 183199 - DNA, 15 bp, Homo sapiens
attcccattctattg

SEQ ID NO: 183200 - DNA, 15 bp, Homo sapiens
cattcccattctatt

SEQ ID NO: 183201 - DNA, 15 bp, Homo sapiens
gcattcccattctat

SEQ ID NO: 183202 - DNA, 15 bp, Homo sapiens
ggcattcccattcta

SEQ ID NO: 183203 - DNA, 15 bp, Homo sapiens
gggcattcccattct

SEQ ID NO: 183204 - DNA, 15 bp, Homo sapiens
agggcattcccattc

SEQ ID NO: 183205 - DNA, 15 bp, Homo sapiens
cagggcattcccatt

SEQ ID NO: 183206 - DNA, 15 bp, Homo sapiens
tcagggcattcccat

SEQ ID NO: 183207 - DNA, 15 bp, Homo sapiens
atcagggcattccca

SEQ ID NO: 183208 - DNA, 15 bp, Homo sapiens
catcagggcattccc

SEQ ID NO: 183209 - DNA, 15 bp, Homo sapiens
acatcagggcattcc

SEQ ID NO: 183210 - DNA, 15 bp, Homo sapiens
tacatcagggcattc

SEQ ID NO: 183211 - DNA, 15 bp, Homo sapiens
ttacatcagggcatt

SEQ ID NO: 183212 - DNA, 15 bp, Homo sapiens
tttacatcagggcat

SEQ ID NO: 183213 - DNA, 15 bp, Homo sapiens
gtttacatcagggca

SEQ ID NO: 183214 - DNA, 15 bp, Homo sapiens
agtttacatcagggc

SEQ ID NO: 183215 - DNA, 15 bp, Homo sapiens
tagtttacatcaggg

SEQ ID NO: 183216 - DNA, 15 bp, Homo sapiens
ctagtttacatcagg

SEQ ID NO: 183217 - DNA, 15 bp, Homo sapiens
tctagtttacatcag

SEQ ID NO: 183218 - DNA, 15 bp, Homo sapiens
gtctagtttacatca

SEQ ID NO: 183219 - DNA, 15 bp, Homo sapiens
tgtctagtttacatc

SEQ ID NO: 183220 - DNA, 15 bp, Homo sapiens
ctgtctagtttacat

SEQ ID NO: 183221 - DNA, 15 bp, Homo sapiens
cctgtctagtttaca

SEQ ID NO: 183222 - DNA, 15 bp, Homo sapiens
tcctgtctagtttac

SEQ ID NO: 183223 - DNA, 15 bp, Homo sapiens
gtcctgtctagttta

SEQ ID NO: 183224 - DNA, 15 bp, Homo sapiens
ggtcctgtctagttt

SEQ ID NO: 183225 - DNA, 15 bp, Homo sapiens
gggtcctgtctagtt

SEQ ID NO: 183226 - DNA, 15 bp, Homo sapiens
tgggtcctgtctagt

SEQ ID NO: 183227 - DNA, 15 bp, Homo sapiens
gtgggtcctgtctag

SEQ ID NO: 183228 - DNA, 15 bp, Homo sapiens
ggtgggtcctgtcta

SEQ ID NO: 183229 - DNA, 15 bp, Homo sapiens
tggtgggtcctgtct

SEQ ID NO: 183230 - DNA, 15 bp, Homo sapiens
ctggtgggtcctgtc

SEQ ID NO: 183231 - DNA, 15 bp, Homo sapiens
gctggtgggtcctgt

SEQ ID NO: 183232 - DNA, 15 bp, Homo sapiens
agctggtgggtcctg

SEQ ID NO: 183233 - DNA, 15 bp, Homo sapiens
cagctggtgggtcct

SEQ ID NO: 183234 - DNA, 15 bp, Homo sapiens
ccagctggtgggtcc

SEQ ID NO: 183235 - DNA, 15 bp, Homo sapiens
accagctggtgggtc

SEQ ID NO: 183236 - DNA, 15 bp, Homo sapiens
caccagctggtgggt

SEQ ID NO: 183237 - DNA, 15 bp, Homo sapiens
tcaccagctggtggg

SEQ ID NO: 183238 - DNA, 15 bp, Homo sapiens
ctcaccagctggtgg

SEQ ID NO: 183239 - DNA, 15 bp, Homo sapiens
cctcaccagctggtg

SEQ ID NO: 183240 - DNA, 15 bp, Homo sapiens
ccctcaccagctggt

SEQ ID NO: 183241 - DNA, 15 bp, Homo sapiens
tccctcaccagctgg

SEQ ID NO: 183242 - DNA, 15 bp, Homo sapiens
ttccctcaccagctg

SEQ ID NO: 183243 - DNA, 15 bp, Homo sapiens
attccctcaccagct

SEQ ID NO: 183244 - DNA, 15 bp, Homo sapiens
cattccctcaccagc

SEQ ID NO: 183245 - DNA, 15 bp, Homo sapiens
ccattccctcaccag

SEQ ID NO: 183246 - DNA, 15 bp, Homo sapiens
cccattccctcacca

SEQ ID NO: 183247 - DNA, 15 bp, Homo sapiens
ccccattccctcacc

SEQ ID NO: 183248 - DNA, 15 bp, Homo sapiens
accccattccctcac

SEQ ID NO: 183249 - DNA, 15 bp, Homo sapiens
gaccccattccctca

SEQ ID NO: 183250 - DNA, 15 bp, Homo sapiens
tgaccccattccctc

SEQ ID NO: 183251 - DNA, 15 bp, Homo sapiens
ctgaccccattccct

SEQ ID NO: 183252 - DNA, 15 bp, Homo sapiens
actgaccccattccc

SEQ ID NO: 183253 - DNA, 15 bp, Homo sapiens
aactgaccccattcc

SEQ ID NO: 183254 - DNA, 15 bp, Homo sapiens
aaactgaccccattc

SEQ ID NO: 183255 - DNA, 15 bp, Homo sapiens
taaactgaccccatt

SEQ ID NO: 183256 - DNA, 15 bp, Homo sapiens
ataaactgaccccat

SEQ ID NO: 183257 - DNA, 15 bp, Homo sapiens
gataaactgacccca

SEQ ID NO: 183258 - DNA, 15 bp, Homo sapiens
agataaactgacccc

SEQ ID NO: 183259 - DNA, 15 bp, Homo sapiens
cagataaactgaccc

SEQ ID NO: 183260 - DNA, 15 bp, Homo sapiens
tcagataaactgacc

SEQ ID NO: 183261 - DNA, 15 bp, Homo sapiens
ctcagataaactgac

SEQ ID NO: 183262 - DNA, 15 bp, Homo sapiens
cctcagataaactga

SEQ ID NO: 183263 - DNA, 15 bp, Homo sapiens
acctcagataaactg

SEQ ID NO: 183264 - DNA, 15 bp, Homo sapiens
cacctcagataaact

SEQ ID NO: 183265 - DNA, 15 bp, Homo sapiens
gcacctcagataaac

SEQ ID NO: 183266 - DNA, 15 bp, Homo sapiens
tgcacctcagataaa

SEQ ID NO: 183267 - DNA, 15 bp, Homo sapiens
ttgcacctcagataa

SEQ ID NO: 183268 - DNA, 15 bp, Homo sapiens
cttgcacctcagata

SEQ ID NO: 183269 - DNA, 15 bp, Homo sapiens
tcttgcacctcagat

SEQ ID NO: 183270 - DNA, 15 bp, Homo sapiens
gtcttgcacctcaga

SEQ ID NO: 183271 - DNA, 15 bp, Homo sapiens
tgtcttgcacctcag

SEQ ID NO: 183272 - DNA, 15 bp, Homo sapiens
gtgtcttgcacctca

SEQ ID NO: 183273 - DNA, 15 bp, Homo sapiens
agtgtcttgcacctc

SEQ ID NO: 183274 - DNA, 15 bp, Homo sapiens
cagtgtcttgcacct

SEQ ID NO: 183275 - DNA, 15 bp, Homo sapiens
acagtgtcttgcacc

SEQ ID NO: 183276 - DNA, 15 bp, Homo sapiens
cacagtgtcttgcac

SEQ ID NO: 183277 - DNA, 15 bp, Homo sapiens
ccacagtgtcttgca

SEQ ID NO: 183278 - DNA, 15 bp, Homo sapiens
tccacagtgtcttgc

SEQ ID NO: 183279 - DNA, 15 bp, Homo sapiens
ctccacagtgtcttg

SEQ ID NO: 183280 - DNA, 15 bp, Homo sapiens
tctccacagtgtctt

SEQ ID NO: 183281 - DNA, 15 bp, Homo sapiens
ttctccacagtgtct

SEQ ID NO: 183282 - DNA, 15 bp, Homo sapiens
cttctccacagtgtc

SEQ ID NO: 183283 - DNA, 15 bp, Homo sapiens
ccttctccacagtgt

SEQ ID NO: 183284 - DNA, 15 bp, Homo sapiens
tccttctccacagtg

SEQ ID NO: 183285 - DNA, 15 bp, Homo sapiens
ctccttctccacagt

SEQ ID NO: 183286 - DNA, 15 bp, Homo sapiens
actccttctccacag

SEQ ID NO: 183287 - DNA, 15 bp, Homo sapiens
cactccttctccaca

SEQ ID NO: 183288 - DNA, 15 bp, Homo sapiens
ccactccttctccac

SEQ ID NO: 183289 - DNA, 15 bp, Homo sapiens
cccactccttctcca

SEQ ID NO: 183290 - DNA, 15 bp, Homo sapiens
tcccactccttctcc

SEQ ID NO: 183291 - DNA, 15 bp, Homo sapiens
ttcccactccttctc

SEQ ID NO: 183292 - DNA, 15 bp, Homo sapiens
gttcccactccttct

SEQ ID NO: 183293 - DNA, 15 bp, Homo sapiens
ggttcccactccttc

SEQ ID NO: 183294 - DNA, 15 bp, Homo sapiens
aggttcccactcctt

SEQ ID NO: 183295 - DNA, 15 bp, Homo sapiens
caggttcccactcct

SEQ ID NO: 183296 - DNA, 15 bp, Homo sapiens
ccaggttcccactcc

SEQ ID NO: 183297 - DNA, 15 bp, Homo sapiens
tccaggttcccactc

SEQ ID NO: 183298 - DNA, 15 bp, Homo sapiens
gtccaggttcccact

SEQ ID NO: 183299 - DNA, 15 bp, Homo sapiens
tgtccaggttcccac

SEQ ID NO: 183300 - DNA, 15 bp, Homo sapiens
ttgtccaggttccca

SEQ ID NO: 183301 - DNA, 15 bp, Homo sapiens
cttgtccaggttccc

SEQ ID NO: 183302 - DNA, 15 bp, Homo sapiens
tcttgtccaggttcc

SEQ ID NO: 183303 - DNA, 15 bp, Homo sapiens
atcttgtccaggttc

SEQ ID NO: 183304 - DNA, 15 bp, Homo sapiens
catcttgtccaggtt

SEQ ID NO: 183305 - DNA, 15 bp, Homo sapiens
ccatcttgtccaggt

SEQ ID NO: 183306 - DNA, 15 bp, Homo sapiens
cccatcttgtccagg

SEQ ID NO: 183307 - DNA, 15 bp, Homo sapiens
ccccatcttgtccag

SEQ ID NO: 183308 - DNA, 15 bp, Homo sapiens
gccccatcttgtcca

SEQ ID NO: 183309 - DNA, 15 bp, Homo sapiens
ggccccatcttgtcc

SEQ ID NO: 183310 - DNA, 15 bp, Homo sapiens
tggccccatcttgtc

SEQ ID NO: 183311 - DNA, 15 bp, Homo sapiens
atggccccatcttgt

SEQ ID NO: 183312 - DNA, 15 bp, Homo sapiens
catggccccatcttg

SEQ ID NO: 183313 - DNA, 15 bp, Homo sapiens
acatggccccatctt

SEQ ID NO: 183314 - DNA, 15 bp, Homo sapiens
aacatggccccatct

SEQ ID NO: 183315 - DNA, 15 bp, Homo sapiens
taacatggccccatc

SEQ ID NO: 183316 - DNA, 15 bp, Homo sapiens
ctaacatggccccat

SEQ ID NO: 183317 - DNA, 15 bp, Homo sapiens
actaacatggcccca

SEQ ID NO: 183318 - DNA, 15 bp, Homo sapiens
tactaacatggcccc

SEQ ID NO: 183319 - DNA, 15 bp, Homo sapiens
ttactaacatggccc

SEQ ID NO: 183320 - DNA, 15 bp, Homo sapiens
gttactaacatggcc

SEQ ID NO: 183321 - DNA, 15 bp, Homo sapiens
cgttactaacatggc

SEQ ID NO: 183322 - DNA, 15 bp, Homo sapiens
tcgttactaacatgg

SEQ ID NO: 183323 - DNA, 15 bp, Homo sapiens
ctcgttactaacatg

SEQ ID NO: 183324 - DNA, 15 bp, Homo sapiens
cctcgttactaacat

SEQ ID NO: 183325 - DNA, 15 bp, Homo sapiens
tcctcgttactaaca

SEQ ID NO: 183326 - DNA, 15 bp, Homo sapiens
ctcctcgttactaac

SEQ ID NO: 183327 - DNA, 15 bp, Homo sapiens
cctcctcgttactaa

SEQ ID NO: 183328 - DNA, 15 bp, Homo sapiens
tcctcctcgttacta

SEQ ID NO: 183329 - DNA, 15 bp, Homo sapiens
ctcctcctcgttact

SEQ ID NO: 183330 - DNA, 15 bp, Homo sapiens
cctcctcctcgttac

SEQ ID NO: 183331 - DNA, 15 bp, Homo sapiens
ccctcctcctcgtta

SEQ ID NO: 183332 - DNA, 15 bp, Homo sapiens
accctcctcctcgtt

SEQ ID NO: 183333 - DNA, 15 bp, Homo sapiens
caccctcctcctcgt

SEQ ID NO: 183334 - DNA, 15 bp, Homo sapiens
tcaccctcctcctcg

SEQ ID NO: 183335 - DNA, 15 bp, Homo sapiens
gtcaccctcctcctc

SEQ ID NO: 183336 - DNA, 15 bp, Homo sapiens
tgtcaccctcctcct

SEQ ID NO: 183337 - DNA, 15 bp, Homo sapiens
atgtcaccctcctcc

SEQ ID NO: 183338 - DNA, 15 bp, Homo sapiens
gatgtcaccctcctc

SEQ ID NO: 183339 - DNA, 15 bp, Homo sapiens
agatgtcaccctcct

SEQ ID NO: 183340 - DNA, 15 bp, Homo sapiens
aagatgtcaccctcc

SEQ ID NO: 183341 - DNA, 15 bp, Homo sapiens
aaagatgtcaccctc

SEQ ID NO: 183342 - DNA, 15 bp, Homo sapiens
aaaagatgtcaccct

SEQ ID NO: 183343 - DNA, 15 bp, Homo sapiens
caaaagatgtcaccc

SEQ ID NO: 183344 - DNA, 15 bp, Homo sapiens
gcaaaagatgtcacc

SEQ ID NO: 183345 - DNA, 15 bp, Homo sapiens
ggcaaaagatgtcac

SEQ ID NO: 183346 - DNA, 15 bp, Homo sapiens
aggcaaaagatgtca

SEQ ID NO: 183347 - DNA, 15 bp, Homo sapiens
gaggcaaaagatgtc

SEQ ID NO: 183348 - DNA, 15 bp, Homo sapiens
ggaggcaaaagatgt

SEQ ID NO: 183349 - DNA, 15 bp, Homo sapiens
tggaggcaaaagatg

SEQ ID NO: 183350 - DNA, 15 bp, Homo sapiens
atggaggcaaaagat

SEQ ID NO: 183351 - DNA, 15 bp, Homo sapiens
catggaggcaaaaga

SEQ ID NO: 183352 - DNA, 15 bp, Homo sapiens
tcatggaggcaaaag

SEQ ID NO: 183353 - DNA, 15 bp, Homo sapiens
ttcatggaggcaaaa

SEQ ID NO: 183354 - DNA, 15 bp, Homo sapiens
attcatggaggcaaa

SEQ ID NO: 183355 - DNA, 15 bp, Homo sapiens
tattcatggaggcaa

SEQ ID NO: 183356 - DNA, 15 bp, Homo sapiens
ctattcatggaggca

SEQ ID NO: 183357 - DNA, 15 bp, Homo sapiens
gctattcatggaggc

SEQ ID NO: 183358 - DNA, 15 bp, Homo sapiens
tgctattcatggagg

SEQ ID NO: 183359 - DNA, 15 bp, Homo sapiens
ttgctattcatggag

SEQ ID NO: 183360 - DNA, 15 bp, Homo sapiens
tttgctattcatgga

SEQ ID NO: 183361 - DNA, 15 bp, Homo sapiens
ctttgctattcatgg

SEQ ID NO: 183362 - DNA, 15 bp, Homo sapiens
cctttgctattcatg

SEQ ID NO: 183363 - DNA, 15 bp, Homo sapiens
ccctttgctattcat

SEQ ID NO: 183364 - DNA, 15 bp, Homo sapiens
gccctttgctattca

SEQ ID NO: 183365 - DNA, 15 bp, Homo sapiens
tgccctttgctattc

SEQ ID NO: 183366 - DNA, 15 bp, Homo sapiens
ctgccctttgctatt

SEQ ID NO: 183367 - DNA, 15 bp, Homo sapiens
actgccctttgctat

SEQ ID NO: 183368 - DNA, 15 bp, Homo sapiens
aactgccctttgcta

SEQ ID NO: 183369 - DNA, 15 bp, Homo sapiens
gaactgccctttgct

SEQ ID NO: 183370 - DNA, 15 bp, Homo sapiens
agaactgccctttgc

SEQ ID NO: 183371 - DNA, 15 bp, Homo sapiens
gagaactgccctttg

SEQ ID NO: 183372 - DNA, 15 bp, Homo sapiens
tgagaactgcccttt

SEQ ID NO: 183373 - DNA, 15 bp, Homo sapiens
gtgagaactgccctt

SEQ ID NO: 183374 - DNA, 15 bp, Homo sapiens
agtgagaactgccct

SEQ ID NO: 183375 - DNA, 15 bp, Homo sapiens
aagtgagaactgccc

SEQ ID NO: 183376 - DNA, 15 bp, Homo sapiens
taagtgagaactgcc

SEQ ID NO: 183377 - DNA, 15 bp, Homo sapiens
ttaagtgagaactgc

SEQ ID NO: 183378 - DNA, 15 bp, Homo sapiens
gttaagtgagaactg

SEQ ID NO: 183379 - DNA, 15 bp, Homo sapiens
agttaagtgagaact

SEQ ID NO: 183380 - DNA, 15 bp, Homo sapiens
cagttaagtgagaac

SEQ ID NO: 183381 - DNA, 15 bp, Homo sapiens
ccagttaagtgagaa

SEQ ID NO: 183382 - DNA, 15 bp, Homo sapiens
cccagttaagtgaga

SEQ ID NO: 183383 - DNA, 15 bp, Homo sapiens
ccccagttaagtgag

SEQ ID NO: 183384 - DNA, 15 bp, Homo sapiens
accccagttaagtga

SEQ ID NO: 183385 - DNA, 15 bp, Homo sapiens
caccccagttaagtg

SEQ ID NO: 183386 - DNA, 15 bp, Homo sapiens
gcaccccagttaagt

SEQ ID NO: 183387 - DNA, 15 bp, Homo sapiens
tgcaccccagttaag

SEQ ID NO: 183388 - DNA, 15 bp, Homo sapiens
gtgcaccccagttaa

SEQ ID NO: 183389 - DNA, 15 bp, Homo sapiens
tgtgcaccccagtta

SEQ ID NO: 183390 - DNA, 15 bp, Homo sapiens
atgtgcaccccagtt

SEQ ID NO: 183391 - DNA, 15 bp, Homo sapiens
catgtgcaccccagt

SEQ ID NO: 183392 - DNA, 15 bp, Homo sapiens
ccatgtgcaccccag

SEQ ID NO: 183393 - DNA, 15 bp, Homo sapiens
gccatgtgcacccca

SEQ ID NO: 183394 - DNA, 15 bp, Homo sapiens
tgccatgtgcacccc

SEQ ID NO: 183395 - DNA, 15 bp, Homo sapiens
atgccatgtgcaccc

SEQ ID NO: 183396 - DNA, 15 bp, Homo sapiens
gatgccatgtgcacc

SEQ ID NO: 183397 - DNA, 15 bp, Homo sapiens
tgatgccatgtgcac

SEQ ID NO: 183398 - DNA, 15 bp, Homo sapiens
gtgatgccatgtgca

SEQ ID NO: 183399 - DNA, 15 bp, Homo sapiens
tgtgatgccatgtgc

SEQ ID NO: 183400 - DNA, 15 bp, Homo sapiens
ctgtgatgccatgtg

SEQ ID NO: 183401 - DNA, 15 bp, Homo sapiens
tctgtgatgccatgt

SEQ ID NO: 183402 - DNA, 15 bp, Homo sapiens
ttctgtgatgccatg

SEQ ID NO: 183403 - DNA, 15 bp, Homo sapiens
attctgtgatgccat

SEQ ID NO: 183404 - DNA, 15 bp, Homo sapiens
cattctgtgatgcca

SEQ ID NO: 183405 - DNA, 15 bp, Homo sapiens
gcattctgtgatgcc

SEQ ID NO: 183406 - DNA, 15 bp, Homo sapiens
agcattctgtgatgc

SEQ ID NO: 183407 - DNA, 15 bp, Homo sapiens
tagcattctgtgatg

SEQ ID NO: 183408 - DNA, 15 bp, Homo sapiens
ctagcattctgtgat

SEQ ID NO: 183409 - DNA, 15 bp, Homo sapiens
tctagcattctgtga

SEQ ID NO: 183410 - DNA, 15 bp, Homo sapiens
ttctagcattctgtg

SEQ ID NO: 183411 - DNA, 15 bp, Homo sapiens
gttctagcattctgt

SEQ ID NO: 183412 - DNA, 15 bp, Homo sapiens
agttctagcattctg

SEQ ID NO: 183413 - DNA, 15 bp, Homo sapiens
aagttctagcattct

SEQ ID NO: 183414 - DNA, 15 bp, Homo sapiens
caagttctagcattc

SEQ ID NO: 183415 - DNA, 15 bp, Homo sapiens
ccaagttctagcatt

SEQ ID NO: 183416 - DNA, 15 bp, Homo sapiens
tccaagttctagcat

SEQ ID NO: 183417 - DNA, 15 bp, Homo sapiens
ttccaagttctagca

SEQ ID NO: 183418 - DNA, 15 bp, Homo sapiens
cttccaagttctagc

SEQ ID NO: 183419 - DNA, 15 bp, Homo sapiens
ccttccaagttctag

SEQ ID NO: 183420 - DNA, 15 bp, Homo sapiens
cccttccaagttcta

SEQ ID NO: 183421 - DNA, 15 bp, Homo sapiens
tcccttccaagttct

SEQ ID NO: 183422 - DNA, 15 bp, Homo sapiens
ttcccttccaagttc

SEQ ID NO: 183423 - DNA, 15 bp, Homo sapiens
tttcccttccaagtt

SEQ ID NO: 183424 - DNA, 15 bp, Homo sapiens
atttcccttccaagt

SEQ ID NO: 183425 - DNA, 15 bp, Homo sapiens
aatttcccttccaag

SEQ ID NO: 183426 - DNA, 15 bp, Homo sapiens
taatttcccttccaa

SEQ ID NO: 183427 - DNA, 15 bp, Homo sapiens
ctaatttcccttcca

SEQ ID NO: 183428 - DNA, 15 bp, Homo sapiens
tctaatttcccttcc

SEQ ID NO: 183429 - DNA, 15 bp, Homo sapiens
ctctaatttcccttc

SEQ ID NO: 183430 - DNA, 15 bp, Homo sapiens
tctctaatttccctt

SEQ ID NO: 183431 - DNA, 15 bp, Homo sapiens
gtctctaatttccct

SEQ ID NO: 183432 - DNA, 15 bp, Homo sapiens
tgtctctaatttccc

SEQ ID NO: 183433 - DNA, 15 bp, Homo sapiens
ttgtctctaatttcc

SEQ ID NO: 183434 - DNA, 15 bp, Homo sapiens
attgtctctaatttc

SEQ ID NO: 183435 - DNA, 15 bp, Homo sapiens
gattgtctctaattt

SEQ ID NO: 183436 - DNA, 15 bp, Homo sapiens
agattgtctctaatt

SEQ ID NO: 183437 - DNA, 15 bp, Homo sapiens
aagattgtctctaat

SEQ ID NO: 183438 - DNA, 15 bp, Homo sapiens
gaagattgtctctaa

SEQ ID NO: 183439 - DNA, 15 bp, Homo sapiens
agaagattgtctcta

SEQ ID NO: 183440 - DNA, 15 bp, Homo sapiens
aagaagattgtctct

SEQ ID NO: 183441 - DNA, 15 bp, Homo sapiens
gaagaagattgtctc

SEQ ID NO: 183442 - DNA, 15 bp, Homo sapiens
tgaagaagattgtct

SEQ ID NO: 183443 - DNA, 15 bp, Homo sapiens
ttgaagaagattgtc

SEQ ID NO: 183444 - DNA, 15 bp, Homo sapiens
attgaagaagattgt

SEQ ID NO: 183445 - DNA, 15 bp, Homo sapiens
gattgaagaagattg

SEQ ID NO: 183446 - DNA, 15 bp, Homo sapiens
ggattgaagaagatt

SEQ ID NO: 183447 - DNA, 15 bp, Homo sapiens
aggattgaagaagat

SEQ ID NO: 183448 - DNA, 15 bp, Homo sapiens
aaggattgaagaaga

SEQ ID NO: 183449 - DNA, 15 bp, Homo sapiens
aaaggattgaagaag

SEQ ID NO: 183450 - DNA, 15 bp, Homo sapiens
gaaaggattgaagaa

SEQ ID NO: 183451 - DNA, 15 bp, Homo sapiens
tgaaaggattgaaga

SEQ ID NO: 183452 - DNA, 15 bp, Homo sapiens
atgaaaggattgaag

SEQ ID NO: 183453 - DNA, 15 bp, Homo sapiens
aatgaaaggattgaa

SEQ ID NO: 183454 - DNA, 15 bp, Homo sapiens
aaatgaaaggattga

SEQ ID NO: 183455 - DNA, 15 bp, Homo sapiens
aaaatgaaaggattg

SEQ ID NO: 183456 - DNA, 15 bp, Homo sapiens
taaaatgaaaggatt

SEQ ID NO: 183457 - DNA, 15 bp, Homo sapiens
gtaaaatgaaaggat

SEQ ID NO: 183458 - DNA, 15 bp, Homo sapiens
tgtaaaatgaaagga

SEQ ID NO: 183459 - DNA, 15 bp, Homo sapiens
gtgtaaaatgaaagg

SEQ ID NO: 183460 - DNA, 15 bp, Homo sapiens
tgtgtaaaatgaaag

SEQ ID NO: 183461 - DNA, 15 bp, Homo sapiens
atgtgtaaaatgaaa

SEQ ID NO: 183462 - DNA, 15 bp, Homo sapiens
catgtgtaaaatgaa

SEQ ID NO: 183463 - DNA, 15 bp, Homo sapiens
tcatgtgtaaaatga

SEQ ID NO: 183464 - DNA, 15 bp, Homo sapiens
ttcatgtgtaaaatg

SEQ ID NO: 183465 - DNA, 15 bp, Homo sapiens
cttcatgtgtaaaat

SEQ ID NO: 183466 - DNA, 15 bp, Homo sapiens
tcttcatgtgtaaaa

SEQ ID NO: 183467 - DNA, 15 bp, Homo sapiens
ttcttcatgtgtaaa

SEQ ID NO: 183468 - DNA, 15 bp, Homo sapiens
tttcttcatgtgtaa

SEQ ID NO: 183469 - DNA, 15 bp, Homo sapiens
gtttcttcatgtgta

SEQ ID NO: 183470 - DNA, 15 bp, Homo sapiens
agtttcttcatgtgt

SEQ ID NO: 183471 - DNA, 15 bp, Homo sapiens
cagtttcttcatgtg

SEQ ID NO: 183472 - DNA, 15 bp, Homo sapiens
tcagtttcttcatgt

SEQ ID NO: 183473 - DNA, 15 bp, Homo sapiens
ctcagtttcttcatg

SEQ ID NO: 183474 - DNA, 15 bp, Homo sapiens
gctcagtttcttcat

SEQ ID NO: 183475 - DNA, 15 bp, Homo sapiens
agctcagtttcttca

SEQ ID NO: 183476 - DNA, 15 bp, Homo sapiens
gagctcagtttcttc

SEQ ID NO: 183477 - DNA, 15 bp, Homo sapiens
ggagctcagtttctt

SEQ ID NO: 183478 - DNA, 15 bp, Homo sapiens
tggagctcagtttct

SEQ ID NO: 183479 - DNA, 15 bp, Homo sapiens
ctggagctcagtttc

SEQ ID NO: 183480 - DNA, 15 bp, Homo sapiens
cctggagctcagttt

SEQ ID NO: 183481 - DNA, 15 bp, Homo sapiens
tcctggagctcagtt

SEQ ID NO: 183482 - DNA, 15 bp, Homo sapiens
ttcctggagctcagt

SEQ ID NO: 183483 - DNA, 15 bp, Homo sapiens
attcctggagctcag

SEQ ID NO: 183484 - DNA, 15 bp, Homo sapiens
cattcctggagctca

SEQ ID NO: 183485 - DNA, 15 bp, Homo sapiens
tcattcctggagctc

SEQ ID NO: 183486 - DNA, 15 bp, Homo sapiens
ctcattcctggagct

SEQ ID NO: 183487 - DNA, 15 bp, Homo sapiens
cctcattcctggagc

SEQ ID NO: 183488 - DNA, 15 bp, Homo sapiens
tcctcattcctggag

SEQ ID NO: 183489 - DNA, 15 bp, Homo sapiens
ctcctcattcctgga

SEQ ID NO: 183490 - DNA, 15 bp, Homo sapiens
cctcctcattcctgg

SEQ ID NO: 183491 - DNA, 15 bp, Homo sapiens
tcctcctcattcctg

SEQ ID NO: 183492 - DNA, 15 bp, Homo sapiens
ctcctcctcattcct

SEQ ID NO: 183493 - DNA, 15 bp, Homo sapiens
actcctcctcattcc

SEQ ID NO: 183494 - DNA, 15 bp, Homo sapiens
aactcctcctcattc

SEQ ID NO: 183495 - DNA, 15 bp, Homo sapiens
caactcctcctcatt

SEQ ID NO: 183496 - DNA, 15 bp, Homo sapiens
gcaactcctcctcat

SEQ ID NO: 183497 - DNA, 15 bp, Homo sapiens
ggcaactcctcctca

SEQ ID NO: 183498 - DNA, 15 bp, Homo sapiens
gggcaactcctcctc

SEQ ID NO: 183499 - DNA, 15 bp, Homo sapiens
tgggcaactcctcct

SEQ ID NO: 183500 - DNA, 15 bp, Homo sapiens
ttgggcaactcctcc

SEQ ID NO: 183501 - DNA, 15 bp, Homo sapiens
tttgggcaactcctc

SEQ ID NO: 183502 - DNA, 15 bp, Homo sapiens
gtttgggcaactcct

SEQ ID NO: 183503 - DNA, 15 bp, Homo sapiens
agtttgggcaactcc

SEQ ID NO: 183504 - DNA, 15 bp, Homo sapiens
gagtttgggcaactc

SEQ ID NO: 183505 - DNA, 15 bp, Homo sapiens
tgagtttgggcaact

SEQ ID NO: 183506 - DNA, 15 bp, Homo sapiens
atgagtttgggcaac

SEQ ID NO: 183507 - DNA, 15 bp, Homo sapiens
catgagtttgggcaa

SEQ ID NO: 183508 - DNA, 15 bp, Homo sapiens
ccatgagtttgggca

SEQ ID NO: 183509 - DNA, 15 bp, Homo sapiens
tccatgagtttgggc

SEQ ID NO: 183510 - DNA, 15 bp, Homo sapiens
atccatgagtttggg

SEQ ID NO: 183511 - DNA, 15 bp, Homo sapiens
gatccatgagtttgg

SEQ ID NO: 183512 - DNA, 15 bp, Homo sapiens
ggatccatgagtttg

SEQ ID NO: 183513 - DNA, 15 bp, Homo sapiens
tggatccatgagttt

SEQ ID NO: 183514 - DNA, 15 bp, Homo sapiens
gtggatccatgagtt

SEQ ID NO: 183515 - DNA, 15 bp, Homo sapiens
ggtggatccatgagt

SEQ ID NO: 183516 - DNA, 15 bp, Homo sapiens
gggtggatccatgag

SEQ ID NO: 183517 - DNA, 15 bp, Homo sapiens
agggtggatccatga

SEQ ID NO: 183518 - DNA, 15 bp, Homo sapiens
cagggtggatccatg

SEQ ID NO: 183519 - DNA, 15 bp, Homo sapiens
ccagggtggatccat

SEQ ID NO: 183520 - DNA, 15 bp, Homo sapiens
cccagggtggatcca

SEQ ID NO: 183521 - DNA, 15 bp, Homo sapiens
gcccagggtggatcc

SEQ ID NO: 183522 - DNA, 15 bp, Homo sapiens
ggcccagggtggatc

SEQ ID NO: 183523 - DNA, 15 bp, Homo sapiens
gggcccagggtggat

SEQ ID NO: 183524 - DNA, 15 bp, Homo sapiens
ggggcccagggtgga

SEQ ID NO: 183525 - DNA, 15 bp, Homo sapiens
tggggcccagggtgg

SEQ ID NO: 183526 - DNA, 15 bp, Homo sapiens
ctggggcccagggtg

SEQ ID NO: 183527 - DNA, 15 bp, Homo sapiens
cctggggcccagggt

SEQ ID NO: 183528 - DNA, 15 bp, Homo sapiens
gcctggggcccaggg

SEQ ID NO: 183529 - DNA, 15 bp, Homo sapiens
tgcctggggcccagg

SEQ ID NO: 183530 - DNA, 15 bp, Homo sapiens
gtgcctggggcccag

SEQ ID NO: 183531 - DNA, 15 bp, Homo sapiens
ggtgcctggggccca

SEQ ID NO: 183532 - DNA, 15 bp, Homo sapiens
tggtgcctggggccc

SEQ ID NO: 183533 - DNA, 15 bp, Homo sapiens
ctggtgcctggggcc

SEQ ID NO: 183534 - DNA, 15 bp, Homo sapiens
gctggtgcctggggc

SEQ ID NO: 183535 - DNA, 15 bp, Homo sapiens
agctggtgcctgggg

SEQ ID NO: 183536 - DNA, 15 bp, Homo sapiens
cagctggtgcctggg

SEQ ID NO: 183537 - DNA, 15 bp, Homo sapiens
acagctggtgcctgg

SEQ ID NO: 183538 - DNA, 15 bp, Homo sapiens
cacagctggtgcctg

SEQ ID NO: 183539 - DNA, 15 bp, Homo sapiens
acacagctggtgcct

SEQ ID NO: 183540 - DNA, 15 bp, Homo sapiens
cacacagctggtgcc

SEQ ID NO: 183541 - DNA, 15 bp, Homo sapiens
ccacacagctggtgc

SEQ ID NO: 183542 - DNA, 15 bp, Homo sapiens
cccacacagctggtg

SEQ ID NO: 183543 - DNA, 15 bp, Homo sapiens
ccccacacagctggt

SEQ ID NO: 183544 - DNA, 15 bp, Homo sapiens
gccccacacagctgg

SEQ ID NO: 183545 - DNA, 15 bp, Homo sapiens
ggccccacacagctg

SEQ ID NO: 183546 - DNA, 15 bp, Homo sapiens
tggccccacacagct

SEQ ID NO: 183547 - DNA, 15 bp, Homo sapiens
ctggccccacacagc

SEQ ID NO: 183548 - DNA, 15 bp, Homo sapiens
actggccccacacag

SEQ ID NO: 183549 - DNA, 15 bp, Homo sapiens
cactggccccacaca

SEQ ID NO: 183550 - DNA, 15 bp, Homo sapiens
ccactggccccacac

SEQ ID NO: 183551 - DNA, 15 bp, Homo sapiens
cccactggccccaca

SEQ ID NO: 183552 - DNA, 15 bp, Homo sapiens
gcccactggccccac

SEQ ID NO: 183553 - DNA, 15 bp, Homo sapiens
ggcccactggcccca

SEQ ID NO: 183554 - DNA, 15 bp, Homo sapiens
cggcccactggcccc

SEQ ID NO: 183555 - DNA, 15 bp, Homo sapiens
acggcccactggccc

SEQ ID NO: 183556 - DNA, 15 bp, Homo sapiens
aacggcccactggcc

SEQ ID NO: 183557 - DNA, 15 bp, Homo sapiens
caacggcccactggc

SEQ ID NO: 183558 - DNA, 15 bp, Homo sapiens
tcaacggcccactgg

SEQ ID NO: 183559 - DNA, 15 bp, Homo sapiens
ttcaacggcccactg

SEQ ID NO: 183560 - DNA, 15 bp, Homo sapiens
cttcaacggcccact

SEQ ID NO: 183561 - DNA, 15 bp, Homo sapiens
gcttcaacggcccac

SEQ ID NO: 183562 - DNA, 15 bp, Homo sapiens
tgcttcaacggccca

SEQ ID NO: 183563 - DNA, 15 bp, Homo sapiens
gtgcttcaacggccc

SEQ ID NO: 183564 - DNA, 15 bp, Homo sapiens
agtgcttcaacggcc

SEQ ID NO: 183565 - DNA, 15 bp, Homo sapiens
gagtgcttcaacggc

SEQ ID NO: 183566 - DNA, 15 bp, Homo sapiens
agagtgcttcaacgg

SEQ ID NO: 183567 - DNA, 15 bp, Homo sapiens
tagagtgcttcaacg

SEQ ID NO: 183568 - DNA, 15 bp, Homo sapiens
ctagagtgcttcaac

SEQ ID NO: 183569 - DNA, 15 bp, Homo sapiens
actagagtgcttcaa

SEQ ID NO: 183570 - DNA, 15 bp, Homo sapiens
gactagagtgcttca

SEQ ID NO: 183571 - DNA, 15 bp, Homo sapiens
tgactagagtgcttc

SEQ ID NO: 183572 - DNA, 15 bp, Homo sapiens
ttgactagagtgctt

SEQ ID NO: 183573 - DNA, 15 bp, Homo sapiens
attgactagagtgct

SEQ ID NO: 183574 - DNA, 15 bp, Homo sapiens
cattgactagagtgc

SEQ ID NO: 183575 - DNA, 15 bp, Homo sapiens
gcattgactagagtg

SEQ ID NO: 183576 - DNA, 15 bp, Homo sapiens
ggcattgactagagt

SEQ ID NO: 183577 - DNA, 15 bp, Homo sapiens
tggcattgactagag

SEQ ID NO: 183578 - DNA, 15 bp, Homo sapiens
gtggcattgactaga

SEQ ID NO: 183579 - DNA, 15 bp, Homo sapiens
tgtggcattgactag

SEQ ID NO: 183580 - DNA, 15 bp, Homo sapiens
gtgtggcattgacta

SEQ ID NO: 183581 - DNA, 15 bp, Homo sapiens
tgtgtggcattgact

SEQ ID NO: 183582 - DNA, 15 bp, Homo sapiens
ctgtgtggcattgac

SEQ ID NO: 183583 - DNA, 15 bp, Homo sapiens
gctgtgtggcattga

SEQ ID NO: 183584 - DNA, 15 bp, Homo sapiens
ggctgtgtggcattg

SEQ ID NO: 183585 - DNA, 15 bp, Homo sapiens
aggctgtgtggcatt

SEQ ID NO: 183586 - DNA, 15 bp, Homo sapiens
caggctgtgtggcat

SEQ ID NO: 183587 - DNA, 15 bp, Homo sapiens
ccaggctgtgtggca

SEQ ID NO: 183588 - DNA, 15 bp, Homo sapiens
cccaggctgtgtggc

SEQ ID NO: 183589 - DNA, 15 bp, Homo sapiens
tcccaggctgtgtgg

SEQ ID NO: 183590 - DNA, 15 bp, Homo sapiens
ctcccaggctgtgtg

SEQ ID NO: 183591 - DNA, 15 bp, Homo sapiens
gctcccaggctgtgt

SEQ ID NO: 183592 - DNA, 15 bp, Homo sapiens
tgctcccaggctgtg

SEQ ID NO: 183593 - DNA, 15 bp, Homo sapiens
ctgctcccaggctgt

SEQ ID NO: 183594 - DNA, 15 bp, Homo sapiens
actgctcccaggctg

SEQ ID NO: 183595 - DNA, 15 bp, Homo sapiens
tactgctcccaggct

SEQ ID NO: 183596 - DNA, 15 bp, Homo sapiens
gtactgctcccaggc

SEQ ID NO: 183597 - DNA, 15 bp, Homo sapiens
ggtactgctcccagg

SEQ ID NO: 183598 - DNA, 15 bp, Homo sapiens
tggtactgctcccag

SEQ ID NO: 183599 - DNA, 15 bp, Homo sapiens
ctggtactgctccca

SEQ ID NO: 183600 - DNA, 15 bp, Homo sapiens
tctggtactgctccc

SEQ ID NO: 183601 - DNA, 15 bp, Homo sapiens
ttctggtactgctcc

SEQ ID NO: 183602 - DNA, 15 bp, Homo sapiens
gttctggtactgctc

SEQ ID NO: 183603 - DNA, 15 bp, Homo sapiens
ggttctggtactgct

SEQ ID NO: 183604 - DNA, 15 bp, Homo sapiens
gggttctggtactgc

SEQ ID NO: 183605 - DNA, 15 bp, Homo sapiens
tgggttctggtactg

SEQ ID NO: 183606 - DNA, 15 bp, Homo sapiens
ctgggttctggtact

SEQ ID NO: 183607 - DNA, 15 bp, Homo sapiens
cctgggttctggtac

SEQ ID NO: 183608 - DNA, 15 bp, Homo sapiens
ccctgggttctggta

SEQ ID NO: 183609 - DNA, 15 bp, Homo sapiens
accctgggttctggt

SEQ ID NO: 183610 - DNA, 15 bp, Homo sapiens
caccctgggttctgg

SEQ ID NO: 183611 - DNA, 15 bp, Homo sapiens
ccaccctgggttctg

SEQ ID NO: 183612 - DNA, 15 bp, Homo sapiens
cccaccctgggttct

SEQ ID NO: 183613 - DNA, 15 bp, Homo sapiens
tcccaccctgggttc

SEQ ID NO: 183614 - DNA, 15 bp, Homo sapiens
ttcccaccctgggtt

SEQ ID NO: 183615 - DNA, 15 bp, Homo sapiens
tttcccaccctgggt

SEQ ID NO: 183616 - DNA, 15 bp, Homo sapiens
ttttcccaccctggg

SEQ ID NO: 183617 - DNA, 15 bp, Homo sapiens
attttcccaccctgg

SEQ ID NO: 183618 - DNA, 15 bp, Homo sapiens
cattttcccaccctg

SEQ ID NO: 183619 - DNA, 15 bp, Homo sapiens
acattttcccaccct

SEQ ID NO: 183620 - DNA, 15 bp, Homo sapiens
aacattttcccaccc

SEQ ID NO: 183621 - DNA, 15 bp, Homo sapiens
caacattttcccacc

SEQ ID NO: 183622 - DNA, 15 bp, Homo sapiens
ccaacattttcccac

SEQ ID NO: 183623 - DNA, 15 bp, Homo sapiens
gccaacattttccca

SEQ ID NO: 183624 - DNA, 15 bp, Homo sapiens
tgccaacattttccc

SEQ ID NO: 183625 - DNA, 15 bp, Homo sapiens
ctgccaacattttcc

SEQ ID NO: 183626 - DNA, 15 bp, Homo sapiens
cctgccaacattttc

SEQ ID NO: 183627 - DNA, 15 bp, Homo sapiens
ccctgccaacatttt

SEQ ID NO: 183628 - DNA, 15 bp, Homo sapiens
gccctgccaacattt

SEQ ID NO: 183629 - DNA, 15 bp, Homo sapiens
agccctgccaacatt

SEQ ID NO: 183630 - DNA, 15 bp, Homo sapiens
aagccctgccaacat

SEQ ID NO: 183631 - DNA, 15 bp, Homo sapiens
gaagccctgccaaca

SEQ ID NO: 183632 - DNA, 15 bp, Homo sapiens
ggaagccctgccaac

SEQ ID NO: 183633 - DNA, 15 bp, Homo sapiens
tggaagccctgccaa

SEQ ID NO: 183634 - DNA, 15 bp, Homo sapiens
ctggaagccctgcca

SEQ ID NO: 183635 - DNA, 15 bp, Homo sapiens
tctggaagccctgcc

SEQ ID NO: 183636 - DNA, 15 bp, Homo sapiens
ttctggaagccctgc

SEQ ID NO: 183637 - DNA, 15 bp, Homo sapiens
tttctggaagccctg

SEQ ID NO: 183638 - DNA, 15 bp, Homo sapiens
gtttctggaagccct

SEQ ID NO: 183639 - DNA, 15 bp, Homo sapiens
agtttctggaagccc

SEQ ID NO: 183640 - DNA, 15 bp, Homo sapiens
tagtttctggaagcc

SEQ ID NO: 183641 - DNA, 15 bp, Homo sapiens
gtagtttctggaagc

SEQ ID NO: 183642 - DNA, 15 bp, Homo sapiens
agtagtttctggaag

SEQ ID NO: 183643 - DNA, 15 bp, Homo sapiens
aagtagtttctggaa

SEQ ID NO: 183644 - DNA, 15 bp, Homo sapiens
caagtagtttctgga

SEQ ID NO: 183645 - DNA, 15 bp, Homo sapiens
acaagtagtttctgg

SEQ ID NO: 183646 - DNA, 15 bp, Homo sapiens
tacaagtagtttctg

SEQ ID NO: 183647 - DNA, 15 bp, Homo sapiens
ctacaagtagtttct

SEQ ID NO: 183648 - DNA, 15 bp, Homo sapiens
cctacaagtagtttc

SEQ ID NO: 183649 - DNA, 15 bp, Homo sapiens
ccctacaagtagttt

SEQ ID NO: 183650 - DNA, 15 bp, Homo sapiens
gccctacaagtagtt

SEQ ID NO: 183651 - DNA, 15 bp, Homo sapiens
ggccctacaagtagt

SEQ ID NO: 183652 - DNA, 15 bp, Homo sapiens
aggccctacaagtag

SEQ ID NO: 183653 - DNA, 15 bp, Homo sapiens
caggccctacaagta

SEQ ID NO: 183654 - DNA, 15 bp, Homo sapiens
acaggccctacaagt

SEQ ID NO: 183655 - DNA, 15 bp, Homo sapiens
gacaggccctacaag

SEQ ID NO: 183656 - DNA, 15 bp, Homo sapiens
tgacaggccctacaa

SEQ ID NO: 183657 - DNA, 15 bp, Homo sapiens
atgacaggccctaca

SEQ ID NO: 183658 - DNA, 15 bp, Homo sapiens
aatgacaggccctac

SEQ ID NO: 183659 - DNA, 15 bp, Homo sapiens
aaatgacaggcccta

SEQ ID NO: 183660 - DNA, 15 bp, Homo sapiens
aaaatgacaggccct

SEQ ID NO: 183661 - DNA, 15 bp, Homo sapiens
gaaaatgacaggccc

SEQ ID NO: 183662 - DNA, 15 bp, Homo sapiens
tgaaaatgacaggcc

SEQ ID NO: 183663 - DNA, 15 bp, Homo sapiens
atgaaaatgacaggc

SEQ ID NO: 183664 - DNA, 15 bp, Homo sapiens
aatgaaaatgacagg

SEQ ID NO: 183665 - DNA, 15 bp, Homo sapiens
gaatgaaaatgacag

SEQ ID NO: 183666 - DNA, 15 bp, Homo sapiens
tgaatgaaaatgaca

SEQ ID NO: 183667 - DNA, 15 bp, Homo sapiens
ttgaatgaaaatgac

SEQ ID NO: 183668 - DNA, 15 bp, Homo sapiens
attgaatgaaaatga

SEQ ID NO: 183669 - DNA, 15 bp, Homo sapiens
tattgaatgaaaatg

SEQ ID NO: 183670 - DNA, 15 bp, Homo sapiens
ttattgaatgaaaat

SEQ ID NO: 183671 - DNA, 15 bp, Homo sapiens
tttattgaatgaaaa

SEQ ID NO: 183672 - DNA, 15 bp, Homo sapiens
atttattgaatgaaa

SEQ ID NO: 183673 - DNA, 15 bp, Homo sapiens
catttattgaatgaa

SEQ ID NO: 183674 - DNA, 15 bp, Homo sapiens
acatttattgaatga

SEQ ID NO: 183675 - DNA, 15 bp, Homo sapiens
tacatttattgaatg

SEQ ID NO: 183676 - DNA, 15 bp, Homo sapiens
atacatttattgaat

SEQ ID NO: 183677 - DNA, 15 bp, Homo sapiens
aatacatttattgaa

SEQ ID NO: 183678 - DNA, 15 bp, Homo sapiens
caatacatttattga

SEQ ID NO: 183679 - DNA, 15 bp, Homo sapiens
tcaatacatttattg

SEQ ID NO: 183680 - DNA, 15 bp, Homo sapiens
atcaatacatttatt

SEQ ID NO: 183681 - DNA, 15 bp, Homo sapiens
gatcaatacatttat

SEQ ID NO: 183682 - DNA, 15 bp, Homo sapiens
tgatcaatacattta

SEQ ID NO: 183683 - DNA, 15 bp, Homo sapiens
ttgatcaatacattt

SEQ ID NO: 183684 - DNA, 15 bp, Homo sapiens
gttgatcaatacatt

SEQ ID NO: 183685 - DNA, 15 bp, Homo sapiens
ggttgatcaatacat

SEQ ID NO: 183686 - DNA, 15 bp, Homo sapiens
tggttgatcaataca

SEQ ID NO: 183687 - DNA, 15 bp, Homo sapiens
atggttgatcaatac

SEQ ID NO: 183688 - DNA, 15 bp, Homo sapiens
aatggttgatcaata

SEQ ID NO: 183689 - DNA, 15 bp, Homo sapiens
caatggttgatcaat

SEQ ID NO: 183690 - DNA, 15 bp, Homo sapiens
tcaatggttgatcaa

SEQ ID NO: 183691 - DNA, 15 bp, Homo sapiens
ctcaatggttgatca

SEQ ID NO: 183692 - DNA, 15 bp, Homo sapiens
actcaatggttgatc

SEQ ID NO: 183693 - DNA, 15 bp, Homo sapiens
gactcaatggttgat

SEQ ID NO: 183694 - DNA, 15 bp, Homo sapiens
agactcaatggttga

SEQ ID NO: 183695 - DNA, 15 bp, Homo sapiens
gagactcaatggttg

SEQ ID NO: 183696 - DNA, 15 bp, Homo sapiens
ggagactcaatggtt

SEQ ID NO: 183697 - DNA, 15 bp, Homo sapiens
tggagactcaatggt

SEQ ID NO: 183698 - DNA, 15 bp, Homo sapiens
ttggagactcaatgg

SEQ ID NO: 183699 - DNA, 15 bp, Homo sapiens
gttggagactcaatg

SEQ ID NO: 183700 - DNA, 15 bp, Homo sapiens
ggttggagactcaat

SEQ ID NO: 183701 - DNA, 15 bp, Homo sapiens
gggttggagactcaa

SEQ ID NO: 183702 - DNA, 15 bp, Homo sapiens
agggttggagactca

SEQ ID NO: 183703 - DNA, 15 bp, Homo sapiens
cagggttggagactc

SEQ ID NO: 183704 - DNA, 15 bp, Homo sapiens
gcagggttggagact

SEQ ID NO: 183705 - DNA, 15 bp, Homo sapiens
tgcagggttggagac

SEQ ID NO: 183706 - DNA, 15 bp, Homo sapiens
gtgcagggttggaga

SEQ ID NO: 183707 - DNA, 15 bp, Homo sapiens
agtgcagggttggag

SEQ ID NO: 183708 - DNA, 15 bp, Homo sapiens
aagtgcagggttgga

SEQ ID NO: 183709 - DNA, 15 bp, Homo sapiens
aaagtgcagggttgg

SEQ ID NO: 183710 - DNA, 15 bp, Homo sapiens
gaaagtgcagggttg

SEQ ID NO: 183711 - DNA, 15 bp, Homo sapiens
agaaagtgcagggtt

SEQ ID NO: 183712 - DNA, 15 bp, Homo sapiens
cagaaagtgcagggt

SEQ ID NO: 183713 - DNA, 15 bp, Homo sapiens
ccagaaagtgcaggg

SEQ ID NO: 183714 - DNA, 15 bp, Homo sapiens
cccagaaagtgcagg

SEQ ID NO: 183715 - DNA, 15 bp, Homo sapiens
acccagaaagtgcag

SEQ ID NO: 183716 - DNA, 15 bp, Homo sapiens
cacccagaaagtgca

SEQ ID NO: 183717 - DNA, 15 bp, Homo sapiens
ccacccagaaagtgc

SEQ ID NO: 183718 - DNA, 15 bp, Homo sapiens
accacccagaaagtg

SEQ ID NO: 183719 - DNA, 15 bp, Homo sapiens
aaccacccagaaagt

SEQ ID NO: 183720 - DNA, 15 bp, Homo sapiens
taaccacccagaaag

SEQ ID NO: 183721 - DNA, 15 bp, Homo sapiens
ataaccacccagaaa

SEQ ID NO: 183722 - DNA, 15 bp, Homo sapiens
cataaccacccagaa

SEQ ID NO: 183723 - DNA, 15 bp, Homo sapiens
tcataaccacccaga

SEQ ID NO: 183724 - DNA, 15 bp, Homo sapiens
ctcataaccacccag

SEQ ID NO: 183725 - DNA, 15 bp, Homo sapiens
tctcataaccaccca

SEQ ID NO: 183726 - DNA, 15 bp, Homo sapiens
ttctcataaccaccc

SEQ ID NO: 183727 - DNA, 15 bp, Homo sapiens
tttctcataaccacc

SEQ ID NO: 183728 - DNA, 15 bp, Homo sapiens
ctttctcataaccac

SEQ ID NO: 183729 - DNA, 15 bp, Homo sapiens
tctttctcataacca

SEQ ID NO: 183730 - DNA, 15 bp, Homo sapiens
ctctttctcataacc

SEQ ID NO: 183731 - DNA, 15 bp, Homo sapiens
actctttctcataac

SEQ ID NO: 183732 - DNA, 15 bp, Homo sapiens
tactctttctcataa

SEQ ID NO: 183733 - DNA, 15 bp, Homo sapiens
ttactctttctcata

SEQ ID NO: 183734 - DNA, 15 bp, Homo sapiens
tttactctttctcat

SEQ ID NO: 183735 - DNA, 15 bp, Homo sapiens
ctttactctttctca

SEQ ID NO: 183736 - DNA, 15 bp, Homo sapiens
actttactctttctc

SEQ ID NO: 183737 - DNA, 15 bp, Homo sapiens
aactttactctttct

SEQ ID NO: 183738 - DNA, 15 bp, Homo sapiens
taactttactctttc

SEQ ID NO: 183739 - DNA, 15 bp, Homo sapiens
ttaactttactcttt

SEQ ID NO: 183740 - DNA, 15 bp, Homo sapiens
tttaactttactctt

SEQ ID NO: 183741 - DNA, 15 bp, Homo sapiens
ctttaactttactct

SEQ ID NO: 183742 - DNA, 15 bp, Homo sapiens
tctttaactttactc

SEQ ID NO: 183743 - DNA, 15 bp, Homo sapiens
ttctttaactttact

SEQ ID NO: 183744 - DNA, 15 bp, Homo sapiens
cttctttaactttac

SEQ ID NO: 183745 - DNA, 15 bp, Homo sapiens
gcttctttaacttta

SEQ ID NO: 183746 - DNA, 15 bp, Homo sapiens
ggcttctttaacttt

SEQ ID NO: 183747 - DNA, 15 bp, Homo sapiens
aggcttctttaactt

SEQ ID NO: 183748 - DNA, 15 bp, Homo sapiens
gaggcttctttaact

SEQ ID NO: 183749 - DNA, 15 bp, Homo sapiens
tgaggcttctttaac

SEQ ID NO: 183750 - DNA, 15 bp, Homo sapiens
ttgaggcttctttaa

SEQ ID NO: 183751 - DNA, 15 bp, Homo sapiens
cttgaggcttcttta

SEQ ID NO: 183752 - DNA, 15 bp, Homo sapiens
ccttgaggcttcttt

SEQ ID NO: 183753 - DNA, 15 bp, Homo sapiens
gccttgaggcttctt

SEQ ID NO: 183754 - DNA, 15 bp, Homo sapiens
tgccttgaggcttct

SEQ ID NO: 183755 - DNA, 15 bp, Homo sapiens
atgccttgaggcttc

SEQ ID NO: 183756 - DNA, 15 bp, Homo sapiens
gatgccttgaggctt

SEQ ID NO: 183757 - DNA, 15 bp, Homo sapiens
agatgccttgaggct

SEQ ID NO: 183758 - DNA, 15 bp, Homo sapiens
cagatgccttgaggc

SEQ ID NO: 183759 - DNA, 15 bp, Homo sapiens
ccagatgccttgagg

SEQ ID NO: 183760 - DNA, 15 bp, Homo sapiens
tccagatgccttgag

SEQ ID NO: 183761 - DNA, 15 bp, Homo sapiens
ttccagatgccttga

SEQ ID NO: 183762 - DNA, 15 bp, Homo sapiens
cttccagatgccttg

SEQ ID NO: 183763 - DNA, 15 bp, Homo sapiens
tcttccagatgcctt

SEQ ID NO: 183764 - DNA, 15 bp, Homo sapiens
ctcttccagatgcct

SEQ ID NO: 183765 - DNA, 15 bp, Homo sapiens
tctcttccagatgcc

SEQ ID NO: 183766 - DNA, 15 bp, Homo sapiens
ttctcttccagatgc

SEQ ID NO: 183767 - DNA, 15 bp, Homo sapiens
gttctcttccagatg

SEQ ID NO: 183768 - DNA, 15 bp, Homo sapiens
cgttctcttccagat

SEQ ID NO: 183769 - DNA, 15 bp, Homo sapiens
ccgttctcttccaga

SEQ ID NO: 183770 - DNA, 15 bp, Homo sapiens
cccgttctcttccag

SEQ ID NO: 183771 - DNA, 15 bp, Homo sapiens
acccgttctcttcca

SEQ ID NO: 183772 - DNA, 15 bp, Homo sapiens
aacccgttctcttcc

SEQ ID NO: 183773 - DNA, 15 bp, Homo sapiens
gaacccgttctcttc

SEQ ID NO: 183774 - DNA, 15 bp, Homo sapiens
ggaacccgttctctt

SEQ ID NO: 183775 - DNA, 15 bp, Homo sapiens
tggaacccgttctct

SEQ ID NO: 183776 - DNA, 15 bp, Homo sapiens
ttggaacccgttctc

SEQ ID NO: 183777 - DNA, 15 bp, Homo sapiens
gttggaacccgttct

SEQ ID NO: 183778 - DNA, 15 bp, Homo sapiens
ggttggaacccgttc

SEQ ID NO: 183779 - DNA, 15 bp, Homo sapiens
aggttggaacccgtt

SEQ ID NO: 183780 - DNA, 15 bp, Homo sapiens
caggttggaacccgt

SEQ ID NO: 183781 - DNA, 15 bp, Homo sapiens
acaggttggaacccg

SEQ ID NO: 183782 - DNA, 15 bp, Homo sapiens
tacaggttggaaccc

SEQ ID NO: 183783 - DNA, 15 bp, Homo sapiens
ttacaggttggaacc

SEQ ID NO: 183784 - DNA, 15 bp, Homo sapiens
cttacaggttggaac

SEQ ID NO: 183785 - DNA, 15 bp, Homo sapiens
ccttacaggttggaa

SEQ ID NO: 183786 - DNA, 15 bp, Homo sapiens
tccttacaggttgga

SEQ ID NO: 183787 - DNA, 15 bp, Homo sapiens
gtccttacaggttgg

SEQ ID NO: 183788 - DNA, 15 bp, Homo sapiens
tgtccttacaggttg

SEQ ID NO: 183789 - DNA, 15 bp, Homo sapiens
atgtccttacaggtt

SEQ ID NO: 183790 - DNA, 15 bp, Homo sapiens
tatgtccttacaggt

SEQ ID NO: 183791 - DNA, 15 bp, Homo sapiens
atatgtccttacagg

SEQ ID NO: 183792 - DNA, 15 bp, Homo sapiens
aatatgtccttacag

SEQ ID NO: 183793 - DNA, 15 bp, Homo sapiens
gaatatgtccttaca

SEQ ID NO: 183794 - DNA, 15 bp, Homo sapiens
ggaatatgtccttac

SEQ ID NO: 183795 - DNA, 15 bp, Homo sapiens
tggaatatgtcctta

SEQ ID NO: 183796 - DNA, 15 bp, Homo sapiens
ctggaatatgtcctt

SEQ ID NO: 183797 - DNA, 15 bp, Homo sapiens
cctggaatatgtcct

SEQ ID NO: 183798 - DNA, 15 bp, Homo sapiens
gcctggaatatgtcc

SEQ ID NO: 183799 - DNA, 15 bp, Homo sapiens
agcctggaatatgtc

SEQ ID NO: 183800 - DNA, 15 bp, Homo sapiens
cagcctggaatatgt

SEQ ID NO: 183801 - DNA, 15 bp, Homo sapiens
ccagcctggaatatg

SEQ ID NO: 183802 - DNA, 15 bp, Homo sapiens
tccagcctggaatat

SEQ ID NO: 183803 - DNA, 15 bp, Homo sapiens
atccagcctggaata

SEQ ID NO: 183804 - DNA, 15 bp, Homo sapiens
catccagcctggaat

SEQ ID NO: 183805 - DNA, 15 bp, Homo sapiens
acatccagcctggaa

SEQ ID NO: 183806 - DNA, 15 bp, Homo sapiens
cacatccagcctgga

SEQ ID NO: 183807 - DNA, 15 bp, Homo sapiens
gcacatccagcctgg

SEQ ID NO: 183808 - DNA, 15 bp, Homo sapiens
agcacatccagcctg

SEQ ID NO: 183809 - DNA, 15 bp, Homo sapiens
aagcacatccagcct

SEQ ID NO: 183810 - DNA, 15 bp, Homo sapiens
aaagcacatccagcc

SEQ ID NO: 183811 - DNA, 15 bp, Homo sapiens
gaaagcacatccagc

SEQ ID NO: 183812 - DNA, 15 bp, Homo sapiens
agaaagcacatccag

SEQ ID NO: 183813 - DNA, 15 bp, Homo sapiens
gagaaagcacatcca

SEQ ID NO: 183814 - DNA, 15 bp, Homo sapiens
agagaaagcacatcc

SEQ ID NO: 183815 - DNA, 15 bp, Homo sapiens
aagagaaagcacatc

SEQ ID NO: 183816 - DNA, 15 bp, Homo sapiens
gaagagaaagcacat

SEQ ID NO: 183817 - DNA, 15 bp, Homo sapiens
agaagagaaagcaca

SEQ ID NO: 183818 - DNA, 15 bp, Homo sapiens
cagaagagaaagcac

SEQ ID NO: 183819 - DNA, 15 bp, Homo sapiens
ccagaagagaaagca

SEQ ID NO: 183820 - DNA, 15 bp, Homo sapiens
tccagaagagaaagc

SEQ ID NO: 183821 - DNA, 15 bp, Homo sapiens
ctccagaagagaaag

SEQ ID NO: 183822 - DNA, 15 bp, Homo sapiens
tctccagaagagaaa

SEQ ID NO: 183823 - DNA, 15 bp, Homo sapiens
atctccagaagagaa

SEQ ID NO: 183824 - DNA, 15 bp, Homo sapiens
tatctccagaagaga

SEQ ID NO: 183825 - DNA, 15 bp, Homo sapiens
ttatctccagaagag

SEQ ID NO: 183826 - DNA, 15 bp, Homo sapiens
attatctccagaaga

SEQ ID NO: 183827 - DNA, 15 bp, Homo sapiens
aattatctccagaag

SEQ ID NO: 183828 - DNA, 15 bp, Homo sapiens
gaattatctccagaa

SEQ ID NO: 183829 - DNA, 15 bp, Homo sapiens
agaattatctccaga

SEQ ID NO: 183830 - DNA, 15 bp, Homo sapiens
gagaattatctccag

SEQ ID NO: 183831 - DNA, 15 bp, Homo sapiens
tgagaattatctcca

SEQ ID NO: 183832 - DNA, 15 bp, Homo sapiens
atgagaattatctcc

SEQ ID NO: 183833 - DNA, 15 bp, Homo sapiens
aatgagaattatctc

SEQ ID NO: 183834 - DNA, 15 bp, Homo sapiens
aaatgagaattatct

SEQ ID NO: 183835 - DNA, 15 bp, Homo sapiens
aaaatgagaattatc

SEQ ID NO: 183836 - DNA, 15 bp, Homo sapiens
caaaatgagaattat

SEQ ID NO: 183837 - DNA, 15 bp, Homo sapiens
ccaaaatgagaatta

SEQ ID NO: 183838 - DNA, 15 bp, Homo sapiens
accaaaatgagaatt

SEQ ID NO: 183839 - DNA, 15 bp, Homo sapiens
gaccaaaatgagaat

SEQ ID NO: 183840 - DNA, 15 bp, Homo sapiens
agaccaaaatgagaa

SEQ ID NO: 183841 - DNA, 15 bp, Homo sapiens
gagaccaaaatgaga

SEQ ID NO: 183842 - DNA, 15 bp, Homo sapiens
agagaccaaaatgag

SEQ ID NO: 183843 - DNA, 15 bp, Homo sapiens
aaagagaccaaaatg

SEQ ID NO: 183844 - DNA, 15 bp, Homo sapiens
aaaagagaccaaaat

SEQ ID NO: 183845 - DNA, 15 bp, Homo sapiens
aaaaagagaccaaaa

SEQ ID NO: 183846 - DNA, 15 bp, Homo sapiens
aaaaaagagaccaaa

SEQ ID NO: 183847 - DNA, 15 bp, Homo sapiens
gaaaaaagagaccaa

SEQ ID NO: 183848 - DNA, 15 bp, Homo sapiens
tgaaaaaagagacca

SEQ ID NO: 183849 - DNA, 15 bp, Homo sapiens
atgaaaaaagagacc

SEQ ID NO: 183850 - DNA, 15 bp, Homo sapiens
tatgaaaaaagagac

SEQ ID NO: 183851 - DNA, 15 bp, Homo sapiens
atatgaaaaaagaga

SEQ ID NO: 183852 - DNA, 15 bp, Homo sapiens
aatatgaaaaaagag

SEQ ID NO: 183853 - DNA, 15 bp, Homo sapiens
gaatatgaaaaaaga

SEQ ID NO: 183854 - DNA, 15 bp, Homo sapiens
agaatatgaaaaaag

SEQ ID NO: 183855 - DNA, 15 bp, Homo sapiens
aagaatatgaaaaaa

SEQ ID NO: 183856 - DNA, 15 bp, Homo sapiens
taagaatatgaaaaa

SEQ ID NO: 183857 - DNA, 15 bp, Homo sapiens
gtaagaatatgaaaa

SEQ ID NO: 183858 - DNA, 15 bp, Homo sapiens
agtaagaatatgaaa

SEQ ID NO: 183859 - DNA, 15 bp, Homo sapiens
cagtaagaatatgaa

SEQ ID NO: 183860 - DNA, 15 bp, Homo sapiens
gcagtaagaatatga

SEQ ID NO: 183861 - DNA, 15 bp, Homo sapiens
ggcagtaagaatatg

SEQ ID NO: 183862 - DNA, 15 bp, Homo sapiens
tgtcgaaggagaacg

SEQ ID NO: 183863 - DNA, 15 bp, Homo sapiens
atgtcgaaggagaac

SEQ ID NO: 183864 - DNA, 15 bp, Homo sapiens
gatgtcgaaggagaa

SEQ ID NO: 183865 - DNA, 15 bp, Homo sapiens
agatgtcgaaggaga

SEQ ID NO: 183866 - DNA, 15 bp, Homo sapiens
gagatgtcgaaggag

SEQ ID NO: 183867 - DNA, 15 bp, Homo sapiens
tgagatgtcgaagga

SEQ ID NO: 183868 - DNA, 15 bp, Homo sapiens
gtgagatgtcgaagg

SEQ ID NO: 183869 - DNA, 15 bp, Homo sapiens
tgtgagatgtcgaag

SEQ ID NO: 183870 - DNA, 15 bp, Homo sapiens
atgtgagatgtcgaa

SEQ ID NO: 183871 - DNA, 15 bp, Homo sapiens
tatgtgagatgtcga

SEQ ID NO: 183872 - DNA, 15 bp, Homo sapiens
gtatgtgagatgtcg

SEQ ID NO: 183873 - DNA, 15 bp, Homo sapiens
agtatgtgagatgtc

SEQ ID NO: 183874 - DNA, 15 bp, Homo sapiens
gagtatgtgagatgt

SEQ ID NO: 183875 - DNA, 15 bp, Homo sapiens
ggagtatgtgagatg

SEQ ID NO: 183876 - DNA, 15 bp, Homo sapiens
aggagtatgtgagat

SEQ ID NO: 183877 - DNA, 15 bp, Homo sapiens
caggagtatgtgaga

SEQ ID NO: 183878 - DNA, 15 bp, Homo sapiens
gcaggagtatgtgag

SEQ ID NO: 183879 - DNA, 15 bp, Homo sapiens
agcaggagtatgtga

SEQ ID NO: 183880 - DNA, 15 bp, Homo sapiens
cagcaggagtatgtg

SEQ ID NO: 183881 - DNA, 15 bp, Homo sapiens
gcagcaggagtatgt

SEQ ID NO: 183882 - DNA, 15 bp, Homo sapiens
agcagcaggagtatg

SEQ ID NO: 183883 - DNA, 15 bp, Homo sapiens
aagcagcaggagtat

SEQ ID NO: 183884 - DNA, 15 bp, Homo sapiens
aaagcagcaggagta

SEQ ID NO: 183885 - DNA, 15 bp, Homo sapiens
gaaagcagcaggagt

SEQ ID NO: 183886 - DNA, 15 bp, Homo sapiens
ggaaagcagcaggag

SEQ ID NO: 183887 - DNA, 15 bp, Homo sapiens
aggaaagcagcagga

SEQ ID NO: 183888 - DNA, 15 bp, Homo sapiens
aaggaaagcagcagg

SEQ ID NO: 183889 - DNA, 15 bp, Homo sapiens
caaaggaaagcagca

SEQ ID NO: 183890 - DNA, 15 bp, Homo sapiens
acaaaggaaagcagc

SEQ ID NO: 183891 - DNA, 15 bp, Homo sapiens
cacaaaggaaagcag

SEQ ID NO: 183892 - DNA, 15 bp, Homo sapiens
tcacaaaggaaagca

SEQ ID NO: 183893 - DNA, 15 bp, Homo sapiens
ctcacaaaggaaagc

SEQ ID NO: 183894 - DNA, 15 bp, Homo sapiens
actcacaaaggaaag

SEQ ID NO: 183895 - DNA, 15 bp, Homo sapiens
cactcacaaaggaaa

SEQ ID NO: 183896 - DNA, 15 bp, Homo sapiens
ccactcacaaaggaa

SEQ ID NO: 183897 - DNA, 15 bp, Homo sapiens
tccactcacaaagga

SEQ ID NO: 183898 - DNA, 15 bp, Homo sapiens
ctccactcacaaagg

SEQ ID NO: 183899 - DNA, 15 bp, Homo sapiens
tctccactcacaaag

SEQ ID NO: 183900 - DNA, 15 bp, Homo sapiens
gtctccactcacaaa

SEQ ID NO: 183901 - DNA, 15 bp, Homo sapiens
ggtctccactcacaa

SEQ ID NO: 183902 - DNA, 15 bp, Homo sapiens
aggtctccactcaca

SEQ ID NO: 183903 - DNA, 15 bp, Homo sapiens
gaggtctccactcac

SEQ ID NO: 183904 - DNA, 15 bp, Homo sapiens
cgaggtctccactca

SEQ ID NO: 183905 - DNA, 15 bp, Homo sapiens
gcgaggtctccactc

SEQ ID NO: 183906 - DNA, 15 bp, Homo sapiens
agcgaggtctccact

SEQ ID NO: 183907 - DNA, 15 bp, Homo sapiens
aagcgaggtctccac

SEQ ID NO: 183908 - DNA, 15 bp, Homo sapiens
aaagcgaggtctcca

SEQ ID NO: 183909 - DNA, 15 bp, Homo sapiens
gaaagcgaggtctcc

SEQ ID NO: 183910 - DNA, 15 bp, Homo sapiens
agaaagcgaggtctc

SEQ ID NO: 183911 - DNA, 15 bp, Homo sapiens
aagaaagcgaggtct

SEQ ID NO: 183912 - DNA, 15 bp, Homo sapiens
aaagaaagcgaggtc

SEQ ID NO: 183913 - DNA, 15 bp, Homo sapiens
taaagaaagcgaggt

SEQ ID NO: 183914 - DNA, 15 bp, Homo sapiens
ataaagaaagcgagg

SEQ ID NO: 183915 - DNA, 15 bp, Homo sapiens
tataaagaaagcgag

SEQ ID NO: 183916 - DNA, 15 bp, Homo sapiens
ctataaagaaagcga

SEQ ID NO: 183917 - DNA, 15 bp, Homo sapiens
cctataaagaaagcg

SEQ ID NO: 183918 - DNA, 15 bp, Homo sapiens
acctataaagaaagc

SEQ ID NO: 183919 - DNA, 15 bp, Homo sapiens
cacctataaagaaag

SEQ ID NO: 183920 - DNA, 15 bp, Homo sapiens
ccacctataaagaaa

SEQ ID NO: 183921 - DNA, 15 bp, Homo sapiens
accacctataaagaa

SEQ ID NO: 183922 - DNA, 15 bp, Homo sapiens
taccacctataaaga

SEQ ID NO: 183923 - DNA, 15 bp, Homo sapiens
ttaccacctataaag

SEQ ID NO: 183924 - DNA, 15 bp, Homo sapiens
gttaccacctataaa

SEQ ID NO: 183925 - DNA, 15 bp, Homo sapiens
tgttaccacctataa

SEQ ID NO: 183926 - DNA, 15 bp, Homo sapiens
ctgttaccacctata

SEQ ID NO: 183927 - DNA, 15 bp, Homo sapiens
gctgttaccacctat

SEQ ID NO: 183928 - DNA, 15 bp, Homo sapiens
agctgttaccaccta

SEQ ID NO: 183929 - DNA, 15 bp, Homo sapiens
cagctgttaccacct

SEQ ID NO: 183930 - DNA, 15 bp, Homo sapiens
acagctgttaccacc

SEQ ID NO: 183931 - DNA, 15 bp, Homo sapiens
cacagctgttaccac

SEQ ID NO: 183932 - DNA, 15 bp, Homo sapiens
acacagctgttacca

SEQ ID NO: 183933 - DNA, 15 bp, Homo sapiens
aacacagctgttacc

SEQ ID NO: 183934 - DNA, 15 bp, Homo sapiens
gaacacagctgttac

SEQ ID NO: 183935 - DNA, 15 bp, Homo sapiens
agaacacagctgtta

SEQ ID NO: 183936 - DNA, 15 bp, Homo sapiens
gagaacacagctgtt

SEQ ID NO: 183937 - DNA, 15 bp, Homo sapiens
agagaacacagctgt

SEQ ID NO: 183938 - DNA, 15 bp, Homo sapiens
tagagaacacagctg

SEQ ID NO: 183939 - DNA, 15 bp, Homo sapiens
ctagagaacacagct

SEQ ID NO: 183940 - DNA, 15 bp, Homo sapiens
tctagagaacacagc

SEQ ID NO: 183941 - DNA, 15 bp, Homo sapiens
ctctagagaacacag

SEQ ID NO: 183942 - DNA, 15 bp, Homo sapiens
tctctagagaacaca

SEQ ID NO: 183943 - DNA, 15 bp, Homo sapiens
ctctctagagaacac

SEQ ID NO: 183944 - DNA, 15 bp, Homo sapiens
actctctagagaaca

SEQ ID NO: 183945 - DNA, 15 bp, Homo sapiens
cactctctagagaac

SEQ ID NO: 183946 - DNA, 15 bp, Homo sapiens
tcactctctagagaa

SEQ ID NO: 183947 - DNA, 15 bp, Homo sapiens
ttcactctctagaga

SEQ ID NO: 183948 - DNA, 15 bp, Homo sapiens
attcactctctagag

SEQ ID NO: 183949 - DNA, 15 bp, Homo sapiens
aattcactctctaga

SEQ ID NO: 183950 - DNA, 15 bp, Homo sapiens
aaattcactctctag

SEQ ID NO: 183951 - DNA, 15 bp, Homo sapiens
aaaattcactctcta

SEQ ID NO: 183952 - DNA, 15 bp, Homo sapiens
aaaaattcactctct

SEQ ID NO: 183953 - DNA, 15 bp, Homo sapiens
caaaaattcactctc

SEQ ID NO: 183954 - DNA, 15 bp, Homo sapiens
gcaaaaattcactct

SEQ ID NO: 183955 - DNA, 15 bp, Homo sapiens
tgcaaaaattcactc

SEQ ID NO: 183956 - DNA, 15 bp, Homo sapiens
gtgcaaaaattcact

SEQ ID NO: 183957 - DNA, 15 bp, Homo sapiens
ggtgcaaaaattcac

SEQ ID NO: 183958 - DNA, 15 bp, Homo sapiens
tggtgcaaaaattca

SEQ ID NO: 183959 - DNA, 15 bp, Homo sapiens
gtggtgcaaaaattc

SEQ ID NO: 183960 - DNA, 15 bp, Homo sapiens
tgtggtgcaaaaatt

SEQ ID NO: 183961 - DNA, 15 bp, Homo sapiens
ttgtggtgcaaaaat

SEQ ID NO: 183962 - DNA, 15 bp, Homo sapiens
gttgtggtgcaaaaa

SEQ ID NO: 183963 - DNA, 15 bp, Homo sapiens
ggttgtggtgcaaaa

SEQ ID NO: 183964 - DNA, 15 bp, Homo sapiens
gggttgtggtgcaaa

SEQ ID NO: 183965 - DNA, 15 bp, Homo sapiens
ggggttgtggtgcaa

SEQ ID NO: 183966 - DNA, 15 bp, Homo sapiens
aggggttgtggtgca

SEQ ID NO: 183967 - DNA, 15 bp, Homo sapiens
taggggttgtggtgc

SEQ ID NO: 183968 - DNA, 15 bp, Homo sapiens
ataggggttgtggtg

SEQ ID NO: 183969 - DNA, 15 bp, Homo sapiens
aataggggttgtggt

SEQ ID NO: 183970 - DNA, 15 bp, Homo sapiens
gaataggggttgtgg

SEQ ID NO: 183971 - DNA, 15 bp, Homo sapiens
agaataggggttgtg

SEQ ID NO: 183972 - DNA, 15 bp, Homo sapiens
gagaataggggttgt

SEQ ID NO: 183973 - DNA, 15 bp, Homo sapiens
tgagaataggggttg

SEQ ID NO: 183974 - DNA, 15 bp, Homo sapiens
gtgagaataggggtt

SEQ ID NO: 183975 - DNA, 15 bp, Homo sapiens
tgtgagaataggggt

SEQ ID NO: 183976 - DNA, 15 bp, Homo sapiens
ttgtgagaatagggg

SEQ ID NO: 183977 - DNA, 15 bp, Homo sapiens
attgtgagaataggg

SEQ ID NO: 183978 - DNA, 15 bp, Homo sapiens
tattgtgagaatagg

SEQ ID NO: 183979 - DNA, 15 bp, Homo sapiens
ttattgtgagaatag

SEQ ID NO: 183980 - DNA, 15 bp, Homo sapiens
gttattgtgagaata

SEQ ID NO: 183981 - DNA, 15 bp, Homo sapiens
agttattgtgagaat

SEQ ID NO: 183982 - DNA, 15 bp, Homo sapiens
aagttattgtgagaa

SEQ ID NO: 183983 - DNA, 15 bp, Homo sapiens
gaagttattgtgaga

SEQ ID NO: 183984 - DNA, 15 bp, Homo sapiens
tgaagttattgtgag

SEQ ID NO: 183985 - DNA, 15 bp, Homo sapiens
gtgaagttattgtga

SEQ ID NO: 183986 - DNA, 15 bp, Homo sapiens
agtgaagttattgtg

SEQ ID NO: 183987 - DNA, 15 bp, Homo sapiens
aagtgaagttattgt

SEQ ID NO: 183988 - DNA, 15 bp, Homo sapiens
caagtgaagttattg

SEQ ID NO: 183989 - DNA, 15 bp, Homo sapiens
ccaagtgaagttatt

SEQ ID NO: 183990 - DNA, 15 bp, Homo sapiens
tccaagtgaagttat

SEQ ID NO: 183991 - DNA, 15 bp, Homo sapiens
gtccaagtgaagtta

SEQ ID NO: 183992 - DNA, 15 bp, Homo sapiens
tgtccaagtgaagtt

SEQ ID NO: 183993 - DNA, 15 bp, Homo sapiens
atgtccaagtgaagt

SEQ ID NO: 183994 - DNA, 15 bp, Homo sapiens
gatgtccaagtgaag

SEQ ID NO: 183995 - DNA, 15 bp, Homo sapiens
cgatgtccaagtgaa

SEQ ID NO: 183996 - DNA, 15 bp, Homo sapiens
tcgatgtccaagtga

SEQ ID NO: 183997 - DNA, 15 bp, Homo sapiens
ctcgatgtccaagtg

SEQ ID NO: 183998 - DNA, 15 bp, Homo sapiens
cctcgatgtccaagt

SEQ ID NO: 183999 - DNA, 15 bp, Homo sapiens
tcctcgatgtccaag

SEQ ID NO: 184000 - DNA, 15 bp, Homo sapiens
atcctcgatgtccaa

SEQ ID NO: 184001 - DNA, 15 bp, Homo sapiens
tatcctcgatgtcca

SEQ ID NO: 184002 - DNA, 15 bp, Homo sapiens
ttatcctcgatgtcc

SEQ ID NO: 184003 - DNA, 15 bp, Homo sapiens
cttatcctcgatgtc

SEQ ID NO: 184004 - DNA, 15 bp, Homo sapiens
acttatcctcgatgt

SEQ ID NO: 184005 - DNA, 15 bp, Homo sapiens
aacttatcctcgatg

SEQ ID NO: 184006 - DNA, 15 bp, Homo sapiens
aaacttatcctcgat

SEQ ID NO: 184007 - DNA, 15 bp, Homo sapiens
gaaacttatcctcga

SEQ ID NO: 184008 - DNA, 15 bp, Homo sapiens
ggaaacttatcctcg

SEQ ID NO: 184009 - DNA, 15 bp, Homo sapiens
tggaaacttatcctc

SEQ ID NO: 184010 - DNA, 15 bp, Homo sapiens
atggaaacttatcct

SEQ ID NO: 184011 - DNA, 15 bp, Homo sapiens
catggaaacttatcc

SEQ ID NO: 184012 - DNA, 15 bp, Homo sapiens
acatggaaacttatc

SEQ ID NO: 184013 - DNA, 15 bp, Homo sapiens
cacatggaaacttat

SEQ ID NO: 184014 - DNA, 15 bp, Homo sapiens
tcacatggaaactta

SEQ ID NO: 184015 - DNA, 15 bp, Homo sapiens
ctcacatggaaactt

SEQ ID NO: 184016 - DNA, 15 bp, Homo sapiens
tctcacatggaaact

SEQ ID NO: 184017 - DNA, 15 bp, Homo sapiens
ttctcacatggaaac

SEQ ID NO: 184018 - DNA, 15 bp, Homo sapiens
tttctcacatggaaa

SEQ ID NO: 184019 - DNA, 15 bp, Homo sapiens
atttctcacatggaa

SEQ ID NO: 184020 - DNA, 15 bp, Homo sapiens
tatttctcacatgga

SEQ ID NO: 184021 - DNA, 15 bp, Homo sapiens
atatttctcacatgg

SEQ ID NO: 184022 - DNA, 15 bp, Homo sapiens
aatatttctcacatg

SEQ ID NO: 184023 - DNA, 15 bp, Homo sapiens
caatatttctcacat

SEQ ID NO: 184024 - DNA, 15 bp, Homo sapiens
acaatatttctcaca

SEQ ID NO: 184025 - DNA, 15 bp, Homo sapiens
aacaatatttctcac

SEQ ID NO: 184026 - DNA, 15 bp, Homo sapiens
aaacaatatttctca

SEQ ID NO: 184027 - DNA, 15 bp, Homo sapiens
taaacaatatttctc

SEQ ID NO: 184028 - DNA, 15 bp, Homo sapiens
ctaaacaatatttct

SEQ ID NO: 184029 - DNA, 15 bp, Homo sapiens
actaaacaatatttc

SEQ ID NO: 184030 - DNA, 15 bp, Homo sapiens
gactaaacaatattt

SEQ ID NO: 184031 - DNA, 15 bp, Homo sapiens
tgactaaacaatatt

SEQ ID NO: 184032 - DNA, 15 bp, Homo sapiens
atgactaaacaatat

SEQ ID NO: 184033 - DNA, 15 bp, Homo sapiens
aatgactaaacaata

SEQ ID NO: 184034 - DNA, 15 bp, Homo sapiens
aaatgactaaacaat

SEQ ID NO: 184035 - DNA, 15 bp, Homo sapiens
taaatgactaaacaa

SEQ ID NO: 184036 - DNA, 15 bp, Homo sapiens
ataaatgactaaaca

SEQ ID NO: 184037 - DNA, 15 bp, Homo sapiens
aataaatgactaaac

SEQ ID NO: 184038 - DNA, 15 bp, Homo sapiens
aaataaatgactaaa

SEQ ID NO: 184039 - DNA, 15 bp, Homo sapiens
aaaataaatgactaa

SEQ ID NO: 184040 - DNA, 15 bp, Homo sapiens
taaaataaatgacta

SEQ ID NO: 184041 - DNA, 15 bp, Homo sapiens
ttaaaataaatgact

SEQ ID NO: 184042 - DNA, 15 bp, Homo sapiens
tttaaaataaatgac

SEQ ID NO: 184043 - DNA, 15 bp, Homo sapiens
ttttaaaataaatga

SEQ ID NO: 184044 - DNA, 15 bp, Homo sapiens
tttttaaaataaatg

SEQ ID NO: 184045 - DNA, 15 bp, Homo sapiens
ttttttaaaataaat

SEQ ID NO: 184046 - DNA, 15 bp, Homo sapiens
cttttttaaaataaa

SEQ ID NO: 184047 - DNA, 15 bp, Homo sapiens
gcttttttaaaataa

SEQ ID NO: 184048 - DNA, 15 bp, Homo sapiens
agcttttttaaaata

SEQ ID NO: 184049 - DNA, 15 bp, Homo sapiens
aagcttttttaaaat

SEQ ID NO: 184050 - DNA, 15 bp, Homo sapiens
aaagcttttttaaaa

SEQ ID NO: 184051 - DNA, 15 bp, Homo sapiens
aaaagcttttttaaa

SEQ ID NO: 184052 - DNA, 15 bp, Homo sapiens
taaaagcttttttaa

SEQ ID NO: 184053 - DNA, 15 bp, Homo sapiens
ttaaaagctttttta

SEQ ID NO: 184054 - DNA, 15 bp, Homo sapiens
tttaaaagctttttt

SEQ ID NO: 184055 - DNA, 15 bp, Homo sapiens
atttaaaagcttttt

SEQ ID NO: 184056 - DNA, 15 bp, Homo sapiens
aatttaaaagctttt

SEQ ID NO: 184057 - DNA, 15 bp, Homo sapiens
taatttaaaagcttt

SEQ ID NO: 184058 - DNA, 15 bp, Homo sapiens
ataatttaaaagctt

SEQ ID NO: 184059 - DNA, 15 bp, Homo sapiens
aataatttaaaagct

SEQ ID NO: 184060 - DNA, 15 bp, Homo sapiens
aaataatttaaaagc

SEQ ID NO: 184061 - DNA, 15 bp, Homo sapiens
taaataatttaaaag

SEQ ID NO: 184062 - DNA, 15 bp, Homo sapiens
ttaaataatttaaaa

SEQ ID NO: 184063 - DNA, 15 bp, Homo sapiens
tttaaataatttaaa

SEQ ID NO: 184064 - DNA, 15 bp, Homo sapiens
ttttaaataatttaa

SEQ ID NO: 184065 - DNA, 15 bp, Homo sapiens
gttttaaataattta

SEQ ID NO: 184066 - DNA, 15 bp, Homo sapiens
tgttttaaataattt

SEQ ID NO: 184067 - DNA, 15 bp, Homo sapiens
ttgttttaaataatt

SEQ ID NO: 184068 - DNA, 15 bp, Homo sapiens
attgttttaaataat

SEQ ID NO: 184069 - DNA, 15 bp, Homo sapiens
aattgttttaaataa

SEQ ID NO: 184070 - DNA, 15 bp, Homo sapiens
aaattgttttaaata

SEQ ID NO: 184071 - DNA, 15 bp, Homo sapiens
caaattgttttaaat

SEQ ID NO: 184072 - DNA, 15 bp, Homo sapiens
acaaattgttttaaa

SEQ ID NO: 184073 - DNA, 15 bp, Homo sapiens
cacaaattgttttaa

SEQ ID NO: 184074 - DNA, 15 bp, Homo sapiens
ccacaaattgtttta

SEQ ID NO: 184075 - DNA, 15 bp, Homo sapiens
cccacaaattgtttt

SEQ ID NO: 184076 - DNA, 15 bp, Homo sapiens
acccacaaattgttt

SEQ ID NO: 184077 - DNA, 15 bp, Homo sapiens
aacccacaaattgtt

SEQ ID NO: 184078 - DNA, 15 bp, Homo sapiens
taacccacaaattgt

SEQ ID NO: 184079 - DNA, 15 bp, Homo sapiens
gtaacccacaaattg

SEQ ID NO: 184080 - DNA, 15 bp, Homo sapiens
tgtaacccacaaatt

SEQ ID NO: 184081 - DNA, 15 bp, Homo sapiens
atgtaacccacaaat

SEQ ID NO: 184082 - DNA, 15 bp, Homo sapiens
tatgtaacccacaaa

SEQ ID NO: 184083 - DNA, 15 bp, Homo sapiens
ctatgtaacccacaa

SEQ ID NO: 184084 - DNA, 15 bp, Homo sapiens
actatgtaacccaca

SEQ ID NO: 184085 - DNA, 15 bp, Homo sapiens
tactatgtaacccac

SEQ ID NO: 184086 - DNA, 15 bp, Homo sapiens
ctactatgtaaccca

SEQ ID NO: 184087 - DNA, 15 bp, Homo sapiens
cctactatgtaaccc

SEQ ID NO: 184088 - DNA, 15 bp, Homo sapiens
acctactatgtaacc

SEQ ID NO: 184089 - DNA, 15 bp, Homo sapiens
cacctactatgtaac

SEQ ID NO: 184090 - DNA, 15 bp, Homo sapiens
acacctactatgtaa

SEQ ID NO: 184091 - DNA, 15 bp, Homo sapiens
cacacctactatgta

SEQ ID NO: 184092 - DNA, 15 bp, Homo sapiens
acacacctactatgt

SEQ ID NO: 184093 - DNA, 15 bp, Homo sapiens
tacacacctactatg

SEQ ID NO: 184094 - DNA, 15 bp, Homo sapiens
ctacacacctactat

SEQ ID NO: 184095 - DNA, 15 bp, Homo sapiens
tctacacacctacta

SEQ ID NO: 184096 - DNA, 15 bp, Homo sapiens
atctacacacctact

SEQ ID NO: 184097 - DNA, 15 bp, Homo sapiens
aatctacacacctac

SEQ ID NO: 184098 - DNA, 15 bp, Homo sapiens
aaatctacacaccta

SEQ ID NO: 184099 - DNA, 15 bp, Homo sapiens
taaatctacacacct

SEQ ID NO: 184100 - DNA, 15 bp, Homo sapiens
ataaatctacacacc

SEQ ID NO: 184101 - DNA, 15 bp, Homo sapiens
cataaatctacacac

SEQ ID NO: 184102 - DNA, 15 bp, Homo sapiens
ccataaatctacaca

SEQ ID NO: 184103 - DNA, 15 bp, Homo sapiens
tccataaatctacac

SEQ ID NO: 184104 - DNA, 15 bp, Homo sapiens
ctccataaatctaca

SEQ ID NO: 184105 - DNA, 15 bp, Homo sapiens
gctccataaatctac

SEQ ID NO: 184106 - DNA, 15 bp, Homo sapiens
ggctccataaatcta

SEQ ID NO: 184107 - DNA, 15 bp, Homo sapiens
gggctccataaatct

SEQ ID NO: 184108 - DNA, 15 bp, Homo sapiens
tgggctccataaatc

SEQ ID NO: 184109 - DNA, 15 bp, Homo sapiens
atgggctccataaat

SEQ ID NO: 184110 - DNA, 15 bp, Homo sapiens
catgggctccataaa

SEQ ID NO: 184111 - DNA, 15 bp, Homo sapiens
tcatgggctccataa

SEQ ID NO: 184112 - DNA, 15 bp, Homo sapiens
ctcatgggctccata

SEQ ID NO: 184113 - DNA, 15 bp, Homo sapiens
tctcatgggctccat

SEQ ID NO: 184114 - DNA, 15 bp, Homo sapiens
atctcatgggctcca

SEQ ID NO: 184115 - DNA, 15 bp, Homo sapiens
catctcatgggctcc

SEQ ID NO: 184116 - DNA, 15 bp, Homo sapiens
acatctcatgggctc

SEQ ID NO: 184117 - DNA, 15 bp, Homo sapiens
aacatctcatgggct

SEQ ID NO: 184118 - DNA, 15 bp, Homo sapiens
aaacatctcatgggc

SEQ ID NO: 184119 - DNA, 15 bp, Homo sapiens
aaaacatctcatggg

SEQ ID NO: 184120 - DNA, 15 bp, Homo sapiens
caaaacatctcatgg

SEQ ID NO: 184121 - DNA, 15 bp, Homo sapiens
tcaaaacatctcatg

SEQ ID NO: 184122 - DNA, 15 bp, Homo sapiens
atcaaaacatctcat

SEQ ID NO: 184123 - DNA, 15 bp, Homo sapiens
tatcaaaacatctca

SEQ ID NO: 184124 - DNA, 15 bp, Homo sapiens
gtatcaaaacatctc

SEQ ID NO: 184125 - DNA, 15 bp, Homo sapiens
tgtatcaaaacatct

SEQ ID NO: 184126 - DNA, 15 bp, Homo sapiens
ctgtatcaaaacatc

SEQ ID NO: 184127 - DNA, 15 bp, Homo sapiens
cctgtatcaaaacat

SEQ ID NO: 184128 - DNA, 15 bp, Homo sapiens
gcctgtatcaaaaca

SEQ ID NO: 184129 - DNA, 15 bp, Homo sapiens
tgcctgtatcaaaac

SEQ ID NO: 184130 - DNA, 15 bp, Homo sapiens
atgcctgtatcaaaa

SEQ ID NO: 184131 - DNA, 15 bp, Homo sapiens
catgcctgtatcaaa

SEQ ID NO: 184132 - DNA, 15 bp, Homo sapiens
gcatgcctgtatcaa

SEQ ID NO: 184133 - DNA, 15 bp, Homo sapiens
tgcatgcctgtatca

SEQ ID NO: 184134 - DNA, 15 bp, Homo sapiens
ttgcatgcctgtatc

SEQ ID NO: 184135 - DNA, 15 bp, Homo sapiens
attgcatgcctgtat

SEQ ID NO: 184136 - DNA, 15 bp, Homo sapiens
cattgcatgcctgta

SEQ ID NO: 184137 - DNA, 15 bp, Homo sapiens
acattgcatgcctgt

SEQ ID NO: 184138 - DNA, 15 bp, Homo sapiens
cacattgcatgcctg

SEQ ID NO: 184139 - DNA, 15 bp, Homo sapiens
tcacattgcatgcct

SEQ ID NO: 184140 - DNA, 15 bp, Homo sapiens
ttcacattgcatgcc

SEQ ID NO: 184141 - DNA, 15 bp, Homo sapiens
tttcacattgcatgc

SEQ ID NO: 184142 - DNA, 15 bp, Homo sapiens
atttcacattgcatg

SEQ ID NO: 184143 - DNA, 15 bp, Homo sapiens
tatttcacattgcat

SEQ ID NO: 184144 - DNA, 15 bp, Homo sapiens
ttatttcacattgca

SEQ ID NO: 184145 - DNA, 15 bp, Homo sapiens
cttatttcacattgc

SEQ ID NO: 184146 - DNA, 15 bp, Homo sapiens
gcttatttcacattg

SEQ ID NO: 184147 - DNA, 15 bp, Homo sapiens
tgcttatttcacatt

SEQ ID NO: 184148 - DNA, 15 bp, Homo sapiens
gtgcttatttcacat

SEQ ID NO: 184149 - DNA, 15 bp, Homo sapiens
tgtgcttatttcaca

SEQ ID NO: 184150 - DNA, 15 bp, Homo sapiens
atgtgcttatttcac

SEQ ID NO: 184151 - DNA, 15 bp, Homo sapiens
gatgtgcttatttca

SEQ ID NO: 184152 - DNA, 15 bp, Homo sapiens
tgatgtgcttatttc

SEQ ID NO: 184153 - DNA, 15 bp, Homo sapiens
atgatgtgcttattt

SEQ ID NO: 184154 - DNA, 15 bp, Homo sapiens
catgatgtgcttatt

SEQ ID NO: 184155 - DNA, 15 bp, Homo sapiens
ccatgatgtgcttat

SEQ ID NO: 184156 - DNA, 15 bp, Homo sapiens
tccatgatgtgctta

SEQ ID NO: 184157 - DNA, 15 bp, Homo sapiens
ctccatgatgtgctt

SEQ ID NO: 184158 - DNA, 15 bp, Homo sapiens
tctccatgatgtgct

SEQ ID NO: 184159 - DNA, 15 bp, Homo sapiens
ctctccatgatgtgc

SEQ ID NO: 184160 - DNA, 15 bp, Homo sapiens
actctccatgatgtg

SEQ ID NO: 184161 - DNA, 15 bp, Homo sapiens
cactctccatgatgt

SEQ ID NO: 184162 - DNA, 15 bp, Homo sapiens
tcactctccatgatg

SEQ ID NO: 184163 - DNA, 15 bp, Homo sapiens
ttcactctccatgat

SEQ ID NO: 184164 - DNA, 15 bp, Homo sapiens
attcactctccatga

SEQ ID NO: 184165 - DNA, 15 bp, Homo sapiens
tattcactctccatg

SEQ ID NO: 184166 - DNA, 15 bp, Homo sapiens
atattcactctccat

SEQ ID NO: 184167 - DNA, 15 bp, Homo sapiens
aatattcactctcca

SEQ ID NO: 184168 - DNA, 15 bp, Homo sapiens
gaatattcactctcc

SEQ ID NO: 184169 - DNA, 15 bp, Homo sapiens
tgaatattcactctc

SEQ ID NO: 184170 - DNA, 15 bp, Homo sapiens
atgaatattcactct

SEQ ID NO: 184171 - DNA, 15 bp, Homo sapiens
gatgaatattcactc

SEQ ID NO: 184172 - DNA, 15 bp, Homo sapiens
agatgaatattcact

SEQ ID NO: 184173 - DNA, 15 bp, Homo sapiens
gagatgaatattcac

SEQ ID NO: 184174 - DNA, 15 bp, Homo sapiens
ggagatgaatattca

SEQ ID NO: 184175 - DNA, 15 bp, Homo sapiens
aggagatgaatattc

SEQ ID NO: 184176 - DNA, 15 bp, Homo sapiens
gaggagatgaatatt

SEQ ID NO: 184177 - DNA, 15 bp, Homo sapiens
tgaggagatgaatat

SEQ ID NO: 184178 - DNA, 15 bp, Homo sapiens
ttgaggagatgaata

SEQ ID NO: 184179 - DNA, 15 bp, Homo sapiens
cttgaggagatgaat

SEQ ID NO: 184180 - DNA, 15 bp, Homo sapiens
gcttgaggagatgaa

SEQ ID NO: 184181 - DNA, 15 bp, Homo sapiens
tgcttgaggagatga

SEQ ID NO: 184182 - DNA, 15 bp, Homo sapiens
atgcttgaggagatg

SEQ ID NO: 184183 - DNA, 15 bp, Homo sapiens
aatgcttgaggagat

SEQ ID NO: 184184 - DNA, 15 bp, Homo sapiens
aaatgcttgaggaga

SEQ ID NO: 184185 - DNA, 15 bp, Homo sapiens
taaatgcttgaggag

SEQ ID NO: 184186 - DNA, 15 bp, Homo sapiens
ataaatgcttgagga

SEQ ID NO: 184187 - DNA, 15 bp, Homo sapiens
gataaatgcttgagg

SEQ ID NO: 184188 - DNA, 15 bp, Homo sapiens
ggataaatgcttgag

SEQ ID NO: 184189 - DNA, 15 bp, Homo sapiens
aggataaatgcttga

SEQ ID NO: 184190 - DNA, 15 bp, Homo sapiens
aaggataaatgcttg

SEQ ID NO: 184191 - DNA, 15 bp, Homo sapiens
aaaggataaatgctt

SEQ ID NO: 184192 - DNA, 15 bp, Homo sapiens
caaaggataaatgct

SEQ ID NO: 184193 - DNA, 15 bp, Homo sapiens
tcaaaggataaatgc

SEQ ID NO: 184194 - DNA, 15 bp, Homo sapiens
ctcaaaggataaatg

SEQ ID NO: 184195 - DNA, 15 bp, Homo sapiens
actcaaaggataaat

SEQ ID NO: 184196 - DNA, 15 bp, Homo sapiens
aactcaaaggataaa

SEQ ID NO: 184197 - DNA, 15 bp, Homo sapiens
taactcaaaggataa

SEQ ID NO: 184198 - DNA, 15 bp, Homo sapiens
gtaactcaaaggata

SEQ ID NO: 184199 - DNA, 15 bp, Homo sapiens
tgtaactcaaaggat

SEQ ID NO: 184200 - DNA, 15 bp, Homo sapiens
ttgtaactcaaagga

SEQ ID NO: 184201 - DNA, 15 bp, Homo sapiens
tttgtaactcaaagg

SEQ ID NO: 184202 - DNA, 15 bp, Homo sapiens
gtttgtaactcaaag

SEQ ID NO: 184203 - DNA, 15 bp, Homo sapiens
tgtttgtaactcaaa

SEQ ID NO: 184204 - DNA, 15 bp, Homo sapiens
ttgtttgtaactcaa

SEQ ID NO: 184205 - DNA, 15 bp, Homo sapiens
attgtttgtaactca

SEQ ID NO: 184206 - DNA, 15 bp, Homo sapiens
gattgtttgtaactc

SEQ ID NO: 184207 - DNA, 15 bp, Homo sapiens
ggattgtttgtaact

SEQ ID NO: 184208 - DNA, 15 bp, Homo sapiens
tggattgtttgtaac

SEQ ID NO: 184209 - DNA, 15 bp, Homo sapiens
ctggattgtttgtaa

SEQ ID NO: 184210 - DNA, 15 bp, Homo sapiens
actggattgtttgta

SEQ ID NO: 184211 - DNA, 15 bp, Homo sapiens
aactggattgtttgt

SEQ ID NO: 184212 - DNA, 15 bp, Homo sapiens
taactggattgtttg

SEQ ID NO: 184213 - DNA, 15 bp, Homo sapiens
gtaactggattgttt

SEQ ID NO: 184214 - DNA, 15 bp, Homo sapiens
tgtaactggattgtt

SEQ ID NO: 184215 - DNA, 15 bp, Homo sapiens
atgtaactggattgt

SEQ ID NO: 184216 - DNA, 15 bp, Homo sapiens
aatgtaactggattg

SEQ ID NO: 184217 - DNA, 15 bp, Homo sapiens
gaatgtaactggatt

SEQ ID NO: 184218 - DNA, 15 bp, Homo sapiens
agaatgtaactggat

SEQ ID NO: 184219 - DNA, 15 bp, Homo sapiens
aagaatgtaactgga

SEQ ID NO: 184220 - DNA, 15 bp, Homo sapiens
aaagaatgtaactgg

SEQ ID NO: 184221 - DNA, 15 bp, Homo sapiens
taaagaatgtaactg

SEQ ID NO: 184222 - DNA, 15 bp, Homo sapiens
ttaaagaatgtaact

SEQ ID NO: 184223 - DNA, 15 bp, Homo sapiens
cttaaagaatgtaac

SEQ ID NO: 184224 - DNA, 15 bp, Homo sapiens
acttaaagaatgtaa

SEQ ID NO: 184225 - DNA, 15 bp, Homo sapiens
aacttaaagaatgta

SEQ ID NO: 184226 - DNA, 15 bp, Homo sapiens
taacttaaagaatgt

SEQ ID NO: 184227 - DNA, 15 bp, Homo sapiens
ataacttaaagaatg

SEQ ID NO: 184228 - DNA, 15 bp, Homo sapiens
aataacttaaagaat

SEQ ID NO: 184229 - DNA, 15 bp, Homo sapiens
aaataacttaaagaa

SEQ ID NO: 184230 - DNA, 15 bp, Homo sapiens
aaaataacttaaaga

SEQ ID NO: 184231 - DNA, 15 bp, Homo sapiens
taaaataacttaaag

SEQ ID NO: 184232 - DNA, 15 bp, Homo sapiens
ttaaaataacttaaa

SEQ ID NO: 184233 - DNA, 15 bp, Homo sapiens
tttaaaataacttaa

SEQ ID NO: 184234 - DNA, 15 bp, Homo sapiens
ttttaaaataactta

SEQ ID NO: 184235 - DNA, 15 bp, Homo sapiens
attttaaaataactt

SEQ ID NO: 184236 - DNA, 15 bp, Homo sapiens
tattttaaaataact

SEQ ID NO: 184237 - DNA, 15 bp, Homo sapiens
atattttaaaataac

SEQ ID NO: 184238 - DNA, 15 bp, Homo sapiens
tatattttaaaataa

SEQ ID NO: 184239 - DNA, 15 bp, Homo sapiens
gtatattttaaaata

SEQ ID NO: 184240 - DNA, 15 bp, Homo sapiens
tgtatattttaaaat

SEQ ID NO: 184241 - DNA, 15 bp, Homo sapiens
ttgtatattttaaaa

SEQ ID NO: 184242 - DNA, 15 bp, Homo sapiens
attgtatattttaaa

SEQ ID NO: 184243 - DNA, 15 bp, Homo sapiens
aattgtatattttaa

SEQ ID NO: 184244 - DNA, 15 bp, Homo sapiens
taattgtatatttta

SEQ ID NO: 184245 - DNA, 15 bp, Homo sapiens
ttaattgtatatttt

SEQ ID NO: 184246 - DNA, 15 bp, Homo sapiens
cttaattgtatattt

SEQ ID NO: 184247 - DNA, 15 bp, Homo sapiens
acttaattgtatatt

SEQ ID NO: 184248 - DNA, 15 bp, Homo sapiens
aacttaattgtatat

SEQ ID NO: 184249 - DNA, 15 bp, Homo sapiens
taacttaattgtata

SEQ ID NO: 184250 - DNA, 15 bp, Homo sapiens
ataacttaattgtat

SEQ ID NO: 184251 - DNA, 15 bp, Homo sapiens
aataacttaattgta

SEQ ID NO: 184252 - DNA, 15 bp, Homo sapiens
taataacttaattgt

SEQ ID NO: 184253 - DNA, 15 bp, Homo sapiens
ataataacttaattg

SEQ ID NO: 184254 - DNA, 15 bp, Homo sapiens
aataataacttaatt

SEQ ID NO: 184255 - DNA, 15 bp, Homo sapiens
caataataacttaat

SEQ ID NO: 184256 - DNA, 15 bp, Homo sapiens
tcaataataacttaa

SEQ ID NO: 184257 - DNA, 15 bp, Homo sapiens
gtcaataataactta

SEQ ID NO: 184258 - DNA, 15 bp, Homo sapiens
agtcaataataactt

SEQ ID NO: 184259 - DNA, 15 bp, Homo sapiens
tagtcaataataact

SEQ ID NO: 184260 - DNA, 15 bp, Homo sapiens
atagtcaataataac

SEQ ID NO: 184261 - DNA, 15 bp, Homo sapiens
tatagtcaataataa

SEQ ID NO: 184262 - DNA, 15 bp, Homo sapiens
ctatagtcaataata

SEQ ID NO: 184263 - DNA, 15 bp, Homo sapiens
actatagtcaataat

SEQ ID NO: 184264 - DNA, 15 bp, Homo sapiens
gactatagtcaataa

SEQ ID NO: 184265 - DNA, 15 bp, Homo sapiens
tgactatagtcaata

SEQ ID NO: 184266 - DNA, 15 bp, Homo sapiens
gtgactatagtcaat

SEQ ID NO: 184267 - DNA, 15 bp, Homo sapiens
ggtgactatagtcaa

SEQ ID NO: 184268 - DNA, 15 bp, Homo sapiens
gggtgactatagtca

SEQ ID NO: 184269 - DNA, 15 bp, Homo sapiens
agggtgactatagtc

SEQ ID NO: 184270 - DNA, 15 bp, Homo sapiens
tagggtgactatagt

SEQ ID NO: 184271 - DNA, 15 bp, Homo sapiens
atagggtgactatag

SEQ ID NO: 184272 - DNA, 15 bp, Homo sapiens
aatagggtgactata

SEQ ID NO: 184273 - DNA, 15 bp, Homo sapiens
taatagggtgactat

SEQ ID NO: 184274 - DNA, 15 bp, Homo sapiens
ataatagggtgacta

SEQ ID NO: 184275 - DNA, 15 bp, Homo sapiens
cataatagggtgact

SEQ ID NO: 184276 - DNA, 15 bp, Homo sapiens
acataatagggtgac

SEQ ID NO: 184277 - DNA, 15 bp, Homo sapiens
aacataatagggtga

SEQ ID NO: 184278 - DNA, 15 bp, Homo sapiens
taacataatagggtg

SEQ ID NO: 184279 - DNA, 15 bp, Homo sapiens
ataacataatagggt

SEQ ID NO: 184280 - DNA, 15 bp, Homo sapiens
gataacataataggg

SEQ ID NO: 184281 - DNA, 15 bp, Homo sapiens
tgataacataatagg

SEQ ID NO: 184282 - DNA, 15 bp, Homo sapiens
ctgataacataatag

SEQ ID NO: 184283 - DNA, 15 bp, Homo sapiens
tctgataacataata

SEQ ID NO: 184284 - DNA, 15 bp, Homo sapiens
atctgataacataat

SEQ ID NO: 184285 - DNA, 15 bp, Homo sapiens
tatctgataacataa

SEQ ID NO: 184286 - DNA, 15 bp, Homo sapiens
ctatctgataacata

SEQ ID NO: 184287 - DNA, 15 bp, Homo sapiens
actatctgataacat

SEQ ID NO: 184288 - DNA, 15 bp, Homo sapiens
tactatctgataaca

SEQ ID NO: 184289 - DNA, 15 bp, Homo sapiens
ctactatctgataac

SEQ ID NO: 184290 - DNA, 15 bp, Homo sapiens
cctactatctgataa

SEQ ID NO: 184291 - DNA, 15 bp, Homo sapiens
acctactatctgata

SEQ ID NO: 184292 - DNA, 15 bp, Homo sapiens
cacctactatctgat

SEQ ID NO: 184293 - DNA, 15 bp, Homo sapiens
acacctactatctga

SEQ ID NO: 184294 - DNA, 15 bp, Homo sapiens
aacacctactatctg

SEQ ID NO: 184295 - DNA, 15 bp, Homo sapiens
taacacctactatct

SEQ ID NO: 184296 - DNA, 15 bp, Homo sapiens
ataacacctactatc

SEQ ID NO: 184297 - DNA, 15 bp, Homo sapiens
aataacacctactat

SEQ ID NO: 184298 - DNA, 15 bp, Homo sapiens
gaataacacctacta

SEQ ID NO: 184299 - DNA, 15 bp, Homo sapiens
tgaataacacctact

SEQ ID NO: 184300 - DNA, 15 bp, Homo sapiens
atgaataacacctac

SEQ ID NO: 184301 - DNA, 15 bp, Homo sapiens
aatgaataacaccta

SEQ ID NO: 184302 - DNA, 15 bp, Homo sapiens
gaatgaataacacct

SEQ ID NO: 184303 - DNA, 15 bp, Homo sapiens
agaatgaataacacc

SEQ ID NO: 184304 - DNA, 15 bp, Homo sapiens
aagaatgaataacac

SEQ ID NO: 184305 - DNA, 15 bp, Homo sapiens
aaagaatgaataaca

SEQ ID NO: 184306 - DNA, 15 bp, Homo sapiens
gaaagaatgaataac

SEQ ID NO: 184307 - DNA, 15 bp, Homo sapiens
agaaagaatgaataa

SEQ ID NO: 184308 - DNA, 15 bp, Homo sapiens
tagaaagaatgaata

SEQ ID NO: 184309 - DNA, 15 bp, Homo sapiens
atagaaagaatgaat

SEQ ID NO: 184310 - DNA, 15 bp, Homo sapiens
aatagaaagaatgaa

SEQ ID NO: 184311 - DNA, 15 bp, Homo sapiens
aaatagaaagaatga

SEQ ID NO: 184312 - DNA, 15 bp, Homo sapiens
aaaatagaaagaatg

SEQ ID NO: 184313 - DNA, 15 bp, Homo sapiens
aaaaatagaaagaat

SEQ ID NO: 184314 - DNA, 15 bp, Homo sapiens
aaaaaatagaaagaa

SEQ ID NO: 184315 - DNA, 15 bp, Homo sapiens
aaaaaaatagaaaga

SEQ ID NO: 184316 - DNA, 15 bp, Homo sapiens
caaaaaaatagaaag

SEQ ID NO: 184317 - DNA, 15 bp, Homo sapiens
acaaaaaaatagaaa

SEQ ID NO: 184318 - DNA, 15 bp, Homo sapiens
tacaaaaaaatagaa

SEQ ID NO: 184319 - DNA, 15 bp, Homo sapiens
atacaaaaaaataga

SEQ ID NO: 184320 - DNA, 15 bp, Homo sapiens
gatacaaaaaaatag

SEQ ID NO: 184321 - DNA, 15 bp, Homo sapiens
ggatacaaaaaaata

SEQ ID NO: 184322 - DNA, 15 bp, Homo sapiens
tggatacaaaaaaat

SEQ ID NO: 184323 - DNA, 15 bp, Homo sapiens
atggatacaaaaaaa

SEQ ID NO: 184324 - DNA, 15 bp, Homo sapiens
aatggatacaaaaaa

SEQ ID NO: 184325 - DNA, 15 bp, Homo sapiens
taatggatacaaaaa

SEQ ID NO: 184326 - DNA, 15 bp, Homo sapiens
ttaatggatacaaaa

SEQ ID NO: 184327 - DNA, 15 bp, Homo sapiens
gttaatggatacaaa

SEQ ID NO: 184328 - DNA, 15 bp, Homo sapiens
ggttaatggatacaa

SEQ ID NO: 184329 - DNA, 15 bp, Homo sapiens
tggttaatggataca

SEQ ID NO: 184330 - DNA, 15 bp, Homo sapiens
atggttaatggatac

SEQ ID NO: 184331 - DNA, 15 bp, Homo sapiens
gatggttaatggata

SEQ ID NO: 184332 - DNA, 15 bp, Homo sapiens
ggatggttaatggat

SEQ ID NO: 184333 - DNA, 15 bp, Homo sapiens
aggatggttaatgga

SEQ ID NO: 184334 - DNA, 15 bp, Homo sapiens
caggatggttaatgg

SEQ ID NO: 184335 - DNA, 15 bp, Homo sapiens
gcaggatggttaatg

SEQ ID NO: 184336 - DNA, 15 bp, Homo sapiens
ggcaggatggttaat

SEQ ID NO: 184337 - DNA, 15 bp, Homo sapiens
aggcaggatggttaa

SEQ ID NO: 184338 - DNA, 15 bp, Homo sapiens
gaggcaggatggtta

SEQ ID NO: 184339 - DNA, 15 bp, Homo sapiens
ggaggcaggatggtt

SEQ ID NO: 184340 - DNA, 15 bp, Homo sapiens
gggaggcaggatggt

SEQ ID NO: 184341 - DNA, 15 bp, Homo sapiens
ggggaggcaggatgg

SEQ ID NO: 184342 - DNA, 15 bp, Homo sapiens
aggggaggcaggatg

SEQ ID NO: 184343 - DNA, 15 bp, Homo sapiens
gaggggaggcaggat

SEQ ID NO: 184344 - DNA, 15 bp, Homo sapiens
ggaggggaggcagga

SEQ ID NO: 184345 - DNA, 15 bp, Homo sapiens
tggaggggaggcagg

SEQ ID NO: 184346 - DNA, 15 bp, Homo sapiens
ttggaggggaggcag

SEQ ID NO: 184347 - DNA, 15 bp, Homo sapiens
attggaggggaggca

SEQ ID NO: 184348 - DNA, 15 bp, Homo sapiens
gattggaggggaggc

SEQ ID NO: 184349 - DNA, 15 bp, Homo sapiens
ggattggaggggagg

SEQ ID NO: 184350 - DNA, 15 bp, Homo sapiens
cggattggaggggag

SEQ ID NO: 184351 - DNA, 15 bp, Homo sapiens
gcggattggagggga

SEQ ID NO: 184352 - DNA, 15 bp, Homo sapiens
ggcggattggagggg

SEQ ID NO: 184353 - DNA, 15 bp, Homo sapiens
tggcggattggaggg

SEQ ID NO: 184354 - DNA, 15 bp, Homo sapiens
gtggcggattggagg

SEQ ID NO: 184355 - DNA, 15 bp, Homo sapiens
agtggcggattggag

SEQ ID NO: 184356 - DNA, 15 bp, Homo sapiens
gagtggcggattgga

SEQ ID NO: 184357 - DNA, 15 bp, Homo sapiens
ggagtggcggattgg

SEQ ID NO: 184358 - DNA, 15 bp, Homo sapiens
gggagtggcggattg

SEQ ID NO: 184359 - DNA, 15 bp, Homo sapiens
ggggagtggcggatt

SEQ ID NO: 184360 - DNA, 15 bp, Homo sapiens
aggggagtggcggat

SEQ ID NO: 184361 - DNA, 15 bp, Homo sapiens
aaggggagtggcgga

SEQ ID NO: 184362 - DNA, 15 bp, Homo sapiens
gaaggggagtggcgg

SEQ ID NO: 184363 - DNA, 15 bp, Homo sapiens
ggaaggggagtggcg

SEQ ID NO: 184364 - DNA, 15 bp, Homo sapiens
gggaaggggagtggc

SEQ ID NO: 184365 - DNA, 15 bp, Homo sapiens
tgggaaggggagtgg

SEQ ID NO: 184366 - DNA, 15 bp, Homo sapiens
ctgggaaggggagtg

SEQ ID NO: 184367 - DNA, 15 bp, Homo sapiens
gctgggaaggggagt

SEQ ID NO: 184368 - DNA, 15 bp, Homo sapiens
ggctgggaaggggag

SEQ ID NO: 184369 - DNA, 15 bp, Homo sapiens
aggctgggaagggga

SEQ ID NO: 184370 - DNA, 15 bp, Homo sapiens
gaggctgggaagggg

SEQ ID NO: 184371 - DNA, 15 bp, Homo sapiens
agaggctgggaaggg

SEQ ID NO: 184372 - DNA, 15 bp, Homo sapiens
cagaggctgggaagg

SEQ ID NO: 184373 - DNA, 15 bp, Homo sapiens
ccagaggctgggaag

SEQ ID NO: 184374 - DNA, 15 bp, Homo sapiens
accagaggctgggaa

SEQ ID NO: 184375 - DNA, 15 bp, Homo sapiens
taccagaggctggga

SEQ ID NO: 184376 - DNA, 15 bp, Homo sapiens
ttaccagaggctggg

SEQ ID NO: 184377 - DNA, 15 bp, Homo sapiens
gttaccagaggctgg

SEQ ID NO: 184378 - DNA, 15 bp, Homo sapiens
agttaccagaggctg

SEQ ID NO: 184379 - DNA, 15 bp, Homo sapiens
gagttaccagaggct

SEQ ID NO: 184380 - DNA, 15 bp, Homo sapiens
agagttaccagaggc

SEQ ID NO: 184381 - DNA, 15 bp, Homo sapiens
gagagttaccagagg

SEQ ID NO: 184382 - DNA, 15 bp, Homo sapiens
agagagttaccagag

SEQ ID NO: 184383 - DNA, 15 bp, Homo sapiens
aagagagttaccaga

SEQ ID NO: 184384 - DNA, 15 bp, Homo sapiens
aaagagagttaccag

SEQ ID NO: 184385 - DNA, 15 bp, Homo sapiens
gaaagagagttacca

SEQ ID NO: 184386 - DNA, 15 bp, Homo sapiens
agaaagagagttacc

SEQ ID NO: 184387 - DNA, 15 bp, Homo sapiens
tagaaagagagttac

SEQ ID NO: 184388 - DNA, 15 bp, Homo sapiens
gtagaaagagagtta

SEQ ID NO: 184389 - DNA, 15 bp, Homo sapiens
agtagaaagagagtt

SEQ ID NO: 184390 - DNA, 15 bp, Homo sapiens
gagtagaaagagagt

SEQ ID NO: 184391 - DNA, 15 bp, Homo sapiens
agagtagaaagagag

SEQ ID NO: 184392 - DNA, 15 bp, Homo sapiens
tagagtagaaagaga

SEQ ID NO: 184393 - DNA, 15 bp, Homo sapiens
ttagagtagaaagag

SEQ ID NO: 184394 - DNA, 15 bp, Homo sapiens
attagagtagaaaga

SEQ ID NO: 184395 - DNA, 15 bp, Homo sapiens
aattagagtagaaag

SEQ ID NO: 184396 - DNA, 15 bp, Homo sapiens
aaattagagtagaaa

SEQ ID NO: 184397 - DNA, 15 bp, Homo sapiens
caaattagagtagaa

SEQ ID NO: 184398 - DNA, 15 bp, Homo sapiens
tcaaattagagtaga

SEQ ID NO: 184399 - DNA, 15 bp, Homo sapiens
atcaaattagagtag

SEQ ID NO: 184400 - DNA, 15 bp, Homo sapiens
aatcaaattagagta

SEQ ID NO: 184401 - DNA, 15 bp, Homo sapiens
aaatcaaattagagt

SEQ ID NO: 184402 - DNA, 15 bp, Homo sapiens
aaaatcaaattagag

SEQ ID NO: 184403 - DNA, 15 bp, Homo sapiens
aaaaatcaaattaga

SEQ ID NO: 184404 - DNA, 15 bp, Homo sapiens
aaaaaatcaaattag

SEQ ID NO: 184405 - DNA, 15 bp, Homo sapiens
taaaaaatcaaatta

SEQ ID NO: 184406 - DNA, 15 bp, Homo sapiens
ctaaaaaatcaaatt

SEQ ID NO: 184407 - DNA, 15 bp, Homo sapiens
tctaaaaaatcaaat

SEQ ID NO: 184408 - DNA, 15 bp, Homo sapiens
atctaaaaaatcaaa

SEQ ID NO: 184409 - DNA, 15 bp, Homo sapiens
gatctaaaaaatcaa

SEQ ID NO: 184410 - DNA, 15 bp, Homo sapiens
ggatctaaaaaatca

SEQ ID NO: 184411 - DNA, 15 bp, Homo sapiens
gggatctaaaaaatc

SEQ ID NO: 184412 - DNA, 15 bp, Homo sapiens
tgggatctaaaaaat

SEQ ID NO: 184413 - DNA, 15 bp, Homo sapiens
gtgggatctaaaaaa

SEQ ID NO: 184414 - DNA, 15 bp, Homo sapiens
tgtgggatctaaaaa

SEQ ID NO: 184415 - DNA, 15 bp, Homo sapiens
ttgtgggatctaaaa

SEQ ID NO: 184416 - DNA, 15 bp, Homo sapiens
tttgtgggatctaaa

SEQ ID NO: 184417 - DNA, 15 bp, Homo sapiens
atttgtgggatctaa

SEQ ID NO: 184418 - DNA, 15 bp, Homo sapiens
tatttgtgggatcta

SEQ ID NO: 184419 - DNA, 15 bp, Homo sapiens
atatttgtgggatct

SEQ ID NO: 184420 - DNA, 15 bp, Homo sapiens
aatatttgtgggatc

SEQ ID NO: 184421 - DNA, 15 bp, Homo sapiens
aaatatttgtgggat

SEQ ID NO: 184422 - DNA, 15 bp, Homo sapiens
aaaatatttgtggga

SEQ ID NO: 184423 - DNA, 15 bp, Homo sapiens
aaaaatatttgtggg

SEQ ID NO: 184424 - DNA, 15 bp, Homo sapiens
taaaaatatttgtgg

SEQ ID NO: 184425 - DNA, 15 bp, Homo sapiens
gtaaaaatatttgtg

SEQ ID NO: 184426 - DNA, 15 bp, Homo sapiens
agtaaaaatatttgt

SEQ ID NO: 184427 - DNA, 15 bp, Homo sapiens
aagtaaaaatatttg

SEQ ID NO: 184428 - DNA, 15 bp, Homo sapiens
aaagtaaaaatattt

SEQ ID NO: 184429 - DNA, 15 bp, Homo sapiens
aaaagtaaaaatatt

SEQ ID NO: 184430 - DNA, 15 bp, Homo sapiens
gaaaagtaaaaatat

SEQ ID NO: 184431 - DNA, 15 bp, Homo sapiens
tgaaaagtaaaaata

SEQ ID NO: 184432 - DNA, 15 bp, Homo sapiens
ttgaaaagtaaaaat

SEQ ID NO: 184433 - DNA, 15 bp, Homo sapiens
cttgaaaagtaaaaa

SEQ ID NO: 184434 - DNA, 15 bp, Homo sapiens
acttgaaaagtaaaa

SEQ ID NO: 184435 - DNA, 15 bp, Homo sapiens
aacttgaaaagtaaa

SEQ ID NO: 184436 - DNA, 15 bp, Homo sapiens
caacttgaaaagtaa

SEQ ID NO: 184437 - DNA, 15 bp, Homo sapiens
tcaacttgaaaagta

SEQ ID NO: 184438 - DNA, 15 bp, Homo sapiens
ttcaacttgaaaagt

SEQ ID NO: 184439 - DNA, 15 bp, Homo sapiens
gttcaacttgaaaag

SEQ ID NO: 184440 - DNA, 15 bp, Homo sapiens
agttcaacttgaaaa

SEQ ID NO: 184441 - DNA, 15 bp, Homo sapiens
tagttcaacttgaaa

SEQ ID NO: 184442 - DNA, 15 bp, Homo sapiens
atagttcaacttgaa

SEQ ID NO: 184443 - DNA, 15 bp, Homo sapiens
tatagttcaacttga

SEQ ID NO: 184444 - DNA, 15 bp, Homo sapiens
atatagttcaacttg

SEQ ID NO: 184445 - DNA, 15 bp, Homo sapiens
tatatagttcaactt

SEQ ID NO: 184446 - DNA, 15 bp, Homo sapiens
ttatatagttcaact

SEQ ID NO: 184447 - DNA, 15 bp, Homo sapiens
attatatagttcaac

SEQ ID NO: 184448 - DNA, 15 bp, Homo sapiens
tattatatagttcaa

SEQ ID NO: 184449 - DNA, 15 bp, Homo sapiens
atattatatagttca

SEQ ID NO: 184450 - DNA, 15 bp, Homo sapiens
catattatatagttc

SEQ ID NO: 184451 - DNA, 15 bp, Homo sapiens
tcatattatatagtt

SEQ ID NO: 184452 - DNA, 15 bp, Homo sapiens
atcatattatatagt

SEQ ID NO: 184453 - DNA, 15 bp, Homo sapiens
tatcatattatatag

SEQ ID NO: 184454 - DNA, 15 bp, Homo sapiens
gtatcatattatata

SEQ ID NO: 184455 - DNA, 15 bp, Homo sapiens
agtatcatattatat

SEQ ID NO: 184456 - DNA, 15 bp, Homo sapiens
tagtatcatattata

SEQ ID NO: 184457 - DNA, 15 bp, Homo sapiens
ttagtatcatattat

SEQ ID NO: 184458 - DNA, 15 bp, Homo sapiens
tttagtatcatatta

SEQ ID NO: 184459 - DNA, 15 bp, Homo sapiens
ttttagtatcatatt

SEQ ID NO: 184460 - DNA, 15 bp, Homo sapiens
gttttagtatcatat

SEQ ID NO: 184461 - DNA, 15 bp, Homo sapiens
agttttagtatcata

SEQ ID NO: 184462 - DNA, 15 bp, Homo sapiens
aagttttagtatcat

SEQ ID NO: 184463 - DNA, 15 bp, Homo sapiens
caagttttagtatca

SEQ ID NO: 184464 - DNA, 15 bp, Homo sapiens
tcaagttttagtatc

SEQ ID NO: 184465 - DNA, 15 bp, Homo sapiens
ttcaagttttagtat

SEQ ID NO: 184466 - DNA, 15 bp, Homo sapiens
gttcaagttttagta

SEQ ID NO: 184467 - DNA, 15 bp, Homo sapiens
tgttcaagttttagt

SEQ ID NO: 184468 - DNA, 15 bp, Homo sapiens
gtgttcaagttttag

SEQ ID NO: 184469 - DNA, 15 bp, Homo sapiens
tgtgttcaagtttta

SEQ ID NO: 184470 - DNA, 15 bp, Homo sapiens
gtgtgttcaagtttt

SEQ ID NO: 184471 - DNA, 15 bp, Homo sapiens
ggtgtgttcaagttt

SEQ ID NO: 184472 - DNA, 15 bp, Homo sapiens
tggtgtgttcaagtt

SEQ ID NO: 184473 - DNA, 15 bp, Homo sapiens
gtggtgtgttcaagt

SEQ ID NO: 184474 - DNA, 15 bp, Homo sapiens
tgtggtgtgttcaag

SEQ ID NO: 184475 - DNA, 15 bp, Homo sapiens
ttgtggtgtgttcaa

SEQ ID NO: 184476 - DNA, 15 bp, Homo sapiens
tttgtggtgtgttca

SEQ ID NO: 184477 - DNA, 15 bp, Homo sapiens
ctttgtggtgtgttc

SEQ ID NO: 184478 - DNA, 15 bp, Homo sapiens
actttgtggtgtgtt

SEQ ID NO: 184479 - DNA, 15 bp, Homo sapiens
tactttgtggtgtgt

SEQ ID NO: 184480 - DNA, 15 bp, Homo sapiens
atactttgtggtgtg

SEQ ID NO: 184481 - DNA, 15 bp, Homo sapiens
tatactttgtggtgt

SEQ ID NO: 184482 - DNA, 15 bp, Homo sapiens
atatactttgtggtg

SEQ ID NO: 184483 - DNA, 15 bp, Homo sapiens
catatactttgtggt

SEQ ID NO: 184484 - DNA, 15 bp, Homo sapiens
gcatatactttgtgg

SEQ ID NO: 184485 - DNA, 15 bp, Homo sapiens
tgcatatactttgtg

SEQ ID NO: 184486 - DNA, 15 bp, Homo sapiens
atgcatatactttgt

SEQ ID NO: 184487 - DNA, 15 bp, Homo sapiens
tatgcatatactttg

SEQ ID NO: 184488 - DNA, 15 bp, Homo sapiens
atatgcatatacttt

SEQ ID NO: 184489 - DNA, 15 bp, Homo sapiens
aatatgcatatactt

SEQ ID NO: 184490 - DNA, 15 bp, Homo sapiens
gaatatgcatatact

SEQ ID NO: 184491 - DNA, 15 bp, Homo sapiens
tgaatatgcatatac

SEQ ID NO: 184492 - DNA, 15 bp, Homo sapiens
ttgaatatgcatata

SEQ ID NO: 184493 - DNA, 15 bp, Homo sapiens
tttgaatatgcatat

SEQ ID NO: 184494 - DNA, 15 bp, Homo sapiens
ttttgaatatgcata

SEQ ID NO: 184495 - DNA, 15 bp, Homo sapiens
gttttgaatatgcat

SEQ ID NO: 184496 - DNA, 15 bp, Homo sapiens
agttttgaatatgca

SEQ ID NO: 184497 - DNA, 15 bp, Homo sapiens
cagttttgaatatgc

SEQ ID NO: 184498 - DNA, 15 bp, Homo sapiens
tcagttttgaatatg

SEQ ID NO: 184499 - DNA, 15 bp, Homo sapiens
ttcagttttgaatat

SEQ ID NO: 184500 - DNA, 15 bp, Homo sapiens
gttcagttttgaata

SEQ ID NO: 184501 - DNA, 15 bp, Homo sapiens
tgttcagttttgaat

SEQ ID NO: 184502 - DNA, 15 bp, Homo sapiens
gtgttcagttttgaa

SEQ ID NO: 184503 - DNA, 15 bp, Homo sapiens
tgtgttcagttttga

SEQ ID NO: 184504 - DNA, 15 bp, Homo sapiens
gtgtgttcagttttg

SEQ ID NO: 184505 - DNA, 15 bp, Homo sapiens
ggtgtgttcagtttt

SEQ ID NO: 184506 - DNA, 15 bp, Homo sapiens
gggtgtgttcagttt

SEQ ID NO: 184507 - DNA, 15 bp, Homo sapiens
tgggtgtgttcagtt

SEQ ID NO: 184508 - DNA, 15 bp, Homo sapiens
atgggtgtgttcagt

SEQ ID NO: 184509 - DNA, 15 bp, Homo sapiens
catgggtgtgttcag

SEQ ID NO: 184510 - DNA, 15 bp, Homo sapiens
ccatgggtgtgttca

SEQ ID NO: 184511 - DNA, 15 bp, Homo sapiens
tccatgggtgtgttc

SEQ ID NO: 184512 - DNA, 15 bp, Homo sapiens
ttccatgggtgtgtt

SEQ ID NO: 184513 - DNA, 15 bp, Homo sapiens
gttccatgggtgtgt

SEQ ID NO: 184514 - DNA, 15 bp, Homo sapiens
agttccatgggtgtg

SEQ ID NO: 184515 - DNA, 15 bp, Homo sapiens
tagttccatgggtgt

SEQ ID NO: 184516 - DNA, 15 bp, Homo sapiens
ttagttccatgggtg

SEQ ID NO: 184517 - DNA, 15 bp, Homo sapiens
gttagttccatgggt

SEQ ID NO: 184518 - DNA, 15 bp, Homo sapiens
tgttagttccatggg

SEQ ID NO: 184519 - DNA, 15 bp, Homo sapiens
atgttagttccatgg

SEQ ID NO: 184520 - DNA, 15 bp, Homo sapiens
gatgttagttccatg

SEQ ID NO: 184521 - DNA, 15 bp, Homo sapiens
ggatgttagttccat

SEQ ID NO: 184522 - DNA, 15 bp, Homo sapiens
tggatgttagttcca

SEQ ID NO: 184523 - DNA, 15 bp, Homo sapiens
ttggatgttagttcc

SEQ ID NO: 184524 - DNA, 15 bp, Homo sapiens
tttggatgttagttc

SEQ ID NO: 184525 - DNA, 15 bp, Homo sapiens
atttggatgttagtt

SEQ ID NO: 184526 - DNA, 15 bp, Homo sapiens
gatttggatgttagt

SEQ ID NO: 184527 - DNA, 15 bp, Homo sapiens
tgatttggatgttag

SEQ ID NO: 184528 - DNA, 15 bp, Homo sapiens
ttgatttggatgtta

SEQ ID NO: 184529 - DNA, 15 bp, Homo sapiens
cttgatttggatgtt

SEQ ID NO: 184530 - DNA, 15 bp, Homo sapiens
tcttgatttggatgt

SEQ ID NO: 184531 - DNA, 15 bp, Homo sapiens
ttcttgatttggatg

SEQ ID NO: 184532 - DNA, 15 bp, Homo sapiens
tttcttgatttggat

SEQ ID NO: 184533 - DNA, 15 bp, Homo sapiens
gtttcttgatttgga

SEQ ID NO: 184534 - DNA, 15 bp, Homo sapiens
tgtttcttgatttgg

SEQ ID NO: 184535 - DNA, 15 bp, Homo sapiens
atgtttcttgatttg

SEQ ID NO: 184536 - DNA, 15 bp, Homo sapiens
tatgtttcttgattt

SEQ ID NO: 184537 - DNA, 15 bp, Homo sapiens
ctatgtttcttgatt

SEQ ID NO: 184538 - DNA, 15 bp, Homo sapiens
gctatgtttcttgat

SEQ ID NO: 184539 - DNA, 15 bp, Homo sapiens
agctatgtttcttga

SEQ ID NO: 184540 - DNA, 15 bp, Homo sapiens
cagctatgtttcttg

SEQ ID NO: 184541 - DNA, 15 bp, Homo sapiens
gcagctatgtttctt

SEQ ID NO: 184542 - DNA, 15 bp, Homo sapiens
agcagctatgtttct

SEQ ID NO: 184543 - DNA, 15 bp, Homo sapiens
aagcagctatgtttc

SEQ ID NO: 184544 - DNA, 15 bp, Homo sapiens
aaagcagctatgttt

SEQ ID NO: 184545 - DNA, 15 bp, Homo sapiens
taaagcagctatgtt

SEQ ID NO: 184546 - DNA, 15 bp, Homo sapiens
gtaaagcagctatgt

SEQ ID NO: 184547 - DNA, 15 bp, Homo sapiens
tgtaaagcagctatg

SEQ ID NO: 184548 - DNA, 15 bp, Homo sapiens
gtgtaaagcagctat

SEQ ID NO: 184549 - DNA, 15 bp, Homo sapiens
agtgtaaagcagcta

SEQ ID NO: 184550 - DNA, 15 bp, Homo sapiens
aagtgtaaagcagct

SEQ ID NO: 184551 - DNA, 15 bp, Homo sapiens
aaagtgtaaagcagc

SEQ ID NO: 184552 - DNA, 15 bp, Homo sapiens
gaaagtgtaaagcag

SEQ ID NO: 184553 - DNA, 15 bp, Homo sapiens
agaaagtgtaaagca

SEQ ID NO: 184554 - DNA, 15 bp, Homo sapiens
aagaaagtgtaaagc

SEQ ID NO: 184555 - DNA, 15 bp, Homo sapiens
caagaaagtgtaaag

SEQ ID NO: 184556 - DNA, 15 bp, Homo sapiens
tcaagaaagtgtaaa

SEQ ID NO: 184557 - DNA, 15 bp, Homo sapiens
ttcaagaaagtgtaa

SEQ ID NO: 184558 - DNA, 15 bp, Homo sapiens
tttcaagaaagtgta

SEQ ID NO: 184559 - DNA, 15 bp, Homo sapiens
atttcaagaaagtgt

SEQ ID NO: 184560 - DNA, 15 bp, Homo sapiens
tatttcaagaaagtg

SEQ ID NO: 184561 - DNA, 15 bp, Homo sapiens
ttatttcaagaaagt

SEQ ID NO: 184562 - DNA, 15 bp, Homo sapiens
cttatttcaagaaag

SEQ ID NO: 184563 - DNA, 15 bp, Homo sapiens
gcttatttcaagaaa

SEQ ID NO: 184564 - DNA, 15 bp, Homo sapiens
tgcttatttcaagaa

SEQ ID NO: 184565 - DNA, 15 bp, Homo sapiens
gtgcttatttcaaga

SEQ ID NO: 184566 - DNA, 15 bp, Homo sapiens
agtgcttatttcaag

SEQ ID NO: 184567 - DNA, 15 bp, Homo sapiens
aagtgcttatttcaa

SEQ ID NO: 184568 - DNA, 15 bp, Homo sapiens
taagtgcttatttca

SEQ ID NO: 184569 - DNA, 15 bp, Homo sapiens
gtaagtgcttatttc

SEQ ID NO: 184570 - DNA, 15 bp, Homo sapiens
ggtaagtgcttattt

SEQ ID NO: 184571 - DNA, 15 bp, Homo sapiens
aggtaagtgcttatt

SEQ ID NO: 184572 - DNA, 15 bp, Homo sapiens
caggtaagtgcttat

SEQ ID NO: 184573 - DNA, 15 bp, Homo sapiens
ccaggtaagtgctta

SEQ ID NO: 184574 - DNA, 15 bp, Homo sapiens
tccaggtaagtgctt

SEQ ID NO: 184575 - DNA, 15 bp, Homo sapiens
ctccaggtaagtgct

SEQ ID NO: 184576 - DNA, 15 bp, Homo sapiens
tctccaggtaagtgc

SEQ ID NO: 184577 - DNA, 15 bp, Homo sapiens
atctccaggtaagtg

SEQ ID NO: 184578 - DNA, 15 bp, Homo sapiens
catctccaggtaagt

SEQ ID NO: 184579 - DNA, 15 bp, Homo sapiens
gcatctccaggtaag

SEQ ID NO: 184580 - DNA, 15 bp, Homo sapiens
tgcatctccaggtaa

SEQ ID NO: 184581 - DNA, 15 bp, Homo sapiens
ttgcatctccaggta

SEQ ID NO: 184582 - DNA, 15 bp, Homo sapiens
tttgcatctccaggt

SEQ ID NO: 184583 - DNA, 15 bp, Homo sapiens
ctttgcatctccagg

SEQ ID NO: 184584 - DNA, 15 bp, Homo sapiens
cctttgcatctccag

SEQ ID NO: 184585 - DNA, 15 bp, Homo sapiens
gcctttgcatctcca

SEQ ID NO: 184586 - DNA, 15 bp, Homo sapiens
tgcctttgcatctcc

SEQ ID NO: 184587 - DNA, 15 bp, Homo sapiens
gtgcctttgcatctc

SEQ ID NO: 184588 - DNA, 15 bp, Homo sapiens
agtgcctttgcatct

SEQ ID NO: 184589 - DNA, 15 bp, Homo sapiens
aagtgcctttgcatc

SEQ ID NO: 184590 - DNA, 15 bp, Homo sapiens
caagtgcctttgcat

SEQ ID NO: 184591 - DNA, 15 bp, Homo sapiens
gcaagtgcctttgca

SEQ ID NO: 184592 - DNA, 15 bp, Homo sapiens
cgcaagtgcctttgc

SEQ ID NO: 184593 - DNA, 15 bp, Homo sapiens
acgcaagtgcctttg

SEQ ID NO: 184594 - DNA, 15 bp, Homo sapiens
cacgcaagtgccttt

SEQ ID NO: 184595 - DNA, 15 bp, Homo sapiens
gcacgcaagtgcctt

SEQ ID NO: 184596 - DNA, 15 bp, Homo sapiens
agcacgcaagtgcct

SEQ ID NO: 184597 - DNA, 15 bp, Homo sapiens
gagcacgcaagtgcc

SEQ ID NO: 184598 - DNA, 15 bp, Homo sapiens
agagcacgcaagtgc

SEQ ID NO: 184599 - DNA, 15 bp, Homo sapiens
aagagcacgcaagtg

SEQ ID NO: 184600 - DNA, 15 bp, Homo sapiens
aaagagcacgcaagt

SEQ ID NO: 184601 - DNA, 15 bp, Homo sapiens
gaaagagcacgcaag

SEQ ID NO: 184602 - DNA, 15 bp, Homo sapiens
tgaaagagcacgcaa

SEQ ID NO: 184603 - DNA, 15 bp, Homo sapiens
ctgaaagagcacgca

SEQ ID NO: 184604 - DNA, 15 bp, Homo sapiens
actgaaagagcacgc

SEQ ID NO: 184605 - DNA, 15 bp, Homo sapiens
tactgaaagagcacg

SEQ ID NO: 184606 - DNA, 15 bp, Homo sapiens
ctactgaaagagcac

SEQ ID NO: 184607 - DNA, 15 bp, Homo sapiens
gctactgaaagagca

SEQ ID NO: 184608 - DNA, 15 bp, Homo sapiens
tgctactgaaagagc

SEQ ID NO: 184609 - DNA, 15 bp, Homo sapiens
atgctactgaaagag

SEQ ID NO: 184610 - DNA, 15 bp, Homo sapiens
aatgctactgaaaga

SEQ ID NO: 184611 - DNA, 15 bp, Homo sapiens
aaatgctactgaaag

SEQ ID NO: 184612 - DNA, 15 bp, Homo sapiens
gaaatgctactgaaa

SEQ ID NO: 184613 - DNA, 15 bp, Homo sapiens
agaaatgctactgaa

SEQ ID NO: 184614 - DNA, 15 bp, Homo sapiens
gagaaatgctactga

SEQ ID NO: 184615 - DNA, 15 bp, Homo sapiens
agagaaatgctactg

SEQ ID NO: 184616 - DNA, 15 bp, Homo sapiens
aagagaaatgctact

SEQ ID NO: 184617 - DNA, 15 bp, Homo sapiens
gaagagaaatgctac

SEQ ID NO: 184618 - DNA, 15 bp, Homo sapiens
agaagagaaatgcta

SEQ ID NO: 184619 - DNA, 15 bp, Homo sapiens
gagaagagaaatgct

SEQ ID NO: 184620 - DNA, 15 bp, Homo sapiens
ggagaagagaaatgc

SEQ ID NO: 184621 - DNA, 15 bp, Homo sapiens
tggagaagagaaatg

SEQ ID NO: 184622 - DNA, 15 bp, Homo sapiens
ctggagaagagaaat

SEQ ID NO: 184623 - DNA, 15 bp, Homo sapiens
gctggagaagagaaa

SEQ ID NO: 184624 - DNA, 15 bp, Homo sapiens
tgctggagaagagaa

SEQ ID NO: 184625 - DNA, 15 bp, Homo sapiens
atgctggagaagaga

SEQ ID NO: 184626 - DNA, 15 bp, Homo sapiens
gatgctggagaagag

SEQ ID NO: 184627 - DNA, 15 bp, Homo sapiens
agatgctggagaaga

SEQ ID NO: 184628 - DNA, 15 bp, Homo sapiens
aagatgctggagaag

SEQ ID NO: 184629 - DNA, 15 bp, Homo sapiens
gaagatgctggagaa

SEQ ID NO: 184630 - DNA, 15 bp, Homo sapiens
ggaagatgctggaga

SEQ ID NO: 184631 - DNA, 15 bp, Homo sapiens
gggaagatgctggag

SEQ ID NO: 184632 - DNA, 15 bp, Homo sapiens
agggaagatgctgga

SEQ ID NO: 184633 - DNA, 15 bp, Homo sapiens
aagggaagatgctgg

SEQ ID NO: 184634 - DNA, 15 bp, Homo sapiens
caagggaagatgctg

SEQ ID NO: 184635 - DNA, 15 bp, Homo sapiens
tcaagggaagatgct

SEQ ID NO: 184636 - DNA, 15 bp, Homo sapiens
gtcaagggaagatgc

SEQ ID NO: 184637 - DNA, 15 bp, Homo sapiens
tgtcaagggaagatg

SEQ ID NO: 184638 - DNA, 15 bp, Homo sapiens
atgtcaagggaagat

SEQ ID NO: 184639 - DNA, 15 bp, Homo sapiens
gatgtcaagggaaga

SEQ ID NO: 184640 - DNA, 15 bp, Homo sapiens
tgatgtcaagggaag

SEQ ID NO: 184641 - DNA, 15 bp, Homo sapiens
ctgatgtcaagggaa

SEQ ID NO: 184642 - DNA, 15 bp, Homo sapiens
gctgatgtcaaggga

SEQ ID NO: 184643 - DNA, 15 bp, Homo sapiens
ggctgatgtcaaggg

SEQ ID NO: 184644 - DNA, 15 bp, Homo sapiens
aggctgatgtcaagg

SEQ ID NO: 184645 - DNA, 15 bp, Homo sapiens
aaggctgatgtcaag

SEQ ID NO: 184646 - DNA, 15 bp, Homo sapiens
caaggctgatgtcaa

SEQ ID NO: 184647 - DNA, 15 bp, Homo sapiens
gcaaggctgatgtca

SEQ ID NO: 184648 - DNA, 15 bp, Homo sapiens
ggcaaggctgatgtc

SEQ ID NO: 184649 - DNA, 15 bp, Homo sapiens
aggcaaggctgatgt

SEQ ID NO: 184650 - DNA, 15 bp, Homo sapiens
caggcaaggctgatg

SEQ ID NO: 184651 - DNA, 15 bp, Homo sapiens
gcaggcaaggctgat

SEQ ID NO: 184652 - DNA, 15 bp, Homo sapiens
tgcaggcaaggctga

SEQ ID NO: 184653 - DNA, 15 bp, Homo sapiens
gtgcaggcaaggctg

SEQ ID NO: 184654 - DNA, 15 bp, Homo sapiens
tgtgcaggcaaggct

SEQ ID NO: 184655 - DNA, 15 bp, Homo sapiens
atgtgcaggcaaggc

SEQ ID NO: 184656 - DNA, 15 bp, Homo sapiens
aatgtgcaggcaagg

SEQ ID NO: 184657 - DNA, 15 bp, Homo sapiens
caatgtgcaggcaag

SEQ ID NO: 184658 - DNA, 15 bp, Homo sapiens
gcaatgtgcaggcaa

SEQ ID NO: 184659 - DNA, 15 bp, Homo sapiens
ggcaatgtgcaggca

SEQ ID NO: 184660 - DNA, 15 bp, Homo sapiens
gggcaatgtgcaggc

SEQ ID NO: 184661 - DNA, 15 bp, Homo sapiens
tgggcaatgtgcagg

SEQ ID NO: 184662 - DNA, 15 bp, Homo sapiens
ctgggcaatgtgcag

SEQ ID NO: 184663 - DNA, 15 bp, Homo sapiens
actgggcaatgtgca

SEQ ID NO: 184664 - DNA, 15 bp, Homo sapiens
aactgggcaatgtgc

SEQ ID NO: 184665 - DNA, 15 bp, Homo sapiens
caactgggcaatgtg

SEQ ID NO: 184666 - DNA, 15 bp, Homo sapiens
ccaactgggcaatgt

SEQ ID NO: 184667 - DNA, 15 bp, Homo sapiens
cccaactgggcaatg

SEQ ID NO: 184668 - DNA, 15 bp, Homo sapiens
gcccaactgggcaat

SEQ ID NO: 184669 - DNA, 15 bp, Homo sapiens
tgcccaactgggcaa

SEQ ID NO: 184670 - DNA, 15 bp, Homo sapiens
ttgcccaactgggca

SEQ ID NO: 184671 - DNA, 15 bp, Homo sapiens
tttgcccaactgggc

SEQ ID NO: 184672 - DNA, 15 bp, Homo sapiens
aatttgcccaactgg

SEQ ID NO: 184673 - DNA, 15 bp, Homo sapiens
aaatttgcccaactg

SEQ ID NO: 184674 - DNA, 15 bp, Homo sapiens
gaaatttgcccaact

SEQ ID NO: 184675 - DNA, 15 bp, Homo sapiens
agaaatttgcccaac

SEQ ID NO: 184676 - DNA, 15 bp, Homo sapiens
gagaaatttgcccaa

SEQ ID NO: 184677 - DNA, 15 bp, Homo sapiens
agagaaatttgccca

SEQ ID NO: 184678 - DNA, 15 bp, Homo sapiens
gagagaaatttgccc

SEQ ID NO: 184679 - DNA, 15 bp, Homo sapiens
ggagagaaatttgcc

SEQ ID NO: 184680 - DNA, 15 bp, Homo sapiens
gggagagaaatttgc

SEQ ID NO: 184681 - DNA, 15 bp, Homo sapiens
tgggagagaaatttg

SEQ ID NO: 184682 - DNA, 15 bp, Homo sapiens
ctgggagagaaattt

SEQ ID NO: 184683 - DNA, 15 bp, Homo sapiens
cctgggagagaaatt

SEQ ID NO: 184684 - DNA, 15 bp, Homo sapiens
acctgggagagaaat

SEQ ID NO: 184685 - DNA, 15 bp, Homo sapiens
tacctgggagagaaa

SEQ ID NO: 184686 - DNA, 15 bp, Homo sapiens
ctacctgggagagaa

SEQ ID NO: 184687 - DNA, 15 bp, Homo sapiens
tctacctgggagaga

SEQ ID NO: 184688 - DNA, 15 bp, Homo sapiens
ctctacctgggagag

SEQ ID NO: 184689 - DNA, 15 bp, Homo sapiens
cctctacctgggaga

SEQ ID NO: 184690 - DNA, 15 bp, Homo sapiens
acctctacctgggag

SEQ ID NO: 184691 - DNA, 15 bp, Homo sapiens
aacctctacctggga

SEQ ID NO: 184692 - DNA, 15 bp, Homo sapiens
taacctctacctggg

SEQ ID NO: 184693 - DNA, 15 bp, Homo sapiens
gtaacctctacctgg

SEQ ID NO: 184694 - DNA, 15 bp, Homo sapiens
ggtaacctctacctg

SEQ ID NO: 184695 - DNA, 15 bp, Homo sapiens
tggtaacctctacct

SEQ ID NO: 184696 - DNA, 15 bp, Homo sapiens
ctggtaacctctacc

SEQ ID NO: 184697 - DNA, 15 bp, Homo sapiens
cctggtaacctctac

SEQ ID NO: 184698 - DNA, 15 bp, Homo sapiens
gcctggtaacctcta

SEQ ID NO: 184699 - DNA, 15 bp, Homo sapiens
agcctggtaacctct

SEQ ID NO: 184700 - DNA, 15 bp, Homo sapiens
aagcctggtaacctc

SEQ ID NO: 184701 - DNA, 15 bp, Homo sapiens
caagcctggtaacct

SEQ ID NO: 184702 - DNA, 15 bp, Homo sapiens
gcaagcctggtaacc

SEQ ID NO: 184703 - DNA, 15 bp, Homo sapiens
tgcaagcctggtaac

SEQ ID NO: 184704 - DNA, 15 bp, Homo sapiens
atgcaagcctggtaa

SEQ ID NO: 184705 - DNA, 15 bp, Homo sapiens
aatgcaagcctggta

SEQ ID NO: 184706 - DNA, 15 bp, Homo sapiens
gaatgcaagcctggt

SEQ ID NO: 184707 - DNA, 15 bp, Homo sapiens
ggaatgcaagcctgg

SEQ ID NO: 184708 - DNA, 15 bp, Homo sapiens
gggaatgcaagcctg

SEQ ID NO: 184709 - DNA, 15 bp, Homo sapiens
agggaatgcaagcct

SEQ ID NO: 184710 - DNA, 15 bp, Homo sapiens
tagggaatgcaagcc

SEQ ID NO: 184711 - DNA, 15 bp, Homo sapiens
atagggaatgcaagc

SEQ ID NO: 184712 - DNA, 15 bp, Homo sapiens
catagggaatgcaag

SEQ ID NO: 184713 - DNA, 15 bp, Homo sapiens
acatagggaatgcaa

SEQ ID NO: 184714 - DNA, 15 bp, Homo sapiens
aacatagggaatgca

SEQ ID NO: 184715 - DNA, 15 bp, Homo sapiens
aaacatagggaatgc

SEQ ID NO: 184716 - DNA, 15 bp, Homo sapiens
aaaacatagggaatg

SEQ ID NO: 184717 - DNA, 15 bp, Homo sapiens
taaaacatagggaat

SEQ ID NO: 184718 - DNA, 15 bp, Homo sapiens
ctaaaacatagggaa

SEQ ID NO: 184719 - DNA, 15 bp, Homo sapiens
gctaaaacataggga

SEQ ID NO: 184720 - DNA, 15 bp, Homo sapiens
agctaaaacataggg

SEQ ID NO: 184721 - DNA, 15 bp, Homo sapiens
aagctaaaacatagg

SEQ ID NO: 184722 - DNA, 15 bp, Homo sapiens
gaagctaaaacatag

SEQ ID NO: 184723 - DNA, 15 bp, Homo sapiens
agaagctaaaacata

SEQ ID NO: 184724 - DNA, 15 bp, Homo sapiens
cagaagctaaaacat

SEQ ID NO: 184725 - DNA, 15 bp, Homo sapiens
acagaagctaaaaca

SEQ ID NO: 184726 - DNA, 15 bp, Homo sapiens
gacagaagctaaaac

SEQ ID NO: 184727 - DNA, 15 bp, Homo sapiens
agacagaagctaaaa

SEQ ID NO: 184728 - DNA, 15 bp, Homo sapiens
aagacagaagctaaa

SEQ ID NO: 184729 - DNA, 15 bp, Homo sapiens
caagacagaagctaa

SEQ ID NO: 184730 - DNA, 15 bp, Homo sapiens
ccaagacagaagcta

SEQ ID NO: 184731 - DNA, 15 bp, Homo sapiens
accaagacagaagct

SEQ ID NO: 184732 - DNA, 15 bp, Homo sapiens
gaccaagacagaagc

SEQ ID NO: 184733 - DNA, 15 bp, Homo sapiens
agaccaagacagaag

SEQ ID NO: 184734 - DNA, 15 bp, Homo sapiens
aagaccaagacagaa

SEQ ID NO: 184735 - DNA, 15 bp, Homo sapiens
aaagaccaagacaga

SEQ ID NO: 184736 - DNA, 15 bp, Homo sapiens
gaaagaccaagacag

SEQ ID NO: 184737 - DNA, 15 bp, Homo sapiens
agaaagaccaagaca

SEQ ID NO: 184738 - DNA, 15 bp, Homo sapiens
cagaaagaccaagac

SEQ ID NO: 184739 - DNA, 15 bp, Homo sapiens
acagaaagaccaaga

SEQ ID NO: 184740 - DNA, 15 bp, Homo sapiens
cacagaaagaccaag

SEQ ID NO: 184741 - DNA, 15 bp, Homo sapiens
acacagaaagaccaa

SEQ ID NO: 184742 - DNA, 15 bp, Homo sapiens
cacacagaaagacca

SEQ ID NO: 184743 - DNA, 15 bp, Homo sapiens
acacacagaaagacc

SEQ ID NO: 184744 - DNA, 15 bp, Homo sapiens
aacacacagaaagac

SEQ ID NO: 184745 - DNA, 15 bp, Homo sapiens
aaacacacagaaaga

SEQ ID NO: 184746 - DNA, 15 bp, Homo sapiens
aaaacacacagaaag

SEQ ID NO: 184747 - DNA, 15 bp, Homo sapiens
aaaaacacacagaaa

SEQ ID NO: 184748 - DNA, 15 bp, Homo sapiens
taaaaacacacagaa

SEQ ID NO: 184749 - DNA, 15 bp, Homo sapiens
ataaaaacacacaga

SEQ ID NO: 184750 - DNA, 15 bp, Homo sapiens
tataaaaacacacag

SEQ ID NO: 184751 - DNA, 15 bp, Homo sapiens
gtataaaaacacaca

SEQ ID NO: 184752 - DNA, 15 bp, Homo sapiens
ggtataaaaacacac

SEQ ID NO: 184753 - DNA, 15 bp, Homo sapiens
aggtataaaaacaca

SEQ ID NO: 184754 - DNA, 15 bp, Homo sapiens
gaggtataaaaacac

SEQ ID NO: 184755 - DNA, 15 bp, Homo sapiens
ggaggtataaaaaca

SEQ ID NO: 184756 - DNA, 15 bp, Homo sapiens
tggaggtataaaaac

SEQ ID NO: 184757 - DNA, 15 bp, Homo sapiens
atggaggtataaaaa

SEQ ID NO: 184758 - DNA, 15 bp, Homo sapiens
aatggaggtataaaa

SEQ ID NO: 184759 - DNA, 15 bp, Homo sapiens
aaatggaggtataaa

SEQ ID NO: 184760 - DNA, 15 bp, Homo sapiens
caaatggaggtataa

SEQ ID NO: 184761 - DNA, 15 bp, Homo sapiens
tcaaatggaggtata

SEQ ID NO: 184762 - DNA, 15 bp, Homo sapiens
ttcaaatggaggtat

SEQ ID NO: 184763 - DNA, 15 bp, Homo sapiens
cttcaaatggaggta

SEQ ID NO: 184764 - DNA, 15 bp, Homo sapiens
gcttcaaatggaggt

SEQ ID NO: 184765 - DNA, 15 bp, Homo sapiens
tgcttcaaatggagg

SEQ ID NO: 184766 - DNA, 15 bp, Homo sapiens
ttgcttcaaatggag

SEQ ID NO: 184767 - DNA, 15 bp, Homo sapiens
tttgcttcaaatgga

SEQ ID NO: 184768 - DNA, 15 bp, Homo sapiens
gtttgcttcaaatgg

SEQ ID NO: 184769 - DNA, 15 bp, Homo sapiens
ggtttgcttcaaatg

SEQ ID NO: 184770 - DNA, 15 bp, Homo sapiens
gggtttgcttcaaat

SEQ ID NO: 184771 - DNA, 15 bp, Homo sapiens
tgggtttgcttcaaa

SEQ ID NO: 184772 - DNA, 15 bp, Homo sapiens
ttgggtttgcttcaa

SEQ ID NO: 184773 - DNA, 15 bp, Homo sapiens
gttgggtttgcttca

SEQ ID NO: 184774 - DNA, 15 bp, Homo sapiens
tgttgggtttgcttc

SEQ ID NO: 184775 - DNA, 15 bp, Homo sapiens
gtgttgggtttgctt

SEQ ID NO: 184776 - DNA, 15 bp, Homo sapiens
tgtgttgggtttgct

SEQ ID NO: 184777 - DNA, 15 bp, Homo sapiens
atgtgttgggtttgc

SEQ ID NO: 184778 - DNA, 15 bp, Homo sapiens
catgtgttgggtttg

SEQ ID NO: 184779 - DNA, 15 bp, Homo sapiens
tcatgtgttgggttt

SEQ ID NO: 184780 - DNA, 15 bp, Homo sapiens
ttcatgtgttgggtt

SEQ ID NO: 184781 - DNA, 15 bp, Homo sapiens
tttcatgtgttgggt

SEQ ID NO: 184782 - DNA, 15 bp, Homo sapiens
ttttcatgtgttggg

SEQ ID NO: 184783 - DNA, 15 bp, Homo sapiens
cttttcatgtgttgg

SEQ ID NO: 184784 - DNA, 15 bp, Homo sapiens
gcttttcatgtgttg

SEQ ID NO: 184785 - DNA, 15 bp, Homo sapiens
agcttttcatgtgtt

SEQ ID NO: 184786 - DNA, 15 bp, Homo sapiens
tagcttttcatgtgt

SEQ ID NO: 184787 - DNA, 15 bp, Homo sapiens
atagcttttcatgtg

SEQ ID NO: 184788 - DNA, 15 bp, Homo sapiens
tatagcttttcatgt

SEQ ID NO: 184789 - DNA, 15 bp, Homo sapiens
atatagcttttcatg

SEQ ID NO: 184790 - DNA, 15 bp, Homo sapiens
aatatagcttttcat

SEQ ID NO: 184791 - DNA, 15 bp, Homo sapiens
aaatatagcttttca

SEQ ID NO: 184792 - DNA, 15 bp, Homo sapiens
taaatatagcttttc

SEQ ID NO: 184793 - DNA, 15 bp, Homo sapiens
gtaaatatagctttt

SEQ ID NO: 184794 - DNA, 15 bp, Homo sapiens
ggtaaatatagcttt

SEQ ID NO: 184795 - DNA, 15 bp, Homo sapiens
tggtaaatatagctt

SEQ ID NO: 184796 - DNA, 15 bp, Homo sapiens
ttggtaaatatagct

SEQ ID NO: 184797 - DNA, 15 bp, Homo sapiens
attggtaaatatagc

SEQ ID NO: 184798 - DNA, 15 bp, Homo sapiens
cattggtaaatatag

SEQ ID NO: 184799 - DNA, 15 bp, Homo sapiens
ccattggtaaatata

SEQ ID NO: 184800 - DNA, 15 bp, Homo sapiens
cccattggtaaatat

SEQ ID NO: 184801 - DNA, 15 bp, Homo sapiens
tcccattggtaaata

SEQ ID NO: 184802 - DNA, 15 bp, Homo sapiens
gtcccattggtaaat

SEQ ID NO: 184803 - DNA, 15 bp, Homo sapiens
ggtcccattggtaaa

SEQ ID NO: 184804 - DNA, 15 bp, Homo sapiens
tggtcccattggtaa

SEQ ID NO: 184805 - DNA, 15 bp, Homo sapiens
ttggtcccattggta

SEQ ID NO: 184806 - DNA, 15 bp, Homo sapiens
gttggtcccattggt

SEQ ID NO: 184807 - DNA, 15 bp, Homo sapiens
agttggtcccattgg

SEQ ID NO: 184808 - DNA, 15 bp, Homo sapiens
tagttggtcccattg

SEQ ID NO: 184809 - DNA, 15 bp, Homo sapiens
atagttggtcccatt

SEQ ID NO: 184810 - DNA, 15 bp, Homo sapiens
aatagttggtcccat

SEQ ID NO: 184811 - DNA, 15 bp, Homo sapiens
caatagttggtccca

SEQ ID NO: 184812 - DNA, 15 bp, Homo sapiens
ccaatagttggtccc

SEQ ID NO: 184813 - DNA, 15 bp, Homo sapiens
cccaatagttggtcc

SEQ ID NO: 184814 - DNA, 15 bp, Homo sapiens
ccccaatagttggtc

SEQ ID NO: 184815 - DNA, 15 bp, Homo sapiens
gccccaatagttggt

SEQ ID NO: 184816 - DNA, 15 bp, Homo sapiens
tgccccaatagttgg

SEQ ID NO: 184817 - DNA, 15 bp, Homo sapiens
ctgccccaatagttg

SEQ ID NO: 184818 - DNA, 15 bp, Homo sapiens
actgccccaatagtt

SEQ ID NO: 184819 - DNA, 15 bp, Homo sapiens
cactgccccaatagt

SEQ ID NO: 184820 - DNA, 15 bp, Homo sapiens
acactgccccaatag

SEQ ID NO: 184821 - DNA, 15 bp, Homo sapiens
gacactgccccaata

SEQ ID NO: 184822 - DNA, 15 bp, Homo sapiens
agacactgccccaat

SEQ ID NO: 184823 - DNA, 15 bp, Homo sapiens
tagacactgccccaa

SEQ ID NO: 184824 - DNA, 15 bp, Homo sapiens
gtagacactgcccca

SEQ ID NO: 184825 - DNA, 15 bp, Homo sapiens
agtagacactgcccc

SEQ ID NO: 184826 - DNA, 15 bp, Homo sapiens
aagtagacactgccc

SEQ ID NO: 184827 - DNA, 15 bp, Homo sapiens
taagtagacactgcc

SEQ ID NO: 184828 - DNA, 15 bp, Homo sapiens
gtaagtagacactgc

SEQ ID NO: 184829 - DNA, 15 bp, Homo sapiens
agtaagtagacactg

SEQ ID NO: 184830 - DNA, 15 bp, Homo sapiens
tagtaagtagacact

SEQ ID NO: 184831 - DNA, 15 bp, Homo sapiens
atagtaagtagacac

SEQ ID NO: 184832 - DNA, 15 bp, Homo sapiens
tatagtaagtagaca

SEQ ID NO: 184833 - DNA, 15 bp, Homo sapiens
gtatagtaagtagac

SEQ ID NO: 184834 - DNA, 15 bp, Homo sapiens
tgtatagtaagtaga

SEQ ID NO: 184835 - DNA, 15 bp, Homo sapiens
atgtatagtaagtag

SEQ ID NO: 184836 - DNA, 15 bp, Homo sapiens
tatgtatagtaagta

SEQ ID NO: 184837 - DNA, 15 bp, Homo sapiens
atatgtatagtaagt

SEQ ID NO: 184838 - DNA, 15 bp, Homo sapiens
aatatgtatagtaag

SEQ ID NO: 184839 - DNA, 15 bp, Homo sapiens
aaatatgtatagtaa

SEQ ID NO: 184840 - DNA, 15 bp, Homo sapiens
aaaatatgtatagta

SEQ ID NO: 184841 - DNA, 15 bp, Homo sapiens
aaaaatatgtatagt

SEQ ID NO: 184842 - DNA, 15 bp, Homo sapiens
taaaaatatgtatag

SEQ ID NO: 184843 - DNA, 15 bp, Homo sapiens
ttaaaaatatgtata

SEQ ID NO: 184844 - DNA, 15 bp, Homo sapiens
tttaaaaatatgtat

SEQ ID NO: 184845 - DNA, 15 bp, Homo sapiens
ttttaaaaatatgta

SEQ ID NO: 184846 - DNA, 15 bp, Homo sapiens
tttttaaaaatatgt

SEQ ID NO: 184847 - DNA, 15 bp, Homo sapiens
ttttttaaaaatatg

SEQ ID NO: 184848 - DNA, 15 bp, Homo sapiens
gttttttaaaaatat

SEQ ID NO: 184849 - DNA, 15 bp, Homo sapiens
agttttttaaaaata

SEQ ID NO: 184850 - DNA, 15 bp, Homo sapiens
cagttttttaaaaat

SEQ ID NO: 184851 - DNA, 15 bp, Homo sapiens
acagttttttaaaaa

SEQ ID NO: 184852 - DNA, 15 bp, Homo sapiens
aacagttttttaaaa

SEQ ID NO: 184853 - DNA, 15 bp, Homo sapiens
aaacagttttttaaa

SEQ ID NO: 184854 - DNA, 15 bp, Homo sapiens
gaaacagttttttaa

SEQ ID NO: 184855 - DNA, 15 bp, Homo sapiens
agaaacagtttttta

SEQ ID NO: 184856 - DNA, 15 bp, Homo sapiens
aagaaacagtttttt

SEQ ID NO: 184857 - DNA, 15 bp, Homo sapiens
aaagaaacagttttt

SEQ ID NO: 184858 - DNA, 15 bp, Homo sapiens
taaagaaacagtttt

SEQ ID NO: 184859 - DNA, 15 bp, Homo sapiens
ttaaagaaacagttt

SEQ ID NO: 184860 - DNA, 15 bp, Homo sapiens
tttaaagaaacagtt

SEQ ID NO: 184861 - DNA, 15 bp, Homo sapiens
atttaaagaaacagt

SEQ ID NO: 184862 - DNA, 15 bp, Homo sapiens
aatttaaagaaacag

SEQ ID NO: 184863 - DNA, 15 bp, Homo sapiens
caatttaaagaaaca

SEQ ID NO: 184864 - DNA, 15 bp, Homo sapiens
ccaatttaaagaaac

SEQ ID NO: 184865 - DNA, 15 bp, Homo sapiens
tccaatttaaagaaa

SEQ ID NO: 184866 - DNA, 15 bp, Homo sapiens
ctccaatttaaagaa

SEQ ID NO: 184867 - DNA, 15 bp, Homo sapiens
tctccaatttaaaga

SEQ ID NO: 184868 - DNA, 15 bp, Homo sapiens
ctctccaatttaaag

SEQ ID NO: 184869 - DNA, 15 bp, Homo sapiens
gctctccaatttaaa

SEQ ID NO: 184870 - DNA, 15 bp, Homo sapiens
agctctccaatttaa

SEQ ID NO: 184871 - DNA, 15 bp, Homo sapiens
gagctctccaattta

SEQ ID NO: 184872 - DNA, 15 bp, Homo sapiens
ggagctctccaattt

SEQ ID NO: 184873 - DNA, 15 bp, Homo sapiens
tggagctctccaatt

SEQ ID NO: 184874 - DNA, 15 bp, Homo sapiens
ttggagctctccaat

SEQ ID NO: 184875 - DNA, 15 bp, Homo sapiens
cttggagctctccaa

SEQ ID NO: 184876 - DNA, 15 bp, Homo sapiens
ccttggagctctcca

SEQ ID NO: 184877 - DNA, 15 bp, Homo sapiens
accttggagctctcc

SEQ ID NO: 184878 - DNA, 15 bp, Homo sapiens
caccttggagctctc

SEQ ID NO: 184879 - DNA, 15 bp, Homo sapiens
tcaccttggagctct

SEQ ID NO: 184880 - DNA, 15 bp, Homo sapiens
gtcaccttggagctc

SEQ ID NO: 184881 - DNA, 15 bp, Homo sapiens
agtcaccttggagct

SEQ ID NO: 184882 - DNA, 15 bp, Homo sapiens
cagtcaccttggagc

SEQ ID NO: 184883 - DNA, 15 bp, Homo sapiens
tcagtcaccttggag

SEQ ID NO: 184884 - DNA, 15 bp, Homo sapiens
atcagtcaccttgga

SEQ ID NO: 184885 - DNA, 15 bp, Homo sapiens
catcagtcaccttgg

SEQ ID NO: 184886 - DNA, 15 bp, Homo sapiens
acatcagtcaccttg

SEQ ID NO: 184887 - DNA, 15 bp, Homo sapiens
aacatcagtcacctt

SEQ ID NO: 184888 - DNA, 15 bp, Homo sapiens
taacatcagtcacct

SEQ ID NO: 184889 - DNA, 15 bp, Homo sapiens
ttaacatcagtcacc

SEQ ID NO: 184890 - DNA, 15 bp, Homo sapiens
attaacatcagtcac

SEQ ID NO: 184891 - DNA, 15 bp, Homo sapiens
tattaacatcagtca

SEQ ID NO: 184892 - DNA, 15 bp, Homo sapiens
ttattaacatcagtc

SEQ ID NO: 184893 - DNA, 15 bp, Homo sapiens
attattaacatcagt

SEQ ID NO: 184894 - DNA, 15 bp, Homo sapiens
aattattaacatcag

SEQ ID NO: 184895 - DNA, 15 bp, Homo sapiens
aaattattaacatca

SEQ ID NO: 184896 - DNA, 15 bp, Homo sapiens
taaattattaacatc

SEQ ID NO: 184897 - DNA, 15 bp, Homo sapiens
ataaattattaacat

SEQ ID NO: 184898 - DNA, 15 bp, Homo sapiens
tataaattattaaca

SEQ ID NO: 184899 - DNA, 15 bp, Homo sapiens
ttataaattattaac

SEQ ID NO: 184900 - DNA, 15 bp, Homo sapiens
gttataaattattaa

SEQ ID NO: 184901 - DNA, 15 bp, Homo sapiens
agttataaattatta

SEQ ID NO: 184902 - DNA, 15 bp, Homo sapiens
tagttataaattatt

SEQ ID NO: 184903 - DNA, 15 bp, Homo sapiens
atagttataaattat

SEQ ID NO: 184904 - DNA, 15 bp, Homo sapiens
aatagttataaatta

SEQ ID NO: 184905 - DNA, 15 bp, Homo sapiens
aaatagttataaatt

SEQ ID NO: 184906 - DNA, 15 bp, Homo sapiens
taaatagttataaat

SEQ ID NO: 184907 - DNA, 15 bp, Homo sapiens
ataaatagttataaa

SEQ ID NO: 184908 - DNA, 15 bp, Homo sapiens
aataaatagttataa

SEQ ID NO: 184909 - DNA, 15 bp, Homo sapiens
taataaatagttata

SEQ ID NO: 184910 - DNA, 15 bp, Homo sapiens
ttaataaatagttat

SEQ ID NO: 184911 - DNA, 15 bp, Homo sapiens
cttaataaatagtta

SEQ ID NO: 184912 - DNA, 15 bp, Homo sapiens
gcttaataaatagtt

SEQ ID NO: 184913 - DNA, 15 bp, Homo sapiens
tgcttaataaatagt

SEQ ID NO: 184914 - DNA, 15 bp, Homo sapiens
gtgcttaataaatag

SEQ ID NO: 184915 - DNA, 15 bp, Homo sapiens
ggtgcttaataaata

SEQ ID NO: 184916 - DNA, 15 bp, Homo sapiens
aggtgcttaataaat

SEQ ID NO: 184917 - DNA, 15 bp, Homo sapiens
taggtgcttaataaa

SEQ ID NO: 184918 - DNA, 15 bp, Homo sapiens
gtaggtgcttaataa

SEQ ID NO: 184919 - DNA, 15 bp, Homo sapiens
agtaggtgcttaata

SEQ ID NO: 184920 - DNA, 15 bp, Homo sapiens
tagtaggtgcttaat

SEQ ID NO: 184921 - DNA, 15 bp, Homo sapiens
atagtaggtgcttaa

SEQ ID NO: 184922 - DNA, 15 bp, Homo sapiens
catagtaggtgctta

SEQ ID NO: 184923 - DNA, 15 bp, Homo sapiens
gcatagtaggtgctt

SEQ ID NO: 184924 - DNA, 15 bp, Homo sapiens
cgcatagtaggtgct

SEQ ID NO: 184925 - DNA, 15 bp, Homo sapiens
ccgcatagtaggtgc

SEQ ID NO: 184926 - DNA, 15 bp, Homo sapiens
accgcatagtaggtg

SEQ ID NO: 184927 - DNA, 15 bp, Homo sapiens
aaccgcatagtaggt

SEQ ID NO: 184928 - DNA, 15 bp, Homo sapiens
gaaccgcatagtagg

SEQ ID NO: 184929 - DNA, 15 bp, Homo sapiens
agaaccgcatagtag

SEQ ID NO: 184930 - DNA, 15 bp, Homo sapiens
cagaaccgcatagta

SEQ ID NO: 184931 - DNA, 15 bp, Homo sapiens
acagaaccgcatagt

SEQ ID NO: 184932 - DNA, 15 bp, Homo sapiens
cacagaaccgcatag

SEQ ID NO: 184933 - DNA, 15 bp, Homo sapiens
ccacagaaccgcata

SEQ ID NO: 184934 - DNA, 15 bp, Homo sapiens
accacagaaccgcat

SEQ ID NO: 184935 - DNA, 15 bp, Homo sapiens
caccacagaaccgca

SEQ ID NO: 184936 - DNA, 15 bp, Homo sapiens
acaccacagaaccgc

SEQ ID NO: 184937 - DNA, 15 bp, Homo sapiens
cacaccacagaaccg

SEQ ID NO: 184938 - DNA, 15 bp, Homo sapiens
tcacaccacagaacc

SEQ ID NO: 184939 - DNA, 15 bp, Homo sapiens
atcacaccacagaac

SEQ ID NO: 184940 - DNA, 15 bp, Homo sapiens
aatcacaccacagaa

SEQ ID NO: 184941 - DNA, 15 bp, Homo sapiens
caatcacaccacaga

SEQ ID NO: 184942 - DNA, 15 bp, Homo sapiens
gcaatcacaccacag

SEQ ID NO: 184943 - DNA, 15 bp, Homo sapiens
tgcaatcacaccaca

SEQ ID NO: 184944 - DNA, 15 bp, Homo sapiens
ttgcaatcacaccac

SEQ ID NO: 184945 - DNA, 15 bp, Homo sapiens
cttgcaatcacacca

SEQ ID NO: 184946 - DNA, 15 bp, Homo sapiens
ccttgcaatcacacc

SEQ ID NO: 184947 - DNA, 15 bp, Homo sapiens
cccttgcaatcacac

SEQ ID NO: 184948 - DNA, 15 bp, Homo sapiens
ccccttgcaatcaca

SEQ ID NO: 184949 - DNA, 15 bp, Homo sapiens
cccccttgcaatcac

SEQ ID NO: 184950 - DNA, 15 bp, Homo sapiens
ccccccttgcaatca

SEQ ID NO: 184951 - DNA, 15 bp, Homo sapiens
cccccccttgcaatc

SEQ ID NO: 184952 - DNA, 15 bp, Homo sapiens
ccccccccttgcaat

SEQ ID NO: 184953 - DNA, 15 bp, Homo sapiens
cccccccccttgcaa

SEQ ID NO: 184954 - DNA, 15 bp, Homo sapiens
ccccccccccttgca

SEQ ID NO: 184955 - DNA, 15 bp, Homo sapiens
gccccccccccttgc

SEQ ID NO: 184956 - DNA, 15 bp, Homo sapiens
tgccccccccccttg

SEQ ID NO: 184957 - DNA, 15 bp, Homo sapiens
gtgcccccccccctt

SEQ ID NO: 184958 - DNA, 15 bp, Homo sapiens
cgtgcccccccccct

SEQ ID NO: 184959 - DNA, 15 bp, Homo sapiens
acgtgcccccccccc

SEQ ID NO: 184960 - DNA, 15 bp, Homo sapiens
gacgtgccccccccc

SEQ ID NO: 184961 - DNA, 15 bp, Homo sapiens
ggacgtgcccccccc

SEQ ID NO: 184962 - DNA, 15 bp, Homo sapiens
tggacgtgccccccc

SEQ ID NO: 184963 - DNA, 15 bp, Homo sapiens
ttggacgtgcccccc

SEQ ID NO: 184964 - DNA, 15 bp, Homo sapiens
cttggacgtgccccc

SEQ ID NO: 184965 - DNA, 15 bp, Homo sapiens
ccttggacgtgcccc

SEQ ID NO: 184966 - DNA, 15 bp, Homo sapiens
accttggacgtgccc

SEQ ID NO: 184967 - DNA, 15 bp, Homo sapiens
aaccttggacgtgcc

SEQ ID NO: 184968 - DNA, 15 bp, Homo sapiens
caaccttggacgtgc

SEQ ID NO: 184969 - DNA, 15 bp, Homo sapiens
tcaaccttggacgtg

SEQ ID NO: 184970 - DNA, 15 bp, Homo sapiens
ctcaaccttggacgt

SEQ ID NO: 184971 - DNA, 15 bp, Homo sapiens
actcaaccttggacg

SEQ ID NO: 184972 - DNA, 15 bp, Homo sapiens
tactcaaccttggac

SEQ ID NO: 184973 - DNA, 15 bp, Homo sapiens
ttactcaaccttgga

SEQ ID NO: 184974 - DNA, 15 bp, Homo sapiens
cttactcaaccttgg

SEQ ID NO: 184975 - DNA, 15 bp, Homo sapiens
tcttactcaaccttg

SEQ ID NO: 184976 - DNA, 15 bp, Homo sapiens
gtcttactcaacctt

SEQ ID NO: 184977 - DNA, 15 bp, Homo sapiens
tgtcttactcaacct

SEQ ID NO: 184978 - DNA, 15 bp, Homo sapiens
atgtcttactcaacc

SEQ ID NO: 184979 - DNA, 15 bp, Homo sapiens
tatgtcttactcaac

SEQ ID NO: 184980 - DNA, 15 bp, Homo sapiens
ctatgtcttactcaa

SEQ ID NO: 184981 - DNA, 15 bp, Homo sapiens
gctatgtcttactca

SEQ ID NO: 184982 - DNA, 15 bp, Homo sapiens
agctatgtcttactc

SEQ ID NO: 184983 - DNA, 15 bp, Homo sapiens
aagctatgtcttact

SEQ ID NO: 184984 - DNA, 15 bp, Homo sapiens
gaagctatgtcttac

SEQ ID NO: 184985 - DNA, 15 bp, Homo sapiens
agaagctatgtctta

SEQ ID NO: 184986 - DNA, 15 bp, Homo sapiens
cagaagctatgtctt

SEQ ID NO: 184987 - DNA, 15 bp, Homo sapiens
acagaagctatgtct

SEQ ID NO: 184988 - DNA, 15 bp, Homo sapiens
aacagaagctatgtc

SEQ ID NO: 184989 - DNA, 15 bp, Homo sapiens
gaacagaagctatgt

SEQ ID NO: 184990 - DNA, 15 bp, Homo sapiens
agaacagaagctatg

SEQ ID NO: 184991 - DNA, 15 bp, Homo sapiens
aagaacagaagctat

SEQ ID NO: 184992 - DNA, 15 bp, Homo sapiens
taagaacagaagcta

SEQ ID NO: 184993 - DNA, 15 bp, Homo sapiens
ttaagaacagaagct

SEQ ID NO: 184994 - DNA, 15 bp, Homo sapiens
cttaagaacagaagc

SEQ ID NO: 184995 - DNA, 15 bp, Homo sapiens
ccttaagaacagaag

SEQ ID NO: 184996 - DNA, 15 bp, Homo sapiens
tccttaagaacagaa

SEQ ID NO: 184997 - DNA, 15 bp, Homo sapiens
atccttaagaacaga

SEQ ID NO: 184998 - DNA, 15 bp, Homo sapiens
catccttaagaacag

SEQ ID NO: 184999 - DNA, 15 bp, Homo sapiens
acatccttaagaaca

SEQ ID NO: 185000 - DNA, 15 bp, Homo sapiens
gacatccttaagaac

SEQ ID NO: 185001 - DNA, 15 bp, Homo sapiens
ggacatccttaagaa

SEQ ID NO: 185002 - DNA, 15 bp, Homo sapiens
gggacatccttaaga

SEQ ID NO: 185003 - DNA, 15 bp, Homo sapiens
tgggacatccttaag

SEQ ID NO: 185004 - DNA, 15 bp, Homo sapiens
ctgggacatccttaa

SEQ ID NO: 185005 - DNA, 15 bp, Homo sapiens
actgggacatcctta

SEQ ID NO: 185006 - DNA, 15 bp, Homo sapiens
gactgggacatcctt

SEQ ID NO: 185007 - DNA, 15 bp, Homo sapiens
agactgggacatcct

SEQ ID NO: 185008 - DNA, 15 bp, Homo sapiens
tagactgggacatcc

SEQ ID NO: 185009 - DNA, 15 bp, Homo sapiens
ctagactgggacatc

SEQ ID NO: 185010 - DNA, 15 bp, Homo sapiens
tctagactgggacat

SEQ ID NO: 185011 - DNA, 15 bp, Homo sapiens
ttctagactgggaca

SEQ ID NO: 185012 - DNA, 15 bp, Homo sapiens
cttctagactgggac

SEQ ID NO: 185013 - DNA, 15 bp, Homo sapiens
acttctagactggga

SEQ ID NO: 185014 - DNA, 15 bp, Homo sapiens
cacttctagactggg

SEQ ID NO: 185015 - DNA, 15 bp, Homo sapiens
ccacttctagactgg

SEQ ID NO: 185016 - DNA, 15 bp, Homo sapiens
tccacttctagactg

SEQ ID NO: 185017 - DNA, 15 bp, Homo sapiens
ctccacttctagact

SEQ ID NO: 185018 - DNA, 15 bp, Homo sapiens
tctccacttctagac

SEQ ID NO: 185019 - DNA, 15 bp, Homo sapiens
atctccacttctaga

SEQ ID NO: 185020 - DNA, 15 bp, Homo sapiens
tatctccacttctag

SEQ ID NO: 185021 - DNA, 15 bp, Homo sapiens
ttatctccacttcta

SEQ ID NO: 185022 - DNA, 15 bp, Homo sapiens
cttatctccacttct

SEQ ID NO: 185023 - DNA, 15 bp, Homo sapiens
gcttatctccacttc

SEQ ID NO: 185024 - DNA, 15 bp, Homo sapiens
agcttatctccactt

SEQ ID NO: 185025 - DNA, 15 bp, Homo sapiens
tagcttatctccact

SEQ ID NO: 185026 - DNA, 15 bp, Homo sapiens
atagcttatctccac

SEQ ID NO: 185027 - DNA, 15 bp, Homo sapiens
catagcttatctcca

SEQ ID NO: 185028 - DNA, 15 bp, Homo sapiens
gcatagcttatctcc

SEQ ID NO: 185029 - DNA, 15 bp, Homo sapiens
tgcatagcttatctc

SEQ ID NO: 185030 - DNA, 15 bp, Homo sapiens
atgcatagcttatct

SEQ ID NO: 185031 - DNA, 15 bp, Homo sapiens
catgcatagcttatc

SEQ ID NO: 185032 - DNA, 15 bp, Homo sapiens
tcatgcatagcttat

SEQ ID NO: 185033 - DNA, 15 bp, Homo sapiens
ctcatgcatagctta

SEQ ID NO: 185034 - DNA, 15 bp, Homo sapiens
gctcatgcatagctt

SEQ ID NO: 185035 - DNA, 15 bp, Homo sapiens
agctcatgcatagct

SEQ ID NO: 185036 - DNA, 15 bp, Homo sapiens
aagctcatgcatagc

SEQ ID NO: 185037 - DNA, 15 bp, Homo sapiens
caagctcatgcatag

SEQ ID NO: 185038 - DNA, 15 bp, Homo sapiens
tcaagctcatgcata

SEQ ID NO: 185039 - DNA, 15 bp, Homo sapiens
gtcaagctcatgcat

SEQ ID NO: 185040 - DNA, 15 bp, Homo sapiens
ggtcaagctcatgca

SEQ ID NO: 185041 - DNA, 15 bp, Homo sapiens
tggtcaagctcatgc

SEQ ID NO: 185042 - DNA, 15 bp, Homo sapiens
ttggtcaagctcatg

SEQ ID NO: 185043 - DNA, 15 bp, Homo sapiens
cttggtcaagctcat

SEQ ID NO: 185044 - DNA, 15 bp, Homo sapiens
tcttggtcaagctca

SEQ ID NO: 185045 - DNA, 15 bp, Homo sapiens
atcttggtcaagctc

SEQ ID NO: 185046 - DNA, 15 bp, Homo sapiens
gatcttggtcaagct

SEQ ID NO: 185047 - DNA, 15 bp, Homo sapiens
agatcttggtcaagc

SEQ ID NO: 185048 - DNA, 15 bp, Homo sapiens
aagatcttggtcaag

SEQ ID NO: 185049 - DNA, 15 bp, Homo sapiens
caagatcttggtcaa

SEQ ID NO: 185050 - DNA, 15 bp, Homo sapiens
gcaagatcttggtca

SEQ ID NO: 185051 - DNA, 15 bp, Homo sapiens
agcaagatcttggtc

SEQ ID NO: 185052 - DNA, 15 bp, Homo sapiens
tagcaagatcttggt

SEQ ID NO: 185053 - DNA, 15 bp, Homo sapiens
gtagcaagatcttgg

SEQ ID NO: 185054 - DNA, 15 bp, Homo sapiens
tgtagcaagatcttg

SEQ ID NO: 185055 - DNA, 15 bp, Homo sapiens
ttgtagcaagatctt

SEQ ID NO: 185056 - DNA, 15 bp, Homo sapiens
attgtagcaagatct

SEQ ID NO: 185057 - DNA, 15 bp, Homo sapiens
cattgtagcaagatc

SEQ ID NO: 185058 - DNA, 15 bp, Homo sapiens
tcattgtagcaagat

SEQ ID NO: 185059 - DNA, 15 bp, Homo sapiens
ttcattgtagcaaga

SEQ ID NO: 185060 - DNA, 15 bp, Homo sapiens
tttcattgtagcaag

SEQ ID NO: 185061 - DNA, 15 bp, Homo sapiens
ctttcattgtagcaa

SEQ ID NO: 185062 - DNA, 15 bp, Homo sapiens
tctttcattgtagca

SEQ ID NO: 185063 - DNA, 15 bp, Homo sapiens
atctttcattgtagc

SEQ ID NO: 185064 - DNA, 15 bp, Homo sapiens
tatctttcattgtag

SEQ ID NO: 185065 - DNA, 15 bp, Homo sapiens
ctatctttcattgta

SEQ ID NO: 185066 - DNA, 15 bp, Homo sapiens
gctatctttcattgt

SEQ ID NO: 185067 - DNA, 15 bp, Homo sapiens
agctatctttcattg

SEQ ID NO: 185068 - DNA, 15 bp, Homo sapiens
cagctatctttcatt

SEQ ID NO: 185069 - DNA, 15 bp, Homo sapiens
ccagctatctttcat

SEQ ID NO: 185070 - DNA, 15 bp, Homo sapiens
cccagctatctttca

SEQ ID NO: 185071 - DNA, 15 bp, Homo sapiens
tcccagctatctttc

SEQ ID NO: 185072 - DNA, 15 bp, Homo sapiens
ttcccagctatcttt

SEQ ID NO: 185073 - DNA, 15 bp, Homo sapiens
cttcccagctatctt

SEQ ID NO: 185074 - DNA, 15 bp, Homo sapiens
tcttcccagctatct

SEQ ID NO: 185075 - DNA, 15 bp, Homo sapiens
ctcttcccagctatc

SEQ ID NO: 185076 - DNA, 15 bp, Homo sapiens
gctcttcccagctat

SEQ ID NO: 185077 - DNA, 15 bp, Homo sapiens
tgctcttcccagcta

SEQ ID NO: 185078 - DNA, 15 bp, Homo sapiens
atgctcttcccagct

SEQ ID NO: 185079 - DNA, 15 bp, Homo sapiens
catgctcttcccagc

SEQ ID NO: 185080 - DNA, 15 bp, Homo sapiens
tcatgctcttcccag

SEQ ID NO: 185081 - DNA, 15 bp, Homo sapiens
ctcatgctcttccca

SEQ ID NO: 185082 - DNA, 15 bp, Homo sapiens
tctcatgctcttccc

SEQ ID NO: 185083 - DNA, 15 bp, Homo sapiens
ctctcatgctcttcc

SEQ ID NO: 185084 - DNA, 15 bp, Homo sapiens
tctctcatgctcttc

SEQ ID NO: 185085 - DNA, 15 bp, Homo sapiens
ctctctcatgctctt

SEQ ID NO: 185086 - DNA, 15 bp, Homo sapiens
actctctcatgctct

SEQ ID NO: 185087 - DNA, 15 bp, Homo sapiens
aactctctcatgctc

SEQ ID NO: 185088 - DNA, 15 bp, Homo sapiens
gaactctctcatgct

SEQ ID NO: 185089 - DNA, 15 bp, Homo sapiens
tgaactctctcatgc

SEQ ID NO: 185090 - DNA, 15 bp, Homo sapiens
ctgaactctctcatg

SEQ ID NO: 185091 - DNA, 15 bp, Homo sapiens
cctgaactctctcat

SEQ ID NO: 185092 - DNA, 15 bp, Homo sapiens
ccctgaactctctca

SEQ ID NO: 185093 - DNA, 15 bp, Homo sapiens
cccctgaactctctc

SEQ ID NO: 185094 - DNA, 15 bp, Homo sapiens
tcccctgaactctct

SEQ ID NO: 185095 - DNA, 15 bp, Homo sapiens
ctcccctgaactctc

SEQ ID NO: 185096 - DNA, 15 bp, Homo sapiens
cctcccctgaactct

SEQ ID NO: 185097 - DNA, 15 bp, Homo sapiens
tcctcccctgaactc

SEQ ID NO: 185098 - DNA, 15 bp, Homo sapiens
ttcctcccctgaact

SEQ ID NO: 185099 - DNA, 15 bp, Homo sapiens
tttcctcccctgaac

SEQ ID NO: 185100 - DNA, 15 bp, Homo sapiens
ttttcctcccctgaa

SEQ ID NO: 185101 - DNA, 15 bp, Homo sapiens
cttttcctcccctga

SEQ ID NO: 185102 - DNA, 15 bp, Homo sapiens
tcttttcctcccctg

SEQ ID NO: 185103 - DNA, 15 bp, Homo sapiens
gtcttttcctcccct

SEQ ID NO: 185104 - DNA, 15 bp, Homo sapiens
ggtcttttcctcccc

SEQ ID NO: 185105 - DNA, 15 bp, Homo sapiens
tggtcttttcctccc

SEQ ID NO: 185106 - DNA, 15 bp, Homo sapiens
gtggtcttttcctcc

SEQ ID NO: 185107 - DNA, 15 bp, Homo sapiens
agtggtcttttcctc

SEQ ID NO: 185108 - DNA, 15 bp, Homo sapiens
gagtggtcttttcct

SEQ ID NO: 185109 - DNA, 15 bp, Homo sapiens
ggagtggtcttttcc

SEQ ID NO: 185110 - DNA, 15 bp, Homo sapiens
gggagtggtcttttc

SEQ ID NO: 185111 - DNA, 15 bp, Homo sapiens
tgggagtggtctttt

SEQ ID NO: 185112 - DNA, 15 bp, Homo sapiens
gtgggagtggtcttt

SEQ ID NO: 185113 - DNA, 15 bp, Homo sapiens
ggtgggagtggtctt

SEQ ID NO: 185114 - DNA, 15 bp, Homo sapiens
aggtgggagtggtct

SEQ ID NO: 185115 - DNA, 15 bp, Homo sapiens
caggtgggagtggtc

SEQ ID NO: 185116 - DNA, 15 bp, Homo sapiens
acaggtgggagtggt

SEQ ID NO: 185117 - DNA, 15 bp, Homo sapiens
cacaggtgggagtgg

SEQ ID NO: 185118 - DNA, 15 bp, Homo sapiens
ccacaggtgggagtg

SEQ ID NO: 185119 - DNA, 15 bp, Homo sapiens
gccacaggtgggagt

SEQ ID NO: 185120 - DNA, 15 bp, Homo sapiens
tgccacaggtgggag

SEQ ID NO: 185121 - DNA, 15 bp, Homo sapiens
atgccacaggtggga

SEQ ID NO: 185122 - DNA, 15 bp, Homo sapiens
catgccacaggtggg

SEQ ID NO: 185123 - DNA, 15 bp, Homo sapiens
ccatgccacaggtgg

SEQ ID NO: 185124 - DNA, 15 bp, Homo sapiens
tccatgccacaggtg

SEQ ID NO: 185125 - DNA, 15 bp, Homo sapiens
ctccatgccacaggt

SEQ ID NO: 185126 - DNA, 15 bp, Homo sapiens
cctccatgccacagg

SEQ ID NO: 185127 - DNA, 15 bp, Homo sapiens
ccctccatgccacag

SEQ ID NO: 185128 - DNA, 15 bp, Homo sapiens
accctccatgccaca

SEQ ID NO: 185129 - DNA, 15 bp, Homo sapiens
gaccctccatgccac

SEQ ID NO: 185130 - DNA, 15 bp, Homo sapiens
tgaccctccatgcca

SEQ ID NO: 185131 - DNA, 15 bp, Homo sapiens
atgaccctccatgcc

SEQ ID NO: 185132 - DNA, 15 bp, Homo sapiens
aatgaccctccatgc

SEQ ID NO: 185133 - DNA, 15 bp, Homo sapiens
gaatgaccctccatg

SEQ ID NO: 185134 - DNA, 15 bp, Homo sapiens
tgaatgaccctccat

SEQ ID NO: 185135 - DNA, 15 bp, Homo sapiens
ctgaatgaccctcca

SEQ ID NO: 185136 - DNA, 15 bp, Homo sapiens
cctgaatgaccctcc

SEQ ID NO: 185137 - DNA, 15 bp, Homo sapiens
tcctgaatgaccctc

SEQ ID NO: 185138 - DNA, 15 bp, Homo sapiens
ctcctgaatgaccct

SEQ ID NO: 185139 - DNA, 15 bp, Homo sapiens
cctcctgaatgaccc

SEQ ID NO: 185140 - DNA, 15 bp, Homo sapiens
tcctcctgaatgacc

SEQ ID NO: 185141 - DNA, 15 bp, Homo sapiens
gtcctcctgaatgac

SEQ ID NO: 185142 - DNA, 15 bp, Homo sapiens
agtcctcctgaatga

SEQ ID NO: 185143 - DNA, 15 bp, Homo sapiens
tagtcctcctgaatg

SEQ ID NO: 185144 - DNA, 15 bp, Homo sapiens
gtagtcctcctgaat

SEQ ID NO: 185145 - DNA, 15 bp, Homo sapiens
tgtagtcctcctgaa

SEQ ID NO: 185146 - DNA, 15 bp, Homo sapiens
atgtagtcctcctga

SEQ ID NO: 185147 - DNA, 15 bp, Homo sapiens
tatgtagtcctcctg

SEQ ID NO: 185148 - DNA, 15 bp, Homo sapiens
ctatgtagtcctcct

SEQ ID NO: 185149 - DNA, 15 bp, Homo sapiens
tctatgtagtcctcc

SEQ ID NO: 185150 - DNA, 15 bp, Homo sapiens
ctctatgtagtcctc

SEQ ID NO: 185151 - DNA, 15 bp, Homo sapiens
cctctatgtagtcct

SEQ ID NO: 185152 - DNA, 15 bp, Homo sapiens
tcctctatgtagtcc

SEQ ID NO: 185153 - DNA, 15 bp, Homo sapiens
ctcctctatgtagtc

SEQ ID NO: 185154 - DNA, 15 bp, Homo sapiens
cctcctctatgtagt

SEQ ID NO: 185155 - DNA, 15 bp, Homo sapiens
ccctcctctatgtag

SEQ ID NO: 185156 - DNA, 15 bp, Homo sapiens
cccctcctctatgta

SEQ ID NO: 185157 - DNA, 15 bp, Homo sapiens
ccccctcctctatgt

SEQ ID NO: 185158 - DNA, 15 bp, Homo sapiens
gccccctcctctatg

SEQ ID NO: 185159 - DNA, 15 bp, Homo sapiens
tgccccctcctctat

SEQ ID NO: 185160 - DNA, 15 bp, Homo sapiens
gtgccccctcctcta

SEQ ID NO: 185161 - DNA, 15 bp, Homo sapiens
agtgccccctcctct

SEQ ID NO: 185162 - DNA, 15 bp, Homo sapiens
aagtgccccctcctc

SEQ ID NO: 185163 - DNA, 15 bp, Homo sapiens
aaagtgccccctcct

SEQ ID NO: 185164 - DNA, 15 bp, Homo sapiens
taaagtgccccctcc

SEQ ID NO: 185165 - DNA, 15 bp, Homo sapiens
gtaaagtgccccctc

SEQ ID NO: 185166 - DNA, 15 bp, Homo sapiens
tgtaaagtgccccct

SEQ ID NO: 185167 - DNA, 15 bp, Homo sapiens
atgtaaagtgccccc

SEQ ID NO: 185168 - DNA, 15 bp, Homo sapiens
aatgtaaagtgcccc

SEQ ID NO: 185169 - DNA, 15 bp, Homo sapiens
caatgtaaagtgccc

SEQ ID NO: 185170 - DNA, 15 bp, Homo sapiens
ccaatgtaaagtgcc

SEQ ID NO: 185171 - DNA, 15 bp, Homo sapiens
gccaatgtaaagtgc

SEQ ID NO: 185172 - DNA, 15 bp, Homo sapiens
tgccaatgtaaagtg

SEQ ID NO: 185173 - DNA, 15 bp, Homo sapiens
gtgccaatgtaaagt

SEQ ID NO: 185174 - DNA, 15 bp, Homo sapiens
agtgccaatgtaaag

SEQ ID NO: 185175 - DNA, 15 bp, Homo sapiens
aagtgccaatgtaaa

SEQ ID NO: 185176 - DNA, 15 bp, Homo sapiens
taagtgccaatgtaa

SEQ ID NO: 185177 - DNA, 15 bp, Homo sapiens
ctaagtgccaatgta

SEQ ID NO: 185178 - DNA, 15 bp, Homo sapiens
tctaagtgccaatgt

SEQ ID NO: 185179 - DNA, 15 bp, Homo sapiens
ctctaagtgccaatg

SEQ ID NO: 185180 - DNA, 15 bp, Homo sapiens
cctctaagtgccaat

SEQ ID NO: 185181 - DNA, 15 bp, Homo sapiens
tcctctaagtgccaa

SEQ ID NO: 185182 - DNA, 15 bp, Homo sapiens
ttcctctaagtgcca

SEQ ID NO: 185183 - DNA, 15 bp, Homo sapiens
attcctctaagtgcc

SEQ ID NO: 185184 - DNA, 15 bp, Homo sapiens
gattcctctaagtgc

SEQ ID NO: 185185 - DNA, 15 bp, Homo sapiens
agattcctctaagtg

SEQ ID NO: 185186 - DNA, 15 bp, Homo sapiens
cagattcctctaagt

SEQ ID NO: 185187 - DNA, 15 bp, Homo sapiens
gcagattcctctaag

SEQ ID NO: 185188 - DNA, 15 bp, Homo sapiens
ggcagattcctctaa

SEQ ID NO: 185189 - DNA, 15 bp, Homo sapiens
gggcagattcctcta

SEQ ID NO: 185190 - DNA, 15 bp, Homo sapiens
ggggcagattcctct

SEQ ID NO: 185191 - DNA, 15 bp, Homo sapiens
aggggcagattcctc

SEQ ID NO: 185192 - DNA, 15 bp, Homo sapiens
aaggggcagattcct

SEQ ID NO: 185193 - DNA, 15 bp, Homo sapiens
caaggggcagattcc

SEQ ID NO: 185194 - DNA, 15 bp, Homo sapiens
tcaaggggcagattc

SEQ ID NO: 185195 - DNA, 15 bp, Homo sapiens
atcaaggggcagatt

SEQ ID NO: 185196 - DNA, 15 bp, Homo sapiens
catcaaggggcagat

SEQ ID NO: 185197 - DNA, 15 bp, Homo sapiens
ccatcaaggggcaga

SEQ ID NO: 185198 - DNA, 15 bp, Homo sapiens
cccatcaaggggcag

SEQ ID NO: 185199 - DNA, 15 bp, Homo sapiens
tcccatcaaggggca

SEQ ID NO: 185200 - DNA, 15 bp, Homo sapiens
gtcccatcaaggggc

SEQ ID NO: 185201 - DNA, 15 bp, Homo sapiens
ggtcccatcaagggg

SEQ ID NO: 185202 - DNA, 15 bp, Homo sapiens
gggtcccatcaaggg

SEQ ID NO: 185203 - DNA, 15 bp, Homo sapiens
tgggtcccatcaagg

SEQ ID NO: 185204 - DNA, 15 bp, Homo sapiens
ttgggtcccatcaag

SEQ ID NO: 185205 - DNA, 15 bp, Homo sapiens
tttgggtcccatcaa

SEQ ID NO: 185206 - DNA, 15 bp, Homo sapiens
gtttgggtcccatca

SEQ ID NO: 185207 - DNA, 15 bp, Homo sapiens
agtttgggtcccatc

SEQ ID NO: 185208 - DNA, 15 bp, Homo sapiens
aagtttgggtcccat

SEQ ID NO: 185209 - DNA, 15 bp, Homo sapiens
taagtttgggtccca

SEQ ID NO: 185210 - DNA, 15 bp, Homo sapiens
gtaagtttgggtccc

SEQ ID NO: 185211 - DNA, 15 bp, Homo sapiens
tgtaagtttgggtcc

SEQ ID NO: 185212 - DNA, 15 bp, Homo sapiens
atgtaagtttgggtc

SEQ ID NO: 185213 - DNA, 15 bp, Homo sapiens
aatgtaagtttgggt

SEQ ID NO: 185214 - DNA, 15 bp, Homo sapiens
aaatgtaagtttggg

SEQ ID NO: 185215 - DNA, 15 bp, Homo sapiens
taaatgtaagtttgg

SEQ ID NO: 185216 - DNA, 15 bp, Homo sapiens
ataaatgtaagtttg

SEQ ID NO: 185217 - DNA, 15 bp, Homo sapiens
cataaatgtaagttt

SEQ ID NO: 185218 - DNA, 15 bp, Homo sapiens
tcataaatgtaagtt

SEQ ID NO: 185219 - DNA, 15 bp, Homo sapiens
atcataaatgtaagt

SEQ ID NO: 185220 - DNA, 15 bp, Homo sapiens
catcataaatgtaag

SEQ ID NO: 185221 - DNA, 15 bp, Homo sapiens
acatcataaatgtaa

SEQ ID NO: 185222 - DNA, 15 bp, Homo sapiens
cacatcataaatgta

SEQ ID NO: 185223 - DNA, 15 bp, Homo sapiens
tcacatcataaatgt

SEQ ID NO: 185224 - DNA, 15 bp, Homo sapiens
ttcacatcataaatg

SEQ ID NO: 185225 - DNA, 15 bp, Homo sapiens
tttcacatcataaat

SEQ ID NO: 185226 - DNA, 15 bp, Homo sapiens
ttttcacatcataaa

SEQ ID NO: 185227 - DNA, 15 bp, Homo sapiens
tttttcacatcataa

SEQ ID NO: 185228 - DNA, 15 bp, Homo sapiens
atttttcacatcata

SEQ ID NO: 185229 - DNA, 15 bp, Homo sapiens
catttttcacatcat

SEQ ID NO: 185230 - DNA, 15 bp, Homo sapiens
ccatttttcacatca

SEQ ID NO: 185231 - DNA, 15 bp, Homo sapiens
tccatttttcacatc

SEQ ID NO: 185232 - DNA, 15 bp, Homo sapiens
ttccatttttcacat

SEQ ID NO: 185233 - DNA, 15 bp, Homo sapiens
tttccatttttcaca

SEQ ID NO: 185234 - DNA, 15 bp, Homo sapiens
ctttccatttttcac

SEQ ID NO: 185235 - DNA, 15 bp, Homo sapiens
cctttccatttttca

SEQ ID NO: 185236 - DNA, 15 bp, Homo sapiens
tcctttccatttttc

SEQ ID NO: 185237 - DNA, 15 bp, Homo sapiens
ctcctttccattttt

SEQ ID NO: 185238 - DNA, 15 bp, Homo sapiens
tctcctttccatttt

SEQ ID NO: 185239 - DNA, 15 bp, Homo sapiens
gtctcctttccattt

SEQ ID NO: 185240 - DNA, 15 bp, Homo sapiens
agtctcctttccatt

SEQ ID NO: 185241 - DNA, 15 bp, Homo sapiens
aagtctcctttccat

SEQ ID NO: 185242 - DNA, 15 bp, Homo sapiens
caagtctcctttcca

SEQ ID NO: 185243 - DNA, 15 bp, Homo sapiens
acaagtctcctttcc

SEQ ID NO: 185244 - DNA, 15 bp, Homo sapiens
aacaagtctcctttc

SEQ ID NO: 185245 - DNA, 15 bp, Homo sapiens
taacaagtctccttt

SEQ ID NO: 185246 - DNA, 15 bp, Homo sapiens
ataacaagtctcctt

SEQ ID NO: 185247 - DNA, 15 bp, Homo sapiens
cataacaagtctcct

SEQ ID NO: 185248 - DNA, 15 bp, Homo sapiens
gcataacaagtctcc

SEQ ID NO: 185249 - DNA, 15 bp, Homo sapiens
agcataacaagtctc

SEQ ID NO: 185250 - DNA, 15 bp, Homo sapiens
aagcataacaagtct

SEQ ID NO: 185251 - DNA, 15 bp, Homo sapiens
aaagcataacaagtc

SEQ ID NO: 185252 - DNA, 15 bp, Homo sapiens
taaagcataacaagt

SEQ ID NO: 185253 - DNA, 15 bp, Homo sapiens
ttaaagcataacaag

SEQ ID NO: 185254 - DNA, 15 bp, Homo sapiens
gttaaagcataacaa

SEQ ID NO: 185255 - DNA, 15 bp, Homo sapiens
tgttaaagcataaca

SEQ ID NO: 185256 - DNA, 15 bp, Homo sapiens
ctgttaaagcataac

SEQ ID NO: 185257 - DNA, 15 bp, Homo sapiens
actgttaaagcataa

SEQ ID NO: 185258 - DNA, 15 bp, Homo sapiens
tactgttaaagcata

SEQ ID NO: 185259 - DNA, 15 bp, Homo sapiens
ctactgttaaagcat

SEQ ID NO: 185260 - DNA, 15 bp, Homo sapiens
cctactgttaaagca

SEQ ID NO: 185261 - DNA, 15 bp, Homo sapiens
acctactgttaaagc

SEQ ID NO: 185262 - DNA, 15 bp, Homo sapiens
cacctactgttaaag

SEQ ID NO: 185263 - DNA, 15 bp, Homo sapiens
acacctactgttaaa

SEQ ID NO: 185264 - DNA, 15 bp, Homo sapiens
aacacctactgttaa

SEQ ID NO: 185265 - DNA, 15 bp, Homo sapiens
caacacctactgtta

SEQ ID NO: 185266 - DNA, 15 bp, Homo sapiens
gcaacacctactgtt

SEQ ID NO: 185267 - DNA, 15 bp, Homo sapiens
agcaacacctactgt

SEQ ID NO: 185268 - DNA, 15 bp, Homo sapiens
tagcaacacctactg

SEQ ID NO: 185269 - DNA, 15 bp, Homo sapiens
atagcaacacctact

SEQ ID NO: 185270 - DNA, 15 bp, Homo sapiens
aatagcaacacctac

SEQ ID NO: 185271 - DNA, 15 bp, Homo sapiens
aaatagcaacaccta

SEQ ID NO: 185272 - DNA, 15 bp, Homo sapiens
taaatagcaacacct

SEQ ID NO: 185273 - DNA, 15 bp, Homo sapiens
ttaaatagcaacacc

SEQ ID NO: 185274 - DNA, 15 bp, Homo sapiens
attaaatagcaacac

SEQ ID NO: 185275 - DNA, 15 bp, Homo sapiens
cattaaatagcaaca

SEQ ID NO: 185276 - DNA, 15 bp, Homo sapiens
acattaaatagcaac

SEQ ID NO: 185277 - DNA, 15 bp, Homo sapiens
tacattaaatagcaa

SEQ ID NO: 185278 - DNA, 15 bp, Homo sapiens
atacattaaatagca

SEQ ID NO: 185279 - DNA, 15 bp, Homo sapiens
catacattaaatagc

SEQ ID NO: 185280 - DNA, 15 bp, Homo sapiens
tcatacattaaatag

SEQ ID NO: 185281 - DNA, 15 bp, Homo sapiens
ttcatacattaaata

SEQ ID NO: 185282 - DNA, 15 bp, Homo sapiens
cttcatacattaaat

SEQ ID NO: 185283 - DNA, 15 bp, Homo sapiens
gcttcatacattaaa

SEQ ID NO: 185284 - DNA, 15 bp, Homo sapiens
agcttcatacattaa

SEQ ID NO: 185285 - DNA, 15 bp, Homo sapiens
aagcttcatacatta

SEQ ID NO: 185286 - DNA, 15 bp, Homo sapiens
taagcttcatacatt

SEQ ID NO: 185287 - DNA, 15 bp, Homo sapiens
gtaagcttcatacat

SEQ ID NO: 185288 - DNA, 15 bp, Homo sapiens
agtaagcttcataca

SEQ ID NO: 185289 - DNA, 15 bp, Homo sapiens
gagtaagcttcatac

SEQ ID NO: 185290 - DNA, 15 bp, Homo sapiens
tgagtaagcttcata

SEQ ID NO: 185291 - DNA, 15 bp, Homo sapiens
ttgagtaagcttcat

SEQ ID NO: 185292 - DNA, 15 bp, Homo sapiens
tttgagtaagcttca

SEQ ID NO: 185293 - DNA, 15 bp, Homo sapiens
atttgagtaagcttc

SEQ ID NO: 185294 - DNA, 15 bp, Homo sapiens
catttgagtaagctt

SEQ ID NO: 185295 - DNA, 15 bp, Homo sapiens
ccatttgagtaagct

SEQ ID NO: 185296 - DNA, 15 bp, Homo sapiens
tccatttgagtaagc

SEQ ID NO: 185297 - DNA, 15 bp, Homo sapiens
ttccatttgagtaag

SEQ ID NO: 185298 - DNA, 15 bp, Homo sapiens
cttccatttgagtaa

SEQ ID NO: 185299 - DNA, 15 bp, Homo sapiens
tcttccatttgagta

SEQ ID NO: 185300 - DNA, 15 bp, Homo sapiens
ctcttccatttgagt

SEQ ID NO: 185301 - DNA, 15 bp, Homo sapiens
actcttccatttgag

SEQ ID NO: 185302 - DNA, 15 bp, Homo sapiens
aactcttccatttga

SEQ ID NO: 185303 - DNA, 15 bp, Homo sapiens
aaactcttccatttg

SEQ ID NO: 185304 - DNA, 15 bp, Homo sapiens
caaactcttccattt

SEQ ID NO: 185305 - DNA, 15 bp, Homo sapiens
ccaaactcttccatt

SEQ ID NO: 185306 - DNA, 15 bp, Homo sapiens
cccaaactcttccat

SEQ ID NO: 185307 - DNA, 15 bp, Homo sapiens
acccaaactcttcca

SEQ ID NO: 185308 - DNA, 15 bp, Homo sapiens
aacccaaactcttcc

SEQ ID NO: 185309 - DNA, 15 bp, Homo sapiens
aaacccaaactcttc

SEQ ID NO: 185310 - DNA, 15 bp, Homo sapiens
taaacccaaactctt

SEQ ID NO: 185311 - DNA, 15 bp, Homo sapiens
ataaacccaaactct

SEQ ID NO: 185312 - DNA, 15 bp, Homo sapiens
aataaacccaaactc

SEQ ID NO: 185313 - DNA, 15 bp, Homo sapiens
taataaacccaaact

SEQ ID NO: 185314 - DNA, 15 bp, Homo sapiens
ttaataaacccaaac

SEQ ID NO: 185315 - DNA, 15 bp, Homo sapiens
tttaataaacccaaa

SEQ ID NO: 185316 - DNA, 15 bp, Homo sapiens
ctttaataaacccaa

SEQ ID NO: 185317 - DNA, 15 bp, Homo sapiens
cctttaataaaccca

SEQ ID NO: 185318 - DNA, 15 bp, Homo sapiens
tcctttaataaaccc

SEQ ID NO: 185319 - DNA, 15 bp, Homo sapiens
ttcctttaataaacc

SEQ ID NO: 185320 - DNA, 15 bp, Homo sapiens
tttcctttaataaac

SEQ ID NO: 185321 - DNA, 15 bp, Homo sapiens
atttcctttaataaa

SEQ ID NO: 185322 - DNA, 15 bp, Homo sapiens
aatttcctttaataa

SEQ ID NO: 185323 - DNA, 15 bp, Homo sapiens
taatttcctttaata

SEQ ID NO: 185324 - DNA, 15 bp, Homo sapiens
ctaatttcctttaat

SEQ ID NO: 185325 - DNA, 15 bp, Homo sapiens
tctaatttcctttaa

SEQ ID NO: 185326 - DNA, 15 bp, Homo sapiens
ctctaatttccttta

SEQ ID NO: 185327 - DNA, 15 bp, Homo sapiens
cctctaatttccttt

SEQ ID NO: 185328 - DNA, 15 bp, Homo sapiens
acctctaatttcctt

SEQ ID NO: 185329 - DNA, 15 bp, Homo sapiens
gacctctaatttcct

SEQ ID NO: 185330 - DNA, 15 bp, Homo sapiens
agacctctaatttcc

SEQ ID NO: 185331 - DNA, 15 bp, Homo sapiens
gagacctctaatttc

SEQ ID NO: 185332 - DNA, 15 bp, Homo sapiens
agagacctctaattt

SEQ ID NO: 185333 - DNA, 15 bp, Homo sapiens
cagagacctctaatt

SEQ ID NO: 185334 - DNA, 15 bp, Homo sapiens
acagagacctctaat

SEQ ID NO: 185335 - DNA, 15 bp, Homo sapiens
cacagagacctctaa

SEQ ID NO: 185336 - DNA, 15 bp, Homo sapiens
acacagagacctcta

SEQ ID NO: 185337 - DNA, 15 bp, Homo sapiens
aacacagagacctct

SEQ ID NO: 185338 - DNA, 15 bp, Homo sapiens
taacacagagacctc

SEQ ID NO: 185339 - DNA, 15 bp, Homo sapiens
ctaacacagagacct

SEQ ID NO: 185340 - DNA, 15 bp, Homo sapiens
gctaacacagagacc

SEQ ID NO: 185341 - DNA, 15 bp, Homo sapiens
tgctaacacagagac

SEQ ID NO: 185342 - DNA, 15 bp, Homo sapiens
ctgctaacacagaga

SEQ ID NO: 185343 - DNA, 15 bp, Homo sapiens
actgctaacacagag

SEQ ID NO: 185344 - DNA, 15 bp, Homo sapiens
aactgctaacacaga

SEQ ID NO: 185345 - DNA, 15 bp, Homo sapiens
gaactgctaacacag

SEQ ID NO: 185346 - DNA, 15 bp, Homo sapiens
agaactgctaacaca

SEQ ID NO: 185347 - DNA, 15 bp, Homo sapiens
cagaactgctaacac

SEQ ID NO: 185348 - DNA, 15 bp, Homo sapiens
acagaactgctaaca

SEQ ID NO: 185349 - DNA, 15 bp, Homo sapiens
tacagaactgctaac

SEQ ID NO: 185350 - DNA, 15 bp, Homo sapiens
atacagaactgctaa

SEQ ID NO: 185351 - DNA, 15 bp, Homo sapiens
catacagaactgcta

SEQ ID NO: 185352 - DNA, 15 bp, Homo sapiens
acatacagaactgct

SEQ ID NO: 185353 - DNA, 15 bp, Homo sapiens
aacatacagaactgc

SEQ ID NO: 185354 - DNA, 15 bp, Homo sapiens
gaacatacagaactg

SEQ ID NO: 185355 - DNA, 15 bp, Homo sapiens
tgaacatacagaact

SEQ ID NO: 185356 - DNA, 15 bp, Homo sapiens
ttgaacatacagaac

SEQ ID NO: 185357 - DNA, 15 bp, Homo sapiens
tttgaacatacagaa

SEQ ID NO: 185358 - DNA, 15 bp, Homo sapiens
ttttgaacatacaga

SEQ ID NO: 185359 - DNA, 15 bp, Homo sapiens
attttgaacatacag

SEQ ID NO: 185360 - DNA, 15 bp, Homo sapiens
cattttgaacataca

SEQ ID NO: 185361 - DNA, 15 bp, Homo sapiens
acattttgaacatac

SEQ ID NO: 185362 - DNA, 15 bp, Homo sapiens
cacattttgaacata

SEQ ID NO: 185363 - DNA, 15 bp, Homo sapiens
tcacattttgaacat

SEQ ID NO: 185364 - DNA, 15 bp, Homo sapiens
atcacattttgaaca

SEQ ID NO: 185365 - DNA, 15 bp, Homo sapiens
tatcacattttgaac

SEQ ID NO: 185366 - DNA, 15 bp, Homo sapiens
gtatcacattttgaa

SEQ ID NO: 185367 - DNA, 15 bp, Homo sapiens
tgtatcacattttga

SEQ ID NO: 185368 - DNA, 15 bp, Homo sapiens
ttgtatcacattttg

SEQ ID NO: 185369 - DNA, 15 bp, Homo sapiens
attgtatcacatttt

SEQ ID NO: 185370 - DNA, 15 bp, Homo sapiens
cattgtatcacattt

SEQ ID NO: 185371 - DNA, 15 bp, Homo sapiens
ccattgtatcacatt

SEQ ID NO: 185372 - DNA, 15 bp, Homo sapiens
cccattgtatcacat

SEQ ID NO: 185373 - DNA, 15 bp, Homo sapiens
acccattgtatcaca

SEQ ID NO: 185374 - DNA, 15 bp, Homo sapiens
aacccattgtatcac

SEQ ID NO: 185375 - DNA, 15 bp, Homo sapiens
aaacccattgtatca

SEQ ID NO: 185376 - DNA, 15 bp, Homo sapiens
taaacccattgtatc

SEQ ID NO: 185377 - DNA, 15 bp, Homo sapiens
gtaaacccattgtat

SEQ ID NO: 185378 - DNA, 15 bp, Homo sapiens
agtaaacccattgta

SEQ ID NO: 185379 - DNA, 15 bp, Homo sapiens
aagtaaacccattgt

SEQ ID NO: 185380 - DNA, 15 bp, Homo sapiens
taagtaaacccattg

SEQ ID NO: 185381 - DNA, 15 bp, Homo sapiens
ttaagtaaacccatt

SEQ ID NO: 185382 - DNA, 15 bp, Homo sapiens
tttaagtaaacccat

SEQ ID NO: 185383 - DNA, 15 bp, Homo sapiens
gtttaagtaaaccca

SEQ ID NO: 185384 - DNA, 15 bp, Homo sapiens
ggtttaagtaaaccc

SEQ ID NO: 185385 - DNA, 15 bp, Homo sapiens
tggtttaagtaaacc

SEQ ID NO: 185386 - DNA, 15 bp, Homo sapiens
atggtttaagtaaac

SEQ ID NO: 185387 - DNA, 15 bp, Homo sapiens
aatggtttaagtaaa

SEQ ID NO: 185388 - DNA, 15 bp, Homo sapiens
caatggtttaagtaa

SEQ ID NO: 185389 - DNA, 15 bp, Homo sapiens
ccaatggtttaagta

SEQ ID NO: 185390 - DNA, 15 bp, Homo sapiens
accaatggtttaagt

SEQ ID NO: 185391 - DNA, 15 bp, Homo sapiens
aaccaatggtttaag

SEQ ID NO: 185392 - DNA, 15 bp, Homo sapiens
caaccaatggtttaa

SEQ ID NO: 185393 - DNA, 15 bp, Homo sapiens
gcaaccaatggttta

SEQ ID NO: 185394 - DNA, 15 bp, Homo sapiens
ggcaaccaatggttt

SEQ ID NO: 185395 - DNA, 15 bp, Homo sapiens
gggcaaccaatggtt

SEQ ID NO: 185396 - DNA, 15 bp, Homo sapiens
ggggcaaccaatggt

SEQ ID NO: 185397 - DNA, 15 bp, Homo sapiens
tggggcaaccaatgg

SEQ ID NO: 185398 - DNA, 15 bp, Homo sapiens
ttggggcaaccaatg

SEQ ID NO: 185399 - DNA, 15 bp, Homo sapiens
cttggggcaaccaat

SEQ ID NO: 185400 - DNA, 15 bp, Homo sapiens
tcttggggcaaccaa

SEQ ID NO: 185401 - DNA, 15 bp, Homo sapiens
gtcttggggcaacca

SEQ ID NO: 185402 - DNA, 15 bp, Homo sapiens
ggtcttggggcaacc

SEQ ID NO: 185403 - DNA, 15 bp, Homo sapiens
gggtcttggggcaac

SEQ ID NO: 185404 - DNA, 15 bp, Homo sapiens
ggggtcttggggcaa

SEQ ID NO: 185405 - DNA, 15 bp, Homo sapiens
aggggtcttggggca

SEQ ID NO: 185406 - DNA, 15 bp, Homo sapiens
aaggggtcttggggc

SEQ ID NO: 185407 - DNA, 15 bp, Homo sapiens
aaaggggtcttgggg

SEQ ID NO: 185408 - DNA, 15 bp, Homo sapiens
gaaaggggtcttggg

SEQ ID NO: 185409 - DNA, 15 bp, Homo sapiens
agaaaggggtcttgg

SEQ ID NO: 185410 - DNA, 15 bp, Homo sapiens
aagaaaggggtcttg

SEQ ID NO: 185411 - DNA, 15 bp, Homo sapiens
caagaaaggggtctt

SEQ ID NO: 185412 - DNA, 15 bp, Homo sapiens
tcaagaaaggggtct

SEQ ID NO: 185413 - DNA, 15 bp, Homo sapiens
ctcaagaaaggggtc

SEQ ID NO: 185414 - DNA, 15 bp, Homo sapiens
cctcaagaaaggggt

SEQ ID NO: 185415 - DNA, 15 bp, Homo sapiens
tcctcaagaaagggg

SEQ ID NO: 185416 - DNA, 15 bp, Homo sapiens
ttcctcaagaaaggg

SEQ ID NO: 185417 - DNA, 15 bp, Homo sapiens
attcctcaagaaagg

SEQ ID NO: 185418 - DNA, 15 bp, Homo sapiens
aattcctcaagaaag

SEQ ID NO: 185419 - DNA, 15 bp, Homo sapiens
caattcctcaagaaa

SEQ ID NO: 185420 - DNA, 15 bp, Homo sapiens
ccaattcctcaagaa

SEQ ID NO: 185421 - DNA, 15 bp, Homo sapiens
gccaattcctcaaga

SEQ ID NO: 185422 - DNA, 15 bp, Homo sapiens
tgccaattcctcaag

SEQ ID NO: 185423 - DNA, 15 bp, Homo sapiens
ctgccaattcctcaa

SEQ ID NO: 185424 - DNA, 15 bp, Homo sapiens
gctgccaattcctca

SEQ ID NO: 185425 - DNA, 15 bp, Homo sapiens
agctgccaattcctc

SEQ ID NO: 185426 - DNA, 15 bp, Homo sapiens
aagctgccaattcct

SEQ ID NO: 185427 - DNA, 15 bp, Homo sapiens
caagctgccaattcc

SEQ ID NO: 185428 - DNA, 15 bp, Homo sapiens
ccaagctgccaattc

SEQ ID NO: 185429 - DNA, 15 bp, Homo sapiens
gccaagctgccaatt

SEQ ID NO: 185430 - DNA, 15 bp, Homo sapiens
tgccaagctgccaat

SEQ ID NO: 185431 - DNA, 15 bp, Homo sapiens
ctgccaagctgccaa

SEQ ID NO: 185432 - DNA, 15 bp, Homo sapiens
tctgccaagctgcca

SEQ ID NO: 185433 - DNA, 15 bp, Homo sapiens
ctctgccaagctgcc

SEQ ID NO: 185434 - DNA, 15 bp, Homo sapiens
actctgccaagctgc

SEQ ID NO: 185435 - DNA, 15 bp, Homo sapiens
aactctgccaagctg

SEQ ID NO: 185436 - DNA, 15 bp, Homo sapiens
aaactctgccaagct

SEQ ID NO: 185437 - DNA, 15 bp, Homo sapiens
caaactctgccaagc

SEQ ID NO: 185438 - DNA, 15 bp, Homo sapiens
gcaaactctgccaag

SEQ ID NO: 185439 - DNA, 15 bp, Homo sapiens
tgcaaactctgccaa

SEQ ID NO: 185440 - DNA, 15 bp, Homo sapiens
gtgcaaactctgcca

SEQ ID NO: 185441 - DNA, 15 bp, Homo sapiens
ggtgcaaactctgcc

SEQ ID NO: 185442 - DNA, 15 bp, Homo sapiens
aggtgcaaactctgc

SEQ ID NO: 185443 - DNA, 15 bp, Homo sapiens
aaggtgcaaactctg

SEQ ID NO: 185444 - DNA, 15 bp, Homo sapiens
aaaggtgcaaactct

SEQ ID NO: 185445 - DNA, 15 bp, Homo sapiens
caaaggtgcaaactc

SEQ ID NO: 185446 - DNA, 15 bp, Homo sapiens
tcaaaggtgcaaact

SEQ ID NO: 185447 - DNA, 15 bp, Homo sapiens
ttcaaaggtgcaaac

SEQ ID NO: 185448 - DNA, 15 bp, Homo sapiens
cttcaaaggtgcaaa

SEQ ID NO: 185449 - DNA, 15 bp, Homo sapiens
ccttcaaaggtgcaa

SEQ ID NO: 185450 - DNA, 15 bp, Homo sapiens
gccttcaaaggtgca

SEQ ID NO: 185451 - DNA, 15 bp, Homo sapiens
agccttcaaaggtgc

SEQ ID NO: 185452 - DNA, 15 bp, Homo sapiens
cagccttcaaaggtg

SEQ ID NO: 185453 - DNA, 15 bp, Homo sapiens
gcagccttcaaaggt

SEQ ID NO: 185454 - DNA, 15 bp, Homo sapiens
ggcagccttcaaagg

SEQ ID NO: 185455 - DNA, 15 bp, Homo sapiens
gggcagccttcaaag

SEQ ID NO: 185456 - DNA, 15 bp, Homo sapiens
agggcagccttcaaa

SEQ ID NO: 185457 - DNA, 15 bp, Homo sapiens
cagggcagccttcaa

SEQ ID NO: 185458 - DNA, 15 bp, Homo sapiens
gcagggcagccttca

SEQ ID NO: 185459 - DNA, 15 bp, Homo sapiens
tgcagggcagccttc

SEQ ID NO: 185460 - DNA, 15 bp, Homo sapiens
ttgcagggcagcctt

SEQ ID NO: 185461 - DNA, 15 bp, Homo sapiens
cttgcagggcagcct

SEQ ID NO: 185462 - DNA, 15 bp, Homo sapiens
ccttgcagggcagcc

SEQ ID NO: 185463 - DNA, 15 bp, Homo sapiens
tccttgcagggcagc

SEQ ID NO: 185464 - DNA, 15 bp, Homo sapiens
atccttgcagggcag

SEQ ID NO: 185465 - DNA, 15 bp, Homo sapiens
tatccttgcagggca

SEQ ID NO: 185466 - DNA, 15 bp, Homo sapiens
ttatccttgcagggc

SEQ ID NO: 185467 - DNA, 15 bp, Homo sapiens
tttatccttgcaggg

SEQ ID NO: 185468 - DNA, 15 bp, Homo sapiens
ctttatccttgcagg

SEQ ID NO: 185469 - DNA, 15 bp, Homo sapiens
tctttatccttgcag

SEQ ID NO: 185470 - DNA, 15 bp, Homo sapiens
gtctttatccttgca

SEQ ID NO: 185471 - DNA, 15 bp, Homo sapiens
ggtctttatccttgc

SEQ ID NO: 185472 - DNA, 15 bp, Homo sapiens
aggtctttatccttg

SEQ ID NO: 185473 - DNA, 15 bp, Homo sapiens
gaggtctttatcctt

SEQ ID NO: 185474 - DNA, 15 bp, Homo sapiens
ggaggtctttatcct

SEQ ID NO: 185475 - DNA, 15 bp, Homo sapiens
tggaggtctttatcc

SEQ ID NO: 185476 - DNA, 15 bp, Homo sapiens
atggaggtctttatc

SEQ ID NO: 185477 - DNA, 15 bp, Homo sapiens
gatggaggtctttat

SEQ ID NO: 185478 - DNA, 15 bp, Homo sapiens
ggatggaggtcttta

SEQ ID NO: 185479 - DNA, 15 bp, Homo sapiens
tggatggaggtcttt

SEQ ID NO: 185480 - DNA, 15 bp, Homo sapiens
ttggatggaggtctt

SEQ ID NO: 185481 - DNA, 15 bp, Homo sapiens
cttggatggaggtct

SEQ ID NO: 185482 - DNA, 15 bp, Homo sapiens
ccttggatggaggtc

SEQ ID NO: 185483 - DNA, 15 bp, Homo sapiens
cccttggatggaggt

SEQ ID NO: 185484 - DNA, 15 bp, Homo sapiens
ccccttggatggagg

SEQ ID NO: 185485 - DNA, 15 bp, Homo sapiens
tccccttggatggag

SEQ ID NO: 185486 - DNA, 15 bp, Homo sapiens
ttccccttggatgga

SEQ ID NO: 185487 - DNA, 15 bp, Homo sapiens
tttccccttggatgg

SEQ ID NO: 185488 - DNA, 15 bp, Homo sapiens
ctttccccttggatg

SEQ ID NO: 185489 - DNA, 15 bp, Homo sapiens
cctttccccttggat

SEQ ID NO: 185490 - DNA, 15 bp, Homo sapiens
gcctttccccttgga

SEQ ID NO: 185491 - DNA, 15 bp, Homo sapiens
ggcctttccccttgg

SEQ ID NO: 185492 - DNA, 15 bp, Homo sapiens
tggcctttccccttg

SEQ ID NO: 185493 - DNA, 15 bp, Homo sapiens
ctggcctttcccctt

SEQ ID NO: 185494 - DNA, 15 bp, Homo sapiens
tctggcctttcccct

SEQ ID NO: 185495 - DNA, 15 bp, Homo sapiens
ttctggcctttcccc

SEQ ID NO: 185496 - DNA, 15 bp, Homo sapiens
cttctggcctttccc

SEQ ID NO: 185497 - DNA, 15 bp, Homo sapiens
gcttctggcctttcc

SEQ ID NO: 185498 - DNA, 15 bp, Homo sapiens
tgcttctggcctttc

SEQ ID NO: 185499 - DNA, 15 bp, Homo sapiens
ctgcttctggccttt

SEQ ID NO: 185500 - DNA, 15 bp, Homo sapiens
cctgcttctggcctt

SEQ ID NO: 185501 - DNA, 15 bp, Homo sapiens
gcctgcttctggcct

SEQ ID NO: 185502 - DNA, 15 bp, Homo sapiens
agcctgcttctggcc

SEQ ID NO: 185503 - DNA, 15 bp, Homo sapiens
gagcctgcttctggc

SEQ ID NO: 185504 - DNA, 15 bp, Homo sapiens
tgagcctgcttctgg

SEQ ID NO: 185505 - DNA, 15 bp, Homo sapiens
ctgagcctgcttctg

SEQ ID NO: 185506 - DNA, 15 bp, Homo sapiens
tctgagcctgcttct

SEQ ID NO: 185507 - DNA, 15 bp, Homo sapiens
ctctgagcctgcttc

SEQ ID NO: 185508 - DNA, 15 bp, Homo sapiens
gctctgagcctgctt

SEQ ID NO: 185509 - DNA, 15 bp, Homo sapiens
agctctgagcctgct

SEQ ID NO: 185510 - DNA, 15 bp, Homo sapiens
tagctctgagcctgc

SEQ ID NO: 185511 - DNA, 15 bp, Homo sapiens
ctagctctgagcctg

SEQ ID NO: 185512 - DNA, 15 bp, Homo sapiens
cctagctctgagcct

SEQ ID NO: 185513 - DNA, 15 bp, Homo sapiens
acctagctctgagcc

SEQ ID NO: 185514 - DNA, 15 bp, Homo sapiens
gacctagctctgagc

SEQ ID NO: 185515 - DNA, 15 bp, Homo sapiens
ggacctagctctgag

SEQ ID NO: 185516 - DNA, 15 bp, Homo sapiens
gggacctagctctga

SEQ ID NO: 185517 - DNA, 15 bp, Homo sapiens
tgggacctagctctg

SEQ ID NO: 185518 - DNA, 15 bp, Homo sapiens
gtgggacctagctct

SEQ ID NO: 185519 - DNA, 15 bp, Homo sapiens
tgtgggacctagctc

SEQ ID NO: 185520 - DNA, 15 bp, Homo sapiens
ttgtgggacctagct

SEQ ID NO: 185521 - DNA, 15 bp, Homo sapiens
gttgtgggacctagc

SEQ ID NO: 185522 - DNA, 15 bp, Homo sapiens
agttgtgggacctag

SEQ ID NO: 185523 - DNA, 15 bp, Homo sapiens
gagttgtgggaccta

SEQ ID NO: 185524 - DNA, 15 bp, Homo sapiens
agagttgtgggacct

SEQ ID NO: 185525 - DNA, 15 bp, Homo sapiens
cagagttgtgggacc

SEQ ID NO: 185526 - DNA, 15 bp, Homo sapiens
gcagagttgtgggac

SEQ ID NO: 185527 - DNA, 15 bp, Homo sapiens
agcagagttgtggga

SEQ ID NO: 185528 - DNA, 15 bp, Homo sapiens
aagcagagttgtggg

SEQ ID NO: 185529 - DNA, 15 bp, Homo sapiens
gaagcagagttgtgg

SEQ ID NO: 185530 - DNA, 15 bp, Homo sapiens
ggaagcagagttgtg

SEQ ID NO: 185531 - DNA, 15 bp, Homo sapiens
gggaagcagagttgt

SEQ ID NO: 185532 - DNA, 15 bp, Homo sapiens
agggaagcagagttg

SEQ ID NO: 185533 - DNA, 15 bp, Homo sapiens
cagggaagcagagtt

SEQ ID NO: 185534 - DNA, 15 bp, Homo sapiens
acagggaagcagagt

SEQ ID NO: 185535 - DNA, 15 bp, Homo sapiens
tacagggaagcagag

SEQ ID NO: 185536 - DNA, 15 bp, Homo sapiens
atacagggaagcaga

SEQ ID NO: 185537 - DNA, 15 bp, Homo sapiens
gatacagggaagcag

SEQ ID NO: 185538 - DNA, 15 bp, Homo sapiens
ggatacagggaagca

SEQ ID NO: 185539 - DNA, 15 bp, Homo sapiens
cggatacagggaagc

SEQ ID NO: 185540 - DNA, 15 bp, Homo sapiens
ccggatacagggaag

SEQ ID NO: 185541 - DNA, 15 bp, Homo sapiens
gccggatacagggaa

SEQ ID NO: 185542 - DNA, 15 bp, Homo sapiens
ggccggatacaggga

SEQ ID NO: 185543 - DNA, 15 bp, Homo sapiens
gggccggatacaggg

SEQ ID NO: 185544 - DNA, 15 bp, Homo sapiens
ggggccggatacagg

SEQ ID NO: 185545 - DNA, 15 bp, Homo sapiens
gggggccggatacag

SEQ ID NO: 185546 - DNA, 15 bp, Homo sapiens
ggggggccggataca

SEQ ID NO: 185547 - DNA, 15 bp, Homo sapiens
aggggggccggatac

SEQ ID NO: 185548 - DNA, 15 bp, Homo sapiens
caggggggccggata

SEQ ID NO: 185549 - DNA, 15 bp, Homo sapiens
gcaggggggccggat

SEQ ID NO: 185550 - DNA, 15 bp, Homo sapiens
ggcaggggggccgga

SEQ ID NO: 185551 - DNA, 15 bp, Homo sapiens
tggcaggggggccgg

SEQ ID NO: 185552 - DNA, 15 bp, Homo sapiens
ctggcaggggggccg

SEQ ID NO: 185553 - DNA, 15 bp, Homo sapiens
gctggcaggggggcc

SEQ ID NO: 185554 - DNA, 15 bp, Homo sapiens
agctggcaggggggc

SEQ ID NO: 185555 - DNA, 15 bp, Homo sapiens
gagctggcagggggg

SEQ ID NO: 185556 - DNA, 15 bp, Homo sapiens
tgagctggcaggggg

SEQ ID NO: 185557 - DNA, 15 bp, Homo sapiens
gtgagctggcagggg

SEQ ID NO: 185558 - DNA, 15 bp, Homo sapiens
agtgagctggcaggg

SEQ ID NO: 185559 - DNA, 15 bp, Homo sapiens
gagtgagctggcagg

SEQ ID NO: 185560 - DNA, 15 bp, Homo sapiens
tgagtgagctggcag

SEQ ID NO: 185561 - DNA, 15 bp, Homo sapiens
ttgagtgagctggca

SEQ ID NO: 185562 - DNA, 15 bp, Homo sapiens
cttgagtgagctggc

SEQ ID NO: 185563 - DNA, 15 bp, Homo sapiens
gcttgagtgagctgg

SEQ ID NO: 185564 - DNA, 15 bp, Homo sapiens
tgcttgagtgagctg

SEQ ID NO: 185565 - DNA, 15 bp, Homo sapiens
ttgcttgagtgagct

SEQ ID NO: 185566 - DNA, 15 bp, Homo sapiens
cttgcttgagtgagc

SEQ ID NO: 185567 - DNA, 15 bp, Homo sapiens
gcttgcttgagtgag

SEQ ID NO: 185568 - DNA, 15 bp, Homo sapiens
ggcttgcttgagtga

SEQ ID NO: 185569 - DNA, 15 bp, Homo sapiens
gggcttgcttgagtg

SEQ ID NO: 185570 - DNA, 15 bp, Homo sapiens
agggcttgcttgagt

SEQ ID NO: 185571 - DNA, 15 bp, Homo sapiens
cagggcttgcttgag

SEQ ID NO: 185572 - DNA, 15 bp, Homo sapiens
acagggcttgcttga

SEQ ID NO: 185573 - DNA, 15 bp, Homo sapiens
aacagggcttgcttg

SEQ ID NO: 185574 - DNA, 15 bp, Homo sapiens
aaacagggcttgctt

SEQ ID NO: 185575 - DNA, 15 bp, Homo sapiens
gaaacagggcttgct

SEQ ID NO: 185576 - DNA, 15 bp, Homo sapiens
agaaacagggcttgc

SEQ ID NO: 185577 - DNA, 15 bp, Homo sapiens
cagaaacagggcttg

SEQ ID NO: 185578 - DNA, 15 bp, Homo sapiens
ccagaaacagggctt

SEQ ID NO: 185579 - DNA, 15 bp, Homo sapiens
cccagaaacagggct

SEQ ID NO: 185580 - DNA, 15 bp, Homo sapiens
gcccagaaacagggc

SEQ ID NO: 185581 - DNA, 15 bp, Homo sapiens
tgcccagaaacaggg

SEQ ID NO: 185582 - DNA, 15 bp, Homo sapiens
ctgcccagaaacagg

SEQ ID NO: 185583 - DNA, 15 bp, Homo sapiens
gctgcccagaaacag

SEQ ID NO: 185584 - DNA, 15 bp, Homo sapiens
tgctgcccagaaaca

SEQ ID NO: 185585 - DNA, 15 bp, Homo sapiens
ctgctgcccagaaac

SEQ ID NO: 185586 - DNA, 15 bp, Homo sapiens
gctgctgcccagaaa

SEQ ID NO: 185587 - DNA, 15 bp, Homo sapiens
tgctgctgcccagaa

SEQ ID NO: 185588 - DNA, 15 bp, Homo sapiens
ctgctgctgcccaga

SEQ ID NO: 185589 - DNA, 15 bp, Homo sapiens
gctgctgctgcccag

SEQ ID NO: 185590 - DNA, 15 bp, Homo sapiens
agctgctgctgccca

SEQ ID NO: 185591 - DNA, 15 bp, Homo sapiens
cagctgctgctgccc

SEQ ID NO: 185592 - DNA, 15 bp, Homo sapiens
acagctgctgctgcc

SEQ ID NO: 185593 - DNA, 15 bp, Homo sapiens
cacagctgctgctgc

SEQ ID NO: 185594 - DNA, 15 bp, Homo sapiens
tcacagctgctgctg

SEQ ID NO: 185595 - DNA, 15 bp, Homo sapiens
ctcacagctgctgct

SEQ ID NO: 185596 - DNA, 15 bp, Homo sapiens
cctcacagctgctgc

SEQ ID NO: 185597 - DNA, 15 bp, Homo sapiens
acctcacagctgctg

SEQ ID NO: 185598 - DNA, 15 bp, Homo sapiens
cacctcacagctgct

SEQ ID NO: 185599 - DNA, 15 bp, Homo sapiens
acacctcacagctgc

SEQ ID NO: 185600 - DNA, 15 bp, Homo sapiens
cacacctcacagctg

SEQ ID NO: 185601 - DNA, 15 bp, Homo sapiens
ccacacctcacagct

SEQ ID NO: 185602 - DNA, 15 bp, Homo sapiens
cccacacctcacagc

SEQ ID NO: 185603 - DNA, 15 bp, Homo sapiens
acccacacctcacag

SEQ ID NO: 185604 - DNA, 15 bp, Homo sapiens
cacccacacctcaca

SEQ ID NO: 185605 - DNA, 15 bp, Homo sapiens
tcacccacacctcac

SEQ ID NO: 185606 - DNA, 15 bp, Homo sapiens
ctcacccacacctca

SEQ ID NO: 185607 - DNA, 15 bp, Homo sapiens
cctcacccacacctc

SEQ ID NO: 185608 - DNA, 15 bp, Homo sapiens
ccctcacccacacct

SEQ ID NO: 185609 - DNA, 15 bp, Homo sapiens
cccctcacccacacc

SEQ ID NO: 185610 - DNA, 15 bp, Homo sapiens
gcccctcacccacac

SEQ ID NO: 185611 - DNA, 15 bp, Homo sapiens
agcccctcacccaca

SEQ ID NO: 185612 - DNA, 15 bp, Homo sapiens
cagcccctcacccac

SEQ ID NO: 185613 - DNA, 15 bp, Homo sapiens
acagcccctcaccca

SEQ ID NO: 185614 - DNA, 15 bp, Homo sapiens
aacagcccctcaccc

SEQ ID NO: 185615 - DNA, 15 bp, Homo sapiens
caacagcccctcacc

SEQ ID NO: 185616 - DNA, 15 bp, Homo sapiens
gcaacagcccctcac

SEQ ID NO: 185617 - DNA, 15 bp, Homo sapiens
agcaacagcccctca

SEQ ID NO: 185618 - DNA, 15 bp, Homo sapiens
tagcaacagcccctc

SEQ ID NO: 185619 - DNA, 15 bp, Homo sapiens
ctagcaacagcccct

SEQ ID NO: 185620 - DNA, 15 bp, Homo sapiens
cctagcaacagcccc

SEQ ID NO: 185621 - DNA, 15 bp, Homo sapiens
tcctagcaacagccc

SEQ ID NO: 185622 - DNA, 15 bp, Homo sapiens
ctcctagcaacagcc

SEQ ID NO: 185623 - DNA, 15 bp, Homo sapiens
gctcctagcaacagc

SEQ ID NO: 185624 - DNA, 15 bp, Homo sapiens
tgctcctagcaacag

SEQ ID NO: 185625 - DNA, 15 bp, Homo sapiens
ctgctcctagcaaca

SEQ ID NO: 185626 - DNA, 15 bp, Homo sapiens
cctgctcctagcaac

SEQ ID NO: 185627 - DNA, 15 bp, Homo sapiens
ccctgctcctagcaa

SEQ ID NO: 185628 - DNA, 15 bp, Homo sapiens
tccctgctcctagca

SEQ ID NO: 185629 - DNA, 15 bp, Homo sapiens
atccctgctcctagc

SEQ ID NO: 185630 - DNA, 15 bp, Homo sapiens
gatccctgctcctag

SEQ ID NO: 185631 - DNA, 15 bp, Homo sapiens
ggatccctgctccta

SEQ ID NO: 185632 - DNA, 15 bp, Homo sapiens
tggatccctgctcct

SEQ ID NO: 185633 - DNA, 15 bp, Homo sapiens
ctggatccctgctcc

SEQ ID NO: 185634 - DNA, 15 bp, Homo sapiens
gctggatccctgctc

SEQ ID NO: 185635 - DNA, 15 bp, Homo sapiens
agctggatccctgct

SEQ ID NO: 185636 - DNA, 15 bp, Homo sapiens
aagctggatccctgc

SEQ ID NO: 185637 - DNA, 15 bp, Homo sapiens
caagctggatccctg

SEQ ID NO: 185638 - DNA, 15 bp, Homo sapiens
gcaagctggatccct

SEQ ID NO: 185639 - DNA, 15 bp, Homo sapiens
ggcaagctggatccc

SEQ ID NO: 185640 - DNA, 15 bp, Homo sapiens
aggcaagctggatcc

SEQ ID NO: 185641 - DNA, 15 bp, Homo sapiens
aaggcaagctggatc

SEQ ID NO: 185642 - DNA, 15 bp, Homo sapiens
aaaggcaagctggat

SEQ ID NO: 185643 - DNA, 15 bp, Homo sapiens
aaaaggcaagctgga

SEQ ID NO: 185644 - DNA, 15 bp, Homo sapiens
gaaaaggcaagctgg

SEQ ID NO: 185645 - DNA, 15 bp, Homo sapiens
agaaaaggcaagctg

SEQ ID NO: 185646 - DNA, 15 bp, Homo sapiens
cagaaaaggcaagct

SEQ ID NO: 185647 - DNA, 15 bp, Homo sapiens
tcagaaaaggcaagc

SEQ ID NO: 185648 - DNA, 15 bp, Homo sapiens
gtcagaaaaggcaag

SEQ ID NO: 185649 - DNA, 15 bp, Homo sapiens
tgtcagaaaaggcaa

SEQ ID NO: 185650 - DNA, 15 bp, Homo sapiens
gtgtcagaaaaggca

SEQ ID NO: 185651 - DNA, 15 bp, Homo sapiens
cgtgtcagaaaaggc

SEQ ID NO: 185652 - DNA, 15 bp, Homo sapiens
acgtgtcagaaaagg

SEQ ID NO: 185653 - DNA, 15 bp, Homo sapiens
cacgtgtcagaaaag

SEQ ID NO: 185654 - DNA, 15 bp, Homo sapiens
acacgtgtcagaaaa

SEQ ID NO: 185655 - DNA, 15 bp, Homo sapiens
cacacgtgtcagaaa

SEQ ID NO: 185656 - DNA, 15 bp, Homo sapiens
acacacgtgtcagaa

SEQ ID NO: 185657 - DNA, 15 bp, Homo sapiens
aacacacgtgtcaga

SEQ ID NO: 185658 - DNA, 15 bp, Homo sapiens
aaacacacgtgtcag

SEQ ID NO: 185659 - DNA, 15 bp, Homo sapiens
taaacacacgtgtca

SEQ ID NO: 185660 - DNA, 15 bp, Homo sapiens
ttaaacacacgtgtc

SEQ ID NO: 185661 - DNA, 15 bp, Homo sapiens
tttaaacacacgtgt

SEQ ID NO: 185662 - DNA, 15 bp, Homo sapiens
atttaaacacacgtg

SEQ ID NO: 185663 - DNA, 15 bp, Homo sapiens
aatttaaacacacgt

SEQ ID NO: 185664 - DNA, 15 bp, Homo sapiens
taatttaaacacacg

SEQ ID NO: 185665 - DNA, 15 bp, Homo sapiens
ctaatttaaacacac

SEQ ID NO: 185666 - DNA, 15 bp, Homo sapiens
gctaatttaaacaca

SEQ ID NO: 185667 - DNA, 15 bp, Homo sapiens
tgctaatttaaacac

SEQ ID NO: 185668 - DNA, 15 bp, Homo sapiens
atgctaatttaaaca

SEQ ID NO: 185669 - DNA, 15 bp, Homo sapiens
gatgctaatttaaac

SEQ ID NO: 185670 - DNA, 15 bp, Homo sapiens
agatgctaatttaaa

SEQ ID NO: 185671 - DNA, 15 bp, Homo sapiens
aagatgctaatttaa

SEQ ID NO: 185672 - DNA, 15 bp, Homo sapiens
aaagatgctaattta

SEQ ID NO: 185673 - DNA, 15 bp, Homo sapiens
taaagatgctaattt

SEQ ID NO: 185674 - DNA, 15 bp, Homo sapiens
ttaaagatgctaatt

SEQ ID NO: 185675 - DNA, 15 bp, Homo sapiens
tttaaagatgctaat

SEQ ID NO: 185676 - DNA, 15 bp, Homo sapiens
atttaaagatgctaa

SEQ ID NO: 185677 - DNA, 15 bp, Homo sapiens
catttaaagatgcta

SEQ ID NO: 185678 - DNA, 15 bp, Homo sapiens
gcatttaaagatgct

SEQ ID NO: 185679 - DNA, 15 bp, Homo sapiens
agcatttaaagatgc

SEQ ID NO: 185680 - DNA, 15 bp, Homo sapiens
cagcatttaaagatg

SEQ ID NO: 185681 - DNA, 15 bp, Homo sapiens
acagcatttaaagat

SEQ ID NO: 185682 - DNA, 15 bp, Homo sapiens
aacagcatttaaaga

SEQ ID NO: 185683 - DNA, 15 bp, Homo sapiens
gaacagcatttaaag

SEQ ID NO: 185684 - DNA, 15 bp, Homo sapiens
ggaacagcatttaaa

SEQ ID NO: 185685 - DNA, 15 bp, Homo sapiens
gggaacagcatttaa

SEQ ID NO: 185686 - DNA, 15 bp, Homo sapiens
cgggaacagcattta

SEQ ID NO: 185687 - DNA, 15 bp, Homo sapiens
tcgggaacagcattt

SEQ ID NO: 185688 - DNA, 15 bp, Homo sapiens
gtcgggaacagcatt

SEQ ID NO: 185689 - DNA, 15 bp, Homo sapiens
tgtcgggaacagcat

SEQ ID NO: 185690 - DNA, 15 bp, Homo sapiens
ctgtcgggaacagca

SEQ ID NO: 185691 - DNA, 15 bp, Homo sapiens
actgtcgggaacagc

SEQ ID NO: 185692 - DNA, 15 bp, Homo sapiens
aactgtcgggaacag

SEQ ID NO: 185693 - DNA, 15 bp, Homo sapiens
taactgtcgggaaca

SEQ ID NO: 185694 - DNA, 15 bp, Homo sapiens
ataactgtcgggaac

SEQ ID NO: 185695 - DNA, 15 bp, Homo sapiens
aataactgtcgggaa

SEQ ID NO: 185696 - DNA, 15 bp, Homo sapiens
gaataactgtcggga

SEQ ID NO: 185697 - DNA, 15 bp, Homo sapiens
tgaataactgtcggg

SEQ ID NO: 185698 - DNA, 15 bp, Homo sapiens
ttgaataactgtcgg

SEQ ID NO: 185699 - DNA, 15 bp, Homo sapiens
attgaataactgtcg

SEQ ID NO: 185700 - DNA, 15 bp, Homo sapiens
aattgaataactgtc

SEQ ID NO: 185701 - DNA, 15 bp, Homo sapiens
aaattgaataactgt

SEQ ID NO: 185702 - DNA, 15 bp, Homo sapiens
aaaattgaataactg

SEQ ID NO: 185703 - DNA, 15 bp, Homo sapiens
caaaattgaataact

SEQ ID NO: 185704 - DNA, 15 bp, Homo sapiens
tcaaaattgaataac

SEQ ID NO: 185705 - DNA, 15 bp, Homo sapiens
ttcaaaattgaataa

SEQ ID NO: 185706 - DNA, 15 bp, Homo sapiens
tttcaaaattgaata

SEQ ID NO: 185707 - DNA, 15 bp, Homo sapiens
gtttcaaaattgaat

SEQ ID NO: 185708 - DNA, 15 bp, Homo sapiens
agtttcaaaattgaa

SEQ ID NO: 185709 - DNA, 15 bp, Homo sapiens
tagtttcaaaattga

SEQ ID NO: 185710 - DNA, 15 bp, Homo sapiens
gtagtttcaaaattg

SEQ ID NO: 185711 - DNA, 15 bp, Homo sapiens
agtagtttcaaaatt

SEQ ID NO: 185712 - DNA, 15 bp, Homo sapiens
cagtagtttcaaaat

SEQ ID NO: 185713 - DNA, 15 bp, Homo sapiens
ccagtagtttcaaaa

SEQ ID NO: 185714 - DNA, 15 bp, Homo sapiens
cccagtagtttcaaa

SEQ ID NO: 185715 - DNA, 15 bp, Homo sapiens
ccccagtagtttcaa

SEQ ID NO: 185716 - DNA, 15 bp, Homo sapiens
tccccagtagtttca

SEQ ID NO: 185717 - DNA, 15 bp, Homo sapiens
atccccagtagtttc

SEQ ID NO: 185718 - DNA, 15 bp, Homo sapiens
aatccccagtagttt

SEQ ID NO: 185719 - DNA, 15 bp, Homo sapiens
aaatccccagtagtt

SEQ ID NO: 185720 - DNA, 15 bp, Homo sapiens
aaaatccccagtagt

SEQ ID NO: 185721 - DNA, 15 bp, Homo sapiens
caaaatccccagtag

SEQ ID NO: 185722 - DNA, 15 bp, Homo sapiens
ccaaaatccccagta

SEQ ID NO: 185723 - DNA, 15 bp, Homo sapiens
cccaaaatccccagt

SEQ ID NO: 185724 - DNA, 15 bp, Homo sapiens
ccccaaaatccccag

SEQ ID NO: 185725 - DNA, 15 bp, Homo sapiens
gccccaaaatcccca

SEQ ID NO: 185726 - DNA, 15 bp, Homo sapiens
tgccccaaaatcccc

SEQ ID NO: 185727 - DNA, 15 bp, Homo sapiens
ctgccccaaaatccc

SEQ ID NO: 185728 - DNA, 15 bp, Homo sapiens
cctgccccaaaatcc

SEQ ID NO: 185729 - DNA, 15 bp, Homo sapiens
acctgccccaaaatc

SEQ ID NO: 185730 - DNA, 15 bp, Homo sapiens
cacctgccccaaaat

SEQ ID NO: 185731 - DNA, 15 bp, Homo sapiens
ccacctgccccaaaa

SEQ ID NO: 185732 - DNA, 15 bp, Homo sapiens
tccacctgccccaaa

SEQ ID NO: 185733 - DNA, 15 bp, Homo sapiens
ctccacctgccccaa

SEQ ID NO: 185734 - DNA, 15 bp, Homo sapiens
tctccacctgcccca

SEQ ID NO: 185735 - DNA, 15 bp, Homo sapiens
ctctccacctgcccc

SEQ ID NO: 185736 - DNA, 15 bp, Homo sapiens
actctccacctgccc

SEQ ID NO: 185737 - DNA, 15 bp, Homo sapiens
cactctccacctgcc

SEQ ID NO: 185738 - DNA, 15 bp, Homo sapiens
acactctccacctgc

SEQ ID NO: 185739 - DNA, 15 bp, Homo sapiens
aacactctccacctg

SEQ ID NO: 185740 - DNA, 15 bp, Homo sapiens
taacactctccacct

SEQ ID NO: 185741 - DNA, 15 bp, Homo sapiens
ttaacactctccacc

SEQ ID NO: 185742 - DNA, 15 bp, Homo sapiens
cttaacactctccac

SEQ ID NO: 185743 - DNA, 15 bp, Homo sapiens
ccttaacactctcca

SEQ ID NO: 185744 - DNA, 15 bp, Homo sapiens
tccttaacactctcc

SEQ ID NO: 185745 - DNA, 15 bp, Homo sapiens
ctccttaacactctc

SEQ ID NO: 185746 - DNA, 15 bp, Homo sapiens
cctccttaacactct

SEQ ID NO: 185747 - DNA, 15 bp, Homo sapiens
tcctccttaacactc

SEQ ID NO: 185748 - DNA, 15 bp, Homo sapiens
ctcctccttaacact

SEQ ID NO: 185749 - DNA, 15 bp, Homo sapiens
cctcctccttaacac

SEQ ID NO: 185750 - DNA, 15 bp, Homo sapiens
gcctcctccttaaca

SEQ ID NO: 185751 - DNA, 15 bp, Homo sapiens
cgcctcctccttaac

SEQ ID NO: 185752 - DNA, 15 bp, Homo sapiens
tcgcctcctccttaa

SEQ ID NO: 185753 - DNA, 15 bp, Homo sapiens
ctcgcctcctcctta

SEQ ID NO: 185754 - DNA, 15 bp, Homo sapiens
cctcgcctcctcctt

SEQ ID NO: 185755 - DNA, 15 bp, Homo sapiens
gcctcgcctcctcct

SEQ ID NO: 185756 - DNA, 15 bp, Homo sapiens
tgcctcgcctcctcc

SEQ ID NO: 185757 - DNA, 15 bp, Homo sapiens
ttgcctcgcctcctc

SEQ ID NO: 185758 - DNA, 15 bp, Homo sapiens
tttgcctcgcctcct

SEQ ID NO: 185759 - DNA, 15 bp, Homo sapiens
atttgcctcgcctcc

SEQ ID NO: 185760 - DNA, 15 bp, Homo sapiens
catttgcctcgcctc

SEQ ID NO: 185761 - DNA, 15 bp, Homo sapiens
tcatttgcctcgcct

SEQ ID NO: 185762 - DNA, 15 bp, Homo sapiens
ttcatttgcctcgcc

SEQ ID NO: 185763 - DNA, 15 bp, Homo sapiens
tttcatttgcctcgc

SEQ ID NO: 185764 - DNA, 15 bp, Homo sapiens
ttttcatttgcctcg

SEQ ID NO: 185765 - DNA, 15 bp, Homo sapiens
cttttcatttgcctc

SEQ ID NO: 185766 - DNA, 15 bp, Homo sapiens
ccttttcatttgcct

SEQ ID NO: 185767 - DNA, 15 bp, Homo sapiens
gccttttcatttgcc

SEQ ID NO: 185768 - DNA, 15 bp, Homo sapiens
tgccttttcatttgc

SEQ ID NO: 185769 - DNA, 15 bp, Homo sapiens
ttgccttttcatttg

SEQ ID NO: 185770 - DNA, 15 bp, Homo sapiens
tttgccttttcattt

SEQ ID NO: 185771 - DNA, 15 bp, Homo sapiens
ttttgccttttcatt

SEQ ID NO: 185772 - DNA, 15 bp, Homo sapiens
gttttgccttttcat

SEQ ID NO: 185773 - DNA, 15 bp, Homo sapiens
tgttttgccttttca

SEQ ID NO: 185774 - DNA, 15 bp, Homo sapiens
atgttttgccttttc

SEQ ID NO: 185775 - DNA, 15 bp, Homo sapiens
aatgttttgcctttt

SEQ ID NO: 185776 - DNA, 15 bp, Homo sapiens
aaatgttttgccttt

SEQ ID NO: 185777 - DNA, 15 bp, Homo sapiens
caaatgttttgcctt

SEQ ID NO: 185778 - DNA, 15 bp, Homo sapiens
ccaaatgttttgcct

SEQ ID NO: 185779 - DNA, 15 bp, Homo sapiens
cccaaatgttttgcc

SEQ ID NO: 185780 - DNA, 15 bp, Homo sapiens
ccccaaatgttttgc

SEQ ID NO: 185781 - DNA, 15 bp, Homo sapiens
cccccaaatgttttg

SEQ ID NO: 185782 - DNA, 15 bp, Homo sapiens
tcccccaaatgtttt

SEQ ID NO: 185783 - DNA, 15 bp, Homo sapiens
ctcccccaaatgttt

SEQ ID NO: 185784 - DNA, 15 bp, Homo sapiens
actcccccaaatgtt

SEQ ID NO: 185785 - DNA, 15 bp, Homo sapiens
aactcccccaaatgt

SEQ ID NO: 185786 - DNA, 15 bp, Homo sapiens
aaactcccccaaatg

SEQ ID NO: 185787 - DNA, 15 bp, Homo sapiens
aaaactcccccaaat

SEQ ID NO: 185788 - DNA, 15 bp, Homo sapiens
aaaaactcccccaaa

SEQ ID NO: 185789 - DNA, 15 bp, Homo sapiens
caaaaactcccccaa

SEQ ID NO: 185790 - DNA, 15 bp, Homo sapiens
tcaaaaactccccca

SEQ ID NO: 185791 - DNA, 15 bp, Homo sapiens
ttcaaaaactccccc

SEQ ID NO: 185792 - DNA, 15 bp, Homo sapiens
tttcaaaaactcccc

SEQ ID NO: 185793 - DNA, 15 bp, Homo sapiens
ttttcaaaaactccc

SEQ ID NO: 185794 - DNA, 15 bp, Homo sapiens
tttttcaaaaactcc

SEQ ID NO: 185795 - DNA, 15 bp, Homo sapiens
ctttttcaaaaactc

SEQ ID NO: 185796 - DNA, 15 bp, Homo sapiens
actttttcaaaaact

SEQ ID NO: 185797 - DNA, 15 bp, Homo sapiens
aactttttcaaaaac

SEQ ID NO: 185798 - DNA, 15 bp, Homo sapiens
taactttttcaaaaa

SEQ ID NO: 185799 - DNA, 15 bp, Homo sapiens
ttaactttttcaaaa

SEQ ID NO: 185800 - DNA, 15 bp, Homo sapiens
tttaactttttcaaa

SEQ ID NO: 185801 - DNA, 15 bp, Homo sapiens
atttaactttttcaa

SEQ ID NO: 185802 - DNA, 15 bp, Homo sapiens
tatttaactttttca

SEQ ID NO: 185803 - DNA, 15 bp, Homo sapiens
ttatttaactttttc

SEQ ID NO: 185804 - DNA, 15 bp, Homo sapiens
cttatttaacttttt

SEQ ID NO: 185805 - DNA, 15 bp, Homo sapiens
ccttatttaactttt

SEQ ID NO: 185806 - DNA, 15 bp, Homo sapiens
tccttatttaacttt

SEQ ID NO: 185807 - DNA, 15 bp, Homo sapiens
ttccttatttaactt

SEQ ID NO: 185808 - DNA, 15 bp, Homo sapiens
tttccttatttaact

SEQ ID NO: 185809 - DNA, 15 bp, Homo sapiens
ttttccttatttaac

SEQ ID NO: 185810 - DNA, 15 bp, Homo sapiens
cttttccttatttaa

SEQ ID NO: 185811 - DNA, 15 bp, Homo sapiens
tcttttccttattta

SEQ ID NO: 185812 - DNA, 15 bp, Homo sapiens
ctcttttccttattt

SEQ ID NO: 185813 - DNA, 15 bp, Homo sapiens
actcttttccttatt

SEQ ID NO: 185814 - DNA, 15 bp, Homo sapiens
cactcttttccttat

SEQ ID NO: 185815 - DNA, 15 bp, Homo sapiens
acactcttttcctta

SEQ ID NO: 185816 - DNA, 15 bp, Homo sapiens
gacactcttttcctt

SEQ ID NO: 185817 - DNA, 15 bp, Homo sapiens
tgacactcttttcct

SEQ ID NO: 185818 - DNA, 15 bp, Homo sapiens
ctgacactcttttcc

SEQ ID NO: 185819 - DNA, 15 bp, Homo sapiens
gctgacactcttttc

SEQ ID NO: 185820 - DNA, 15 bp, Homo sapiens
agctgacactctttt

SEQ ID NO: 185821 - DNA, 15 bp, Homo sapiens
cagctgacactcttt

SEQ ID NO: 185822 - DNA, 15 bp, Homo sapiens
ccagctgacactctt

SEQ ID NO: 185823 - DNA, 15 bp, Homo sapiens
cccagctgacactct

SEQ ID NO: 185824 - DNA, 15 bp, Homo sapiens
ccccagctgacactc

SEQ ID NO: 185825 - DNA, 15 bp, Homo sapiens
cccccagctgacact

SEQ ID NO: 185826 - DNA, 15 bp, Homo sapiens
tcccccagctgacac

SEQ ID NO: 185827 - DNA, 15 bp, Homo sapiens
ttcccccagctgaca

SEQ ID NO: 185828 - DNA, 15 bp, Homo sapiens
tttcccccagctgac

SEQ ID NO: 185829 - DNA, 15 bp, Homo sapiens
ctttcccccagctga

SEQ ID NO: 185830 - DNA, 15 bp, Homo sapiens
gctttcccccagctg

SEQ ID NO: 185831 - DNA, 15 bp, Homo sapiens
tgctttcccccagct

SEQ ID NO: 185832 - DNA, 15 bp, Homo sapiens
gtgctttcccccagc

SEQ ID NO: 185833 - DNA, 15 bp, Homo sapiens
tgtgctttcccccag

SEQ ID NO: 185834 - DNA, 15 bp, Homo sapiens
atgtgctttccccca

SEQ ID NO: 185835 - DNA, 15 bp, Homo sapiens
gatgtgctttccccc

SEQ ID NO: 185836 - DNA, 15 bp, Homo sapiens
agatgtgctttcccc

SEQ ID NO: 185837 - DNA, 15 bp, Homo sapiens
gagatgtgctttccc

SEQ ID NO: 185838 - DNA, 15 bp, Homo sapiens
tgagatgtgctttcc

SEQ ID NO: 185839 - DNA, 15 bp, Homo sapiens
ctgagatgtgctttc

SEQ ID NO: 185840 - DNA, 15 bp, Homo sapiens
cctgagatgtgcttt

SEQ ID NO: 185841 - DNA, 15 bp, Homo sapiens
gcctgagatgtgctt

SEQ ID NO: 185842 - DNA, 15 bp, Homo sapiens
ggcctgagatgtgct

SEQ ID NO: 185843 - DNA, 15 bp, Homo sapiens
gggcctgagatgtgc

SEQ ID NO: 185844 - DNA, 15 bp, Homo sapiens
ggggcctgagatgtg

SEQ ID NO: 185845 - DNA, 15 bp, Homo sapiens
tggggcctgagatgt

SEQ ID NO: 185846 - DNA, 15 bp, Homo sapiens
atggggcctgagatg

SEQ ID NO: 185847 - DNA, 15 bp, Homo sapiens
aatggggcctgagat

SEQ ID NO: 185848 - DNA, 15 bp, Homo sapiens
caatggggcctgaga

SEQ ID NO: 185849 - DNA, 15 bp, Homo sapiens
gcaatggggcctgag

SEQ ID NO: 185850 - DNA, 15 bp, Homo sapiens
tgcaatggggcctga

SEQ ID NO: 185851 - DNA, 15 bp, Homo sapiens
ctgcaatggggcctg

SEQ ID NO: 185852 - DNA, 15 bp, Homo sapiens
cctgcaatggggcct

SEQ ID NO: 185853 - DNA, 15 bp, Homo sapiens
tcctgcaatggggcc

SEQ ID NO: 185854 - DNA, 15 bp, Homo sapiens
gtcctgcaatggggc

SEQ ID NO: 185855 - DNA, 15 bp, Homo sapiens
ggtcctgcaatgggg

SEQ ID NO: 185856 - DNA, 15 bp, Homo sapiens
gggtcctgcaatggg

SEQ ID NO: 185857 - DNA, 15 bp, Homo sapiens
ggggtcctgcaatgg

SEQ ID NO: 185858 - DNA, 15 bp, Homo sapiens
aggggtcctgcaatg

SEQ ID NO: 185859 - DNA, 15 bp, Homo sapiens
aaggggtcctgcaat

SEQ ID NO: 185860 - DNA, 15 bp, Homo sapiens
gaaggggtcctgcaa

SEQ ID NO: 185861 - DNA, 15 bp, Homo sapiens
ggaaggggtcctgca

SEQ ID NO: 185862 - DNA, 15 bp, Homo sapiens
gggaaggggtcctgc

SEQ ID NO: 185863 - DNA, 15 bp, Homo sapiens
ggggaaggggtcctg

SEQ ID NO: 185864 - DNA, 15 bp, Homo sapiens
tggggaaggggtcct

SEQ ID NO: 185865 - DNA, 15 bp, Homo sapiens
ctggggaaggggtcc

SEQ ID NO: 185866 - DNA, 15 bp, Homo sapiens
actggggaaggggtc

SEQ ID NO: 185867 - DNA, 15 bp, Homo sapiens
cactggggaaggggt

SEQ ID NO: 185868 - DNA, 15 bp, Homo sapiens
ccactggggaagggg

SEQ ID NO: 185869 - DNA, 15 bp, Homo sapiens
tccactggggaaggg

SEQ ID NO: 185870 - DNA, 15 bp, Homo sapiens
ctccactggggaagg

SEQ ID NO: 185871 - DNA, 15 bp, Homo sapiens
actccactggggaag

SEQ ID NO: 185872 - DNA, 15 bp, Homo sapiens
gactccactggggaa

SEQ ID NO: 185873 - DNA, 15 bp, Homo sapiens
tgactccactgggga

SEQ ID NO: 185874 - DNA, 15 bp, Homo sapiens
atgactccactgggg

SEQ ID NO: 185875 - DNA, 15 bp, Homo sapiens
tatgactccactggg

SEQ ID NO: 185876 - DNA, 15 bp, Homo sapiens
ctatgactccactgg

SEQ ID NO: 185877 - DNA, 15 bp, Homo sapiens
tctatgactccactg

SEQ ID NO: 185878 - DNA, 15 bp, Homo sapiens
ctctatgactccact

SEQ ID NO: 185879 - DNA, 15 bp, Homo sapiens
actctatgactccac

SEQ ID NO: 185880 - DNA, 15 bp, Homo sapiens
gactctatgactcca

SEQ ID NO: 185881 - DNA, 15 bp, Homo sapiens
ggactctatgactcc

SEQ ID NO: 185882 - DNA, 15 bp, Homo sapiens
gggactctatgactc

SEQ ID NO: 185883 - DNA, 15 bp, Homo sapiens
ggggactctatgact

SEQ ID NO: 185884 - DNA, 15 bp, Homo sapiens
aggggactctatgac

SEQ ID NO: 185885 - DNA, 15 bp, Homo sapiens
taggggactctatga

SEQ ID NO: 185886 - DNA, 15 bp, Homo sapiens
gtaggggactctatg

SEQ ID NO: 185887 - DNA, 15 bp, Homo sapiens
agtaggggactctat

SEQ ID NO: 185888 - DNA, 15 bp, Homo sapiens
gagtaggggactcta

SEQ ID NO: 185889 - DNA, 15 bp, Homo sapiens
agagtaggggactct

SEQ ID NO: 185890 - DNA, 15 bp, Homo sapiens
cagagtaggggactc

SEQ ID NO: 185891 - DNA, 15 bp, Homo sapiens
gcagagtaggggact

SEQ ID NO: 185892 - DNA, 15 bp, Homo sapiens
ggcagagtaggggac

SEQ ID NO: 185893 - DNA, 15 bp, Homo sapiens
gggcagagtagggga

SEQ ID NO: 185894 - DNA, 15 bp, Homo sapiens
ggggcagagtagggg

SEQ ID NO: 185895 - DNA, 15 bp, Homo sapiens
tggggcagagtaggg

SEQ ID NO: 185896 - DNA, 15 bp, Homo sapiens
ttggggcagagtagg

SEQ ID NO: 185897 - DNA, 15 bp, Homo sapiens
cttggggcagagtag

SEQ ID NO: 185898 - DNA, 15 bp, Homo sapiens
ccttggggcagagta

SEQ ID NO: 185899 - DNA, 15 bp, Homo sapiens
accttggggcagagt

SEQ ID NO: 185900 - DNA, 15 bp, Homo sapiens
caccttggggcagag

SEQ ID NO: 185901 - DNA, 15 bp, Homo sapiens
acaccttggggcaga

SEQ ID NO: 185902 - DNA, 15 bp, Homo sapiens
aacaccttggggcag

SEQ ID NO: 185903 - DNA, 15 bp, Homo sapiens
caacaccttggggca

SEQ ID NO: 185904 - DNA, 15 bp, Homo sapiens
ccaacaccttggggc

SEQ ID NO: 185905 - DNA, 15 bp, Homo sapiens
tccaacaccttgggg

SEQ ID NO: 185906 - DNA, 15 bp, Homo sapiens
ctccaacaccttggg

SEQ ID NO: 185907 - DNA, 15 bp, Homo sapiens
tctccaacaccttgg

SEQ ID NO: 185908 - DNA, 15 bp, Homo sapiens
atctccaacaccttg

SEQ ID NO: 185909 - DNA, 15 bp, Homo sapiens
catctccaacacctt

SEQ ID NO: 185910 - DNA, 15 bp, Homo sapiens
ccatctccaacacct

SEQ ID NO: 185911 - DNA, 15 bp, Homo sapiens
gccatctccaacacc

SEQ ID NO: 185912 - DNA, 15 bp, Homo sapiens
agccatctccaacac

SEQ ID NO: 185913 - DNA, 15 bp, Homo sapiens
gagccatctccaaca

SEQ ID NO: 185914 - DNA, 15 bp, Homo sapiens
tgagccatctccaac

SEQ ID NO: 185915 - DNA, 15 bp, Homo sapiens
atgagccatctccaa

SEQ ID NO: 185916 - DNA, 15 bp, Homo sapiens
catgagccatctcca

SEQ ID NO: 185917 - DNA, 15 bp, Homo sapiens
ccatgagccatctcc

SEQ ID NO: 185918 - DNA, 15 bp, Homo sapiens
gccatgagccatctc

SEQ ID NO: 185919 - DNA, 15 bp, Homo sapiens
agccatgagccatct

SEQ ID NO: 185920 - DNA, 15 bp, Homo sapiens
gagccatgagccatc

SEQ ID NO: 185921 - DNA, 15 bp, Homo sapiens
tgagccatgagccat

SEQ ID NO: 185922 - DNA, 15 bp, Homo sapiens
atgagccatgagcca

SEQ ID NO: 185923 - DNA, 15 bp, Homo sapiens
catgagccatgagcc

SEQ ID NO: 185924 - DNA, 15 bp, Homo sapiens
ccatgagccatgagc

SEQ ID NO: 185925 - DNA, 15 bp, Homo sapiens
cccatgagccatgag

SEQ ID NO: 185926 - DNA, 15 bp, Homo sapiens
tcccatgagccatga

SEQ ID NO: 185927 - DNA, 15 bp, Homo sapiens
ttcccatgagccatg

SEQ ID NO: 185928 - DNA, 15 bp, Homo sapiens
attcccatgagccat

SEQ ID NO: 185929 - DNA, 15 bp, Homo sapiens
cattcccatgagcca

SEQ ID NO: 185930 - DNA, 15 bp, Homo sapiens
acattcccatgagcc

SEQ ID NO: 185931 - DNA, 15 bp, Homo sapiens
cacattcccatgagc

SEQ ID NO: 185932 - DNA, 15 bp, Homo sapiens
gcacattcccatgag

SEQ ID NO: 185933 - DNA, 15 bp, Homo sapiens
tgcacattcccatga

SEQ ID NO: 185934 - DNA, 15 bp, Homo sapiens
ctgcacattcccatg

SEQ ID NO: 185935 - DNA, 15 bp, Homo sapiens
cctgcacattcccat

SEQ ID NO: 185936 - DNA, 15 bp, Homo sapiens
tcctgcacattccca

SEQ ID NO: 185937 - DNA, 15 bp, Homo sapiens
ttcctgcacattccc

SEQ ID NO: 185938 - DNA, 15 bp, Homo sapiens
cttcctgcacattcc

SEQ ID NO: 185939 - DNA, 15 bp, Homo sapiens
acttcctgcacattc

SEQ ID NO: 185940 - DNA, 15 bp, Homo sapiens
gacttcctgcacatt

SEQ ID NO: 185941 - DNA, 15 bp, Homo sapiens
ggacttcctgcacat

SEQ ID NO: 185942 - DNA, 15 bp, Homo sapiens
gggacttcctgcaca

SEQ ID NO: 185943 - DNA, 15 bp, Homo sapiens
ggggacttcctgcac

SEQ ID NO: 185944 - DNA, 15 bp, Homo sapiens
aggggacttcctgca

SEQ ID NO: 185945 - DNA, 15 bp, Homo sapiens
caggggacttcctgc

SEQ ID NO: 185946 - DNA, 15 bp, Homo sapiens
tcaggggacttcctg

SEQ ID NO: 185947 - DNA, 15 bp, Homo sapiens
ctcaggggacttcct

SEQ ID NO: 185948 - DNA, 15 bp, Homo sapiens
actcaggggacttcc

SEQ ID NO: 185949 - DNA, 15 bp, Homo sapiens
gactcaggggacttc

SEQ ID NO: 185950 - DNA, 15 bp, Homo sapiens
agactcaggggactt

SEQ ID NO: 185951 - DNA, 15 bp, Homo sapiens
aagactcaggggact

SEQ ID NO: 185952 - DNA, 15 bp, Homo sapiens
taagactcaggggac

SEQ ID NO: 185953 - DNA, 15 bp, Homo sapiens
ataagactcagggga

SEQ ID NO: 185954 - DNA, 15 bp, Homo sapiens
aataagactcagggg

SEQ ID NO: 185955 - DNA, 15 bp, Homo sapiens
aaataagactcaggg

SEQ ID NO: 185956 - DNA, 15 bp, Homo sapiens
taaataagactcagg

SEQ ID NO: 185957 - DNA, 15 bp, Homo sapiens
ataaataagactcag

SEQ ID NO: 185958 - DNA, 15 bp, Homo sapiens
aataaataagactca

SEQ ID NO: 185959 - DNA, 15 bp, Homo sapiens
aaataaataagactc

SEQ ID NO: 185960 - DNA, 15 bp, Homo sapiens
taaataaataagact

SEQ ID NO: 185961 - DNA, 15 bp, Homo sapiens
ataaataaataagac

SEQ ID NO: 185962 - DNA, 15 bp, Homo sapiens
aataaataaataaga

SEQ ID NO: 185963 - DNA, 15 bp, Homo sapiens
aaataaataaataag

SEQ ID NO: 185964 - DNA, 15 bp, Homo sapiens
taaataaataaataa

SEQ ID NO: 185965 - DNA, 15 bp, Homo sapiens
ataaataaataaata

SEQ ID NO: 185966 - DNA, 15 bp, Homo sapiens
aataaataaataaat

SEQ ID NO: 185967 - DNA, 15 bp, Homo sapiens
aaataaataaataaa

SEQ ID NO: 185968 - DNA, 15 bp, Homo sapiens
aaaataaataaataa

SEQ ID NO: 185969 - DNA, 15 bp, Homo sapiens
caaaataaataaata

SEQ ID NO: 185970 - DNA, 15 bp, Homo sapiens
tcaaaataaataaat

SEQ ID NO: 185971 - DNA, 15 bp, Homo sapiens
ctcaaaataaataaa

SEQ ID NO: 185972 - DNA, 15 bp, Homo sapiens
tctcaaaataaataa

SEQ ID NO: 185973 - DNA, 15 bp, Homo sapiens
atctcaaaataaata

SEQ ID NO: 185974 - DNA, 15 bp, Homo sapiens
catctcaaaataaat

SEQ ID NO: 185975 - DNA, 15 bp, Homo sapiens
ccatctcaaaataaa

SEQ ID NO: 185976 - DNA, 15 bp, Homo sapiens
tccatctcaaaataa

SEQ ID NO: 185977 - DNA, 15 bp, Homo sapiens
ctccatctcaaaata

SEQ ID NO: 185978 - DNA, 15 bp, Homo sapiens
actccatctcaaaat

SEQ ID NO: 185979 - DNA, 15 bp, Homo sapiens
aagactccatctcaa

SEQ ID NO: 185980 - DNA, 15 bp, Homo sapiens
caagactccatctca

SEQ ID NO: 185981 - DNA, 15 bp, Homo sapiens
gcaagactccatctc

SEQ ID NO: 185982 - DNA, 15 bp, Homo sapiens
agcaagactccatct

SEQ ID NO: 185983 - DNA, 15 bp, Homo sapiens
gagcaagactccatc

SEQ ID NO: 185984 - DNA, 15 bp, Homo sapiens
agagcaagactccat

SEQ ID NO: 185985 - DNA, 15 bp, Homo sapiens
cagagcaagactcca

SEQ ID NO: 185986 - DNA, 15 bp, Homo sapiens
acagagcaagactcc

SEQ ID NO: 185987 - DNA, 15 bp, Homo sapiens
gacagagcaagactc

SEQ ID NO: 185988 - DNA, 15 bp, Homo sapiens
tgacagagcaagact

SEQ ID NO: 185989 - DNA, 15 bp, Homo sapiens
gtgacagagcaagac

SEQ ID NO: 185990 - DNA, 15 bp, Homo sapiens
ggtgacagagcaaga

SEQ ID NO: 185991 - DNA, 15 bp, Homo sapiens
gggtgacagagcaag

SEQ ID NO: 185992 - DNA, 15 bp, Homo sapiens
tgggtgacagagcaa

SEQ ID NO: 185993 - DNA, 15 bp, Homo sapiens
ctgggtgacagagca

SEQ ID NO: 185994 - DNA, 15 bp, Homo sapiens
tactccagcctgggt

SEQ ID NO: 185995 - DNA, 15 bp, Homo sapiens
ctactccagcctggg

SEQ ID NO: 185996 - DNA, 15 bp, Homo sapiens
actactccagcctgg

SEQ ID NO: 185997 - DNA, 15 bp, Homo sapiens
cactactccagcctg

SEQ ID NO: 185998 - DNA, 15 bp, Homo sapiens
gcactactccagcct

SEQ ID NO: 185999 - DNA, 15 bp, Homo sapiens
tgcactactccagcc

SEQ ID NO: 186000 - DNA, 15 bp, Homo sapiens
ctgcactactccagc

SEQ ID NO: 186001 - DNA, 15 bp, Homo sapiens
actgcactactccag

SEQ ID NO: 186002 - DNA, 15 bp, Homo sapiens
cactgcactactcca

SEQ ID NO: 186003 - DNA, 15 bp, Homo sapiens
tcactgcactactcc

SEQ ID NO: 186004 - DNA, 15 bp, Homo sapiens
gtcactgcactactc

SEQ ID NO: 186005 - DNA, 15 bp, Homo sapiens
tgtcactgcactact

SEQ ID NO: 186006 - DNA, 15 bp, Homo sapiens
atgtcactgcactac

SEQ ID NO: 186007 - DNA, 15 bp, Homo sapiens
catgtcactgcacta

SEQ ID NO: 186008 - DNA, 15 bp, Homo sapiens
tcatgtcactgcact

SEQ ID NO: 186009 - DNA, 15 bp, Homo sapiens
atcatgtcactgcac

SEQ ID NO: 186010 - DNA, 15 bp, Homo sapiens
gatcatgtcactgca

SEQ ID NO: 186011 - DNA, 15 bp, Homo sapiens
agatcatgtcactgc

SEQ ID NO: 186012 - DNA, 15 bp, Homo sapiens
aagatcatgtcactg

SEQ ID NO: 186013 - DNA, 15 bp, Homo sapiens
caagatcatgtcact

SEQ ID NO: 186014 - DNA, 15 bp, Homo sapiens
ccaagatcatgtcac

SEQ ID NO: 186015 - DNA, 15 bp, Homo sapiens
gccaagatcatgtca

SEQ ID NO: 186016 - DNA, 15 bp, Homo sapiens
agccaagatcatgtc

SEQ ID NO: 186017 - DNA, 15 bp, Homo sapiens
gagccaagatcatgt

SEQ ID NO: 186018 - DNA, 15 bp, Homo sapiens
tgagccaagatcatg

SEQ ID NO: 186019 - DNA, 15 bp, Homo sapiens
gtgagccaagatcat

SEQ ID NO: 186020 - DNA, 15 bp, Homo sapiens
aggaggcggaggttg

SEQ ID NO: 186021 - DNA, 15 bp, Homo sapiens
caggaggcggaggtt

SEQ ID NO: 186022 - DNA, 15 bp, Homo sapiens
ccaggaggcggaggt

SEQ ID NO: 186023 - DNA, 15 bp, Homo sapiens
cccaggaggcggagg

SEQ ID NO: 186024 - DNA, 15 bp, Homo sapiens
acccaggaggcggag

SEQ ID NO: 186025 - DNA, 15 bp, Homo sapiens
aacccaggaggcgga

SEQ ID NO: 186026 - DNA, 15 bp, Homo sapiens
gaacccaggaggcgg

SEQ ID NO: 186027 - DNA, 15 bp, Homo sapiens
aatcacttgaaccca

SEQ ID NO: 186028 - DNA, 15 bp, Homo sapiens
gaatcacttgaaccc

SEQ ID NO: 186029 - DNA, 15 bp, Homo sapiens
gaggcaggagaatca

SEQ ID NO: 186030 - DNA, 15 bp, Homo sapiens
gctcaggaggctgag

SEQ ID NO: 186031 - DNA, 15 bp, Homo sapiens
tgctcaggaggctga

SEQ ID NO: 186032 - DNA, 15 bp, Homo sapiens
ctgctcaggaggctg

SEQ ID NO: 186033 - DNA, 15 bp, Homo sapiens
gctgctcaggaggct

SEQ ID NO: 186034 - DNA, 15 bp, Homo sapiens
agctgctcaggaggc

SEQ ID NO: 186035 - DNA, 15 bp, Homo sapiens
cagctgctcaggagg

SEQ ID NO: 186036 - DNA, 15 bp, Homo sapiens
ccagctgctcaggag

SEQ ID NO: 186037 - DNA, 15 bp, Homo sapiens
cccagctgctcagga

SEQ ID NO: 186038 - DNA, 15 bp, Homo sapiens
tcccagctgctcagg

SEQ ID NO: 186039 - DNA, 15 bp, Homo sapiens
atcccagctgctcag

SEQ ID NO: 186040 - DNA, 15 bp, Homo sapiens
aatcccagctgctca

SEQ ID NO: 186041 - DNA, 15 bp, Homo sapiens
taatcccagctgctc

SEQ ID NO: 186042 - DNA, 15 bp, Homo sapiens
gtaatcccagctgct

SEQ ID NO: 186043 - DNA, 15 bp, Homo sapiens
tgtaatcccagctgc

SEQ ID NO: 186044 - DNA, 15 bp, Homo sapiens
ctgtaatcccagctg

SEQ ID NO: 186045 - DNA, 15 bp, Homo sapiens
ccctgtaatcccagc

SEQ ID NO: 186046 - DNA, 15 bp, Homo sapiens
tccctgtaatcccag

SEQ ID NO: 186047 - DNA, 15 bp, Homo sapiens
gtccctgtaatccca

SEQ ID NO: 186048 - DNA, 15 bp, Homo sapiens
ggtccctgtaatccc

SEQ ID NO: 186049 - DNA, 15 bp, Homo sapiens
aggtccctgtaatcc

SEQ ID NO: 186050 - DNA, 15 bp, Homo sapiens
caggtccctgtaatc

SEQ ID NO: 186051 - DNA, 15 bp, Homo sapiens
gcaggtccctgtaat

SEQ ID NO: 186052 - DNA, 15 bp, Homo sapiens
ggcaggtccctgtaa

SEQ ID NO: 186053 - DNA, 15 bp, Homo sapiens
tggcaggtccctgta

SEQ ID NO: 186054 - DNA, 15 bp, Homo sapiens
gtggcaggtccctgt

SEQ ID NO: 186055 - DNA, 15 bp, Homo sapiens
ggtggcaggtccctg

SEQ ID NO: 186056 - DNA, 15 bp, Homo sapiens
tggtggcaggtccct

SEQ ID NO: 186057 - DNA, 15 bp, Homo sapiens
gtggtggcaggtccc

SEQ ID NO: 186058 - DNA, 15 bp, Homo sapiens
cgtggtggcaggtcc

SEQ ID NO: 186059 - DNA, 15 bp, Homo sapiens
gcgtggtggcaggtc

SEQ ID NO: 186060 - DNA, 15 bp, Homo sapiens
ggcgtggtggcaggt

SEQ ID NO: 186061 - DNA, 15 bp, Homo sapiens
aggcgtggtggcagg

SEQ ID NO: 186062 - DNA, 15 bp, Homo sapiens
caggcgtggtggcag

SEQ ID NO: 186063 - DNA, 15 bp, Homo sapiens
ccaggcgtggtggca

SEQ ID NO: 186064 - DNA, 15 bp, Homo sapiens
tagccaggcgtggtg

SEQ ID NO: 186065 - DNA, 15 bp, Homo sapiens
ttagccaggcgtggt

SEQ ID NO: 186066 - DNA, 15 bp, Homo sapiens
attagccaggcgtgg

SEQ ID NO: 186067 - DNA, 15 bp, Homo sapiens
aattagccaggcgtg

SEQ ID NO: 186068 - DNA, 15 bp, Homo sapiens
aaattagccaggcgt

SEQ ID NO: 186069 - DNA, 15 bp, Homo sapiens
aaaattagccaggcg

SEQ ID NO: 186070 - DNA, 15 bp, Homo sapiens
tatctctactaaaaa

SEQ ID NO: 186071 - DNA, 15 bp, Homo sapiens
ctatctctactaaaa

SEQ ID NO: 186072 - DNA, 15 bp, Homo sapiens
cctatctctactaaa

SEQ ID NO: 186073 - DNA, 15 bp, Homo sapiens
acctatctctactaa

SEQ ID NO: 186074 - DNA, 15 bp, Homo sapiens
aacctatctctacta

SEQ ID NO: 186075 - DNA, 15 bp, Homo sapiens
aaacctatctctact

SEQ ID NO: 186076 - DNA, 15 bp, Homo sapiens
aaaacctatctctac

SEQ ID NO: 186077 - DNA, 15 bp, Homo sapiens
caaaacctatctcta

SEQ ID NO: 186078 - DNA, 15 bp, Homo sapiens
gcaaaacctatctct

SEQ ID NO: 186079 - DNA, 15 bp, Homo sapiens
ggcaaaacctatctc

SEQ ID NO: 186080 - DNA, 15 bp, Homo sapiens
tggcaaaacctatct

SEQ ID NO: 186081 - DNA, 15 bp, Homo sapiens
atggcaaaacctatc

SEQ ID NO: 186082 - DNA, 15 bp, Homo sapiens
catggcaaaacctat

SEQ ID NO: 186083 - DNA, 15 bp, Homo sapiens
acatggcaaaaccta

SEQ ID NO: 186084 - DNA, 15 bp, Homo sapiens
aacatggcaaaacct

SEQ ID NO: 186085 - DNA, 15 bp, Homo sapiens
cagaccagcctggcc

SEQ ID NO: 186086 - DNA, 15 bp, Homo sapiens
tcagaccagcctggc

SEQ ID NO: 186087 - DNA, 15 bp, Homo sapiens
ttcagaccagcctgg

SEQ ID NO: 186088 - DNA, 15 bp, Homo sapiens
tttcagaccagcctg

SEQ ID NO: 186089 - DNA, 15 bp, Homo sapiens
gtttcagaccagcct

SEQ ID NO: 186090 - DNA, 15 bp, Homo sapiens
agtttcagaccagcc

SEQ ID NO: 186091 - DNA, 15 bp, Homo sapiens
gagtttcagaccagc

SEQ ID NO: 186092 - DNA, 15 bp, Homo sapiens
ggagtttcagaccag

SEQ ID NO: 186093 - DNA, 15 bp, Homo sapiens
aggagtttcagacca

SEQ ID NO: 186094 - DNA, 15 bp, Homo sapiens
caggagtttcagacc

SEQ ID NO: 186095 - DNA, 15 bp, Homo sapiens
tcaggagtttcagac

SEQ ID NO: 186096 - DNA, 15 bp, Homo sapiens
gtcaggagtttcaga

SEQ ID NO: 186097 - DNA, 15 bp, Homo sapiens
ggtcaggagtttcag

SEQ ID NO: 186098 - DNA, 15 bp, Homo sapiens
aggtcaggagtttca

SEQ ID NO: 186099 - DNA, 15 bp, Homo sapiens
gaggtcaggagtttc

SEQ ID NO: 186100 - DNA, 15 bp, Homo sapiens
tagatcacctgaggt

SEQ ID NO: 186101 - DNA, 15 bp, Homo sapiens
gtagatcacctgagg

SEQ ID NO: 186102 - DNA, 15 bp, Homo sapiens
ggtagatcacctgag

SEQ ID NO: 186103 - DNA, 15 bp, Homo sapiens
aggtagatcacctga

SEQ ID NO: 186104 - DNA, 15 bp, Homo sapiens
caggtagatcacctg

SEQ ID NO: 186105 - DNA, 15 bp, Homo sapiens
gcaggtagatcacct

SEQ ID NO: 186106 - DNA, 15 bp, Homo sapiens
ggcaggtagatcacc

SEQ ID NO: 186107 - DNA, 15 bp, Homo sapiens
aggcaggtagatcac

SEQ ID NO: 186108 - DNA, 15 bp, Homo sapiens
gaggcaggtagatca

SEQ ID NO: 186109 - DNA, 15 bp, Homo sapiens
cgaggcaggtagatc

SEQ ID NO: 186110 - DNA, 15 bp, Homo sapiens
tcgaggcaggtagat

SEQ ID NO: 186111 - DNA, 15 bp, Homo sapiens
gtcgaggcaggtaga

SEQ ID NO: 186112 - DNA, 15 bp, Homo sapiens
ggtcgaggcaggtag

SEQ ID NO: 186113 - DNA, 15 bp, Homo sapiens
aggtcgaggcaggta

SEQ ID NO: 186114 - DNA, 15 bp, Homo sapiens
gaggtcgaggcaggt

SEQ ID NO: 186115 - DNA, 15 bp, Homo sapiens
ggaggtcgaggcagg

SEQ ID NO: 186116 - DNA, 15 bp, Homo sapiens
gggaggtcgaggcag

SEQ ID NO: 186117 - DNA, 15 bp, Homo sapiens
tgggaggtcgaggca

SEQ ID NO: 186118 - DNA, 15 bp, Homo sapiens
ttgggaggtcgaggc

SEQ ID NO: 186119 - DNA, 15 bp, Homo sapiens
tttgggaggtcgagg

SEQ ID NO: 186120 - DNA, 15 bp, Homo sapiens
ctttgggaggtcgag

SEQ ID NO: 186121 - DNA, 15 bp, Homo sapiens
actttgggaggtcga

SEQ ID NO: 186122 - DNA, 15 bp, Homo sapiens
cactttgggaggtcg

SEQ ID NO: 186123 - DNA, 15 bp, Homo sapiens
gcactttgggaggtc

SEQ ID NO: 186124 - DNA, 15 bp, Homo sapiens
agcactttgggaggt

SEQ ID NO: 186125 - DNA, 15 bp, Homo sapiens
acggtggctcatgcc

SEQ ID NO: 186126 - DNA, 15 bp, Homo sapiens
cacggtggctcatgc

SEQ ID NO: 186127 - DNA, 15 bp, Homo sapiens
gcacggtggctcatg

SEQ ID NO: 186128 - DNA, 15 bp, Homo sapiens
ggcacggtggctcat

SEQ ID NO: 186129 - DNA, 15 bp, Homo sapiens
aggcacggtggctca

SEQ ID NO: 186130 - DNA, 15 bp, Homo sapiens
caggcacggtggctc

SEQ ID NO: 186131 - DNA, 15 bp, Homo sapiens
ccaggcacggtggct

SEQ ID NO: 186132 - DNA, 15 bp, Homo sapiens
accaggcacggtggc

SEQ ID NO: 186133 - DNA, 15 bp, Homo sapiens
gaccaggcacggtgg

SEQ ID NO: 186134 - DNA, 15 bp, Homo sapiens
ggaccaggcacggtg

SEQ ID NO: 186135 - DNA, 15 bp, Homo sapiens
gggaccaggcacggt

SEQ ID NO: 186136 - DNA, 15 bp, Homo sapiens
agggaccaggcacgg

SEQ ID NO: 186137 - DNA, 15 bp, Homo sapiens
cagggaccaggcacg

SEQ ID NO: 186138 - DNA, 15 bp, Homo sapiens
tcagggaccaggcac

SEQ ID NO: 186139 - DNA, 15 bp, Homo sapiens
ctcagggaccaggca

SEQ ID NO: 186140 - DNA, 15 bp, Homo sapiens
actcagggaccaggc

SEQ ID NO: 186141 - DNA, 15 bp, Homo sapiens
gactcagggaccagg

SEQ ID NO: 186142 - DNA, 15 bp, Homo sapiens
ggactcagggaccag

SEQ ID NO: 186143 - DNA, 15 bp, Homo sapiens
aggactcagggacca

SEQ ID NO: 186144 - DNA, 15 bp, Homo sapiens
gaggactcagggacc

SEQ ID NO: 186145 - DNA, 15 bp, Homo sapiens
agaggactcagggac

SEQ ID NO: 186146 - DNA, 15 bp, Homo sapiens
aagaggactcaggga

SEQ ID NO: 186147 - DNA, 15 bp, Homo sapiens
taagaggactcaggg

SEQ ID NO: 186148 - DNA, 15 bp, Homo sapiens
ctaagaggactcagg

SEQ ID NO: 186149 - DNA, 15 bp, Homo sapiens
cctaagaggactcag

SEQ ID NO: 186150 - DNA, 15 bp, Homo sapiens
ccctaagaggactca

SEQ ID NO: 186151 - DNA, 15 bp, Homo sapiens
accctaagaggactc

SEQ ID NO: 186152 - DNA, 15 bp, Homo sapiens
gaccctaagaggact

SEQ ID NO: 186153 - DNA, 15 bp, Homo sapiens
agaccctaagaggac

SEQ ID NO: 186154 - DNA, 15 bp, Homo sapiens
gagaccctaagagga

SEQ ID NO: 186155 - DNA, 15 bp, Homo sapiens
ggagaccctaagagg

SEQ ID NO: 186156 - DNA, 15 bp, Homo sapiens
tggagaccctaagag

SEQ ID NO: 186157 - DNA, 15 bp, Homo sapiens
ctggagaccctaaga

SEQ ID NO: 186158 - DNA, 15 bp, Homo sapiens
tctggagaccctaag

SEQ ID NO: 186159 - DNA, 15 bp, Homo sapiens
ttctggagaccctaa

SEQ ID NO: 186160 - DNA, 15 bp, Homo sapiens
tttctggagacccta

SEQ ID NO: 186161 - DNA, 15 bp, Homo sapiens
atttctggagaccct

SEQ ID NO: 186162 - DNA, 15 bp, Homo sapiens
gatttctggagaccc

SEQ ID NO: 186163 - DNA, 15 bp, Homo sapiens
tgatttctggagacc

SEQ ID NO: 186164 - DNA, 15 bp, Homo sapiens
gtgatttctggagac

SEQ ID NO: 186165 - DNA, 15 bp, Homo sapiens
agtgatttctggaga

SEQ ID NO: 186166 - DNA, 15 bp, Homo sapiens
tagtgatttctggag

SEQ ID NO: 186167 - DNA, 15 bp, Homo sapiens
atagtgatttctgga

SEQ ID NO: 186168 - DNA, 15 bp, Homo sapiens
tatagtgatttctgg

SEQ ID NO: 186169 - DNA, 15 bp, Homo sapiens
atatagtgatttctg

SEQ ID NO: 186170 - DNA, 15 bp, Homo sapiens
gatatagtgatttct

SEQ ID NO: 186171 - DNA, 15 bp, Homo sapiens
tgatatagtgatttc

SEQ ID NO: 186172 - DNA, 15 bp, Homo sapiens
ttgatatagtgattt

SEQ ID NO: 186173 - DNA, 15 bp, Homo sapiens
cttgatatagtgatt

SEQ ID NO: 186174 - DNA, 15 bp, Homo sapiens
acttgatatagtgat

SEQ ID NO: 186175 - DNA, 15 bp, Homo sapiens
cacttgatatagtga

SEQ ID NO: 186176 - DNA, 15 bp, Homo sapiens
tcacttgatatagtg

SEQ ID NO: 186177 - DNA, 15 bp, Homo sapiens
ctcacttgatatagt

SEQ ID NO: 186178 - DNA, 15 bp, Homo sapiens
cctcacttgatatag

SEQ ID NO: 186179 - DNA, 15 bp, Homo sapiens
acctcacttgatata

SEQ ID NO: 186180 - DNA, 15 bp, Homo sapiens
aacctcacttgatat

SEQ ID NO: 186181 - DNA, 15 bp, Homo sapiens
aaacctcacttgata

SEQ ID NO: 186182 - DNA, 15 bp, Homo sapiens
caaacctcacttgat

SEQ ID NO: 186183 - DNA, 15 bp, Homo sapiens
ccaaacctcacttga

SEQ ID NO: 186184 - DNA, 15 bp, Homo sapiens
cccaaacctcacttg

SEQ ID NO: 186185 - DNA, 15 bp, Homo sapiens
ccccaaacctcactt

SEQ ID NO: 186186 - DNA, 15 bp, Homo sapiens
tccccaaacctcact

SEQ ID NO: 186187 - DNA, 15 bp, Homo sapiens
atccccaaacctcac

SEQ ID NO: 186188 - DNA, 15 bp, Homo sapiens
catccccaaacctca

SEQ ID NO: 186189 - DNA, 15 bp, Homo sapiens
ccatccccaaacctc

SEQ ID NO: 186190 - DNA, 15 bp, Homo sapiens
cccatccccaaacct

SEQ ID NO: 186191 - DNA, 15 bp, Homo sapiens
gcccatccccaaacc

SEQ ID NO: 186192 - DNA, 15 bp, Homo sapiens
tgcccatccccaaac

SEQ ID NO: 186193 - DNA, 15 bp, Homo sapiens
gtgcccatccccaaa

SEQ ID NO: 186194 - DNA, 15 bp, Homo sapiens
tgtgcccatccccaa

SEQ ID NO: 186195 - DNA, 15 bp, Homo sapiens
atgtgcccatcccca

SEQ ID NO: 186196 - DNA, 15 bp, Homo sapiens
gatgtgcccatcccc

SEQ ID NO: 186197 - DNA, 15 bp, Homo sapiens
agatgtgcccatccc

SEQ ID NO: 186198 - DNA, 15 bp, Homo sapiens
tagatgtgcccatcc

SEQ ID NO: 186199 - DNA, 15 bp, Homo sapiens
ttagatgtgcccatc

SEQ ID NO: 186200 - DNA, 15 bp, Homo sapiens
cttagatgtgcccat

SEQ ID NO: 186201 - DNA, 15 bp, Homo sapiens
acttagatgtgccca

SEQ ID NO: 186202 - DNA, 15 bp, Homo sapiens
cacttagatgtgccc

SEQ ID NO: 186203 - DNA, 15 bp, Homo sapiens
tcacttagatgtgcc

SEQ ID NO: 186204 - DNA, 15 bp, Homo sapiens
atcacttagatgtgc

SEQ ID NO: 186205 - DNA, 15 bp, Homo sapiens
tatcacttagatgtg

SEQ ID NO: 186206 - DNA, 15 bp, Homo sapiens
ttatcacttagatgt

SEQ ID NO: 186207 - DNA, 15 bp, Homo sapiens
gttatcacttagatg

SEQ ID NO: 186208 - DNA, 15 bp, Homo sapiens
ggttatcacttagat

SEQ ID NO: 186209 - DNA, 15 bp, Homo sapiens
tggttatcacttaga

SEQ ID NO: 186210 - DNA, 15 bp, Homo sapiens
gtggttatcacttag

SEQ ID NO: 186211 - DNA, 15 bp, Homo sapiens
ggtggttatcactta

SEQ ID NO: 186212 - DNA, 15 bp, Homo sapiens
gggtggttatcactt

SEQ ID NO: 186213 - DNA, 15 bp, Homo sapiens
tgggtggttatcact

SEQ ID NO: 186214 - DNA, 15 bp, Homo sapiens
gtgggtggttatcac

SEQ ID NO: 186215 - DNA, 15 bp, Homo sapiens
agtgggtggttatca

SEQ ID NO: 186216 - DNA, 15 bp, Homo sapiens
tagtgggtggttatc

SEQ ID NO: 186217 - DNA, 15 bp, Homo sapiens
ctagtgggtggttat

SEQ ID NO: 186218 - DNA, 15 bp, Homo sapiens
cctagtgggtggtta

SEQ ID NO: 186219 - DNA, 15 bp, Homo sapiens
gcctagtgggtggtt

SEQ ID NO: 186220 - DNA, 15 bp, Homo sapiens
tgcctagtgggtggt

SEQ ID NO: 186221 - DNA, 15 bp, Homo sapiens
ttgcctagtgggtgg

SEQ ID NO: 186222 - DNA, 15 bp, Homo sapiens
tttgcctagtgggtg

SEQ ID NO: 186223 - DNA, 15 bp, Homo sapiens
ttttgcctagtgggt

SEQ ID NO: 186224 - DNA, 15 bp, Homo sapiens
cttttgcctagtggg

SEQ ID NO: 186225 - DNA, 15 bp, Homo sapiens
ccttttgcctagtgg

SEQ ID NO: 186226 - DNA, 15 bp, Homo sapiens
tccttttgcctagtg

SEQ ID NO: 186227 - DNA, 15 bp, Homo sapiens
atccttttgcctagt

SEQ ID NO: 186228 - DNA, 15 bp, Homo sapiens
gatccttttgcctag

SEQ ID NO: 186229 - DNA, 15 bp, Homo sapiens
ggatccttttgccta

SEQ ID NO: 186230 - DNA, 15 bp, Homo sapiens
aggatccttttgcct

SEQ ID NO: 186231 - DNA, 15 bp, Homo sapiens
caggatccttttgcc

SEQ ID NO: 186232 - DNA, 15 bp, Homo sapiens
ccaggatccttttgc

SEQ ID NO: 186233 - DNA, 15 bp, Homo sapiens
accaggatccttttg

SEQ ID NO: 186234 - DNA, 15 bp, Homo sapiens
caccaggatcctttt

SEQ ID NO: 186235 - DNA, 15 bp, Homo sapiens
acaccaggatccttt

SEQ ID NO: 186236 - DNA, 15 bp, Homo sapiens
aacaccaggatcctt

SEQ ID NO: 186237 - DNA, 15 bp, Homo sapiens
caacaccaggatcct

SEQ ID NO: 186238 - DNA, 15 bp, Homo sapiens
ccaacaccaggatcc

SEQ ID NO: 186239 - DNA, 15 bp, Homo sapiens
cccaacaccaggatc

SEQ ID NO: 186240 - DNA, 15 bp, Homo sapiens
tcccaacaccaggat

SEQ ID NO: 186241 - DNA, 15 bp, Homo sapiens
ctcccaacaccagga

SEQ ID NO: 186242 - DNA, 15 bp, Homo sapiens
tctcccaacaccagg

SEQ ID NO: 186243 - DNA, 15 bp, Homo sapiens
atctcccaacaccag

SEQ ID NO: 186244 - DNA, 15 bp, Homo sapiens
catctcccaacacca

SEQ ID NO: 186245 - DNA, 15 bp, Homo sapiens
ccatctcccaacacc

SEQ ID NO: 186246 - DNA, 15 bp, Homo sapiens
cccatctcccaacac

SEQ ID NO: 186247 - DNA, 15 bp, Homo sapiens
ccccatctcccaaca

SEQ ID NO: 186248 - DNA, 15 bp, Homo sapiens
accccatctcccaac

SEQ ID NO: 186249 - DNA, 15 bp, Homo sapiens
caccccatctcccaa

SEQ ID NO: 186250 - DNA, 15 bp, Homo sapiens
tcaccccatctccca

SEQ ID NO: 186251 - DNA, 15 bp, Homo sapiens
ctcaccccatctccc

SEQ ID NO: 186252 - DNA, 15 bp, Homo sapiens
tctcaccccatctcc

SEQ ID NO: 186253 - DNA, 15 bp, Homo sapiens
ttctcaccccatctc

SEQ ID NO: 186254 - DNA, 15 bp, Homo sapiens
tttctcaccccatct

SEQ ID NO: 186255 - DNA, 15 bp, Homo sapiens
gtttctcaccccatc

SEQ ID NO: 186256 - DNA, 15 bp, Homo sapiens
agtttctcaccccat

SEQ ID NO: 186257 - DNA, 15 bp, Homo sapiens
cagtttctcacccca

SEQ ID NO: 186258 - DNA, 15 bp, Homo sapiens
ccagtttctcacccc

SEQ ID NO: 186259 - DNA, 15 bp, Homo sapiens
cccagtttctcaccc

SEQ ID NO: 186260 - DNA, 15 bp, Homo sapiens
ccccagtttctcacc

SEQ ID NO: 186261 - DNA, 15 bp, Homo sapiens
accccagtttctcac

SEQ ID NO: 186262 - DNA, 15 bp, Homo sapiens
caccccagtttctca

SEQ ID NO: 186263 - DNA, 15 bp, Homo sapiens
ccaccccagtttctc

SEQ ID NO: 186264 - DNA, 15 bp, Homo sapiens
cccaccccagtttct

SEQ ID NO: 186265 - DNA, 15 bp, Homo sapiens
acccaccccagtttc

SEQ ID NO: 186266 - DNA, 15 bp, Homo sapiens
cacccaccccagttt

SEQ ID NO: 186267 - DNA, 15 bp, Homo sapiens
acacccaccccagtt

SEQ ID NO: 186268 - DNA, 15 bp, Homo sapiens
gacacccaccccagt

SEQ ID NO: 186269 - DNA, 15 bp, Homo sapiens
tgacacccaccccag

SEQ ID NO: 186270 - DNA, 15 bp, Homo sapiens
atgacacccacccca

SEQ ID NO: 186271 - DNA, 15 bp, Homo sapiens
aatgacacccacccc

SEQ ID NO: 186272 - DNA, 15 bp, Homo sapiens
gaatgacacccaccc

SEQ ID NO: 186273 - DNA, 15 bp, Homo sapiens
tgaatgacacccacc

SEQ ID NO: 186274 - DNA, 15 bp, Homo sapiens
atgaatgacacccac

SEQ ID NO: 186275 - DNA, 15 bp, Homo sapiens
aatgaatgacaccca

SEQ ID NO: 186276 - DNA, 15 bp, Homo sapiens
gaatgaatgacaccc

SEQ ID NO: 186277 - DNA, 15 bp, Homo sapiens
tgaatgaatgacacc

SEQ ID NO: 186278 - DNA, 15 bp, Homo sapiens
ttgaatgaatgacac

SEQ ID NO: 186279 - DNA, 15 bp, Homo sapiens
gttgaatgaatgaca

SEQ ID NO: 186280 - DNA, 15 bp, Homo sapiens
ggttgaatgaatgac

SEQ ID NO: 186281 - DNA, 15 bp, Homo sapiens
cggttgaatgaatga

SEQ ID NO: 186282 - DNA, 15 bp, Homo sapiens
tcggttgaatgaatg

SEQ ID NO: 186283 - DNA, 15 bp, Homo sapiens
ctcggttgaatgaat

SEQ ID NO: 186284 - DNA, 15 bp, Homo sapiens
actcggttgaatgaa

SEQ ID NO: 186285 - DNA, 15 bp, Homo sapiens
gactcggttgaatga

SEQ ID NO: 186286 - DNA, 15 bp, Homo sapiens
tgactcggttgaatg

SEQ ID NO: 186287 - DNA, 15 bp, Homo sapiens
atgactcggttgaat

SEQ ID NO: 186288 - DNA, 15 bp, Homo sapiens
gatgactcggttgaa

SEQ ID NO: 186289 - DNA, 15 bp, Homo sapiens
tgatgactcggttga

SEQ ID NO: 186290 - DNA, 15 bp, Homo sapiens
gtgatgactcggttg

SEQ ID NO: 186291 - DNA, 15 bp, Homo sapiens
agtgatgactcggtt

SEQ ID NO: 186292 - DNA, 15 bp, Homo sapiens
gagtgatgactcggt

SEQ ID NO: 186293 - DNA, 15 bp, Homo sapiens
agagtgatgactcgg

SEQ ID NO: 186294 - DNA, 15 bp, Homo sapiens
gagagtgatgactcg

SEQ ID NO: 186295 - DNA, 15 bp, Homo sapiens
tgagagtgatgactc

SEQ ID NO: 186296 - DNA, 15 bp, Homo sapiens
ttgagagtgatgact

SEQ ID NO: 186297 - DNA, 15 bp, Homo sapiens
cttgagagtgatgac

SEQ ID NO: 186298 - DNA, 15 bp, Homo sapiens
ccttgagagtgatga

SEQ ID NO: 186299 - DNA, 15 bp, Homo sapiens
cccttgagagtgatg

SEQ ID NO: 186300 - DNA, 15 bp, Homo sapiens
tcccttgagagtgat

SEQ ID NO: 186301 - DNA, 15 bp, Homo sapiens
gtcccttgagagtga

SEQ ID NO: 186302 - DNA, 15 bp, Homo sapiens
ggtcccttgagagtg

SEQ ID NO: 186303 - DNA, 15 bp, Homo sapiens
tggtcccttgagagt

SEQ ID NO: 186304 - DNA, 15 bp, Homo sapiens
ctggtcccttgagag

SEQ ID NO: 186305 - DNA, 15 bp, Homo sapiens
tctggtcccttgaga

SEQ ID NO: 186306 - DNA, 15 bp, Homo sapiens
atctggtcccttgag

SEQ ID NO: 186307 - DNA, 15 bp, Homo sapiens
catctggtcccttga

SEQ ID NO: 186308 - DNA, 15 bp, Homo sapiens
ccatctggtcccttg

SEQ ID NO: 186309 - DNA, 15 bp, Homo sapiens
tccatctggtccctt

SEQ ID NO: 186310 - DNA, 15 bp, Homo sapiens
ctccatctggtccct

SEQ ID NO: 186311 - DNA, 15 bp, Homo sapiens
tctccatctggtccc

SEQ ID NO: 186312 - DNA, 15 bp, Homo sapiens
ttctccatctggtcc

SEQ ID NO: 186313 - DNA, 15 bp, Homo sapiens
tttctccatctggtc

SEQ ID NO: 186314 - DNA, 15 bp, Homo sapiens
ctttctccatctggt

SEQ ID NO: 186315 - DNA, 15 bp, Homo sapiens
cctttctccatctgg

SEQ ID NO: 186316 - DNA, 15 bp, Homo sapiens
ccctttctccatctg

SEQ ID NO: 186317 - DNA, 15 bp, Homo sapiens
tccctttctccatct

SEQ ID NO: 186318 - DNA, 15 bp, Homo sapiens
ttccctttctccatc

SEQ ID NO: 186319 - DNA, 15 bp, Homo sapiens
attccctttctccat

SEQ ID NO: 186320 - DNA, 15 bp, Homo sapiens
tattccctttctcca

SEQ ID NO: 186321 - DNA, 15 bp, Homo sapiens
atattccctttctcc

SEQ ID NO: 186322 - DNA, 15 bp, Homo sapiens
tatattccctttctc

SEQ ID NO: 186323 - DNA, 15 bp, Homo sapiens
ttatattccctttct

SEQ ID NO: 186324 - DNA, 15 bp, Homo sapiens
attatattccctttc

SEQ ID NO: 186325 - DNA, 15 bp, Homo sapiens
tattatattcccttt

SEQ ID NO: 186326 - DNA, 15 bp, Homo sapiens
ttattatattccctt

SEQ ID NO: 186327 - DNA, 15 bp, Homo sapiens
cttattatattccct

SEQ ID NO: 186328 - DNA, 15 bp, Homo sapiens
tcttattatattccc

SEQ ID NO: 186329 - DNA, 15 bp, Homo sapiens
ttcttattatattcc

SEQ ID NO: 186330 - DNA, 15 bp, Homo sapiens
tttcttattatattc

SEQ ID NO: 186331 - DNA, 15 bp, Homo sapiens
ttttcttattatatt

SEQ ID NO: 186332 - DNA, 15 bp, Homo sapiens
tttttcttattatat

SEQ ID NO: 186333 - DNA, 15 bp, Homo sapiens
atttttcttattata

SEQ ID NO: 186334 - DNA, 15 bp, Homo sapiens
catttttcttattat

SEQ ID NO: 186335 - DNA, 15 bp, Homo sapiens
tcatttttcttatta

SEQ ID NO: 186336 - DNA, 15 bp, Homo sapiens
atcatttttcttatt

SEQ ID NO: 186337 - DNA, 15 bp, Homo sapiens
catcatttttcttat

SEQ ID NO: 186338 - DNA, 15 bp, Homo sapiens
tcatcatttttctta

SEQ ID NO: 186339 - DNA, 15 bp, Homo sapiens
atcatcatttttctt

SEQ ID NO: 186340 - DNA, 15 bp, Homo sapiens
catcatcatttttct

SEQ ID NO: 186341 - DNA, 15 bp, Homo sapiens
gcatcatcatttttc

SEQ ID NO: 186342 - DNA, 15 bp, Homo sapiens
agcatcatcattttt

SEQ ID NO: 186343 - DNA, 15 bp, Homo sapiens
aagcatcatcatttt

SEQ ID NO: 186344 - DNA, 15 bp, Homo sapiens
taagcatcatcattt

SEQ ID NO: 186345 - DNA, 15 bp, Homo sapiens
ttaagcatcatcatt

SEQ ID NO: 186346 - DNA, 15 bp, Homo sapiens
tttaagcatcatcat

SEQ ID NO: 186347 - DNA, 15 bp, Homo sapiens
ttttaagcatcatca

SEQ ID NO: 186348 - DNA, 15 bp, Homo sapiens
attttaagcatcatc

SEQ ID NO: 186349 - DNA, 15 bp, Homo sapiens
tattttaagcatcat

SEQ ID NO: 186350 - DNA, 15 bp, Homo sapiens
ttattttaagcatca

SEQ ID NO: 186351 - DNA, 15 bp, Homo sapiens
tttattttaagcatc

SEQ ID NO: 186352 - DNA, 15 bp, Homo sapiens
atttattttaagcat

SEQ ID NO: 186353 - DNA, 15 bp, Homo sapiens
tatttattttaagca

SEQ ID NO: 186354 - DNA, 15 bp, Homo sapiens
atatttattttaagc

SEQ ID NO: 186355 - DNA, 15 bp, Homo sapiens
aatatttattttaag

SEQ ID NO: 186356 - DNA, 15 bp, Homo sapiens
caatatttattttaa

SEQ ID NO: 186357 - DNA, 15 bp, Homo sapiens
tcaatatttatttta

SEQ ID NO: 186358 - DNA, 15 bp, Homo sapiens
atcaatatttatttt

SEQ ID NO: 186359 - DNA, 15 bp, Homo sapiens
tatcaatatttattt

SEQ ID NO: 186360 - DNA, 15 bp, Homo sapiens
ttatcaatatttatt

SEQ ID NO: 186361 - DNA, 15 bp, Homo sapiens
attatcaatatttat

SEQ ID NO: 186362 - DNA, 15 bp, Homo sapiens
cattatcaatattta

SEQ ID NO: 186363 - DNA, 15 bp, Homo sapiens
gcattatcaatattt

SEQ ID NO: 186364 - DNA, 15 bp, Homo sapiens
ggcattatcaatatt

SEQ ID NO: 186365 - DNA, 15 bp, Homo sapiens
gggcattatcaatat

SEQ ID NO: 186366 - DNA, 15 bp, Homo sapiens
tgggcattatcaata

SEQ ID NO: 186367 - DNA, 15 bp, Homo sapiens
gtgggcattatcaat

SEQ ID NO: 186368 - DNA, 15 bp, Homo sapiens
tgtgggcattatcaa

SEQ ID NO: 186369 - DNA, 15 bp, Homo sapiens
atgtgggcattatca

SEQ ID NO: 186370 - DNA, 15 bp, Homo sapiens
aatgtgggcattatc

SEQ ID NO: 186371 - DNA, 15 bp, Homo sapiens
aaatgtgggcattat

SEQ ID NO: 186372 - DNA, 15 bp, Homo sapiens
aaaatgtgggcatta

SEQ ID NO: 186373 - DNA, 15 bp, Homo sapiens
gaaaatgtgggcatt

SEQ ID NO: 186374 - DNA, 15 bp, Homo sapiens
tgaaaatgtgggcat

SEQ ID NO: 186375 - DNA, 15 bp, Homo sapiens
ctgaaaatgtgggca

SEQ ID NO: 186376 - DNA, 15 bp, Homo sapiens
cctgaaaatgtgggc

SEQ ID NO: 186377 - DNA, 15 bp, Homo sapiens
ccctgaaaatgtggg

SEQ ID NO: 186378 - DNA, 15 bp, Homo sapiens
tccctgaaaatgtgg

SEQ ID NO: 186379 - DNA, 15 bp, Homo sapiens
ttccctgaaaatgtg

SEQ ID NO: 186380 - DNA, 15 bp, Homo sapiens
gttccctgaaaatgt

SEQ ID NO: 186381 - DNA, 15 bp, Homo sapiens
agttccctgaaaatg

SEQ ID NO: 186382 - DNA, 15 bp, Homo sapiens
aagttccctgaaaat

SEQ ID NO: 186383 - DNA, 15 bp, Homo sapiens
gaagttccctgaaaa

SEQ ID NO: 186384 - DNA, 15 bp, Homo sapiens
agaagttccctgaaa

SEQ ID NO: 186385 - DNA, 15 bp, Homo sapiens
tagaagttccctgaa

SEQ ID NO: 186386 - DNA, 15 bp, Homo sapiens
atagaagttccctga

SEQ ID NO: 186387 - DNA, 15 bp, Homo sapiens
catagaagttccctg

SEQ ID NO: 186388 - DNA, 15 bp, Homo sapiens
acatagaagttccct

SEQ ID NO: 186389 - DNA, 15 bp, Homo sapiens
cacatagaagttccc

SEQ ID NO: 186390 - DNA, 15 bp, Homo sapiens
gcacatagaagttcc

SEQ ID NO: 186391 - DNA, 15 bp, Homo sapiens
ggcacatagaagttc

SEQ ID NO: 186392 - DNA, 15 bp, Homo sapiens
aggcacatagaagtt

SEQ ID NO: 186393 - DNA, 15 bp, Homo sapiens
aaggcacatagaagt

SEQ ID NO: 186394 - DNA, 15 bp, Homo sapiens
taaggcacatagaag

SEQ ID NO: 186395 - DNA, 15 bp, Homo sapiens
ctaaggcacatagaa

SEQ ID NO: 186396 - DNA, 15 bp, Homo sapiens
tctaaggcacataga

SEQ ID NO: 186397 - DNA, 15 bp, Homo sapiens
atctaaggcacatag

SEQ ID NO: 186398 - DNA, 15 bp, Homo sapiens
tatctaaggcacata

SEQ ID NO: 186399 - DNA, 15 bp, Homo sapiens
atatctaaggcacat

SEQ ID NO: 186400 - DNA, 15 bp, Homo sapiens
aatatctaaggcaca

SEQ ID NO: 186401 - DNA, 15 bp, Homo sapiens
aaatatctaaggcac

SEQ ID NO: 186402 - DNA, 15 bp, Homo sapiens
taaatatctaaggca

SEQ ID NO: 186403 - DNA, 15 bp, Homo sapiens
ataaatatctaaggc

SEQ ID NO: 186404 - DNA, 15 bp, Homo sapiens
aataaatatctaagg

SEQ ID NO: 186405 - DNA, 15 bp, Homo sapiens
aaataaatatctaag

SEQ ID NO: 186406 - DNA, 15 bp, Homo sapiens
taaataaatatctaa

SEQ ID NO: 186407 - DNA, 15 bp, Homo sapiens
ataaataaatatcta

SEQ ID NO: 186408 - DNA, 15 bp, Homo sapiens
gataaataaatatct

SEQ ID NO: 186409 - DNA, 15 bp, Homo sapiens
ggataaataaatatc

SEQ ID NO: 186410 - DNA, 15 bp, Homo sapiens
tggataaataaatat

SEQ ID NO: 186411 - DNA, 15 bp, Homo sapiens
ttggataaataaata

SEQ ID NO: 186412 - DNA, 15 bp, Homo sapiens
cttggataaataaat

SEQ ID NO: 186413 - DNA, 15 bp, Homo sapiens
tcttggataaataaa

SEQ ID NO: 186414 - DNA, 15 bp, Homo sapiens
ctcttggataaataa

SEQ ID NO: 186415 - DNA, 15 bp, Homo sapiens
gctcttggataaata

SEQ ID NO: 186416 - DNA, 15 bp, Homo sapiens
ggctcttggataaat

SEQ ID NO: 186417 - DNA, 15 bp, Homo sapiens
aggctcttggataaa

SEQ ID NO: 186418 - DNA, 15 bp, Homo sapiens
gaggctcttggataa

SEQ ID NO: 186419 - DNA, 15 bp, Homo sapiens
tgaggctcttggata

SEQ ID NO: 186420 - DNA, 15 bp, Homo sapiens
gtgaggctcttggat

SEQ ID NO: 186421 - DNA, 15 bp, Homo sapiens
agtgaggctcttgga

SEQ ID NO: 186422 - DNA, 15 bp, Homo sapiens
aagtgaggctcttgg

SEQ ID NO: 186423 - DNA, 15 bp, Homo sapiens
gaagtgaggctcttg

SEQ ID NO: 186424 - DNA, 15 bp, Homo sapiens
agaagtgaggctctt

SEQ ID NO: 186425 - DNA, 15 bp, Homo sapiens
aagaagtgaggctct

SEQ ID NO: 186426 - DNA, 15 bp, Homo sapiens
aaagaagtgaggctc

SEQ ID NO: 186427 - DNA, 15 bp, Homo sapiens
aaaagaagtgaggct

SEQ ID NO: 186428 - DNA, 15 bp, Homo sapiens
aaaaagaagtgaggc

SEQ ID NO: 186429 - DNA, 15 bp, Homo sapiens
taaaaagaagtgagg

SEQ ID NO: 186430 - DNA, 15 bp, Homo sapiens
gtaaaaagaagtgag

SEQ ID NO: 186431 - DNA, 15 bp, Homo sapiens
agtaaaaagaagtga

SEQ ID NO: 186432 - DNA, 15 bp, Homo sapiens
aagtaaaaagaagtg

SEQ ID NO: 186433 - DNA, 15 bp, Homo sapiens
caagtaaaaagaagt

SEQ ID NO: 186434 - DNA, 15 bp, Homo sapiens
acaagtaaaaagaag

SEQ ID NO: 186435 - DNA, 15 bp, Homo sapiens
gacaagtaaaaagaa

SEQ ID NO: 186436 - DNA, 15 bp, Homo sapiens
ggacaagtaaaaaga

SEQ ID NO: 186437 - DNA, 15 bp, Homo sapiens
cggacaagtaaaaag

SEQ ID NO: 186438 - DNA, 15 bp, Homo sapiens
tcggacaagtaaaaa

SEQ ID NO: 186439 - DNA, 15 bp, Homo sapiens
atcggacaagtaaaa

SEQ ID NO: 186440 - DNA, 15 bp, Homo sapiens
gatcggacaagtaaa

SEQ ID NO: 186441 - DNA, 15 bp, Homo sapiens
ggatcggacaagtaa

SEQ ID NO: 186442 - DNA, 15 bp, Homo sapiens
aggatcggacaagta

SEQ ID NO: 186443 - DNA, 15 bp, Homo sapiens
aaggatcggacaagt

SEQ ID NO: 186444 - DNA, 15 bp, Homo sapiens
taaggatcggacaag

SEQ ID NO: 186445 - DNA, 15 bp, Homo sapiens
gtaaggatcggacaa

SEQ ID NO: 186446 - DNA, 15 bp, Homo sapiens
tgtaaggatcggaca

SEQ ID NO: 186447 - DNA, 15 bp, Homo sapiens
ctgtaaggatcggac

SEQ ID NO: 186448 - DNA, 15 bp, Homo sapiens
gctgtaaggatcgga

SEQ ID NO: 186449 - DNA, 15 bp, Homo sapiens
tgctgtaaggatcgg

SEQ ID NO: 186450 - DNA, 15 bp, Homo sapiens
ctgctgtaaggatcg

SEQ ID NO: 186451 - DNA, 15 bp, Homo sapiens
tctgctgtaaggatc

SEQ ID NO: 186452 - DNA, 15 bp, Homo sapiens
atctgctgtaaggat

SEQ ID NO: 186453 - DNA, 15 bp, Homo sapiens
gatctgctgtaagga

SEQ ID NO: 186454 - DNA, 15 bp, Homo sapiens
agatctgctgtaagg

SEQ ID NO: 186455 - DNA, 15 bp, Homo sapiens
gagatctgctgtaag

SEQ ID NO: 186456 - DNA, 15 bp, Homo sapiens
ggagatctgctgtaa

SEQ ID NO: 186457 - DNA, 15 bp, Homo sapiens
tggagatctgctgta

SEQ ID NO: 186458 - DNA, 15 bp, Homo sapiens
ttggagatctgctgt

SEQ ID NO: 186459 - DNA, 15 bp, Homo sapiens
tttggagatctgctg

SEQ ID NO: 186460 - DNA, 15 bp, Homo sapiens
ctttggagatctgct

SEQ ID NO: 186461 - DNA, 15 bp, Homo sapiens
tctttggagatctgc

SEQ ID NO: 186462 - DNA, 15 bp, Homo sapiens
ctctttggagatctg

SEQ ID NO: 186463 - DNA, 15 bp, Homo sapiens
cctctttggagatct

SEQ ID NO: 186464 - DNA, 15 bp, Homo sapiens
acctctttggagatc

SEQ ID NO: 186465 - DNA, 15 bp, Homo sapiens
aacctctttggagat

SEQ ID NO: 186466 - DNA, 15 bp, Homo sapiens
gaacctctttggaga

SEQ ID NO: 186467 - DNA, 15 bp, Homo sapiens
agaacctctttggag

SEQ ID NO: 186468 - DNA, 15 bp, Homo sapiens
gagaacctctttgga

SEQ ID NO: 186469 - DNA, 15 bp, Homo sapiens
agagaacctctttgg

SEQ ID NO: 186470 - DNA, 15 bp, Homo sapiens
cagagaacctctttg

SEQ ID NO: 186471 - DNA, 15 bp, Homo sapiens
acagagaacctcttt

SEQ ID NO: 186472 - DNA, 15 bp, Homo sapiens
aacagagaacctctt

SEQ ID NO: 186473 - DNA, 15 bp, Homo sapiens
taacagagaacctct

SEQ ID NO: 186474 - DNA, 15 bp, Homo sapiens
ataacagagaacctc

SEQ ID NO: 186475 - DNA, 15 bp, Homo sapiens
gataacagagaacct

SEQ ID NO: 186476 - DNA, 15 bp, Homo sapiens
ggataacagagaacc

SEQ ID NO: 186477 - DNA, 15 bp, Homo sapiens
tggataacagagaac

SEQ ID NO: 186478 - DNA, 15 bp, Homo sapiens
atggataacagagaa

SEQ ID NO: 186479 - DNA, 15 bp, Homo sapiens
catggataacagaga

SEQ ID NO: 186480 - DNA, 15 bp, Homo sapiens
ccatggataacagag

SEQ ID NO: 186481 - DNA, 15 bp, Homo sapiens
accatggataacaga

SEQ ID NO: 186482 - DNA, 15 bp, Homo sapiens
aaccatggataacag

SEQ ID NO: 186483 - DNA, 15 bp, Homo sapiens
aaaccatggataaca

SEQ ID NO: 186484 - DNA, 15 bp, Homo sapiens
taaaccatggataac

SEQ ID NO: 186485 - DNA, 15 bp, Homo sapiens
gtaaaccatggataa

SEQ ID NO: 186486 - DNA, 15 bp, Homo sapiens
tgtaaaccatggata

SEQ ID NO: 186487 - DNA, 15 bp, Homo sapiens
ctgtaaaccatggat

SEQ ID NO: 186488 - DNA, 15 bp, Homo sapiens
tctgtaaaccatgga

SEQ ID NO: 186489 - DNA, 15 bp, Homo sapiens
atctgtaaaccatgg

SEQ ID NO: 186490 - DNA, 15 bp, Homo sapiens
catctgtaaaccatg

SEQ ID NO: 186491 - DNA, 15 bp, Homo sapiens
tcatctgtaaaccat

SEQ ID NO: 186492 - DNA, 15 bp, Homo sapiens
ctcatctgtaaacca

SEQ ID NO: 186493 - DNA, 15 bp, Homo sapiens
cctcatctgtaaacc

SEQ ID NO: 186494 - DNA, 15 bp, Homo sapiens
tcctcatctgtaaac

SEQ ID NO: 186495 - DNA, 15 bp, Homo sapiens
ttcctcatctgtaaa

SEQ ID NO: 186496 - DNA, 15 bp, Homo sapiens
tttcctcatctgtaa

SEQ ID NO: 186497 - DNA, 15 bp, Homo sapiens
gtttcctcatctgta

SEQ ID NO: 186498 - DNA, 15 bp, Homo sapiens
agtttcctcatctgt

SEQ ID NO: 186499 - DNA, 15 bp, Homo sapiens
cagtttcctcatctg

SEQ ID NO: 186500 - DNA, 15 bp, Homo sapiens
tcagtttcctcatct

SEQ ID NO: 186501 - DNA, 15 bp, Homo sapiens
ctcagtttcctcatc

SEQ ID NO: 186502 - DNA, 15 bp, Homo sapiens
cctcagtttcctcat

SEQ ID NO: 186503 - DNA, 15 bp, Homo sapiens
gcctcagtttcctca

SEQ ID NO: 186504 - DNA, 15 bp, Homo sapiens
tgcctcagtttcctc

SEQ ID NO: 186505 - DNA, 15 bp, Homo sapiens
gtgcctcagtttcct

SEQ ID NO: 186506 - DNA, 15 bp, Homo sapiens
tgtgcctcagtttcc

SEQ ID NO: 186507 - DNA, 15 bp, Homo sapiens
ctgtgcctcagtttc

SEQ ID NO: 186508 - DNA, 15 bp, Homo sapiens
tgcctctctgtgcct

SEQ ID NO: 186509 - DNA, 15 bp, Homo sapiens
ctgcctctctgtgcc

SEQ ID NO: 186510 - DNA, 15 bp, Homo sapiens
actgcctctctgtgc

SEQ ID NO: 186511 - DNA, 15 bp, Homo sapiens
aactgcctctctgtg

SEQ ID NO: 186512 - DNA, 15 bp, Homo sapiens
taactgcctctctgt

SEQ ID NO: 186513 - DNA, 15 bp, Homo sapiens
ttaactgcctctctg

SEQ ID NO: 186514 - DNA, 15 bp, Homo sapiens
tttaactgcctctct

SEQ ID NO: 186515 - DNA, 15 bp, Homo sapiens
atttaactgcctctc

SEQ ID NO: 186516 - DNA, 15 bp, Homo sapiens
gatttaactgcctct

SEQ ID NO: 186517 - DNA, 15 bp, Homo sapiens
tgatttaactgcctc

SEQ ID NO: 186518 - DNA, 15 bp, Homo sapiens
gtgatttaactgcct

SEQ ID NO: 186519 - DNA, 15 bp, Homo sapiens
agtgatttaactgcc

SEQ ID NO: 186520 - DNA, 15 bp, Homo sapiens
aagtgatttaactgc

SEQ ID NO: 186521 - DNA, 15 bp, Homo sapiens
caagtgatttaactg

SEQ ID NO: 186522 - DNA, 15 bp, Homo sapiens
gcaagtgatttaact

SEQ ID NO: 186523 - DNA, 15 bp, Homo sapiens
ggcaagtgatttaac

SEQ ID NO: 186524 - DNA, 15 bp, Homo sapiens
gggcaagtgatttaa

SEQ ID NO: 186525 - DNA, 15 bp, Homo sapiens
ggggcaagtgattta

SEQ ID NO: 186526 - DNA, 15 bp, Homo sapiens
tggggcaagtgattt

SEQ ID NO: 186527 - DNA, 15 bp, Homo sapiens
ttggggcaagtgatt

SEQ ID NO: 186528 - DNA, 15 bp, Homo sapiens
tttggggcaagtgat

SEQ ID NO: 186529 - DNA, 15 bp, Homo sapiens
gtttggggcaagtga

SEQ ID NO: 186530 - DNA, 15 bp, Homo sapiens
ggtttggggcaagtg

SEQ ID NO: 186531 - DNA, 15 bp, Homo sapiens
tggtttggggcaagt

SEQ ID NO: 186532 - DNA, 15 bp, Homo sapiens
gtggtttggggcaag

SEQ ID NO: 186533 - DNA, 15 bp, Homo sapiens
agtggtttggggcaa

SEQ ID NO: 186534 - DNA, 15 bp, Homo sapiens
cagtggtttggggca

SEQ ID NO: 186535 - DNA, 15 bp, Homo sapiens
tcagtggtttggggc

SEQ ID NO: 186536 - DNA, 15 bp, Homo sapiens
ttcagtggtttgggg

SEQ ID NO: 186537 - DNA, 15 bp, Homo sapiens
cttcagtggtttggg

SEQ ID NO: 186538 - DNA, 15 bp, Homo sapiens
gcttcagtggtttgg

SEQ ID NO: 186539 - DNA, 15 bp, Homo sapiens
ggcttcagtggtttg

SEQ ID NO: 186540 - DNA, 15 bp, Homo sapiens
tggcttcagtggttt

SEQ ID NO: 186541 - DNA, 15 bp, Homo sapiens
atggcttcagtggtt

SEQ ID NO: 186542 - DNA, 15 bp, Homo sapiens
tatggcttcagtggt

SEQ ID NO: 186543 - DNA, 15 bp, Homo sapiens
ttatggcttcagtgg

SEQ ID NO: 186544 - DNA, 15 bp, Homo sapiens
attatggcttcagtg

SEQ ID NO: 186545 - DNA, 15 bp, Homo sapiens
aattatggcttcagt

SEQ ID NO: 186546 - DNA, 15 bp, Homo sapiens
caattatggcttcag

SEQ ID NO: 186547 - DNA, 15 bp, Homo sapiens
ccaattatggcttca

SEQ ID NO: 186548 - DNA, 15 bp, Homo sapiens
gccaattatggcttc

SEQ ID NO: 186549 - DNA, 15 bp, Homo sapiens
cgccaattatggctt

SEQ ID NO: 186550 - DNA, 15 bp, Homo sapiens
ccgccaattatggct

SEQ ID NO: 186551 - DNA, 15 bp, Homo sapiens
tccgccaattatggc

SEQ ID NO: 186552 - DNA, 15 bp, Homo sapiens
atccgccaattatgg

SEQ ID NO: 186553 - DNA, 15 bp, Homo sapiens
gatccgccaattatg

SEQ ID NO: 186554 - DNA, 15 bp, Homo sapiens
agatccgccaattat

SEQ ID NO: 186555 - DNA, 15 bp, Homo sapiens
cagatccgccaatta

SEQ ID NO: 186556 - DNA, 15 bp, Homo sapiens
ccagatccgccaatt

SEQ ID NO: 186557 - DNA, 15 bp, Homo sapiens
cccagatccgccaat

SEQ ID NO: 186558 - DNA, 15 bp, Homo sapiens
tcccagatccgccaa

SEQ ID NO: 186559 - DNA, 15 bp, Homo sapiens
atcccagatccgcca

SEQ ID NO: 186560 - DNA, 15 bp, Homo sapiens
aatcccagatccgcc

SEQ ID NO: 186561 - DNA, 15 bp, Homo sapiens
caatcccagatccgc

SEQ ID NO: 186562 - DNA, 15 bp, Homo sapiens
tcaatcccagatccg

SEQ ID NO: 186563 - DNA, 15 bp, Homo sapiens
ttcaatcccagatcc

SEQ ID NO: 186564 - DNA, 15 bp, Homo sapiens
cttcaatcccagatc

SEQ ID NO: 186565 - DNA, 15 bp, Homo sapiens
gcttcaatcccagat

SEQ ID NO: 186566 - DNA, 15 bp, Homo sapiens
ggcttcaatcccaga

SEQ ID NO: 186567 - DNA, 15 bp, Homo sapiens
gggcttcaatcccag

SEQ ID NO: 186568 - DNA, 15 bp, Homo sapiens
tgggcttcaatccca

SEQ ID NO: 186569 - DNA, 15 bp, Homo sapiens
ttgggcttcaatccc

SEQ ID NO: 186570 - DNA, 15 bp, Homo sapiens
cttgggcttcaatcc

SEQ ID NO: 186571 - DNA, 15 bp, Homo sapiens
gcttgggcttcaatc

SEQ ID NO: 186572 - DNA, 15 bp, Homo sapiens
agcttgggcttcaat

SEQ ID NO: 186573 - DNA, 15 bp, Homo sapiens
aagcttgggcttcaa

SEQ ID NO: 186574 - DNA, 15 bp, Homo sapiens
gaagcttgggcttca

SEQ ID NO: 186575 - DNA, 15 bp, Homo sapiens
ggaagcttgggcttc

SEQ ID NO: 186576 - DNA, 15 bp, Homo sapiens
cggaagcttgggctt

SEQ ID NO: 186577 - DNA, 15 bp, Homo sapiens
ccggaagcttgggct

SEQ ID NO: 186578 - DNA, 15 bp, Homo sapiens
cccggaagcttgggc

SEQ ID NO: 186579 - DNA, 15 bp, Homo sapiens
gcccggaagcttggg

SEQ ID NO: 186580 - DNA, 15 bp, Homo sapiens
tgcccggaagcttgg

SEQ ID NO: 186581 - DNA, 15 bp, Homo sapiens
gtgcccggaagcttg

SEQ ID NO: 186582 - DNA, 15 bp, Homo sapiens
agtgcccggaagctt

SEQ ID NO: 186583 - DNA, 15 bp, Homo sapiens
tagtgcccggaagct

SEQ ID NO: 186584 - DNA, 15 bp, Homo sapiens
ctagtgcccggaagc

SEQ ID NO: 186585 - DNA, 15 bp, Homo sapiens
actagtgcccggaag

SEQ ID NO: 186586 - DNA, 15 bp, Homo sapiens
cactagtgcccggaa

SEQ ID NO: 186587 - DNA, 15 bp, Homo sapiens
acactagtgcccgga

SEQ ID NO: 186588 - DNA, 15 bp, Homo sapiens
cacactagtgcccgg

SEQ ID NO: 186589 - DNA, 15 bp, Homo sapiens
acacactagtgcccg

SEQ ID NO: 186590 - DNA, 15 bp, Homo sapiens
cacacactagtgccc

SEQ ID NO: 186591 - DNA, 15 bp, Homo sapiens
ccacacactagtgcc

SEQ ID NO: 186592 - DNA, 15 bp, Homo sapiens
cccacacactagtgc

SEQ ID NO: 186593 - DNA, 15 bp, Homo sapiens
gcccacacactagtg

SEQ ID NO: 186594 - DNA, 15 bp, Homo sapiens
ggcccacacactagt

SEQ ID NO: 186595 - DNA, 15 bp, Homo sapiens
aggcccacacactag

SEQ ID NO: 186596 - DNA, 15 bp, Homo sapiens
gaggcccacacacta

SEQ ID NO: 186597 - DNA, 15 bp, Homo sapiens
agaggcccacacact

SEQ ID NO: 186598 - DNA, 15 bp, Homo sapiens
tagaggcccacacac

SEQ ID NO: 186599 - DNA, 15 bp, Homo sapiens
ttagaggcccacaca

SEQ ID NO: 186600 - DNA, 15 bp, Homo sapiens
attagaggcccacac

SEQ ID NO: 186601 - DNA, 15 bp, Homo sapiens
gattagaggcccaca

SEQ ID NO: 186602 - DNA, 15 bp, Homo sapiens
agattagaggcccac

SEQ ID NO: 186603 - DNA, 15 bp, Homo sapiens
aagattagaggccca

SEQ ID NO: 186604 - DNA, 15 bp, Homo sapiens
caagattagaggccc

SEQ ID NO: 186605 - DNA, 15 bp, Homo sapiens
gcaagattagaggcc

SEQ ID NO: 186606 - DNA, 15 bp, Homo sapiens
tgcaagattagaggc

SEQ ID NO: 186607 - DNA, 15 bp, Homo sapiens
gtgcaagattagagg

SEQ ID NO: 186608 - DNA, 15 bp, Homo sapiens
agtgcaagattagag

SEQ ID NO: 186609 - DNA, 15 bp, Homo sapiens
aagtgcaagattaga

SEQ ID NO: 186610 - DNA, 15 bp, Homo sapiens
aaagtgcaagattag

SEQ ID NO: 186611 - DNA, 15 bp, Homo sapiens
caaagtgcaagatta

SEQ ID NO: 186612 - DNA, 15 bp, Homo sapiens
gcaaagtgcaagatt

SEQ ID NO: 186613 - DNA, 15 bp, Homo sapiens
agcaaagtgcaagat

SEQ ID NO: 186614 - DNA, 15 bp, Homo sapiens
cagcaaagtgcaaga

SEQ ID NO: 186615 - DNA, 15 bp, Homo sapiens
gcagcaaagtgcaag

SEQ ID NO: 186616 - DNA, 15 bp, Homo sapiens
ggcagcaaagtgcaa

SEQ ID NO: 186617 - DNA, 15 bp, Homo sapiens
tggcagcaaagtgca

SEQ ID NO: 186618 - DNA, 15 bp, Homo sapiens
gtggcagcaaagtgc

SEQ ID NO: 186619 - DNA, 15 bp, Homo sapiens
ggtggcagcaaagtg

SEQ ID NO: 186620 - DNA, 15 bp, Homo sapiens
tggtggcagcaaagt

SEQ ID NO: 186621 - DNA, 15 bp, Homo sapiens
ctggtggcagcaaag

SEQ ID NO: 186622 - DNA, 15 bp, Homo sapiens
tctggtggcagcaaa

SEQ ID NO: 186623 - DNA, 15 bp, Homo sapiens
ttctggtggcagcaa

SEQ ID NO: 186624 - DNA, 15 bp, Homo sapiens
tttctggtggcagca

SEQ ID NO: 186625 - DNA, 15 bp, Homo sapiens
atttctggtggcagc

SEQ ID NO: 186626 - DNA, 15 bp, Homo sapiens
aatttctggtggcag

SEQ ID NO: 186627 - DNA, 15 bp, Homo sapiens
taatttctggtggca

SEQ ID NO: 186628 - DNA, 15 bp, Homo sapiens
ctaatttctggtggc

SEQ ID NO: 186629 - DNA, 15 bp, Homo sapiens
cctaatttctggtgg

SEQ ID NO: 186630 - DNA, 15 bp, Homo sapiens
gcctaatttctggtg

SEQ ID NO: 186631 - DNA, 15 bp, Homo sapiens
tgcctaatttctggt

SEQ ID NO: 186632 - DNA, 15 bp, Homo sapiens
gtgcctaatttctgg

SEQ ID NO: 186633 - DNA, 15 bp, Homo sapiens
ggtgcctaatttctg

SEQ ID NO: 186634 - DNA, 15 bp, Homo sapiens
tggtgcctaatttct

SEQ ID NO: 186635 - DNA, 15 bp, Homo sapiens
ctggtgcctaatttc

SEQ ID NO: 186636 - DNA, 15 bp, Homo sapiens
cctggtgcctaattt

SEQ ID NO: 186637 - DNA, 15 bp, Homo sapiens
tcctggtgcctaatt

SEQ ID NO: 186638 - DNA, 15 bp, Homo sapiens
atcctggtgcctaat

SEQ ID NO: 186639 - DNA, 15 bp, Homo sapiens
catcctggtgcctaa

SEQ ID NO: 186640 - DNA, 15 bp, Homo sapiens
ccatcctggtgccta

SEQ ID NO: 186641 - DNA, 15 bp, Homo sapiens
accatcctggtgcct

SEQ ID NO: 186642 - DNA, 15 bp, Homo sapiens
taccatcctggtgcc

SEQ ID NO: 186643 - DNA, 15 bp, Homo sapiens
ttaccatcctggtgc

SEQ ID NO: 186644 - DNA, 15 bp, Homo sapiens
gttaccatcctggtg

SEQ ID NO: 186645 - DNA, 15 bp, Homo sapiens
agttaccatcctggt

SEQ ID NO: 186646 - DNA, 15 bp, Homo sapiens
cagttaccatcctgg

SEQ ID NO: 186647 - DNA, 15 bp, Homo sapiens
tcagttaccatcctg

SEQ ID NO: 186648 - DNA, 15 bp, Homo sapiens
ctcagttaccatcct

SEQ ID NO: 186649 - DNA, 15 bp, Homo sapiens
cctcagttaccatcc

SEQ ID NO: 186650 - DNA, 15 bp, Homo sapiens
tcctcagttaccatc

SEQ ID NO: 186651 - DNA, 15 bp, Homo sapiens
ttcctcagttaccat

SEQ ID NO: 186652 - DNA, 15 bp, Homo sapiens
tttcctcagttacca

SEQ ID NO: 186653 - DNA, 15 bp, Homo sapiens
gtttcctcagttacc

SEQ ID NO: 186654 - DNA, 15 bp, Homo sapiens
ggtttcctcagttac

SEQ ID NO: 186655 - DNA, 15 bp, Homo sapiens
tggtttcctcagtta

SEQ ID NO: 186656 - DNA, 15 bp, Homo sapiens
ctggtttcctcagtt

SEQ ID NO: 186657 - DNA, 15 bp, Homo sapiens
tctggtttcctcagt

SEQ ID NO: 186658 - DNA, 15 bp, Homo sapiens
gtctggtttcctcag

SEQ ID NO: 186659 - DNA, 15 bp, Homo sapiens
tgtctggtttcctca

SEQ ID NO: 186660 - DNA, 15 bp, Homo sapiens
ttgtctggtttcctc

SEQ ID NO: 186661 - DNA, 15 bp, Homo sapiens
cttgtctggtttcct

SEQ ID NO: 186662 - DNA, 15 bp, Homo sapiens
tcttgtctggtttcc

SEQ ID NO: 186663 - DNA, 15 bp, Homo sapiens
ctcttgtctggtttc

SEQ ID NO: 186664 - DNA, 15 bp, Homo sapiens
actcttgtctggttt

SEQ ID NO: 186665 - DNA, 15 bp, Homo sapiens
cactcttgtctggtt

SEQ ID NO: 186666 - DNA, 15 bp, Homo sapiens
tcactcttgtctggt

SEQ ID NO: 186667 - DNA, 15 bp, Homo sapiens
ctcactcttgtctgg

SEQ ID NO: 186668 - DNA, 15 bp, Homo sapiens
tctcactcttgtctg

SEQ ID NO: 186669 - DNA, 15 bp, Homo sapiens
ttctcactcttgtct

SEQ ID NO: 186670 - DNA, 15 bp, Homo sapiens
attctcactcttgtc

SEQ ID NO: 186671 - DNA, 15 bp, Homo sapiens
cattctcactcttgt

SEQ ID NO: 186672 - DNA, 15 bp, Homo sapiens
acattctcactcttg

SEQ ID NO: 186673 - DNA, 15 bp, Homo sapiens
tacattctcactctt

SEQ ID NO: 186674 - DNA, 15 bp, Homo sapiens
ctacattctcactct

SEQ ID NO: 186675 - DNA, 15 bp, Homo sapiens
cctacattctcactc

SEQ ID NO: 186676 - DNA, 15 bp, Homo sapiens
ccctacattctcact

SEQ ID NO: 186677 - DNA, 15 bp, Homo sapiens
cccctacattctcac

SEQ ID NO: 186678 - DNA, 15 bp, Homo sapiens
acccctacattctca

SEQ ID NO: 186679 - DNA, 15 bp, Homo sapiens
cacccctacattctc

SEQ ID NO: 186680 - DNA, 15 bp, Homo sapiens
ccacccctacattct

SEQ ID NO: 186681 - DNA, 15 bp, Homo sapiens
tccacccctacattc

SEQ ID NO: 186682 - DNA, 15 bp, Homo sapiens
ctccacccctacatt

SEQ ID NO: 186683 - DNA, 15 bp, Homo sapiens
cctccacccctacat

SEQ ID NO: 186684 - DNA, 15 bp, Homo sapiens
tcctccacccctaca

SEQ ID NO: 186685 - DNA, 15 bp, Homo sapiens
atcctccacccctac

SEQ ID NO: 186686 - DNA, 15 bp, Homo sapiens
catcctccaccccta

SEQ ID NO: 186687 - DNA, 15 bp, Homo sapiens
ccatcctccacccct

SEQ ID NO: 186688 - DNA, 15 bp, Homo sapiens
tccatcctccacccc

SEQ ID NO: 186689 - DNA, 15 bp, Homo sapiens
ttccatcctccaccc

SEQ ID NO: 186690 - DNA, 15 bp, Homo sapiens
cttccatcctccacc

SEQ ID NO: 186691 - DNA, 15 bp, Homo sapiens
tcttccatcctccac

SEQ ID NO: 186692 - DNA, 15 bp, Homo sapiens
atcttccatcctcca

SEQ ID NO: 186693 - DNA, 15 bp, Homo sapiens
catcttccatcctcc

SEQ ID NO: 186694 - DNA, 15 bp, Homo sapiens
ccatcttccatcctc

SEQ ID NO: 186695 - DNA, 15 bp, Homo sapiens
cccatcttccatcct

SEQ ID NO: 186696 - DNA, 15 bp, Homo sapiens
acccatcttccatcc

SEQ ID NO: 186697 - DNA, 15 bp, Homo sapiens
tacccatcttccatc

SEQ ID NO: 186698 - DNA, 15 bp, Homo sapiens
atacccatcttccat

SEQ ID NO: 186699 - DNA, 15 bp, Homo sapiens
gatacccatcttcca

SEQ ID NO: 186700 - DNA, 15 bp, Homo sapiens
tgatacccatcttcc

SEQ ID NO: 186701 - DNA, 15 bp, Homo sapiens
ctgatacccatcttc

SEQ ID NO: 186702 - DNA, 15 bp, Homo sapiens
cctgatacccatctt

SEQ ID NO: 186703 - DNA, 15 bp, Homo sapiens
ccctgatacccatct

SEQ ID NO: 186704 - DNA, 15 bp, Homo sapiens
tccctgatacccatc

SEQ ID NO: 186705 - DNA, 15 bp, Homo sapiens
ctccctgatacccat

SEQ ID NO: 186706 - DNA, 15 bp, Homo sapiens
cctccctgataccca

SEQ ID NO: 186707 - DNA, 15 bp, Homo sapiens
acctccctgataccc

SEQ ID NO: 186708 - DNA, 15 bp, Homo sapiens
aacctccctgatacc

SEQ ID NO: 186709 - DNA, 15 bp, Homo sapiens
aaacctccctgatac

SEQ ID NO: 186710 - DNA, 15 bp, Homo sapiens
aaaacctccctgata

SEQ ID NO: 186711 - DNA, 15 bp, Homo sapiens
gaaaacctccctgat

SEQ ID NO: 186712 - DNA, 15 bp, Homo sapiens
agaaaacctccctga

SEQ ID NO: 186713 - DNA, 15 bp, Homo sapiens
cagaaaacctccctg

SEQ ID NO: 186714 - DNA, 15 bp, Homo sapiens
tcagaaaacctccct

SEQ ID NO: 186715 - DNA, 15 bp, Homo sapiens
ctcagaaaacctccc

SEQ ID NO: 186716 - DNA, 15 bp, Homo sapiens
actcagaaaacctcc

SEQ ID NO: 186717 - DNA, 15 bp, Homo sapiens
aactcagaaaacctc

SEQ ID NO: 186718 - DNA, 15 bp, Homo sapiens
caactcagaaaacct

SEQ ID NO: 186719 - DNA, 15 bp, Homo sapiens
tcaactcagaaaacc

SEQ ID NO: 186720 - DNA, 15 bp, Homo sapiens
ttcaactcagaaaac

SEQ ID NO: 186721 - DNA, 15 bp, Homo sapiens
cttcaactcagaaaa

SEQ ID NO: 186722 - DNA, 15 bp, Homo sapiens
tcttcaactcagaaa

SEQ ID NO: 186723 - DNA, 15 bp, Homo sapiens
gtcttcaactcagaa

SEQ ID NO: 186724 - DNA, 15 bp, Homo sapiens
tgtcttcaactcaga

SEQ ID NO: 186725 - DNA, 15 bp, Homo sapiens
ctgtcttcaactcag

SEQ ID NO: 186726 - DNA, 15 bp, Homo sapiens
actgtcttcaactca

SEQ ID NO: 186727 - DNA, 15 bp, Homo sapiens
gactgtcttcaactc

SEQ ID NO: 186728 - DNA, 15 bp, Homo sapiens
agactgtcttcaact

SEQ ID NO: 186729 - DNA, 15 bp, Homo sapiens
cagactgtcttcaac

SEQ ID NO: 186730 - DNA, 15 bp, Homo sapiens
acagactgtcttcaa

SEQ ID NO: 186731 - DNA, 15 bp, Homo sapiens
gacagactgtcttca

SEQ ID NO: 186732 - DNA, 15 bp, Homo sapiens
ggacagactgtcttc

SEQ ID NO: 186733 - DNA, 15 bp, Homo sapiens
aggacagactgtctt

SEQ ID NO: 186734 - DNA, 15 bp, Homo sapiens
caggacagactgtct

SEQ ID NO: 186735 - DNA, 15 bp, Homo sapiens
acaggacagactgtc

SEQ ID NO: 186736 - DNA, 15 bp, Homo sapiens
cacaggacagactgt

SEQ ID NO: 186737 - DNA, 15 bp, Homo sapiens
ccacaggacagactg

SEQ ID NO: 186738 - DNA, 15 bp, Homo sapiens
gccacaggacagact

SEQ ID NO: 186739 - DNA, 15 bp, Homo sapiens
agccacaggacagac

SEQ ID NO: 186740 - DNA, 15 bp, Homo sapiens
aagccacaggacaga

SEQ ID NO: 186741 - DNA, 15 bp, Homo sapiens
gaagccacaggacag

SEQ ID NO: 186742 - DNA, 15 bp, Homo sapiens
agaagccacaggaca

SEQ ID NO: 186743 - DNA, 15 bp, Homo sapiens
aagaagccacaggac

SEQ ID NO: 186744 - DNA, 15 bp, Homo sapiens
taagaagccacagga

SEQ ID NO: 186745 - DNA, 15 bp, Homo sapiens
ttaagaagccacagg

SEQ ID NO: 186746 - DNA, 15 bp, Homo sapiens
tttaagaagccacag

SEQ ID NO: 186747 - DNA, 15 bp, Homo sapiens
ctttaagaagccaca

SEQ ID NO: 186748 - DNA, 15 bp, Homo sapiens
cctttaagaagccac

SEQ ID NO: 186749 - DNA, 15 bp, Homo sapiens
acctttaagaagcca

SEQ ID NO: 186750 - DNA, 15 bp, Homo sapiens
aacctttaagaagcc

SEQ ID NO: 186751 - DNA, 15 bp, Homo sapiens
caacctttaagaagc

SEQ ID NO: 186752 - DNA, 15 bp, Homo sapiens
gcaacctttaagaag

SEQ ID NO: 186753 - DNA, 15 bp, Homo sapiens
agcaacctttaagaa

SEQ ID NO: 186754 - DNA, 15 bp, Homo sapiens
aagcaacctttaaga

SEQ ID NO: 186755 - DNA, 15 bp, Homo sapiens
aaagcaacctttaag

SEQ ID NO: 186756 - DNA, 15 bp, Homo sapiens
gaaagcaacctttaa

SEQ ID NO: 186757 - DNA, 15 bp, Homo sapiens
tgaaagcaaccttta

SEQ ID NO: 186758 - DNA, 15 bp, Homo sapiens
ctgaaagcaaccttt

SEQ ID NO: 186759 - DNA, 15 bp, Homo sapiens
tctgaaagcaacctt

SEQ ID NO: 186760 - DNA, 15 bp, Homo sapiens
atctgaaagcaacct

SEQ ID NO: 186761 - DNA, 15 bp, Homo sapiens
catctgaaagcaacc

SEQ ID NO: 186762 - DNA, 15 bp, Homo sapiens
tcatctgaaagcaac

SEQ ID NO: 186763 - DNA, 15 bp, Homo sapiens
ctcatctgaaagcaa

SEQ ID NO: 186764 - DNA, 15 bp, Homo sapiens
cctcatctgaaagca

SEQ ID NO: 186765 - DNA, 15 bp, Homo sapiens
ccctcatctgaaagc

SEQ ID NO: 186766 - DNA, 15 bp, Homo sapiens
accctcatctgaaag

SEQ ID NO: 186767 - DNA, 15 bp, Homo sapiens
caccctcatctgaaa

SEQ ID NO: 186768 - DNA, 15 bp, Homo sapiens
tcaccctcatctgaa

SEQ ID NO: 186769 - DNA, 15 bp, Homo sapiens
gtcaccctcatctga

SEQ ID NO: 186770 - DNA, 15 bp, Homo sapiens
tgtcaccctcatctg

SEQ ID NO: 186771 - DNA, 15 bp, Homo sapiens
gtgtcaccctcatct

SEQ ID NO: 186772 - DNA, 15 bp, Homo sapiens
tgtgtcaccctcatc

SEQ ID NO: 186773 - DNA, 15 bp, Homo sapiens
ttgtgtcaccctcat

SEQ ID NO: 186774 - DNA, 15 bp, Homo sapiens
tttgtgtcaccctca

SEQ ID NO: 186775 - DNA, 15 bp, Homo sapiens
ctttgtgtcaccctc

SEQ ID NO: 186776 - DNA, 15 bp, Homo sapiens
cctttgtgtcaccct

SEQ ID NO: 186777 - DNA, 15 bp, Homo sapiens
acctttgtgtcaccc

SEQ ID NO: 186778 - DNA, 15 bp, Homo sapiens
cacctttgtgtcacc

SEQ ID NO: 186779 - DNA, 15 bp, Homo sapiens
acacctttgtgtcac

SEQ ID NO: 186780 - DNA, 15 bp, Homo sapiens
gacacctttgtgtca

SEQ ID NO: 186781 - DNA, 15 bp, Homo sapiens
ggacacctttgtgtc

SEQ ID NO: 186782 - DNA, 15 bp, Homo sapiens
gggacacctttgtgt

SEQ ID NO: 186783 - DNA, 15 bp, Homo sapiens
ggggacacctttgtg

SEQ ID NO: 186784 - DNA, 15 bp, Homo sapiens
gggggacacctttgt

SEQ ID NO: 186785 - DNA, 15 bp, Homo sapiens
agggggacacctttg

SEQ ID NO: 186786 - DNA, 15 bp, Homo sapiens
cagggggacaccttt

SEQ ID NO: 186787 - DNA, 15 bp, Homo sapiens
acagggggacacctt

SEQ ID NO: 186788 - DNA, 15 bp, Homo sapiens
gacagggggacacct

SEQ ID NO: 186789 - DNA, 15 bp, Homo sapiens
ggacagggggacacc

SEQ ID NO: 186790 - DNA, 15 bp, Homo sapiens
aggacagggggacac

SEQ ID NO: 186791 - DNA, 15 bp, Homo sapiens
caggacagggggaca

SEQ ID NO: 186792 - DNA, 15 bp, Homo sapiens
ccaggacagggggac

SEQ ID NO: 186793 - DNA, 15 bp, Homo sapiens
tccaggacaggggga

SEQ ID NO: 186794 - DNA, 15 bp, Homo sapiens
gtccaggacaggggg

SEQ ID NO: 186795 - DNA, 15 bp, Homo sapiens
tgtccaggacagggg

SEQ ID NO: 186796 - DNA, 15 bp, Homo sapiens
atgtccaggacaggg

SEQ ID NO: 186797 - DNA, 15 bp, Homo sapiens
catgtccaggacagg

SEQ ID NO: 186798 - DNA, 15 bp, Homo sapiens
tcatgtccaggacag

SEQ ID NO: 186799 - DNA, 15 bp, Homo sapiens
atcatgtccaggaca

SEQ ID NO: 186800 - DNA, 15 bp, Homo sapiens
aatcatgtccaggac

SEQ ID NO: 186801 - DNA, 15 bp, Homo sapiens
aaatcatgtccagga

SEQ ID NO: 186802 - DNA, 15 bp, Homo sapiens
taaatcatgtccagg

SEQ ID NO: 186803 - DNA, 15 bp, Homo sapiens
ctaaatcatgtccag

SEQ ID NO: 186804 - DNA, 15 bp, Homo sapiens
tctaaatcatgtcca

SEQ ID NO: 186805 - DNA, 15 bp, Homo sapiens
ttctaaatcatgtcc

SEQ ID NO: 186806 - DNA, 15 bp, Homo sapiens
gttctaaatcatgtc

SEQ ID NO: 186807 - DNA, 15 bp, Homo sapiens
ggttctaaatcatgt

SEQ ID NO: 186808 - DNA, 15 bp, Homo sapiens
gggttctaaatcatg

SEQ ID NO: 186809 - DNA, 15 bp, Homo sapiens
agggttctaaatcat

SEQ ID NO: 186810 - DNA, 15 bp, Homo sapiens
tagggttctaaatca

SEQ ID NO: 186811 - DNA, 15 bp, Homo sapiens
atagggttctaaatc

SEQ ID NO: 186812 - DNA, 15 bp, Homo sapiens
gatagggttctaaat

SEQ ID NO: 186813 - DNA, 15 bp, Homo sapiens
ggatagggttctaaa

SEQ ID NO: 186814 - DNA, 15 bp, Homo sapiens
tggatagggttctaa

SEQ ID NO: 186815 - DNA, 15 bp, Homo sapiens
gtggatagggttcta

SEQ ID NO: 186816 - DNA, 15 bp, Homo sapiens
tgtggatagggttct

SEQ ID NO: 186817 - DNA, 15 bp, Homo sapiens
ctgtggatagggttc

SEQ ID NO: 186818 - DNA, 15 bp, Homo sapiens
tctgtggatagggtt

SEQ ID NO: 186819 - DNA, 15 bp, Homo sapiens
ctctgtggatagggt

SEQ ID NO: 186820 - DNA, 15 bp, Homo sapiens
tctctgtggataggg

SEQ ID NO: 186821 - DNA, 15 bp, Homo sapiens
ttctctgtggatagg

SEQ ID NO: 186822 - DNA, 15 bp, Homo sapiens
gttctctgtggatag

SEQ ID NO: 186823 - DNA, 15 bp, Homo sapiens
tgttctctgtggata

SEQ ID NO: 186824 - DNA, 15 bp, Homo sapiens
atgttctctgtggat

SEQ ID NO: 186825 - DNA, 15 bp, Homo sapiens
catgttctctgtgga

SEQ ID NO: 186826 - DNA, 15 bp, Homo sapiens
gcatgttctctgtgg

SEQ ID NO: 186827 - DNA, 15 bp, Homo sapiens
ggcatgttctctgtg

SEQ ID NO: 186828 - DNA, 15 bp, Homo sapiens
tggcatgttctctgt

SEQ ID NO: 186829 - DNA, 15 bp, Homo sapiens
ttggcatgttctctg

SEQ ID NO: 186830 - DNA, 15 bp, Homo sapiens
tttggcatgttctct

SEQ ID NO: 186831 - DNA, 15 bp, Homo sapiens
atttggcatgttctc

SEQ ID NO: 186832 - DNA, 15 bp, Homo sapiens
aatttggcatgttct

SEQ ID NO: 186833 - DNA, 15 bp, Homo sapiens
aaatttggcatgttc

SEQ ID NO: 186834 - DNA, 15 bp, Homo sapiens
aaaatttggcatgtt

SEQ ID NO: 186835 - DNA, 15 bp, Homo sapiens
taaaatttggcatgt

SEQ ID NO: 186836 - DNA, 15 bp, Homo sapiens
ataaaatttggcatg

SEQ ID NO: 186837 - DNA, 15 bp, Homo sapiens
cataaaatttggcat

SEQ ID NO: 186838 - DNA, 15 bp, Homo sapiens
gcataaaatttggca

SEQ ID NO: 186839 - DNA, 15 bp, Homo sapiens
tgcataaaatttggc

SEQ ID NO: 186840 - DNA, 15 bp, Homo sapiens
gtgcataaaatttgg

SEQ ID NO: 186841 - DNA, 15 bp, Homo sapiens
ggtgcataaaatttg

SEQ ID NO: 186842 - DNA, 15 bp, Homo sapiens
aggtgcataaaattt

SEQ ID NO: 186843 - DNA, 15 bp, Homo sapiens
gaggtgcataaaatt

SEQ ID NO: 186844 - DNA, 15 bp, Homo sapiens
tgaggtgcataaaat

SEQ ID NO: 186845 - DNA, 15 bp, Homo sapiens
ctgaggtgcataaaa

SEQ ID NO: 186846 - DNA, 15 bp, Homo sapiens
cctgaggtgcataaa

SEQ ID NO: 186847 - DNA, 15 bp, Homo sapiens
ccctgaggtgcataa

SEQ ID NO: 186848 - DNA, 15 bp, Homo sapiens
gccctgaggtgcata

SEQ ID NO: 186849 - DNA, 15 bp, Homo sapiens
ggccctgaggtgcat

SEQ ID NO: 186850 - DNA, 15 bp, Homo sapiens
aggccctgaggtgca

SEQ ID NO: 186851 - DNA, 15 bp, Homo sapiens
aaggccctgaggtgc

SEQ ID NO: 186852 - DNA, 15 bp, Homo sapiens
aaaggccctgaggtg

SEQ ID NO: 186853 - DNA, 15 bp, Homo sapiens
caaaggccctgaggt

SEQ ID NO: 186854 - DNA, 15 bp, Homo sapiens
gcaaaggccctgagg

SEQ ID NO: 186855 - DNA, 15 bp, Homo sapiens
tgcaaaggccctgag

SEQ ID NO: 186856 - DNA, 15 bp, Homo sapiens
gtgcaaaggccctga

SEQ ID NO: 186857 - DNA, 15 bp, Homo sapiens
tgtgcaaaggccctg

SEQ ID NO: 186858 - DNA, 15 bp, Homo sapiens
atgtgcaaaggccct

SEQ ID NO: 186859 - DNA, 15 bp, Homo sapiens
catgtgcaaaggccc

SEQ ID NO: 186860 - DNA, 15 bp, Homo sapiens
gcatgtgcaaaggcc

SEQ ID NO: 186861 - DNA, 15 bp, Homo sapiens
agcatgtgcaaaggc

SEQ ID NO: 186862 - DNA, 15 bp, Homo sapiens
cagcatgtgcaaagg

SEQ ID NO: 186863 - DNA, 15 bp, Homo sapiens
acagcatgtgcaaag

SEQ ID NO: 186864 - DNA, 15 bp, Homo sapiens
aacagcatgtgcaaa

SEQ ID NO: 186865 - DNA, 15 bp, Homo sapiens
aaacagcatgtgcaa

SEQ ID NO: 186866 - DNA, 15 bp, Homo sapiens
aaaacagcatgtgca

SEQ ID NO: 186867 - DNA, 15 bp, Homo sapiens
gaaaacagcatgtgc

SEQ ID NO: 186868 - DNA, 15 bp, Homo sapiens
agaaaacagcatgtg

SEQ ID NO: 186869 - DNA, 15 bp, Homo sapiens
aagaaaacagcatgt

SEQ ID NO: 186870 - DNA, 15 bp, Homo sapiens
aaagaaaacagcatg

SEQ ID NO: 186871 - DNA, 15 bp, Homo sapiens
caaagaaaacagcat

SEQ ID NO: 186872 - DNA, 15 bp, Homo sapiens
ccaaagaaaacagca

SEQ ID NO: 186873 - DNA, 15 bp, Homo sapiens
gccaaagaaaacagc

SEQ ID NO: 186874 - DNA, 15 bp, Homo sapiens
agccaaagaaaacag

SEQ ID NO: 186875 - DNA, 15 bp, Homo sapiens
cagccaaagaaaaca

SEQ ID NO: 186876 - DNA, 15 bp, Homo sapiens
ccagccaaagaaaac

SEQ ID NO: 186877 - DNA, 15 bp, Homo sapiens
tccagccaaagaaaa

SEQ ID NO: 186878 - DNA, 15 bp, Homo sapiens
ttccagccaaagaaa

SEQ ID NO: 186879 - DNA, 15 bp, Homo sapiens
attccagccaaagaa

SEQ ID NO: 186880 - DNA, 15 bp, Homo sapiens
gattccagccaaaga

SEQ ID NO: 186881 - DNA, 15 bp, Homo sapiens
tgattccagccaaag

SEQ ID NO: 186882 - DNA, 15 bp, Homo sapiens
gtgattccagccaaa

SEQ ID NO: 186883 - DNA, 15 bp, Homo sapiens
agtgattccagccaa

SEQ ID NO: 186884 - DNA, 15 bp, Homo sapiens
cagtgattccagcca

SEQ ID NO: 186885 - DNA, 15 bp, Homo sapiens
acagtgattccagcc

SEQ ID NO: 186886 - DNA, 15 bp, Homo sapiens
aacagtgattccagc

SEQ ID NO: 186887 - DNA, 15 bp, Homo sapiens
gaacagtgattccag

SEQ ID NO: 186888 - DNA, 15 bp, Homo sapiens
agaacagtgattcca

SEQ ID NO: 186889 - DNA, 15 bp, Homo sapiens
gagaacagtgattcc

SEQ ID NO: 186890 - DNA, 15 bp, Homo sapiens
ggagaacagtgattc

SEQ ID NO: 186891 - DNA, 15 bp, Homo sapiens
gggagaacagtgatt

SEQ ID NO: 186892 - DNA, 15 bp, Homo sapiens
agggagaacagtgat

SEQ ID NO: 186893 - DNA, 15 bp, Homo sapiens
cagggagaacagtga

SEQ ID NO: 186894 - DNA, 15 bp, Homo sapiens
gcagggagaacagtg

SEQ ID NO: 186895 - DNA, 15 bp, Homo sapiens
agcagggagaacagt

SEQ ID NO: 186896 - DNA, 15 bp, Homo sapiens
aagcagggagaacag

SEQ ID NO: 186897 - DNA, 15 bp, Homo sapiens
aaagcagggagaaca

SEQ ID NO: 186898 - DNA, 15 bp, Homo sapiens
caaagcagggagaac

SEQ ID NO: 186899 - DNA, 15 bp, Homo sapiens
acaaagcagggagaa

SEQ ID NO: 186900 - DNA, 15 bp, Homo sapiens
cacaaagcagggaga

SEQ ID NO: 186901 - DNA, 15 bp, Homo sapiens
acacaaagcagggag

SEQ ID NO: 186902 - DNA, 15 bp, Homo sapiens
cacacaaagcaggga

SEQ ID NO: 186903 - DNA, 15 bp, Homo sapiens
acacacaaagcaggg

SEQ ID NO: 186904 - DNA, 15 bp, Homo sapiens
aacacacaaagcagg

SEQ ID NO: 186905 - DNA, 15 bp, Homo sapiens
taacacacaaagcag

SEQ ID NO: 186906 - DNA, 15 bp, Homo sapiens
ataacacacaaagca

SEQ ID NO: 186907 - DNA, 15 bp, Homo sapiens
cataacacacaaagc

SEQ ID NO: 186908 - DNA, 15 bp, Homo sapiens
ccataacacacaaag

SEQ ID NO: 186909 - DNA, 15 bp, Homo sapiens
accataacacacaaa

SEQ ID NO: 186910 - DNA, 15 bp, Homo sapiens
aaccataacacacaa

SEQ ID NO: 186911 - DNA, 15 bp, Homo sapiens
gaaccataacacaca

SEQ ID NO: 186912 - DNA, 15 bp, Homo sapiens
agaaccataacacac

SEQ ID NO: 186913 - DNA, 15 bp, Homo sapiens
aagaaccataacaca

SEQ ID NO: 186914 - DNA, 15 bp, Homo sapiens
aaagaaccataacac

SEQ ID NO: 186915 - DNA, 15 bp, Homo sapiens
gaaagaaccataaca

SEQ ID NO: 186916 - DNA, 15 bp, Homo sapiens
agaaagaaccataac

SEQ ID NO: 186917 - DNA, 15 bp, Homo sapiens
gagaaagaaccataa

SEQ ID NO: 186918 - DNA, 15 bp, Homo sapiens
tgagaaagaaccata

SEQ ID NO: 186919 - DNA, 15 bp, Homo sapiens
atgagaaagaaccat

SEQ ID NO: 186920 - DNA, 15 bp, Homo sapiens
gatgagaaagaacca

SEQ ID NO: 186921 - DNA, 15 bp, Homo sapiens
agatgagaaagaacc

SEQ ID NO: 186922 - DNA, 15 bp, Homo sapiens
cagatgagaaagaac

SEQ ID NO: 186923 - DNA, 15 bp, Homo sapiens
acagatgagaaagaa

SEQ ID NO: 186924 - DNA, 15 bp, Homo sapiens
gacagatgagaaaga

SEQ ID NO: 186925 - DNA, 15 bp, Homo sapiens
tgacagatgagaaag

SEQ ID NO: 186926 - DNA, 15 bp, Homo sapiens
gtgacagatgagaaa

SEQ ID NO: 186927 - DNA, 15 bp, Homo sapiens
tgtgacagatgagaa

SEQ ID NO: 186928 - DNA, 15 bp, Homo sapiens
gtgtgacagatgaga

SEQ ID NO: 186929 - DNA, 15 bp, Homo sapiens
agtgtgacagatgag

SEQ ID NO: 186930 - DNA, 15 bp, Homo sapiens
aagtgtgacagatga

SEQ ID NO: 186931 - DNA, 15 bp, Homo sapiens
taagtgtgacagatg

SEQ ID NO: 186932 - DNA, 15 bp, Homo sapiens
ctaagtgtgacagat

SEQ ID NO: 186933 - DNA, 15 bp, Homo sapiens
actaagtgtgacaga

SEQ ID NO: 186934 - DNA, 15 bp, Homo sapiens
aactaagtgtgacag

SEQ ID NO: 186935 - DNA, 15 bp, Homo sapiens
aaactaagtgtgaca

SEQ ID NO: 186936 - DNA, 15 bp, Homo sapiens
taaactaagtgtgac

SEQ ID NO: 186937 - DNA, 15 bp, Homo sapiens
ttaaactaagtgtga

SEQ ID NO: 186938 - DNA, 15 bp, Homo sapiens
tttaaactaagtgtg

SEQ ID NO: 186939 - DNA, 15 bp, Homo sapiens
ctttaaactaagtgt

SEQ ID NO: 186940 - DNA, 15 bp, Homo sapiens
gctttaaactaagtg

SEQ ID NO: 186941 - DNA, 15 bp, Homo sapiens
agctttaaactaagt

SEQ ID NO: 186942 - DNA, 15 bp, Homo sapiens
cagctttaaactaag

SEQ ID NO: 186943 - DNA, 15 bp, Homo sapiens
gcagctttaaactaa

SEQ ID NO: 186944 - DNA, 15 bp, Homo sapiens
ggcagctttaaacta

SEQ ID NO: 186945 - DNA, 15 bp, Homo sapiens
aggcagctttaaact

SEQ ID NO: 186946 - DNA, 15 bp, Homo sapiens
gaggcagctttaaac

SEQ ID NO: 186947 - DNA, 15 bp, Homo sapiens
ggaggcagctttaaa

SEQ ID NO: 186948 - DNA, 15 bp, Homo sapiens
aggaggcagctttaa

SEQ ID NO: 186949 - DNA, 15 bp, Homo sapiens
caggaggcagcttta

SEQ ID NO: 186950 - DNA, 15 bp, Homo sapiens
gcaggaggcagcttt

SEQ ID NO: 186951 - DNA, 15 bp, Homo sapiens
tgcaggaggcagctt

SEQ ID NO: 186952 - DNA, 15 bp, Homo sapiens
ctgcaggaggcagct

SEQ ID NO: 186953 - DNA, 15 bp, Homo sapiens
tctgcaggaggcagc

SEQ ID NO: 186954 - DNA, 15 bp, Homo sapiens
ctctgcaggaggcag

SEQ ID NO: 186955 - DNA, 15 bp, Homo sapiens
cctctgcaggaggca

SEQ ID NO: 186956 - DNA, 15 bp, Homo sapiens
gcctctgcaggaggc

SEQ ID NO: 186957 - DNA, 15 bp, Homo sapiens
agcctctgcaggagg

SEQ ID NO: 186958 - DNA, 15 bp, Homo sapiens
cagcctctgcaggag

SEQ ID NO: 186959 - DNA, 15 bp, Homo sapiens
tcagcctctgcagga

SEQ ID NO: 186960 - DNA, 15 bp, Homo sapiens
gtcagcctctgcagg

SEQ ID NO: 186961 - DNA, 15 bp, Homo sapiens
tgtcagcctctgcag

SEQ ID NO: 186962 - DNA, 15 bp, Homo sapiens
gtgtcagcctctgca

SEQ ID NO: 186963 - DNA, 15 bp, Homo sapiens
cgtgtcagcctctgc

SEQ ID NO: 186964 - DNA, 15 bp, Homo sapiens
acgtgtcagcctctg

SEQ ID NO: 186965 - DNA, 15 bp, Homo sapiens
gacgtgtcagcctct

SEQ ID NO: 186966 - DNA, 15 bp, Homo sapiens
cgacgtgtcagcctc

SEQ ID NO: 186967 - DNA, 15 bp, Homo sapiens
acgacgtgtcagcct

SEQ ID NO: 186968 - DNA, 15 bp, Homo sapiens
tacgacgtgtcagcc

SEQ ID NO: 186969 - DNA, 15 bp, Homo sapiens
ctacgacgtgtcagc

SEQ ID NO: 186970 - DNA, 15 bp, Homo sapiens
gctacgacgtgtcag

SEQ ID NO: 186971 - DNA, 15 bp, Homo sapiens
tgctacgacgtgtca

SEQ ID NO: 186972 - DNA, 15 bp, Homo sapiens
ctgctacgacgtgtc

SEQ ID NO: 186973 - DNA, 15 bp, Homo sapiens
actgctacgacgtgt

SEQ ID NO: 186974 - DNA, 15 bp, Homo sapiens
aactgctacgacgtg

SEQ ID NO: 186975 - DNA, 15 bp, Homo sapiens
caactgctacgacgt

SEQ ID NO: 186976 - DNA, 15 bp, Homo sapiens
gcaactgctacgacg

SEQ ID NO: 186977 - DNA, 15 bp, Homo sapiens
agcaactgctacgac

SEQ ID NO: 186978 - DNA, 15 bp, Homo sapiens
gagcaactgctacga

SEQ ID NO: 186979 - DNA, 15 bp, Homo sapiens
ggagcaactgctacg

SEQ ID NO: 186980 - DNA, 15 bp, Homo sapiens
tggagcaactgctac

SEQ ID NO: 186981 - DNA, 15 bp, Homo sapiens
atggagcaactgcta

SEQ ID NO: 186982 - DNA, 15 bp, Homo sapiens
catggagcaactgct

SEQ ID NO: 186983 - DNA, 15 bp, Homo sapiens
tcatggagcaactgc

SEQ ID NO: 186984 - DNA, 15 bp, Homo sapiens
ttcatggagcaactg

SEQ ID NO: 186985 - DNA, 15 bp, Homo sapiens
tttcatggagcaact

SEQ ID NO: 186986 - DNA, 15 bp, Homo sapiens
ctttcatggagcaac

SEQ ID NO: 186987 - DNA, 15 bp, Homo sapiens
actttcatggagcaa

SEQ ID NO: 186988 - DNA, 15 bp, Homo sapiens
cactttcatggagca

SEQ ID NO: 186989 - DNA, 15 bp, Homo sapiens
acactttcatggagc

SEQ ID NO: 186990 - DNA, 15 bp, Homo sapiens
aacactttcatggag

SEQ ID NO: 186991 - DNA, 15 bp, Homo sapiens
caacactttcatgga

SEQ ID NO: 186992 - DNA, 15 bp, Homo sapiens
tcaacactttcatgg

SEQ ID NO: 186993 - DNA, 15 bp, Homo sapiens
ctcaacactttcatg

SEQ ID NO: 186994 - DNA, 15 bp, Homo sapiens
actcaacactttcat

SEQ ID NO: 186995 - DNA, 15 bp, Homo sapiens
tactcaacactttca

SEQ ID NO: 186996 - DNA, 15 bp, Homo sapiens
ttactcaacactttc

SEQ ID NO: 186997 - DNA, 15 bp, Homo sapiens
tttactcaacacttt

SEQ ID NO: 186998 - DNA, 15 bp, Homo sapiens
atttactcaacactt

SEQ ID NO: 186999 - DNA, 15 bp, Homo sapiens
catttactcaacact

SEQ ID NO: 187000 - DNA, 15 bp, Homo sapiens
ccatttactcaacac

SEQ ID NO: 187001 - DNA, 15 bp, Homo sapiens
tccatttactcaaca

SEQ ID NO: 187002 - DNA, 15 bp, Homo sapiens
atccatttactcaac

SEQ ID NO: 187003 - DNA, 15 bp, Homo sapiens
catccatttactcaa

SEQ ID NO: 187004 - DNA, 15 bp, Homo sapiens
tcatccatttactca

SEQ ID NO: 187005 - DNA, 15 bp, Homo sapiens
ttcatccatttactc

SEQ ID NO: 187006 - DNA, 15 bp, Homo sapiens
cttcatccatttact

SEQ ID NO: 187007 - DNA, 15 bp, Homo sapiens
tcttcatccatttac

SEQ ID NO: 187008 - DNA, 15 bp, Homo sapiens
ttcttcatccattta

SEQ ID NO: 187009 - DNA, 15 bp, Homo sapiens
attcttcatccattt

SEQ ID NO: 187010 - DNA, 15 bp, Homo sapiens
tattcttcatccatt

SEQ ID NO: 187011 - DNA, 15 bp, Homo sapiens
ttattcttcatccat

SEQ ID NO: 187012 - DNA, 15 bp, Homo sapiens
tttattcttcatcca

SEQ ID NO: 187013 - DNA, 15 bp, Homo sapiens
ctttattcttcatcc

SEQ ID NO: 187014 - DNA, 15 bp, Homo sapiens
gctttattcttcatc

SEQ ID NO: 187015 - DNA, 15 bp, Homo sapiens
agctttattcttcat

SEQ ID NO: 187016 - DNA, 15 bp, Homo sapiens
gagctttattcttca

SEQ ID NO: 187017 - DNA, 15 bp, Homo sapiens
agagctttattcttc

SEQ ID NO: 187018 - DNA, 15 bp, Homo sapiens
aagagctttattctt

SEQ ID NO: 187019 - DNA, 15 bp, Homo sapiens
caagagctttattct

SEQ ID NO: 187020 - DNA, 15 bp, Homo sapiens
ccaagagctttattc

SEQ ID NO: 187021 - DNA, 15 bp, Homo sapiens
gccaagagctttatt

SEQ ID NO: 187022 - DNA, 15 bp, Homo sapiens
ggccaagagctttat

SEQ ID NO: 187023 - DNA, 15 bp, Homo sapiens
aggccaagagcttta

SEQ ID NO: 187024 - DNA, 15 bp, Homo sapiens
aaggccaagagcttt

SEQ ID NO: 187025 - DNA, 15 bp, Homo sapiens
aaaggccaagagctt

SEQ ID NO: 187026 - DNA, 15 bp, Homo sapiens
gaaaggccaagagct

SEQ ID NO: 187027 - DNA, 15 bp, Homo sapiens
tgaaaggccaagagc

SEQ ID NO: 187028 - DNA, 15 bp, Homo sapiens
ctgaaaggccaagag

SEQ ID NO: 187029 - DNA, 15 bp, Homo sapiens
cctgaaaggccaaga

SEQ ID NO: 187030 - DNA, 15 bp, Homo sapiens
ccctgaaaggccaag

SEQ ID NO: 187031 - DNA, 15 bp, Homo sapiens
tccctgaaaggccaa

SEQ ID NO: 187032 - DNA, 15 bp, Homo sapiens
ttccctgaaaggcca

SEQ ID NO: 187033 - DNA, 15 bp, Homo sapiens
attccctgaaaggcc

SEQ ID NO: 187034 - DNA, 15 bp, Homo sapiens
tattccctgaaaggc

SEQ ID NO: 187035 - DNA, 15 bp, Homo sapiens
ttattccctgaaagg

SEQ ID NO: 187036 - DNA, 15 bp, Homo sapiens
gttattccctgaaag

SEQ ID NO: 187037 - DNA, 15 bp, Homo sapiens
agttattccctgaaa

SEQ ID NO: 187038 - DNA, 15 bp, Homo sapiens
tagttattccctgaa

SEQ ID NO: 187039 - DNA, 15 bp, Homo sapiens
atagttattccctga

SEQ ID NO: 187040 - DNA, 15 bp, Homo sapiens
tatagttattccctg

SEQ ID NO: 187041 - DNA, 15 bp, Homo sapiens
ttatagttattccct

SEQ ID NO: 187042 - DNA, 15 bp, Homo sapiens
attatagttattccc

SEQ ID NO: 187043 - DNA, 15 bp, Homo sapiens
cattatagttattcc

SEQ ID NO: 187044 - DNA, 15 bp, Homo sapiens
tcattatagttattc

SEQ ID NO: 187045 - DNA, 15 bp, Homo sapiens
ctcattatagttatt

SEQ ID NO: 187046 - DNA, 15 bp, Homo sapiens
tctcattatagttat

SEQ ID NO: 187047 - DNA, 15 bp, Homo sapiens
ttctcattatagtta

SEQ ID NO: 187048 - DNA, 15 bp, Homo sapiens
tttctcattatagtt

SEQ ID NO: 187049 - DNA, 15 bp, Homo sapiens
atttctcattatagt

SEQ ID NO: 187050 - DNA, 15 bp, Homo sapiens
aatttctcattatag

SEQ ID NO: 187051 - DNA, 15 bp, Homo sapiens
aaatttctcattata

SEQ ID NO: 187052 - DNA, 15 bp, Homo sapiens
caaatttctcattat

SEQ ID NO: 187053 - DNA, 15 bp, Homo sapiens
ccaaatttctcatta

SEQ ID NO: 187054 - DNA, 15 bp, Homo sapiens
tccaaatttctcatt

SEQ ID NO: 187055 - DNA, 15 bp, Homo sapiens
ttccaaatttctcat

SEQ ID NO: 187056 - DNA, 15 bp, Homo sapiens
cttccaaatttctca

SEQ ID NO: 187057 - DNA, 15 bp, Homo sapiens
tcttccaaatttctc

SEQ ID NO: 187058 - DNA, 15 bp, Homo sapiens
atcttccaaatttct

SEQ ID NO: 187059 - DNA, 15 bp, Homo sapiens
gatcttccaaatttc

SEQ ID NO: 187060 - DNA, 15 bp, Homo sapiens
agatcttccaaattt

SEQ ID NO: 187061 - DNA, 15 bp, Homo sapiens
aagatcttccaaatt

SEQ ID NO: 187062 - DNA, 15 bp, Homo sapiens
aaagatcttccaaat

SEQ ID NO: 187063 - DNA, 15 bp, Homo sapiens
gaaagatcttccaaa

SEQ ID NO: 187064 - DNA, 15 bp, Homo sapiens
agaaagatcttccaa

SEQ ID NO: 187065 - DNA, 15 bp, Homo sapiens
cagaaagatcttcca

SEQ ID NO: 187066 - DNA, 15 bp, Homo sapiens
gcagaaagatcttcc

SEQ ID NO: 187067 - DNA, 15 bp, Homo sapiens
tgcagaaagatcttc

SEQ ID NO: 187068 - DNA, 15 bp, Homo sapiens
ctgcagaaagatctt

SEQ ID NO: 187069 - DNA, 15 bp, Homo sapiens
gctgcagaaagatct

SEQ ID NO: 187070 - DNA, 15 bp, Homo sapiens
agctgcagaaagatc

SEQ ID NO: 187071 - DNA, 15 bp, Homo sapiens
cagctgcagaaagat

SEQ ID NO: 187072 - DNA, 15 bp, Homo sapiens
tcagctgcagaaaga

SEQ ID NO: 187073 - DNA, 15 bp, Homo sapiens
ctcagctgcagaaag

SEQ ID NO: 187074 - DNA, 15 bp, Homo sapiens
gctcagctgcagaaa

SEQ ID NO: 187075 - DNA, 15 bp, Homo sapiens
ggctcagctgcagaa

SEQ ID NO: 187076 - DNA, 15 bp, Homo sapiens
aggctcagctgcaga

SEQ ID NO: 187077 - DNA, 15 bp, Homo sapiens
aaggctcagctgcag

SEQ ID NO: 187078 - DNA, 15 bp, Homo sapiens
aaaggctcagctgca

SEQ ID NO: 187079 - DNA, 15 bp, Homo sapiens
caaaggctcagctgc

SEQ ID NO: 187080 - DNA, 15 bp, Homo sapiens
ccaaaggctcagctg

SEQ ID NO: 187081 - DNA, 15 bp, Homo sapiens
tccaaaggctcagct

SEQ ID NO: 187082 - DNA, 15 bp, Homo sapiens
ttccaaaggctcagc

SEQ ID NO: 187083 - DNA, 15 bp, Homo sapiens
attccaaaggctcag

SEQ ID NO: 187084 - DNA, 15 bp, Homo sapiens
aattccaaaggctca

SEQ ID NO: 187085 - DNA, 15 bp, Homo sapiens
aaattccaaaggctc

SEQ ID NO: 187086 - DNA, 15 bp, Homo sapiens
aaaattccaaaggct

SEQ ID NO: 187087 - DNA, 15 bp, Homo sapiens
caaaattccaaaggc

SEQ ID NO: 187088 - DNA, 15 bp, Homo sapiens
tcaaaattccaaagg

SEQ ID NO: 187089 - DNA, 15 bp, Homo sapiens
atcaaaattccaaag

SEQ ID NO: 187090 - DNA, 15 bp, Homo sapiens
catcaaaattccaaa

SEQ ID NO: 187091 - DNA, 15 bp, Homo sapiens
acatcaaaattccaa

SEQ ID NO: 187092 - DNA, 15 bp, Homo sapiens
gacatcaaaattcca

SEQ ID NO: 187093 - DNA, 15 bp, Homo sapiens
agacatcaaaattcc

SEQ ID NO: 187094 - DNA, 15 bp, Homo sapiens
aagacatcaaaattc

SEQ ID NO: 187095 - DNA, 15 bp, Homo sapiens
gaagacatcaaaatt

SEQ ID NO: 187096 - DNA, 15 bp, Homo sapiens
ggaagacatcaaaat

SEQ ID NO: 187097 - DNA, 15 bp, Homo sapiens
tggaagacatcaaaa

SEQ ID NO: 187098 - DNA, 15 bp, Homo sapiens
ttggaagacatcaaa

SEQ ID NO: 187099 - DNA, 15 bp, Homo sapiens
tttggaagacatcaa

SEQ ID NO: 187100 - DNA, 15 bp, Homo sapiens
ttttggaagacatca

SEQ ID NO: 187101 - DNA, 15 bp, Homo sapiens
cttttggaagacatc

SEQ ID NO: 187102 - DNA, 15 bp, Homo sapiens
gcttttggaagacat

SEQ ID NO: 187103 - DNA, 15 bp, Homo sapiens
agcttttggaagaca

SEQ ID NO: 187104 - DNA, 15 bp, Homo sapiens
cagcttttggaagac

SEQ ID NO: 187105 - DNA, 15 bp, Homo sapiens
ccagcttttggaaga

SEQ ID NO: 187106 - DNA, 15 bp, Homo sapiens
cccagcttttggaag

SEQ ID NO: 187107 - DNA, 15 bp, Homo sapiens
ccccagcttttggaa

SEQ ID NO: 187108 - DNA, 15 bp, Homo sapiens
accccagcttttgga

SEQ ID NO: 187109 - DNA, 15 bp, Homo sapiens
aaccccagcttttgg

SEQ ID NO: 187110 - DNA, 15 bp, Homo sapiens
caaccccagcttttg

SEQ ID NO: 187111 - DNA, 15 bp, Homo sapiens
acaaccccagctttt

SEQ ID NO: 187112 - DNA, 15 bp, Homo sapiens
aacaaccccagcttt

SEQ ID NO: 187113 - DNA, 15 bp, Homo sapiens
taacaaccccagctt

SEQ ID NO: 187114 - DNA, 15 bp, Homo sapiens
ctaacaaccccagct

SEQ ID NO: 187115 - DNA, 15 bp, Homo sapiens
cctaacaaccccagc

SEQ ID NO: 187116 - DNA, 15 bp, Homo sapiens
tcctaacaaccccag

SEQ ID NO: 187117 - DNA, 15 bp, Homo sapiens
ctcctaacaacccca

SEQ ID NO: 187118 - DNA, 15 bp, Homo sapiens
tctcctaacaacccc

SEQ ID NO: 187119 - DNA, 15 bp, Homo sapiens
ttctcctaacaaccc

SEQ ID NO: 187120 - DNA, 15 bp, Homo sapiens
cttctcctaacaacc

SEQ ID NO: 187121 - DNA, 15 bp, Homo sapiens
tcttctcctaacaac

SEQ ID NO: 187122 - DNA, 15 bp, Homo sapiens
ctcttctcctaacaa

SEQ ID NO: 187123 - DNA, 15 bp, Homo sapiens
cctcttctcctaaca

SEQ ID NO: 187124 - DNA, 15 bp, Homo sapiens
acctcttctcctaac

SEQ ID NO: 187125 - DNA, 15 bp, Homo sapiens
tacctcttctcctaa

SEQ ID NO: 187126 - DNA, 15 bp, Homo sapiens
gtacctcttctccta

SEQ ID NO: 187127 - DNA, 15 bp, Homo sapiens
ggtacctcttctcct

SEQ ID NO: 187128 - DNA, 15 bp, Homo sapiens
tggtacctcttctcc

SEQ ID NO: 187129 - DNA, 15 bp, Homo sapiens
ttggtacctcttctc

SEQ ID NO: 187130 - DNA, 15 bp, Homo sapiens
tttggtacctcttct

SEQ ID NO: 187131 - DNA, 15 bp, Homo sapiens
ctttggtacctcttc

SEQ ID NO: 187132 - DNA, 15 bp, Homo sapiens
actttggtacctctt

SEQ ID NO: 187133 - DNA, 15 bp, Homo sapiens
cactttggtacctct

SEQ ID NO: 187134 - DNA, 15 bp, Homo sapiens
ccactttggtacctc

SEQ ID NO: 187135 - DNA, 15 bp, Homo sapiens
cccactttggtacct

SEQ ID NO: 187136 - DNA, 15 bp, Homo sapiens
ccccactttggtacc

SEQ ID NO: 187137 - DNA, 15 bp, Homo sapiens
gccccactttggtac

SEQ ID NO: 187138 - DNA, 15 bp, Homo sapiens
agccccactttggta

SEQ ID NO: 187139 - DNA, 15 bp, Homo sapiens
aagccccactttggt

SEQ ID NO: 187140 - DNA, 15 bp, Homo sapiens
gaagccccactttgg

SEQ ID NO: 187141 - DNA, 15 bp, Homo sapiens
tgaagccccactttg

SEQ ID NO: 187142 - DNA, 15 bp, Homo sapiens
atgaagccccacttt

SEQ ID NO: 187143 - DNA, 15 bp, Homo sapiens
gatgaagccccactt

SEQ ID NO: 187144 - DNA, 15 bp, Homo sapiens
agatgaagccccact

SEQ ID NO: 187145 - DNA, 15 bp, Homo sapiens
cagatgaagccccac

SEQ ID NO: 187146 - DNA, 15 bp, Homo sapiens
acagatgaagcccca

SEQ ID NO: 187147 - DNA, 15 bp, Homo sapiens
tacagatgaagcccc

SEQ ID NO: 187148 - DNA, 15 bp, Homo sapiens
ttacagatgaagccc

SEQ ID NO: 187149 - DNA, 15 bp, Homo sapiens
tttacagatgaagcc

SEQ ID NO: 187150 - DNA, 15 bp, Homo sapiens
ctttacagatgaagc

SEQ ID NO: 187151 - DNA, 15 bp, Homo sapiens
tctttacagatgaag

SEQ ID NO: 187152 - DNA, 15 bp, Homo sapiens
gtctttacagatgaa

SEQ ID NO: 187153 - DNA, 15 bp, Homo sapiens
ggtctttacagatga

SEQ ID NO: 187154 - DNA, 15 bp, Homo sapiens
gggtctttacagatg

SEQ ID NO: 187155 - DNA, 15 bp, Homo sapiens
tgggtctttacagat

SEQ ID NO: 187156 - DNA, 15 bp, Homo sapiens
ctgggtctttacaga

SEQ ID NO: 187157 - DNA, 15 bp, Homo sapiens
gctgggtctttacag

SEQ ID NO: 187158 - DNA, 15 bp, Homo sapiens
agctgggtctttaca

SEQ ID NO: 187159 - DNA, 15 bp, Homo sapiens
cagctgggtctttac

SEQ ID NO: 187160 - DNA, 15 bp, Homo sapiens
ccagctgggtcttta

SEQ ID NO: 187161 - DNA, 15 bp, Homo sapiens
tccagctgggtcttt

SEQ ID NO: 187162 - DNA, 15 bp, Homo sapiens
ctccagctgggtctt

SEQ ID NO: 187163 - DNA, 15 bp, Homo sapiens
gctccagctgggtct

SEQ ID NO: 187164 - DNA, 15 bp, Homo sapiens
agctccagctgggtc

SEQ ID NO: 187165 - DNA, 15 bp, Homo sapiens
gagctccagctgggt

SEQ ID NO: 187166 - DNA, 15 bp, Homo sapiens
agagctccagctggg

SEQ ID NO: 187167 - DNA, 15 bp, Homo sapiens
aagagctccagctgg

SEQ ID NO: 187168 - DNA, 15 bp, Homo sapiens
caagagctccagctg

SEQ ID NO: 187169 - DNA, 15 bp, Homo sapiens
acaagagctccagct

SEQ ID NO: 187170 - DNA, 15 bp, Homo sapiens
aacaagagctccagc

SEQ ID NO: 187171 - DNA, 15 bp, Homo sapiens
gaacaagagctccag

SEQ ID NO: 187172 - DNA, 15 bp, Homo sapiens
tgaacaagagctcca

SEQ ID NO: 187173 - DNA, 15 bp, Homo sapiens
gtgaacaagagctcc

SEQ ID NO: 187174 - DNA, 15 bp, Homo sapiens
cgtgaacaagagctc

SEQ ID NO: 187175 - DNA, 15 bp, Homo sapiens
gcgtgaacaagagct

SEQ ID NO: 187176 - DNA, 15 bp, Homo sapiens
ggcgtgaacaagagc

SEQ ID NO: 187177 - DNA, 15 bp, Homo sapiens
aggcgtgaacaagag

SEQ ID NO: 187178 - DNA, 15 bp, Homo sapiens
aaggcgtgaacaaga

SEQ ID NO: 187179 - DNA, 15 bp, Homo sapiens
aaaggcgtgaacaag

SEQ ID NO: 187180 - DNA, 15 bp, Homo sapiens
gaaaggcgtgaacaa

SEQ ID NO: 187181 - DNA, 15 bp, Homo sapiens
ggaaaggcgtgaaca

SEQ ID NO: 187182 - DNA, 15 bp, Homo sapiens
gggaaaggcgtgaac

SEQ ID NO: 187183 - DNA, 15 bp, Homo sapiens
agggaaaggcgtgaa

SEQ ID NO: 187184 - DNA, 15 bp, Homo sapiens
cagggaaaggcgtga

SEQ ID NO: 187185 - DNA, 15 bp, Homo sapiens
tcagggaaaggcgtg

SEQ ID NO: 187186 - DNA, 15 bp, Homo sapiens
ctcagggaaaggcgt

SEQ ID NO: 187187 - DNA, 15 bp, Homo sapiens
cctcagggaaaggcg

SEQ ID NO: 187188 - DNA, 15 bp, Homo sapiens
gcctcagggaaaggc

SEQ ID NO: 187189 - DNA, 15 bp, Homo sapiens
agcctcagggaaagg

SEQ ID NO: 187190 - DNA, 15 bp, Homo sapiens
cagcctcagggaaag

SEQ ID NO: 187191 - DNA, 15 bp, Homo sapiens
ccagcctcagggaaa

SEQ ID NO: 187192 - DNA, 15 bp, Homo sapiens
tccagcctcagggaa

SEQ ID NO: 187193 - DNA, 15 bp, Homo sapiens
ttccagcctcaggga

SEQ ID NO: 187194 - DNA, 15 bp, Homo sapiens
cttccagcctcaggg

SEQ ID NO: 187195 - DNA, 15 bp, Homo sapiens
ccttccagcctcagg

SEQ ID NO: 187196 - DNA, 15 bp, Homo sapiens
accttccagcctcag

SEQ ID NO: 187197 - DNA, 15 bp, Homo sapiens
gaccttccagcctca

SEQ ID NO: 187198 - DNA, 15 bp, Homo sapiens
agaccttccagcctc

SEQ ID NO: 187199 - DNA, 15 bp, Homo sapiens
gagaccttccagcct

SEQ ID NO: 187200 - DNA, 15 bp, Homo sapiens
agagaccttccagcc

SEQ ID NO: 187201 - DNA, 15 bp, Homo sapiens
aagagaccttccagc

SEQ ID NO: 187202 - DNA, 15 bp, Homo sapiens
caagagaccttccag

SEQ ID NO: 187203 - DNA, 15 bp, Homo sapiens
ccaagagaccttcca

SEQ ID NO: 187204 - DNA, 15 bp, Homo sapiens
tccaagagaccttcc

SEQ ID NO: 187205 - DNA, 15 bp, Homo sapiens
atccaagagaccttc

SEQ ID NO: 187206 - DNA, 15 bp, Homo sapiens
catccaagagacctt

SEQ ID NO: 187207 - DNA, 15 bp, Homo sapiens
acatccaagagacct

SEQ ID NO: 187208 - DNA, 15 bp, Homo sapiens
gacatccaagagacc

SEQ ID NO: 187209 - DNA, 15 bp, Homo sapiens
tgacatccaagagac

SEQ ID NO: 187210 - DNA, 15 bp, Homo sapiens
gtgacatccaagaga

SEQ ID NO: 187211 - DNA, 15 bp, Homo sapiens
tgtgacatccaagag

SEQ ID NO: 187212 - DNA, 15 bp, Homo sapiens
ctgtgacatccaaga

SEQ ID NO: 187213 - DNA, 15 bp, Homo sapiens
cctgtgacatccaag

SEQ ID NO: 187214 - DNA, 15 bp, Homo sapiens
gcctgtgacatccaa

SEQ ID NO: 187215 - DNA, 15 bp, Homo sapiens
agcctgtgacatcca

SEQ ID NO: 187216 - DNA, 15 bp, Homo sapiens
cagcctgtgacatcc

SEQ ID NO: 187217 - DNA, 15 bp, Homo sapiens
gcagcctgtgacatc

SEQ ID NO: 187218 - DNA, 15 bp, Homo sapiens
ggcagcctgtgacat

SEQ ID NO: 187219 - DNA, 15 bp, Homo sapiens
aggcagcctgtgaca

SEQ ID NO: 187220 - DNA, 15 bp, Homo sapiens
gaggcagcctgtgac

SEQ ID NO: 187221 - DNA, 15 bp, Homo sapiens
agaggcagcctgtga

SEQ ID NO: 187222 - DNA, 15 bp, Homo sapiens
aagaggcagcctgtg

SEQ ID NO: 187223 - DNA, 15 bp, Homo sapiens
aaagaggcagcctgt

SEQ ID NO: 187224 - DNA, 15 bp, Homo sapiens
taaagaggcagcctg

SEQ ID NO: 187225 - DNA, 15 bp, Homo sapiens
ttaaagaggcagcct

SEQ ID NO: 187226 - DNA, 15 bp, Homo sapiens
tttaaagaggcagcc

SEQ ID NO: 187227 - DNA, 15 bp, Homo sapiens
ttttaaagaggcagc

SEQ ID NO: 187228 - DNA, 15 bp, Homo sapiens
attttaaagaggcag

SEQ ID NO: 187229 - DNA, 15 bp, Homo sapiens
cattttaaagaggca

SEQ ID NO: 187230 - DNA, 15 bp, Homo sapiens
ccattttaaagaggc

SEQ ID NO: 187231 - DNA, 15 bp, Homo sapiens
tccattttaaagagg

SEQ ID NO: 187232 - DNA, 15 bp, Homo sapiens
ctccattttaaagag

SEQ ID NO: 187233 - DNA, 15 bp, Homo sapiens
tctccattttaaaga

SEQ ID NO: 187234 - DNA, 15 bp, Homo sapiens
gtctccattttaaag

SEQ ID NO: 187235 - DNA, 15 bp, Homo sapiens
tgtctccattttaaa

SEQ ID NO: 187236 - DNA, 15 bp, Homo sapiens
ctgtctccattttaa

SEQ ID NO: 187237 - DNA, 15 bp, Homo sapiens
actgtctccatttta

SEQ ID NO: 187238 - DNA, 15 bp, Homo sapiens
cactgtctccatttt

SEQ ID NO: 187239 - DNA, 15 bp, Homo sapiens
ccactgtctccattt

SEQ ID NO: 187240 - DNA, 15 bp, Homo sapiens
accactgtctccatt

SEQ ID NO: 187241 - DNA, 15 bp, Homo sapiens
caccactgtctccat

SEQ ID NO: 187242 - DNA, 15 bp, Homo sapiens
ccaccactgtctcca

SEQ ID NO: 187243 - DNA, 15 bp, Homo sapiens
tccaccactgtctcc

SEQ ID NO: 187244 - DNA, 15 bp, Homo sapiens
gtccaccactgtctc

SEQ ID NO: 187245 - DNA, 15 bp, Homo sapiens
agtccaccactgtct

SEQ ID NO: 187246 - DNA, 15 bp, Homo sapiens
aagtccaccactgtc

SEQ ID NO: 187247 - DNA, 15 bp, Homo sapiens
aaagtccaccactgt

SEQ ID NO: 187248 - DNA, 15 bp, Homo sapiens
gaaagtccaccactg

SEQ ID NO: 187249 - DNA, 15 bp, Homo sapiens
ggaaagtccaccact

SEQ ID NO: 187250 - DNA, 15 bp, Homo sapiens
aggaaagtccaccac

SEQ ID NO: 187251 - DNA, 15 bp, Homo sapiens
gaggaaagtccacca

SEQ ID NO: 187252 - DNA, 15 bp, Homo sapiens
agaggaaagtccacc

SEQ ID NO: 187253 - DNA, 15 bp, Homo sapiens
gagaggaaagtccac

SEQ ID NO: 187254 - DNA, 15 bp, Homo sapiens
agagaggaaagtcca

SEQ ID NO: 187255 - DNA, 15 bp, Homo sapiens
cagagaggaaagtcc

SEQ ID NO: 187256 - DNA, 15 bp, Homo sapiens
acagagaggaaagtc

SEQ ID NO: 187257 - DNA, 15 bp, Homo sapiens
aacagagaggaaagt

SEQ ID NO: 187258 - DNA, 15 bp, Homo sapiens
caacagagaggaaag

SEQ ID NO: 187259 - DNA, 15 bp, Homo sapiens
tcaacagagaggaaa

SEQ ID NO: 187260 - DNA, 15 bp, Homo sapiens
ctcaacagagaggaa

SEQ ID NO: 187261 - DNA, 15 bp, Homo sapiens
cctcaacagagagga

SEQ ID NO: 187262 - DNA, 15 bp, Homo sapiens
tcctcaacagagagg

SEQ ID NO: 187263 - DNA, 15 bp, Homo sapiens
atcctcaacagagag

SEQ ID NO: 187264 - DNA, 15 bp, Homo sapiens
catcctcaacagaga

SEQ ID NO: 187265 - DNA, 15 bp, Homo sapiens
ccatcctcaacagag

SEQ ID NO: 187266 - DNA, 15 bp, Homo sapiens
cccatcctcaacaga

SEQ ID NO: 187267 - DNA, 15 bp, Homo sapiens
tcccatcctcaacag

SEQ ID NO: 187268 - DNA, 15 bp, Homo sapiens
ttcccatcctcaaca

SEQ ID NO: 187269 - DNA, 15 bp, Homo sapiens
attcccatcctcaac

SEQ ID NO: 187270 - DNA, 15 bp, Homo sapiens
cattcccatcctcaa

SEQ ID NO: 187271 - DNA, 15 bp, Homo sapiens
tcattcccatcctca

SEQ ID NO: 187272 - DNA, 15 bp, Homo sapiens
ctcattcccatcctc

SEQ ID NO: 187273 - DNA, 15 bp, Homo sapiens
cctcattcccatcct

SEQ ID NO: 187274 - DNA, 15 bp, Homo sapiens
tcctcattcccatcc

SEQ ID NO: 187275 - DNA, 15 bp, Homo sapiens
atcctcattcccatc

SEQ ID NO: 187276 - DNA, 15 bp, Homo sapiens
catcctcattcccat

SEQ ID NO: 187277 - DNA, 15 bp, Homo sapiens
tcatcctcattccca

SEQ ID NO: 187278 - DNA, 15 bp, Homo sapiens
ctcatcctcattccc

SEQ ID NO: 187279 - DNA, 15 bp, Homo sapiens
cctcatcctcattcc

SEQ ID NO: 187280 - DNA, 15 bp, Homo sapiens
ccctcatcctcattc

SEQ ID NO: 187281 - DNA, 15 bp, Homo sapiens
tccctcatcctcatt

SEQ ID NO: 187282 - DNA, 15 bp, Homo sapiens
ctccctcatcctcat

SEQ ID NO: 187283 - DNA, 15 bp, Homo sapiens
gctccctcatcctca

SEQ ID NO: 187284 - DNA, 15 bp, Homo sapiens
tgctccctcatcctc

SEQ ID NO: 187285 - DNA, 15 bp, Homo sapiens
ctgctccctcatcct

SEQ ID NO: 187286 - DNA, 15 bp, Homo sapiens
cctgctccctcatcc

SEQ ID NO: 187287 - DNA, 15 bp, Homo sapiens
gcctgctccctcatc

SEQ ID NO: 187288 - DNA, 15 bp, Homo sapiens
agcctgctccctcat

SEQ ID NO: 187289 - DNA, 15 bp, Homo sapiens
aagcctgctccctca

SEQ ID NO: 187290 - DNA, 15 bp, Homo sapiens
caagcctgctccctc

SEQ ID NO: 187291 - DNA, 15 bp, Homo sapiens
ccaagcctgctccct

SEQ ID NO: 187292 - DNA, 15 bp, Homo sapiens
cccaagcctgctccc

SEQ ID NO: 187293 - DNA, 15 bp, Homo sapiens
ccccaagcctgctcc

SEQ ID NO: 187294 - DNA, 15 bp, Homo sapiens
accccaagcctgctc

SEQ ID NO: 187295 - DNA, 15 bp, Homo sapiens
caccccaagcctgct

SEQ ID NO: 187296 - DNA, 15 bp, Homo sapiens
tcaccccaagcctgc

SEQ ID NO: 187297 - DNA, 15 bp, Homo sapiens
ctcaccccaagcctg

SEQ ID NO: 187298 - DNA, 15 bp, Homo sapiens
gctcaccccaagcct

SEQ ID NO: 187299 - DNA, 15 bp, Homo sapiens
ggctcaccccaagcc

SEQ ID NO: 187300 - DNA, 15 bp, Homo sapiens
aggctcaccccaagc

SEQ ID NO: 187301 - DNA, 15 bp, Homo sapiens
taggctcaccccaag

SEQ ID NO: 187302 - DNA, 15 bp, Homo sapiens
gtaggctcaccccaa

SEQ ID NO: 187303 - DNA, 15 bp, Homo sapiens
ggtaggctcacccca

SEQ ID NO: 187304 - DNA, 15 bp, Homo sapiens
tggtaggctcacccc

SEQ ID NO: 187305 - DNA, 15 bp, Homo sapiens
atggtaggctcaccc

SEQ ID NO: 187306 - DNA, 15 bp, Homo sapiens
gatggtaggctcacc

SEQ ID NO: 187307 - DNA, 15 bp, Homo sapiens
ggatggtaggctcac

SEQ ID NO: 187308 - DNA, 15 bp, Homo sapiens
tggatggtaggctca

SEQ ID NO: 187309 - DNA, 15 bp, Homo sapiens
ctggatggtaggctc

SEQ ID NO: 187310 - DNA, 15 bp, Homo sapiens
cctggatggtaggct

SEQ ID NO: 187311 - DNA, 15 bp, Homo sapiens
ccctggatggtaggc

SEQ ID NO: 187312 - DNA, 15 bp, Homo sapiens
cccctggatggtagg

SEQ ID NO: 187313 - DNA, 15 bp, Homo sapiens
gcccctggatggtag

SEQ ID NO: 187314 - DNA, 15 bp, Homo sapiens
tgcccctggatggta

SEQ ID NO: 187315 - DNA, 15 bp, Homo sapiens
ctgcccctggatggt

SEQ ID NO: 187316 - DNA, 15 bp, Homo sapiens
actgcccctggatgg

SEQ ID NO: 187317 - DNA, 15 bp, Homo sapiens
cactgcccctggatg

SEQ ID NO: 187318 - DNA, 15 bp, Homo sapiens
tcactgcccctggat

SEQ ID NO: 187319 - DNA, 15 bp, Homo sapiens
ttcactgcccctgga

SEQ ID NO: 187320 - DNA, 15 bp, Homo sapiens
gttcactgcccctgg

SEQ ID NO: 187321 - DNA, 15 bp, Homo sapiens
agttcactgcccctg

SEQ ID NO: 187322 - DNA, 15 bp, Homo sapiens
aagttcactgcccct

SEQ ID NO: 187323 - DNA, 15 bp, Homo sapiens
aaagttcactgcccc

SEQ ID NO: 187324 - DNA, 15 bp, Homo sapiens
taaagttcactgccc

SEQ ID NO: 187325 - DNA, 15 bp, Homo sapiens
ataaagttcactgcc

SEQ ID NO: 187326 - DNA, 15 bp, Homo sapiens
tataaagttcactgc

SEQ ID NO: 187327 - DNA, 15 bp, Homo sapiens
atataaagttcactg

SEQ ID NO: 187328 - DNA, 15 bp, Homo sapiens
catataaagttcact

SEQ ID NO: 187329 - DNA, 15 bp, Homo sapiens
ccatataaagttcac

SEQ ID NO: 187330 - DNA, 15 bp, Homo sapiens
gccatataaagttca

SEQ ID NO: 187331 - DNA, 15 bp, Homo sapiens
cgccatataaagttc

SEQ ID NO: 187332 - DNA, 15 bp, Homo sapiens
acgccatataaagtt

SEQ ID NO: 187333 - DNA, 15 bp, Homo sapiens
cacgccatataaagt

SEQ ID NO: 187334 - DNA, 15 bp, Homo sapiens
ccacgccatataaag

SEQ ID NO: 187335 - DNA, 15 bp, Homo sapiens
cccacgccatataaa

SEQ ID NO: 187336 - DNA, 15 bp, Homo sapiens
tcccacgccatataa

SEQ ID NO: 187337 - DNA, 15 bp, Homo sapiens
atcccacgccatata

SEQ ID NO: 187338 - DNA, 15 bp, Homo sapiens
catcccacgccatat

SEQ ID NO: 187339 - DNA, 15 bp, Homo sapiens
tcatcccacgccata

SEQ ID NO: 187340 - DNA, 15 bp, Homo sapiens
gtcatcccacgccat

SEQ ID NO: 187341 - DNA, 15 bp, Homo sapiens
ggtcatcccacgcca

SEQ ID NO: 187342 - DNA, 15 bp, Homo sapiens
tggtcatcccacgcc

SEQ ID NO: 187343 - DNA, 15 bp, Homo sapiens
ctggtcatcccacgc

SEQ ID NO: 187344 - DNA, 15 bp, Homo sapiens
actggtcatcccacg

SEQ ID NO: 187345 - DNA, 15 bp, Homo sapiens
cactggtcatcccac

SEQ ID NO: 187346 - DNA, 15 bp, Homo sapiens
ccactggtcatccca

SEQ ID NO: 187347 - DNA, 15 bp, Homo sapiens
gccactggtcatccc

SEQ ID NO: 187348 - DNA, 15 bp, Homo sapiens
ggccactggtcatcc

SEQ ID NO: 187349 - DNA, 15 bp, Homo sapiens
aggccactggtcatc

SEQ ID NO: 187350 - DNA, 15 bp, Homo sapiens
gaggccactggtcat

SEQ ID NO: 187351 - DNA, 15 bp, Homo sapiens
ggaggccactggtca

SEQ ID NO: 187352 - DNA, 15 bp, Homo sapiens
gggaggccactggtc

SEQ ID NO: 187353 - DNA, 15 bp, Homo sapiens
ggggaggccactggt

SEQ ID NO: 187354 - DNA, 15 bp, Homo sapiens
aggggaggccactgg

SEQ ID NO: 187355 - DNA, 15 bp, Homo sapiens
caggggaggccactg

SEQ ID NO: 187356 - DNA, 15 bp, Homo sapiens
ccaggggaggccact

SEQ ID NO: 187357 - DNA, 15 bp, Homo sapiens
cccaggggaggccac

SEQ ID NO: 187358 - DNA, 15 bp, Homo sapiens
ccccaggggaggcca

SEQ ID NO: 187359 - DNA, 15 bp, Homo sapiens
accccaggggaggcc

SEQ ID NO: 187360 - DNA, 15 bp, Homo sapiens
caccccaggggaggc

SEQ ID NO: 187361 - DNA, 15 bp, Homo sapiens
ccaccccaggggagg

SEQ ID NO: 187362 - DNA, 15 bp, Homo sapiens
gccaccccaggggag

SEQ ID NO: 187363 - DNA, 15 bp, Homo sapiens
agccaccccagggga

SEQ ID NO: 187364 - DNA, 15 bp, Homo sapiens
cagccaccccagggg

SEQ ID NO: 187365 - DNA, 15 bp, Homo sapiens
gcagccaccccaggg

SEQ ID NO: 187366 - DNA, 15 bp, Homo sapiens
agcagccaccccagg

SEQ ID NO: 187367 - DNA, 15 bp, Homo sapiens
cagcagccaccccag

SEQ ID NO: 187368 - DNA, 15 bp, Homo sapiens
ccagcagccacccca

SEQ ID NO: 187369 - DNA, 15 bp, Homo sapiens
tccagcagccacccc

SEQ ID NO: 187370 - DNA, 15 bp, Homo sapiens
atccagcagccaccc

SEQ ID NO: 187371 - DNA, 15 bp, Homo sapiens
tatccagcagccacc

SEQ ID NO: 187372 - DNA, 15 bp, Homo sapiens
atatccagcagccac

SEQ ID NO: 187373 - DNA, 15 bp, Homo sapiens
aatatccagcagcca

SEQ ID NO: 187374 - DNA, 15 bp, Homo sapiens
caatatccagcagcc

SEQ ID NO: 187375 - DNA, 15 bp, Homo sapiens
ccaatatccagcagc

SEQ ID NO: 187376 - DNA, 15 bp, Homo sapiens
gccaatatccagcag

SEQ ID NO: 187377 - DNA, 15 bp, Homo sapiens
agccaatatccagca

SEQ ID NO: 187378 - DNA, 15 bp, Homo sapiens
cagccaatatccagc

SEQ ID NO: 187379 - DNA, 15 bp, Homo sapiens
tcagccaatatccag

SEQ ID NO: 187380 - DNA, 15 bp, Homo sapiens
atcagccaatatcca

SEQ ID NO: 187381 - DNA, 15 bp, Homo sapiens
catcagccaatatcc

SEQ ID NO: 187382 - DNA, 15 bp, Homo sapiens
ccatcagccaatatc

SEQ ID NO: 187383 - DNA, 15 bp, Homo sapiens
tccatcagccaatat

SEQ ID NO: 187384 - DNA, 15 bp, Homo sapiens
atccatcagccaata

SEQ ID NO: 187385 - DNA, 15 bp, Homo sapiens
catccatcagccaat

SEQ ID NO: 187386 - DNA, 15 bp, Homo sapiens
ccatccatcagccaa

SEQ ID NO: 187387 - DNA, 15 bp, Homo sapiens
accatccatcagcca

SEQ ID NO: 187388 - DNA, 15 bp, Homo sapiens
taccatccatcagcc

SEQ ID NO: 187389 - DNA, 15 bp, Homo sapiens
ctaccatccatcagc

SEQ ID NO: 187390 - DNA, 15 bp, Homo sapiens
tctaccatccatcag

SEQ ID NO: 187391 - DNA, 15 bp, Homo sapiens
ctctaccatccatca

SEQ ID NO: 187392 - DNA, 15 bp, Homo sapiens
cctctaccatccatc

SEQ ID NO: 187393 - DNA, 15 bp, Homo sapiens
tcctctaccatccat

SEQ ID NO: 187394 - DNA, 15 bp, Homo sapiens
ttcctctaccatcca

SEQ ID NO: 187395 - DNA, 15 bp, Homo sapiens
tttcctctaccatcc

SEQ ID NO: 187396 - DNA, 15 bp, Homo sapiens
gtttcctctaccatc

SEQ ID NO: 187397 - DNA, 15 bp, Homo sapiens
tgtttcctctaccat

SEQ ID NO: 187398 - DNA, 15 bp, Homo sapiens
gtgtttcctctacca

SEQ ID NO: 187399 - DNA, 15 bp, Homo sapiens
agtgtttcctctacc

SEQ ID NO: 187400 - DNA, 15 bp, Homo sapiens
tagtgtttcctctac

SEQ ID NO: 187401 - DNA, 15 bp, Homo sapiens
atagtgtttcctcta

SEQ ID NO: 187402 - DNA, 15 bp, Homo sapiens
aatagtgtttcctct

SEQ ID NO: 187403 - DNA, 15 bp, Homo sapiens
gaatagtgtttcctc

SEQ ID NO: 187404 - DNA, 15 bp, Homo sapiens
agaatagtgtttcct

SEQ ID NO: 187405 - DNA, 15 bp, Homo sapiens
gagaatagtgtttcc

SEQ ID NO: 187406 - DNA, 15 bp, Homo sapiens
tgagaatagtgtttc

SEQ ID NO: 187407 - DNA, 15 bp, Homo sapiens
atgagaatagtgttt

SEQ ID NO: 187408 - DNA, 15 bp, Homo sapiens
gatgagaatagtgtt

SEQ ID NO: 187409 - DNA, 15 bp, Homo sapiens
agatgagaatagtgt

SEQ ID NO: 187410 - DNA, 15 bp, Homo sapiens
gagatgagaatagtg

SEQ ID NO: 187411 - DNA, 15 bp, Homo sapiens
tgagatgagaatagt

SEQ ID NO: 187412 - DNA, 15 bp, Homo sapiens
ttgagatgagaatag

SEQ ID NO: 187413 - DNA, 15 bp, Homo sapiens
attgagatgagaata

SEQ ID NO: 187414 - DNA, 15 bp, Homo sapiens
aattgagatgagaat

SEQ ID NO: 187415 - DNA, 15 bp, Homo sapiens
gaattgagatgagaa

SEQ ID NO: 187416 - DNA, 15 bp, Homo sapiens
ggaattgagatgaga

SEQ ID NO: 187417 - DNA, 15 bp, Homo sapiens
aggaattgagatgag

SEQ ID NO: 187418 - DNA, 15 bp, Homo sapiens
caggaattgagatga

SEQ ID NO: 187419 - DNA, 15 bp, Homo sapiens
ccaggaattgagatg

SEQ ID NO: 187420 - DNA, 15 bp, Homo sapiens
tccaggaattgagat

SEQ ID NO: 187421 - DNA, 15 bp, Homo sapiens
atccaggaattgaga

SEQ ID NO: 187422 - DNA, 15 bp, Homo sapiens
aatccaggaattgag

SEQ ID NO: 187423 - DNA, 15 bp, Homo sapiens
caatccaggaattga

SEQ ID NO: 187424 - DNA, 15 bp, Homo sapiens
ccaatccaggaattg

SEQ ID NO: 187425 - DNA, 15 bp, Homo sapiens
accaatccaggaatt

SEQ ID NO: 187426 - DNA, 15 bp, Homo sapiens
caccaatccaggaat

SEQ ID NO: 187427 - DNA, 15 bp, Homo sapiens
acaccaatccaggaa

SEQ ID NO: 187428 - DNA, 15 bp, Homo sapiens
cacaccaatccagga

SEQ ID NO: 187429 - DNA, 15 bp, Homo sapiens
ccacaccaatccagg

SEQ ID NO: 187430 - DNA, 15 bp, Homo sapiens
cccacaccaatccag

SEQ ID NO: 187431 - DNA, 15 bp, Homo sapiens
ccccacaccaatcca

SEQ ID NO: 187432 - DNA, 15 bp, Homo sapiens
cccccacaccaatcc

SEQ ID NO: 187433 - DNA, 15 bp, Homo sapiens
gcccccacaccaatc

SEQ ID NO: 187434 - DNA, 15 bp, Homo sapiens
ggcccccacaccaat

SEQ ID NO: 187435 - DNA, 15 bp, Homo sapiens
tggcccccacaccaa

SEQ ID NO: 187436 - DNA, 15 bp, Homo sapiens
ttggcccccacacca

SEQ ID NO: 187437 - DNA, 15 bp, Homo sapiens
tttggcccccacacc

SEQ ID NO: 187438 - DNA, 15 bp, Homo sapiens
atttggcccccacac

SEQ ID NO: 187439 - DNA, 15 bp, Homo sapiens
catttggcccccaca

SEQ ID NO: 187440 - DNA, 15 bp, Homo sapiens
tcatttggcccccac

SEQ ID NO: 187441 - DNA, 15 bp, Homo sapiens
ctcatttggccccca

SEQ ID NO: 187442 - DNA, 15 bp, Homo sapiens
tctcatttggccccc

SEQ ID NO: 187443 - DNA, 15 bp, Homo sapiens
atctcatttggcccc

SEQ ID NO: 187444 - DNA, 15 bp, Homo sapiens
gatctcatttggccc

SEQ ID NO: 187445 - DNA, 15 bp, Homo sapiens
ggatctcatttggcc

SEQ ID NO: 187446 - DNA, 15 bp, Homo sapiens
gggatctcatttggc

SEQ ID NO: 187447 - DNA, 15 bp, Homo sapiens
tgggatctcatttgg

SEQ ID NO: 187448 - DNA, 15 bp, Homo sapiens
atgggatctcatttg

SEQ ID NO: 187449 - DNA, 15 bp, Homo sapiens
gatgggatctcattt

SEQ ID NO: 187450 - DNA, 15 bp, Homo sapiens
tgatgggatctcatt

SEQ ID NO: 187451 - DNA, 15 bp, Homo sapiens
atgatgggatctcat

SEQ ID NO: 187452 - DNA, 15 bp, Homo sapiens
aatgatgggatctca

SEQ ID NO: 187453 - DNA, 15 bp, Homo sapiens
gaatgatgggatctc

SEQ ID NO: 187454 - DNA, 15 bp, Homo sapiens
ggaatgatgggatct

SEQ ID NO: 187455 - DNA, 15 bp, Homo sapiens
aggaatgatgggatc

SEQ ID NO: 187456 - DNA, 15 bp, Homo sapiens
taggaatgatgggat

SEQ ID NO: 187457 - DNA, 15 bp, Homo sapiens
ttaggaatgatggga

SEQ ID NO: 187458 - DNA, 15 bp, Homo sapiens
attaggaatgatggg

SEQ ID NO: 187459 - DNA, 15 bp, Homo sapiens
aattaggaatgatgg

SEQ ID NO: 187460 - DNA, 15 bp, Homo sapiens
taattaggaatgatg

SEQ ID NO: 187461 - DNA, 15 bp, Homo sapiens
ttaattaggaatgat

SEQ ID NO: 187462 - DNA, 15 bp, Homo sapiens
cttaattaggaatga

SEQ ID NO: 187463 - DNA, 15 bp, Homo sapiens
tcttaattaggaatg

SEQ ID NO: 187464 - DNA, 15 bp, Homo sapiens
atcttaattaggaat

SEQ ID NO: 187465 - DNA, 15 bp, Homo sapiens
catcttaattaggaa

SEQ ID NO: 187466 - DNA, 15 bp, Homo sapiens
acatcttaattagga

SEQ ID NO: 187467 - DNA, 15 bp, Homo sapiens
tacatcttaattagg

SEQ ID NO: 187468 - DNA, 15 bp, Homo sapiens
ctacatcttaattag

SEQ ID NO: 187469 - DNA, 15 bp, Homo sapiens
actacatcttaatta

SEQ ID NO: 187470 - DNA, 15 bp, Homo sapiens
aactacatcttaatt

SEQ ID NO: 187471 - DNA, 15 bp, Homo sapiens
taactacatcttaat

SEQ ID NO: 187472 - DNA, 15 bp, Homo sapiens
gtaactacatcttaa

SEQ ID NO: 187473 - DNA, 15 bp, Homo sapiens
tgtaactacatctta

SEQ ID NO: 187474 - DNA, 15 bp, Homo sapiens
atgtaactacatctt

SEQ ID NO: 187475 - DNA, 15 bp, Homo sapiens
aatgtaactacatct

SEQ ID NO: 187476 - DNA, 15 bp, Homo sapiens
taatgtaactacatc

SEQ ID NO: 187477 - DNA, 15 bp, Homo sapiens
ttaatgtaactacat

SEQ ID NO: 187478 - DNA, 15 bp, Homo sapiens
attaatgtaactaca

SEQ ID NO: 187479 - DNA, 15 bp, Homo sapiens
cattaatgtaactac

SEQ ID NO: 187480 - DNA, 15 bp, Homo sapiens
tcattaatgtaacta

SEQ ID NO: 187481 - DNA, 15 bp, Homo sapiens
atcattaatgtaact

SEQ ID NO: 187482 - DNA, 15 bp, Homo sapiens
tatcattaatgtaac

SEQ ID NO: 187483 - DNA, 15 bp, Homo sapiens
ttatcattaatgtaa

SEQ ID NO: 187484 - DNA, 15 bp, Homo sapiens
tttatcattaatgta

SEQ ID NO: 187485 - DNA, 15 bp, Homo sapiens
ctttatcattaatgt

SEQ ID NO: 187486 - DNA, 15 bp, Homo sapiens
tctttatcattaatg

SEQ ID NO: 187487 - DNA, 15 bp, Homo sapiens
gtctttatcattaat

SEQ ID NO: 187488 - DNA, 15 bp, Homo sapiens
tgtctttatcattaa

SEQ ID NO: 187489 - DNA, 15 bp, Homo sapiens
ttgtctttatcatta

SEQ ID NO: 187490 - DNA, 15 bp, Homo sapiens
gttgtctttatcatt

SEQ ID NO: 187491 - DNA, 15 bp, Homo sapiens
tgttgtctttatcat

SEQ ID NO: 187492 - DNA, 15 bp, Homo sapiens
ttgttgtctttatca

SEQ ID NO: 187493 - DNA, 15 bp, Homo sapiens
attgttgtctttatc

SEQ ID NO: 187494 - DNA, 15 bp, Homo sapiens
cattgttgtctttat

SEQ ID NO: 187495 - DNA, 15 bp, Homo sapiens
ccattgttgtcttta

SEQ ID NO: 187496 - DNA, 15 bp, Homo sapiens
gccattgttgtcttt

SEQ ID NO: 187497 - DNA, 15 bp, Homo sapiens
tgccattgttgtctt

SEQ ID NO: 187498 - DNA, 15 bp, Homo sapiens
ctgccattgttgtct

SEQ ID NO: 187499 - DNA, 15 bp, Homo sapiens
gctgccattgttgtc

SEQ ID NO: 187500 - DNA, 15 bp, Homo sapiens
agctgccattgttgt

SEQ ID NO: 187501 - DNA, 15 bp, Homo sapiens
tagctgccattgttg

SEQ ID NO: 187502 - DNA, 15 bp, Homo sapiens
ttagctgccattgtt

SEQ ID NO: 187503 - DNA, 15 bp, Homo sapiens
attagctgccattgt

SEQ ID NO: 187504 - DNA, 15 bp, Homo sapiens
tattagctgccattg

SEQ ID NO: 187505 - DNA, 15 bp, Homo sapiens
gtattagctgccatt

SEQ ID NO: 187506 - DNA, 15 bp, Homo sapiens
agtattagctgccat

SEQ ID NO: 187507 - DNA, 15 bp, Homo sapiens
aagtattagctgcca

SEQ ID NO: 187508 - DNA, 15 bp, Homo sapiens
taagtattagctgcc

SEQ ID NO: 187509 - DNA, 15 bp, Homo sapiens
ctaagtattagctgc

SEQ ID NO: 187510 - DNA, 15 bp, Homo sapiens
tctaagtattagctg

SEQ ID NO: 187511 - DNA, 15 bp, Homo sapiens
ctctaagtattagct

SEQ ID NO: 187512 - DNA, 15 bp, Homo sapiens
tctctaagtattagc

SEQ ID NO: 187513 - DNA, 15 bp, Homo sapiens
ctctctaagtattag

SEQ ID NO: 187514 - DNA, 15 bp, Homo sapiens
actctctaagtatta

SEQ ID NO: 187515 - DNA, 15 bp, Homo sapiens
cactctctaagtatt

SEQ ID NO: 187516 - DNA, 15 bp, Homo sapiens
gcactctctaagtat

SEQ ID NO: 187517 - DNA, 15 bp, Homo sapiens
agcactctctaagta

SEQ ID NO: 187518 - DNA, 15 bp, Homo sapiens
cagcactctctaagt

SEQ ID NO: 187519 - DNA, 15 bp, Homo sapiens
gcagcactctctaag

SEQ ID NO: 187520 - DNA, 15 bp, Homo sapiens
agcagcactctctaa

SEQ ID NO: 187521 - DNA, 15 bp, Homo sapiens
tagcagcactctcta

SEQ ID NO: 187522 - DNA, 15 bp, Homo sapiens
gtagcagcactctct

SEQ ID NO: 187523 - DNA, 15 bp, Homo sapiens
ggtagcagcactctc

SEQ ID NO: 187524 - DNA, 15 bp, Homo sapiens
aggtagcagcactct

SEQ ID NO: 187525 - DNA, 15 bp, Homo sapiens
caggtagcagcactc

SEQ ID NO: 187526 - DNA, 15 bp, Homo sapiens
gcaggtagcagcact

SEQ ID NO: 187527 - DNA, 15 bp, Homo sapiens
agcaggtagcagcac

SEQ ID NO: 187528 - DNA, 15 bp, Homo sapiens
cagcaggtagcagca

SEQ ID NO: 187529 - DNA, 15 bp, Homo sapiens
ccagcaggtagcagc

SEQ ID NO: 187530 - DNA, 15 bp, Homo sapiens
accagcaggtagcag

SEQ ID NO: 187531 - DNA, 15 bp, Homo sapiens
gaccagcaggtagca

SEQ ID NO: 187532 - DNA, 15 bp, Homo sapiens
tgaccagcaggtagc

SEQ ID NO: 187533 - DNA, 15 bp, Homo sapiens
gtgaccagcaggtag

SEQ ID NO: 187534 - DNA, 15 bp, Homo sapiens
agtgaccagcaggta

SEQ ID NO: 187535 - DNA, 15 bp, Homo sapiens
cagtgaccagcaggt

SEQ ID NO: 187536 - DNA, 15 bp, Homo sapiens
acagtgaccagcagg

SEQ ID NO: 187537 - DNA, 15 bp, Homo sapiens
cacagtgaccagcag

SEQ ID NO: 187538 - DNA, 15 bp, Homo sapiens
gcacagtgaccagca

SEQ ID NO: 187539 - DNA, 15 bp, Homo sapiens
ggcacagtgaccagc

SEQ ID NO: 187540 - DNA, 15 bp, Homo sapiens
tggcacagtgaccag

SEQ ID NO: 187541 - DNA, 15 bp, Homo sapiens
ttggcacagtgacca

SEQ ID NO: 187542 - DNA, 15 bp, Homo sapiens
cttggcacagtgacc

SEQ ID NO: 187543 - DNA, 15 bp, Homo sapiens
gcttggcacagtgac

SEQ ID NO: 187544 - DNA, 15 bp, Homo sapiens
ggcttggcacagtga

SEQ ID NO: 187545 - DNA, 15 bp, Homo sapiens
gggcttggcacagtg

SEQ ID NO: 187546 - DNA, 15 bp, Homo sapiens
agggcttggcacagt

SEQ ID NO: 187547 - DNA, 15 bp, Homo sapiens
aagggcttggcacag

SEQ ID NO: 187548 - DNA, 15 bp, Homo sapiens
aaagggcttggcaca

SEQ ID NO: 187549 - DNA, 15 bp, Homo sapiens
taaagggcttggcac

SEQ ID NO: 187550 - DNA, 15 bp, Homo sapiens
ctaaagggcttggca

SEQ ID NO: 187551 - DNA, 15 bp, Homo sapiens
actaaagggcttggc

SEQ ID NO: 187552 - DNA, 15 bp, Homo sapiens
cactaaagggcttgg

SEQ ID NO: 187553 - DNA, 15 bp, Homo sapiens
acactaaagggcttg

SEQ ID NO: 187554 - DNA, 15 bp, Homo sapiens
cacactaaagggctt

SEQ ID NO: 187555 - DNA, 15 bp, Homo sapiens
gcacactaaagggct

SEQ ID NO: 187556 - DNA, 15 bp, Homo sapiens
ggcacactaaagggc

SEQ ID NO: 187557 - DNA, 15 bp, Homo sapiens
aggcacactaaaggg

SEQ ID NO: 187558 - DNA, 15 bp, Homo sapiens
aaggcacactaaagg

SEQ ID NO: 187559 - DNA, 15 bp, Homo sapiens
taaggcacactaaag

SEQ ID NO: 187560 - DNA, 15 bp, Homo sapiens
ataaggcacactaaa

SEQ ID NO: 187561 - DNA, 15 bp, Homo sapiens
gataaggcacactaa

SEQ ID NO: 187562 - DNA, 15 bp, Homo sapiens
ggataaggcacacta

SEQ ID NO: 187563 - DNA, 15 bp, Homo sapiens
aggataaggcacact

SEQ ID NO: 187564 - DNA, 15 bp, Homo sapiens
aaggataaggcacac

SEQ ID NO: 187565 - DNA, 15 bp, Homo sapiens
caaggataaggcaca

SEQ ID NO: 187566 - DNA, 15 bp, Homo sapiens
tcaaggataaggcac

SEQ ID NO: 187567 - DNA, 15 bp, Homo sapiens
ctcaaggataaggca

SEQ ID NO: 187568 - DNA, 15 bp, Homo sapiens
actcaaggataaggc

SEQ ID NO: 187569 - DNA, 15 bp, Homo sapiens
gactcaaggataagg

SEQ ID NO: 187570 - DNA, 15 bp, Homo sapiens
ggactcaaggataag

SEQ ID NO: 187571 - DNA, 15 bp, Homo sapiens
aggactcaaggataa

SEQ ID NO: 187572 - DNA, 15 bp, Homo sapiens
gaggactcaaggata

SEQ ID NO: 187573 - DNA, 15 bp, Homo sapiens
tgaggactcaaggat

SEQ ID NO: 187574 - DNA, 15 bp, Homo sapiens
gtgaggactcaagga

SEQ ID NO: 187575 - DNA, 15 bp, Homo sapiens
ggtgaggactcaagg

SEQ ID NO: 187576 - DNA, 15 bp, Homo sapiens
tggtgaggactcaag

SEQ ID NO: 187577 - DNA, 15 bp, Homo sapiens
ctggtgaggactcaa

SEQ ID NO: 187578 - DNA, 15 bp, Homo sapiens
gctggtgaggactca

SEQ ID NO: 187579 - DNA, 15 bp, Homo sapiens
ggctggtgaggactc

SEQ ID NO: 187580 - DNA, 15 bp, Homo sapiens
gggctggtgaggact

SEQ ID NO: 187581 - DNA, 15 bp, Homo sapiens
ggggctggtgaggac

SEQ ID NO: 187582 - DNA, 15 bp, Homo sapiens
aggggctggtgagga

SEQ ID NO: 187583 - DNA, 15 bp, Homo sapiens
taggggctggtgagg

SEQ ID NO: 187584 - DNA, 15 bp, Homo sapiens
ataggggctggtgag

SEQ ID NO: 187585 - DNA, 15 bp, Homo sapiens
cataggggctggtga

SEQ ID NO: 187586 - DNA, 15 bp, Homo sapiens
acataggggctggtg

SEQ ID NO: 187587 - DNA, 15 bp, Homo sapiens
cacataggggctggt

SEQ ID NO: 187588 - DNA, 15 bp, Homo sapiens
gcacataggggctgg

SEQ ID NO: 187589 - DNA, 15 bp, Homo sapiens
tgcacataggggctg

SEQ ID NO: 187590 - DNA, 15 bp, Homo sapiens
ctgcacataggggct

SEQ ID NO: 187591 - DNA, 15 bp, Homo sapiens
cctgcacataggggc

SEQ ID NO: 187592 - DNA, 15 bp, Homo sapiens
tcctgcacatagggg

SEQ ID NO: 187593 - DNA, 15 bp, Homo sapiens
ttcctgcacataggg

SEQ ID NO: 187594 - DNA, 15 bp, Homo sapiens
gttcctgcacatagg

SEQ ID NO: 187595 - DNA, 15 bp, Homo sapiens
ggttcctgcacatag

SEQ ID NO: 187596 - DNA, 15 bp, Homo sapiens
aggttcctgcacata

SEQ ID NO: 187597 - DNA, 15 bp, Homo sapiens
caggttcctgcacat

SEQ ID NO: 187598 - DNA, 15 bp, Homo sapiens
gcaggttcctgcaca

SEQ ID NO: 187599 - DNA, 15 bp, Homo sapiens
agcaggttcctgcac

SEQ ID NO: 187600 - DNA, 15 bp, Homo sapiens
cagcaggttcctgca

SEQ ID NO: 187601 - DNA, 15 bp, Homo sapiens
tcagcaggttcctgc

SEQ ID NO: 187602 - DNA, 15 bp, Homo sapiens
ctcagcaggttcctg

SEQ ID NO: 187603 - DNA, 15 bp, Homo sapiens
tctcagcaggttcct

SEQ ID NO: 187604 - DNA, 15 bp, Homo sapiens
atctcagcaggttcc

SEQ ID NO: 187605 - DNA, 15 bp, Homo sapiens
catctcagcaggttc

SEQ ID NO: 187606 - DNA, 15 bp, Homo sapiens
tcatctcagcaggtt

SEQ ID NO: 187607 - DNA, 15 bp, Homo sapiens
ttcatctcagcaggt

SEQ ID NO: 187608 - DNA, 15 bp, Homo sapiens
cttcatctcagcagg

SEQ ID NO: 187609 - DNA, 15 bp, Homo sapiens
acttcatctcagcag

SEQ ID NO: 187610 - DNA, 15 bp, Homo sapiens
cacttcatctcagca

SEQ ID NO: 187611 - DNA, 15 bp, Homo sapiens
tcacttcatctcagc

SEQ ID NO: 187612 - DNA, 15 bp, Homo sapiens
gtcacttcatctcag

SEQ ID NO: 187613 - DNA, 15 bp, Homo sapiens
agtcacttcatctca

SEQ ID NO: 187614 - DNA, 15 bp, Homo sapiens
aagtcacttcatctc

SEQ ID NO: 187615 - DNA, 15 bp, Homo sapiens
caagtcacttcatct

SEQ ID NO: 187616 - DNA, 15 bp, Homo sapiens
gcaagtcacttcatc

SEQ ID NO: 187617 - DNA, 15 bp, Homo sapiens
ggcaagtcacttcat

SEQ ID NO: 187618 - DNA, 15 bp, Homo sapiens
gggcaagtcacttca

SEQ ID NO: 187619 - DNA, 15 bp, Homo sapiens
cgggcaagtcacttc

SEQ ID NO: 187620 - DNA, 15 bp, Homo sapiens
ccgggcaagtcactt

SEQ ID NO: 187621 - DNA, 15 bp, Homo sapiens
cccgggcaagtcact

SEQ ID NO: 187622 - DNA, 15 bp, Homo sapiens
gcccgggcaagtcac

SEQ ID NO: 187623 - DNA, 15 bp, Homo sapiens
ggcccgggcaagtca

SEQ ID NO: 187624 - DNA, 15 bp, Homo sapiens
tggcccgggcaagtc

SEQ ID NO: 187625 - DNA, 15 bp, Homo sapiens
gtggcccgggcaagt

SEQ ID NO: 187626 - DNA, 15 bp, Homo sapiens
tgtggcccgggcaag

SEQ ID NO: 187627 - DNA, 15 bp, Homo sapiens
gtgtggcccgggcaa

SEQ ID NO: 187628 - DNA, 15 bp, Homo sapiens
tgtgtggcccgggca

SEQ ID NO: 187629 - DNA, 15 bp, Homo sapiens
gtgtgtggcccgggc

SEQ ID NO: 187630 - DNA, 15 bp, Homo sapiens
ggtgtgtggcccggg

SEQ ID NO: 187631 - DNA, 15 bp, Homo sapiens
aggtgtgtggcccgg

SEQ ID NO: 187632 - DNA, 15 bp, Homo sapiens
caggtgtgtggcccg

SEQ ID NO: 187633 - DNA, 15 bp, Homo sapiens
ccaggtgtgtggccc

SEQ ID NO: 187634 - DNA, 15 bp, Homo sapiens
accaggtgtgtggcc

SEQ ID NO: 187635 - DNA, 15 bp, Homo sapiens
taccaggtgtgtggc

SEQ ID NO: 187636 - DNA, 15 bp, Homo sapiens
ttaccaggtgtgtgg

SEQ ID NO: 187637 - DNA, 15 bp, Homo sapiens
tttaccaggtgtgtg

SEQ ID NO: 187638 - DNA, 15 bp, Homo sapiens
ctttaccaggtgtgt

SEQ ID NO: 187639 - DNA, 15 bp, Homo sapiens
actttaccaggtgtg

SEQ ID NO: 187640 - DNA, 15 bp, Homo sapiens
aactttaccaggtgt

SEQ ID NO: 187641 - DNA, 15 bp, Homo sapiens
caactttaccaggtg

SEQ ID NO: 187642 - DNA, 15 bp, Homo sapiens
ccaactttaccaggt

SEQ ID NO: 187643 - DNA, 15 bp, Homo sapiens
tccaactttaccagg

SEQ ID NO: 187644 - DNA, 15 bp, Homo sapiens
ttccaactttaccag

SEQ ID NO: 187645 - DNA, 15 bp, Homo sapiens
tttccaactttacca

SEQ ID NO: 187646 - DNA, 15 bp, Homo sapiens
gtttccaactttacc

SEQ ID NO: 187647 - DNA, 15 bp, Homo sapiens
ggtttccaactttac

SEQ ID NO: 187648 - DNA, 15 bp, Homo sapiens
tggtttccaacttta

SEQ ID NO: 187649 - DNA, 15 bp, Homo sapiens
ttggtttccaacttt

SEQ ID NO: 187650 - DNA, 15 bp, Homo sapiens
gttggtttccaactt

SEQ ID NO: 187651 - DNA, 15 bp, Homo sapiens
agttggtttccaact

SEQ ID NO: 187652 - DNA, 15 bp, Homo sapiens
cagttggtttccaac

SEQ ID NO: 187653 - DNA, 15 bp, Homo sapiens
ccagttggtttccaa

SEQ ID NO: 187654 - DNA, 15 bp, Homo sapiens
tccagttggtttcca

SEQ ID NO: 187655 - DNA, 15 bp, Homo sapiens
ctccagttggtttcc

SEQ ID NO: 187656 - DNA, 15 bp, Homo sapiens
gctccagttggtttc

SEQ ID NO: 187657 - DNA, 15 bp, Homo sapiens
ggctccagttggttt

SEQ ID NO: 187658 - DNA, 15 bp, Homo sapiens
tggctccagttggtt

SEQ ID NO: 187659 - DNA, 15 bp, Homo sapiens
ctggctccagttggt

SEQ ID NO: 187660 - DNA, 15 bp, Homo sapiens
gctggctccagttgg

SEQ ID NO: 187661 - DNA, 15 bp, Homo sapiens
ggctggctccagttg

SEQ ID NO: 187662 - DNA, 15 bp, Homo sapiens
gggctggctccagtt

SEQ ID NO: 187663 - DNA, 15 bp, Homo sapiens
ggggctggctccagt

SEQ ID NO: 187664 - DNA, 15 bp, Homo sapiens
tggggctggctccag

SEQ ID NO: 187665 - DNA, 15 bp, Homo sapiens
ctggggctggctcca

SEQ ID NO: 187666 - DNA, 15 bp, Homo sapiens
tctggggctggctcc

SEQ ID NO: 187667 - DNA, 15 bp, Homo sapiens
gtctggggctggctc

SEQ ID NO: 187668 - DNA, 15 bp, Homo sapiens
ggtctggggctggct

SEQ ID NO: 187669 - DNA, 15 bp, Homo sapiens
aggtctggggctggc

SEQ ID NO: 187670 - DNA, 15 bp, Homo sapiens
gaggtctggggctgg

SEQ ID NO: 187671 - DNA, 15 bp, Homo sapiens
tgaggtctggggctg

SEQ ID NO: 187672 - DNA, 15 bp, Homo sapiens
gtgaggtctggggct

SEQ ID NO: 187673 - DNA, 15 bp, Homo sapiens
tgtgaggtctggggc

SEQ ID NO: 187674 - DNA, 15 bp, Homo sapiens
atgtgaggtctgggg

SEQ ID NO: 187675 - DNA, 15 bp, Homo sapiens
aatgtgaggtctggg

SEQ ID NO: 187676 - DNA, 15 bp, Homo sapiens
caatgtgaggtctgg

SEQ ID NO: 187677 - DNA, 15 bp, Homo sapiens
gcaatgtgaggtctg

SEQ ID NO: 187678 - DNA, 15 bp, Homo sapiens
tgcaatgtgaggtct

SEQ ID NO: 187679 - DNA, 15 bp, Homo sapiens
atgcaatgtgaggtc

SEQ ID NO: 187680 - DNA, 15 bp, Homo sapiens
tatgcaatgtgaggt

SEQ ID NO: 187681 - DNA, 15 bp, Homo sapiens
gtatgcaatgtgagg

SEQ ID NO: 187682 - DNA, 15 bp, Homo sapiens
ggtatgcaatgtgag

SEQ ID NO: 187683 - DNA, 15 bp, Homo sapiens
gggtatgcaatgtga

SEQ ID NO: 187684 - DNA, 15 bp, Homo sapiens
ggggtatgcaatgtg

SEQ ID NO: 187685 - DNA, 15 bp, Homo sapiens
tggggtatgcaatgt

SEQ ID NO: 187686 - DNA, 15 bp, Homo sapiens
ctggggtatgcaatg

SEQ ID NO: 187687 - DNA, 15 bp, Homo sapiens
tctggggtatgcaat

SEQ ID NO: 187688 - DNA, 15 bp, Homo sapiens
gtctggggtatgcaa

SEQ ID NO: 187689 - DNA, 15 bp, Homo sapiens
ggtctggggtatgca

SEQ ID NO: 187690 - DNA, 15 bp, Homo sapiens
aggtctggggtatgc

SEQ ID NO: 187691 - DNA, 15 bp, Homo sapiens
gaggtctggggtatg

SEQ ID NO: 187692 - DNA, 15 bp, Homo sapiens
tgaggtctggggtat

SEQ ID NO: 187693 - DNA, 15 bp, Homo sapiens
gtgaggtctggggta

SEQ ID NO: 187694 - DNA, 15 bp, Homo sapiens
tgtgaggtctggggt

SEQ ID NO: 187695 - DNA, 15 bp, Homo sapiens
gtgtgaggtctgggg

SEQ ID NO: 187696 - DNA, 15 bp, Homo sapiens
agtgtgaggtctggg

SEQ ID NO: 187697 - DNA, 15 bp, Homo sapiens
cagtgtgaggtctgg

SEQ ID NO: 187698 - DNA, 15 bp, Homo sapiens
ccagtgtgaggtctg

SEQ ID NO: 187699 - DNA, 15 bp, Homo sapiens
tccagtgtgaggtct

SEQ ID NO: 187700 - DNA, 15 bp, Homo sapiens
atccagtgtgaggtc

SEQ ID NO: 187701 - DNA, 15 bp, Homo sapiens
tatccagtgtgaggt

SEQ ID NO: 187702 - DNA, 15 bp, Homo sapiens
gtatccagtgtgagg

SEQ ID NO: 187703 - DNA, 15 bp, Homo sapiens
ggtatccagtgtgag

SEQ ID NO: 187704 - DNA, 15 bp, Homo sapiens
gggtatccagtgtga

SEQ ID NO: 187705 - DNA, 15 bp, Homo sapiens
agggtatccagtgtg

SEQ ID NO: 187706 - DNA, 15 bp, Homo sapiens
gagggtatccagtgt

SEQ ID NO: 187707 - DNA, 15 bp, Homo sapiens
tgagggtatccagtg

SEQ ID NO: 187708 - DNA, 15 bp, Homo sapiens
gtgagggtatccagt

SEQ ID NO: 187709 - DNA, 15 bp, Homo sapiens
tgtgagggtatccag

SEQ ID NO: 187710 - DNA, 15 bp, Homo sapiens
gtgtgagggtatcca

SEQ ID NO: 187711 - DNA, 15 bp, Homo sapiens
agtgtgagggtatcc

SEQ ID NO: 187712 - DNA, 15 bp, Homo sapiens
cagtgtgagggtatc

SEQ ID NO: 187713 - DNA, 15 bp, Homo sapiens
gcagtgtgagggtat

SEQ ID NO: 187714 - DNA, 15 bp, Homo sapiens
tgcagtgtgagggta

SEQ ID NO: 187715 - DNA, 15 bp, Homo sapiens
gtgcagtgtgagggt

SEQ ID NO: 187716 - DNA, 15 bp, Homo sapiens
tgtgcagtgtgaggg

SEQ ID NO: 187717 - DNA, 15 bp, Homo sapiens
gtgtgcagtgtgagg

SEQ ID NO: 187718 - DNA, 15 bp, Homo sapiens
ggtgtgcagtgtgag

SEQ ID NO: 187719 - DNA, 15 bp, Homo sapiens
gggtgtgcagtgtga

SEQ ID NO: 187720 - DNA, 15 bp, Homo sapiens
agggtgtgcagtgtg

SEQ ID NO: 187721 - DNA, 15 bp, Homo sapiens
gagggtgtgcagtgt

SEQ ID NO: 187722 - DNA, 15 bp, Homo sapiens
tgagggtgtgcagtg

SEQ ID NO: 187723 - DNA, 15 bp, Homo sapiens
gtgagggtgtgcagt

SEQ ID NO: 187724 - DNA, 15 bp, Homo sapiens
tgtgagggtgtgcag

SEQ ID NO: 187725 - DNA, 15 bp, Homo sapiens
gtgtgagggtgtgca

SEQ ID NO: 187726 - DNA, 15 bp, Homo sapiens
agtgtgagggtgtgc

SEQ ID NO: 187727 - DNA, 15 bp, Homo sapiens
cagtgtgagggtgtg

SEQ ID NO: 187728 - DNA, 15 bp, Homo sapiens
gcagtgtgagggtgt

SEQ ID NO: 187729 - DNA, 15 bp, Homo sapiens
tgcagtgtgagggtg

SEQ ID NO: 187730 - DNA, 15 bp, Homo sapiens
atgcagtgtgagggt

SEQ ID NO: 187731 - DNA, 15 bp, Homo sapiens
tatgcagtgtgaggg

SEQ ID NO: 187732 - DNA, 15 bp, Homo sapiens
gtatgcagtgtgagg

SEQ ID NO: 187733 - DNA, 15 bp, Homo sapiens
ggtatgcagtgtgag

SEQ ID NO: 187734 - DNA, 15 bp, Homo sapiens
gggtatgcagtgtga

SEQ ID NO: 187735 - DNA, 15 bp, Homo sapiens
agggtatgcagtgtg

SEQ ID NO: 187736 - DNA, 15 bp, Homo sapiens
gagggtatgcagtgt

SEQ ID NO: 187737 - DNA, 15 bp, Homo sapiens
tgagggtatgcagtg

SEQ ID NO: 187738 - DNA, 15 bp, Homo sapiens
gtgagggtatgcagt

SEQ ID NO: 187739 - DNA, 15 bp, Homo sapiens
tgtgagggtatgcag

SEQ ID NO: 187740 - DNA, 15 bp, Homo sapiens
gtgtgagggtatgca

SEQ ID NO: 187741 - DNA, 15 bp, Homo sapiens
ggtgtgagggtatgc

SEQ ID NO: 187742 - DNA, 15 bp, Homo sapiens
tggtgtgagggtatg

SEQ ID NO: 187743 - DNA, 15 bp, Homo sapiens
gtggtgtgagggtat

SEQ ID NO: 187744 - DNA, 15 bp, Homo sapiens
tgtggtgtgagggta

SEQ ID NO: 187745 - DNA, 15 bp, Homo sapiens
atgtggtgtgagggt

SEQ ID NO: 187746 - DNA, 15 bp, Homo sapiens
tatgtggtgtgaggg

SEQ ID NO: 187747 - DNA, 15 bp, Homo sapiens
atatgtggtgtgagg

SEQ ID NO: 187748 - DNA, 15 bp, Homo sapiens
gatatgtggtgtgag

SEQ ID NO: 187749 - DNA, 15 bp, Homo sapiens
ggatatgtggtgtga

SEQ ID NO: 187750 - DNA, 15 bp, Homo sapiens
gggatatgtggtgtg

SEQ ID NO: 187751 - DNA, 15 bp, Homo sapiens
tgggatatgtggtgt

SEQ ID NO: 187752 - DNA, 15 bp, Homo sapiens
ctgggatatgtggtg

SEQ ID NO: 187753 - DNA, 15 bp, Homo sapiens
tctgggatatgtggt

SEQ ID NO: 187754 - DNA, 15 bp, Homo sapiens
gtctgggatatgtgg

SEQ ID NO: 187755 - DNA, 15 bp, Homo sapiens
ggtctgggatatgtg

SEQ ID NO: 187756 - DNA, 15 bp, Homo sapiens
aggtctgggatatgt

SEQ ID NO: 187757 - DNA, 15 bp, Homo sapiens
gaggtctgggatatg

SEQ ID NO: 187758 - DNA, 15 bp, Homo sapiens
tgaggtctgggatat

SEQ ID NO: 187759 - DNA, 15 bp, Homo sapiens
gtgaggtctgggata

SEQ ID NO: 187760 - DNA, 15 bp, Homo sapiens
tgtgaggtctgggat

SEQ ID NO: 187761 - DNA, 15 bp, Homo sapiens
gtgtgaggtctggga

SEQ ID NO: 187762 - DNA, 15 bp, Homo sapiens
gcagtgtgaggtctg

SEQ ID NO: 187763 - DNA, 15 bp, Homo sapiens
tgcagtgtgaggtct

SEQ ID NO: 187764 - DNA, 15 bp, Homo sapiens
gtgcagtgtgaggtc

SEQ ID NO: 187765 - DNA, 15 bp, Homo sapiens
tgtgcagtgtgaggt

SEQ ID NO: 187766 - DNA, 15 bp, Homo sapiens
ggggtgtgcagtgtg

SEQ ID NO: 187767 - DNA, 15 bp, Homo sapiens
tggggtgtgcagtgt

SEQ ID NO: 187768 - DNA, 15 bp, Homo sapiens
ctggggtgtgcagtg

SEQ ID NO: 187769 - DNA, 15 bp, Homo sapiens
tctggggtgtgcagt

SEQ ID NO: 187770 - DNA, 15 bp, Homo sapiens
gtctggggtgtgcag

SEQ ID NO: 187771 - DNA, 15 bp, Homo sapiens
ggtctggggtgtgca

SEQ ID NO: 187772 - DNA, 15 bp, Homo sapiens
aggtctggggtgtgc

SEQ ID NO: 187773 - DNA, 15 bp, Homo sapiens
gtgtgagcaaatgtg

SEQ ID NO: 187774 - DNA, 15 bp, Homo sapiens
tgtgtgagcaaatgt

SEQ ID NO: 187775 - DNA, 15 bp, Homo sapiens
gtgtgtgagcaaatg

SEQ ID NO: 187776 - DNA, 15 bp, Homo sapiens
ggtgtgtgagcaaat

SEQ ID NO: 187777 - DNA, 15 bp, Homo sapiens
aggtgtgtgagcaaa

SEQ ID NO: 187778 - DNA, 15 bp, Homo sapiens
caggtgtgtgagcaa

SEQ ID NO: 187779 - DNA, 15 bp, Homo sapiens
gcaggtgtgtgagca

SEQ ID NO: 187780 - DNA, 15 bp, Homo sapiens
tgcaggtgtgtgagc

SEQ ID NO: 187781 - DNA, 15 bp, Homo sapiens
ctgcaggtgtgtgag

SEQ ID NO: 187782 - DNA, 15 bp, Homo sapiens
gctgcaggtgtgtga

SEQ ID NO: 187783 - DNA, 15 bp, Homo sapiens
agctgcaggtgtgtg

SEQ ID NO: 187784 - DNA, 15 bp, Homo sapiens
cagctgcaggtgtgt

SEQ ID NO: 187785 - DNA, 15 bp, Homo sapiens
gcagctgcaggtgtg

SEQ ID NO: 187786 - DNA, 15 bp, Homo sapiens
agcagctgcaggtgt

SEQ ID NO: 187787 - DNA, 15 bp, Homo sapiens
gagcagctgcaggtg

SEQ ID NO: 187788 - DNA, 15 bp, Homo sapiens
tgagcagctgcaggt

SEQ ID NO: 187789 - DNA, 15 bp, Homo sapiens
gtgagcagctgcagg

SEQ ID NO: 187790 - DNA, 15 bp, Homo sapiens
tgtgagcagctgcag

SEQ ID NO: 187791 - DNA, 15 bp, Homo sapiens
gtgtgagcagctgca

SEQ ID NO: 187792 - DNA, 15 bp, Homo sapiens
tgtgtgagcagctgc

SEQ ID NO: 187793 - DNA, 15 bp, Homo sapiens
atgtgtgagcagctg

SEQ ID NO: 187794 - DNA, 15 bp, Homo sapiens
catgtgtgagcagct

SEQ ID NO: 187795 - DNA, 15 bp, Homo sapiens
gcatgtgtgagcagc

SEQ ID NO: 187796 - DNA, 15 bp, Homo sapiens
ggcatgtgtgagcag

SEQ ID NO: 187797 - DNA, 15 bp, Homo sapiens
aggcatgtgtgagca

SEQ ID NO: 187798 - DNA, 15 bp, Homo sapiens
caggcatgtgtgagc

SEQ ID NO: 187799 - DNA, 15 bp, Homo sapiens
gcaggcatgtgtgag

SEQ ID NO: 187800 - DNA, 15 bp, Homo sapiens
tgcaggcatgtgtga

SEQ ID NO: 187801 - DNA, 15 bp, Homo sapiens
atgcaggcatgtgtg

SEQ ID NO: 187802 - DNA, 15 bp, Homo sapiens
catgcaggcatgtgt

SEQ ID NO: 187803 - DNA, 15 bp, Homo sapiens
tcatgcaggcatgtg

SEQ ID NO: 187804 - DNA, 15 bp, Homo sapiens
ctcatgcaggcatgt

SEQ ID NO: 187805 - DNA, 15 bp, Homo sapiens
tctcatgcaggcatg

SEQ ID NO: 187806 - DNA, 15 bp, Homo sapiens
ctctcatgcaggcat

SEQ ID NO: 187807 - DNA, 15 bp, Homo sapiens
cctctcatgcaggca

SEQ ID NO: 187808 - DNA, 15 bp, Homo sapiens
gcctctcatgcaggc

SEQ ID NO: 187809 - DNA, 15 bp, Homo sapiens
ggcctctcatgcagg

SEQ ID NO: 187810 - DNA, 15 bp, Homo sapiens
gggcctctcatgcag

SEQ ID NO: 187811 - DNA, 15 bp, Homo sapiens
agggcctctcatgca

SEQ ID NO: 187812 - DNA, 15 bp, Homo sapiens
gagggcctctcatgc

SEQ ID NO: 187813 - DNA, 15 bp, Homo sapiens
agagggcctctcatg

SEQ ID NO: 187814 - DNA, 15 bp, Homo sapiens
gagagggcctctcat

SEQ ID NO: 187815 - DNA, 15 bp, Homo sapiens
ggagagggcctctca

SEQ ID NO: 187816 - DNA, 15 bp, Homo sapiens
tggagagggcctctc

SEQ ID NO: 187817 - DNA, 15 bp, Homo sapiens
gtggagagggcctct

SEQ ID NO: 187818 - DNA, 15 bp, Homo sapiens
ggtggagagggcctc

SEQ ID NO: 187819 - DNA, 15 bp, Homo sapiens
gggtggagagggcct

SEQ ID NO: 187820 - DNA, 15 bp, Homo sapiens
agggtggagagggcc

SEQ ID NO: 187821 - DNA, 15 bp, Homo sapiens
aagggtggagagggc

SEQ ID NO: 187822 - DNA, 15 bp, Homo sapiens
gaagggtggagaggg

SEQ ID NO: 187823 - DNA, 15 bp, Homo sapiens
tgaagggtggagagg

SEQ ID NO: 187824 - DNA, 15 bp, Homo sapiens
ctgaagggtggagag

SEQ ID NO: 187825 - DNA, 15 bp, Homo sapiens
actgaagggtggaga

SEQ ID NO: 187826 - DNA, 15 bp, Homo sapiens
gactgaagggtggag

SEQ ID NO: 187827 - DNA, 15 bp, Homo sapiens
agactgaagggtgga

SEQ ID NO: 187828 - DNA, 15 bp, Homo sapiens
gagactgaagggtgg

SEQ ID NO: 187829 - DNA, 15 bp, Homo sapiens
ggagactgaagggtg

SEQ ID NO: 187830 - DNA, 15 bp, Homo sapiens
gggagactgaagggt

SEQ ID NO: 187831 - DNA, 15 bp, Homo sapiens
cgggagactgaaggg

SEQ ID NO: 187832 - DNA, 15 bp, Homo sapiens
acgggagactgaagg

SEQ ID NO: 187833 - DNA, 15 bp, Homo sapiens
tacgggagactgaag

SEQ ID NO: 187834 - DNA, 15 bp, Homo sapiens
gtacgggagactgaa

SEQ ID NO: 187835 - DNA, 15 bp, Homo sapiens
tgtacgggagactga

SEQ ID NO: 187836 - DNA, 15 bp, Homo sapiens
gtgtacgggagactg

SEQ ID NO: 187837 - DNA, 15 bp, Homo sapiens
ggtgtacgggagact

SEQ ID NO: 187838 - DNA, 15 bp, Homo sapiens
cggtgtacgggagac

SEQ ID NO: 187839 - DNA, 15 bp, Homo sapiens
ccggtgtacgggaga

SEQ ID NO: 187840 - DNA, 15 bp, Homo sapiens
gccggtgtacgggag

SEQ ID NO: 187841 - DNA, 15 bp, Homo sapiens
tgccggtgtacggga

SEQ ID NO: 187842 - DNA, 15 bp, Homo sapiens
ctgccggtgtacggg

SEQ ID NO: 187843 - DNA, 15 bp, Homo sapiens
cctgccggtgtacgg

SEQ ID NO: 187844 - DNA, 15 bp, Homo sapiens
acctgccggtgtacg

SEQ ID NO: 187845 - DNA, 15 bp, Homo sapiens
cacctgccggtgtac

SEQ ID NO: 187846 - DNA, 15 bp, Homo sapiens
gcacctgccggtgta

SEQ ID NO: 187847 - DNA, 15 bp, Homo sapiens
ggcacctgccggtgt

SEQ ID NO: 187848 - DNA, 15 bp, Homo sapiens
gggcacctgccggtg

SEQ ID NO: 187849 - DNA, 15 bp, Homo sapiens
tgggcacctgccggt

SEQ ID NO: 187850 - DNA, 15 bp, Homo sapiens
gtgggcacctgccgg

SEQ ID NO: 187851 - DNA, 15 bp, Homo sapiens
ggtgggcacctgccg

SEQ ID NO: 187852 - DNA, 15 bp, Homo sapiens
gggtgggcacctgcc

SEQ ID NO: 187853 - DNA, 15 bp, Homo sapiens
ggggtgggcacctgc

SEQ ID NO: 187854 - DNA, 15 bp, Homo sapiens
tggggtgggcacctg

SEQ ID NO: 187855 - DNA, 15 bp, Homo sapiens
gtggggtgggcacct

SEQ ID NO: 187856 - DNA, 15 bp, Homo sapiens
tgtggggtgggcacc

SEQ ID NO: 187857 - DNA, 15 bp, Homo sapiens
gtgtggggtgggcac

SEQ ID NO: 187858 - DNA, 15 bp, Homo sapiens
ggtgtggggtgggca

SEQ ID NO: 187859 - DNA, 15 bp, Homo sapiens
tggtgtggggtgggc

SEQ ID NO: 187860 - DNA, 15 bp, Homo sapiens
ctggtgtggggtggg

SEQ ID NO: 187861 - DNA, 15 bp, Homo sapiens
gctggtgtggggtgg

SEQ ID NO: 187862 - DNA, 15 bp, Homo sapiens
ggctggtgtggggtg

SEQ ID NO: 187863 - DNA, 15 bp, Homo sapiens
cggctggtgtggggt

SEQ ID NO: 187864 - DNA, 15 bp, Homo sapiens
gcggctggtgtgggg

SEQ ID NO: 187865 - DNA, 15 bp, Homo sapiens
agcggctggtgtggg

SEQ ID NO: 187866 - DNA, 15 bp, Homo sapiens
gagcggctggtgtgg

SEQ ID NO: 187867 - DNA, 15 bp, Homo sapiens
tgagcggctggtgtg

SEQ ID NO: 187868 - DNA, 15 bp, Homo sapiens
gtgagcggctggtgt

SEQ ID NO: 187869 - DNA, 15 bp, Homo sapiens
tgtgagcggctggtg

SEQ ID NO: 187870 - DNA, 15 bp, Homo sapiens
gtgtgagcggctggt

SEQ ID NO: 187871 - DNA, 15 bp, Homo sapiens
tgtgtgagcggctgg

SEQ ID NO: 187872 - DNA, 15 bp, Homo sapiens
ctgtgtgagcggctg

SEQ ID NO: 187873 - DNA, 15 bp, Homo sapiens
cctgtgtgagcggct

SEQ ID NO: 187874 - DNA, 15 bp, Homo sapiens
gcctgtgtgagcggc

SEQ ID NO: 187875 - DNA, 15 bp, Homo sapiens
tgcctgtgtgagcgg

SEQ ID NO: 187876 - DNA, 15 bp, Homo sapiens
gtgcctgtgtgagcg

SEQ ID NO: 187877 - DNA, 15 bp, Homo sapiens
ggtgcctgtgtgagc

SEQ ID NO: 187878 - DNA, 15 bp, Homo sapiens
gggtgcctgtgtgag

SEQ ID NO: 187879 - DNA, 15 bp, Homo sapiens
ggggtgcctgtgtga

SEQ ID NO: 187880 - DNA, 15 bp, Homo sapiens
gggggtgcctgtgtg

SEQ ID NO: 187881 - DNA, 15 bp, Homo sapiens
cgggggtgcctgtgt

SEQ ID NO: 187882 - DNA, 15 bp, Homo sapiens
acgggggtgcctgtg

SEQ ID NO: 187883 - DNA, 15 bp, Homo sapiens
aacgggggtgcctgt

SEQ ID NO: 187884 - DNA, 15 bp, Homo sapiens
aaacgggggtgcctg

SEQ ID NO: 187885 - DNA, 15 bp, Homo sapiens
aaaacgggggtgcct

SEQ ID NO: 187886 - DNA, 15 bp, Homo sapiens
taaaacgggggtgcc

SEQ ID NO: 187887 - DNA, 15 bp, Homo sapiens
ctaaaacgggggtgc

SEQ ID NO: 187888 - DNA, 15 bp, Homo sapiens
gctaaaacgggggtg

SEQ ID NO: 187889 - DNA, 15 bp, Homo sapiens
ggctaaaacgggggt

SEQ ID NO: 187890 - DNA, 15 bp, Homo sapiens
aggctaaaacggggg

SEQ ID NO: 187891 - DNA, 15 bp, Homo sapiens
gaggctaaaacgggg

SEQ ID NO: 187892 - DNA, 15 bp, Homo sapiens
agaggctaaaacggg

SEQ ID NO: 187893 - DNA, 15 bp, Homo sapiens
aagaggctaaaacgg

SEQ ID NO: 187894 - DNA, 15 bp, Homo sapiens
taagaggctaaaacg

SEQ ID NO: 187895 - DNA, 15 bp, Homo sapiens
gtaagaggctaaaac

SEQ ID NO: 187896 - DNA, 15 bp, Homo sapiens
tgtaagaggctaaaa

SEQ ID NO: 187897 - DNA, 15 bp, Homo sapiens
gtgtaagaggctaaa

SEQ ID NO: 187898 - DNA, 15 bp, Homo sapiens
agtgtaagaggctaa

SEQ ID NO: 187899 - DNA, 15 bp, Homo sapiens
aagtgtaagaggcta

SEQ ID NO: 187900 - DNA, 15 bp, Homo sapiens
caagtgtaagaggct

SEQ ID NO: 187901 - DNA, 15 bp, Homo sapiens
gcaagtgtaagaggc

SEQ ID NO: 187902 - DNA, 15 bp, Homo sapiens
tgcaagtgtaagagg

SEQ ID NO: 187903 - DNA, 15 bp, Homo sapiens
gtgcaagtgtaagag

SEQ ID NO: 187904 - DNA, 15 bp, Homo sapiens
tgtgcaagtgtaaga

SEQ ID NO: 187905 - DNA, 15 bp, Homo sapiens
ctgtgcaagtgtaag

SEQ ID NO: 187906 - DNA, 15 bp, Homo sapiens
cctgtgcaagtgtaa

SEQ ID NO: 187907 - DNA, 15 bp, Homo sapiens
ccctgtgcaagtgta

SEQ ID NO: 187908 - DNA, 15 bp, Homo sapiens
cccctgtgcaagtgt

SEQ ID NO: 187909 - DNA, 15 bp, Homo sapiens
ccccctgtgcaagtg

SEQ ID NO: 187910 - DNA, 15 bp, Homo sapiens
gccccctgtgcaagt

SEQ ID NO: 187911 - DNA, 15 bp, Homo sapiens
ggccccctgtgcaag

SEQ ID NO: 187912 - DNA, 15 bp, Homo sapiens
gggccccctgtgcaa

SEQ ID NO: 187913 - DNA, 15 bp, Homo sapiens
agggccccctgtgca

SEQ ID NO: 187914 - DNA, 15 bp, Homo sapiens
aagggccccctgtgc

SEQ ID NO: 187915 - DNA, 15 bp, Homo sapiens
gaagggccccctgtg

SEQ ID NO: 187916 - DNA, 15 bp, Homo sapiens
tgaagggccccctgt

SEQ ID NO: 187917 - DNA, 15 bp, Homo sapiens
gtgaagggccccctg

SEQ ID NO: 187918 - DNA, 15 bp, Homo sapiens
ggtgaagggccccct

SEQ ID NO: 187919 - DNA, 15 bp, Homo sapiens
aggtgaagggccccc

SEQ ID NO: 187920 - DNA, 15 bp, Homo sapiens
caggtgaagggcccc

SEQ ID NO: 187921 - DNA, 15 bp, Homo sapiens
gcaggtgaagggccc

SEQ ID NO: 187922 - DNA, 15 bp, Homo sapiens
agcaggtgaagggcc

SEQ ID NO: 187923 - DNA, 15 bp, Homo sapiens
aagcaggtgaagggc

SEQ ID NO: 187924 - DNA, 15 bp, Homo sapiens
aaagcaggtgaaggg

SEQ ID NO: 187925 - DNA, 15 bp, Homo sapiens
caaagcaggtgaagg

SEQ ID NO: 187926 - DNA, 15 bp, Homo sapiens
gcaaagcaggtgaag

SEQ ID NO: 187927 - DNA, 15 bp, Homo sapiens
tgcaaagcaggtgaa

SEQ ID NO: 187928 - DNA, 15 bp, Homo sapiens
ctgcaaagcaggtga

SEQ ID NO: 187929 - DNA, 15 bp, Homo sapiens
gctgcaaagcaggtg

SEQ ID NO: 187930 - DNA, 15 bp, Homo sapiens
tgctgcaaagcaggt

SEQ ID NO: 187931 - DNA, 15 bp, Homo sapiens
gtgctgcaaagcagg

SEQ ID NO: 187932 - DNA, 15 bp, Homo sapiens
ggtgctgcaaagcag

SEQ ID NO: 187933 - DNA, 15 bp, Homo sapiens
cggtgctgcaaagca

SEQ ID NO: 187934 - DNA, 15 bp, Homo sapiens
ccggtgctgcaaagc

SEQ ID NO: 187935 - DNA, 15 bp, Homo sapiens
tccggtgctgcaaag

SEQ ID NO: 187936 - DNA, 15 bp, Homo sapiens
ctccggtgctgcaaa

SEQ ID NO: 187937 - DNA, 15 bp, Homo sapiens
gctccggtgctgcaa

SEQ ID NO: 187938 - DNA, 15 bp, Homo sapiens
ggctccggtgctgca

SEQ ID NO: 187939 - DNA, 15 bp, Homo sapiens
cggctccggtgctgc

SEQ ID NO: 187940 - DNA, 15 bp, Homo sapiens
ccggctccggtgctg

SEQ ID NO: 187941 - DNA, 15 bp, Homo sapiens
tccggctccggtgct

SEQ ID NO: 187942 - DNA, 15 bp, Homo sapiens
ctccggctccggtgc

SEQ ID NO: 187943 - DNA, 15 bp, Homo sapiens
gctccggctccggtg

SEQ ID NO: 187944 - DNA, 15 bp, Homo sapiens
ggctccggctccggt

SEQ ID NO: 187945 - DNA, 15 bp, Homo sapiens
gggctccggctccgg

SEQ ID NO: 187946 - DNA, 15 bp, Homo sapiens
tgggctccggctccg

SEQ ID NO: 187947 - DNA, 15 bp, Homo sapiens
ctgggctccggctcc

SEQ ID NO: 187948 - DNA, 15 bp, Homo sapiens
tctgggctccggctc

SEQ ID NO: 187949 - DNA, 15 bp, Homo sapiens
gtctgggctccggct

SEQ ID NO: 187950 - DNA, 15 bp, Homo sapiens
tgtctgggctccggc

SEQ ID NO: 187951 - DNA, 15 bp, Homo sapiens
gtgtctgggctccgg

SEQ ID NO: 187952 - DNA, 15 bp, Homo sapiens
tgtgtctgggctccg

SEQ ID NO: 187953 - DNA, 15 bp, Homo sapiens
atgtgtctgggctcc

SEQ ID NO: 187954 - DNA, 15 bp, Homo sapiens
catgtgtctgggctc

SEQ ID NO: 187955 - DNA, 15 bp, Homo sapiens
tcatgtgtctgggct

SEQ ID NO: 187956 - DNA, 15 bp, Homo sapiens
atcatgtgtctgggc

SEQ ID NO: 187957 - DNA, 15 bp, Homo sapiens
catcatgtgtctggg

SEQ ID NO: 187958 - DNA, 15 bp, Homo sapiens
tcatcatgtgtctgg

SEQ ID NO: 187959 - DNA, 15 bp, Homo sapiens
ctcatcatgtgtctg

SEQ ID NO: 187960 - DNA, 15 bp, Homo sapiens
cctcatcatgtgtct

SEQ ID NO: 187961 - DNA, 15 bp, Homo sapiens
gcctcatcatgtgtc

SEQ ID NO: 187962 - DNA, 15 bp, Homo sapiens
tgcctcatcatgtgt

SEQ ID NO: 187963 - DNA, 15 bp, Homo sapiens
atgcctcatcatgtg

SEQ ID NO: 187964 - DNA, 15 bp, Homo sapiens
catgcctcatcatgt

SEQ ID NO: 187965 - DNA, 15 bp, Homo sapiens
tcatgcctcatcatg

SEQ ID NO: 187966 - DNA, 15 bp, Homo sapiens
ctcatgcctcatcat

SEQ ID NO: 187967 - DNA, 15 bp, Homo sapiens
tctcatgcctcatca

SEQ ID NO: 187968 - DNA, 15 bp, Homo sapiens
ttctcatgcctcatc

SEQ ID NO: 187969 - DNA, 15 bp, Homo sapiens
cttctcatgcctcat

SEQ ID NO: 187970 - DNA, 15 bp, Homo sapiens
acttctcatgcctca

SEQ ID NO: 187971 - DNA, 15 bp, Homo sapiens
cacttctcatgcctc

SEQ ID NO: 187972 - DNA, 15 bp, Homo sapiens
ccacttctcatgcct

SEQ ID NO: 187973 - DNA, 15 bp, Homo sapiens
tccacttctcatgcc

SEQ ID NO: 187974 - DNA, 15 bp, Homo sapiens
ttccacttctcatgc

SEQ ID NO: 187975 - DNA, 15 bp, Homo sapiens
tttccacttctcatg

SEQ ID NO: 187976 - DNA, 15 bp, Homo sapiens
ctttccacttctcat

SEQ ID NO: 187977 - DNA, 15 bp, Homo sapiens
actttccacttctca

SEQ ID NO: 187978 - DNA, 15 bp, Homo sapiens
aactttccacttctc

SEQ ID NO: 187979 - DNA, 15 bp, Homo sapiens
gaactttccacttct

SEQ ID NO: 187980 - DNA, 15 bp, Homo sapiens
agaactttccacttc

SEQ ID NO: 187981 - DNA, 15 bp, Homo sapiens
cagaactttccactt

SEQ ID NO: 187982 - DNA, 15 bp, Homo sapiens
gcagaactttccact

SEQ ID NO: 187983 - DNA, 15 bp, Homo sapiens
tgcagaactttccac

SEQ ID NO: 187984 - DNA, 15 bp, Homo sapiens
ctgcagaactttcca

SEQ ID NO: 187985 - DNA, 15 bp, Homo sapiens
cctgcagaactttcc

SEQ ID NO: 187986 - DNA, 15 bp, Homo sapiens
acctgcagaactttc

SEQ ID NO: 187987 - DNA, 15 bp, Homo sapiens
cacctgcagaacttt

SEQ ID NO: 187988 - DNA, 15 bp, Homo sapiens
gcacctgcagaactt

SEQ ID NO: 187989 - DNA, 15 bp, Homo sapiens
agcacctgcagaact

SEQ ID NO: 187990 - DNA, 15 bp, Homo sapiens
gagcacctgcagaac

SEQ ID NO: 187991 - DNA, 15 bp, Homo sapiens
agagcacctgcagaa

SEQ ID NO: 187992 - DNA, 15 bp, Homo sapiens
cagagcacctgcaga

SEQ ID NO: 187993 - DNA, 15 bp, Homo sapiens
gcagagcacctgcag

SEQ ID NO: 187994 - DNA, 15 bp, Homo sapiens
ggcagagcacctgca

SEQ ID NO: 187995 - DNA, 15 bp, Homo sapiens
gggcagagcacctgc

SEQ ID NO: 187996 - DNA, 15 bp, Homo sapiens
tgggcagagcacctg

SEQ ID NO: 187997 - DNA, 15 bp, Homo sapiens
gtgggcagagcacct

SEQ ID NO: 187998 - DNA, 15 bp, Homo sapiens
ggtgggcagagcacc

SEQ ID NO: 187999 - DNA, 15 bp, Homo sapiens
cggtgggcagagcac

SEQ ID NO: 188000 - DNA, 15 bp, Homo sapiens
acggtgggcagagca

SEQ ID NO: 188001 - DNA, 15 bp, Homo sapiens
cacggtgggcagagc

SEQ ID NO: 188002 - DNA, 15 bp, Homo sapiens
gcacggtgggcagag

SEQ ID NO: 188003 - DNA, 15 bp, Homo sapiens
tgcacggtgggcaga

SEQ ID NO: 188004 - DNA, 15 bp, Homo sapiens
ttgcacggtgggcag

SEQ ID NO: 188005 - DNA, 15 bp, Homo sapiens
tttgcacggtgggca

SEQ ID NO: 188006 - DNA, 15 bp, Homo sapiens
ctttgcacggtgggc

SEQ ID NO: 188007 - DNA, 15 bp, Homo sapiens
cctttgcacggtggg

SEQ ID NO: 188008 - DNA, 15 bp, Homo sapiens
tcctttgcacggtgg

SEQ ID NO: 188009 - DNA, 15 bp, Homo sapiens
ctcctttgcacggtg

SEQ ID NO: 188010 - DNA, 15 bp, Homo sapiens
cctcctttgcacggt

SEQ ID NO: 188011 - DNA, 15 bp, Homo sapiens
tcctcctttgcacgg

SEQ ID NO: 188012 - DNA, 15 bp, Homo sapiens
ctcctcctttgcacg

SEQ ID NO: 188013 - DNA, 15 bp, Homo sapiens
cctcctcctttgcac

SEQ ID NO: 188014 - DNA, 15 bp, Homo sapiens
gcctcctcctttgca

SEQ ID NO: 188015 - DNA, 15 bp, Homo sapiens
tgcctcctcctttgc

SEQ ID NO: 188016 - DNA, 15 bp, Homo sapiens
ctgcctcctcctttg

SEQ ID NO: 188017 - DNA, 15 bp, Homo sapiens
tctgcctcctccttt

SEQ ID NO: 188018 - DNA, 15 bp, Homo sapiens
ctctgcctcctcctt

SEQ ID NO: 188019 - DNA, 15 bp, Homo sapiens
cctctgcctcctcct

SEQ ID NO: 188020 - DNA, 15 bp, Homo sapiens
acctctgcctcctcc

SEQ ID NO: 188021 - DNA, 15 bp, Homo sapiens
gacctctgcctcctc

SEQ ID NO: 188022 - DNA, 15 bp, Homo sapiens
ggacctctgcctcct

SEQ ID NO: 188023 - DNA, 15 bp, Homo sapiens
tggacctctgcctcc

SEQ ID NO: 188024 - DNA, 15 bp, Homo sapiens
ctggacctctgcctc

SEQ ID NO: 188025 - DNA, 15 bp, Homo sapiens
gctggacctctgcct

SEQ ID NO: 188026 - DNA, 15 bp, Homo sapiens
agctggacctctgcc

SEQ ID NO: 188027 - DNA, 15 bp, Homo sapiens
cagctggacctctgc

SEQ ID NO: 188028 - DNA, 15 bp, Homo sapiens
gcagctggacctctg

SEQ ID NO: 188029 - DNA, 15 bp, Homo sapiens
ggcagctggacctct

SEQ ID NO: 188030 - DNA, 15 bp, Homo sapiens
aggcagctggacctc

SEQ ID NO: 188031 - DNA, 15 bp, Homo sapiens
gaggcagctggacct

SEQ ID NO: 188032 - DNA, 15 bp, Homo sapiens
agaggcagctggacc

SEQ ID NO: 188033 - DNA, 15 bp, Homo sapiens
gagaggcagctggac

SEQ ID NO: 188034 - DNA, 15 bp, Homo sapiens
tgagaggcagctgga

SEQ ID NO: 188035 - DNA, 15 bp, Homo sapiens
ctgagaggcagctgg

SEQ ID NO: 188036 - DNA, 15 bp, Homo sapiens
gctgagaggcagctg

SEQ ID NO: 188037 - DNA, 15 bp, Homo sapiens
tgctgagaggcagct

SEQ ID NO: 188038 - DNA, 15 bp, Homo sapiens
atgctgagaggcagc

SEQ ID NO: 188039 - DNA, 15 bp, Homo sapiens
tatgctgagaggcag

SEQ ID NO: 188040 - DNA, 15 bp, Homo sapiens
atatgctgagaggca

SEQ ID NO: 188041 - DNA, 15 bp, Homo sapiens
tatatgctgagaggc

SEQ ID NO: 188042 - DNA, 15 bp, Homo sapiens
ctatatgctgagagg

SEQ ID NO: 188043 - DNA, 15 bp, Homo sapiens
tctatatgctgagag

SEQ ID NO: 188044 - DNA, 15 bp, Homo sapiens
ctctatatgctgaga

SEQ ID NO: 188045 - DNA, 15 bp, Homo sapiens
cctctatatgctgag

SEQ ID NO: 188046 - DNA, 15 bp, Homo sapiens
gcctctatatgctga

SEQ ID NO: 188047 - DNA, 15 bp, Homo sapiens
agcctctatatgctg

SEQ ID NO: 188048 - DNA, 15 bp, Homo sapiens
gagcctctatatgct

SEQ ID NO: 188049 - DNA, 15 bp, Homo sapiens
tgagcctctatatgc

SEQ ID NO: 188050 - DNA, 15 bp, Homo sapiens
ctgagcctctatatg

SEQ ID NO: 188051 - DNA, 15 bp, Homo sapiens
tctgagcctctatat

SEQ ID NO: 188052 - DNA, 15 bp, Homo sapiens
ctctgagcctctata

SEQ ID NO: 188053 - DNA, 15 bp, Homo sapiens
cctctgagcctctat

SEQ ID NO: 188054 - DNA, 15 bp, Homo sapiens
gcctctgagcctcta

SEQ ID NO: 188055 - DNA, 15 bp, Homo sapiens
ggcctctgagcctct

SEQ ID NO: 188056 - DNA, 15 bp, Homo sapiens
aggcctctgagcctc

SEQ ID NO: 188057 - DNA, 15 bp, Homo sapiens
aaggcctctgagcct

SEQ ID NO: 188058 - DNA, 15 bp, Homo sapiens
aaaggcctctgagcc

SEQ ID NO: 188059 - DNA, 15 bp, Homo sapiens
caaaggcctctgagc

SEQ ID NO: 188060 - DNA, 15 bp, Homo sapiens
gcaaaggcctctgag

SEQ ID NO: 188061 - DNA, 15 bp, Homo sapiens
tgcaaaggcctctga

SEQ ID NO: 188062 - DNA, 15 bp, Homo sapiens
ctgcaaaggcctctg

SEQ ID NO: 188063 - DNA, 15 bp, Homo sapiens
gctgcaaaggcctct

SEQ ID NO: 188064 - DNA, 15 bp, Homo sapiens
tgctgcaaaggcctc

SEQ ID NO: 188065 - DNA, 15 bp, Homo sapiens
atgctgcaaaggcct

SEQ ID NO: 188066 - DNA, 15 bp, Homo sapiens
catgctgcaaaggcc

SEQ ID NO: 188067 - DNA, 15 bp, Homo sapiens
gcatgctgcaaaggc

SEQ ID NO: 188068 - DNA, 15 bp, Homo sapiens
tgcatgctgcaaagg

SEQ ID NO: 188069 - DNA, 15 bp, Homo sapiens
ctgcatgctgcaaag

SEQ ID NO: 188070 - DNA, 15 bp, Homo sapiens
tctgcatgctgcaaa

SEQ ID NO: 188071 - DNA, 15 bp, Homo sapiens
ctctgcatgctgcaa

SEQ ID NO: 188072 - DNA, 15 bp, Homo sapiens
gctctgcatgctgca

SEQ ID NO: 188073 - DNA, 15 bp, Homo sapiens
agctctgcatgctgc

SEQ ID NO: 188074 - DNA, 15 bp, Homo sapiens
aagctctgcatgctg

SEQ ID NO: 188075 - DNA, 15 bp, Homo sapiens
aaagctctgcatgct

SEQ ID NO: 188076 - DNA, 15 bp, Homo sapiens
aaaagctctgcatgc

SEQ ID NO: 188077 - DNA, 15 bp, Homo sapiens
caaaagctctgcatg

SEQ ID NO: 188078 - DNA, 15 bp, Homo sapiens
ccaaaagctctgcat

SEQ ID NO: 188079 - DNA, 15 bp, Homo sapiens
tccaaaagctctgca

SEQ ID NO: 188080 - DNA, 15 bp, Homo sapiens
ttccaaaagctctgc

SEQ ID NO: 188081 - DNA, 15 bp, Homo sapiens
gttccaaaagctctg

SEQ ID NO: 188082 - DNA, 15 bp, Homo sapiens
cgttccaaaagctct

SEQ ID NO: 188083 - DNA, 15 bp, Homo sapiens
acgttccaaaagctc

SEQ ID NO: 188084 - DNA, 15 bp, Homo sapiens
tacgttccaaaagct

SEQ ID NO: 188085 - DNA, 15 bp, Homo sapiens
atacgttccaaaagc

SEQ ID NO: 188086 - DNA, 15 bp, Homo sapiens
gatacgttccaaaag

SEQ ID NO: 188087 - DNA, 15 bp, Homo sapiens
agatacgttccaaaa

SEQ ID NO: 188088 - DNA, 15 bp, Homo sapiens
aagatacgttccaaa

SEQ ID NO: 188089 - DNA, 15 bp, Homo sapiens
taagatacgttccaa

SEQ ID NO: 188090 - DNA, 15 bp, Homo sapiens
gtaagatacgttcca

SEQ ID NO: 188091 - DNA, 15 bp, Homo sapiens
agtaagatacgttcc

SEQ ID NO: 188092 - DNA, 15 bp, Homo sapiens
aagtaagatacgttc

SEQ ID NO: 188093 - DNA, 15 bp, Homo sapiens
aaagtaagatacgtt

SEQ ID NO: 188094 - DNA, 15 bp, Homo sapiens
gaaagtaagatacgt

SEQ ID NO: 188095 - DNA, 15 bp, Homo sapiens
agaaagtaagatacg

SEQ ID NO: 188096 - DNA, 15 bp, Homo sapiens
gagaaagtaagatac

SEQ ID NO: 188097 - DNA, 15 bp, Homo sapiens
tgagaaagtaagata

SEQ ID NO: 188098 - DNA, 15 bp, Homo sapiens
atgagaaagtaagat

SEQ ID NO: 188099 - DNA, 15 bp, Homo sapiens
aatgagaaagtaaga

SEQ ID NO: 188100 - DNA, 15 bp, Homo sapiens
gaatgagaaagtaag

SEQ ID NO: 188101 - DNA, 15 bp, Homo sapiens
agaatgagaaagtaa

SEQ ID NO: 188102 - DNA, 15 bp, Homo sapiens
aagaatgagaaagta

SEQ ID NO: 188103 - DNA, 15 bp, Homo sapiens
taagaatgagaaagt

SEQ ID NO: 188104 - DNA, 15 bp, Homo sapiens
ttaagaatgagaaag

SEQ ID NO: 188105 - DNA, 15 bp, Homo sapiens
tttaagaatgagaaa

SEQ ID NO: 188106 - DNA, 15 bp, Homo sapiens
atttaagaatgagaa

SEQ ID NO: 188107 - DNA, 15 bp, Homo sapiens
aatttaagaatgaga

SEQ ID NO: 188108 - DNA, 15 bp, Homo sapiens
gaatttaagaatgag

SEQ ID NO: 188109 - DNA, 15 bp, Homo sapiens
tgaatttaagaatga

SEQ ID NO: 188110 - DNA, 15 bp, Homo sapiens
atgaatttaagaatg

SEQ ID NO: 188111 - DNA, 15 bp, Homo sapiens
aatgaatttaagaat

SEQ ID NO: 188112 - DNA, 15 bp, Homo sapiens
gaatgaatttaagaa

SEQ ID NO: 188113 - DNA, 15 bp, Homo sapiens
cgaatgaatttaaga

SEQ ID NO: 188114 - DNA, 15 bp, Homo sapiens
ccgaatgaatttaag

SEQ ID NO: 188115 - DNA, 15 bp, Homo sapiens
cccgaatgaatttaa

SEQ ID NO: 188116 - DNA, 15 bp, Homo sapiens
acccgaatgaattta

SEQ ID NO: 188117 - DNA, 15 bp, Homo sapiens
tacccgaatgaattt

SEQ ID NO: 188118 - DNA, 15 bp, Homo sapiens
ttacccgaatgaatt

SEQ ID NO: 188119 - DNA, 15 bp, Homo sapiens
gttacccgaatgaat

SEQ ID NO: 188120 - DNA, 15 bp, Homo sapiens
ggttacccgaatgaa

SEQ ID NO: 188121 - DNA, 15 bp, Homo sapiens
tggttacccgaatga

SEQ ID NO: 188122 - DNA, 15 bp, Homo sapiens
gtggttacccgaatg

SEQ ID NO: 188123 - DNA, 15 bp, Homo sapiens
agtggttacccgaat

SEQ ID NO: 188124 - DNA, 15 bp, Homo sapiens
cagtggttacccgaa

SEQ ID NO: 188125 - DNA, 15 bp, Homo sapiens
acagtggttacccga

SEQ ID NO: 188126 - DNA, 15 bp, Homo sapiens
aacagtggttacccg

SEQ ID NO: 188127 - DNA, 15 bp, Homo sapiens
aaacagtggttaccc

SEQ ID NO: 188128 - DNA, 15 bp, Homo sapiens
taaacagtggttacc

SEQ ID NO: 188129 - DNA, 15 bp, Homo sapiens
gtaaacagtggttac

SEQ ID NO: 188130 - DNA, 15 bp, Homo sapiens
agtaaacagtggtta

SEQ ID NO: 188131 - DNA, 15 bp, Homo sapiens
cagtaaacagtggtt

SEQ ID NO: 188132 - DNA, 15 bp, Homo sapiens
acagtaaacagtggt

SEQ ID NO: 188133 - DNA, 15 bp, Homo sapiens
cacagtaaacagtgg

SEQ ID NO: 188134 - DNA, 15 bp, Homo sapiens
gcacagtaaacagtg

SEQ ID NO: 188135 - DNA, 15 bp, Homo sapiens
tgcacagtaaacagt

SEQ ID NO: 188136 - DNA, 15 bp, Homo sapiens
gtgcacagtaaacag

SEQ ID NO: 188137 - DNA, 15 bp, Homo sapiens
ggtgcacagtaaaca

SEQ ID NO: 188138 - DNA, 15 bp, Homo sapiens
aggtgcacagtaaac

SEQ ID NO: 188139 - DNA, 15 bp, Homo sapiens
taggtgcacagtaaa

SEQ ID NO: 188140 - DNA, 15 bp, Homo sapiens
gtaggtgcacagtaa

SEQ ID NO: 188141 - DNA, 15 bp, Homo sapiens
ggtaggtgcacagta

SEQ ID NO: 188142 - DNA, 15 bp, Homo sapiens
tggtaggtgcacagt

SEQ ID NO: 188143 - DNA, 15 bp, Homo sapiens
atggtaggtgcacag

SEQ ID NO: 188144 - DNA, 15 bp, Homo sapiens
catggtaggtgcaca

SEQ ID NO: 188145 - DNA, 15 bp, Homo sapiens
ccatggtaggtgcac

SEQ ID NO: 188146 - DNA, 15 bp, Homo sapiens
cccatggtaggtgca

SEQ ID NO: 188147 - DNA, 15 bp, Homo sapiens
acccatggtaggtgc

SEQ ID NO: 188148 - DNA, 15 bp, Homo sapiens
gacccatggtaggtg

SEQ ID NO: 188149 - DNA, 15 bp, Homo sapiens
tgacccatggtaggt

SEQ ID NO: 188150 - DNA, 15 bp, Homo sapiens
ctgacccatggtagg

SEQ ID NO: 188151 - DNA, 15 bp, Homo sapiens
cctgacccatggtag

SEQ ID NO: 188152 - DNA, 15 bp, Homo sapiens
gcctgacccatggta

SEQ ID NO: 188153 - DNA, 15 bp, Homo sapiens
cgcctgacccatggt

SEQ ID NO: 188154 - DNA, 15 bp, Homo sapiens
gcgcctgacccatgg

SEQ ID NO: 188155 - DNA, 15 bp, Homo sapiens
agcgcctgacccatg

SEQ ID NO: 188156 - DNA, 15 bp, Homo sapiens
cagcgcctgacccat

SEQ ID NO: 188157 - DNA, 15 bp, Homo sapiens
acagcgcctgaccca

SEQ ID NO: 188158 - DNA, 15 bp, Homo sapiens
gacagcgcctgaccc

SEQ ID NO: 188159 - DNA, 15 bp, Homo sapiens
ggacagcgcctgacc

SEQ ID NO: 188160 - DNA, 15 bp, Homo sapiens
aggacagcgcctgac

SEQ ID NO: 188161 - DNA, 15 bp, Homo sapiens
gaggacagcgcctga

SEQ ID NO: 188162 - DNA, 15 bp, Homo sapiens
agaggacagcgcctg

SEQ ID NO: 188163 - DNA, 15 bp, Homo sapiens
cagaggacagcgcct

SEQ ID NO: 188164 - DNA, 15 bp, Homo sapiens
gcagaggacagcgcc

SEQ ID NO: 188165 - DNA, 15 bp, Homo sapiens
tgcagaggacagcgc

SEQ ID NO: 188166 - DNA, 15 bp, Homo sapiens
gtgcagaggacagcg

SEQ ID NO: 188167 - DNA, 15 bp, Homo sapiens
ggtgcagaggacagc

SEQ ID NO: 188168 - DNA, 15 bp, Homo sapiens
cggtgcagaggacag

SEQ ID NO: 188169 - DNA, 15 bp, Homo sapiens
ccggtgcagaggaca

SEQ ID NO: 188170 - DNA, 15 bp, Homo sapiens
cccggtgcagaggac

SEQ ID NO: 188171 - DNA, 15 bp, Homo sapiens
gcccggtgcagagga

SEQ ID NO: 188172 - DNA, 15 bp, Homo sapiens
tgcccggtgcagagg

SEQ ID NO: 188173 - DNA, 15 bp, Homo sapiens
atgcccggtgcagag

SEQ ID NO: 188174 - DNA, 15 bp, Homo sapiens
tatgcccggtgcaga

SEQ ID NO: 188175 - DNA, 15 bp, Homo sapiens
gtatgcccggtgcag

SEQ ID NO: 188176 - DNA, 15 bp, Homo sapiens
agtatgcccggtgca

SEQ ID NO: 188177 - DNA, 15 bp, Homo sapiens
cagtatgcccggtgc

SEQ ID NO: 188178 - DNA, 15 bp, Homo sapiens
gcagtatgcccggtg

SEQ ID NO: 188179 - DNA, 15 bp, Homo sapiens
tgcagtatgcccggt

SEQ ID NO: 188180 - DNA, 15 bp, Homo sapiens
ctgcagtatgcccgg

SEQ ID NO: 188181 - DNA, 15 bp, Homo sapiens
tctgcagtatgcccg

SEQ ID NO: 188182 - DNA, 15 bp, Homo sapiens
ttctgcagtatgccc

SEQ ID NO: 188183 - DNA, 15 bp, Homo sapiens
tttctgcagtatgcc

SEQ ID NO: 188184 - DNA, 15 bp, Homo sapiens
ttttctgcagtatgc

SEQ ID NO: 188185 - DNA, 15 bp, Homo sapiens
gttttctgcagtatg

SEQ ID NO: 188186 - DNA, 15 bp, Homo sapiens
cgttttctgcagtat

SEQ ID NO: 188187 - DNA, 15 bp, Homo sapiens
tcgttttctgcagta

SEQ ID NO: 188188 - DNA, 15 bp, Homo sapiens
ttcgttttctgcagt

SEQ ID NO: 188189 - DNA, 15 bp, Homo sapiens
cttcgttttctgcag

SEQ ID NO: 188190 - DNA, 15 bp, Homo sapiens
gcttcgttttctgca

SEQ ID NO: 188191 - DNA, 15 bp, Homo sapiens
tgcttcgttttctgc

SEQ ID NO: 188192 - DNA, 15 bp, Homo sapiens
ctgcttcgttttctg

SEQ ID NO: 188193 - DNA, 15 bp, Homo sapiens
tctgcttcgttttct

SEQ ID NO: 188194 - DNA, 15 bp, Homo sapiens
atctgcttcgttttc

SEQ ID NO: 188195 - DNA, 15 bp, Homo sapiens
catctgcttcgtttt

SEQ ID NO: 188196 - DNA, 15 bp, Homo sapiens
gcatctgcttcgttt

SEQ ID NO: 188197 - DNA, 15 bp, Homo sapiens
tgcatctgcttcgtt

SEQ ID NO: 188198 - DNA, 15 bp, Homo sapiens
ctgcatctgcttcgt

SEQ ID NO: 188199 - DNA, 15 bp, Homo sapiens
cctgcatctgcttcg

SEQ ID NO: 188200 - DNA, 15 bp, Homo sapiens
gcctgcatctgcttc

SEQ ID NO: 188201 - DNA, 15 bp, Homo sapiens
ggcctgcatctgctt

SEQ ID NO: 188202 - DNA, 15 bp, Homo sapiens
gggcctgcatctgct

SEQ ID NO: 188203 - DNA, 15 bp, Homo sapiens
agggcctgcatctgc

SEQ ID NO: 188204 - DNA, 15 bp, Homo sapiens
gggcagggcctgcat

SEQ ID NO: 188205 - DNA, 15 bp, Homo sapiens
agggcagggcctgca

SEQ ID NO: 188206 - DNA, 15 bp, Homo sapiens
gagggcagggcctgc

SEQ ID NO: 188207 - DNA, 15 bp, Homo sapiens
tgagggcagggcctg

SEQ ID NO: 188208 - DNA, 15 bp, Homo sapiens
atgagggcagggcct

SEQ ID NO: 188209 - DNA, 15 bp, Homo sapiens
aatgagggcagggcc

SEQ ID NO: 188210 - DNA, 15 bp, Homo sapiens
caatgagggcagggc

SEQ ID NO: 188211 - DNA, 15 bp, Homo sapiens
ccaatgagggcaggg

SEQ ID NO: 188212 - DNA, 15 bp, Homo sapiens
cccaatgagggcagg

SEQ ID NO: 188213 - DNA, 15 bp, Homo sapiens
acccaatgagggcag

SEQ ID NO: 188214 - DNA, 15 bp, Homo sapiens
aacccaatgagggca

SEQ ID NO: 188215 - DNA, 15 bp, Homo sapiens
taacccaatgagggc

SEQ ID NO: 188216 - DNA, 15 bp, Homo sapiens
ctaacccaatgaggg

SEQ ID NO: 188217 - DNA, 15 bp, Homo sapiens
cctaacccaatgagg

SEQ ID NO: 188218 - DNA, 15 bp, Homo sapiens
acctaacccaatgag

SEQ ID NO: 188219 - DNA, 15 bp, Homo sapiens
gacctaacccaatga

SEQ ID NO: 188220 - DNA, 15 bp, Homo sapiens
agacctaacccaatg

SEQ ID NO: 188221 - DNA, 15 bp, Homo sapiens
tagacctaacccaat

SEQ ID NO: 188222 - DNA, 15 bp, Homo sapiens
ctagacctaacccaa

SEQ ID NO: 188223 - DNA, 15 bp, Homo sapiens
actagacctaaccca

SEQ ID NO: 188224 - DNA, 15 bp, Homo sapiens
tactagacctaaccc

SEQ ID NO: 188225 - DNA, 15 bp, Homo sapiens
ctactagacctaacc

SEQ ID NO: 188226 - DNA, 15 bp, Homo sapiens
actactagacctaac

SEQ ID NO: 188227 - DNA, 15 bp, Homo sapiens
cactactagacctaa

SEQ ID NO: 188228 - DNA, 15 bp, Homo sapiens
ccactactagaccta

SEQ ID NO: 188229 - DNA, 15 bp, Homo sapiens
tccactactagacct

SEQ ID NO: 188230 - DNA, 15 bp, Homo sapiens
ctccactactagacc

SEQ ID NO: 188231 - DNA, 15 bp, Homo sapiens
tctccactactagac

SEQ ID NO: 188232 - DNA, 15 bp, Homo sapiens
gtctccactactaga

SEQ ID NO: 188233 - DNA, 15 bp, Homo sapiens
tgtctccactactag

SEQ ID NO: 188234 - DNA, 15 bp, Homo sapiens
ctgtctccactacta

SEQ ID NO: 188235 - DNA, 15 bp, Homo sapiens
tctgtctccactact

SEQ ID NO: 188236 - DNA, 15 bp, Homo sapiens
gtctgtctccactac

SEQ ID NO: 188237 - DNA, 15 bp, Homo sapiens
ggtctgtctccacta

SEQ ID NO: 188238 - DNA, 15 bp, Homo sapiens
tggtctgtctccact

SEQ ID NO: 188239 - DNA, 15 bp, Homo sapiens
gtggtctgtctccac

SEQ ID NO: 188240 - DNA, 15 bp, Homo sapiens
tgtggtctgtctcca

SEQ ID NO: 188241 - DNA, 15 bp, Homo sapiens
ctgtggtctgtctcc

SEQ ID NO: 188242 - DNA, 15 bp, Homo sapiens
tctgtggtctgtctc

SEQ ID NO: 188243 - DNA, 15 bp, Homo sapiens
gtctgtggtctgtct

SEQ ID NO: 188244 - DNA, 15 bp, Homo sapiens
tgtctgtggtctgtc

SEQ ID NO: 188245 - DNA, 15 bp, Homo sapiens
ctgtctgtggtctgt

SEQ ID NO: 188246 - DNA, 15 bp, Homo sapiens
cctgtctgtggtctg

SEQ ID NO: 188247 - DNA, 15 bp, Homo sapiens
tcctgtctgtggtct

SEQ ID NO: 188248 - DNA, 15 bp, Homo sapiens
gtcctgtctgtggtc

SEQ ID NO: 188249 - DNA, 15 bp, Homo sapiens
tgtcctgtctgtggt

SEQ ID NO: 188250 - DNA, 15 bp, Homo sapiens
ttgtcctgtctgtgg

SEQ ID NO: 188251 - DNA, 15 bp, Homo sapiens
tttgtcctgtctgtg

SEQ ID NO: 188252 - DNA, 15 bp, Homo sapiens
atttgtcctgtctgt

SEQ ID NO: 188253 - DNA, 15 bp, Homo sapiens
tatttgtcctgtctg

SEQ ID NO: 188254 - DNA, 15 bp, Homo sapiens
ctatttgtcctgtct

SEQ ID NO: 188255 - DNA, 15 bp, Homo sapiens
cctatttgtcctgtc

SEQ ID NO: 188256 - DNA, 15 bp, Homo sapiens
ccctatttgtcctgt

SEQ ID NO: 188257 - DNA, 15 bp, Homo sapiens
tccctatttgtcctg

SEQ ID NO: 188258 - DNA, 15 bp, Homo sapiens
ttccctatttgtcct

SEQ ID NO: 188259 - DNA, 15 bp, Homo sapiens
tttccctatttgtcc

SEQ ID NO: 188260 - DNA, 15 bp, Homo sapiens
gtttccctatttgtc

SEQ ID NO: 188261 - DNA, 15 bp, Homo sapiens
tgtttccctatttgt

SEQ ID NO: 188262 - DNA, 15 bp, Homo sapiens
ctgtttccctatttg

SEQ ID NO: 188263 - DNA, 15 bp, Homo sapiens
cctgtttccctattt

SEQ ID NO: 188264 - DNA, 15 bp, Homo sapiens
tcctgtttccctatt

SEQ ID NO: 188265 - DNA, 15 bp, Homo sapiens
ctcctgtttccctat

SEQ ID NO: 188266 - DNA, 15 bp, Homo sapiens
tctcctgtttcccta

SEQ ID NO: 188267 - DNA, 15 bp, Homo sapiens
ttctcctgtttccct

SEQ ID NO: 188268 - DNA, 15 bp, Homo sapiens
cttctcctgtttccc

SEQ ID NO: 188269 - DNA, 15 bp, Homo sapiens
gcttctcctgtttcc

SEQ ID NO: 188270 - DNA, 15 bp, Homo sapiens
ggcttctcctgtttc

SEQ ID NO: 188271 - DNA, 15 bp, Homo sapiens
tggcttctcctgttt

SEQ ID NO: 188272 - DNA, 15 bp, Homo sapiens
ctggcttctcctgtt

SEQ ID NO: 188273 - DNA, 15 bp, Homo sapiens
cctggcttctcctgt

SEQ ID NO: 188274 - DNA, 15 bp, Homo sapiens
acctggcttctcctg

SEQ ID NO: 188275 - DNA, 15 bp, Homo sapiens
cacctggcttctcct

SEQ ID NO: 188276 - DNA, 15 bp, Homo sapiens
ccacctggcttctcc

SEQ ID NO: 188277 - DNA, 15 bp, Homo sapiens
gccacctggcttctc

SEQ ID NO: 188278 - DNA, 15 bp, Homo sapiens
ggccacctggcttct

SEQ ID NO: 188279 - DNA, 15 bp, Homo sapiens
tggccacctggcttc

SEQ ID NO: 188280 - DNA, 15 bp, Homo sapiens
atggccacctggctt

SEQ ID NO: 188281 - DNA, 15 bp, Homo sapiens
tatggccacctggct

SEQ ID NO: 188282 - DNA, 15 bp, Homo sapiens
ttatggccacctggc

SEQ ID NO: 188283 - DNA, 15 bp, Homo sapiens
cttatggccacctgg

SEQ ID NO: 188284 - DNA, 15 bp, Homo sapiens
acttatggccacctg

SEQ ID NO: 188285 - DNA, 15 bp, Homo sapiens
cacttatggccacct

SEQ ID NO: 188286 - DNA, 15 bp, Homo sapiens
gcacttatggccacc

SEQ ID NO: 188287 - DNA, 15 bp, Homo sapiens
tgcacttatggccac

SEQ ID NO: 188288 - DNA, 15 bp, Homo sapiens
gtgcacttatggcca

SEQ ID NO: 188289 - DNA, 15 bp, Homo sapiens
tgtgcacttatggcc

SEQ ID NO: 188290 - DNA, 15 bp, Homo sapiens
ttgtgcacttatggc

SEQ ID NO: 188291 - DNA, 15 bp, Homo sapiens
cttgtgcacttatgg

SEQ ID NO: 188292 - DNA, 15 bp, Homo sapiens
gcttgtgcacttatg

SEQ ID NO: 188293 - DNA, 15 bp, Homo sapiens
tgcttgtgcacttat

SEQ ID NO: 188294 - DNA, 15 bp, Homo sapiens
gtgcttgtgcactta

SEQ ID NO: 188295 - DNA, 15 bp, Homo sapiens
tgtgcttgtgcactt

SEQ ID NO: 188296 - DNA, 15 bp, Homo sapiens
ttgtgcttgtgcact

SEQ ID NO: 188297 - DNA, 15 bp, Homo sapiens
tttgtgcttgtgcac

SEQ ID NO: 188298 - DNA, 15 bp, Homo sapiens
atttgtgcttgtgca

SEQ ID NO: 188299 - DNA, 15 bp, Homo sapiens
catttgtgcttgtgc

SEQ ID NO: 188300 - DNA, 15 bp, Homo sapiens
tcatttgtgcttgtg

SEQ ID NO: 188301 - DNA, 15 bp, Homo sapiens
ttcatttgtgcttgt

SEQ ID NO: 188302 - DNA, 15 bp, Homo sapiens
tttcatttgtgcttg

SEQ ID NO: 188303 - DNA, 15 bp, Homo sapiens
gtttcatttgtgctt

SEQ ID NO: 188304 - DNA, 15 bp, Homo sapiens
tgtttcatttgtgct

SEQ ID NO: 188305 - DNA, 15 bp, Homo sapiens
ctgtttcatttgtgc

SEQ ID NO: 188306 - DNA, 15 bp, Homo sapiens
cctgtttcatttgtg

SEQ ID NO: 188307 - DNA, 15 bp, Homo sapiens
ccctgtttcatttgt

SEQ ID NO: 188308 - DNA, 15 bp, Homo sapiens
tccctgtttcatttg

SEQ ID NO: 188309 - DNA, 15 bp, Homo sapiens
ttccctgtttcattt

SEQ ID NO: 188310 - DNA, 15 bp, Homo sapiens
attccctgtttcatt

SEQ ID NO: 188311 - DNA, 15 bp, Homo sapiens
cattccctgtttcat

SEQ ID NO: 188312 - DNA, 15 bp, Homo sapiens
ccattccctgtttca

SEQ ID NO: 188313 - DNA, 15 bp, Homo sapiens
cccattccctgtttc

SEQ ID NO: 188314 - DNA, 15 bp, Homo sapiens
tcccattccctgttt

SEQ ID NO: 188315 - DNA, 15 bp, Homo sapiens
ttcccattccctgtt

SEQ ID NO: 188316 - DNA, 15 bp, Homo sapiens
tttcccattccctgt

SEQ ID NO: 188317 - DNA, 15 bp, Homo sapiens
ttttcccattccctg

SEQ ID NO: 188318 - DNA, 15 bp, Homo sapiens
tttttcccattccct

SEQ ID NO: 188319 - DNA, 15 bp, Homo sapiens
ttttttcccattccc

SEQ ID NO: 188320 - DNA, 15 bp, Homo sapiens
attttttcccattcc

SEQ ID NO: 188321 - DNA, 15 bp, Homo sapiens
tattttttcccattc

SEQ ID NO: 188322 - DNA, 15 bp, Homo sapiens
ctattttttcccatt

SEQ ID NO: 188323 - DNA, 15 bp, Homo sapiens
actattttttcccat

SEQ ID NO: 188324 - DNA, 15 bp, Homo sapiens
cactattttttccca

SEQ ID NO: 188325 - DNA, 15 bp, Homo sapiens
gcactattttttccc

SEQ ID NO: 188326 - DNA, 15 bp, Homo sapiens
agcactattttttcc

SEQ ID NO: 188327 - DNA, 15 bp, Homo sapiens
tagcactattttttc

SEQ ID NO: 188328 - DNA, 15 bp, Homo sapiens
atagcactatttttt

SEQ ID NO: 188329 - DNA, 15 bp, Homo sapiens
catagcactattttt

SEQ ID NO: 188330 - DNA, 15 bp, Homo sapiens
ccatagcactatttt

SEQ ID NO: 188331 - DNA, 15 bp, Homo sapiens
tccatagcactattt

SEQ ID NO: 188332 - DNA, 15 bp, Homo sapiens
ctccatagcactatt

SEQ ID NO: 188333 - DNA, 15 bp, Homo sapiens
cctccatagcactat

SEQ ID NO: 188334 - DNA, 15 bp, Homo sapiens
ccctccatagcacta

SEQ ID NO: 188335 - DNA, 15 bp, Homo sapiens
accctccatagcact

SEQ ID NO: 188336 - DNA, 15 bp, Homo sapiens
caccctccatagcac

SEQ ID NO: 188337 - DNA, 15 bp, Homo sapiens
gcaccctccatagca

SEQ ID NO: 188338 - DNA, 15 bp, Homo sapiens
tgcaccctccatagc

SEQ ID NO: 188339 - DNA, 15 bp, Homo sapiens
atgcaccctccatag

SEQ ID NO: 188340 - DNA, 15 bp, Homo sapiens
catgcaccctccata

SEQ ID NO: 188341 - DNA, 15 bp, Homo sapiens
ccatgcaccctccat

SEQ ID NO: 188342 - DNA, 15 bp, Homo sapiens
tccatgcaccctcca

SEQ ID NO: 188343 - DNA, 15 bp, Homo sapiens
ctccatgcaccctcc

SEQ ID NO: 188344 - DNA, 15 bp, Homo sapiens
tctccatgcaccctc

SEQ ID NO: 188345 - DNA, 15 bp, Homo sapiens
ctctccatgcaccct

SEQ ID NO: 188346 - DNA, 15 bp, Homo sapiens
tctctccatgcaccc

SEQ ID NO: 188347 - DNA, 15 bp, Homo sapiens
ttctctccatgcacc

SEQ ID NO: 188348 - DNA, 15 bp, Homo sapiens
tttctctccatgcac

SEQ ID NO: 188349 - DNA, 15 bp, Homo sapiens
ctttctctccatgca

SEQ ID NO: 188350 - DNA, 15 bp, Homo sapiens
gctttctctccatgc

SEQ ID NO: 188351 - DNA, 15 bp, Homo sapiens
agctttctctccatg

SEQ ID NO: 188352 - DNA, 15 bp, Homo sapiens
gagctttctctccat

SEQ ID NO: 188353 - DNA, 15 bp, Homo sapiens
agagctttctctcca

SEQ ID NO: 188354 - DNA, 15 bp, Homo sapiens
aagagctttctctcc

SEQ ID NO: 188355 - DNA, 15 bp, Homo sapiens
aaagagctttctctc

SEQ ID NO: 188356 - DNA, 15 bp, Homo sapiens
caaagagctttctct

SEQ ID NO: 188357 - DNA, 15 bp, Homo sapiens
acaaagagctttctc

SEQ ID NO: 188358 - DNA, 15 bp, Homo sapiens
aacaaagagctttct

SEQ ID NO: 188359 - DNA, 15 bp, Homo sapiens
taacaaagagctttc

SEQ ID NO: 188360 - DNA, 15 bp, Homo sapiens
ttaacaaagagcttt

SEQ ID NO: 188361 - DNA, 15 bp, Homo sapiens
cttaacaaagagctt

SEQ ID NO: 188362 - DNA, 15 bp, Homo sapiens
ccttaacaaagagct

SEQ ID NO: 188363 - DNA, 15 bp, Homo sapiens
cccttaacaaagagc

SEQ ID NO: 188364 - DNA, 15 bp, Homo sapiens
ccccttaacaaagag

SEQ ID NO: 188365 - DNA, 15 bp, Homo sapiens
tccccttaacaaaga

SEQ ID NO: 188366 - DNA, 15 bp, Homo sapiens
ctccccttaacaaag

SEQ ID NO: 188367 - DNA, 15 bp, Homo sapiens
actccccttaacaaa

SEQ ID NO: 188368 - DNA, 15 bp, Homo sapiens
aactccccttaacaa

SEQ ID NO: 188369 - DNA, 15 bp, Homo sapiens
aaactccccttaaca

SEQ ID NO: 188370 - DNA, 15 bp, Homo sapiens
caaactccccttaac

SEQ ID NO: 188371 - DNA, 15 bp, Homo sapiens
ccaaactccccttaa

SEQ ID NO: 188372 - DNA, 15 bp, Homo sapiens
tccaaactcccctta

SEQ ID NO: 188373 - DNA, 15 bp, Homo sapiens
ctccaaactcccctt

SEQ ID NO: 188374 - DNA, 15 bp, Homo sapiens
gctccaaactcccct

SEQ ID NO: 188375 - DNA, 15 bp, Homo sapiens
tgctccaaactcccc

SEQ ID NO: 188376 - DNA, 15 bp, Homo sapiens
ctgctccaaactccc

SEQ ID NO: 188377 - DNA, 15 bp, Homo sapiens
tctgctccaaactcc

SEQ ID NO: 188378 - DNA, 15 bp, Homo sapiens
atctgctccaaactc

SEQ ID NO: 188379 - DNA, 15 bp, Homo sapiens
aatctgctccaaact

SEQ ID NO: 188380 - DNA, 15 bp, Homo sapiens
aaatctgctccaaac

SEQ ID NO: 188381 - DNA, 15 bp, Homo sapiens
gaaatctgctccaaa

SEQ ID NO: 188382 - DNA, 15 bp, Homo sapiens
tgaaatctgctccaa

SEQ ID NO: 188383 - DNA, 15 bp, Homo sapiens
ctgaaatctgctcca

SEQ ID NO: 188384 - DNA, 15 bp, Homo sapiens
cctgaaatctgctcc

SEQ ID NO: 188385 - DNA, 15 bp, Homo sapiens
tcctgaaatctgctc

SEQ ID NO: 188386 - DNA, 15 bp, Homo sapiens
ttcctgaaatctgct

SEQ ID NO: 188387 - DNA, 15 bp, Homo sapiens
tttcctgaaatctgc

SEQ ID NO: 188388 - DNA, 15 bp, Homo sapiens
ctttcctgaaatctg

SEQ ID NO: 188389 - DNA, 15 bp, Homo sapiens
cctttcctgaaatct

SEQ ID NO: 188390 - DNA, 15 bp, Homo sapiens
ccctttcctgaaatc

SEQ ID NO: 188391 - DNA, 15 bp, Homo sapiens
gccctttcctgaaat

SEQ ID NO: 188392 - DNA, 15 bp, Homo sapiens
ggccctttcctgaaa

SEQ ID NO: 188393 - DNA, 15 bp, Homo sapiens
tggccctttcctgaa

SEQ ID NO: 188394 - DNA, 15 bp, Homo sapiens
atggccctttcctga

SEQ ID NO: 188395 - DNA, 15 bp, Homo sapiens
catggccctttcctg

SEQ ID NO: 188396 - DNA, 15 bp, Homo sapiens
acatggccctttcct

SEQ ID NO: 188397 - DNA, 15 bp, Homo sapiens
aacatggccctttcc

SEQ ID NO: 188398 - DNA, 15 bp, Homo sapiens
caacatggccctttc

SEQ ID NO: 188399 - DNA, 15 bp, Homo sapiens
gcaacatggcccttt

SEQ ID NO: 188400 - DNA, 15 bp, Homo sapiens
tgcaacatggccctt

SEQ ID NO: 188401 - DNA, 15 bp, Homo sapiens
ctgcaacatggccct

SEQ ID NO: 188402 - DNA, 15 bp, Homo sapiens
cctgcaacatggccc

SEQ ID NO: 188403 - DNA, 15 bp, Homo sapiens
gcctgcaacatggcc

SEQ ID NO: 188404 - DNA, 15 bp, Homo sapiens
tgcctgcaacatggc

SEQ ID NO: 188405 - DNA, 15 bp, Homo sapiens
ctgcctgcaacatgg

SEQ ID NO: 188406 - DNA, 15 bp, Homo sapiens
tctgcctgcaacatg

SEQ ID NO: 188407 - DNA, 15 bp, Homo sapiens
ttctgcctgcaacat

SEQ ID NO: 188408 - DNA, 15 bp, Homo sapiens
cttctgcctgcaaca

SEQ ID NO: 188409 - DNA, 15 bp, Homo sapiens
ccttctgcctgcaac

SEQ ID NO: 188410 - DNA, 15 bp, Homo sapiens
tccttctgcctgcaa

SEQ ID NO: 188411 - DNA, 15 bp, Homo sapiens
ttccttctgcctgca

SEQ ID NO: 188412 - DNA, 15 bp, Homo sapiens
cttccttctgcctgc

SEQ ID NO: 188413 - DNA, 15 bp, Homo sapiens
tcttccttctgcctg

SEQ ID NO: 188414 - DNA, 15 bp, Homo sapiens
ctcttccttctgcct

SEQ ID NO: 188415 - DNA, 15 bp, Homo sapiens
gctcttccttctgcc

SEQ ID NO: 188416 - DNA, 15 bp, Homo sapiens
tgctcttccttctgc

SEQ ID NO: 188417 - DNA, 15 bp, Homo sapiens
ttgctcttccttctg

SEQ ID NO: 188418 - DNA, 15 bp, Homo sapiens
cttgctcttccttct

SEQ ID NO: 188419 - DNA, 15 bp, Homo sapiens
acttgctcttccttc

SEQ ID NO: 188420 - DNA, 15 bp, Homo sapiens
cacttgctcttcctt

SEQ ID NO: 188421 - DNA, 15 bp, Homo sapiens
acacttgctcttcct

SEQ ID NO: 188422 - DNA, 15 bp, Homo sapiens
cacacttgctcttcc

SEQ ID NO: 188423 - DNA, 15 bp, Homo sapiens
ccacacttgctcttc

SEQ ID NO: 188424 - DNA, 15 bp, Homo sapiens
gccacacttgctctt

SEQ ID NO: 188425 - DNA, 15 bp, Homo sapiens
ggccacacttgctct

SEQ ID NO: 188426 - DNA, 15 bp, Homo sapiens
tggccacacttgctc

SEQ ID NO: 188427 - DNA, 15 bp, Homo sapiens
ttggccacacttgct

SEQ ID NO: 188428 - DNA, 15 bp, Homo sapiens
cttggccacacttgc

SEQ ID NO: 188429 - DNA, 15 bp, Homo sapiens
tcttggccacacttg

SEQ ID NO: 188430 - DNA, 15 bp, Homo sapiens
gtcttggccacactt

SEQ ID NO: 188431 - DNA, 15 bp, Homo sapiens
ggtcttggccacact

SEQ ID NO: 188432 - DNA, 15 bp, Homo sapiens
gggtcttggccacac

SEQ ID NO: 188433 - DNA, 15 bp, Homo sapiens
tgggtcttggccaca

SEQ ID NO: 188434 - DNA, 15 bp, Homo sapiens
ctgggtcttggccac

SEQ ID NO: 188435 - DNA, 15 bp, Homo sapiens
cctgggtcttggcca

SEQ ID NO: 188436 - DNA, 15 bp, Homo sapiens
tcctgggtcttggcc

SEQ ID NO: 188437 - DNA, 15 bp, Homo sapiens
ttcctgggtcttggc

SEQ ID NO: 188438 - DNA, 15 bp, Homo sapiens
cttcctgggtcttgg

SEQ ID NO: 188439 - DNA, 15 bp, Homo sapiens
ccttcctgggtcttg

SEQ ID NO: 188440 - DNA, 15 bp, Homo sapiens
tccttcctgggtctt

SEQ ID NO: 188441 - DNA, 15 bp, Homo sapiens
atccttcctgggtct

SEQ ID NO: 188442 - DNA, 15 bp, Homo sapiens
catccttcctgggtc

SEQ ID NO: 188443 - DNA, 15 bp, Homo sapiens
ccatccttcctgggt

SEQ ID NO: 188444 - DNA, 15 bp, Homo sapiens
cccatccttcctggg

SEQ ID NO: 188445 - DNA, 15 bp, Homo sapiens
tcccatccttcctgg

SEQ ID NO: 188446 - DNA, 15 bp, Homo sapiens
ctcccatccttcctg

SEQ ID NO: 188447 - DNA, 15 bp, Homo sapiens
cctcccatccttcct

SEQ ID NO: 188448 - DNA, 15 bp, Homo sapiens
tcctcccatccttcc

SEQ ID NO: 188449 - DNA, 15 bp, Homo sapiens
ctcctcccatccttc

SEQ ID NO: 188450 - DNA, 15 bp, Homo sapiens
cctcctcccatcctt

SEQ ID NO: 188451 - DNA, 15 bp, Homo sapiens
ccctcctcccatcct

SEQ ID NO: 188452 - DNA, 15 bp, Homo sapiens
accctcctcccatcc

SEQ ID NO: 188453 - DNA, 15 bp, Homo sapiens
caccctcctcccatc

SEQ ID NO: 188454 - DNA, 15 bp, Homo sapiens
ccaccctcctcccat

SEQ ID NO: 188455 - DNA, 15 bp, Homo sapiens
gccaccctcctccca

SEQ ID NO: 188456 - DNA, 15 bp, Homo sapiens
agccaccctcctccc

SEQ ID NO: 188457 - DNA, 15 bp, Homo sapiens
cagccaccctcctcc

SEQ ID NO: 188458 - DNA, 15 bp, Homo sapiens
acagccaccctcctc

SEQ ID NO: 188459 - DNA, 15 bp, Homo sapiens
cacagccaccctcct

SEQ ID NO: 188460 - DNA, 15 bp, Homo sapiens
ccacagccaccctcc

SEQ ID NO: 188461 - DNA, 15 bp, Homo sapiens
gccacagccaccctc

SEQ ID NO: 188462 - DNA, 15 bp, Homo sapiens
cgccacagccaccct

SEQ ID NO: 188463 - DNA, 15 bp, Homo sapiens
ccgccacagccaccc

SEQ ID NO: 188464 - DNA, 15 bp, Homo sapiens
cccgccacagccacc

SEQ ID NO: 188465 - DNA, 15 bp, Homo sapiens
ccccgccacagccac

SEQ ID NO: 188466 - DNA, 15 bp, Homo sapiens
gccccgccacagcca

SEQ ID NO: 188467 - DNA, 15 bp, Homo sapiens
cgccccgccacagcc

SEQ ID NO: 188468 - DNA, 15 bp, Homo sapiens
ccgccccgccacagc

SEQ ID NO: 188469 - DNA, 15 bp, Homo sapiens
tccgccccgccacag

SEQ ID NO: 188470 - DNA, 15 bp, Homo sapiens
ctccgccccgccaca

SEQ ID NO: 188471 - DNA, 15 bp, Homo sapiens
actccgccccgccac

SEQ ID NO: 188472 - DNA, 15 bp, Homo sapiens
tactccgccccgcca

SEQ ID NO: 188473 - DNA, 15 bp, Homo sapiens
ctactccgccccgcc

SEQ ID NO: 188474 - DNA, 15 bp, Homo sapiens
cctactccgccccgc

SEQ ID NO: 188475 - DNA, 15 bp, Homo sapiens
ccctactccgccccg

SEQ ID NO: 188476 - DNA, 15 bp, Homo sapiens
cccctactccgcccc

SEQ ID NO: 188477 - DNA, 15 bp, Homo sapiens
ccccctactccgccc

SEQ ID NO: 188478 - DNA, 15 bp, Homo sapiens
cccccctactccgcc

SEQ ID NO: 188479 - DNA, 15 bp, Homo sapiens
acccccctactccgc

SEQ ID NO: 188480 - DNA, 15 bp, Homo sapiens
cacccccctactccg

SEQ ID NO: 188481 - DNA, 15 bp, Homo sapiens
ccacccccctactcc

SEQ ID NO: 188482 - DNA, 15 bp, Homo sapiens
cccacccccctactc

SEQ ID NO: 188483 - DNA, 15 bp, Homo sapiens
gcccacccccctact

SEQ ID NO: 188484 - DNA, 15 bp, Homo sapiens
agcccacccccctac

SEQ ID NO: 188485 - DNA, 15 bp, Homo sapiens
cagcccaccccccta

SEQ ID NO: 188486 - DNA, 15 bp, Homo sapiens
acagcccacccccct

SEQ ID NO: 188487 - DNA, 15 bp, Homo sapiens
cacagcccacccccc

SEQ ID NO: 188488 - DNA, 15 bp, Homo sapiens
ccacagcccaccccc

SEQ ID NO: 188489 - DNA, 15 bp, Homo sapiens
cccacagcccacccc

SEQ ID NO: 188490 - DNA, 15 bp, Homo sapiens
acccacagcccaccc

SEQ ID NO: 188491 - DNA, 15 bp, Homo sapiens
tacccacagcccacc

SEQ ID NO: 188492 - DNA, 15 bp, Homo sapiens
gtacccacagcccac

SEQ ID NO: 188493 - DNA, 15 bp, Homo sapiens
agtacccacagccca

SEQ ID NO: 188494 - DNA, 15 bp, Homo sapiens
gagtacccacagccc

SEQ ID NO: 188495 - DNA, 15 bp, Homo sapiens
agagtacccacagcc

SEQ ID NO: 188496 - DNA, 15 bp, Homo sapiens
tagagtacccacagc

SEQ ID NO: 188497 - DNA, 15 bp, Homo sapiens
gtagagtacccacag

SEQ ID NO: 188498 - DNA, 15 bp, Homo sapiens
tgtagagtacccaca

SEQ ID NO: 188499 - DNA, 15 bp, Homo sapiens
atgtagagtacccac

SEQ ID NO: 188500 - DNA, 15 bp, Homo sapiens
catgtagagtaccca

SEQ ID NO: 188501 - DNA, 15 bp, Homo sapiens
tcatgtagagtaccc

SEQ ID NO: 188502 - DNA, 15 bp, Homo sapiens
atcatgtagagtacc

SEQ ID NO: 188503 - DNA, 15 bp, Homo sapiens
catcatgtagagtac

SEQ ID NO: 188504 - DNA, 15 bp, Homo sapiens
ccatcatgtagagta

SEQ ID NO: 188505 - DNA, 15 bp, Homo sapiens
cccatcatgtagagt

SEQ ID NO: 188506 - DNA, 15 bp, Homo sapiens
ccccatcatgtagag

SEQ ID NO: 188507 - DNA, 15 bp, Homo sapiens
tccccatcatgtaga

SEQ ID NO: 188508 - DNA, 15 bp, Homo sapiens
atccccatcatgtag

SEQ ID NO: 188509 - DNA, 15 bp, Homo sapiens
aatccccatcatgta

SEQ ID NO: 188510 - DNA, 15 bp, Homo sapiens
aaatccccatcatgt

SEQ ID NO: 188511 - DNA, 15 bp, Homo sapiens
gaaatccccatcatg

SEQ ID NO: 188512 - DNA, 15 bp, Homo sapiens
agaaatccccatcat

SEQ ID NO: 188513 - DNA, 15 bp, Homo sapiens
aagaaatccccatca

SEQ ID NO: 188514 - DNA, 15 bp, Homo sapiens
taagaaatccccatc

SEQ ID NO: 188515 - DNA, 15 bp, Homo sapiens
ttaagaaatccccat

SEQ ID NO: 188516 - DNA, 15 bp, Homo sapiens
tttaagaaatcccca

SEQ ID NO: 188517 - DNA, 15 bp, Homo sapiens
gtttaagaaatcccc

SEQ ID NO: 188518 - DNA, 15 bp, Homo sapiens
tgtttaagaaatccc

SEQ ID NO: 188519 - DNA, 15 bp, Homo sapiens
atgtttaagaaatcc

SEQ ID NO: 188520 - DNA, 15 bp, Homo sapiens
gatgtttaagaaatc

SEQ ID NO: 188521 - DNA, 15 bp, Homo sapiens
agatgtttaagaaat

SEQ ID NO: 188522 - DNA, 15 bp, Homo sapiens
cagatgtttaagaaa

SEQ ID NO: 188523 - DNA, 15 bp, Homo sapiens
acagatgtttaagaa

SEQ ID NO: 188524 - DNA, 15 bp, Homo sapiens
gacagatgtttaaga

SEQ ID NO: 188525 - DNA, 15 bp, Homo sapiens
tgacagatgtttaag

SEQ ID NO: 188526 - DNA, 15 bp, Homo sapiens
ctgacagatgtttaa

SEQ ID NO: 188527 - DNA, 15 bp, Homo sapiens
tctgacagatgttta

SEQ ID NO: 188528 - DNA, 15 bp, Homo sapiens
gtctgacagatgttt

SEQ ID NO: 188529 - DNA, 15 bp, Homo sapiens
ggtctgacagatgtt

SEQ ID NO: 188530 - DNA, 15 bp, Homo sapiens
gggtctgacagatgt

SEQ ID NO: 188531 - DNA, 15 bp, Homo sapiens
tgggtctgacagatg

SEQ ID NO: 188532 - DNA, 15 bp, Homo sapiens
ttgggtctgacagat

SEQ ID NO: 188533 - DNA, 15 bp, Homo sapiens
cttgggtctgacaga

SEQ ID NO: 188534 - DNA, 15 bp, Homo sapiens
tcttgggtctgacag

SEQ ID NO: 188535 - DNA, 15 bp, Homo sapiens
ctcttgggtctgaca

SEQ ID NO: 188536 - DNA, 15 bp, Homo sapiens
tctcttgggtctgac

SEQ ID NO: 188537 - DNA, 15 bp, Homo sapiens
gtctcttgggtctga

SEQ ID NO: 188538 - DNA, 15 bp, Homo sapiens
agtctcttgggtctg

SEQ ID NO: 188539 - DNA, 15 bp, Homo sapiens
cagtctcttgggtct

SEQ ID NO: 188540 - DNA, 15 bp, Homo sapiens
acagtctcttgggtc

SEQ ID NO: 188541 - DNA, 15 bp, Homo sapiens
cacagtctcttgggt

SEQ ID NO: 188542 - DNA, 15 bp, Homo sapiens
tcacagtctcttggg

SEQ ID NO: 188543 - DNA, 15 bp, Homo sapiens
atcacagtctcttgg

SEQ ID NO: 188544 - DNA, 15 bp, Homo sapiens
gatcacagtctcttg

SEQ ID NO: 188545 - DNA, 15 bp, Homo sapiens
aaaccaaacacacct

SEQ ID NO: 188546 - DNA, 15 bp, Homo sapiens
taaaccaaacacacc

SEQ ID NO: 188547 - DNA, 15 bp, Homo sapiens
ctaaaccaaacacac

SEQ ID NO: 188548 - DNA, 15 bp, Homo sapiens
gctaaaccaaacaca

SEQ ID NO: 188549 - DNA, 15 bp, Homo sapiens
ggctaaaccaaacac

SEQ ID NO: 188550 - DNA, 15 bp, Homo sapiens
gggctaaaccaaaca

SEQ ID NO: 188551 - DNA, 15 bp, Homo sapiens
tgggctaaaccaaac

SEQ ID NO: 188552 - DNA, 15 bp, Homo sapiens
atgggctaaaccaaa

SEQ ID NO: 188553 - DNA, 15 bp, Homo sapiens
catgggctaaaccaa

SEQ ID NO: 188554 - DNA, 15 bp, Homo sapiens
acatgggctaaacca

SEQ ID NO: 188555 - DNA, 15 bp, Homo sapiens
cacatgggctaaacc

SEQ ID NO: 188556 - DNA, 15 bp, Homo sapiens
ccacatgggctaaac

SEQ ID NO: 188557 - DNA, 15 bp, Homo sapiens
gccacatgggctaaa

SEQ ID NO: 188558 - DNA, 15 bp, Homo sapiens
agccacatgggctaa

SEQ ID NO: 188559 - DNA, 15 bp, Homo sapiens
aagccacatgggcta

SEQ ID NO: 188560 - DNA, 15 bp, Homo sapiens
gaagccacatgggct

SEQ ID NO: 188561 - DNA, 15 bp, Homo sapiens
tgaagccacatgggc

SEQ ID NO: 188562 - DNA, 15 bp, Homo sapiens
atgaagccacatggg

SEQ ID NO: 188563 - DNA, 15 bp, Homo sapiens
aatgaagccacatgg

SEQ ID NO: 188564 - DNA, 15 bp, Homo sapiens
caatgaagccacatg

SEQ ID NO: 188565 - DNA, 15 bp, Homo sapiens
acaatgaagccacat

SEQ ID NO: 188566 - DNA, 15 bp, Homo sapiens
aacaatgaagccaca

SEQ ID NO: 188567 - DNA, 15 bp, Homo sapiens
aaacaatgaagccac

SEQ ID NO: 188568 - DNA, 15 bp, Homo sapiens
aaaacaatgaagcca

SEQ ID NO: 188569 - DNA, 15 bp, Homo sapiens
aaaaacaatgaagcc

SEQ ID NO: 188570 - DNA, 15 bp, Homo sapiens
aaaaaacaatgaagc

SEQ ID NO: 188571 - DNA, 15 bp, Homo sapiens
taaaaaacaatgaag

SEQ ID NO: 188572 - DNA, 15 bp, Homo sapiens
ttaaaaaacaatgaa

SEQ ID NO: 188573 - DNA, 15 bp, Homo sapiens
attaaaaaacaatga

SEQ ID NO: 188574 - DNA, 15 bp, Homo sapiens
aattaaaaaacaatg

SEQ ID NO: 188575 - DNA, 15 bp, Homo sapiens
aaattaaaaaacaat

SEQ ID NO: 188576 - DNA, 15 bp, Homo sapiens
aaaattaaaaaacaa

SEQ ID NO: 188577 - DNA, 15 bp, Homo sapiens
aaaaattaaaaaaca

SEQ ID NO: 188578 - DNA, 15 bp, Homo sapiens
aaaaaattaaaaaac

SEQ ID NO: 188579 - DNA, 15 bp, Homo sapiens
aaaaaaattaaaaaa

SEQ ID NO: 188580 - DNA, 15 bp, Homo sapiens
aaaaaaaattaaaaa

SEQ ID NO: 188581 - DNA, 15 bp, Homo sapiens
aaaaaaaaattaaaa

SEQ ID NO: 188582 - DNA, 15 bp, Homo sapiens
aaaaaaaaaattaaa

SEQ ID NO: 188583 - DNA, 15 bp, Homo sapiens
gaaaaaaaaaattaa

SEQ ID NO: 188584 - DNA, 15 bp, Homo sapiens
tgaaaaaaaaaatta

SEQ ID NO: 188585 - DNA, 15 bp, Homo sapiens
atgaaaaaaaaaatt

SEQ ID NO: 188586 - DNA, 15 bp, Homo sapiens
gatgaaaaaaaaaat

SEQ ID NO: 188587 - DNA, 15 bp, Homo sapiens
tgatgaaaaaaaaaa

SEQ ID NO: 188588 - DNA, 15 bp, Homo sapiens
ttgatgaaaaaaaaa

SEQ ID NO: 188589 - DNA, 15 bp, Homo sapiens
attgatgaaaaaaaa

SEQ ID NO: 188590 - DNA, 15 bp, Homo sapiens
aattgatgaaaaaaa

SEQ ID NO: 188591 - DNA, 15 bp, Homo sapiens
caattgatgaaaaaa

SEQ ID NO: 188592 - DNA, 15 bp, Homo sapiens
gcaattgatgaaaaa

SEQ ID NO: 188593 - DNA, 15 bp, Homo sapiens
ggcaattgatgaaaa

SEQ ID NO: 188594 - DNA, 15 bp, Homo sapiens
aggcaattgatgaaa

SEQ ID NO: 188595 - DNA, 15 bp, Homo sapiens
taggcaattgatgaa

SEQ ID NO: 188596 - DNA, 15 bp, Homo sapiens
ataggcaattgatga

SEQ ID NO: 188597 - DNA, 15 bp, Homo sapiens
tataggcaattgatg

SEQ ID NO: 188598 - DNA, 15 bp, Homo sapiens
atataggcaattgat

SEQ ID NO: 188599 - DNA, 15 bp, Homo sapiens
aatataggcaattga

SEQ ID NO: 188600 - DNA, 15 bp, Homo sapiens
aaatataggcaattg

SEQ ID NO: 188601 - DNA, 15 bp, Homo sapiens
taaatataggcaatt

SEQ ID NO: 188602 - DNA, 15 bp, Homo sapiens
gtaaatataggcaat

SEQ ID NO: 188603 - DNA, 15 bp, Homo sapiens
tgtaaatataggcaa

SEQ ID NO: 188604 - DNA, 15 bp, Homo sapiens
ttgtaaatataggca

SEQ ID NO: 188605 - DNA, 15 bp, Homo sapiens
tttgtaaatataggc

SEQ ID NO: 188606 - DNA, 15 bp, Homo sapiens
ctttgtaaatatagg

SEQ ID NO: 188607 - DNA, 15 bp, Homo sapiens
cctttgtaaatatag

SEQ ID NO: 188608 - DNA, 15 bp, Homo sapiens
tcctttgtaaatata

SEQ ID NO: 188609 - DNA, 15 bp, Homo sapiens
ctcctttgtaaatat

SEQ ID NO: 188610 - DNA, 15 bp, Homo sapiens
tctcctttgtaaata

SEQ ID NO: 188611 - DNA, 15 bp, Homo sapiens
atctcctttgtaaat

SEQ ID NO: 188612 - DNA, 15 bp, Homo sapiens
aatctcctttgtaaa

SEQ ID NO: 188613 - DNA, 15 bp, Homo sapiens
aaatctcctttgtaa

SEQ ID NO: 188614 - DNA, 15 bp, Homo sapiens
aaaatctcctttgta

SEQ ID NO: 188615 - DNA, 15 bp, Homo sapiens
caaaatctcctttgt

SEQ ID NO: 188616 - DNA, 15 bp, Homo sapiens
ccaaaatctcctttg

SEQ ID NO: 188617 - DNA, 15 bp, Homo sapiens
tccaaaatctccttt

SEQ ID NO: 188618 - DNA, 15 bp, Homo sapiens
atccaaaatctcctt

SEQ ID NO: 188619 - DNA, 15 bp, Homo sapiens
tatccaaaatctcct

SEQ ID NO: 188620 - DNA, 15 bp, Homo sapiens
ttatccaaaatctcc

SEQ ID NO: 188621 - DNA, 15 bp, Homo sapiens
tttatccaaaatctc

SEQ ID NO: 188622 - DNA, 15 bp, Homo sapiens
ttttatccaaaatct

SEQ ID NO: 188623 - DNA, 15 bp, Homo sapiens
tttttatccaaaatc

SEQ ID NO: 188624 - DNA, 15 bp, Homo sapiens
atttttatccaaaat

SEQ ID NO: 188625 - DNA, 15 bp, Homo sapiens
gatttttatccaaaa

SEQ ID NO: 188626 - DNA, 15 bp, Homo sapiens
agatttttatccaaa

SEQ ID NO: 188627 - DNA, 15 bp, Homo sapiens
cagatttttatccaa

SEQ ID NO: 188628 - DNA, 15 bp, Homo sapiens
ccagatttttatcca

SEQ ID NO: 188629 - DNA, 15 bp, Homo sapiens
tccagatttttatcc

SEQ ID NO: 188630 - DNA, 15 bp, Homo sapiens
atccagatttttatc

SEQ ID NO: 188631 - DNA, 15 bp, Homo sapiens
aatccagatttttat

SEQ ID NO: 188632 - DNA, 15 bp, Homo sapiens
caatccagattttta

SEQ ID NO: 188633 - DNA, 15 bp, Homo sapiens
gcaatccagattttt

SEQ ID NO: 188634 - DNA, 15 bp, Homo sapiens
agcaatccagatttt

SEQ ID NO: 188635 - DNA, 15 bp, Homo sapiens
tagcaatccagattt

SEQ ID NO: 188636 - DNA, 15 bp, Homo sapiens
ctagcaatccagatt

SEQ ID NO: 188637 - DNA, 15 bp, Homo sapiens
gctagcaatccagat

SEQ ID NO: 188638 - DNA, 15 bp, Homo sapiens
agctagcaatccaga

SEQ ID NO: 188639 - DNA, 15 bp, Homo sapiens
cagctagcaatccag

SEQ ID NO: 188640 - DNA, 15 bp, Homo sapiens
acagctagcaatcca

SEQ ID NO: 188641 - DNA, 15 bp, Homo sapiens
aacagctagcaatcc

SEQ ID NO: 188642 - DNA, 15 bp, Homo sapiens
aaacagctagcaatc

SEQ ID NO: 188643 - DNA, 15 bp, Homo sapiens
aaaacagctagcaat

SEQ ID NO: 188644 - DNA, 15 bp, Homo sapiens
aaaaacagctagcaa

SEQ ID NO: 188645 - DNA, 15 bp, Homo sapiens
caaaaacagctagca

SEQ ID NO: 188646 - DNA, 15 bp, Homo sapiens
tcaaaaacagctagc

SEQ ID NO: 188647 - DNA, 15 bp, Homo sapiens
ttcaaaaacagctag

SEQ ID NO: 188648 - DNA, 15 bp, Homo sapiens
tttcaaaaacagcta

SEQ ID NO: 188649 - DNA, 15 bp, Homo sapiens
ttttcaaaaacagct

SEQ ID NO: 188650 - DNA, 15 bp, Homo sapiens
tttttcaaaaacagc

SEQ ID NO: 188651 - DNA, 15 bp, Homo sapiens
ttttttcaaaaacag

SEQ ID NO: 188652 - DNA, 15 bp, Homo sapiens
attttttcaaaaaca

SEQ ID NO: 188653 - DNA, 15 bp, Homo sapiens
tattttttcaaaaac

SEQ ID NO: 188654 - DNA, 15 bp, Homo sapiens
ttattttttcaaaaa

SEQ ID NO: 188655 - DNA, 15 bp, Homo sapiens
tttattttttcaaaa

SEQ ID NO: 188656 - DNA, 15 bp, Homo sapiens
ttttattttttcaaa

SEQ ID NO: 188657 - DNA, 15 bp, Homo sapiens
cttttattttttcaa

SEQ ID NO: 188658 - DNA, 15 bp, Homo sapiens
tcttttattttttca

SEQ ID NO: 188659 - DNA, 15 bp, Homo sapiens
atcttttattttttc

SEQ ID NO: 188660 - DNA, 15 bp, Homo sapiens
aatcttttatttttt

SEQ ID NO: 188661 - DNA, 15 bp, Homo sapiens
caatcttttattttt

SEQ ID NO: 188662 - DNA, 15 bp, Homo sapiens
tcaatcttttatttt

SEQ ID NO: 188663 - DNA, 15 bp, Homo sapiens
ttcaatcttttattt

SEQ ID NO: 188664 - DNA, 15 bp, Homo sapiens
tttcaatcttttatt

SEQ ID NO: 188665 - DNA, 15 bp, Homo sapiens
ttttcaatcttttat

SEQ ID NO: 188666 - DNA, 15 bp, Homo sapiens
attttcaatctttta

SEQ ID NO: 188667 - DNA, 15 bp, Homo sapiens
cattttcaatctttt

SEQ ID NO: 188668 - DNA, 15 bp, Homo sapiens
acattttcaatcttt

SEQ ID NO: 188669 - DNA, 15 bp, Homo sapiens
tacattttcaatctt

SEQ ID NO: 188670 - DNA, 15 bp, Homo sapiens
gtacattttcaatct

SEQ ID NO: 188671 - DNA, 15 bp, Homo sapiens
ggtacattttcaatc

SEQ ID NO: 188672 - DNA, 15 bp, Homo sapiens
aggtacattttcaat

SEQ ID NO: 188673 - DNA, 15 bp, Homo sapiens
aaggtacattttcaa

SEQ ID NO: 188674 - DNA, 15 bp, Homo sapiens
aaaggtacattttca

SEQ ID NO: 188675 - DNA, 15 bp, Homo sapiens
caaaggtacattttc

SEQ ID NO: 188676 - DNA, 15 bp, Homo sapiens
acaaaggtacatttt

SEQ ID NO: 188677 - DNA, 15 bp, Homo sapiens
cacaaaggtacattt

SEQ ID NO: 188678 - DNA, 15 bp, Homo sapiens
acacaaaggtacatt

SEQ ID NO: 188679 - DNA, 15 bp, Homo sapiens
cacacaaaggtacat

SEQ ID NO: 188680 - DNA, 15 bp, Homo sapiens
gcacacaaaggtaca

SEQ ID NO: 188681 - DNA, 15 bp, Homo sapiens
ggcacacaaaggtac

SEQ ID NO: 188682 - DNA, 15 bp, Homo sapiens
aggcacacaaaggta

SEQ ID NO: 188683 - DNA, 15 bp, Homo sapiens
caggcacacaaaggt

SEQ ID NO: 188684 - DNA, 15 bp, Homo sapiens
acaggcacacaaagg

SEQ ID NO: 188685 - DNA, 15 bp, Homo sapiens
cacaggcacacaaag

SEQ ID NO: 188686 - DNA, 15 bp, Homo sapiens
acacaggcacacaaa

SEQ ID NO: 188687 - DNA, 15 bp, Homo sapiens
gacacaggcacacaa

SEQ ID NO: 188688 - DNA, 15 bp, Homo sapiens
ggacacaggcacaca

SEQ ID NO: 188689 - DNA, 15 bp, Homo sapiens
gggacacaggcacac

SEQ ID NO: 188690 - DNA, 15 bp, Homo sapiens
ggggacacaggcaca

SEQ ID NO: 188691 - DNA, 15 bp, Homo sapiens
aggggacacaggcac

SEQ ID NO: 188692 - DNA, 15 bp, Homo sapiens
gaggggacacaggca

SEQ ID NO: 188693 - DNA, 15 bp, Homo sapiens
tgaggggacacaggc

SEQ ID NO: 188694 - DNA, 15 bp, Homo sapiens
atgaggggacacagg

SEQ ID NO: 188695 - DNA, 15 bp, Homo sapiens
catgaggggacacag

SEQ ID NO: 188696 - DNA, 15 bp, Homo sapiens
ccatgaggggacaca

SEQ ID NO: 188697 - DNA, 15 bp, Homo sapiens
accatgaggggacac

SEQ ID NO: 188698 - DNA, 15 bp, Homo sapiens
caccatgaggggaca

SEQ ID NO: 188699 - DNA, 15 bp, Homo sapiens
tcaccatgaggggac

SEQ ID NO: 188700 - DNA, 15 bp, Homo sapiens
atcaccatgagggga

SEQ ID NO: 188701 - DNA, 15 bp, Homo sapiens
catcaccatgagggg

SEQ ID NO: 188702 - DNA, 15 bp, Homo sapiens
tcatcaccatgaggg

SEQ ID NO: 188703 - DNA, 15 bp, Homo sapiens
atcatcaccatgagg

SEQ ID NO: 188704 - DNA, 15 bp, Homo sapiens
aatcatcaccatgag

SEQ ID NO: 188705 - DNA, 15 bp, Homo sapiens
caatcatcaccatga

SEQ ID NO: 188706 - DNA, 15 bp, Homo sapiens
ccaatcatcaccatg

SEQ ID NO: 188707 - DNA, 15 bp, Homo sapiens
accaatcatcaccat

SEQ ID NO: 188708 - DNA, 15 bp, Homo sapiens
aaccaatcatcacca

SEQ ID NO: 188709 - DNA, 15 bp, Homo sapiens
aaaccaatcatcacc

SEQ ID NO: 188710 - DNA, 15 bp, Homo sapiens
caaaccaatcatcac

SEQ ID NO: 188711 - DNA, 15 bp, Homo sapiens
ccaaaccaatcatca

SEQ ID NO: 188712 - DNA, 15 bp, Homo sapiens
cccaaaccaatcatc

SEQ ID NO: 188713 - DNA, 15 bp, Homo sapiens
gcccaaaccaatcat

SEQ ID NO: 188714 - DNA, 15 bp, Homo sapiens
tgcccaaaccaatca

SEQ ID NO: 188715 - DNA, 15 bp, Homo sapiens
ctgcccaaaccaatc

SEQ ID NO: 188716 - DNA, 15 bp, Homo sapiens
tctgcccaaaccaat

SEQ ID NO: 188717 - DNA, 15 bp, Homo sapiens
ctctgcccaaaccaa

SEQ ID NO: 188718 - DNA, 15 bp, Homo sapiens
gctctgcccaaacca

SEQ ID NO: 188719 - DNA, 15 bp, Homo sapiens
ggctctgcccaaacc

SEQ ID NO: 188720 - DNA, 15 bp, Homo sapiens
tggctctgcccaaac

SEQ ID NO: 188721 - DNA, 15 bp, Homo sapiens
atggctctgcccaaa

SEQ ID NO: 188722 - DNA, 15 bp, Homo sapiens
aatggctctgcccaa

SEQ ID NO: 188723 - DNA, 15 bp, Homo sapiens
caatggctctgccca

SEQ ID NO: 188724 - DNA, 15 bp, Homo sapiens
gcaatggctctgccc

SEQ ID NO: 188725 - DNA, 15 bp, Homo sapiens
tgcaatggctctgcc

SEQ ID NO: 188726 - DNA, 15 bp, Homo sapiens
gtgcaatggctctgc

SEQ ID NO: 188727 - DNA, 15 bp, Homo sapiens
cgtgcaatggctctg

SEQ ID NO: 188728 - DNA, 15 bp, Homo sapiens
gcgtgcaatggctct

SEQ ID NO: 188729 - DNA, 15 bp, Homo sapiens
agcgtgcaatggctc

SEQ ID NO: 188730 - DNA, 15 bp, Homo sapiens
gagcgtgcaatggct

SEQ ID NO: 188731 - DNA, 15 bp, Homo sapiens
agagcgtgcaatggc

SEQ ID NO: 188732 - DNA, 15 bp, Homo sapiens
gagagcgtgcaatgg

SEQ ID NO: 188733 - DNA, 15 bp, Homo sapiens
ggagagcgtgcaatg

SEQ ID NO: 188734 - DNA, 15 bp, Homo sapiens
aggagagcgtgcaat

SEQ ID NO: 188735 - DNA, 15 bp, Homo sapiens
aaggagagcgtgcaa

SEQ ID NO: 188736 - DNA, 15 bp, Homo sapiens
aaaggagagcgtgca

SEQ ID NO: 188737 - DNA, 15 bp, Homo sapiens
gaaaggagagcgtgc

SEQ ID NO: 188738 - DNA, 15 bp, Homo sapiens
ggaaaggagagcgtg

SEQ ID NO: 188739 - DNA, 15 bp, Homo sapiens
gggaaaggagagcgt

SEQ ID NO: 188740 - DNA, 15 bp, Homo sapiens
ggggaaaggagagcg

SEQ ID NO: 188741 - DNA, 15 bp, Homo sapiens
gggggaaaggagagc

SEQ ID NO: 188742 - DNA, 15 bp, Homo sapiens
ggggggaaaggagag

SEQ ID NO: 188743 - DNA, 15 bp, Homo sapiens
gggggggaaaggaga

SEQ ID NO: 188744 - DNA, 15 bp, Homo sapiens
tgggggggaaaggag

SEQ ID NO: 188745 - DNA, 15 bp, Homo sapiens
atgggggggaaagga

SEQ ID NO: 188746 - DNA, 15 bp, Homo sapiens
gatgggggggaaagg

SEQ ID NO: 188747 - DNA, 15 bp, Homo sapiens
ggatgggggggaaag

SEQ ID NO: 188748 - DNA, 15 bp, Homo sapiens
gggatgggggggaaa

SEQ ID NO: 188749 - DNA, 15 bp, Homo sapiens
ggggatgggggggaa

SEQ ID NO: 188750 - DNA, 15 bp, Homo sapiens
gggggatggggggga

SEQ ID NO: 188751 - DNA, 15 bp, Homo sapiens
cgggggatggggggg

SEQ ID NO: 188752 - DNA, 15 bp, Homo sapiens
ccgggggatgggggg

SEQ ID NO: 188753 - DNA, 15 bp, Homo sapiens
accgggggatggggg

SEQ ID NO: 188754 - DNA, 15 bp, Homo sapiens
caccgggggatgggg

SEQ ID NO: 188755 - DNA, 15 bp, Homo sapiens
gcaccgggggatggg

SEQ ID NO: 188756 - DNA, 15 bp, Homo sapiens
agcaccgggggatgg

SEQ ID NO: 188757 - DNA, 15 bp, Homo sapiens
cagcaccgggggatg

SEQ ID NO: 188758 - DNA, 15 bp, Homo sapiens
tcagcaccgggggat

SEQ ID NO: 188759 - DNA, 15 bp, Homo sapiens
ttcagcaccggggga

SEQ ID NO: 188760 - DNA, 15 bp, Homo sapiens
attcagcaccggggg

SEQ ID NO: 188761 - DNA, 15 bp, Homo sapiens
cattcagcaccgggg

SEQ ID NO: 188762 - DNA, 15 bp, Homo sapiens
gcattcagcaccggg

SEQ ID NO: 188763 - DNA, 15 bp, Homo sapiens
tgcattcagcaccgg

SEQ ID NO: 188764 - DNA, 15 bp, Homo sapiens
ctgcattcagcaccg

SEQ ID NO: 188765 - DNA, 15 bp, Homo sapiens
gctgcattcagcacc

SEQ ID NO: 188766 - DNA, 15 bp, Homo sapiens
tgctgcattcagcac

SEQ ID NO: 188767 - DNA, 15 bp, Homo sapiens
gtgctgcattcagca

SEQ ID NO: 188768 - DNA, 15 bp, Homo sapiens
ggtgctgcattcagc

SEQ ID NO: 188769 - DNA, 15 bp, Homo sapiens
gggtgctgcattcag

SEQ ID NO: 188770 - DNA, 15 bp, Homo sapiens
ggggtgctgcattca

SEQ ID NO: 188771 - DNA, 15 bp, Homo sapiens
aggggtgctgcattc

SEQ ID NO: 188772 - DNA, 15 bp, Homo sapiens
gaggggtgctgcatt

SEQ ID NO: 188773 - DNA, 15 bp, Homo sapiens
tgaggggtgctgcat

SEQ ID NO: 188774 - DNA, 15 bp, Homo sapiens
gtgaggggtgctgca

SEQ ID NO: 188775 - DNA, 15 bp, Homo sapiens
agtgaggggtgctgc

SEQ ID NO: 188776 - DNA, 15 bp, Homo sapiens
gagtgaggggtgctg

SEQ ID NO: 188777 - DNA, 15 bp, Homo sapiens
tgagtgaggggtgct

SEQ ID NO: 188778 - DNA, 15 bp, Homo sapiens
gtgagtgaggggtgc

SEQ ID NO: 188779 - DNA, 15 bp, Homo sapiens
ggtgagtgaggggtg

SEQ ID NO: 188780 - DNA, 15 bp, Homo sapiens
cggtgagtgaggggt

SEQ ID NO: 188781 - DNA, 15 bp, Homo sapiens
acggtgagtgagggg

SEQ ID NO: 188782 - DNA, 15 bp, Homo sapiens
tacggtgagtgaggg

SEQ ID NO: 188783 - DNA, 15 bp, Homo sapiens
ttacggtgagtgagg

SEQ ID NO: 188784 - DNA, 15 bp, Homo sapiens
gttacggtgagtgag

SEQ ID NO: 188785 - DNA, 15 bp, Homo sapiens
tgttacggtgagtga

SEQ ID NO: 188786 - DNA, 15 bp, Homo sapiens
ctgttacggtgagtg

SEQ ID NO: 188787 - DNA, 15 bp, Homo sapiens
cctgttacggtgagt

SEQ ID NO: 188788 - DNA, 15 bp, Homo sapiens
gcctgttacggtgag

SEQ ID NO: 188789 - DNA, 15 bp, Homo sapiens
agcctgttacggtga

SEQ ID NO: 188790 - DNA, 15 bp, Homo sapiens
cagcctgttacggtg

SEQ ID NO: 188791 - DNA, 15 bp, Homo sapiens
ccagcctgttacggt

SEQ ID NO: 188792 - DNA, 15 bp, Homo sapiens
gccagcctgttacgg

SEQ ID NO: 188793 - DNA, 15 bp, Homo sapiens
agccagcctgttacg

SEQ ID NO: 188794 - DNA, 15 bp, Homo sapiens
gagccagcctgttac

SEQ ID NO: 188795 - DNA, 15 bp, Homo sapiens
ggagccagcctgtta

SEQ ID NO: 188796 - DNA, 15 bp, Homo sapiens
aggagccagcctgtt

SEQ ID NO: 188797 - DNA, 15 bp, Homo sapiens
caggagccagcctgt

SEQ ID NO: 188798 - DNA, 15 bp, Homo sapiens
acaggagccagcctg

SEQ ID NO: 188799 - DNA, 15 bp, Homo sapiens
tacaggagccagcct

SEQ ID NO: 188800 - DNA, 15 bp, Homo sapiens
ctacaggagccagcc

SEQ ID NO: 188801 - DNA, 15 bp, Homo sapiens
tctacaggagccagc

SEQ ID NO: 188802 - DNA, 15 bp, Homo sapiens
gtctacaggagccag

SEQ ID NO: 188803 - DNA, 15 bp, Homo sapiens
tgtctacaggagcca

SEQ ID NO: 188804 - DNA, 15 bp, Homo sapiens
gtgtctacaggagcc

SEQ ID NO: 188805 - DNA, 15 bp, Homo sapiens
tgtgtctacaggagc

SEQ ID NO: 188806 - DNA, 15 bp, Homo sapiens
atgtgtctacaggag

SEQ ID NO: 188807 - DNA, 15 bp, Homo sapiens
catgtgtctacagga

SEQ ID NO: 188808 - DNA, 15 bp, Homo sapiens
tcatgtgtctacagg

SEQ ID NO: 188809 - DNA, 15 bp, Homo sapiens
gtcatgtgtctacag

SEQ ID NO: 188810 - DNA, 15 bp, Homo sapiens
ggtcatgtgtctaca

SEQ ID NO: 188811 - DNA, 15 bp, Homo sapiens
aggtcatgtgtctac

SEQ ID NO: 188812 - DNA, 15 bp, Homo sapiens
aaggtcatgtgtcta

SEQ ID NO: 188813 - DNA, 15 bp, Homo sapiens
caaggtcatgtgtct

SEQ ID NO: 188814 - DNA, 15 bp, Homo sapiens
ccaaggtcatgtgtc

SEQ ID NO: 188815 - DNA, 15 bp, Homo sapiens
tccaaggtcatgtgt

SEQ ID NO: 188816 - DNA, 15 bp, Homo sapiens
atccaaggtcatgtg

SEQ ID NO: 188817 - DNA, 15 bp, Homo sapiens
gatccaaggtcatgt

SEQ ID NO: 188818 - DNA, 15 bp, Homo sapiens
ggatccaaggtcatg

SEQ ID NO: 188819 - DNA, 15 bp, Homo sapiens
aggatccaaggtcat

SEQ ID NO: 188820 - DNA, 15 bp, Homo sapiens
aaggatccaaggtca

SEQ ID NO: 188821 - DNA, 15 bp, Homo sapiens
aaaggatccaaggtc

SEQ ID NO: 188822 - DNA, 15 bp, Homo sapiens
aaaaggatccaaggt

SEQ ID NO: 188823 - DNA, 15 bp, Homo sapiens
aaaaaggatccaagg

SEQ ID NO: 188824 - DNA, 15 bp, Homo sapiens
aaaaaaggatccaag

SEQ ID NO: 188825 - DNA, 15 bp, Homo sapiens
caaaaaaggatccaa

SEQ ID NO: 188826 - DNA, 15 bp, Homo sapiens
ccaaaaaaggatcca

SEQ ID NO: 188827 - DNA, 15 bp, Homo sapiens
tccaaaaaaggatcc

SEQ ID NO: 188828 - DNA, 15 bp, Homo sapiens
atccaaaaaaggatc

SEQ ID NO: 188829 - DNA, 15 bp, Homo sapiens
aatccaaaaaaggat

SEQ ID NO: 188830 - DNA, 15 bp, Homo sapiens
taatccaaaaaagga

SEQ ID NO: 188831 - DNA, 15 bp, Homo sapiens
ttaatccaaaaaagg

SEQ ID NO: 188832 - DNA, 15 bp, Homo sapiens
cttaatccaaaaaag

SEQ ID NO: 188833 - DNA, 15 bp, Homo sapiens
ccttaatccaaaaaa

SEQ ID NO: 188834 - DNA, 15 bp, Homo sapiens
tccttaatccaaaaa

SEQ ID NO: 188835 - DNA, 15 bp, Homo sapiens
ttccttaatccaaaa

SEQ ID NO: 188836 - DNA, 15 bp, Homo sapiens
cttccttaatccaaa

SEQ ID NO: 188837 - DNA, 15 bp, Homo sapiens
gcttccttaatccaa

SEQ ID NO: 188838 - DNA, 15 bp, Homo sapiens
tgcttccttaatcca

SEQ ID NO: 188839 - DNA, 15 bp, Homo sapiens
ttgcttccttaatcc

SEQ ID NO: 188840 - DNA, 15 bp, Homo sapiens
tttgcttccttaatc

SEQ ID NO: 188841 - DNA, 15 bp, Homo sapiens
gtttgcttccttaat

SEQ ID NO: 188842 - DNA, 15 bp, Homo sapiens
tgtttgcttccttaa

SEQ ID NO: 188843 - DNA, 15 bp, Homo sapiens
atgtttgcttcctta

SEQ ID NO: 188844 - DNA, 15 bp, Homo sapiens
catgtttgcttcctt

SEQ ID NO: 188845 - DNA, 15 bp, Homo sapiens
acatgtttgcttcct

SEQ ID NO: 188846 - DNA, 15 bp, Homo sapiens
tacatgtttgcttcc

SEQ ID NO: 188847 - DNA, 15 bp, Homo sapiens
ctacatgtttgcttc

SEQ ID NO: 188848 - DNA, 15 bp, Homo sapiens
cctacatgtttgctt

SEQ ID NO: 188849 - DNA, 15 bp, Homo sapiens
tcctacatgtttgct

SEQ ID NO: 188850 - DNA, 15 bp, Homo sapiens
atcctacatgtttgc

SEQ ID NO: 188851 - DNA, 15 bp, Homo sapiens
aatcctacatgtttg

SEQ ID NO: 188852 - DNA, 15 bp, Homo sapiens
caatcctacatgttt

SEQ ID NO: 188853 - DNA, 15 bp, Homo sapiens
acaatcctacatgtt

SEQ ID NO: 188854 - DNA, 15 bp, Homo sapiens
cacaatcctacatgt

SEQ ID NO: 188855 - DNA, 15 bp, Homo sapiens
gcacaatcctacatg

SEQ ID NO: 188856 - DNA, 15 bp, Homo sapiens
agcacaatcctacat

SEQ ID NO: 188857 - DNA, 15 bp, Homo sapiens
aagcacaatcctaca

SEQ ID NO: 188858 - DNA, 15 bp, Homo sapiens
gaagcacaatcctac

SEQ ID NO: 188859 - DNA, 15 bp, Homo sapiens
agaagcacaatccta

SEQ ID NO: 188860 - DNA, 15 bp, Homo sapiens
cagaagcacaatcct

SEQ ID NO: 188861 - DNA, 15 bp, Homo sapiens
gcagaagcacaatcc

SEQ ID NO: 188862 - DNA, 15 bp, Homo sapiens
tgcagaagcacaatc

SEQ ID NO: 188863 - DNA, 15 bp, Homo sapiens
ttgcagaagcacaat

SEQ ID NO: 188864 - DNA, 15 bp, Homo sapiens
tttgcagaagcacaa

SEQ ID NO: 188865 - DNA, 15 bp, Homo sapiens
atttgcagaagcaca

SEQ ID NO: 188866 - DNA, 15 bp, Homo sapiens
aatttgcagaagcac

SEQ ID NO: 188867 - DNA, 15 bp, Homo sapiens
gaatttgcagaagca

SEQ ID NO: 188868 - DNA, 15 bp, Homo sapiens
agaatttgcagaagc

SEQ ID NO: 188869 - DNA, 15 bp, Homo sapiens
gagaatttgcagaag

SEQ ID NO: 188870 - DNA, 15 bp, Homo sapiens
tgagaatttgcagaa

SEQ ID NO: 188871 - DNA, 15 bp, Homo sapiens
ctgagaatttgcaga

SEQ ID NO: 188872 - DNA, 15 bp, Homo sapiens
tctgagaatttgcag

SEQ ID NO: 188873 - DNA, 15 bp, Homo sapiens
ctctgagaatttgca

SEQ ID NO: 188874 - DNA, 15 bp, Homo sapiens
tctctgagaatttgc

SEQ ID NO: 188875 - DNA, 15 bp, Homo sapiens
atctctgagaatttg

SEQ ID NO: 188876 - DNA, 15 bp, Homo sapiens
catctctgagaattt

SEQ ID NO: 188877 - DNA, 15 bp, Homo sapiens
ccatctctgagaatt

SEQ ID NO: 188878 - DNA, 15 bp, Homo sapiens
gccatctctgagaat

SEQ ID NO: 188879 - DNA, 15 bp, Homo sapiens
agccatctctgagaa

SEQ ID NO: 188880 - DNA, 15 bp, Homo sapiens
aagccatctctgaga

SEQ ID NO: 188881 - DNA, 15 bp, Homo sapiens
aaagccatctctgag

SEQ ID NO: 188882 - DNA, 15 bp, Homo sapiens
aaaagccatctctga

SEQ ID NO: 188883 - DNA, 15 bp, Homo sapiens
caaaagccatctctg

SEQ ID NO: 188884 - DNA, 15 bp, Homo sapiens
tcaaaagccatctct

SEQ ID NO: 188885 - DNA, 15 bp, Homo sapiens
ctcaaaagccatctc

SEQ ID NO: 188886 - DNA, 15 bp, Homo sapiens
gctcaaaagccatct

SEQ ID NO: 188887 - DNA, 15 bp, Homo sapiens
ggctcaaaagccatc

SEQ ID NO: 188888 - DNA, 15 bp, Homo sapiens
gggctcaaaagccat

SEQ ID NO: 188889 - DNA, 15 bp, Homo sapiens
agggctcaaaagcca

SEQ ID NO: 188890 - DNA, 15 bp, Homo sapiens
aagggctcaaaagcc

SEQ ID NO: 188891 - DNA, 15 bp, Homo sapiens
taagggctcaaaagc

SEQ ID NO: 188892 - DNA, 15 bp, Homo sapiens
ttaagggctcaaaag

SEQ ID NO: 188893 - DNA, 15 bp, Homo sapiens
cttaagggctcaaaa

SEQ ID NO: 188894 - DNA, 15 bp, Homo sapiens
gcttaagggctcaaa

SEQ ID NO: 188895 - DNA, 15 bp, Homo sapiens
agcttaagggctcaa

SEQ ID NO: 188896 - DNA, 15 bp, Homo sapiens
gagcttaagggctca

SEQ ID NO: 188897 - DNA, 15 bp, Homo sapiens
agagcttaagggctc

SEQ ID NO: 188898 - DNA, 15 bp, Homo sapiens
aagagcttaagggct

SEQ ID NO: 188899 - DNA, 15 bp, Homo sapiens
gaagagcttaagggc

SEQ ID NO: 188900 - DNA, 15 bp, Homo sapiens
agaagagcttaaggg

SEQ ID NO: 188901 - DNA, 15 bp, Homo sapiens
cagaagagcttaagg

SEQ ID NO: 188902 - DNA, 15 bp, Homo sapiens
ccagaagagcttaag

SEQ ID NO: 188903 - DNA, 15 bp, Homo sapiens
cccagaagagcttaa

SEQ ID NO: 188904 - DNA, 15 bp, Homo sapiens
ccccagaagagctta

SEQ ID NO: 188905 - DNA, 15 bp, Homo sapiens
gccccagaagagctt

SEQ ID NO: 188906 - DNA, 15 bp, Homo sapiens
tgccccagaagagct

SEQ ID NO: 188907 - DNA, 15 bp, Homo sapiens
atgccccagaagagc

SEQ ID NO: 188908 - DNA, 15 bp, Homo sapiens
aatgccccagaagag

SEQ ID NO: 188909 - DNA, 15 bp, Homo sapiens
gaatgccccagaaga

SEQ ID NO: 188910 - DNA, 15 bp, Homo sapiens
agaatgccccagaag

SEQ ID NO: 188911 - DNA, 15 bp, Homo sapiens
gagaatgccccagaa

SEQ ID NO: 188912 - DNA, 15 bp, Homo sapiens
tgagaatgccccaga

SEQ ID NO: 188913 - DNA, 15 bp, Homo sapiens
atgagaatgccccag

SEQ ID NO: 188914 - DNA, 15 bp, Homo sapiens
aatgagaatgcccca

SEQ ID NO: 188915 - DNA, 15 bp, Homo sapiens
aaatgagaatgcccc

SEQ ID NO: 188916 - DNA, 15 bp, Homo sapiens
gaaatgagaatgccc

SEQ ID NO: 188917 - DNA, 15 bp, Homo sapiens
agaaatgagaatgcc

SEQ ID NO: 188918 - DNA, 15 bp, Homo sapiens
gagaaatgagaatgc

SEQ ID NO: 188919 - DNA, 15 bp, Homo sapiens
tgagaaatgagaatg

SEQ ID NO: 188920 - DNA, 15 bp, Homo sapiens
ttgagaaatgagaat

SEQ ID NO: 188921 - DNA, 15 bp, Homo sapiens
gttgagaaatgagaa

SEQ ID NO: 188922 - DNA, 15 bp, Homo sapiens
agttgagaaatgaga

SEQ ID NO: 188923 - DNA, 15 bp, Homo sapiens
tagttgagaaatgag

SEQ ID NO: 188924 - DNA, 15 bp, Homo sapiens
ctagttgagaaatga

SEQ ID NO: 188925 - DNA, 15 bp, Homo sapiens
tctagttgagaaatg

SEQ ID NO: 188926 - DNA, 15 bp, Homo sapiens
ctctagttgagaaat

SEQ ID NO: 188927 - DNA, 15 bp, Homo sapiens
gctctagttgagaaa

SEQ ID NO: 188928 - DNA, 15 bp, Homo sapiens
agctctagttgagaa

SEQ ID NO: 188929 - DNA, 15 bp, Homo sapiens
tagctctagttgaga

SEQ ID NO: 188930 - DNA, 15 bp, Homo sapiens
ctagctctagttgag

SEQ ID NO: 188931 - DNA, 15 bp, Homo sapiens
gctagctctagttga

SEQ ID NO: 188932 - DNA, 15 bp, Homo sapiens
cgctagctctagttg

SEQ ID NO: 188933 - DNA, 15 bp, Homo sapiens
ccgctagctctagtt

SEQ ID NO: 188934 - DNA, 15 bp, Homo sapiens
cccgctagctctagt

SEQ ID NO: 188935 - DNA, 15 bp, Homo sapiens
acccgctagctctag

SEQ ID NO: 188936 - DNA, 15 bp, Homo sapiens
cacccgctagctcta

SEQ ID NO: 188937 - DNA, 15 bp, Homo sapiens
tcacccgctagctct

SEQ ID NO: 188938 - DNA, 15 bp, Homo sapiens
ctcacccgctagctc

SEQ ID NO: 188939 - DNA, 15 bp, Homo sapiens
tctcacccgctagct

SEQ ID NO: 188940 - DNA, 15 bp, Homo sapiens
ctctcacccgctagc

SEQ ID NO: 188941 - DNA, 15 bp, Homo sapiens
gctctcacccgctag

SEQ ID NO: 188942 - DNA, 15 bp, Homo sapiens
ggctctcacccgcta

SEQ ID NO: 188943 - DNA, 15 bp, Homo sapiens
gggctctcacccgct

SEQ ID NO: 188944 - DNA, 15 bp, Homo sapiens
agggctctcacccgc

SEQ ID NO: 188945 - DNA, 15 bp, Homo sapiens
gagggctctcacccg

SEQ ID NO: 188946 - DNA, 15 bp, Homo sapiens
agagggctctcaccc

SEQ ID NO: 188947 - DNA, 15 bp, Homo sapiens
gagagggctctcacc

SEQ ID NO: 188948 - DNA, 15 bp, Homo sapiens
agagagggctctcac

SEQ ID NO: 188949 - DNA, 15 bp, Homo sapiens
gagagagggctctca

SEQ ID NO: 188950 - DNA, 15 bp, Homo sapiens
agagagagggctctc

SEQ ID NO: 188951 - DNA, 15 bp, Homo sapiens
cagagagagggctct

SEQ ID NO: 188952 - DNA, 15 bp, Homo sapiens
acagagagagggctc

SEQ ID NO: 188953 - DNA, 15 bp, Homo sapiens
aacagagagagggct

SEQ ID NO: 188954 - DNA, 15 bp, Homo sapiens
aaacagagagagggc

SEQ ID NO: 188955 - DNA, 15 bp, Homo sapiens
aaaacagagagaggg

SEQ ID NO: 188956 - DNA, 15 bp, Homo sapiens
gaaaacagagagagg

SEQ ID NO: 188957 - DNA, 15 bp, Homo sapiens
tgaaaacagagagag

SEQ ID NO: 188958 - DNA, 15 bp, Homo sapiens
atgaaaacagagaga

SEQ ID NO: 188959 - DNA, 15 bp, Homo sapiens
gatgaaaacagagag

SEQ ID NO: 188960 - DNA, 15 bp, Homo sapiens
agatgaaaacagaga

SEQ ID NO: 188961 - DNA, 15 bp, Homo sapiens
cagatgaaaacagag

SEQ ID NO: 188962 - DNA, 15 bp, Homo sapiens
gcagatgaaaacaga

SEQ ID NO: 188963 - DNA, 15 bp, Homo sapiens
agcagatgaaaacag

SEQ ID NO: 188964 - DNA, 15 bp, Homo sapiens
cagcagatgaaaaca

SEQ ID NO: 188965 - DNA, 15 bp, Homo sapiens
gcagcagatgaaaac

SEQ ID NO: 188966 - DNA, 15 bp, Homo sapiens
tgcagcagatgaaaa

SEQ ID NO: 188967 - DNA, 15 bp, Homo sapiens
ctgcagcagatgaaa

SEQ ID NO: 188968 - DNA, 15 bp, Homo sapiens
cctgcagcagatgaa

SEQ ID NO: 188969 - DNA, 15 bp, Homo sapiens
tcctgcagcagatga

SEQ ID NO: 188970 - DNA, 15 bp, Homo sapiens
gtcctgcagcagatg

SEQ ID NO: 188971 - DNA, 15 bp, Homo sapiens
tgtcctgcagcagat

SEQ ID NO: 188972 - DNA, 15 bp, Homo sapiens
ctgtcctgcagcaga

SEQ ID NO: 188973 - DNA, 15 bp, Homo sapiens
gctgtcctgcagcag

SEQ ID NO: 188974 - DNA, 15 bp, Homo sapiens
agctgtcctgcagca

SEQ ID NO: 188975 - DNA, 15 bp, Homo sapiens
cagctgtcctgcagc

SEQ ID NO: 188976 - DNA, 15 bp, Homo sapiens
ccagctgtcctgcag

SEQ ID NO: 188977 - DNA, 15 bp, Homo sapiens
tccagctgtcctgca

SEQ ID NO: 188978 - DNA, 15 bp, Homo sapiens
gtccagctgtcctgc

SEQ ID NO: 188979 - DNA, 15 bp, Homo sapiens
agtccagctgtcctg

SEQ ID NO: 188980 - DNA, 15 bp, Homo sapiens
aagtccagctgtcct

SEQ ID NO: 188981 - DNA, 15 bp, Homo sapiens
gaagtccagctgtcc

SEQ ID NO: 188982 - DNA, 15 bp, Homo sapiens
tgaagtccagctgtc

SEQ ID NO: 188983 - DNA, 15 bp, Homo sapiens
gtgaagtccagctgt

SEQ ID NO: 188984 - DNA, 15 bp, Homo sapiens
agtgaagtccagctg

SEQ ID NO: 188985 - DNA, 15 bp, Homo sapiens
cagtgaagtccagct

SEQ ID NO: 188986 - DNA, 15 bp, Homo sapiens
acagtgaagtccagc

SEQ ID NO: 188987 - DNA, 15 bp, Homo sapiens
tacagtgaagtccag

SEQ ID NO: 188988 - DNA, 15 bp, Homo sapiens
atacagtgaagtcca

SEQ ID NO: 188989 - DNA, 15 bp, Homo sapiens
gatacagtgaagtcc

SEQ ID NO: 188990 - DNA, 15 bp, Homo sapiens
agatacagtgaagtc

SEQ ID NO: 188991 - DNA, 15 bp, Homo sapiens
gagatacagtgaagt

SEQ ID NO: 188992 - DNA, 15 bp, Homo sapiens
tgagatacagtgaag

SEQ ID NO: 188993 - DNA, 15 bp, Homo sapiens
atgagatacagtgaa

SEQ ID NO: 188994 - DNA, 15 bp, Homo sapiens
tatgagatacagtga

SEQ ID NO: 188995 - DNA, 15 bp, Homo sapiens
ttatgagatacagtg

SEQ ID NO: 188996 - DNA, 15 bp, Homo sapiens
tttatgagatacagt

SEQ ID NO: 188997 - DNA, 15 bp, Homo sapiens
ctttatgagatacag

SEQ ID NO: 188998 - DNA, 15 bp, Homo sapiens
tctttatgagataca

SEQ ID NO: 188999 - DNA, 15 bp, Homo sapiens
ttctttatgagatac

SEQ ID NO: 189000 - DNA, 15 bp, Homo sapiens
tttctttatgagata

SEQ ID NO: 189001 - DNA, 15 bp, Homo sapiens
ttttctttatgagat

SEQ ID NO: 189002 - DNA, 15 bp, Homo sapiens
cttttctttatgaga

SEQ ID NO: 189003 - DNA, 15 bp, Homo sapiens
ccttttctttatgag

SEQ ID NO: 189004 - DNA, 15 bp, Homo sapiens
tccttttctttatga

SEQ ID NO: 189005 - DNA, 15 bp, Homo sapiens
ctccttttctttatg

SEQ ID NO: 189006 - DNA, 15 bp, Homo sapiens
cctccttttctttat

SEQ ID NO: 189007 - DNA, 15 bp, Homo sapiens
acctccttttcttta

SEQ ID NO: 189008 - DNA, 15 bp, Homo sapiens
cacctccttttcttt

SEQ ID NO: 189009 - DNA, 15 bp, Homo sapiens
ccacctccttttctt

SEQ ID NO: 189010 - DNA, 15 bp, Homo sapiens
cccacctccttttct

SEQ ID NO: 189011 - DNA, 15 bp, Homo sapiens
ccccacctccttttc

SEQ ID NO: 189012 - DNA, 15 bp, Homo sapiens
accccacctcctttt

SEQ ID NO: 189013 - DNA, 15 bp, Homo sapiens
caccccacctccttt

SEQ ID NO: 189014 - DNA, 15 bp, Homo sapiens
ccaccccacctcctt

SEQ ID NO: 189015 - DNA, 15 bp, Homo sapiens
cccaccccacctcct

SEQ ID NO: 189016 - DNA, 15 bp, Homo sapiens
gcccaccccacctcc

SEQ ID NO: 189017 - DNA, 15 bp, Homo sapiens
tgcccaccccacctc

SEQ ID NO: 189018 - DNA, 15 bp, Homo sapiens
ctgcccaccccacct

SEQ ID NO: 189019 - DNA, 15 bp, Homo sapiens
cctgcccaccccacc

SEQ ID NO: 189020 - DNA, 15 bp, Homo sapiens
ccctgcccaccccac

SEQ ID NO: 189021 - DNA, 15 bp, Homo sapiens
gccctgcccacccca

SEQ ID NO: 189022 - DNA, 15 bp, Homo sapiens
ggccctgcccacccc

SEQ ID NO: 189023 - DNA, 15 bp, Homo sapiens
gggccctgcccaccc

SEQ ID NO: 189024 - DNA, 15 bp, Homo sapiens
agggccctgcccacc

SEQ ID NO: 189025 - DNA, 15 bp, Homo sapiens
tagggccctgcccac

SEQ ID NO: 189026 - DNA, 15 bp, Homo sapiens
ctagggccctgccca

SEQ ID NO: 189027 - DNA, 15 bp, Homo sapiens
cctagggccctgccc

SEQ ID NO: 189028 - DNA, 15 bp, Homo sapiens
gcctagggccctgcc

SEQ ID NO: 189029 - DNA, 15 bp, Homo sapiens
agcctagggccctgc

SEQ ID NO: 189030 - DNA, 15 bp, Homo sapiens
cagcctagggccctg

SEQ ID NO: 189031 - DNA, 15 bp, Homo sapiens
acagcctagggccct

SEQ ID NO: 189032 - DNA, 15 bp, Homo sapiens
tacagcctagggccc

SEQ ID NO: 189033 - DNA, 15 bp, Homo sapiens
atacagcctagggcc

SEQ ID NO: 189034 - DNA, 15 bp, Homo sapiens
aatacagcctagggc

SEQ ID NO: 189035 - DNA, 15 bp, Homo sapiens
taatacagcctaggg

SEQ ID NO: 189036 - DNA, 15 bp, Homo sapiens
gtaatacagcctagg

SEQ ID NO: 189037 - DNA, 15 bp, Homo sapiens
agtaatacagcctag

SEQ ID NO: 189038 - DNA, 15 bp, Homo sapiens
cagtaatacagccta

SEQ ID NO: 189039 - DNA, 15 bp, Homo sapiens
ccagtaatacagcct

SEQ ID NO: 189040 - DNA, 15 bp, Homo sapiens
tccagtaatacagcc

SEQ ID NO: 189041 - DNA, 15 bp, Homo sapiens
ttccagtaatacagc

SEQ ID NO: 189042 - DNA, 15 bp, Homo sapiens
tttccagtaatacag

SEQ ID NO: 189043 - DNA, 15 bp, Homo sapiens
ttttccagtaataca

SEQ ID NO: 189044 - DNA, 15 bp, Homo sapiens
tttttccagtaatac

SEQ ID NO: 189045 - DNA, 15 bp, Homo sapiens
ttttttccagtaata

SEQ ID NO: 189046 - DNA, 15 bp, Homo sapiens
tttttttccagtaat

SEQ ID NO: 189047 - DNA, 15 bp, Homo sapiens
ttttttttccagtaa

SEQ ID NO: 189048 - DNA, 15 bp, Homo sapiens
gttttttttccagta

SEQ ID NO: 189049 - DNA, 15 bp, Homo sapiens
tgttttttttccagt

SEQ ID NO: 189050 - DNA, 15 bp, Homo sapiens
ttgttttttttccag

SEQ ID NO: 189051 - DNA, 15 bp, Homo sapiens
tttgttttttttcca

SEQ ID NO: 189052 - DNA, 15 bp, Homo sapiens
ttttgttttttttcc

SEQ ID NO: 189053 - DNA, 15 bp, Homo sapiens
tttttgttttttttc

SEQ ID NO: 189054 - DNA, 15 bp, Homo sapiens
ttttttgtttttttt

SEQ ID NO: 189055 - DNA, 15 bp, Homo sapiens
tttttttgttttttt

SEQ ID NO: 189056 - DNA, 15 bp, Homo sapiens
ttttttttgtttttt

SEQ ID NO: 189057 - DNA, 15 bp, Homo sapiens
tttttttttgttttt

SEQ ID NO: 189058 - DNA, 15 bp, Homo sapiens
gtttttttttgtttt

SEQ ID NO: 189059 - DNA, 15 bp, Homo sapiens
tgtttttttttgttt

SEQ ID NO: 189060 - DNA, 15 bp, Homo sapiens
ttgtttttttttgtt

SEQ ID NO: 189061 - DNA, 15 bp, Homo sapiens
tttgtttttttttgt

SEQ ID NO: 189062 - DNA, 15 bp, Homo sapiens
ttttgtttttttttg

SEQ ID NO: 189063 - DNA, 15 bp, Homo sapiens
gttttgttttttttt

SEQ ID NO: 189064 - DNA, 15 bp, Homo sapiens
tgttttgtttttttt

SEQ ID NO: 189065 - DNA, 15 bp, Homo sapiens
ctgttttgttttttt

SEQ ID NO: 189066 - DNA, 15 bp, Homo sapiens
cctgttttgtttttt

SEQ ID NO: 189067 - DNA, 15 bp, Homo sapiens
gcctgttttgttttt

SEQ ID NO: 189068 - DNA, 15 bp, Homo sapiens
tgcctgttttgtttt

SEQ ID NO: 189069 - DNA, 15 bp, Homo sapiens
ctgcctgttttgttt

SEQ ID NO: 189070 - DNA, 15 bp, Homo sapiens
actgcctgttttgtt

SEQ ID NO: 189071 - DNA, 15 bp, Homo sapiens
tactgcctgttttgt

SEQ ID NO: 189072 - DNA, 15 bp, Homo sapiens
ctactgcctgttttg

SEQ ID NO: 189073 - DNA, 15 bp, Homo sapiens
gctactgcctgtttt

SEQ ID NO: 189074 - DNA, 15 bp, Homo sapiens
agctactgcctgttt

SEQ ID NO: 189075 - DNA, 15 bp, Homo sapiens
gagctactgcctgtt

SEQ ID NO: 189076 - DNA, 15 bp, Homo sapiens
ggagctactgcctgt

SEQ ID NO: 189077 - DNA, 15 bp, Homo sapiens
aggagctactgcctg

SEQ ID NO: 189078 - DNA, 15 bp, Homo sapiens
caggagctactgcct

SEQ ID NO: 189079 - DNA, 15 bp, Homo sapiens
ccaggagctactgcc

SEQ ID NO: 189080 - DNA, 15 bp, Homo sapiens
accaggagctactgc

SEQ ID NO: 189081 - DNA, 15 bp, Homo sapiens
aaccaggagctactg

SEQ ID NO: 189082 - DNA, 15 bp, Homo sapiens
aaaccaggagctact

SEQ ID NO: 189083 - DNA, 15 bp, Homo sapiens
gaaaccaggagctac

SEQ ID NO: 189084 - DNA, 15 bp, Homo sapiens
agaaaccaggagcta

SEQ ID NO: 189085 - DNA, 15 bp, Homo sapiens
cagaaaccaggagct

SEQ ID NO: 189086 - DNA, 15 bp, Homo sapiens
acagaaaccaggagc

SEQ ID NO: 189087 - DNA, 15 bp, Homo sapiens
tacagaaaccaggag

SEQ ID NO: 189088 - DNA, 15 bp, Homo sapiens
ttacagaaaccagga

SEQ ID NO: 189089 - DNA, 15 bp, Homo sapiens
tttacagaaaccagg

SEQ ID NO: 189090 - DNA, 15 bp, Homo sapiens
ttttacagaaaccag

SEQ ID NO: 189091 - DNA, 15 bp, Homo sapiens
tttttacagaaacca

SEQ ID NO: 189092 - DNA, 15 bp, Homo sapiens
atttttacagaaacc

SEQ ID NO: 189093 - DNA, 15 bp, Homo sapiens
catttttacagaaac

SEQ ID NO: 189094 - DNA, 15 bp, Homo sapiens
ccatttttacagaaa

SEQ ID NO: 189095 - DNA, 15 bp, Homo sapiens
accatttttacagaa

SEQ ID NO: 189096 - DNA, 15 bp, Homo sapiens
caccatttttacaga

SEQ ID NO: 189097 - DNA, 15 bp, Homo sapiens
acaccatttttacag

SEQ ID NO: 189098 - DNA, 15 bp, Homo sapiens
gacaccatttttaca

SEQ ID NO: 189099 - DNA, 15 bp, Homo sapiens
agacaccatttttac

SEQ ID NO: 189100 - DNA, 15 bp, Homo sapiens
tagacaccattttta

SEQ ID NO: 189101 - DNA, 15 bp, Homo sapiens
ctagacaccattttt

SEQ ID NO: 189102 - DNA, 15 bp, Homo sapiens
tctagacaccatttt

SEQ ID NO: 189103 - DNA, 15 bp, Homo sapiens
gtctagacaccattt

SEQ ID NO: 189104 - DNA, 15 bp, Homo sapiens
cgtctagacaccatt

SEQ ID NO: 189105 - DNA, 15 bp, Homo sapiens
acgtctagacaccat

SEQ ID NO: 189106 - DNA, 15 bp, Homo sapiens
cacgtctagacacca

SEQ ID NO: 189107 - DNA, 15 bp, Homo sapiens
tcacgtctagacacc

SEQ ID NO: 189108 - DNA, 15 bp, Homo sapiens
ctcacgtctagacac

SEQ ID NO: 189109 - DNA, 15 bp, Homo sapiens
actcacgtctagaca

SEQ ID NO: 189110 - DNA, 15 bp, Homo sapiens
cactcacgtctagac

SEQ ID NO: 189111 - DNA, 15 bp, Homo sapiens
tcactcacgtctaga

SEQ ID NO: 189112 - DNA, 15 bp, Homo sapiens
ttcactcacgtctag

SEQ ID NO: 189113 - DNA, 15 bp, Homo sapiens
cttcactcacgtcta

SEQ ID NO: 189114 - DNA, 15 bp, Homo sapiens
tcttcactcacgtct

SEQ ID NO: 189115 - DNA, 15 bp, Homo sapiens
ctcttcactcacgtc

SEQ ID NO: 189116 - DNA, 15 bp, Homo sapiens
cctcttcactcacgt

SEQ ID NO: 189117 - DNA, 15 bp, Homo sapiens
gcctcttcactcacg

SEQ ID NO: 189118 - DNA, 15 bp, Homo sapiens
tgcctcttcactcac

SEQ ID NO: 189119 - DNA, 15 bp, Homo sapiens
ctgcctcttcactca

SEQ ID NO: 189120 - DNA, 15 bp, Homo sapiens
tctgcctcttcactc

SEQ ID NO: 189121 - DNA, 15 bp, Homo sapiens
ttctgcctcttcact

SEQ ID NO: 189122 - DNA, 15 bp, Homo sapiens
cttctgcctcttcac

SEQ ID NO: 189123 - DNA, 15 bp, Homo sapiens
ccttctgcctcttca

SEQ ID NO: 189124 - DNA, 15 bp, Homo sapiens
accttctgcctcttc

SEQ ID NO: 189125 - DNA, 15 bp, Homo sapiens
gaccttctgcctctt

SEQ ID NO: 189126 - DNA, 15 bp, Homo sapiens
tgaccttctgcctct

SEQ ID NO: 189127 - DNA, 15 bp, Homo sapiens
ctgaccttctgcctc

SEQ ID NO: 189128 - DNA, 15 bp, Homo sapiens
tctgaccttctgcct

SEQ ID NO: 189129 - DNA, 15 bp, Homo sapiens
ctctgaccttctgcc

SEQ ID NO: 189130 - DNA, 15 bp, Homo sapiens
cctctgaccttctgc

SEQ ID NO: 189131 - DNA, 15 bp, Homo sapiens
ccctctgaccttctg

SEQ ID NO: 189132 - DNA, 15 bp, Homo sapiens
cccctctgaccttct

SEQ ID NO: 189133 - DNA, 15 bp, Homo sapiens
tcccctctgaccttc

SEQ ID NO: 189134 - DNA, 15 bp, Homo sapiens
atcccctctgacctt

SEQ ID NO: 189135 - DNA, 15 bp, Homo sapiens
aatcccctctgacct

SEQ ID NO: 189136 - DNA, 15 bp, Homo sapiens
aaatcccctctgacc

SEQ ID NO: 189137 - DNA, 15 bp, Homo sapiens
caaatcccctctgac

SEQ ID NO: 189138 - DNA, 15 bp, Homo sapiens
ccaaatcccctctga

SEQ ID NO: 189139 - DNA, 15 bp, Homo sapiens
tccaaatcccctctg

SEQ ID NO: 189140 - DNA, 15 bp, Homo sapiens
ttccaaatcccctct

SEQ ID NO: 189141 - DNA, 15 bp, Homo sapiens
tttccaaatcccctc

SEQ ID NO: 189142 - DNA, 15 bp, Homo sapiens
atttccaaatcccct

SEQ ID NO: 189143 - DNA, 15 bp, Homo sapiens
gatttccaaatcccc

SEQ ID NO: 189144 - DNA, 15 bp, Homo sapiens
agatttccaaatccc

SEQ ID NO: 189145 - DNA, 15 bp, Homo sapiens
gagatttccaaatcc

SEQ ID NO: 189146 - DNA, 15 bp, Homo sapiens
tgagatttccaaatc

SEQ ID NO: 189147 - DNA, 15 bp, Homo sapiens
ttgagatttccaaat

SEQ ID NO: 189148 - DNA, 15 bp, Homo sapiens
tttgagatttccaaa

SEQ ID NO: 189149 - DNA, 15 bp, Homo sapiens
ctttgagatttccaa

SEQ ID NO: 189150 - DNA, 15 bp, Homo sapiens
cctttgagatttcca

SEQ ID NO: 189151 - DNA, 15 bp, Homo sapiens
gcctttgagatttcc

SEQ ID NO: 189152 - DNA, 15 bp, Homo sapiens
agcctttgagatttc

SEQ ID NO: 189153 - DNA, 15 bp, Homo sapiens
cagcctttgagattt

SEQ ID NO: 189154 - DNA, 15 bp, Homo sapiens
tcagcctttgagatt

SEQ ID NO: 189155 - DNA, 15 bp, Homo sapiens
ctcagcctttgagat

SEQ ID NO: 189156 - DNA, 15 bp, Homo sapiens
gctcagcctttgaga

SEQ ID NO: 189157 - DNA, 15 bp, Homo sapiens
tgctcagcctttgag

SEQ ID NO: 189158 - DNA, 15 bp, Homo sapiens
gtgctcagcctttga

SEQ ID NO: 189159 - DNA, 15 bp, Homo sapiens
tgtgctcagcctttg

SEQ ID NO: 189160 - DNA, 15 bp, Homo sapiens
ctgtgctcagccttt

SEQ ID NO: 189161 - DNA, 15 bp, Homo sapiens
tctgtgctcagcctt

SEQ ID NO: 189162 - DNA, 15 bp, Homo sapiens
ctctgtgctcagcct

SEQ ID NO: 189163 - DNA, 15 bp, Homo sapiens
gctctgtgctcagcc

SEQ ID NO: 189164 - DNA, 15 bp, Homo sapiens
cgctctgtgctcagc

SEQ ID NO: 189165 - DNA, 15 bp, Homo sapiens
gcgctctgtgctcag

SEQ ID NO: 189166 - DNA, 15 bp, Homo sapiens
ggcgctctgtgctca

SEQ ID NO: 189167 - DNA, 15 bp, Homo sapiens
gggcgctctgtgctc

SEQ ID NO: 189168 - DNA, 15 bp, Homo sapiens
tgggcgctctgtgct

SEQ ID NO: 189169 - DNA, 15 bp, Homo sapiens
gtgggcgctctgtgc

SEQ ID NO: 189170 - DNA, 15 bp, Homo sapiens
tgtgggcgctctgtg

SEQ ID NO: 189171 - DNA, 15 bp, Homo sapiens
ctgtgggcgctctgt

SEQ ID NO: 189172 - DNA, 15 bp, Homo sapiens
cctgtgggcgctctg

SEQ ID NO: 189173 - DNA, 15 bp, Homo sapiens
acctgtgggcgctct

SEQ ID NO: 189174 - DNA, 15 bp, Homo sapiens
cacctgtgggcgctc

SEQ ID NO: 189175 - DNA, 15 bp, Homo sapiens
gcacctgtgggcgct

SEQ ID NO: 189176 - DNA, 15 bp, Homo sapiens
tgcacctgtgggcgc

SEQ ID NO: 189177 - DNA, 15 bp, Homo sapiens
ttgcacctgtgggcg

SEQ ID NO: 189178 - DNA, 15 bp, Homo sapiens
cttgcacctgtgggc

SEQ ID NO: 189179 - DNA, 15 bp, Homo sapiens
ccttgcacctgtggg

SEQ ID NO: 189180 - DNA, 15 bp, Homo sapiens
tccttgcacctgtgg

SEQ ID NO: 189181 - DNA, 15 bp, Homo sapiens
ctccttgcacctgtg

SEQ ID NO: 189182 - DNA, 15 bp, Homo sapiens
tctccttgcacctgt

SEQ ID NO: 189183 - DNA, 15 bp, Homo sapiens
ttctccttgcacctg

SEQ ID NO: 189184 - DNA, 15 bp, Homo sapiens
tttctccttgcacct

SEQ ID NO: 189185 - DNA, 15 bp, Homo sapiens
ctttctccttgcacc

SEQ ID NO: 189186 - DNA, 15 bp, Homo sapiens
actttctccttgcac

SEQ ID NO: 189187 - DNA, 15 bp, Homo sapiens
tactttctccttgca

SEQ ID NO: 189188 - DNA, 15 bp, Homo sapiens
gtactttctccttgc

SEQ ID NO: 189189 - DNA, 15 bp, Homo sapiens
tgtactttctccttg

SEQ ID NO: 189190 - DNA, 15 bp, Homo sapiens
ctgtactttctcctt

SEQ ID NO: 189191 - DNA, 15 bp, Homo sapiens
cctgtactttctcct

SEQ ID NO: 189192 - DNA, 15 bp, Homo sapiens
ccctgtactttctcc

SEQ ID NO: 189193 - DNA, 15 bp, Homo sapiens
gccctgtactttctc

SEQ ID NO: 189194 - DNA, 15 bp, Homo sapiens
ggccctgtactttct

SEQ ID NO: 189195 - DNA, 15 bp, Homo sapiens
tggccctgtactttc

SEQ ID NO: 189196 - DNA, 15 bp, Homo sapiens
ctggccctgtacttt

SEQ ID NO: 189197 - DNA, 15 bp, Homo sapiens
cctggccctgtactt

SEQ ID NO: 189198 - DNA, 15 bp, Homo sapiens
ccctggccctgtact

SEQ ID NO: 189199 - DNA, 15 bp, Homo sapiens
gccctggccctgtac

SEQ ID NO: 189200 - DNA, 15 bp, Homo sapiens
ggccctggccctgta

SEQ ID NO: 189201 - DNA, 15 bp, Homo sapiens
tggccctggccctgt

SEQ ID NO: 189202 - DNA, 15 bp, Homo sapiens
ctggccctggccctg

SEQ ID NO: 189203 - DNA, 15 bp, Homo sapiens
tctggccctggccct

SEQ ID NO: 189204 - DNA, 15 bp, Homo sapiens
ctctggccctggccc

SEQ ID NO: 189205 - DNA, 15 bp, Homo sapiens
tctctggccctggcc

SEQ ID NO: 189206 - DNA, 15 bp, Homo sapiens
atctctggccctggc

SEQ ID NO: 189207 - DNA, 15 bp, Homo sapiens
aatctctggccctgg

SEQ ID NO: 189208 - DNA, 15 bp, Homo sapiens
aaatctctggccctg

SEQ ID NO: 189209 - DNA, 15 bp, Homo sapiens
gaaatctctggccct

SEQ ID NO: 189210 - DNA, 15 bp, Homo sapiens
ggaaatctctggccc

SEQ ID NO: 189211 - DNA, 15 bp, Homo sapiens
aggaaatctctggcc

SEQ ID NO: 189212 - DNA, 15 bp, Homo sapiens
aaggaaatctctggc

SEQ ID NO: 189213 - DNA, 15 bp, Homo sapiens
aaaggaaatctctgg

SEQ ID NO: 189214 - DNA, 15 bp, Homo sapiens
gaaaggaaatctctg

SEQ ID NO: 189215 - DNA, 15 bp, Homo sapiens
agaaaggaaatctct

SEQ ID NO: 189216 - DNA, 15 bp, Homo sapiens
gagaaaggaaatctc

SEQ ID NO: 189217 - DNA, 15 bp, Homo sapiens
agagaaaggaaatct

SEQ ID NO: 189218 - DNA, 15 bp, Homo sapiens
aagagaaaggaaatc

SEQ ID NO: 189219 - DNA, 15 bp, Homo sapiens
caagagaaaggaaat

SEQ ID NO: 189220 - DNA, 15 bp, Homo sapiens
acaagagaaaggaaa

SEQ ID NO: 189221 - DNA, 15 bp, Homo sapiens
aacaagagaaaggaa

SEQ ID NO: 189222 - DNA, 15 bp, Homo sapiens
gaacaagagaaagga

SEQ ID NO: 189223 - DNA, 15 bp, Homo sapiens
ggaacaagagaaagg

SEQ ID NO: 189224 - DNA, 15 bp, Homo sapiens
aggaacaagagaaag

SEQ ID NO: 189225 - DNA, 15 bp, Homo sapiens
gaggaacaagagaaa

SEQ ID NO: 189226 - DNA, 15 bp, Homo sapiens
tgaggaacaagagaa

SEQ ID NO: 189227 - DNA, 15 bp, Homo sapiens
ctgaggaacaagaga

SEQ ID NO: 189228 - DNA, 15 bp, Homo sapiens
gctgaggaacaagag

SEQ ID NO: 189229 - DNA, 15 bp, Homo sapiens
agctgaggaacaaga

SEQ ID NO: 189230 - DNA, 15 bp, Homo sapiens
aagctgaggaacaag

SEQ ID NO: 189231 - DNA, 15 bp, Homo sapiens
taagctgaggaacaa

SEQ ID NO: 189232 - DNA, 15 bp, Homo sapiens
ataagctgaggaaca

SEQ ID NO: 189233 - DNA, 15 bp, Homo sapiens
aataagctgaggaac

SEQ ID NO: 189234 - DNA, 15 bp, Homo sapiens
gaataagctgaggaa

SEQ ID NO: 189235 - DNA, 15 bp, Homo sapiens
agaataagctgagga

SEQ ID NO: 189236 - DNA, 15 bp, Homo sapiens
aagaataagctgagg

SEQ ID NO: 189237 - DNA, 15 bp, Homo sapiens
taagaataagctgag

SEQ ID NO: 189238 - DNA, 15 bp, Homo sapiens
gtaagaataagctga

SEQ ID NO: 189239 - DNA, 15 bp, Homo sapiens
ggtaagaataagctg

SEQ ID NO: 189240 - DNA, 15 bp, Homo sapiens
gggtaagaataagct

SEQ ID NO: 189241 - DNA, 15 bp, Homo sapiens
agggtaagaataagc

SEQ ID NO: 189242 - DNA, 15 bp, Homo sapiens
tagggtaagaataag

SEQ ID NO: 189243 - DNA, 15 bp, Homo sapiens
atagggtaagaataa

SEQ ID NO: 189244 - DNA, 15 bp, Homo sapiens
aatagggtaagaata

SEQ ID NO: 189245 - DNA, 15 bp, Homo sapiens
gaatagggtaagaat

SEQ ID NO: 189246 - DNA, 15 bp, Homo sapiens
ggaatagggtaagaa

SEQ ID NO: 189247 - DNA, 15 bp, Homo sapiens
tggaatagggtaaga

SEQ ID NO: 189248 - DNA, 15 bp, Homo sapiens
gtggaatagggtaag

SEQ ID NO: 189249 - DNA, 15 bp, Homo sapiens
ggtggaatagggtaa

SEQ ID NO: 189250 - DNA, 15 bp, Homo sapiens
gggtggaatagggta

SEQ ID NO: 189251 - DNA, 15 bp, Homo sapiens
tgggtggaatagggt

SEQ ID NO: 189252 - DNA, 15 bp, Homo sapiens
gtgggtggaataggg

SEQ ID NO: 189253 - DNA, 15 bp, Homo sapiens
ggtgggtggaatagg

SEQ ID NO: 189254 - DNA, 15 bp, Homo sapiens
gggtgggtggaatag

SEQ ID NO: 189255 - DNA, 15 bp, Homo sapiens
agggtgggtggaata

SEQ ID NO: 189256 - DNA, 15 bp, Homo sapiens
cagggtgggtggaat

SEQ ID NO: 189257 - DNA, 15 bp, Homo sapiens
gcagggtgggtggaa

SEQ ID NO: 189258 - DNA, 15 bp, Homo sapiens
ggcagggtgggtgga

SEQ ID NO: 189259 - DNA, 15 bp, Homo sapiens
tggcagggtgggtgg

SEQ ID NO: 189260 - DNA, 15 bp, Homo sapiens
gtggcagggtgggtg

SEQ ID NO: 189261 - DNA, 15 bp, Homo sapiens
agtggcagggtgggt

SEQ ID NO: 189262 - DNA, 15 bp, Homo sapiens
cagtggcagggtggg

SEQ ID NO: 189263 - DNA, 15 bp, Homo sapiens
gcagtggcagggtgg

SEQ ID NO: 189264 - DNA, 15 bp, Homo sapiens
ggcagtggcagggtg

SEQ ID NO: 189265 - DNA, 15 bp, Homo sapiens
tggcagtggcagggt

SEQ ID NO: 189266 - DNA, 15 bp, Homo sapiens
ctggcagtggcaggg

SEQ ID NO: 189267 - DNA, 15 bp, Homo sapiens
cctggcagtggcagg

SEQ ID NO: 189268 - DNA, 15 bp, Homo sapiens
acctggcagtggcag

SEQ ID NO: 189269 - DNA, 15 bp, Homo sapiens
cacctggcagtggca

SEQ ID NO: 189270 - DNA, 15 bp, Homo sapiens
gcacctggcagtggc

SEQ ID NO: 189271 - DNA, 15 bp, Homo sapiens
agcacctggcagtgg

SEQ ID NO: 189272 - DNA, 15 bp, Homo sapiens
gagcacctggcagtg

SEQ ID NO: 189273 - DNA, 15 bp, Homo sapiens
tgagcacctggcagt

SEQ ID NO: 189274 - DNA, 15 bp, Homo sapiens
ctgagcacctggcag

SEQ ID NO: 189275 - DNA, 15 bp, Homo sapiens
gctgagcacctggca

SEQ ID NO: 189276 - DNA, 15 bp, Homo sapiens
cgctgagcacctggc

SEQ ID NO: 189277 - DNA, 15 bp, Homo sapiens
tcgctgagcacctgg

SEQ ID NO: 189278 - DNA, 15 bp, Homo sapiens
ctcgctgagcacctg

SEQ ID NO: 189279 - DNA, 15 bp, Homo sapiens
actcgctgagcacct

SEQ ID NO: 189280 - DNA, 15 bp, Homo sapiens
gactcgctgagcacc

SEQ ID NO: 189281 - DNA, 15 bp, Homo sapiens
agactcgctgagcac

SEQ ID NO: 189282 - DNA, 15 bp, Homo sapiens
aagactcgctgagca

SEQ ID NO: 189283 - DNA, 15 bp, Homo sapiens
aaagactcgctgagc

SEQ ID NO: 189284 - DNA, 15 bp, Homo sapiens
taaagactcgctgag

SEQ ID NO: 189285 - DNA, 15 bp, Homo sapiens
ataaagactcgctga

SEQ ID NO: 189286 - DNA, 15 bp, Homo sapiens
aataaagactcgctg

SEQ ID NO: 189287 - DNA, 15 bp, Homo sapiens
caataaagactcgct

SEQ ID NO: 189288 - DNA, 15 bp, Homo sapiens
tcaataaagactcgc

SEQ ID NO: 189289 - DNA, 15 bp, Homo sapiens
ttcaataaagactcg

SEQ ID NO: 189290 - DNA, 15 bp, Homo sapiens
tttcaataaagactc

SEQ ID NO: 189291 - DNA, 15 bp, Homo sapiens
ctttcaataaagact

SEQ ID NO: 189292 - DNA, 15 bp, Homo sapiens
tctttcaataaagac

SEQ ID NO: 189293 - DNA, 15 bp, Homo sapiens
ctctttcaataaaga

SEQ ID NO: 189294 - DNA, 15 bp, Homo sapiens
tctctttcaataaag

SEQ ID NO: 189295 - DNA, 15 bp, Homo sapiens
ctctctttcaataaa

SEQ ID NO: 189296 - DNA, 15 bp, Homo sapiens
tctctctttcaataa

SEQ ID NO: 189297 - DNA, 15 bp, Homo sapiens
atctctctttcaata

SEQ ID NO: 189298 - DNA, 15 bp, Homo sapiens
aatctctctttcaat

SEQ ID NO: 189299 - DNA, 15 bp, Homo sapiens
taatctctctttcaa

SEQ ID NO: 189300 - DNA, 15 bp, Homo sapiens
ataatctctctttca

SEQ ID NO: 189301 - DNA, 15 bp, Homo sapiens
aataatctctctttc

SEQ ID NO: 189302 - DNA, 15 bp, Homo sapiens
taataatctctcttt

SEQ ID NO: 189303 - DNA, 15 bp, Homo sapiens
ttaataatctctctt

SEQ ID NO: 189304 - DNA, 15 bp, Homo sapiens
attaataatctctct

SEQ ID NO: 189305 - DNA, 15 bp, Homo sapiens
tattaataatctctc

SEQ ID NO: 189306 - DNA, 15 bp, Homo sapiens
atattaataatctct

SEQ ID NO: 189307 - DNA, 15 bp, Homo sapiens
catattaataatctc

SEQ ID NO: 189308 - DNA, 15 bp, Homo sapiens
ccatattaataatct

SEQ ID NO: 189309 - DNA, 15 bp, Homo sapiens
accatattaataatc

SEQ ID NO: 189310 - DNA, 15 bp, Homo sapiens
caccatattaataat

SEQ ID NO: 189311 - DNA, 15 bp, Homo sapiens
tcaccatattaataa

SEQ ID NO: 189312 - DNA, 15 bp, Homo sapiens
ttcaccatattaata

SEQ ID NO: 189313 - DNA, 15 bp, Homo sapiens
tttcaccatattaat

SEQ ID NO: 189314 - DNA, 15 bp, Homo sapiens
atttcaccatattaa

SEQ ID NO: 189315 - DNA, 15 bp, Homo sapiens
catttcaccatatta

SEQ ID NO: 189316 - DNA, 15 bp, Homo sapiens
acatttcaccatatt

SEQ ID NO: 189317 - DNA, 15 bp, Homo sapiens
gacatttcaccatat

SEQ ID NO: 189318 - DNA, 15 bp, Homo sapiens
agacatttcaccata

SEQ ID NO: 189319 - DNA, 15 bp, Homo sapiens
cagacatttcaccat

SEQ ID NO: 189320 - DNA, 15 bp, Homo sapiens
tcagacatttcacca

SEQ ID NO: 189321 - DNA, 15 bp, Homo sapiens
ctcagacatttcacc

SEQ ID NO: 189322 - DNA, 15 bp, Homo sapiens
tctcagacatttcac

SEQ ID NO: 189323 - DNA, 15 bp, Homo sapiens
atctcagacatttca

SEQ ID NO: 189324 - DNA, 15 bp, Homo sapiens
catctcagacatttc

SEQ ID NO: 189325 - DNA, 15 bp, Homo sapiens
ccatctcagacattt

SEQ ID NO: 189326 - DNA, 15 bp, Homo sapiens
accatctcagacatt

SEQ ID NO: 189327 - DNA, 15 bp, Homo sapiens
aaccatctcagacat

SEQ ID NO: 189328 - DNA, 15 bp, Homo sapiens
gaaccatctcagaca

SEQ ID NO: 189329 - DNA, 15 bp, Homo sapiens
agaaccatctcagac

SEQ ID NO: 189330 - DNA, 15 bp, Homo sapiens
gagaaccatctcaga

SEQ ID NO: 189331 - DNA, 15 bp, Homo sapiens
agagaaccatctcag

SEQ ID NO: 189332 - DNA, 15 bp, Homo sapiens
gagagaaccatctca

SEQ ID NO: 189333 - DNA, 15 bp, Homo sapiens
agagagaaccatctc

SEQ ID NO: 189334 - DNA, 15 bp, Homo sapiens
gagagagaaccatct

SEQ ID NO: 189335 - DNA, 15 bp, Homo sapiens
ggagagagaaccatc

SEQ ID NO: 189336 - DNA, 15 bp, Homo sapiens
cggagagagaaccat

SEQ ID NO: 189337 - DNA, 15 bp, Homo sapiens
gcggagagagaacca

SEQ ID NO: 189338 - DNA, 15 bp, Homo sapiens
tgcggagagagaacc

SEQ ID NO: 189339 - DNA, 15 bp, Homo sapiens
atgcggagagagaac

SEQ ID NO: 189340 - DNA, 15 bp, Homo sapiens
tatgcggagagagaa

SEQ ID NO: 189341 - DNA, 15 bp, Homo sapiens
gtatgcggagagaga

SEQ ID NO: 189342 - DNA, 15 bp, Homo sapiens
ggtatgcggagagag

SEQ ID NO: 189343 - DNA, 15 bp, Homo sapiens
gggtatgcggagaga

SEQ ID NO: 189344 - DNA, 15 bp, Homo sapiens
tgggtatgcggagag

SEQ ID NO: 189345 - DNA, 15 bp, Homo sapiens
ctgggtatgcggaga

SEQ ID NO: 189346 - DNA, 15 bp, Homo sapiens
actgggtatgcggag

SEQ ID NO: 189347 - DNA, 15 bp, Homo sapiens
tactgggtatgcgga

SEQ ID NO: 189348 - DNA, 15 bp, Homo sapiens
ttactgggtatgcgg

SEQ ID NO: 189349 - DNA, 15 bp, Homo sapiens
attactgggtatgcg

SEQ ID NO: 189350 - DNA, 15 bp, Homo sapiens
tattactgggtatgc

SEQ ID NO: 189351 - DNA, 15 bp, Homo sapiens
gtattactgggtatg

SEQ ID NO: 189352 - DNA, 15 bp, Homo sapiens
tgtattactgggtat

SEQ ID NO: 189353 - DNA, 15 bp, Homo sapiens
ctgtattactgggta

SEQ ID NO: 189354 - DNA, 15 bp, Homo sapiens
cctgtattactgggt

SEQ ID NO: 189355 - DNA, 15 bp, Homo sapiens
ccctgtattactggg

SEQ ID NO: 189356 - DNA, 15 bp, Homo sapiens
accctgtattactgg

SEQ ID NO: 189357 - DNA, 15 bp, Homo sapiens
gaccctgtattactg

SEQ ID NO: 189358 - DNA, 15 bp, Homo sapiens
ggaccctgtattact

SEQ ID NO: 189359 - DNA, 15 bp, Homo sapiens
gggaccctgtattac

SEQ ID NO: 189360 - DNA, 15 bp, Homo sapiens
agggaccctgtatta

SEQ ID NO: 189361 - DNA, 15 bp, Homo sapiens
aagggaccctgtatt

SEQ ID NO: 189362 - DNA, 15 bp, Homo sapiens
aaagggaccctgtat

SEQ ID NO: 189363 - DNA, 15 bp, Homo sapiens
caaagggaccctgta

SEQ ID NO: 189364 - DNA, 15 bp, Homo sapiens
ccaaagggaccctgt

SEQ ID NO: 189365 - DNA, 15 bp, Homo sapiens
gccaaagggaccctg

SEQ ID NO: 189366 - DNA, 15 bp, Homo sapiens
agccaaagggaccct

SEQ ID NO: 189367 - DNA, 15 bp, Homo sapiens
aagccaaagggaccc

SEQ ID NO: 189368 - DNA, 15 bp, Homo sapiens
caagccaaagggacc

SEQ ID NO: 189369 - DNA, 15 bp, Homo sapiens
acaagccaaagggac

SEQ ID NO: 189370 - DNA, 15 bp, Homo sapiens
cacaagccaaaggga

SEQ ID NO: 189371 - DNA, 15 bp, Homo sapiens
ccacaagccaaaggg

SEQ ID NO: 189372 - DNA, 15 bp, Homo sapiens
cccacaagccaaagg

SEQ ID NO: 189373 - DNA, 15 bp, Homo sapiens
tcccacaagccaaag

SEQ ID NO: 189374 - DNA, 15 bp, Homo sapiens
ctcccacaagccaaa

SEQ ID NO: 189375 - DNA, 15 bp, Homo sapiens
actcccacaagccaa

SEQ ID NO: 189376 - DNA, 15 bp, Homo sapiens
gactcccacaagcca

SEQ ID NO: 189377 - DNA, 15 bp, Homo sapiens
tgactcccacaagcc

SEQ ID NO: 189378 - DNA, 15 bp, Homo sapiens
gtgactcccacaagc

SEQ ID NO: 189379 - DNA, 15 bp, Homo sapiens
tgtgactcccacaag

SEQ ID NO: 189380 - DNA, 15 bp, Homo sapiens
atgtgactcccacaa

SEQ ID NO: 189381 - DNA, 15 bp, Homo sapiens
catgtgactcccaca

SEQ ID NO: 189382 - DNA, 15 bp, Homo sapiens
acatgtgactcccac

SEQ ID NO: 189383 - DNA, 15 bp, Homo sapiens
cacatgtgactccca

SEQ ID NO: 189384 - DNA, 15 bp, Homo sapiens
ccacatgtgactccc

SEQ ID NO: 189385 - DNA, 15 bp, Homo sapiens
gccacatgtgactcc

SEQ ID NO: 189386 - DNA, 15 bp, Homo sapiens
ggccacatgtgactc

SEQ ID NO: 189387 - DNA, 15 bp, Homo sapiens
tggccacatgtgact

SEQ ID NO: 189388 - DNA, 15 bp, Homo sapiens
atggccacatgtgac

SEQ ID NO: 189389 - DNA, 15 bp, Homo sapiens
aatggccacatgtga

SEQ ID NO: 189390 - DNA, 15 bp, Homo sapiens
aaatggccacatgtg

SEQ ID NO: 189391 - DNA, 15 bp, Homo sapiens
aaaatggccacatgt

SEQ ID NO: 189392 - DNA, 15 bp, Homo sapiens
gaaaatggccacatg

SEQ ID NO: 189393 - DNA, 15 bp, Homo sapiens
tgaaaatggccacat

SEQ ID NO: 189394 - DNA, 15 bp, Homo sapiens
ctgaaaatggccaca

SEQ ID NO: 189395 - DNA, 15 bp, Homo sapiens
actgaaaatggccac

SEQ ID NO: 189396 - DNA, 15 bp, Homo sapiens
tactgaaaatggcca

SEQ ID NO: 189397 - DNA, 15 bp, Homo sapiens
ctactgaaaatggcc

SEQ ID NO: 189398 - DNA, 15 bp, Homo sapiens
actactgaaaatggc

SEQ ID NO: 189399 - DNA, 15 bp, Homo sapiens
aactactgaaaatgg

SEQ ID NO: 189400 - DNA, 15 bp, Homo sapiens
caactactgaaaatg

SEQ ID NO: 189401 - DNA, 15 bp, Homo sapiens
ccaactactgaaaat

SEQ ID NO: 189402 - DNA, 15 bp, Homo sapiens
cccaactactgaaaa

SEQ ID NO: 189403 - DNA, 15 bp, Homo sapiens
tcccaactactgaaa

SEQ ID NO: 189404 - DNA, 15 bp, Homo sapiens
ttcccaactactgaa

SEQ ID NO: 189405 - DNA, 15 bp, Homo sapiens
cttcccaactactga

SEQ ID NO: 189406 - DNA, 15 bp, Homo sapiens
gcttcccaactactg

SEQ ID NO: 189407 - DNA, 15 bp, Homo sapiens
ggcttcccaactact

SEQ ID NO: 189408 - DNA, 15 bp, Homo sapiens
aggcttcccaactac

SEQ ID NO: 189409 - DNA, 15 bp, Homo sapiens
caggcttcccaacta

SEQ ID NO: 189410 - DNA, 15 bp, Homo sapiens
ccaggcttcccaact

SEQ ID NO: 189411 - DNA, 15 bp, Homo sapiens
cccaggcttcccaac

SEQ ID NO: 189412 - DNA, 15 bp, Homo sapiens
ccccaggcttcccaa

SEQ ID NO: 189413 - DNA, 15 bp, Homo sapiens
cccccaggcttccca

SEQ ID NO: 189414 - DNA, 15 bp, Homo sapiens
gcccccaggcttccc

SEQ ID NO: 189415 - DNA, 15 bp, Homo sapiens
ggcccccaggcttcc

SEQ ID NO: 189416 - DNA, 15 bp, Homo sapiens
tggcccccaggcttc

SEQ ID NO: 189417 - DNA, 15 bp, Homo sapiens
ctggcccccaggctt

SEQ ID NO: 189418 - DNA, 15 bp, Homo sapiens
gctggcccccaggct

SEQ ID NO: 189419 - DNA, 15 bp, Homo sapiens
agctggcccccaggc

SEQ ID NO: 189420 - DNA, 15 bp, Homo sapiens
cagctggcccccagg

SEQ ID NO: 189421 - DNA, 15 bp, Homo sapiens
ccagctggcccccag

SEQ ID NO: 189422 - DNA, 15 bp, Homo sapiens
cccagctggccccca

SEQ ID NO: 189423 - DNA, 15 bp, Homo sapiens
tcccagctggccccc

SEQ ID NO: 189424 - DNA, 15 bp, Homo sapiens
ctcccagctggcccc

SEQ ID NO: 189425 - DNA, 15 bp, Homo sapiens
actcccagctggccc

SEQ ID NO: 189426 - DNA, 15 bp, Homo sapiens
aactcccagctggcc

SEQ ID NO: 189427 - DNA, 15 bp, Homo sapiens
caactcccagctggc

SEQ ID NO: 189428 - DNA, 15 bp, Homo sapiens
acaactcccagctgg

SEQ ID NO: 189429 - DNA, 15 bp, Homo sapiens
gacaactcccagctg

SEQ ID NO: 189430 - DNA, 15 bp, Homo sapiens
tgacaactcccagct

SEQ ID NO: 189431 - DNA, 15 bp, Homo sapiens
gtgacaactcccagc

SEQ ID NO: 189432 - DNA, 15 bp, Homo sapiens
agtgacaactcccag

SEQ ID NO: 189433 - DNA, 15 bp, Homo sapiens
cagtgacaactccca

SEQ ID NO: 189434 - DNA, 15 bp, Homo sapiens
gcagtgacaactccc

SEQ ID NO: 189435 - DNA, 15 bp, Homo sapiens
cgcagtgacaactcc

SEQ ID NO: 189436 - DNA, 15 bp, Homo sapiens
acgcagtgacaactc

SEQ ID NO: 189437 - DNA, 15 bp, Homo sapiens
aacgcagtgacaact

SEQ ID NO: 189438 - DNA, 15 bp, Homo sapiens
caacgcagtgacaac

SEQ ID NO: 189439 - DNA, 15 bp, Homo sapiens
ccaacgcagtgacaa

SEQ ID NO: 189440 - DNA, 15 bp, Homo sapiens
cccaacgcagtgaca

SEQ ID NO: 189441 - DNA, 15 bp, Homo sapiens
tcccaacgcagtgac

SEQ ID NO: 189442 - DNA, 15 bp, Homo sapiens
ttcccaacgcagtga

SEQ ID NO: 189443 - DNA, 15 bp, Homo sapiens
attcccaacgcagtg

SEQ ID NO: 189444 - DNA, 15 bp, Homo sapiens
gattcccaacgcagt

SEQ ID NO: 189445 - DNA, 15 bp, Homo sapiens
agattcccaacgcag

SEQ ID NO: 189446 - DNA, 15 bp, Homo sapiens
cagattcccaacgca

SEQ ID NO: 189447 - DNA, 15 bp, Homo sapiens
gcagattcccaacgc

SEQ ID NO: 189448 - DNA, 15 bp, Homo sapiens
ggcagattcccaacg

SEQ ID NO: 189449 - DNA, 15 bp, Homo sapiens
aggcagattcccaac

SEQ ID NO: 189450 - DNA, 15 bp, Homo sapiens
gaggcagattcccaa

SEQ ID NO: 189451 - DNA, 15 bp, Homo sapiens
ggaggcagattccca

SEQ ID NO: 189452 - DNA, 15 bp, Homo sapiens
aggaggcagattccc

SEQ ID NO: 189453 - DNA, 15 bp, Homo sapiens
caggaggcagattcc

SEQ ID NO: 189454 - DNA, 15 bp, Homo sapiens
ccaggaggcagattc

SEQ ID NO: 189455 - DNA, 15 bp, Homo sapiens
cccaggaggcagatt

SEQ ID NO: 189456 - DNA, 15 bp, Homo sapiens
gcccaggaggcagat

SEQ ID NO: 189457 - DNA, 15 bp, Homo sapiens
ggcccaggaggcaga

SEQ ID NO: 189458 - DNA, 15 bp, Homo sapiens
aggcccaggaggcag

SEQ ID NO: 189459 - DNA, 15 bp, Homo sapiens
aaggcccaggaggca

SEQ ID NO: 189460 - DNA, 15 bp, Homo sapiens
aaaggcccaggaggc

SEQ ID NO: 189461 - DNA, 15 bp, Homo sapiens
aaaaggcccaggagg

SEQ ID NO: 189462 - DNA, 15 bp, Homo sapiens
aaaaaggcccaggag

SEQ ID NO: 189463 - DNA, 15 bp, Homo sapiens
taaaaaggcccagga

SEQ ID NO: 189464 - DNA, 15 bp, Homo sapiens
ataaaaaggcccagg

SEQ ID NO: 189465 - DNA, 15 bp, Homo sapiens
aataaaaaggcccag

SEQ ID NO: 189466 - DNA, 15 bp, Homo sapiens
taataaaaaggccca

SEQ ID NO: 189467 - DNA, 15 bp, Homo sapiens
ttaataaaaaggccc

SEQ ID NO: 189468 - DNA, 15 bp, Homo sapiens
cttaataaaaaggcc

SEQ ID NO: 189469 - DNA, 15 bp, Homo sapiens
ccttaataaaaaggc

SEQ ID NO: 189470 - DNA, 15 bp, Homo sapiens
gccttaataaaaagg

SEQ ID NO: 189471 - DNA, 15 bp, Homo sapiens
cgccttaataaaaag

SEQ ID NO: 189472 - DNA, 15 bp, Homo sapiens
acgccttaataaaaa

SEQ ID NO: 189473 - DNA, 15 bp, Homo sapiens
cacgccttaataaaa

SEQ ID NO: 189474 - DNA, 15 bp, Homo sapiens
ccacgccttaataaa

SEQ ID NO: 189475 - DNA, 15 bp, Homo sapiens
tccacgccttaataa

SEQ ID NO: 189476 - DNA, 15 bp, Homo sapiens
ctccacgccttaata

SEQ ID NO: 189477 - DNA, 15 bp, Homo sapiens
actccacgccttaat

SEQ ID NO: 189478 - DNA, 15 bp, Homo sapiens
aactccacgccttaa

SEQ ID NO: 189479 - DNA, 15 bp, Homo sapiens
caactccacgcctta

SEQ ID NO: 189480 - DNA, 15 bp, Homo sapiens
acaactccacgcctt

SEQ ID NO: 189481 - DNA, 15 bp, Homo sapiens
cacaactccacgcct

SEQ ID NO: 189482 - DNA, 15 bp, Homo sapiens
acacaactccacgcc

SEQ ID NO: 189483 - DNA, 15 bp, Homo sapiens
cacacaactccacgc

SEQ ID NO: 189484 - DNA, 15 bp, Homo sapiens
gcacacaactccacg

SEQ ID NO: 189485 - DNA, 15 bp, Homo sapiens
agcacacaactccac

SEQ ID NO: 189486 - DNA, 15 bp, Homo sapiens
cagcacacaactcca

SEQ ID NO: 189487 - DNA, 15 bp, Homo sapiens
acagcacacaactcc

SEQ ID NO: 189488 - DNA, 15 bp, Homo sapiens
aacagcacacaactc

SEQ ID NO: 189489 - DNA, 15 bp, Homo sapiens
gaacagcacacaact

SEQ ID NO: 189490 - DNA, 15 bp, Homo sapiens
agaacagcacacaac

SEQ ID NO: 189491 - DNA, 15 bp, Homo sapiens
gagaacagcacacaa

SEQ ID NO: 189492 - DNA, 15 bp, Homo sapiens
agagaacagcacaca

SEQ ID NO: 189493 - DNA, 15 bp, Homo sapiens
aagagaacagcacac

SEQ ID NO: 189494 - DNA, 15 bp, Homo sapiens
taagagaacagcaca

SEQ ID NO: 189495 - DNA, 15 bp, Homo sapiens
gtaagagaacagcac

SEQ ID NO: 189496 - DNA, 15 bp, Homo sapiens
ggtaagagaacagca

SEQ ID NO: 189497 - DNA, 15 bp, Homo sapiens
aggtaagagaacagc

SEQ ID NO: 189498 - DNA, 15 bp, Homo sapiens
gaggtaagagaacag

SEQ ID NO: 189499 - DNA, 15 bp, Homo sapiens
agaggtaagagaaca

SEQ ID NO: 189500 - DNA, 15 bp, Homo sapiens
cagaggtaagagaac

SEQ ID NO: 189501 - DNA, 15 bp, Homo sapiens
ccagaggtaagagaa

SEQ ID NO: 189502 - DNA, 15 bp, Homo sapiens
accagaggtaagaga

SEQ ID NO: 189503 - DNA, 15 bp, Homo sapiens
gaccagaggtaagag

SEQ ID NO: 189504 - DNA, 15 bp, Homo sapiens
ggaccagaggtaaga

SEQ ID NO: 189505 - DNA, 15 bp, Homo sapiens
gggaccagaggtaag

SEQ ID NO: 189506 - DNA, 15 bp, Homo sapiens
agggaccagaggtaa

SEQ ID NO: 189507 - DNA, 15 bp, Homo sapiens
cagggaccagaggta

SEQ ID NO: 189508 - DNA, 15 bp, Homo sapiens
gcagggaccagaggt

SEQ ID NO: 189509 - DNA, 15 bp, Homo sapiens
agcagggaccagagg

SEQ ID NO: 189510 - DNA, 15 bp, Homo sapiens
aagcagggaccagag

SEQ ID NO: 189511 - DNA, 15 bp, Homo sapiens
caagcagggaccaga

SEQ ID NO: 189512 - DNA, 15 bp, Homo sapiens
ccaagcagggaccag

SEQ ID NO: 189513 - DNA, 15 bp, Homo sapiens
tccaagcagggacca

SEQ ID NO: 189514 - DNA, 15 bp, Homo sapiens
ctccaagcagggacc

SEQ ID NO: 189515 - DNA, 15 bp, Homo sapiens
cctccaagcagggac

SEQ ID NO: 189516 - DNA, 15 bp, Homo sapiens
tcctccaagcaggga

SEQ ID NO: 189517 - DNA, 15 bp, Homo sapiens
ttcctccaagcaggg

SEQ ID NO: 189518 - DNA, 15 bp, Homo sapiens
cttcctccaagcagg

SEQ ID NO: 189519 - DNA, 15 bp, Homo sapiens
tcttcctccaagcag

SEQ ID NO: 189520 - DNA, 15 bp, Homo sapiens
ctcttcctccaagca

SEQ ID NO: 189521 - DNA, 15 bp, Homo sapiens
cctcttcctccaagc

SEQ ID NO: 189522 - DNA, 15 bp, Homo sapiens
gcctcttcctccaag

SEQ ID NO: 189523 - DNA, 15 bp, Homo sapiens
agcctcttcctccaa

SEQ ID NO: 189524 - DNA, 15 bp, Homo sapiens
cagcctcttcctcca

SEQ ID NO: 189525 - DNA, 15 bp, Homo sapiens
tcagcctcttcctcc

SEQ ID NO: 189526 - DNA, 15 bp, Homo sapiens
ttcagcctcttcctc

SEQ ID NO: 189527 - DNA, 15 bp, Homo sapiens
gttcagcctcttcct

SEQ ID NO: 189528 - DNA, 15 bp, Homo sapiens
agttcagcctcttcc

SEQ ID NO: 189529 - DNA, 15 bp, Homo sapiens
aagttcagcctcttc

SEQ ID NO: 189530 - DNA, 15 bp, Homo sapiens
caagttcagcctctt

SEQ ID NO: 189531 - DNA, 15 bp, Homo sapiens
acaagttcagcctct

SEQ ID NO: 189532 - DNA, 15 bp, Homo sapiens
tacaagttcagcctc

SEQ ID NO: 189533 - DNA, 15 bp, Homo sapiens
gtacaagttcagcct

SEQ ID NO: 189534 - DNA, 15 bp, Homo sapiens
ggtacaagttcagcc

SEQ ID NO: 189535 - DNA, 15 bp, Homo sapiens
tggtacaagttcagc

SEQ ID NO: 189536 - DNA, 15 bp, Homo sapiens
gtggtacaagttcag

SEQ ID NO: 189537 - DNA, 15 bp, Homo sapiens
ggtggtacaagttca

SEQ ID NO: 189538 - DNA, 15 bp, Homo sapiens
aggtggtacaagttc

SEQ ID NO: 189539 - DNA, 15 bp, Homo sapiens
caggtggtacaagtt

SEQ ID NO: 189540 - DNA, 15 bp, Homo sapiens
ccaggtggtacaagt

SEQ ID NO: 189541 - DNA, 15 bp, Homo sapiens
cccaggtggtacaag

SEQ ID NO: 189542 - DNA, 15 bp, Homo sapiens
gcccaggtggtacaa

SEQ ID NO: 189543 - DNA, 15 bp, Homo sapiens
tgcccaggtggtaca

SEQ ID NO: 189544 - DNA, 15 bp, Homo sapiens
ttgcccaggtggtac

SEQ ID NO: 189545 - DNA, 15 bp, Homo sapiens
cttgcccaggtggta

SEQ ID NO: 189546 - DNA, 15 bp, Homo sapiens
gcttgcccaggtggt

SEQ ID NO: 189547 - DNA, 15 bp, Homo sapiens
ggcttgcccaggtgg

SEQ ID NO: 189548 - DNA, 15 bp, Homo sapiens
tggcttgcccaggtg

SEQ ID NO: 189549 - DNA, 15 bp, Homo sapiens
ctggcttgcccaggt

SEQ ID NO: 189550 - DNA, 15 bp, Homo sapiens
actggcttgcccagg

SEQ ID NO: 189551 - DNA, 15 bp, Homo sapiens
aactggcttgcccag

SEQ ID NO: 189552 - DNA, 15 bp, Homo sapiens
aaactggcttgccca

SEQ ID NO: 189553 - DNA, 15 bp, Homo sapiens
caaactggcttgccc

SEQ ID NO: 189554 - DNA, 15 bp, Homo sapiens
gcaaactggcttgcc

SEQ ID NO: 189555 - DNA, 15 bp, Homo sapiens
agcaaactggcttgc

SEQ ID NO: 189556 - DNA, 15 bp, Homo sapiens
cagcaaactggcttg

SEQ ID NO: 189557 - DNA, 15 bp, Homo sapiens
acagcaaactggctt

SEQ ID NO: 189558 - DNA, 15 bp, Homo sapiens
cacagcaaactggct

SEQ ID NO: 189559 - DNA, 15 bp, Homo sapiens
tcacagcaaactggc

SEQ ID NO: 189560 - DNA, 15 bp, Homo sapiens
gtcacagcaaactgg

SEQ ID NO: 189561 - DNA, 15 bp, Homo sapiens
ggtcacagcaaactg

SEQ ID NO: 189562 - DNA, 15 bp, Homo sapiens
tggtcacagcaaact

SEQ ID NO: 189563 - DNA, 15 bp, Homo sapiens
gtggtcacagcaaac

SEQ ID NO: 189564 - DNA, 15 bp, Homo sapiens
tgtggtcacagcaaa

SEQ ID NO: 189565 - DNA, 15 bp, Homo sapiens
gtgtggtcacagcaa

SEQ ID NO: 189566 - DNA, 15 bp, Homo sapiens
tgtgtggtcacagca

SEQ ID NO: 189567 - DNA, 15 bp, Homo sapiens
atgtgtggtcacagc

SEQ ID NO: 189568 - DNA, 15 bp, Homo sapiens
catgtgtggtcacag

SEQ ID NO: 189569 - DNA, 15 bp, Homo sapiens
ccatgtgtggtcaca

SEQ ID NO: 189570 - DNA, 15 bp, Homo sapiens
tccatgtgtggtcac

SEQ ID NO: 189571 - DNA, 15 bp, Homo sapiens
atccatgtgtggtca

SEQ ID NO: 189572 - DNA, 15 bp, Homo sapiens
aatccatgtgtggtc

SEQ ID NO: 189573 - DNA, 15 bp, Homo sapiens
taatccatgtgtggt

SEQ ID NO: 189574 - DNA, 15 bp, Homo sapiens
ctaatccatgtgtgg

SEQ ID NO: 189575 - DNA, 15 bp, Homo sapiens
cctaatccatgtgtg

SEQ ID NO: 189576 - DNA, 15 bp, Homo sapiens
acctaatccatgtgt

SEQ ID NO: 189577 - DNA, 15 bp, Homo sapiens
cacctaatccatgtg

SEQ ID NO: 189578 - DNA, 15 bp, Homo sapiens
gcacctaatccatgt

SEQ ID NO: 189579 - DNA, 15 bp, Homo sapiens
ggcacctaatccatg

SEQ ID NO: 189580 - DNA, 15 bp, Homo sapiens
tggcacctaatccat

SEQ ID NO: 189581 - DNA, 15 bp, Homo sapiens
ctggcacctaatcca

SEQ ID NO: 189582 - DNA, 15 bp, Homo sapiens
tctggcacctaatcc

SEQ ID NO: 189583 - DNA, 15 bp, Homo sapiens
atctggcacctaatc

SEQ ID NO: 189584 - DNA, 15 bp, Homo sapiens
catctggcacctaat

SEQ ID NO: 189585 - DNA, 15 bp, Homo sapiens
tcatctggcacctaa

SEQ ID NO: 189586 - DNA, 15 bp, Homo sapiens
gtcatctggcaccta

SEQ ID NO: 189587 - DNA, 15 bp, Homo sapiens
ggtcatctggcacct

SEQ ID NO: 189588 - DNA, 15 bp, Homo sapiens
tggtcatctggcacc

SEQ ID NO: 189589 - DNA, 15 bp, Homo sapiens
gtggtcatctggcac

SEQ ID NO: 189590 - DNA, 15 bp, Homo sapiens
ggtggtcatctggca

SEQ ID NO: 189591 - DNA, 15 bp, Homo sapiens
aggtggtcatctggc

SEQ ID NO: 189592 - DNA, 15 bp, Homo sapiens
caggtggtcatctgg

SEQ ID NO: 189593 - DNA, 15 bp, Homo sapiens
ccaggtggtcatctg

SEQ ID NO: 189594 - DNA, 15 bp, Homo sapiens
cccaggtggtcatct

SEQ ID NO: 189595 - DNA, 15 bp, Homo sapiens
ccccaggtggtcatc

SEQ ID NO: 189596 - DNA, 15 bp, Homo sapiens
tccccaggtggtcat

SEQ ID NO: 189597 - DNA, 15 bp, Homo sapiens
ttccccaggtggtca

SEQ ID NO: 189598 - DNA, 15 bp, Homo sapiens
attccccaggtggtc

SEQ ID NO: 189599 - DNA, 15 bp, Homo sapiens
cattccccaggtggt

SEQ ID NO: 189600 - DNA, 15 bp, Homo sapiens
acattccccaggtgg

SEQ ID NO: 189601 - DNA, 15 bp, Homo sapiens
cacattccccaggtg

SEQ ID NO: 189602 - DNA, 15 bp, Homo sapiens
gcacattccccaggt

SEQ ID NO: 189603 - DNA, 15 bp, Homo sapiens
ggcacattccccagg

SEQ ID NO: 189604 - DNA, 15 bp, Homo sapiens
tggcacattccccag

SEQ ID NO: 189605 - DNA, 15 bp, Homo sapiens
ctggcacattcccca

SEQ ID NO: 189606 - DNA, 15 bp, Homo sapiens
actggcacattcccc

SEQ ID NO: 189607 - DNA, 15 bp, Homo sapiens
gactggcacattccc

SEQ ID NO: 189608 - DNA, 15 bp, Homo sapiens
tgactggcacattcc

SEQ ID NO: 189609 - DNA, 15 bp, Homo sapiens
ctgactggcacattc

SEQ ID NO: 189610 - DNA, 15 bp, Homo sapiens
cctgactggcacatt

SEQ ID NO: 189611 - DNA, 15 bp, Homo sapiens
gcctgactggcacat

SEQ ID NO: 189612 - DNA, 15 bp, Homo sapiens
tgcctgactggcaca

SEQ ID NO: 189613 - DNA, 15 bp, Homo sapiens
ctgcctgactggcac

SEQ ID NO: 189614 - DNA, 15 bp, Homo sapiens
gctgcctgactggca

SEQ ID NO: 189615 - DNA, 15 bp, Homo sapiens
ggctgcctgactggc

SEQ ID NO: 189616 - DNA, 15 bp, Homo sapiens
tggctgcctgactgg

SEQ ID NO: 189617 - DNA, 15 bp, Homo sapiens
ctggctgcctgactg

SEQ ID NO: 189618 - DNA, 15 bp, Homo sapiens
cctggctgcctgact

SEQ ID NO: 189619 - DNA, 15 bp, Homo sapiens
tcctggctgcctgac

SEQ ID NO: 189620 - DNA, 15 bp, Homo sapiens
atcctggctgcctga

SEQ ID NO: 189621 - DNA, 15 bp, Homo sapiens
catcctggctgcctg

SEQ ID NO: 189622 - DNA, 15 bp, Homo sapiens
gcatcctggctgcct

SEQ ID NO: 189623 - DNA, 15 bp, Homo sapiens
tgcatcctggctgcc

SEQ ID NO: 189624 - DNA, 15 bp, Homo sapiens
ttgcatcctggctgc

SEQ ID NO: 189625 - DNA, 15 bp, Homo sapiens
tttgcatcctggctg

SEQ ID NO: 189626 - DNA, 15 bp, Homo sapiens
ctttgcatcctggct

SEQ ID NO: 189627 - DNA, 15 bp, Homo sapiens
actttgcatcctggc

SEQ ID NO: 189628 - DNA, 15 bp, Homo sapiens
cactttgcatcctgg

SEQ ID NO: 189629 - DNA, 15 bp, Homo sapiens
tcactttgcatcctg

SEQ ID NO: 189630 - DNA, 15 bp, Homo sapiens
atcactttgcatcct

SEQ ID NO: 189631 - DNA, 15 bp, Homo sapiens
aatcactttgcatcc

SEQ ID NO: 189632 - DNA, 15 bp, Homo sapiens
gaatcactttgcatc

SEQ ID NO: 189633 - DNA, 15 bp, Homo sapiens
cgaatcactttgcat

SEQ ID NO: 189634 - DNA, 15 bp, Homo sapiens
gcgaatcactttgca

SEQ ID NO: 189635 - DNA, 15 bp, Homo sapiens
agcgaatcactttgc

SEQ ID NO: 189636 - DNA, 15 bp, Homo sapiens
aagcgaatcactttg

SEQ ID NO: 189637 - DNA, 15 bp, Homo sapiens
gaagcgaatcacttt

SEQ ID NO: 189638 - DNA, 15 bp, Homo sapiens
ggaagcgaatcactt

SEQ ID NO: 189639 - DNA, 15 bp, Homo sapiens
gggaagcgaatcact

SEQ ID NO: 189640 - DNA, 15 bp, Homo sapiens
ggggaagcgaatcac

SEQ ID NO: 189641 - DNA, 15 bp, Homo sapiens
gggggaagcgaatca

SEQ ID NO: 189642 - DNA, 15 bp, Homo sapiens
agggggaagcgaatc

SEQ ID NO: 189643 - DNA, 15 bp, Homo sapiens
aagggggaagcgaat

SEQ ID NO: 189644 - DNA, 15 bp, Homo sapiens
caagggggaagcgaa

SEQ ID NO: 189645 - DNA, 15 bp, Homo sapiens
gcaagggggaagcga

SEQ ID NO: 189646 - DNA, 15 bp, Homo sapiens
ggcaagggggaagcg

SEQ ID NO: 189647 - DNA, 15 bp, Homo sapiens
tggcaagggggaagc

SEQ ID NO: 189648 - DNA, 15 bp, Homo sapiens
ctggcaagggggaag

SEQ ID NO: 189649 - DNA, 15 bp, Homo sapiens
actggcaagggggaa

SEQ ID NO: 189650 - DNA, 15 bp, Homo sapiens
tactggcaaggggga

SEQ ID NO: 189651 - DNA, 15 bp, Homo sapiens
atactggcaaggggg

SEQ ID NO: 189652 - DNA, 15 bp, Homo sapiens
aatactggcaagggg

SEQ ID NO: 189653 - DNA, 15 bp, Homo sapiens
aaatactggcaaggg

SEQ ID NO: 189654 - DNA, 15 bp, Homo sapiens
aaaatactggcaagg

SEQ ID NO: 189655 - DNA, 15 bp, Homo sapiens
gaaaatactggcaag

SEQ ID NO: 189656 - DNA, 15 bp, Homo sapiens
agaaaatactggcaa

SEQ ID NO: 189657 - DNA, 15 bp, Homo sapiens
tagaaaatactggca

SEQ ID NO: 189658 - DNA, 15 bp, Homo sapiens
ctagaaaatactggc

SEQ ID NO: 189659 - DNA, 15 bp, Homo sapiens
cctagaaaatactgg

SEQ ID NO: 189660 - DNA, 15 bp, Homo sapiens
ccctagaaaatactg

SEQ ID NO: 189661 - DNA, 15 bp, Homo sapiens
gccctagaaaatact

SEQ ID NO: 189662 - DNA, 15 bp, Homo sapiens
cgccctagaaaatac

SEQ ID NO: 189663 - DNA, 15 bp, Homo sapiens
acgccctagaaaata

SEQ ID NO: 189664 - DNA, 15 bp, Homo sapiens
cacgccctagaaaat

SEQ ID NO: 189665 - DNA, 15 bp, Homo sapiens
ccacgccctagaaaa

SEQ ID NO: 189666 - DNA, 15 bp, Homo sapiens
accacgccctagaaa

SEQ ID NO: 189667 - DNA, 15 bp, Homo sapiens
caccacgccctagaa

SEQ ID NO: 189668 - DNA, 15 bp, Homo sapiens
acaccacgccctaga

SEQ ID NO: 189669 - DNA, 15 bp, Homo sapiens
aacaccacgccctag

SEQ ID NO: 189670 - DNA, 15 bp, Homo sapiens
aaacaccacgcccta

SEQ ID NO: 189671 - DNA, 15 bp, Homo sapiens
caaacaccacgccct

SEQ ID NO: 189672 - DNA, 15 bp, Homo sapiens
gcaaacaccacgccc

SEQ ID NO: 189673 - DNA, 15 bp, Homo sapiens
ggcaaacaccacgcc

SEQ ID NO: 189674 - DNA, 15 bp, Homo sapiens
gggcaaacaccacgc

SEQ ID NO: 189675 - DNA, 15 bp, Homo sapiens
cgggcaaacaccacg

SEQ ID NO: 189676 - DNA, 15 bp, Homo sapiens
gcgggcaaacaccac

SEQ ID NO: 189677 - DNA, 15 bp, Homo sapiens
tgcgggcaaacacca

SEQ ID NO: 189678 - DNA, 15 bp, Homo sapiens
atgcgggcaaacacc

SEQ ID NO: 189679 - DNA, 15 bp, Homo sapiens
gatgcgggcaaacac

SEQ ID NO: 189680 - DNA, 15 bp, Homo sapiens
agatgcgggcaaaca

SEQ ID NO: 189681 - DNA, 15 bp, Homo sapiens
aagatgcgggcaaac

SEQ ID NO: 189682 - DNA, 15 bp, Homo sapiens
gaagatgcgggcaaa

SEQ ID NO: 189683 - DNA, 15 bp, Homo sapiens
agaagatgcgggcaa

SEQ ID NO: 189684 - DNA, 15 bp, Homo sapiens
cagaagatgcgggca

SEQ ID NO: 189685 - DNA, 15 bp, Homo sapiens
ccagaagatgcgggc

SEQ ID NO: 189686 - DNA, 15 bp, Homo sapiens
accagaagatgcggg

SEQ ID NO: 189687 - DNA, 15 bp, Homo sapiens
caccagaagatgcgg

SEQ ID NO: 189688 - DNA, 15 bp, Homo sapiens
tcaccagaagatgcg

SEQ ID NO: 189689 - DNA, 15 bp, Homo sapiens
ctcaccagaagatgc

SEQ ID NO: 189690 - DNA, 15 bp, Homo sapiens
cctcaccagaagatg

SEQ ID NO: 189691 - DNA, 15 bp, Homo sapiens
gcctcaccagaagat

SEQ ID NO: 189692 - DNA, 15 bp, Homo sapiens
ggcctcaccagaaga

SEQ ID NO: 189693 - DNA, 15 bp, Homo sapiens
aggcctcaccagaag

SEQ ID NO: 189694 - DNA, 15 bp, Homo sapiens
caggcctcaccagaa

SEQ ID NO: 189695 - DNA, 15 bp, Homo sapiens
ccaggcctcaccaga

SEQ ID NO: 189696 - DNA, 15 bp, Homo sapiens
gccaggcctcaccag

SEQ ID NO: 189697 - DNA, 15 bp, Homo sapiens
agccaggcctcacca

SEQ ID NO: 189698 - DNA, 15 bp, Homo sapiens
tagccaggcctcacc

SEQ ID NO: 189699 - DNA, 15 bp, Homo sapiens
atagccaggcctcac

SEQ ID NO: 189700 - DNA, 15 bp, Homo sapiens
gatagccaggcctca

SEQ ID NO: 189701 - DNA, 15 bp, Homo sapiens
agatagccaggcctc

SEQ ID NO: 189702 - DNA, 15 bp, Homo sapiens
gagatagccaggcct

SEQ ID NO: 189703 - DNA, 15 bp, Homo sapiens
agagatagccaggcc

SEQ ID NO: 189704 - DNA, 15 bp, Homo sapiens
cagagatagccaggc

SEQ ID NO: 189705 - DNA, 15 bp, Homo sapiens
tcagagatagccagg

SEQ ID NO: 189706 - DNA, 15 bp, Homo sapiens
ctcagagatagccag

SEQ ID NO: 189707 - DNA, 15 bp, Homo sapiens
cctcagagatagcca

SEQ ID NO: 189708 - DNA, 15 bp, Homo sapiens
ccctcagagatagcc

SEQ ID NO: 189709 - DNA, 15 bp, Homo sapiens
cccctcagagatagc

SEQ ID NO: 189710 - DNA, 15 bp, Homo sapiens
gcccctcagagatag

SEQ ID NO: 189711 - DNA, 15 bp, Homo sapiens
tgcccctcagagata

SEQ ID NO: 189712 - DNA, 15 bp, Homo sapiens
ctgcccctcagagat

SEQ ID NO: 189713 - DNA, 15 bp, Homo sapiens
tctgcccctcagaga

SEQ ID NO: 189714 - DNA, 15 bp, Homo sapiens
gtctgcccctcagag

SEQ ID NO: 189715 - DNA, 15 bp, Homo sapiens
ggtctgcccctcaga

SEQ ID NO: 189716 - DNA, 15 bp, Homo sapiens
tggtctgcccctcag

SEQ ID NO: 189717 - DNA, 15 bp, Homo sapiens
ctggtctgcccctca

SEQ ID NO: 189718 - DNA, 15 bp, Homo sapiens
gctggtctgcccctc

SEQ ID NO: 189719 - DNA, 15 bp, Homo sapiens
tgctggtctgcccct

SEQ ID NO: 189720 - DNA, 15 bp, Homo sapiens
gtgctggtctgcccc

SEQ ID NO: 189721 - DNA, 15 bp, Homo sapiens
tgtgctggtctgccc

SEQ ID NO: 189722 - DNA, 15 bp, Homo sapiens
gtgtgctggtctgcc

SEQ ID NO: 189723 - DNA, 15 bp, Homo sapiens
ggtgtgctggtctgc

SEQ ID NO: 189724 - DNA, 15 bp, Homo sapiens
aggtgtgctggtctg

SEQ ID NO: 189725 - DNA, 15 bp, Homo sapiens
caggtgtgctggtct

SEQ ID NO: 189726 - DNA, 15 bp, Homo sapiens
acaggtgtgctggtc

SEQ ID NO: 189727 - DNA, 15 bp, Homo sapiens
cacaggtgtgctggt

SEQ ID NO: 189728 - DNA, 15 bp, Homo sapiens
ccacaggtgtgctgg

SEQ ID NO: 189729 - DNA, 15 bp, Homo sapiens
cccacaggtgtgctg

SEQ ID NO: 189730 - DNA, 15 bp, Homo sapiens
acccacaggtgtgct

SEQ ID NO: 189731 - DNA, 15 bp, Homo sapiens
cacccacaggtgtgc

SEQ ID NO: 189732 - DNA, 15 bp, Homo sapiens
gcacccacaggtgtg

SEQ ID NO: 189733 - DNA, 15 bp, Homo sapiens
tgcacccacaggtgt

SEQ ID NO: 189734 - DNA, 15 bp, Homo sapiens
ctgcacccacaggtg

SEQ ID NO: 189735 - DNA, 15 bp, Homo sapiens
gctgcacccacaggt

SEQ ID NO: 189736 - DNA, 15 bp, Homo sapiens
tgctgcacccacagg

SEQ ID NO: 189737 - DNA, 15 bp, Homo sapiens
ctgctgcacccacag

SEQ ID NO: 189738 - DNA, 15 bp, Homo sapiens
gctgctgcacccaca

SEQ ID NO: 189739 - DNA, 15 bp, Homo sapiens
agctgctgcacccac

SEQ ID NO: 189740 - DNA, 15 bp, Homo sapiens
gagctgctgcaccca

SEQ ID NO: 189741 - DNA, 15 bp, Homo sapiens
tgagctgctgcaccc

SEQ ID NO: 189742 - DNA, 15 bp, Homo sapiens
gtgagctgctgcacc

SEQ ID NO: 189743 - DNA, 15 bp, Homo sapiens
tgtgagctgctgcac

SEQ ID NO: 189744 - DNA, 15 bp, Homo sapiens
ctgtgagctgctgca

SEQ ID NO: 189745 - DNA, 15 bp, Homo sapiens
cctgtgagctgctgc

SEQ ID NO: 189746 - DNA, 15 bp, Homo sapiens
tcctgtgagctgctg

SEQ ID NO: 189747 - DNA, 15 bp, Homo sapiens
ctcctgtgagctgct

SEQ ID NO: 189748 - DNA, 15 bp, Homo sapiens
actcctgtgagctgc

SEQ ID NO: 189749 - DNA, 15 bp, Homo sapiens
gactcctgtgagctg

SEQ ID NO: 189750 - DNA, 15 bp, Homo sapiens
agactcctgtgagct

SEQ ID NO: 189751 - DNA, 15 bp, Homo sapiens
cagactcctgtgagc

SEQ ID NO: 189752 - DNA, 15 bp, Homo sapiens
acagactcctgtgag

SEQ ID NO: 189753 - DNA, 15 bp, Homo sapiens
aacagactcctgtga

SEQ ID NO: 189754 - DNA, 15 bp, Homo sapiens
caacagactcctgtg

SEQ ID NO: 189755 - DNA, 15 bp, Homo sapiens
ccaacagactcctgt

SEQ ID NO: 189756 - DNA, 15 bp, Homo sapiens
cccaacagactcctg

SEQ ID NO: 189757 - DNA, 15 bp, Homo sapiens
gcccaacagactcct

SEQ ID NO: 189758 - DNA, 15 bp, Homo sapiens
cgcccaacagactcc

SEQ ID NO: 189759 - DNA, 15 bp, Homo sapiens
ccgcccaacagactc

SEQ ID NO: 189760 - DNA, 15 bp, Homo sapiens
gccgcccaacagact

SEQ ID NO: 189761 - DNA, 15 bp, Homo sapiens
tgccgcccaacagac

SEQ ID NO: 189762 - DNA, 15 bp, Homo sapiens
gtgccgcccaacaga

SEQ ID NO: 189763 - DNA, 15 bp, Homo sapiens
agtgccgcccaacag

SEQ ID NO: 189764 - DNA, 15 bp, Homo sapiens
cagtgccgcccaaca

SEQ ID NO: 189765 - DNA, 15 bp, Homo sapiens
gcagtgccgcccaac

SEQ ID NO: 189766 - DNA, 15 bp, Homo sapiens
ggcagtgccgcccaa

SEQ ID NO: 189767 - DNA, 15 bp, Homo sapiens
tggcagtgccgccca

SEQ ID NO: 189768 - DNA, 15 bp, Homo sapiens
ctggcagtgccgccc

SEQ ID NO: 189769 - DNA, 15 bp, Homo sapiens
cctggcagtgccgcc

SEQ ID NO: 189770 - DNA, 15 bp, Homo sapiens
gcctggcagtgccgc

SEQ ID NO: 189771 - DNA, 15 bp, Homo sapiens
ggcctggcagtgccg

SEQ ID NO: 189772 - DNA, 15 bp, Homo sapiens
gggcctggcagtgcc

SEQ ID NO: 189773 - DNA, 15 bp, Homo sapiens
agggcctggcagtgc

SEQ ID NO: 189774 - DNA, 15 bp, Homo sapiens
gagggcctggcagtg

SEQ ID NO: 189775 - DNA, 15 bp, Homo sapiens
cgagggcctggcagt

SEQ ID NO: 189776 - DNA, 15 bp, Homo sapiens
ccgagggcctggcag

SEQ ID NO: 189777 - DNA, 15 bp, Homo sapiens
cccgagggcctggca

SEQ ID NO: 189778 - DNA, 15 bp, Homo sapiens
tcccgagggcctggc

SEQ ID NO: 189779 - DNA, 15 bp, Homo sapiens
gtcccgagggcctgg

SEQ ID NO: 189780 - DNA, 15 bp, Homo sapiens
ggtcccgagggcctg

SEQ ID NO: 189781 - DNA, 15 bp, Homo sapiens
gggtcccgagggcct

SEQ ID NO: 189782 - DNA, 15 bp, Homo sapiens
agggtcccgagggcc

SEQ ID NO: 189783 - DNA, 15 bp, Homo sapiens
cagggtcccgagggc

SEQ ID NO: 189784 - DNA, 15 bp, Homo sapiens
tcagggtcccgaggg

SEQ ID NO: 189785 - DNA, 15 bp, Homo sapiens
ctcagggtcccgagg

SEQ ID NO: 189786 - DNA, 15 bp, Homo sapiens
actcagggtcccgag

SEQ ID NO: 189787 - DNA, 15 bp, Homo sapiens
tactcagggtcccga

SEQ ID NO: 189788 - DNA, 15 bp, Homo sapiens
ttactcagggtcccg

SEQ ID NO: 189789 - DNA, 15 bp, Homo sapiens
cttactcagggtccc

SEQ ID NO: 189790 - DNA, 15 bp, Homo sapiens
ccttactcagggtcc

SEQ ID NO: 189791 - DNA, 15 bp, Homo sapiens
accttactcagggtc

SEQ ID NO: 189792 - DNA, 15 bp, Homo sapiens
gaccttactcagggt

SEQ ID NO: 189793 - DNA, 15 bp, Homo sapiens
agaccttactcaggg

SEQ ID NO: 189794 - DNA, 15 bp, Homo sapiens
cagaccttactcagg

SEQ ID NO: 189795 - DNA, 15 bp, Homo sapiens
tcagaccttactcag

SEQ ID NO: 189796 - DNA, 15 bp, Homo sapiens
gtcagaccttactca

SEQ ID NO: 189797 - DNA, 15 bp, Homo sapiens
cgtcagaccttactc

SEQ ID NO: 189798 - DNA, 15 bp, Homo sapiens
gcgtcagaccttact

SEQ ID NO: 189799 - DNA, 15 bp, Homo sapiens
tgcgtcagaccttac

SEQ ID NO: 189800 - DNA, 15 bp, Homo sapiens
atgcgtcagacctta

SEQ ID NO: 189801 - DNA, 15 bp, Homo sapiens
gatgcgtcagacctt

SEQ ID NO: 189802 - DNA, 15 bp, Homo sapiens
tgatgcgtcagacct

SEQ ID NO: 189803 - DNA, 15 bp, Homo sapiens
ctgatgcgtcagacc

SEQ ID NO: 189804 - DNA, 15 bp, Homo sapiens
cctgatgcgtcagac

SEQ ID NO: 189805 - DNA, 15 bp, Homo sapiens
ccctgatgcgtcaga

SEQ ID NO: 189806 - DNA, 15 bp, Homo sapiens
gccctgatgcgtcag

SEQ ID NO: 189807 - DNA, 15 bp, Homo sapiens
tgccctgatgcgtca

SEQ ID NO: 189808 - DNA, 15 bp, Homo sapiens
ctgccctgatgcgtc

SEQ ID NO: 189809 - DNA, 15 bp, Homo sapiens
cctgccctgatgcgt

SEQ ID NO: 189810 - DNA, 15 bp, Homo sapiens
gcctgccctgatgcg

SEQ ID NO: 189811 - DNA, 15 bp, Homo sapiens
tgcctgccctgatgc

SEQ ID NO: 189812 - DNA, 15 bp, Homo sapiens
ctgcctgccctgatg

SEQ ID NO: 189813 - DNA, 15 bp, Homo sapiens
tctgcctgccctgat

SEQ ID NO: 189814 - DNA, 15 bp, Homo sapiens
ctctgcctgccctga

SEQ ID NO: 189815 - DNA, 15 bp, Homo sapiens
cctctgcctgccctg

SEQ ID NO: 189816 - DNA, 15 bp, Homo sapiens
ccctctgcctgccct

SEQ ID NO: 189817 - DNA, 15 bp, Homo sapiens
cccctctgcctgccc

SEQ ID NO: 189818 - DNA, 15 bp, Homo sapiens
tcccctctgcctgcc

SEQ ID NO: 189819 - DNA, 15 bp, Homo sapiens
ctcccctctgcctgc

SEQ ID NO: 189820 - DNA, 15 bp, Homo sapiens
cctcccctctgcctg

SEQ ID NO: 189821 - DNA, 15 bp, Homo sapiens
gcctcccctctgcct

SEQ ID NO: 189822 - DNA, 15 bp, Homo sapiens
ggcctcccctctgcc

SEQ ID NO: 189823 - DNA, 15 bp, Homo sapiens
tggcctcccctctgc

SEQ ID NO: 189824 - DNA, 15 bp, Homo sapiens
gtggcctcccctctg

SEQ ID NO: 189825 - DNA, 15 bp, Homo sapiens
tgtggcctcccctct

SEQ ID NO: 189826 - DNA, 15 bp, Homo sapiens
atgtggcctcccctc

SEQ ID NO: 189827 - DNA, 15 bp, Homo sapiens
aatgtggcctcccct

SEQ ID NO: 189828 - DNA, 15 bp, Homo sapiens
aaatgtggcctcccc

SEQ ID NO: 189829 - DNA, 15 bp, Homo sapiens
gaaatgtggcctccc

SEQ ID NO: 189830 - DNA, 15 bp, Homo sapiens
cgaaatgtggcctcc

SEQ ID NO: 189831 - DNA, 15 bp, Homo sapiens
gcgaaatgtggcctc

SEQ ID NO: 189832 - DNA, 15 bp, Homo sapiens
ggcgaaatgtggcct

SEQ ID NO: 189833 - DNA, 15 bp, Homo sapiens
aggcgaaatgtggcc

SEQ ID NO: 189834 - DNA, 15 bp, Homo sapiens
caggcgaaatgtggc

SEQ ID NO: 189835 - DNA, 15 bp, Homo sapiens
gcaggcgaaatgtgg

SEQ ID NO: 189836 - DNA, 15 bp, Homo sapiens
ggcaggcgaaatgtg

SEQ ID NO: 189837 - DNA, 15 bp, Homo sapiens
tggcaggcgaaatgt

SEQ ID NO: 189838 - DNA, 15 bp, Homo sapiens
gtggcaggcgaaatg

SEQ ID NO: 189839 - DNA, 15 bp, Homo sapiens
agtggcaggcgaaat

SEQ ID NO: 189840 - DNA, 15 bp, Homo sapiens
cagtggcaggcgaaa

SEQ ID NO: 189841 - DNA, 15 bp, Homo sapiens
tcagtggcaggcgaa

SEQ ID NO: 189842 - DNA, 15 bp, Homo sapiens
atcagtggcaggcga

SEQ ID NO: 189843 - DNA, 15 bp, Homo sapiens
catcagtggcaggcg

SEQ ID NO: 189844 - DNA, 15 bp, Homo sapiens
acatcagtggcaggc

SEQ ID NO: 189845 - DNA, 15 bp, Homo sapiens
aacatcagtggcagg

SEQ ID NO: 189846 - DNA, 15 bp, Homo sapiens
taacatcagtggcag

SEQ ID NO: 189847 - DNA, 15 bp, Homo sapiens
ctaacatcagtggca

SEQ ID NO: 189848 - DNA, 15 bp, Homo sapiens
gctaacatcagtggc

SEQ ID NO: 189849 - DNA, 15 bp, Homo sapiens
cgctaacatcagtgg

SEQ ID NO: 189850 - DNA, 15 bp, Homo sapiens
ccgctaacatcagtg

SEQ ID NO: 189851 - DNA, 15 bp, Homo sapiens
cccgctaacatcagt

SEQ ID NO: 189852 - DNA, 15 bp, Homo sapiens
ccccgctaacatcag

SEQ ID NO: 189853 - DNA, 15 bp, Homo sapiens
tccccgctaacatca

SEQ ID NO: 189854 - DNA, 15 bp, Homo sapiens
ctccccgctaacatc

SEQ ID NO: 189855 - DNA, 15 bp, Homo sapiens
cctccccgctaacat

SEQ ID NO: 189856 - DNA, 15 bp, Homo sapiens
gcctccccgctaaca

SEQ ID NO: 189857 - DNA, 15 bp, Homo sapiens
ggcctccccgctaac

SEQ ID NO: 189858 - DNA, 15 bp, Homo sapiens
gggcctccccgctaa

SEQ ID NO: 189859 - DNA, 15 bp, Homo sapiens
ggggcctccccgcta

SEQ ID NO: 189860 - DNA, 15 bp, Homo sapiens
tggggcctccccgct

SEQ ID NO: 189861 - DNA, 15 bp, Homo sapiens
ctggggcctccccgc

SEQ ID NO: 189862 - DNA, 15 bp, Homo sapiens
tctggggcctccccg

SEQ ID NO: 189863 - DNA, 15 bp, Homo sapiens
gtctggggcctcccc

SEQ ID NO: 189864 - DNA, 15 bp, Homo sapiens
ggtctggggcctccc

SEQ ID NO: 189865 - DNA, 15 bp, Homo sapiens
gggtctggggcctcc

SEQ ID NO: 189866 - DNA, 15 bp, Homo sapiens
tgggtctggggcctc

SEQ ID NO: 189867 - DNA, 15 bp, Homo sapiens
ctgggtctggggcct

SEQ ID NO: 189868 - DNA, 15 bp, Homo sapiens
cctgggtctggggcc

SEQ ID NO: 189869 - DNA, 15 bp, Homo sapiens
acctgggtctggggc

SEQ ID NO: 189870 - DNA, 15 bp, Homo sapiens
cacctgggtctgggg

SEQ ID NO: 189871 - DNA, 15 bp, Homo sapiens
gcacctgggtctggg

SEQ ID NO: 189872 - DNA, 15 bp, Homo sapiens
ggcacctgggtctgg

SEQ ID NO: 189873 - DNA, 15 bp, Homo sapiens
tggcacctgggtctg

SEQ ID NO: 189874 - DNA, 15 bp, Homo sapiens
ctggcacctgggtct

SEQ ID NO: 189875 - DNA, 15 bp, Homo sapiens
cctggcacctgggtc

SEQ ID NO: 189876 - DNA, 15 bp, Homo sapiens
gcctggcacctgggt

SEQ ID NO: 189877 - DNA, 15 bp, Homo sapiens
cgcctggcacctggg

SEQ ID NO: 189878 - DNA, 15 bp, Homo sapiens
ccgcctggcacctgg

SEQ ID NO: 189879 - DNA, 15 bp, Homo sapiens
cccgcctggcacctg

SEQ ID NO: 189880 - DNA, 15 bp, Homo sapiens
gcccgcctggcacct

SEQ ID NO: 189881 - DNA, 15 bp, Homo sapiens
tgcccgcctggcacc

SEQ ID NO: 189882 - DNA, 15 bp, Homo sapiens
ttgcccgcctggcac

SEQ ID NO: 189883 - DNA, 15 bp, Homo sapiens
tttgcccgcctggca

SEQ ID NO: 189884 - DNA, 15 bp, Homo sapiens
atttgcccgcctggc

SEQ ID NO: 189885 - DNA, 15 bp, Homo sapiens
aatttgcccgcctgg

SEQ ID NO: 189886 - DNA, 15 bp, Homo sapiens
caatttgcccgcctg

SEQ ID NO: 189887 - DNA, 15 bp, Homo sapiens
tcaatttgcccgcct

SEQ ID NO: 189888 - DNA, 15 bp, Homo sapiens
atcaatttgcccgcc

SEQ ID NO: 189889 - DNA, 15 bp, Homo sapiens
aatcaatttgcccgc

SEQ ID NO: 189890 - DNA, 15 bp, Homo sapiens
aaatcaatttgcccg

SEQ ID NO: 189891 - DNA, 15 bp, Homo sapiens
aaaatcaatttgccc

SEQ ID NO: 189892 - DNA, 15 bp, Homo sapiens
aaaaatcaatttgcc

SEQ ID NO: 189893 - DNA, 15 bp, Homo sapiens
gaaaaatcaatttgc

SEQ ID NO: 189894 - DNA, 15 bp, Homo sapiens
tgaaaaatcaatttg

SEQ ID NO: 189895 - DNA, 15 bp, Homo sapiens
ctgaaaaatcaattt

SEQ ID NO: 189896 - DNA, 15 bp, Homo sapiens
gctgaaaaatcaatt

SEQ ID NO: 189897 - DNA, 15 bp, Homo sapiens
ggctgaaaaatcaat

SEQ ID NO: 189898 - DNA, 15 bp, Homo sapiens
aggctgaaaaatcaa

SEQ ID NO: 189899 - DNA, 15 bp, Homo sapiens
caggctgaaaaatca

SEQ ID NO: 189900 - DNA, 15 bp, Homo sapiens
gcaggctgaaaaatc

SEQ ID NO: 189901 - DNA, 15 bp, Homo sapiens
cgcaggctgaaaaat

SEQ ID NO: 189902 - DNA, 15 bp, Homo sapiens
tcgcaggctgaaaaa

SEQ ID NO: 189903 - DNA, 15 bp, Homo sapiens
ttcgcaggctgaaaa

SEQ ID NO: 189904 - DNA, 15 bp, Homo sapiens
tttcgcaggctgaaa

SEQ ID NO: 189905 - DNA, 15 bp, Homo sapiens
gtttcgcaggctgaa

SEQ ID NO: 189906 - DNA, 15 bp, Homo sapiens
agtttcgcaggctga

SEQ ID NO: 189907 - DNA, 15 bp, Homo sapiens
aagtttcgcaggctg

SEQ ID NO: 189908 - DNA, 15 bp, Homo sapiens
gaagtttcgcaggct

SEQ ID NO: 189909 - DNA, 15 bp, Homo sapiens
agaagtttcgcaggc

SEQ ID NO: 189910 - DNA, 15 bp, Homo sapiens
tagaagtttcgcagg

SEQ ID NO: 189911 - DNA, 15 bp, Homo sapiens
ttagaagtttcgcag

SEQ ID NO: 189912 - DNA, 15 bp, Homo sapiens
tttagaagtttcgca

SEQ ID NO: 189913 - DNA, 15 bp, Homo sapiens
ctttagaagtttcgc

SEQ ID NO: 189914 - DNA, 15 bp, Homo sapiens
tctttagaagtttcg

SEQ ID NO: 189915 - DNA, 15 bp, Homo sapiens
atctttagaagtttc

SEQ ID NO: 189916 - DNA, 15 bp, Homo sapiens
tatctttagaagttt

SEQ ID NO: 189917 - DNA, 15 bp, Homo sapiens
ctatctttagaagtt

SEQ ID NO: 189918 - DNA, 15 bp, Homo sapiens
cctatctttagaagt

SEQ ID NO: 189919 - DNA, 15 bp, Homo sapiens
gcctatctttagaag

SEQ ID NO: 189920 - DNA, 15 bp, Homo sapiens
tgcctatctttagaa

SEQ ID NO: 189921 - DNA, 15 bp, Homo sapiens
gtgcctatctttaga

SEQ ID NO: 189922 - DNA, 15 bp, Homo sapiens
cgtgcctatctttag

SEQ ID NO: 189923 - DNA, 15 bp, Homo sapiens
ccgtgcctatcttta

SEQ ID NO: 189924 - DNA, 15 bp, Homo sapiens
cccgtgcctatcttt

SEQ ID NO: 189925 - DNA, 15 bp, Homo sapiens
acccgtgcctatctt

SEQ ID NO: 189926 - DNA, 15 bp, Homo sapiens
cacccgtgcctatct

SEQ ID NO: 189927 - DNA, 15 bp, Homo sapiens
ccacccgtgcctatc

SEQ ID NO: 189928 - DNA, 15 bp, Homo sapiens
accacccgtgcctat

SEQ ID NO: 189929 - DNA, 15 bp, Homo sapiens
caccacccgtgccta

SEQ ID NO: 189930 - DNA, 15 bp, Homo sapiens
gcaccacccgtgcct

SEQ ID NO: 189931 - DNA, 15 bp, Homo sapiens
agcaccacccgtgcc

SEQ ID NO: 189932 - DNA, 15 bp, Homo sapiens
gagcaccacccgtgc

SEQ ID NO: 189933 - DNA, 15 bp, Homo sapiens
agagcaccacccgtg

SEQ ID NO: 189934 - DNA, 15 bp, Homo sapiens
cagagcaccacccgt

SEQ ID NO: 189935 - DNA, 15 bp, Homo sapiens
acagagcaccacccg

SEQ ID NO: 189936 - DNA, 15 bp, Homo sapiens
cacagagcaccaccc

SEQ ID NO: 189937 - DNA, 15 bp, Homo sapiens
gcacagagcaccacc

SEQ ID NO: 189938 - DNA, 15 bp, Homo sapiens
agcacagagcaccac

SEQ ID NO: 189939 - DNA, 15 bp, Homo sapiens
cagcacagagcacca

SEQ ID NO: 189940 - DNA, 15 bp, Homo sapiens
ccagcacagagcacc

SEQ ID NO: 189941 - DNA, 15 bp, Homo sapiens
gccagcacagagcac

SEQ ID NO: 189942 - DNA, 15 bp, Homo sapiens
tgccagcacagagca

SEQ ID NO: 189943 - DNA, 15 bp, Homo sapiens
gtgccagcacagagc

SEQ ID NO: 189944 - DNA, 15 bp, Homo sapiens
agtgccagcacagag

SEQ ID NO: 189945 - DNA, 15 bp, Homo sapiens
cagtgccagcacaga

SEQ ID NO: 189946 - DNA, 15 bp, Homo sapiens
ccagtgccagcacag

SEQ ID NO: 189947 - DNA, 15 bp, Homo sapiens
cccagtgccagcaca

SEQ ID NO: 189948 - DNA, 15 bp, Homo sapiens
tcccagtgccagcac

SEQ ID NO: 189949 - DNA, 15 bp, Homo sapiens
ctcccagtgccagca

SEQ ID NO: 189950 - DNA, 15 bp, Homo sapiens
actcccagtgccagc

SEQ ID NO: 189951 - DNA, 15 bp, Homo sapiens
cactcccagtgccag

SEQ ID NO: 189952 - DNA, 15 bp, Homo sapiens
tcactcccagtgcca

SEQ ID NO: 189953 - DNA, 15 bp, Homo sapiens
gtcactcccagtgcc

SEQ ID NO: 189954 - DNA, 15 bp, Homo sapiens
tgtcactcccagtgc

SEQ ID NO: 189955 - DNA, 15 bp, Homo sapiens
ctgtcactcccagtg

SEQ ID NO: 189956 - DNA, 15 bp, Homo sapiens
cctgtcactcccagt

SEQ ID NO: 189957 - DNA, 15 bp, Homo sapiens
gcctgtcactcccag

SEQ ID NO: 189958 - DNA, 15 bp, Homo sapiens
ggcctgtcactccca

SEQ ID NO: 189959 - DNA, 15 bp, Homo sapiens
tggcctgtcactccc

SEQ ID NO: 189960 - DNA, 15 bp, Homo sapiens
atggcctgtcactcc

SEQ ID NO: 189961 - DNA, 15 bp, Homo sapiens
gatggcctgtcactc

SEQ ID NO: 189962 - DNA, 15 bp, Homo sapiens
agatggcctgtcact

SEQ ID NO: 189963 - DNA, 15 bp, Homo sapiens
cagatggcctgtcac

SEQ ID NO: 189964 - DNA, 15 bp, Homo sapiens
acagatggcctgtca

SEQ ID NO: 189965 - DNA, 15 bp, Homo sapiens
cacagatggcctgtc

SEQ ID NO: 189966 - DNA, 15 bp, Homo sapiens
tcacagatggcctgt

SEQ ID NO: 189967 - DNA, 15 bp, Homo sapiens
ctcacagatggcctg

SEQ ID NO: 189968 - DNA, 15 bp, Homo sapiens
actcacagatggcct

SEQ ID NO: 189969 - DNA, 15 bp, Homo sapiens
gactcacagatggcc

SEQ ID NO: 189970 - DNA, 15 bp, Homo sapiens
tgactcacagatggc

SEQ ID NO: 189971 - DNA, 15 bp, Homo sapiens
gtgactcacagatgg

SEQ ID NO: 189972 - DNA, 15 bp, Homo sapiens
tgtgactcacagatg

SEQ ID NO: 189973 - DNA, 15 bp, Homo sapiens
ctgtgactcacagat

SEQ ID NO: 189974 - DNA, 15 bp, Homo sapiens
actgtgactcacaga

SEQ ID NO: 189975 - DNA, 15 bp, Homo sapiens
gactgtgactcacag

SEQ ID NO: 189976 - DNA, 15 bp, Homo sapiens
ggactgtgactcaca

SEQ ID NO: 189977 - DNA, 15 bp, Homo sapiens
gggactgtgactcac

SEQ ID NO: 189978 - DNA, 15 bp, Homo sapiens
cgggactgtgactca

SEQ ID NO: 189979 - DNA, 15 bp, Homo sapiens
gcgggactgtgactc

SEQ ID NO: 189980 - DNA, 15 bp, Homo sapiens
ggcgggactgtgact

SEQ ID NO: 189981 - DNA, 15 bp, Homo sapiens
gggcgggactgtgac

SEQ ID NO: 189982 - DNA, 15 bp, Homo sapiens
cgggcgggactgtga

SEQ ID NO: 189983 - DNA, 15 bp, Homo sapiens
gcgggcgggactgtg

SEQ ID NO: 189984 - DNA, 15 bp, Homo sapiens
agcgggcgggactgt

SEQ ID NO: 189985 - DNA, 15 bp, Homo sapiens
cagcgggcgggactg

SEQ ID NO: 189986 - DNA, 15 bp, Homo sapiens
ccagcgggcgggact

SEQ ID NO: 189987 - DNA, 15 bp, Homo sapiens
tccagcgggcgggac

SEQ ID NO: 189988 - DNA, 15 bp, Homo sapiens
ctccagcgggcggga

SEQ ID NO: 189989 - DNA, 15 bp, Homo sapiens
cctccagcgggcggg

SEQ ID NO: 189990 - DNA, 15 bp, Homo sapiens
tcctccagcgggcgg

SEQ ID NO: 189991 - DNA, 15 bp, Homo sapiens
ctcctccagcgggcg

SEQ ID NO: 189992 - DNA, 15 bp, Homo sapiens
actcctccagcgggc

SEQ ID NO: 189993 - DNA, 15 bp, Homo sapiens
cactcctccagcggg

SEQ ID NO: 189994 - DNA, 15 bp, Homo sapiens
gcactcctccagcgg

SEQ ID NO: 189995 - DNA, 15 bp, Homo sapiens
tgcactcctccagcg

SEQ ID NO: 189996 - DNA, 15 bp, Homo sapiens
ctgcactcctccagc

SEQ ID NO: 189997 - DNA, 15 bp, Homo sapiens
cctgcactcctccag

SEQ ID NO: 189998 - DNA, 15 bp, Homo sapiens
acctgcactcctcca

SEQ ID NO: 189999 - DNA, 15 bp, Homo sapiens
gacctgcactcctcc

SEQ ID NO: 190000 - DNA, 15 bp, Homo sapiens
ggacctgcactcctc

SEQ ID NO: 190001 - DNA, 15 bp, Homo sapiens
aggacctgcactcct

SEQ ID NO: 190002 - DNA, 15 bp, Homo sapiens
caggacctgcactcc

SEQ ID NO: 190003 - DNA, 15 bp, Homo sapiens
ccaggacctgcactc

SEQ ID NO: 190004 - DNA, 15 bp, Homo sapiens
cccaggacctgcact

SEQ ID NO: 190005 - DNA, 15 bp, Homo sapiens
gcccaggacctgcac

SEQ ID NO: 190006 - DNA, 15 bp, Homo sapiens
tgcccaggacctgca

SEQ ID NO: 190007 - DNA, 15 bp, Homo sapiens
ctgcccaggacctgc

SEQ ID NO: 190008 - DNA, 15 bp, Homo sapiens
cctgcccaggacctg

SEQ ID NO: 190009 - DNA, 15 bp, Homo sapiens
gcctgcccaggacct

SEQ ID NO: 190010 - DNA, 15 bp, Homo sapiens
tgcctgcccaggacc

SEQ ID NO: 190011 - DNA, 15 bp, Homo sapiens
ctgcctgcccaggac

SEQ ID NO: 190012 - DNA, 15 bp, Homo sapiens
gctgcctgcccagga

SEQ ID NO: 190013 - DNA, 15 bp, Homo sapiens
tgctgcctgcccagg

SEQ ID NO: 190014 - DNA, 15 bp, Homo sapiens
gtgctgcctgcccag

SEQ ID NO: 190015 - DNA, 15 bp, Homo sapiens
agtgctgcctgccca

SEQ ID NO: 190016 - DNA, 15 bp, Homo sapiens
cagtgctgcctgccc

SEQ ID NO: 190017 - DNA, 15 bp, Homo sapiens
gcagtgctgcctgcc

SEQ ID NO: 190018 - DNA, 15 bp, Homo sapiens
cgcagtgctgcctgc

SEQ ID NO: 190019 - DNA, 15 bp, Homo sapiens
ccgcagtgctgcctg

SEQ ID NO: 190020 - DNA, 15 bp, Homo sapiens
accgcagtgctgcct

SEQ ID NO: 190021 - DNA, 15 bp, Homo sapiens
caccgcagtgctgcc

SEQ ID NO: 190022 - DNA, 15 bp, Homo sapiens
tcaccgcagtgctgc

SEQ ID NO: 190023 - DNA, 15 bp, Homo sapiens
ctcaccgcagtgctg

SEQ ID NO: 190024 - DNA, 15 bp, Homo sapiens
tctcaccgcagtgct

SEQ ID NO: 190025 - DNA, 15 bp, Homo sapiens
ctctcaccgcagtgc

SEQ ID NO: 190026 - DNA, 15 bp, Homo sapiens
cctctcaccgcagtg

SEQ ID NO: 190027 - DNA, 15 bp, Homo sapiens
ccctctcaccgcagt

SEQ ID NO: 190028 - DNA, 15 bp, Homo sapiens
cccctctcaccgcag

SEQ ID NO: 190029 - DNA, 15 bp, Homo sapiens
gcccctctcaccgca

SEQ ID NO: 190030 - DNA, 15 bp, Homo sapiens
ggcccctctcaccgc

SEQ ID NO: 190031 - DNA, 15 bp, Homo sapiens
gggcccctctcaccg

SEQ ID NO: 190032 - DNA, 15 bp, Homo sapiens
tgggcccctctcacc

SEQ ID NO: 190033 - DNA, 15 bp, Homo sapiens
ctgggcccctctcac

SEQ ID NO: 190034 - DNA, 15 bp, Homo sapiens
tctgggcccctctca

SEQ ID NO: 190035 - DNA, 15 bp, Homo sapiens
atctgggcccctctc

SEQ ID NO: 190036 - DNA, 15 bp, Homo sapiens
catctgggcccctct

SEQ ID NO: 190037 - DNA, 15 bp, Homo sapiens
gcatctgggcccctc

SEQ ID NO: 190038 - DNA, 15 bp, Homo sapiens
tgcatctgggcccct

SEQ ID NO: 190039 - DNA, 15 bp, Homo sapiens
ctgcatctgggcccc

SEQ ID NO: 190040 - DNA, 15 bp, Homo sapiens
cctgcatctgggccc

SEQ ID NO: 190041 - DNA, 15 bp, Homo sapiens
tcctgcatctgggcc

SEQ ID NO: 190042 - DNA, 15 bp, Homo sapiens
ctcctgcatctgggc

SEQ ID NO: 190043 - DNA, 15 bp, Homo sapiens
cctcctgcatctggg

SEQ ID NO: 190044 - DNA, 15 bp, Homo sapiens
ccctcctgcatctgg

SEQ ID NO: 190045 - DNA, 15 bp, Homo sapiens
cccctcctgcatctg

SEQ ID NO: 190046 - DNA, 15 bp, Homo sapiens
tcccctcctgcatct

SEQ ID NO: 190047 - DNA, 15 bp, Homo sapiens
ctcccctcctgcatc

SEQ ID NO: 190048 - DNA, 15 bp, Homo sapiens
cctcccctcctgcat

SEQ ID NO: 190049 - DNA, 15 bp, Homo sapiens
ccctcccctcctgca

SEQ ID NO: 190050 - DNA, 15 bp, Homo sapiens
gccctcccctcctgc

SEQ ID NO: 190051 - DNA, 15 bp, Homo sapiens
agccctcccctcctg

SEQ ID NO: 190052 - DNA, 15 bp, Homo sapiens
tagccctcccctcct

SEQ ID NO: 190053 - DNA, 15 bp, Homo sapiens
ttagccctcccctcc

SEQ ID NO: 190054 - DNA, 15 bp, Homo sapiens
attagccctcccctc

SEQ ID NO: 190055 - DNA, 15 bp, Homo sapiens
cattagccctcccct

SEQ ID NO: 190056 - DNA, 15 bp, Homo sapiens
gcattagccctcccc

SEQ ID NO: 190057 - DNA, 15 bp, Homo sapiens
tgcattagccctccc

SEQ ID NO: 190058 - DNA, 15 bp, Homo sapiens
ttgcattagccctcc

SEQ ID NO: 190059 - DNA, 15 bp, Homo sapiens
attgcattagccctc

SEQ ID NO: 190060 - DNA, 15 bp, Homo sapiens
cattgcattagccct

SEQ ID NO: 190061 - DNA, 15 bp, Homo sapiens
tcattgcattagccc

SEQ ID NO: 190062 - DNA, 15 bp, Homo sapiens
ctcattgcattagcc

SEQ ID NO: 190063 - DNA, 15 bp, Homo sapiens
gctcattgcattagc

SEQ ID NO: 190064 - DNA, 15 bp, Homo sapiens
agctcattgcattag

SEQ ID NO: 190065 - DNA, 15 bp, Homo sapiens
aagctcattgcatta

SEQ ID NO: 190066 - DNA, 15 bp, Homo sapiens
caagctcattgcatt

SEQ ID NO: 190067 - DNA, 15 bp, Homo sapiens
tcaagctcattgcat

SEQ ID NO: 190068 - DNA, 15 bp, Homo sapiens
ctcaagctcattgca

SEQ ID NO: 190069 - DNA, 15 bp, Homo sapiens
actcaagctcattgc

SEQ ID NO: 190070 - DNA, 15 bp, Homo sapiens
gactcaagctcattg

SEQ ID NO: 190071 - DNA, 15 bp, Homo sapiens
tgactcaagctcatt

SEQ ID NO: 190072 - DNA, 15 bp, Homo sapiens
ctgactcaagctcat

SEQ ID NO: 190073 - DNA, 15 bp, Homo sapiens
gctgactcaagctca

SEQ ID NO: 190074 - DNA, 15 bp, Homo sapiens
ggctgactcaagctc

SEQ ID NO: 190075 - DNA, 15 bp, Homo sapiens
gggctgactcaagct

SEQ ID NO: 190076 - DNA, 15 bp, Homo sapiens
agggctgactcaagc

SEQ ID NO: 190077 - DNA, 15 bp, Homo sapiens
cagggctgactcaag

SEQ ID NO: 190078 - DNA, 15 bp, Homo sapiens
gcagggctgactcaa

SEQ ID NO: 190079 - DNA, 15 bp, Homo sapiens
agcagggctgactca

SEQ ID NO: 190080 - DNA, 15 bp, Homo sapiens
aagcagggctgactc

SEQ ID NO: 190081 - DNA, 15 bp, Homo sapiens
caagcagggctgact

SEQ ID NO: 190082 - DNA, 15 bp, Homo sapiens
gcaagcagggctgac

SEQ ID NO: 190083 - DNA, 15 bp, Homo sapiens
ggcaagcagggctga

SEQ ID NO: 190084 - DNA, 15 bp, Homo sapiens
tggcaagcagggctg

SEQ ID NO: 190085 - DNA, 15 bp, Homo sapiens
ctggcaagcagggct

SEQ ID NO: 190086 - DNA, 15 bp, Homo sapiens
cctggcaagcagggc

SEQ ID NO: 190087 - DNA, 15 bp, Homo sapiens
gcctggcaagcaggg

SEQ ID NO: 190088 - DNA, 15 bp, Homo sapiens
ggcctggcaagcagg

SEQ ID NO: 190089 - DNA, 15 bp, Homo sapiens
tggcctggcaagcag

SEQ ID NO: 190090 - DNA, 15 bp, Homo sapiens
ctggcctggcaagca

SEQ ID NO: 190091 - DNA, 15 bp, Homo sapiens
cctggcctggcaagc

SEQ ID NO: 190092 - DNA, 15 bp, Homo sapiens
tcctggcctggcaag

SEQ ID NO: 190093 - DNA, 15 bp, Homo sapiens
atcctggcctggcaa

SEQ ID NO: 190094 - DNA, 15 bp, Homo sapiens
gatcctggcctggca

SEQ ID NO: 190095 - DNA, 15 bp, Homo sapiens
ggatcctggcctggc

SEQ ID NO: 190096 - DNA, 15 bp, Homo sapiens
aggatcctggcctgg

SEQ ID NO: 190097 - DNA, 15 bp, Homo sapiens
gaggatcctggcctg

SEQ ID NO: 190098 - DNA, 15 bp, Homo sapiens
ggaggatcctggcct

SEQ ID NO: 190099 - DNA, 15 bp, Homo sapiens
aggaggatcctggcc

SEQ ID NO: 190100 - DNA, 15 bp, Homo sapiens
gaggaggatcctggc

SEQ ID NO: 190101 - DNA, 15 bp, Homo sapiens
ggaggaggatcctgg

SEQ ID NO: 190102 - DNA, 15 bp, Homo sapiens
gggaggaggatcctg

SEQ ID NO: 190103 - DNA, 15 bp, Homo sapiens
tgggaggaggatcct

SEQ ID NO: 190104 - DNA, 15 bp, Homo sapiens
ctgggaggaggatcc

SEQ ID NO: 190105 - DNA, 15 bp, Homo sapiens
cctgggaggaggatc

SEQ ID NO: 190106 - DNA, 15 bp, Homo sapiens
gcctgggaggaggat

SEQ ID NO: 190107 - DNA, 15 bp, Homo sapiens
ggcctgggaggagga

SEQ ID NO: 190108 - DNA, 15 bp, Homo sapiens
cggcctgggaggagg

SEQ ID NO: 190109 - DNA, 15 bp, Homo sapiens
ccggcctgggaggag

SEQ ID NO: 190110 - DNA, 15 bp, Homo sapiens
gccggcctgggagga

SEQ ID NO: 190111 - DNA, 15 bp, Homo sapiens
tgccggcctgggagg

SEQ ID NO: 190112 - DNA, 15 bp, Homo sapiens
gtgccggcctgggag

SEQ ID NO: 190113 - DNA, 15 bp, Homo sapiens
ggtgccggcctggga

SEQ ID NO: 190114 - DNA, 15 bp, Homo sapiens
tggtgccggcctggg

SEQ ID NO: 190115 - DNA, 15 bp, Homo sapiens
ttggtgccggcctgg

SEQ ID NO: 190116 - DNA, 15 bp, Homo sapiens
cttggtgccggcctg

SEQ ID NO: 190117 - DNA, 15 bp, Homo sapiens
ccttggtgccggcct

SEQ ID NO: 190118 - DNA, 15 bp, Homo sapiens
tccttggtgccggcc

SEQ ID NO: 190119 - DNA, 15 bp, Homo sapiens
ctccttggtgccggc

SEQ ID NO: 190120 - DNA, 15 bp, Homo sapiens
tctccttggtgccgg

SEQ ID NO: 190121 - DNA, 15 bp, Homo sapiens
ctctccttggtgccg

SEQ ID NO: 190122 - DNA, 15 bp, Homo sapiens
actctccttggtgcc

SEQ ID NO: 190123 - DNA, 15 bp, Homo sapiens
cactctccttggtgc

SEQ ID NO: 190124 - DNA, 15 bp, Homo sapiens
acactctccttggtg

SEQ ID NO: 190125 - DNA, 15 bp, Homo sapiens
aacactctccttggt

SEQ ID NO: 190126 - DNA, 15 bp, Homo sapiens
gaacactctccttgg

SEQ ID NO: 190127 - DNA, 15 bp, Homo sapiens
agaacactctccttg

SEQ ID NO: 190128 - DNA, 15 bp, Homo sapiens
tagaacactctcctt

SEQ ID NO: 190129 - DNA, 15 bp, Homo sapiens
gtagaacactctcct

SEQ ID NO: 190130 - DNA, 15 bp, Homo sapiens
agtagaacactctcc

SEQ ID NO: 190131 - DNA, 15 bp, Homo sapiens
cagtagaacactctc

SEQ ID NO: 190132 - DNA, 15 bp, Homo sapiens
gcagtagaacactct

SEQ ID NO: 190133 - DNA, 15 bp, Homo sapiens
ggcagtagaacactc

SEQ ID NO: 190134 - DNA, 15 bp, Homo sapiens
aggcagtagaacact

SEQ ID NO: 190135 - DNA, 15 bp, Homo sapiens
caggcagtagaacac

SEQ ID NO: 190136 - DNA, 15 bp, Homo sapiens
ccaggcagtagaaca

SEQ ID NO: 190137 - DNA, 15 bp, Homo sapiens
gccaggcagtagaac

SEQ ID NO: 190138 - DNA, 15 bp, Homo sapiens
agccaggcagtagaa

SEQ ID NO: 190139 - DNA, 15 bp, Homo sapiens
gagccaggcagtaga

SEQ ID NO: 190140 - DNA, 15 bp, Homo sapiens
ggagccaggcagtag

SEQ ID NO: 190141 - DNA, 15 bp, Homo sapiens
tggagccaggcagta

SEQ ID NO: 190142 - DNA, 15 bp, Homo sapiens
ctggagccaggcagt

SEQ ID NO: 190143 - DNA, 15 bp, Homo sapiens
cctggagccaggcag

SEQ ID NO: 190144 - DNA, 15 bp, Homo sapiens
tcctggagccaggca

SEQ ID NO: 190145 - DNA, 15 bp, Homo sapiens
ttcctggagccaggc

SEQ ID NO: 190146 - DNA, 15 bp, Homo sapiens
tttcctggagccagg

SEQ ID NO: 190147 - DNA, 15 bp, Homo sapiens
ttttcctggagccag

SEQ ID NO: 190148 - DNA, 15 bp, Homo sapiens
gttttcctggagcca

SEQ ID NO: 190149 - DNA, 15 bp, Homo sapiens
agttttcctggagcc

SEQ ID NO: 190150 - DNA, 15 bp, Homo sapiens
cagttttcctggagc

SEQ ID NO: 190151 - DNA, 15 bp, Homo sapiens
gcagttttcctggag

SEQ ID NO: 190152 - DNA, 15 bp, Homo sapiens
agcagttttcctgga

SEQ ID NO: 190153 - DNA, 15 bp, Homo sapiens
cagcagttttcctgg

SEQ ID NO: 190154 - DNA, 15 bp, Homo sapiens
gcagcagttttcctg

SEQ ID NO: 190155 - DNA, 15 bp, Homo sapiens
agcagcagttttcct

SEQ ID NO: 190156 - DNA, 15 bp, Homo sapiens
cagcagcagttttcc

SEQ ID NO: 190157 - DNA, 15 bp, Homo sapiens
gcagcagcagttttc

SEQ ID NO: 190158 - DNA, 15 bp, Homo sapiens
ggcagcagcagtttt

SEQ ID NO: 190159 - DNA, 15 bp, Homo sapiens
aggcagcagcagttt

SEQ ID NO: 190160 - DNA, 15 bp, Homo sapiens
caggcagcagcagtt

SEQ ID NO: 190161 - DNA, 15 bp, Homo sapiens
acaggcagcagcagt

SEQ ID NO: 190162 - DNA, 15 bp, Homo sapiens
tacaggcagcagcag

SEQ ID NO: 190163 - DNA, 15 bp, Homo sapiens
ttacaggcagcagca

SEQ ID NO: 190164 - DNA, 15 bp, Homo sapiens
attacaggcagcagc

SEQ ID NO: 190165 - DNA, 15 bp, Homo sapiens
aattacaggcagcag

SEQ ID NO: 190166 - DNA, 15 bp, Homo sapiens
aaattacaggcagca

SEQ ID NO: 190167 - DNA, 15 bp, Homo sapiens
taaattacaggcagc

SEQ ID NO: 190168 - DNA, 15 bp, Homo sapiens
ataaattacaggcag

SEQ ID NO: 190169 - DNA, 15 bp, Homo sapiens
cataaattacaggca

SEQ ID NO: 190170 - DNA, 15 bp, Homo sapiens
gcataaattacaggc

SEQ ID NO: 190171 - DNA, 15 bp, Homo sapiens
tgcataaattacagg

SEQ ID NO: 190172 - DNA, 15 bp, Homo sapiens
ctgcataaattacag

SEQ ID NO: 190173 - DNA, 15 bp, Homo sapiens
actgcataaattaca

SEQ ID NO: 190174 - DNA, 15 bp, Homo sapiens
aactgcataaattac

SEQ ID NO: 190175 - DNA, 15 bp, Homo sapiens
aaactgcataaatta

SEQ ID NO: 190176 - DNA, 15 bp, Homo sapiens
gaaactgcataaatt

SEQ ID NO: 190177 - DNA, 15 bp, Homo sapiens
agaaactgcataaat

SEQ ID NO: 190178 - DNA, 15 bp, Homo sapiens
tagaaactgcataaa

SEQ ID NO: 190179 - DNA, 15 bp, Homo sapiens
atagaaactgcataa

SEQ ID NO: 190180 - DNA, 15 bp, Homo sapiens
catagaaactgcata

SEQ ID NO: 190181 - DNA, 15 bp, Homo sapiens
ccatagaaactgcat

SEQ ID NO: 190182 - DNA, 15 bp, Homo sapiens
gccatagaaactgca

SEQ ID NO: 190183 - DNA, 15 bp, Homo sapiens
agccatagaaactgc

SEQ ID NO: 190184 - DNA, 15 bp, Homo sapiens
cagccatagaaactg

SEQ ID NO: 190185 - DNA, 15 bp, Homo sapiens
tcagccatagaaact

SEQ ID NO: 190186 - DNA, 15 bp, Homo sapiens
ctcagccatagaaac

SEQ ID NO: 190187 - DNA, 15 bp, Homo sapiens
actcagccatagaaa

SEQ ID NO: 190188 - DNA, 15 bp, Homo sapiens
cactcagccatagaa

SEQ ID NO: 190189 - DNA, 15 bp, Homo sapiens
ccactcagccataga

SEQ ID NO: 190190 - DNA, 15 bp, Homo sapiens
tccactcagccatag

SEQ ID NO: 190191 - DNA, 15 bp, Homo sapiens
ctccactcagccata

SEQ ID NO: 190192 - DNA, 15 bp, Homo sapiens
gctccactcagccat

SEQ ID NO: 190193 - DNA, 15 bp, Homo sapiens
tgctccactcagcca

SEQ ID NO: 190194 - DNA, 15 bp, Homo sapiens
ctgctccactcagcc

SEQ ID NO: 190195 - DNA, 15 bp, Homo sapiens
tctgctccactcagc

SEQ ID NO: 190196 - DNA, 15 bp, Homo sapiens
gtctgctccactcag

SEQ ID NO: 190197 - DNA, 15 bp, Homo sapiens
tgtctgctccactca

SEQ ID NO: 190198 - DNA, 15 bp, Homo sapiens
atgtctgctccactc

SEQ ID NO: 190199 - DNA, 15 bp, Homo sapiens
catgtctgctccact

SEQ ID NO: 190200 - DNA, 15 bp, Homo sapiens
ccatgtctgctccac

SEQ ID NO: 190201 - DNA, 15 bp, Homo sapiens
gccatgtctgctcca

SEQ ID NO: 190202 - DNA, 15 bp, Homo sapiens
ggccatgtctgctcc

SEQ ID NO: 190203 - DNA, 15 bp, Homo sapiens
aggccatgtctgctc

SEQ ID NO: 190204 - DNA, 15 bp, Homo sapiens
caggccatgtctgct

SEQ ID NO: 190205 - DNA, 15 bp, Homo sapiens
tcaggccatgtctgc

SEQ ID NO: 190206 - DNA, 15 bp, Homo sapiens
ttcaggccatgtctg

SEQ ID NO: 190207 - DNA, 15 bp, Homo sapiens
attcaggccatgtct

SEQ ID NO: 190208 - DNA, 15 bp, Homo sapiens
cattcaggccatgtc

SEQ ID NO: 190209 - DNA, 15 bp, Homo sapiens
ccattcaggccatgt

SEQ ID NO: 190210 - DNA, 15 bp, Homo sapiens
tccattcaggccatg

SEQ ID NO: 190211 - DNA, 15 bp, Homo sapiens
atccattcaggccat

SEQ ID NO: 190212 - DNA, 15 bp, Homo sapiens
gatccattcaggcca

SEQ ID NO: 190213 - DNA, 15 bp, Homo sapiens
tgatccattcaggcc

SEQ ID NO: 190214 - DNA, 15 bp, Homo sapiens
atgatccattcaggc

SEQ ID NO: 190215 - DNA, 15 bp, Homo sapiens
aatgatccattcagg

SEQ ID NO: 190216 - DNA, 15 bp, Homo sapiens
caatgatccattcag

SEQ ID NO: 190217 - DNA, 15 bp, Homo sapiens
ccaatgatccattca

SEQ ID NO: 190218 - DNA, 15 bp, Homo sapiens
tccaatgatccattc

SEQ ID NO: 190219 - DNA, 15 bp, Homo sapiens
ctccaatgatccatt

SEQ ID NO: 190220 - DNA, 15 bp, Homo sapiens
actccaatgatccat

SEQ ID NO: 190221 - DNA, 15 bp, Homo sapiens
cactccaatgatcca

SEQ ID NO: 190222 - DNA, 15 bp, Homo sapiens
ccactccaatgatcc

SEQ ID NO: 190223 - DNA, 15 bp, Homo sapiens
accactccaatgatc

SEQ ID NO: 190224 - DNA, 15 bp, Homo sapiens
aaccactccaatgat

SEQ ID NO: 190225 - DNA, 15 bp, Homo sapiens
aaaccactccaatga

SEQ ID NO: 190226 - DNA, 15 bp, Homo sapiens
caaaccactccaatg

SEQ ID NO: 190227 - DNA, 15 bp, Homo sapiens
acaaaccactccaat

SEQ ID NO: 190228 - DNA, 15 bp, Homo sapiens
cacaaaccactccaa

SEQ ID NO: 190229 - DNA, 15 bp, Homo sapiens
gcacaaaccactcca

SEQ ID NO: 190230 - DNA, 15 bp, Homo sapiens
agcacaaaccactcc

SEQ ID NO: 190231 - DNA, 15 bp, Homo sapiens
aagcacaaaccactc

SEQ ID NO: 190232 - DNA, 15 bp, Homo sapiens
gaagcacaaaccact

SEQ ID NO: 190233 - DNA, 15 bp, Homo sapiens
ggaagcacaaaccac

SEQ ID NO: 190234 - DNA, 15 bp, Homo sapiens
gggaagcacaaacca

SEQ ID NO: 190235 - DNA, 15 bp, Homo sapiens
agggaagcacaaacc

SEQ ID NO: 190236 - DNA, 15 bp, Homo sapiens
gagggaagcacaaac

SEQ ID NO: 190237 - DNA, 15 bp, Homo sapiens
cgagggaagcacaaa

SEQ ID NO: 190238 - DNA, 15 bp, Homo sapiens
gcgagggaagcacaa

SEQ ID NO: 190239 - DNA, 15 bp, Homo sapiens
ggcgagggaagcaca

SEQ ID NO: 190240 - DNA, 15 bp, Homo sapiens
gggcgagggaagcac

SEQ ID NO: 190241 - DNA, 15 bp, Homo sapiens
agggcgagggaagca

SEQ ID NO: 190242 - DNA, 15 bp, Homo sapiens
cagggcgagggaagc

SEQ ID NO: 190243 - DNA, 15 bp, Homo sapiens
acagggcgagggaag

SEQ ID NO: 190244 - DNA, 15 bp, Homo sapiens
cacagggcgagggaa

SEQ ID NO: 190245 - DNA, 15 bp, Homo sapiens
ccacagggcgaggga

SEQ ID NO: 190246 - DNA, 15 bp, Homo sapiens
gccacagggcgaggg

SEQ ID NO: 190247 - DNA, 15 bp, Homo sapiens
ggccacagggcgagg

SEQ ID NO: 190248 - DNA, 15 bp, Homo sapiens
aggccacagggcgag

SEQ ID NO: 190249 - DNA, 15 bp, Homo sapiens
gaggccacagggcga

SEQ ID NO: 190250 - DNA, 15 bp, Homo sapiens
tgaggccacagggcg

SEQ ID NO: 190251 - DNA, 15 bp, Homo sapiens
gtgaggccacagggc

SEQ ID NO: 190252 - DNA, 15 bp, Homo sapiens
tgtgaggccacaggg

SEQ ID NO: 190253 - DNA, 15 bp, Homo sapiens
atgtgaggccacagg

SEQ ID NO: 190254 - DNA, 15 bp, Homo sapiens
tatgtgaggccacag

SEQ ID NO: 190255 - DNA, 15 bp, Homo sapiens
atatgtgaggccaca

SEQ ID NO: 190256 - DNA, 15 bp, Homo sapiens
aatatgtgaggccac

SEQ ID NO: 190257 - DNA, 15 bp, Homo sapiens
aaatatgtgaggcca

SEQ ID NO: 190258 - DNA, 15 bp, Homo sapiens
taaatatgtgaggcc

SEQ ID NO: 190259 - DNA, 15 bp, Homo sapiens
ttaaatatgtgaggc

SEQ ID NO: 190260 - DNA, 15 bp, Homo sapiens
gttaaatatgtgagg

SEQ ID NO: 190261 - DNA, 15 bp, Homo sapiens
tgttaaatatgtgag

SEQ ID NO: 190262 - DNA, 15 bp, Homo sapiens
ttgttaaatatgtga

SEQ ID NO: 190263 - DNA, 15 bp, Homo sapiens
tttgttaaatatgtg

SEQ ID NO: 190264 - DNA, 15 bp, Homo sapiens
ttttgttaaatatgt

SEQ ID NO: 190265 - DNA, 15 bp, Homo sapiens
attttgttaaatatg

SEQ ID NO: 190266 - DNA, 15 bp, Homo sapiens
aattttgttaaatat

SEQ ID NO: 190267 - DNA, 15 bp, Homo sapiens
caattttgttaaata

SEQ ID NO: 190268 - DNA, 15 bp, Homo sapiens
ccaattttgttaaat

SEQ ID NO: 190269 - DNA, 15 bp, Homo sapiens
accaattttgttaaa

SEQ ID NO: 190270 - DNA, 15 bp, Homo sapiens
aaccaattttgttaa

SEQ ID NO: 190271 - DNA, 15 bp, Homo sapiens
caaccaattttgtta

SEQ ID NO: 190272 - DNA, 15 bp, Homo sapiens
gcaaccaattttgtt

SEQ ID NO: 190273 - DNA, 15 bp, Homo sapiens
agcaaccaattttgt

SEQ ID NO: 190274 - DNA, 15 bp, Homo sapiens
aagcaaccaattttg

SEQ ID NO: 190275 - DNA, 15 bp, Homo sapiens
caagcaaccaatttt

SEQ ID NO: 190276 - DNA, 15 bp, Homo sapiens
ccaagcaaccaattt

SEQ ID NO: 190277 - DNA, 15 bp, Homo sapiens
accaagcaaccaatt

SEQ ID NO: 190278 - DNA, 15 bp, Homo sapiens
aaccaagcaaccaat

SEQ ID NO: 190279 - DNA, 15 bp, Homo sapiens
aaaccaagcaaccaa

SEQ ID NO: 190280 - DNA, 15 bp, Homo sapiens
taaaccaagcaacca

SEQ ID NO: 190281 - DNA, 15 bp, Homo sapiens
ataaaccaagcaacc

SEQ ID NO: 190282 - DNA, 15 bp, Homo sapiens
aataaaccaagcaac

SEQ ID NO: 190283 - DNA, 15 bp, Homo sapiens
aaataaaccaagcaa

SEQ ID NO: 190284 - DNA, 15 bp, Homo sapiens
gaaataaaccaagca

SEQ ID NO: 190285 - DNA, 15 bp, Homo sapiens
agaaataaaccaagc

SEQ ID NO: 190286 - DNA, 15 bp, Homo sapiens
aagaaataaaccaag

SEQ ID NO: 190287 - DNA, 15 bp, Homo sapiens
caagaaataaaccaa

SEQ ID NO: 190288 - DNA, 15 bp, Homo sapiens
tcaagaaataaacca

SEQ ID NO: 190289 - DNA, 15 bp, Homo sapiens
ttcaagaaataaacc

SEQ ID NO: 190290 - DNA, 15 bp, Homo sapiens
attcaagaaataaac

SEQ ID NO: 190291 - DNA, 15 bp, Homo sapiens
gattcaagaaataaa

SEQ ID NO: 190292 - DNA, 15 bp, Homo sapiens
tgattcaagaaataa

SEQ ID NO: 190293 - DNA, 15 bp, Homo sapiens
atgattcaagaaata

SEQ ID NO: 190294 - DNA, 15 bp, Homo sapiens
gatgattcaagaaat

SEQ ID NO: 190295 - DNA, 15 bp, Homo sapiens
tgatgattcaagaaa

SEQ ID NO: 190296 - DNA, 15 bp, Homo sapiens
gtgatgattcaagaa

SEQ ID NO: 190297 - DNA, 15 bp, Homo sapiens
agtgatgattcaaga

SEQ ID NO: 190298 - DNA, 15 bp, Homo sapiens
aagtgatgattcaag

SEQ ID NO: 190299 - DNA, 15 bp, Homo sapiens
caagtgatgattcaa

SEQ ID NO: 190300 - DNA, 15 bp, Homo sapiens
tcaagtgatgattca

SEQ ID NO: 190301 - DNA, 15 bp, Homo sapiens
ttcaagtgatgattc

SEQ ID NO: 190302 - DNA, 15 bp, Homo sapiens
tttcaagtgatgatt

SEQ ID NO: 190303 - DNA, 15 bp, Homo sapiens
atttcaagtgatgat

SEQ ID NO: 190304 - DNA, 15 bp, Homo sapiens
gatttcaagtgatga

SEQ ID NO: 190305 - DNA, 15 bp, Homo sapiens
agatttcaagtgatg

SEQ ID NO: 190306 - DNA, 15 bp, Homo sapiens
gagatttcaagtgat

SEQ ID NO: 190307 - DNA, 15 bp, Homo sapiens
agagatttcaagtga

SEQ ID NO: 190308 - DNA, 15 bp, Homo sapiens
gagagatttcaagtg

SEQ ID NO: 190309 - DNA, 15 bp, Homo sapiens
tgagagatttcaagt

SEQ ID NO: 190310 - DNA, 15 bp, Homo sapiens
ctgagagatttcaag

SEQ ID NO: 190311 - DNA, 15 bp, Homo sapiens
gctgagagatttcaa

SEQ ID NO: 190312 - DNA, 15 bp, Homo sapiens
agctgagagatttca

SEQ ID NO: 190313 - DNA, 15 bp, Homo sapiens
aagctgagagatttc

SEQ ID NO: 190314 - DNA, 15 bp, Homo sapiens
gaagctgagagattt

SEQ ID NO: 190315 - DNA, 15 bp, Homo sapiens
tgaagctgagagatt

SEQ ID NO: 190316 - DNA, 15 bp, Homo sapiens
atgaagctgagagat

SEQ ID NO: 190317 - DNA, 15 bp, Homo sapiens
aatgaagctgagaga

SEQ ID NO: 190318 - DNA, 15 bp, Homo sapiens
gaatgaagctgagag

SEQ ID NO: 190319 - DNA, 15 bp, Homo sapiens
agaatgaagctgaga

SEQ ID NO: 190320 - DNA, 15 bp, Homo sapiens
cagaatgaagctgag

SEQ ID NO: 190321 - DNA, 15 bp, Homo sapiens
tcagaatgaagctga

SEQ ID NO: 190322 - DNA, 15 bp, Homo sapiens
ttcagaatgaagctg

SEQ ID NO: 190323 - DNA, 15 bp, Homo sapiens
attcagaatgaagct

SEQ ID NO: 190324 - DNA, 15 bp, Homo sapiens
aattcagaatgaagc

SEQ ID NO: 190325 - DNA, 15 bp, Homo sapiens
gaattcagaatgaag

SEQ ID NO: 190326 - DNA, 15 bp, Homo sapiens
ggaattcagaatgaa

SEQ ID NO: 190327 - DNA, 15 bp, Homo sapiens
aggaattcagaatga

SEQ ID NO: 190328 - DNA, 15 bp, Homo sapiens
gaggaattcagaatg

SEQ ID NO: 190329 - DNA, 15 bp, Homo sapiens
tgaggaattcagaat

SEQ ID NO: 190330 - DNA, 15 bp, Homo sapiens
atgaggaattcagaa

SEQ ID NO: 190331 - DNA, 15 bp, Homo sapiens
gatgaggaattcaga

SEQ ID NO: 190332 - DNA, 15 bp, Homo sapiens
ggatgaggaattcag

SEQ ID NO: 190333 - DNA, 15 bp, Homo sapiens
gggatgaggaattca

SEQ ID NO: 190334 - DNA, 15 bp, Homo sapiens
agggatgaggaattc

SEQ ID NO: 190335 - DNA, 15 bp, Homo sapiens
gagggatgaggaatt

SEQ ID NO: 190336 - DNA, 15 bp, Homo sapiens
agagggatgaggaat

SEQ ID NO: 190337 - DNA, 15 bp, Homo sapiens
aagagggatgaggaa

SEQ ID NO: 190338 - DNA, 15 bp, Homo sapiens
gaagagggatgagga

SEQ ID NO: 190339 - DNA, 15 bp, Homo sapiens
agaagagggatgagg

SEQ ID NO: 190340 - DNA, 15 bp, Homo sapiens
gagaagagggatgag

SEQ ID NO: 190341 - DNA, 15 bp, Homo sapiens
ggagaagagggatga

SEQ ID NO: 190342 - DNA, 15 bp, Homo sapiens
gggagaagagggatg

SEQ ID NO: 190343 - DNA, 15 bp, Homo sapiens
ggggagaagagggat

SEQ ID NO: 190344 - DNA, 15 bp, Homo sapiens
aggggagaagaggga

SEQ ID NO: 190345 - DNA, 15 bp, Homo sapiens
aaggggagaagaggg

SEQ ID NO: 190346 - DNA, 15 bp, Homo sapiens
caaggggagaagagg

SEQ ID NO: 190347 - DNA, 15 bp, Homo sapiens
acaaggggagaagag

SEQ ID NO: 190348 - DNA, 15 bp, Homo sapiens
aacaaggggagaaga

SEQ ID NO: 190349 - DNA, 15 bp, Homo sapiens
aaacaaggggagaag

SEQ ID NO: 190350 - DNA, 15 bp, Homo sapiens
gaaacaaggggagaa

SEQ ID NO: 190351 - DNA, 15 bp, Homo sapiens
ggaaacaaggggaga

SEQ ID NO: 190352 - DNA, 15 bp, Homo sapiens
aggaaacaaggggag

SEQ ID NO: 190353 - DNA, 15 bp, Homo sapiens
taggaaacaagggga

SEQ ID NO: 190354 - DNA, 15 bp, Homo sapiens
ataggaaacaagggg

SEQ ID NO: 190355 - DNA, 15 bp, Homo sapiens
aataggaaacaaggg

SEQ ID NO: 190356 - DNA, 15 bp, Homo sapiens
aaataggaaacaagg

SEQ ID NO: 190357 - DNA, 15 bp, Homo sapiens
aaaataggaaacaag

SEQ ID NO: 190358 - DNA, 15 bp, Homo sapiens
gaaaataggaaacaa

SEQ ID NO: 190359 - DNA, 15 bp, Homo sapiens
agaaaataggaaaca

SEQ ID NO: 190360 - DNA, 15 bp, Homo sapiens
aagaaaataggaaac

SEQ ID NO: 190361 - DNA, 15 bp, Homo sapiens
aaagaaaataggaaa

SEQ ID NO: 190362 - DNA, 15 bp, Homo sapiens
caaagaaaataggaa

SEQ ID NO: 190363 - DNA, 15 bp, Homo sapiens
tcaaagaaaatagga

SEQ ID NO: 190364 - DNA, 15 bp, Homo sapiens
ttcaaagaaaatagg

SEQ ID NO: 190365 - DNA, 15 bp, Homo sapiens
attcaaagaaaatag

SEQ ID NO: 190366 - DNA, 15 bp, Homo sapiens
aattcaaagaaaata

SEQ ID NO: 190367 - DNA, 15 bp, Homo sapiens
taattcaaagaaaat

SEQ ID NO: 190368 - DNA, 15 bp, Homo sapiens
ataattcaaagaaaa

SEQ ID NO: 190369 - DNA, 15 bp, Homo sapiens
aataattcaaagaaa

SEQ ID NO: 190370 - DNA, 15 bp, Homo sapiens
aaataattcaaagaa

SEQ ID NO: 190371 - DNA, 15 bp, Homo sapiens
caaataattcaaaga

SEQ ID NO: 190372 - DNA, 15 bp, Homo sapiens
ccaaataattcaaag

SEQ ID NO: 190373 - DNA, 15 bp, Homo sapiens
gccaaataattcaaa

SEQ ID NO: 190374 - DNA, 15 bp, Homo sapiens
agccaaataattcaa

SEQ ID NO: 190375 - DNA, 15 bp, Homo sapiens
cagccaaataattca

SEQ ID NO: 190376 - DNA, 15 bp, Homo sapiens
ccagccaaataattc

SEQ ID NO: 190377 - DNA, 15 bp, Homo sapiens
gccagccaaataatt

SEQ ID NO: 190378 - DNA, 15 bp, Homo sapiens
agccagccaaataat

SEQ ID NO: 190379 - DNA, 15 bp, Homo sapiens
gagccagccaaataa

SEQ ID NO: 190380 - DNA, 15 bp, Homo sapiens
agagccagccaaata

SEQ ID NO: 190381 - DNA, 15 bp, Homo sapiens
aagagccagccaaat

SEQ ID NO: 190382 - DNA, 15 bp, Homo sapiens
aaagagccagccaaa

SEQ ID NO: 190383 - DNA, 15 bp, Homo sapiens
aaaagagccagccaa

SEQ ID NO: 190384 - DNA, 15 bp, Homo sapiens
aaaaagagccagcca

SEQ ID NO: 190385 - DNA, 15 bp, Homo sapiens
caaaaagagccagcc

SEQ ID NO: 190386 - DNA, 15 bp, Homo sapiens
tcaaaaagagccagc

SEQ ID NO: 190387 - DNA, 15 bp, Homo sapiens
atcaaaaagagccag

SEQ ID NO: 190388 - DNA, 15 bp, Homo sapiens
tatcaaaaagagcca

SEQ ID NO: 190389 - DNA, 15 bp, Homo sapiens
atatcaaaaagagcc

SEQ ID NO: 190390 - DNA, 15 bp, Homo sapiens
aatatcaaaaagagc

SEQ ID NO: 190391 - DNA, 15 bp, Homo sapiens
aaatatcaaaaagag

SEQ ID NO: 190392 - DNA, 15 bp, Homo sapiens
caaatatcaaaaaga

SEQ ID NO: 190393 - DNA, 15 bp, Homo sapiens
acaaatatcaaaaag

SEQ ID NO: 190394 - DNA, 15 bp, Homo sapiens
cacaaatatcaaaaa

SEQ ID NO: 190395 - DNA, 15 bp, Homo sapiens
tcacaaatatcaaaa

SEQ ID NO: 190396 - DNA, 15 bp, Homo sapiens
gtcacaaatatcaaa

SEQ ID NO: 190397 - DNA, 15 bp, Homo sapiens
tgtcacaaatatcaa

SEQ ID NO: 190398 - DNA, 15 bp, Homo sapiens
atgtcacaaatatca

SEQ ID NO: 190399 - DNA, 15 bp, Homo sapiens
aatgtcacaaatatc

SEQ ID NO: 190400 - DNA, 15 bp, Homo sapiens
taatgtcacaaatat

SEQ ID NO: 190401 - DNA, 15 bp, Homo sapiens
ataatgtcacaaata

SEQ ID NO: 190402 - DNA, 15 bp, Homo sapiens
gataatgtcacaaat

SEQ ID NO: 190403 - DNA, 15 bp, Homo sapiens
agataatgtcacaaa

SEQ ID NO: 190404 - DNA, 15 bp, Homo sapiens
aagataatgtcacaa

SEQ ID NO: 190405 - DNA, 15 bp, Homo sapiens
taagataatgtcaca

SEQ ID NO: 190406 - DNA, 15 bp, Homo sapiens
gtaagataatgtcac

SEQ ID NO: 190407 - DNA, 15 bp, Homo sapiens
tgtaagataatgtca

SEQ ID NO: 190408 - DNA, 15 bp, Homo sapiens
atgtaagataatgtc

SEQ ID NO: 190409 - DNA, 15 bp, Homo sapiens
aatgtaagataatgt

SEQ ID NO: 190410 - DNA, 15 bp, Homo sapiens
aaatgtaagataatg

SEQ ID NO: 190411 - DNA, 15 bp, Homo sapiens
taaatgtaagataat

SEQ ID NO: 190412 - DNA, 15 bp, Homo sapiens
ataaatgtaagataa

SEQ ID NO: 190413 - DNA, 15 bp, Homo sapiens
cataaatgtaagata

SEQ ID NO: 190414 - DNA, 15 bp, Homo sapiens
gcataaatgtaagat

SEQ ID NO: 190415 - DNA, 15 bp, Homo sapiens
tgcataaatgtaaga

SEQ ID NO: 190416 - DNA, 15 bp, Homo sapiens
ctgcataaatgtaag

SEQ ID NO: 190417 - DNA, 15 bp, Homo sapiens
gctgcataaatgtaa

SEQ ID NO: 190418 - DNA, 15 bp, Homo sapiens
tgctgcataaatgta

SEQ ID NO: 190419 - DNA, 15 bp, Homo sapiens
gtgctgcataaatgt

SEQ ID NO: 190420 - DNA, 15 bp, Homo sapiens
agtgctgcataaatg

SEQ ID NO: 190421 - DNA, 15 bp, Homo sapiens
aagtgctgcataaat

SEQ ID NO: 190422 - DNA, 15 bp, Homo sapiens
aaagtgctgcataaa

SEQ ID NO: 190423 - DNA, 15 bp, Homo sapiens
taaagtgctgcataa

SEQ ID NO: 190424 - DNA, 15 bp, Homo sapiens
gtaaagtgctgcata

SEQ ID NO: 190425 - DNA, 15 bp, Homo sapiens
tgtaaagtgctgcat

SEQ ID NO: 190426 - DNA, 15 bp, Homo sapiens
ctgtaaagtgctgca

SEQ ID NO: 190427 - DNA, 15 bp, Homo sapiens
actgtaaagtgctgc

SEQ ID NO: 190428 - DNA, 15 bp, Homo sapiens
aactgtaaagtgctg

SEQ ID NO: 190429 - DNA, 15 bp, Homo sapiens
aaactgtaaagtgct

SEQ ID NO: 190430 - DNA, 15 bp, Homo sapiens
caaactgtaaagtgc

SEQ ID NO: 190431 - DNA, 15 bp, Homo sapiens
gcaaactgtaaagtg

SEQ ID NO: 190432 - DNA, 15 bp, Homo sapiens
tgcaaactgtaaagt

SEQ ID NO: 190433 - DNA, 15 bp, Homo sapiens
ttgcaaactgtaaag

SEQ ID NO: 190434 - DNA, 15 bp, Homo sapiens
tttgcaaactgtaaa

SEQ ID NO: 190435 - DNA, 15 bp, Homo sapiens
ctttgcaaactgtaa

SEQ ID NO: 190436 - DNA, 15 bp, Homo sapiens
gctttgcaaactgta

SEQ ID NO: 190437 - DNA, 15 bp, Homo sapiens
agctttgcaaactgt

SEQ ID NO: 190438 - DNA, 15 bp, Homo sapiens
gagctttgcaaactg

SEQ ID NO: 190439 - DNA, 15 bp, Homo sapiens
agagctttgcaaact

SEQ ID NO: 190440 - DNA, 15 bp, Homo sapiens
aagagctttgcaaac

SEQ ID NO: 190441 - DNA, 15 bp, Homo sapiens
aaagagctttgcaaa

SEQ ID NO: 190442 - DNA, 15 bp, Homo sapiens
gaaagagctttgcaa

SEQ ID NO: 190443 - DNA, 15 bp, Homo sapiens
tgaaagagctttgca

SEQ ID NO: 190444 - DNA, 15 bp, Homo sapiens
gtgaaagagctttgc

SEQ ID NO: 190445 - DNA, 15 bp, Homo sapiens
tgtgaaagagctttg

SEQ ID NO: 190446 - DNA, 15 bp, Homo sapiens
atgtgaaagagcttt

SEQ ID NO: 190447 - DNA, 15 bp, Homo sapiens
tatgtgaaagagctt

SEQ ID NO: 190448 - DNA, 15 bp, Homo sapiens
gtatgtgaaagagct

SEQ ID NO: 190449 - DNA, 15 bp, Homo sapiens
tgtatgtgaaagagc

SEQ ID NO: 190450 - DNA, 15 bp, Homo sapiens
atgtatgtgaaagag

SEQ ID NO: 190451 - DNA, 15 bp, Homo sapiens
aatgtatgtgaaaga

SEQ ID NO: 190452 - DNA, 15 bp, Homo sapiens
taatgtatgtgaaag

SEQ ID NO: 190453 - DNA, 15 bp, Homo sapiens
ataatgtatgtgaaa

SEQ ID NO: 190454 - DNA, 15 bp, Homo sapiens
gataatgtatgtgaa

SEQ ID NO: 190455 - DNA, 15 bp, Homo sapiens
ggataatgtatgtga

SEQ ID NO: 190456 - DNA, 15 bp, Homo sapiens
tggataatgtatgtg

SEQ ID NO: 190457 - DNA, 15 bp, Homo sapiens
ctggataatgtatgt

SEQ ID NO: 190458 - DNA, 15 bp, Homo sapiens
cctggataatgtatg

SEQ ID NO: 190459 - DNA, 15 bp, Homo sapiens
gcctggataatgtat

SEQ ID NO: 190460 - DNA, 15 bp, Homo sapiens
tgcctggataatgta

SEQ ID NO: 190461 - DNA, 15 bp, Homo sapiens
ttgcctggataatgt

SEQ ID NO: 190462 - DNA, 15 bp, Homo sapiens
gttgcctggataatg

SEQ ID NO: 190463 - DNA, 15 bp, Homo sapiens
tgttgcctggataat

SEQ ID NO: 190464 - DNA, 15 bp, Homo sapiens
gtgttgcctggataa

SEQ ID NO: 190465 - DNA, 15 bp, Homo sapiens
tgtgttgcctggata

SEQ ID NO: 190466 - DNA, 15 bp, Homo sapiens
atgtgttgcctggat

SEQ ID NO: 190467 - DNA, 15 bp, Homo sapiens
tatgtgttgcctgga

SEQ ID NO: 190468 - DNA, 15 bp, Homo sapiens
atatgtgttgcctgg

SEQ ID NO: 190469 - DNA, 15 bp, Homo sapiens
aatatgtgttgcctg

SEQ ID NO: 190470 - DNA, 15 bp, Homo sapiens
aaatatgtgttgcct

SEQ ID NO: 190471 - DNA, 15 bp, Homo sapiens
taaatatgtgttgcc

SEQ ID NO: 190472 - DNA, 15 bp, Homo sapiens
gtaaatatgtgttgc

SEQ ID NO: 190473 - DNA, 15 bp, Homo sapiens
agtaaatatgtgttg

SEQ ID NO: 190474 - DNA, 15 bp, Homo sapiens
tagtaaatatgtgtt

SEQ ID NO: 190475 - DNA, 15 bp, Homo sapiens
ttagtaaatatgtgt

SEQ ID NO: 190476 - DNA, 15 bp, Homo sapiens
cttagtaaatatgtg

SEQ ID NO: 190477 - DNA, 15 bp, Homo sapiens
gcttagtaaatatgt

SEQ ID NO: 190478 - DNA, 15 bp, Homo sapiens
agcttagtaaatatg

SEQ ID NO: 190479 - DNA, 15 bp, Homo sapiens
gagcttagtaaatat

SEQ ID NO: 190480 - DNA, 15 bp, Homo sapiens
ggagcttagtaaata

SEQ ID NO: 190481 - DNA, 15 bp, Homo sapiens
tggagcttagtaaat

SEQ ID NO: 190482 - DNA, 15 bp, Homo sapiens
ttggagcttagtaaa

SEQ ID NO: 190483 - DNA, 15 bp, Homo sapiens
cttggagcttagtaa

SEQ ID NO: 190484 - DNA, 15 bp, Homo sapiens
ccttggagcttagta

SEQ ID NO: 190485 - DNA, 15 bp, Homo sapiens
gccttggagcttagt

SEQ ID NO: 190486 - DNA, 15 bp, Homo sapiens
ggccttggagcttag

SEQ ID NO: 190487 - DNA, 15 bp, Homo sapiens
aggccttggagctta

SEQ ID NO: 190488 - DNA, 15 bp, Homo sapiens
aaggccttggagctt

SEQ ID NO: 190489 - DNA, 15 bp, Homo sapiens
caaggccttggagct

SEQ ID NO: 190490 - DNA, 15 bp, Homo sapiens
ccaaggccttggagc

SEQ ID NO: 190491 - DNA, 15 bp, Homo sapiens
tccaaggccttggag

SEQ ID NO: 190492 - DNA, 15 bp, Homo sapiens
ttccaaggccttgga

SEQ ID NO: 190493 - DNA, 15 bp, Homo sapiens
attccaaggccttgg

SEQ ID NO: 190494 - DNA, 15 bp, Homo sapiens
tattccaaggccttg

SEQ ID NO: 190495 - DNA, 15 bp, Homo sapiens
ttattccaaggcctt

SEQ ID NO: 190496 - DNA, 15 bp, Homo sapiens
cttattccaaggcct

SEQ ID NO: 190497 - DNA, 15 bp, Homo sapiens
acttattccaaggcc

SEQ ID NO: 190498 - DNA, 15 bp, Homo sapiens
cacttattccaaggc

SEQ ID NO: 190499 - DNA, 15 bp, Homo sapiens
gcacttattccaagg

SEQ ID NO: 190500 - DNA, 15 bp, Homo sapiens
agcacttattccaag

SEQ ID NO: 190501 - DNA, 15 bp, Homo sapiens
tagcacttattccaa

SEQ ID NO: 190502 - DNA, 15 bp, Homo sapiens
ctagcacttattcca

SEQ ID NO: 190503 - DNA, 15 bp, Homo sapiens
cctagcacttattcc

SEQ ID NO: 190504 - DNA, 15 bp, Homo sapiens
gcctagcacttattc

SEQ ID NO: 190505 - DNA, 15 bp, Homo sapiens
agcctagcacttatt

SEQ ID NO: 190506 - DNA, 15 bp, Homo sapiens
gagcctagcacttat

SEQ ID NO: 190507 - DNA, 15 bp, Homo sapiens
ggagcctagcactta

SEQ ID NO: 190508 - DNA, 15 bp, Homo sapiens
gggagcctagcactt

SEQ ID NO: 190509 - DNA, 15 bp, Homo sapiens
cgggagcctagcact

SEQ ID NO: 190510 - DNA, 15 bp, Homo sapiens
ccgggagcctagcac

SEQ ID NO: 190511 - DNA, 15 bp, Homo sapiens
cccgggagcctagca

SEQ ID NO: 190512 - DNA, 15 bp, Homo sapiens
tcccgggagcctagc

SEQ ID NO: 190513 - DNA, 15 bp, Homo sapiens
ctcccgggagcctag

SEQ ID NO: 190514 - DNA, 15 bp, Homo sapiens
cctcccgggagccta

SEQ ID NO: 190515 - DNA, 15 bp, Homo sapiens
gcctcccgggagcct

SEQ ID NO: 190516 - DNA, 15 bp, Homo sapiens
tgcctcccgggagcc

SEQ ID NO: 190517 - DNA, 15 bp, Homo sapiens
ctgcctcccgggagc

SEQ ID NO: 190518 - DNA, 15 bp, Homo sapiens
gctgcctcccgggag

SEQ ID NO: 190519 - DNA, 15 bp, Homo sapiens
tgctgcctcccggga

SEQ ID NO: 190520 - DNA, 15 bp, Homo sapiens
ctgctgcctcccggg

SEQ ID NO: 190521 - DNA, 15 bp, Homo sapiens
actgctgcctcccgg

SEQ ID NO: 190522 - DNA, 15 bp, Homo sapiens
cactgctgcctcccg

SEQ ID NO: 190523 - DNA, 15 bp, Homo sapiens
gcactgctgcctccc

SEQ ID NO: 190524 - DNA, 15 bp, Homo sapiens
tgcactgctgcctcc

SEQ ID NO: 190525 - DNA, 15 bp, Homo sapiens
atgcactgctgcctc

SEQ ID NO: 190526 - DNA, 15 bp, Homo sapiens
aatgcactgctgcct

SEQ ID NO: 190527 - DNA, 15 bp, Homo sapiens
gaatgcactgctgcc

SEQ ID NO: 190528 - DNA, 15 bp, Homo sapiens
cgaatgcactgctgc

SEQ ID NO: 190529 - DNA, 15 bp, Homo sapiens
tcgaatgcactgctg

SEQ ID NO: 190530 - DNA, 15 bp, Homo sapiens
atcgaatgcactgct

SEQ ID NO: 190531 - DNA, 15 bp, Homo sapiens
tatcgaatgcactgc

SEQ ID NO: 190532 - DNA, 15 bp, Homo sapiens
ctatcgaatgcactg

SEQ ID NO: 190533 - DNA, 15 bp, Homo sapiens
gctatcgaatgcact

SEQ ID NO: 190534 - DNA, 15 bp, Homo sapiens
agctatcgaatgcac

SEQ ID NO: 190535 - DNA, 15 bp, Homo sapiens
tagctatcgaatgca

SEQ ID NO: 190536 - DNA, 15 bp, Homo sapiens
gtagctatcgaatgc

SEQ ID NO: 190537 - DNA, 15 bp, Homo sapiens
cgtagctatcgaatg

SEQ ID NO: 190538 - DNA, 15 bp, Homo sapiens
ccgtagctatcgaat

SEQ ID NO: 190539 - DNA, 15 bp, Homo sapiens
accgtagctatcgaa

SEQ ID NO: 190540 - DNA, 15 bp, Homo sapiens
caccgtagctatcga

SEQ ID NO: 190541 - DNA, 15 bp, Homo sapiens
ccaccgtagctatcg

SEQ ID NO: 190542 - DNA, 15 bp, Homo sapiens
gccaccgtagctatc

SEQ ID NO: 190543 - DNA, 15 bp, Homo sapiens
agccaccgtagctat

SEQ ID NO: 190544 - DNA, 15 bp, Homo sapiens
cagccaccgtagcta

SEQ ID NO: 190545 - DNA, 15 bp, Homo sapiens
gcagccaccgtagct

SEQ ID NO: 190546 - DNA, 15 bp, Homo sapiens
agcagccaccgtagc

SEQ ID NO: 190547 - DNA, 15 bp, Homo sapiens
gagcagccaccgtag

SEQ ID NO: 190548 - DNA, 15 bp, Homo sapiens
agagcagccaccgta

SEQ ID NO: 190549 - DNA, 15 bp, Homo sapiens
gagagcagccaccgt

SEQ ID NO: 190550 - DNA, 15 bp, Homo sapiens
tgagagcagccaccg

SEQ ID NO: 190551 - DNA, 15 bp, Homo sapiens
ctgagagcagccacc

SEQ ID NO: 190552 - DNA, 15 bp, Homo sapiens
cctgagagcagccac

SEQ ID NO: 190553 - DNA, 15 bp, Homo sapiens
ccctgagagcagcca

SEQ ID NO: 190554 - DNA, 15 bp, Homo sapiens
tccctgagagcagcc

SEQ ID NO: 190555 - DNA, 15 bp, Homo sapiens
ctccctgagagcagc

SEQ ID NO: 190556 - DNA, 15 bp, Homo sapiens
tctccctgagagcag

SEQ ID NO: 190557 - DNA, 15 bp, Homo sapiens
gtctccctgagagca

SEQ ID NO: 190558 - DNA, 15 bp, Homo sapiens
tgtctccctgagagc

SEQ ID NO: 190559 - DNA, 15 bp, Homo sapiens
ctgtctccctgagag

SEQ ID NO: 190560 - DNA, 15 bp, Homo sapiens
actgtctccctgaga

SEQ ID NO: 190561 - DNA, 15 bp, Homo sapiens
cactgtctccctgag

SEQ ID NO: 190562 - DNA, 15 bp, Homo sapiens
tcactgtctccctga

SEQ ID NO: 190563 - DNA, 15 bp, Homo sapiens
atcactgtctccctg

SEQ ID NO: 190564 - DNA, 15 bp, Homo sapiens
tatcactgtctccct

SEQ ID NO: 190565 - DNA, 15 bp, Homo sapiens
ttatcactgtctccc

SEQ ID NO: 190566 - DNA, 15 bp, Homo sapiens
cttatcactgtctcc

SEQ ID NO: 190567 - DNA, 15 bp, Homo sapiens
gcttatcactgtctc

SEQ ID NO: 190568 - DNA, 15 bp, Homo sapiens
agcttatcactgtct

SEQ ID NO: 190569 - DNA, 15 bp, Homo sapiens
tagcttatcactgtc

SEQ ID NO: 190570 - DNA, 15 bp, Homo sapiens
gtagcttatcactgt

SEQ ID NO: 190571 - DNA, 15 bp, Homo sapiens
agtagcttatcactg

SEQ ID NO: 190572 - DNA, 15 bp, Homo sapiens
cagtagcttatcact

SEQ ID NO: 190573 - DNA, 15 bp, Homo sapiens
gcagtagcttatcac

SEQ ID NO: 190574 - DNA, 15 bp, Homo sapiens
agcagtagcttatca

SEQ ID NO: 190575 - DNA, 15 bp, Homo sapiens
tagcagtagcttatc

SEQ ID NO: 190576 - DNA, 15 bp, Homo sapiens
ttagcagtagcttat

SEQ ID NO: 190577 - DNA, 15 bp, Homo sapiens
gttagcagtagctta

SEQ ID NO: 190578 - DNA, 15 bp, Homo sapiens
agttagcagtagctt

SEQ ID NO: 190579 - DNA, 15 bp, Homo sapiens
aagttagcagtagct

SEQ ID NO: 190580 - DNA, 15 bp, Homo sapiens
caagttagcagtagc

SEQ ID NO: 190581 - DNA, 15 bp, Homo sapiens
acaagttagcagtag

SEQ ID NO: 190582 - DNA, 15 bp, Homo sapiens
tacaagttagcagta

SEQ ID NO: 190583 - DNA, 15 bp, Homo sapiens
ctacaagttagcagt

SEQ ID NO: 190584 - DNA, 15 bp, Homo sapiens
cctacaagttagcag

SEQ ID NO: 190585 - DNA, 15 bp, Homo sapiens
tcctacaagttagca

SEQ ID NO: 190586 - DNA, 15 bp, Homo sapiens
ttcctacaagttagc

SEQ ID NO: 190587 - DNA, 15 bp, Homo sapiens
cttcctacaagttag

SEQ ID NO: 190588 - DNA, 15 bp, Homo sapiens
tcttcctacaagtta

SEQ ID NO: 190589 - DNA, 15 bp, Homo sapiens
gtcttcctacaagtt

SEQ ID NO: 190590 - DNA, 15 bp, Homo sapiens
tgtcttcctacaagt

SEQ ID NO: 190591 - DNA, 15 bp, Homo sapiens
ttgtcttcctacaag

SEQ ID NO: 190592 - DNA, 15 bp, Homo sapiens
attgtcttcctacaa

SEQ ID NO: 190593 - DNA, 15 bp, Homo sapiens
tattgtcttcctaca

SEQ ID NO: 190594 - DNA, 15 bp, Homo sapiens
ctattgtcttcctac

SEQ ID NO: 190595 - DNA, 15 bp, Homo sapiens
gctattgtcttccta

SEQ ID NO: 190596 - DNA, 15 bp, Homo sapiens
cgctattgtcttcct

SEQ ID NO: 190597 - DNA, 15 bp, Homo sapiens
acgctattgtcttcc

SEQ ID NO: 190598 - DNA, 15 bp, Homo sapiens
cacgctattgtcttc

SEQ ID NO: 190599 - DNA, 15 bp, Homo sapiens
tcacgctattgtctt

SEQ ID NO: 190600 - DNA, 15 bp, Homo sapiens
ctcacgctattgtct

SEQ ID NO: 190601 - DNA, 15 bp, Homo sapiens
tctcacgctattgtc

SEQ ID NO: 190602 - DNA, 15 bp, Homo sapiens
atctcacgctattgt

SEQ ID NO: 190603 - DNA, 15 bp, Homo sapiens
catctcacgctattg

SEQ ID NO: 190604 - DNA, 15 bp, Homo sapiens
tcatctcacgctatt

SEQ ID NO: 190605 - DNA, 15 bp, Homo sapiens
atcatctcacgctat

SEQ ID NO: 190606 - DNA, 15 bp, Homo sapiens
catcatctcacgcta

SEQ ID NO: 190607 - DNA, 15 bp, Homo sapiens
gcatcatctcacgct

SEQ ID NO: 190608 - DNA, 15 bp, Homo sapiens
agcatcatctcacgc

SEQ ID NO: 190609 - DNA, 15 bp, Homo sapiens
cagcatcatctcacg

SEQ ID NO: 190610 - DNA, 15 bp, Homo sapiens
tcagcatcatctcac

SEQ ID NO: 190611 - DNA, 15 bp, Homo sapiens
ctcagcatcatctca

SEQ ID NO: 190612 - DNA, 15 bp, Homo sapiens
cctcagcatcatctc

SEQ ID NO: 190613 - DNA, 15 bp, Homo sapiens
ccctcagcatcatct

SEQ ID NO: 190614 - DNA, 15 bp, Homo sapiens
accctcagcatcatc

SEQ ID NO: 190615 - DNA, 15 bp, Homo sapiens
aaccctcagcatcat

SEQ ID NO: 190616 - DNA, 15 bp, Homo sapiens
aaaccctcagcatca

SEQ ID NO: 190617 - DNA, 15 bp, Homo sapiens
gaaaccctcagcatc

SEQ ID NO: 190618 - DNA, 15 bp, Homo sapiens
agaaaccctcagcat

SEQ ID NO: 190619 - DNA, 15 bp, Homo sapiens
aagaaaccctcagca

SEQ ID NO: 190620 - DNA, 15 bp, Homo sapiens
aaagaaaccctcagc

SEQ ID NO: 190621 - DNA, 15 bp, Homo sapiens
caaagaaaccctcag

SEQ ID NO: 190622 - DNA, 15 bp, Homo sapiens
acaaagaaaccctca

SEQ ID NO: 190623 - DNA, 15 bp, Homo sapiens
cacaaagaaaccctc

SEQ ID NO: 190624 - DNA, 15 bp, Homo sapiens
tcacaaagaaaccct

SEQ ID NO: 190625 - DNA, 15 bp, Homo sapiens
atcacaaagaaaccc

SEQ ID NO: 190626 - DNA, 15 bp, Homo sapiens
catcacaaagaaacc

SEQ ID NO: 190627 - DNA, 15 bp, Homo sapiens
ccatcacaaagaaac

SEQ ID NO: 190628 - DNA, 15 bp, Homo sapiens
tccatcacaaagaaa

SEQ ID NO: 190629 - DNA, 15 bp, Homo sapiens
atccatcacaaagaa

SEQ ID NO: 190630 - DNA, 15 bp, Homo sapiens
catccatcacaaaga

SEQ ID NO: 190631 - DNA, 15 bp, Homo sapiens
ccatccatcacaaag

SEQ ID NO: 190632 - DNA, 15 bp, Homo sapiens
cccatccatcacaaa

SEQ ID NO: 190633 - DNA, 15 bp, Homo sapiens
tcccatccatcacaa

SEQ ID NO: 190634 - DNA, 15 bp, Homo sapiens
ttcccatccatcaca

SEQ ID NO: 190635 - DNA, 15 bp, Homo sapiens
tttcccatccatcac

SEQ ID NO: 190636 - DNA, 15 bp, Homo sapiens
ttttcccatccatca

SEQ ID NO: 190637 - DNA, 15 bp, Homo sapiens
cttttcccatccatc

SEQ ID NO: 190638 - DNA, 15 bp, Homo sapiens
gcttttcccatccat

SEQ ID NO: 190639 - DNA, 15 bp, Homo sapiens
ggcttttcccatcca

SEQ ID NO: 190640 - DNA, 15 bp, Homo sapiens
aggcttttcccatcc

SEQ ID NO: 190641 - DNA, 15 bp, Homo sapiens
gaggcttttcccatc

SEQ ID NO: 190642 - DNA, 15 bp, Homo sapiens
agaggcttttcccat

SEQ ID NO: 190643 - DNA, 15 bp, Homo sapiens
gagaggcttttccca

SEQ ID NO: 190644 - DNA, 15 bp, Homo sapiens
ggagaggcttttccc

SEQ ID NO: 190645 - DNA, 15 bp, Homo sapiens
cggagaggcttttcc

SEQ ID NO: 190646 - DNA, 15 bp, Homo sapiens
tcggagaggcttttc

SEQ ID NO: 190647 - DNA, 15 bp, Homo sapiens
ctcggagaggctttt

SEQ ID NO: 190648 - DNA, 15 bp, Homo sapiens
cctcggagaggcttt

SEQ ID NO: 190649 - DNA, 15 bp, Homo sapiens
tcctcggagaggctt

SEQ ID NO: 190650 - DNA, 15 bp, Homo sapiens
ctcctcggagaggct

SEQ ID NO: 190651 - DNA, 15 bp, Homo sapiens
tctcctcggagaggc

SEQ ID NO: 190652 - DNA, 15 bp, Homo sapiens
ttctcctcggagagg

SEQ ID NO: 190653 - DNA, 15 bp, Homo sapiens
cttctcctcggagag

SEQ ID NO: 190654 - DNA, 15 bp, Homo sapiens
tcttctcctcggaga

SEQ ID NO: 190655 - DNA, 15 bp, Homo sapiens
gtcttctcctcggag

SEQ ID NO: 190656 - DNA, 15 bp, Homo sapiens
tgtcttctcctcgga

SEQ ID NO: 190657 - DNA, 15 bp, Homo sapiens
atgtcttctcctcgg

SEQ ID NO: 190658 - DNA, 15 bp, Homo sapiens
aatgtcttctcctcg

SEQ ID NO: 190659 - DNA, 15 bp, Homo sapiens
aaatgtcttctcctc

SEQ ID NO: 190660 - DNA, 15 bp, Homo sapiens
caaatgtcttctcct

SEQ ID NO: 190661 - DNA, 15 bp, Homo sapiens
tcaaatgtcttctcc

SEQ ID NO: 190662 - DNA, 15 bp, Homo sapiens
ttcaaatgtcttctc

SEQ ID NO: 190663 - DNA, 15 bp, Homo sapiens
gttcaaatgtcttct

SEQ ID NO: 190664 - DNA, 15 bp, Homo sapiens
agttcaaatgtcttc

SEQ ID NO: 190665 - DNA, 15 bp, Homo sapiens
gagttcaaatgtctt

SEQ ID NO: 190666 - DNA, 15 bp, Homo sapiens
tgagttcaaatgtct

SEQ ID NO: 190667 - DNA, 15 bp, Homo sapiens
ctgagttcaaatgtc

SEQ ID NO: 190668 - DNA, 15 bp, Homo sapiens
tctgagttcaaatgt

SEQ ID NO: 190669 - DNA, 15 bp, Homo sapiens
ctctgagttcaaatg

SEQ ID NO: 190670 - DNA, 15 bp, Homo sapiens
cctctgagttcaaat

SEQ ID NO: 190671 - DNA, 15 bp, Homo sapiens
tcctctgagttcaaa

SEQ ID NO: 190672 - DNA, 15 bp, Homo sapiens
ttcctctgagttcaa

SEQ ID NO: 190673 - DNA, 15 bp, Homo sapiens
cttcctctgagttca

SEQ ID NO: 190674 - DNA, 15 bp, Homo sapiens
gcttcctctgagttc

SEQ ID NO: 190675 - DNA, 15 bp, Homo sapiens
ggcttcctctgagtt

SEQ ID NO: 190676 - DNA, 15 bp, Homo sapiens
tggcttcctctgagt

SEQ ID NO: 190677 - DNA, 15 bp, Homo sapiens
ctggcttcctctgag

SEQ ID NO: 190678 - DNA, 15 bp, Homo sapiens
gctggcttcctctga

SEQ ID NO: 190679 - DNA, 15 bp, Homo sapiens
ggctggcttcctctg

SEQ ID NO: 190680 - DNA, 15 bp, Homo sapiens
tggctggcttcctct

SEQ ID NO: 190681 - DNA, 15 bp, Homo sapiens
ctggctggcttcctc

SEQ ID NO: 190682 - DNA, 15 bp, Homo sapiens
cctggctggcttcct

SEQ ID NO: 190683 - DNA, 15 bp, Homo sapiens
tcctggctggcttcc

SEQ ID NO: 190684 - DNA, 15 bp, Homo sapiens
ctcctggctggcttc

SEQ ID NO: 190685 - DNA, 15 bp, Homo sapiens
cctcctggctggctt

SEQ ID NO: 190686 - DNA, 15 bp, Homo sapiens
tcctcctggctggct

SEQ ID NO: 190687 - DNA, 15 bp, Homo sapiens
ttcctcctggctggc

SEQ ID NO: 190688 - DNA, 15 bp, Homo sapiens
tttcctcctggctgg

SEQ ID NO: 190689 - DNA, 15 bp, Homo sapiens
atttcctcctggctg

SEQ ID NO: 190690 - DNA, 15 bp, Homo sapiens
aatttcctcctggct

SEQ ID NO: 190691 - DNA, 15 bp, Homo sapiens
aaatttcctcctggc

SEQ ID NO: 190692 - DNA, 15 bp, Homo sapiens
caaatttcctcctgg

SEQ ID NO: 190693 - DNA, 15 bp, Homo sapiens
ccaaatttcctcctg

SEQ ID NO: 190694 - DNA, 15 bp, Homo sapiens
cccaaatttcctcct

SEQ ID NO: 190695 - DNA, 15 bp, Homo sapiens
ccccaaatttcctcc

SEQ ID NO: 190696 - DNA, 15 bp, Homo sapiens
cccccaaatttcctc

SEQ ID NO: 190697 - DNA, 15 bp, Homo sapiens
tcccccaaatttcct

SEQ ID NO: 190698 - DNA, 15 bp, Homo sapiens
ttcccccaaatttcc

SEQ ID NO: 190699 - DNA, 15 bp, Homo sapiens
cttcccccaaatttc

SEQ ID NO: 190700 - DNA, 15 bp, Homo sapiens
tcttcccccaaattt

SEQ ID NO: 190701 - DNA, 15 bp, Homo sapiens
ctcttcccccaaatt

SEQ ID NO: 190702 - DNA, 15 bp, Homo sapiens
gctcttcccccaaat

SEQ ID NO: 190703 - DNA, 15 bp, Homo sapiens
cgctcttcccccaaa

SEQ ID NO: 190704 - DNA, 15 bp, Homo sapiens
acgctcttcccccaa

SEQ ID NO: 190705 - DNA, 15 bp, Homo sapiens
aacgctcttccccca

SEQ ID NO: 190706 - DNA, 15 bp, Homo sapiens
gaacgctcttccccc

SEQ ID NO: 190707 - DNA, 15 bp, Homo sapiens
ggaacgctcttcccc

SEQ ID NO: 190708 - DNA, 15 bp, Homo sapiens
tggaacgctcttccc

SEQ ID NO: 190709 - DNA, 15 bp, Homo sapiens
gtggaacgctcttcc

SEQ ID NO: 190710 - DNA, 15 bp, Homo sapiens
cgtggaacgctcttc

SEQ ID NO: 190711 - DNA, 15 bp, Homo sapiens
acgtggaacgctctt

SEQ ID NO: 190712 - DNA, 15 bp, Homo sapiens
tacgtggaacgctct

SEQ ID NO: 190713 - DNA, 15 bp, Homo sapiens
ctacgtggaacgctc

SEQ ID NO: 190714 - DNA, 15 bp, Homo sapiens
actacgtggaacgct

SEQ ID NO: 190715 - DNA, 15 bp, Homo sapiens
tactacgtggaacgc

SEQ ID NO: 190716 - DNA, 15 bp, Homo sapiens
ctactacgtggaacg

SEQ ID NO: 190717 - DNA, 15 bp, Homo sapiens
gctactacgtggaac

SEQ ID NO: 190718 - DNA, 15 bp, Homo sapiens
tgctactacgtggaa

SEQ ID NO: 190719 - DNA, 15 bp, Homo sapiens
gtgctactacgtgga

SEQ ID NO: 190720 - DNA, 15 bp, Homo sapiens
ggtgctactacgtgg

SEQ ID NO: 190721 - DNA, 15 bp, Homo sapiens
tggtgctactacgtg

SEQ ID NO: 190722 - DNA, 15 bp, Homo sapiens
ctggtgctactacgt

SEQ ID NO: 190723 - DNA, 15 bp, Homo sapiens
gctggtgctactacg

SEQ ID NO: 190724 - DNA, 15 bp, Homo sapiens
agctggtgctactac

SEQ ID NO: 190725 - DNA, 15 bp, Homo sapiens
tagctggtgctacta

SEQ ID NO: 190726 - DNA, 15 bp, Homo sapiens
ctagctggtgctact

SEQ ID NO: 190727 - DNA, 15 bp, Homo sapiens
actagctggtgctac

SEQ ID NO: 190728 - DNA, 15 bp, Homo sapiens
cactagctggtgcta

SEQ ID NO: 190729 - DNA, 15 bp, Homo sapiens
gcactagctggtgct

SEQ ID NO: 190730 - DNA, 15 bp, Homo sapiens
tgcactagctggtgc

SEQ ID NO: 190731 - DNA, 15 bp, Homo sapiens
ttgcactagctggtg

SEQ ID NO: 190732 - DNA, 15 bp, Homo sapiens
tttgcactagctggt

SEQ ID NO: 190733 - DNA, 15 bp, Homo sapiens
ctttgcactagctgg

SEQ ID NO: 190734 - DNA, 15 bp, Homo sapiens
cctttgcactagctg

SEQ ID NO: 190735 - DNA, 15 bp, Homo sapiens
gcctttgcactagct

SEQ ID NO: 190736 - DNA, 15 bp, Homo sapiens
ggcctttgcactagc

SEQ ID NO: 190737 - DNA, 15 bp, Homo sapiens
aggcctttgcactag

SEQ ID NO: 190738 - DNA, 15 bp, Homo sapiens
caggcctttgcacta

SEQ ID NO: 190739 - DNA, 15 bp, Homo sapiens
ccaggcctttgcact

SEQ ID NO: 190740 - DNA, 15 bp, Homo sapiens
accaggcctttgcac

SEQ ID NO: 190741 - DNA, 15 bp, Homo sapiens
caccaggcctttgca

SEQ ID NO: 190742 - DNA, 15 bp, Homo sapiens
ccaccaggcctttgc

SEQ ID NO: 190743 - DNA, 15 bp, Homo sapiens
gccaccaggcctttg

SEQ ID NO: 190744 - DNA, 15 bp, Homo sapiens
tgccaccaggccttt

SEQ ID NO: 190745 - DNA, 15 bp, Homo sapiens
ttgccaccaggcctt

SEQ ID NO: 190746 - DNA, 15 bp, Homo sapiens
cttgccaccaggcct

SEQ ID NO: 190747 - DNA, 15 bp, Homo sapiens
ccttgccaccaggcc

SEQ ID NO: 190748 - DNA, 15 bp, Homo sapiens
tccttgccaccaggc

SEQ ID NO: 190749 - DNA, 15 bp, Homo sapiens
atccttgccaccagg

SEQ ID NO: 190750 - DNA, 15 bp, Homo sapiens
aatccttgccaccag

SEQ ID NO: 190751 - DNA, 15 bp, Homo sapiens
taatccttgccacca

SEQ ID NO: 190752 - DNA, 15 bp, Homo sapiens
ctaatccttgccacc

SEQ ID NO: 190753 - DNA, 15 bp, Homo sapiens
gctaatccttgccac

SEQ ID NO: 190754 - DNA, 15 bp, Homo sapiens
agctaatccttgcca

SEQ ID NO: 190755 - DNA, 15 bp, Homo sapiens
aagctaatccttgcc

SEQ ID NO: 190756 - DNA, 15 bp, Homo sapiens
caagctaatccttgc

SEQ ID NO: 190757 - DNA, 15 bp, Homo sapiens
gcaagctaatccttg

SEQ ID NO: 190758 - DNA, 15 bp, Homo sapiens
agcaagctaatcctt

SEQ ID NO: 190759 - DNA, 15 bp, Homo sapiens
aagcaagctaatcct

SEQ ID NO: 190760 - DNA, 15 bp, Homo sapiens
caagcaagctaatcc

SEQ ID NO: 190761 - DNA, 15 bp, Homo sapiens
acaagcaagctaatc

SEQ ID NO: 190762 - DNA, 15 bp, Homo sapiens
aacaagcaagctaat

SEQ ID NO: 190763 - DNA, 15 bp, Homo sapiens
aaacaagcaagctaa

SEQ ID NO: 190764 - DNA, 15 bp, Homo sapiens
gaaacaagcaagcta

SEQ ID NO: 190765 - DNA, 15 bp, Homo sapiens
agaaacaagcaagct

SEQ ID NO: 190766 - DNA, 15 bp, Homo sapiens
cagaaacaagcaagc

SEQ ID NO: 190767 - DNA, 15 bp, Homo sapiens
tcagaaacaagcaag

SEQ ID NO: 190768 - DNA, 15 bp, Homo sapiens
ttcagaaacaagcaa

SEQ ID NO: 190769 - DNA, 15 bp, Homo sapiens
tttcagaaacaagca

SEQ ID NO: 190770 - DNA, 15 bp, Homo sapiens
gtttcagaaacaagc

SEQ ID NO: 190771 - DNA, 15 bp, Homo sapiens
tgtttcagaaacaag

SEQ ID NO: 190772 - DNA, 15 bp, Homo sapiens
ctgtttcagaaacaa

SEQ ID NO: 190773 - DNA, 15 bp, Homo sapiens
gctgtttcagaaaca

SEQ ID NO: 190774 - DNA, 15 bp, Homo sapiens
tgctgtttcagaaac

SEQ ID NO: 190775 - DNA, 15 bp, Homo sapiens
ttgctgtttcagaaa

SEQ ID NO: 190776 - DNA, 15 bp, Homo sapiens
tttgctgtttcagaa

SEQ ID NO: 190777 - DNA, 15 bp, Homo sapiens
ttttgctgtttcaga

SEQ ID NO: 190778 - DNA, 15 bp, Homo sapiens
tttttgctgtttcag

SEQ ID NO: 190779 - DNA, 15 bp, Homo sapiens
gtttttgctgtttca

SEQ ID NO: 190780 - DNA, 15 bp, Homo sapiens
cgtttttgctgtttc

SEQ ID NO: 190781 - DNA, 15 bp, Homo sapiens
gcgtttttgctgttt

SEQ ID NO: 190782 - DNA, 15 bp, Homo sapiens
ggcgtttttgctgtt

SEQ ID NO: 190783 - DNA, 15 bp, Homo sapiens
tggcgtttttgctgt

SEQ ID NO: 190784 - DNA, 15 bp, Homo sapiens
gtggcgtttttgctg

SEQ ID NO: 190785 - DNA, 15 bp, Homo sapiens
agtggcgtttttgct

SEQ ID NO: 190786 - DNA, 15 bp, Homo sapiens
gagtggcgtttttgc

SEQ ID NO: 190787 - DNA, 15 bp, Homo sapiens
agagtggcgtttttg

SEQ ID NO: 190788 - DNA, 15 bp, Homo sapiens
cagagtggcgttttt

SEQ ID NO: 190789 - DNA, 15 bp, Homo sapiens
tcagagtggcgtttt

SEQ ID NO: 190790 - DNA, 15 bp, Homo sapiens
ctcagagtggcgttt

SEQ ID NO: 190791 - DNA, 15 bp, Homo sapiens
actcagagtggcgtt

SEQ ID NO: 190792 - DNA, 15 bp, Homo sapiens
cactcagagtggcgt

SEQ ID NO: 190793 - DNA, 15 bp, Homo sapiens
ccactcagagtggcg

SEQ ID NO: 190794 - DNA, 15 bp, Homo sapiens
tccactcagagtggc

SEQ ID NO: 190795 - DNA, 15 bp, Homo sapiens
ctccactcagagtgg

SEQ ID NO: 190796 - DNA, 15 bp, Homo sapiens
actccactcagagtg

SEQ ID NO: 190797 - DNA, 15 bp, Homo sapiens
aactccactcagagt

SEQ ID NO: 190798 - DNA, 15 bp, Homo sapiens
aaactccactcagag

SEQ ID NO: 190799 - DNA, 15 bp, Homo sapiens
taaactccactcaga

SEQ ID NO: 190800 - DNA, 15 bp, Homo sapiens
ctaaactccactcag

SEQ ID NO: 190801 - DNA, 15 bp, Homo sapiens
cctaaactccactca

SEQ ID NO: 190802 - DNA, 15 bp, Homo sapiens
ccctaaactccactc

SEQ ID NO: 190803 - DNA, 15 bp, Homo sapiens
gccctaaactccact

SEQ ID NO: 190804 - DNA, 15 bp, Homo sapiens
tgccctaaactccac

SEQ ID NO: 190805 - DNA, 15 bp, Homo sapiens
atgccctaaactcca

SEQ ID NO: 190806 - DNA, 15 bp, Homo sapiens
catgccctaaactcc

SEQ ID NO: 190807 - DNA, 15 bp, Homo sapiens
tcatgccctaaactc

SEQ ID NO: 190808 - DNA, 15 bp, Homo sapiens
ctcatgccctaaact

SEQ ID NO: 190809 - DNA, 15 bp, Homo sapiens
cctcatgccctaaac

SEQ ID NO: 190810 - DNA, 15 bp, Homo sapiens
acctcatgccctaaa

SEQ ID NO: 190811 - DNA, 15 bp, Homo sapiens
cacctcatgccctaa

SEQ ID NO: 190812 - DNA, 15 bp, Homo sapiens
ccacctcatgcccta

SEQ ID NO: 190813 - DNA, 15 bp, Homo sapiens
accacctcatgccct

SEQ ID NO: 190814 - DNA, 15 bp, Homo sapiens
caccacctcatgccc

SEQ ID NO: 190815 - DNA, 15 bp, Homo sapiens
tcaccacctcatgcc

SEQ ID NO: 190816 - DNA, 15 bp, Homo sapiens
atcaccacctcatgc

SEQ ID NO: 190817 - DNA, 15 bp, Homo sapiens
catcaccacctcatg

SEQ ID NO: 190818 - DNA, 15 bp, Homo sapiens
ccatcaccacctcat

SEQ ID NO: 190819 - DNA, 15 bp, Homo sapiens
accatcaccacctca

SEQ ID NO: 190820 - DNA, 15 bp, Homo sapiens
caccatcaccacctc

SEQ ID NO: 190821 - DNA, 15 bp, Homo sapiens
ccaccatcaccacct

SEQ ID NO: 190822 - DNA, 15 bp, Homo sapiens
cccaccatcaccacc

SEQ ID NO: 190823 - DNA, 15 bp, Homo sapiens
ccccaccatcaccac

SEQ ID NO: 190824 - DNA, 15 bp, Homo sapiens
cccccaccatcacca

SEQ ID NO: 190825 - DNA, 15 bp, Homo sapiens
acccccaccatcacc

SEQ ID NO: 190826 - DNA, 15 bp, Homo sapiens
cacccccaccatcac

SEQ ID NO: 190827 - DNA, 15 bp, Homo sapiens
ccacccccaccatca

SEQ ID NO: 190828 - DNA, 15 bp, Homo sapiens
cccacccccaccatc

SEQ ID NO: 190829 - DNA, 15 bp, Homo sapiens
ccccacccccaccat

SEQ ID NO: 190830 - DNA, 15 bp, Homo sapiens
cccccacccccacca

SEQ ID NO: 190831 - DNA, 15 bp, Homo sapiens
tcccccacccccacc

SEQ ID NO: 190832 - DNA, 15 bp, Homo sapiens
ttcccccacccccac

SEQ ID NO: 190833 - DNA, 15 bp, Homo sapiens
tttcccccaccccca

SEQ ID NO: 190834 - DNA, 15 bp, Homo sapiens
atttcccccaccccc

SEQ ID NO: 190835 - DNA, 15 bp, Homo sapiens
catttcccccacccc

SEQ ID NO: 190836 - DNA, 15 bp, Homo sapiens
gcatttcccccaccc

SEQ ID NO: 190837 - DNA, 15 bp, Homo sapiens
agcatttcccccacc

SEQ ID NO: 190838 - DNA, 15 bp, Homo sapiens
cagcatttcccccac

SEQ ID NO: 190839 - DNA, 15 bp, Homo sapiens
ccagcatttccccca

SEQ ID NO: 190840 - DNA, 15 bp, Homo sapiens
cccagcatttccccc

SEQ ID NO: 190841 - DNA, 15 bp, Homo sapiens
acccagcatttcccc

SEQ ID NO: 190842 - DNA, 15 bp, Homo sapiens
tacccagcatttccc

SEQ ID NO: 190843 - DNA, 15 bp, Homo sapiens
ctacccagcatttcc

SEQ ID NO: 190844 - DNA, 15 bp, Homo sapiens
cctacccagcatttc

SEQ ID NO: 190845 - DNA, 15 bp, Homo sapiens
ccctacccagcattt

SEQ ID NO: 190846 - DNA, 15 bp, Homo sapiens
cccctacccagcatt

SEQ ID NO: 190847 - DNA, 15 bp, Homo sapiens
ccccctacccagcat

SEQ ID NO: 190848 - DNA, 15 bp, Homo sapiens
tccccctacccagca

SEQ ID NO: 190849 - DNA, 15 bp, Homo sapiens
ctccccctacccagc

SEQ ID NO: 190850 - DNA, 15 bp, Homo sapiens
cctccccctacccag

SEQ ID NO: 190851 - DNA, 15 bp, Homo sapiens
gcctccccctaccca

SEQ ID NO: 190852 - DNA, 15 bp, Homo sapiens
agcctccccctaccc

SEQ ID NO: 190853 - DNA, 15 bp, Homo sapiens
cagcctccccctacc

SEQ ID NO: 190854 - DNA, 15 bp, Homo sapiens
ccagcctccccctac

SEQ ID NO: 190855 - DNA, 15 bp, Homo sapiens
gccagcctcccccta

SEQ ID NO: 190856 - DNA, 15 bp, Homo sapiens
tgccagcctccccct

SEQ ID NO: 190857 - DNA, 15 bp, Homo sapiens
ctgccagcctccccc

SEQ ID NO: 190858 - DNA, 15 bp, Homo sapiens
cctgccagcctcccc

SEQ ID NO: 190859 - DNA, 15 bp, Homo sapiens
ccctgccagcctccc

SEQ ID NO: 190860 - DNA, 15 bp, Homo sapiens
cccctgccagcctcc

SEQ ID NO: 190861 - DNA, 15 bp, Homo sapiens
gcccctgccagcctc

SEQ ID NO: 190862 - DNA, 15 bp, Homo sapiens
ggcccctgccagcct

SEQ ID NO: 190863 - DNA, 15 bp, Homo sapiens
cggcccctgccagcc

SEQ ID NO: 190864 - DNA, 15 bp, Homo sapiens
acggcccctgccagc

SEQ ID NO: 190865 - DNA, 15 bp, Homo sapiens
aacggcccctgccag

SEQ ID NO: 190866 - DNA, 15 bp, Homo sapiens
aaacggcccctgcca

SEQ ID NO: 190867 - DNA, 15 bp, Homo sapiens
aaaacggcccctgcc

SEQ ID NO: 190868 - DNA, 15 bp, Homo sapiens
aaaaacggcccctgc

SEQ ID NO: 190869 - DNA, 15 bp, Homo sapiens
gaaaaacggcccctg

SEQ ID NO: 190870 - DNA, 15 bp, Homo sapiens
tgaaaaacggcccct

SEQ ID NO: 190871 - DNA, 15 bp, Homo sapiens
ctgaaaaacggcccc

SEQ ID NO: 190872 - DNA, 15 bp, Homo sapiens
cctgaaaaacggccc

SEQ ID NO: 190873 - DNA, 15 bp, Homo sapiens
ccctgaaaaacggcc

SEQ ID NO: 190874 - DNA, 15 bp, Homo sapiens
gccctgaaaaacggc

SEQ ID NO: 190875 - DNA, 15 bp, Homo sapiens
agccctgaaaaacgg

SEQ ID NO: 190876 - DNA, 15 bp, Homo sapiens
aagccctgaaaaacg

SEQ ID NO: 190877 - DNA, 15 bp, Homo sapiens
aaagccctgaaaaac

SEQ ID NO: 190878 - DNA, 15 bp, Homo sapiens
caaagccctgaaaaa

SEQ ID NO: 190879 - DNA, 15 bp, Homo sapiens
acaaagccctgaaaa

SEQ ID NO: 190880 - DNA, 15 bp, Homo sapiens
aacaaagccctgaaa

SEQ ID NO: 190881 - DNA, 15 bp, Homo sapiens
caacaaagccctgaa

SEQ ID NO: 190882 - DNA, 15 bp, Homo sapiens
ccaacaaagccctga

SEQ ID NO: 190883 - DNA, 15 bp, Homo sapiens
gccaacaaagccctg

SEQ ID NO: 190884 - DNA, 15 bp, Homo sapiens
ggccaacaaagccct

SEQ ID NO: 190885 - DNA, 15 bp, Homo sapiens
tggccaacaaagccc

SEQ ID NO: 190886 - DNA, 15 bp, Homo sapiens
atggccaacaaagcc

SEQ ID NO: 190887 - DNA, 15 bp, Homo sapiens
catggccaacaaagc

SEQ ID NO: 190888 - DNA, 15 bp, Homo sapiens
ccatggccaacaaag

SEQ ID NO: 190889 - DNA, 15 bp, Homo sapiens
accatggccaacaaa

SEQ ID NO: 190890 - DNA, 15 bp, Homo sapiens
caccatggccaacaa

SEQ ID NO: 190891 - DNA, 15 bp, Homo sapiens
tcaccatggccaaca

SEQ ID NO: 190892 - DNA, 15 bp, Homo sapiens
ctcaccatggccaac

SEQ ID NO: 190893 - DNA, 15 bp, Homo sapiens
cctcaccatggccaa

SEQ ID NO: 190894 - DNA, 15 bp, Homo sapiens
tcctcaccatggcca

SEQ ID NO: 190895 - DNA, 15 bp, Homo sapiens
ctcctcaccatggcc

SEQ ID NO: 190896 - DNA, 15 bp, Homo sapiens
gctcctcaccatggc

SEQ ID NO: 190897 - DNA, 15 bp, Homo sapiens
agctcctcaccatgg

SEQ ID NO: 190898 - DNA, 15 bp, Homo sapiens
aagctcctcaccatg

SEQ ID NO: 190899 - DNA, 15 bp, Homo sapiens
caagctcctcaccat

SEQ ID NO: 190900 - DNA, 15 bp, Homo sapiens
ccaagctcctcacca

SEQ ID NO: 190901 - DNA, 15 bp, Homo sapiens
tccaagctcctcacc

SEQ ID NO: 190902 - DNA, 15 bp, Homo sapiens
atccaagctcctcac

SEQ ID NO: 190903 - DNA, 15 bp, Homo sapiens
aatccaagctcctca

SEQ ID NO: 190904 - DNA, 15 bp, Homo sapiens
aaatccaagctcctc

SEQ ID NO: 190905 - DNA, 15 bp, Homo sapiens
gaaatccaagctcct

SEQ ID NO: 190906 - DNA, 15 bp, Homo sapiens
ggaaatccaagctcc

SEQ ID NO: 190907 - DNA, 15 bp, Homo sapiens
aggaaatccaagctc

SEQ ID NO: 190908 - DNA, 15 bp, Homo sapiens
aaggaaatccaagct

SEQ ID NO: 190909 - DNA, 15 bp, Homo sapiens
gaaggaaatccaagc

SEQ ID NO: 190910 - DNA, 15 bp, Homo sapiens
agaaggaaatccaag

SEQ ID NO: 190911 - DNA, 15 bp, Homo sapiens
gagaaggaaatccaa

SEQ ID NO: 190912 - DNA, 15 bp, Homo sapiens
tgagaaggaaatcca

SEQ ID NO: 190913 - DNA, 15 bp, Homo sapiens
ctgagaaggaaatcc

SEQ ID NO: 190914 - DNA, 15 bp, Homo sapiens
actgagaaggaaatc

SEQ ID NO: 190915 - DNA, 15 bp, Homo sapiens
tactgagaaggaaat

SEQ ID NO: 190916 - DNA, 15 bp, Homo sapiens
atactgagaaggaaa

SEQ ID NO: 190917 - DNA, 15 bp, Homo sapiens
aatactgagaaggaa

SEQ ID NO: 190918 - DNA, 15 bp, Homo sapiens
taatactgagaagga

SEQ ID NO: 190919 - DNA, 15 bp, Homo sapiens
ctaatactgagaagg

SEQ ID NO: 190920 - DNA, 15 bp, Homo sapiens
cctaatactgagaag

SEQ ID NO: 190921 - DNA, 15 bp, Homo sapiens
acctaatactgagaa

SEQ ID NO: 190922 - DNA, 15 bp, Homo sapiens
cacctaatactgaga

SEQ ID NO: 190923 - DNA, 15 bp, Homo sapiens
tcacctaatactgag

SEQ ID NO: 190924 - DNA, 15 bp, Homo sapiens
gtcacctaatactga

SEQ ID NO: 190925 - DNA, 15 bp, Homo sapiens
tgtcacctaatactg

SEQ ID NO: 190926 - DNA, 15 bp, Homo sapiens
atgtcacctaatact

SEQ ID NO: 190927 - DNA, 15 bp, Homo sapiens
tatgtcacctaatac

SEQ ID NO: 190928 - DNA, 15 bp, Homo sapiens
atatgtcacctaata

SEQ ID NO: 190929 - DNA, 15 bp, Homo sapiens
aatatgtcacctaat

SEQ ID NO: 190930 - DNA, 15 bp, Homo sapiens
caatatgtcacctaa

SEQ ID NO: 190931 - DNA, 15 bp, Homo sapiens
ccaatatgtcaccta

SEQ ID NO: 190932 - DNA, 15 bp, Homo sapiens
tccaatatgtcacct

SEQ ID NO: 190933 - DNA, 15 bp, Homo sapiens
ctccaatatgtcacc

SEQ ID NO: 190934 - DNA, 15 bp, Homo sapiens
cctccaatatgtcac

SEQ ID NO: 190935 - DNA, 15 bp, Homo sapiens
tcctccaatatgtca

SEQ ID NO: 190936 - DNA, 15 bp, Homo sapiens
ttcctccaatatgtc

SEQ ID NO: 190937 - DNA, 15 bp, Homo sapiens
attcctccaatatgt

SEQ ID NO: 190938 - DNA, 15 bp, Homo sapiens
aattcctccaatatg

SEQ ID NO: 190939 - DNA, 15 bp, Homo sapiens
aaattcctccaatat

SEQ ID NO: 190940 - DNA, 15 bp, Homo sapiens
taaattcctccaata

SEQ ID NO: 190941 - DNA, 15 bp, Homo sapiens
ctaaattcctccaat

SEQ ID NO: 190942 - DNA, 15 bp, Homo sapiens
cctaaattcctccaa

SEQ ID NO: 190943 - DNA, 15 bp, Homo sapiens
gcctaaattcctcca

SEQ ID NO: 190944 - DNA, 15 bp, Homo sapiens
tgcctaaattcctcc

SEQ ID NO: 190945 - DNA, 15 bp, Homo sapiens
ctgcctaaattcctc

SEQ ID NO: 190946 - DNA, 15 bp, Homo sapiens
gctgcctaaattcct

SEQ ID NO: 190947 - DNA, 15 bp, Homo sapiens
ggctgcctaaattcc

SEQ ID NO: 190948 - DNA, 15 bp, Homo sapiens
tggctgcctaaattc

SEQ ID NO: 190949 - DNA, 15 bp, Homo sapiens
gtggctgcctaaatt

SEQ ID NO: 190950 - DNA, 15 bp, Homo sapiens
cgtggctgcctaaat

SEQ ID NO: 190951 - DNA, 15 bp, Homo sapiens
gcgtggctgcctaaa

SEQ ID NO: 190952 - DNA, 15 bp, Homo sapiens
cgcgtggctgcctaa

SEQ ID NO: 190953 - DNA, 15 bp, Homo sapiens
acgcgtggctgccta

SEQ ID NO: 190954 - DNA, 15 bp, Homo sapiens
cacgcgtggctgcct

SEQ ID NO: 190955 - DNA, 15 bp, Homo sapiens
acacgcgtggctgcc

SEQ ID NO: 190956 - DNA, 15 bp, Homo sapiens
cacacgcgtggctgc

SEQ ID NO: 190957 - DNA, 15 bp, Homo sapiens
tcacacgcgtggctg

SEQ ID NO: 190958 - DNA, 15 bp, Homo sapiens
atcacacgcgtggct

SEQ ID NO: 190959 - DNA, 15 bp, Homo sapiens
gatcacacgcgtggc

SEQ ID NO: 190960 - DNA, 15 bp, Homo sapiens
agatcacacgcgtgg

SEQ ID NO: 190961 - DNA, 15 bp, Homo sapiens
cagatcacacgcgtg

SEQ ID NO: 190962 - DNA, 15 bp, Homo sapiens
ccagatcacacgcgt

SEQ ID NO: 190963 - DNA, 15 bp, Homo sapiens
accagatcacacgcg

SEQ ID NO: 190964 - DNA, 15 bp, Homo sapiens
aaccagatcacacgc

SEQ ID NO: 190965 - DNA, 15 bp, Homo sapiens
taaccagatcacacg

SEQ ID NO: 190966 - DNA, 15 bp, Homo sapiens
ttaaccagatcacac

SEQ ID NO: 190967 - DNA, 15 bp, Homo sapiens
gttaaccagatcaca

SEQ ID NO: 190968 - DNA, 15 bp, Homo sapiens
tgttaaccagatcac

SEQ ID NO: 190969 - DNA, 15 bp, Homo sapiens
gtgttaaccagatca

SEQ ID NO: 190970 - DNA, 15 bp, Homo sapiens
agtgttaaccagatc

SEQ ID NO: 190971 - DNA, 15 bp, Homo sapiens
cagtgttaaccagat

SEQ ID NO: 190972 - DNA, 15 bp, Homo sapiens
ccagtgttaaccaga

SEQ ID NO: 190973 - DNA, 15 bp, Homo sapiens
accagtgttaaccag

SEQ ID NO: 190974 - DNA, 15 bp, Homo sapiens
caccagtgttaacca

SEQ ID NO: 190975 - DNA, 15 bp, Homo sapiens
tcaccagtgttaacc

SEQ ID NO: 190976 - DNA, 15 bp, Homo sapiens
ttcaccagtgttaac

SEQ ID NO: 190977 - DNA, 15 bp, Homo sapiens
cttcaccagtgttaa

SEQ ID NO: 190978 - DNA, 15 bp, Homo sapiens
acttcaccagtgtta

SEQ ID NO: 190979 - DNA, 15 bp, Homo sapiens
aacttcaccagtgtt

SEQ ID NO: 190980 - DNA, 15 bp, Homo sapiens
gaacttcaccagtgt

SEQ ID NO: 190981 - DNA, 15 bp, Homo sapiens
tgaacttcaccagtg

SEQ ID NO: 190982 - DNA, 15 bp, Homo sapiens
gtgaacttcaccagt

SEQ ID NO: 190983 - DNA, 15 bp, Homo sapiens
agtgaacttcaccag

SEQ ID NO: 190984 - DNA, 15 bp, Homo sapiens
gagtgaacttcacca

SEQ ID NO: 190985 - DNA, 15 bp, Homo sapiens
agagtgaacttcacc

SEQ ID NO: 190986 - DNA, 15 bp, Homo sapiens
aagagtgaacttcac

SEQ ID NO: 190987 - DNA, 15 bp, Homo sapiens
caagagtgaacttca

SEQ ID NO: 190988 - DNA, 15 bp, Homo sapiens
acaagagtgaacttc

SEQ ID NO: 190989 - DNA, 15 bp, Homo sapiens
tacaagagtgaactt

SEQ ID NO: 190990 - DNA, 15 bp, Homo sapiens
ttacaagagtgaact

SEQ ID NO: 190991 - DNA, 15 bp, Homo sapiens
gttacaagagtgaac

SEQ ID NO: 190992 - DNA, 15 bp, Homo sapiens
tgttacaagagtgaa

SEQ ID NO: 190993 - DNA, 15 bp, Homo sapiens
ctgttacaagagtga

SEQ ID NO: 190994 - DNA, 15 bp, Homo sapiens
actgttacaagagtg

SEQ ID NO: 190995 - DNA, 15 bp, Homo sapiens
tactgttacaagagt

SEQ ID NO: 190996 - DNA, 15 bp, Homo sapiens
ttactgttacaagag

SEQ ID NO: 190997 - DNA, 15 bp, Homo sapiens
cttactgttacaaga

SEQ ID NO: 190998 - DNA, 15 bp, Homo sapiens
ccttactgttacaag

SEQ ID NO: 190999 - DNA, 15 bp, Homo sapiens
gccttactgttacaa

SEQ ID NO: 191000 - DNA, 15 bp, Homo sapiens
ggccttactgttaca

SEQ ID NO: 191001 - DNA, 15 bp, Homo sapiens
tggccttactgttac

SEQ ID NO: 191002 - DNA, 15 bp, Homo sapiens
ctggccttactgtta

SEQ ID NO: 191003 - DNA, 15 bp, Homo sapiens
cctggccttactgtt

SEQ ID NO: 191004 - DNA, 15 bp, Homo sapiens
ccctggccttactgt

SEQ ID NO: 191005 - DNA, 15 bp, Homo sapiens
tccctggccttactg

SEQ ID NO: 191006 - DNA, 15 bp, Homo sapiens
ctccctggccttact

SEQ ID NO: 191007 - DNA, 15 bp, Homo sapiens
actccctggccttac

SEQ ID NO: 191008 - DNA, 15 bp, Homo sapiens
tactccctggcctta

SEQ ID NO: 191009 - DNA, 15 bp, Homo sapiens
ttactccctggcctt

SEQ ID NO: 191010 - DNA, 15 bp, Homo sapiens
cttactccctggcct

SEQ ID NO: 191011 - DNA, 15 bp, Homo sapiens
ccttactccctggcc

SEQ ID NO: 191012 - DNA, 15 bp, Homo sapiens
cccttactccctggc

SEQ ID NO: 191013 - DNA, 15 bp, Homo sapiens
gcccttactccctgg

SEQ ID NO: 191014 - DNA, 15 bp, Homo sapiens
tgcccttactccctg

SEQ ID NO: 191015 - DNA, 15 bp, Homo sapiens
ctgcccttactccct

SEQ ID NO: 191016 - DNA, 15 bp, Homo sapiens
cctgcccttactccc

SEQ ID NO: 191017 - DNA, 15 bp, Homo sapiens
tcctgcccttactcc

SEQ ID NO: 191018 - DNA, 15 bp, Homo sapiens
ctcctgcccttactc

SEQ ID NO: 191019 - DNA, 15 bp, Homo sapiens
actcctgcccttact

SEQ ID NO: 191020 - DNA, 15 bp, Homo sapiens
cactcctgcccttac

SEQ ID NO: 191021 - DNA, 15 bp, Homo sapiens
ccactcctgccctta

SEQ ID NO: 191022 - DNA, 15 bp, Homo sapiens
tccactcctgccctt

SEQ ID NO: 191023 - DNA, 15 bp, Homo sapiens
ttccactcctgccct

SEQ ID NO: 191024 - DNA, 15 bp, Homo sapiens
cttccactcctgccc

SEQ ID NO: 191025 - DNA, 15 bp, Homo sapiens
gcttccactcctgcc

SEQ ID NO: 191026 - DNA, 15 bp, Homo sapiens
tgcttccactcctgc

SEQ ID NO: 191027 - DNA, 15 bp, Homo sapiens
ctgcttccactcctg

SEQ ID NO: 191028 - DNA, 15 bp, Homo sapiens
tctgcttccactcct

SEQ ID NO: 191029 - DNA, 15 bp, Homo sapiens
ttctgcttccactcc

SEQ ID NO: 191030 - DNA, 15 bp, Homo sapiens
cttctgcttccactc

SEQ ID NO: 191031 - DNA, 15 bp, Homo sapiens
ccttctgcttccact

SEQ ID NO: 191032 - DNA, 15 bp, Homo sapiens
cccttctgcttccac

SEQ ID NO: 191033 - DNA, 15 bp, Homo sapiens
gcccttctgcttcca

SEQ ID NO: 191034 - DNA, 15 bp, Homo sapiens
ggcccttctgcttcc

SEQ ID NO: 191035 - DNA, 15 bp, Homo sapiens
gggcccttctgcttc

SEQ ID NO: 191036 - DNA, 15 bp, Homo sapiens
ggggcccttctgctt

SEQ ID NO: 191037 - DNA, 15 bp, Homo sapiens
aggggcccttctgct

SEQ ID NO: 191038 - DNA, 15 bp, Homo sapiens
gaggggcccttctgc

SEQ ID NO: 191039 - DNA, 15 bp, Homo sapiens
tgaggggcccttctg

SEQ ID NO: 191040 - DNA, 15 bp, Homo sapiens
ctgaggggcccttct

SEQ ID NO: 191041 - DNA, 15 bp, Homo sapiens
cctgaggggcccttc

SEQ ID NO: 191042 - DNA, 15 bp, Homo sapiens
gcctgaggggccctt

SEQ ID NO: 191043 - DNA, 15 bp, Homo sapiens
ggcctgaggggccct

SEQ ID NO: 191044 - DNA, 15 bp, Homo sapiens
tggcctgaggggccc

SEQ ID NO: 191045 - DNA, 15 bp, Homo sapiens
gtggcctgaggggcc

SEQ ID NO: 191046 - DNA, 15 bp, Homo sapiens
agtggcctgaggggc

SEQ ID NO: 191047 - DNA, 15 bp, Homo sapiens
cagtggcctgagggg

SEQ ID NO: 191048 - DNA, 15 bp, Homo sapiens
gcagtggcctgaggg

SEQ ID NO: 191049 - DNA, 15 bp, Homo sapiens
tgcagtggcctgagg

SEQ ID NO: 191050 - DNA, 15 bp, Homo sapiens
gtgcagtggcctgag

SEQ ID NO: 191051 - DNA, 15 bp, Homo sapiens
agtgcagtggcctga

SEQ ID NO: 191052 - DNA, 15 bp, Homo sapiens
aagtgcagtggcctg

SEQ ID NO: 191053 - DNA, 15 bp, Homo sapiens
caagtgcagtggcct

SEQ ID NO: 191054 - DNA, 15 bp, Homo sapiens
acaagtgcagtggcc

SEQ ID NO: 191055 - DNA, 15 bp, Homo sapiens
gacaagtgcagtggc

SEQ ID NO: 191056 - DNA, 15 bp, Homo sapiens
ggacaagtgcagtgg

SEQ ID NO: 191057 - DNA, 15 bp, Homo sapiens
aggacaagtgcagtg

SEQ ID NO: 191058 - DNA, 15 bp, Homo sapiens
caggacaagtgcagt

SEQ ID NO: 191059 - DNA, 15 bp, Homo sapiens
ccaggacaagtgcag

SEQ ID NO: 191060 - DNA, 15 bp, Homo sapiens
accaggacaagtgca

SEQ ID NO: 191061 - DNA, 15 bp, Homo sapiens
caccaggacaagtgc

SEQ ID NO: 191062 - DNA, 15 bp, Homo sapiens
ccaccaggacaagtg

SEQ ID NO: 191063 - DNA, 15 bp, Homo sapiens
cccaccaggacaagt

SEQ ID NO: 191064 - DNA, 15 bp, Homo sapiens
tcccaccaggacaag

SEQ ID NO: 191065 - DNA, 15 bp, Homo sapiens
ctcccaccaggacaa

SEQ ID NO: 191066 - DNA, 15 bp, Homo sapiens
actcccaccaggaca

SEQ ID NO: 191067 - DNA, 15 bp, Homo sapiens
aactcccaccaggac

SEQ ID NO: 191068 - DNA, 15 bp, Homo sapiens
taactcccaccagga

SEQ ID NO: 191069 - DNA, 15 bp, Homo sapiens
ttaactcccaccagg

SEQ ID NO: 191070 - DNA, 15 bp, Homo sapiens
attaactcccaccag

SEQ ID NO: 191071 - DNA, 15 bp, Homo sapiens
tattaactcccacca

SEQ ID NO: 191072 - DNA, 15 bp, Homo sapiens
ctattaactcccacc

SEQ ID NO: 191073 - DNA, 15 bp, Homo sapiens
actattaactcccac

SEQ ID NO: 191074 - DNA, 15 bp, Homo sapiens
cactattaactccca

SEQ ID NO: 191075 - DNA, 15 bp, Homo sapiens
ccactattaactccc

SEQ ID NO: 191076 - DNA, 15 bp, Homo sapiens
tccactattaactcc

SEQ ID NO: 191077 - DNA, 15 bp, Homo sapiens
ttccactattaactc

SEQ ID NO: 191078 - DNA, 15 bp, Homo sapiens
gttccactattaact

SEQ ID NO: 191079 - DNA, 15 bp, Homo sapiens
cgttccactattaac

SEQ ID NO: 191080 - DNA, 15 bp, Homo sapiens
ccgttccactattaa

SEQ ID NO: 191081 - DNA, 15 bp, Homo sapiens
accgttccactatta

SEQ ID NO: 191082 - DNA, 15 bp, Homo sapiens
caccgttccactatt

SEQ ID NO: 191083 - DNA, 15 bp, Homo sapiens
ccaccgttccactat

SEQ ID NO: 191084 - DNA, 15 bp, Homo sapiens
gccaccgttccacta

SEQ ID NO: 191085 - DNA, 15 bp, Homo sapiens
agccaccgttccact

SEQ ID NO: 191086 - DNA, 15 bp, Homo sapiens
aagccaccgttccac

SEQ ID NO: 191087 - DNA, 15 bp, Homo sapiens
caagccaccgttcca

SEQ ID NO: 191088 - DNA, 15 bp, Homo sapiens
ccaagccaccgttcc

SEQ ID NO: 191089 - DNA, 15 bp, Homo sapiens
tccaagccaccgttc

SEQ ID NO: 191090 - DNA, 15 bp, Homo sapiens
gtccaagccaccgtt

SEQ ID NO: 191091 - DNA, 15 bp, Homo sapiens
agtccaagccaccgt

SEQ ID NO: 191092 - DNA, 15 bp, Homo sapiens
aagtccaagccaccg

SEQ ID NO: 191093 - DNA, 15 bp, Homo sapiens
taagtccaagccacc

SEQ ID NO: 191094 - DNA, 15 bp, Homo sapiens
ttaagtccaagccac

SEQ ID NO: 191095 - DNA, 15 bp, Homo sapiens
cttaagtccaagcca

SEQ ID NO: 191096 - DNA, 15 bp, Homo sapiens
ccttaagtccaagcc

SEQ ID NO: 191097 - DNA, 15 bp, Homo sapiens
gccttaagtccaagc

SEQ ID NO: 191098 - DNA, 15 bp, Homo sapiens
agccttaagtccaag

SEQ ID NO: 191099 - DNA, 15 bp, Homo sapiens
gagccttaagtccaa

SEQ ID NO: 191100 - DNA, 15 bp, Homo sapiens
tgagccttaagtcca

SEQ ID NO: 191101 - DNA, 15 bp, Homo sapiens
ttgagccttaagtcc

SEQ ID NO: 191102 - DNA, 15 bp, Homo sapiens
cttgagccttaagtc

SEQ ID NO: 191103 - DNA, 15 bp, Homo sapiens
acttgagccttaagt

SEQ ID NO: 191104 - DNA, 15 bp, Homo sapiens
gacttgagccttaag

SEQ ID NO: 191105 - DNA, 15 bp, Homo sapiens
cgacttgagccttaa

SEQ ID NO: 191106 - DNA, 15 bp, Homo sapiens
ccgacttgagcctta

SEQ ID NO: 191107 - DNA, 15 bp, Homo sapiens
tccgacttgagcctt

SEQ ID NO: 191108 - DNA, 15 bp, Homo sapiens
atccgacttgagcct

SEQ ID NO: 191109 - DNA, 15 bp, Homo sapiens
tatccgacttgagcc

SEQ ID NO: 191110 - DNA, 15 bp, Homo sapiens
atatccgacttgagc

SEQ ID NO: 191111 - DNA, 15 bp, Homo sapiens
tatatccgacttgag

SEQ ID NO: 191112 - DNA, 15 bp, Homo sapiens
gtatatccgacttga

SEQ ID NO: 191113 - DNA, 15 bp, Homo sapiens
ggtatatccgacttg

SEQ ID NO: 191114 - DNA, 15 bp, Homo sapiens
cggtatatccgactt

SEQ ID NO: 191115 - DNA, 15 bp, Homo sapiens
acggtatatccgact

SEQ ID NO: 191116 - DNA, 15 bp, Homo sapiens
gacggtatatccgac

SEQ ID NO: 191117 - DNA, 15 bp, Homo sapiens
agacggtatatccga

SEQ ID NO: 191118 - DNA, 15 bp, Homo sapiens
gagacggtatatccg

SEQ ID NO: 191119 - DNA, 15 bp, Homo sapiens
tgagacggtatatcc

SEQ ID NO: 191120 - DNA, 15 bp, Homo sapiens
ctgagacggtatatc

SEQ ID NO: 191121 - DNA, 15 bp, Homo sapiens
actgagacggtatat

SEQ ID NO: 191122 - DNA, 15 bp, Homo sapiens
gactgagacggtata

SEQ ID NO: 191123 - DNA, 15 bp, Homo sapiens
ggactgagacggtat

SEQ ID NO: 191124 - DNA, 15 bp, Homo sapiens
aggactgagacggta

SEQ ID NO: 191125 - DNA, 15 bp, Homo sapiens
aaggactgagacggt

SEQ ID NO: 191126 - DNA, 15 bp, Homo sapiens
taaggactgagacgg

SEQ ID NO: 191127 - DNA, 15 bp, Homo sapiens
gtaaggactgagacg

SEQ ID NO: 191128 - DNA, 15 bp, Homo sapiens
agtaaggactgagac

SEQ ID NO: 191129 - DNA, 15 bp, Homo sapiens
tagtaaggactgaga

SEQ ID NO: 191130 - DNA, 15 bp, Homo sapiens
atagtaaggactgag

SEQ ID NO: 191131 - DNA, 15 bp, Homo sapiens
gatagtaaggactga

SEQ ID NO: 191132 - DNA, 15 bp, Homo sapiens
agatagtaaggactg

SEQ ID NO: 191133 - DNA, 15 bp, Homo sapiens
cagatagtaaggact

SEQ ID NO: 191134 - DNA, 15 bp, Homo sapiens
ccagatagtaaggac

SEQ ID NO: 191135 - DNA, 15 bp, Homo sapiens
tccagatagtaagga

SEQ ID NO: 191136 - DNA, 15 bp, Homo sapiens
ttccagatagtaagg

SEQ ID NO: 191137 - DNA, 15 bp, Homo sapiens
cttccagatagtaag

SEQ ID NO: 191138 - DNA, 15 bp, Homo sapiens
acttccagatagtaa

SEQ ID NO: 191139 - DNA, 15 bp, Homo sapiens
gacttccagatagta

SEQ ID NO: 191140 - DNA, 15 bp, Homo sapiens
ggacttccagatagt

SEQ ID NO: 191141 - DNA, 15 bp, Homo sapiens
tggacttccagatag

SEQ ID NO: 191142 - DNA, 15 bp, Homo sapiens
ttggacttccagata

SEQ ID NO: 191143 - DNA, 15 bp, Homo sapiens
cttggacttccagat

SEQ ID NO: 191144 - DNA, 15 bp, Homo sapiens
tcttggacttccaga

SEQ ID NO: 191145 - DNA, 15 bp, Homo sapiens
atcttggacttccag

SEQ ID NO: 191146 - DNA, 15 bp, Homo sapiens
gatcttggacttcca

SEQ ID NO: 191147 - DNA, 15 bp, Homo sapiens
atgatcttggacttc

SEQ ID NO: 191148 - DNA, 15 bp, Homo sapiens
catgatcttggactt

SEQ ID NO: 191149 - DNA, 15 bp, Homo sapiens
ccatgatcttggact

SEQ ID NO: 191150 - DNA, 15 bp, Homo sapiens
accatgatcttggac

SEQ ID NO: 191151 - DNA, 15 bp, Homo sapiens
caccatgatcttgga

SEQ ID NO: 191152 - DNA, 15 bp, Homo sapiens
acaccatgatcttgg

SEQ ID NO: 191153 - DNA, 15 bp, Homo sapiens
aacaccatgatcttg

SEQ ID NO: 191154 - DNA, 15 bp, Homo sapiens
caacaccatgatctt

SEQ ID NO: 191155 - DNA, 15 bp, Homo sapiens
tcaacaccatgatct

SEQ ID NO: 191156 - DNA, 15 bp, Homo sapiens
gtcaacaccatgatc

SEQ ID NO: 191157 - DNA, 15 bp, Homo sapiens
tgtcaacaccatgat

SEQ ID NO: 191158 - DNA, 15 bp, Homo sapiens
ctgtcaacaccatga

SEQ ID NO: 191159 - DNA, 15 bp, Homo sapiens
cctgtcaacaccatg

SEQ ID NO: 191160 - DNA, 15 bp, Homo sapiens
ccctgtcaacaccat

SEQ ID NO: 191161 - DNA, 15 bp, Homo sapiens
accctgtcaacacca

SEQ ID NO: 191162 - DNA, 15 bp, Homo sapiens
aaccctgtcaacacc

SEQ ID NO: 191163 - DNA, 15 bp, Homo sapiens
caaccctgtcaacac

SEQ ID NO: 191164 - DNA, 15 bp, Homo sapiens
ccaaccctgtcaaca

SEQ ID NO: 191165 - DNA, 15 bp, Homo sapiens
accaaccctgtcaac

SEQ ID NO: 191166 - DNA, 15 bp, Homo sapiens
aaccaaccctgtcaa

SEQ ID NO: 191167 - DNA, 15 bp, Homo sapiens
aaaccaaccctgtca

SEQ ID NO: 191168 - DNA, 15 bp, Homo sapiens
gaaaccaaccctgtc

SEQ ID NO: 191169 - DNA, 15 bp, Homo sapiens
tgaaaccaaccctgt

SEQ ID NO: 191170 - DNA, 15 bp, Homo sapiens
atgaaaccaaccctg

SEQ ID NO: 191171 - DNA, 15 bp, Homo sapiens
gatgaaaccaaccct

SEQ ID NO: 191172 - DNA, 15 bp, Homo sapiens
tgatgaaaccaaccc

SEQ ID NO: 191173 - DNA, 15 bp, Homo sapiens
gtgatgaaaccaacc

SEQ ID NO: 191174 - DNA, 15 bp, Homo sapiens
tgtgatgaaaccaac

SEQ ID NO: 191175 - DNA, 15 bp, Homo sapiens
ctgtgatgaaaccaa

SEQ ID NO: 191176 - DNA, 15 bp, Homo sapiens
cctgtgatgaaacca

SEQ ID NO: 191177 - DNA, 15 bp, Homo sapiens
gcctgtgatgaaacc

SEQ ID NO: 191178 - DNA, 15 bp, Homo sapiens
ggcctgtgatgaaac

SEQ ID NO: 191179 - DNA, 15 bp, Homo sapiens
aggcctgtgatgaaa

SEQ ID NO: 191180 - DNA, 15 bp, Homo sapiens
gaggcctgtgatgaa

SEQ ID NO: 191181 - DNA, 15 bp, Homo sapiens
agaggcctgtgatga

SEQ ID NO: 191182 - DNA, 15 bp, Homo sapiens
gagaggcctgtgatg

SEQ ID NO: 191183 - DNA, 15 bp, Homo sapiens
agagaggcctgtgat

SEQ ID NO: 191184 - DNA, 15 bp, Homo sapiens
cagagaggcctgtga

SEQ ID NO: 191185 - DNA, 15 bp, Homo sapiens
gcagagaggcctgtg

SEQ ID NO: 191186 - DNA, 15 bp, Homo sapiens
ggcagagaggcctgt

SEQ ID NO: 191187 - DNA, 15 bp, Homo sapiens
aggcagagaggcctg

SEQ ID NO: 191188 - DNA, 15 bp, Homo sapiens
taggcagagaggcct

SEQ ID NO: 191189 - DNA, 15 bp, Homo sapiens
ctaggcagagaggcc

SEQ ID NO: 191190 - DNA, 15 bp, Homo sapiens
gctaggcagagaggc

SEQ ID NO: 191191 - DNA, 15 bp, Homo sapiens
agctaggcagagagg

SEQ ID NO: 191192 - DNA, 15 bp, Homo sapiens
aagctaggcagagag

SEQ ID NO: 191193 - DNA, 15 bp, Homo sapiens
caagctaggcagaga

SEQ ID NO: 191194 - DNA, 15 bp, Homo sapiens
acaagctaggcagag

SEQ ID NO: 191195 - DNA, 15 bp, Homo sapiens
tacaagctaggcaga

SEQ ID NO: 191196 - DNA, 15 bp, Homo sapiens
ctacaagctaggcag

SEQ ID NO: 191197 - DNA, 15 bp, Homo sapiens
cctacaagctaggca

SEQ ID NO: 191198 - DNA, 15 bp, Homo sapiens
acctacaagctaggc

SEQ ID NO: 191199 - DNA, 15 bp, Homo sapiens
cacctacaagctagg

SEQ ID NO: 191200 - DNA, 15 bp, Homo sapiens
ccacctacaagctag

SEQ ID NO: 191201 - DNA, 15 bp, Homo sapiens
gccacctacaagcta

SEQ ID NO: 191202 - DNA, 15 bp, Homo sapiens
agccacctacaagct

SEQ ID NO: 191203 - DNA, 15 bp, Homo sapiens
cagccacctacaagc

SEQ ID NO: 191204 - DNA, 15 bp, Homo sapiens
acagccacctacaag

SEQ ID NO: 191205 - DNA, 15 bp, Homo sapiens
gacagccacctacaa

SEQ ID NO: 191206 - DNA, 15 bp, Homo sapiens
agacagccacctaca

SEQ ID NO: 191207 - DNA, 15 bp, Homo sapiens
aagacagccacctac

SEQ ID NO: 191208 - DNA, 15 bp, Homo sapiens
gaagacagccaccta

SEQ ID NO: 191209 - DNA, 15 bp, Homo sapiens
agaagacagccacct

SEQ ID NO: 191210 - DNA, 15 bp, Homo sapiens
gagaagacagccacc

SEQ ID NO: 191211 - DNA, 15 bp, Homo sapiens
ggagaagacagccac

SEQ ID NO: 191212 - DNA, 15 bp, Homo sapiens
gggagaagacagcca

SEQ ID NO: 191213 - DNA, 15 bp, Homo sapiens
ggggagaagacagcc

SEQ ID NO: 191214 - DNA, 15 bp, Homo sapiens
tggggagaagacagc

SEQ ID NO: 191215 - DNA, 15 bp, Homo sapiens
atggggagaagacag

SEQ ID NO: 191216 - DNA, 15 bp, Homo sapiens
catggggagaagaca

SEQ ID NO: 191217 - DNA, 15 bp, Homo sapiens
acatggggagaagac

SEQ ID NO: 191218 - DNA, 15 bp, Homo sapiens
gacatggggagaaga

SEQ ID NO: 191219 - DNA, 15 bp, Homo sapiens
agacatggggagaag

SEQ ID NO: 191220 - DNA, 15 bp, Homo sapiens
aagacatggggagaa

SEQ ID NO: 191221 - DNA, 15 bp, Homo sapiens
gaagacatggggaga

SEQ ID NO: 191222 - DNA, 15 bp, Homo sapiens
tgaagacatggggag

SEQ ID NO: 191223 - DNA, 15 bp, Homo sapiens
gtgaagacatgggga

SEQ ID NO: 191224 - DNA, 15 bp, Homo sapiens
tgtgaagacatgggg

SEQ ID NO: 191225 - DNA, 15 bp, Homo sapiens
gtgtgaagacatggg

SEQ ID NO: 191226 - DNA, 15 bp, Homo sapiens
agtgtgaagacatgg

SEQ ID NO: 191227 - DNA, 15 bp, Homo sapiens
cagtgtgaagacatg

SEQ ID NO: 191228 - DNA, 15 bp, Homo sapiens
acagtgtgaagacat

SEQ ID NO: 191229 - DNA, 15 bp, Homo sapiens
gacagtgtgaagaca

SEQ ID NO: 191230 - DNA, 15 bp, Homo sapiens
agacagtgtgaagac

SEQ ID NO: 191231 - DNA, 15 bp, Homo sapiens
aagacagtgtgaaga

SEQ ID NO: 191232 - DNA, 15 bp, Homo sapiens
gaagacagtgtgaag

SEQ ID NO: 191233 - DNA, 15 bp, Homo sapiens
agaagacagtgtgaa

SEQ ID NO: 191234 - DNA, 15 bp, Homo sapiens
gagaagacagtgtga

SEQ ID NO: 191235 - DNA, 15 bp, Homo sapiens
tgagaagacagtgtg

SEQ ID NO: 191236 - DNA, 15 bp, Homo sapiens
ctgagaagacagtgt

SEQ ID NO: 191237 - DNA, 15 bp, Homo sapiens
actgagaagacagtg

SEQ ID NO: 191238 - DNA, 15 bp, Homo sapiens
cactgagaagacagt

SEQ ID NO: 191239 - DNA, 15 bp, Homo sapiens
acactgagaagacag

SEQ ID NO: 191240 - DNA, 15 bp, Homo sapiens
tacactgagaagaca

SEQ ID NO: 191241 - DNA, 15 bp, Homo sapiens
ttacactgagaagac

SEQ ID NO: 191242 - DNA, 15 bp, Homo sapiens
cttacactgagaaga

SEQ ID NO: 191243 - DNA, 15 bp, Homo sapiens
acttacactgagaag

SEQ ID NO: 191244 - DNA, 15 bp, Homo sapiens
gacttacactgagaa

SEQ ID NO: 191245 - DNA, 15 bp, Homo sapiens
agacttacactgaga

SEQ ID NO: 191246 - DNA, 15 bp, Homo sapiens
cagacttacactgag

SEQ ID NO: 191247 - DNA, 15 bp, Homo sapiens
acagacttacactga

SEQ ID NO: 191248 - DNA, 15 bp, Homo sapiens
cacagacttacactg

SEQ ID NO: 191249 - DNA, 15 bp, Homo sapiens
gcacagacttacact

SEQ ID NO: 191250 - DNA, 15 bp, Homo sapiens
ggcacagacttacac

SEQ ID NO: 191251 - DNA, 15 bp, Homo sapiens
gggcacagacttaca

SEQ ID NO: 191252 - DNA, 15 bp, Homo sapiens
agggcacagacttac

SEQ ID NO: 191253 - DNA, 15 bp, Homo sapiens
tagggcacagactta

SEQ ID NO: 191254 - DNA, 15 bp, Homo sapiens
ttagggcacagactt

SEQ ID NO: 191255 - DNA, 15 bp, Homo sapiens
attagggcacagact

SEQ ID NO: 191256 - DNA, 15 bp, Homo sapiens
gattagggcacagac

SEQ ID NO: 191257 - DNA, 15 bp, Homo sapiens
agattagggcacaga

SEQ ID NO: 191258 - DNA, 15 bp, Homo sapiens
gagattagggcacag

SEQ ID NO: 191259 - DNA, 15 bp, Homo sapiens
ggagattagggcaca

SEQ ID NO: 191260 - DNA, 15 bp, Homo sapiens
aggagattagggcac

SEQ ID NO: 191261 - DNA, 15 bp, Homo sapiens
aaggagattagggca

SEQ ID NO: 191262 - DNA, 15 bp, Homo sapiens
aaaggagattagggc

SEQ ID NO: 191263 - DNA, 15 bp, Homo sapiens
aaaaggagattaggg

SEQ ID NO: 191264 - DNA, 15 bp, Homo sapiens
gaaaaggagattagg

SEQ ID NO: 191265 - DNA, 15 bp, Homo sapiens
agaaaaggagattag

SEQ ID NO: 191266 - DNA, 15 bp, Homo sapiens
aagaaaaggagatta

SEQ ID NO: 191267 - DNA, 15 bp, Homo sapiens
taagaaaaggagatt

SEQ ID NO: 191268 - DNA, 15 bp, Homo sapiens
ataagaaaaggagat

SEQ ID NO: 191269 - DNA, 15 bp, Homo sapiens
tataagaaaaggaga

SEQ ID NO: 191270 - DNA, 15 bp, Homo sapiens
ttataagaaaaggag

SEQ ID NO: 191271 - DNA, 15 bp, Homo sapiens
cttataagaaaagga

SEQ ID NO: 191272 - DNA, 15 bp, Homo sapiens
ccttataagaaaagg

SEQ ID NO: 191273 - DNA, 15 bp, Homo sapiens
cccttataagaaaag

SEQ ID NO: 191274 - DNA, 15 bp, Homo sapiens
gcccttataagaaaa

SEQ ID NO: 191275 - DNA, 15 bp, Homo sapiens
agcccttataagaaa

SEQ ID NO: 191276 - DNA, 15 bp, Homo sapiens
gagcccttataagaa

SEQ ID NO: 191277 - DNA, 15 bp, Homo sapiens
ggagcccttataaga

SEQ ID NO: 191278 - DNA, 15 bp, Homo sapiens
tggagcccttataag

SEQ ID NO: 191279 - DNA, 15 bp, Homo sapiens
ctggagcccttataa

SEQ ID NO: 191280 - DNA, 15 bp, Homo sapiens
actggagcccttata

SEQ ID NO: 191281 - DNA, 15 bp, Homo sapiens
aactggagcccttat

SEQ ID NO: 191282 - DNA, 15 bp, Homo sapiens
taactggagccctta

SEQ ID NO: 191283 - DNA, 15 bp, Homo sapiens
ataactggagccctt

SEQ ID NO: 191284 - DNA, 15 bp, Homo sapiens
tataactggagccct

SEQ ID NO: 191285 - DNA, 15 bp, Homo sapiens
atataactggagccc

SEQ ID NO: 191286 - DNA, 15 bp, Homo sapiens
aatataactggagcc

SEQ ID NO: 191287 - DNA, 15 bp, Homo sapiens
caatataactggagc

SEQ ID NO: 191288 - DNA, 15 bp, Homo sapiens
ccaatataactggag

SEQ ID NO: 191289 - DNA, 15 bp, Homo sapiens
tccaatataactgga

SEQ ID NO: 191290 - DNA, 15 bp, Homo sapiens
atccaatataactgg

SEQ ID NO: 191291 - DNA, 15 bp, Homo sapiens
catccaatataactg

SEQ ID NO: 191292 - DNA, 15 bp, Homo sapiens
tcatccaatataact

SEQ ID NO: 191293 - DNA, 15 bp, Homo sapiens
ctcatccaatataac

SEQ ID NO: 191294 - DNA, 15 bp, Homo sapiens
cctcatccaatataa

SEQ ID NO: 191295 - DNA, 15 bp, Homo sapiens
ccctcatccaatata

SEQ ID NO: 191296 - DNA, 15 bp, Homo sapiens
gccctcatccaatat

SEQ ID NO: 191297 - DNA, 15 bp, Homo sapiens
ggccctcatccaata

SEQ ID NO: 191298 - DNA, 15 bp, Homo sapiens
gggccctcatccaat

SEQ ID NO: 191299 - DNA, 15 bp, Homo sapiens
tgggccctcatccaa

SEQ ID NO: 191300 - DNA, 15 bp, Homo sapiens
gtgggccctcatcca

SEQ ID NO: 191301 - DNA, 15 bp, Homo sapiens
ggtgggccctcatcc

SEQ ID NO: 191302 - DNA, 15 bp, Homo sapiens
gggtgggccctcatc

SEQ ID NO: 191303 - DNA, 15 bp, Homo sapiens
agggtgggccctcat

SEQ ID NO: 191304 - DNA, 15 bp, Homo sapiens
tagggtgggccctca

SEQ ID NO: 191305 - DNA, 15 bp, Homo sapiens
ttagggtgggccctc

SEQ ID NO: 191306 - DNA, 15 bp, Homo sapiens
attagggtgggccct

SEQ ID NO: 191307 - DNA, 15 bp, Homo sapiens
cattagggtgggccc

SEQ ID NO: 191308 - DNA, 15 bp, Homo sapiens
tcattagggtgggcc

SEQ ID NO: 191309 - DNA, 15 bp, Homo sapiens
gtcattagggtgggc

SEQ ID NO: 191310 - DNA, 15 bp, Homo sapiens
ggtcattagggtggg

SEQ ID NO: 191311 - DNA, 15 bp, Homo sapiens
aggtcattagggtgg

SEQ ID NO: 191312 - DNA, 15 bp, Homo sapiens
gaggtcattagggtg

SEQ ID NO: 191313 - DNA, 15 bp, Homo sapiens
tgaggtcattagggt

SEQ ID NO: 191314 - DNA, 15 bp, Homo sapiens
atgaggtcattaggg

SEQ ID NO: 191315 - DNA, 15 bp, Homo sapiens
aatgaggtcattagg

SEQ ID NO: 191316 - DNA, 15 bp, Homo sapiens
aaatgaggtcattag

SEQ ID NO: 191317 - DNA, 15 bp, Homo sapiens
aaaatgaggtcatta

SEQ ID NO: 191318 - DNA, 15 bp, Homo sapiens
taaaatgaggtcatt

SEQ ID NO: 191319 - DNA, 15 bp, Homo sapiens
ttaaaatgaggtcat

SEQ ID NO: 191320 - DNA, 15 bp, Homo sapiens
gttaaaatgaggtca

SEQ ID NO: 191321 - DNA, 15 bp, Homo sapiens
agttaaaatgaggtc

SEQ ID NO: 191322 - DNA, 15 bp, Homo sapiens
aagttaaaatgaggt

SEQ ID NO: 191323 - DNA, 15 bp, Homo sapiens
taagttaaaatgagg

SEQ ID NO: 191324 - DNA, 15 bp, Homo sapiens
ttaagttaaaatgag

SEQ ID NO: 191325 - DNA, 15 bp, Homo sapiens
attaagttaaaatga

SEQ ID NO: 191326 - DNA, 15 bp, Homo sapiens
aattaagttaaaatg

SEQ ID NO: 191327 - DNA, 15 bp, Homo sapiens
taattaagttaaaat

SEQ ID NO: 191328 - DNA, 15 bp, Homo sapiens
gtaattaagttaaaa

SEQ ID NO: 191329 - DNA, 15 bp, Homo sapiens
agtaattaagttaaa

SEQ ID NO: 191330 - DNA, 15 bp, Homo sapiens
aagtaattaagttaa

SEQ ID NO: 191331 - DNA, 15 bp, Homo sapiens
gaagtaattaagtta

SEQ ID NO: 191332 - DNA, 15 bp, Homo sapiens
agaagtaattaagtt

SEQ ID NO: 191333 - DNA, 15 bp, Homo sapiens
aagaagtaattaagt

SEQ ID NO: 191334 - DNA, 15 bp, Homo sapiens
aaagaagtaattaag

SEQ ID NO: 191335 - DNA, 15 bp, Homo sapiens
taaagaagtaattaa

SEQ ID NO: 191336 - DNA, 15 bp, Homo sapiens
ttaaagaagtaatta

SEQ ID NO: 191337 - DNA, 15 bp, Homo sapiens
tttaaagaagtaatt

SEQ ID NO: 191338 - DNA, 15 bp, Homo sapiens
ctttaaagaagtaat

SEQ ID NO: 191339 - DNA, 15 bp, Homo sapiens
tctttaaagaagtaa

SEQ ID NO: 191340 - DNA, 15 bp, Homo sapiens
gtctttaaagaagta

SEQ ID NO: 191341 - DNA, 15 bp, Homo sapiens
ggtctttaaagaagt

SEQ ID NO: 191342 - DNA, 15 bp, Homo sapiens
gggtctttaaagaag

SEQ ID NO: 191343 - DNA, 15 bp, Homo sapiens
agggtctttaaagaa

SEQ ID NO: 191344 - DNA, 15 bp, Homo sapiens
cagggtctttaaaga

SEQ ID NO: 191345 - DNA, 15 bp, Homo sapiens
acagggtctttaaag

SEQ ID NO: 191346 - DNA, 15 bp, Homo sapiens
gacagggtctttaaa

SEQ ID NO: 191347 - DNA, 15 bp, Homo sapiens
agacagggtctttaa

SEQ ID NO: 191348 - DNA, 15 bp, Homo sapiens
gagacagggtcttta

SEQ ID NO: 191349 - DNA, 15 bp, Homo sapiens
ggagacagggtcttt

SEQ ID NO: 191350 - DNA, 15 bp, Homo sapiens
tggagacagggtctt

SEQ ID NO: 191351 - DNA, 15 bp, Homo sapiens
atttggagacagggt

SEQ ID NO: 191352 - DNA, 15 bp, Homo sapiens
tatttggagacaggg

SEQ ID NO: 191353 - DNA, 15 bp, Homo sapiens
gtatttggagacagg

SEQ ID NO: 191354 - DNA, 15 bp, Homo sapiens
tgtatttggagacag

SEQ ID NO: 191355 - DNA, 15 bp, Homo sapiens
ctgtatttggagaca

SEQ ID NO: 191356 - DNA, 15 bp, Homo sapiens
actgtatttggagac

SEQ ID NO: 191357 - DNA, 15 bp, Homo sapiens
tactgtatttggaga

SEQ ID NO: 191358 - DNA, 15 bp, Homo sapiens
ctactgtatttggag

SEQ ID NO: 191359 - DNA, 15 bp, Homo sapiens
tctactgtatttgga

SEQ ID NO: 191360 - DNA, 15 bp, Homo sapiens
atctactgtatttgg

SEQ ID NO: 191361 - DNA, 15 bp, Homo sapiens
catctactgtatttg

SEQ ID NO: 191362 - DNA, 15 bp, Homo sapiens
gcatctactgtattt

SEQ ID NO: 191363 - DNA, 15 bp, Homo sapiens
ggcatctactgtatt

SEQ ID NO: 191364 - DNA, 15 bp, Homo sapiens
gggcatctactgtat

SEQ ID NO: 191365 - DNA, 15 bp, Homo sapiens
agggcatctactgta

SEQ ID NO: 191366 - DNA, 15 bp, Homo sapiens
aagggcatctactgt

SEQ ID NO: 191367 - DNA, 15 bp, Homo sapiens
taagggcatctactg

SEQ ID NO: 191368 - DNA, 15 bp, Homo sapiens
ataagggcatctact

SEQ ID NO: 191369 - DNA, 15 bp, Homo sapiens
gataagggcatctac

SEQ ID NO: 191370 - DNA, 15 bp, Homo sapiens
agataagggcatcta

SEQ ID NO: 191371 - DNA, 15 bp, Homo sapiens
aagataagggcatct

SEQ ID NO: 191372 - DNA, 15 bp, Homo sapiens
aaagataagggcatc

SEQ ID NO: 191373 - DNA, 15 bp, Homo sapiens
taaagataagggcat

SEQ ID NO: 191374 - DNA, 15 bp, Homo sapiens
ctaaagataagggca

SEQ ID NO: 191375 - DNA, 15 bp, Homo sapiens
cctaaagataagggc

SEQ ID NO: 191376 - DNA, 15 bp, Homo sapiens
ccctaaagataaggg

SEQ ID NO: 191377 - DNA, 15 bp, Homo sapiens
cccctaaagataagg

SEQ ID NO: 191378 - DNA, 15 bp, Homo sapiens
acccctaaagataag

SEQ ID NO: 191379 - DNA, 15 bp, Homo sapiens
aacccctaaagataa

SEQ ID NO: 191380 - DNA, 15 bp, Homo sapiens
taacccctaaagata

SEQ ID NO: 191381 - DNA, 15 bp, Homo sapiens
gtaacccctaaagat

SEQ ID NO: 191382 - DNA, 15 bp, Homo sapiens
tgtaacccctaaaga

SEQ ID NO: 191383 - DNA, 15 bp, Homo sapiens
atgtaacccctaaag

SEQ ID NO: 191384 - DNA, 15 bp, Homo sapiens
aatgtaacccctaaa

SEQ ID NO: 191385 - DNA, 15 bp, Homo sapiens
gaatgtaacccctaa

SEQ ID NO: 191386 - DNA, 15 bp, Homo sapiens
ggaatgtaaccccta

SEQ ID NO: 191387 - DNA, 15 bp, Homo sapiens
tggaatgtaacccct

SEQ ID NO: 191388 - DNA, 15 bp, Homo sapiens
ttggaatgtaacccc

SEQ ID NO: 191389 - DNA, 15 bp, Homo sapiens
cttggaatgtaaccc

SEQ ID NO: 191390 - DNA, 15 bp, Homo sapiens
tcttggaatgtaacc

SEQ ID NO: 191391 - DNA, 15 bp, Homo sapiens
gtcttggaatgtaac

SEQ ID NO: 191392 - DNA, 15 bp, Homo sapiens
ggtcttggaatgtaa

SEQ ID NO: 191393 - DNA, 15 bp, Homo sapiens
gggtcttggaatgta

SEQ ID NO: 191394 - DNA, 15 bp, Homo sapiens
ggggtcttggaatgt

SEQ ID NO: 191395 - DNA, 15 bp, Homo sapiens
tggggtcttggaatg

SEQ ID NO: 191396 - DNA, 15 bp, Homo sapiens
ctggggtcttggaat

SEQ ID NO: 191397 - DNA, 15 bp, Homo sapiens
actggggtcttggaa

SEQ ID NO: 191398 - DNA, 15 bp, Homo sapiens
cactggggtcttgga

SEQ ID NO: 191399 - DNA, 15 bp, Homo sapiens
ccactggggtcttgg

SEQ ID NO: 191400 - DNA, 15 bp, Homo sapiens
tccactggggtcttg

SEQ ID NO: 191401 - DNA, 15 bp, Homo sapiens
atccactggggtctt

SEQ ID NO: 191402 - DNA, 15 bp, Homo sapiens
catccactggggtct

SEQ ID NO: 191403 - DNA, 15 bp, Homo sapiens
gcatccactggggtc

SEQ ID NO: 191404 - DNA, 15 bp, Homo sapiens
ggcatccactggggt

SEQ ID NO: 191405 - DNA, 15 bp, Homo sapiens
aggcatccactgggg

SEQ ID NO: 191406 - DNA, 15 bp, Homo sapiens
caggcatccactggg

SEQ ID NO: 191407 - DNA, 15 bp, Homo sapiens
ccaggcatccactgg

SEQ ID NO: 191408 - DNA, 15 bp, Homo sapiens
tccaggcatccactg

SEQ ID NO: 191409 - DNA, 15 bp, Homo sapiens
ttccaggcatccact

SEQ ID NO: 191410 - DNA, 15 bp, Homo sapiens
gttccaggcatccac

SEQ ID NO: 191411 - DNA, 15 bp, Homo sapiens
agttccaggcatcca

SEQ ID NO: 191412 - DNA, 15 bp, Homo sapiens
cagttccaggcatcc

SEQ ID NO: 191413 - DNA, 15 bp, Homo sapiens
gcagttccaggcatc

SEQ ID NO: 191414 - DNA, 15 bp, Homo sapiens
tgcagttccaggcat

SEQ ID NO: 191415 - DNA, 15 bp, Homo sapiens
ctgcagttccaggca

SEQ ID NO: 191416 - DNA, 15 bp, Homo sapiens
tctgcagttccaggc

SEQ ID NO: 191417 - DNA, 15 bp, Homo sapiens
atctgcagttccagg

SEQ ID NO: 191418 - DNA, 15 bp, Homo sapiens
catctgcagttccag

SEQ ID NO: 191419 - DNA, 15 bp, Homo sapiens
ccatctgcagttcca

SEQ ID NO: 191420 - DNA, 15 bp, Homo sapiens
tccatctgcagttcc

SEQ ID NO: 191421 - DNA, 15 bp, Homo sapiens
atccatctgcagttc

SEQ ID NO: 191422 - DNA, 15 bp, Homo sapiens
tatccatctgcagtt

SEQ ID NO: 191423 - DNA, 15 bp, Homo sapiens
ctatccatctgcagt

SEQ ID NO: 191424 - DNA, 15 bp, Homo sapiens
actatccatctgcag

SEQ ID NO: 191425 - DNA, 15 bp, Homo sapiens
tactatccatctgca

SEQ ID NO: 191426 - DNA, 15 bp, Homo sapiens
gtactatccatctgc

SEQ ID NO: 191427 - DNA, 15 bp, Homo sapiens
ggtactatccatctg

SEQ ID NO: 191428 - DNA, 15 bp, Homo sapiens
cggtactatccatct

SEQ ID NO: 191429 - DNA, 15 bp, Homo sapiens
tcggtactatccatc

SEQ ID NO: 191430 - DNA, 15 bp, Homo sapiens
atcggtactatccat

SEQ ID NO: 191431 - DNA, 15 bp, Homo sapiens
tatcggtactatcca

SEQ ID NO: 191432 - DNA, 15 bp, Homo sapiens
gtatcggtactatcc

SEQ ID NO: 191433 - DNA, 15 bp, Homo sapiens
ggtatcggtactatc

SEQ ID NO: 191434 - DNA, 15 bp, Homo sapiens
aggtatcggtactat

SEQ ID NO: 191435 - DNA, 15 bp, Homo sapiens
caggtatcggtacta

SEQ ID NO: 191436 - DNA, 15 bp, Homo sapiens
acaggtatcggtact

SEQ ID NO: 191437 - DNA, 15 bp, Homo sapiens
tacaggtatcggtac

SEQ ID NO: 191438 - DNA, 15 bp, Homo sapiens
atacaggtatcggta

SEQ ID NO: 191439 - DNA, 15 bp, Homo sapiens
tatacaggtatcggt

SEQ ID NO: 191440 - DNA, 15 bp, Homo sapiens
atatacaggtatcgg

SEQ ID NO: 191441 - DNA, 15 bp, Homo sapiens
tatatacaggtatcg

SEQ ID NO: 191442 - DNA, 15 bp, Homo sapiens
gtatatacaggtatc

SEQ ID NO: 191443 - DNA, 15 bp, Homo sapiens
agtatatacaggtat

SEQ ID NO: 191444 - DNA, 15 bp, Homo sapiens
cagtatatacaggta

SEQ ID NO: 191445 - DNA, 15 bp, Homo sapiens
acagtatatacaggt

SEQ ID NO: 191446 - DNA, 15 bp, Homo sapiens
cacagtatatacagg

SEQ ID NO: 191447 - DNA, 15 bp, Homo sapiens
acacagtatatacag

SEQ ID NO: 191448 - DNA, 15 bp, Homo sapiens
aacacagtatataca

SEQ ID NO: 191449 - DNA, 15 bp, Homo sapiens
aaacacagtatatac

SEQ ID NO: 191450 - DNA, 15 bp, Homo sapiens
aaaacacagtatata

SEQ ID NO: 191451 - DNA, 15 bp, Homo sapiens
gaaaacacagtatat

SEQ ID NO: 191452 - DNA, 15 bp, Homo sapiens
agaaaacacagtata

SEQ ID NO: 191453 - DNA, 15 bp, Homo sapiens
gagaaaacacagtat

SEQ ID NO: 191454 - DNA, 15 bp, Homo sapiens
ggagaaaacacagta

SEQ ID NO: 191455 - DNA, 15 bp, Homo sapiens
aggagaaaacacagt

SEQ ID NO: 191456 - DNA, 15 bp, Homo sapiens
taggagaaaacacag

SEQ ID NO: 191457 - DNA, 15 bp, Homo sapiens
gtaggagaaaacaca

SEQ ID NO: 191458 - DNA, 15 bp, Homo sapiens
tgtaggagaaaacac

SEQ ID NO: 191459 - DNA, 15 bp, Homo sapiens
gtgtaggagaaaaca

SEQ ID NO: 191460 - DNA, 15 bp, Homo sapiens
tgtgtaggagaaaac

SEQ ID NO: 191461 - DNA, 15 bp, Homo sapiens
ctgtgtaggagaaaa

SEQ ID NO: 191462 - DNA, 15 bp, Homo sapiens
cctgtgtaggagaaa

SEQ ID NO: 191463 - DNA, 15 bp, Homo sapiens
gcctgtgtaggagaa

SEQ ID NO: 191464 - DNA, 15 bp, Homo sapiens
tgcctgtgtaggaga

SEQ ID NO: 191465 - DNA, 15 bp, Homo sapiens
atgcctgtgtaggag

SEQ ID NO: 191466 - DNA, 15 bp, Homo sapiens
tatgcctgtgtagga

SEQ ID NO: 191467 - DNA, 15 bp, Homo sapiens
atatgcctgtgtagg

SEQ ID NO: 191468 - DNA, 15 bp, Homo sapiens
gatatgcctgtgtag

SEQ ID NO: 191469 - DNA, 15 bp, Homo sapiens
agatatgcctgtgta

SEQ ID NO: 191470 - DNA, 15 bp, Homo sapiens
cagatatgcctgtgt

SEQ ID NO: 191471 - DNA, 15 bp, Homo sapiens
gcagatatgcctgtg

SEQ ID NO: 191472 - DNA, 15 bp, Homo sapiens
tgcagatatgcctgt

SEQ ID NO: 191473 - DNA, 15 bp, Homo sapiens
ttgcagatatgcctg

SEQ ID NO: 191474 - DNA, 15 bp, Homo sapiens
attgcagatatgcct

SEQ ID NO: 191475 - DNA, 15 bp, Homo sapiens
tattgcagatatgcc

SEQ ID NO: 191476 - DNA, 15 bp, Homo sapiens
ttattgcagatatgc

SEQ ID NO: 191477 - DNA, 15 bp, Homo sapiens
tttattgcagatatg

SEQ ID NO: 191478 - DNA, 15 bp, Homo sapiens
ctttattgcagatat

SEQ ID NO: 191479 - DNA, 15 bp, Homo sapiens
actttattgcagata

SEQ ID NO: 191480 - DNA, 15 bp, Homo sapiens
aactttattgcagat

SEQ ID NO: 191481 - DNA, 15 bp, Homo sapiens
aaactttattgcaga

SEQ ID NO: 191482 - DNA, 15 bp, Homo sapiens
taaactttattgcag

SEQ ID NO: 191483 - DNA, 15 bp, Homo sapiens
ttaaactttattgca

SEQ ID NO: 191484 - DNA, 15 bp, Homo sapiens
attaaactttattgc

SEQ ID NO: 191485 - DNA, 15 bp, Homo sapiens
aattaaactttattg

SEQ ID NO: 191486 - DNA, 15 bp, Homo sapiens
aaattaaactttatt

SEQ ID NO: 191487 - DNA, 15 bp, Homo sapiens
taaattaaactttat

SEQ ID NO: 191488 - DNA, 15 bp, Homo sapiens
ataaattaaacttta

SEQ ID NO: 191489 - DNA, 15 bp, Homo sapiens
tataaattaaacttt

SEQ ID NO: 191490 - DNA, 15 bp, Homo sapiens
ttataaattaaactt

SEQ ID NO: 191491 - DNA, 15 bp, Homo sapiens
tttataaattaaact

SEQ ID NO: 191492 - DNA, 15 bp, Homo sapiens
atttataaattaaac

SEQ ID NO: 191493 - DNA, 15 bp, Homo sapiens
aatttataaattaaa

SEQ ID NO: 191494 - DNA, 15 bp, Homo sapiens
taatttataaattaa

SEQ ID NO: 191495 - DNA, 15 bp, Homo sapiens
ctaatttataaatta

SEQ ID NO: 191496 - DNA, 15 bp, Homo sapiens
cctaatttataaatt

SEQ ID NO: 191497 - DNA, 15 bp, Homo sapiens
acctaatttataaat

SEQ ID NO: 191498 - DNA, 15 bp, Homo sapiens
tacctaatttataaa

SEQ ID NO: 191499 - DNA, 15 bp, Homo sapiens
gtacctaatttataa

SEQ ID NO: 191500 - DNA, 15 bp, Homo sapiens
tgtacctaatttata

SEQ ID NO: 191501 - DNA, 15 bp, Homo sapiens
ctgtacctaatttat

SEQ ID NO: 191502 - DNA, 15 bp, Homo sapiens
actgtacctaattta

SEQ ID NO: 191503 - DNA, 15 bp, Homo sapiens
cactgtacctaattt

SEQ ID NO: 191504 - DNA, 15 bp, Homo sapiens
tcactgtacctaatt

SEQ ID NO: 191505 - DNA, 15 bp, Homo sapiens
gtcactgtacctaat

SEQ ID NO: 191506 - DNA, 15 bp, Homo sapiens
tgtcactgtacctaa

SEQ ID NO: 191507 - DNA, 15 bp, Homo sapiens
ctgtcactgtaccta

SEQ ID NO: 191508 - DNA, 15 bp, Homo sapiens
tctgtcactgtacct

SEQ ID NO: 191509 - DNA, 15 bp, Homo sapiens
atctgtcactgtacc

SEQ ID NO: 191510 - DNA, 15 bp, Homo sapiens
catctgtcactgtac

SEQ ID NO: 191511 - DNA, 15 bp, Homo sapiens
tcatctgtcactgta

SEQ ID NO: 191512 - DNA, 15 bp, Homo sapiens
ctcatctgtcactgt

SEQ ID NO: 191513 - DNA, 15 bp, Homo sapiens
gctcatctgtcactg

SEQ ID NO: 191514 - DNA, 15 bp, Homo sapiens
tgctcatctgtcact

SEQ ID NO: 191515 - DNA, 15 bp, Homo sapiens
ttgctcatctgtcac

SEQ ID NO: 191516 - DNA, 15 bp, Homo sapiens
gttgctcatctgtca

SEQ ID NO: 191517 - DNA, 15 bp, Homo sapiens
tgttgctcatctgtc

SEQ ID NO: 191518 - DNA, 15 bp, Homo sapiens
ctgttgctcatctgt

SEQ ID NO: 191519 - DNA, 15 bp, Homo sapiens
actgttgctcatctg

SEQ ID NO: 191520 - DNA, 15 bp, Homo sapiens
tactgttgctcatct

SEQ ID NO: 191521 - DNA, 15 bp, Homo sapiens
ttactgttgctcatc

SEQ ID NO: 191522 - DNA, 15 bp, Homo sapiens
attactgttgctcat

SEQ ID NO: 191523 - DNA, 15 bp, Homo sapiens
cattactgttgctca

SEQ ID NO: 191524 - DNA, 15 bp, Homo sapiens
tcattactgttgctc

SEQ ID NO: 191525 - DNA, 15 bp, Homo sapiens
ttcattactgttgct

SEQ ID NO: 191526 - DNA, 15 bp, Homo sapiens
attcattactgttgc

SEQ ID NO: 191527 - DNA, 15 bp, Homo sapiens
tattcattactgttg

SEQ ID NO: 191528 - DNA, 15 bp, Homo sapiens
ttattcattactgtt

SEQ ID NO: 191529 - DNA, 15 bp, Homo sapiens
attattcattactgt

SEQ ID NO: 191530 - DNA, 15 bp, Homo sapiens
tattattcattactg

SEQ ID NO: 191531 - DNA, 15 bp, Homo sapiens
ttattattcattact

SEQ ID NO: 191532 - DNA, 15 bp, Homo sapiens
tttattattcattac

SEQ ID NO: 191533 - DNA, 15 bp, Homo sapiens
ttttattattcatta

SEQ ID NO: 191534 - DNA, 15 bp, Homo sapiens
attttattattcatt

SEQ ID NO: 191535 - DNA, 15 bp, Homo sapiens
aattttattattcat

SEQ ID NO: 191536 - DNA, 15 bp, Homo sapiens
caattttattattca

SEQ ID NO: 191537 - DNA, 15 bp, Homo sapiens
acaattttattattc

SEQ ID NO: 191538 - DNA, 15 bp, Homo sapiens
cacaattttattatt

SEQ ID NO: 191539 - DNA, 15 bp, Homo sapiens
gcacaattttattat

SEQ ID NO: 191540 - DNA, 15 bp, Homo sapiens
tgcacaattttatta

SEQ ID NO: 191541 - DNA, 15 bp, Homo sapiens
ttgcacaattttatt

SEQ ID NO: 191542 - DNA, 15 bp, Homo sapiens
attgcacaattttat

SEQ ID NO: 191543 - DNA, 15 bp, Homo sapiens
aattgcacaatttta

SEQ ID NO: 191544 - DNA, 15 bp, Homo sapiens
taattgcacaatttt

SEQ ID NO: 191545 - DNA, 15 bp, Homo sapiens
ataattgcacaattt

SEQ ID NO: 191546 - DNA, 15 bp, Homo sapiens
tataattgcacaatt

SEQ ID NO: 191547 - DNA, 15 bp, Homo sapiens
ttataattgcacaat

SEQ ID NO: 191548 - DNA, 15 bp, Homo sapiens
gttataattgcacaa

SEQ ID NO: 191549 - DNA, 15 bp, Homo sapiens
tgttataattgcaca

SEQ ID NO: 191550 - DNA, 15 bp, Homo sapiens
ttgttataattgcac

SEQ ID NO: 191551 - DNA, 15 bp, Homo sapiens
attgttataattgca

SEQ ID NO: 191552 - DNA, 15 bp, Homo sapiens
tattgttataattgc

SEQ ID NO: 191553 - DNA, 15 bp, Homo sapiens
atattgttataattg

SEQ ID NO: 191554 - DNA, 15 bp, Homo sapiens
tatattgttataatt

SEQ ID NO: 191555 - DNA, 15 bp, Homo sapiens
gtatattgttataat

SEQ ID NO: 191556 - DNA, 15 bp, Homo sapiens
agtatattgttataa

SEQ ID NO: 191557 - DNA, 15 bp, Homo sapiens
cagtatattgttata

SEQ ID NO: 191558 - DNA, 15 bp, Homo sapiens
acagtatattgttat

SEQ ID NO: 191559 - DNA, 15 bp, Homo sapiens
tacagtatattgtta

SEQ ID NO: 191560 - DNA, 15 bp, Homo sapiens
ttacagtatattgtt

SEQ ID NO: 191561 - DNA, 15 bp, Homo sapiens
attacagtatattgt

SEQ ID NO: 191562 - DNA, 15 bp, Homo sapiens
tattacagtatattg

SEQ ID NO: 191563 - DNA, 15 bp, Homo sapiens
ttattacagtatatt

SEQ ID NO: 191564 - DNA, 15 bp, Homo sapiens
tttattacagtatat

SEQ ID NO: 191565 - DNA, 15 bp, Homo sapiens
ttttattacagtata

SEQ ID NO: 191566 - DNA, 15 bp, Homo sapiens
cttttattacagtat

SEQ ID NO: 191567 - DNA, 15 bp, Homo sapiens
acttttattacagta

SEQ ID NO: 191568 - DNA, 15 bp, Homo sapiens
gacttttattacagt

SEQ ID NO: 191569 - DNA, 15 bp, Homo sapiens
tgacttttattacag

SEQ ID NO: 191570 - DNA, 15 bp, Homo sapiens
atgacttttattaca

SEQ ID NO: 191571 - DNA, 15 bp, Homo sapiens
catgacttttattac

SEQ ID NO: 191572 - DNA, 15 bp, Homo sapiens
acatgacttttatta

SEQ ID NO: 191573 - DNA, 15 bp, Homo sapiens
cacatgacttttatt

SEQ ID NO: 191574 - DNA, 15 bp, Homo sapiens
tcacatgacttttat

SEQ ID NO: 191575 - DNA, 15 bp, Homo sapiens
gtcacatgactttta

SEQ ID NO: 191576 - DNA, 15 bp, Homo sapiens
agtcacatgactttt

SEQ ID NO: 191577 - DNA, 15 bp, Homo sapiens
cagtcacatgacttt

SEQ ID NO: 191578 - DNA, 15 bp, Homo sapiens
acagtcacatgactt

SEQ ID NO: 191579 - DNA, 15 bp, Homo sapiens
cacagtcacatgact

SEQ ID NO: 191580 - DNA, 15 bp, Homo sapiens
gcacagtcacatgac

SEQ ID NO: 191581 - DNA, 15 bp, Homo sapiens
agcacagtcacatga

SEQ ID NO: 191582 - DNA, 15 bp, Homo sapiens
gagcacagtcacatg

SEQ ID NO: 191583 - DNA, 15 bp, Homo sapiens
agagcacagtcacat

SEQ ID NO: 191584 - DNA, 15 bp, Homo sapiens
cagagcacagtcaca

SEQ ID NO: 191585 - DNA, 15 bp, Homo sapiens
acagagcacagtcac

SEQ ID NO: 191586 - DNA, 15 bp, Homo sapiens
gacagagcacagtca

SEQ ID NO: 191587 - DNA, 15 bp, Homo sapiens
agacagagcacagtc

SEQ ID NO: 191588 - DNA, 15 bp, Homo sapiens
gagacagagcacagt

SEQ ID NO: 191589 - DNA, 15 bp, Homo sapiens
tgagacagagcacag

SEQ ID NO: 191590 - DNA, 15 bp, Homo sapiens
atgagacagagcaca

SEQ ID NO: 191591 - DNA, 15 bp, Homo sapiens
aatgagacagagcac

SEQ ID NO: 191592 - DNA, 15 bp, Homo sapiens
taatgagacagagca

SEQ ID NO: 191593 - DNA, 15 bp, Homo sapiens
gtaatgagacagagc

SEQ ID NO: 191594 - DNA, 15 bp, Homo sapiens
tgtaatgagacagag

SEQ ID NO: 191595 - DNA, 15 bp, Homo sapiens
ctgtaatgagacaga

SEQ ID NO: 191596 - DNA, 15 bp, Homo sapiens
tctgtaatgagacag

SEQ ID NO: 191597 - DNA, 15 bp, Homo sapiens
ctctgtaatgagaca

SEQ ID NO: 191598 - DNA, 15 bp, Homo sapiens
gctctgtaatgagac

SEQ ID NO: 191599 - DNA, 15 bp, Homo sapiens
tgctctgtaatgaga

SEQ ID NO: 191600 - DNA, 15 bp, Homo sapiens
gtgctctgtaatgag

SEQ ID NO: 191601 - DNA, 15 bp, Homo sapiens
tgtgctctgtaatga

SEQ ID NO: 191602 - DNA, 15 bp, Homo sapiens
ttgtgctctgtaatg

SEQ ID NO: 191603 - DNA, 15 bp, Homo sapiens
tttgtgctctgtaat

SEQ ID NO: 191604 - DNA, 15 bp, Homo sapiens
ttttgtgctctgtaa

SEQ ID NO: 191605 - DNA, 15 bp, Homo sapiens
tttttgtgctctgta

SEQ ID NO: 191606 - DNA, 15 bp, Homo sapiens
atttttgtgctctgt

SEQ ID NO: 191607 - DNA, 15 bp, Homo sapiens
aatttttgtgctctg

SEQ ID NO: 191608 - DNA, 15 bp, Homo sapiens
gaatttttgtgctct

SEQ ID NO: 191609 - DNA, 15 bp, Homo sapiens
ggaatttttgtgctc

SEQ ID NO: 191610 - DNA, 15 bp, Homo sapiens
aggaatttttgtgct

SEQ ID NO: 191611 - DNA, 15 bp, Homo sapiens
gaggaatttttgtgc

SEQ ID NO: 191612 - DNA, 15 bp, Homo sapiens
tgaggaatttttgtg

SEQ ID NO: 191613 - DNA, 15 bp, Homo sapiens
atgaggaatttttgt

SEQ ID NO: 191614 - DNA, 15 bp, Homo sapiens
aatgaggaatttttg

SEQ ID NO: 191615 - DNA, 15 bp, Homo sapiens
caatgaggaattttt

SEQ ID NO: 191616 - DNA, 15 bp, Homo sapiens
acaatgaggaatttt

SEQ ID NO: 191617 - DNA, 15 bp, Homo sapiens
tacaatgaggaattt

SEQ ID NO: 191618 - DNA, 15 bp, Homo sapiens
gtacaatgaggaatt

SEQ ID NO: 191619 - DNA, 15 bp, Homo sapiens
agtacaatgaggaat

SEQ ID NO: 191620 - DNA, 15 bp, Homo sapiens
cagtacaatgaggaa

SEQ ID NO: 191621 - DNA, 15 bp, Homo sapiens
acagtacaatgagga

SEQ ID NO: 191622 - DNA, 15 bp, Homo sapiens
tacagtacaatgagg

SEQ ID NO: 191623 - DNA, 15 bp, Homo sapiens
gtacagtacaatgag

SEQ ID NO: 191624 - DNA, 15 bp, Homo sapiens
agtacagtacaatga

SEQ ID NO: 191625 - DNA, 15 bp, Homo sapiens
cagtacagtacaatg

SEQ ID NO: 191626 - DNA, 15 bp, Homo sapiens
acagtacagtacaat

SEQ ID NO: 191627 - DNA, 15 bp, Homo sapiens
cacagtacagtacaa

SEQ ID NO: 191628 - DNA, 15 bp, Homo sapiens
ccacagtacagtaca

SEQ ID NO: 191629 - DNA, 15 bp, Homo sapiens
cccacagtacagtac

SEQ ID NO: 191630 - DNA, 15 bp, Homo sapiens
acccacagtacagta

SEQ ID NO: 191631 - DNA, 15 bp, Homo sapiens
tacccacagtacagt

SEQ ID NO: 191632 - DNA, 15 bp, Homo sapiens
ttacccacagtacag

SEQ ID NO: 191633 - DNA, 15 bp, Homo sapiens
gttacccacagtaca

SEQ ID NO: 191634 - DNA, 15 bp, Homo sapiens
agttacccacagtac

SEQ ID NO: 191635 - DNA, 15 bp, Homo sapiens
cagttacccacagta

SEQ ID NO: 191636 - DNA, 15 bp, Homo sapiens
tcagttacccacagt

SEQ ID NO: 191637 - DNA, 15 bp, Homo sapiens
ttcagttacccacag

SEQ ID NO: 191638 - DNA, 15 bp, Homo sapiens
tttcagttacccaca

SEQ ID NO: 191639 - DNA, 15 bp, Homo sapiens
ttttcagttacccac

SEQ ID NO: 191640 - DNA, 15 bp, Homo sapiens
tttttcagttaccca

SEQ ID NO: 191641 - DNA, 15 bp, Homo sapiens
ttttttcagttaccc

SEQ ID NO: 191642 - DNA, 15 bp, Homo sapiens
attttttcagttacc

SEQ ID NO: 191643 - DNA, 15 bp, Homo sapiens
cattttttcagttac

SEQ ID NO: 191644 - DNA, 15 bp, Homo sapiens
tcattttttcagtta

SEQ ID NO: 191645 - DNA, 15 bp, Homo sapiens
ttcattttttcagtt

SEQ ID NO: 191646 - DNA, 15 bp, Homo sapiens
tttcattttttcagt

SEQ ID NO: 191647 - DNA, 15 bp, Homo sapiens
ttttcattttttcag

SEQ ID NO: 191648 - DNA, 15 bp, Homo sapiens
cttttcattttttca

SEQ ID NO: 191649 - DNA, 15 bp, Homo sapiens
acttttcattttttc

SEQ ID NO: 191650 - DNA, 15 bp, Homo sapiens
cacttttcatttttt

SEQ ID NO: 191651 - DNA, 15 bp, Homo sapiens
tcacttttcattttt

SEQ ID NO: 191652 - DNA, 15 bp, Homo sapiens
ttcacttttcatttt

SEQ ID NO: 191653 - DNA, 15 bp, Homo sapiens
tttcacttttcattt

SEQ ID NO: 191654 - DNA, 15 bp, Homo sapiens
gtttcacttttcatt

SEQ ID NO: 191655 - DNA, 15 bp, Homo sapiens
agtttcacttttcat

SEQ ID NO: 191656 - DNA, 15 bp, Homo sapiens
tagtttcacttttca

SEQ ID NO: 191657 - DNA, 15 bp, Homo sapiens
atagtttcacttttc

SEQ ID NO: 191658 - DNA, 15 bp, Homo sapiens
catagtttcactttt

SEQ ID NO: 191659 - DNA, 15 bp, Homo sapiens
ccatagtttcacttt

SEQ ID NO: 191660 - DNA, 15 bp, Homo sapiens
tccatagtttcactt

SEQ ID NO: 191661 - DNA, 15 bp, Homo sapiens
atccatagtttcact

SEQ ID NO: 191662 - DNA, 15 bp, Homo sapiens
tatccatagtttcac

SEQ ID NO: 191663 - DNA, 15 bp, Homo sapiens
ttatccatagtttca

SEQ ID NO: 191664 - DNA, 15 bp, Homo sapiens
cttatccatagtttc

SEQ ID NO: 191665 - DNA, 15 bp, Homo sapiens
ccttatccatagttt

SEQ ID NO: 191666 - DNA, 15 bp, Homo sapiens
cccttatccatagtt

SEQ ID NO: 191667 - DNA, 15 bp, Homo sapiens
ccccttatccatagt

SEQ ID NO: 191668 - DNA, 15 bp, Homo sapiens
cccccttatccatag

SEQ ID NO: 191669 - DNA, 15 bp, Homo sapiens
ccccccttatccata

SEQ ID NO: 191670 - DNA, 15 bp, Homo sapiens
tccccccttatccat

SEQ ID NO: 191671 - DNA, 15 bp, Homo sapiens
gtccccccttatcca

SEQ ID NO: 191672 - DNA, 15 bp, Homo sapiens
agtccccccttatcc

SEQ ID NO: 191673 - DNA, 15 bp, Homo sapiens
cagtccccccttatc

SEQ ID NO: 191674 - DNA, 15 bp, Homo sapiens
acagtccccccttat

SEQ ID NO: 191675 - DNA, 15 bp, Homo sapiens
cacagtcccccctta

SEQ ID NO: 191676 - DNA, 15 bp, Homo sapiens
ccacagtcccccctt

SEQ ID NO: 191677 - DNA, 15 bp, Homo sapiens
tccacagtcccccct

SEQ ID NO: 191678 - DNA, 15 bp, Homo sapiens
ctccacagtcccccc

SEQ ID NO: 191679 - DNA, 15 bp, Homo sapiens
actccacagtccccc

SEQ ID NO: 191680 - DNA, 15 bp, Homo sapiens
gactccacagtcccc

SEQ ID NO: 191681 - DNA, 15 bp, Homo sapiens
ggactccacagtccc

SEQ ID NO: 191682 - DNA, 15 bp, Homo sapiens
aggactccacagtcc

SEQ ID NO: 191683 - DNA, 15 bp, Homo sapiens
taggactccacagtc

SEQ ID NO: 191684 - DNA, 15 bp, Homo sapiens
ttaggactccacagt

SEQ ID NO: 191685 - DNA, 15 bp, Homo sapiens
attaggactccacag

SEQ ID NO: 191686 - DNA, 15 bp, Homo sapiens
aattaggactccaca

SEQ ID NO: 191687 - DNA, 15 bp, Homo sapiens
taattaggactccac

SEQ ID NO: 191688 - DNA, 15 bp, Homo sapiens
ctaattaggactcca

SEQ ID NO: 191689 - DNA, 15 bp, Homo sapiens
cctaattaggactcc

SEQ ID NO: 191690 - DNA, 15 bp, Homo sapiens
ccctaattaggactc

SEQ ID NO: 191691 - DNA, 15 bp, Homo sapiens
tccctaattaggact

SEQ ID NO: 191692 - DNA, 15 bp, Homo sapiens
ttccctaattaggac

SEQ ID NO: 191693 - DNA, 15 bp, Homo sapiens
tttccctaattagga

SEQ ID NO: 191694 - DNA, 15 bp, Homo sapiens
ttttccctaattagg

SEQ ID NO: 191695 - DNA, 15 bp, Homo sapiens
cttttccctaattag

SEQ ID NO: 191696 - DNA, 15 bp, Homo sapiens
ccttttccctaatta

SEQ ID NO: 191697 - DNA, 15 bp, Homo sapiens
tccttttccctaatt

SEQ ID NO: 191698 - DNA, 15 bp, Homo sapiens
ctccttttccctaat

SEQ ID NO: 191699 - DNA, 15 bp, Homo sapiens
actccttttccctaa

SEQ ID NO: 191700 - DNA, 15 bp, Homo sapiens
gactccttttcccta

SEQ ID NO: 191701 - DNA, 15 bp, Homo sapiens
tgactccttttccct

SEQ ID NO: 191702 - DNA, 15 bp, Homo sapiens
ctgactccttttccc

SEQ ID NO: 191703 - DNA, 15 bp, Homo sapiens
cctgactccttttcc

SEQ ID NO: 191704 - DNA, 15 bp, Homo sapiens
gcctgactccttttc

SEQ ID NO: 191705 - DNA, 15 bp, Homo sapiens
agcctgactcctttt

SEQ ID NO: 191706 - DNA, 15 bp, Homo sapiens
cagcctgactccttt

SEQ ID NO: 191707 - DNA, 15 bp, Homo sapiens
ccagcctgactcctt

SEQ ID NO: 191708 - DNA, 15 bp, Homo sapiens
accagcctgactcct

SEQ ID NO: 191709 - DNA, 15 bp, Homo sapiens
caccagcctgactcc

SEQ ID NO: 191710 - DNA, 15 bp, Homo sapiens
ccaccagcctgactc

SEQ ID NO: 191711 - DNA, 15 bp, Homo sapiens
cccaccagcctgact

SEQ ID NO: 191712 - DNA, 15 bp, Homo sapiens
tcccaccagcctgac

SEQ ID NO: 191713 - DNA, 15 bp, Homo sapiens
gtcccaccagcctga

SEQ ID NO: 191714 - DNA, 15 bp, Homo sapiens
ggtcccaccagcctg

SEQ ID NO: 191715 - DNA, 15 bp, Homo sapiens
tggtcccaccagcct

SEQ ID NO: 191716 - DNA, 15 bp, Homo sapiens
ctggtcccaccagcc

SEQ ID NO: 191717 - DNA, 15 bp, Homo sapiens
cctggtcccaccagc

SEQ ID NO: 191718 - DNA, 15 bp, Homo sapiens
ccctggtcccaccag

SEQ ID NO: 191719 - DNA, 15 bp, Homo sapiens
cccctggtcccacca

SEQ ID NO: 191720 - DNA, 15 bp, Homo sapiens
tcccctggtcccacc

SEQ ID NO: 191721 - DNA, 15 bp, Homo sapiens
ttcccctggtcccac

SEQ ID NO: 191722 - DNA, 15 bp, Homo sapiens
tttcccctggtccca

SEQ ID NO: 191723 - DNA, 15 bp, Homo sapiens
ctttcccctggtccc

SEQ ID NO: 191724 - DNA, 15 bp, Homo sapiens
gctttcccctggtcc

SEQ ID NO: 191725 - DNA, 15 bp, Homo sapiens
tgctttcccctggtc

SEQ ID NO: 191726 - DNA, 15 bp, Homo sapiens
ttgctttcccctggt

SEQ ID NO: 191727 - DNA, 15 bp, Homo sapiens
cttgctttcccctgg

SEQ ID NO: 191728 - DNA, 15 bp, Homo sapiens
tcttgctttcccctg

SEQ ID NO: 191729 - DNA, 15 bp, Homo sapiens
ctcttgctttcccct

SEQ ID NO: 191730 - DNA, 15 bp, Homo sapiens
tctcttgctttcccc

SEQ ID NO: 191731 - DNA, 15 bp, Homo sapiens
atctcttgctttccc

SEQ ID NO: 191732 - DNA, 15 bp, Homo sapiens
tatctcttgctttcc

SEQ ID NO: 191733 - DNA, 15 bp, Homo sapiens
ttatctcttgctttc

SEQ ID NO: 191734 - DNA, 15 bp, Homo sapiens
tttatctcttgcttt

SEQ ID NO: 191735 - DNA, 15 bp, Homo sapiens
ctttatctcttgctt

SEQ ID NO: 191736 - DNA, 15 bp, Homo sapiens
gctttatctcttgct

SEQ ID NO: 191737 - DNA, 15 bp, Homo sapiens
tgctttatctcttgc

SEQ ID NO: 191738 - DNA, 15 bp, Homo sapiens
ctgctttatctcttg

SEQ ID NO: 191739 - DNA, 15 bp, Homo sapiens
tctgctttatctctt

SEQ ID NO: 191740 - DNA, 15 bp, Homo sapiens
atctgctttatctct

SEQ ID NO: 191741 - DNA, 15 bp, Homo sapiens
tatctgctttatctc

SEQ ID NO: 191742 - DNA, 15 bp, Homo sapiens
ttatctgctttatct

SEQ ID NO: 191743 - DNA, 15 bp, Homo sapiens
cttatctgctttatc

SEQ ID NO: 191744 - DNA, 15 bp, Homo sapiens
gcttatctgctttat

SEQ ID NO: 191745 - DNA, 15 bp, Homo sapiens
agcttatctgcttta

SEQ ID NO: 191746 - DNA, 15 bp, Homo sapiens
tagcttatctgcttt

SEQ ID NO: 191747 - DNA, 15 bp, Homo sapiens
atagcttatctgctt

SEQ ID NO: 191748 - DNA, 15 bp, Homo sapiens
tatagcttatctgct

SEQ ID NO: 191749 - DNA, 15 bp, Homo sapiens
ttatagcttatctgc

SEQ ID NO: 191750 - DNA, 15 bp, Homo sapiens
tttatagcttatctg

SEQ ID NO: 191751 - DNA, 15 bp, Homo sapiens
atttatagcttatct

SEQ ID NO: 191752 - DNA, 15 bp, Homo sapiens
gatttatagcttatc

SEQ ID NO: 191753 - DNA, 15 bp, Homo sapiens
agatttatagcttat

SEQ ID NO: 191754 - DNA, 15 bp, Homo sapiens
cagatttatagctta

SEQ ID NO: 191755 - DNA, 15 bp, Homo sapiens
gcagatttatagctt

SEQ ID NO: 191756 - DNA, 15 bp, Homo sapiens
ggcagatttatagct

SEQ ID NO: 191757 - DNA, 15 bp, Homo sapiens
aggcagatttatagc

SEQ ID NO: 191758 - DNA, 15 bp, Homo sapiens
aaggcagatttatag

SEQ ID NO: 191759 - DNA, 15 bp, Homo sapiens
aaaggcagatttata

SEQ ID NO: 191760 - DNA, 15 bp, Homo sapiens
gaaaggcagatttat

SEQ ID NO: 191761 - DNA, 15 bp, Homo sapiens
agaaaggcagattta

SEQ ID NO: 191762 - DNA, 15 bp, Homo sapiens
aagaaaggcagattt

SEQ ID NO: 191763 - DNA, 15 bp, Homo sapiens
gaagaaaggcagatt

SEQ ID NO: 191764 - DNA, 15 bp, Homo sapiens
tgaagaaaggcagat

SEQ ID NO: 191765 - DNA, 15 bp, Homo sapiens
gtgaagaaaggcaga

SEQ ID NO: 191766 - DNA, 15 bp, Homo sapiens
cgtgaagaaaggcag

SEQ ID NO: 191767 - DNA, 15 bp, Homo sapiens
acgtgaagaaaggca

SEQ ID NO: 191768 - DNA, 15 bp, Homo sapiens
gacgtgaagaaaggc

SEQ ID NO: 191769 - DNA, 15 bp, Homo sapiens
ggacgtgaagaaagg

SEQ ID NO: 191770 - DNA, 15 bp, Homo sapiens
tggacgtgaagaaag

SEQ ID NO: 191771 - DNA, 15 bp, Homo sapiens
ctggacgtgaagaaa

SEQ ID NO: 191772 - DNA, 15 bp, Homo sapiens
tctggacgtgaagaa

SEQ ID NO: 191773 - DNA, 15 bp, Homo sapiens
ctctggacgtgaaga

SEQ ID NO: 191774 - DNA, 15 bp, Homo sapiens
tctctggacgtgaag

SEQ ID NO: 191775 - DNA, 15 bp, Homo sapiens
ttctctggacgtgaa

SEQ ID NO: 191776 - DNA, 15 bp, Homo sapiens
attctctggacgtga

SEQ ID NO: 191777 - DNA, 15 bp, Homo sapiens
aattctctggacgtg

SEQ ID NO: 191778 - DNA, 15 bp, Homo sapiens
aaattctctggacgt

SEQ ID NO: 191779 - DNA, 15 bp, Homo sapiens
taaattctctggacg

SEQ ID NO: 191780 - DNA, 15 bp, Homo sapiens
ttaaattctctggac

SEQ ID NO: 191781 - DNA, 15 bp, Homo sapiens
tttaaattctctgga

SEQ ID NO: 191782 - DNA, 15 bp, Homo sapiens
gtttaaattctctgg

SEQ ID NO: 191783 - DNA, 15 bp, Homo sapiens
tgtttaaattctctg

SEQ ID NO: 191784 - DNA, 15 bp, Homo sapiens
ttgtttaaattctct

SEQ ID NO: 191785 - DNA, 15 bp, Homo sapiens
tttgtttaaattctc

SEQ ID NO: 191786 - DNA, 15 bp, Homo sapiens
ttttgtttaaattct

SEQ ID NO: 191787 - DNA, 15 bp, Homo sapiens
cttttgtttaaattc

SEQ ID NO: 191788 - DNA, 15 bp, Homo sapiens
tcttttgtttaaatt

SEQ ID NO: 191789 - DNA, 15 bp, Homo sapiens
ctcttttgtttaaat

SEQ ID NO: 191790 - DNA, 15 bp, Homo sapiens
tctcttttgtttaaa

SEQ ID NO: 191791 - DNA, 15 bp, Homo sapiens
ttctcttttgtttaa

SEQ ID NO: 191792 - DNA, 15 bp, Homo sapiens
tttctcttttgttta

SEQ ID NO: 191793 - DNA, 15 bp, Homo sapiens
gtttctcttttgttt

SEQ ID NO: 191794 - DNA, 15 bp, Homo sapiens
ggtttctcttttgtt

SEQ ID NO: 191795 - DNA, 15 bp, Homo sapiens
tggtttctcttttgt

SEQ ID NO: 191796 - DNA, 15 bp, Homo sapiens
ctggtttctcttttg

SEQ ID NO: 191797 - DNA, 15 bp, Homo sapiens
tctggtttctctttt

SEQ ID NO: 191798 - DNA, 15 bp, Homo sapiens
atctggtttctcttt

SEQ ID NO: 191799 - DNA, 15 bp, Homo sapiens
tatctggtttctctt

SEQ ID NO: 191800 - DNA, 15 bp, Homo sapiens
ttatctggtttctct

SEQ ID NO: 191801 - DNA, 15 bp, Homo sapiens
cttatctggtttctc

SEQ ID NO: 191802 - DNA, 15 bp, Homo sapiens
acttatctggtttct

SEQ ID NO: 191803 - DNA, 15 bp, Homo sapiens
aacttatctggtttc

SEQ ID NO: 191804 - DNA, 15 bp, Homo sapiens
taacttatctggttt

SEQ ID NO: 191805 - DNA, 15 bp, Homo sapiens
gtaacttatctggtt

SEQ ID NO: 191806 - DNA, 15 bp, Homo sapiens
tgtaacttatctggt

SEQ ID NO: 191807 - DNA, 15 bp, Homo sapiens
ctgtaacttatctgg

SEQ ID NO: 191808 - DNA, 15 bp, Homo sapiens
cctgtaacttatctg

SEQ ID NO: 191809 - DNA, 15 bp, Homo sapiens
acctgtaacttatct

SEQ ID NO: 191810 - DNA, 15 bp, Homo sapiens
gacctgtaacttatc

SEQ ID NO: 191811 - DNA, 15 bp, Homo sapiens
agacctgtaacttat

SEQ ID NO: 191812 - DNA, 15 bp, Homo sapiens
cagacctgtaactta

SEQ ID NO: 191813 - DNA, 15 bp, Homo sapiens
gcagacctgtaactt

SEQ ID NO: 191814 - DNA, 15 bp, Homo sapiens
ggcagacctgtaact

SEQ ID NO: 191815 - DNA, 15 bp, Homo sapiens
aggcagacctgtaac

SEQ ID NO: 191816 - DNA, 15 bp, Homo sapiens
aaggcagacctgtaa

SEQ ID NO: 191817 - DNA, 15 bp, Homo sapiens
aaaggcagacctgta

SEQ ID NO: 191818 - DNA, 15 bp, Homo sapiens
gaaaggcagacctgt

SEQ ID NO: 191819 - DNA, 15 bp, Homo sapiens
agaaaggcagacctg

SEQ ID NO: 191820 - DNA, 15 bp, Homo sapiens
aagaaaggcagacct

SEQ ID NO: 191821 - DNA, 15 bp, Homo sapiens
aaagaaaggcagacc

SEQ ID NO: 191822 - DNA, 15 bp, Homo sapiens
caaagaaaggcagac

SEQ ID NO: 191823 - DNA, 15 bp, Homo sapiens
acaaagaaaggcaga

SEQ ID NO: 191824 - DNA, 15 bp, Homo sapiens
cacaaagaaaggcag

SEQ ID NO: 191825 - DNA, 15 bp, Homo sapiens
ccacaaagaaaggca

SEQ ID NO: 191826 - DNA, 15 bp, Homo sapiens
gccacaaagaaaggc

SEQ ID NO: 191827 - DNA, 15 bp, Homo sapiens
ggccacaaagaaagg

SEQ ID NO: 191828 - DNA, 15 bp, Homo sapiens
gggccacaaagaaag

SEQ ID NO: 191829 - DNA, 15 bp, Homo sapiens
tgggccacaaagaaa

SEQ ID NO: 191830 - DNA, 15 bp, Homo sapiens
ctgggccacaaagaa

SEQ ID NO: 191831 - DNA, 15 bp, Homo sapiens
cctgggccacaaaga

SEQ ID NO: 191832 - DNA, 15 bp, Homo sapiens
ccctgggccacaaag

SEQ ID NO: 191833 - DNA, 15 bp, Homo sapiens
gccctgggccacaaa

SEQ ID NO: 191834 - DNA, 15 bp, Homo sapiens
tgccctgggccacaa

SEQ ID NO: 191835 - DNA, 15 bp, Homo sapiens
atgccctgggccaca

SEQ ID NO: 191836 - DNA, 15 bp, Homo sapiens
tatgccctgggccac

SEQ ID NO: 191837 - DNA, 15 bp, Homo sapiens
atatgccctgggcca

SEQ ID NO: 191838 - DNA, 15 bp, Homo sapiens
catatgccctgggcc

SEQ ID NO: 191839 - DNA, 15 bp, Homo sapiens
ccatatgccctgggc

SEQ ID NO: 191840 - DNA, 15 bp, Homo sapiens
gccatatgccctggg

SEQ ID NO: 191841 - DNA, 15 bp, Homo sapiens
ggccatatgccctgg

SEQ ID NO: 191842 - DNA, 15 bp, Homo sapiens
gggccatatgccctg

SEQ ID NO: 191843 - DNA, 15 bp, Homo sapiens
tgggccatatgccct

SEQ ID NO: 191844 - DNA, 15 bp, Homo sapiens
ctgggccatatgccc

SEQ ID NO: 191845 - DNA, 15 bp, Homo sapiens
cctgggccatatgcc

SEQ ID NO: 191846 - DNA, 15 bp, Homo sapiens
tcctgggccatatgc

SEQ ID NO: 191847 - DNA, 15 bp, Homo sapiens
atcctgggccatatg

SEQ ID NO: 191848 - DNA, 15 bp, Homo sapiens
tatcctgggccatat

SEQ ID NO: 191849 - DNA, 15 bp, Homo sapiens
atatcctgggccata

SEQ ID NO: 191850 - DNA, 15 bp, Homo sapiens
tatatcctgggccat

SEQ ID NO: 191851 - DNA, 15 bp, Homo sapiens
atatatcctgggcca

SEQ ID NO: 191852 - DNA, 15 bp, Homo sapiens
catatatcctgggcc

SEQ ID NO: 191853 - DNA, 15 bp, Homo sapiens
tcatatatcctgggc

SEQ ID NO: 191854 - DNA, 15 bp, Homo sapiens
gtcatatatcctggg

SEQ ID NO: 191855 - DNA, 15 bp, Homo sapiens
ggtcatatatcctgg

SEQ ID NO: 191856 - DNA, 15 bp, Homo sapiens
gggtcatatatcctg

SEQ ID NO: 191857 - DNA, 15 bp, Homo sapiens
tgggtcatatatcct

SEQ ID NO: 191858 - DNA, 15 bp, Homo sapiens
ttgggtcatatatcc

SEQ ID NO: 191859 - DNA, 15 bp, Homo sapiens
cttgggtcatatatc

SEQ ID NO: 191860 - DNA, 15 bp, Homo sapiens
tcttgggtcatatat

SEQ ID NO: 191861 - DNA, 15 bp, Homo sapiens
gtcttgggtcatata

SEQ ID NO: 191862 - DNA, 15 bp, Homo sapiens
tgtcttgggtcatat

SEQ ID NO: 191863 - DNA, 15 bp, Homo sapiens
atgtcttgggtcata

SEQ ID NO: 191864 - DNA, 15 bp, Homo sapiens
aatgtcttgggtcat

SEQ ID NO: 191865 - DNA, 15 bp, Homo sapiens
aaatgtcttgggtca

SEQ ID NO: 191866 - DNA, 15 bp, Homo sapiens
caaatgtcttgggtc

SEQ ID NO: 191867 - DNA, 15 bp, Homo sapiens
ccaaatgtcttgggt

SEQ ID NO: 191868 - DNA, 15 bp, Homo sapiens
gccaaatgtcttggg

SEQ ID NO: 191869 - DNA, 15 bp, Homo sapiens
ggccaaatgtcttgg

SEQ ID NO: 191870 - DNA, 15 bp, Homo sapiens
aggccaaatgtcttg

SEQ ID NO: 191871 - DNA, 15 bp, Homo sapiens
aaggccaaatgtctt

SEQ ID NO: 191872 - DNA, 15 bp, Homo sapiens
gaaggccaaatgtct

SEQ ID NO: 191873 - DNA, 15 bp, Homo sapiens
tgaaggccaaatgtc

SEQ ID NO: 191874 - DNA, 15 bp, Homo sapiens
atgaaggccaaatgt

SEQ ID NO: 191875 - DNA, 15 bp, Homo sapiens
catgaaggccaaatg

SEQ ID NO: 191876 - DNA, 15 bp, Homo sapiens
gcatgaaggccaaat

SEQ ID NO: 191877 - DNA, 15 bp, Homo sapiens
ggcatgaaggccaaa

SEQ ID NO: 191878 - DNA, 15 bp, Homo sapiens
gggcatgaaggccaa

SEQ ID NO: 191879 - DNA, 15 bp, Homo sapiens
cgggcatgaaggcca

SEQ ID NO: 191880 - DNA, 15 bp, Homo sapiens
ccgggcatgaaggcc

SEQ ID NO: 191881 - DNA, 15 bp, Homo sapiens
tccgggcatgaaggc

SEQ ID NO: 191882 - DNA, 15 bp, Homo sapiens
atccgggcatgaagg

SEQ ID NO: 191883 - DNA, 15 bp, Homo sapiens
tatccgggcatgaag

SEQ ID NO: 191884 - DNA, 15 bp, Homo sapiens
ttatccgggcatgaa

SEQ ID NO: 191885 - DNA, 15 bp, Homo sapiens
gttatccgggcatga

SEQ ID NO: 191886 - DNA, 15 bp, Homo sapiens
tgttatccgggcatg

SEQ ID NO: 191887 - DNA, 15 bp, Homo sapiens
atgttatccgggcat

SEQ ID NO: 191888 - DNA, 15 bp, Homo sapiens
tatgttatccgggca

SEQ ID NO: 191889 - DNA, 15 bp, Homo sapiens
gtatgttatccgggc

SEQ ID NO: 191890 - DNA, 15 bp, Homo sapiens
tgtatgttatccggg

SEQ ID NO: 191891 - DNA, 15 bp, Homo sapiens
atgtatgttatccgg

SEQ ID NO: 191892 - DNA, 15 bp, Homo sapiens
tatgtatgttatccg

SEQ ID NO: 191893 - DNA, 15 bp, Homo sapiens
ttatgtatgttatcc

SEQ ID NO: 191894 - DNA, 15 bp, Homo sapiens
gttatgtatgttatc

SEQ ID NO: 191895 - DNA, 15 bp, Homo sapiens
agttatgtatgttat

SEQ ID NO: 191896 - DNA, 15 bp, Homo sapiens
gagttatgtatgtta

SEQ ID NO: 191897 - DNA, 15 bp, Homo sapiens
ggagttatgtatgtt

SEQ ID NO: 191898 - DNA, 15 bp, Homo sapiens
gggagttatgtatgt

SEQ ID NO: 191899 - DNA, 15 bp, Homo sapiens
cgggagttatgtatg

SEQ ID NO: 191900 - DNA, 15 bp, Homo sapiens
ccgggagttatgtat

SEQ ID NO: 191901 - DNA, 15 bp, Homo sapiens
cccgggagttatgta

SEQ ID NO: 191902 - DNA, 15 bp, Homo sapiens
gcccgggagttatgt

SEQ ID NO: 191903 - DNA, 15 bp, Homo sapiens
agcccgggagttatg

SEQ ID NO: 191904 - DNA, 15 bp, Homo sapiens
aagcccgggagttat

SEQ ID NO: 191905 - DNA, 15 bp, Homo sapiens
gaagcccgggagtta

SEQ ID NO: 191906 - DNA, 15 bp, Homo sapiens
ggaagcccgggagtt

SEQ ID NO: 191907 - DNA, 15 bp, Homo sapiens
aggaagcccgggagt

SEQ ID NO: 191908 - DNA, 15 bp, Homo sapiens
caggaagcccgggag

SEQ ID NO: 191909 - DNA, 15 bp, Homo sapiens
gcaggaagcccggga

SEQ ID NO: 191910 - DNA, 15 bp, Homo sapiens
agcaggaagcccggg

SEQ ID NO: 191911 - DNA, 15 bp, Homo sapiens
gagcaggaagcccgg

SEQ ID NO: 191912 - DNA, 15 bp, Homo sapiens
tgagcaggaagcccg

SEQ ID NO: 191913 - DNA, 15 bp, Homo sapiens
gtgagcaggaagccc

SEQ ID NO: 191914 - DNA, 15 bp, Homo sapiens
ggtgagcaggaagcc

SEQ ID NO: 191915 - DNA, 15 bp, Homo sapiens
tggtgagcaggaagc

SEQ ID NO: 191916 - DNA, 15 bp, Homo sapiens
atggtgagcaggaag

SEQ ID NO: 191917 - DNA, 15 bp, Homo sapiens
gatggtgagcaggaa

SEQ ID NO: 191918 - DNA, 15 bp, Homo sapiens
tgatggtgagcagga

SEQ ID NO: 191919 - DNA, 15 bp, Homo sapiens
ttgatggtgagcagg

SEQ ID NO: 191920 - DNA, 15 bp, Homo sapiens
tttgatggtgagcag

SEQ ID NO: 191921 - DNA, 15 bp, Homo sapiens
gtttgatggtgagca

SEQ ID NO: 191922 - DNA, 15 bp, Homo sapiens
tgtttgatggtgagc

SEQ ID NO: 191923 - DNA, 15 bp, Homo sapiens
gtgtttgatggtgag

SEQ ID NO: 191924 - DNA, 15 bp, Homo sapiens
ggtgtttgatggtga

SEQ ID NO: 191925 - DNA, 15 bp, Homo sapiens
aggtgtttgatggtg

SEQ ID NO: 191926 - DNA, 15 bp, Homo sapiens
gaggtgtttgatggt

SEQ ID NO: 191927 - DNA, 15 bp, Homo sapiens
tgaggtgtttgatgg

SEQ ID NO: 191928 - DNA, 15 bp, Homo sapiens
ttgaggtgtttgatg

SEQ ID NO: 191929 - DNA, 15 bp, Homo sapiens
attgaggtgtttgat

SEQ ID NO: 191930 - DNA, 15 bp, Homo sapiens
aattgaggtgtttga

SEQ ID NO: 191931 - DNA, 15 bp, Homo sapiens
aaattgaggtgtttg

SEQ ID NO: 191932 - DNA, 15 bp, Homo sapiens
taaattgaggtgttt

SEQ ID NO: 191933 - DNA, 15 bp, Homo sapiens
ataaattgaggtgtt

SEQ ID NO: 191934 - DNA, 15 bp, Homo sapiens
gataaattgaggtgt

SEQ ID NO: 191935 - DNA, 15 bp, Homo sapiens
tgataaattgaggtg

SEQ ID NO: 191936 - DNA, 15 bp, Homo sapiens
ttgataaattgaggt

SEQ ID NO: 191937 - DNA, 15 bp, Homo sapiens
tttgataaattgagg

SEQ ID NO: 191938 - DNA, 15 bp, Homo sapiens
gtttgataaattgag

SEQ ID NO: 191939 - DNA, 15 bp, Homo sapiens
tgtttgataaattga

SEQ ID NO: 191940 - DNA, 15 bp, Homo sapiens
atgtttgataaattg

SEQ ID NO: 191941 - DNA, 15 bp, Homo sapiens
gatgtttgataaatt

SEQ ID NO: 191942 - DNA, 15 bp, Homo sapiens
ggatgtttgataaat

SEQ ID NO: 191943 - DNA, 15 bp, Homo sapiens
tggatgtttgataaa

SEQ ID NO: 191944 - DNA, 15 bp, Homo sapiens
ctggatgtttgataa

SEQ ID NO: 191945 - DNA, 15 bp, Homo sapiens
cctggatgtttgata

SEQ ID NO: 191946 - DNA, 15 bp, Homo sapiens
gcctggatgtttgat

SEQ ID NO: 191947 - DNA, 15 bp, Homo sapiens
agcctggatgtttga

SEQ ID NO: 191948 - DNA, 15 bp, Homo sapiens
cagcctggatgtttg

SEQ ID NO: 191949 - DNA, 15 bp, Homo sapiens
tcagcctggatgttt

SEQ ID NO: 191950 - DNA, 15 bp, Homo sapiens
gtcagcctggatgtt

SEQ ID NO: 191951 - DNA, 15 bp, Homo sapiens
tgtcagcctggatgt

SEQ ID NO: 191952 - DNA, 15 bp, Homo sapiens
ctgtcagcctggatg

SEQ ID NO: 191953 - DNA, 15 bp, Homo sapiens
tctgtcagcctggat

SEQ ID NO: 191954 - DNA, 15 bp, Homo sapiens
ctctgtcagcctgga

SEQ ID NO: 191955 - DNA, 15 bp, Homo sapiens
cctctgtcagcctgg

SEQ ID NO: 191956 - DNA, 15 bp, Homo sapiens
tcctctgtcagcctg

SEQ ID NO: 191957 - DNA, 15 bp, Homo sapiens
ttcctctgtcagcct

SEQ ID NO: 191958 - DNA, 15 bp, Homo sapiens
attcctctgtcagcc

SEQ ID NO: 191959 - DNA, 15 bp, Homo sapiens
cattcctctgtcagc

SEQ ID NO: 191960 - DNA, 15 bp, Homo sapiens
gcattcctctgtcag

SEQ ID NO: 191961 - DNA, 15 bp, Homo sapiens
tgcattcctctgtca

SEQ ID NO: 191962 - DNA, 15 bp, Homo sapiens
ttgcattcctctgtc

SEQ ID NO: 191963 - DNA, 15 bp, Homo sapiens
cttgcattcctctgt

SEQ ID NO: 191964 - DNA, 15 bp, Homo sapiens
acttgcattcctctg

SEQ ID NO: 191965 - DNA, 15 bp, Homo sapiens
aacttgcattcctct

SEQ ID NO: 191966 - DNA, 15 bp, Homo sapiens
taacttgcattcctc

SEQ ID NO: 191967 - DNA, 15 bp, Homo sapiens
ttaacttgcattcct

SEQ ID NO: 191968 - DNA, 15 bp, Homo sapiens
cttaacttgcattcc

SEQ ID NO: 191969 - DNA, 15 bp, Homo sapiens
gcttaacttgcattc

SEQ ID NO: 191970 - DNA, 15 bp, Homo sapiens
agcttaacttgcatt

SEQ ID NO: 191971 - DNA, 15 bp, Homo sapiens
gagcttaacttgcat

SEQ ID NO: 191972 - DNA, 15 bp, Homo sapiens
ggagcttaacttgca

SEQ ID NO: 191973 - DNA, 15 bp, Homo sapiens
gggagcttaacttgc

SEQ ID NO: 191974 - DNA, 15 bp, Homo sapiens
agggagcttaacttg

SEQ ID NO: 191975 - DNA, 15 bp, Homo sapiens
cagggagcttaactt

SEQ ID NO: 191976 - DNA, 15 bp, Homo sapiens
gcagggagcttaact

SEQ ID NO: 191977 - DNA, 15 bp, Homo sapiens
agcagggagcttaac

SEQ ID NO: 191978 - DNA, 15 bp, Homo sapiens
cagcagggagcttaa

SEQ ID NO: 191979 - DNA, 15 bp, Homo sapiens
gcagcagggagctta

SEQ ID NO: 191980 - DNA, 15 bp, Homo sapiens
ggcagcagggagctt

SEQ ID NO: 191981 - DNA, 15 bp, Homo sapiens
aggcagcagggagct

SEQ ID NO: 191982 - DNA, 15 bp, Homo sapiens
aaggcagcagggagc

SEQ ID NO: 191983 - DNA, 15 bp, Homo sapiens
caaggcagcagggag

SEQ ID NO: 191984 - DNA, 15 bp, Homo sapiens
ccaaggcagcaggga

SEQ ID NO: 191985 - DNA, 15 bp, Homo sapiens
gccaaggcagcaggg

SEQ ID NO: 191986 - DNA, 15 bp, Homo sapiens
tgccaaggcagcagg

SEQ ID NO: 191987 - DNA, 15 bp, Homo sapiens
atgccaaggcagcag

SEQ ID NO: 191988 - DNA, 15 bp, Homo sapiens
aatgccaaggcagca

SEQ ID NO: 191989 - DNA, 15 bp, Homo sapiens
taatgccaaggcagc

SEQ ID NO: 191990 - DNA, 15 bp, Homo sapiens
ataatgccaaggcag

SEQ ID NO: 191991 - DNA, 15 bp, Homo sapiens
gataatgccaaggca

SEQ ID NO: 191992 - DNA, 15 bp, Homo sapiens
tgataatgccaaggc

SEQ ID NO: 191993 - DNA, 15 bp, Homo sapiens
ttgataatgccaagg

SEQ ID NO: 191994 - DNA, 15 bp, Homo sapiens
attgataatgccaag

SEQ ID NO: 191995 - DNA, 15 bp, Homo sapiens
gattgataatgccaa

SEQ ID NO: 191996 - DNA, 15 bp, Homo sapiens
tgattgataatgcca

SEQ ID NO: 191997 - DNA, 15 bp, Homo sapiens
ctgattgataatgcc

SEQ ID NO: 191998 - DNA, 15 bp, Homo sapiens
gctgattgataatgc

SEQ ID NO: 191999 - DNA, 15 bp, Homo sapiens
ggctgattgataatg

SEQ ID NO: 192000 - DNA, 15 bp, Homo sapiens
gggctgattgataat

SEQ ID NO: 192001 - DNA, 15 bp, Homo sapiens
tgggctgattgataa

SEQ ID NO: 192002 - DNA, 15 bp, Homo sapiens
ttgggctgattgata

SEQ ID NO: 192003 - DNA, 15 bp, Homo sapiens
cttgggctgattgat

SEQ ID NO: 192004 - DNA, 15 bp, Homo sapiens
acttgggctgattga

SEQ ID NO: 192005 - DNA, 15 bp, Homo sapiens
aacttgggctgattg

SEQ ID NO: 192006 - DNA, 15 bp, Homo sapiens
gaacttgggctgatt

SEQ ID NO: 192007 - DNA, 15 bp, Homo sapiens
ggaacttgggctgat

SEQ ID NO: 192008 - DNA, 15 bp, Homo sapiens
tggaacttgggctga

SEQ ID NO: 192009 - DNA, 15 bp, Homo sapiens
atggaacttgggctg

SEQ ID NO: 192010 - DNA, 15 bp, Homo sapiens
aatggaacttgggct

SEQ ID NO: 192011 - DNA, 15 bp, Homo sapiens
gaatggaacttgggc

SEQ ID NO: 192012 - DNA, 15 bp, Homo sapiens
agaatggaacttggg

SEQ ID NO: 192013 - DNA, 15 bp, Homo sapiens
gagaatggaacttgg

SEQ ID NO: 192014 - DNA, 15 bp, Homo sapiens
agagaatggaacttg

SEQ ID NO: 192015 - DNA, 15 bp, Homo sapiens
tagagaatggaactt

SEQ ID NO: 192016 - DNA, 15 bp, Homo sapiens
ttagagaatggaact

SEQ ID NO: 192017 - DNA, 15 bp, Homo sapiens
tttagagaatggaac

SEQ ID NO: 192018 - DNA, 15 bp, Homo sapiens
ttttagagaatggaa

SEQ ID NO: 192019 - DNA, 15 bp, Homo sapiens
attttagagaatgga

SEQ ID NO: 192020 - DNA, 15 bp, Homo sapiens
gattttagagaatgg

SEQ ID NO: 192021 - DNA, 15 bp, Homo sapiens
agattttagagaatg

SEQ ID NO: 192022 - DNA, 15 bp, Homo sapiens
cagattttagagaat

SEQ ID NO: 192023 - DNA, 15 bp, Homo sapiens
gcagattttagagaa

SEQ ID NO: 192024 - DNA, 15 bp, Homo sapiens
tgcagattttagaga

SEQ ID NO: 192025 - DNA, 15 bp, Homo sapiens
ctgcagattttagag

SEQ ID NO: 192026 - DNA, 15 bp, Homo sapiens
gctgcagattttaga

SEQ ID NO: 192027 - DNA, 15 bp, Homo sapiens
tgctgcagattttag

SEQ ID NO: 192028 - DNA, 15 bp, Homo sapiens
ttgctgcagatttta

SEQ ID NO: 192029 - DNA, 15 bp, Homo sapiens
cttgctgcagatttt

SEQ ID NO: 192030 - DNA, 15 bp, Homo sapiens
gcttgctgcagattt

SEQ ID NO: 192031 - DNA, 15 bp, Homo sapiens
agcttgctgcagatt

SEQ ID NO: 192032 - DNA, 15 bp, Homo sapiens
aagcttgctgcagat

SEQ ID NO: 192033 - DNA, 15 bp, Homo sapiens
aaagcttgctgcaga

SEQ ID NO: 192034 - DNA, 15 bp, Homo sapiens
aaaagcttgctgcag

SEQ ID NO: 192035 - DNA, 15 bp, Homo sapiens
caaaagcttgctgca

SEQ ID NO: 192036 - DNA, 15 bp, Homo sapiens
acaaaagcttgctgc

SEQ ID NO: 192037 - DNA, 15 bp, Homo sapiens
gacaaaagcttgctg

SEQ ID NO: 192038 - DNA, 15 bp, Homo sapiens
agacaaaagcttgct

SEQ ID NO: 192039 - DNA, 15 bp, Homo sapiens
aagacaaaagcttgc

SEQ ID NO: 192040 - DNA, 15 bp, Homo sapiens
gaagacaaaagcttg

SEQ ID NO: 192041 - DNA, 15 bp, Homo sapiens
agaagacaaaagctt

SEQ ID NO: 192042 - DNA, 15 bp, Homo sapiens
cagaagacaaaagct

SEQ ID NO: 192043 - DNA, 15 bp, Homo sapiens
ccagaagacaaaagc

SEQ ID NO: 192044 - DNA, 15 bp, Homo sapiens
tccagaagacaaaag

SEQ ID NO: 192045 - DNA, 15 bp, Homo sapiens
ttccagaagacaaaa

SEQ ID NO: 192046 - DNA, 15 bp, Homo sapiens
cttccagaagacaaa

SEQ ID NO: 192047 - DNA, 15 bp, Homo sapiens
acttccagaagacaa

SEQ ID NO: 192048 - DNA, 15 bp, Homo sapiens
aacttccagaagaca

SEQ ID NO: 192049 - DNA, 15 bp, Homo sapiens
taacttccagaagac

SEQ ID NO: 192050 - DNA, 15 bp, Homo sapiens
ctaacttccagaaga

SEQ ID NO: 192051 - DNA, 15 bp, Homo sapiens
gctaacttccagaag

SEQ ID NO: 192052 - DNA, 15 bp, Homo sapiens
agctaacttccagaa

SEQ ID NO: 192053 - DNA, 15 bp, Homo sapiens
aagctaacttccaga

SEQ ID NO: 192054 - DNA, 15 bp, Homo sapiens
gaagctaacttccag

SEQ ID NO: 192055 - DNA, 15 bp, Homo sapiens
agaagctaacttcca

SEQ ID NO: 192056 - DNA, 15 bp, Homo sapiens
gagaagctaacttcc

SEQ ID NO: 192057 - DNA, 15 bp, Homo sapiens
agagaagctaacttc

SEQ ID NO: 192058 - DNA, 15 bp, Homo sapiens
gagagaagctaactt

SEQ ID NO: 192059 - DNA, 15 bp, Homo sapiens
tgagagaagctaact

SEQ ID NO: 192060 - DNA, 15 bp, Homo sapiens
ctgagagaagctaac

SEQ ID NO: 192061 - DNA, 15 bp, Homo sapiens
cctgagagaagctaa

SEQ ID NO: 192062 - DNA, 15 bp, Homo sapiens
gcctgagagaagcta

SEQ ID NO: 192063 - DNA, 15 bp, Homo sapiens
agcctgagagaagct

SEQ ID NO: 192064 - DNA, 15 bp, Homo sapiens
tagcctgagagaagc

SEQ ID NO: 192065 - DNA, 15 bp, Homo sapiens
ttagcctgagagaag

SEQ ID NO: 192066 - DNA, 15 bp, Homo sapiens
gttagcctgagagaa

SEQ ID NO: 192067 - DNA, 15 bp, Homo sapiens
agttagcctgagaga

SEQ ID NO: 192068 - DNA, 15 bp, Homo sapiens
aagttagcctgagag

SEQ ID NO: 192069 - DNA, 15 bp, Homo sapiens
caagttagcctgaga

SEQ ID NO: 192070 - DNA, 15 bp, Homo sapiens
gcaagttagcctgag

SEQ ID NO: 192071 - DNA, 15 bp, Homo sapiens
ggcaagttagcctga

SEQ ID NO: 192072 - DNA, 15 bp, Homo sapiens
gggcaagttagcctg

SEQ ID NO: 192073 - DNA, 15 bp, Homo sapiens
tgggcaagttagcct

SEQ ID NO: 192074 - DNA, 15 bp, Homo sapiens
atgggcaagttagcc

SEQ ID NO: 192075 - DNA, 15 bp, Homo sapiens
aatgggcaagttagc

SEQ ID NO: 192076 - DNA, 15 bp, Homo sapiens
caatgggcaagttag

SEQ ID NO: 192077 - DNA, 15 bp, Homo sapiens
acaatgggcaagtta

SEQ ID NO: 192078 - DNA, 15 bp, Homo sapiens
gacaatgggcaagtt

SEQ ID NO: 192079 - DNA, 15 bp, Homo sapiens
agacaatgggcaagt

SEQ ID NO: 192080 - DNA, 15 bp, Homo sapiens
gagacaatgggcaag

SEQ ID NO: 192081 - DNA, 15 bp, Homo sapiens
agagacaatgggcaa

SEQ ID NO: 192082 - DNA, 15 bp, Homo sapiens
gagagacaatgggca

SEQ ID NO: 192083 - DNA, 15 bp, Homo sapiens
tgagagacaatgggc

SEQ ID NO: 192084 - DNA, 15 bp, Homo sapiens
ctgagagacaatggg

SEQ ID NO: 192085 - DNA, 15 bp, Homo sapiens
cctgagagacaatgg

SEQ ID NO: 192086 - DNA, 15 bp, Homo sapiens
gcctgagagacaatg

SEQ ID NO: 192087 - DNA, 15 bp, Homo sapiens
tgcctgagagacaat

SEQ ID NO: 192088 - DNA, 15 bp, Homo sapiens
ttgcctgagagacaa

SEQ ID NO: 192089 - DNA, 15 bp, Homo sapiens
gttgcctgagagaca

SEQ ID NO: 192090 - DNA, 15 bp, Homo sapiens
tgttgcctgagagac

SEQ ID NO: 192091 - DNA, 15 bp, Homo sapiens
atgttgcctgagaga

SEQ ID NO: 192092 - DNA, 15 bp, Homo sapiens
tatgttgcctgagag

SEQ ID NO: 192093 - DNA, 15 bp, Homo sapiens
atatgttgcctgaga

SEQ ID NO: 192094 - DNA, 15 bp, Homo sapiens
aatatgttgcctgag

SEQ ID NO: 192095 - DNA, 15 bp, Homo sapiens
aaatatgttgcctga

SEQ ID NO: 192096 - DNA, 15 bp, Homo sapiens
gaaatatgttgcctg

SEQ ID NO: 192097 - DNA, 15 bp, Homo sapiens
ggaaatatgttgcct

SEQ ID NO: 192098 - DNA, 15 bp, Homo sapiens
gggaaatatgttgcc

SEQ ID NO: 192099 - DNA, 15 bp, Homo sapiens
ggggaaatatgttgc

SEQ ID NO: 192100 - DNA, 15 bp, Homo sapiens
tggggaaatatgttg

SEQ ID NO: 192101 - DNA, 15 bp, Homo sapiens
gtggggaaatatgtt

SEQ ID NO: 192102 - DNA, 15 bp, Homo sapiens
agtggggaaatatgt

SEQ ID NO: 192103 - DNA, 15 bp, Homo sapiens
aagtggggaaatatg

SEQ ID NO: 192104 - DNA, 15 bp, Homo sapiens
aaagtggggaaatat

SEQ ID NO: 192105 - DNA, 15 bp, Homo sapiens
gaaagtggggaaata

SEQ ID NO: 192106 - DNA, 15 bp, Homo sapiens
agaaagtggggaaat

SEQ ID NO: 192107 - DNA, 15 bp, Homo sapiens
gagaaagtggggaaa

SEQ ID NO: 192108 - DNA, 15 bp, Homo sapiens
agagaaagtggggaa

SEQ ID NO: 192109 - DNA, 15 bp, Homo sapiens
tagagaaagtgggga

SEQ ID NO: 192110 - DNA, 15 bp, Homo sapiens
ttagagaaagtgggg

SEQ ID NO: 192111 - DNA, 15 bp, Homo sapiens
attagagaaagtggg

SEQ ID NO: 192112 - DNA, 15 bp, Homo sapiens
tattagagaaagtgg

SEQ ID NO: 192113 - DNA, 15 bp, Homo sapiens
ttattagagaaagtg

SEQ ID NO: 192114 - DNA, 15 bp, Homo sapiens
tttattagagaaagt

SEQ ID NO: 192115 - DNA, 15 bp, Homo sapiens
atttattagagaaag

SEQ ID NO: 192116 - DNA, 15 bp, Homo sapiens
gatttattagagaaa

SEQ ID NO: 192117 - DNA, 15 bp, Homo sapiens
agatttattagagaa

SEQ ID NO: 192118 - DNA, 15 bp, Homo sapiens
cagatttattagaga

SEQ ID NO: 192119 - DNA, 15 bp, Homo sapiens
gcagatttattagag

SEQ ID NO: 192120 - DNA, 15 bp, Homo sapiens
ggcagatttattaga

SEQ ID NO: 192121 - DNA, 15 bp, Homo sapiens
aggcagatttattag

SEQ ID NO: 192122 - DNA, 15 bp, Homo sapiens
aaggcagatttatta

SEQ ID NO: 192123 - DNA, 15 bp, Homo sapiens
aaaggcagatttatt

SEQ ID NO: 192124 - DNA, 15 bp, Homo sapiens
caagaaaggcagatt

SEQ ID NO: 192125 - DNA, 15 bp, Homo sapiens
tcaagaaaggcagat

SEQ ID NO: 192126 - DNA, 15 bp, Homo sapiens
gtcaagaaaggcaga

SEQ ID NO: 192127 - DNA, 15 bp, Homo sapiens
ggtcaagaaaggcag

SEQ ID NO: 192128 - DNA, 15 bp, Homo sapiens
aggtcaagaaaggca

SEQ ID NO: 192129 - DNA, 15 bp, Homo sapiens
taggtcaagaaaggc

SEQ ID NO: 192130 - DNA, 15 bp, Homo sapiens
ataggtcaagaaagg

SEQ ID NO: 192131 - DNA, 15 bp, Homo sapiens
cataggtcaagaaag

SEQ ID NO: 192132 - DNA, 15 bp, Homo sapiens
tcataggtcaagaaa

SEQ ID NO: 192133 - DNA, 15 bp, Homo sapiens
atcataggtcaagaa

SEQ ID NO: 192134 - DNA, 15 bp, Homo sapiens
aatcataggtcaaga

SEQ ID NO: 192135 - DNA, 15 bp, Homo sapiens
aaatcataggtcaag

SEQ ID NO: 192136 - DNA, 15 bp, Homo sapiens
aaaatcataggtcaa

SEQ ID NO: 192137 - DNA, 15 bp, Homo sapiens
gaaaatcataggtca

SEQ ID NO: 192138 - DNA, 15 bp, Homo sapiens
agaaaatcataggtc

SEQ ID NO: 192139 - DNA, 15 bp, Homo sapiens
aagaaaatcataggt

SEQ ID NO: 192140 - DNA, 15 bp, Homo sapiens
caagaaaatcatagg

SEQ ID NO: 192141 - DNA, 15 bp, Homo sapiens
ccaagaaaatcatag

SEQ ID NO: 192142 - DNA, 15 bp, Homo sapiens
accaagaaaatcata

SEQ ID NO: 192143 - DNA, 15 bp, Homo sapiens
taccaagaaaatcat

SEQ ID NO: 192144 - DNA, 15 bp, Homo sapiens
ttaccaagaaaatca

SEQ ID NO: 192145 - DNA, 15 bp, Homo sapiens
tttaccaagaaaatc

SEQ ID NO: 192146 - DNA, 15 bp, Homo sapiens
atttaccaagaaaat

SEQ ID NO: 192147 - DNA, 15 bp, Homo sapiens
aatttaccaagaaaa

SEQ ID NO: 192148 - DNA, 15 bp, Homo sapiens
gaatttaccaagaaa

SEQ ID NO: 192149 - DNA, 15 bp, Homo sapiens
agaatttaccaagaa

SEQ ID NO: 192150 - DNA, 15 bp, Homo sapiens
aagaatttaccaaga

SEQ ID NO: 192151 - DNA, 15 bp, Homo sapiens
aaagaatttaccaag

SEQ ID NO: 192152 - DNA, 15 bp, Homo sapiens
aaaagaatttaccaa

SEQ ID NO: 192153 - DNA, 15 bp, Homo sapiens
taaaagaatttacca

SEQ ID NO: 192154 - DNA, 15 bp, Homo sapiens
gtaaaagaatttacc

SEQ ID NO: 192155 - DNA, 15 bp, Homo sapiens
ggtaaaagaatttac

SEQ ID NO: 192156 - DNA, 15 bp, Homo sapiens
gggtaaaagaattta

SEQ ID NO: 192157 - DNA, 15 bp, Homo sapiens
ggggtaaaagaattt

SEQ ID NO: 192158 - DNA, 15 bp, Homo sapiens
aggggtaaaagaatt

SEQ ID NO: 192159 - DNA, 15 bp, Homo sapiens
caggggtaaaagaat

SEQ ID NO: 192160 - DNA, 15 bp, Homo sapiens
acaggggtaaaagaa

SEQ ID NO: 192161 - DNA, 15 bp, Homo sapiens
cacaggggtaaaaga

SEQ ID NO: 192162 - DNA, 15 bp, Homo sapiens
gcacaggggtaaaag

SEQ ID NO: 192163 - DNA, 15 bp, Homo sapiens
ggcacaggggtaaaa

SEQ ID NO: 192164 - DNA, 15 bp, Homo sapiens
tggcacaggggtaaa

SEQ ID NO: 192165 - DNA, 15 bp, Homo sapiens
atggcacaggggtaa

SEQ ID NO: 192166 - DNA, 15 bp, Homo sapiens
gatggcacaggggta

SEQ ID NO: 192167 - DNA, 15 bp, Homo sapiens
tgatggcacaggggt

SEQ ID NO: 192168 - DNA, 15 bp, Homo sapiens
ctgatggcacagggg

SEQ ID NO: 192169 - DNA, 15 bp, Homo sapiens
gctgatggcacaggg

SEQ ID NO: 192170 - DNA, 15 bp, Homo sapiens
ggctgatggcacagg

SEQ ID NO: 192171 - DNA, 15 bp, Homo sapiens
aggctgatggcacag

SEQ ID NO: 192172 - DNA, 15 bp, Homo sapiens
caggctgatggcaca

SEQ ID NO: 192173 - DNA, 15 bp, Homo sapiens
gcaggctgatggcac

SEQ ID NO: 192174 - DNA, 15 bp, Homo sapiens
tgcaggctgatggca

SEQ ID NO: 192175 - DNA, 15 bp, Homo sapiens
atgcaggctgatggc

SEQ ID NO: 192176 - DNA, 15 bp, Homo sapiens
aatgcaggctgatgg

SEQ ID NO: 192177 - DNA, 15 bp, Homo sapiens
gaatgcaggctgatg

SEQ ID NO: 192178 - DNA, 15 bp, Homo sapiens
cgaatgcaggctgat

SEQ ID NO: 192179 - DNA, 15 bp, Homo sapiens
gcgaatgcaggctga

SEQ ID NO: 192180 - DNA, 15 bp, Homo sapiens
ggcgaatgcaggctg

SEQ ID NO: 192181 - DNA, 15 bp, Homo sapiens
gggcgaatgcaggct

SEQ ID NO: 192182 - DNA, 15 bp, Homo sapiens
tgggcgaatgcaggc

SEQ ID NO: 192183 - DNA, 15 bp, Homo sapiens
atgggcgaatgcagg

SEQ ID NO: 192184 - DNA, 15 bp, Homo sapiens
catgggcgaatgcag

SEQ ID NO: 192185 - DNA, 15 bp, Homo sapiens
tcatgggcgaatgca

SEQ ID NO: 192186 - DNA, 15 bp, Homo sapiens
gtcatgggcgaatgc

SEQ ID NO: 192187 - DNA, 15 bp, Homo sapiens
tgtcatgggcgaatg

SEQ ID NO: 192188 - DNA, 15 bp, Homo sapiens
ctgtcatgggcgaat

SEQ ID NO: 192189 - DNA, 15 bp, Homo sapiens
cctgtcatgggcgaa

SEQ ID NO: 192190 - DNA, 15 bp, Homo sapiens
ccctgtcatgggcga

SEQ ID NO: 192191 - DNA, 15 bp, Homo sapiens
tccctgtcatgggcg

SEQ ID NO: 192192 - DNA, 15 bp, Homo sapiens
gtccctgtcatgggc

SEQ ID NO: 192193 - DNA, 15 bp, Homo sapiens
cgtccctgtcatggg

SEQ ID NO: 192194 - DNA, 15 bp, Homo sapiens
tcgtccctgtcatgg

SEQ ID NO: 192195 - DNA, 15 bp, Homo sapiens
gtcgtccctgtcatg

SEQ ID NO: 192196 - DNA, 15 bp, Homo sapiens
agtcgtccctgtcat

SEQ ID NO: 192197 - DNA, 15 bp, Homo sapiens
cagtcgtccctgtca

SEQ ID NO: 192198 - DNA, 15 bp, Homo sapiens
acagtcgtccctgtc

SEQ ID NO: 192199 - DNA, 15 bp, Homo sapiens
tacagtcgtccctgt

SEQ ID NO: 192200 - DNA, 15 bp, Homo sapiens
atacagtcgtccctg

SEQ ID NO: 192201 - DNA, 15 bp, Homo sapiens
tatacagtcgtccct

SEQ ID NO: 192202 - DNA, 15 bp, Homo sapiens
ctatacagtcgtccc

SEQ ID NO: 192203 - DNA, 15 bp, Homo sapiens
actatacagtcgtcc

SEQ ID NO: 192204 - DNA, 15 bp, Homo sapiens
gactatacagtcgtc

SEQ ID NO: 192205 - DNA, 15 bp, Homo sapiens
tgactatacagtcgt

SEQ ID NO: 192206 - DNA, 15 bp, Homo sapiens
gtgactatacagtcg

SEQ ID NO: 192207 - DNA, 15 bp, Homo sapiens
tgtgactatacagtc

SEQ ID NO: 192208 - DNA, 15 bp, Homo sapiens
atgtgactatacagt

SEQ ID NO: 192209 - DNA, 15 bp, Homo sapiens
gatgtgactatacag

SEQ ID NO: 192210 - DNA, 15 bp, Homo sapiens
ggatgtgactataca

SEQ ID NO: 192211 - DNA, 15 bp, Homo sapiens
aggatgtgactatac

SEQ ID NO: 192212 - DNA, 15 bp, Homo sapiens
caggatgtgactata

SEQ ID NO: 192213 - DNA, 15 bp, Homo sapiens
tcaggatgtgactat

SEQ ID NO: 192214 - DNA, 15 bp, Homo sapiens
ctcaggatgtgacta

SEQ ID NO: 192215 - DNA, 15 bp, Homo sapiens
cctcaggatgtgact

SEQ ID NO: 192216 - DNA, 15 bp, Homo sapiens
acctcaggatgtgac

SEQ ID NO: 192217 - DNA, 15 bp, Homo sapiens
gacctcaggatgtga

SEQ ID NO: 192218 - DNA, 15 bp, Homo sapiens
tgacctcaggatgtg

SEQ ID NO: 192219 - DNA, 15 bp, Homo sapiens
ctgacctcaggatgt

SEQ ID NO: 192220 - DNA, 15 bp, Homo sapiens
gctgacctcaggatg

SEQ ID NO: 192221 - DNA, 15 bp, Homo sapiens
agctgacctcaggat

SEQ ID NO: 192222 - DNA, 15 bp, Homo sapiens
cagctgacctcagga

SEQ ID NO: 192223 - DNA, 15 bp, Homo sapiens
tcagctgacctcagg

SEQ ID NO: 192224 - DNA, 15 bp, Homo sapiens
gtcagctgacctcag

SEQ ID NO: 192225 - DNA, 15 bp, Homo sapiens
tgtcagctgacctca

SEQ ID NO: 192226 - DNA, 15 bp, Homo sapiens
ctgtcagctgacctc

SEQ ID NO: 192227 - DNA, 15 bp, Homo sapiens
actgtcagctgacct

SEQ ID NO: 192228 - DNA, 15 bp, Homo sapiens
tactgtcagctgacc

SEQ ID NO: 192229 - DNA, 15 bp, Homo sapiens
gtactgtcagctgac

SEQ ID NO: 192230 - DNA, 15 bp, Homo sapiens
cgtactgtcagctga

SEQ ID NO: 192231 - DNA, 15 bp, Homo sapiens
gcgtactgtcagctg

SEQ ID NO: 192232 - DNA, 15 bp, Homo sapiens
tgcgtactgtcagct

SEQ ID NO: 192233 - DNA, 15 bp, Homo sapiens
ctgcgtactgtcagc

SEQ ID NO: 192234 - DNA, 15 bp, Homo sapiens
tctgcgtactgtcag

SEQ ID NO: 192235 - DNA, 15 bp, Homo sapiens
atctgcgtactgtca

SEQ ID NO: 192236 - DNA, 15 bp, Homo sapiens
catctgcgtactgtc

SEQ ID NO: 192237 - DNA, 15 bp, Homo sapiens
tcatctgcgtactgt

SEQ ID NO: 192238 - DNA, 15 bp, Homo sapiens
ctcatctgcgtactg

SEQ ID NO: 192239 - DNA, 15 bp, Homo sapiens
gctcatctgcgtact

SEQ ID NO: 192240 - DNA, 15 bp, Homo sapiens
agctcatctgcgtac

SEQ ID NO: 192241 - DNA, 15 bp, Homo sapiens
tagctcatctgcgta

SEQ ID NO: 192242 - DNA, 15 bp, Homo sapiens
atagctcatctgcgt

SEQ ID NO: 192243 - DNA, 15 bp, Homo sapiens
aatagctcatctgcg

SEQ ID NO: 192244 - DNA, 15 bp, Homo sapiens
aaatagctcatctgc

SEQ ID NO: 192245 - DNA, 15 bp, Homo sapiens
taaatagctcatctg

SEQ ID NO: 192246 - DNA, 15 bp, Homo sapiens
gtaaatagctcatct

SEQ ID NO: 192247 - DNA, 15 bp, Homo sapiens
ggtaaatagctcatc

SEQ ID NO: 192248 - DNA, 15 bp, Homo sapiens
tggtaaatagctcat

SEQ ID NO: 192249 - DNA, 15 bp, Homo sapiens
ctggtaaatagctca

SEQ ID NO: 192250 - DNA, 15 bp, Homo sapiens
tctggtaaatagctc

SEQ ID NO: 192251 - DNA, 15 bp, Homo sapiens
atctggtaaatagct

SEQ ID NO: 192252 - DNA, 15 bp, Homo sapiens
tatctggtaaatagc

SEQ ID NO: 192253 - DNA, 15 bp, Homo sapiens
ttatctggtaaatag

SEQ ID NO: 192254 - DNA, 15 bp, Homo sapiens
cttatctggtaaata

SEQ ID NO: 192255 - DNA, 15 bp, Homo sapiens
tcttatctggtaaat

SEQ ID NO: 192256 - DNA, 15 bp, Homo sapiens
atcttatctggtaaa

SEQ ID NO: 192257 - DNA, 15 bp, Homo sapiens
catcttatctggtaa

SEQ ID NO: 192258 - DNA, 15 bp, Homo sapiens
tcatcttatctggta

SEQ ID NO: 192259 - DNA, 15 bp, Homo sapiens
atcatcttatctggt

SEQ ID NO: 192260 - DNA, 15 bp, Homo sapiens
aatcatcttatctgg

SEQ ID NO: 192261 - DNA, 15 bp, Homo sapiens
taatcatcttatctg

SEQ ID NO: 192262 - DNA, 15 bp, Homo sapiens
ttaatcatcttatct

SEQ ID NO: 192263 - DNA, 15 bp, Homo sapiens
tttaatcatcttatc

SEQ ID NO: 192264 - DNA, 15 bp, Homo sapiens
atttaatcatcttat

SEQ ID NO: 192265 - DNA, 15 bp, Homo sapiens
tatttaatcatctta

SEQ ID NO: 192266 - DNA, 15 bp, Homo sapiens
ttatttaatcatctt

SEQ ID NO: 192267 - DNA, 15 bp, Homo sapiens
gttatttaatcatct

SEQ ID NO: 192268 - DNA, 15 bp, Homo sapiens
tgttatttaatcatc

SEQ ID NO: 192269 - DNA, 15 bp, Homo sapiens
ctgttatttaatcat

SEQ ID NO: 192270 - DNA, 15 bp, Homo sapiens
actgttatttaatca

SEQ ID NO: 192271 - DNA, 15 bp, Homo sapiens
gactgttatttaatc

SEQ ID NO: 192272 - DNA, 15 bp, Homo sapiens
tgactgttatttaat

SEQ ID NO: 192273 - DNA, 15 bp, Homo sapiens
atgactgttatttaa

SEQ ID NO: 192274 - DNA, 15 bp, Homo sapiens
aatgactgttattta

SEQ ID NO: 192275 - DNA, 15 bp, Homo sapiens
taatgactgttattt

SEQ ID NO: 192276 - DNA, 15 bp, Homo sapiens
ttaatgactgttatt

SEQ ID NO: 192277 - DNA, 15 bp, Homo sapiens
tttaatgactgttat

SEQ ID NO: 192278 - DNA, 15 bp, Homo sapiens
ttttaatgactgtta

SEQ ID NO: 192279 - DNA, 15 bp, Homo sapiens
tttttaatgactgtt

SEQ ID NO: 192280 - DNA, 15 bp, Homo sapiens
ctttttaatgactgt

SEQ ID NO: 192281 - DNA, 15 bp, Homo sapiens
tctttttaatgactg

SEQ ID NO: 192282 - DNA, 15 bp, Homo sapiens
ttctttttaatgact

SEQ ID NO: 192283 - DNA, 15 bp, Homo sapiens
attctttttaatgac

SEQ ID NO: 192284 - DNA, 15 bp, Homo sapiens
tattctttttaatga

SEQ ID NO: 192285 - DNA, 15 bp, Homo sapiens
ttattctttttaatg

SEQ ID NO: 192286 - DNA, 15 bp, Homo sapiens
gttattctttttaat

SEQ ID NO: 192287 - DNA, 15 bp, Homo sapiens
ggttattctttttaa

SEQ ID NO: 192288 - DNA, 15 bp, Homo sapiens
tggttattcttttta

SEQ ID NO: 192289 - DNA, 15 bp, Homo sapiens
ttggttattcttttt

SEQ ID NO: 192290 - DNA, 15 bp, Homo sapiens
attggttattctttt

SEQ ID NO: 192291 - DNA, 15 bp, Homo sapiens
gattggttattcttt

SEQ ID NO: 192292 - DNA, 15 bp, Homo sapiens
agattggttattctt

SEQ ID NO: 192293 - DNA, 15 bp, Homo sapiens
aagattggttattct

SEQ ID NO: 192294 - DNA, 15 bp, Homo sapiens
aaagattggttattc

SEQ ID NO: 192295 - DNA, 15 bp, Homo sapiens
taaagattggttatt

SEQ ID NO: 192296 - DNA, 15 bp, Homo sapiens
ataaagattggttat

SEQ ID NO: 192297 - DNA, 15 bp, Homo sapiens
aataaagattggtta

SEQ ID NO: 192298 - DNA, 15 bp, Homo sapiens
caataaagattggtt

SEQ ID NO: 192299 - DNA, 15 bp, Homo sapiens
tcaataaagattggt

SEQ ID NO: 192300 - DNA, 15 bp, Homo sapiens
ctcaataaagattgg

SEQ ID NO: 192301 - DNA, 15 bp, Homo sapiens
gctcaataaagattg

SEQ ID NO: 192302 - DNA, 15 bp, Homo sapiens
tgctcaataaagatt

SEQ ID NO: 192303 - DNA, 15 bp, Homo sapiens
gtgctcaataaagat

SEQ ID NO: 192304 - DNA, 15 bp, Homo sapiens
agtgctcaataaaga

SEQ ID NO: 192305 - DNA, 15 bp, Homo sapiens
aagtgctcaataaag

SEQ ID NO: 192306 - DNA, 15 bp, Homo sapiens
taagtgctcaataaa

SEQ ID NO: 192307 - DNA, 15 bp, Homo sapiens
gtaagtgctcaataa

SEQ ID NO: 192308 - DNA, 15 bp, Homo sapiens
agtaagtgctcaata

SEQ ID NO: 192309 - DNA, 15 bp, Homo sapiens
tagtaagtgctcaat

SEQ ID NO: 192310 - DNA, 15 bp, Homo sapiens
ctagtaagtgctcaa

SEQ ID NO: 192311 - DNA, 15 bp, Homo sapiens
tctagtaagtgctca

SEQ ID NO: 192312 - DNA, 15 bp, Homo sapiens
atctagtaagtgctc

SEQ ID NO: 192313 - DNA, 15 bp, Homo sapiens
catctagtaagtgct

SEQ ID NO: 192314 - DNA, 15 bp, Homo sapiens
gcatctagtaagtgc

SEQ ID NO: 192315 - DNA, 15 bp, Homo sapiens
ggcatctagtaagtg

SEQ ID NO: 192316 - DNA, 15 bp, Homo sapiens
tggcatctagtaagt

SEQ ID NO: 192317 - DNA, 15 bp, Homo sapiens
ctggcatctagtaag

SEQ ID NO: 192318 - DNA, 15 bp, Homo sapiens
cctggcatctagtaa

SEQ ID NO: 192319 - DNA, 15 bp, Homo sapiens
gcctggcatctagta

SEQ ID NO: 192320 - DNA, 15 bp, Homo sapiens
tgcctggcatctagt

SEQ ID NO: 192321 - DNA, 15 bp, Homo sapiens
atgcctggcatctag

SEQ ID NO: 192322 - DNA, 15 bp, Homo sapiens
aatgcctggcatcta

SEQ ID NO: 192323 - DNA, 15 bp, Homo sapiens
gaatgcctggcatct

SEQ ID NO: 192324 - DNA, 15 bp, Homo sapiens
ggaatgcctggcatc

SEQ ID NO: 192325 - DNA, 15 bp, Homo sapiens
gggaatgcctggcat

SEQ ID NO: 192326 - DNA, 15 bp, Homo sapiens
ggggaatgcctggca

SEQ ID NO: 192327 - DNA, 15 bp, Homo sapiens
tggggaatgcctggc

SEQ ID NO: 192328 - DNA, 15 bp, Homo sapiens
ttggggaatgcctgg

SEQ ID NO: 192329 - DNA, 15 bp, Homo sapiens
cttggggaatgcctg

SEQ ID NO: 192330 - DNA, 15 bp, Homo sapiens
gcttggggaatgcct

SEQ ID NO: 192331 - DNA, 15 bp, Homo sapiens
tgcttggggaatgcc

SEQ ID NO: 192332 - DNA, 15 bp, Homo sapiens
atgcttggggaatgc

SEQ ID NO: 192333 - DNA, 15 bp, Homo sapiens
gatgcttggggaatg

SEQ ID NO: 192334 - DNA, 15 bp, Homo sapiens
ggatgcttggggaat

SEQ ID NO: 192335 - DNA, 15 bp, Homo sapiens
aggatgcttggggaa

SEQ ID NO: 192336 - DNA, 15 bp, Homo sapiens
caggatgcttgggga

SEQ ID NO: 192337 - DNA, 15 bp, Homo sapiens
gcaggatgcttgggg

SEQ ID NO: 192338 - DNA, 15 bp, Homo sapiens
agcaggatgcttggg

SEQ ID NO: 192339 - DNA, 15 bp, Homo sapiens
aagcaggatgcttgg

SEQ ID NO: 192340 - DNA, 15 bp, Homo sapiens
caagcaggatgcttg

SEQ ID NO: 192341 - DNA, 15 bp, Homo sapiens
gcaagcaggatgctt

SEQ ID NO: 192342 - DNA, 15 bp, Homo sapiens
agcaagcaggatgct

SEQ ID NO: 192343 - DNA, 15 bp, Homo sapiens
aagcaagcaggatgc

SEQ ID NO: 192344 - DNA, 15 bp, Homo sapiens
aaagcaagcaggatg

SEQ ID NO: 192345 - DNA, 15 bp, Homo sapiens
taaagcaagcaggat

SEQ ID NO: 192346 - DNA, 15 bp, Homo sapiens
ataaagcaagcagga

SEQ ID NO: 192347 - DNA, 15 bp, Homo sapiens
aataaagcaagcagg

SEQ ID NO: 192348 - DNA, 15 bp, Homo sapiens
aaataaagcaagcag

SEQ ID NO: 192349 - DNA, 15 bp, Homo sapiens
gaaataaagcaagca

SEQ ID NO: 192350 - DNA, 15 bp, Homo sapiens
agaaataaagcaagc

SEQ ID NO: 192351 - DNA, 15 bp, Homo sapiens
cagaaataaagcaag

SEQ ID NO: 192352 - DNA, 15 bp, Homo sapiens
gcagaaataaagcaa

SEQ ID NO: 192353 - DNA, 15 bp, Homo sapiens
tgcagaaataaagca

SEQ ID NO: 192354 - DNA, 15 bp, Homo sapiens
atgcagaaataaagc

SEQ ID NO: 192355 - DNA, 15 bp, Homo sapiens
gatgcagaaataaag

SEQ ID NO: 192356 - DNA, 15 bp, Homo sapiens
tgatgcagaaataaa

SEQ ID NO: 192357 - DNA, 15 bp, Homo sapiens
gtgatgcagaaataa

SEQ ID NO: 192358 - DNA, 15 bp, Homo sapiens
tgtgatgcagaaata

SEQ ID NO: 192359 - DNA, 15 bp, Homo sapiens
ctgtgatgcagaaat

SEQ ID NO: 192360 - DNA, 15 bp, Homo sapiens
tctgtgatgcagaaa

SEQ ID NO: 192361 - DNA, 15 bp, Homo sapiens
ttctgtgatgcagaa

SEQ ID NO: 192362 - DNA, 15 bp, Homo sapiens
tttctgtgatgcaga

SEQ ID NO: 192363 - DNA, 15 bp, Homo sapiens
atttctgtgatgcag

SEQ ID NO: 192364 - DNA, 15 bp, Homo sapiens
aatttctgtgatgca

SEQ ID NO: 192365 - DNA, 15 bp, Homo sapiens
gaatttctgtgatgc

SEQ ID NO: 192366 - DNA, 15 bp, Homo sapiens
agaatttctgtgatg

SEQ ID NO: 192367 - DNA, 15 bp, Homo sapiens
tagaatttctgtgat

SEQ ID NO: 192368 - DNA, 15 bp, Homo sapiens
atagaatttctgtga

SEQ ID NO: 192369 - DNA, 15 bp, Homo sapiens
catagaatttctgtg

SEQ ID NO: 192370 - DNA, 15 bp, Homo sapiens
tcatagaatttctgt

SEQ ID NO: 192371 - DNA, 15 bp, Homo sapiens
ttcatagaatttctg

SEQ ID NO: 192372 - DNA, 15 bp, Homo sapiens
gttcatagaatttct

SEQ ID NO: 192373 - DNA, 15 bp, Homo sapiens
agttcatagaatttc

SEQ ID NO: 192374 - DNA, 15 bp, Homo sapiens
tagttcatagaattt

SEQ ID NO: 192375 - DNA, 15 bp, Homo sapiens
ctagttcatagaatt

SEQ ID NO: 192376 - DNA, 15 bp, Homo sapiens
cctagttcatagaat

SEQ ID NO: 192377 - DNA, 15 bp, Homo sapiens
gcctagttcatagaa

SEQ ID NO: 192378 - DNA, 15 bp, Homo sapiens
tgcctagttcataga

SEQ ID NO: 192379 - DNA, 15 bp, Homo sapiens
atgcctagttcatag

SEQ ID NO: 192380 - DNA, 15 bp, Homo sapiens
aatgcctagttcata

SEQ ID NO: 192381 - DNA, 15 bp, Homo sapiens
caatgcctagttcat

SEQ ID NO: 192382 - DNA, 15 bp, Homo sapiens
gcaatgcctagttca

SEQ ID NO: 192383 - DNA, 15 bp, Homo sapiens
ggcaatgcctagttc

SEQ ID NO: 192384 - DNA, 15 bp, Homo sapiens
tggcaatgcctagtt

SEQ ID NO: 192385 - DNA, 15 bp, Homo sapiens
atggcaatgcctagt

SEQ ID NO: 192386 - DNA, 15 bp, Homo sapiens
catggcaatgcctag

SEQ ID NO: 192387 - DNA, 15 bp, Homo sapiens
tcatggcaatgccta

SEQ ID NO: 192388 - DNA, 15 bp, Homo sapiens
atcatggcaatgcct

SEQ ID NO: 192389 - DNA, 15 bp, Homo sapiens
aatcatggcaatgcc

SEQ ID NO: 192390 - DNA, 15 bp, Homo sapiens
aaatcatggcaatgc

SEQ ID NO: 192391 - DNA, 15 bp, Homo sapiens
aaaatcatggcaatg

SEQ ID NO: 192392 - DNA, 15 bp, Homo sapiens
gaaaatcatggcaat

SEQ ID NO: 192393 - DNA, 15 bp, Homo sapiens
agaaaatcatggcaa

SEQ ID NO: 192394 - DNA, 15 bp, Homo sapiens
gagaaaatcatggca

SEQ ID NO: 192395 - DNA, 15 bp, Homo sapiens
agagaaaatcatggc

SEQ ID NO: 192396 - DNA, 15 bp, Homo sapiens
gagagaaaatcatgg

SEQ ID NO: 192397 - DNA, 15 bp, Homo sapiens
ggagagaaaatcatg

SEQ ID NO: 192398 - DNA, 15 bp, Homo sapiens
gggagagaaaatcat

SEQ ID NO: 192399 - DNA, 15 bp, Homo sapiens
agggagagaaaatca

SEQ ID NO: 192400 - DNA, 15 bp, Homo sapiens
aagggagagaaaatc

SEQ ID NO: 192401 - DNA, 15 bp, Homo sapiens
taagggagagaaaat

SEQ ID NO: 192402 - DNA, 15 bp, Homo sapiens
ctaagggagagaaaa

SEQ ID NO: 192403 - DNA, 15 bp, Homo sapiens
tctaagggagagaaa

SEQ ID NO: 192404 - DNA, 15 bp, Homo sapiens
ctctaagggagagaa

SEQ ID NO: 192405 - DNA, 15 bp, Homo sapiens
tctctaagggagaga

SEQ ID NO: 192406 - DNA, 15 bp, Homo sapiens
atctctaagggagag

SEQ ID NO: 192407 - DNA, 15 bp, Homo sapiens
tatctctaagggaga

SEQ ID NO: 192408 - DNA, 15 bp, Homo sapiens
ttatctctaagggag

SEQ ID NO: 192409 - DNA, 15 bp, Homo sapiens
tttatctctaaggga

SEQ ID NO: 192410 - DNA, 15 bp, Homo sapiens
ctttatctctaaggg

SEQ ID NO: 192411 - DNA, 15 bp, Homo sapiens
tctttatctctaagg

SEQ ID NO: 192412 - DNA, 15 bp, Homo sapiens
ctctttatctctaag

SEQ ID NO: 192413 - DNA, 15 bp, Homo sapiens
cctctttatctctaa

SEQ ID NO: 192414 - DNA, 15 bp, Homo sapiens
gcctctttatctcta

SEQ ID NO: 192415 - DNA, 15 bp, Homo sapiens
agcctctttatctct

SEQ ID NO: 192416 - DNA, 15 bp, Homo sapiens
cagcctctttatctc

SEQ ID NO: 192417 - DNA, 15 bp, Homo sapiens
acagcctctttatct

SEQ ID NO: 192418 - DNA, 15 bp, Homo sapiens
cacagcctctttatc

SEQ ID NO: 192419 - DNA, 15 bp, Homo sapiens
ccacagcctctttat

SEQ ID NO: 192420 - DNA, 15 bp, Homo sapiens
gccacagcctcttta

SEQ ID NO: 192421 - DNA, 15 bp, Homo sapiens
agccacagcctcttt

SEQ ID NO: 192422 - DNA, 15 bp, Homo sapiens
aagccacagcctctt

SEQ ID NO: 192423 - DNA, 15 bp, Homo sapiens
caagccacagcctct

SEQ ID NO: 192424 - DNA, 15 bp, Homo sapiens
ccaagccacagcctc

SEQ ID NO: 192425 - DNA, 15 bp, Homo sapiens
cccaagccacagcct

SEQ ID NO: 192426 - DNA, 15 bp, Homo sapiens
tcccaagccacagcc

SEQ ID NO: 192427 - DNA, 15 bp, Homo sapiens
ttcccaagccacagc

SEQ ID NO: 192428 - DNA, 15 bp, Homo sapiens
cttcccaagccacag

SEQ ID NO: 192429 - DNA, 15 bp, Homo sapiens
acttcccaagccaca

SEQ ID NO: 192430 - DNA, 15 bp, Homo sapiens
aacttcccaagccac

SEQ ID NO: 192431 - DNA, 15 bp, Homo sapiens
aaacttcccaagcca

SEQ ID NO: 192432 - DNA, 15 bp, Homo sapiens
aaaacttcccaagcc

SEQ ID NO: 192433 - DNA, 15 bp, Homo sapiens
taaaacttcccaagc

SEQ ID NO: 192434 - DNA, 15 bp, Homo sapiens
ttaaaacttcccaag

SEQ ID NO: 192435 - DNA, 15 bp, Homo sapiens
attaaaacttcccaa

SEQ ID NO: 192436 - DNA, 15 bp, Homo sapiens
tattaaaacttccca

SEQ ID NO: 192437 - DNA, 15 bp, Homo sapiens
ttattaaaacttccc

SEQ ID NO: 192438 - DNA, 15 bp, Homo sapiens
gttattaaaacttcc

SEQ ID NO: 192439 - DNA, 15 bp, Homo sapiens
agttattaaaacttc

SEQ ID NO: 192440 - DNA, 15 bp, Homo sapiens
aagttattaaaactt

SEQ ID NO: 192441 - DNA, 15 bp, Homo sapiens
caagttattaaaact

SEQ ID NO: 192442 - DNA, 15 bp, Homo sapiens
gcaagttattaaaac

SEQ ID NO: 192443 - DNA, 15 bp, Homo sapiens
agcaagttattaaaa

SEQ ID NO: 192444 - DNA, 15 bp, Homo sapiens
cagcaagttattaaa

SEQ ID NO: 192445 - DNA, 15 bp, Homo sapiens
acagcaagttattaa

SEQ ID NO: 192446 - DNA, 15 bp, Homo sapiens
cacagcaagttatta

SEQ ID NO: 192447 - DNA, 15 bp, Homo sapiens
acacagcaagttatt

SEQ ID NO: 192448 - DNA, 15 bp, Homo sapiens
aacacagcaagttat

SEQ ID NO: 192449 - DNA, 15 bp, Homo sapiens
gaacacagcaagtta

SEQ ID NO: 192450 - DNA, 15 bp, Homo sapiens
tgaacacagcaagtt

SEQ ID NO: 192451 - DNA, 15 bp, Homo sapiens
gtgaacacagcaagt

SEQ ID NO: 192452 - DNA, 15 bp, Homo sapiens
tgtgaacacagcaag

SEQ ID NO: 192453 - DNA, 15 bp, Homo sapiens
gtgtgaacacagcaa

SEQ ID NO: 192454 - DNA, 15 bp, Homo sapiens
tgtgtgaacacagca

SEQ ID NO: 192455 - DNA, 15 bp, Homo sapiens
ctgtgtgaacacagc

SEQ ID NO: 192456 - DNA, 15 bp, Homo sapiens
gctgtgtgaacacag

SEQ ID NO: 192457 - DNA, 15 bp, Homo sapiens
ggctgtgtgaacaca

SEQ ID NO: 192458 - DNA, 15 bp, Homo sapiens
tggctgtgtgaacac

SEQ ID NO: 192459 - DNA, 15 bp, Homo sapiens
ctggctgtgtgaaca

SEQ ID NO: 192460 - DNA, 15 bp, Homo sapiens
cctggctgtgtgaac

SEQ ID NO: 192461 - DNA, 15 bp, Homo sapiens
gcctggctgtgtgaa

SEQ ID NO: 192462 - DNA, 15 bp, Homo sapiens
tgcctggctgtgtga

SEQ ID NO: 192463 - DNA, 15 bp, Homo sapiens
gtgcctggctgtgtg

SEQ ID NO: 192464 - DNA, 15 bp, Homo sapiens
agtgcctggctgtgt

SEQ ID NO: 192465 - DNA, 15 bp, Homo sapiens
cagtgcctggctgtg

SEQ ID NO: 192466 - DNA, 15 bp, Homo sapiens
ccagtgcctggctgt

SEQ ID NO: 192467 - DNA, 15 bp, Homo sapiens
cccagtgcctggctg

SEQ ID NO: 192468 - DNA, 15 bp, Homo sapiens
tcccagtgcctggct

SEQ ID NO: 192469 - DNA, 15 bp, Homo sapiens
ctcccagtgcctggc

SEQ ID NO: 192470 - DNA, 15 bp, Homo sapiens
tctcccagtgcctgg

SEQ ID NO: 192471 - DNA, 15 bp, Homo sapiens
atctcccagtgcctg

SEQ ID NO: 192472 - DNA, 15 bp, Homo sapiens
gatctcccagtgcct

SEQ ID NO: 192473 - DNA, 15 bp, Homo sapiens
agatctcccagtgcc

SEQ ID NO: 192474 - DNA, 15 bp, Homo sapiens
cagatctcccagtgc

SEQ ID NO: 192475 - DNA, 15 bp, Homo sapiens
ccagatctcccagtg

SEQ ID NO: 192476 - DNA, 15 bp, Homo sapiens
cccagatctcccagt

SEQ ID NO: 192477 - DNA, 15 bp, Homo sapiens
tcccagatctcccag

SEQ ID NO: 192478 - DNA, 15 bp, Homo sapiens
gtcccagatctccca

SEQ ID NO: 192479 - DNA, 15 bp, Homo sapiens
agtcccagatctccc

SEQ ID NO: 192480 - DNA, 15 bp, Homo sapiens
aagtcccagatctcc

SEQ ID NO: 192481 - DNA, 15 bp, Homo sapiens
caagtcccagatctc

SEQ ID NO: 192482 - DNA, 15 bp, Homo sapiens
gcaagtcccagatct

SEQ ID NO: 192483 - DNA, 15 bp, Homo sapiens
tgcaagtcccagatc

SEQ ID NO: 192484 - DNA, 15 bp, Homo sapiens
ttgcaagtcccagat

SEQ ID NO: 192485 - DNA, 15 bp, Homo sapiens
tttgcaagtcccaga

SEQ ID NO: 192486 - DNA, 15 bp, Homo sapiens
gtttgcaagtcccag

SEQ ID NO: 192487 - DNA, 15 bp, Homo sapiens
cgtttgcaagtccca

SEQ ID NO: 192488 - DNA, 15 bp, Homo sapiens
acgtttgcaagtccc

SEQ ID NO: 192489 - DNA, 15 bp, Homo sapiens
cacgtttgcaagtcc

SEQ ID NO: 192490 - DNA, 15 bp, Homo sapiens
gcacgtttgcaagtc

SEQ ID NO: 192491 - DNA, 15 bp, Homo sapiens
agcacgtttgcaagt

SEQ ID NO: 192492 - DNA, 15 bp, Homo sapiens
gagcacgtttgcaag

SEQ ID NO: 192493 - DNA, 15 bp, Homo sapiens
agagcacgtttgcaa

SEQ ID NO: 192494 - DNA, 15 bp, Homo sapiens
aagagcacgtttgca

SEQ ID NO: 192495 - DNA, 15 bp, Homo sapiens
aaagagcacgtttgc

SEQ ID NO: 192496 - DNA, 15 bp, Homo sapiens
aaaagagcacgtttg

SEQ ID NO: 192497 - DNA, 15 bp, Homo sapiens
gaaaagagcacgttt

SEQ ID NO: 192498 - DNA, 15 bp, Homo sapiens
agaaaagagcacgtt

SEQ ID NO: 192499 - DNA, 15 bp, Homo sapiens
cagaaaagagcacgt

SEQ ID NO: 192500 - DNA, 15 bp, Homo sapiens
tcagaaaagagcacg

SEQ ID NO: 192501 - DNA, 15 bp, Homo sapiens
gtcagaaaagagcac

SEQ ID NO: 192502 - DNA, 15 bp, Homo sapiens
agtcagaaaagagca

SEQ ID NO: 192503 - DNA, 15 bp, Homo sapiens
gagtcagaaaagagc

SEQ ID NO: 192504 - DNA, 15 bp, Homo sapiens
ggagtcagaaaagag

SEQ ID NO: 192505 - DNA, 15 bp, Homo sapiens
tggagtcagaaaaga

SEQ ID NO: 192506 - DNA, 15 bp, Homo sapiens
ctggagtcagaaaag

SEQ ID NO: 192507 - DNA, 15 bp, Homo sapiens
tctggagtcagaaaa

SEQ ID NO: 192508 - DNA, 15 bp, Homo sapiens
ctctggagtcagaaa

SEQ ID NO: 192509 - DNA, 15 bp, Homo sapiens
actctggagtcagaa

SEQ ID NO: 192510 - DNA, 15 bp, Homo sapiens
gactctggagtcaga

SEQ ID NO: 192511 - DNA, 15 bp, Homo sapiens
ggactctggagtcag

SEQ ID NO: 192512 - DNA, 15 bp, Homo sapiens
tggactctggagtca

SEQ ID NO: 192513 - DNA, 15 bp, Homo sapiens
atggactctggagtc

SEQ ID NO: 192514 - DNA, 15 bp, Homo sapiens
aatggactctggagt

SEQ ID NO: 192515 - DNA, 15 bp, Homo sapiens
aaatggactctggag

SEQ ID NO: 192516 - DNA, 15 bp, Homo sapiens
aaaatggactctgga

SEQ ID NO: 192517 - DNA, 15 bp, Homo sapiens
gaaaatggactctgg

SEQ ID NO: 192518 - DNA, 15 bp, Homo sapiens
agaaaatggactctg

SEQ ID NO: 192519 - DNA, 15 bp, Homo sapiens
aagaaaatggactct

SEQ ID NO: 192520 - DNA, 15 bp, Homo sapiens
taagaaaatggactc

SEQ ID NO: 192521 - DNA, 15 bp, Homo sapiens
ttaagaaaatggact

SEQ ID NO: 192522 - DNA, 15 bp, Homo sapiens
gttaagaaaatggac

SEQ ID NO: 192523 - DNA, 15 bp, Homo sapiens
agttaagaaaatgga

SEQ ID NO: 192524 - DNA, 15 bp, Homo sapiens
tagttaagaaaatgg

SEQ ID NO: 192525 - DNA, 15 bp, Homo sapiens
gtagttaagaaaatg

SEQ ID NO: 192526 - DNA, 15 bp, Homo sapiens
agtagttaagaaaat

SEQ ID NO: 192527 - DNA, 15 bp, Homo sapiens
tagtagttaagaaaa

SEQ ID NO: 192528 - DNA, 15 bp, Homo sapiens
atagtagttaagaaa

SEQ ID NO: 192529 - DNA, 15 bp, Homo sapiens
catagtagttaagaa

SEQ ID NO: 192530 - DNA, 15 bp, Homo sapiens
tcatagtagttaaga

SEQ ID NO: 192531 - DNA, 15 bp, Homo sapiens
ttcatagtagttaag

SEQ ID NO: 192532 - DNA, 15 bp, Homo sapiens
tttcatagtagttaa

SEQ ID NO: 192533 - DNA, 15 bp, Homo sapiens
atttcatagtagtta

SEQ ID NO: 192534 - DNA, 15 bp, Homo sapiens
catttcatagtagtt

SEQ ID NO: 192535 - DNA, 15 bp, Homo sapiens
gcatttcatagtagt

SEQ ID NO: 192536 - DNA, 15 bp, Homo sapiens
agcatttcatagtag

SEQ ID NO: 192537 - DNA, 15 bp, Homo sapiens
aagcatttcatagta

SEQ ID NO: 192538 - DNA, 15 bp, Homo sapiens
gaagcatttcatagt

SEQ ID NO: 192539 - DNA, 15 bp, Homo sapiens
ggaagcatttcatag

SEQ ID NO: 192540 - DNA, 15 bp, Homo sapiens
aggaagcatttcata

SEQ ID NO: 192541 - DNA, 15 bp, Homo sapiens
aaggaagcatttcat

SEQ ID NO: 192542 - DNA, 15 bp, Homo sapiens
aaaggaagcatttca

SEQ ID NO: 192543 - DNA, 15 bp, Homo sapiens
taaaggaagcatttc

SEQ ID NO: 192544 - DNA, 15 bp, Homo sapiens
ttaaaggaagcattt

SEQ ID NO: 192545 - DNA, 15 bp, Homo sapiens
cttaaaggaagcatt

SEQ ID NO: 192546 - DNA, 15 bp, Homo sapiens
tcttaaaggaagcat

SEQ ID NO: 192547 - DNA, 15 bp, Homo sapiens
ttcttaaaggaagca

SEQ ID NO: 192548 - DNA, 15 bp, Homo sapiens
gttcttaaaggaagc

SEQ ID NO: 192549 - DNA, 15 bp, Homo sapiens
agttcttaaaggaag

SEQ ID NO: 192550 - DNA, 15 bp, Homo sapiens
aagttcttaaaggaa

SEQ ID NO: 192551 - DNA, 15 bp, Homo sapiens
caagttcttaaagga

SEQ ID NO: 192552 - DNA, 15 bp, Homo sapiens
acaagttcttaaagg

SEQ ID NO: 192553 - DNA, 15 bp, Homo sapiens
gacaagttcttaaag

SEQ ID NO: 192554 - DNA, 15 bp, Homo sapiens
ggacaagttcttaaa

SEQ ID NO: 192555 - DNA, 15 bp, Homo sapiens
gggacaagttcttaa

SEQ ID NO: 192556 - DNA, 15 bp, Homo sapiens
tgggacaagttctta

SEQ ID NO: 192557 - DNA, 15 bp, Homo sapiens
ctgggacaagttctt

SEQ ID NO: 192558 - DNA, 15 bp, Homo sapiens
tctgggacaagttct

SEQ ID NO: 192559 - DNA, 15 bp, Homo sapiens
ttctgggacaagttc

SEQ ID NO: 192560 - DNA, 15 bp, Homo sapiens
cttctgggacaagtt

SEQ ID NO: 192561 - DNA, 15 bp, Homo sapiens
tcttctgggacaagt

SEQ ID NO: 192562 - DNA, 15 bp, Homo sapiens
ctcttctgggacaag

SEQ ID NO: 192563 - DNA, 15 bp, Homo sapiens
tctcttctgggacaa

SEQ ID NO: 192564 - DNA, 15 bp, Homo sapiens
ttctcttctgggaca

SEQ ID NO: 192565 - DNA, 15 bp, Homo sapiens
attctcttctgggac

SEQ ID NO: 192566 - DNA, 15 bp, Homo sapiens
cattctcttctggga

SEQ ID NO: 192567 - DNA, 15 bp, Homo sapiens
ccattctcttctggg

SEQ ID NO: 192568 - DNA, 15 bp, Homo sapiens
tccattctcttctgg

SEQ ID NO: 192569 - DNA, 15 bp, Homo sapiens
atccattctcttctg

SEQ ID NO: 192570 - DNA, 15 bp, Homo sapiens
catccattctcttct

SEQ ID NO: 192571 - DNA, 15 bp, Homo sapiens
acatccattctcttc

SEQ ID NO: 192572 - DNA, 15 bp, Homo sapiens
aacatccattctctt

SEQ ID NO: 192573 - DNA, 15 bp, Homo sapiens
aaacatccattctct

SEQ ID NO: 192574 - DNA, 15 bp, Homo sapiens
gaaacatccattctc

SEQ ID NO: 192575 - DNA, 15 bp, Homo sapiens
tgaaacatccattct

SEQ ID NO: 192576 - DNA, 15 bp, Homo sapiens
ttgaaacatccattc

SEQ ID NO: 192577 - DNA, 15 bp, Homo sapiens
cttgaaacatccatt

SEQ ID NO: 192578 - DNA, 15 bp, Homo sapiens
acttgaaacatccat

SEQ ID NO: 192579 - DNA, 15 bp, Homo sapiens
aacttgaaacatcca

SEQ ID NO: 192580 - DNA, 15 bp, Homo sapiens
gaacttgaaacatcc

SEQ ID NO: 192581 - DNA, 15 bp, Homo sapiens
agaacttgaaacatc

SEQ ID NO: 192582 - DNA, 15 bp, Homo sapiens
cagaacttgaaacat

SEQ ID NO: 192583 - DNA, 15 bp, Homo sapiens
tcagaacttgaaaca

SEQ ID NO: 192584 - DNA, 15 bp, Homo sapiens
ttcagaacttgaaac

SEQ ID NO: 192585 - DNA, 15 bp, Homo sapiens
attcagaacttgaaa

SEQ ID NO: 192586 - DNA, 15 bp, Homo sapiens
aattcagaacttgaa

SEQ ID NO: 192587 - DNA, 15 bp, Homo sapiens
taattcagaacttga

SEQ ID NO: 192588 - DNA, 15 bp, Homo sapiens
ataattcagaacttg

SEQ ID NO: 192589 - DNA, 15 bp, Homo sapiens
tataattcagaactt

SEQ ID NO: 192590 - DNA, 15 bp, Homo sapiens
gtataattcagaact

SEQ ID NO: 192591 - DNA, 15 bp, Homo sapiens
agtataattcagaac

SEQ ID NO: 192592 - DNA, 15 bp, Homo sapiens
aagtataattcagaa

SEQ ID NO: 192593 - DNA, 15 bp, Homo sapiens
caagtataattcaga

SEQ ID NO: 192594 - DNA, 15 bp, Homo sapiens
tcaagtataattcag

SEQ ID NO: 192595 - DNA, 15 bp, Homo sapiens
atcaagtataattca

SEQ ID NO: 192596 - DNA, 15 bp, Homo sapiens
aatcaagtataattc

SEQ ID NO: 192597 - DNA, 15 bp, Homo sapiens
aaatcaagtataatt

SEQ ID NO: 192598 - DNA, 15 bp, Homo sapiens
gaaatcaagtataat

SEQ ID NO: 192599 - DNA, 15 bp, Homo sapiens
agaaatcaagtataa

SEQ ID NO: 192600 - DNA, 15 bp, Homo sapiens
aagaaatcaagtata

SEQ ID NO: 192601 - DNA, 15 bp, Homo sapiens
aaagaaatcaagtat

SEQ ID NO: 192602 - DNA, 15 bp, Homo sapiens
caaagaaatcaagta

SEQ ID NO: 192603 - DNA, 15 bp, Homo sapiens
ccaaagaaatcaagt

SEQ ID NO: 192604 - DNA, 15 bp, Homo sapiens
gccaaagaaatcaag

SEQ ID NO: 192605 - DNA, 15 bp, Homo sapiens
tgccaaagaaatcaa

SEQ ID NO: 192606 - DNA, 15 bp, Homo sapiens
atgccaaagaaatca

SEQ ID NO: 192607 - DNA, 15 bp, Homo sapiens
aatgccaaagaaatc

SEQ ID NO: 192608 - DNA, 15 bp, Homo sapiens
caatgccaaagaaat

SEQ ID NO: 192609 - DNA, 15 bp, Homo sapiens
gcaatgccaaagaaa

SEQ ID NO: 192610 - DNA, 15 bp, Homo sapiens
tgcaatgccaaagaa

SEQ ID NO: 192611 - DNA, 15 bp, Homo sapiens
ctgcaatgccaaaga

SEQ ID NO: 192612 - DNA, 15 bp, Homo sapiens
tctgcaatgccaaag

SEQ ID NO: 192613 - DNA, 15 bp, Homo sapiens
ttctgcaatgccaaa

SEQ ID NO: 192614 - DNA, 15 bp, Homo sapiens
tttctgcaatgccaa

SEQ ID NO: 192615 - DNA, 15 bp, Homo sapiens
ctttctgcaatgcca

SEQ ID NO: 192616 - DNA, 15 bp, Homo sapiens
actttctgcaatgcc

SEQ ID NO: 192617 - DNA, 15 bp, Homo sapiens
tactttctgcaatgc

SEQ ID NO: 192618 - DNA, 15 bp, Homo sapiens
ctactttctgcaatg

SEQ ID NO: 192619 - DNA, 15 bp, Homo sapiens
tctactttctgcaat

SEQ ID NO: 192620 - DNA, 15 bp, Homo sapiens
gtctactttctgcaa

SEQ ID NO: 192621 - DNA, 15 bp, Homo sapiens
tgtctactttctgca

SEQ ID NO: 192622 - DNA, 15 bp, Homo sapiens
ctgtctactttctgc

SEQ ID NO: 192623 - DNA, 15 bp, Homo sapiens
tctgtctactttctg

SEQ ID NO: 192624 - DNA, 15 bp, Homo sapiens
atctgtctactttct

SEQ ID NO: 192625 - DNA, 15 bp, Homo sapiens
aatctgtctactttc

SEQ ID NO: 192626 - DNA, 15 bp, Homo sapiens
aaatctgtctacttt

SEQ ID NO: 192627 - DNA, 15 bp, Homo sapiens
gaaatctgtctactt

SEQ ID NO: 192628 - DNA, 15 bp, Homo sapiens
ggaaatctgtctact

SEQ ID NO: 192629 - DNA, 15 bp, Homo sapiens
aggaaatctgtctac

SEQ ID NO: 192630 - DNA, 15 bp, Homo sapiens
caggaaatctgtcta

SEQ ID NO: 192631 - DNA, 15 bp, Homo sapiens
acaggaaatctgtct

SEQ ID NO: 192632 - DNA, 15 bp, Homo sapiens
tacaggaaatctgtc

SEQ ID NO: 192633 - DNA, 15 bp, Homo sapiens
atacaggaaatctgt

SEQ ID NO: 192634 - DNA, 15 bp, Homo sapiens
catacaggaaatctg

SEQ ID NO: 192635 - DNA, 15 bp, Homo sapiens
ccatacaggaaatct

SEQ ID NO: 192636 - DNA, 15 bp, Homo sapiens
accatacaggaaatc

SEQ ID NO: 192637 - DNA, 15 bp, Homo sapiens
gaccatacaggaaat

SEQ ID NO: 192638 - DNA, 15 bp, Homo sapiens
ggaccatacaggaaa

SEQ ID NO: 192639 - DNA, 15 bp, Homo sapiens
aggaccatacaggaa

SEQ ID NO: 192640 - DNA, 15 bp, Homo sapiens
caggaccatacagga

SEQ ID NO: 192641 - DNA, 15 bp, Homo sapiens
acaggaccatacagg

SEQ ID NO: 192642 - DNA, 15 bp, Homo sapiens
tacaggaccatacag

SEQ ID NO: 192643 - DNA, 15 bp, Homo sapiens
atacaggaccataca

SEQ ID NO: 192644 - DNA, 15 bp, Homo sapiens
aatacaggaccatac

SEQ ID NO: 192645 - DNA, 15 bp, Homo sapiens
taatacaggaccata

SEQ ID NO: 192646 - DNA, 15 bp, Homo sapiens
ttaatacaggaccat

SEQ ID NO: 192647 - DNA, 15 bp, Homo sapiens
tttaatacaggacca

SEQ ID NO: 192648 - DNA, 15 bp, Homo sapiens
gtttaatacaggacc

SEQ ID NO: 192649 - DNA, 15 bp, Homo sapiens
agtttaatacaggac

SEQ ID NO: 192650 - DNA, 15 bp, Homo sapiens
aagtttaatacagga

SEQ ID NO: 192651 - DNA, 15 bp, Homo sapiens
caagtttaatacagg

SEQ ID NO: 192652 - DNA, 15 bp, Homo sapiens
acaagtttaatacag

SEQ ID NO: 192653 - DNA, 15 bp, Homo sapiens
tacaagtttaataca

SEQ ID NO: 192654 - DNA, 15 bp, Homo sapiens
atacaagtttaatac

SEQ ID NO: 192655 - DNA, 15 bp, Homo sapiens
catacaagtttaata

SEQ ID NO: 192656 - DNA, 15 bp, Homo sapiens
acatacaagtttaat

SEQ ID NO: 192657 - DNA, 15 bp, Homo sapiens
cacatacaagtttaa

SEQ ID NO: 192658 - DNA, 15 bp, Homo sapiens
tcacatacaagttta

SEQ ID NO: 192659 - DNA, 15 bp, Homo sapiens
ctcacatacaagttt

SEQ ID NO: 192660 - DNA, 15 bp, Homo sapiens
cctcacatacaagtt

SEQ ID NO: 192661 - DNA, 15 bp, Homo sapiens
ccctcacatacaagt

SEQ ID NO: 192662 - DNA, 15 bp, Homo sapiens
cccctcacatacaag

SEQ ID NO: 192663 - DNA, 15 bp, Homo sapiens
acccctcacatacaa

SEQ ID NO: 192664 - DNA, 15 bp, Homo sapiens
aacccctcacataca

SEQ ID NO: 192665 - DNA, 15 bp, Homo sapiens
aaacccctcacatac

SEQ ID NO: 192666 - DNA, 15 bp, Homo sapiens
aaaacccctcacata

SEQ ID NO: 192667 - DNA, 15 bp, Homo sapiens
aaaaacccctcacat

SEQ ID NO: 192668 - DNA, 15 bp, Homo sapiens
caaaaacccctcaca

SEQ ID NO: 192669 - DNA, 15 bp, Homo sapiens
tcaaaaacccctcac

SEQ ID NO: 192670 - DNA, 15 bp, Homo sapiens
gtcaaaaacccctca

SEQ ID NO: 192671 - DNA, 15 bp, Homo sapiens
agtcaaaaacccctc

SEQ ID NO: 192672 - DNA, 15 bp, Homo sapiens
cagtcaaaaacccct

SEQ ID NO: 192673 - DNA, 15 bp, Homo sapiens
acagtcaaaaacccc

SEQ ID NO: 192674 - DNA, 15 bp, Homo sapiens
gacagtcaaaaaccc

SEQ ID NO: 192675 - DNA, 15 bp, Homo sapiens
agacagtcaaaaacc

SEQ ID NO: 192676 - DNA, 15 bp, Homo sapiens
cagacagtcaaaaac

SEQ ID NO: 192677 - DNA, 15 bp, Homo sapiens
gcagacagtcaaaaa

SEQ ID NO: 192678 - DNA, 15 bp, Homo sapiens
tgcagacagtcaaaa

SEQ ID NO: 192679 - DNA, 15 bp, Homo sapiens
atgcagacagtcaaa

SEQ ID NO: 192680 - DNA, 15 bp, Homo sapiens
gatgcagacagtcaa

SEQ ID NO: 192681 - DNA, 15 bp, Homo sapiens
tgatgcagacagtca

SEQ ID NO: 192682 - DNA, 15 bp, Homo sapiens
ctgatgcagacagtc

SEQ ID NO: 192683 - DNA, 15 bp, Homo sapiens
actgatgcagacagt

SEQ ID NO: 192684 - DNA, 15 bp, Homo sapiens
cactgatgcagacag

SEQ ID NO: 192685 - DNA, 15 bp, Homo sapiens
ccactgatgcagaca

SEQ ID NO: 192686 - DNA, 15 bp, Homo sapiens
accactgatgcagac

SEQ ID NO: 192687 - DNA, 15 bp, Homo sapiens
aaccactgatgcaga

SEQ ID NO: 192688 - DNA, 15 bp, Homo sapiens
gaaccactgatgcag

SEQ ID NO: 192689 - DNA, 15 bp, Homo sapiens
agaaccactgatgca

SEQ ID NO: 192690 - DNA, 15 bp, Homo sapiens
gagaaccactgatgc

SEQ ID NO: 192691 - DNA, 15 bp, Homo sapiens
tgagaaccactgatg

SEQ ID NO: 192692 - DNA, 15 bp, Homo sapiens
ttgagaaccactgat

SEQ ID NO: 192693 - DNA, 15 bp, Homo sapiens
tttgagaaccactga

SEQ ID NO: 192694 - DNA, 15 bp, Homo sapiens
ttttgagaaccactg

SEQ ID NO: 192695 - DNA, 15 bp, Homo sapiens
attttgagaaccact

SEQ ID NO: 192696 - DNA, 15 bp, Homo sapiens
cattttgagaaccac

SEQ ID NO: 192697 - DNA, 15 bp, Homo sapiens
ccattttgagaacca

SEQ ID NO: 192698 - DNA, 15 bp, Homo sapiens
cccattttgagaacc

SEQ ID NO: 192699 - DNA, 15 bp, Homo sapiens
ccccattttgagaac

SEQ ID NO: 192700 - DNA, 15 bp, Homo sapiens
accccattttgagaa

SEQ ID NO: 192701 - DNA, 15 bp, Homo sapiens
gaccccattttgaga

SEQ ID NO: 192702 - DNA, 15 bp, Homo sapiens
ggaccccattttgag

SEQ ID NO: 192703 - DNA, 15 bp, Homo sapiens
gggaccccattttga

SEQ ID NO: 192704 - DNA, 15 bp, Homo sapiens
agggaccccattttg

SEQ ID NO: 192705 - DNA, 15 bp, Homo sapiens
cagggaccccatttt

SEQ ID NO: 192706 - DNA, 15 bp, Homo sapiens
ccagggaccccattt

SEQ ID NO: 192707 - DNA, 15 bp, Homo sapiens
cccagggaccccatt

SEQ ID NO: 192708 - DNA, 15 bp, Homo sapiens
acccagggaccccat

SEQ ID NO: 192709 - DNA, 15 bp, Homo sapiens
gacccagggacccca

SEQ ID NO: 192710 - DNA, 15 bp, Homo sapiens
tgacccagggacccc

SEQ ID NO: 192711 - DNA, 15 bp, Homo sapiens
ttgacccagggaccc

SEQ ID NO: 192712 - DNA, 15 bp, Homo sapiens
gttgacccagggacc

SEQ ID NO: 192713 - DNA, 15 bp, Homo sapiens
tgttgacccagggac

SEQ ID NO: 192714 - DNA, 15 bp, Homo sapiens
ctgttgacccaggga

SEQ ID NO: 192715 - DNA, 15 bp, Homo sapiens
gctgttgacccaggg

SEQ ID NO: 192716 - DNA, 15 bp, Homo sapiens
tgctgttgacccagg

SEQ ID NO: 192717 - DNA, 15 bp, Homo sapiens
atgctgttgacccag

SEQ ID NO: 192718 - DNA, 15 bp, Homo sapiens
gatgctgttgaccca

SEQ ID NO: 192719 - DNA, 15 bp, Homo sapiens
tgatgctgttgaccc

SEQ ID NO: 192720 - DNA, 15 bp, Homo sapiens
ctgatgctgttgacc

SEQ ID NO: 192721 - DNA, 15 bp, Homo sapiens
gctgatgctgttgac

SEQ ID NO: 192722 - DNA, 15 bp, Homo sapiens
tgctgatgctgttga

SEQ ID NO: 192723 - DNA, 15 bp, Homo sapiens
atgctgatgctgttg

SEQ ID NO: 192724 - DNA, 15 bp, Homo sapiens
gatgctgatgctgtt

SEQ ID NO: 192725 - DNA, 15 bp, Homo sapiens
tgatgctgatgctgt

SEQ ID NO: 192726 - DNA, 15 bp, Homo sapiens
gtgatgctgatgctg

SEQ ID NO: 192727 - DNA, 15 bp, Homo sapiens
ggtgatgctgatgct

SEQ ID NO: 192728 - DNA, 15 bp, Homo sapiens
aggtgatgctgatgc

SEQ ID NO: 192729 - DNA, 15 bp, Homo sapiens
caggtgatgctgatg

SEQ ID NO: 192730 - DNA, 15 bp, Homo sapiens
ccaggtgatgctgat

SEQ ID NO: 192731 - DNA, 15 bp, Homo sapiens
cccaggtgatgctga

SEQ ID NO: 192732 - DNA, 15 bp, Homo sapiens
tcccaggtgatgctg

SEQ ID NO: 192733 - DNA, 15 bp, Homo sapiens
ttcccaggtgatgct

SEQ ID NO: 192734 - DNA, 15 bp, Homo sapiens
attcccaggtgatgc

SEQ ID NO: 192735 - DNA, 15 bp, Homo sapiens
aattcccaggtgatg

SEQ ID NO: 192736 - DNA, 15 bp, Homo sapiens
aaattcccaggtgat

SEQ ID NO: 192737 - DNA, 15 bp, Homo sapiens
caaattcccaggtga

SEQ ID NO: 192738 - DNA, 15 bp, Homo sapiens
acaaattcccaggtg

SEQ ID NO: 192739 - DNA, 15 bp, Homo sapiens
aacaaattcccaggt

SEQ ID NO: 192740 - DNA, 15 bp, Homo sapiens
taacaaattcccagg

SEQ ID NO: 192741 - DNA, 15 bp, Homo sapiens
ctaacaaattcccag

SEQ ID NO: 192742 - DNA, 15 bp, Homo sapiens
tctaacaaattccca

SEQ ID NO: 192743 - DNA, 15 bp, Homo sapiens
ttctaacaaattccc

SEQ ID NO: 192744 - DNA, 15 bp, Homo sapiens
tttctaacaaattcc

SEQ ID NO: 192745 - DNA, 15 bp, Homo sapiens
atttctaacaaattc

SEQ ID NO: 192746 - DNA, 15 bp, Homo sapiens
catttctaacaaatt

SEQ ID NO: 192747 - DNA, 15 bp, Homo sapiens
gcatttctaacaaat

SEQ ID NO: 192748 - DNA, 15 bp, Homo sapiens
tgcatttctaacaaa

SEQ ID NO: 192749 - DNA, 15 bp, Homo sapiens
gtgcatttctaacaa

SEQ ID NO: 192750 - DNA, 15 bp, Homo sapiens
tgtgcatttctaaca

SEQ ID NO: 192751 - DNA, 15 bp, Homo sapiens
atgtgcatttctaac

SEQ ID NO: 192752 - DNA, 15 bp, Homo sapiens
aatgtgcatttctaa

SEQ ID NO: 192753 - DNA, 15 bp, Homo sapiens
gaatgtgcatttcta

SEQ ID NO: 192754 - DNA, 15 bp, Homo sapiens
agaatgtgcatttct

SEQ ID NO: 192755 - DNA, 15 bp, Homo sapiens
aagaatgtgcatttc

SEQ ID NO: 192756 - DNA, 15 bp, Homo sapiens
caagaatgtgcattt

SEQ ID NO: 192757 - DNA, 15 bp, Homo sapiens
ccaagaatgtgcatt

SEQ ID NO: 192758 - DNA, 15 bp, Homo sapiens
cccaagaatgtgcat

SEQ ID NO: 192759 - DNA, 15 bp, Homo sapiens
acccaagaatgtgca

SEQ ID NO: 192760 - DNA, 15 bp, Homo sapiens
gacccaagaatgtgc

SEQ ID NO: 192761 - DNA, 15 bp, Homo sapiens
ggacccaagaatgtg

SEQ ID NO: 192762 - DNA, 15 bp, Homo sapiens
gggacccaagaatgt

SEQ ID NO: 192763 - DNA, 15 bp, Homo sapiens
tgggacccaagaatg

SEQ ID NO: 192764 - DNA, 15 bp, Homo sapiens
ctgggacccaagaat

SEQ ID NO: 192765 - DNA, 15 bp, Homo sapiens
gctgggacccaagaa

SEQ ID NO: 192766 - DNA, 15 bp, Homo sapiens
ggctgggacccaaga

SEQ ID NO: 192767 - DNA, 15 bp, Homo sapiens
gggctgggacccaag

SEQ ID NO: 192768 - DNA, 15 bp, Homo sapiens
tgggctgggacccaa

SEQ ID NO: 192769 - DNA, 15 bp, Homo sapiens
ctgggctgggaccca

SEQ ID NO: 192770 - DNA, 15 bp, Homo sapiens
tctgggctgggaccc

SEQ ID NO: 192771 - DNA, 15 bp, Homo sapiens
ctctgggctgggacc

SEQ ID NO: 192772 - DNA, 15 bp, Homo sapiens
gctctgggctgggac

SEQ ID NO: 192773 - DNA, 15 bp, Homo sapiens
agctctgggctggga

SEQ ID NO: 192774 - DNA, 15 bp, Homo sapiens
cagctctgggctggg

SEQ ID NO: 192775 - DNA, 15 bp, Homo sapiens
gcagctctgggctgg

SEQ ID NO: 192776 - DNA, 15 bp, Homo sapiens
agcagctctgggctg

SEQ ID NO: 192777 - DNA, 15 bp, Homo sapiens
cagcagctctgggct

SEQ ID NO: 192778 - DNA, 15 bp, Homo sapiens
tcagcagctctgggc

SEQ ID NO: 192779 - DNA, 15 bp, Homo sapiens
ttcagcagctctggg

SEQ ID NO: 192780 - DNA, 15 bp, Homo sapiens
attcagcagctctgg

SEQ ID NO: 192781 - DNA, 15 bp, Homo sapiens
gattcagcagctctg

SEQ ID NO: 192782 - DNA, 15 bp, Homo sapiens
tgattcagcagctct

SEQ ID NO: 192783 - DNA, 15 bp, Homo sapiens
ctgattcagcagctc

SEQ ID NO: 192784 - DNA, 15 bp, Homo sapiens
tctgattcagcagct

SEQ ID NO: 192785 - DNA, 15 bp, Homo sapiens
ttctgattcagcagc

SEQ ID NO: 192786 - DNA, 15 bp, Homo sapiens
tttctgattcagcag

SEQ ID NO: 192787 - DNA, 15 bp, Homo sapiens
gtttctgattcagca

SEQ ID NO: 192788 - DNA, 15 bp, Homo sapiens
agtttctgattcagc

SEQ ID NO: 192789 - DNA, 15 bp, Homo sapiens
cagtttctgattcag

SEQ ID NO: 192790 - DNA, 15 bp, Homo sapiens
tcagtttctgattca

SEQ ID NO: 192791 - DNA, 15 bp, Homo sapiens
ctcagtttctgattc

SEQ ID NO: 192792 - DNA, 15 bp, Homo sapiens
cctcagtttctgatt

SEQ ID NO: 192793 - DNA, 15 bp, Homo sapiens
gcctcagtttctgat

SEQ ID NO: 192794 - DNA, 15 bp, Homo sapiens
agcctcagtttctga

SEQ ID NO: 192795 - DNA, 15 bp, Homo sapiens
cagcctcagtttctg

SEQ ID NO: 192796 - DNA, 15 bp, Homo sapiens
ccagcctcagtttct

SEQ ID NO: 192797 - DNA, 15 bp, Homo sapiens
cccagcctcagtttc

SEQ ID NO: 192798 - DNA, 15 bp, Homo sapiens
ccccagcctcagttt

SEQ ID NO: 192799 - DNA, 15 bp, Homo sapiens
gccccagcctcagtt

SEQ ID NO: 192800 - DNA, 15 bp, Homo sapiens
ggccccagcctcagt

SEQ ID NO: 192801 - DNA, 15 bp, Homo sapiens
gggccccagcctcag

SEQ ID NO: 192802 - DNA, 15 bp, Homo sapiens
tgggccccagcctca

SEQ ID NO: 192803 - DNA, 15 bp, Homo sapiens
ctgggccccagcctc

SEQ ID NO: 192804 - DNA, 15 bp, Homo sapiens
cctgggccccagcct

SEQ ID NO: 192805 - DNA, 15 bp, Homo sapiens
tcctgggccccagcc

SEQ ID NO: 192806 - DNA, 15 bp, Homo sapiens
gtcctgggccccagc

SEQ ID NO: 192807 - DNA, 15 bp, Homo sapiens
cgtcctgggccccag

SEQ ID NO: 192808 - DNA, 15 bp, Homo sapiens
gcgtcctgggcccca

SEQ ID NO: 192809 - DNA, 15 bp, Homo sapiens
agcgtcctgggcccc

SEQ ID NO: 192810 - DNA, 15 bp, Homo sapiens
cagcgtcctgggccc

SEQ ID NO: 192811 - DNA, 15 bp, Homo sapiens
ccagcgtcctgggcc

SEQ ID NO: 192812 - DNA, 15 bp, Homo sapiens
accagcgtcctgggc

SEQ ID NO: 192813 - DNA, 15 bp, Homo sapiens
aaccagcgtcctggg

SEQ ID NO: 192814 - DNA, 15 bp, Homo sapiens
aaaccagcgtcctgg

SEQ ID NO: 192815 - DNA, 15 bp, Homo sapiens
taaaccagcgtcctg

SEQ ID NO: 192816 - DNA, 15 bp, Homo sapiens
ttaaaccagcgtcct

SEQ ID NO: 192817 - DNA, 15 bp, Homo sapiens
gttaaaccagcgtcc

SEQ ID NO: 192818 - DNA, 15 bp, Homo sapiens
tgttaaaccagcgtc

SEQ ID NO: 192819 - DNA, 15 bp, Homo sapiens
ttgttaaaccagcgt

SEQ ID NO: 192820 - DNA, 15 bp, Homo sapiens
cttgttaaaccagcg

SEQ ID NO: 192821 - DNA, 15 bp, Homo sapiens
gcttgttaaaccagc

SEQ ID NO: 192822 - DNA, 15 bp, Homo sapiens
ggcttgttaaaccag

SEQ ID NO: 192823 - DNA, 15 bp, Homo sapiens
aggcttgttaaacca

SEQ ID NO: 192824 - DNA, 15 bp, Homo sapiens
aaggcttgttaaacc

SEQ ID NO: 192825 - DNA, 15 bp, Homo sapiens
gaaggcttgttaaac

SEQ ID NO: 192826 - DNA, 15 bp, Homo sapiens
ggaaggcttgttaaa

SEQ ID NO: 192827 - DNA, 15 bp, Homo sapiens
aggaaggcttgttaa

SEQ ID NO: 192828 - DNA, 15 bp, Homo sapiens
caggaaggcttgtta

SEQ ID NO: 192829 - DNA, 15 bp, Homo sapiens
ccaggaaggcttgtt

SEQ ID NO: 192830 - DNA, 15 bp, Homo sapiens
accaggaaggcttgt

SEQ ID NO: 192831 - DNA, 15 bp, Homo sapiens
caccaggaaggcttg

SEQ ID NO: 192832 - DNA, 15 bp, Homo sapiens
tcaccaggaaggctt

SEQ ID NO: 192833 - DNA, 15 bp, Homo sapiens
atcaccaggaaggct

SEQ ID NO: 192834 - DNA, 15 bp, Homo sapiens
aatcaccaggaaggc

SEQ ID NO: 192835 - DNA, 15 bp, Homo sapiens
gaatcaccaggaagg

SEQ ID NO: 192836 - DNA, 15 bp, Homo sapiens
agaatcaccaggaag

SEQ ID NO: 192837 - DNA, 15 bp, Homo sapiens
gagaatcaccaggaa

SEQ ID NO: 192838 - DNA, 15 bp, Homo sapiens
tgagaatcaccagga

SEQ ID NO: 192839 - DNA, 15 bp, Homo sapiens
atgagaatcaccagg

SEQ ID NO: 192840 - DNA, 15 bp, Homo sapiens
catgagaatcaccag

SEQ ID NO: 192841 - DNA, 15 bp, Homo sapiens
gcatgagaatcacca

SEQ ID NO: 192842 - DNA, 15 bp, Homo sapiens
agcatgagaatcacc

SEQ ID NO: 192843 - DNA, 15 bp, Homo sapiens
gagcatgagaatcac

SEQ ID NO: 192844 - DNA, 15 bp, Homo sapiens
agagcatgagaatca

SEQ ID NO: 192845 - DNA, 15 bp, Homo sapiens
tagagcatgagaatc

SEQ ID NO: 192846 - DNA, 15 bp, Homo sapiens
atagagcatgagaat

SEQ ID NO: 192847 - DNA, 15 bp, Homo sapiens
catagagcatgagaa

SEQ ID NO: 192848 - DNA, 15 bp, Homo sapiens
tcatagagcatgaga

SEQ ID NO: 192849 - DNA, 15 bp, Homo sapiens
ttcatagagcatgag

SEQ ID NO: 192850 - DNA, 15 bp, Homo sapiens
attcatagagcatga

SEQ ID NO: 192851 - DNA, 15 bp, Homo sapiens
aattcatagagcatg

SEQ ID NO: 192852 - DNA, 15 bp, Homo sapiens
aaattcatagagcat

SEQ ID NO: 192853 - DNA, 15 bp, Homo sapiens
aaaattcatagagca

SEQ ID NO: 192854 - DNA, 15 bp, Homo sapiens
caaaattcatagagc

SEQ ID NO: 192855 - DNA, 15 bp, Homo sapiens
tcaaaattcatagag

SEQ ID NO: 192856 - DNA, 15 bp, Homo sapiens
ctcaaaattcataga

SEQ ID NO: 192857 - DNA, 15 bp, Homo sapiens
tctcaaaattcatag

SEQ ID NO: 192858 - DNA, 15 bp, Homo sapiens
gtctcaaaattcata

SEQ ID NO: 192859 - DNA, 15 bp, Homo sapiens
agtctcaaaattcat

SEQ ID NO: 192860 - DNA, 15 bp, Homo sapiens
cagtctcaaaattca

SEQ ID NO: 192861 - DNA, 15 bp, Homo sapiens
gcagtctcaaaattc

SEQ ID NO: 192862 - DNA, 15 bp, Homo sapiens
agcagtctcaaaatt

SEQ ID NO: 192863 - DNA, 15 bp, Homo sapiens
cagcagtctcaaaat

SEQ ID NO: 192864 - DNA, 15 bp, Homo sapiens
tcagcagtctcaaaa

SEQ ID NO: 192865 - DNA, 15 bp, Homo sapiens
atcagcagtctcaaa

SEQ ID NO: 192866 - DNA, 15 bp, Homo sapiens
gatcagcagtctcaa

SEQ ID NO: 192867 - DNA, 15 bp, Homo sapiens
agatcagcagtctca

SEQ ID NO: 192868 - DNA, 15 bp, Homo sapiens
cagatcagcagtctc

SEQ ID NO: 192869 - DNA, 15 bp, Homo sapiens
gcagatcagcagtct

SEQ ID NO: 192870 - DNA, 15 bp, Homo sapiens
tgcagatcagcagtc

SEQ ID NO: 192871 - DNA, 15 bp, Homo sapiens
ctgcagatcagcagt

SEQ ID NO: 192872 - DNA, 15 bp, Homo sapiens
gctgcagatcagcag

SEQ ID NO: 192873 - DNA, 15 bp, Homo sapiens
tgctgcagatcagca

SEQ ID NO: 192874 - DNA, 15 bp, Homo sapiens
ctgctgcagatcagc

SEQ ID NO: 192875 - DNA, 15 bp, Homo sapiens
gctgctgcagatcag

SEQ ID NO: 192876 - DNA, 15 bp, Homo sapiens
ggctgctgcagatca

SEQ ID NO: 192877 - DNA, 15 bp, Homo sapiens
gggctgctgcagatc

SEQ ID NO: 192878 - DNA, 15 bp, Homo sapiens
ggggctgctgcagat

SEQ ID NO: 192879 - DNA, 15 bp, Homo sapiens
tggggctgctgcaga

SEQ ID NO: 192880 - DNA, 15 bp, Homo sapiens
ttggggctgctgcag

SEQ ID NO: 192881 - DNA, 15 bp, Homo sapiens
gttggggctgctgca

SEQ ID NO: 192882 - DNA, 15 bp, Homo sapiens
tgttggggctgctgc

SEQ ID NO: 192883 - DNA, 15 bp, Homo sapiens
atgttggggctgctg

SEQ ID NO: 192884 - DNA, 15 bp, Homo sapiens
tatgttggggctgct

SEQ ID NO: 192885 - DNA, 15 bp, Homo sapiens
gtatgttggggctgc

SEQ ID NO: 192886 - DNA, 15 bp, Homo sapiens
agtatgttggggctg

SEQ ID NO: 192887 - DNA, 15 bp, Homo sapiens
gagtatgttggggct

SEQ ID NO: 192888 - DNA, 15 bp, Homo sapiens
tgagtatgttggggc

SEQ ID NO: 192889 - DNA, 15 bp, Homo sapiens
gtgagtatgttgggg

SEQ ID NO: 192890 - DNA, 15 bp, Homo sapiens
tgtgagtatgttggg

SEQ ID NO: 192891 - DNA, 15 bp, Homo sapiens
ctgtgagtatgttgg

SEQ ID NO: 192892 - DNA, 15 bp, Homo sapiens
cctgtgagtatgttg

SEQ ID NO: 192893 - DNA, 15 bp, Homo sapiens
acctgtgagtatgtt

SEQ ID NO: 192894 - DNA, 15 bp, Homo sapiens
cacctgtgagtatgt

SEQ ID NO: 192895 - DNA, 15 bp, Homo sapiens
acacctgtgagtatg

SEQ ID NO: 192896 - DNA, 15 bp, Homo sapiens
aacacctgtgagtat

SEQ ID NO: 192897 - DNA, 15 bp, Homo sapiens
aaacacctgtgagta

SEQ ID NO: 192898 - DNA, 15 bp, Homo sapiens
caaacacctgtgagt

SEQ ID NO: 192899 - DNA, 15 bp, Homo sapiens
gcaaacacctgtgag

SEQ ID NO: 192900 - DNA, 15 bp, Homo sapiens
tgcaaacacctgtga

SEQ ID NO: 192901 - DNA, 15 bp, Homo sapiens
atgcaaacacctgtg

SEQ ID NO: 192902 - DNA, 15 bp, Homo sapiens
catgcaaacacctgt

SEQ ID NO: 192903 - DNA, 15 bp, Homo sapiens
acatgcaaacacctg

SEQ ID NO: 192904 - DNA, 15 bp, Homo sapiens
cacatgcaaacacct

SEQ ID NO: 192905 - DNA, 15 bp, Homo sapiens
ccacatgcaaacacc

SEQ ID NO: 192906 - DNA, 15 bp, Homo sapiens
tccacatgcaaacac

SEQ ID NO: 192907 - DNA, 15 bp, Homo sapiens
ttccacatgcaaaca

SEQ ID NO: 192908 - DNA, 15 bp, Homo sapiens
tttccacatgcaaac

SEQ ID NO: 192909 - DNA, 15 bp, Homo sapiens
atttccacatgcaaa

SEQ ID NO: 192910 - DNA, 15 bp, Homo sapiens
aatttccacatgcaa

SEQ ID NO: 192911 - DNA, 15 bp, Homo sapiens
gaatttccacatgca

SEQ ID NO: 192912 - DNA, 15 bp, Homo sapiens
tgaatttccacatgc

SEQ ID NO: 192913 - DNA, 15 bp, Homo sapiens
ttgaatttccacatg

SEQ ID NO: 192914 - DNA, 15 bp, Homo sapiens
cttgaatttccacat

SEQ ID NO: 192915 - DNA, 15 bp, Homo sapiens
ccttgaatttccaca

SEQ ID NO: 192916 - DNA, 15 bp, Homo sapiens
gccttgaatttccac

SEQ ID NO: 192917 - DNA, 15 bp, Homo sapiens
agccttgaatttcca

SEQ ID NO: 192918 - DNA, 15 bp, Homo sapiens
gagccttgaatttcc

SEQ ID NO: 192919 - DNA, 15 bp, Homo sapiens
cgagccttgaatttc

SEQ ID NO: 192920 - DNA, 15 bp, Homo sapiens
tcgagccttgaattt

SEQ ID NO: 192921 - DNA, 15 bp, Homo sapiens
atcgagccttgaatt

SEQ ID NO: 192922 - DNA, 15 bp, Homo sapiens
catcgagccttgaat

SEQ ID NO: 192923 - DNA, 15 bp, Homo sapiens
acatcgagccttgaa

SEQ ID NO: 192924 - DNA, 15 bp, Homo sapiens
gacatcgagccttga

SEQ ID NO: 192925 - DNA, 15 bp, Homo sapiens
ggacatcgagccttg

SEQ ID NO: 192926 - DNA, 15 bp, Homo sapiens
aggacatcgagcctt

SEQ ID NO: 192927 - DNA, 15 bp, Homo sapiens
aaggacatcgagcct

SEQ ID NO: 192928 - DNA, 15 bp, Homo sapiens
caaggacatcgagcc

SEQ ID NO: 192929 - DNA, 15 bp, Homo sapiens
tcaaggacatcgagc

SEQ ID NO: 192930 - DNA, 15 bp, Homo sapiens
ctcaaggacatcgag

SEQ ID NO: 192931 - DNA, 15 bp, Homo sapiens
cctcaaggacatcga

SEQ ID NO: 192932 - DNA, 15 bp, Homo sapiens
tcctcaaggacatcg

SEQ ID NO: 192933 - DNA, 15 bp, Homo sapiens
ttcctcaaggacatc

SEQ ID NO: 192934 - DNA, 15 bp, Homo sapiens
gttcctcaaggacat

SEQ ID NO: 192935 - DNA, 15 bp, Homo sapiens
ggttcctcaaggaca

SEQ ID NO: 192936 - DNA, 15 bp, Homo sapiens
tggttcctcaaggac

SEQ ID NO: 192937 - DNA, 15 bp, Homo sapiens
ctggttcctcaagga

SEQ ID NO: 192938 - DNA, 15 bp, Homo sapiens
tctggttcctcaagg

SEQ ID NO: 192939 - DNA, 15 bp, Homo sapiens
gtctggttcctcaag

SEQ ID NO: 192940 - DNA, 15 bp, Homo sapiens
agtctggttcctcaa

SEQ ID NO: 192941 - DNA, 15 bp, Homo sapiens
aagtctggttcctca

SEQ ID NO: 192942 - DNA, 15 bp, Homo sapiens
gaagtctggttcctc

SEQ ID NO: 192943 - DNA, 15 bp, Homo sapiens
ggaagtctggttcct

SEQ ID NO: 192944 - DNA, 15 bp, Homo sapiens
tggaagtctggttcc

SEQ ID NO: 192945 - DNA, 15 bp, Homo sapiens
ctggaagtctggttc

SEQ ID NO: 192946 - DNA, 15 bp, Homo sapiens
cctggaagtctggtt

SEQ ID NO: 192947 - DNA, 15 bp, Homo sapiens
acctggaagtctggt

SEQ ID NO: 192948 - DNA, 15 bp, Homo sapiens
aacctggaagtctgg

SEQ ID NO: 192949 - DNA, 15 bp, Homo sapiens
aaacctggaagtctg

SEQ ID NO: 192950 - DNA, 15 bp, Homo sapiens
gaaacctggaagtct

SEQ ID NO: 192951 - DNA, 15 bp, Homo sapiens
tgaaacctggaagtc

SEQ ID NO: 192952 - DNA, 15 bp, Homo sapiens
ctgaaacctggaagt

SEQ ID NO: 192953 - DNA, 15 bp, Homo sapiens
cctgaaacctggaag

SEQ ID NO: 192954 - DNA, 15 bp, Homo sapiens
acctgaaacctggaa

SEQ ID NO: 192955 - DNA, 15 bp, Homo sapiens
gacctgaaacctgga

SEQ ID NO: 192956 - DNA, 15 bp, Homo sapiens
cgacctgaaacctgg

SEQ ID NO: 192957 - DNA, 15 bp, Homo sapiens
ccgacctgaaacctg

SEQ ID NO: 192958 - DNA, 15 bp, Homo sapiens
tccgacctgaaacct

SEQ ID NO: 192959 - DNA, 15 bp, Homo sapiens
atccgacctgaaacc

SEQ ID NO: 192960 - DNA, 15 bp, Homo sapiens
catccgacctgaaac

SEQ ID NO: 192961 - DNA, 15 bp, Homo sapiens
tcatccgacctgaaa

SEQ ID NO: 192962 - DNA, 15 bp, Homo sapiens
ctcatccgacctgaa

SEQ ID NO: 192963 - DNA, 15 bp, Homo sapiens
cctcatccgacctga

SEQ ID NO: 192964 - DNA, 15 bp, Homo sapiens
tcctcatccgacctg

SEQ ID NO: 192965 - DNA, 15 bp, Homo sapiens
ctcctcatccgacct

SEQ ID NO: 192966 - DNA, 15 bp, Homo sapiens
actcctcatccgacc

SEQ ID NO: 192967 - DNA, 15 bp, Homo sapiens
cactcctcatccgac

SEQ ID NO: 192968 - DNA, 15 bp, Homo sapiens
ccactcctcatccga

SEQ ID NO: 192969 - DNA, 15 bp, Homo sapiens
tccactcctcatccg

SEQ ID NO: 192970 - DNA, 15 bp, Homo sapiens
ctccactcctcatcc

SEQ ID NO: 192971 - DNA, 15 bp, Homo sapiens
gctccactcctcatc

SEQ ID NO: 192972 - DNA, 15 bp, Homo sapiens
tgctccactcctcat

SEQ ID NO: 192973 - DNA, 15 bp, Homo sapiens
ctgctccactcctca

SEQ ID NO: 192974 - DNA, 15 bp, Homo sapiens
gctgctccactcctc

SEQ ID NO: 192975 - DNA, 15 bp, Homo sapiens
tgctgctccactcct

SEQ ID NO: 192976 - DNA, 15 bp, Homo sapiens
gtgctgctccactcc

SEQ ID NO: 192977 - DNA, 15 bp, Homo sapiens
agtgctgctccactc

SEQ ID NO: 192978 - DNA, 15 bp, Homo sapiens
cagtgctgctccact

SEQ ID NO: 192979 - DNA, 15 bp, Homo sapiens
gcagtgctgctccac

SEQ ID NO: 192980 - DNA, 15 bp, Homo sapiens
agcagtgctgctcca

SEQ ID NO: 192981 - DNA, 15 bp, Homo sapiens
gagcagtgctgctcc

SEQ ID NO: 192982 - DNA, 15 bp, Homo sapiens
tgagcagtgctgctc

SEQ ID NO: 192983 - DNA, 15 bp, Homo sapiens
gtgagcagtgctgct

SEQ ID NO: 192984 - DNA, 15 bp, Homo sapiens
agtgagcagtgctgc

SEQ ID NO: 192985 - DNA, 15 bp, Homo sapiens
gagtgagcagtgctg

SEQ ID NO: 192986 - DNA, 15 bp, Homo sapiens
ggagtgagcagtgct

SEQ ID NO: 192987 - DNA, 15 bp, Homo sapiens
tggagtgagcagtgc

SEQ ID NO: 192988 - DNA, 15 bp, Homo sapiens
atggagtgagcagtg

SEQ ID NO: 192989 - DNA, 15 bp, Homo sapiens
catggagtgagcagt

SEQ ID NO: 192990 - DNA, 15 bp, Homo sapiens
acatggagtgagcag

SEQ ID NO: 192991 - DNA, 15 bp, Homo sapiens
cacatggagtgagca

SEQ ID NO: 192992 - DNA, 15 bp, Homo sapiens
acacatggagtgagc

SEQ ID NO: 192993 - DNA, 15 bp, Homo sapiens
aacacatggagtgag

SEQ ID NO: 192994 - DNA, 15 bp, Homo sapiens
caacacatggagtga

SEQ ID NO: 192995 - DNA, 15 bp, Homo sapiens
acaacacatggagtg

SEQ ID NO: 192996 - DNA, 15 bp, Homo sapiens
aacaacacatggagt

SEQ ID NO: 192997 - DNA, 15 bp, Homo sapiens
taacaacacatggag

SEQ ID NO: 192998 - DNA, 15 bp, Homo sapiens
ttaacaacacatgga

SEQ ID NO: 192999 - DNA, 15 bp, Homo sapiens
attaacaacacatgg

SEQ ID NO: 193000 - DNA, 15 bp, Homo sapiens
gattaacaacacatg

SEQ ID NO: 193001 - DNA, 15 bp, Homo sapiens
cgattaacaacacat

SEQ ID NO: 193002 - DNA, 15 bp, Homo sapiens
ccgattaacaacaca

SEQ ID NO: 193003 - DNA, 15 bp, Homo sapiens
gccgattaacaacac

SEQ ID NO: 193004 - DNA, 15 bp, Homo sapiens
cgccgattaacaaca

SEQ ID NO: 193005 - DNA, 15 bp, Homo sapiens
acgccgattaacaac

SEQ ID NO: 193006 - DNA, 15 bp, Homo sapiens
aacgccgattaacaa

SEQ ID NO: 193007 - DNA, 15 bp, Homo sapiens
taacgccgattaaca

SEQ ID NO: 193008 - DNA, 15 bp, Homo sapiens
ataacgccgattaac

SEQ ID NO: 193009 - DNA, 15 bp, Homo sapiens
gataacgccgattaa

SEQ ID NO: 193010 - DNA, 15 bp, Homo sapiens
agataacgccgatta

SEQ ID NO: 193011 - DNA, 15 bp, Homo sapiens
gagataacgccgatt

SEQ ID NO: 193012 - DNA, 15 bp, Homo sapiens
ggagataacgccgat

SEQ ID NO: 193013 - DNA, 15 bp, Homo sapiens
tggagataacgccga

SEQ ID NO: 193014 - DNA, 15 bp, Homo sapiens
atggagataacgccg

SEQ ID NO: 193015 - DNA, 15 bp, Homo sapiens
catggagataacgcc

SEQ ID NO: 193016 - DNA, 15 bp, Homo sapiens
acatggagataacgc

SEQ ID NO: 193017 - DNA, 15 bp, Homo sapiens
cacatggagataacg

SEQ ID NO: 193018 - DNA, 15 bp, Homo sapiens
acacatggagataac

SEQ ID NO: 193019 - DNA, 15 bp, Homo sapiens
aacacatggagataa

SEQ ID NO: 193020 - DNA, 15 bp, Homo sapiens
caacacatggagata

SEQ ID NO: 193021 - DNA, 15 bp, Homo sapiens
ccaacacatggagat

SEQ ID NO: 193022 - DNA, 15 bp, Homo sapiens
tccaacacatggaga

SEQ ID NO: 193023 - DNA, 15 bp, Homo sapiens
ctccaacacatggag

SEQ ID NO: 193024 - DNA, 15 bp, Homo sapiens
tctccaacacatgga

SEQ ID NO: 193025 - DNA, 15 bp, Homo sapiens
atctccaacacatgg

SEQ ID NO: 193026 - DNA, 15 bp, Homo sapiens
tatctccaacacatg

SEQ ID NO: 193027 - DNA, 15 bp, Homo sapiens
atatctccaacacat

SEQ ID NO: 193028 - DNA, 15 bp, Homo sapiens
catatctccaacaca

SEQ ID NO: 193029 - DNA, 15 bp, Homo sapiens
acatatctccaacac

SEQ ID NO: 193030 - DNA, 15 bp, Homo sapiens
aacatatctccaaca

SEQ ID NO: 193031 - DNA, 15 bp, Homo sapiens
taacatatctccaac

SEQ ID NO: 193032 - DNA, 15 bp, Homo sapiens
ataacatatctccaa

SEQ ID NO: 193033 - DNA, 15 bp, Homo sapiens
aataacatatctcca

SEQ ID NO: 193034 - DNA, 15 bp, Homo sapiens
aaataacatatctcc

SEQ ID NO: 193035 - DNA, 15 bp, Homo sapiens
gaaataacatatctc

SEQ ID NO: 193036 - DNA, 15 bp, Homo sapiens
ggaaataacatatct

SEQ ID NO: 193037 - DNA, 15 bp, Homo sapiens
tggaaataacatatc

SEQ ID NO: 193038 - DNA, 15 bp, Homo sapiens
atggaaataacatat

SEQ ID NO: 193039 - DNA, 15 bp, Homo sapiens
catggaaataacata

SEQ ID NO: 193040 - DNA, 15 bp, Homo sapiens
acatggaaataacat

SEQ ID NO: 193041 - DNA, 15 bp, Homo sapiens
cacatggaaataaca

SEQ ID NO: 193042 - DNA, 15 bp, Homo sapiens
acacatggaaataac

SEQ ID NO: 193043 - DNA, 15 bp, Homo sapiens
aacacatggaaataa

SEQ ID NO: 193044 - DNA, 15 bp, Homo sapiens
aaacacatggaaata

SEQ ID NO: 193045 - DNA, 15 bp, Homo sapiens
gaaacacatggaaat

SEQ ID NO: 193046 - DNA, 15 bp, Homo sapiens
ggaaacacatggaaa

SEQ ID NO: 193047 - DNA, 15 bp, Homo sapiens
tggaaacacatggaa

SEQ ID NO: 193048 - DNA, 15 bp, Homo sapiens
gtggaaacacatgga

SEQ ID NO: 193049 - DNA, 15 bp, Homo sapiens
tgtggaaacacatgg

SEQ ID NO: 193050 - DNA, 15 bp, Homo sapiens
atgtggaaacacatg

SEQ ID NO: 193051 - DNA, 15 bp, Homo sapiens
catgtggaaacacat

SEQ ID NO: 193052 - DNA, 15 bp, Homo sapiens
ccatgtggaaacaca

SEQ ID NO: 193053 - DNA, 15 bp, Homo sapiens
tccatgtggaaacac

SEQ ID NO: 193054 - DNA, 15 bp, Homo sapiens
ttccatgtggaaaca

SEQ ID NO: 193055 - DNA, 15 bp, Homo sapiens
tttccatgtggaaac

SEQ ID NO: 193056 - DNA, 15 bp, Homo sapiens
ctttccatgtggaaa

SEQ ID NO: 193057 - DNA, 15 bp, Homo sapiens
actttccatgtggaa

SEQ ID NO: 193058 - DNA, 15 bp, Homo sapiens
gactttccatgtgga

SEQ ID NO: 193059 - DNA, 15 bp, Homo sapiens
tgactttccatgtgg

SEQ ID NO: 193060 - DNA, 15 bp, Homo sapiens
atgactttccatgtg

SEQ ID NO: 193061 - DNA, 15 bp, Homo sapiens
gatgactttccatgt

SEQ ID NO: 193062 - DNA, 15 bp, Homo sapiens
agatgactttccatg

SEQ ID NO: 193063 - DNA, 15 bp, Homo sapiens
gagatgactttccat

SEQ ID NO: 193064 - DNA, 15 bp, Homo sapiens
ggagatgactttcca

SEQ ID NO: 193065 - DNA, 15 bp, Homo sapiens
tggagatgactttcc

SEQ ID NO: 193066 - DNA, 15 bp, Homo sapiens
atggagatgactttc

SEQ ID NO: 193067 - DNA, 15 bp, Homo sapiens
catggagatgacttt

SEQ ID NO: 193068 - DNA, 15 bp, Homo sapiens
acatggagatgactt

SEQ ID NO: 193069 - DNA, 15 bp, Homo sapiens
cacatggagatgact

SEQ ID NO: 193070 - DNA, 15 bp, Homo sapiens
acacatggagatgac

SEQ ID NO: 193071 - DNA, 15 bp, Homo sapiens
aacacatggagatga

SEQ ID NO: 193072 - DNA, 15 bp, Homo sapiens
caacacatggagatg

SEQ ID NO: 193073 - DNA, 15 bp, Homo sapiens
acaacacatggagat

SEQ ID NO: 193074 - DNA, 15 bp, Homo sapiens
aacaacacatggaga

SEQ ID NO: 193075 - DNA, 15 bp, Homo sapiens
aattaacaacacatg

SEQ ID NO: 193076 - DNA, 15 bp, Homo sapiens
caattaacaacacat

SEQ ID NO: 193077 - DNA, 15 bp, Homo sapiens
ccaattaacaacaca

SEQ ID NO: 193078 - DNA, 15 bp, Homo sapiens
gccaattaacaacac

SEQ ID NO: 193079 - DNA, 15 bp, Homo sapiens
cgccaattaacaaca

SEQ ID NO: 193080 - DNA, 15 bp, Homo sapiens
acgccaattaacaac

SEQ ID NO: 193081 - DNA, 15 bp, Homo sapiens
aacgccaattaacaa

SEQ ID NO: 193082 - DNA, 15 bp, Homo sapiens
taacgccaattaaca

SEQ ID NO: 193083 - DNA, 15 bp, Homo sapiens
ataacgccaattaac

SEQ ID NO: 193084 - DNA, 15 bp, Homo sapiens
cataacgccaattaa

SEQ ID NO: 193085 - DNA, 15 bp, Homo sapiens
gcataacgccaatta

SEQ ID NO: 193086 - DNA, 15 bp, Homo sapiens
ggcataacgccaatt

SEQ ID NO: 193087 - DNA, 15 bp, Homo sapiens
tggcataacgccaat

SEQ ID NO: 193088 - DNA, 15 bp, Homo sapiens
ttggcataacgccaa

SEQ ID NO: 193089 - DNA, 15 bp, Homo sapiens
tttggcataacgcca

SEQ ID NO: 193090 - DNA, 15 bp, Homo sapiens
ttttggcataacgcc

SEQ ID NO: 193091 - DNA, 15 bp, Homo sapiens
tttttggcataacgc

SEQ ID NO: 193092 - DNA, 15 bp, Homo sapiens
ctttttggcataacg

SEQ ID NO: 193093 - DNA, 15 bp, Homo sapiens
cctttttggcataac

SEQ ID NO: 193094 - DNA, 15 bp, Homo sapiens
acctttttggcataa

SEQ ID NO: 193095 - DNA, 15 bp, Homo sapiens
cacctttttggcata

SEQ ID NO: 193096 - DNA, 15 bp, Homo sapiens
acacctttttggcat

SEQ ID NO: 193097 - DNA, 15 bp, Homo sapiens
aacacctttttggca

SEQ ID NO: 193098 - DNA, 15 bp, Homo sapiens
gaacacctttttggc

SEQ ID NO: 193099 - DNA, 15 bp, Homo sapiens
tgaacacctttttgg

SEQ ID NO: 193100 - DNA, 15 bp, Homo sapiens
ctgaacacctttttg

SEQ ID NO: 193101 - DNA, 15 bp, Homo sapiens
actgaacaccttttt

SEQ ID NO: 193102 - DNA, 15 bp, Homo sapiens
cactgaacacctttt

SEQ ID NO: 193103 - DNA, 15 bp, Homo sapiens
ccactgaacaccttt

SEQ ID NO: 193104 - DNA, 15 bp, Homo sapiens
accactgaacacctt

SEQ ID NO: 193105 - DNA, 15 bp, Homo sapiens
gaccactgaacacct

SEQ ID NO: 193106 - DNA, 15 bp, Homo sapiens
tgaccactgaacacc

SEQ ID NO: 193107 - DNA, 15 bp, Homo sapiens
ttgaccactgaacac

SEQ ID NO: 193108 - DNA, 15 bp, Homo sapiens
attgaccactgaaca

SEQ ID NO: 193109 - DNA, 15 bp, Homo sapiens
tattgaccactgaac

SEQ ID NO: 193110 - DNA, 15 bp, Homo sapiens
atattgaccactgaa

SEQ ID NO: 193111 - DNA, 15 bp, Homo sapiens
catattgaccactga

SEQ ID NO: 193112 - DNA, 15 bp, Homo sapiens
acatattgaccactg

SEQ ID NO: 193113 - DNA, 15 bp, Homo sapiens
aacatattgaccact

SEQ ID NO: 193114 - DNA, 15 bp, Homo sapiens
aaacatattgaccac

SEQ ID NO: 193115 - DNA, 15 bp, Homo sapiens
gaaacatattgacca

SEQ ID NO: 193116 - DNA, 15 bp, Homo sapiens
tgaaacatattgacc

SEQ ID NO: 193117 - DNA, 15 bp, Homo sapiens
ctgaaacatattgac

SEQ ID NO: 193118 - DNA, 15 bp, Homo sapiens
tctgaaacatattga

SEQ ID NO: 193119 - DNA, 15 bp, Homo sapiens
ttctgaaacatattg

SEQ ID NO: 193120 - DNA, 15 bp, Homo sapiens
tttctgaaacatatt

SEQ ID NO: 193121 - DNA, 15 bp, Homo sapiens
gtttctgaaacatat

SEQ ID NO: 193122 - DNA, 15 bp, Homo sapiens
tgtttctgaaacata

SEQ ID NO: 193123 - DNA, 15 bp, Homo sapiens
atgtttctgaaacat

SEQ ID NO: 193124 - DNA, 15 bp, Homo sapiens
tatgtttctgaaaca

SEQ ID NO: 193125 - DNA, 15 bp, Homo sapiens
ctatgtttctgaaac

SEQ ID NO: 193126 - DNA, 15 bp, Homo sapiens
cctatgtttctgaaa

SEQ ID NO: 193127 - DNA, 15 bp, Homo sapiens
acctatgtttctgaa

SEQ ID NO: 193128 - DNA, 15 bp, Homo sapiens
aacctatgtttctga

SEQ ID NO: 193129 - DNA, 15 bp, Homo sapiens
aaacctatgtttctg

SEQ ID NO: 193130 - DNA, 15 bp, Homo sapiens
gaaacctatgtttct

SEQ ID NO: 193131 - DNA, 15 bp, Homo sapiens
agaaacctatgtttc

SEQ ID NO: 193132 - DNA, 15 bp, Homo sapiens
gagaaacctatgttt

SEQ ID NO: 193133 - DNA, 15 bp, Homo sapiens
ggagaaacctatgtt

SEQ ID NO: 193134 - DNA, 15 bp, Homo sapiens
aggagaaacctatgt

SEQ ID NO: 193135 - DNA, 15 bp, Homo sapiens
aaggagaaacctatg

SEQ ID NO: 193136 - DNA, 15 bp, Homo sapiens
aaaggagaaacctat

SEQ ID NO: 193137 - DNA, 15 bp, Homo sapiens
aaaaggagaaaccta

SEQ ID NO: 193138 - DNA, 15 bp, Homo sapiens
aaaaaggagaaacct

SEQ ID NO: 193139 - DNA, 15 bp, Homo sapiens
aaaaaaggagaaacc

SEQ ID NO: 193140 - DNA, 15 bp, Homo sapiens
taaaaaaggagaaac

SEQ ID NO: 193141 - DNA, 15 bp, Homo sapiens
ataaaaaaggagaaa

SEQ ID NO: 193142 - DNA, 15 bp, Homo sapiens
aataaaaaaggagaa

SEQ ID NO: 193143 - DNA, 15 bp, Homo sapiens
aaataaaaaaggaga

SEQ ID NO: 193144 - DNA, 15 bp, Homo sapiens
aaaataaaaaaggag

SEQ ID NO: 193145 - DNA, 15 bp, Homo sapiens
aaaaataaaaaagga

SEQ ID NO: 193146 - DNA, 15 bp, Homo sapiens
gaaaaataaaaaagg

SEQ ID NO: 193147 - DNA, 15 bp, Homo sapiens
agaaaaataaaaaag

SEQ ID NO: 193148 - DNA, 15 bp, Homo sapiens
tagaaaaataaaaaa

SEQ ID NO: 193149 - DNA, 15 bp, Homo sapiens
ttagaaaaataaaaa

SEQ ID NO: 193150 - DNA, 15 bp, Homo sapiens
tttagaaaaataaaa

SEQ ID NO: 193151 - DNA, 15 bp, Homo sapiens
ctttagaaaaataaa

SEQ ID NO: 193152 - DNA, 15 bp, Homo sapiens
tctttagaaaaataa

SEQ ID NO: 193153 - DNA, 15 bp, Homo sapiens
ttctttagaaaaata

SEQ ID NO: 193154 - DNA, 15 bp, Homo sapiens
cttctttagaaaaat

SEQ ID NO: 193155 - DNA, 15 bp, Homo sapiens
gcttctttagaaaaa

SEQ ID NO: 193156 - DNA, 15 bp, Homo sapiens
tgcttctttagaaaa

SEQ ID NO: 193157 - DNA, 15 bp, Homo sapiens
ctgcttctttagaaa

SEQ ID NO: 193158 - DNA, 15 bp, Homo sapiens
cctgcttctttagaa

SEQ ID NO: 193159 - DNA, 15 bp, Homo sapiens
ccctgcttctttaga

SEQ ID NO: 193160 - DNA, 15 bp, Homo sapiens
gccctgcttctttag

SEQ ID NO: 193161 - DNA, 15 bp, Homo sapiens
ggccctgcttcttta

SEQ ID NO: 193162 - DNA, 15 bp, Homo sapiens
aggccctgcttcttt

SEQ ID NO: 193163 - DNA, 15 bp, Homo sapiens
aaggccctgcttctt

SEQ ID NO: 193164 - DNA, 15 bp, Homo sapiens
aaaggccctgcttct

SEQ ID NO: 193165 - DNA, 15 bp, Homo sapiens
gaaaggccctgcttc

SEQ ID NO: 193166 - DNA, 15 bp, Homo sapiens
agaaaggccctgctt

SEQ ID NO: 193167 - DNA, 15 bp, Homo sapiens
aagaaaggccctgct

SEQ ID NO: 193168 - DNA, 15 bp, Homo sapiens
caagaaaggccctgc

SEQ ID NO: 193169 - DNA, 15 bp, Homo sapiens
acaagaaaggccctg

SEQ ID NO: 193170 - DNA, 15 bp, Homo sapiens
aacaagaaaggccct

SEQ ID NO: 193171 - DNA, 15 bp, Homo sapiens
caacaagaaaggccc

SEQ ID NO: 193172 - DNA, 15 bp, Homo sapiens
gcaacaagaaaggcc

SEQ ID NO: 193173 - DNA, 15 bp, Homo sapiens
agcaacaagaaaggc

SEQ ID NO: 193174 - DNA, 15 bp, Homo sapiens
gagcaacaagaaagg

SEQ ID NO: 193175 - DNA, 15 bp, Homo sapiens
tgagcaacaagaaag

SEQ ID NO: 193176 - DNA, 15 bp, Homo sapiens
ctgagcaacaagaaa

SEQ ID NO: 193177 - DNA, 15 bp, Homo sapiens
cctgagcaacaagaa

SEQ ID NO: 193178 - DNA, 15 bp, Homo sapiens
gcctgagcaacaaga

SEQ ID NO: 193179 - DNA, 15 bp, Homo sapiens
agcctgagcaacaag

SEQ ID NO: 193180 - DNA, 15 bp, Homo sapiens
cagcctgagcaacaa

SEQ ID NO: 193181 - DNA, 15 bp, Homo sapiens
ccagcctgagcaaca

SEQ ID NO: 193182 - DNA, 15 bp, Homo sapiens
tccagcctgagcaac

SEQ ID NO: 193183 - DNA, 15 bp, Homo sapiens
ctccagcctgagcaa

SEQ ID NO: 193184 - DNA, 15 bp, Homo sapiens
actccagcctgagca

SEQ ID NO: 193185 - DNA, 15 bp, Homo sapiens
cactccagcctgagc

SEQ ID NO: 193186 - DNA, 15 bp, Homo sapiens
gcactccagcctgag

SEQ ID NO: 193187 - DNA, 15 bp, Homo sapiens
tgcactccagcctga

SEQ ID NO: 193188 - DNA, 15 bp, Homo sapiens
agcgccactgcactc

SEQ ID NO: 193189 - DNA, 15 bp, Homo sapiens
cagcgccactgcact

SEQ ID NO: 193190 - DNA, 15 bp, Homo sapiens
acagcgccactgcac

SEQ ID NO: 193191 - DNA, 15 bp, Homo sapiens
gacagcgccactgca

SEQ ID NO: 193192 - DNA, 15 bp, Homo sapiens
tgacagcgccactgc

SEQ ID NO: 193193 - DNA, 15 bp, Homo sapiens
atgacagcgccactg

SEQ ID NO: 193194 - DNA, 15 bp, Homo sapiens
tatgacagcgccact

SEQ ID NO: 193195 - DNA, 15 bp, Homo sapiens
ctatgacagcgccac

SEQ ID NO: 193196 - DNA, 15 bp, Homo sapiens
gctatgacagcgcca

SEQ ID NO: 193197 - DNA, 15 bp, Homo sapiens
agctatgacagcgcc

SEQ ID NO: 193198 - DNA, 15 bp, Homo sapiens
gagctatgacagcgc

SEQ ID NO: 193199 - DNA, 15 bp, Homo sapiens
cgagctatgacagcg

SEQ ID NO: 193200 - DNA, 15 bp, Homo sapiens
gcgagctatgacagc

SEQ ID NO: 193201 - DNA, 15 bp, Homo sapiens
agcgagctatgacag

SEQ ID NO: 193202 - DNA, 15 bp, Homo sapiens
cagcgagctatgaca

SEQ ID NO: 193203 - DNA, 15 bp, Homo sapiens
gcagcgagctatgac

SEQ ID NO: 193204 - DNA, 15 bp, Homo sapiens
tgcagcgagctatga

SEQ ID NO: 193205 - DNA, 15 bp, Homo sapiens
ctgcagcgagctatg

SEQ ID NO: 193206 - DNA, 15 bp, Homo sapiens
gctgcagcgagctat

SEQ ID NO: 193207 - DNA, 15 bp, Homo sapiens
ggctgcagcgagcta

SEQ ID NO: 193208 - DNA, 15 bp, Homo sapiens
aggctgcagcgagct

SEQ ID NO: 193209 - DNA, 15 bp, Homo sapiens
aaggctgcagcgagc

SEQ ID NO: 193210 - DNA, 15 bp, Homo sapiens
caaggctgcagcgag

SEQ ID NO: 193211 - DNA, 15 bp, Homo sapiens
tcaaggctgcagcga

SEQ ID NO: 193212 - DNA, 15 bp, Homo sapiens
ttcaaggctgcagcg

SEQ ID NO: 193213 - DNA, 15 bp, Homo sapiens
attcaaggctgcagc

SEQ ID NO: 193214 - DNA, 15 bp, Homo sapiens
aattcaaggctgcag

SEQ ID NO: 193215 - DNA, 15 bp, Homo sapiens
gaattcaaggctgca

SEQ ID NO: 193216 - DNA, 15 bp, Homo sapiens
ggaattcaaggctgc

SEQ ID NO: 193217 - DNA, 15 bp, Homo sapiens
aggaattcaaggctg

SEQ ID NO: 193218 - DNA, 15 bp, Homo sapiens
caggaattcaaggct

SEQ ID NO: 193219 - DNA, 15 bp, Homo sapiens
ccaggaattcaaggc

SEQ ID NO: 193220 - DNA, 15 bp, Homo sapiens
cccaggaattcaagg

SEQ ID NO: 193221 - DNA, 15 bp, Homo sapiens
gcccaggaattcaag

SEQ ID NO: 193222 - DNA, 15 bp, Homo sapiens
agcccaggaattcaa

SEQ ID NO: 193223 - DNA, 15 bp, Homo sapiens
gagcccaggaattca

SEQ ID NO: 193224 - DNA, 15 bp, Homo sapiens
tgagcccaggaattc

SEQ ID NO: 193225 - DNA, 15 bp, Homo sapiens
ttgagcccaggaatt

SEQ ID NO: 193226 - DNA, 15 bp, Homo sapiens
cttgagcccaggaat

SEQ ID NO: 193227 - DNA, 15 bp, Homo sapiens
acttgagcccaggaa

SEQ ID NO: 193228 - DNA, 15 bp, Homo sapiens
cacttgagcccagga

SEQ ID NO: 193229 - DNA, 15 bp, Homo sapiens
tcacttgagcccagg

SEQ ID NO: 193230 - DNA, 15 bp, Homo sapiens
cctgaggcaggagga

SEQ ID NO: 193231 - DNA, 15 bp, Homo sapiens
gcctgaggcaggagg

SEQ ID NO: 193232 - DNA, 15 bp, Homo sapiens
agcctgaggcaggag

SEQ ID NO: 193233 - DNA, 15 bp, Homo sapiens
gagcctgaggcagga

SEQ ID NO: 193234 - DNA, 15 bp, Homo sapiens
ggagcctgaggcagg

SEQ ID NO: 193235 - DNA, 15 bp, Homo sapiens
gggagcctgaggcag

SEQ ID NO: 193236 - DNA, 15 bp, Homo sapiens
tgggagcctgaggca

SEQ ID NO: 193237 - DNA, 15 bp, Homo sapiens
ttgggagcctgaggc

SEQ ID NO: 193238 - DNA, 15 bp, Homo sapiens
cttgggagcctgagg

SEQ ID NO: 193239 - DNA, 15 bp, Homo sapiens
acttgggagcctgag

SEQ ID NO: 193240 - DNA, 15 bp, Homo sapiens
tacttgggagcctga

SEQ ID NO: 193241 - DNA, 15 bp, Homo sapiens
ctacttgggagcctg

SEQ ID NO: 193242 - DNA, 15 bp, Homo sapiens
gctacttgggagcct

SEQ ID NO: 193243 - DNA, 15 bp, Homo sapiens
agctacttgggagcc

SEQ ID NO: 193244 - DNA, 15 bp, Homo sapiens
cagctacttgggagc

SEQ ID NO: 193245 - DNA, 15 bp, Homo sapiens
acgcctgtagtccca

SEQ ID NO: 193246 - DNA, 15 bp, Homo sapiens
cacgcctgtagtccc

SEQ ID NO: 193247 - DNA, 15 bp, Homo sapiens
acacgcctgtagtcc

SEQ ID NO: 193248 - DNA, 15 bp, Homo sapiens
cacacgcctgtagtc

SEQ ID NO: 193249 - DNA, 15 bp, Homo sapiens
gcacacgcctgtagt

SEQ ID NO: 193250 - DNA, 15 bp, Homo sapiens
ggcacacgcctgtag

SEQ ID NO: 193251 - DNA, 15 bp, Homo sapiens
gggcacacgcctgta

SEQ ID NO: 193252 - DNA, 15 bp, Homo sapiens
ggggcacacgcctgt

SEQ ID NO: 193253 - DNA, 15 bp, Homo sapiens
gggggcacacgcctg

SEQ ID NO: 193254 - DNA, 15 bp, Homo sapiens
tgggggcacacgcct

SEQ ID NO: 193255 - DNA, 15 bp, Homo sapiens
atgggggcacacgcc

SEQ ID NO: 193256 - DNA, 15 bp, Homo sapiens
catgggggcacacgc

SEQ ID NO: 193257 - DNA, 15 bp, Homo sapiens
gcatgggggcacacg

SEQ ID NO: 193258 - DNA, 15 bp, Homo sapiens
ggcatgggggcacac

SEQ ID NO: 193259 - DNA, 15 bp, Homo sapiens
gggcatgggggcaca

SEQ ID NO: 193260 - DNA, 15 bp, Homo sapiens
tgggcatgggggcac

SEQ ID NO: 193261 - DNA, 15 bp, Homo sapiens
ctgggcatgggggca

SEQ ID NO: 193262 - DNA, 15 bp, Homo sapiens
gctgggcatgggggc

SEQ ID NO: 193263 - DNA, 15 bp, Homo sapiens
agctgggcatggggg

SEQ ID NO: 193264 - DNA, 15 bp, Homo sapiens
tagctgggcatgggg

SEQ ID NO: 193265 - DNA, 15 bp, Homo sapiens
ttagctgggcatggg

SEQ ID NO: 193266 - DNA, 15 bp, Homo sapiens
gaaaaaattagctgg

SEQ ID NO: 193267 - DNA, 15 bp, Homo sapiens
agaaaaaattagctg

SEQ ID NO: 193268 - DNA, 15 bp, Homo sapiens
aagaaaaaattagct

SEQ ID NO: 193269 - DNA, 15 bp, Homo sapiens
aaagaaaaaattagc

SEQ ID NO: 193270 - DNA, 15 bp, Homo sapiens
aaaagaaaaaattag

SEQ ID NO: 193271 - DNA, 15 bp, Homo sapiens
aaaaagaaaaaatta

SEQ ID NO: 193272 - DNA, 15 bp, Homo sapiens
aaaaaagaaaaaatt

SEQ ID NO: 193273 - DNA, 15 bp, Homo sapiens
aaaaaaagaaaaaat

SEQ ID NO: 193274 - DNA, 15 bp, Homo sapiens
aaaaaaaagaaaaaa

SEQ ID NO: 193275 - DNA, 15 bp, Homo sapiens
aaaaaaaaagaaaaa

SEQ ID NO: 193276 - DNA, 15 bp, Homo sapiens
caaaaaaaaaaaaga

SEQ ID NO: 193277 - DNA, 15 bp, Homo sapiens
acaaaaaaaaaaaag

SEQ ID NO: 193278 - DNA, 15 bp, Homo sapiens
ctacaaaaaaaaaaa

SEQ ID NO: 193279 - DNA, 15 bp, Homo sapiens
tctacaaaaaaaaaa

SEQ ID NO: 193280 - DNA, 15 bp, Homo sapiens
ctctacaaaaaaaaa

SEQ ID NO: 193281 - DNA, 15 bp, Homo sapiens
tctctacaaaaaaaa

SEQ ID NO: 193282 - DNA, 15 bp, Homo sapiens
gtctctacaaaaaaa

SEQ ID NO: 193283 - DNA, 15 bp, Homo sapiens
tgtctctacaaaaaa

SEQ ID NO: 193284 - DNA, 15 bp, Homo sapiens
gaccctgtctctaca

SEQ ID NO: 193285 - DNA, 15 bp, Homo sapiens
agaccctgtctctac

SEQ ID NO: 193286 - DNA, 15 bp, Homo sapiens
aagaccctgtctcta

SEQ ID NO: 193287 - DNA, 15 bp, Homo sapiens
caagaccctgtctct

SEQ ID NO: 193288 - DNA, 15 bp, Homo sapiens
ggcaagaccctgtct

SEQ ID NO: 193289 - DNA, 15 bp, Homo sapiens
tggcaagaccctgtc

SEQ ID NO: 193290 - DNA, 15 bp, Homo sapiens
ctggcaagaccctgt

SEQ ID NO: 193291 - DNA, 15 bp, Homo sapiens
tctggcaagaccctg

SEQ ID NO: 193292 - DNA, 15 bp, Homo sapiens
ctctggcaagaccct

SEQ ID NO: 193293 - DNA, 15 bp, Homo sapiens
tctctggcaagaccc

SEQ ID NO: 193294 - DNA, 15 bp, Homo sapiens
ttctctggcaagacc

SEQ ID NO: 193295 - DNA, 15 bp, Homo sapiens
tttctctggcaagac

SEQ ID NO: 193296 - DNA, 15 bp, Homo sapiens
gtttctctggcaaga

SEQ ID NO: 193297 - DNA, 15 bp, Homo sapiens
tgtttctctggcaag

SEQ ID NO: 193298 - DNA, 15 bp, Homo sapiens
atgtttctctggcaa

SEQ ID NO: 193299 - DNA, 15 bp, Homo sapiens
tatgtttctctggca

SEQ ID NO: 193300 - DNA, 15 bp, Homo sapiens
ctatgtttctctggc

SEQ ID NO: 193301 - DNA, 15 bp, Homo sapiens
cctatgtttctctgg

SEQ ID NO: 193302 - DNA, 15 bp, Homo sapiens
acctatgtttctctg

SEQ ID NO: 193303 - DNA, 15 bp, Homo sapiens
aacctatgtttctct

SEQ ID NO: 193304 - DNA, 15 bp, Homo sapiens
aaacctatgtttctc

SEQ ID NO: 193305 - DNA, 15 bp, Homo sapiens
aagaaacctatgttt

SEQ ID NO: 193306 - DNA, 15 bp, Homo sapiens
caagaaacctatgtt

SEQ ID NO: 193307 - DNA, 15 bp, Homo sapiens
ccaagaaacctatgt

SEQ ID NO: 193308 - DNA, 15 bp, Homo sapiens
accaagaaacctatg

SEQ ID NO: 193309 - DNA, 15 bp, Homo sapiens
aaccaagaaacctat

SEQ ID NO: 193310 - DNA, 15 bp, Homo sapiens
taaccaagaaaccta

SEQ ID NO: 193311 - DNA, 15 bp, Homo sapiens
gtaaccaagaaacct

SEQ ID NO: 193312 - DNA, 15 bp, Homo sapiens
tgtaaccaagaaacc

SEQ ID NO: 193313 - DNA, 15 bp, Homo sapiens
ctgtaaccaagaaac

SEQ ID NO: 193314 - DNA, 15 bp, Homo sapiens
tctgtaaccaagaaa

SEQ ID NO: 193315 - DNA, 15 bp, Homo sapiens
gtctgtaaccaagaa

SEQ ID NO: 193316 - DNA, 15 bp, Homo sapiens
ggtctgtaaccaaga

SEQ ID NO: 193317 - DNA, 15 bp, Homo sapiens
aggtctgtaaccaag

SEQ ID NO: 193318 - DNA, 15 bp, Homo sapiens
aaggtctgtaaccaa

SEQ ID NO: 193319 - DNA, 15 bp, Homo sapiens
aaaggtctgtaacca

SEQ ID NO: 193320 - DNA, 15 bp, Homo sapiens
gaaaggtctgtaacc

SEQ ID NO: 193321 - DNA, 15 bp, Homo sapiens
tgaaaggtctgtaac

SEQ ID NO: 193322 - DNA, 15 bp, Homo sapiens
atgaaaggtctgtaa

SEQ ID NO: 193323 - DNA, 15 bp, Homo sapiens
tatgaaaggtctgta

SEQ ID NO: 193324 - DNA, 15 bp, Homo sapiens
atatgaaaggtctgt

SEQ ID NO: 193325 - DNA, 15 bp, Homo sapiens
catatgaaaggtctg

SEQ ID NO: 193326 - DNA, 15 bp, Homo sapiens
acatatgaaaggtct

SEQ ID NO: 193327 - DNA, 15 bp, Homo sapiens
aacatatgaaaggtc

SEQ ID NO: 193328 - DNA, 15 bp, Homo sapiens
taacatatgaaaggt

SEQ ID NO: 193329 - DNA, 15 bp, Homo sapiens
ttaacatatgaaagg

SEQ ID NO: 193330 - DNA, 15 bp, Homo sapiens
attaacatatgaaag

SEQ ID NO: 193331 - DNA, 15 bp, Homo sapiens
aattaacatatgaaa

SEQ ID NO: 193332 - DNA, 15 bp, Homo sapiens
taattaacatatgaa

SEQ ID NO: 193333 - DNA, 15 bp, Homo sapiens
ataattaacatatga

SEQ ID NO: 193334 - DNA, 15 bp, Homo sapiens
aataattaacatatg

SEQ ID NO: 193335 - DNA, 15 bp, Homo sapiens
taataattaacatat

SEQ ID NO: 193336 - DNA, 15 bp, Homo sapiens
ataataattaacata

SEQ ID NO: 193337 - DNA, 15 bp, Homo sapiens
aataataattaacat

SEQ ID NO: 193338 - DNA, 15 bp, Homo sapiens
gaataataattaaca

SEQ ID NO: 193339 - DNA, 15 bp, Homo sapiens
agaataataattaac

SEQ ID NO: 193340 - DNA, 15 bp, Homo sapiens
aagaataataattaa

SEQ ID NO: 193341 - DNA, 15 bp, Homo sapiens
aaagaataataatta

SEQ ID NO: 193342 - DNA, 15 bp, Homo sapiens
aaaagaataataatt

SEQ ID NO: 193343 - DNA, 15 bp, Homo sapiens
caaaagaataataat

SEQ ID NO: 193344 - DNA, 15 bp, Homo sapiens
gcaaaagaataataa

SEQ ID NO: 193345 - DNA, 15 bp, Homo sapiens
agcaaaagaataata

SEQ ID NO: 193346 - DNA, 15 bp, Homo sapiens
cagcaaaagaataat

SEQ ID NO: 193347 - DNA, 15 bp, Homo sapiens
acagcaaaagaataa

SEQ ID NO: 193348 - DNA, 15 bp, Homo sapiens
aacagcaaaagaata

SEQ ID NO: 193349 - DNA, 15 bp, Homo sapiens
aaacagcaaaagaat

SEQ ID NO: 193350 - DNA, 15 bp, Homo sapiens
aaaacagcaaaagaa

SEQ ID NO: 193351 - DNA, 15 bp, Homo sapiens
aaaaacagcaaaaga

SEQ ID NO: 193352 - DNA, 15 bp, Homo sapiens
caaaaacagcaaaag

SEQ ID NO: 193353 - DNA, 15 bp, Homo sapiens
tcaaaaacagcaaaa

SEQ ID NO: 193354 - DNA, 15 bp, Homo sapiens
ttcaaaaacagcaaa

SEQ ID NO: 193355 - DNA, 15 bp, Homo sapiens
cttcaaaaacagcaa

SEQ ID NO: 193356 - DNA, 15 bp, Homo sapiens
tcttcaaaaacagca

SEQ ID NO: 193357 - DNA, 15 bp, Homo sapiens
atcttcaaaaacagc

SEQ ID NO: 193358 - DNA, 15 bp, Homo sapiens
tatcttcaaaaacag

SEQ ID NO: 193359 - DNA, 15 bp, Homo sapiens
ttatcttcaaaaaca

SEQ ID NO: 193360 - DNA, 15 bp, Homo sapiens
gttatcttcaaaaac

SEQ ID NO: 193361 - DNA, 15 bp, Homo sapiens
tgttatcttcaaaaa

SEQ ID NO: 193362 - DNA, 15 bp, Homo sapiens
ttgttatcttcaaaa

SEQ ID NO: 193363 - DNA, 15 bp, Homo sapiens
attgttatcttcaaa

SEQ ID NO: 193364 - DNA, 15 bp, Homo sapiens
gattgttatcttcaa

SEQ ID NO: 193365 - DNA, 15 bp, Homo sapiens
agattgttatcttca

SEQ ID NO: 193366 - DNA, 15 bp, Homo sapiens
aagattgttatcttc

SEQ ID NO: 193367 - DNA, 15 bp, Homo sapiens
aaagattgttatctt

SEQ ID NO: 193368 - DNA, 15 bp, Homo sapiens
caaagattgttatct

SEQ ID NO: 193369 - DNA, 15 bp, Homo sapiens
acaaagattgttatc

SEQ ID NO: 193370 - DNA, 15 bp, Homo sapiens
cacaaagattgttat

SEQ ID NO: 193371 - DNA, 15 bp, Homo sapiens
gcacaaagattgtta

SEQ ID NO: 193372 - DNA, 15 bp, Homo sapiens
agcacaaagattgtt

SEQ ID NO: 193373 - DNA, 15 bp, Homo sapiens
aagcacaaagattgt

SEQ ID NO: 193374 - DNA, 15 bp, Homo sapiens
gaagcacaaagattg

SEQ ID NO: 193375 - DNA, 15 bp, Homo sapiens
ggaagcacaaagatt

SEQ ID NO: 193376 - DNA, 15 bp, Homo sapiens
gggaagcacaaagat

SEQ ID NO: 193377 - DNA, 15 bp, Homo sapiens
tgggaagcacaaaga

SEQ ID NO: 193378 - DNA, 15 bp, Homo sapiens
ctgggaagcacaaag

SEQ ID NO: 193379 - DNA, 15 bp, Homo sapiens
cctgggaagcacaaa

SEQ ID NO: 193380 - DNA, 15 bp, Homo sapiens
gcctgggaagcacaa

SEQ ID NO: 193381 - DNA, 15 bp, Homo sapiens
agcctgggaagcaca

SEQ ID NO: 193382 - DNA, 15 bp, Homo sapiens
aagcctgggaagcac

SEQ ID NO: 193383 - DNA, 15 bp, Homo sapiens
taagcctgggaagca

SEQ ID NO: 193384 - DNA, 15 bp, Homo sapiens
ataagcctgggaagc

SEQ ID NO: 193385 - DNA, 15 bp, Homo sapiens
aataagcctgggaag

SEQ ID NO: 193386 - DNA, 15 bp, Homo sapiens
aaataagcctgggaa

SEQ ID NO: 193387 - DNA, 15 bp, Homo sapiens
caaataagcctggga

SEQ ID NO: 193388 - DNA, 15 bp, Homo sapiens
tcaaataagcctggg

SEQ ID NO: 193389 - DNA, 15 bp, Homo sapiens
atcaaataagcctgg

SEQ ID NO: 193390 - DNA, 15 bp, Homo sapiens
gatcaaataagcctg

SEQ ID NO: 193391 - DNA, 15 bp, Homo sapiens
ggatcaaataagcct

SEQ ID NO: 193392 - DNA, 15 bp, Homo sapiens
aggatcaaataagcc

SEQ ID NO: 193393 - DNA, 15 bp, Homo sapiens
caggatcaaataagc

SEQ ID NO: 193394 - DNA, 15 bp, Homo sapiens
tcaggatcaaataag

SEQ ID NO: 193395 - DNA, 15 bp, Homo sapiens
ctcaggatcaaataa

SEQ ID NO: 193396 - DNA, 15 bp, Homo sapiens
tctcaggatcaaata

SEQ ID NO: 193397 - DNA, 15 bp, Homo sapiens
atctcaggatcaaat

SEQ ID NO: 193398 - DNA, 15 bp, Homo sapiens
gatctcaggatcaaa

SEQ ID NO: 193399 - DNA, 15 bp, Homo sapiens
ggatctcaggatcaa

SEQ ID NO: 193400 - DNA, 15 bp, Homo sapiens
aggatctcaggatca

SEQ ID NO: 193401 - DNA, 15 bp, Homo sapiens
aaggatctcaggatc

SEQ ID NO: 193402 - DNA, 15 bp, Homo sapiens
aaaggatctcaggat

SEQ ID NO: 193403 - DNA, 15 bp, Homo sapiens
caaaggatctcagga

SEQ ID NO: 193404 - DNA, 15 bp, Homo sapiens
acaaaggatctcagg

SEQ ID NO: 193405 - DNA, 15 bp, Homo sapiens
aacaaaggatctcag

SEQ ID NO: 193406 - DNA, 15 bp, Homo sapiens
aaacaaaggatctca

SEQ ID NO: 193407 - DNA, 15 bp, Homo sapiens
caaacaaaggatctc

SEQ ID NO: 193408 - DNA, 15 bp, Homo sapiens
tcaaacaaaggatct

SEQ ID NO: 193409 - DNA, 15 bp, Homo sapiens
ctcaaacaaaggatc

SEQ ID NO: 193410 - DNA, 15 bp, Homo sapiens
cctcaaacaaaggat

SEQ ID NO: 193411 - DNA, 15 bp, Homo sapiens
tcctcaaacaaagga

SEQ ID NO: 193412 - DNA, 15 bp, Homo sapiens
ctcctcaaacaaagg

SEQ ID NO: 193413 - DNA, 15 bp, Homo sapiens
tctcctcaaacaaag

SEQ ID NO: 193414 - DNA, 15 bp, Homo sapiens
ttctcctcaaacaaa

SEQ ID NO: 193415 - DNA, 15 bp, Homo sapiens
cttctcctcaaacaa

SEQ ID NO: 193416 - DNA, 15 bp, Homo sapiens
tcttctcctcaaaca

SEQ ID NO: 193417 - DNA, 15 bp, Homo sapiens
ctcttctcctcaaac

SEQ ID NO: 193418 - DNA, 15 bp, Homo sapiens
tctcttctcctcaaa

SEQ ID NO: 193419 - DNA, 15 bp, Homo sapiens
ttctcttctcctcaa

SEQ ID NO: 193420 - DNA, 15 bp, Homo sapiens
gttctcttctcctca

SEQ ID NO: 193421 - DNA, 15 bp, Homo sapiens
tgttctcttctcctc

SEQ ID NO: 193422 - DNA, 15 bp, Homo sapiens
ctgttctcttctcct

SEQ ID NO: 193423 - DNA, 15 bp, Homo sapiens
cctgttctcttctcc

SEQ ID NO: 193424 - DNA, 15 bp, Homo sapiens
tcctgttctcttctc

SEQ ID NO: 193425 - DNA, 15 bp, Homo sapiens
gtcctgttctcttct

SEQ ID NO: 193426 - DNA, 15 bp, Homo sapiens
agtcctgttctcttc

SEQ ID NO: 193427 - DNA, 15 bp, Homo sapiens
tagtcctgttctctt

SEQ ID NO: 193428 - DNA, 15 bp, Homo sapiens
atagtcctgttctct

SEQ ID NO: 193429 - DNA, 15 bp, Homo sapiens
catagtcctgttctc

SEQ ID NO: 193430 - DNA, 15 bp, Homo sapiens
acatagtcctgttct

SEQ ID NO: 193431 - DNA, 15 bp, Homo sapiens
aacatagtcctgttc

SEQ ID NO: 193432 - DNA, 15 bp, Homo sapiens
aaacatagtcctgtt

SEQ ID NO: 193433 - DNA, 15 bp, Homo sapiens
caaacatagtcctgt

SEQ ID NO: 193434 - DNA, 15 bp, Homo sapiens
tcaaacatagtcctg

SEQ ID NO: 193435 - DNA, 15 bp, Homo sapiens
ctcaaacatagtcct

SEQ ID NO: 193436 - DNA, 15 bp, Homo sapiens
tctcaaacatagtcc

SEQ ID NO: 193437 - DNA, 15 bp, Homo sapiens
ttctcaaacatagtc

SEQ ID NO: 193438 - DNA, 15 bp, Homo sapiens
tttctcaaacatagt

SEQ ID NO: 193439 - DNA, 15 bp, Homo sapiens
gtttctcaaacatag

SEQ ID NO: 193440 - DNA, 15 bp, Homo sapiens
ggtttctcaaacata

SEQ ID NO: 193441 - DNA, 15 bp, Homo sapiens
aggtttctcaaacat

SEQ ID NO: 193442 - DNA, 15 bp, Homo sapiens
caggtttctcaaaca

SEQ ID NO: 193443 - DNA, 15 bp, Homo sapiens
gcaggtttctcaaac

SEQ ID NO: 193444 - DNA, 15 bp, Homo sapiens
tgcaggtttctcaaa

SEQ ID NO: 193445 - DNA, 15 bp, Homo sapiens
gtgcaggtttctcaa

SEQ ID NO: 193446 - DNA, 15 bp, Homo sapiens
agtgcaggtttctca

SEQ ID NO: 193447 - DNA, 15 bp, Homo sapiens
gagtgcaggtttctc

SEQ ID NO: 193448 - DNA, 15 bp, Homo sapiens
ggagtgcaggtttct

SEQ ID NO: 193449 - DNA, 15 bp, Homo sapiens
tggagtgcaggtttc

SEQ ID NO: 193450 - DNA, 15 bp, Homo sapiens
atggagtgcaggttt

SEQ ID NO: 193451 - DNA, 15 bp, Homo sapiens
tatggagtgcaggtt

SEQ ID NO: 193452 - DNA, 15 bp, Homo sapiens
ctatggagtgcaggt

SEQ ID NO: 193453 - DNA, 15 bp, Homo sapiens
tctatggagtgcagg

SEQ ID NO: 193454 - DNA, 15 bp, Homo sapiens
ctctatggagtgcag

SEQ ID NO: 193455 - DNA, 15 bp, Homo sapiens
cctctatggagtgca

SEQ ID NO: 193456 - DNA, 15 bp, Homo sapiens
gcctctatggagtgc

SEQ ID NO: 193457 - DNA, 15 bp, Homo sapiens
agcctctatggagtg

SEQ ID NO: 193458 - DNA, 15 bp, Homo sapiens
aagcctctatggagt

SEQ ID NO: 193459 - DNA, 15 bp, Homo sapiens
gaagcctctatggag

SEQ ID NO: 193460 - DNA, 15 bp, Homo sapiens
ggaagcctctatgga

SEQ ID NO: 193461 - DNA, 15 bp, Homo sapiens
tggaagcctctatgg

SEQ ID NO: 193462 - DNA, 15 bp, Homo sapiens
ctggaagcctctatg

SEQ ID NO: 193463 - DNA, 15 bp, Homo sapiens
cctggaagcctctat

SEQ ID NO: 193464 - DNA, 15 bp, Homo sapiens
tcctggaagcctcta

SEQ ID NO: 193465 - DNA, 15 bp, Homo sapiens
ctcctggaagcctct

SEQ ID NO: 193466 - DNA, 15 bp, Homo sapiens
tctcctggaagcctc

SEQ ID NO: 193467 - DNA, 15 bp, Homo sapiens
ctctcctggaagcct

SEQ ID NO: 193468 - DNA, 15 bp, Homo sapiens
cctctcctggaagcc

SEQ ID NO: 193469 - DNA, 15 bp, Homo sapiens
tcctctcctggaagc

SEQ ID NO: 193470 - DNA, 15 bp, Homo sapiens
gtcctctcctggaag

SEQ ID NO: 193471 - DNA, 15 bp, Homo sapiens
tgtcctctcctggaa

SEQ ID NO: 193472 - DNA, 15 bp, Homo sapiens
atgtcctctcctgga

SEQ ID NO: 193473 - DNA, 15 bp, Homo sapiens
tatgtcctctcctgg

SEQ ID NO: 193474 - DNA, 15 bp, Homo sapiens
ttatgtcctctcctg

SEQ ID NO: 193475 - DNA, 15 bp, Homo sapiens
tttatgtcctctcct

SEQ ID NO: 193476 - DNA, 15 bp, Homo sapiens
atttatgtcctctcc

SEQ ID NO: 193477 - DNA, 15 bp, Homo sapiens
tatttatgtcctctc

SEQ ID NO: 193478 - DNA, 15 bp, Homo sapiens
ttatttatgtcctct

SEQ ID NO: 193479 - DNA, 15 bp, Homo sapiens
attatttatgtcctc

SEQ ID NO: 193480 - DNA, 15 bp, Homo sapiens
aatggggtagaagct

SEQ ID NO: 193481 - DNA, 15 bp, Homo sapiens
aaatggggtagaagc

SEQ ID NO: 193482 - DNA, 15 bp, Homo sapiens
gaaatggggtagaag

SEQ ID NO: 193483 - DNA, 15 bp, Homo sapiens
ggaaatggggtagaa

SEQ ID NO: 193484 - DNA, 15 bp, Homo sapiens
aggaaatggggtaga

SEQ ID NO: 193485 - DNA, 15 bp, Homo sapiens
gaggaaatggggtag

SEQ ID NO: 193486 - DNA, 15 bp, Homo sapiens
agaggaaatggggta

SEQ ID NO: 193487 - DNA, 15 bp, Homo sapiens
gagaggaaatggggt

SEQ ID NO: 193488 - DNA, 15 bp, Homo sapiens
agagaggaaatgggg

SEQ ID NO: 193489 - DNA, 15 bp, Homo sapiens
tagagaggaaatggg

SEQ ID NO: 193490 - DNA, 15 bp, Homo sapiens
ttagagaggaaatgg

SEQ ID NO: 193491 - DNA, 15 bp, Homo sapiens
attagagaggaaatg

SEQ ID NO: 193492 - DNA, 15 bp, Homo sapiens
cattagagaggaaat

SEQ ID NO: 193493 - DNA, 15 bp, Homo sapiens
ccattagagaggaaa

SEQ ID NO: 193494 - DNA, 15 bp, Homo sapiens
gccattagagaggaa

SEQ ID NO: 193495 - DNA, 15 bp, Homo sapiens
tgccattagagagga

SEQ ID NO: 193496 - DNA, 15 bp, Homo sapiens
gtgccattagagagg

SEQ ID NO: 193497 - DNA, 15 bp, Homo sapiens
agtgccattagagag

SEQ ID NO: 193498 - DNA, 15 bp, Homo sapiens
tagtgccattagaga

SEQ ID NO: 193499 - DNA, 15 bp, Homo sapiens
ttagtgccattagag

SEQ ID NO: 193500 - DNA, 15 bp, Homo sapiens
attagtgccattaga

SEQ ID NO: 193501 - DNA, 15 bp, Homo sapiens
gattagtgccattag

SEQ ID NO: 193502 - DNA, 15 bp, Homo sapiens
agattagtgccatta

SEQ ID NO: 193503 - DNA, 15 bp, Homo sapiens
aagattagtgccatt

SEQ ID NO: 193504 - DNA, 15 bp, Homo sapiens
aaagattagtgccat

SEQ ID NO: 193505 - DNA, 15 bp, Homo sapiens
aaaagattagtgcca

SEQ ID NO: 193506 - DNA, 15 bp, Homo sapiens
caaaagattagtgcc

SEQ ID NO: 193507 - DNA, 15 bp, Homo sapiens
acaaaagattagtgc

SEQ ID NO: 193508 - DNA, 15 bp, Homo sapiens
tacaaaagattagtg

SEQ ID NO: 193509 - DNA, 15 bp, Homo sapiens
atacaaaagattagt

SEQ ID NO: 193510 - DNA, 15 bp, Homo sapiens
gatacaaaagattag

SEQ ID NO: 193511 - DNA, 15 bp, Homo sapiens
agatacaaaagatta

SEQ ID NO: 193512 - DNA, 15 bp, Homo sapiens
aagatacaaaagatt

SEQ ID NO: 193513 - DNA, 15 bp, Homo sapiens
gaagatacaaaagat

SEQ ID NO: 193514 - DNA, 15 bp, Homo sapiens
agaagatacaaaaga

SEQ ID NO: 193515 - DNA, 15 bp, Homo sapiens
cagaagatacaaaag

SEQ ID NO: 193516 - DNA, 15 bp, Homo sapiens
acagaagatacaaaa

SEQ ID NO: 193517 - DNA, 15 bp, Homo sapiens
aacagaagatacaaa

SEQ ID NO: 193518 - DNA, 15 bp, Homo sapiens
taacagaagatacaa

SEQ ID NO: 193519 - DNA, 15 bp, Homo sapiens
ctaacagaagataca

SEQ ID NO: 193520 - DNA, 15 bp, Homo sapiens
cctaacagaagatac

SEQ ID NO: 193521 - DNA, 15 bp, Homo sapiens
ccctaacagaagata

SEQ ID NO: 193522 - DNA, 15 bp, Homo sapiens
accctaacagaagat

SEQ ID NO: 193523 - DNA, 15 bp, Homo sapiens
aaccctaacagaaga

SEQ ID NO: 193524 - DNA, 15 bp, Homo sapiens
aaaccctaacagaag

SEQ ID NO: 193525 - DNA, 15 bp, Homo sapiens
aaaaccctaacagaa

SEQ ID NO: 193526 - DNA, 15 bp, Homo sapiens
aaaaaccctaacaga

SEQ ID NO: 193527 - DNA, 15 bp, Homo sapiens
caaaaaccctaacag

SEQ ID NO: 193528 - DNA, 15 bp, Homo sapiens
ccaaaaaccctaaca

SEQ ID NO: 193529 - DNA, 15 bp, Homo sapiens
tccaaaaaccctaac

SEQ ID NO: 193530 - DNA, 15 bp, Homo sapiens
ttccaaaaaccctaa

SEQ ID NO: 193531 - DNA, 15 bp, Homo sapiens
attccaaaaacccta

SEQ ID NO: 193532 - DNA, 15 bp, Homo sapiens
tattccaaaaaccct

SEQ ID NO: 193533 - DNA, 15 bp, Homo sapiens
gtattccaaaaaccc

SEQ ID NO: 193534 - DNA, 15 bp, Homo sapiens
agtattccaaaaacc

SEQ ID NO: 193535 - DNA, 15 bp, Homo sapiens
tagtattccaaaaac

SEQ ID NO: 193536 - DNA, 15 bp, Homo sapiens
ctagtattccaaaaa

SEQ ID NO: 193537 - DNA, 15 bp, Homo sapiens
actagtattccaaaa

SEQ ID NO: 193538 - DNA, 15 bp, Homo sapiens
cactagtattccaaa

SEQ ID NO: 193539 - DNA, 15 bp, Homo sapiens
tcactagtattccaa

SEQ ID NO: 193540 - DNA, 15 bp, Homo sapiens
gtcactagtattcca

SEQ ID NO: 193541 - DNA, 15 bp, Homo sapiens
tgtcactagtattcc

SEQ ID NO: 193542 - DNA, 15 bp, Homo sapiens
atgtcactagtattc

SEQ ID NO: 193543 - DNA, 15 bp, Homo sapiens
gatgtcactagtatt

SEQ ID NO: 193544 - DNA, 15 bp, Homo sapiens
agatgtcactagtat

SEQ ID NO: 193545 - DNA, 15 bp, Homo sapiens
gagatgtcactagta

SEQ ID NO: 193546 - DNA, 15 bp, Homo sapiens
ggagatgtcactagt

SEQ ID NO: 193547 - DNA, 15 bp, Homo sapiens
aggagatgtcactag

SEQ ID NO: 193548 - DNA, 15 bp, Homo sapiens
taggagatgtcacta

SEQ ID NO: 193549 - DNA, 15 bp, Homo sapiens
ctaggagatgtcact

SEQ ID NO: 193550 - DNA, 15 bp, Homo sapiens
tctaggagatgtcac

SEQ ID NO: 193551 - DNA, 15 bp, Homo sapiens
ctctaggagatgtca

SEQ ID NO: 193552 - DNA, 15 bp, Homo sapiens
gctctaggagatgtc

SEQ ID NO: 193553 - DNA, 15 bp, Homo sapiens
ggctctaggagatgt

SEQ ID NO: 193554 - DNA, 15 bp, Homo sapiens
aggctctaggagatg

SEQ ID NO: 193555 - DNA, 15 bp, Homo sapiens
aaggctctaggagat

SEQ ID NO: 193556 - DNA, 15 bp, Homo sapiens
caaggctctaggaga

SEQ ID NO: 193557 - DNA, 15 bp, Homo sapiens
acaaggctctaggag

SEQ ID NO: 193558 - DNA, 15 bp, Homo sapiens
tacaaggctctagga

SEQ ID NO: 193559 - DNA, 15 bp, Homo sapiens
ttacaaggctctagg

SEQ ID NO: 193560 - DNA, 15 bp, Homo sapiens
tttacaaggctctag

SEQ ID NO: 193561 - DNA, 15 bp, Homo sapiens
ctttacaaggctcta

SEQ ID NO: 193562 - DNA, 15 bp, Homo sapiens
gctttacaaggctct

SEQ ID NO: 193563 - DNA, 15 bp, Homo sapiens
agctttacaaggctc

SEQ ID NO: 193564 - DNA, 15 bp, Homo sapiens
gagctttacaaggct

SEQ ID NO: 193565 - DNA, 15 bp, Homo sapiens
agagctttacaaggc

SEQ ID NO: 193566 - DNA, 15 bp, Homo sapiens
aagagctttacaagg

SEQ ID NO: 193567 - DNA, 15 bp, Homo sapiens
taagagctttacaag

SEQ ID NO: 193568 - DNA, 15 bp, Homo sapiens
ataagagctttacaa

SEQ ID NO: 193569 - DNA, 15 bp, Homo sapiens
aataagagctttaca

SEQ ID NO: 193570 - DNA, 15 bp, Homo sapiens
aaataagagctttac

SEQ ID NO: 193571 - DNA, 15 bp, Homo sapiens
caaataagagcttta

SEQ ID NO: 193572 - DNA, 15 bp, Homo sapiens
gcaaataagagcttt

SEQ ID NO: 193573 - DNA, 15 bp, Homo sapiens
ggcaaataagagctt

SEQ ID NO: 193574 - DNA, 15 bp, Homo sapiens
aggcaaataagagct

SEQ ID NO: 193575 - DNA, 15 bp, Homo sapiens
aaggcaaataagagc

SEQ ID NO: 193576 - DNA, 15 bp, Homo sapiens
gaaggcaaataagag

SEQ ID NO: 193577 - DNA, 15 bp, Homo sapiens
tgaaggcaaataaga

SEQ ID NO: 193578 - DNA, 15 bp, Homo sapiens
ttgaaggcaaataag

SEQ ID NO: 193579 - DNA, 15 bp, Homo sapiens
cttgaaggcaaataa

SEQ ID NO: 193580 - DNA, 15 bp, Homo sapiens
acttgaaggcaaata

SEQ ID NO: 193581 - DNA, 15 bp, Homo sapiens
cacttgaaggcaaat

SEQ ID NO: 193582 - DNA, 15 bp, Homo sapiens
gcacttgaaggcaaa

SEQ ID NO: 193583 - DNA, 15 bp, Homo sapiens
ggcacttgaaggcaa

SEQ ID NO: 193584 - DNA, 15 bp, Homo sapiens
gggcacttgaaggca

SEQ ID NO: 193585 - DNA, 15 bp, Homo sapiens
ggggcacttgaaggc

SEQ ID NO: 193586 - DNA, 15 bp, Homo sapiens
gggggcacttgaagg

SEQ ID NO: 193587 - DNA, 15 bp, Homo sapiens
ggggggcacttgaag

SEQ ID NO: 193588 - DNA, 15 bp, Homo sapiens
tggggggcacttgaa

SEQ ID NO: 193589 - DNA, 15 bp, Homo sapiens
atggggggcacttga

SEQ ID NO: 193590 - DNA, 15 bp, Homo sapiens
aatggggggcacttg

SEQ ID NO: 193591 - DNA, 15 bp, Homo sapiens
caatggggggcactt

SEQ ID NO: 193592 - DNA, 15 bp, Homo sapiens
gcaatggggggcact

SEQ ID NO: 193593 - DNA, 15 bp, Homo sapiens
ggcaatggggggcac

SEQ ID NO: 193594 - DNA, 15 bp, Homo sapiens
tggcaatggggggca

SEQ ID NO: 193595 - DNA, 15 bp, Homo sapiens
ctggcaatggggggc

SEQ ID NO: 193596 - DNA, 15 bp, Homo sapiens
cctggcaatgggggg

SEQ ID NO: 193597 - DNA, 15 bp, Homo sapiens
ccctggcaatggggg

SEQ ID NO: 193598 - DNA, 15 bp, Homo sapiens
gccctggcaatgggg

SEQ ID NO: 193599 - DNA, 15 bp, Homo sapiens
tgccctggcaatggg

SEQ ID NO: 193600 - DNA, 15 bp, Homo sapiens
atgccctggcaatgg

SEQ ID NO: 193601 - DNA, 15 bp, Homo sapiens
catgccctggcaatg

SEQ ID NO: 193602 - DNA, 15 bp, Homo sapiens
ccatgccctggcaat

SEQ ID NO: 193603 - DNA, 15 bp, Homo sapiens
tccatgccctggcaa

SEQ ID NO: 193604 - DNA, 15 bp, Homo sapiens
ctccatgccctggca

SEQ ID NO: 193605 - DNA, 15 bp, Homo sapiens
gctccatgccctggc

SEQ ID NO: 193606 - DNA, 15 bp, Homo sapiens
ggctccatgccctgg

SEQ ID NO: 193607 - DNA, 15 bp, Homo sapiens
aggctccatgccctg

SEQ ID NO: 193608 - DNA, 15 bp, Homo sapiens
aaggctccatgccct

SEQ ID NO: 193609 - DNA, 15 bp, Homo sapiens
caaggctccatgccc

SEQ ID NO: 193610 - DNA, 15 bp, Homo sapiens
gcaaggctccatgcc

SEQ ID NO: 193611 - DNA, 15 bp, Homo sapiens
tgcaaggctccatgc

SEQ ID NO: 193612 - DNA, 15 bp, Homo sapiens
gtgcaaggctccatg

SEQ ID NO: 193613 - DNA, 15 bp, Homo sapiens
tgtgcaaggctccat

SEQ ID NO: 193614 - DNA, 15 bp, Homo sapiens
ctgtgcaaggctcca

SEQ ID NO: 193615 - DNA, 15 bp, Homo sapiens
cctgtgcaaggctcc

SEQ ID NO: 193616 - DNA, 15 bp, Homo sapiens
ccctgtgcaaggctc

SEQ ID NO: 193617 - DNA, 15 bp, Homo sapiens
gccctgtgcaaggct

SEQ ID NO: 193618 - DNA, 15 bp, Homo sapiens
tgccctgtgcaaggc

SEQ ID NO: 193619 - DNA, 15 bp, Homo sapiens
ttgccctgtgcaagg

SEQ ID NO: 193620 - DNA, 15 bp, Homo sapiens
tttgccctgtgcaag

SEQ ID NO: 193621 - DNA, 15 bp, Homo sapiens
atttgccctgtgcaa

SEQ ID NO: 193622 - DNA, 15 bp, Homo sapiens
tatttgccctgtgca

SEQ ID NO: 193623 - DNA, 15 bp, Homo sapiens
atatttgccctgtgc

SEQ ID NO: 193624 - DNA, 15 bp, Homo sapiens
aatatttgccctgtg

SEQ ID NO: 193625 - DNA, 15 bp, Homo sapiens
gaatatttgccctgt

SEQ ID NO: 193626 - DNA, 15 bp, Homo sapiens
tgaatatttgccctg

SEQ ID NO: 193627 - DNA, 15 bp, Homo sapiens
ctgaatatttgccct

SEQ ID NO: 193628 - DNA, 15 bp, Homo sapiens
gctgaatatttgccc

SEQ ID NO: 193629 - DNA, 15 bp, Homo sapiens
tgctgaatatttgcc

SEQ ID NO: 193630 - DNA, 15 bp, Homo sapiens
ttgctgaatatttgc

SEQ ID NO: 193631 - DNA, 15 bp, Homo sapiens
attgctgaatatttg

SEQ ID NO: 193632 - DNA, 15 bp, Homo sapiens
cattgctgaatattt

SEQ ID NO: 193633 - DNA, 15 bp, Homo sapiens
acattgctgaatatt

SEQ ID NO: 193634 - DNA, 15 bp, Homo sapiens
aacattgctgaatat

SEQ ID NO: 193635 - DNA, 15 bp, Homo sapiens
caacattgctgaata

SEQ ID NO: 193636 - DNA, 15 bp, Homo sapiens
ccaacattgctgaat

SEQ ID NO: 193637 - DNA, 15 bp, Homo sapiens
tccaacattgctgaa

SEQ ID NO: 193638 - DNA, 15 bp, Homo sapiens
atccaacattgctga

SEQ ID NO: 193639 - DNA, 15 bp, Homo sapiens
catccaacattgctg

SEQ ID NO: 193640 - DNA, 15 bp, Homo sapiens
tcatccaacattgct

SEQ ID NO: 193641 - DNA, 15 bp, Homo sapiens
ttcatccaacattgc

SEQ ID NO: 193642 - DNA, 15 bp, Homo sapiens
attcatccaacattg

SEQ ID NO: 193643 - DNA, 15 bp, Homo sapiens
tattcatccaacatt

SEQ ID NO: 193644 - DNA, 15 bp, Homo sapiens
ttattcatccaacat

SEQ ID NO: 193645 - DNA, 15 bp, Homo sapiens
tttattcatccaaca

SEQ ID NO: 193646 - DNA, 15 bp, Homo sapiens
atttattcatccaac

SEQ ID NO: 193647 - DNA, 15 bp, Homo sapiens
catttattcatccaa

SEQ ID NO: 193648 - DNA, 15 bp, Homo sapiens
tcatttattcatcca

SEQ ID NO: 193649 - DNA, 15 bp, Homo sapiens
ttcatttattcatcc

SEQ ID NO: 193650 - DNA, 15 bp, Homo sapiens
cttcatttattcatc

SEQ ID NO: 193651 - DNA, 15 bp, Homo sapiens
tcttcatttattcat

SEQ ID NO: 193652 - DNA, 15 bp, Homo sapiens
ctcttcatttattca

SEQ ID NO: 193653 - DNA, 15 bp, Homo sapiens
actcttcatttattc

SEQ ID NO: 193654 - DNA, 15 bp, Homo sapiens
cactcttcatttatt

SEQ ID NO: 193655 - DNA, 15 bp, Homo sapiens
tcactcttcatttat

SEQ ID NO: 193656 - DNA, 15 bp, Homo sapiens
gtcactcttcattta

SEQ ID NO: 193657 - DNA, 15 bp, Homo sapiens
ggtcactcttcattt

SEQ ID NO: 193658 - DNA, 15 bp, Homo sapiens
tggtcactcttcatt

SEQ ID NO: 193659 - DNA, 15 bp, Homo sapiens
ttggtcactcttcat

SEQ ID NO: 193660 - DNA, 15 bp, Homo sapiens
cttggtcactcttca

SEQ ID NO: 193661 - DNA, 15 bp, Homo sapiens
ccttggtcactcttc

SEQ ID NO: 193662 - DNA, 15 bp, Homo sapiens
cccttggtcactctt

SEQ ID NO: 193663 - DNA, 15 bp, Homo sapiens
acccttggtcactct

SEQ ID NO: 193664 - DNA, 15 bp, Homo sapiens
aacccttggtcactc

SEQ ID NO: 193665 - DNA, 15 bp, Homo sapiens
caacccttggtcact

SEQ ID NO: 193666 - DNA, 15 bp, Homo sapiens
gcaacccttggtcac

SEQ ID NO: 193667 - DNA, 15 bp, Homo sapiens
ggcaacccttggtca

SEQ ID NO: 193668 - DNA, 15 bp, Homo sapiens
tggcaacccttggtc

SEQ ID NO: 193669 - DNA, 15 bp, Homo sapiens
ctggcaacccttggt

SEQ ID NO: 193670 - DNA, 15 bp, Homo sapiens
actggcaacccttgg

SEQ ID NO: 193671 - DNA, 15 bp, Homo sapiens
cactggcaacccttg

SEQ ID NO: 193672 - DNA, 15 bp, Homo sapiens
ccactggcaaccctt

SEQ ID NO: 193673 - DNA, 15 bp, Homo sapiens
accactggcaaccct

SEQ ID NO: 193674 - DNA, 15 bp, Homo sapiens
taccactggcaaccc

SEQ ID NO: 193675 - DNA, 15 bp, Homo sapiens
ctaccactggcaacc

SEQ ID NO: 193676 - DNA, 15 bp, Homo sapiens
actaccactggcaac

SEQ ID NO: 193677 - DNA, 15 bp, Homo sapiens
gactaccactggcaa

SEQ ID NO: 193678 - DNA, 15 bp, Homo sapiens
tgactaccactggca

SEQ ID NO: 193679 - DNA, 15 bp, Homo sapiens
ctgactaccactggc

SEQ ID NO: 193680 - DNA, 15 bp, Homo sapiens
actgactaccactgg

SEQ ID NO: 193681 - DNA, 15 bp, Homo sapiens
gactgactaccactg

SEQ ID NO: 193682 - DNA, 15 bp, Homo sapiens
agactgactaccact

SEQ ID NO: 193683 - DNA, 15 bp, Homo sapiens
aagactgactaccac

SEQ ID NO: 193684 - DNA, 15 bp, Homo sapiens
aaagactgactacca

SEQ ID NO: 193685 - DNA, 15 bp, Homo sapiens
taaagactgactacc

SEQ ID NO: 193686 - DNA, 15 bp, Homo sapiens
ataaagactgactac

SEQ ID NO: 193687 - DNA, 15 bp, Homo sapiens
aataaagactgacta

SEQ ID NO: 193688 - DNA, 15 bp, Homo sapiens
aaataaagactgact

SEQ ID NO: 193689 - DNA, 15 bp, Homo sapiens
aaaataaagactgac

SEQ ID NO: 193690 - DNA, 15 bp, Homo sapiens
gaaaataaagactga

SEQ ID NO: 193691 - DNA, 15 bp, Homo sapiens
tgaaaataaagactg

SEQ ID NO: 193692 - DNA, 15 bp, Homo sapiens
gtgaaaataaagact

SEQ ID NO: 193693 - DNA, 15 bp, Homo sapiens
ggtgaaaataaagac

SEQ ID NO: 193694 - DNA, 15 bp, Homo sapiens
gggtgaaaataaaga

SEQ ID NO: 193695 - DNA, 15 bp, Homo sapiens
ggggtgaaaataaag

SEQ ID NO: 193696 - DNA, 15 bp, Homo sapiens
cggggtgaaaataaa

SEQ ID NO: 193697 - DNA, 15 bp, Homo sapiens
gcggggtgaaaataa

SEQ ID NO: 193698 - DNA, 15 bp, Homo sapiens
tgcggggtgaaaata

SEQ ID NO: 193699 - DNA, 15 bp, Homo sapiens
gtgcggggtgaaaat

SEQ ID NO: 193700 - DNA, 15 bp, Homo sapiens
agtgcggggtgaaaa

SEQ ID NO: 193701 - DNA, 15 bp, Homo sapiens
cagtgcggggtgaaa

SEQ ID NO: 193702 - DNA, 15 bp, Homo sapiens
gcagtgcggggtgaa

SEQ ID NO: 193703 - DNA, 15 bp, Homo sapiens
agcagtgcggggtga

SEQ ID NO: 193704 - DNA, 15 bp, Homo sapiens
tagcagtgcggggtg

SEQ ID NO: 193705 - DNA, 15 bp, Homo sapiens
atagcagtgcggggt

SEQ ID NO: 193706 - DNA, 15 bp, Homo sapiens
aatagcagtgcgggg

SEQ ID NO: 193707 - DNA, 15 bp, Homo sapiens
aaatagcagtgcggg

SEQ ID NO: 193708 - DNA, 15 bp, Homo sapiens
caaatagcagtgcgg

SEQ ID NO: 193709 - DNA, 15 bp, Homo sapiens
gcaaatagcagtgcg

SEQ ID NO: 193710 - DNA, 15 bp, Homo sapiens
ggcaaatagcagtgc

SEQ ID NO: 193711 - DNA, 15 bp, Homo sapiens
gggcaaatagcagtg

SEQ ID NO: 193712 - DNA, 15 bp, Homo sapiens
agggcaaatagcagt

SEQ ID NO: 193713 - DNA, 15 bp, Homo sapiens
cagggcaaatagcag

SEQ ID NO: 193714 - DNA, 15 bp, Homo sapiens
acagggcaaatagca

SEQ ID NO: 193715 - DNA, 15 bp, Homo sapiens
tacagggcaaatagc

SEQ ID NO: 193716 - DNA, 15 bp, Homo sapiens
gtacagggcaaatag

SEQ ID NO: 193717 - DNA, 15 bp, Homo sapiens
agtacagggcaaata

SEQ ID NO: 193718 - DNA, 15 bp, Homo sapiens
gagtacagggcaaat

SEQ ID NO: 193719 - DNA, 15 bp, Homo sapiens
tgagtacagggcaaa

SEQ ID NO: 193720 - DNA, 15 bp, Homo sapiens
gtgagtacagggcaa

SEQ ID NO: 193721 - DNA, 15 bp, Homo sapiens
agtgagtacagggca

SEQ ID NO: 193722 - DNA, 15 bp, Homo sapiens
aagtgagtacagggc

SEQ ID NO: 193723 - DNA, 15 bp, Homo sapiens
caagtgagtacaggg

SEQ ID NO: 193724 - DNA, 15 bp, Homo sapiens
ccaagtgagtacagg

SEQ ID NO: 193725 - DNA, 15 bp, Homo sapiens
tccaagtgagtacag

SEQ ID NO: 193726 - DNA, 15 bp, Homo sapiens
gtccaagtgagtaca

SEQ ID NO: 193727 - DNA, 15 bp, Homo sapiens
agtccaagtgagtac

SEQ ID NO: 193728 - DNA, 15 bp, Homo sapiens
cagtccaagtgagta

SEQ ID NO: 193729 - DNA, 15 bp, Homo sapiens
ccagtccaagtgagt

SEQ ID NO: 193730 - DNA, 15 bp, Homo sapiens
accagtccaagtgag

SEQ ID NO: 193731 - DNA, 15 bp, Homo sapiens
aaccagtccaagtga

SEQ ID NO: 193732 - DNA, 15 bp, Homo sapiens
gaaccagtccaagtg

SEQ ID NO: 193733 - DNA, 15 bp, Homo sapiens
ggaaccagtccaagt

SEQ ID NO: 193734 - DNA, 15 bp, Homo sapiens
aggaaccagtccaag

SEQ ID NO: 193735 - DNA, 15 bp, Homo sapiens
caggaaccagtccaa

SEQ ID NO: 193736 - DNA, 15 bp, Homo sapiens
gcaggaaccagtcca

SEQ ID NO: 193737 - DNA, 15 bp, Homo sapiens
agcaggaaccagtcc

SEQ ID NO: 193738 - DNA, 15 bp, Homo sapiens
cagcaggaaccagtc

SEQ ID NO: 193739 - DNA, 15 bp, Homo sapiens
ccagcaggaaccagt

SEQ ID NO: 193740 - DNA, 15 bp, Homo sapiens
accagcaggaaccag

SEQ ID NO: 193741 - DNA, 15 bp, Homo sapiens
caccagcaggaacca

SEQ ID NO: 193742 - DNA, 15 bp, Homo sapiens
tcaccagcaggaacc

SEQ ID NO: 193743 - DNA, 15 bp, Homo sapiens
ctcaccagcaggaac

SEQ ID NO: 193744 - DNA, 15 bp, Homo sapiens
tctcaccagcaggaa

SEQ ID NO: 193745 - DNA, 15 bp, Homo sapiens
ttctcaccagcagga

SEQ ID NO: 193746 - DNA, 15 bp, Homo sapiens
tttctcaccagcagg

SEQ ID NO: 193747 - DNA, 15 bp, Homo sapiens
gtttctcaccagcag

SEQ ID NO: 193748 - DNA, 15 bp, Homo sapiens
agtttctcaccagca

SEQ ID NO: 193749 - DNA, 15 bp, Homo sapiens
aagtttctcaccagc

SEQ ID NO: 193750 - DNA, 15 bp, Homo sapiens
caagtttctcaccag

SEQ ID NO: 193751 - DNA, 15 bp, Homo sapiens
gcaagtttctcacca

SEQ ID NO: 193752 - DNA, 15 bp, Homo sapiens
agcaagtttctcacc

SEQ ID NO: 193753 - DNA, 15 bp, Homo sapiens
tagcaagtttctcac

SEQ ID NO: 193754 - DNA, 15 bp, Homo sapiens
gtagcaagtttctca

SEQ ID NO: 193755 - DNA, 15 bp, Homo sapiens
ggtagcaagtttctc

SEQ ID NO: 193756 - DNA, 15 bp, Homo sapiens
gggtagcaagtttct

SEQ ID NO: 193757 - DNA, 15 bp, Homo sapiens
tgggtagcaagtttc

SEQ ID NO: 193758 - DNA, 15 bp, Homo sapiens
ctgggtagcaagttt

SEQ ID NO: 193759 - DNA, 15 bp, Homo sapiens
cctgggtagcaagtt

SEQ ID NO: 193760 - DNA, 15 bp, Homo sapiens
acctgggtagcaagt

SEQ ID NO: 193761 - DNA, 15 bp, Homo sapiens
tacctgggtagcaag

SEQ ID NO: 193762 - DNA, 15 bp, Homo sapiens
gtacctgggtagcaa

SEQ ID NO: 193763 - DNA, 15 bp, Homo sapiens
ggtacctgggtagca

SEQ ID NO: 193764 - DNA, 15 bp, Homo sapiens
tggtacctgggtagc

SEQ ID NO: 193765 - DNA, 15 bp, Homo sapiens
gtggtacctgggtag

SEQ ID NO: 193766 - DNA, 15 bp, Homo sapiens
agtggtacctgggta

SEQ ID NO: 193767 - DNA, 15 bp, Homo sapiens
aagtggtacctgggt

SEQ ID NO: 193768 - DNA, 15 bp, Homo sapiens
taagtggtacctggg

SEQ ID NO: 193769 - DNA, 15 bp, Homo sapiens
ataagtggtacctgg

SEQ ID NO: 193770 - DNA, 15 bp, Homo sapiens
aataagtggtacctg

SEQ ID NO: 193771 - DNA, 15 bp, Homo sapiens
aaataagtggtacct

SEQ ID NO: 193772 - DNA, 15 bp, Homo sapiens
aaaataagtggtacc

SEQ ID NO: 193773 - DNA, 15 bp, Homo sapiens
taaaataagtggtac

SEQ ID NO: 193774 - DNA, 15 bp, Homo sapiens
ttaaaataagtggta

SEQ ID NO: 193775 - DNA, 15 bp, Homo sapiens
cttaaaataagtggt

SEQ ID NO: 193776 - DNA, 15 bp, Homo sapiens
gcttaaaataagtgg

SEQ ID NO: 193777 - DNA, 15 bp, Homo sapiens
tgcttaaaataagtg

SEQ ID NO: 193778 - DNA, 15 bp, Homo sapiens
gtgcttaaaataagt

SEQ ID NO: 193779 - DNA, 15 bp, Homo sapiens
tgtgcttaaaataag

SEQ ID NO: 193780 - DNA, 15 bp, Homo sapiens
atgtgcttaaaataa

SEQ ID NO: 193781 - DNA, 15 bp, Homo sapiens
aatgtgcttaaaata

SEQ ID NO: 193782 - DNA, 15 bp, Homo sapiens
aaatgtgcttaaaat

SEQ ID NO: 193783 - DNA, 15 bp, Homo sapiens
taaatgtgcttaaaa

SEQ ID NO: 193784 - DNA, 15 bp, Homo sapiens
ataaatgtgcttaaa

SEQ ID NO: 193785 - DNA, 15 bp, Homo sapiens
cataaatgtgcttaa

SEQ ID NO: 193786 - DNA, 15 bp, Homo sapiens
gcataaatgtgctta

SEQ ID NO: 193787 - DNA, 15 bp, Homo sapiens
tgcataaatgtgctt

SEQ ID NO: 193788 - DNA, 15 bp, Homo sapiens
atgcataaatgtgct

SEQ ID NO: 193789 - DNA, 15 bp, Homo sapiens
aatgcataaatgtgc

SEQ ID NO: 193790 - DNA, 15 bp, Homo sapiens
aaatgcataaatgtg

SEQ ID NO: 193791 - DNA, 15 bp, Homo sapiens
gaaatgcataaatgt

SEQ ID NO: 193792 - DNA, 15 bp, Homo sapiens
ggaaatgcataaatg

SEQ ID NO: 193793 - DNA, 15 bp, Homo sapiens
tggaaatgcataaat

SEQ ID NO: 193794 - DNA, 15 bp, Homo sapiens
ctggaaatgcataaa

SEQ ID NO: 193795 - DNA, 15 bp, Homo sapiens
cctggaaatgcataa

SEQ ID NO: 193796 - DNA, 15 bp, Homo sapiens
gcctggaaatgcata

SEQ ID NO: 193797 - DNA, 15 bp, Homo sapiens
tgcctggaaatgcat

SEQ ID NO: 193798 - DNA, 15 bp, Homo sapiens
gtgcctggaaatgca

SEQ ID NO: 193799 - DNA, 15 bp, Homo sapiens
cgtgcctggaaatgc

SEQ ID NO: 193800 - DNA, 15 bp, Homo sapiens
acgtgcctggaaatg

SEQ ID NO: 193801 - DNA, 15 bp, Homo sapiens
tacgtgcctggaaat

SEQ ID NO: 193802 - DNA, 15 bp, Homo sapiens
ctacgtgcctggaaa

SEQ ID NO: 193803 - DNA, 15 bp, Homo sapiens
gctacgtgcctggaa

SEQ ID NO: 193804 - DNA, 15 bp, Homo sapiens
tgctacgtgcctgga

SEQ ID NO: 193805 - DNA, 15 bp, Homo sapiens
ttgctacgtgcctgg

SEQ ID NO: 193806 - DNA, 15 bp, Homo sapiens
cttgctacgtgcctg

SEQ ID NO: 193807 - DNA, 15 bp, Homo sapiens
ccttgctacgtgcct

SEQ ID NO: 193808 - DNA, 15 bp, Homo sapiens
cccttgctacgtgcc

SEQ ID NO: 193809 - DNA, 15 bp, Homo sapiens
ccccttgctacgtgc

SEQ ID NO: 193810 - DNA, 15 bp, Homo sapiens
cccccttgctacgtg

SEQ ID NO: 193811 - DNA, 15 bp, Homo sapiens
gcccccttgctacgt

SEQ ID NO: 193812 - DNA, 15 bp, Homo sapiens
tgcccccttgctacg

SEQ ID NO: 193813 - DNA, 15 bp, Homo sapiens
ctgcccccttgctac

SEQ ID NO: 193814 - DNA, 15 bp, Homo sapiens
gctgcccccttgcta

SEQ ID NO: 193815 - DNA, 15 bp, Homo sapiens
tgctgcccccttgct

SEQ ID NO: 193816 - DNA, 15 bp, Homo sapiens
ctgctgcccccttgc

SEQ ID NO: 193817 - DNA, 15 bp, Homo sapiens
cctgctgcccccttg

SEQ ID NO: 193818 - DNA, 15 bp, Homo sapiens
acctgctgccccctt

SEQ ID NO: 193819 - DNA, 15 bp, Homo sapiens
aacctgctgccccct

SEQ ID NO: 193820 - DNA, 15 bp, Homo sapiens
taacctgctgccccc

SEQ ID NO: 193821 - DNA, 15 bp, Homo sapiens
ctaacctgctgcccc

SEQ ID NO: 193822 - DNA, 15 bp, Homo sapiens
actaacctgctgccc

SEQ ID NO: 193823 - DNA, 15 bp, Homo sapiens
cactaacctgctgcc

SEQ ID NO: 193824 - DNA, 15 bp, Homo sapiens
tcactaacctgctgc

SEQ ID NO: 193825 - DNA, 15 bp, Homo sapiens
atcactaacctgctg

SEQ ID NO: 193826 - DNA, 15 bp, Homo sapiens
aatcactaacctgct

SEQ ID NO: 193827 - DNA, 15 bp, Homo sapiens
gaatcactaacctgc

SEQ ID NO: 193828 - DNA, 15 bp, Homo sapiens
tgaatcactaacctg

SEQ ID NO: 193829 - DNA, 15 bp, Homo sapiens
atgaatcactaacct

SEQ ID NO: 193830 - DNA, 15 bp, Homo sapiens
catgaatcactaacc

SEQ ID NO: 193831 - DNA, 15 bp, Homo sapiens
tcatgaatcactaac

SEQ ID NO: 193832 - DNA, 15 bp, Homo sapiens
ctcatgaatcactaa

SEQ ID NO: 193833 - DNA, 15 bp, Homo sapiens
actcatgaatcacta

SEQ ID NO: 193834 - DNA, 15 bp, Homo sapiens
tactcatgaatcact

SEQ ID NO: 193835 - DNA, 15 bp, Homo sapiens
ctactcatgaatcac

SEQ ID NO: 193836 - DNA, 15 bp, Homo sapiens
cctactcatgaatca

SEQ ID NO: 193837 - DNA, 15 bp, Homo sapiens
acctactcatgaatc

SEQ ID NO: 193838 - DNA, 15 bp, Homo sapiens
cacctactcatgaat

SEQ ID NO: 193839 - DNA, 15 bp, Homo sapiens
ccacctactcatgaa

SEQ ID NO: 193840 - DNA, 15 bp, Homo sapiens
tccacctactcatga

SEQ ID NO: 193841 - DNA, 15 bp, Homo sapiens
ttccacctactcatg

SEQ ID NO: 193842 - DNA, 15 bp, Homo sapiens
tttccacctactcat

SEQ ID NO: 193843 - DNA, 15 bp, Homo sapiens
ttttccacctactca

SEQ ID NO: 193844 - DNA, 15 bp, Homo sapiens
cttttccacctactc

SEQ ID NO: 193845 - DNA, 15 bp, Homo sapiens
ccttttccacctact

SEQ ID NO: 193846 - DNA, 15 bp, Homo sapiens
accttttccacctac

SEQ ID NO: 193847 - DNA, 15 bp, Homo sapiens
caccttttccaccta

SEQ ID NO: 193848 - DNA, 15 bp, Homo sapiens
tcaccttttccacct

SEQ ID NO: 193849 - DNA, 15 bp, Homo sapiens
atcaccttttccacc

SEQ ID NO: 193850 - DNA, 15 bp, Homo sapiens
aatcaccttttccac

SEQ ID NO: 193851 - DNA, 15 bp, Homo sapiens
caatcaccttttcca

SEQ ID NO: 193852 - DNA, 15 bp, Homo sapiens
gcaatcaccttttcc

SEQ ID NO: 193853 - DNA, 15 bp, Homo sapiens
ggcaatcaccttttc

SEQ ID NO: 193854 - DNA, 15 bp, Homo sapiens
aggcaatcacctttt

SEQ ID NO: 193855 - DNA, 15 bp, Homo sapiens
aaggcaatcaccttt

SEQ ID NO: 193856 - DNA, 15 bp, Homo sapiens
caaggcaatcacctt

SEQ ID NO: 193857 - DNA, 15 bp, Homo sapiens
tcaaggcaatcacct

SEQ ID NO: 193858 - DNA, 15 bp, Homo sapiens
ctcaaggcaatcacc

SEQ ID NO: 193859 - DNA, 15 bp, Homo sapiens
tctcaaggcaatcac

SEQ ID NO: 193860 - DNA, 15 bp, Homo sapiens
ctctcaaggcaatca

SEQ ID NO: 193861 - DNA, 15 bp, Homo sapiens
gctctcaaggcaatc

SEQ ID NO: 193862 - DNA, 15 bp, Homo sapiens
agctctcaaggcaat

SEQ ID NO: 193863 - DNA, 15 bp, Homo sapiens
cagctctcaaggcaa

SEQ ID NO: 193864 - DNA, 15 bp, Homo sapiens
gcagctctcaaggca

SEQ ID NO: 193865 - DNA, 15 bp, Homo sapiens
agcagctctcaaggc

SEQ ID NO: 193866 - DNA, 15 bp, Homo sapiens
cagcagctctcaagg

SEQ ID NO: 193867 - DNA, 15 bp, Homo sapiens
tcagcagctctcaag

SEQ ID NO: 193868 - DNA, 15 bp, Homo sapiens
gtcagcagctctcaa

SEQ ID NO: 193869 - DNA, 15 bp, Homo sapiens
agtcagcagctctca

SEQ ID NO: 193870 - DNA, 15 bp, Homo sapiens
gagtcagcagctctc

SEQ ID NO: 193871 - DNA, 15 bp, Homo sapiens
tgagtcagcagctct

SEQ ID NO: 193872 - DNA, 15 bp, Homo sapiens
ctgagtcagcagctc

SEQ ID NO: 193873 - DNA, 15 bp, Homo sapiens
gctgagtcagcagct

SEQ ID NO: 193874 - DNA, 15 bp, Homo sapiens
ggctgagtcagcagc

SEQ ID NO: 193875 - DNA, 15 bp, Homo sapiens
cggctgagtcagcag

SEQ ID NO: 193876 - DNA, 15 bp, Homo sapiens
gcggctgagtcagca

SEQ ID NO: 193877 - DNA, 15 bp, Homo sapiens
ggcggctgagtcagc

SEQ ID NO: 193878 - DNA, 15 bp, Homo sapiens
tggcggctgagtcag

SEQ ID NO: 193879 - DNA, 15 bp, Homo sapiens
ctggcggctgagtca

SEQ ID NO: 193880 - DNA, 15 bp, Homo sapiens
gctggcggctgagtc

SEQ ID NO: 193881 - DNA, 15 bp, Homo sapiens
ggctggcggctgagt

SEQ ID NO: 193882 - DNA, 15 bp, Homo sapiens
cggctggcggctgag

SEQ ID NO: 193883 - DNA, 15 bp, Homo sapiens
acggctggcggctga

SEQ ID NO: 193884 - DNA, 15 bp, Homo sapiens
aacggctggcggctg

SEQ ID NO: 193885 - DNA, 15 bp, Homo sapiens
taacggctggcggct

SEQ ID NO: 193886 - DNA, 15 bp, Homo sapiens
ttaacggctggcggc

SEQ ID NO: 193887 - DNA, 15 bp, Homo sapiens
gttaacggctggcgg

SEQ ID NO: 193888 - DNA, 15 bp, Homo sapiens
ggttaacggctggcg

SEQ ID NO: 193889 - DNA, 15 bp, Homo sapiens
gggttaacggctggc

SEQ ID NO: 193890 - DNA, 15 bp, Homo sapiens
agggttaacggctgg

SEQ ID NO: 193891 - DNA, 15 bp, Homo sapiens
cagggttaacggctg

SEQ ID NO: 193892 - DNA, 15 bp, Homo sapiens
ccagggttaacggct

SEQ ID NO: 193893 - DNA, 15 bp, Homo sapiens
accagggttaacggc

SEQ ID NO: 193894 - DNA, 15 bp, Homo sapiens
caccagggttaacgg

SEQ ID NO: 193895 - DNA, 15 bp, Homo sapiens
gcaccagggttaacg

SEQ ID NO: 193896 - DNA, 15 bp, Homo sapiens
agcaccagggttaac

SEQ ID NO: 193897 - DNA, 15 bp, Homo sapiens
gagcaccagggttaa

SEQ ID NO: 193898 - DNA, 15 bp, Homo sapiens
ggagcaccagggtta

SEQ ID NO: 193899 - DNA, 15 bp, Homo sapiens
aggagcaccagggtt

SEQ ID NO: 193900 - DNA, 15 bp, Homo sapiens
gaggagcaccagggt

SEQ ID NO: 193901 - DNA, 15 bp, Homo sapiens
agaggagcaccaggg

SEQ ID NO: 193902 - DNA, 15 bp, Homo sapiens
cagaggagcaccagg

SEQ ID NO: 193903 - DNA, 15 bp, Homo sapiens
ccagaggagcaccag

SEQ ID NO: 193904 - DNA, 15 bp, Homo sapiens
cccagaggagcacca

SEQ ID NO: 193905 - DNA, 15 bp, Homo sapiens
gcccagaggagcacc

SEQ ID NO: 193906 - DNA, 15 bp, Homo sapiens
ggcccagaggagcac

SEQ ID NO: 193907 - DNA, 15 bp, Homo sapiens
gggcccagaggagca

SEQ ID NO: 193908 - DNA, 15 bp, Homo sapiens
agggcccagaggagc

SEQ ID NO: 193909 - DNA, 15 bp, Homo sapiens
cagggcccagaggag

SEQ ID NO: 193910 - DNA, 15 bp, Homo sapiens
tcagggcccagagga

SEQ ID NO: 193911 - DNA, 15 bp, Homo sapiens
ttcagggcccagagg

SEQ ID NO: 193912 - DNA, 15 bp, Homo sapiens
attcagggcccagag

SEQ ID NO: 193913 - DNA, 15 bp, Homo sapiens
gattcagggcccaga

SEQ ID NO: 193914 - DNA, 15 bp, Homo sapiens
tgattcagggcccag

SEQ ID NO: 193915 - DNA, 15 bp, Homo sapiens
ctgattcagggccca

SEQ ID NO: 193916 - DNA, 15 bp, Homo sapiens
actgattcagggccc

SEQ ID NO: 193917 - DNA, 15 bp, Homo sapiens
cactgattcagggcc

SEQ ID NO: 193918 - DNA, 15 bp, Homo sapiens
tcactgattcagggc

SEQ ID NO: 193919 - DNA, 15 bp, Homo sapiens
ctcactgattcaggg

SEQ ID NO: 193920 - DNA, 15 bp, Homo sapiens
actcactgattcagg

SEQ ID NO: 193921 - DNA, 15 bp, Homo sapiens
cactcactgattcag

SEQ ID NO: 193922 - DNA, 15 bp, Homo sapiens
ccactcactgattca

SEQ ID NO: 193923 - DNA, 15 bp, Homo sapiens
tccactcactgattc

SEQ ID NO: 193924 - DNA, 15 bp, Homo sapiens
atccactcactgatt

SEQ ID NO: 193925 - DNA, 15 bp, Homo sapiens
catccactcactgat

SEQ ID NO: 193926 - DNA, 15 bp, Homo sapiens
ccatccactcactga

SEQ ID NO: 193927 - DNA, 15 bp, Homo sapiens
gccatccactcactg

SEQ ID NO: 193928 - DNA, 15 bp, Homo sapiens
tgccatccactcact

SEQ ID NO: 193929 - DNA, 15 bp, Homo sapiens
atgccatccactcac

SEQ ID NO: 193930 - DNA, 15 bp, Homo sapiens
catgccatccactca

SEQ ID NO: 193931 - DNA, 15 bp, Homo sapiens
tcatgccatccactc

SEQ ID NO: 193932 - DNA, 15 bp, Homo sapiens
ttcatgccatccact

SEQ ID NO: 193933 - DNA, 15 bp, Homo sapiens
attcatgccatccac

SEQ ID NO: 193934 - DNA, 15 bp, Homo sapiens
cattcatgccatcca

SEQ ID NO: 193935 - DNA, 15 bp, Homo sapiens
tcattcatgccatcc

SEQ ID NO: 193936 - DNA, 15 bp, Homo sapiens
ttcattcatgccatc

SEQ ID NO: 193937 - DNA, 15 bp, Homo sapiens
gttcattcatgccat

SEQ ID NO: 193938 - DNA, 15 bp, Homo sapiens
tgttcattcatgcca

SEQ ID NO: 193939 - DNA, 15 bp, Homo sapiens
ctgttcattcatgcc

SEQ ID NO: 193940 - DNA, 15 bp, Homo sapiens
tctgttcattcatgc

SEQ ID NO: 193941 - DNA, 15 bp, Homo sapiens
atctgttcattcatg

SEQ ID NO: 193942 - DNA, 15 bp, Homo sapiens
catctgttcattcat

SEQ ID NO: 193943 - DNA, 15 bp, Homo sapiens
ccatctgttcattca

SEQ ID NO: 193944 - DNA, 15 bp, Homo sapiens
gccatctgttcattc

SEQ ID NO: 193945 - DNA, 15 bp, Homo sapiens
ggccatctgttcatt

SEQ ID NO: 193946 - DNA, 15 bp, Homo sapiens
tggccatctgttcat

SEQ ID NO: 193947 - DNA, 15 bp, Homo sapiens
ttggccatctgttca

SEQ ID NO: 193948 - DNA, 15 bp, Homo sapiens
cttggccatctgttc

SEQ ID NO: 193949 - DNA, 15 bp, Homo sapiens
ccttggccatctgtt

SEQ ID NO: 193950 - DNA, 15 bp, Homo sapiens
tccttggccatctgt

SEQ ID NO: 193951 - DNA, 15 bp, Homo sapiens
ttccttggccatctg

SEQ ID NO: 193952 - DNA, 15 bp, Homo sapiens
attccttggccatct

SEQ ID NO: 193953 - DNA, 15 bp, Homo sapiens
gattccttggccatc

SEQ ID NO: 193954 - DNA, 15 bp, Homo sapiens
agattccttggccat

SEQ ID NO: 193955 - DNA, 15 bp, Homo sapiens
gagattccttggcca

SEQ ID NO: 193956 - DNA, 15 bp, Homo sapiens
tgagattccttggcc

SEQ ID NO: 193957 - DNA, 15 bp, Homo sapiens
ctgagattccttggc

SEQ ID NO: 193958 - DNA, 15 bp, Homo sapiens
cctgagattccttgg

SEQ ID NO: 193959 - DNA, 15 bp, Homo sapiens
tcctgagattccttg

SEQ ID NO: 193960 - DNA, 15 bp, Homo sapiens
ctcctgagattcctt

SEQ ID NO: 193961 - DNA, 15 bp, Homo sapiens
tctcctgagattcct

SEQ ID NO: 193962 - DNA, 15 bp, Homo sapiens
gtctcctgagattcc

SEQ ID NO: 193963 - DNA, 15 bp, Homo sapiens
ggtctcctgagattc

SEQ ID NO: 193964 - DNA, 15 bp, Homo sapiens
gggtctcctgagatt

SEQ ID NO: 193965 - DNA, 15 bp, Homo sapiens
cgggtctcctgagat

SEQ ID NO: 193966 - DNA, 15 bp, Homo sapiens
tcgggtctcctgaga

SEQ ID NO: 193967 - DNA, 15 bp, Homo sapiens
ctcgggtctcctgag

SEQ ID NO: 193968 - DNA, 15 bp, Homo sapiens
actcgggtctcctga

SEQ ID NO: 193969 - DNA, 15 bp, Homo sapiens
gactcgggtctcctg

SEQ ID NO: 193970 - DNA, 15 bp, Homo sapiens
agactcgggtctcct

SEQ ID NO: 193971 - DNA, 15 bp, Homo sapiens
gagactcgggtctcc

SEQ ID NO: 193972 - DNA, 15 bp, Homo sapiens
ggagactcgggtctc

SEQ ID NO: 193973 - DNA, 15 bp, Homo sapiens
aggagactcgggtct

SEQ ID NO: 193974 - DNA, 15 bp, Homo sapiens
caggagactcgggtc

SEQ ID NO: 193975 - DNA, 15 bp, Homo sapiens
ccaggagactcgggt

SEQ ID NO: 193976 - DNA, 15 bp, Homo sapiens
tccaggagactcggg

SEQ ID NO: 193977 - DNA, 15 bp, Homo sapiens
atccaggagactcgg

SEQ ID NO: 193978 - DNA, 15 bp, Homo sapiens
aatccaggagactcg

SEQ ID NO: 193979 - DNA, 15 bp, Homo sapiens
aaatccaggagactc

SEQ ID NO: 193980 - DNA, 15 bp, Homo sapiens
caaatccaggagact

SEQ ID NO: 193981 - DNA, 15 bp, Homo sapiens
ccaaatccaggagac

SEQ ID NO: 193982 - DNA, 15 bp, Homo sapiens
tccaaatccaggaga

SEQ ID NO: 193983 - DNA, 15 bp, Homo sapiens
gtccaaatccaggag

SEQ ID NO: 193984 - DNA, 15 bp, Homo sapiens
agtccaaatccagga

SEQ ID NO: 193985 - DNA, 15 bp, Homo sapiens
aagtccaaatccagg

SEQ ID NO: 193986 - DNA, 15 bp, Homo sapiens
aaagtccaaatccag

SEQ ID NO: 193987 - DNA, 15 bp, Homo sapiens
gaaagtccaaatcca

SEQ ID NO: 193988 - DNA, 15 bp, Homo sapiens
ggaaagtccaaatcc

SEQ ID NO: 193989 - DNA, 15 bp, Homo sapiens
tggaaagtccaaatc

SEQ ID NO: 193990 - DNA, 15 bp, Homo sapiens
ctggaaagtccaaat

SEQ ID NO: 193991 - DNA, 15 bp, Homo sapiens
gctggaaagtccaaa

SEQ ID NO: 193992 - DNA, 15 bp, Homo sapiens
tgctggaaagtccaa

SEQ ID NO: 193993 - DNA, 15 bp, Homo sapiens
atgctggaaagtcca

SEQ ID NO: 193994 - DNA, 15 bp, Homo sapiens
aatgctggaaagtcc

SEQ ID NO: 193995 - DNA, 15 bp, Homo sapiens
taatgctggaaagtc

SEQ ID NO: 193996 - DNA, 15 bp, Homo sapiens
ctaatgctggaaagt

SEQ ID NO: 193997 - DNA, 15 bp, Homo sapiens
tctaatgctggaaag

SEQ ID NO: 193998 - DNA, 15 bp, Homo sapiens
ctctaatgctggaaa

SEQ ID NO: 193999 - DNA, 15 bp, Homo sapiens
cctctaatgctggaa

SEQ ID NO: 194000 - DNA, 15 bp, Homo sapiens
acctctaatgctgga

SEQ ID NO: 194001 - DNA, 15 bp, Homo sapiens
cacctctaatgctgg

SEQ ID NO: 194002 - DNA, 15 bp, Homo sapiens
gcacctctaatgctg

SEQ ID NO: 194003 - DNA, 15 bp, Homo sapiens
tgcacctctaatgct

SEQ ID NO: 194004 - DNA, 15 bp, Homo sapiens
gtgcacctctaatgc

SEQ ID NO: 194005 - DNA, 15 bp, Homo sapiens
tgtgcacctctaatg

SEQ ID NO: 194006 - DNA, 15 bp, Homo sapiens
ctgtgcacctctaat

SEQ ID NO: 194007 - DNA, 15 bp, Homo sapiens
gctgtgcacctctaa

SEQ ID NO: 194008 - DNA, 15 bp, Homo sapiens
ggctgtgcacctcta

SEQ ID NO: 194009 - DNA, 15 bp, Homo sapiens
gggctgtgcacctct

SEQ ID NO: 194010 - DNA, 15 bp, Homo sapiens
tgggctgtgcacctc

SEQ ID NO: 194011 - DNA, 15 bp, Homo sapiens
ctgggctgtgcacct

SEQ ID NO: 194012 - DNA, 15 bp, Homo sapiens
tctgggctgtgcacc

SEQ ID NO: 194013 - DNA, 15 bp, Homo sapiens
ctctgggctgtgcac

SEQ ID NO: 194014 - DNA, 15 bp, Homo sapiens
gctctgggctgtgca

SEQ ID NO: 194015 - DNA, 15 bp, Homo sapiens
ggctctgggctgtgc

SEQ ID NO: 194016 - DNA, 15 bp, Homo sapiens
aggctctgggctgtg

SEQ ID NO: 194017 - DNA, 15 bp, Homo sapiens
gaggctctgggctgt

SEQ ID NO: 194018 - DNA, 15 bp, Homo sapiens
tgaggctctgggctg

SEQ ID NO: 194019 - DNA, 15 bp, Homo sapiens
gtgaggctctgggct

SEQ ID NO: 194020 - DNA, 15 bp, Homo sapiens
tgtgaggctctgggc

SEQ ID NO: 194021 - DNA, 15 bp, Homo sapiens
ctgtgaggctctggg

SEQ ID NO: 194022 - DNA, 15 bp, Homo sapiens
cctgtgaggctctgg

SEQ ID NO: 194023 - DNA, 15 bp, Homo sapiens
ccctgtgaggctctg

SEQ ID NO: 194024 - DNA, 15 bp, Homo sapiens
tccctgtgaggctct

SEQ ID NO: 194025 - DNA, 15 bp, Homo sapiens
ttccctgtgaggctc

SEQ ID NO: 194026 - DNA, 15 bp, Homo sapiens
attccctgtgaggct

SEQ ID NO: 194027 - DNA, 15 bp, Homo sapiens
cattccctgtgaggc

SEQ ID NO: 194028 - DNA, 15 bp, Homo sapiens
gcattccctgtgagg

SEQ ID NO: 194029 - DNA, 15 bp, Homo sapiens
agcattccctgtgag

SEQ ID NO: 194030 - DNA, 15 bp, Homo sapiens
tagcattccctgtga

SEQ ID NO: 194031 - DNA, 15 bp, Homo sapiens
ctagcattccctgtg

SEQ ID NO: 194032 - DNA, 15 bp, Homo sapiens
tctagcattccctgt

SEQ ID NO: 194033 - DNA, 15 bp, Homo sapiens
ttctagcattccctg

SEQ ID NO: 194034 - DNA, 15 bp, Homo sapiens
cttctagcattccct

SEQ ID NO: 194035 - DNA, 15 bp, Homo sapiens
gcttctagcattccc

SEQ ID NO: 194036 - DNA, 15 bp, Homo sapiens
agcttctagcattcc

SEQ ID NO: 194037 - DNA, 15 bp, Homo sapiens
cagcttctagcattc

SEQ ID NO: 194038 - DNA, 15 bp, Homo sapiens
gcagcttctagcatt

SEQ ID NO: 194039 - DNA, 15 bp, Homo sapiens
tgcagcttctagcat

SEQ ID NO: 194040 - DNA, 15 bp, Homo sapiens
ctgcagcttctagca

SEQ ID NO: 194041 - DNA, 15 bp, Homo sapiens
actgcagcttctagc

SEQ ID NO: 194042 - DNA, 15 bp, Homo sapiens
tactgcagcttctag

SEQ ID NO: 194043 - DNA, 15 bp, Homo sapiens
atactgcagcttcta

SEQ ID NO: 194044 - DNA, 15 bp, Homo sapiens
tatactgcagcttct

SEQ ID NO: 194045 - DNA, 15 bp, Homo sapiens
ttatactgcagcttc

SEQ ID NO: 194046 - DNA, 15 bp, Homo sapiens
attatactgcagctt

SEQ ID NO: 194047 - DNA, 15 bp, Homo sapiens
gattatactgcagct

SEQ ID NO: 194048 - DNA, 15 bp, Homo sapiens
tgattatactgcagc

SEQ ID NO: 194049 - DNA, 15 bp, Homo sapiens
atgattatactgcag

SEQ ID NO: 194050 - DNA, 15 bp, Homo sapiens
catgattatactgca

SEQ ID NO: 194051 - DNA, 15 bp, Homo sapiens
ccatgattatactgc

SEQ ID NO: 194052 - DNA, 15 bp, Homo sapiens
gccatgattatactg

SEQ ID NO: 194053 - DNA, 15 bp, Homo sapiens
tgccatgattatact

SEQ ID NO: 194054 - DNA, 15 bp, Homo sapiens
gtgccatgattatac

SEQ ID NO: 194055 - DNA, 15 bp, Homo sapiens
tgtgccatgattata

SEQ ID NO: 194056 - DNA, 15 bp, Homo sapiens
atgtgccatgattat

SEQ ID NO: 194057 - DNA, 15 bp, Homo sapiens
aatgtgccatgatta

SEQ ID NO: 194058 - DNA, 15 bp, Homo sapiens
aaatgtgccatgatt

SEQ ID NO: 194059 - DNA, 15 bp, Homo sapiens
aaaatgtgccatgat

SEQ ID NO: 194060 - DNA, 15 bp, Homo sapiens
gaaaatgtgccatga

SEQ ID NO: 194061 - DNA, 15 bp, Homo sapiens
ggaaaatgtgccatg

SEQ ID NO: 194062 - DNA, 15 bp, Homo sapiens
aggaaaatgtgccat

SEQ ID NO: 194063 - DNA, 15 bp, Homo sapiens
caggaaaatgtgcca

SEQ ID NO: 194064 - DNA, 15 bp, Homo sapiens
ccaggaaaatgtgcc

SEQ ID NO: 194065 - DNA, 15 bp, Homo sapiens
tccaggaaaatgtgc

SEQ ID NO: 194066 - DNA, 15 bp, Homo sapiens
ctccaggaaaatgtg

SEQ ID NO: 194067 - DNA, 15 bp, Homo sapiens
tctccaggaaaatgt

SEQ ID NO: 194068 - DNA, 15 bp, Homo sapiens
ttctccaggaaaatg

SEQ ID NO: 194069 - DNA, 15 bp, Homo sapiens
gttctccaggaaaat

SEQ ID NO: 194070 - DNA, 15 bp, Homo sapiens
ggttctccaggaaaa

SEQ ID NO: 194071 - DNA, 15 bp, Homo sapiens
tggttctccaggaaa

SEQ ID NO: 194072 - DNA, 15 bp, Homo sapiens
ctggttctccaggaa

SEQ ID NO: 194073 - DNA, 15 bp, Homo sapiens
actggttctccagga

SEQ ID NO: 194074 - DNA, 15 bp, Homo sapiens
aactggttctccagg

SEQ ID NO: 194075 - DNA, 15 bp, Homo sapiens
gaactggttctccag

SEQ ID NO: 194076 - DNA, 15 bp, Homo sapiens
agaactggttctcca

SEQ ID NO: 194077 - DNA, 15 bp, Homo sapiens
aagaactggttctcc

SEQ ID NO: 194078 - DNA, 15 bp, Homo sapiens
gaagaactggttctc

SEQ ID NO: 194079 - DNA, 15 bp, Homo sapiens
agaagaactggttct

SEQ ID NO: 194080 - DNA, 15 bp, Homo sapiens
aagaagaactggttc

SEQ ID NO: 194081 - DNA, 15 bp, Homo sapiens
caagaagaactggtt

SEQ ID NO: 194082 - DNA, 15 bp, Homo sapiens
tcaagaagaactggt

SEQ ID NO: 194083 - DNA, 15 bp, Homo sapiens
ttcaagaagaactgg

SEQ ID NO: 194084 - DNA, 15 bp, Homo sapiens
cttcaagaagaactg

SEQ ID NO: 194085 - DNA, 15 bp, Homo sapiens
ccttcaagaagaact

SEQ ID NO: 194086 - DNA, 15 bp, Homo sapiens
accttcaagaagaac

SEQ ID NO: 194087 - DNA, 15 bp, Homo sapiens
aaccttcaagaagaa

SEQ ID NO: 194088 - DNA, 15 bp, Homo sapiens
aaaccttcaagaaga

SEQ ID NO: 194089 - DNA, 15 bp, Homo sapiens
caaaccttcaagaag

SEQ ID NO: 194090 - DNA, 15 bp, Homo sapiens
ccaaaccttcaagaa

SEQ ID NO: 194091 - DNA, 15 bp, Homo sapiens
cccaaaccttcaaga

SEQ ID NO: 194092 - DNA, 15 bp, Homo sapiens
tcccaaaccttcaag

SEQ ID NO: 194093 - DNA, 15 bp, Homo sapiens
ttcccaaaccttcaa

SEQ ID NO: 194094 - DNA, 15 bp, Homo sapiens
attcccaaaccttca

SEQ ID NO: 194095 - DNA, 15 bp, Homo sapiens
cattcccaaaccttc

SEQ ID NO: 194096 - DNA, 15 bp, Homo sapiens
tcattcccaaacctt

SEQ ID NO: 194097 - DNA, 15 bp, Homo sapiens
ttcattcccaaacct

SEQ ID NO: 194098 - DNA, 15 bp, Homo sapiens
attcattcccaaacc

SEQ ID NO: 194099 - DNA, 15 bp, Homo sapiens
tattcattcccaaac

SEQ ID NO: 194100 - DNA, 15 bp, Homo sapiens
atattcattcccaaa

SEQ ID NO: 194101 - DNA, 15 bp, Homo sapiens
aatattcattcccaa

SEQ ID NO: 194102 - DNA, 15 bp, Homo sapiens
taatattcattccca

SEQ ID NO: 194103 - DNA, 15 bp, Homo sapiens
ataatattcattccc

SEQ ID NO: 194104 - DNA, 15 bp, Homo sapiens
aataatattcattcc

SEQ ID NO: 194105 - DNA, 15 bp, Homo sapiens
aaataatattcattc

SEQ ID NO: 194106 - DNA, 15 bp, Homo sapiens
aaaataatattcatt

SEQ ID NO: 194107 - DNA, 15 bp, Homo sapiens
caaaataatattcat

SEQ ID NO: 194108 - DNA, 15 bp, Homo sapiens
acaaaataatattca

SEQ ID NO: 194109 - DNA, 15 bp, Homo sapiens
tacaaaataatattc

SEQ ID NO: 194110 - DNA, 15 bp, Homo sapiens
atacaaaataatatt

SEQ ID NO: 194111 - DNA, 15 bp, Homo sapiens
aatacaaaataatat

SEQ ID NO: 194112 - DNA, 15 bp, Homo sapiens
gaatacaaaataata

SEQ ID NO: 194113 - DNA, 15 bp, Homo sapiens
tgaatacaaaataat

SEQ ID NO: 194114 - DNA, 15 bp, Homo sapiens
ttgaatacaaaataa

SEQ ID NO: 194115 - DNA, 15 bp, Homo sapiens
attgaatacaaaata

SEQ ID NO: 194116 - DNA, 15 bp, Homo sapiens
gattgaatacaaaat

SEQ ID NO: 194117 - DNA, 15 bp, Homo sapiens
tgattgaatacaaaa

SEQ ID NO: 194118 - DNA, 15 bp, Homo sapiens
gtgattgaatacaaa

SEQ ID NO: 194119 - DNA, 15 bp, Homo sapiens
tgtgattgaatacaa

SEQ ID NO: 194120 - DNA, 15 bp, Homo sapiens
atgtgattgaataca

SEQ ID NO: 194121 - DNA, 15 bp, Homo sapiens
aatgtgattgaatac

SEQ ID NO: 194122 - DNA, 15 bp, Homo sapiens
aaatgtgattgaata

SEQ ID NO: 194123 - DNA, 15 bp, Homo sapiens
caaatgtgattgaat

SEQ ID NO: 194124 - DNA, 15 bp, Homo sapiens
acaaatgtgattgaa

SEQ ID NO: 194125 - DNA, 15 bp, Homo sapiens
gacaaatgtgattga

SEQ ID NO: 194126 - DNA, 15 bp, Homo sapiens
tgacaaatgtgattg

SEQ ID NO: 194127 - DNA, 15 bp, Homo sapiens
atgacaaatgtgatt

SEQ ID NO: 194128 - DNA, 15 bp, Homo sapiens
catgacaaatgtgat

SEQ ID NO: 194129 - DNA, 15 bp, Homo sapiens
tcatgacaaatgtga

SEQ ID NO: 194130 - DNA, 15 bp, Homo sapiens
ctcatgacaaatgtg

SEQ ID NO: 194131 - DNA, 15 bp, Homo sapiens
cctcatgacaaatgt

SEQ ID NO: 194132 - DNA, 15 bp, Homo sapiens
tcctcatgacaaatg

SEQ ID NO: 194133 - DNA, 15 bp, Homo sapiens
ctcctcatgacaaat

SEQ ID NO: 194134 - DNA, 15 bp, Homo sapiens
cctcctcatgacaaa

SEQ ID NO: 194135 - DNA, 15 bp, Homo sapiens
tcctcctcatgacaa

SEQ ID NO: 194136 - DNA, 15 bp, Homo sapiens
ttcctcctcatgaca

SEQ ID NO: 194137 - DNA, 15 bp, Homo sapiens
attcctcctcatgac

SEQ ID NO: 194138 - DNA, 15 bp, Homo sapiens
tattcctcctcatga

SEQ ID NO: 194139 - DNA, 15 bp, Homo sapiens
ttattcctcctcatg

SEQ ID NO: 194140 - DNA, 15 bp, Homo sapiens
tttattcctcctcat

SEQ ID NO: 194141 - DNA, 15 bp, Homo sapiens
ttttattcctcctca

SEQ ID NO: 194142 - DNA, 15 bp, Homo sapiens
attttattcctcctc

SEQ ID NO: 194143 - DNA, 15 bp, Homo sapiens
tattttattcctcct

SEQ ID NO: 194144 - DNA, 15 bp, Homo sapiens
atattttattcctcc

SEQ ID NO: 194145 - DNA, 15 bp, Homo sapiens
catattttattcctc

SEQ ID NO: 194146 - DNA, 15 bp, Homo sapiens
gcatattttattcct

SEQ ID NO: 194147 - DNA, 15 bp, Homo sapiens
tgcatattttattcc

SEQ ID NO: 194148 - DNA, 15 bp, Homo sapiens
atgcatattttattc

SEQ ID NO: 194149 - DNA, 15 bp, Homo sapiens
tatgcatattttatt

SEQ ID NO: 194150 - DNA, 15 bp, Homo sapiens
gtatgcatattttat

SEQ ID NO: 194151 - DNA, 15 bp, Homo sapiens
tgtatgcatatttta

SEQ ID NO: 194152 - DNA, 15 bp, Homo sapiens
atgtatgcatatttt

SEQ ID NO: 194153 - DNA, 15 bp, Homo sapiens
tatgtatgcatattt

SEQ ID NO: 194154 - DNA, 15 bp, Homo sapiens
atatgtatgcatatt

SEQ ID NO: 194155 - DNA, 15 bp, Homo sapiens
aatatgtatgcatat

SEQ ID NO: 194156 - DNA, 15 bp, Homo sapiens
aaatatgtatgcata

SEQ ID NO: 194157 - DNA, 15 bp, Homo sapiens
aaaatatgtatgcat

SEQ ID NO: 194158 - DNA, 15 bp, Homo sapiens
taaaatatgtatgca

SEQ ID NO: 194159 - DNA, 15 bp, Homo sapiens
ttaaaatatgtatgc

SEQ ID NO: 194160 - DNA, 15 bp, Homo sapiens
tttaaaatatgtatg

SEQ ID NO: 194161 - DNA, 15 bp, Homo sapiens
ttttaaaatatgtat

SEQ ID NO: 194162 - DNA, 15 bp, Homo sapiens
cttttaaaatatgta

SEQ ID NO: 194163 - DNA, 15 bp, Homo sapiens
tcttttaaaatatgt

SEQ ID NO: 194164 - DNA, 15 bp, Homo sapiens
atcttttaaaatatg

SEQ ID NO: 194165 - DNA, 15 bp, Homo sapiens
tatcttttaaaatat

SEQ ID NO: 194166 - DNA, 15 bp, Homo sapiens
ttatcttttaaaata

SEQ ID NO: 194167 - DNA, 15 bp, Homo sapiens
tttatcttttaaaat

SEQ ID NO: 194168 - DNA, 15 bp, Homo sapiens
ttttatcttttaaaa

SEQ ID NO: 194169 - DNA, 15 bp, Homo sapiens
attttatcttttaaa

SEQ ID NO: 194170 - DNA, 15 bp, Homo sapiens
cattttatcttttaa

SEQ ID NO: 194171 - DNA, 15 bp, Homo sapiens
gcattttatctttta

SEQ ID NO: 194172 - DNA, 15 bp, Homo sapiens
tgcattttatctttt

SEQ ID NO: 194173 - DNA, 15 bp, Homo sapiens
ttgcattttatcttt

SEQ ID NO: 194174 - DNA, 15 bp, Homo sapiens
gttgcattttatctt

SEQ ID NO: 194175 - DNA, 15 bp, Homo sapiens
tgttgcattttatct

SEQ ID NO: 194176 - DNA, 15 bp, Homo sapiens
ttgttgcattttatc

SEQ ID NO: 194177 - DNA, 15 bp, Homo sapiens
attgttgcattttat

SEQ ID NO: 194178 - DNA, 15 bp, Homo sapiens
aattgttgcatttta

SEQ ID NO: 194179 - DNA, 15 bp, Homo sapiens
aaattgttgcatttt

SEQ ID NO: 194180 - DNA, 15 bp, Homo sapiens
taaattgttgcattt

SEQ ID NO: 194181 - DNA, 15 bp, Homo sapiens
ttaaattgttgcatt

SEQ ID NO: 194182 - DNA, 15 bp, Homo sapiens
tttaaattgttgcat

SEQ ID NO: 194183 - DNA, 15 bp, Homo sapiens
ctttaaattgttgca

SEQ ID NO: 194184 - DNA, 15 bp, Homo sapiens
tctttaaattgttgc

SEQ ID NO: 194185 - DNA, 15 bp, Homo sapiens
ttctttaaattgttg

SEQ ID NO: 194186 - DNA, 15 bp, Homo sapiens
cttctttaaattgtt

SEQ ID NO: 194187 - DNA, 15 bp, Homo sapiens
gcttctttaaattgt

SEQ ID NO: 194188 - DNA, 15 bp, Homo sapiens
agcttctttaaattg

SEQ ID NO: 194189 - DNA, 15 bp, Homo sapiens
aagcttctttaaatt

SEQ ID NO: 194190 - DNA, 15 bp, Homo sapiens
gaagcttctttaaat

SEQ ID NO: 194191 - DNA, 15 bp, Homo sapiens
ggaagcttctttaaa

SEQ ID NO: 194192 - DNA, 15 bp, Homo sapiens
aggaagcttctttaa

SEQ ID NO: 194193 - DNA, 15 bp, Homo sapiens
caggaagcttcttta

SEQ ID NO: 194194 - DNA, 15 bp, Homo sapiens
ccaggaagcttcttt

SEQ ID NO: 194195 - DNA, 15 bp, Homo sapiens
gccaggaagcttctt

SEQ ID NO: 194196 - DNA, 15 bp, Homo sapiens
agccaggaagcttct

SEQ ID NO: 194197 - DNA, 15 bp, Homo sapiens
cagccaggaagcttc

SEQ ID NO: 194198 - DNA, 15 bp, Homo sapiens
ccagccaggaagctt

SEQ ID NO: 194199 - DNA, 15 bp, Homo sapiens
tccagccaggaagct

SEQ ID NO: 194200 - DNA, 15 bp, Homo sapiens
gtccagccaggaagc

SEQ ID NO: 194201 - DNA, 15 bp, Homo sapiens
tgtccagccaggaag

SEQ ID NO: 194202 - DNA, 15 bp, Homo sapiens
atgtccagccaggaa

SEQ ID NO: 194203 - DNA, 15 bp, Homo sapiens
catgtccagccagga

SEQ ID NO: 194204 - DNA, 15 bp, Homo sapiens
ccatgtccagccagg

SEQ ID NO: 194205 - DNA, 15 bp, Homo sapiens
accatgtccagccag

SEQ ID NO: 194206 - DNA, 15 bp, Homo sapiens
caccatgtccagcca

SEQ ID NO: 194207 - DNA, 15 bp, Homo sapiens
tcaccatgtccagcc

SEQ ID NO: 194208 - DNA, 15 bp, Homo sapiens
gtcaccatgtccagc

SEQ ID NO: 194209 - DNA, 15 bp, Homo sapiens
agtcaccatgtccag

SEQ ID NO: 194210 - DNA, 15 bp, Homo sapiens
gagtcaccatgtcca

SEQ ID NO: 194211 - DNA, 15 bp, Homo sapiens
tgagtcaccatgtcc

SEQ ID NO: 194212 - DNA, 15 bp, Homo sapiens
atgagtcaccatgtc

SEQ ID NO: 194213 - DNA, 15 bp, Homo sapiens
catgagtcaccatgt

SEQ ID NO: 194214 - DNA, 15 bp, Homo sapiens
gcatgagtcaccatg

SEQ ID NO: 194215 - DNA, 15 bp, Homo sapiens
ggcatgagtcaccat

SEQ ID NO: 194216 - DNA, 15 bp, Homo sapiens
aggcatgagtcacca

SEQ ID NO: 194217 - DNA, 15 bp, Homo sapiens
caggcatgagtcacc

SEQ ID NO: 194218 - DNA, 15 bp, Homo sapiens
acaggcatgagtcac

SEQ ID NO: 194219 - DNA, 15 bp, Homo sapiens
tacaggcatgagtca

SEQ ID NO: 194220 - DNA, 15 bp, Homo sapiens
ttacaggcatgagtc

SEQ ID NO: 194221 - DNA, 15 bp, Homo sapiens
attacaggcatgagt

SEQ ID NO: 194222 - DNA, 15 bp, Homo sapiens
tattacaggcatgag

SEQ ID NO: 194223 - DNA, 15 bp, Homo sapiens
gtattacaggcatga

SEQ ID NO: 194224 - DNA, 15 bp, Homo sapiens
ggtattacaggcatg

SEQ ID NO: 194225 - DNA, 15 bp, Homo sapiens
aggtattacaggcat

SEQ ID NO: 194226 - DNA, 15 bp, Homo sapiens
taggtattacaggca

SEQ ID NO: 194227 - DNA, 15 bp, Homo sapiens
ctaggtattacaggc

SEQ ID NO: 194228 - DNA, 15 bp, Homo sapiens
actaggtattacagg

SEQ ID NO: 194229 - DNA, 15 bp, Homo sapiens
cactaggtattacag

SEQ ID NO: 194230 - DNA, 15 bp, Homo sapiens
tcactaggtattaca

SEQ ID NO: 194231 - DNA, 15 bp, Homo sapiens
atcactaggtattac

SEQ ID NO: 194232 - DNA, 15 bp, Homo sapiens
aatcactaggtatta

SEQ ID NO: 194233 - DNA, 15 bp, Homo sapiens
aaatcactaggtatt

SEQ ID NO: 194234 - DNA, 15 bp, Homo sapiens
caaatcactaggtat

SEQ ID NO: 194235 - DNA, 15 bp, Homo sapiens
ccaaatcactaggta

SEQ ID NO: 194236 - DNA, 15 bp, Homo sapiens
cccaaatcactaggt

SEQ ID NO: 194237 - DNA, 15 bp, Homo sapiens
tcccaaatcactagg

SEQ ID NO: 194238 - DNA, 15 bp, Homo sapiens
ctcccaaatcactag

SEQ ID NO: 194239 - DNA, 15 bp, Homo sapiens
cctcccaaatcacta

SEQ ID NO: 194240 - DNA, 15 bp, Homo sapiens
gcctcccaaatcact

SEQ ID NO: 194241 - DNA, 15 bp, Homo sapiens
agcctcccaaatcac

SEQ ID NO: 194242 - DNA, 15 bp, Homo sapiens
cagcctcccaaatca

SEQ ID NO: 194243 - DNA, 15 bp, Homo sapiens
tcagcctcccaaatc

SEQ ID NO: 194244 - DNA, 15 bp, Homo sapiens
ctcagcctcccaaat

SEQ ID NO: 194245 - DNA, 15 bp, Homo sapiens
ctcaagcaattctcc

SEQ ID NO: 194246 - DNA, 15 bp, Homo sapiens
gctcaagcaattctc

SEQ ID NO: 194247 - DNA, 15 bp, Homo sapiens
ggctcaagcaattct

SEQ ID NO: 194248 - DNA, 15 bp, Homo sapiens
gggctcaagcaattc

SEQ ID NO: 194249 - DNA, 15 bp, Homo sapiens
tgggctcaagcaatt

SEQ ID NO: 194250 - DNA, 15 bp, Homo sapiens
tcctgggctcaagca

SEQ ID NO: 194251 - DNA, 15 bp, Homo sapiens
gaactcctgggctca

SEQ ID NO: 194252 - DNA, 15 bp, Homo sapiens
tgaactcctgggctc

SEQ ID NO: 194253 - DNA, 15 bp, Homo sapiens
atgaactcctgggct

SEQ ID NO: 194254 - DNA, 15 bp, Homo sapiens
aatgaactcctgggc

SEQ ID NO: 194255 - DNA, 15 bp, Homo sapiens
caatgaactcctggg

SEQ ID NO: 194256 - DNA, 15 bp, Homo sapiens
gcaatgaactcctgg

SEQ ID NO: 194257 - DNA, 15 bp, Homo sapiens
tgcaatgaactcctg

SEQ ID NO: 194258 - DNA, 15 bp, Homo sapiens
atgcaatgaactcct

SEQ ID NO: 194259 - DNA, 15 bp, Homo sapiens
gatgcaatgaactcc

SEQ ID NO: 194260 - DNA, 15 bp, Homo sapiens
tgatgcaatgaactc

SEQ ID NO: 194261 - DNA, 15 bp, Homo sapiens
atgatgcaatgaact

SEQ ID NO: 194262 - DNA, 15 bp, Homo sapiens
tatgatgcaatgaac

SEQ ID NO: 194263 - DNA, 15 bp, Homo sapiens
ctatgatgcaatgaa

SEQ ID NO: 194264 - DNA, 15 bp, Homo sapiens
actatgatgcaatga

SEQ ID NO: 194265 - DNA, 15 bp, Homo sapiens
cactatgatgcaatg

SEQ ID NO: 194266 - DNA, 15 bp, Homo sapiens
gcactatgatgcaat

SEQ ID NO: 194267 - DNA, 15 bp, Homo sapiens
tgcactatgatgcaa

SEQ ID NO: 194268 - DNA, 15 bp, Homo sapiens
ttgcactatgatgca

SEQ ID NO: 194269 - DNA, 15 bp, Homo sapiens
attgcactatgatgc

SEQ ID NO: 194270 - DNA, 15 bp, Homo sapiens
cattgcactatgatg

SEQ ID NO: 194271 - DNA, 15 bp, Homo sapiens
tcattgcactatgat

SEQ ID NO: 194272 - DNA, 15 bp, Homo sapiens
ctcattgcactatga

SEQ ID NO: 194273 - DNA, 15 bp, Homo sapiens
gctcattgcactatg

SEQ ID NO: 194274 - DNA, 15 bp, Homo sapiens
agctcattgcactat

SEQ ID NO: 194275 - DNA, 15 bp, Homo sapiens
tagctcattgcacta

SEQ ID NO: 194276 - DNA, 15 bp, Homo sapiens
atagctcattgcact

SEQ ID NO: 194277 - DNA, 15 bp, Homo sapiens
catagctcattgcac

SEQ ID NO: 194278 - DNA, 15 bp, Homo sapiens
tcatagctcattgca

SEQ ID NO: 194279 - DNA, 15 bp, Homo sapiens
atcatagctcattgc

SEQ ID NO: 194280 - DNA, 15 bp, Homo sapiens
aatcatagctcattg

SEQ ID NO: 194281 - DNA, 15 bp, Homo sapiens
caatcatagctcatt

SEQ ID NO: 194282 - DNA, 15 bp, Homo sapiens
gcaatcatagctcat

SEQ ID NO: 194283 - DNA, 15 bp, Homo sapiens
tgcaatcatagctca

SEQ ID NO: 194284 - DNA, 15 bp, Homo sapiens
gtgcaatcatagctc

SEQ ID NO: 194285 - DNA, 15 bp, Homo sapiens
agtgcaatcatagct

SEQ ID NO: 194286 - DNA, 15 bp, Homo sapiens
tagtgcaatcatagc

SEQ ID NO: 194287 - DNA, 15 bp, Homo sapiens
gtagtgcaatcatag

SEQ ID NO: 194288 - DNA, 15 bp, Homo sapiens
agtagtgcaatcata

SEQ ID NO: 194289 - DNA, 15 bp, Homo sapiens
cagtagtgcaatcat

SEQ ID NO: 194290 - DNA, 15 bp, Homo sapiens
gcagtagtgcaatca

SEQ ID NO: 194291 - DNA, 15 bp, Homo sapiens
tgcagtagtgcaatc

SEQ ID NO: 194292 - DNA, 15 bp, Homo sapiens
ctgcagtagtgcaat

SEQ ID NO: 194293 - DNA, 15 bp, Homo sapiens
actgcagtagtgcaa

SEQ ID NO: 194294 - DNA, 15 bp, Homo sapiens
gactgcagtagtgca

SEQ ID NO: 194295 - DNA, 15 bp, Homo sapiens
ggactgcagtagtgc

SEQ ID NO: 194296 - DNA, 15 bp, Homo sapiens
tggactgcagtagtg

SEQ ID NO: 194297 - DNA, 15 bp, Homo sapiens
ctggactgcagtagt

SEQ ID NO: 194298 - DNA, 15 bp, Homo sapiens
gctggactgcagtag

SEQ ID NO: 194299 - DNA, 15 bp, Homo sapiens
tgctggactgcagta

SEQ ID NO: 194300 - DNA, 15 bp, Homo sapiens
atgctggactgcagt

SEQ ID NO: 194301 - DNA, 15 bp, Homo sapiens
catgctggactgcag

SEQ ID NO: 194302 - DNA, 15 bp, Homo sapiens
ccatgctggactgca

SEQ ID NO: 194303 - DNA, 15 bp, Homo sapiens
cccatgctggactgc

SEQ ID NO: 194304 - DNA, 15 bp, Homo sapiens
gcccatgctggactg

SEQ ID NO: 194305 - DNA, 15 bp, Homo sapiens
tgcccatgctggact

SEQ ID NO: 194306 - DNA, 15 bp, Homo sapiens
ttgcccatgctggac

SEQ ID NO: 194307 - DNA, 15 bp, Homo sapiens
gttgcccatgctgga

SEQ ID NO: 194308 - DNA, 15 bp, Homo sapiens
tgttgcccatgctgg

SEQ ID NO: 194309 - DNA, 15 bp, Homo sapiens
ctgttgcccatgctg

SEQ ID NO: 194310 - DNA, 15 bp, Homo sapiens
tctgttgcccatgct

SEQ ID NO: 194311 - DNA, 15 bp, Homo sapiens
ctctgttgcccatgc

SEQ ID NO: 194312 - DNA, 15 bp, Homo sapiens
actctgttgcccatg

SEQ ID NO: 194313 - DNA, 15 bp, Homo sapiens
cactctgttgcccat

SEQ ID NO: 194314 - DNA, 15 bp, Homo sapiens
agagacagggtctca

SEQ ID NO: 194315 - DNA, 15 bp, Homo sapiens
tagagacagggtctc

SEQ ID NO: 194316 - DNA, 15 bp, Homo sapiens
ttagagacagggtct

SEQ ID NO: 194317 - DNA, 15 bp, Homo sapiens
tttagagacagggtc

SEQ ID NO: 194318 - DNA, 15 bp, Homo sapiens
ttttagagacagggt

SEQ ID NO: 194319 - DNA, 15 bp, Homo sapiens
tttttagagacaggg

SEQ ID NO: 194320 - DNA, 15 bp, Homo sapiens
atttttagagacagg

SEQ ID NO: 194321 - DNA, 15 bp, Homo sapiens
tatttttagagacag

SEQ ID NO: 194322 - DNA, 15 bp, Homo sapiens
atatttttagagaca

SEQ ID NO: 194323 - DNA, 15 bp, Homo sapiens
tatatttttagagac

SEQ ID NO: 194324 - DNA, 15 bp, Homo sapiens
ttatatttttagaga

SEQ ID NO: 194325 - DNA, 15 bp, Homo sapiens
gttatatttttagag

SEQ ID NO: 194326 - DNA, 15 bp, Homo sapiens
tgttatatttttaga

SEQ ID NO: 194327 - DNA, 15 bp, Homo sapiens
ttgttatatttttag

SEQ ID NO: 194328 - DNA, 15 bp, Homo sapiens
tttgttatattttta

SEQ ID NO: 194329 - DNA, 15 bp, Homo sapiens
ttttgttatattttt

SEQ ID NO: 194330 - DNA, 15 bp, Homo sapiens
tttttgttatatttt

SEQ ID NO: 194331 - DNA, 15 bp, Homo sapiens
atttttgttatattt

SEQ ID NO: 194332 - DNA, 15 bp, Homo sapiens
tatttttgttatatt

SEQ ID NO: 194333 - DNA, 15 bp, Homo sapiens
ttatttttgttatat

SEQ ID NO: 194334 - DNA, 15 bp, Homo sapiens
tttatttttgttata

SEQ ID NO: 194335 - DNA, 15 bp, Homo sapiens
ttttatttttgttat

SEQ ID NO: 194336 - DNA, 15 bp, Homo sapiens
tttttatttttgtta

SEQ ID NO: 194337 - DNA, 15 bp, Homo sapiens
ctttttatttttgtt

SEQ ID NO: 194338 - DNA, 15 bp, Homo sapiens
tctttttatttttgt

SEQ ID NO: 194339 - DNA, 15 bp, Homo sapiens
atctttttatttttg

SEQ ID NO: 194340 - DNA, 15 bp, Homo sapiens
tatctttttattttt

SEQ ID NO: 194341 - DNA, 15 bp, Homo sapiens
ttatctttttatttt

SEQ ID NO: 194342 - DNA, 15 bp, Homo sapiens
tttatctttttattt

SEQ ID NO: 194343 - DNA, 15 bp, Homo sapiens
ttttatctttttatt

SEQ ID NO: 194344 - DNA, 15 bp, Homo sapiens
attttatctttttat

SEQ ID NO: 194345 - DNA, 15 bp, Homo sapiens
aattttatcttttta

SEQ ID NO: 194346 - DNA, 15 bp, Homo sapiens
aaattttatcttttt

SEQ ID NO: 194347 - DNA, 15 bp, Homo sapiens
taaattttatctttt

SEQ ID NO: 194348 - DNA, 15 bp, Homo sapiens
ttaaattttatcttt

SEQ ID NO: 194349 - DNA, 15 bp, Homo sapiens
tttaaattttatctt

SEQ ID NO: 194350 - DNA, 15 bp, Homo sapiens
ttttaaattttatct

SEQ ID NO: 194351 - DNA, 15 bp, Homo sapiens
attttaaattttatc

SEQ ID NO: 194352 - DNA, 15 bp, Homo sapiens
tattttaaattttat

SEQ ID NO: 194353 - DNA, 15 bp, Homo sapiens
atattttaaatttta

SEQ ID NO: 194354 - DNA, 15 bp, Homo sapiens
tatattttaaatttt

SEQ ID NO: 194355 - DNA, 15 bp, Homo sapiens
atatattttaaattt

SEQ ID NO: 194356 - DNA, 15 bp, Homo sapiens
tatatattttaaatt

SEQ ID NO: 194357 - DNA, 15 bp, Homo sapiens
atatatattttaaat

SEQ ID NO: 194358 - DNA, 15 bp, Homo sapiens
tatatatattttaaa

SEQ ID NO: 194359 - DNA, 15 bp, Homo sapiens
ttatatatattttaa

SEQ ID NO: 194360 - DNA, 15 bp, Homo sapiens
tttatatatatttta

SEQ ID NO: 194361 - DNA, 15 bp, Homo sapiens
ctttatatatatttt

SEQ ID NO: 194362 - DNA, 15 bp, Homo sapiens
tctttatatatattt

SEQ ID NO: 194363 - DNA, 15 bp, Homo sapiens
ttctttatatatatt

SEQ ID NO: 194364 - DNA, 15 bp, Homo sapiens
tttctttatatatat

SEQ ID NO: 194365 - DNA, 15 bp, Homo sapiens
gtttctttatatata

SEQ ID NO: 194366 - DNA, 15 bp, Homo sapiens
agtttctttatatat

SEQ ID NO: 194367 - DNA, 15 bp, Homo sapiens
cagtttctttatata

SEQ ID NO: 194368 - DNA, 15 bp, Homo sapiens
acagtttctttatat

SEQ ID NO: 194369 - DNA, 15 bp, Homo sapiens
gacagtttctttata

SEQ ID NO: 194370 - DNA, 15 bp, Homo sapiens
agacagtttctttat

SEQ ID NO: 194371 - DNA, 15 bp, Homo sapiens
cagacagtttcttta

SEQ ID NO: 194372 - DNA, 15 bp, Homo sapiens
gcagacagtttcttt

SEQ ID NO: 194373 - DNA, 15 bp, Homo sapiens
agcagacagtttctt

SEQ ID NO: 194374 - DNA, 15 bp, Homo sapiens
aagcagacagtttct

SEQ ID NO: 194375 - DNA, 15 bp, Homo sapiens
caagcagacagtttc

SEQ ID NO: 194376 - DNA, 15 bp, Homo sapiens
acaagcagacagttt

SEQ ID NO: 194377 - DNA, 15 bp, Homo sapiens
cacaagcagacagtt

SEQ ID NO: 194378 - DNA, 15 bp, Homo sapiens
ccacaagcagacagt

SEQ ID NO: 194379 - DNA, 15 bp, Homo sapiens
tccacaagcagacag

SEQ ID NO: 194380 - DNA, 15 bp, Homo sapiens
ttccacaagcagaca

SEQ ID NO: 194381 - DNA, 15 bp, Homo sapiens
cttccacaagcagac

SEQ ID NO: 194382 - DNA, 15 bp, Homo sapiens
ccttccacaagcaga

SEQ ID NO: 194383 - DNA, 15 bp, Homo sapiens
gccttccacaagcag

SEQ ID NO: 194384 - DNA, 15 bp, Homo sapiens
agccttccacaagca

SEQ ID NO: 194385 - DNA, 15 bp, Homo sapiens
aagccttccacaagc

SEQ ID NO: 194386 - DNA, 15 bp, Homo sapiens
caagccttccacaag

SEQ ID NO: 194387 - DNA, 15 bp, Homo sapiens
gcaagccttccacaa

SEQ ID NO: 194388 - DNA, 15 bp, Homo sapiens
agcaagccttccaca

SEQ ID NO: 194389 - DNA, 15 bp, Homo sapiens
aagcaagccttccac

SEQ ID NO: 194390 - DNA, 15 bp, Homo sapiens
gaagcaagccttcca

SEQ ID NO: 194391 - DNA, 15 bp, Homo sapiens
tgaagcaagccttcc

SEQ ID NO: 194392 - DNA, 15 bp, Homo sapiens
ttgaagcaagccttc

SEQ ID NO: 194393 - DNA, 15 bp, Homo sapiens
tttgaagcaagcctt

SEQ ID NO: 194394 - DNA, 15 bp, Homo sapiens
atttgaagcaagcct

SEQ ID NO: 194395 - DNA, 15 bp, Homo sapiens
aatttgaagcaagcc

SEQ ID NO: 194396 - DNA, 15 bp, Homo sapiens
gaatttgaagcaagc

SEQ ID NO: 194397 - DNA, 15 bp, Homo sapiens
agaatttgaagcaag

SEQ ID NO: 194398 - DNA, 15 bp, Homo sapiens
tagaatttgaagcaa

SEQ ID NO: 194399 - DNA, 15 bp, Homo sapiens
ttagaatttgaagca

SEQ ID NO: 194400 - DNA, 15 bp, Homo sapiens
attagaatttgaagc

SEQ ID NO: 194401 - DNA, 15 bp, Homo sapiens
gattagaatttgaag

SEQ ID NO: 194402 - DNA, 15 bp, Homo sapiens
ggattagaatttgaa

SEQ ID NO: 194403 - DNA, 15 bp, Homo sapiens
tggattagaatttga

SEQ ID NO: 194404 - DNA, 15 bp, Homo sapiens
ctggattagaatttg

SEQ ID NO: 194405 - DNA, 15 bp, Homo sapiens
tctggattagaattt

SEQ ID NO: 194406 - DNA, 15 bp, Homo sapiens
gtctggattagaatt

SEQ ID NO: 194407 - DNA, 15 bp, Homo sapiens
agtctggattagaat

SEQ ID NO: 194408 - DNA, 15 bp, Homo sapiens
gagtctggattagaa

SEQ ID NO: 194409 - DNA, 15 bp, Homo sapiens
ggagtctggattaga

SEQ ID NO: 194410 - DNA, 15 bp, Homo sapiens
gggagtctggattag

SEQ ID NO: 194411 - DNA, 15 bp, Homo sapiens
agggagtctggatta

SEQ ID NO: 194412 - DNA, 15 bp, Homo sapiens
cagggagtctggatt

SEQ ID NO: 194413 - DNA, 15 bp, Homo sapiens
tcagggagtctggat

SEQ ID NO: 194414 - DNA, 15 bp, Homo sapiens
ctcagggagtctgga

SEQ ID NO: 194415 - DNA, 15 bp, Homo sapiens
cctcagggagtctgg

SEQ ID NO: 194416 - DNA, 15 bp, Homo sapiens
acctcagggagtctg

SEQ ID NO: 194417 - DNA, 15 bp, Homo sapiens
tacctcagggagtct

SEQ ID NO: 194418 - DNA, 15 bp, Homo sapiens
ctacctcagggagtc

SEQ ID NO: 194419 - DNA, 15 bp, Homo sapiens
cctacctcagggagt

SEQ ID NO: 194420 - DNA, 15 bp, Homo sapiens
tcctacctcagggag

SEQ ID NO: 194421 - DNA, 15 bp, Homo sapiens
ctcctacctcaggga

SEQ ID NO: 194422 - DNA, 15 bp, Homo sapiens
cctcctacctcaggg

SEQ ID NO: 194423 - DNA, 15 bp, Homo sapiens
acctcctacctcagg

SEQ ID NO: 194424 - DNA, 15 bp, Homo sapiens
tacctcctacctcag

SEQ ID NO: 194425 - DNA, 15 bp, Homo sapiens
ttacctcctacctca

SEQ ID NO: 194426 - DNA, 15 bp, Homo sapiens
tttacctcctacctc

SEQ ID NO: 194427 - DNA, 15 bp, Homo sapiens
ttttacctcctacct

SEQ ID NO: 194428 - DNA, 15 bp, Homo sapiens
cttttacctcctacc

SEQ ID NO: 194429 - DNA, 15 bp, Homo sapiens
acttttacctcctac

SEQ ID NO: 194430 - DNA, 15 bp, Homo sapiens
aacttttacctccta

SEQ ID NO: 194431 - DNA, 15 bp, Homo sapiens
aaacttttacctcct

SEQ ID NO: 194432 - DNA, 15 bp, Homo sapiens
gaaacttttacctcc

SEQ ID NO: 194433 - DNA, 15 bp, Homo sapiens
agaaacttttacctc

SEQ ID NO: 194434 - DNA, 15 bp, Homo sapiens
aagaaacttttacct

SEQ ID NO: 194435 - DNA, 15 bp, Homo sapiens
gaagaaacttttacc

SEQ ID NO: 194436 - DNA, 15 bp, Homo sapiens
agaagaaacttttac

SEQ ID NO: 194437 - DNA, 15 bp, Homo sapiens
aagaagaaactttta

SEQ ID NO: 194438 - DNA, 15 bp, Homo sapiens
aaagaagaaactttt

SEQ ID NO: 194439 - DNA, 15 bp, Homo sapiens
aaaagaagaaacttt

SEQ ID NO: 194440 - DNA, 15 bp, Homo sapiens
gaaaagaagaaactt

SEQ ID NO: 194441 - DNA, 15 bp, Homo sapiens
agaaaagaagaaact

SEQ ID NO: 194442 - DNA, 15 bp, Homo sapiens
cagaaaagaagaaac

SEQ ID NO: 194443 - DNA, 15 bp, Homo sapiens
gcagaaaagaagaaa

SEQ ID NO: 194444 - DNA, 15 bp, Homo sapiens
ggcagaaaagaagaa

SEQ ID NO: 194445 - DNA, 15 bp, Homo sapiens
aggcagaaaagaaga

SEQ ID NO: 194446 - DNA, 15 bp, Homo sapiens
aaggcagaaaagaag

SEQ ID NO: 194447 - DNA, 15 bp, Homo sapiens
gaaggcagaaaagaa

SEQ ID NO: 194448 - DNA, 15 bp, Homo sapiens
tgaaggcagaaaaga

SEQ ID NO: 194449 - DNA, 15 bp, Homo sapiens
ctgaaggcagaaaag

SEQ ID NO: 194450 - DNA, 15 bp, Homo sapiens
cctgaaggcagaaaa

SEQ ID NO: 194451 - DNA, 15 bp, Homo sapiens
ccctgaaggcagaaa

SEQ ID NO: 194452 - DNA, 15 bp, Homo sapiens
gccctgaaggcagaa

SEQ ID NO: 194453 - DNA, 15 bp, Homo sapiens
agccctgaaggcaga

SEQ ID NO: 194454 - DNA, 15 bp, Homo sapiens
cagccctgaaggcag

SEQ ID NO: 194455 - DNA, 15 bp, Homo sapiens
acagccctgaaggca

SEQ ID NO: 194456 - DNA, 15 bp, Homo sapiens
gacagccctgaaggc

SEQ ID NO: 194457 - DNA, 15 bp, Homo sapiens
tgacagccctgaagg

SEQ ID NO: 194458 - DNA, 15 bp, Homo sapiens
atgacagccctgaag

SEQ ID NO: 194459 - DNA, 15 bp, Homo sapiens
catgacagccctgaa

SEQ ID NO: 194460 - DNA, 15 bp, Homo sapiens
ccatgacagccctga

SEQ ID NO: 194461 - DNA, 15 bp, Homo sapiens
cccatgacagccctg

SEQ ID NO: 194462 - DNA, 15 bp, Homo sapiens
tcccatgacagccct

SEQ ID NO: 194463 - DNA, 15 bp, Homo sapiens
ttcccatgacagccc

SEQ ID NO: 194464 - DNA, 15 bp, Homo sapiens
tttcccatgacagcc

SEQ ID NO: 194465 - DNA, 15 bp, Homo sapiens
ctttcccatgacagc

SEQ ID NO: 194466 - DNA, 15 bp, Homo sapiens
actttcccatgacag

SEQ ID NO: 194467 - DNA, 15 bp, Homo sapiens
aactttcccatgaca

SEQ ID NO: 194468 - DNA, 15 bp, Homo sapiens
aaactttcccatgac

SEQ ID NO: 194469 - DNA, 15 bp, Homo sapiens
caaactttcccatga

SEQ ID NO: 194470 - DNA, 15 bp, Homo sapiens
gcaaactttcccatg

SEQ ID NO: 194471 - DNA, 15 bp, Homo sapiens
tgcaaactttcccat

SEQ ID NO: 194472 - DNA, 15 bp, Homo sapiens
ttgcaaactttccca

SEQ ID NO: 194473 - DNA, 15 bp, Homo sapiens
cttgcaaactttccc

SEQ ID NO: 194474 - DNA, 15 bp, Homo sapiens
ccttgcaaactttcc

SEQ ID NO: 194475 - DNA, 15 bp, Homo sapiens
tccttgcaaactttc

SEQ ID NO: 194476 - DNA, 15 bp, Homo sapiens
atccttgcaaacttt

SEQ ID NO: 194477 - DNA, 15 bp, Homo sapiens
gatccttgcaaactt

SEQ ID NO: 194478 - DNA, 15 bp, Homo sapiens
agatccttgcaaact

SEQ ID NO: 194479 - DNA, 15 bp, Homo sapiens
cagatccttgcaaac

SEQ ID NO: 194480 - DNA, 15 bp, Homo sapiens
ccagatccttgcaaa

SEQ ID NO: 194481 - DNA, 15 bp, Homo sapiens
cccagatccttgcaa

SEQ ID NO: 194482 - DNA, 15 bp, Homo sapiens
gcccagatccttgca

SEQ ID NO: 194483 - DNA, 15 bp, Homo sapiens
agcccagatccttgc

SEQ ID NO: 194484 - DNA, 15 bp, Homo sapiens
tagcccagatccttg

SEQ ID NO: 194485 - DNA, 15 bp, Homo sapiens
ctagcccagatcctt

SEQ ID NO: 194486 - DNA, 15 bp, Homo sapiens
actagcccagatcct

SEQ ID NO: 194487 - DNA, 15 bp, Homo sapiens
gactagcccagatcc

SEQ ID NO: 194488 - DNA, 15 bp, Homo sapiens
agactagcccagatc

SEQ ID NO: 194489 - DNA, 15 bp, Homo sapiens
cagactagcccagat

SEQ ID NO: 194490 - DNA, 15 bp, Homo sapiens
ccagactagcccaga

SEQ ID NO: 194491 - DNA, 15 bp, Homo sapiens
gccagactagcccag

SEQ ID NO: 194492 - DNA, 15 bp, Homo sapiens
tgccagactagccca

SEQ ID NO: 194493 - DNA, 15 bp, Homo sapiens
gtgccagactagccc

SEQ ID NO: 194494 - DNA, 15 bp, Homo sapiens
ggtgccagactagcc

SEQ ID NO: 194495 - DNA, 15 bp, Homo sapiens
gggtgccagactagc

SEQ ID NO: 194496 - DNA, 15 bp, Homo sapiens
ggggtgccagactag

SEQ ID NO: 194497 - DNA, 15 bp, Homo sapiens
aggggtgccagacta

SEQ ID NO: 194498 - DNA, 15 bp, Homo sapiens
gaggggtgccagact

SEQ ID NO: 194499 - DNA, 15 bp, Homo sapiens
agaggggtgccagac

SEQ ID NO: 194500 - DNA, 15 bp, Homo sapiens
gagaggggtgccaga

SEQ ID NO: 194501 - DNA, 15 bp, Homo sapiens
cgagaggggtgccag

SEQ ID NO: 194502 - DNA, 15 bp, Homo sapiens
ccgagaggggtgcca

SEQ ID NO: 194503 - DNA, 15 bp, Homo sapiens
accgagaggggtgcc

SEQ ID NO: 194504 - DNA, 15 bp, Homo sapiens
aaccgagaggggtgc

SEQ ID NO: 194505 - DNA, 15 bp, Homo sapiens
caaccgagaggggtg

SEQ ID NO: 194506 - DNA, 15 bp, Homo sapiens
gcaaccgagaggggt

SEQ ID NO: 194507 - DNA, 15 bp, Homo sapiens
agcaaccgagagggg

SEQ ID NO: 194508 - DNA, 15 bp, Homo sapiens
gagcaaccgagaggg

SEQ ID NO: 194509 - DNA, 15 bp, Homo sapiens
cgagcaaccgagagg

SEQ ID NO: 194510 - DNA, 15 bp, Homo sapiens
ccgagcaaccgagag

SEQ ID NO: 194511 - DNA, 15 bp, Homo sapiens
accgagcaaccgaga

SEQ ID NO: 194512 - DNA, 15 bp, Homo sapiens
aaccgagcaaccgag

SEQ ID NO: 194513 - DNA, 15 bp, Homo sapiens
gaaccgagcaaccga

SEQ ID NO: 194514 - DNA, 15 bp, Homo sapiens
ggaaccgagcaaccg

SEQ ID NO: 194515 - DNA, 15 bp, Homo sapiens
gggaaccgagcaacc

SEQ ID NO: 194516 - DNA, 15 bp, Homo sapiens
ggggaaccgagcaac

SEQ ID NO: 194517 - DNA, 15 bp, Homo sapiens
tggggaaccgagcaa

SEQ ID NO: 194518 - DNA, 15 bp, Homo sapiens
atggggaaccgagca

SEQ ID NO: 194519 - DNA, 15 bp, Homo sapiens
gatggggaaccgagc

SEQ ID NO: 194520 - DNA, 15 bp, Homo sapiens
tgatggggaaccgag

SEQ ID NO: 194521 - DNA, 15 bp, Homo sapiens
gtgatggggaaccga

SEQ ID NO: 194522 - DNA, 15 bp, Homo sapiens
agtgatggggaaccg

SEQ ID NO: 194523 - DNA, 15 bp, Homo sapiens
cagtgatggggaacc

SEQ ID NO: 194524 - DNA, 15 bp, Homo sapiens
gcagtgatggggaac

SEQ ID NO: 194525 - DNA, 15 bp, Homo sapiens
ggcagtgatggggaa

SEQ ID NO: 194526 - DNA, 15 bp, Homo sapiens
aggcagtgatgggga

SEQ ID NO: 194527 - DNA, 15 bp, Homo sapiens
aaggcagtgatgggg

SEQ ID NO: 194528 - DNA, 15 bp, Homo sapiens
gaaggcagtgatggg

SEQ ID NO: 194529 - DNA, 15 bp, Homo sapiens
ggaaggcagtgatgg

SEQ ID NO: 194530 - DNA, 15 bp, Homo sapiens
gggaaggcagtgatg

SEQ ID NO: 194531 - DNA, 15 bp, Homo sapiens
tgggaaggcagtgat

SEQ ID NO: 194532 - DNA, 15 bp, Homo sapiens
gtgggaaggcagtga

SEQ ID NO: 194533 - DNA, 15 bp, Homo sapiens
agtgggaaggcagtg

SEQ ID NO: 194534 - DNA, 15 bp, Homo sapiens
gagtgggaaggcagt

SEQ ID NO: 194535 - DNA, 15 bp, Homo sapiens
ggagtgggaaggcag

SEQ ID NO: 194536 - DNA, 15 bp, Homo sapiens
tggagtgggaaggca

SEQ ID NO: 194537 - DNA, 15 bp, Homo sapiens
atggagtgggaaggc

SEQ ID NO: 194538 - DNA, 15 bp, Homo sapiens
catggagtgggaagg

SEQ ID NO: 194539 - DNA, 15 bp, Homo sapiens
ccatggagtgggaag

SEQ ID NO: 194540 - DNA, 15 bp, Homo sapiens
gccatggagtgggaa

SEQ ID NO: 194541 - DNA, 15 bp, Homo sapiens
agccatggagtggga

SEQ ID NO: 194542 - DNA, 15 bp, Homo sapiens
aagccatggagtggg

SEQ ID NO: 194543 - DNA, 15 bp, Homo sapiens
gaagccatggagtgg

SEQ ID NO: 194544 - DNA, 15 bp, Homo sapiens
agaagccatggagtg

SEQ ID NO: 194545 - DNA, 15 bp, Homo sapiens
gagaagccatggagt

SEQ ID NO: 194546 - DNA, 15 bp, Homo sapiens
ggagaagccatggag

SEQ ID NO: 194547 - DNA, 15 bp, Homo sapiens
aggagaagccatgga

SEQ ID NO: 194548 - DNA, 15 bp, Homo sapiens
gaggagaagccatgg

SEQ ID NO: 194549 - DNA, 15 bp, Homo sapiens
agaggagaagccatg

SEQ ID NO: 194550 - DNA, 15 bp, Homo sapiens
cagaggagaagccat

SEQ ID NO: 194551 - DNA, 15 bp, Homo sapiens
gcagaggagaagcca

SEQ ID NO: 194552 - DNA, 15 bp, Homo sapiens
tgcagaggagaagcc

SEQ ID NO: 194553 - DNA, 15 bp, Homo sapiens
ctgcagaggagaagc

SEQ ID NO: 194554 - DNA, 15 bp, Homo sapiens
cctgcagaggagaag

SEQ ID NO: 194555 - DNA, 15 bp, Homo sapiens
ccctgcagaggagaa

SEQ ID NO: 194556 - DNA, 15 bp, Homo sapiens
accctgcagaggaga

SEQ ID NO: 194557 - DNA, 15 bp, Homo sapiens
caccctgcagaggag

SEQ ID NO: 194558 - DNA, 15 bp, Homo sapiens
acaccctgcagagga

SEQ ID NO: 194559 - DNA, 15 bp, Homo sapiens
tacaccctgcagagg

SEQ ID NO: 194560 - DNA, 15 bp, Homo sapiens
ctacaccctgcagag

SEQ ID NO: 194561 - DNA, 15 bp, Homo sapiens
tctacaccctgcaga

SEQ ID NO: 194562 - DNA, 15 bp, Homo sapiens
gtctacaccctgcag

SEQ ID NO: 194563 - DNA, 15 bp, Homo sapiens
agtctacaccctgca

SEQ ID NO: 194564 - DNA, 15 bp, Homo sapiens
tagtctacaccctgc

SEQ ID NO: 194565 - DNA, 15 bp, Homo sapiens
atagtctacaccctg

SEQ ID NO: 194566 - DNA, 15 bp, Homo sapiens
catagtctacaccct

SEQ ID NO: 194567 - DNA, 15 bp, Homo sapiens
tcatagtctacaccc

SEQ ID NO: 194568 - DNA, 15 bp, Homo sapiens
atcatagtctacacc

SEQ ID NO: 194569 - DNA, 15 bp, Homo sapiens
catcatagtctacac

SEQ ID NO: 194570 - DNA, 15 bp, Homo sapiens
tcatcatagtctaca

SEQ ID NO: 194571 - DNA, 15 bp, Homo sapiens
ttcatcatagtctac

SEQ ID NO: 194572 - DNA, 15 bp, Homo sapiens
cttcatcatagtcta

SEQ ID NO: 194573 - DNA, 15 bp, Homo sapiens
ccttcatcatagtct

SEQ ID NO: 194574 - DNA, 15 bp, Homo sapiens
accttcatcatagtc

SEQ ID NO: 194575 - DNA, 15 bp, Homo sapiens
aaccttcatcatagt

SEQ ID NO: 194576 - DNA, 15 bp, Homo sapiens
taaccttcatcatag

SEQ ID NO: 194577 - DNA, 15 bp, Homo sapiens
gtaaccttcatcata

SEQ ID NO: 194578 - DNA, 15 bp, Homo sapiens
tgtaaccttcatcat

SEQ ID NO: 194579 - DNA, 15 bp, Homo sapiens
gtgtaaccttcatca

SEQ ID NO: 194580 - DNA, 15 bp, Homo sapiens
agtgtaaccttcatc

SEQ ID NO: 194581 - DNA, 15 bp, Homo sapiens
aagtgtaaccttcat

SEQ ID NO: 194582 - DNA, 15 bp, Homo sapiens
caagtgtaaccttca

SEQ ID NO: 194583 - DNA, 15 bp, Homo sapiens
tcaagtgtaaccttc

SEQ ID NO: 194584 - DNA, 15 bp, Homo sapiens
ttcaagtgtaacctt

SEQ ID NO: 194585 - DNA, 15 bp, Homo sapiens
cttcaagtgtaacct

SEQ ID NO: 194586 - DNA, 15 bp, Homo sapiens
tcttcaagtgtaacc

SEQ ID NO: 194587 - DNA, 15 bp, Homo sapiens
ctcttcaagtgtaac

SEQ ID NO: 194588 - DNA, 15 bp, Homo sapiens
gctcttcaagtgtaa

SEQ ID NO: 194589 - DNA, 15 bp, Homo sapiens
tgctcttcaagtgta

SEQ ID NO: 194590 - DNA, 15 bp, Homo sapiens
ctgctcttcaagtgt

SEQ ID NO: 194591 - DNA, 15 bp, Homo sapiens
actgctcttcaagtg

SEQ ID NO: 194592 - DNA, 15 bp, Homo sapiens
cactgctcttcaagt

SEQ ID NO: 194593 - DNA, 15 bp, Homo sapiens
tcactgctcttcaag

SEQ ID NO: 194594 - DNA, 15 bp, Homo sapiens
ttcactgctcttcaa

SEQ ID NO: 194595 - DNA, 15 bp, Homo sapiens
tttcactgctcttca

SEQ ID NO: 194596 - DNA, 15 bp, Homo sapiens
gtttcactgctcttc

SEQ ID NO: 194597 - DNA, 15 bp, Homo sapiens
tgtttcactgctctt

SEQ ID NO: 194598 - DNA, 15 bp, Homo sapiens
ctgtttcactgctct

SEQ ID NO: 194599 - DNA, 15 bp, Homo sapiens
tctgtttcactgctc

SEQ ID NO: 194600 - DNA, 15 bp, Homo sapiens
ttctgtttcactgct

SEQ ID NO: 194601 - DNA, 15 bp, Homo sapiens
gttctgtttcactgc

SEQ ID NO: 194602 - DNA, 15 bp, Homo sapiens
agttctgtttcactg

SEQ ID NO: 194603 - DNA, 15 bp, Homo sapiens
cagttctgtttcact

SEQ ID NO: 194604 - DNA, 15 bp, Homo sapiens
ccagttctgtttcac

SEQ ID NO: 194605 - DNA, 15 bp, Homo sapiens
cccagttctgtttca

SEQ ID NO: 194606 - DNA, 15 bp, Homo sapiens
acccagttctgtttc

SEQ ID NO: 194607 - DNA, 15 bp, Homo sapiens
aacccagttctgttt

SEQ ID NO: 194608 - DNA, 15 bp, Homo sapiens
gaacccagttctgtt

SEQ ID NO: 194609 - DNA, 15 bp, Homo sapiens
ggaacccagttctgt

SEQ ID NO: 194610 - DNA, 15 bp, Homo sapiens
tggaacccagttctg

SEQ ID NO: 194611 - DNA, 15 bp, Homo sapiens
ttggaacccagttct

SEQ ID NO: 194612 - DNA, 15 bp, Homo sapiens
attggaacccagttc

SEQ ID NO: 194613 - DNA, 15 bp, Homo sapiens
gattggaacccagtt

SEQ ID NO: 194614 - DNA, 15 bp, Homo sapiens
ggattggaacccagt

SEQ ID NO: 194615 - DNA, 15 bp, Homo sapiens
aggattggaacccag

SEQ ID NO: 194616 - DNA, 15 bp, Homo sapiens
caggattggaaccca

SEQ ID NO: 194617 - DNA, 15 bp, Homo sapiens
gcaggattggaaccc

SEQ ID NO: 194618 - DNA, 15 bp, Homo sapiens
ggcaggattggaacc

SEQ ID NO: 194619 - DNA, 15 bp, Homo sapiens
tggcaggattggaac

SEQ ID NO: 194620 - DNA, 15 bp, Homo sapiens
ctggcaggattggaa

SEQ ID NO: 194621 - DNA, 15 bp, Homo sapiens
gctggcaggattgga

SEQ ID NO: 194622 - DNA, 15 bp, Homo sapiens
agctggcaggattgg

SEQ ID NO: 194623 - DNA, 15 bp, Homo sapiens
cagctggcaggattg

SEQ ID NO: 194624 - DNA, 15 bp, Homo sapiens
gcagctggcaggatt

SEQ ID NO: 194625 - DNA, 15 bp, Homo sapiens
tgcagctggcaggat

SEQ ID NO: 194626 - DNA, 15 bp, Homo sapiens
gtgcagctggcagga

SEQ ID NO: 194627 - DNA, 15 bp, Homo sapiens
tgtgcagctggcagg

SEQ ID NO: 194628 - DNA, 15 bp, Homo sapiens
ctgtgcagctggcag

SEQ ID NO: 194629 - DNA, 15 bp, Homo sapiens
tctgtgcagctggca

SEQ ID NO: 194630 - DNA, 15 bp, Homo sapiens
gtctgtgcagctggc

SEQ ID NO: 194631 - DNA, 15 bp, Homo sapiens
tgtctgtgcagctgg

SEQ ID NO: 194632 - DNA, 15 bp, Homo sapiens
gtgtctgtgcagctg

SEQ ID NO: 194633 - DNA, 15 bp, Homo sapiens
ggtgtctgtgcagct

SEQ ID NO: 194634 - DNA, 15 bp, Homo sapiens
tggtgtctgtgcagc

SEQ ID NO: 194635 - DNA, 15 bp, Homo sapiens
atggtgtctgtgcag

SEQ ID NO: 194636 - DNA, 15 bp, Homo sapiens
tatggtgtctgtgca

SEQ ID NO: 194637 - DNA, 15 bp, Homo sapiens
atatggtgtctgtgc

SEQ ID NO: 194638 - DNA, 15 bp, Homo sapiens
gatatggtgtctgtg

SEQ ID NO: 194639 - DNA, 15 bp, Homo sapiens
agatatggtgtctgt

SEQ ID NO: 194640 - DNA, 15 bp, Homo sapiens
cagatatggtgtctg

SEQ ID NO: 194641 - DNA, 15 bp, Homo sapiens
ccagatatggtgtct

SEQ ID NO: 194642 - DNA, 15 bp, Homo sapiens
tccagatatggtgtc

SEQ ID NO: 194643 - DNA, 15 bp, Homo sapiens
ctccagatatggtgt

SEQ ID NO: 194644 - DNA, 15 bp, Homo sapiens
cctccagatatggtg

SEQ ID NO: 194645 - DNA, 15 bp, Homo sapiens
ccctccagatatggt

SEQ ID NO: 194646 - DNA, 15 bp, Homo sapiens
accctccagatatgg

SEQ ID NO: 194647 - DNA, 15 bp, Homo sapiens
caccctccagatatg

SEQ ID NO: 194648 - DNA, 15 bp, Homo sapiens
tcaccctccagatat

SEQ ID NO: 194649 - DNA, 15 bp, Homo sapiens
atcaccctccagata

SEQ ID NO: 194650 - DNA, 15 bp, Homo sapiens
catcaccctccagat

SEQ ID NO: 194651 - DNA, 15 bp, Homo sapiens
ccatcaccctccaga

SEQ ID NO: 194652 - DNA, 15 bp, Homo sapiens
cccatcaccctccag

SEQ ID NO: 194653 - DNA, 15 bp, Homo sapiens
ccccatcaccctcca

SEQ ID NO: 194654 - DNA, 15 bp, Homo sapiens
gccccatcaccctcc

SEQ ID NO: 194655 - DNA, 15 bp, Homo sapiens
tgccccatcaccctc

SEQ ID NO: 194656 - DNA, 15 bp, Homo sapiens
ttgccccatcaccct

SEQ ID NO: 194657 - DNA, 15 bp, Homo sapiens
cttgccccatcaccc

SEQ ID NO: 194658 - DNA, 15 bp, Homo sapiens
ccttgccccatcacc

SEQ ID NO: 194659 - DNA, 15 bp, Homo sapiens
cccttgccccatcac

SEQ ID NO: 194660 - DNA, 15 bp, Homo sapiens
tcccttgccccatca

SEQ ID NO: 194661 - DNA, 15 bp, Homo sapiens
gtcccttgccccatc

SEQ ID NO: 194662 - DNA, 15 bp, Homo sapiens
tgtcccttgccccat

SEQ ID NO: 194663 - DNA, 15 bp, Homo sapiens
atgtcccttgcccca

SEQ ID NO: 194664 - DNA, 15 bp, Homo sapiens
catgtcccttgcccc

SEQ ID NO: 194665 - DNA, 15 bp, Homo sapiens
gcatgtcccttgccc

SEQ ID NO: 194666 - DNA, 15 bp, Homo sapiens
agcatgtcccttgcc

SEQ ID NO: 194667 - DNA, 15 bp, Homo sapiens
gagcatgtcccttgc

SEQ ID NO: 194668 - DNA, 15 bp, Homo sapiens
tgagcatgtcccttg

SEQ ID NO: 194669 - DNA, 15 bp, Homo sapiens
gtgagcatgtccctt

SEQ ID NO: 194670 - DNA, 15 bp, Homo sapiens
agtgagcatgtccct

SEQ ID NO: 194671 - DNA, 15 bp, Homo sapiens
gagtgagcatgtccc

SEQ ID NO: 194672 - DNA, 15 bp, Homo sapiens
agagtgagcatgtcc

SEQ ID NO: 194673 - DNA, 15 bp, Homo sapiens
gagagtgagcatgtc

SEQ ID NO: 194674 - DNA, 15 bp, Homo sapiens
ggagagtgagcatgt

SEQ ID NO: 194675 - DNA, 15 bp, Homo sapiens
gggagagtgagcatg

SEQ ID NO: 194676 - DNA, 15 bp, Homo sapiens
agggagagtgagcat

SEQ ID NO: 194677 - DNA, 15 bp, Homo sapiens
aagggagagtgagca

SEQ ID NO: 194678 - DNA, 15 bp, Homo sapiens
aaagggagagtgagc

SEQ ID NO: 194679 - DNA, 15 bp, Homo sapiens
gaaagggagagtgag

SEQ ID NO: 194680 - DNA, 15 bp, Homo sapiens
ggaaagggagagtga

SEQ ID NO: 194681 - DNA, 15 bp, Homo sapiens
tggaaagggagagtg

SEQ ID NO: 194682 - DNA, 15 bp, Homo sapiens
ctggaaagggagagt

SEQ ID NO: 194683 - DNA, 15 bp, Homo sapiens
tctggaaagggagag

SEQ ID NO: 194684 - DNA, 15 bp, Homo sapiens
ttctggaaagggaga

SEQ ID NO: 194685 - DNA, 15 bp, Homo sapiens
cttctggaaagggag

SEQ ID NO: 194686 - DNA, 15 bp, Homo sapiens
tcttctggaaaggga

SEQ ID NO: 194687 - DNA, 15 bp, Homo sapiens
ctcttctggaaaggg

SEQ ID NO: 194688 - DNA, 15 bp, Homo sapiens
tctcttctggaaagg

SEQ ID NO: 194689 - DNA, 15 bp, Homo sapiens
atctcttctggaaag

SEQ ID NO: 194690 - DNA, 15 bp, Homo sapiens
tatctcttctggaaa

SEQ ID NO: 194691 - DNA, 15 bp, Homo sapiens
ttatctcttctggaa

SEQ ID NO: 194692 - DNA, 15 bp, Homo sapiens
tttatctcttctgga

SEQ ID NO: 194693 - DNA, 15 bp, Homo sapiens
ctttatctcttctgg

SEQ ID NO: 194694 - DNA, 15 bp, Homo sapiens
gctttatctcttctg

SEQ ID NO: 194695 - DNA, 15 bp, Homo sapiens
ggctttatctcttct

SEQ ID NO: 194696 - DNA, 15 bp, Homo sapiens
tggctttatctcttc

SEQ ID NO: 194697 - DNA, 15 bp, Homo sapiens
atggctttatctctt

SEQ ID NO: 194698 - DNA, 15 bp, Homo sapiens
tatggctttatctct

SEQ ID NO: 194699 - DNA, 15 bp, Homo sapiens
atatggctttatctc

SEQ ID NO: 194700 - DNA, 15 bp, Homo sapiens
catatggctttatct

SEQ ID NO: 194701 - DNA, 15 bp, Homo sapiens
ccatatggctttatc

SEQ ID NO: 194702 - DNA, 15 bp, Homo sapiens
cccatatggctttat

SEQ ID NO: 194703 - DNA, 15 bp, Homo sapiens
gcccatatggcttta

SEQ ID NO: 194704 - DNA, 15 bp, Homo sapiens
tgcccatatggcttt

SEQ ID NO: 194705 - DNA, 15 bp, Homo sapiens
ttgcccatatggctt

SEQ ID NO: 194706 - DNA, 15 bp, Homo sapiens
gttgcccatatggct

SEQ ID NO: 194707 - DNA, 15 bp, Homo sapiens
ggttgcccatatggc

SEQ ID NO: 194708 - DNA, 15 bp, Homo sapiens
aggttgcccatatgg

SEQ ID NO: 194709 - DNA, 15 bp, Homo sapiens
caggttgcccatatg

SEQ ID NO: 194710 - DNA, 15 bp, Homo sapiens
gcaggttgcccatat

SEQ ID NO: 194711 - DNA, 15 bp, Homo sapiens
agcaggttgcccata

SEQ ID NO: 194712 - DNA, 15 bp, Homo sapiens
tagcaggttgcccat

SEQ ID NO: 194713 - DNA, 15 bp, Homo sapiens
atagcaggttgccca

SEQ ID NO: 194714 - DNA, 15 bp, Homo sapiens
gatagcaggttgccc

SEQ ID NO: 194715 - DNA, 15 bp, Homo sapiens
tgatagcaggttgcc

SEQ ID NO: 194716 - DNA, 15 bp, Homo sapiens
gtgatagcaggttgc

SEQ ID NO: 194717 - DNA, 15 bp, Homo sapiens
agtgatagcaggttg

SEQ ID NO: 194718 - DNA, 15 bp, Homo sapiens
cagtgatagcaggtt

SEQ ID NO: 194719 - DNA, 15 bp, Homo sapiens
acagtgatagcaggt

SEQ ID NO: 194720 - DNA, 15 bp, Homo sapiens
cacagtgatagcagg

SEQ ID NO: 194721 - DNA, 15 bp, Homo sapiens
tcacagtgatagcag

SEQ ID NO: 194722 - DNA, 15 bp, Homo sapiens
ttcacagtgatagca

SEQ ID NO: 194723 - DNA, 15 bp, Homo sapiens
tttcacagtgatagc

SEQ ID NO: 194724 - DNA, 15 bp, Homo sapiens
ttttcacagtgatag

SEQ ID NO: 194725 - DNA, 15 bp, Homo sapiens
cttttcacagtgata

SEQ ID NO: 194726 - DNA, 15 bp, Homo sapiens
acttttcacagtgat

SEQ ID NO: 194727 - DNA, 15 bp, Homo sapiens
cacttttcacagtga

SEQ ID NO: 194728 - DNA, 15 bp, Homo sapiens
tcacttttcacagtg

SEQ ID NO: 194729 - DNA, 15 bp, Homo sapiens
ctcacttttcacagt

SEQ ID NO: 194730 - DNA, 15 bp, Homo sapiens
actcacttttcacag

SEQ ID NO: 194731 - DNA, 15 bp, Homo sapiens
cactcacttttcaca

SEQ ID NO: 194732 - DNA, 15 bp, Homo sapiens
ccactcacttttcac

SEQ ID NO: 194733 - DNA, 15 bp, Homo sapiens
tccactcacttttca

SEQ ID NO: 194734 - DNA, 15 bp, Homo sapiens
ttccactcacttttc

SEQ ID NO: 194735 - DNA, 15 bp, Homo sapiens
attccactcactttt

SEQ ID NO: 194736 - DNA, 15 bp, Homo sapiens
tattccactcacttt

SEQ ID NO: 194737 - DNA, 15 bp, Homo sapiens
ttattccactcactt

SEQ ID NO: 194738 - DNA, 15 bp, Homo sapiens
tttattccactcact

SEQ ID NO: 194739 - DNA, 15 bp, Homo sapiens
atttattccactcac

SEQ ID NO: 194740 - DNA, 15 bp, Homo sapiens
aatttattccactca

SEQ ID NO: 194741 - DNA, 15 bp, Homo sapiens
caatttattccactc

SEQ ID NO: 194742 - DNA, 15 bp, Homo sapiens
acaatttattccact

SEQ ID NO: 194743 - DNA, 15 bp, Homo sapiens
tacaatttattccac

SEQ ID NO: 194744 - DNA, 15 bp, Homo sapiens
atacaatttattcca

SEQ ID NO: 194745 - DNA, 15 bp, Homo sapiens
tatacaatttattcc

SEQ ID NO: 194746 - DNA, 15 bp, Homo sapiens
ctatacaatttattc

SEQ ID NO: 194747 - DNA, 15 bp, Homo sapiens
actatacaatttatt

SEQ ID NO: 194748 - DNA, 15 bp, Homo sapiens
cactatacaatttat

SEQ ID NO: 194749 - DNA, 15 bp, Homo sapiens
tcactatacaattta

SEQ ID NO: 194750 - DNA, 15 bp, Homo sapiens
ctcactatacaattt

SEQ ID NO: 194751 - DNA, 15 bp, Homo sapiens
actcactatacaatt

SEQ ID NO: 194752 - DNA, 15 bp, Homo sapiens
cactcactatacaat

SEQ ID NO: 194753 - DNA, 15 bp, Homo sapiens
tcactcactatacaa

SEQ ID NO: 194754 - DNA, 15 bp, Homo sapiens
ttcactcactataca

SEQ ID NO: 194755 - DNA, 15 bp, Homo sapiens
cttcactcactatac

SEQ ID NO: 194756 - DNA, 15 bp, Homo sapiens
acttcactcactata

SEQ ID NO: 194757 - DNA, 15 bp, Homo sapiens
cacttcactcactat

SEQ ID NO: 194758 - DNA, 15 bp, Homo sapiens
acacttcactcacta

SEQ ID NO: 194759 - DNA, 15 bp, Homo sapiens
tacacttcactcact

SEQ ID NO: 194760 - DNA, 15 bp, Homo sapiens
ttacacttcactcac

SEQ ID NO: 194761 - DNA, 15 bp, Homo sapiens
cttacacttcactca

SEQ ID NO: 194762 - DNA, 15 bp, Homo sapiens
gcttacacttcactc

SEQ ID NO: 194763 - DNA, 15 bp, Homo sapiens
agcttacacttcact

SEQ ID NO: 194764 - DNA, 15 bp, Homo sapiens
gagcttacacttcac

SEQ ID NO: 194765 - DNA, 15 bp, Homo sapiens
tgagcttacacttca

SEQ ID NO: 194766 - DNA, 15 bp, Homo sapiens
atgagcttacacttc

SEQ ID NO: 194767 - DNA, 15 bp, Homo sapiens
catgagcttacactt

SEQ ID NO: 194768 - DNA, 15 bp, Homo sapiens
ccatgagcttacact

SEQ ID NO: 194769 - DNA, 15 bp, Homo sapiens
gccatgagcttacac

SEQ ID NO: 194770 - DNA, 15 bp, Homo sapiens
cgccatgagcttaca

SEQ ID NO: 194771 - DNA, 15 bp, Homo sapiens
ccgccatgagcttac

SEQ ID NO: 194772 - DNA, 15 bp, Homo sapiens
gccgccatgagctta

SEQ ID NO: 194773 - DNA, 15 bp, Homo sapiens
tgccgccatgagctt

SEQ ID NO: 194774 - DNA, 15 bp, Homo sapiens
ctgccgccatgagct

SEQ ID NO: 194775 - DNA, 15 bp, Homo sapiens
actgccgccatgagc

SEQ ID NO: 194776 - DNA, 15 bp, Homo sapiens
cactgccgccatgag

SEQ ID NO: 194777 - DNA, 15 bp, Homo sapiens
acactgccgccatga

SEQ ID NO: 194778 - DNA, 15 bp, Homo sapiens
tacactgccgccatg

SEQ ID NO: 194779 - DNA, 15 bp, Homo sapiens
ttacactgccgccat

SEQ ID NO: 194780 - DNA, 15 bp, Homo sapiens
cttacactgccgcca

SEQ ID NO: 194781 - DNA, 15 bp, Homo sapiens
tcttacactgccgcc

SEQ ID NO: 194782 - DNA, 15 bp, Homo sapiens
ttcttacactgccgc

SEQ ID NO: 194783 - DNA, 15 bp, Homo sapiens
tttcttacactgccg

SEQ ID NO: 194784 - DNA, 15 bp, Homo sapiens
gtttcttacactgcc

SEQ ID NO: 194785 - DNA, 15 bp, Homo sapiens
tgtttcttacactgc

SEQ ID NO: 194786 - DNA, 15 bp, Homo sapiens
gtgtttcttacactg

SEQ ID NO: 194787 - DNA, 15 bp, Homo sapiens
tgtgtttcttacact

SEQ ID NO: 194788 - DNA, 15 bp, Homo sapiens
atgtgtttcttacac

SEQ ID NO: 194789 - DNA, 15 bp, Homo sapiens
aatgtgtttcttaca

SEQ ID NO: 194790 - DNA, 15 bp, Homo sapiens
gaatgtgtttcttac

SEQ ID NO: 194791 - DNA, 15 bp, Homo sapiens
agaatgtgtttctta

SEQ ID NO: 194792 - DNA, 15 bp, Homo sapiens
aagaatgtgtttctt

SEQ ID NO: 194793 - DNA, 15 bp, Homo sapiens
caagaatgtgtttct

SEQ ID NO: 194794 - DNA, 15 bp, Homo sapiens
gcaagaatgtgtttc

SEQ ID NO: 194795 - DNA, 15 bp, Homo sapiens
ggcaagaatgtgttt

SEQ ID NO: 194796 - DNA, 15 bp, Homo sapiens
tggcaagaatgtgtt

SEQ ID NO: 194797 - DNA, 15 bp, Homo sapiens
ctggcaagaatgtgt

SEQ ID NO: 194798 - DNA, 15 bp, Homo sapiens
cctggcaagaatgtg

SEQ ID NO: 194799 - DNA, 15 bp, Homo sapiens
gcctggcaagaatgt

SEQ ID NO: 194800 - DNA, 15 bp, Homo sapiens
tgcctggcaagaatg

SEQ ID NO: 194801 - DNA, 15 bp, Homo sapiens
ctgcctggcaagaat

SEQ ID NO: 194802 - DNA, 15 bp, Homo sapiens
cctgcctggcaagaa

SEQ ID NO: 194803 - DNA, 15 bp, Homo sapiens
gcctgcctggcaaga

SEQ ID NO: 194804 - DNA, 15 bp, Homo sapiens
tgcctgcctggcaag

SEQ ID NO: 194805 - DNA, 15 bp, Homo sapiens
ctgcctgcctggcaa

SEQ ID NO: 194806 - DNA, 15 bp, Homo sapiens
tctgcctgcctggca

SEQ ID NO: 194807 - DNA, 15 bp, Homo sapiens
atctgcctgcctggc

SEQ ID NO: 194808 - DNA, 15 bp, Homo sapiens
tatctgcctgcctgg

SEQ ID NO: 194809 - DNA, 15 bp, Homo sapiens
ttatctgcctgcctg

SEQ ID NO: 194810 - DNA, 15 bp, Homo sapiens
gttatctgcctgcct

SEQ ID NO: 194811 - DNA, 15 bp, Homo sapiens
ggttatctgcctgcc

SEQ ID NO: 194812 - DNA, 15 bp, Homo sapiens
tggttatctgcctgc

SEQ ID NO: 194813 - DNA, 15 bp, Homo sapiens
ttggttatctgcctg

SEQ ID NO: 194814 - DNA, 15 bp, Homo sapiens
cttggttatctgcct

SEQ ID NO: 194815 - DNA, 15 bp, Homo sapiens
tcttggttatctgcc

SEQ ID NO: 194816 - DNA, 15 bp, Homo sapiens
ttcttggttatctgc

SEQ ID NO: 194817 - DNA, 15 bp, Homo sapiens
tttcttggttatctg

SEQ ID NO: 194818 - DNA, 15 bp, Homo sapiens
ctttcttggttatct

SEQ ID NO: 194819 - DNA, 15 bp, Homo sapiens
cctttcttggttatc

SEQ ID NO: 194820 - DNA, 15 bp, Homo sapiens
tcctttcttggttat

SEQ ID NO: 194821 - DNA, 15 bp, Homo sapiens
gtcctttcttggtta

SEQ ID NO: 194822 - DNA, 15 bp, Homo sapiens
tgtcctttcttggtt

SEQ ID NO: 194823 - DNA, 15 bp, Homo sapiens
ttgtcctttcttggt

SEQ ID NO: 194824 - DNA, 15 bp, Homo sapiens
attgtcctttcttgg

SEQ ID NO: 194825 - DNA, 15 bp, Homo sapiens
aattgtcctttcttg

SEQ ID NO: 194826 - DNA, 15 bp, Homo sapiens
caattgtcctttctt

SEQ ID NO: 194827 - DNA, 15 bp, Homo sapiens
ccaattgtcctttct

SEQ ID NO: 194828 - DNA, 15 bp, Homo sapiens
cccaattgtcctttc

SEQ ID NO: 194829 - DNA, 15 bp, Homo sapiens
tcccaattgtccttt

SEQ ID NO: 194830 - DNA, 15 bp, Homo sapiens
ttcccaattgtcctt

SEQ ID NO: 194831 - DNA, 15 bp, Homo sapiens
gttcccaattgtcct

SEQ ID NO: 194832 - DNA, 15 bp, Homo sapiens
tgttcccaattgtcc

SEQ ID NO: 194833 - DNA, 15 bp, Homo sapiens
gtgttcccaattgtc

SEQ ID NO: 194834 - DNA, 15 bp, Homo sapiens
cgtgttcccaattgt

SEQ ID NO: 194835 - DNA, 15 bp, Homo sapiens
acgtgttcccaattg

SEQ ID NO: 194836 - DNA, 15 bp, Homo sapiens
gacgtgttcccaatt

SEQ ID NO: 194837 - DNA, 15 bp, Homo sapiens
tgacgtgttcccaat

SEQ ID NO: 194838 - DNA, 15 bp, Homo sapiens
ctgacgtgttcccaa

SEQ ID NO: 194839 - DNA, 15 bp, Homo sapiens
gctgacgtgttccca

SEQ ID NO: 194840 - DNA, 15 bp, Homo sapiens
agctgacgtgttccc

SEQ ID NO: 194841 - DNA, 15 bp, Homo sapiens
cagctgacgtgttcc

SEQ ID NO: 194842 - DNA, 15 bp, Homo sapiens
tcagctgacgtgttc

SEQ ID NO: 194843 - DNA, 15 bp, Homo sapiens
atcagctgacgtgtt

SEQ ID NO: 194844 - DNA, 15 bp, Homo sapiens
catcagctgacgtgt

SEQ ID NO: 194845 - DNA, 15 bp, Homo sapiens
ccatcagctgacgtg

SEQ ID NO: 194846 - DNA, 15 bp, Homo sapiens
tccatcagctgacgt

SEQ ID NO: 194847 - DNA, 15 bp, Homo sapiens
ctccatcagctgacg

SEQ ID NO: 194848 - DNA, 15 bp, Homo sapiens
tctccatcagctgac

SEQ ID NO: 194849 - DNA, 15 bp, Homo sapiens
atctccatcagctga

SEQ ID NO: 194850 - DNA, 15 bp, Homo sapiens
catctccatcagctg

SEQ ID NO: 194851 - DNA, 15 bp, Homo sapiens
gcatctccatcagct

SEQ ID NO: 194852 - DNA, 15 bp, Homo sapiens
agcatctccatcagc

SEQ ID NO: 194853 - DNA, 15 bp, Homo sapiens
tagcatctccatcag

SEQ ID NO: 194854 - DNA, 15 bp, Homo sapiens
gtagcatctccatca

SEQ ID NO: 194855 - DNA, 15 bp, Homo sapiens
ggtagcatctccatc

SEQ ID NO: 194856 - DNA, 15 bp, Homo sapiens
gggtagcatctccat

SEQ ID NO: 194857 - DNA, 15 bp, Homo sapiens
tgggtagcatctcca

SEQ ID NO: 194858 - DNA, 15 bp, Homo sapiens
ttgggtagcatctcc

SEQ ID NO: 194859 - DNA, 15 bp, Homo sapiens
attgggtagcatctc

SEQ ID NO: 194860 - DNA, 15 bp, Homo sapiens
aattgggtagcatct

SEQ ID NO: 194861 - DNA, 15 bp, Homo sapiens
caattgggtagcatc

SEQ ID NO: 194862 - DNA, 15 bp, Homo sapiens
acaattgggtagcat

SEQ ID NO: 194863 - DNA, 15 bp, Homo sapiens
tacaattgggtagca

SEQ ID NO: 194864 - DNA, 15 bp, Homo sapiens
atacaattgggtagc

SEQ ID NO: 194865 - DNA, 15 bp, Homo sapiens
gatacaattgggtag

SEQ ID NO: 194866 - DNA, 15 bp, Homo sapiens
ggatacaattgggta

SEQ ID NO: 194867 - DNA, 15 bp, Homo sapiens
gggatacaattgggt

SEQ ID NO: 194868 - DNA, 15 bp, Homo sapiens
agggatacaattggg

SEQ ID NO: 194869 - DNA, 15 bp, Homo sapiens
tagggatacaattgg

SEQ ID NO: 194870 - DNA, 15 bp, Homo sapiens
atagggatacaattg

SEQ ID NO: 194871 - DNA, 15 bp, Homo sapiens
catagggatacaatt

SEQ ID NO: 194872 - DNA, 15 bp, Homo sapiens
acatagggatacaat

SEQ ID NO: 194873 - DNA, 15 bp, Homo sapiens
cacatagggatacaa

SEQ ID NO: 194874 - DNA, 15 bp, Homo sapiens
ccacatagggataca

SEQ ID NO: 194875 - DNA, 15 bp, Homo sapiens
tccacatagggatac

SEQ ID NO: 194876 - DNA, 15 bp, Homo sapiens
ctccacatagggata

SEQ ID NO: 194877 - DNA, 15 bp, Homo sapiens
tctccacatagggat

SEQ ID NO: 194878 - DNA, 15 bp, Homo sapiens
ctctccacataggga

SEQ ID NO: 194879 - DNA, 15 bp, Homo sapiens
tctctccacataggg

SEQ ID NO: 194880 - DNA, 15 bp, Homo sapiens
gtctctccacatagg

SEQ ID NO: 194881 - DNA, 15 bp, Homo sapiens
ggtctctccacatag

SEQ ID NO: 194882 - DNA, 15 bp, Homo sapiens
gggtctctccacata

SEQ ID NO: 194883 - DNA, 15 bp, Homo sapiens
agggtctctccacat

SEQ ID NO: 194884 - DNA, 15 bp, Homo sapiens
gagggtctctccaca

SEQ ID NO: 194885 - DNA, 15 bp, Homo sapiens
ggagggtctctccac

SEQ ID NO: 194886 - DNA, 15 bp, Homo sapiens
tggagggtctctcca

SEQ ID NO: 194887 - DNA, 15 bp, Homo sapiens
ctggagggtctctcc

SEQ ID NO: 194888 - DNA, 15 bp, Homo sapiens
gctggagggtctctc

SEQ ID NO: 194889 - DNA, 15 bp, Homo sapiens
tgctggagggtctct

SEQ ID NO: 194890 - DNA, 15 bp, Homo sapiens
gtgctggagggtctc

SEQ ID NO: 194891 - DNA, 15 bp, Homo sapiens
ggtgctggagggtct

SEQ ID NO: 194892 - DNA, 15 bp, Homo sapiens
tggtgctggagggtc

SEQ ID NO: 194893 - DNA, 15 bp, Homo sapiens
atggtgctggagggt

SEQ ID NO: 194894 - DNA, 15 bp, Homo sapiens
tatggtgctggaggg

SEQ ID NO: 194895 - DNA, 15 bp, Homo sapiens
atatggtgctggagg

SEQ ID NO: 194896 - DNA, 15 bp, Homo sapiens
gatatggtgctggag

SEQ ID NO: 194897 - DNA, 15 bp, Homo sapiens
ggatatggtgctgga

SEQ ID NO: 194898 - DNA, 15 bp, Homo sapiens
gggatatggtgctgg

SEQ ID NO: 194899 - DNA, 15 bp, Homo sapiens
tgggatatggtgctg

SEQ ID NO: 194900 - DNA, 15 bp, Homo sapiens
ctgggatatggtgct

SEQ ID NO: 194901 - DNA, 15 bp, Homo sapiens
gctgggatatggtgc

SEQ ID NO: 194902 - DNA, 15 bp, Homo sapiens
ggctgggatatggtg

SEQ ID NO: 194903 - DNA, 15 bp, Homo sapiens
tggctgggatatggt

SEQ ID NO: 194904 - DNA, 15 bp, Homo sapiens
gtggctgggatatgg

SEQ ID NO: 194905 - DNA, 15 bp, Homo sapiens
ggtggctgggatatg

SEQ ID NO: 194906 - DNA, 15 bp, Homo sapiens
aggtggctgggatat

SEQ ID NO: 194907 - DNA, 15 bp, Homo sapiens
caggtggctgggata

SEQ ID NO: 194908 - DNA, 15 bp, Homo sapiens
gcaggtggctgggat

SEQ ID NO: 194909 - DNA, 15 bp, Homo sapiens
cgcaggtggctggga

SEQ ID NO: 194910 - DNA, 15 bp, Homo sapiens
gcgcaggtggctggg

SEQ ID NO: 194911 - DNA, 15 bp, Homo sapiens
ggcgcaggtggctgg

SEQ ID NO: 194912 - DNA, 15 bp, Homo sapiens
gggcgcaggtggctg

SEQ ID NO: 194913 - DNA, 15 bp, Homo sapiens
agggcgcaggtggct

SEQ ID NO: 194914 - DNA, 15 bp, Homo sapiens
cagggcgcaggtggc

SEQ ID NO: 194915 - DNA, 15 bp, Homo sapiens
gcagggcgcaggtgg

SEQ ID NO: 194916 - DNA, 15 bp, Homo sapiens
ggcagggcgcaggtg

SEQ ID NO: 194917 - DNA, 15 bp, Homo sapiens
gggcagggcgcaggt

SEQ ID NO: 194918 - DNA, 15 bp, Homo sapiens
ggggcagggcgcagg

SEQ ID NO: 194919 - DNA, 15 bp, Homo sapiens
gggggcagggcgcag

SEQ ID NO: 194920 - DNA, 15 bp, Homo sapiens
ggggggcagggcgca

SEQ ID NO: 194921 - DNA, 15 bp, Homo sapiens
tggggggcagggcgc

SEQ ID NO: 194922 - DNA, 15 bp, Homo sapiens
atggggggcagggcg

SEQ ID NO: 194923 - DNA, 15 bp, Homo sapiens
aatggggggcagggc

SEQ ID NO: 194924 - DNA, 15 bp, Homo sapiens
caatggggggcaggg

SEQ ID NO: 194925 - DNA, 15 bp, Homo sapiens
ccaatggggggcagg

SEQ ID NO: 194926 - DNA, 15 bp, Homo sapiens
tccaatggggggcag

SEQ ID NO: 194927 - DNA, 15 bp, Homo sapiens
gtccaatggggggca

SEQ ID NO: 194928 - DNA, 15 bp, Homo sapiens
ggtccaatggggggc

SEQ ID NO: 194929 - DNA, 15 bp, Homo sapiens
gggtccaatgggggg

SEQ ID NO: 194930 - DNA, 15 bp, Homo sapiens
ggggtccaatggggg

SEQ ID NO: 194931 - DNA, 15 bp, Homo sapiens
gggggtccaatgggg

SEQ ID NO: 194932 - DNA, 15 bp, Homo sapiens
agggggtccaatggg

SEQ ID NO: 194933 - DNA, 15 bp, Homo sapiens
gagggggtccaatgg

SEQ ID NO: 194934 - DNA, 15 bp, Homo sapiens
agagggggtccaatg

SEQ ID NO: 194935 - DNA, 15 bp, Homo sapiens
aagagggggtccaat

SEQ ID NO: 194936 - DNA, 15 bp, Homo sapiens
gaagagggggtccaa

SEQ ID NO: 194937 - DNA, 15 bp, Homo sapiens
tgaagagggggtcca

SEQ ID NO: 194938 - DNA, 15 bp, Homo sapiens
gtgaagagggggtcc

SEQ ID NO: 194939 - DNA, 15 bp, Homo sapiens
agtgaagagggggtc

SEQ ID NO: 194940 - DNA, 15 bp, Homo sapiens
cagtgaagagggggt

SEQ ID NO: 194941 - DNA, 15 bp, Homo sapiens
acagtgaagaggggg

SEQ ID NO: 194942 - DNA, 15 bp, Homo sapiens
aacagtgaagagggg

SEQ ID NO: 194943 - DNA, 15 bp, Homo sapiens
aaacagtgaagaggg

SEQ ID NO: 194944 - DNA, 15 bp, Homo sapiens
caaacagtgaagagg

SEQ ID NO: 194945 - DNA, 15 bp, Homo sapiens
gcaaacagtgaagag

SEQ ID NO: 194946 - DNA, 15 bp, Homo sapiens
ggcaaacagtgaaga

SEQ ID NO: 194947 - DNA, 15 bp, Homo sapiens
tggcaaacagtgaag

SEQ ID NO: 194948 - DNA, 15 bp, Homo sapiens
ttggcaaacagtgaa

SEQ ID NO: 194949 - DNA, 15 bp, Homo sapiens
cttggcaaacagtga

SEQ ID NO: 194950 - DNA, 15 bp, Homo sapiens
gcttggcaaacagtg

SEQ ID NO: 194951 - DNA, 15 bp, Homo sapiens
agcttggcaaacagt

SEQ ID NO: 194952 - DNA, 15 bp, Homo sapiens
cagcttggcaaacag

SEQ ID NO: 194953 - DNA, 15 bp, Homo sapiens
tcagcttggcaaaca

SEQ ID NO: 194954 - DNA, 15 bp, Homo sapiens
ttcagcttggcaaac

SEQ ID NO: 194955 - DNA, 15 bp, Homo sapiens
gttcagcttggcaaa

SEQ ID NO: 194956 - DNA, 15 bp, Homo sapiens
tgttcagcttggcaa

SEQ ID NO: 194957 - DNA, 15 bp, Homo sapiens
atgttcagcttggca

SEQ ID NO: 194958 - DNA, 15 bp, Homo sapiens
aatgttcagcttggc

SEQ ID NO: 194959 - DNA, 15 bp, Homo sapiens
caatgttcagcttgg

SEQ ID NO: 194960 - DNA, 15 bp, Homo sapiens
ccaatgttcagcttg

SEQ ID NO: 194961 - DNA, 15 bp, Homo sapiens
tccaatgttcagctt

SEQ ID NO: 194962 - DNA, 15 bp, Homo sapiens
gtccaatgttcagct

SEQ ID NO: 194963 - DNA, 15 bp, Homo sapiens
tgtccaatgttcagc

SEQ ID NO: 194964 - DNA, 15 bp, Homo sapiens
atgtccaatgttcag

SEQ ID NO: 194965 - DNA, 15 bp, Homo sapiens
catgtccaatgttca

SEQ ID NO: 194966 - DNA, 15 bp, Homo sapiens
acatgtccaatgttc

SEQ ID NO: 194967 - DNA, 15 bp, Homo sapiens
gacatgtccaatgtt

SEQ ID NO: 194968 - DNA, 15 bp, Homo sapiens
tgacatgtccaatgt

SEQ ID NO: 194969 - DNA, 15 bp, Homo sapiens
gtgacatgtccaatg

SEQ ID NO: 194970 - DNA, 15 bp, Homo sapiens
tgtgacatgtccaat

SEQ ID NO: 194971 - DNA, 15 bp, Homo sapiens
atgtgacatgtccaa

SEQ ID NO: 194972 - DNA, 15 bp, Homo sapiens
catgtgacatgtcca

SEQ ID NO: 194973 - DNA, 15 bp, Homo sapiens
acatgtgacatgtcc

SEQ ID NO: 194974 - DNA, 15 bp, Homo sapiens
aacatgtgacatgtc

SEQ ID NO: 194975 - DNA, 15 bp, Homo sapiens
gaacatgtgacatgt

SEQ ID NO: 194976 - DNA, 15 bp, Homo sapiens
ggaacatgtgacatg

SEQ ID NO: 194977 - DNA, 15 bp, Homo sapiens
gggaacatgtgacat

SEQ ID NO: 194978 - DNA, 15 bp, Homo sapiens
agggaacatgtgaca

SEQ ID NO: 194979 - DNA, 15 bp, Homo sapiens
gagggaacatgtgac

SEQ ID NO: 194980 - DNA, 15 bp, Homo sapiens
ggagggaacatgtga

SEQ ID NO: 194981 - DNA, 15 bp, Homo sapiens
gggagggaacatgtg

SEQ ID NO: 194982 - DNA, 15 bp, Homo sapiens
agggagggaacatgt

SEQ ID NO: 194983 - DNA, 15 bp, Homo sapiens
gagggagggaacatg

SEQ ID NO: 194984 - DNA, 15 bp, Homo sapiens
tgagggagggaacat

SEQ ID NO: 194985 - DNA, 15 bp, Homo sapiens
ctgagggagggaaca

SEQ ID NO: 194986 - DNA, 15 bp, Homo sapiens
actgagggagggaac

SEQ ID NO: 194987 - DNA, 15 bp, Homo sapiens
cactgagggagggaa

SEQ ID NO: 194988 - DNA, 15 bp, Homo sapiens
gcactgagggaggga

SEQ ID NO: 194989 - DNA, 15 bp, Homo sapiens
ggcactgagggaggg

SEQ ID NO: 194990 - DNA, 15 bp, Homo sapiens
aggcactgagggagg

SEQ ID NO: 194991 - DNA, 15 bp, Homo sapiens
caggcactgagggag

SEQ ID NO: 194992 - DNA, 15 bp, Homo sapiens
tcaggcactgaggga

SEQ ID NO: 194993 - DNA, 15 bp, Homo sapiens
gtcaggcactgaggg

SEQ ID NO: 194994 - DNA, 15 bp, Homo sapiens
agtcaggcactgagg

SEQ ID NO: 194995 - DNA, 15 bp, Homo sapiens
aagtcaggcactgag

SEQ ID NO: 194996 - DNA, 15 bp, Homo sapiens
taagtcaggcactga

SEQ ID NO: 194997 - DNA, 15 bp, Homo sapiens
gtaagtcaggcactg

SEQ ID NO: 194998 - DNA, 15 bp, Homo sapiens
agtaagtcaggcact

SEQ ID NO: 194999 - DNA, 15 bp, Homo sapiens
tagtaagtcaggcac

SEQ ID NO: 195000 - DNA, 15 bp, Homo sapiens
ttagtaagtcaggca

SEQ ID NO: 195001 - DNA, 15 bp, Homo sapiens
tttagtaagtcaggc

SEQ ID NO: 195002 - DNA, 15 bp, Homo sapiens
gtttagtaagtcagg

SEQ ID NO: 195003 - DNA, 15 bp, Homo sapiens
tgtttagtaagtcag

SEQ ID NO: 195004 - DNA, 15 bp, Homo sapiens
ctgtttagtaagtca

SEQ ID NO: 195005 - DNA, 15 bp, Homo sapiens
tctgtttagtaagtc

SEQ ID NO: 195006 - DNA, 15 bp, Homo sapiens
ttctgtttagtaagt

SEQ ID NO: 195007 - DNA, 15 bp, Homo sapiens
tttctgtttagtaag

SEQ ID NO: 195008 - DNA, 15 bp, Homo sapiens
ttttctgtttagtaa

SEQ ID NO: 195009 - DNA, 15 bp, Homo sapiens
attttctgtttagta

SEQ ID NO: 195010 - DNA, 15 bp, Homo sapiens
cattttctgtttagt

SEQ ID NO: 195011 - DNA, 15 bp, Homo sapiens
gcattttctgtttag

SEQ ID NO: 195012 - DNA, 15 bp, Homo sapiens
ggcattttctgttta

SEQ ID NO: 195013 - DNA, 15 bp, Homo sapiens
gggcattttctgttt

SEQ ID NO: 195014 - DNA, 15 bp, Homo sapiens
tgggcattttctgtt

SEQ ID NO: 195015 - DNA, 15 bp, Homo sapiens
ctgggcattttctgt

SEQ ID NO: 195016 - DNA, 15 bp, Homo sapiens
actgggcattttctg

SEQ ID NO: 195017 - DNA, 15 bp, Homo sapiens
cactgggcattttct

SEQ ID NO: 195018 - DNA, 15 bp, Homo sapiens
tcactgggcattttc

SEQ ID NO: 195019 - DNA, 15 bp, Homo sapiens
ttcactgggcatttt

SEQ ID NO: 195020 - DNA, 15 bp, Homo sapiens
tttcactgggcattt

SEQ ID NO: 195021 - DNA, 15 bp, Homo sapiens
ttttcactgggcatt

SEQ ID NO: 195022 - DNA, 15 bp, Homo sapiens
gttttcactgggcat

SEQ ID NO: 195023 - DNA, 15 bp, Homo sapiens
agttttcactgggca

SEQ ID NO: 195024 - DNA, 15 bp, Homo sapiens
aagttttcactgggc

SEQ ID NO: 195025 - DNA, 15 bp, Homo sapiens
taagttttcactggg

SEQ ID NO: 195026 - DNA, 15 bp, Homo sapiens
ctaagttttcactgg

SEQ ID NO: 195027 - DNA, 15 bp, Homo sapiens
cctaagttttcactg

SEQ ID NO: 195028 - DNA, 15 bp, Homo sapiens
acctaagttttcact

SEQ ID NO: 195029 - DNA, 15 bp, Homo sapiens
tacctaagttttcac

SEQ ID NO: 195030 - DNA, 15 bp, Homo sapiens
ttacctaagttttca

SEQ ID NO: 195031 - DNA, 15 bp, Homo sapiens
cttacctaagttttc

SEQ ID NO: 195032 - DNA, 15 bp, Homo sapiens
tcttacctaagtttt

SEQ ID NO: 195033 - DNA, 15 bp, Homo sapiens
atcttacctaagttt

SEQ ID NO: 195034 - DNA, 15 bp, Homo sapiens
catcttacctaagtt

SEQ ID NO: 195035 - DNA, 15 bp, Homo sapiens
acatcttacctaagt

SEQ ID NO: 195036 - DNA, 15 bp, Homo sapiens
gacatcttacctaag

SEQ ID NO: 195037 - DNA, 15 bp, Homo sapiens
cgacatcttacctaa

SEQ ID NO: 195038 - DNA, 15 bp, Homo sapiens
gcgacatcttaccta

SEQ ID NO: 195039 - DNA, 15 bp, Homo sapiens
tgcgacatcttacct

SEQ ID NO: 195040 - DNA, 15 bp, Homo sapiens
gtgcgacatcttacc

SEQ ID NO: 195041 - DNA, 15 bp, Homo sapiens
tgtgcgacatcttac

SEQ ID NO: 195042 - DNA, 15 bp, Homo sapiens
ctgtgcgacatctta

SEQ ID NO: 195043 - DNA, 15 bp, Homo sapiens
actgtgcgacatctt

SEQ ID NO: 195044 - DNA, 15 bp, Homo sapiens
cactgtgcgacatct

SEQ ID NO: 195045 - DNA, 15 bp, Homo sapiens
acactgtgcgacatc

SEQ ID NO: 195046 - DNA, 15 bp, Homo sapiens
aacactgtgcgacat

SEQ ID NO: 195047 - DNA, 15 bp, Homo sapiens
aaacactgtgcgaca

SEQ ID NO: 195048 - DNA, 15 bp, Homo sapiens
caaacactgtgcgac

SEQ ID NO: 195049 - DNA, 15 bp, Homo sapiens
ccaaacactgtgcga

SEQ ID NO: 195050 - DNA, 15 bp, Homo sapiens
gccaaacactgtgcg

SEQ ID NO: 195051 - DNA, 15 bp, Homo sapiens
tgccaaacactgtgc

SEQ ID NO: 195052 - DNA, 15 bp, Homo sapiens
gtgccaaacactgtg

SEQ ID NO: 195053 - DNA, 15 bp, Homo sapiens
agtgccaaacactgt

SEQ ID NO: 195054 - DNA, 15 bp, Homo sapiens
aagtgccaaacactg

SEQ ID NO: 195055 - DNA, 15 bp, Homo sapiens
caagtgccaaacact

SEQ ID NO: 195056 - DNA, 15 bp, Homo sapiens
tcaagtgccaaacac

SEQ ID NO: 195057 - DNA, 15 bp, Homo sapiens
atcaagtgccaaaca

SEQ ID NO: 195058 - DNA, 15 bp, Homo sapiens
tatcaagtgccaaac

SEQ ID NO: 195059 - DNA, 15 bp, Homo sapiens
gtatcaagtgccaaa

SEQ ID NO: 195060 - DNA, 15 bp, Homo sapiens
ggtatcaagtgccaa

SEQ ID NO: 195061 - DNA, 15 bp, Homo sapiens
aggtatcaagtgcca

SEQ ID NO: 195062 - DNA, 15 bp, Homo sapiens
aaggtatcaagtgcc

SEQ ID NO: 195063 - DNA, 15 bp, Homo sapiens
caaggtatcaagtgc

SEQ ID NO: 195064 - DNA, 15 bp, Homo sapiens
acaaggtatcaagtg

SEQ ID NO: 195065 - DNA, 15 bp, Homo sapiens
aacaaggtatcaagt

SEQ ID NO: 195066 - DNA, 15 bp, Homo sapiens
caacaaggtatcaag

SEQ ID NO: 195067 - DNA, 15 bp, Homo sapiens
gcaacaaggtatcaa

SEQ ID NO: 195068 - DNA, 15 bp, Homo sapiens
agcaacaaggtatca

SEQ ID NO: 195069 - DNA, 15 bp, Homo sapiens
tagcaacaaggtatc

SEQ ID NO: 195070 - DNA, 15 bp, Homo sapiens
ttagcaacaaggtat

SEQ ID NO: 195071 - DNA, 15 bp, Homo sapiens
attagcaacaaggta

SEQ ID NO: 195072 - DNA, 15 bp, Homo sapiens
tattagcaacaaggt

SEQ ID NO: 195073 - DNA, 15 bp, Homo sapiens
atattagcaacaagg

SEQ ID NO: 195074 - DNA, 15 bp, Homo sapiens
catattagcaacaag

SEQ ID NO: 195075 - DNA, 15 bp, Homo sapiens
ccatattagcaacaa

SEQ ID NO: 195076 - DNA, 15 bp, Homo sapiens
accatattagcaaca

SEQ ID NO: 195077 - DNA, 15 bp, Homo sapiens
caccatattagcaac

SEQ ID NO: 195078 - DNA, 15 bp, Homo sapiens
ccaccatattagcaa

SEQ ID NO: 195079 - DNA, 15 bp, Homo sapiens
cccaccatattagca

SEQ ID NO: 195080 - DNA, 15 bp, Homo sapiens
ccccaccatattagc

SEQ ID NO: 195081 - DNA, 15 bp, Homo sapiens
tccccaccatattag

SEQ ID NO: 195082 - DNA, 15 bp, Homo sapiens
gtccccaccatatta

SEQ ID NO: 195083 - DNA, 15 bp, Homo sapiens
ggtccccaccatatt

SEQ ID NO: 195084 - DNA, 15 bp, Homo sapiens
gggtccccaccatat

SEQ ID NO: 195085 - DNA, 15 bp, Homo sapiens
ggggtccccaccata

SEQ ID NO: 195086 - DNA, 15 bp, Homo sapiens
aggggtccccaccat

SEQ ID NO: 195087 - DNA, 15 bp, Homo sapiens
aaggggtccccacca

SEQ ID NO: 195088 - DNA, 15 bp, Homo sapiens
gaaggggtccccacc

SEQ ID NO: 195089 - DNA, 15 bp, Homo sapiens
ggaaggggtccccac

SEQ ID NO: 195090 - DNA, 15 bp, Homo sapiens
tggaaggggtcccca

SEQ ID NO: 195091 - DNA, 15 bp, Homo sapiens
ctggaaggggtcccc

SEQ ID NO: 195092 - DNA, 15 bp, Homo sapiens
gctggaaggggtccc

SEQ ID NO: 195093 - DNA, 15 bp, Homo sapiens
tgctggaaggggtcc

SEQ ID NO: 195094 - DNA, 15 bp, Homo sapiens
gtgctggaaggggtc

SEQ ID NO: 195095 - DNA, 15 bp, Homo sapiens
agtgctggaaggggt

SEQ ID NO: 195096 - DNA, 15 bp, Homo sapiens
cagtgctggaagggg

SEQ ID NO: 195097 - DNA, 15 bp, Homo sapiens
tcagtgctggaaggg

SEQ ID NO: 195098 - DNA, 15 bp, Homo sapiens
ttcagtgctggaagg

SEQ ID NO: 195099 - DNA, 15 bp, Homo sapiens
tttcagtgctggaag

SEQ ID NO: 195100 - DNA, 15 bp, Homo sapiens
ttttcagtgctggaa

SEQ ID NO: 195101 - DNA, 15 bp, Homo sapiens
tttttcagtgctgga

SEQ ID NO: 195102 - DNA, 15 bp, Homo sapiens
atttttcagtgctgg

SEQ ID NO: 195103 - DNA, 15 bp, Homo sapiens
gatttttcagtgctg

SEQ ID NO: 195104 - DNA, 15 bp, Homo sapiens
ggatttttcagtgct

SEQ ID NO: 195105 - DNA, 15 bp, Homo sapiens
gggatttttcagtgc

SEQ ID NO: 195106 - DNA, 15 bp, Homo sapiens
cgggatttttcagtg

SEQ ID NO: 195107 - DNA, 15 bp, Homo sapiens
gcgggatttttcagt

SEQ ID NO: 195108 - DNA, 15 bp, Homo sapiens
tgcgggatttttcag

SEQ ID NO: 195109 - DNA, 15 bp, Homo sapiens
ctgcgggatttttca

SEQ ID NO: 195110 - DNA, 15 bp, Homo sapiens
gctgcgggatttttc

SEQ ID NO: 195111 - DNA, 15 bp, Homo sapiens
tgctgcgggattttt

SEQ ID NO: 195112 - DNA, 15 bp, Homo sapiens
gtgctgcgggatttt

SEQ ID NO: 195113 - DNA, 15 bp, Homo sapiens
agtgctgcgggattt

SEQ ID NO: 195114 - DNA, 15 bp, Homo sapiens
aagtgctgcgggatt

SEQ ID NO: 195115 - DNA, 15 bp, Homo sapiens
caagtgctgcgggat

SEQ ID NO: 195116 - DNA, 15 bp, Homo sapiens
acaagtgctgcggga

SEQ ID NO: 195117 - DNA, 15 bp, Homo sapiens
cacaagtgctgcggg

SEQ ID NO: 195118 - DNA, 15 bp, Homo sapiens
ccacaagtgctgcgg

SEQ ID NO: 195119 - DNA, 15 bp, Homo sapiens
gccacaagtgctgcg

SEQ ID NO: 195120 - DNA, 15 bp, Homo sapiens
tgccacaagtgctgc

SEQ ID NO: 195121 - DNA, 15 bp, Homo sapiens
ctgccacaagtgctg

SEQ ID NO: 195122 - DNA, 15 bp, Homo sapiens
gctgccacaagtgct

SEQ ID NO: 195123 - DNA, 15 bp, Homo sapiens
agctgccacaagtgc

SEQ ID NO: 195124 - DNA, 15 bp, Homo sapiens
gagctgccacaagtg

SEQ ID NO: 195125 - DNA, 15 bp, Homo sapiens
tgagctgccacaagt

SEQ ID NO: 195126 - DNA, 15 bp, Homo sapiens
ttgagctgccacaag

SEQ ID NO: 195127 - DNA, 15 bp, Homo sapiens
tttgagctgccacaa

SEQ ID NO: 195128 - DNA, 15 bp, Homo sapiens
gtttgagctgccaca

SEQ ID NO: 195129 - DNA, 15 bp, Homo sapiens
tgtttgagctgccac

SEQ ID NO: 195130 - DNA, 15 bp, Homo sapiens
ctgtttgagctgcca

SEQ ID NO: 195131 - DNA, 15 bp, Homo sapiens
tctgtttgagctgcc

SEQ ID NO: 195132 - DNA, 15 bp, Homo sapiens
ctctgtttgagctgc

SEQ ID NO: 195133 - DNA, 15 bp, Homo sapiens
tctctgtttgagctg

SEQ ID NO: 195134 - DNA, 15 bp, Homo sapiens
ttctctgtttgagct

SEQ ID NO: 195135 - DNA, 15 bp, Homo sapiens
attctctgtttgagc

SEQ ID NO: 195136 - DNA, 15 bp, Homo sapiens
cattctctgtttgag

SEQ ID NO: 195137 - DNA, 15 bp, Homo sapiens
acattctctgtttga

SEQ ID NO: 195138 - DNA, 15 bp, Homo sapiens
tacattctctgtttg

SEQ ID NO: 195139 - DNA, 15 bp, Homo sapiens
gtacattctctgttt

SEQ ID NO: 195140 - DNA, 15 bp, Homo sapiens
ggtacattctctgtt

SEQ ID NO: 195141 - DNA, 15 bp, Homo sapiens
tggtacattctctgt

SEQ ID NO: 195142 - DNA, 15 bp, Homo sapiens
ctggtacattctctg

SEQ ID NO: 195143 - DNA, 15 bp, Homo sapiens
actggtacattctct

SEQ ID NO: 195144 - DNA, 15 bp, Homo sapiens
gactggtacattctc

SEQ ID NO: 195145 - DNA, 15 bp, Homo sapiens
tgactggtacattct

SEQ ID NO: 195146 - DNA, 15 bp, Homo sapiens
gtgactggtacattc

SEQ ID NO: 195147 - DNA, 15 bp, Homo sapiens
agtgactggtacatt

SEQ ID NO: 195148 - DNA, 15 bp, Homo sapiens
cagtgactggtacat

SEQ ID NO: 195149 - DNA, 15 bp, Homo sapiens
ccagtgactggtaca

SEQ ID NO: 195150 - DNA, 15 bp, Homo sapiens
gccagtgactggtac

SEQ ID NO: 195151 - DNA, 15 bp, Homo sapiens
agccagtgactggta

SEQ ID NO: 195152 - DNA, 15 bp, Homo sapiens
gagccagtgactggt

SEQ ID NO: 195153 - DNA, 15 bp, Homo sapiens
ggagccagtgactgg

SEQ ID NO: 195154 - DNA, 15 bp, Homo sapiens
gggagccagtgactg

SEQ ID NO: 195155 - DNA, 15 bp, Homo sapiens
ggggagccagtgact

SEQ ID NO: 195156 - DNA, 15 bp, Homo sapiens
aggggagccagtgac

SEQ ID NO: 195157 - DNA, 15 bp, Homo sapiens
caggggagccagtga

SEQ ID NO: 195158 - DNA, 15 bp, Homo sapiens
tcaggggagccagtg

SEQ ID NO: 195159 - DNA, 15 bp, Homo sapiens
ctcaggggagccagt

SEQ ID NO: 195160 - DNA, 15 bp, Homo sapiens
actcaggggagccag

SEQ ID NO: 195161 - DNA, 15 bp, Homo sapiens
aactcaggggagcca

SEQ ID NO: 195162 - DNA, 15 bp, Homo sapiens
aaactcaggggagcc

SEQ ID NO: 195163 - DNA, 15 bp, Homo sapiens
gaaactcaggggagc

SEQ ID NO: 195164 - DNA, 15 bp, Homo sapiens
agaaactcaggggag

SEQ ID NO: 195165 - DNA, 15 bp, Homo sapiens
aagaaactcagggga

SEQ ID NO: 195166 - DNA, 15 bp, Homo sapiens
gaagaaactcagggg

SEQ ID NO: 195167 - DNA, 15 bp, Homo sapiens
tgaagaaactcaggg

SEQ ID NO: 195168 - DNA, 15 bp, Homo sapiens
ctgaagaaactcagg

SEQ ID NO: 195169 - DNA, 15 bp, Homo sapiens
tctgaagaaactcag

SEQ ID NO: 195170 - DNA, 15 bp, Homo sapiens
ttctgaagaaactca

SEQ ID NO: 195171 - DNA, 15 bp, Homo sapiens
tttctgaagaaactc

SEQ ID NO: 195172 - DNA, 15 bp, Homo sapiens
atttctgaagaaact

SEQ ID NO: 195173 - DNA, 15 bp, Homo sapiens
aatttctgaagaaac

SEQ ID NO: 195174 - DNA, 15 bp, Homo sapiens
caatttctgaagaaa

SEQ ID NO: 195175 - DNA, 15 bp, Homo sapiens
acaatttctgaagaa

SEQ ID NO: 195176 - DNA, 15 bp, Homo sapiens
aacaatttctgaaga

SEQ ID NO: 195177 - DNA, 15 bp, Homo sapiens
aaacaatttctgaag

SEQ ID NO: 195178 - DNA, 15 bp, Homo sapiens
taaacaatttctgaa

SEQ ID NO: 195179 - DNA, 15 bp, Homo sapiens
ttaaacaatttctga

SEQ ID NO: 195180 - DNA, 15 bp, Homo sapiens
cttaaacaatttctg

SEQ ID NO: 195181 - DNA, 15 bp, Homo sapiens
ccttaaacaatttct

SEQ ID NO: 195182 - DNA, 15 bp, Homo sapiens
tccttaaacaatttc

SEQ ID NO: 195183 - DNA, 15 bp, Homo sapiens
ctccttaaacaattt

SEQ ID NO: 195184 - DNA, 15 bp, Homo sapiens
actccttaaacaatt

SEQ ID NO: 195185 - DNA, 15 bp, Homo sapiens
cactccttaaacaat

SEQ ID NO: 195186 - DNA, 15 bp, Homo sapiens
gcactccttaaacaa

SEQ ID NO: 195187 - DNA, 15 bp, Homo sapiens
agcactccttaaaca

SEQ ID NO: 195188 - DNA, 15 bp, Homo sapiens
cagcactccttaaac

SEQ ID NO: 195189 - DNA, 15 bp, Homo sapiens
ccagcactccttaaa

SEQ ID NO: 195190 - DNA, 15 bp, Homo sapiens
tccagcactccttaa

SEQ ID NO: 195191 - DNA, 15 bp, Homo sapiens
atccagcactcctta

SEQ ID NO: 195192 - DNA, 15 bp, Homo sapiens
gatccagcactcctt

SEQ ID NO: 195193 - DNA, 15 bp, Homo sapiens
ggatccagcactcct

SEQ ID NO: 195194 - DNA, 15 bp, Homo sapiens
tggatccagcactcc

SEQ ID NO: 195195 - DNA, 15 bp, Homo sapiens
atggatccagcactc

SEQ ID NO: 195196 - DNA, 15 bp, Homo sapiens
catggatccagcact

SEQ ID NO: 195197 - DNA, 15 bp, Homo sapiens
tcatggatccagcac

SEQ ID NO: 195198 - DNA, 15 bp, Homo sapiens
ctcatggatccagca

SEQ ID NO: 195199 - DNA, 15 bp, Homo sapiens
cctcatggatccagc

SEQ ID NO: 195200 - DNA, 15 bp, Homo sapiens
ccctcatggatccag

SEQ ID NO: 195201 - DNA, 15 bp, Homo sapiens
gccctcatggatcca

SEQ ID NO: 195202 - DNA, 15 bp, Homo sapiens
tgccctcatggatcc

SEQ ID NO: 195203 - DNA, 15 bp, Homo sapiens
ctgccctcatggatc

SEQ ID NO: 195204 - DNA, 15 bp, Homo sapiens
tctgccctcatggat

SEQ ID NO: 195205 - DNA, 15 bp, Homo sapiens
ctctgccctcatgga

SEQ ID NO: 195206 - DNA, 15 bp, Homo sapiens
cctctgccctcatgg

SEQ ID NO: 195207 - DNA, 15 bp, Homo sapiens
gcctctgccctcatg

SEQ ID NO: 195208 - DNA, 15 bp, Homo sapiens
agcctctgccctcat

SEQ ID NO: 195209 - DNA, 15 bp, Homo sapiens
aagcctctgccctca

SEQ ID NO: 195210 - DNA, 15 bp, Homo sapiens
caagcctctgccctc

SEQ ID NO: 195211 - DNA, 15 bp, Homo sapiens
acaagcctctgccct

SEQ ID NO: 195212 - DNA, 15 bp, Homo sapiens
gacaagcctctgccc

SEQ ID NO: 195213 - DNA, 15 bp, Homo sapiens
ggacaagcctctgcc

SEQ ID NO: 195214 - DNA, 15 bp, Homo sapiens
gggacaagcctctgc

SEQ ID NO: 195215 - DNA, 15 bp, Homo sapiens
tgggacaagcctctg

SEQ ID NO: 195216 - DNA, 15 bp, Homo sapiens
ctgggacaagcctct

SEQ ID NO: 195217 - DNA, 15 bp, Homo sapiens
actgggacaagcctc

SEQ ID NO: 195218 - DNA, 15 bp, Homo sapiens
gactgggacaagcct

SEQ ID NO: 195219 - DNA, 15 bp, Homo sapiens
tgactgggacaagcc

SEQ ID NO: 195220 - DNA, 15 bp, Homo sapiens
gtgactgggacaagc

SEQ ID NO: 195221 - DNA, 15 bp, Homo sapiens
agtgactgggacaag

SEQ ID NO: 195222 - DNA, 15 bp, Homo sapiens
tagtgactgggacaa

SEQ ID NO: 195223 - DNA, 15 bp, Homo sapiens
gtagtgactgggaca

SEQ ID NO: 195224 - DNA, 15 bp, Homo sapiens
tgtagtgactgggac

SEQ ID NO: 195225 - DNA, 15 bp, Homo sapiens
gtgtagtgactggga

SEQ ID NO: 195226 - DNA, 15 bp, Homo sapiens
agtgtagtgactggg

SEQ ID NO: 195227 - DNA, 15 bp, Homo sapiens
cagtgtagtgactgg

SEQ ID NO: 195228 - DNA, 15 bp, Homo sapiens
acagtgtagtgactg

SEQ ID NO: 195229 - DNA, 15 bp, Homo sapiens
gacagtgtagtgact

SEQ ID NO: 195230 - DNA, 15 bp, Homo sapiens
agacagtgtagtgac

SEQ ID NO: 195231 - DNA, 15 bp, Homo sapiens
gagacagtgtagtga

SEQ ID NO: 195232 - DNA, 15 bp, Homo sapiens
agagacagtgtagtg

SEQ ID NO: 195233 - DNA, 15 bp, Homo sapiens
tagagacagtgtagt

SEQ ID NO: 195234 - DNA, 15 bp, Homo sapiens
gtagagacagtgtag

SEQ ID NO: 195235 - DNA, 15 bp, Homo sapiens
ggtagagacagtgta

SEQ ID NO: 195236 - DNA, 15 bp, Homo sapiens
aggtagagacagtgt

SEQ ID NO: 195237 - DNA, 15 bp, Homo sapiens
caggtagagacagtg

SEQ ID NO: 195238 - DNA, 15 bp, Homo sapiens
gcaggtagagacagt

SEQ ID NO: 195239 - DNA, 15 bp, Homo sapiens
agcaggtagagacag

SEQ ID NO: 195240 - DNA, 15 bp, Homo sapiens
cagcaggtagagaca

SEQ ID NO: 195241 - DNA, 15 bp, Homo sapiens
ccagcaggtagagac

SEQ ID NO: 195242 - DNA, 15 bp, Homo sapiens
tccagcaggtagaga

SEQ ID NO: 195243 - DNA, 15 bp, Homo sapiens
ttccagcaggtagag

SEQ ID NO: 195244 - DNA, 15 bp, Homo sapiens
gttccagcaggtaga

SEQ ID NO: 195245 - DNA, 15 bp, Homo sapiens
tgttccagcaggtag

SEQ ID NO: 195246 - DNA, 15 bp, Homo sapiens
ctgttccagcaggta

SEQ ID NO: 195247 - DNA, 15 bp, Homo sapiens
cctgttccagcaggt

SEQ ID NO: 195248 - DNA, 15 bp, Homo sapiens
acctgttccagcagg

SEQ ID NO: 195249 - DNA, 15 bp, Homo sapiens
cacctgttccagcag

SEQ ID NO: 195250 - DNA, 15 bp, Homo sapiens
gcacctgttccagca

SEQ ID NO: 195251 - DNA, 15 bp, Homo sapiens
agcacctgttccagc

SEQ ID NO: 195252 - DNA, 15 bp, Homo sapiens
aagcacctgttccag

SEQ ID NO: 195253 - DNA, 15 bp, Homo sapiens
taagcacctgttcca

SEQ ID NO: 195254 - DNA, 15 bp, Homo sapiens
ctaagcacctgttcc

SEQ ID NO: 195255 - DNA, 15 bp, Homo sapiens
actaagcacctgttc

SEQ ID NO: 195256 - DNA, 15 bp, Homo sapiens
tactaagcacctgtt

SEQ ID NO: 195257 - DNA, 15 bp, Homo sapiens
atactaagcacctgt

SEQ ID NO: 195258 - DNA, 15 bp, Homo sapiens
catactaagcacctg

SEQ ID NO: 195259 - DNA, 15 bp, Homo sapiens
acatactaagcacct

SEQ ID NO: 195260 - DNA, 15 bp, Homo sapiens
tacatactaagcacc

SEQ ID NO: 195261 - DNA, 15 bp, Homo sapiens
gtacatactaagcac

SEQ ID NO: 195262 - DNA, 15 bp, Homo sapiens
cgtacatactaagca

SEQ ID NO: 195263 - DNA, 15 bp, Homo sapiens
gcgtacatactaagc

SEQ ID NO: 195264 - DNA, 15 bp, Homo sapiens
ggcgtacatactaag

SEQ ID NO: 195265 - DNA, 15 bp, Homo sapiens
aggcgtacatactaa

SEQ ID NO: 195266 - DNA, 15 bp, Homo sapiens
caggcgtacatacta

SEQ ID NO: 195267 - DNA, 15 bp, Homo sapiens
gcaggcgtacatact

SEQ ID NO: 195268 - DNA, 15 bp, Homo sapiens
agcaggcgtacatac

SEQ ID NO: 195269 - DNA, 15 bp, Homo sapiens
gagcaggcgtacata

SEQ ID NO: 195270 - DNA, 15 bp, Homo sapiens
agagcaggcgtacat

SEQ ID NO: 195271 - DNA, 15 bp, Homo sapiens
cagagcaggcgtaca

SEQ ID NO: 195272 - DNA, 15 bp, Homo sapiens
acagagcaggcgtac

SEQ ID NO: 195273 - DNA, 15 bp, Homo sapiens
cacagagcaggcgta

SEQ ID NO: 195274 - DNA, 15 bp, Homo sapiens
gcacagagcaggcgt

SEQ ID NO: 195275 - DNA, 15 bp, Homo sapiens
agcacagagcaggcg

SEQ ID NO: 195276 - DNA, 15 bp, Homo sapiens
cagcacagagcaggc

SEQ ID NO: 195277 - DNA, 15 bp, Homo sapiens
ccagcacagagcagg

SEQ ID NO: 195278 - DNA, 15 bp, Homo sapiens
cccagcacagagcag

SEQ ID NO: 195279 - DNA, 15 bp, Homo sapiens
gcccagcacagagca

SEQ ID NO: 195280 - DNA, 15 bp, Homo sapiens
ggcccagcacagagc

SEQ ID NO: 195281 - DNA, 15 bp, Homo sapiens
gggcccagcacagag

SEQ ID NO: 195282 - DNA, 15 bp, Homo sapiens
tgggcccagcacaga

SEQ ID NO: 195283 - DNA, 15 bp, Homo sapiens
atgggcccagcacag

SEQ ID NO: 195284 - DNA, 15 bp, Homo sapiens
catgggcccagcaca

SEQ ID NO: 195285 - DNA, 15 bp, Homo sapiens
tcatgggcccagcac

SEQ ID NO: 195286 - DNA, 15 bp, Homo sapiens
gtcatgggcccagca

SEQ ID NO: 195287 - DNA, 15 bp, Homo sapiens
agtcatgggcccagc

SEQ ID NO: 195288 - DNA, 15 bp, Homo sapiens
cagtcatgggcccag

SEQ ID NO: 195289 - DNA, 15 bp, Homo sapiens
gcagtcatgggccca

SEQ ID NO: 195290 - DNA, 15 bp, Homo sapiens
tgcagtcatgggccc

SEQ ID NO: 195291 - DNA, 15 bp, Homo sapiens
gtgcagtcatgggcc

SEQ ID NO: 195292 - DNA, 15 bp, Homo sapiens
tgtgcagtcatgggc

SEQ ID NO: 195293 - DNA, 15 bp, Homo sapiens
ttgtgcagtcatggg

SEQ ID NO: 195294 - DNA, 15 bp, Homo sapiens
cttgtgcagtcatgg

SEQ ID NO: 195295 - DNA, 15 bp, Homo sapiens
ccttgtgcagtcatg

SEQ ID NO: 195296 - DNA, 15 bp, Homo sapiens
tccttgtgcagtcat

SEQ ID NO: 195297 - DNA, 15 bp, Homo sapiens
gtccttgtgcagtca

SEQ ID NO: 195298 - DNA, 15 bp, Homo sapiens
tgtccttgtgcagtc

SEQ ID NO: 195299 - DNA, 15 bp, Homo sapiens
ctgtccttgtgcagt

SEQ ID NO: 195300 - DNA, 15 bp, Homo sapiens
gctgtccttgtgcag

SEQ ID NO: 195301 - DNA, 15 bp, Homo sapiens
agctgtccttgtgca

SEQ ID NO: 195302 - DNA, 15 bp, Homo sapiens
cagctgtccttgtgc

SEQ ID NO: 195303 - DNA, 15 bp, Homo sapiens
tcagctgtccttgtg

SEQ ID NO: 195304 - DNA, 15 bp, Homo sapiens
gtcagctgtccttgt

SEQ ID NO: 195305 - DNA, 15 bp, Homo sapiens
agtcagctgtccttg

SEQ ID NO: 195306 - DNA, 15 bp, Homo sapiens
aagtcagctgtcctt

SEQ ID NO: 195307 - DNA, 15 bp, Homo sapiens
gaagtcagctgtcct

SEQ ID NO: 195308 - DNA, 15 bp, Homo sapiens
tgaagtcagctgtcc

SEQ ID NO: 195309 - DNA, 15 bp, Homo sapiens
ctgaagtcagctgtc

SEQ ID NO: 195310 - DNA, 15 bp, Homo sapiens
tctgaagtcagctgt

SEQ ID NO: 195311 - DNA, 15 bp, Homo sapiens
ctctgaagtcagctg

SEQ ID NO: 195312 - DNA, 15 bp, Homo sapiens
cctctgaagtcagct

SEQ ID NO: 195313 - DNA, 15 bp, Homo sapiens
tcctctgaagtcagc

SEQ ID NO: 195314 - DNA, 15 bp, Homo sapiens
atcctctgaagtcag

SEQ ID NO: 195315 - DNA, 15 bp, Homo sapiens
aatcctctgaagtca

SEQ ID NO: 195316 - DNA, 15 bp, Homo sapiens
caatcctctgaagtc

SEQ ID NO: 195317 - DNA, 15 bp, Homo sapiens
gcaatcctctgaagt

SEQ ID NO: 195318 - DNA, 15 bp, Homo sapiens
agcaatcctctgaag

SEQ ID NO: 195319 - DNA, 15 bp, Homo sapiens
gagcaatcctctgaa

SEQ ID NO: 195320 - DNA, 15 bp, Homo sapiens
tgagcaatcctctga

SEQ ID NO: 195321 - DNA, 15 bp, Homo sapiens
ctgagcaatcctctg

SEQ ID NO: 195322 - DNA, 15 bp, Homo sapiens
cctgagcaatcctct

SEQ ID NO: 195323 - DNA, 15 bp, Homo sapiens
tcctgagcaatcctc

SEQ ID NO: 195324 - DNA, 15 bp, Homo sapiens
atcctgagcaatcct

SEQ ID NO: 195325 - DNA, 15 bp, Homo sapiens
gatcctgagcaatcc

SEQ ID NO: 195326 - DNA, 15 bp, Homo sapiens
tgatcctgagcaatc

SEQ ID NO: 195327 - DNA, 15 bp, Homo sapiens
gtgatcctgagcaat

SEQ ID NO: 195328 - DNA, 15 bp, Homo sapiens
agtgatcctgagcaa

SEQ ID NO: 195329 - DNA, 15 bp, Homo sapiens
cagtgatcctgagca

SEQ ID NO: 195330 - DNA, 15 bp, Homo sapiens
tcagtgatcctgagc

SEQ ID NO: 195331 - DNA, 15 bp, Homo sapiens
ctcagtgatcctgag

SEQ ID NO: 195332 - DNA, 15 bp, Homo sapiens
tctcagtgatcctga

SEQ ID NO: 195333 - DNA, 15 bp, Homo sapiens
ttctcagtgatcctg

SEQ ID NO: 195334 - DNA, 15 bp, Homo sapiens
tttctcagtgatcct

SEQ ID NO: 195335 - DNA, 15 bp, Homo sapiens
atttctcagtgatcc

SEQ ID NO: 195336 - DNA, 15 bp, Homo sapiens
aatttctcagtgatc

SEQ ID NO: 195337 - DNA, 15 bp, Homo sapiens
gaatttctcagtgat

SEQ ID NO: 195338 - DNA, 15 bp, Homo sapiens
tgaatttctcagtga

SEQ ID NO: 195339 - DNA, 15 bp, Homo sapiens
atgaatttctcagtg

SEQ ID NO: 195340 - DNA, 15 bp, Homo sapiens
aatgaatttctcagt

SEQ ID NO: 195341 - DNA, 15 bp, Homo sapiens
aaatgaatttctcag

SEQ ID NO: 195342 - DNA, 15 bp, Homo sapiens
caaatgaatttctca

SEQ ID NO: 195343 - DNA, 15 bp, Homo sapiens
ccaaatgaatttctc

SEQ ID NO: 195344 - DNA, 15 bp, Homo sapiens
gccaaatgaatttct

SEQ ID NO: 195345 - DNA, 15 bp, Homo sapiens
tgccaaatgaatttc

SEQ ID NO: 195346 - DNA, 15 bp, Homo sapiens
ttgccaaatgaattt

SEQ ID NO: 195347 - DNA, 15 bp, Homo sapiens
tttgccaaatgaatt

SEQ ID NO: 195348 - DNA, 15 bp, Homo sapiens
ttttgccaaatgaat

SEQ ID NO: 195349 - DNA, 15 bp, Homo sapiens
attttgccaaatgaa

SEQ ID NO: 195350 - DNA, 15 bp, Homo sapiens
tattttgccaaatga

SEQ ID NO: 195351 - DNA, 15 bp, Homo sapiens
atattttgccaaatg

SEQ ID NO: 195352 - DNA, 15 bp, Homo sapiens
aatattttgccaaat

SEQ ID NO: 195353 - DNA, 15 bp, Homo sapiens
caatattttgccaaa

SEQ ID NO: 195354 - DNA, 15 bp, Homo sapiens
acaatattttgccaa

SEQ ID NO: 195355 - DNA, 15 bp, Homo sapiens
cacaatattttgcca

SEQ ID NO: 195356 - DNA, 15 bp, Homo sapiens
tcacaatattttgcc

SEQ ID NO: 195357 - DNA, 15 bp, Homo sapiens
ttcacaatattttgc

SEQ ID NO: 195358 - DNA, 15 bp, Homo sapiens
attcacaatattttg

SEQ ID NO: 195359 - DNA, 15 bp, Homo sapiens
aattcacaatatttt

SEQ ID NO: 195360 - DNA, 15 bp, Homo sapiens
aaattcacaatattt

SEQ ID NO: 195361 - DNA, 15 bp, Homo sapiens
taaattcacaatatt

SEQ ID NO: 195362 - DNA, 15 bp, Homo sapiens
ttaaattcacaatat

SEQ ID NO: 195363 - DNA, 15 bp, Homo sapiens
attaaattcacaata

SEQ ID NO: 195364 - DNA, 15 bp, Homo sapiens
cattaaattcacaat

SEQ ID NO: 195365 - DNA, 15 bp, Homo sapiens
ccattaaattcacaa

SEQ ID NO: 195366 - DNA, 15 bp, Homo sapiens
gccattaaattcaca

SEQ ID NO: 195367 - DNA, 15 bp, Homo sapiens
ggccattaaattcac

SEQ ID NO: 195368 - DNA, 15 bp, Homo sapiens
aggccattaaattca

SEQ ID NO: 195369 - DNA, 15 bp, Homo sapiens
gaggccattaaattc

SEQ ID NO: 195370 - DNA, 15 bp, Homo sapiens
agaggccattaaatt

SEQ ID NO: 195371 - DNA, 15 bp, Homo sapiens
aagaggccattaaat

SEQ ID NO: 195372 - DNA, 15 bp, Homo sapiens
gaagaggccattaaa

SEQ ID NO: 195373 - DNA, 15 bp, Homo sapiens
tgaagaggccattaa

SEQ ID NO: 195374 - DNA, 15 bp, Homo sapiens
ttgaagaggccatta

SEQ ID NO: 195375 - DNA, 15 bp, Homo sapiens
attgaagaggccatt

SEQ ID NO: 195376 - DNA, 15 bp, Homo sapiens
aattgaagaggccat

SEQ ID NO: 195377 - DNA, 15 bp, Homo sapiens
aaattgaagaggcca

SEQ ID NO: 195378 - DNA, 15 bp, Homo sapiens
caaattgaagaggcc

SEQ ID NO: 195379 - DNA, 15 bp, Homo sapiens
tcaaattgaagaggc

SEQ ID NO: 195380 - DNA, 15 bp, Homo sapiens
ttcaaattgaagagg

SEQ ID NO: 195381 - DNA, 15 bp, Homo sapiens
tttcaaattgaagag

SEQ ID NO: 195382 - DNA, 15 bp, Homo sapiens
atttcaaattgaaga

SEQ ID NO: 195383 - DNA, 15 bp, Homo sapiens
tatttcaaattgaag

SEQ ID NO: 195384 - DNA, 15 bp, Homo sapiens
ttatttcaaattgaa

SEQ ID NO: 195385 - DNA, 15 bp, Homo sapiens
tttatttcaaattga

SEQ ID NO: 195386 - DNA, 15 bp, Homo sapiens
ctttatttcaaattg

SEQ ID NO: 195387 - DNA, 15 bp, Homo sapiens
gctttatttcaaatt

SEQ ID NO: 195388 - DNA, 15 bp, Homo sapiens
ggctttatttcaaat

SEQ ID NO: 195389 - DNA, 15 bp, Homo sapiens
tggctttatttcaaa

SEQ ID NO: 195390 - DNA, 15 bp, Homo sapiens
gtggctttatttcaa

SEQ ID NO: 195391 - DNA, 15 bp, Homo sapiens
ggtggctttatttca

SEQ ID NO: 195392 - DNA, 15 bp, Homo sapiens
gggtggctttatttc

SEQ ID NO: 195393 - DNA, 15 bp, Homo sapiens
cgggtggctttattt

SEQ ID NO: 195394 - DNA, 15 bp, Homo sapiens
ccgggtggctttatt

SEQ ID NO: 195395 - DNA, 15 bp, Homo sapiens
gccgggtggctttat

SEQ ID NO: 195396 - DNA, 15 bp, Homo sapiens
agccgggtggcttta

SEQ ID NO: 195397 - DNA, 15 bp, Homo sapiens
aagccgggtggcttt

SEQ ID NO: 195398 - DNA, 15 bp, Homo sapiens
aaagccgggtggctt

SEQ ID NO: 195399 - DNA, 15 bp, Homo sapiens
aaaagccgggtggct

SEQ ID NO: 195400 - DNA, 15 bp, Homo sapiens
aaaaagccgggtggc

SEQ ID NO: 195401 - DNA, 15 bp, Homo sapiens
caaaaagccgggtgg

SEQ ID NO: 195402 - DNA, 15 bp, Homo sapiens
tcaaaaagccgggtg

SEQ ID NO: 195403 - DNA, 15 bp, Homo sapiens
ttcaaaaagccgggt

SEQ ID NO: 195404 - DNA, 15 bp, Homo sapiens
tttcaaaaagccggg

SEQ ID NO: 195405 - DNA, 15 bp, Homo sapiens
atttcaaaaagccgg

SEQ ID NO: 195406 - DNA, 15 bp, Homo sapiens
tatttcaaaaagccg

SEQ ID NO: 195407 - DNA, 15 bp, Homo sapiens
ctatttcaaaaagcc

SEQ ID NO: 195408 - DNA, 15 bp, Homo sapiens
tctatttcaaaaagc

SEQ ID NO: 195409 - DNA, 15 bp, Homo sapiens
ctctatttcaaaaag

SEQ ID NO: 195410 - DNA, 15 bp, Homo sapiens
gctctatttcaaaaa

SEQ ID NO: 195411 - DNA, 15 bp, Homo sapiens
agctctatttcaaaa

SEQ ID NO: 195412 - DNA, 15 bp, Homo sapiens
aagctctatttcaaa

SEQ ID NO: 195413 - DNA, 15 bp, Homo sapiens
gaagctctatttcaa

SEQ ID NO: 195414 - DNA, 15 bp, Homo sapiens
ggaagctctatttca

SEQ ID NO: 195415 - DNA, 15 bp, Homo sapiens
aggaagctctatttc

SEQ ID NO: 195416 - DNA, 15 bp, Homo sapiens
aaggaagctctattt

SEQ ID NO: 195417 - DNA, 15 bp, Homo sapiens
aaaggaagctctatt

SEQ ID NO: 195418 - DNA, 15 bp, Homo sapiens
caaaggaagctctat

SEQ ID NO: 195419 - DNA, 15 bp, Homo sapiens
ccaaaggaagctcta

SEQ ID NO: 195420 - DNA, 15 bp, Homo sapiens
cccaaaggaagctct

SEQ ID NO: 195421 - DNA, 15 bp, Homo sapiens
tcccaaaggaagctc

SEQ ID NO: 195422 - DNA, 15 bp, Homo sapiens
ctcccaaaggaagct

SEQ ID NO: 195423 - DNA, 15 bp, Homo sapiens
gctcccaaaggaagc

SEQ ID NO: 195424 - DNA, 15 bp, Homo sapiens
agctcccaaaggaag

SEQ ID NO: 195425 - DNA, 15 bp, Homo sapiens
aagctcccaaaggaa

SEQ ID NO: 195426 - DNA, 15 bp, Homo sapiens
taagctcccaaagga

SEQ ID NO: 195427 - DNA, 15 bp, Homo sapiens
ctaagctcccaaagg

SEQ ID NO: 195428 - DNA, 15 bp, Homo sapiens
tctaagctcccaaag

SEQ ID NO: 195429 - DNA, 15 bp, Homo sapiens
ttctaagctcccaaa

SEQ ID NO: 195430 - DNA, 15 bp, Homo sapiens
gttctaagctcccaa

SEQ ID NO: 195431 - DNA, 15 bp, Homo sapiens
agttctaagctccca

SEQ ID NO: 195432 - DNA, 15 bp, Homo sapiens
tagttctaagctccc

SEQ ID NO: 195433 - DNA, 15 bp, Homo sapiens
ttagttctaagctcc

SEQ ID NO: 195434 - DNA, 15 bp, Homo sapiens
tttagttctaagctc

SEQ ID NO: 195435 - DNA, 15 bp, Homo sapiens
atttagttctaagct

SEQ ID NO: 195436 - DNA, 15 bp, Homo sapiens
aatttagttctaagc

SEQ ID NO: 195437 - DNA, 15 bp, Homo sapiens
gaatttagttctaag

SEQ ID NO: 195438 - DNA, 15 bp, Homo sapiens
agaatttagttctaa

SEQ ID NO: 195439 - DNA, 15 bp, Homo sapiens
aagaatttagttcta

SEQ ID NO: 195440 - DNA, 15 bp, Homo sapiens
caagaatttagttct

SEQ ID NO: 195441 - DNA, 15 bp, Homo sapiens
ccaagaatttagttc

SEQ ID NO: 195442 - DNA, 15 bp, Homo sapiens
gccaagaatttagtt

SEQ ID NO: 195443 - DNA, 15 bp, Homo sapiens
agccaagaatttagt

SEQ ID NO: 195444 - DNA, 15 bp, Homo sapiens
aagccaagaatttag

SEQ ID NO: 195445 - DNA, 15 bp, Homo sapiens
gaagccaagaattta

SEQ ID NO: 195446 - DNA, 15 bp, Homo sapiens
tgaagccaagaattt

SEQ ID NO: 195447 - DNA, 15 bp, Homo sapiens
atgaagccaagaatt

SEQ ID NO: 195448 - DNA, 15 bp, Homo sapiens
tatgaagccaagaat

SEQ ID NO: 195449 - DNA, 15 bp, Homo sapiens
ctatgaagccaagaa

SEQ ID NO: 195450 - DNA, 15 bp, Homo sapiens
tctatgaagccaaga

SEQ ID NO: 195451 - DNA, 15 bp, Homo sapiens
ttctatgaagccaag

SEQ ID NO: 195452 - DNA, 15 bp, Homo sapiens
attctatgaagccaa

SEQ ID NO: 195453 - DNA, 15 bp, Homo sapiens
cattctatgaagcca

SEQ ID NO: 195454 - DNA, 15 bp, Homo sapiens
gcattctatgaagcc

SEQ ID NO: 195455 - DNA, 15 bp, Homo sapiens
ggcattctatgaagc

SEQ ID NO: 195456 - DNA, 15 bp, Homo sapiens
gggcattctatgaag

SEQ ID NO: 195457 - DNA, 15 bp, Homo sapiens
agggcattctatgaa

SEQ ID NO: 195458 - DNA, 15 bp, Homo sapiens
tagggcattctatga

SEQ ID NO: 195459 - DNA, 15 bp, Homo sapiens
ctagggcattctatg

SEQ ID NO: 195460 - DNA, 15 bp, Homo sapiens
gctagggcattctat

SEQ ID NO: 195461 - DNA, 15 bp, Homo sapiens
agctagggcattcta

SEQ ID NO: 195462 - DNA, 15 bp, Homo sapiens
cagctagggcattct

SEQ ID NO: 195463 - DNA, 15 bp, Homo sapiens
ccagctagggcattc

SEQ ID NO: 195464 - DNA, 15 bp, Homo sapiens
cccagctagggcatt

SEQ ID NO: 195465 - DNA, 15 bp, Homo sapiens
acccagctagggcat

SEQ ID NO: 195466 - DNA, 15 bp, Homo sapiens
cacccagctagggca

SEQ ID NO: 195467 - DNA, 15 bp, Homo sapiens
ccacccagctagggc

SEQ ID NO: 195468 - DNA, 15 bp, Homo sapiens
tccacccagctaggg

SEQ ID NO: 195469 - DNA, 15 bp, Homo sapiens
gtccacccagctagg

SEQ ID NO: 195470 - DNA, 15 bp, Homo sapiens
cgtccacccagctag

SEQ ID NO: 195471 - DNA, 15 bp, Homo sapiens
ccgtccacccagcta

SEQ ID NO: 195472 - DNA, 15 bp, Homo sapiens
tccgtccacccagct

SEQ ID NO: 195473 - DNA, 15 bp, Homo sapiens
ctccgtccacccagc

SEQ ID NO: 195474 - DNA, 15 bp, Homo sapiens
tctccgtccacccag

SEQ ID NO: 195475 - DNA, 15 bp, Homo sapiens
ttctccgtccaccca

SEQ ID NO: 195476 - DNA, 15 bp, Homo sapiens
attctccgtccaccc

SEQ ID NO: 195477 - DNA, 15 bp, Homo sapiens
gattctccgtccacc

SEQ ID NO: 195478 - DNA, 15 bp, Homo sapiens
ggattctccgtccac

SEQ ID NO: 195479 - DNA, 15 bp, Homo sapiens
gggattctccgtcca

SEQ ID NO: 195480 - DNA, 15 bp, Homo sapiens
tgggattctccgtcc

SEQ ID NO: 195481 - DNA, 15 bp, Homo sapiens
ttgggattctccgtc

SEQ ID NO: 195482 - DNA, 15 bp, Homo sapiens
gttgggattctccgt

SEQ ID NO: 195483 - DNA, 15 bp, Homo sapiens
tgttgggattctccg

SEQ ID NO: 195484 - DNA, 15 bp, Homo sapiens
atgttgggattctcc

SEQ ID NO: 195485 - DNA, 15 bp, Homo sapiens
tatgttgggattctc

SEQ ID NO: 195486 - DNA, 15 bp, Homo sapiens
atatgttgggattct

SEQ ID NO: 195487 - DNA, 15 bp, Homo sapiens
tatatgttgggattc

SEQ ID NO: 195488 - DNA, 15 bp, Homo sapiens
ctatatgttgggatt

SEQ ID NO: 195489 - DNA, 15 bp, Homo sapiens
tctatatgttgggat

SEQ ID NO: 195490 - DNA, 15 bp, Homo sapiens
atctatatgttggga

SEQ ID NO: 195491 - DNA, 15 bp, Homo sapiens
catctatatgttggg

SEQ ID NO: 195492 - DNA, 15 bp, Homo sapiens
acatctatatgttgg

SEQ ID NO: 195493 - DNA, 15 bp, Homo sapiens
tacatctatatgttg

SEQ ID NO: 195494 - DNA, 15 bp, Homo sapiens
atacatctatatgtt

SEQ ID NO: 195495 - DNA, 15 bp, Homo sapiens
gatacatctatatgt

SEQ ID NO: 195496 - DNA, 15 bp, Homo sapiens
agatacatctatatg

SEQ ID NO: 195497 - DNA, 15 bp, Homo sapiens
tagatacatctatat

SEQ ID NO: 195498 - DNA, 15 bp, Homo sapiens
ctagatacatctata

SEQ ID NO: 195499 - DNA, 15 bp, Homo sapiens
tctagatacatctat

SEQ ID NO: 195500 - DNA, 15 bp, Homo sapiens
ttctagatacatcta

SEQ ID NO: 195501 - DNA, 15 bp, Homo sapiens
attctagatacatct

SEQ ID NO: 195502 - DNA, 15 bp, Homo sapiens
cattctagatacatc

SEQ ID NO: 195503 - DNA, 15 bp, Homo sapiens
acattctagatacat

SEQ ID NO: 195504 - DNA, 15 bp, Homo sapiens
gacattctagataca

SEQ ID NO: 195505 - DNA, 15 bp, Homo sapiens
tgacattctagatac

SEQ ID NO: 195506 - DNA, 15 bp, Homo sapiens
ctgacattctagata

SEQ ID NO: 195507 - DNA, 15 bp, Homo sapiens
tctgacattctagat

SEQ ID NO: 195508 - DNA, 15 bp, Homo sapiens
ttctgacattctaga

SEQ ID NO: 195509 - DNA, 15 bp, Homo sapiens
cttctgacattctag

SEQ ID NO: 195510 - DNA, 15 bp, Homo sapiens
acttctgacattcta

SEQ ID NO: 195511 - DNA, 15 bp, Homo sapiens
cacttctgacattct

SEQ ID NO: 195512 - DNA, 15 bp, Homo sapiens
tcacttctgacattc

SEQ ID NO: 195513 - DNA, 15 bp, Homo sapiens
ttcacttctgacatt

SEQ ID NO: 195514 - DNA, 15 bp, Homo sapiens
cttcacttctgacat

SEQ ID NO: 195515 - DNA, 15 bp, Homo sapiens
acttcacttctgaca

SEQ ID NO: 195516 - DNA, 15 bp, Homo sapiens
cacttcacttctgac

SEQ ID NO: 195517 - DNA, 15 bp, Homo sapiens
tcacttcacttctga

SEQ ID NO: 195518 - DNA, 15 bp, Homo sapiens
atcacttcacttctg

SEQ ID NO: 195519 - DNA, 15 bp, Homo sapiens
gatcacttcacttct

SEQ ID NO: 195520 - DNA, 15 bp, Homo sapiens
agatcacttcacttc

SEQ ID NO: 195521 - DNA, 15 bp, Homo sapiens
cagatcacttcactt

SEQ ID NO: 195522 - DNA, 15 bp, Homo sapiens
acagatcacttcact

SEQ ID NO: 195523 - DNA, 15 bp, Homo sapiens
gacagatcacttcac

SEQ ID NO: 195524 - DNA, 15 bp, Homo sapiens
agacagatcacttca

SEQ ID NO: 195525 - DNA, 15 bp, Homo sapiens
gagacagatcacttc

SEQ ID NO: 195526 - DNA, 15 bp, Homo sapiens
agagacagatcactt

SEQ ID NO: 195527 - DNA, 15 bp, Homo sapiens
gagagacagatcact

SEQ ID NO: 195528 - DNA, 15 bp, Homo sapiens
ggagagacagatcac

SEQ ID NO: 195529 - DNA, 15 bp, Homo sapiens
tggagagacagatca

SEQ ID NO: 195530 - DNA, 15 bp, Homo sapiens
ttggagagacagatc

SEQ ID NO: 195531 - DNA, 15 bp, Homo sapiens
tttggagagacagat

SEQ ID NO: 195532 - DNA, 15 bp, Homo sapiens
atttggagagacaga

SEQ ID NO: 195533 - DNA, 15 bp, Homo sapiens
gatttggagagacag

SEQ ID NO: 195534 - DNA, 15 bp, Homo sapiens
tgatttggagagaca

SEQ ID NO: 195535 - DNA, 15 bp, Homo sapiens
atgatttggagagac

SEQ ID NO: 195536 - DNA, 15 bp, Homo sapiens
aatgatttggagaga

SEQ ID NO: 195537 - DNA, 15 bp, Homo sapiens
caatgatttggagag

SEQ ID NO: 195538 - DNA, 15 bp, Homo sapiens
ccaatgatttggaga

SEQ ID NO: 195539 - DNA, 15 bp, Homo sapiens
accaatgatttggag

SEQ ID NO: 195540 - DNA, 15 bp, Homo sapiens
caccaatgatttgga

SEQ ID NO: 195541 - DNA, 15 bp, Homo sapiens
gcaccaatgatttgg

SEQ ID NO: 195542 - DNA, 15 bp, Homo sapiens
agcaccaatgatttg

SEQ ID NO: 195543 - DNA, 15 bp, Homo sapiens
tagcaccaatgattt

SEQ ID NO: 195544 - DNA, 15 bp, Homo sapiens
ctagcaccaatgatt

SEQ ID NO: 195545 - DNA, 15 bp, Homo sapiens
cctagcaccaatgat

SEQ ID NO: 195546 - DNA, 15 bp, Homo sapiens
ccctagcaccaatga

SEQ ID NO: 195547 - DNA, 15 bp, Homo sapiens
tccctagcaccaatg

SEQ ID NO: 195548 - DNA, 15 bp, Homo sapiens
ctccctagcaccaat

SEQ ID NO: 195549 - DNA, 15 bp, Homo sapiens
tctccctagcaccaa

SEQ ID NO: 195550 - DNA, 15 bp, Homo sapiens
ttctccctagcacca

SEQ ID NO: 195551 - DNA, 15 bp, Homo sapiens
tttctccctagcacc

SEQ ID NO: 195552 - DNA, 15 bp, Homo sapiens
ctttctccctagcac

SEQ ID NO: 195553 - DNA, 15 bp, Homo sapiens
tctttctccctagca

SEQ ID NO: 195554 - DNA, 15 bp, Homo sapiens
ctctttctccctagc

SEQ ID NO: 195555 - DNA, 15 bp, Homo sapiens
cctctttctccctag

SEQ ID NO: 195556 - DNA, 15 bp, Homo sapiens
acctctttctcccta

SEQ ID NO: 195557 - DNA, 15 bp, Homo sapiens
cacctctttctccct

SEQ ID NO: 195558 - DNA, 15 bp, Homo sapiens
tcacctctttctccc

SEQ ID NO: 195559 - DNA, 15 bp, Homo sapiens
ctcacctctttctcc

SEQ ID NO: 195560 - DNA, 15 bp, Homo sapiens
gctcacctctttctc

SEQ ID NO: 195561 - DNA, 15 bp, Homo sapiens
tgctcacctctttct

SEQ ID NO: 195562 - DNA, 15 bp, Homo sapiens
atgctcacctctttc

SEQ ID NO: 195563 - DNA, 15 bp, Homo sapiens
catgctcacctcttt

SEQ ID NO: 195564 - DNA, 15 bp, Homo sapiens
gcatgctcacctctt

SEQ ID NO: 195565 - DNA, 15 bp, Homo sapiens
agcatgctcacctct

SEQ ID NO: 195566 - DNA, 15 bp, Homo sapiens
cagcatgctcacctc

SEQ ID NO: 195567 - DNA, 15 bp, Homo sapiens
acagcatgctcacct

SEQ ID NO: 195568 - DNA, 15 bp, Homo sapiens
gacagcatgctcacc

SEQ ID NO: 195569 - DNA, 15 bp, Homo sapiens
agacagcatgctcac

SEQ ID NO: 195570 - DNA, 15 bp, Homo sapiens
aagacagcatgctca

SEQ ID NO: 195571 - DNA, 15 bp, Homo sapiens
aaagacagcatgctc

SEQ ID NO: 195572 - DNA, 15 bp, Homo sapiens
aaaagacagcatgct

SEQ ID NO: 195573 - DNA, 15 bp, Homo sapiens
aaaaagacagcatgc

SEQ ID NO: 195574 - DNA, 15 bp, Homo sapiens
taaaaagacagcatg

SEQ ID NO: 195575 - DNA, 15 bp, Homo sapiens
ttaaaaagacagcat

SEQ ID NO: 195576 - DNA, 15 bp, Homo sapiens
tttaaaaagacagca

SEQ ID NO: 195577 - DNA, 15 bp, Homo sapiens
ctttaaaaagacagc

SEQ ID NO: 195578 - DNA, 15 bp, Homo sapiens
cctttaaaaagacag

SEQ ID NO: 195579 - DNA, 15 bp, Homo sapiens
tcctttaaaaagaca

SEQ ID NO: 195580 - DNA, 15 bp, Homo sapiens
atcctttaaaaagac

SEQ ID NO: 195581 - DNA, 15 bp, Homo sapiens
aatcctttaaaaaga

SEQ ID NO: 195582 - DNA, 15 bp, Homo sapiens
gaatcctttaaaaag

SEQ ID NO: 195583 - DNA, 15 bp, Homo sapiens
tgaatcctttaaaaa

SEQ ID NO: 195584 - DNA, 15 bp, Homo sapiens
ttgaatcctttaaaa

SEQ ID NO: 195585 - DNA, 15 bp, Homo sapiens
gttgaatcctttaaa

SEQ ID NO: 195586 - DNA, 15 bp, Homo sapiens
agttgaatcctttaa

SEQ ID NO: 195587 - DNA, 15 bp, Homo sapiens
tagttgaatccttta

SEQ ID NO: 195588 - DNA, 15 bp, Homo sapiens
ttagttgaatccttt

SEQ ID NO: 195589 - DNA, 15 bp, Homo sapiens
gttagttgaatcctt

SEQ ID NO: 195590 - DNA, 15 bp, Homo sapiens
agttagttgaatcct

SEQ ID NO: 195591 - DNA, 15 bp, Homo sapiens
gagttagttgaatcc

SEQ ID NO: 195592 - DNA, 15 bp, Homo sapiens
agagttagttgaatc

SEQ ID NO: 195593 - DNA, 15 bp, Homo sapiens
gagagttagttgaat

SEQ ID NO: 195594 - DNA, 15 bp, Homo sapiens
tgagagttagttgaa

SEQ ID NO: 195595 - DNA, 15 bp, Homo sapiens
ctgagagttagttga

SEQ ID NO: 195596 - DNA, 15 bp, Homo sapiens
tctgagagttagttg

SEQ ID NO: 195597 - DNA, 15 bp, Homo sapiens
ctctgagagttagtt

SEQ ID NO: 195598 - DNA, 15 bp, Homo sapiens
gctctgagagttagt

SEQ ID NO: 195599 - DNA, 15 bp, Homo sapiens
agctctgagagttag

SEQ ID NO: 195600 - DNA, 15 bp, Homo sapiens
aagctctgagagtta

SEQ ID NO: 195601 - DNA, 15 bp, Homo sapiens
aaagctctgagagtt

SEQ ID NO: 195602 - DNA, 15 bp, Homo sapiens
caaagctctgagagt

SEQ ID NO: 195603 - DNA, 15 bp, Homo sapiens
ccaaagctctgagag

SEQ ID NO: 195604 - DNA, 15 bp, Homo sapiens
tccaaagctctgaga

SEQ ID NO: 195605 - DNA, 15 bp, Homo sapiens
ttccaaagctctgag

SEQ ID NO: 195606 - DNA, 15 bp, Homo sapiens
cttccaaagctctga

SEQ ID NO: 195607 - DNA, 15 bp, Homo sapiens
tcttccaaagctctg

SEQ ID NO: 195608 - DNA, 15 bp, Homo sapiens
ttcttccaaagctct

SEQ ID NO: 195609 - DNA, 15 bp, Homo sapiens
tttcttccaaagctc

SEQ ID NO: 195610 - DNA, 15 bp, Homo sapiens
ctttcttccaaagct

SEQ ID NO: 195611 - DNA, 15 bp, Homo sapiens
tctttcttccaaagc

SEQ ID NO: 195612 - DNA, 15 bp, Homo sapiens
ttctttcttccaaag

SEQ ID NO: 195613 - DNA, 15 bp, Homo sapiens
tttctttcttccaaa

SEQ ID NO: 195614 - DNA, 15 bp, Homo sapiens
ttttctttcttccaa

SEQ ID NO: 195615 - DNA, 15 bp, Homo sapiens
tttttctttcttcca

SEQ ID NO: 195616 - DNA, 15 bp, Homo sapiens
ttttttctttcttcc

SEQ ID NO: 195617 - DNA, 15 bp, Homo sapiens
tttttttctttcttc

SEQ ID NO: 195618 - DNA, 15 bp, Homo sapiens
ttttttttctttctt

SEQ ID NO: 195619 - DNA, 15 bp, Homo sapiens
attttttttctttct

SEQ ID NO: 195620 - DNA, 15 bp, Homo sapiens
gattttttttctttc

SEQ ID NO: 195621 - DNA, 15 bp, Homo sapiens
ggattttttttcttt

SEQ ID NO: 195622 - DNA, 15 bp, Homo sapiens
tggattttttttctt

SEQ ID NO: 195623 - DNA, 15 bp, Homo sapiens
ttggattttttttct

SEQ ID NO: 195624 - DNA, 15 bp, Homo sapiens
tttggattttttttc

SEQ ID NO: 195625 - DNA, 15 bp, Homo sapiens
ttttggatttttttt

SEQ ID NO: 195626 - DNA, 15 bp, Homo sapiens
attttggattttttt

SEQ ID NO: 195627 - DNA, 15 bp, Homo sapiens
cattttggatttttt

SEQ ID NO: 195628 - DNA, 15 bp, Homo sapiens
acattttggattttt

SEQ ID NO: 195629 - DNA, 15 bp, Homo sapiens
cacattttggatttt

SEQ ID NO: 195630 - DNA, 15 bp, Homo sapiens
acacattttggattt

SEQ ID NO: 195631 - DNA, 15 bp, Homo sapiens
tacacattttggatt

SEQ ID NO: 195632 - DNA, 15 bp, Homo sapiens
gtacacattttggat

SEQ ID NO: 195633 - DNA, 15 bp, Homo sapiens
agtacacattttgga

SEQ ID NO: 195634 - DNA, 15 bp, Homo sapiens
tagtacacattttgg

SEQ ID NO: 195635 - DNA, 15 bp, Homo sapiens
ctagtacacattttg

SEQ ID NO: 195636 - DNA, 15 bp, Homo sapiens
cctagtacacatttt

SEQ ID NO: 195637 - DNA, 15 bp, Homo sapiens
acctagtacacattt

SEQ ID NO: 195638 - DNA, 15 bp, Homo sapiens
gacctagtacacatt

SEQ ID NO: 195639 - DNA, 15 bp, Homo sapiens
tgacctagtacacat

SEQ ID NO: 195640 - DNA, 15 bp, Homo sapiens
ctgacctagtacaca

SEQ ID NO: 195641 - DNA, 15 bp, Homo sapiens
actgacctagtacac

SEQ ID NO: 195642 - DNA, 15 bp, Homo sapiens
aactgacctagtaca

SEQ ID NO: 195643 - DNA, 15 bp, Homo sapiens
aaactgacctagtac

SEQ ID NO: 195644 - DNA, 15 bp, Homo sapiens
aaaactgacctagta

SEQ ID NO: 195645 - DNA, 15 bp, Homo sapiens
aaaaactgacctagt

SEQ ID NO: 195646 - DNA, 15 bp, Homo sapiens
taaaaactgacctag

SEQ ID NO: 195647 - DNA, 15 bp, Homo sapiens
ataaaaactgaccta

SEQ ID NO: 195648 - DNA, 15 bp, Homo sapiens
aataaaaactgacct

SEQ ID NO: 195649 - DNA, 15 bp, Homo sapiens
aaataaaaactgacc

SEQ ID NO: 195650 - DNA, 15 bp, Homo sapiens
caaataaaaactgac

SEQ ID NO: 195651 - DNA, 15 bp, Homo sapiens
ccaaataaaaactga

SEQ ID NO: 195652 - DNA, 15 bp, Homo sapiens
tccaaataaaaactg

SEQ ID NO: 195653 - DNA, 15 bp, Homo sapiens
ttccaaataaaaact

SEQ ID NO: 195654 - DNA, 15 bp, Homo sapiens
cttccaaataaaaac

SEQ ID NO: 195655 - DNA, 15 bp, Homo sapiens
tcttccaaataaaaa

SEQ ID NO: 195656 - DNA, 15 bp, Homo sapiens
atcttccaaataaaa

SEQ ID NO: 195657 - DNA, 15 bp, Homo sapiens
catcttccaaataaa

SEQ ID NO: 195658 - DNA, 15 bp, Homo sapiens
ccatcttccaaataa

SEQ ID NO: 195659 - DNA, 15 bp, Homo sapiens
tccatcttccaaata

SEQ ID NO: 195660 - DNA, 15 bp, Homo sapiens
atccatcttccaaat

SEQ ID NO: 195661 - DNA, 15 bp, Homo sapiens
aatccatcttccaaa

SEQ ID NO: 195662 - DNA, 15 bp, Homo sapiens
aaatccatcttccaa

SEQ ID NO: 195663 - DNA, 15 bp, Homo sapiens
aaaatccatcttcca

SEQ ID NO: 195664 - DNA, 15 bp, Homo sapiens
taaaatccatcttcc

SEQ ID NO: 195665 - DNA, 15 bp, Homo sapiens
ataaaatccatcttc

SEQ ID NO: 195666 - DNA, 15 bp, Homo sapiens
aataaaatccatctt

SEQ ID NO: 195667 - DNA, 15 bp, Homo sapiens
caataaaatccatct

SEQ ID NO: 195668 - DNA, 15 bp, Homo sapiens
acaataaaatccatc

SEQ ID NO: 195669 - DNA, 15 bp, Homo sapiens
aacaataaaatccat

SEQ ID NO: 195670 - DNA, 15 bp, Homo sapiens
taacaataaaatcca

SEQ ID NO: 195671 - DNA, 15 bp, Homo sapiens
ataacaataaaatcc

SEQ ID NO: 195672 - DNA, 15 bp, Homo sapiens
tataacaataaaatc

SEQ ID NO: 195673 - DNA, 15 bp, Homo sapiens
atataacaataaaat

SEQ ID NO: 195674 - DNA, 15 bp, Homo sapiens
aatataacaataaaa

SEQ ID NO: 195675 - DNA, 15 bp, Homo sapiens
aaatataacaataaa

SEQ ID NO: 195676 - DNA, 15 bp, Homo sapiens
aaaatataacaataa

SEQ ID NO: 195677 - DNA, 15 bp, Homo sapiens
aaaaatataacaata

SEQ ID NO: 195678 - DNA, 15 bp, Homo sapiens
taaaaatataacaat

SEQ ID NO: 195679 - DNA, 15 bp, Homo sapiens
ttaaaaatataacaa

SEQ ID NO: 195680 - DNA, 15 bp, Homo sapiens
tttaaaaatataaca

SEQ ID NO: 195681 - DNA, 15 bp, Homo sapiens
gtttaaaaatataac

SEQ ID NO: 195682 - DNA, 15 bp, Homo sapiens
agtttaaaaatataa

SEQ ID NO: 195683 - DNA, 15 bp, Homo sapiens
tagtttaaaaatata

SEQ ID NO: 195684 - DNA, 15 bp, Homo sapiens
ctagtttaaaaatat

SEQ ID NO: 195685 - DNA, 15 bp, Homo sapiens
cctagtttaaaaata

SEQ ID NO: 195686 - DNA, 15 bp, Homo sapiens
tcctagtttaaaaat

SEQ ID NO: 195687 - DNA, 15 bp, Homo sapiens
ttcctagtttaaaaa

SEQ ID NO: 195688 - DNA, 15 bp, Homo sapiens
cttcctagtttaaaa

SEQ ID NO: 195689 - DNA, 15 bp, Homo sapiens
acttcctagtttaaa

SEQ ID NO: 195690 - DNA, 15 bp, Homo sapiens
gacttcctagtttaa

SEQ ID NO: 195691 - DNA, 15 bp, Homo sapiens
agacttcctagttta

SEQ ID NO: 195692 - DNA, 15 bp, Homo sapiens
gagacttcctagttt

SEQ ID NO: 195693 - DNA, 15 bp, Homo sapiens
agagacttcctagtt

SEQ ID NO: 195694 - DNA, 15 bp, Homo sapiens
aagagacttcctagt

SEQ ID NO: 195695 - DNA, 15 bp, Homo sapiens
taagagacttcctag

SEQ ID NO: 195696 - DNA, 15 bp, Homo sapiens
gtaagagacttccta

SEQ ID NO: 195697 - DNA, 15 bp, Homo sapiens
ggtaagagacttcct

SEQ ID NO: 195698 - DNA, 15 bp, Homo sapiens
tggtaagagacttcc

SEQ ID NO: 195699 - DNA, 15 bp, Homo sapiens
gtggtaagagacttc

SEQ ID NO: 195700 - DNA, 15 bp, Homo sapiens
agtggtaagagactt

SEQ ID NO: 195701 - DNA, 15 bp, Homo sapiens
gagtggtaagagact

SEQ ID NO: 195702 - DNA, 15 bp, Homo sapiens
ggagtggtaagagac

SEQ ID NO: 195703 - DNA, 15 bp, Homo sapiens
gggagtggtaagaga

SEQ ID NO: 195704 - DNA, 15 bp, Homo sapiens
tgggagtggtaagag

SEQ ID NO: 195705 - DNA, 15 bp, Homo sapiens
atgggagtggtaaga

SEQ ID NO: 195706 - DNA, 15 bp, Homo sapiens
aatgggagtggtaag

SEQ ID NO: 195707 - DNA, 15 bp, Homo sapiens
gaatgggagtggtaa

SEQ ID NO: 195708 - DNA, 15 bp, Homo sapiens
agaatgggagtggta

SEQ ID NO: 195709 - DNA, 15 bp, Homo sapiens
gagaatgggagtggt

SEQ ID NO: 195710 - DNA, 15 bp, Homo sapiens
ggagaatgggagtgg

SEQ ID NO: 195711 - DNA, 15 bp, Homo sapiens
aggagaatgggagtg

SEQ ID NO: 195712 - DNA, 15 bp, Homo sapiens
aaggagaatgggagt

SEQ ID NO: 195713 - DNA, 15 bp, Homo sapiens
gaaggagaatgggag

SEQ ID NO: 195714 - DNA, 15 bp, Homo sapiens
ggaaggagaatggga

SEQ ID NO: 195715 - DNA, 15 bp, Homo sapiens
gggaaggagaatggg

SEQ ID NO: 195716 - DNA, 15 bp, Homo sapiens
agggaaggagaatgg

SEQ ID NO: 195717 - DNA, 15 bp, Homo sapiens
cagggaaggagaatg

SEQ ID NO: 195718 - DNA, 15 bp, Homo sapiens
ccagggaaggagaat

SEQ ID NO: 195719 - DNA, 15 bp, Homo sapiens
gccagggaaggagaa

SEQ ID NO: 195720 - DNA, 15 bp, Homo sapiens
ggccagggaaggaga

SEQ ID NO: 195721 - DNA, 15 bp, Homo sapiens
aggccagggaaggag

SEQ ID NO: 195722 - DNA, 15 bp, Homo sapiens
taggccagggaagga

SEQ ID NO: 195723 - DNA, 15 bp, Homo sapiens
ctaggccagggaagg

SEQ ID NO: 195724 - DNA, 15 bp, Homo sapiens
tctaggccagggaag

SEQ ID NO: 195725 - DNA, 15 bp, Homo sapiens
ctctaggccagggaa

SEQ ID NO: 195726 - DNA, 15 bp, Homo sapiens
cctctaggccaggga

SEQ ID NO: 195727 - DNA, 15 bp, Homo sapiens
ccctctaggccaggg

SEQ ID NO: 195728 - DNA, 15 bp, Homo sapiens
cccctctaggccagg

SEQ ID NO: 195729 - DNA, 15 bp, Homo sapiens
acccctctaggccag

SEQ ID NO: 195730 - DNA, 15 bp, Homo sapiens
cacccctctaggcca

SEQ ID NO: 195731 - DNA, 15 bp, Homo sapiens
ccacccctctaggcc

SEQ ID NO: 195732 - DNA, 15 bp, Homo sapiens
cccacccctctaggc

SEQ ID NO: 195733 - DNA, 15 bp, Homo sapiens
tcccacccctctagg

SEQ ID NO: 195734 - DNA, 15 bp, Homo sapiens
ctcccacccctctag

SEQ ID NO: 195735 - DNA, 15 bp, Homo sapiens
actcccacccctcta

SEQ ID NO: 195736 - DNA, 15 bp, Homo sapiens
aactcccacccctct

SEQ ID NO: 195737 - DNA, 15 bp, Homo sapiens
gaactcccacccctc

SEQ ID NO: 195738 - DNA, 15 bp, Homo sapiens
tgaactcccacccct

SEQ ID NO: 195739 - DNA, 15 bp, Homo sapiens
ctgaactcccacccc

SEQ ID NO: 195740 - DNA, 15 bp, Homo sapiens
tctgaactcccaccc

SEQ ID NO: 195741 - DNA, 15 bp, Homo sapiens
atctgaactcccacc

SEQ ID NO: 195742 - DNA, 15 bp, Homo sapiens
gatctgaactcccac

SEQ ID NO: 195743 - DNA, 15 bp, Homo sapiens
ggatctgaactccca

SEQ ID NO: 195744 - DNA, 15 bp, Homo sapiens
gggatctgaactccc

SEQ ID NO: 195745 - DNA, 15 bp, Homo sapiens
agggatctgaactcc

SEQ ID NO: 195746 - DNA, 15 bp, Homo sapiens
cagggatctgaactc

SEQ ID NO: 195747 - DNA, 15 bp, Homo sapiens
gcagggatctgaact

SEQ ID NO: 195748 - DNA, 15 bp, Homo sapiens
tgcagggatctgaac

SEQ ID NO: 195749 - DNA, 15 bp, Homo sapiens
ttgcagggatctgaa

SEQ ID NO: 195750 - DNA, 15 bp, Homo sapiens
gttgcagggatctga

SEQ ID NO: 195751 - DNA, 15 bp, Homo sapiens
tgttgcagggatctg

SEQ ID NO: 195752 - DNA, 15 bp, Homo sapiens
atgttgcagggatct

SEQ ID NO: 195753 - DNA, 15 bp, Homo sapiens
aatgttgcagggatc

SEQ ID NO: 195754 - DNA, 15 bp, Homo sapiens
aaatgttgcagggat

SEQ ID NO: 195755 - DNA, 15 bp, Homo sapiens
aaaatgttgcaggga

SEQ ID NO: 195756 - DNA, 15 bp, Homo sapiens
taaaatgttgcaggg

SEQ ID NO: 195757 - DNA, 15 bp, Homo sapiens
ttaaaatgttgcagg

SEQ ID NO: 195758 - DNA, 15 bp, Homo sapiens
gttaaaatgttgcag

SEQ ID NO: 195759 - DNA, 15 bp, Homo sapiens
ggttaaaatgttgca

SEQ ID NO: 195760 - DNA, 15 bp, Homo sapiens
gggttaaaatgttgc

SEQ ID NO: 195761 - DNA, 15 bp, Homo sapiens
tgggttaaaatgttg

SEQ ID NO: 195762 - DNA, 15 bp, Homo sapiens
ttgggttaaaatgtt

SEQ ID NO: 195763 - DNA, 15 bp, Homo sapiens
tttgggttaaaatgt

SEQ ID NO: 195764 - DNA, 15 bp, Homo sapiens
ttttgggttaaaatg

SEQ ID NO: 195765 - DNA, 15 bp, Homo sapiens
tttttgggttaaaat

SEQ ID NO: 195766 - DNA, 15 bp, Homo sapiens
ctttttgggttaaaa

SEQ ID NO: 195767 - DNA, 15 bp, Homo sapiens
gctttttgggttaaa

SEQ ID NO: 195768 - DNA, 15 bp, Homo sapiens
agctttttgggttaa

SEQ ID NO: 195769 - DNA, 15 bp, Homo sapiens
gagctttttgggtta

SEQ ID NO: 195770 - DNA, 15 bp, Homo sapiens
agagctttttgggtt

SEQ ID NO: 195771 - DNA, 15 bp, Homo sapiens
aagagctttttgggt

SEQ ID NO: 195772 - DNA, 15 bp, Homo sapiens
taagagctttttggg

SEQ ID NO: 195773 - DNA, 15 bp, Homo sapiens
gtaagagctttttgg

SEQ ID NO: 195774 - DNA, 15 bp, Homo sapiens
ggtaagagctttttg

SEQ ID NO: 195775 - DNA, 15 bp, Homo sapiens
aggtaagagcttttt

SEQ ID NO: 195776 - DNA, 15 bp, Homo sapiens
caggtaagagctttt

SEQ ID NO: 195777 - DNA, 15 bp, Homo sapiens
acaggtaagagcttt

SEQ ID NO: 195778 - DNA, 15 bp, Homo sapiens
aacaggtaagagctt

SEQ ID NO: 195779 - DNA, 15 bp, Homo sapiens
aaacaggtaagagct

SEQ ID NO: 195780 - DNA, 15 bp, Homo sapiens
taaacaggtaagagc

SEQ ID NO: 195781 - DNA, 15 bp, Homo sapiens
gtaaacaggtaagag

SEQ ID NO: 195782 - DNA, 15 bp, Homo sapiens
ggtaaacaggtaaga

SEQ ID NO: 195783 - DNA, 15 bp, Homo sapiens
aggtaaacaggtaag

SEQ ID NO: 195784 - DNA, 15 bp, Homo sapiens
aaggtaaacaggtaa

SEQ ID NO: 195785 - DNA, 15 bp, Homo sapiens
aaaggtaaacaggta

SEQ ID NO: 195786 - DNA, 15 bp, Homo sapiens
gaaaggtaaacaggt

SEQ ID NO: 195787 - DNA, 15 bp, Homo sapiens
agaaaggtaaacagg

SEQ ID NO: 195788 - DNA, 15 bp, Homo sapiens
aagaaaggtaaacag

SEQ ID NO: 195789 - DNA, 15 bp, Homo sapiens
aaagaaaggtaaaca

SEQ ID NO: 195790 - DNA, 15 bp, Homo sapiens
caaagaaaggtaaac

SEQ ID NO: 195791 - DNA, 15 bp, Homo sapiens
tcaaagaaaggtaaa

SEQ ID NO: 195792 - DNA, 15 bp, Homo sapiens
atcaaagaaaggtaa

SEQ ID NO: 195793 - DNA, 15 bp, Homo sapiens
tatcaaagaaaggta

SEQ ID NO: 195794 - DNA, 15 bp, Homo sapiens
ctatcaaagaaaggt

SEQ ID NO: 195795 - DNA, 15 bp, Homo sapiens
tctatcaaagaaagg

SEQ ID NO: 195796 - DNA, 15 bp, Homo sapiens
ctctatcaaagaaag

SEQ ID NO: 195797 - DNA, 15 bp, Homo sapiens
actctatcaaagaaa

SEQ ID NO: 195798 - DNA, 15 bp, Homo sapiens
aactctatcaaagaa

SEQ ID NO: 195799 - DNA, 15 bp, Homo sapiens
caactctatcaaaga

SEQ ID NO: 195800 - DNA, 15 bp, Homo sapiens
gcaactctatcaaag

SEQ ID NO: 195801 - DNA, 15 bp, Homo sapiens
ggcaactctatcaaa

SEQ ID NO: 195802 - DNA, 15 bp, Homo sapiens
tggcaactctatcaa

SEQ ID NO: 195803 - DNA, 15 bp, Homo sapiens
ttggcaactctatca

SEQ ID NO: 195804 - DNA, 15 bp, Homo sapiens
cttggcaactctatc

SEQ ID NO: 195805 - DNA, 15 bp, Homo sapiens
acttggcaactctat

SEQ ID NO: 195806 - DNA, 15 bp, Homo sapiens
cacttggcaactcta

SEQ ID NO: 195807 - DNA, 15 bp, Homo sapiens
ccacttggcaactct

SEQ ID NO: 195808 - DNA, 15 bp, Homo sapiens
accacttggcaactc

SEQ ID NO: 195809 - DNA, 15 bp, Homo sapiens
gaccacttggcaact

SEQ ID NO: 195810 - DNA, 15 bp, Homo sapiens
agaccacttggcaac

SEQ ID NO: 195811 - DNA, 15 bp, Homo sapiens
aagaccacttggcaa

SEQ ID NO: 195812 - DNA, 15 bp, Homo sapiens
caagaccacttggca

SEQ ID NO: 195813 - DNA, 15 bp, Homo sapiens
ccaagaccacttggc

SEQ ID NO: 195814 - DNA, 15 bp, Homo sapiens
accaagaccacttgg

SEQ ID NO: 195815 - DNA, 15 bp, Homo sapiens
aaccaagaccacttg

SEQ ID NO: 195816 - DNA, 15 bp, Homo sapiens
aaaccaagaccactt

SEQ ID NO: 195817 - DNA, 15 bp, Homo sapiens
aaaaccaagaccact

SEQ ID NO: 195818 - DNA, 15 bp, Homo sapiens
caaaaccaagaccac

SEQ ID NO: 195819 - DNA, 15 bp, Homo sapiens
acaaaaccaagacca

SEQ ID NO: 195820 - DNA, 15 bp, Homo sapiens
aacaaaaccaagacc

SEQ ID NO: 195821 - DNA, 15 bp, Homo sapiens
aaacaaaaccaagac

SEQ ID NO: 195822 - DNA, 15 bp, Homo sapiens
aaaacaaaaccaaga

SEQ ID NO: 195823 - DNA, 15 bp, Homo sapiens
caaaacaaaaccaag

SEQ ID NO: 195824 - DNA, 15 bp, Homo sapiens
acaaaacaaaaccaa

SEQ ID NO: 195825 - DNA, 15 bp, Homo sapiens
aacaaaacaaaacca

SEQ ID NO: 195826 - DNA, 15 bp, Homo sapiens
aaacaaaacaaaacc

SEQ ID NO: 195827 - DNA, 15 bp, Homo sapiens
gaaaaacaaaacaaa

SEQ ID NO: 195828 - DNA, 15 bp, Homo sapiens
agaaaaacaaaacaa

SEQ ID NO: 195829 - DNA, 15 bp, Homo sapiens
aagaaaaacaaaaca

SEQ ID NO: 195830 - DNA, 15 bp, Homo sapiens
aaagaaaaacaaaac

SEQ ID NO: 195831 - DNA, 15 bp, Homo sapiens
aaaagaaaaacaaaa

SEQ ID NO: 195832 - DNA, 15 bp, Homo sapiens
taaaagaaaaacaaa

SEQ ID NO: 195833 - DNA, 15 bp, Homo sapiens
ctaaaagaaaaacaa

SEQ ID NO: 195834 - DNA, 15 bp, Homo sapiens
tctaaaagaaaaaca

SEQ ID NO: 195835 - DNA, 15 bp, Homo sapiens
ttctaaaagaaaaac

SEQ ID NO: 195836 - DNA, 15 bp, Homo sapiens
cttctaaaagaaaaa

SEQ ID NO: 195837 - DNA, 15 bp, Homo sapiens
tcttctaaaagaaaa

SEQ ID NO: 195838 - DNA, 15 bp, Homo sapiens
ctcttctaaaagaaa

SEQ ID NO: 195839 - DNA, 15 bp, Homo sapiens
tctcttctaaaagaa

SEQ ID NO: 195840 - DNA, 15 bp, Homo sapiens
ctctcttctaaaaga

SEQ ID NO: 195841 - DNA, 15 bp, Homo sapiens
cctctcttctaaaag

SEQ ID NO: 195842 - DNA, 15 bp, Homo sapiens
tcctctcttctaaaa

SEQ ID NO: 195843 - DNA, 15 bp, Homo sapiens
atcctctcttctaaa

SEQ ID NO: 195844 - DNA, 15 bp, Homo sapiens
gatcctctcttctaa

SEQ ID NO: 195845 - DNA, 15 bp, Homo sapiens
agatcctctcttcta

SEQ ID NO: 195846 - DNA, 15 bp, Homo sapiens
tagatcctctcttct

SEQ ID NO: 195847 - DNA, 15 bp, Homo sapiens
ctagatcctctcttc

SEQ ID NO: 195848 - DNA, 15 bp, Homo sapiens
gctagatcctctctt

SEQ ID NO: 195849 - DNA, 15 bp, Homo sapiens
agctagatcctctct

SEQ ID NO: 195850 - DNA, 15 bp, Homo sapiens
tagctagatcctctc

SEQ ID NO: 195851 - DNA, 15 bp, Homo sapiens
atagctagatcctct

SEQ ID NO: 195852 - DNA, 15 bp, Homo sapiens
catagctagatcctc

SEQ ID NO: 195853 - DNA, 15 bp, Homo sapiens
acatagctagatcct

SEQ ID NO: 195854 - DNA, 15 bp, Homo sapiens
aacatagctagatcc

SEQ ID NO: 195855 - DNA, 15 bp, Homo sapiens
caacatagctagatc

SEQ ID NO: 195856 - DNA, 15 bp, Homo sapiens
gcaacatagctagat

SEQ ID NO: 195857 - DNA, 15 bp, Homo sapiens
ggcaacatagctaga

SEQ ID NO: 195858 - DNA, 15 bp, Homo sapiens
aggcaacatagctag

SEQ ID NO: 195859 - DNA, 15 bp, Homo sapiens
taggcaacatagcta

SEQ ID NO: 195860 - DNA, 15 bp, Homo sapiens
ctaggcaacatagct

SEQ ID NO: 195861 - DNA, 15 bp, Homo sapiens
cctaggcaacatagc

SEQ ID NO: 195862 - DNA, 15 bp, Homo sapiens
gcctaggcaacatag

SEQ ID NO: 195863 - DNA, 15 bp, Homo sapiens
agcctaggcaacata

SEQ ID NO: 195864 - DNA, 15 bp, Homo sapiens
aagcctaggcaacat

SEQ ID NO: 195865 - DNA, 15 bp, Homo sapiens
caagcctaggcaaca

SEQ ID NO: 195866 - DNA, 15 bp, Homo sapiens
acaagcctaggcaac

SEQ ID NO: 195867 - DNA, 15 bp, Homo sapiens
gacaagcctaggcaa

SEQ ID NO: 195868 - DNA, 15 bp, Homo sapiens
agacaagcctaggca

SEQ ID NO: 195869 - DNA, 15 bp, Homo sapiens
gagacaagcctaggc

SEQ ID NO: 195870 - DNA, 15 bp, Homo sapiens
tgagacaagcctagg

SEQ ID NO: 195871 - DNA, 15 bp, Homo sapiens
ttgagacaagcctag

SEQ ID NO: 195872 - DNA, 15 bp, Homo sapiens
tttgagacaagccta

SEQ ID NO: 195873 - DNA, 15 bp, Homo sapiens
gtttgagacaagcct

SEQ ID NO: 195874 - DNA, 15 bp, Homo sapiens
agtttgagacaagcc

SEQ ID NO: 195875 - DNA, 15 bp, Homo sapiens
gagtttgagacaagc

SEQ ID NO: 195876 - DNA, 15 bp, Homo sapiens
ggagtttgagacaag

SEQ ID NO: 195877 - DNA, 15 bp, Homo sapiens
aggagtttgagacaa

SEQ ID NO: 195878 - DNA, 15 bp, Homo sapiens
caggagtttgagaca

SEQ ID NO: 195879 - DNA, 15 bp, Homo sapiens
ccaggagtttgagac

SEQ ID NO: 195880 - DNA, 15 bp, Homo sapiens
cccaggagtttgaga

SEQ ID NO: 195881 - DNA, 15 bp, Homo sapiens
gcccaggagtttgag

SEQ ID NO: 195882 - DNA, 15 bp, Homo sapiens
agcccaggagtttga

SEQ ID NO: 195883 - DNA, 15 bp, Homo sapiens
gagcccaggagtttg

SEQ ID NO: 195884 - DNA, 15 bp, Homo sapiens
tgagcccaggagttt

SEQ ID NO: 195885 - DNA, 15 bp, Homo sapiens
ttgagcccaggagtt

SEQ ID NO: 195886 - DNA, 15 bp, Homo sapiens
cttgagcccaggagt

SEQ ID NO: 195887 - DNA, 15 bp, Homo sapiens
cgcttgagcccagga

SEQ ID NO: 195888 - DNA, 15 bp, Homo sapiens
ccgcttgagcccagg

SEQ ID NO: 195889 - DNA, 15 bp, Homo sapiens
accgcttgagcccag

SEQ ID NO: 195890 - DNA, 15 bp, Homo sapiens
gaccgcttgagccca

SEQ ID NO: 195891 - DNA, 15 bp, Homo sapiens
ggaccgcttgagccc

SEQ ID NO: 195892 - DNA, 15 bp, Homo sapiens
aggaccgcttgagcc

SEQ ID NO: 195893 - DNA, 15 bp, Homo sapiens
gaggaccgcttgagc

SEQ ID NO: 195894 - DNA, 15 bp, Homo sapiens
ggaggaccgcttgag

SEQ ID NO: 195895 - DNA, 15 bp, Homo sapiens
tggaggaccgcttga

SEQ ID NO: 195896 - DNA, 15 bp, Homo sapiens
ctggaggaccgcttg

SEQ ID NO: 195897 - DNA, 15 bp, Homo sapiens
gctggaggaccgctt

SEQ ID NO: 195898 - DNA, 15 bp, Homo sapiens
agctggaggaccgct

SEQ ID NO: 195899 - DNA, 15 bp, Homo sapiens
aagctggaggaccgc

SEQ ID NO: 195900 - DNA, 15 bp, Homo sapiens
gaagctggaggaccg

SEQ ID NO: 195901 - DNA, 15 bp, Homo sapiens
tgaagctggaggacc

SEQ ID NO: 195902 - DNA, 15 bp, Homo sapiens
ctgaagctggaggac

SEQ ID NO: 195903 - DNA, 15 bp, Homo sapiens
gctgaagctggagga

SEQ ID NO: 195904 - DNA, 15 bp, Homo sapiens
ggctgaagctggagg

SEQ ID NO: 195905 - DNA, 15 bp, Homo sapiens
aggctgaagctggag

SEQ ID NO: 195906 - DNA, 15 bp, Homo sapiens
gaggctgaagctgga

SEQ ID NO: 195907 - DNA, 15 bp, Homo sapiens
agaggctgaagctgg

SEQ ID NO: 195908 - DNA, 15 bp, Homo sapiens
gagaggctgaagctg

SEQ ID NO: 195909 - DNA, 15 bp, Homo sapiens
tgagaggctgaagct

SEQ ID NO: 195910 - DNA, 15 bp, Homo sapiens
ttgagaggctgaagc

SEQ ID NO: 195911 - DNA, 15 bp, Homo sapiens
cttgagaggctgaag

SEQ ID NO: 195912 - DNA, 15 bp, Homo sapiens
gcttgagaggctgaa

SEQ ID NO: 195913 - DNA, 15 bp, Homo sapiens
tgcttgagaggctga

SEQ ID NO: 195914 - DNA, 15 bp, Homo sapiens
ctgcttgagaggctg

SEQ ID NO: 195915 - DNA, 15 bp, Homo sapiens
gctgcttgagaggct

SEQ ID NO: 195916 - DNA, 15 bp, Homo sapiens
agctgcttgagaggc

SEQ ID NO: 195917 - DNA, 15 bp, Homo sapiens
tagctgcttgagagg

SEQ ID NO: 195918 - DNA, 15 bp, Homo sapiens
ctagctgcttgagag

SEQ ID NO: 195919 - DNA, 15 bp, Homo sapiens
cctagctgcttgaga

SEQ ID NO: 195920 - DNA, 15 bp, Homo sapiens
tcctagctgcttgag

SEQ ID NO: 195921 - DNA, 15 bp, Homo sapiens
atcctagctgcttga

SEQ ID NO: 195922 - DNA, 15 bp, Homo sapiens
aatcctagctgcttg

SEQ ID NO: 195923 - DNA, 15 bp, Homo sapiens
taatcctagctgctt

SEQ ID NO: 195924 - DNA, 15 bp, Homo sapiens
gtaatcctagctgct

SEQ ID NO: 195925 - DNA, 15 bp, Homo sapiens
tgtaatcctagctgc

SEQ ID NO: 195926 - DNA, 15 bp, Homo sapiens
ctgtaatcctagctg

SEQ ID NO: 195927 - DNA, 15 bp, Homo sapiens
cctgtaatcctagct

SEQ ID NO: 195928 - DNA, 15 bp, Homo sapiens
gcctgtaatcctagc

SEQ ID NO: 195929 - DNA, 15 bp, Homo sapiens
atgcctgtaatccta

SEQ ID NO: 195930 - DNA, 15 bp, Homo sapiens
catgcctgtaatcct

SEQ ID NO: 195931 - DNA, 15 bp, Homo sapiens
cggcacatgcctgta

SEQ ID NO: 195932 - DNA, 15 bp, Homo sapiens
gcggcacatgcctgt

SEQ ID NO: 195933 - DNA, 15 bp, Homo sapiens
ggcggcacatgcctg

SEQ ID NO: 195934 - DNA, 15 bp, Homo sapiens
tggcggcacatgcct

SEQ ID NO: 195935 - DNA, 15 bp, Homo sapiens
gtggcggcacatgcc

SEQ ID NO: 195936 - DNA, 15 bp, Homo sapiens
tgtggcggcacatgc

SEQ ID NO: 195937 - DNA, 15 bp, Homo sapiens
gtgtggcggcacatg

SEQ ID NO: 195938 - DNA, 15 bp, Homo sapiens
agtgtggcggcacat

SEQ ID NO: 195939 - DNA, 15 bp, Homo sapiens
gagtgtggcggcaca

SEQ ID NO: 195940 - DNA, 15 bp, Homo sapiens
tgagtgtggcggcac

SEQ ID NO: 195941 - DNA, 15 bp, Homo sapiens
ctgagtgtggcggca

SEQ ID NO: 195942 - DNA, 15 bp, Homo sapiens
gctgagtgtggcggc

SEQ ID NO: 195943 - DNA, 15 bp, Homo sapiens
agctgagtgtggcgg

SEQ ID NO: 195944 - DNA, 15 bp, Homo sapiens
gagctgagtgtggcg

SEQ ID NO: 195945 - DNA, 15 bp, Homo sapiens
tgagctgagtgtggc

SEQ ID NO: 195946 - DNA, 15 bp, Homo sapiens
gtgagctgagtgtgg

SEQ ID NO: 195947 - DNA, 15 bp, Homo sapiens
ggtgagctgagtgtg

SEQ ID NO: 195948 - DNA, 15 bp, Homo sapiens
cggtgagctgagtgt

SEQ ID NO: 195949 - DNA, 15 bp, Homo sapiens
tcggtgagctgagtg

SEQ ID NO: 195950 - DNA, 15 bp, Homo sapiens
ctcggtgagctgagt

SEQ ID NO: 195951 - DNA, 15 bp, Homo sapiens
gctcggtgagctgag

SEQ ID NO: 195952 - DNA, 15 bp, Homo sapiens
cgctcggtgagctga

SEQ ID NO: 195953 - DNA, 15 bp, Homo sapiens
ccgctcggtgagctg

SEQ ID NO: 195954 - DNA, 15 bp, Homo sapiens
accgctcggtgagct

SEQ ID NO: 195955 - DNA, 15 bp, Homo sapiens
gaccgctcggtgagc

SEQ ID NO: 195956 - DNA, 15 bp, Homo sapiens
agaccgctcggtgag

SEQ ID NO: 195957 - DNA, 15 bp, Homo sapiens
aagaccgctcggtga

SEQ ID NO: 195958 - DNA, 15 bp, Homo sapiens
caagaccgctcggtg

SEQ ID NO: 195959 - DNA, 15 bp, Homo sapiens
tcaagaccgctcggt

SEQ ID NO: 195960 - DNA, 15 bp, Homo sapiens
ttcaagaccgctcgg

SEQ ID NO: 195961 - DNA, 15 bp, Homo sapiens
gttcaagaccgctcg

SEQ ID NO: 195962 - DNA, 15 bp, Homo sapiens
tgttcaagaccgctc

SEQ ID NO: 195963 - DNA, 15 bp, Homo sapiens
ttgttcaagaccgct

SEQ ID NO: 195964 - DNA, 15 bp, Homo sapiens
tttgttcaagaccgc

SEQ ID NO: 195965 - DNA, 15 bp, Homo sapiens
ttttgttcaagaccg

SEQ ID NO: 195966 - DNA, 15 bp, Homo sapiens
tttttgttcaagacc

SEQ ID NO: 195967 - DNA, 15 bp, Homo sapiens
ttttttgttcaagac

SEQ ID NO: 195968 - DNA, 15 bp, Homo sapiens
gttttttgttcaaga

SEQ ID NO: 195969 - DNA, 15 bp, Homo sapiens
ggttttttgttcaag

SEQ ID NO: 195970 - DNA, 15 bp, Homo sapiens
gggttttttgttcaa

SEQ ID NO: 195971 - DNA, 15 bp, Homo sapiens
tgggttttttgttca

SEQ ID NO: 195972 - DNA, 15 bp, Homo sapiens
ttgggttttttgttc

SEQ ID NO: 195973 - DNA, 15 bp, Homo sapiens
tttgggttttttgtt

SEQ ID NO: 195974 - DNA, 15 bp, Homo sapiens
atttgggttttttgt

SEQ ID NO: 195975 - DNA, 15 bp, Homo sapiens
aatttgggttttttg

SEQ ID NO: 195976 - DNA, 15 bp, Homo sapiens
caatttgggtttttt

SEQ ID NO: 195977 - DNA, 15 bp, Homo sapiens
ccaatttgggttttt

SEQ ID NO: 195978 - DNA, 15 bp, Homo sapiens
accaatttgggtttt

SEQ ID NO: 195979 - DNA, 15 bp, Homo sapiens
gaccaatttgggttt

SEQ ID NO: 195980 - DNA, 15 bp, Homo sapiens
ggaccaatttgggtt

SEQ ID NO: 195981 - DNA, 15 bp, Homo sapiens
tggaccaatttgggt

SEQ ID NO: 195982 - DNA, 15 bp, Homo sapiens
ttggaccaatttggg

SEQ ID NO: 195983 - DNA, 15 bp, Homo sapiens
cttggaccaatttgg

SEQ ID NO: 195984 - DNA, 15 bp, Homo sapiens
acttggaccaatttg

SEQ ID NO: 195985 - DNA, 15 bp, Homo sapiens
tacttggaccaattt

SEQ ID NO: 195986 - DNA, 15 bp, Homo sapiens
atacttggaccaatt

SEQ ID NO: 195987 - DNA, 15 bp, Homo sapiens
catacttggaccaat

SEQ ID NO: 195988 - DNA, 15 bp, Homo sapiens
ccatacttggaccaa

SEQ ID NO: 195989 - DNA, 15 bp, Homo sapiens
tccatacttggacca

SEQ ID NO: 195990 - DNA, 15 bp, Homo sapiens
atccatacttggacc

SEQ ID NO: 195991 - DNA, 15 bp, Homo sapiens
aatccatacttggac

SEQ ID NO: 195992 - DNA, 15 bp, Homo sapiens
taatccatacttgga

SEQ ID NO: 195993 - DNA, 15 bp, Homo sapiens
ataatccatacttgg

SEQ ID NO: 195994 - DNA, 15 bp, Homo sapiens
tataatccatacttg

SEQ ID NO: 195995 - DNA, 15 bp, Homo sapiens
gtataatccatactt

SEQ ID NO: 195996 - DNA, 15 bp, Homo sapiens
tgtataatccatact

SEQ ID NO: 195997 - DNA, 15 bp, Homo sapiens
gtgtataatccatac

SEQ ID NO: 195998 - DNA, 15 bp, Homo sapiens
agtgtataatccata

SEQ ID NO: 195999 - DNA, 15 bp, Homo sapiens
tagtgtataatccat

SEQ ID NO: 196000 - DNA, 15 bp, Homo sapiens
ttagtgtataatcca

SEQ ID NO: 196001 - DNA, 15 bp, Homo sapiens
attagtgtataatcc

SEQ ID NO: 196002 - DNA, 15 bp, Homo sapiens
cattagtgtataatc

SEQ ID NO: 196003 - DNA, 15 bp, Homo sapiens
tcattagtgtataat

SEQ ID NO: 196004 - DNA, 15 bp, Homo sapiens
atcattagtgtataa

SEQ ID NO: 196005 - DNA, 15 bp, Homo sapiens
tatcattagtgtata

SEQ ID NO: 196006 - DNA, 15 bp, Homo sapiens
atatcattagtgtat

SEQ ID NO: 196007 - DNA, 15 bp, Homo sapiens
aatatcattagtgta

SEQ ID NO: 196008 - DNA, 15 bp, Homo sapiens
aaatatcattagtgt

SEQ ID NO: 196009 - DNA, 15 bp, Homo sapiens
taaatatcattagtg

SEQ ID NO: 196010 - DNA, 15 bp, Homo sapiens
ataaatatcattagt

SEQ ID NO: 196011 - DNA, 15 bp, Homo sapiens
gataaatatcattag

SEQ ID NO: 196012 - DNA, 15 bp, Homo sapiens
tgataaatatcatta

SEQ ID NO: 196013 - DNA, 15 bp, Homo sapiens
gtgataaatatcatt

SEQ ID NO: 196014 - DNA, 15 bp, Homo sapiens
ggtgataaatatcat

SEQ ID NO: 196015 - DNA, 15 bp, Homo sapiens
tggtgataaatatca

SEQ ID NO: 196016 - DNA, 15 bp, Homo sapiens
atggtgataaatatc

SEQ ID NO: 196017 - DNA, 15 bp, Homo sapiens
gatggtgataaatat

SEQ ID NO: 196018 - DNA, 15 bp, Homo sapiens
tgatggtgataaata

SEQ ID NO: 196019 - DNA, 15 bp, Homo sapiens
gtgatggtgataaat

SEQ ID NO: 196020 - DNA, 15 bp, Homo sapiens
agtgatggtgataaa

SEQ ID NO: 196021 - DNA, 15 bp, Homo sapiens
tagtgatggtgataa

SEQ ID NO: 196022 - DNA, 15 bp, Homo sapiens
atagtgatggtgata

SEQ ID NO: 196023 - DNA, 15 bp, Homo sapiens
gatagtgatggtgat

SEQ ID NO: 196024 - DNA, 15 bp, Homo sapiens
cgatagtgatggtga

SEQ ID NO: 196025 - DNA, 15 bp, Homo sapiens
acgatagtgatggtg

SEQ ID NO: 196026 - DNA, 15 bp, Homo sapiens
aacgatagtgatggt

SEQ ID NO: 196027 - DNA, 15 bp, Homo sapiens
caacgatagtgatgg

SEQ ID NO: 196028 - DNA, 15 bp, Homo sapiens
acaacgatagtgatg

SEQ ID NO: 196029 - DNA, 15 bp, Homo sapiens
gacaacgatagtgat

SEQ ID NO: 196030 - DNA, 15 bp, Homo sapiens
tgacaacgatagtga

SEQ ID NO: 196031 - DNA, 15 bp, Homo sapiens
atgacaacgatagtg

SEQ ID NO: 196032 - DNA, 15 bp, Homo sapiens
aatgacaacgatagt

SEQ ID NO: 196033 - DNA, 15 bp, Homo sapiens
taatgacaacgatag

SEQ ID NO: 196034 - DNA, 15 bp, Homo sapiens
ataatgacaacgata

SEQ ID NO: 196035 - DNA, 15 bp, Homo sapiens
gataatgacaacgat

SEQ ID NO: 196036 - DNA, 15 bp, Homo sapiens
tgataatgacaacga

SEQ ID NO: 196037 - DNA, 15 bp, Homo sapiens
ctgataatgacaacg

SEQ ID NO: 196038 - DNA, 15 bp, Homo sapiens
actgataatgacaac

SEQ ID NO: 196039 - DNA, 15 bp, Homo sapiens
aactgataatgacaa

SEQ ID NO: 196040 - DNA, 15 bp, Homo sapiens
aaactgataatgaca

SEQ ID NO: 196041 - DNA, 15 bp, Homo sapiens
aaaactgataatgac

SEQ ID NO: 196042 - DNA, 15 bp, Homo sapiens
taaaactgataatga

SEQ ID NO: 196043 - DNA, 15 bp, Homo sapiens
ataaaactgataatg

SEQ ID NO: 196044 - DNA, 15 bp, Homo sapiens
aataaaactgataat

SEQ ID NO: 196045 - DNA, 15 bp, Homo sapiens
taataaaactgataa

SEQ ID NO: 196046 - DNA, 15 bp, Homo sapiens
ataataaaactgata

SEQ ID NO: 196047 - DNA, 15 bp, Homo sapiens
tataataaaactgat

SEQ ID NO: 196048 - DNA, 15 bp, Homo sapiens
ctataataaaactga

SEQ ID NO: 196049 - DNA, 15 bp, Homo sapiens
actataataaaactg

SEQ ID NO: 196050 - DNA, 15 bp, Homo sapiens
cactataataaaact

SEQ ID NO: 196051 - DNA, 15 bp, Homo sapiens
tcactataataaaac

SEQ ID NO: 196052 - DNA, 15 bp, Homo sapiens
gtcactataataaaa

SEQ ID NO: 196053 - DNA, 15 bp, Homo sapiens
agtcactataataaa

SEQ ID NO: 196054 - DNA, 15 bp, Homo sapiens
aagtcactataataa

SEQ ID NO: 196055 - DNA, 15 bp, Homo sapiens
gaagtcactataata

SEQ ID NO: 196056 - DNA, 15 bp, Homo sapiens
ggaagtcactataat

SEQ ID NO: 196057 - DNA, 15 bp, Homo sapiens
tggaagtcactataa

SEQ ID NO: 196058 - DNA, 15 bp, Homo sapiens
ctggaagtcactata

SEQ ID NO: 196059 - DNA, 15 bp, Homo sapiens
actggaagtcactat

SEQ ID NO: 196060 - DNA, 15 bp, Homo sapiens
aactggaagtcacta

SEQ ID NO: 196061 - DNA, 15 bp, Homo sapiens
gaactggaagtcact

SEQ ID NO: 196062 - DNA, 15 bp, Homo sapiens
cgaactggaagtcac

SEQ ID NO: 196063 - DNA, 15 bp, Homo sapiens
ccgaactggaagtca

SEQ ID NO: 196064 - DNA, 15 bp, Homo sapiens
accgaactggaagtc

SEQ ID NO: 196065 - DNA, 15 bp, Homo sapiens
taccgaactggaagt

SEQ ID NO: 196066 - DNA, 15 bp, Homo sapiens
ataccgaactggaag

SEQ ID NO: 196067 - DNA, 15 bp, Homo sapiens
gataccgaactggaa

SEQ ID NO: 196068 - DNA, 15 bp, Homo sapiens
agataccgaactgga

SEQ ID NO: 196069 - DNA, 15 bp, Homo sapiens
tagataccgaactgg

SEQ ID NO: 196070 - DNA, 15 bp, Homo sapiens
atagataccgaactg

SEQ ID NO: 196071 - DNA, 15 bp, Homo sapiens
aatagataccgaact

SEQ ID NO: 196072 - DNA, 15 bp, Homo sapiens
caatagataccgaac

SEQ ID NO: 196073 - DNA, 15 bp, Homo sapiens
acaatagataccgaa

SEQ ID NO: 196074 - DNA, 15 bp, Homo sapiens
cacaatagataccga

SEQ ID NO: 196075 - DNA, 15 bp, Homo sapiens
ccacaatagataccg

SEQ ID NO: 196076 - DNA, 15 bp, Homo sapiens
cccacaatagatacc

SEQ ID NO: 196077 - DNA, 15 bp, Homo sapiens
acccacaatagatac

SEQ ID NO: 196078 - DNA, 15 bp, Homo sapiens
cacccacaatagata

SEQ ID NO: 196079 - DNA, 15 bp, Homo sapiens
gcacccacaatagat

SEQ ID NO: 196080 - DNA, 15 bp, Homo sapiens
agcacccacaataga

SEQ ID NO: 196081 - DNA, 15 bp, Homo sapiens
aagcacccacaatag

SEQ ID NO: 196082 - DNA, 15 bp, Homo sapiens
caagcacccacaata

SEQ ID NO: 196083 - DNA, 15 bp, Homo sapiens
ccaagcacccacaat

SEQ ID NO: 196084 - DNA, 15 bp, Homo sapiens
tccaagcacccacaa

SEQ ID NO: 196085 - DNA, 15 bp, Homo sapiens
ctccaagcacccaca

SEQ ID NO: 196086 - DNA, 15 bp, Homo sapiens
gctccaagcacccac

SEQ ID NO: 196087 - DNA, 15 bp, Homo sapiens
agctccaagcaccca

SEQ ID NO: 196088 - DNA, 15 bp, Homo sapiens
aagctccaagcaccc

SEQ ID NO: 196089 - DNA, 15 bp, Homo sapiens
aaagctccaagcacc

SEQ ID NO: 196090 - DNA, 15 bp, Homo sapiens
aaaagctccaagcac

SEQ ID NO: 196091 - DNA, 15 bp, Homo sapiens
caaaagctccaagca

SEQ ID NO: 196092 - DNA, 15 bp, Homo sapiens
gcaaaagctccaagc

SEQ ID NO: 196093 - DNA, 15 bp, Homo sapiens
tgcaaaagctccaag

SEQ ID NO: 196094 - DNA, 15 bp, Homo sapiens
gtgcaaaagctccaa

SEQ ID NO: 196095 - DNA, 15 bp, Homo sapiens
tgtgcaaaagctcca

SEQ ID NO: 196096 - DNA, 15 bp, Homo sapiens
atgtgcaaaagctcc

SEQ ID NO: 196097 - DNA, 15 bp, Homo sapiens
catgtgcaaaagctc

SEQ ID NO: 196098 - DNA, 15 bp, Homo sapiens
acatgtgcaaaagct

SEQ ID NO: 196099 - DNA, 15 bp, Homo sapiens
tacatgtgcaaaagc

SEQ ID NO: 196100 - DNA, 15 bp, Homo sapiens
ttacatgtgcaaaag

SEQ ID NO: 196101 - DNA, 15 bp, Homo sapiens
attacatgtgcaaaa

SEQ ID NO: 196102 - DNA, 15 bp, Homo sapiens
gattacatgtgcaaa

SEQ ID NO: 196103 - DNA, 15 bp, Homo sapiens
agattacatgtgcaa

SEQ ID NO: 196104 - DNA, 15 bp, Homo sapiens
aagattacatgtgca

SEQ ID NO: 196105 - DNA, 15 bp, Homo sapiens
taagattacatgtgc

SEQ ID NO: 196106 - DNA, 15 bp, Homo sapiens
ataagattacatgtg

SEQ ID NO: 196107 - DNA, 15 bp, Homo sapiens
aataagattacatgt

SEQ ID NO: 196108 - DNA, 15 bp, Homo sapiens
aaataagattacatg

SEQ ID NO: 196109 - DNA, 15 bp, Homo sapiens
taaataagattacat

SEQ ID NO: 196110 - DNA, 15 bp, Homo sapiens
ttaaataagattaca

SEQ ID NO: 196111 - DNA, 15 bp, Homo sapiens
attaaataagattac

SEQ ID NO: 196112 - DNA, 15 bp, Homo sapiens
gattaaataagatta

SEQ ID NO: 196113 - DNA, 15 bp, Homo sapiens
ggattaaataagatt

SEQ ID NO: 196114 - DNA, 15 bp, Homo sapiens
aggattaaataagat

SEQ ID NO: 196115 - DNA, 15 bp, Homo sapiens
gaggattaaataaga

SEQ ID NO: 196116 - DNA, 15 bp, Homo sapiens
tgaggattaaataag

SEQ ID NO: 196117 - DNA, 15 bp, Homo sapiens
gtgaggattaaataa

SEQ ID NO: 196118 - DNA, 15 bp, Homo sapiens
tgtgaggattaaata

SEQ ID NO: 196119 - DNA, 15 bp, Homo sapiens
gtgtgaggattaaat

SEQ ID NO: 196120 - DNA, 15 bp, Homo sapiens
ggtgtgaggattaaa

SEQ ID NO: 196121 - DNA, 15 bp, Homo sapiens
tggtgtgaggattaa

SEQ ID NO: 196122 - DNA, 15 bp, Homo sapiens
ttggtgtgaggatta

SEQ ID NO: 196123 - DNA, 15 bp, Homo sapiens
gttggtgtgaggatt

SEQ ID NO: 196124 - DNA, 15 bp, Homo sapiens
ggttggtgtgaggat

SEQ ID NO: 196125 - DNA, 15 bp, Homo sapiens
aggttggtgtgagga

SEQ ID NO: 196126 - DNA, 15 bp, Homo sapiens
taggttggtgtgagg

SEQ ID NO: 196127 - DNA, 15 bp, Homo sapiens
ctaggttggtgtgag

SEQ ID NO: 196128 - DNA, 15 bp, Homo sapiens
cctaggttggtgtga

SEQ ID NO: 196129 - DNA, 15 bp, Homo sapiens
tcctaggttggtgtg

SEQ ID NO: 196130 - DNA, 15 bp, Homo sapiens
ctcctaggttggtgt

SEQ ID NO: 196131 - DNA, 15 bp, Homo sapiens
cctcctaggttggtg

SEQ ID NO: 196132 - DNA, 15 bp, Homo sapiens
tcctcctaggttggt

SEQ ID NO: 196133 - DNA, 15 bp, Homo sapiens
ttcctcctaggttgg

SEQ ID NO: 196134 - DNA, 15 bp, Homo sapiens
cttcctcctaggttg

SEQ ID NO: 196135 - DNA, 15 bp, Homo sapiens
ccttcctcctaggtt

SEQ ID NO: 196136 - DNA, 15 bp, Homo sapiens
accttcctcctaggt

SEQ ID NO: 196137 - DNA, 15 bp, Homo sapiens
taccttcctcctagg

SEQ ID NO: 196138 - DNA, 15 bp, Homo sapiens
ataccttcctcctag

SEQ ID NO: 196139 - DNA, 15 bp, Homo sapiens
aataccttcctccta

SEQ ID NO: 196140 - DNA, 15 bp, Homo sapiens
taataccttcctcct

SEQ ID NO: 196141 - DNA, 15 bp, Homo sapiens
ataataccttcctcc

SEQ ID NO: 196142 - DNA, 15 bp, Homo sapiens
aataataccttcctc

SEQ ID NO: 196143 - DNA, 15 bp, Homo sapiens
taataataccttcct

SEQ ID NO: 196144 - DNA, 15 bp, Homo sapiens
ataataataccttcc

SEQ ID NO: 196145 - DNA, 15 bp, Homo sapiens
aataataataccttc

SEQ ID NO: 196146 - DNA, 15 bp, Homo sapiens
taataataatacctt

SEQ ID NO: 196147 - DNA, 15 bp, Homo sapiens
ataataataatacct

SEQ ID NO: 196148 - DNA, 15 bp, Homo sapiens
aataataataatacc

SEQ ID NO: 196149 - DNA, 15 bp, Homo sapiens
caataataataatac

SEQ ID NO: 196150 - DNA, 15 bp, Homo sapiens
gcaataataataata

SEQ ID NO: 196151 - DNA, 15 bp, Homo sapiens
ggcaataataataat

SEQ ID NO: 196152 - DNA, 15 bp, Homo sapiens
gggcaataataataa

SEQ ID NO: 196153 - DNA, 15 bp, Homo sapiens
agggcaataataata

SEQ ID NO: 196154 - DNA, 15 bp, Homo sapiens
aagggcaataataat

SEQ ID NO: 196155 - DNA, 15 bp, Homo sapiens
aaagggcaataataa

SEQ ID NO: 196156 - DNA, 15 bp, Homo sapiens
aaaagggcaataata

SEQ ID NO: 196157 - DNA, 15 bp, Homo sapiens
gaaaagggcaataat

SEQ ID NO: 196158 - DNA, 15 bp, Homo sapiens
ggaaaagggcaataa

SEQ ID NO: 196159 - DNA, 15 bp, Homo sapiens
tggaaaagggcaata

SEQ ID NO: 196160 - DNA, 15 bp, Homo sapiens
ctggaaaagggcaat

SEQ ID NO: 196161 - DNA, 15 bp, Homo sapiens
cctggaaaagggcaa

SEQ ID NO: 196162 - DNA, 15 bp, Homo sapiens
acctggaaaagggca

SEQ ID NO: 196163 - DNA, 15 bp, Homo sapiens
cacctggaaaagggc

SEQ ID NO: 196164 - DNA, 15 bp, Homo sapiens
ccacctggaaaaggg

SEQ ID NO: 196165 - DNA, 15 bp, Homo sapiens
cccacctggaaaagg

SEQ ID NO: 196166 - DNA, 15 bp, Homo sapiens
tcccacctggaaaag

SEQ ID NO: 196167 - DNA, 15 bp, Homo sapiens
ttcccacctggaaaa

SEQ ID NO: 196168 - DNA, 15 bp, Homo sapiens
tttcccacctggaaa

SEQ ID NO: 196169 - DNA, 15 bp, Homo sapiens
ttttcccacctggaa

SEQ ID NO: 196170 - DNA, 15 bp, Homo sapiens
attttcccacctgga

SEQ ID NO: 196171 - DNA, 15 bp, Homo sapiens
aattttcccacctgg

SEQ ID NO: 196172 - DNA, 15 bp, Homo sapiens
caattttcccacctg

SEQ ID NO: 196173 - DNA, 15 bp, Homo sapiens
tcaattttcccacct

SEQ ID NO: 196174 - DNA, 15 bp, Homo sapiens
ctcaattttcccacc

SEQ ID NO: 196175 - DNA, 15 bp, Homo sapiens
cctcaattttcccac

SEQ ID NO: 196176 - DNA, 15 bp, Homo sapiens
gcctcaattttccca

SEQ ID NO: 196177 - DNA, 15 bp, Homo sapiens
agcctcaattttccc

SEQ ID NO: 196178 - DNA, 15 bp, Homo sapiens
gagcctcaattttcc

SEQ ID NO: 196179 - DNA, 15 bp, Homo sapiens
cgagcctcaattttc

SEQ ID NO: 196180 - DNA, 15 bp, Homo sapiens
ccgagcctcaatttt

SEQ ID NO: 196181 - DNA, 15 bp, Homo sapiens
tccgagcctcaattt

SEQ ID NO: 196182 - DNA, 15 bp, Homo sapiens
ctccgagcctcaatt

SEQ ID NO: 196183 - DNA, 15 bp, Homo sapiens
tctccgagcctcaat

SEQ ID NO: 196184 - DNA, 15 bp, Homo sapiens
ctctccgagcctcaa

SEQ ID NO: 196185 - DNA, 15 bp, Homo sapiens
actctccgagcctca

SEQ ID NO: 196186 - DNA, 15 bp, Homo sapiens
aactctccgagcctc

SEQ ID NO: 196187 - DNA, 15 bp, Homo sapiens
caactctccgagcct

SEQ ID NO: 196188 - DNA, 15 bp, Homo sapiens
acaactctccgagcc

SEQ ID NO: 196189 - DNA, 15 bp, Homo sapiens
tacaactctccgagc

SEQ ID NO: 196190 - DNA, 15 bp, Homo sapiens
ttacaactctccgag

SEQ ID NO: 196191 - DNA, 15 bp, Homo sapiens
cttacaactctccga

SEQ ID NO: 196192 - DNA, 15 bp, Homo sapiens
acttacaactctccg

SEQ ID NO: 196193 - DNA, 15 bp, Homo sapiens
cacttacaactctcc

SEQ ID NO: 196194 - DNA, 15 bp, Homo sapiens
ccacttacaactctc

SEQ ID NO: 196195 - DNA, 15 bp, Homo sapiens
gccacttacaactct

SEQ ID NO: 196196 - DNA, 15 bp, Homo sapiens
agccacttacaactc

SEQ ID NO: 196197 - DNA, 15 bp, Homo sapiens
aagccacttacaact

SEQ ID NO: 196198 - DNA, 15 bp, Homo sapiens
caagccacttacaac

SEQ ID NO: 196199 - DNA, 15 bp, Homo sapiens
gcaagccacttacaa

SEQ ID NO: 196200 - DNA, 15 bp, Homo sapiens
ggcaagccacttaca

SEQ ID NO: 196201 - DNA, 15 bp, Homo sapiens
aggcaagccacttac

SEQ ID NO: 196202 - DNA, 15 bp, Homo sapiens
caggcaagccactta

SEQ ID NO: 196203 - DNA, 15 bp, Homo sapiens
tcaggcaagccactt

SEQ ID NO: 196204 - DNA, 15 bp, Homo sapiens
atcaggcaagccact

SEQ ID NO: 196205 - DNA, 15 bp, Homo sapiens
catcaggcaagccac

SEQ ID NO: 196206 - DNA, 15 bp, Homo sapiens
tcatcaggcaagcca

SEQ ID NO: 196207 - DNA, 15 bp, Homo sapiens
gtcatcaggcaagcc

SEQ ID NO: 196208 - DNA, 15 bp, Homo sapiens
tgtcatcaggcaagc

SEQ ID NO: 196209 - DNA, 15 bp, Homo sapiens
ttgtcatcaggcaag

SEQ ID NO: 196210 - DNA, 15 bp, Homo sapiens
tttgtcatcaggcaa

SEQ ID NO: 196211 - DNA, 15 bp, Homo sapiens
ctttgtcatcaggca

SEQ ID NO: 196212 - DNA, 15 bp, Homo sapiens
cctttgtcatcaggc

SEQ ID NO: 196213 - DNA, 15 bp, Homo sapiens
ccctttgtcatcagg

SEQ ID NO: 196214 - DNA, 15 bp, Homo sapiens
accctttgtcatcag

SEQ ID NO: 196215 - DNA, 15 bp, Homo sapiens
caccctttgtcatca

SEQ ID NO: 196216 - DNA, 15 bp, Homo sapiens
ccaccctttgtcatc

SEQ ID NO: 196217 - DNA, 15 bp, Homo sapiens
cccaccctttgtcat

SEQ ID NO: 196218 - DNA, 15 bp, Homo sapiens
acccaccctttgtca

SEQ ID NO: 196219 - DNA, 15 bp, Homo sapiens
cacccaccctttgtc

SEQ ID NO: 196220 - DNA, 15 bp, Homo sapiens
tcacccaccctttgt

SEQ ID NO: 196221 - DNA, 15 bp, Homo sapiens
ctcacccaccctttg

SEQ ID NO: 196222 - DNA, 15 bp, Homo sapiens
actcacccacccttt

SEQ ID NO: 196223 - DNA, 15 bp, Homo sapiens
cactcacccaccctt

SEQ ID NO: 196224 - DNA, 15 bp, Homo sapiens
ccactcacccaccct

SEQ ID NO: 196225 - DNA, 15 bp, Homo sapiens
accactcacccaccc

SEQ ID NO: 196226 - DNA, 15 bp, Homo sapiens
taccactcacccacc

SEQ ID NO: 196227 - DNA, 15 bp, Homo sapiens
ctaccactcacccac

SEQ ID NO: 196228 - DNA, 15 bp, Homo sapiens
tctaccactcaccca

SEQ ID NO: 196229 - DNA, 15 bp, Homo sapiens
ctctaccactcaccc

SEQ ID NO: 196230 - DNA, 15 bp, Homo sapiens
cctctaccactcacc

SEQ ID NO: 196231 - DNA, 15 bp, Homo sapiens
gcctctaccactcac

SEQ ID NO: 196232 - DNA, 15 bp, Homo sapiens
tgcctctaccactca

SEQ ID NO: 196233 - DNA, 15 bp, Homo sapiens
ttgcctctaccactc

SEQ ID NO: 196234 - DNA, 15 bp, Homo sapiens
tttgcctctaccact

SEQ ID NO: 196235 - DNA, 15 bp, Homo sapiens
atttgcctctaccac

SEQ ID NO: 196236 - DNA, 15 bp, Homo sapiens
aatttgcctctacca

SEQ ID NO: 196237 - DNA, 15 bp, Homo sapiens
aaatttgcctctacc

SEQ ID NO: 196238 - DNA, 15 bp, Homo sapiens
caaatttgcctctac

SEQ ID NO: 196239 - DNA, 15 bp, Homo sapiens
tcaaatttgcctcta

SEQ ID NO: 196240 - DNA, 15 bp, Homo sapiens
ttcaaatttgcctct

SEQ ID NO: 196241 - DNA, 15 bp, Homo sapiens
gttcaaatttgcctc

SEQ ID NO: 196242 - DNA, 15 bp, Homo sapiens
agttcaaatttgcct

SEQ ID NO: 196243 - DNA, 15 bp, Homo sapiens
gagttcaaatttgcc

SEQ ID NO: 196244 - DNA, 15 bp, Homo sapiens
tgagttcaaatttgc

SEQ ID NO: 196245 - DNA, 15 bp, Homo sapiens
ctgagttcaaatttg

SEQ ID NO: 196246 - DNA, 15 bp, Homo sapiens
actgagttcaaattt

SEQ ID NO: 196247 - DNA, 15 bp, Homo sapiens
cactgagttcaaatt

SEQ ID NO: 196248 - DNA, 15 bp, Homo sapiens
tcactgagttcaaat

SEQ ID NO: 196249 - DNA, 15 bp, Homo sapiens
ttcactgagttcaaa

SEQ ID NO: 196250 - DNA, 15 bp, Homo sapiens
cttcactgagttcaa

SEQ ID NO: 196251 - DNA, 15 bp, Homo sapiens
tcttcactgagttca

SEQ ID NO: 196252 - DNA, 15 bp, Homo sapiens
ttcttcactgagttc

SEQ ID NO: 196253 - DNA, 15 bp, Homo sapiens
tttcttcactgagtt

SEQ ID NO: 196254 - DNA, 15 bp, Homo sapiens
ctttcttcactgagt

SEQ ID NO: 196255 - DNA, 15 bp, Homo sapiens
tctttcttcactgag

SEQ ID NO: 196256 - DNA, 15 bp, Homo sapiens
ctctttcttcactga

SEQ ID NO: 196257 - DNA, 15 bp, Homo sapiens
actctttcttcactg

SEQ ID NO: 196258 - DNA, 15 bp, Homo sapiens
aactctttcttcact

SEQ ID NO: 196259 - DNA, 15 bp, Homo sapiens
gaactctttcttcac

SEQ ID NO: 196260 - DNA, 15 bp, Homo sapiens
tgaactctttcttca

SEQ ID NO: 196261 - DNA, 15 bp, Homo sapiens
ctgaactctttcttc

SEQ ID NO: 196262 - DNA, 15 bp, Homo sapiens
cctgaactctttctt

SEQ ID NO: 196263 - DNA, 15 bp, Homo sapiens
gcctgaactctttct

SEQ ID NO: 196264 - DNA, 15 bp, Homo sapiens
agcctgaactctttc

SEQ ID NO: 196265 - DNA, 15 bp, Homo sapiens
aagcctgaactcttt

SEQ ID NO: 196266 - DNA, 15 bp, Homo sapiens
aaagcctgaactctt

SEQ ID NO: 196267 - DNA, 15 bp, Homo sapiens
caaagcctgaactct

SEQ ID NO: 196268 - DNA, 15 bp, Homo sapiens
gcaaagcctgaactc

SEQ ID NO: 196269 - DNA, 15 bp, Homo sapiens
agcaaagcctgaact

SEQ ID NO: 196270 - DNA, 15 bp, Homo sapiens
cagcaaagcctgaac

SEQ ID NO: 196271 - DNA, 15 bp, Homo sapiens
acagcaaagcctgaa

SEQ ID NO: 196272 - DNA, 15 bp, Homo sapiens
gacagcaaagcctga

SEQ ID NO: 196273 - DNA, 15 bp, Homo sapiens
tgacagcaaagcctg

SEQ ID NO: 196274 - DNA, 15 bp, Homo sapiens
ctgacagcaaagcct

SEQ ID NO: 196275 - DNA, 15 bp, Homo sapiens
tctgacagcaaagcc

SEQ ID NO: 196276 - DNA, 15 bp, Homo sapiens
atctgacagcaaagc

SEQ ID NO: 196277 - DNA, 15 bp, Homo sapiens
catctgacagcaaag

SEQ ID NO: 196278 - DNA, 15 bp, Homo sapiens
ccatctgacagcaaa

SEQ ID NO: 196279 - DNA, 15 bp, Homo sapiens
tccatctgacagcaa

SEQ ID NO: 196280 - DNA, 15 bp, Homo sapiens
gtccatctgacagca

SEQ ID NO: 196281 - DNA, 15 bp, Homo sapiens
agtccatctgacagc

SEQ ID NO: 196282 - DNA, 15 bp, Homo sapiens
cagtccatctgacag

SEQ ID NO: 196283 - DNA, 15 bp, Homo sapiens
tcagtccatctgaca

SEQ ID NO: 196284 - DNA, 15 bp, Homo sapiens
ttcagtccatctgac

SEQ ID NO: 196285 - DNA, 15 bp, Homo sapiens
cttcagtccatctga

SEQ ID NO: 196286 - DNA, 15 bp, Homo sapiens
acttcagtccatctg

SEQ ID NO: 196287 - DNA, 15 bp, Homo sapiens
aacttcagtccatct

SEQ ID NO: 196288 - DNA, 15 bp, Homo sapiens
gaacttcagtccatc

SEQ ID NO: 196289 - DNA, 15 bp, Homo sapiens
agaacttcagtccat

SEQ ID NO: 196290 - DNA, 15 bp, Homo sapiens
aagaacttcagtcca

SEQ ID NO: 196291 - DNA, 15 bp, Homo sapiens
gaagaacttcagtcc

SEQ ID NO: 196292 - DNA, 15 bp, Homo sapiens
agaagaacttcagtc

SEQ ID NO: 196293 - DNA, 15 bp, Homo sapiens
gagaagaacttcagt

SEQ ID NO: 196294 - DNA, 15 bp, Homo sapiens
agagaagaacttcag

SEQ ID NO: 196295 - DNA, 15 bp, Homo sapiens
aagagaagaacttca

SEQ ID NO: 196296 - DNA, 15 bp, Homo sapiens
caagagaagaacttc

SEQ ID NO: 196297 - DNA, 15 bp, Homo sapiens
ccaagagaagaactt

SEQ ID NO: 196298 - DNA, 15 bp, Homo sapiens
accaagagaagaact

SEQ ID NO: 196299 - DNA, 15 bp, Homo sapiens
caccaagagaagaac

SEQ ID NO: 196300 - DNA, 15 bp, Homo sapiens
acaccaagagaagaa

SEQ ID NO: 196301 - DNA, 15 bp, Homo sapiens
gacaccaagagaaga

SEQ ID NO: 196302 - DNA, 15 bp, Homo sapiens
ggacaccaagagaag

SEQ ID NO: 196303 - DNA, 15 bp, Homo sapiens
tggacaccaagagaa

SEQ ID NO: 196304 - DNA, 15 bp, Homo sapiens
atggacaccaagaga

SEQ ID NO: 196305 - DNA, 15 bp, Homo sapiens
catggacaccaagag

SEQ ID NO: 196306 - DNA, 15 bp, Homo sapiens
ccatggacaccaaga

SEQ ID NO: 196307 - DNA, 15 bp, Homo sapiens
cccatggacaccaag

SEQ ID NO: 196308 - DNA, 15 bp, Homo sapiens
ccccatggacaccaa

SEQ ID NO: 196309 - DNA, 15 bp, Homo sapiens
cccccatggacacca

SEQ ID NO: 196310 - DNA, 15 bp, Homo sapiens
acccccatggacacc

SEQ ID NO: 196311 - DNA, 15 bp, Homo sapiens
cacccccatggacac

SEQ ID NO: 196312 - DNA, 15 bp, Homo sapiens
gcacccccatggaca

SEQ ID NO: 196313 - DNA, 15 bp, Homo sapiens
ggcacccccatggac

SEQ ID NO: 196314 - DNA, 15 bp, Homo sapiens
tggcacccccatgga

SEQ ID NO: 196315 - DNA, 15 bp, Homo sapiens
ctggcacccccatgg

SEQ ID NO: 196316 - DNA, 15 bp, Homo sapiens
tctggcacccccatg

SEQ ID NO: 196317 - DNA, 15 bp, Homo sapiens
ctctggcacccccat

SEQ ID NO: 196318 - DNA, 15 bp, Homo sapiens
tctctggcaccccca

SEQ ID NO: 196319 - DNA, 15 bp, Homo sapiens
atctctggcaccccc

SEQ ID NO: 196320 - DNA, 15 bp, Homo sapiens
catctctggcacccc

SEQ ID NO: 196321 - DNA, 15 bp, Homo sapiens
acatctctggcaccc

SEQ ID NO: 196322 - DNA, 15 bp, Homo sapiens
cacatctctggcacc

SEQ ID NO: 196323 - DNA, 15 bp, Homo sapiens
ccacatctctggcac

SEQ ID NO: 196324 - DNA, 15 bp, Homo sapiens
cccacatctctggca

SEQ ID NO: 196325 - DNA, 15 bp, Homo sapiens
ccccacatctctggc

SEQ ID NO: 196326 - DNA, 15 bp, Homo sapiens
cccccacatctctgg

SEQ ID NO: 196327 - DNA, 15 bp, Homo sapiens
acccccacatctctg

SEQ ID NO: 196328 - DNA, 15 bp, Homo sapiens
aacccccacatctct

SEQ ID NO: 196329 - DNA, 15 bp, Homo sapiens
gaacccccacatctc

SEQ ID NO: 196330 - DNA, 15 bp, Homo sapiens
agaacccccacatct

SEQ ID NO: 196331 - DNA, 15 bp, Homo sapiens
aagaacccccacatc

SEQ ID NO: 196332 - DNA, 15 bp, Homo sapiens
gaagaacccccacat

SEQ ID NO: 196333 - DNA, 15 bp, Homo sapiens
agaagaacccccaca

SEQ ID NO: 196334 - DNA, 15 bp, Homo sapiens
aagaagaacccccac

SEQ ID NO: 196335 - DNA, 15 bp, Homo sapiens
aaagaagaaccccca

SEQ ID NO: 196336 - DNA, 15 bp, Homo sapiens
gaaagaagaaccccc

SEQ ID NO: 196337 - DNA, 15 bp, Homo sapiens
agaaagaagaacccc

SEQ ID NO: 196338 - DNA, 15 bp, Homo sapiens
gagaaagaagaaccc

SEQ ID NO: 196339 - DNA, 15 bp, Homo sapiens
ggagaaagaagaacc

SEQ ID NO: 196340 - DNA, 15 bp, Homo sapiens
aggagaaagaagaac

SEQ ID NO: 196341 - DNA, 15 bp, Homo sapiens
aaggagaaagaagaa

SEQ ID NO: 196342 - DNA, 15 bp, Homo sapiens
gaaggagaaagaaga

SEQ ID NO: 196343 - DNA, 15 bp, Homo sapiens
ggaaggagaaagaag

SEQ ID NO: 196344 - DNA, 15 bp, Homo sapiens
tggaaggagaaagaa

SEQ ID NO: 196345 - DNA, 15 bp, Homo sapiens
ttggaaggagaaaga

SEQ ID NO: 196346 - DNA, 15 bp, Homo sapiens
tttggaaggagaaag

SEQ ID NO: 196347 - DNA, 15 bp, Homo sapiens
atttggaaggagaaa

SEQ ID NO: 196348 - DNA, 15 bp, Homo sapiens
gatttggaaggagaa

SEQ ID NO: 196349 - DNA, 15 bp, Homo sapiens
tgatttggaaggaga

SEQ ID NO: 196350 - DNA, 15 bp, Homo sapiens
ctgatttggaaggag

SEQ ID NO: 196351 - DNA, 15 bp, Homo sapiens
tctgatttggaagga

SEQ ID NO: 196352 - DNA, 15 bp, Homo sapiens
gtctgatttggaagg

SEQ ID NO: 196353 - DNA, 15 bp, Homo sapiens
cgtctgatttggaag

SEQ ID NO: 196354 - DNA, 15 bp, Homo sapiens
gcgtctgatttggaa

SEQ ID NO: 196355 - DNA, 15 bp, Homo sapiens
tgcgtctgatttgga

SEQ ID NO: 196356 - DNA, 15 bp, Homo sapiens
ttgcgtctgatttgg

SEQ ID NO: 196357 - DNA, 15 bp, Homo sapiens
gttgcgtctgatttg

SEQ ID NO: 196358 - DNA, 15 bp, Homo sapiens
agttgcgtctgattt

SEQ ID NO: 196359 - DNA, 15 bp, Homo sapiens
cagttgcgtctgatt

SEQ ID NO: 196360 - DNA, 15 bp, Homo sapiens
tcagttgcgtctgat

SEQ ID NO: 196361 - DNA, 15 bp, Homo sapiens
ttcagttgcgtctga

SEQ ID NO: 196362 - DNA, 15 bp, Homo sapiens
tttcagttgcgtctg

SEQ ID NO: 196363 - DNA, 15 bp, Homo sapiens
ctttcagttgcgtct

SEQ ID NO: 196364 - DNA, 15 bp, Homo sapiens
actttcagttgcgtc

SEQ ID NO: 196365 - DNA, 15 bp, Homo sapiens
gactttcagttgcgt

SEQ ID NO: 196366 - DNA, 15 bp, Homo sapiens
agactttcagttgcg

SEQ ID NO: 196367 - DNA, 15 bp, Homo sapiens
cagactttcagttgc

SEQ ID NO: 196368 - DNA, 15 bp, Homo sapiens
tcagactttcagttg

SEQ ID NO: 196369 - DNA, 15 bp, Homo sapiens
ctcagactttcagtt

SEQ ID NO: 196370 - DNA, 15 bp, Homo sapiens
cctcagactttcagt

SEQ ID NO: 196371 - DNA, 15 bp, Homo sapiens
tcctcagactttcag

SEQ ID NO: 196372 - DNA, 15 bp, Homo sapiens
gtcctcagactttca

SEQ ID NO: 196373 - DNA, 15 bp, Homo sapiens
agtcctcagactttc

SEQ ID NO: 196374 - DNA, 15 bp, Homo sapiens
gagtcctcagacttt

SEQ ID NO: 196375 - DNA, 15 bp, Homo sapiens
tgagtcctcagactt

SEQ ID NO: 196376 - DNA, 15 bp, Homo sapiens
ctgagtcctcagact

SEQ ID NO: 196377 - DNA, 15 bp, Homo sapiens
gctgagtcctcagac

SEQ ID NO: 196378 - DNA, 15 bp, Homo sapiens
agctgagtcctcaga

SEQ ID NO: 196379 - DNA, 15 bp, Homo sapiens
aagctgagtcctcag

SEQ ID NO: 196380 - DNA, 15 bp, Homo sapiens
gaagctgagtcctca

SEQ ID NO: 196381 - DNA, 15 bp, Homo sapiens
tgaagctgagtcctc

SEQ ID NO: 196382 - DNA, 15 bp, Homo sapiens
ttgaagctgagtcct

SEQ ID NO: 196383 - DNA, 15 bp, Homo sapiens
attgaagctgagtcc

SEQ ID NO: 196384 - DNA, 15 bp, Homo sapiens
gattgaagctgagtc

SEQ ID NO: 196385 - DNA, 15 bp, Homo sapiens
agattgaagctgagt

SEQ ID NO: 196386 - DNA, 15 bp, Homo sapiens
cagattgaagctgag

SEQ ID NO: 196387 - DNA, 15 bp, Homo sapiens
tcagattgaagctga

SEQ ID NO: 196388 - DNA, 15 bp, Homo sapiens
ctcagattgaagctg

SEQ ID NO: 196389 - DNA, 15 bp, Homo sapiens
gctcagattgaagct

SEQ ID NO: 196390 - DNA, 15 bp, Homo sapiens
agctcagattgaagc

SEQ ID NO: 196391 - DNA, 15 bp, Homo sapiens
gagctcagattgaag

SEQ ID NO: 196392 - DNA, 15 bp, Homo sapiens
agagctcagattgaa

SEQ ID NO: 196393 - DNA, 15 bp, Homo sapiens
cagagctcagattga

SEQ ID NO: 196394 - DNA, 15 bp, Homo sapiens
tcagagctcagattg

SEQ ID NO: 196395 - DNA, 15 bp, Homo sapiens
atcagagctcagatt

SEQ ID NO: 196396 - DNA, 15 bp, Homo sapiens
aatcagagctcagat

SEQ ID NO: 196397 - DNA, 15 bp, Homo sapiens
aaatcagagctcaga

SEQ ID NO: 196398 - DNA, 15 bp, Homo sapiens
gaaatcagagctcag

SEQ ID NO: 196399 - DNA, 15 bp, Homo sapiens
agaaatcagagctca

SEQ ID NO: 196400 - DNA, 15 bp, Homo sapiens
gagaaatcagagctc

SEQ ID NO: 196401 - DNA, 15 bp, Homo sapiens
agagaaatcagagct

SEQ ID NO: 196402 - DNA, 15 bp, Homo sapiens
tagagaaatcagagc

SEQ ID NO: 196403 - DNA, 15 bp, Homo sapiens
ctagagaaatcagag

SEQ ID NO: 196404 - DNA, 15 bp, Homo sapiens
tctagagaaatcaga

SEQ ID NO: 196405 - DNA, 15 bp, Homo sapiens
ctctagagaaatcag

SEQ ID NO: 196406 - DNA, 15 bp, Homo sapiens
actctagagaaatca

SEQ ID NO: 196407 - DNA, 15 bp, Homo sapiens
tactctagagaaatc

SEQ ID NO: 196408 - DNA, 15 bp, Homo sapiens
atactctagagaaat

SEQ ID NO: 196409 - DNA, 15 bp, Homo sapiens
gatactctagagaaa

SEQ ID NO: 196410 - DNA, 15 bp, Homo sapiens
ggatactctagagaa

SEQ ID NO: 196411 - DNA, 15 bp, Homo sapiens
tggatactctagaga

SEQ ID NO: 196412 - DNA, 15 bp, Homo sapiens
ctggatactctagag

SEQ ID NO: 196413 - DNA, 15 bp, Homo sapiens
cctggatactctaga

SEQ ID NO: 196414 - DNA, 15 bp, Homo sapiens
tcctggatactctag

SEQ ID NO: 196415 - DNA, 15 bp, Homo sapiens
atcctggatactcta

SEQ ID NO: 196416 - DNA, 15 bp, Homo sapiens
catcctggatactct

SEQ ID NO: 196417 - DNA, 15 bp, Homo sapiens
ccatcctggatactc

SEQ ID NO: 196418 - DNA, 15 bp, Homo sapiens
tccatcctggatact

SEQ ID NO: 196419 - DNA, 15 bp, Homo sapiens
ttccatcctggatac

SEQ ID NO: 196420 - DNA, 15 bp, Homo sapiens
tttccatcctggata

SEQ ID NO: 196421 - DNA, 15 bp, Homo sapiens
ttttccatcctggat

SEQ ID NO: 196422 - DNA, 15 bp, Homo sapiens
cttttccatcctgga

SEQ ID NO: 196423 - DNA, 15 bp, Homo sapiens
ccttttccatcctgg

SEQ ID NO: 196424 - DNA, 15 bp, Homo sapiens
cccttttccatcctg

SEQ ID NO: 196425 - DNA, 15 bp, Homo sapiens
ccccttttccatcct

SEQ ID NO: 196426 - DNA, 15 bp, Homo sapiens
tccccttttccatcc

SEQ ID NO: 196427 - DNA, 15 bp, Homo sapiens
atccccttttccatc

SEQ ID NO: 196428 - DNA, 15 bp, Homo sapiens
catccccttttccat

SEQ ID NO: 196429 - DNA, 15 bp, Homo sapiens
ccatccccttttcca

SEQ ID NO: 196430 - DNA, 15 bp, Homo sapiens
accatccccttttcc

SEQ ID NO: 196431 - DNA, 15 bp, Homo sapiens
taccatccccttttc

SEQ ID NO: 196432 - DNA, 15 bp, Homo sapiens
ttaccatcccctttt

SEQ ID NO: 196433 - DNA, 15 bp, Homo sapiens
cttaccatccccttt

SEQ ID NO: 196434 - DNA, 15 bp, Homo sapiens
tcttaccatcccctt

SEQ ID NO: 196435 - DNA, 15 bp, Homo sapiens
atcttaccatcccct

SEQ ID NO: 196436 - DNA, 15 bp, Homo sapiens
catcttaccatcccc

SEQ ID NO: 196437 - DNA, 15 bp, Homo sapiens
tcatcttaccatccc

SEQ ID NO: 196438 - DNA, 15 bp, Homo sapiens
ttcatcttaccatcc

SEQ ID NO: 196439 - DNA, 15 bp, Homo sapiens
cttcatcttaccatc

SEQ ID NO: 196440 - DNA, 15 bp, Homo sapiens
acttcatcttaccat

SEQ ID NO: 196441 - DNA, 15 bp, Homo sapiens
aacttcatcttacca

SEQ ID NO: 196442 - DNA, 15 bp, Homo sapiens
aaacttcatcttacc

SEQ ID NO: 196443 - DNA, 15 bp, Homo sapiens
caaacttcatcttac

SEQ ID NO: 196444 - DNA, 15 bp, Homo sapiens
gcaaacttcatctta

SEQ ID NO: 196445 - DNA, 15 bp, Homo sapiens
tgcaaacttcatctt

SEQ ID NO: 196446 - DNA, 15 bp, Homo sapiens
ctgcaaacttcatct

SEQ ID NO: 196447 - DNA, 15 bp, Homo sapiens
cctgcaaacttcatc

SEQ ID NO: 196448 - DNA, 15 bp, Homo sapiens
ccctgcaaacttcat

SEQ ID NO: 196449 - DNA, 15 bp, Homo sapiens
tccctgcaaacttca

SEQ ID NO: 196450 - DNA, 15 bp, Homo sapiens
ctccctgcaaacttc

SEQ ID NO: 196451 - DNA, 15 bp, Homo sapiens
cctccctgcaaactt

SEQ ID NO: 196452 - DNA, 15 bp, Homo sapiens
ccctccctgcaaact

SEQ ID NO: 196453 - DNA, 15 bp, Homo sapiens
gccctccctgcaaac

SEQ ID NO: 196454 - DNA, 15 bp, Homo sapiens
agccctccctgcaaa

SEQ ID NO: 196455 - DNA, 15 bp, Homo sapiens
aagccctccctgcaa

SEQ ID NO: 196456 - DNA, 15 bp, Homo sapiens
gaagccctccctgca

SEQ ID NO: 196457 - DNA, 15 bp, Homo sapiens
ggaagccctccctgc

SEQ ID NO: 196458 - DNA, 15 bp, Homo sapiens
aggaagccctccctg

SEQ ID NO: 196459 - DNA, 15 bp, Homo sapiens
caggaagccctccct

SEQ ID NO: 196460 - DNA, 15 bp, Homo sapiens
ccaggaagccctccc

SEQ ID NO: 196461 - DNA, 15 bp, Homo sapiens
tctcctccaggaagc

SEQ ID NO: 196462 - DNA, 15 bp, Homo sapiens
ctctcctccaggaag

SEQ ID NO: 196463 - DNA, 15 bp, Homo sapiens
cctctcctccaggaa

SEQ ID NO: 196464 - DNA, 15 bp, Homo sapiens
ccctctcctccagga

SEQ ID NO: 196465 - DNA, 15 bp, Homo sapiens
gccctctcctccagg

SEQ ID NO: 196466 - DNA, 15 bp, Homo sapiens
agccctctcctccag

SEQ ID NO: 196467 - DNA, 15 bp, Homo sapiens
gagccctctcctcca

SEQ ID NO: 196468 - DNA, 15 bp, Homo sapiens
agagccctctcctcc

SEQ ID NO: 196469 - DNA, 15 bp, Homo sapiens
cagagccctctcctc

SEQ ID NO: 196470 - DNA, 15 bp, Homo sapiens
tcagagccctctcct

SEQ ID NO: 196471 - DNA, 15 bp, Homo sapiens
ttcagagccctctcc

SEQ ID NO: 196472 - DNA, 15 bp, Homo sapiens
tttcagagccctctc

SEQ ID NO: 196473 - DNA, 15 bp, Homo sapiens
gtttcagagccctct

SEQ ID NO: 196474 - DNA, 15 bp, Homo sapiens
tgtttcagagccctc

SEQ ID NO: 196475 - DNA, 15 bp, Homo sapiens
atgtttcagagccct

SEQ ID NO: 196476 - DNA, 15 bp, Homo sapiens
catgtttcagagccc

SEQ ID NO: 196477 - DNA, 15 bp, Homo sapiens
tcatgtttcagagcc

SEQ ID NO: 196478 - DNA, 15 bp, Homo sapiens
ctcatgtttcagagc

SEQ ID NO: 196479 - DNA, 15 bp, Homo sapiens
tctcatgtttcagag

SEQ ID NO: 196480 - DNA, 15 bp, Homo sapiens
ctctcatgtttcaga

SEQ ID NO: 196481 - DNA, 15 bp, Homo sapiens
gctctcatgtttcag

SEQ ID NO: 196482 - DNA, 15 bp, Homo sapiens
tgctctcatgtttca

SEQ ID NO: 196483 - DNA, 15 bp, Homo sapiens
atgctctcatgtttc

SEQ ID NO: 196484 - DNA, 15 bp, Homo sapiens
aatgctctcatgttt

SEQ ID NO: 196485 - DNA, 15 bp, Homo sapiens
gaatgctctcatgtt

SEQ ID NO: 196486 - DNA, 15 bp, Homo sapiens
cgaatgctctcatgt

SEQ ID NO: 196487 - DNA, 15 bp, Homo sapiens
ccgaatgctctcatg

SEQ ID NO: 196488 - DNA, 15 bp, Homo sapiens
cccgaatgctctcat

SEQ ID NO: 196489 - DNA, 15 bp, Homo sapiens
gcccgaatgctctca

SEQ ID NO: 196490 - DNA, 15 bp, Homo sapiens
tgcccgaatgctctc

SEQ ID NO: 196491 - DNA, 15 bp, Homo sapiens
ttgcccgaatgctct

SEQ ID NO: 196492 - DNA, 15 bp, Homo sapiens
tttgcccgaatgctc

SEQ ID NO: 196493 - DNA, 15 bp, Homo sapiens
atttgcccgaatgct

SEQ ID NO: 196494 - DNA, 15 bp, Homo sapiens
tatttgcccgaatgc

SEQ ID NO: 196495 - DNA, 15 bp, Homo sapiens
ctatttgcccgaatg

SEQ ID NO: 196496 - DNA, 15 bp, Homo sapiens
cctatttgcccgaat

SEQ ID NO: 196497 - DNA, 15 bp, Homo sapiens
tcctatttgcccgaa

SEQ ID NO: 196498 - DNA, 15 bp, Homo sapiens
ttcctatttgcccga

SEQ ID NO: 196499 - DNA, 15 bp, Homo sapiens
cttcctatttgcccg

SEQ ID NO: 196500 - DNA, 15 bp, Homo sapiens
ccttcctatttgccc

SEQ ID NO: 196501 - DNA, 15 bp, Homo sapiens
cccttcctatttgcc

SEQ ID NO: 196502 - DNA, 15 bp, Homo sapiens
gcccttcctatttgc

SEQ ID NO: 196503 - DNA, 15 bp, Homo sapiens
tgcccttcctatttg

SEQ ID NO: 196504 - DNA, 15 bp, Homo sapiens
ctgcccttcctattt

SEQ ID NO: 196505 - DNA, 15 bp, Homo sapiens
cctgcccttcctatt

SEQ ID NO: 196506 - DNA, 15 bp, Homo sapiens
acctgcccttcctat

SEQ ID NO: 196507 - DNA, 15 bp, Homo sapiens
tacctgcccttccta

SEQ ID NO: 196508 - DNA, 15 bp, Homo sapiens
atacctgcccttcct

SEQ ID NO: 196509 - DNA, 15 bp, Homo sapiens
aatacctgcccttcc

SEQ ID NO: 196510 - DNA, 15 bp, Homo sapiens
aaatacctgcccttc

SEQ ID NO: 196511 - DNA, 15 bp, Homo sapiens
aaaatacctgccctt

SEQ ID NO: 196512 - DNA, 15 bp, Homo sapiens
caaaatacctgccct

SEQ ID NO: 196513 - DNA, 15 bp, Homo sapiens
ccaaaatacctgccc

SEQ ID NO: 196514 - DNA, 15 bp, Homo sapiens
accaaaatacctgcc

SEQ ID NO: 196515 - DNA, 15 bp, Homo sapiens
caccaaaatacctgc

SEQ ID NO: 196516 - DNA, 15 bp, Homo sapiens
ccaccaaaatacctg

SEQ ID NO: 196517 - DNA, 15 bp, Homo sapiens
tccaccaaaatacct

SEQ ID NO: 196518 - DNA, 15 bp, Homo sapiens
atccaccaaaatacc

SEQ ID NO: 196519 - DNA, 15 bp, Homo sapiens
gatccaccaaaatac

SEQ ID NO: 196520 - DNA, 15 bp, Homo sapiens
ggatccaccaaaata

SEQ ID NO: 196521 - DNA, 15 bp, Homo sapiens
tggatccaccaaaat

SEQ ID NO: 196522 - DNA, 15 bp, Homo sapiens
ctggatccaccaaaa

SEQ ID NO: 196523 - DNA, 15 bp, Homo sapiens
tctggatccaccaaa

SEQ ID NO: 196524 - DNA, 15 bp, Homo sapiens
ctctggatccaccaa

SEQ ID NO: 196525 - DNA, 15 bp, Homo sapiens
cctctggatccacca

SEQ ID NO: 196526 - DNA, 15 bp, Homo sapiens
gcctctggatccacc

SEQ ID NO: 196527 - DNA, 15 bp, Homo sapiens
tgcctctggatccac

SEQ ID NO: 196528 - DNA, 15 bp, Homo sapiens
ctgcctctggatcca

SEQ ID NO: 196529 - DNA, 15 bp, Homo sapiens
cctgcctctggatcc

SEQ ID NO: 196530 - DNA, 15 bp, Homo sapiens
acctgcctctggatc

SEQ ID NO: 196531 - DNA, 15 bp, Homo sapiens
cacctgcctctggat

SEQ ID NO: 196532 - DNA, 15 bp, Homo sapiens
ccacctgcctctgga

SEQ ID NO: 196533 - DNA, 15 bp, Homo sapiens
tccacctgcctctgg

SEQ ID NO: 196534 - DNA, 15 bp, Homo sapiens
atccacctgcctctg

SEQ ID NO: 196535 - DNA, 15 bp, Homo sapiens
aatccacctgcctct

SEQ ID NO: 196536 - DNA, 15 bp, Homo sapiens
gaatccacctgcctc

SEQ ID NO: 196537 - DNA, 15 bp, Homo sapiens
tgaatccacctgcct

SEQ ID NO: 196538 - DNA, 15 bp, Homo sapiens
ctgaatccacctgcc

SEQ ID NO: 196539 - DNA, 15 bp, Homo sapiens
tctgaatccacctgc

SEQ ID NO: 196540 - DNA, 15 bp, Homo sapiens
ctctgaatccacctg

SEQ ID NO: 196541 - DNA, 15 bp, Homo sapiens
cctctgaatccacct

SEQ ID NO: 196542 - DNA, 15 bp, Homo sapiens
acctctgaatccacc

SEQ ID NO: 196543 - DNA, 15 bp, Homo sapiens
cacctctgaatccac

SEQ ID NO: 196544 - DNA, 15 bp, Homo sapiens
ccacctctgaatcca

SEQ ID NO: 196545 - DNA, 15 bp, Homo sapiens
cccacctctgaatcc

SEQ ID NO: 196546 - DNA, 15 bp, Homo sapiens
acccacctctgaatc

SEQ ID NO: 196547 - DNA, 15 bp, Homo sapiens
cacccacctctgaat

SEQ ID NO: 196548 - DNA, 15 bp, Homo sapiens
ccacccacctctgaa

SEQ ID NO: 196549 - DNA, 15 bp, Homo sapiens
gccacccacctctga

SEQ ID NO: 196550 - DNA, 15 bp, Homo sapiens
agccacccacctctg

SEQ ID NO: 196551 - DNA, 15 bp, Homo sapiens
gagccacccacctct

SEQ ID NO: 196552 - DNA, 15 bp, Homo sapiens
tgagccacccacctc

SEQ ID NO: 196553 - DNA, 15 bp, Homo sapiens
ttgagccacccacct

SEQ ID NO: 196554 - DNA, 15 bp, Homo sapiens
cttgagccacccacc

SEQ ID NO: 196555 - DNA, 15 bp, Homo sapiens
tcttgagccacccac

SEQ ID NO: 196556 - DNA, 15 bp, Homo sapiens
ctcttgagccaccca

SEQ ID NO: 196557 - DNA, 15 bp, Homo sapiens
actcttgagccaccc

SEQ ID NO: 196558 - DNA, 15 bp, Homo sapiens
tactcttgagccacc

SEQ ID NO: 196559 - DNA, 15 bp, Homo sapiens
gtactcttgagccac

SEQ ID NO: 196560 - DNA, 15 bp, Homo sapiens
cgtactcttgagcca

SEQ ID NO: 196561 - DNA, 15 bp, Homo sapiens
ccgtactcttgagcc

SEQ ID NO: 196562 - DNA, 15 bp, Homo sapiens
cccgtactcttgagc

SEQ ID NO: 196563 - DNA, 15 bp, Homo sapiens
gcccgtactcttgag

SEQ ID NO: 196564 - DNA, 15 bp, Homo sapiens
ggcccgtactcttga

SEQ ID NO: 196565 - DNA, 15 bp, Homo sapiens
aggcccgtactcttg

SEQ ID NO: 196566 - DNA, 15 bp, Homo sapiens
gaggcccgtactctt

SEQ ID NO: 196567 - DNA, 15 bp, Homo sapiens
ggaggcccgtactct

SEQ ID NO: 196568 - DNA, 15 bp, Homo sapiens
cggaggcccgtactc

SEQ ID NO: 196569 - DNA, 15 bp, Homo sapiens
acggaggcccgtact

SEQ ID NO: 196570 - DNA, 15 bp, Homo sapiens
gacggaggcccgtac

SEQ ID NO: 196571 - DNA, 15 bp, Homo sapiens
agacggaggcccgta

SEQ ID NO: 196572 - DNA, 15 bp, Homo sapiens
gagacggaggcccgt

SEQ ID NO: 196573 - DNA, 15 bp, Homo sapiens
ggagacggaggcccg

SEQ ID NO: 196574 - DNA, 15 bp, Homo sapiens
aggagacggaggccc

SEQ ID NO: 196575 - DNA, 15 bp, Homo sapiens
gaggagacggaggcc

SEQ ID NO: 196576 - DNA, 15 bp, Homo sapiens
cgaggagacggaggc

SEQ ID NO: 196577 - DNA, 15 bp, Homo sapiens
acgaggagacggagg

SEQ ID NO: 196578 - DNA, 15 bp, Homo sapiens
gacgaggagacggag

SEQ ID NO: 196579 - DNA, 15 bp, Homo sapiens
agacgaggagacgga

SEQ ID NO: 196580 - DNA, 15 bp, Homo sapiens
aagacgaggagacgg

SEQ ID NO: 196581 - DNA, 15 bp, Homo sapiens
gaagacgaggagacg

SEQ ID NO: 196582 - DNA, 15 bp, Homo sapiens
ggaagacgaggagac

SEQ ID NO: 196583 - DNA, 15 bp, Homo sapiens
aggaagacgaggaga

SEQ ID NO: 196584 - DNA, 15 bp, Homo sapiens
taggaagacgaggag

SEQ ID NO: 196585 - DNA, 15 bp, Homo sapiens
ttaggaagacgagga

SEQ ID NO: 196586 - DNA, 15 bp, Homo sapiens
cttaggaagacgagg

SEQ ID NO: 196587 - DNA, 15 bp, Homo sapiens
gcttaggaagacgag

SEQ ID NO: 196588 - DNA, 15 bp, Homo sapiens
tgcttaggaagacga

SEQ ID NO: 196589 - DNA, 15 bp, Homo sapiens
atgcttaggaagacg

SEQ ID NO: 196590 - DNA, 15 bp, Homo sapiens
tatgcttaggaagac

SEQ ID NO: 196591 - DNA, 15 bp, Homo sapiens
atatgcttaggaaga

SEQ ID NO: 196592 - DNA, 15 bp, Homo sapiens
aatatgcttaggaag

SEQ ID NO: 196593 - DNA, 15 bp, Homo sapiens
aaatatgcttaggaa

SEQ ID NO: 196594 - DNA, 15 bp, Homo sapiens
taaatatgcttagga

SEQ ID NO: 196595 - DNA, 15 bp, Homo sapiens
ttaaatatgcttagg

SEQ ID NO: 196596 - DNA, 15 bp, Homo sapiens
gttaaatatgcttag

SEQ ID NO: 196597 - DNA, 15 bp, Homo sapiens
agttaaatatgctta

SEQ ID NO: 196598 - DNA, 15 bp, Homo sapiens
cagttaaatatgctt

SEQ ID NO: 196599 - DNA, 15 bp, Homo sapiens
acagttaaatatgct

SEQ ID NO: 196600 - DNA, 15 bp, Homo sapiens
cacagttaaatatgc

SEQ ID NO: 196601 - DNA, 15 bp, Homo sapiens
tcacagttaaatatg

SEQ ID NO: 196602 - DNA, 15 bp, Homo sapiens
ttcacagttaaatat

SEQ ID NO: 196603 - DNA, 15 bp, Homo sapiens
attcacagttaaata

SEQ ID NO: 196604 - DNA, 15 bp, Homo sapiens
cattcacagttaaat

SEQ ID NO: 196605 - DNA, 15 bp, Homo sapiens
tcattcacagttaaa

SEQ ID NO: 196606 - DNA, 15 bp, Homo sapiens
ttcattcacagttaa

SEQ ID NO: 196607 - DNA, 15 bp, Homo sapiens
cttcattcacagtta

SEQ ID NO: 196608 - DNA, 15 bp, Homo sapiens
gcttcattcacagtt

SEQ ID NO: 196609 - DNA, 15 bp, Homo sapiens
tgcttcattcacagt

SEQ ID NO: 196610 - DNA, 15 bp, Homo sapiens
ttgcttcattcacag

SEQ ID NO: 196611 - DNA, 15 bp, Homo sapiens
cttgcttcattcaca

SEQ ID NO: 196612 - DNA, 15 bp, Homo sapiens
tcttgcttcattcac

SEQ ID NO: 196613 - DNA, 15 bp, Homo sapiens
gtcttgcttcattca

SEQ ID NO: 196614 - DNA, 15 bp, Homo sapiens
tgtcttgcttcattc

SEQ ID NO: 196615 - DNA, 15 bp, Homo sapiens
ttgtcttgcttcatt

SEQ ID NO: 196616 - DNA, 15 bp, Homo sapiens
cttgtcttgcttcat

SEQ ID NO: 196617 - DNA, 15 bp, Homo sapiens
tcttgtcttgcttca

SEQ ID NO: 196618 - DNA, 15 bp, Homo sapiens
ctcttgtcttgcttc

SEQ ID NO: 196619 - DNA, 15 bp, Homo sapiens
cctcttgtcttgctt

SEQ ID NO: 196620 - DNA, 15 bp, Homo sapiens
acctcttgtcttgct

SEQ ID NO: 196621 - DNA, 15 bp, Homo sapiens
cacctcttgtcttgc

SEQ ID NO: 196622 - DNA, 15 bp, Homo sapiens
acacctcttgtcttg

SEQ ID NO: 196623 - DNA, 15 bp, Homo sapiens
tacacctcttgtctt

SEQ ID NO: 196624 - DNA, 15 bp, Homo sapiens
atacacctcttgtct

SEQ ID NO: 196625 - DNA, 15 bp, Homo sapiens
aatacacctcttgtc

SEQ ID NO: 196626 - DNA, 15 bp, Homo sapiens
aaatacacctcttgt

SEQ ID NO: 196627 - DNA, 15 bp, Homo sapiens
gaaatacacctcttg

SEQ ID NO: 196628 - DNA, 15 bp, Homo sapiens
agaaatacacctctt

SEQ ID NO: 196629 - DNA, 15 bp, Homo sapiens
gagaaatacacctct

SEQ ID NO: 196630 - DNA, 15 bp, Homo sapiens
ggagaaatacacctc

SEQ ID NO: 196631 - DNA, 15 bp, Homo sapiens
tggagaaatacacct

SEQ ID NO: 196632 - DNA, 15 bp, Homo sapiens
atggagaaatacacc

SEQ ID NO: 196633 - DNA, 15 bp, Homo sapiens
catggagaaatacac

SEQ ID NO: 196634 - DNA, 15 bp, Homo sapiens
acatggagaaataca

SEQ ID NO: 196635 - DNA, 15 bp, Homo sapiens
tacatggagaaatac

SEQ ID NO: 196636 - DNA, 15 bp, Homo sapiens
ttacatggagaaata

SEQ ID NO: 196637 - DNA, 15 bp, Homo sapiens
cttacatggagaaat

SEQ ID NO: 196638 - DNA, 15 bp, Homo sapiens
ccttacatggagaaa

SEQ ID NO: 196639 - DNA, 15 bp, Homo sapiens
cccttacatggagaa

SEQ ID NO: 196640 - DNA, 15 bp, Homo sapiens
tcccttacatggaga

SEQ ID NO: 196641 - DNA, 15 bp, Homo sapiens
ttcccttacatggag

SEQ ID NO: 196642 - DNA, 15 bp, Homo sapiens
tttcccttacatgga

SEQ ID NO: 196643 - DNA, 15 bp, Homo sapiens
atttcccttacatgg

SEQ ID NO: 196644 - DNA, 15 bp, Homo sapiens
catttcccttacatg

SEQ ID NO: 196645 - DNA, 15 bp, Homo sapiens
gcatttcccttacat

SEQ ID NO: 196646 - DNA, 15 bp, Homo sapiens
agcatttcccttaca

SEQ ID NO: 196647 - DNA, 15 bp, Homo sapiens
tagcatttcccttac

SEQ ID NO: 196648 - DNA, 15 bp, Homo sapiens
atagcatttccctta

SEQ ID NO: 196649 - DNA, 15 bp, Homo sapiens
catagcatttccctt

SEQ ID NO: 196650 - DNA, 15 bp, Homo sapiens
tcatagcatttccct

SEQ ID NO: 196651 - DNA, 15 bp, Homo sapiens
ttcatagcatttccc

SEQ ID NO: 196652 - DNA, 15 bp, Homo sapiens
cttcatagcatttcc

SEQ ID NO: 196653 - DNA, 15 bp, Homo sapiens
tcttcatagcatttc

SEQ ID NO: 196654 - DNA, 15 bp, Homo sapiens
ttcttcatagcattt

SEQ ID NO: 196655 - DNA, 15 bp, Homo sapiens
tttcttcatagcatt

SEQ ID NO: 196656 - DNA, 15 bp, Homo sapiens
ttttcttcatagcat

SEQ ID NO: 196657 - DNA, 15 bp, Homo sapiens
cttttcttcatagca

SEQ ID NO: 196658 - DNA, 15 bp, Homo sapiens
ccttttcttcatagc

SEQ ID NO: 196659 - DNA, 15 bp, Homo sapiens
gccttttcttcatag

SEQ ID NO: 196660 - DNA, 15 bp, Homo sapiens
tgccttttcttcata

SEQ ID NO: 196661 - DNA, 15 bp, Homo sapiens
atgccttttcttcat

SEQ ID NO: 196662 - DNA, 15 bp, Homo sapiens
aatgccttttcttca

SEQ ID NO: 196663 - DNA, 15 bp, Homo sapiens
aaatgccttttcttc

SEQ ID NO: 196664 - DNA, 15 bp, Homo sapiens
gaaatgccttttctt

SEQ ID NO: 196665 - DNA, 15 bp, Homo sapiens
agaaatgccttttct

SEQ ID NO: 196666 - DNA, 15 bp, Homo sapiens
cagaaatgccttttc

SEQ ID NO: 196667 - DNA, 15 bp, Homo sapiens
ccagaaatgcctttt

SEQ ID NO: 196668 - DNA, 15 bp, Homo sapiens
accagaaatgccttt

SEQ ID NO: 196669 - DNA, 15 bp, Homo sapiens
caccagaaatgcctt

SEQ ID NO: 196670 - DNA, 15 bp, Homo sapiens
acaccagaaatgcct

SEQ ID NO: 196671 - DNA, 15 bp, Homo sapiens
gacaccagaaatgcc

SEQ ID NO: 196672 - DNA, 15 bp, Homo sapiens
tgacaccagaaatgc

SEQ ID NO: 196673 - DNA, 15 bp, Homo sapiens
ctgacaccagaaatg

SEQ ID NO: 196674 - DNA, 15 bp, Homo sapiens
tctgacaccagaaat

SEQ ID NO: 196675 - DNA, 15 bp, Homo sapiens
ttctgacaccagaaa

SEQ ID NO: 196676 - DNA, 15 bp, Homo sapiens
attctgacaccagaa

SEQ ID NO: 196677 - DNA, 15 bp, Homo sapiens
gattctgacaccaga

SEQ ID NO: 196678 - DNA, 15 bp, Homo sapiens
tgattctgacaccag

SEQ ID NO: 196679 - DNA, 15 bp, Homo sapiens
gtgattctgacacca

SEQ ID NO: 196680 - DNA, 15 bp, Homo sapiens
cgtgattctgacacc

SEQ ID NO: 196681 - DNA, 15 bp, Homo sapiens
tcgtgattctgacac

SEQ ID NO: 196682 - DNA, 15 bp, Homo sapiens
atcgtgattctgaca

SEQ ID NO: 196683 - DNA, 15 bp, Homo sapiens
aatcgtgattctgac

SEQ ID NO: 196684 - DNA, 15 bp, Homo sapiens
caatcgtgattctga

SEQ ID NO: 196685 - DNA, 15 bp, Homo sapiens
acaatcgtgattctg

SEQ ID NO: 196686 - DNA, 15 bp, Homo sapiens
gacaatcgtgattct

SEQ ID NO: 196687 - DNA, 15 bp, Homo sapiens
tgacaatcgtgattc

SEQ ID NO: 196688 - DNA, 15 bp, Homo sapiens
ctgacaatcgtgatt

SEQ ID NO: 196689 - DNA, 15 bp, Homo sapiens
actgacaatcgtgat

SEQ ID NO: 196690 - DNA, 15 bp, Homo sapiens
cactgacaatcgtga

SEQ ID NO: 196691 - DNA, 15 bp, Homo sapiens
ccactgacaatcgtg

SEQ ID NO: 196692 - DNA, 15 bp, Homo sapiens
cccactgacaatcgt

SEQ ID NO: 196693 - DNA, 15 bp, Homo sapiens
tcccactgacaatcg

SEQ ID NO: 196694 - DNA, 15 bp, Homo sapiens
ctcccactgacaatc

SEQ ID NO: 196695 - DNA, 15 bp, Homo sapiens
actcccactgacaat

SEQ ID NO: 196696 - DNA, 15 bp, Homo sapiens
cactcccactgacaa

SEQ ID NO: 196697 - DNA, 15 bp, Homo sapiens
acactcccactgaca

SEQ ID NO: 196698 - DNA, 15 bp, Homo sapiens
gacactcccactgac

SEQ ID NO: 196699 - DNA, 15 bp, Homo sapiens
tgacactcccactga

SEQ ID NO: 196700 - DNA, 15 bp, Homo sapiens
ctgacactcccactg

SEQ ID NO: 196701 - DNA, 15 bp, Homo sapiens
cctgacactcccact

SEQ ID NO: 196702 - DNA, 15 bp, Homo sapiens
tcctgacactcccac

SEQ ID NO: 196703 - DNA, 15 bp, Homo sapiens
ttcctgacactccca

SEQ ID NO: 196704 - DNA, 15 bp, Homo sapiens
cttcctgacactccc

SEQ ID NO: 196705 - DNA, 15 bp, Homo sapiens
tcttcctgacactcc

SEQ ID NO: 196706 - DNA, 15 bp, Homo sapiens
ttcttcctgacactc

SEQ ID NO: 196707 - DNA, 15 bp, Homo sapiens
tttcttcctgacact

SEQ ID NO: 196708 - DNA, 15 bp, Homo sapiens
gtttcttcctgacac

SEQ ID NO: 196709 - DNA, 15 bp, Homo sapiens
agtttcttcctgaca

SEQ ID NO: 196710 - DNA, 15 bp, Homo sapiens
aagtttcttcctgac

SEQ ID NO: 196711 - DNA, 15 bp, Homo sapiens
gaagtttcttcctga

SEQ ID NO: 196712 - DNA, 15 bp, Homo sapiens
cgaagtttcttcctg

SEQ ID NO: 196713 - DNA, 15 bp, Homo sapiens
acgaagtttcttcct

SEQ ID NO: 196714 - DNA, 15 bp, Homo sapiens
cacgaagtttcttcc

SEQ ID NO: 196715 - DNA, 15 bp, Homo sapiens
tcacgaagtttcttc

SEQ ID NO: 196716 - DNA, 15 bp, Homo sapiens
gtcacgaagtttctt

SEQ ID NO: 196717 - DNA, 15 bp, Homo sapiens
agtcacgaagtttct

SEQ ID NO: 196718 - DNA, 15 bp, Homo sapiens
aagtcacgaagtttc

SEQ ID NO: 196719 - DNA, 15 bp, Homo sapiens
aaagtcacgaagttt

SEQ ID NO: 196720 - DNA, 15 bp, Homo sapiens
aaaagtcacgaagtt

SEQ ID NO: 196721 - DNA, 15 bp, Homo sapiens
aaaaagtcacgaagt

SEQ ID NO: 196722 - DNA, 15 bp, Homo sapiens
gaaaaagtcacgaag

SEQ ID NO: 196723 - DNA, 15 bp, Homo sapiens
agaaaaagtcacgaa

SEQ ID NO: 196724 - DNA, 15 bp, Homo sapiens
gagaaaaagtcacga

SEQ ID NO: 196725 - DNA, 15 bp, Homo sapiens
agagaaaaagtcacg

SEQ ID NO: 196726 - DNA, 15 bp, Homo sapiens
gagagaaaaagtcac

SEQ ID NO: 196727 - DNA, 15 bp, Homo sapiens
agagagaaaaagtca

SEQ ID NO: 196728 - DNA, 15 bp, Homo sapiens
aagagagaaaaagtc

SEQ ID NO: 196729 - DNA, 15 bp, Homo sapiens
gaagagagaaaaagt

SEQ ID NO: 196730 - DNA, 15 bp, Homo sapiens
ggaagagagaaaaag

SEQ ID NO: 196731 - DNA, 15 bp, Homo sapiens
gggaagagagaaaaa

SEQ ID NO: 196732 - DNA, 15 bp, Homo sapiens
tgggaagagagaaaa

SEQ ID NO: 196733 - DNA, 15 bp, Homo sapiens
ctgggaagagagaaa

SEQ ID NO: 196734 - DNA, 15 bp, Homo sapiens
cctgggaagagagaa

SEQ ID NO: 196735 - DNA, 15 bp, Homo sapiens
gcctgggaagagaga

SEQ ID NO: 196736 - DNA, 15 bp, Homo sapiens
cgcctgggaagagag

SEQ ID NO: 196737 - DNA, 15 bp, Homo sapiens
gcgcctgggaagaga

SEQ ID NO: 196738 - DNA, 15 bp, Homo sapiens
ggcgcctgggaagag

SEQ ID NO: 196739 - DNA, 15 bp, Homo sapiens
gggcgcctgggaaga

SEQ ID NO: 196740 - DNA, 15 bp, Homo sapiens
ggggcgcctgggaag

SEQ ID NO: 196741 - DNA, 15 bp, Homo sapiens
gggggcgcctgggaa

SEQ ID NO: 196742 - DNA, 15 bp, Homo sapiens
tgggggcgcctggga

SEQ ID NO: 196743 - DNA, 15 bp, Homo sapiens
ctgggggcgcctggg

SEQ ID NO: 196744 - DNA, 15 bp, Homo sapiens
gctgggggcgcctgg

SEQ ID NO: 196745 - DNA, 15 bp, Homo sapiens
agctgggggcgcctg

SEQ ID NO: 196746 - DNA, 15 bp, Homo sapiens
cagctgggggcgcct

SEQ ID NO: 196747 - DNA, 15 bp, Homo sapiens
acagctgggggcgcc

SEQ ID NO: 196748 - DNA, 15 bp, Homo sapiens
aacagctgggggcgc

SEQ ID NO: 196749 - DNA, 15 bp, Homo sapiens
taacagctgggggcg

SEQ ID NO: 196750 - DNA, 15 bp, Homo sapiens
ctaacagctgggggc

SEQ ID NO: 196751 - DNA, 15 bp, Homo sapiens
cctaacagctggggg

SEQ ID NO: 196752 - DNA, 15 bp, Homo sapiens
acctaacagctgggg

SEQ ID NO: 196753 - DNA, 15 bp, Homo sapiens
aacctaacagctggg

SEQ ID NO: 196754 - DNA, 15 bp, Homo sapiens
aaacctaacagctgg

SEQ ID NO: 196755 - DNA, 15 bp, Homo sapiens
gaaacctaacagctg

SEQ ID NO: 196756 - DNA, 15 bp, Homo sapiens
tgaaacctaacagct

SEQ ID NO: 196757 - DNA, 15 bp, Homo sapiens
atgaaacctaacagc

SEQ ID NO: 196758 - DNA, 15 bp, Homo sapiens
catgaaacctaacag

SEQ ID NO: 196759 - DNA, 15 bp, Homo sapiens
ccatgaaacctaaca

SEQ ID NO: 196760 - DNA, 15 bp, Homo sapiens
gccatgaaacctaac

SEQ ID NO: 196761 - DNA, 15 bp, Homo sapiens
tgccatgaaacctaa

SEQ ID NO: 196762 - DNA, 15 bp, Homo sapiens
ttgccatgaaaccta

SEQ ID NO: 196763 - DNA, 15 bp, Homo sapiens
gttgccatgaaacct

SEQ ID NO: 196764 - DNA, 15 bp, Homo sapiens
ggttgccatgaaacc

SEQ ID NO: 196765 - DNA, 15 bp, Homo sapiens
gggttgccatgaaac

SEQ ID NO: 196766 - DNA, 15 bp, Homo sapiens
tgggttgccatgaaa

SEQ ID NO: 196767 - DNA, 15 bp, Homo sapiens
ttgggttgccatgaa

SEQ ID NO: 196768 - DNA, 15 bp, Homo sapiens
attgggttgccatga

SEQ ID NO: 196769 - DNA, 15 bp, Homo sapiens
cattgggttgccatg

SEQ ID NO: 196770 - DNA, 15 bp, Homo sapiens
acattgggttgccat

SEQ ID NO: 196771 - DNA, 15 bp, Homo sapiens
cacattgggttgcca

SEQ ID NO: 196772 - DNA, 15 bp, Homo sapiens
ccacattgggttgcc

SEQ ID NO: 196773 - DNA, 15 bp, Homo sapiens
accacattgggttgc

SEQ ID NO: 196774 - DNA, 15 bp, Homo sapiens
taccacattgggttg

SEQ ID NO: 196775 - DNA, 15 bp, Homo sapiens
ctaccacattgggtt

SEQ ID NO: 196776 - DNA, 15 bp, Homo sapiens
tctaccacattgggt

SEQ ID NO: 196777 - DNA, 15 bp, Homo sapiens
ttctaccacattggg

SEQ ID NO: 196778 - DNA, 15 bp, Homo sapiens
cttctaccacattgg

SEQ ID NO: 196779 - DNA, 15 bp, Homo sapiens
ccttctaccacattg

SEQ ID NO: 196780 - DNA, 15 bp, Homo sapiens
gccttctaccacatt

SEQ ID NO: 196781 - DNA, 15 bp, Homo sapiens
tgccttctaccacat

SEQ ID NO: 196782 - DNA, 15 bp, Homo sapiens
ctgccttctaccaca

SEQ ID NO: 196783 - DNA, 15 bp, Homo sapiens
actgccttctaccac

SEQ ID NO: 196784 - DNA, 15 bp, Homo sapiens
aactgccttctacca

SEQ ID NO: 196785 - DNA, 15 bp, Homo sapiens
aaactgccttctacc

SEQ ID NO: 196786 - DNA, 15 bp, Homo sapiens
gaaactgccttctac

SEQ ID NO: 196787 - DNA, 15 bp, Homo sapiens
agaaactgccttcta

SEQ ID NO: 196788 - DNA, 15 bp, Homo sapiens
aagaaactgccttct

SEQ ID NO: 196789 - DNA, 15 bp, Homo sapiens
aaagaaactgccttc

SEQ ID NO: 196790 - DNA, 15 bp, Homo sapiens
aaaagaaactgcctt

SEQ ID NO: 196791 - DNA, 15 bp, Homo sapiens
gaaaagaaactgcct

SEQ ID NO: 196792 - DNA, 15 bp, Homo sapiens
ggaaaagaaactgcc

SEQ ID NO: 196793 - DNA, 15 bp, Homo sapiens
tggaaaagaaactgc

SEQ ID NO: 196794 - DNA, 15 bp, Homo sapiens
atggaaaagaaactg

SEQ ID NO: 196795 - DNA, 15 bp, Homo sapiens
aatggaaaagaaact

SEQ ID NO: 196796 - DNA, 15 bp, Homo sapiens
gaatggaaaagaaac

SEQ ID NO: 196797 - DNA, 15 bp, Homo sapiens
agaatggaaaagaaa

SEQ ID NO: 196798 - DNA, 15 bp, Homo sapiens
aagaatggaaaagaa

SEQ ID NO: 196799 - DNA, 15 bp, Homo sapiens
caagaatggaaaaga

SEQ ID NO: 196800 - DNA, 15 bp, Homo sapiens
gcaagaatggaaaag

SEQ ID NO: 196801 - DNA, 15 bp, Homo sapiens
agcaagaatggaaaa

SEQ ID NO: 196802 - DNA, 15 bp, Homo sapiens
cagcaagaatggaaa

SEQ ID NO: 196803 - DNA, 15 bp, Homo sapiens
acagcaagaatggaa

SEQ ID NO: 196804 - DNA, 15 bp, Homo sapiens
aacagcaagaatgga

SEQ ID NO: 196805 - DNA, 15 bp, Homo sapiens
taacagcaagaatgg

SEQ ID NO: 196806 - DNA, 15 bp, Homo sapiens
ctaacagcaagaatg

SEQ ID NO: 196807 - DNA, 15 bp, Homo sapiens
tctaacagcaagaat

SEQ ID NO: 196808 - DNA, 15 bp, Homo sapiens
atctaacagcaagaa

SEQ ID NO: 196809 - DNA, 15 bp, Homo sapiens
aatctaacagcaaga

SEQ ID NO: 196810 - DNA, 15 bp, Homo sapiens
aaatctaacagcaag

SEQ ID NO: 196811 - DNA, 15 bp, Homo sapiens
aaaatctaacagcaa

SEQ ID NO: 196812 - DNA, 15 bp, Homo sapiens
aaaaatctaacagca

SEQ ID NO: 196813 - DNA, 15 bp, Homo sapiens
taaaaatctaacagc

SEQ ID NO: 196814 - DNA, 15 bp, Homo sapiens
ataaaaatctaacag

SEQ ID NO: 196815 - DNA, 15 bp, Homo sapiens
cataaaaatctaaca

SEQ ID NO: 196816 - DNA, 15 bp, Homo sapiens
acataaaaatctaac

SEQ ID NO: 196817 - DNA, 15 bp, Homo sapiens
aacataaaaatctaa

SEQ ID NO: 196818 - DNA, 15 bp, Homo sapiens
caacataaaaatcta

SEQ ID NO: 196819 - DNA, 15 bp, Homo sapiens
acaacataaaaatct

SEQ ID NO: 196820 - DNA, 15 bp, Homo sapiens
cacaacataaaaatc

SEQ ID NO: 196821 - DNA, 15 bp, Homo sapiens
acacaacataaaaat

SEQ ID NO: 196822 - DNA, 15 bp, Homo sapiens
cacacaacataaaaa

SEQ ID NO: 196823 - DNA, 15 bp, Homo sapiens
tcacacaacataaaa

SEQ ID NO: 196824 - DNA, 15 bp, Homo sapiens
gtcacacaacataaa

SEQ ID NO: 196825 - DNA, 15 bp, Homo sapiens
ggtcacacaacataa

SEQ ID NO: 196826 - DNA, 15 bp, Homo sapiens
aggtcacacaacata

SEQ ID NO: 196827 - DNA, 15 bp, Homo sapiens
aaggtcacacaacat

SEQ ID NO: 196828 - DNA, 15 bp, Homo sapiens
caaggtcacacaaca

SEQ ID NO: 196829 - DNA, 15 bp, Homo sapiens
ccaaggtcacacaac

SEQ ID NO: 196830 - DNA, 15 bp, Homo sapiens
cccaaggtcacacaa

SEQ ID NO: 196831 - DNA, 15 bp, Homo sapiens
ccccaaggtcacaca

SEQ ID NO: 196832 - DNA, 15 bp, Homo sapiens
gccccaaggtcacac

SEQ ID NO: 196833 - DNA, 15 bp, Homo sapiens
agccccaaggtcaca

SEQ ID NO: 196834 - DNA, 15 bp, Homo sapiens
cagccccaaggtcac

SEQ ID NO: 196835 - DNA, 15 bp, Homo sapiens
gcagccccaaggtca

SEQ ID NO: 196836 - DNA, 15 bp, Homo sapiens
ggcagccccaaggtc

SEQ ID NO: 196837 - DNA, 15 bp, Homo sapiens
aggcagccccaaggt

SEQ ID NO: 196838 - DNA, 15 bp, Homo sapiens
aaggcagccccaagg

SEQ ID NO: 196839 - DNA, 15 bp, Homo sapiens
taaggcagccccaag

SEQ ID NO: 196840 - DNA, 15 bp, Homo sapiens
ctaaggcagccccaa

SEQ ID NO: 196841 - DNA, 15 bp, Homo sapiens
cctaaggcagcccca

SEQ ID NO: 196842 - DNA, 15 bp, Homo sapiens
ccctaaggcagcccc

SEQ ID NO: 196843 - DNA, 15 bp, Homo sapiens
gccctaaggcagccc

SEQ ID NO: 196844 - DNA, 15 bp, Homo sapiens
ggccctaaggcagcc

SEQ ID NO: 196845 - DNA, 15 bp, Homo sapiens
aggccctaaggcagc

SEQ ID NO: 196846 - DNA, 15 bp, Homo sapiens
gaggccctaaggcag

SEQ ID NO: 196847 - DNA, 15 bp, Homo sapiens
agaggccctaaggca

SEQ ID NO: 196848 - DNA, 15 bp, Homo sapiens
gagaggccctaaggc

SEQ ID NO: 196849 - DNA, 15 bp, Homo sapiens
agagaggccctaagg

SEQ ID NO: 196850 - DNA, 15 bp, Homo sapiens
cagagaggccctaag

SEQ ID NO: 196851 - DNA, 15 bp, Homo sapiens
acagagaggccctaa

SEQ ID NO: 196852 - DNA, 15 bp, Homo sapiens
gacagagaggcccta

SEQ ID NO: 196853 - DNA, 15 bp, Homo sapiens
ggacagagaggccct

SEQ ID NO: 196854 - DNA, 15 bp, Homo sapiens
aggacagagaggccc

SEQ ID NO: 196855 - DNA, 15 bp, Homo sapiens
aaggacagagaggcc

SEQ ID NO: 196856 - DNA, 15 bp, Homo sapiens
gaaggacagagaggc

SEQ ID NO: 196857 - DNA, 15 bp, Homo sapiens
tgaaggacagagagg

SEQ ID NO: 196858 - DNA, 15 bp, Homo sapiens
atgaaggacagagag

SEQ ID NO: 196859 - DNA, 15 bp, Homo sapiens
catgaaggacagaga

SEQ ID NO: 196860 - DNA, 15 bp, Homo sapiens
ccatgaaggacagag

SEQ ID NO: 196861 - DNA, 15 bp, Homo sapiens
cccatgaaggacaga

SEQ ID NO: 196862 - DNA, 15 bp, Homo sapiens
acccatgaaggacag

SEQ ID NO: 196863 - DNA, 15 bp, Homo sapiens
gacccatgaaggaca

SEQ ID NO: 196864 - DNA, 15 bp, Homo sapiens
agacccatgaaggac

SEQ ID NO: 196865 - DNA, 15 bp, Homo sapiens
gagacccatgaagga

SEQ ID NO: 196866 - DNA, 15 bp, Homo sapiens
tgagacccatgaagg

SEQ ID NO: 196867 - DNA, 15 bp, Homo sapiens
gtgagacccatgaag

SEQ ID NO: 196868 - DNA, 15 bp, Homo sapiens
ggtgagacccatgaa

SEQ ID NO: 196869 - DNA, 15 bp, Homo sapiens
aggtgagacccatga

SEQ ID NO: 196870 - DNA, 15 bp, Homo sapiens
caggtgagacccatg

SEQ ID NO: 196871 - DNA, 15 bp, Homo sapiens
ccaggtgagacccat

SEQ ID NO: 196872 - DNA, 15 bp, Homo sapiens
gccaggtgagaccca

SEQ ID NO: 196873 - DNA, 15 bp, Homo sapiens
tgccaggtgagaccc

SEQ ID NO: 196874 - DNA, 15 bp, Homo sapiens
ctgccaggtgagacc

SEQ ID NO: 196875 - DNA, 15 bp, Homo sapiens
tctgccaggtgagac

SEQ ID NO: 196876 - DNA, 15 bp, Homo sapiens
ctctgccaggtgaga

SEQ ID NO: 196877 - DNA, 15 bp, Homo sapiens
cctctgccaggtgag

SEQ ID NO: 196878 - DNA, 15 bp, Homo sapiens
tcctctgccaggtga

SEQ ID NO: 196879 - DNA, 15 bp, Homo sapiens
ctcctctgccaggtg

SEQ ID NO: 196880 - DNA, 15 bp, Homo sapiens
cctcctctgccaggt

SEQ ID NO: 196881 - DNA, 15 bp, Homo sapiens
ccctcctctgccagg

SEQ ID NO: 196882 - DNA, 15 bp, Homo sapiens
cccctcctctgccag

SEQ ID NO: 196883 - DNA, 15 bp, Homo sapiens
ccccctcctctgcca

SEQ ID NO: 196884 - DNA, 15 bp, Homo sapiens
tccccctcctctgcc

SEQ ID NO: 196885 - DNA, 15 bp, Homo sapiens
atccccctcctctgc

SEQ ID NO: 196886 - DNA, 15 bp, Homo sapiens
tatccccctcctctg

SEQ ID NO: 196887 - DNA, 15 bp, Homo sapiens
gtatccccctcctct

SEQ ID NO: 196888 - DNA, 15 bp, Homo sapiens
tgtatccccctcctc

SEQ ID NO: 196889 - DNA, 15 bp, Homo sapiens
gtgtatccccctcct

SEQ ID NO: 196890 - DNA, 15 bp, Homo sapiens
tgtgtatccccctcc

SEQ ID NO: 196891 - DNA, 15 bp, Homo sapiens
ctgtgtatccccctc

SEQ ID NO: 196892 - DNA, 15 bp, Homo sapiens
cctgtgtatccccct

SEQ ID NO: 196893 - DNA, 15 bp, Homo sapiens
ccctgtgtatccccc

SEQ ID NO: 196894 - DNA, 15 bp, Homo sapiens
accctgtgtatcccc

SEQ ID NO: 196895 - DNA, 15 bp, Homo sapiens
caccctgtgtatccc

SEQ ID NO: 196896 - DNA, 15 bp, Homo sapiens
tcaccctgtgtatcc

SEQ ID NO: 196897 - DNA, 15 bp, Homo sapiens
atcaccctgtgtatc

SEQ ID NO: 196898 - DNA, 15 bp, Homo sapiens
aatcaccctgtgtat

SEQ ID NO: 196899 - DNA, 15 bp, Homo sapiens
aaatcaccctgtgta

SEQ ID NO: 196900 - DNA, 15 bp, Homo sapiens
gaaatcaccctgtgt

SEQ ID NO: 196901 - DNA, 15 bp, Homo sapiens
ggaaatcaccctgtg

SEQ ID NO: 196902 - DNA, 15 bp, Homo sapiens
tggaaatcaccctgt

SEQ ID NO: 196903 - DNA, 15 bp, Homo sapiens
atggaaatcaccctg

SEQ ID NO: 196904 - DNA, 15 bp, Homo sapiens
tatggaaatcaccct

SEQ ID NO: 196905 - DNA, 15 bp, Homo sapiens
ctatggaaatcaccc

SEQ ID NO: 196906 - DNA, 15 bp, Homo sapiens
cctatggaaatcacc

SEQ ID NO: 196907 - DNA, 15 bp, Homo sapiens
ccctatggaaatcac

SEQ ID NO: 196908 - DNA, 15 bp, Homo sapiens
tccctatggaaatca

SEQ ID NO: 196909 - DNA, 15 bp, Homo sapiens
gtccctatggaaatc

SEQ ID NO: 196910 - DNA, 15 bp, Homo sapiens
agtccctatggaaat

SEQ ID NO: 196911 - DNA, 15 bp, Homo sapiens
aagtccctatggaaa

SEQ ID NO: 196912 - DNA, 15 bp, Homo sapiens
taagtccctatggaa

SEQ ID NO: 196913 - DNA, 15 bp, Homo sapiens
gtaagtccctatgga

SEQ ID NO: 196914 - DNA, 15 bp, Homo sapiens
tgtaagtccctatgg

SEQ ID NO: 196915 - DNA, 15 bp, Homo sapiens
ctgtaagtccctatg

SEQ ID NO: 196916 - DNA, 15 bp, Homo sapiens
gctgtaagtccctat

SEQ ID NO: 196917 - DNA, 15 bp, Homo sapiens
agctgtaagtcccta

SEQ ID NO: 196918 - DNA, 15 bp, Homo sapiens
gagctgtaagtccct

SEQ ID NO: 196919 - DNA, 15 bp, Homo sapiens
agagctgtaagtccc

SEQ ID NO: 196920 - DNA, 15 bp, Homo sapiens
tagagctgtaagtcc

SEQ ID NO: 196921 - DNA, 15 bp, Homo sapiens
ttagagctgtaagtc

SEQ ID NO: 196922 - DNA, 15 bp, Homo sapiens
tttagagctgtaagt

SEQ ID NO: 196923 - DNA, 15 bp, Homo sapiens
ttttagagctgtaag

SEQ ID NO: 196924 - DNA, 15 bp, Homo sapiens
attttagagctgtaa

SEQ ID NO: 196925 - DNA, 15 bp, Homo sapiens
cattttagagctgta

SEQ ID NO: 196926 - DNA, 15 bp, Homo sapiens
gcattttagagctgt

SEQ ID NO: 196927 - DNA, 15 bp, Homo sapiens
agcattttagagctg

SEQ ID NO: 196928 - DNA, 15 bp, Homo sapiens
gagcattttagagct

SEQ ID NO: 196929 - DNA, 15 bp, Homo sapiens
cgagcattttagagc

SEQ ID NO: 196930 - DNA, 15 bp, Homo sapiens
tcgagcattttagag

SEQ ID NO: 196931 - DNA, 15 bp, Homo sapiens
ctcgagcattttaga

SEQ ID NO: 196932 - DNA, 15 bp, Homo sapiens
actcgagcattttag

SEQ ID NO: 196933 - DNA, 15 bp, Homo sapiens
cactcgagcatttta

SEQ ID NO: 196934 - DNA, 15 bp, Homo sapiens
acactcgagcatttt

SEQ ID NO: 196935 - DNA, 15 bp, Homo sapiens
tacactcgagcattt

SEQ ID NO: 196936 - DNA, 15 bp, Homo sapiens
atacactcgagcatt

SEQ ID NO: 196937 - DNA, 15 bp, Homo sapiens
catacactcgagcat

SEQ ID NO: 196938 - DNA, 15 bp, Homo sapiens
tcatacactcgagca

SEQ ID NO: 196939 - DNA, 15 bp, Homo sapiens
atcatacactcgagc

SEQ ID NO: 196940 - DNA, 15 bp, Homo sapiens
gatcatacactcgag

SEQ ID NO: 196941 - DNA, 15 bp, Homo sapiens
agatcatacactcga

SEQ ID NO: 196942 - DNA, 15 bp, Homo sapiens
tagatcatacactcg

SEQ ID NO: 196943 - DNA, 15 bp, Homo sapiens
ttagatcatacactc

SEQ ID NO: 196944 - DNA, 15 bp, Homo sapiens
attagatcatacact

SEQ ID NO: 196945 - DNA, 15 bp, Homo sapiens
gattagatcatacac

SEQ ID NO: 196946 - DNA, 15 bp, Homo sapiens
tgattagatcataca

SEQ ID NO: 196947 - DNA, 15 bp, Homo sapiens
atgattagatcatac

SEQ ID NO: 196948 - DNA, 15 bp, Homo sapiens
catgattagatcata

SEQ ID NO: 196949 - DNA, 15 bp, Homo sapiens
tcatgattagatcat

SEQ ID NO: 196950 - DNA, 15 bp, Homo sapiens
atcatgattagatca

SEQ ID NO: 196951 - DNA, 15 bp, Homo sapiens
catcatgattagatc

SEQ ID NO: 196952 - DNA, 15 bp, Homo sapiens
tcatcatgattagat

SEQ ID NO: 196953 - DNA, 15 bp, Homo sapiens
gtcatcatgattaga

SEQ ID NO: 196954 - DNA, 15 bp, Homo sapiens
tgtcatcatgattag

SEQ ID NO: 196955 - DNA, 15 bp, Homo sapiens
gtgtcatcatgatta

SEQ ID NO: 196956 - DNA, 15 bp, Homo sapiens
tgtgtcatcatgatt

SEQ ID NO: 196957 - DNA, 15 bp, Homo sapiens
gtgtgtcatcatgat

SEQ ID NO: 196958 - DNA, 15 bp, Homo sapiens
tgtgtgtcatcatga

SEQ ID NO: 196959 - DNA, 15 bp, Homo sapiens
ctgtgtgtcatcatg

SEQ ID NO: 196960 - DNA, 15 bp, Homo sapiens
actgtgtgtcatcat

SEQ ID NO: 196961 - DNA, 15 bp, Homo sapiens
gactgtgtgtcatca

SEQ ID NO: 196962 - DNA, 15 bp, Homo sapiens
tgactgtgtgtcatc

SEQ ID NO: 196963 - DNA, 15 bp, Homo sapiens
ctgactgtgtgtcat

SEQ ID NO: 196964 - DNA, 15 bp, Homo sapiens
gctgactgtgtgtca

SEQ ID NO: 196965 - DNA, 15 bp, Homo sapiens
ggctgactgtgtgtc

SEQ ID NO: 196966 - DNA, 15 bp, Homo sapiens
tggctgactgtgtgt

SEQ ID NO: 196967 - DNA, 15 bp, Homo sapiens
gtggctgactgtgtg

SEQ ID NO: 196968 - DNA, 15 bp, Homo sapiens
tgtggctgactgtgt

SEQ ID NO: 196969 - DNA, 15 bp, Homo sapiens
ctgtggctgactgtg

SEQ ID NO: 196970 - DNA, 15 bp, Homo sapiens
actgtggctgactgt

SEQ ID NO: 196971 - DNA, 15 bp, Homo sapiens
cactgtggctgactg

SEQ ID NO: 196972 - DNA, 15 bp, Homo sapiens
tcactgtggctgact

SEQ ID NO: 196973 - DNA, 15 bp, Homo sapiens
ttcactgtggctgac

SEQ ID NO: 196974 - DNA, 15 bp, Homo sapiens
tttcactgtggctga

SEQ ID NO: 196975 - DNA, 15 bp, Homo sapiens
atttcactgtggctg

SEQ ID NO: 196976 - DNA, 15 bp, Homo sapiens
gatttcactgtggct

SEQ ID NO: 196977 - DNA, 15 bp, Homo sapiens
ggatttcactgtggc

SEQ ID NO: 196978 - DNA, 15 bp, Homo sapiens
gggatttcactgtgg

SEQ ID NO: 196979 - DNA, 15 bp, Homo sapiens
agggatttcactgtg

SEQ ID NO: 196980 - DNA, 15 bp, Homo sapiens
cagggatttcactgt

SEQ ID NO: 196981 - DNA, 15 bp, Homo sapiens
tcagggatttcactg

SEQ ID NO: 196982 - DNA, 15 bp, Homo sapiens
gtcagggatttcact

SEQ ID NO: 196983 - DNA, 15 bp, Homo sapiens
tgtcagggatttcac

SEQ ID NO: 196984 - DNA, 15 bp, Homo sapiens
gtgtcagggatttca

SEQ ID NO: 196985 - DNA, 15 bp, Homo sapiens
tgtgtcagggatttc

SEQ ID NO: 196986 - DNA, 15 bp, Homo sapiens
atgtgtcagggattt

SEQ ID NO: 196987 - DNA, 15 bp, Homo sapiens
gatgtgtcagggatt

SEQ ID NO: 196988 - DNA, 15 bp, Homo sapiens
agatgtgtcagggat

SEQ ID NO: 196989 - DNA, 15 bp, Homo sapiens
gagatgtgtcaggga

SEQ ID NO: 196990 - DNA, 15 bp, Homo sapiens
tgagatgtgtcaggg

SEQ ID NO: 196991 - DNA, 15 bp, Homo sapiens
ttgagatgtgtcagg

SEQ ID NO: 196992 - DNA, 15 bp, Homo sapiens
tttgagatgtgtcag

SEQ ID NO: 196993 - DNA, 15 bp, Homo sapiens
atttgagatgtgtca

SEQ ID NO: 196994 - DNA, 15 bp, Homo sapiens
aatttgagatgtgtc

SEQ ID NO: 196995 - DNA, 15 bp, Homo sapiens
aaatttgagatgtgt

SEQ ID NO: 196996 - DNA, 15 bp, Homo sapiens
caaatttgagatgtg

SEQ ID NO: 196997 - DNA, 15 bp, Homo sapiens
tcaaatttgagatgt

SEQ ID NO: 196998 - DNA, 15 bp, Homo sapiens
ttcaaatttgagatg

SEQ ID NO: 196999 - DNA, 15 bp, Homo sapiens
gttcaaatttgagat

SEQ ID NO: 197000 - DNA, 15 bp, Homo sapiens
agttcaaatttgaga

SEQ ID NO: 197001 - DNA, 15 bp, Homo sapiens
cagttcaaatttgag

SEQ ID NO: 197002 - DNA, 15 bp, Homo sapiens
gcagttcaaatttga

SEQ ID NO: 197003 - DNA, 15 bp, Homo sapiens
tgcagttcaaatttg

SEQ ID NO: 197004 - DNA, 15 bp, Homo sapiens
atgcagttcaaattt

SEQ ID NO: 197005 - DNA, 15 bp, Homo sapiens
gatgcagttcaaatt

SEQ ID NO: 197006 - DNA, 15 bp, Homo sapiens
agatgcagttcaaat

SEQ ID NO: 197007 - DNA, 15 bp, Homo sapiens
aagatgcagttcaaa

SEQ ID NO: 197008 - DNA, 15 bp, Homo sapiens
aaagatgcagttcaa

SEQ ID NO: 197009 - DNA, 15 bp, Homo sapiens
taaagatgcagttca

SEQ ID NO: 197010 - DNA, 15 bp, Homo sapiens
ataaagatgcagttc

SEQ ID NO: 197011 - DNA, 15 bp, Homo sapiens
cataaagatgcagtt

SEQ ID NO: 197012 - DNA, 15 bp, Homo sapiens
tcataaagatgcagt

SEQ ID NO: 197013 - DNA, 15 bp, Homo sapiens
ctcataaagatgcag

SEQ ID NO: 197014 - DNA, 15 bp, Homo sapiens
actcataaagatgca

SEQ ID NO: 197015 - DNA, 15 bp, Homo sapiens
cactcataaagatgc

SEQ ID NO: 197016 - DNA, 15 bp, Homo sapiens
ccactcataaagatg

SEQ ID NO: 197017 - DNA, 15 bp, Homo sapiens
tccactcataaagat

SEQ ID NO: 197018 - DNA, 15 bp, Homo sapiens
ttccactcataaaga

SEQ ID NO: 197019 - DNA, 15 bp, Homo sapiens
tttccactcataaag

SEQ ID NO: 197020 - DNA, 15 bp, Homo sapiens
ttttccactcataaa

SEQ ID NO: 197021 - DNA, 15 bp, Homo sapiens
tttttccactcataa

SEQ ID NO: 197022 - DNA, 15 bp, Homo sapiens
gtttttccactcata

SEQ ID NO: 197023 - DNA, 15 bp, Homo sapiens
agtttttccactcat

SEQ ID NO: 197024 - DNA, 15 bp, Homo sapiens
cagtttttccactca

SEQ ID NO: 197025 - DNA, 15 bp, Homo sapiens
acagtttttccactc

SEQ ID NO: 197026 - DNA, 15 bp, Homo sapiens
aacagtttttccact

SEQ ID NO: 197027 - DNA, 15 bp, Homo sapiens
aaacagtttttccac

SEQ ID NO: 197028 - DNA, 15 bp, Homo sapiens
gaaacagtttttcca

SEQ ID NO: 197029 - DNA, 15 bp, Homo sapiens
ggaaacagtttttcc

SEQ ID NO: 197030 - DNA, 15 bp, Homo sapiens
aggaaacagtttttc

SEQ ID NO: 197031 - DNA, 15 bp, Homo sapiens
caggaaacagttttt

SEQ ID NO: 197032 - DNA, 15 bp, Homo sapiens
gcaggaaacagtttt

SEQ ID NO: 197033 - DNA, 15 bp, Homo sapiens
ggcaggaaacagttt

SEQ ID NO: 197034 - DNA, 15 bp, Homo sapiens
gggcaggaaacagtt

SEQ ID NO: 197035 - DNA, 15 bp, Homo sapiens
ggggcaggaaacagt

SEQ ID NO: 197036 - DNA, 15 bp, Homo sapiens
tggggcaggaaacag

SEQ ID NO: 197037 - DNA, 15 bp, Homo sapiens
gtggggcaggaaaca

SEQ ID NO: 197038 - DNA, 15 bp, Homo sapiens
tgtggggcaggaaac

SEQ ID NO: 197039 - DNA, 15 bp, Homo sapiens
ctgtggggcaggaaa

SEQ ID NO: 197040 - DNA, 15 bp, Homo sapiens
cctgtggggcaggaa

SEQ ID NO: 197041 - DNA, 15 bp, Homo sapiens
tcctgtggggcagga

SEQ ID NO: 197042 - DNA, 15 bp, Homo sapiens
gtcctgtggggcagg

SEQ ID NO: 197043 - DNA, 15 bp, Homo sapiens
tgtcctgtggggcag

SEQ ID NO: 197044 - DNA, 15 bp, Homo sapiens
atgtcctgtggggca

SEQ ID NO: 197045 - DNA, 15 bp, Homo sapiens
aatgtcctgtggggc

SEQ ID NO: 197046 - DNA, 15 bp, Homo sapiens
aaatgtcctgtgggg

SEQ ID NO: 197047 - DNA, 15 bp, Homo sapiens
aaaatgtcctgtggg

SEQ ID NO: 197048 - DNA, 15 bp, Homo sapiens
caaaatgtcctgtgg

SEQ ID NO: 197049 - DNA, 15 bp, Homo sapiens
tcaaaatgtcctgtg

SEQ ID NO: 197050 - DNA, 15 bp, Homo sapiens
atcaaaatgtcctgt

SEQ ID NO: 197051 - DNA, 15 bp, Homo sapiens
aatcaaaatgtcctg

SEQ ID NO: 197052 - DNA, 15 bp, Homo sapiens
aaatcaaaatgtcct

SEQ ID NO: 197053 - DNA, 15 bp, Homo sapiens
taaatcaaaatgtcc

SEQ ID NO: 197054 - DNA, 15 bp, Homo sapiens
ttaaatcaaaatgtc

SEQ ID NO: 197055 - DNA, 15 bp, Homo sapiens
gttaaatcaaaatgt

SEQ ID NO: 197056 - DNA, 15 bp, Homo sapiens
agttaaatcaaaatg

SEQ ID NO: 197057 - DNA, 15 bp, Homo sapiens
tagttaaatcaaaat

SEQ ID NO: 197058 - DNA, 15 bp, Homo sapiens
ctagttaaatcaaaa

SEQ ID NO: 197059 - DNA, 15 bp, Homo sapiens
cctagttaaatcaaa

SEQ ID NO: 197060 - DNA, 15 bp, Homo sapiens
tcctagttaaatcaa

SEQ ID NO: 197061 - DNA, 15 bp, Homo sapiens
gtcctagttaaatca

SEQ ID NO: 197062 - DNA, 15 bp, Homo sapiens
tgtcctagttaaatc

SEQ ID NO: 197063 - DNA, 15 bp, Homo sapiens
gtgtcctagttaaat

SEQ ID NO: 197064 - DNA, 15 bp, Homo sapiens
tgtgtcctagttaaa

SEQ ID NO: 197065 - DNA, 15 bp, Homo sapiens
gtgtgtcctagttaa

SEQ ID NO: 197066 - DNA, 15 bp, Homo sapiens
ggtgtgtcctagtta

SEQ ID NO: 197067 - DNA, 15 bp, Homo sapiens
aggtgtgtcctagtt

SEQ ID NO: 197068 - DNA, 15 bp, Homo sapiens
caggtgtgtcctagt

SEQ ID NO: 197069 - DNA, 15 bp, Homo sapiens
tcaggtgtgtcctag

SEQ ID NO: 197070 - DNA, 15 bp, Homo sapiens
gtcaggtgtgtccta

SEQ ID NO: 197071 - DNA, 15 bp, Homo sapiens
ggtcaggtgtgtcct

SEQ ID NO: 197072 - DNA, 15 bp, Homo sapiens
gggtcaggtgtgtcc

SEQ ID NO: 197073 - DNA, 15 bp, Homo sapiens
agggtcaggtgtgtc

SEQ ID NO: 197074 - DNA, 15 bp, Homo sapiens
cagggtcaggtgtgt

SEQ ID NO: 197075 - DNA, 15 bp, Homo sapiens
ccagggtcaggtgtg

SEQ ID NO: 197076 - DNA, 15 bp, Homo sapiens
accagggtcaggtgt

SEQ ID NO: 197077 - DNA, 15 bp, Homo sapiens
gaccagggtcaggtg

SEQ ID NO: 197078 - DNA, 15 bp, Homo sapiens
agaccagggtcaggt

SEQ ID NO: 197079 - DNA, 15 bp, Homo sapiens
cagaccagggtcagg

SEQ ID NO: 197080 - DNA, 15 bp, Homo sapiens
gcagaccagggtcag

SEQ ID NO: 197081 - DNA, 15 bp, Homo sapiens
agcagaccagggtca

SEQ ID NO: 197082 - DNA, 15 bp, Homo sapiens
gagcagaccagggtc

SEQ ID NO: 197083 - DNA, 15 bp, Homo sapiens
tgagcagaccagggt

SEQ ID NO: 197084 - DNA, 15 bp, Homo sapiens
gtgagcagaccaggg

SEQ ID NO: 197085 - DNA, 15 bp, Homo sapiens
tgtgagcagaccagg

SEQ ID NO: 197086 - DNA, 15 bp, Homo sapiens
ctgtgagcagaccag

SEQ ID NO: 197087 - DNA, 15 bp, Homo sapiens
tctgtgagcagacca

SEQ ID NO: 197088 - DNA, 15 bp, Homo sapiens
gtctgtgagcagacc

SEQ ID NO: 197089 - DNA, 15 bp, Homo sapiens
tgtctgtgagcagac

SEQ ID NO: 197090 - DNA, 15 bp, Homo sapiens
ctgtctgtgagcaga

SEQ ID NO: 197091 - DNA, 15 bp, Homo sapiens
tctgtctgtgagcag

SEQ ID NO: 197092 - DNA, 15 bp, Homo sapiens
ctctgtctgtgagca

SEQ ID NO: 197093 - DNA, 15 bp, Homo sapiens
tctctgtctgtgagc

SEQ ID NO: 197094 - DNA, 15 bp, Homo sapiens
ctctctgtctgtgag

SEQ ID NO: 197095 - DNA, 15 bp, Homo sapiens
tctctctgtctgtga

SEQ ID NO: 197096 - DNA, 15 bp, Homo sapiens
ttctctctgtctgtg

SEQ ID NO: 197097 - DNA, 15 bp, Homo sapiens
attctctctgtctgt

SEQ ID NO: 197098 - DNA, 15 bp, Homo sapiens
aattctctctgtctg

SEQ ID NO: 197099 - DNA, 15 bp, Homo sapiens
aaattctctctgtct

SEQ ID NO: 197100 - DNA, 15 bp, Homo sapiens
caaattctctctgtc

SEQ ID NO: 197101 - DNA, 15 bp, Homo sapiens
acaaattctctctgt

SEQ ID NO: 197102 - DNA, 15 bp, Homo sapiens
aacaaattctctctg

SEQ ID NO: 197103 - DNA, 15 bp, Homo sapiens
gaacaaattctctct

SEQ ID NO: 197104 - DNA, 15 bp, Homo sapiens
agaacaaattctctc

SEQ ID NO: 197105 - DNA, 15 bp, Homo sapiens
cagaacaaattctct

SEQ ID NO: 197106 - DNA, 15 bp, Homo sapiens
acagaacaaattctc

SEQ ID NO: 197107 - DNA, 15 bp, Homo sapiens
cacagaacaaattct

SEQ ID NO: 197108 - DNA, 15 bp, Homo sapiens
ccacagaacaaattc

SEQ ID NO: 197109 - DNA, 15 bp, Homo sapiens
gccacagaacaaatt

SEQ ID NO: 197110 - DNA, 15 bp, Homo sapiens
ggccacagaacaaat

SEQ ID NO: 197111 - DNA, 15 bp, Homo sapiens
gggccacagaacaaa

SEQ ID NO: 197112 - DNA, 15 bp, Homo sapiens
tgggccacagaacaa

SEQ ID NO: 197113 - DNA, 15 bp, Homo sapiens
ttgggccacagaaca

SEQ ID NO: 197114 - DNA, 15 bp, Homo sapiens
cttgggccacagaac

SEQ ID NO: 197115 - DNA, 15 bp, Homo sapiens
ccttgggccacagaa

SEQ ID NO: 197116 - DNA, 15 bp, Homo sapiens
gccttgggccacaga

SEQ ID NO: 197117 - DNA, 15 bp, Homo sapiens
ggccttgggccacag

SEQ ID NO: 197118 - DNA, 15 bp, Homo sapiens
aggccttgggccaca

SEQ ID NO: 197119 - DNA, 15 bp, Homo sapiens
gaggccttgggccac

SEQ ID NO: 197120 - DNA, 15 bp, Homo sapiens
agaggccttgggcca

SEQ ID NO: 197121 - DNA, 15 bp, Homo sapiens
cagaggccttgggcc

SEQ ID NO: 197122 - DNA, 15 bp, Homo sapiens
gcagaggccttgggc

SEQ ID NO: 197123 - DNA, 15 bp, Homo sapiens
ggcagaggccttggg

SEQ ID NO: 197124 - DNA, 15 bp, Homo sapiens
aggcagaggccttgg

SEQ ID NO: 197125 - DNA, 15 bp, Homo sapiens
caggcagaggccttg

SEQ ID NO: 197126 - DNA, 15 bp, Homo sapiens
gcaggcagaggcctt

SEQ ID NO: 197127 - DNA, 15 bp, Homo sapiens
ggcaggcagaggcct

SEQ ID NO: 197128 - DNA, 15 bp, Homo sapiens
gggcaggcagaggcc

SEQ ID NO: 197129 - DNA, 15 bp, Homo sapiens
ggggcaggcagaggc

SEQ ID NO: 197130 - DNA, 15 bp, Homo sapiens
aggggcaggcagagg

SEQ ID NO: 197131 - DNA, 15 bp, Homo sapiens
caggggcaggcagag

SEQ ID NO: 197132 - DNA, 15 bp, Homo sapiens
gcaggggcaggcaga

SEQ ID NO: 197133 - DNA, 15 bp, Homo sapiens
agcaggggcaggcag

SEQ ID NO: 197134 - DNA, 15 bp, Homo sapiens
gagcaggggcaggca

SEQ ID NO: 197135 - DNA, 15 bp, Homo sapiens
ggagcaggggcaggc

SEQ ID NO: 197136 - DNA, 15 bp, Homo sapiens
gggagcaggggcagg

SEQ ID NO: 197137 - DNA, 15 bp, Homo sapiens
tgggagcaggggcag

SEQ ID NO: 197138 - DNA, 15 bp, Homo sapiens
gtgggagcaggggca

SEQ ID NO: 197139 - DNA, 15 bp, Homo sapiens
ggtgggagcaggggc

SEQ ID NO: 197140 - DNA, 15 bp, Homo sapiens
gggtgggagcagggg

SEQ ID NO: 197141 - DNA, 15 bp, Homo sapiens
ggggtgggagcaggg

SEQ ID NO: 197142 - DNA, 15 bp, Homo sapiens
tggggtgggagcagg

SEQ ID NO: 197143 - DNA, 15 bp, Homo sapiens
gtggggtgggagcag

SEQ ID NO: 197144 - DNA, 15 bp, Homo sapiens
ggtggggtgggagca

SEQ ID NO: 197145 - DNA, 15 bp, Homo sapiens
tggtggggtgggagc

SEQ ID NO: 197146 - DNA, 15 bp, Homo sapiens
atggtggggtgggag

SEQ ID NO: 197147 - DNA, 15 bp, Homo sapiens
catggtggggtggga

SEQ ID NO: 197148 - DNA, 15 bp, Homo sapiens
ccatggtggggtggg

SEQ ID NO: 197149 - DNA, 15 bp, Homo sapiens
cccatggtggggtgg

SEQ ID NO: 197150 - DNA, 15 bp, Homo sapiens
acccatggtggggtg

SEQ ID NO: 197151 - DNA, 15 bp, Homo sapiens
tacccatggtggggt

SEQ ID NO: 197152 - DNA, 15 bp, Homo sapiens
ctacccatggtgggg

SEQ ID NO: 197153 - DNA, 15 bp, Homo sapiens
gctacccatggtggg

SEQ ID NO: 197154 - DNA, 15 bp, Homo sapiens
tgctacccatggtgg

SEQ ID NO: 197155 - DNA, 15 bp, Homo sapiens
ctgctacccatggtg

SEQ ID NO: 197156 - DNA, 15 bp, Homo sapiens
actgctacccatggt

SEQ ID NO: 197157 - DNA, 15 bp, Homo sapiens
cactgctacccatgg

SEQ ID NO: 197158 - DNA, 15 bp, Homo sapiens
ccactgctacccatg

SEQ ID NO: 197159 - DNA, 15 bp, Homo sapiens
gccactgctacccat

SEQ ID NO: 197160 - DNA, 15 bp, Homo sapiens
ggccactgctaccca

SEQ ID NO: 197161 - DNA, 15 bp, Homo sapiens
tggccactgctaccc

SEQ ID NO: 197162 - DNA, 15 bp, Homo sapiens
gtggccactgctacc

SEQ ID NO: 197163 - DNA, 15 bp, Homo sapiens
cgtggccactgctac

SEQ ID NO: 197164 - DNA, 15 bp, Homo sapiens
acgtggccactgcta

SEQ ID NO: 197165 - DNA, 15 bp, Homo sapiens
cacgtggccactgct

SEQ ID NO: 197166 - DNA, 15 bp, Homo sapiens
ccacgtggccactgc

SEQ ID NO: 197167 - DNA, 15 bp, Homo sapiens
accacgtggccactg

SEQ ID NO: 197168 - DNA, 15 bp, Homo sapiens
taccacgtggccact

SEQ ID NO: 197169 - DNA, 15 bp, Homo sapiens
gtaccacgtggccac

SEQ ID NO: 197170 - DNA, 15 bp, Homo sapiens
agtaccacgtggcca

SEQ ID NO: 197171 - DNA, 15 bp, Homo sapiens
aagtaccacgtggcc

SEQ ID NO: 197172 - DNA, 15 bp, Homo sapiens
caagtaccacgtggc

SEQ ID NO: 197173 - DNA, 15 bp, Homo sapiens
tcaagtaccacgtgg

SEQ ID NO: 197174 - DNA, 15 bp, Homo sapiens
ctcaagtaccacgtg

SEQ ID NO: 197175 - DNA, 15 bp, Homo sapiens
cctcaagtaccacgt

SEQ ID NO: 197176 - DNA, 15 bp, Homo sapiens
tcctcaagtaccacg

SEQ ID NO: 197177 - DNA, 15 bp, Homo sapiens
gtcctcaagtaccac

SEQ ID NO: 197178 - DNA, 15 bp, Homo sapiens
tgtcctcaagtacca

SEQ ID NO: 197179 - DNA, 15 bp, Homo sapiens
ctgtcctcaagtacc

SEQ ID NO: 197180 - DNA, 15 bp, Homo sapiens
gctgtcctcaagtac

SEQ ID NO: 197181 - DNA, 15 bp, Homo sapiens
tgctgtcctcaagta

SEQ ID NO: 197182 - DNA, 15 bp, Homo sapiens
atgctgtcctcaagt

SEQ ID NO: 197183 - DNA, 15 bp, Homo sapiens
gatgctgtcctcaag

SEQ ID NO: 197184 - DNA, 15 bp, Homo sapiens
ggatgctgtcctcaa

SEQ ID NO: 197185 - DNA, 15 bp, Homo sapiens
aggatgctgtcctca

SEQ ID NO: 197186 - DNA, 15 bp, Homo sapiens
caggatgctgtcctc

SEQ ID NO: 197187 - DNA, 15 bp, Homo sapiens
ccaggatgctgtcct

SEQ ID NO: 197188 - DNA, 15 bp, Homo sapiens
tccaggatgctgtcc

SEQ ID NO: 197189 - DNA, 15 bp, Homo sapiens
ttccaggatgctgtc

SEQ ID NO: 197190 - DNA, 15 bp, Homo sapiens
gttccaggatgctgt

SEQ ID NO: 197191 - DNA, 15 bp, Homo sapiens
agttccaggatgctg

SEQ ID NO: 197192 - DNA, 15 bp, Homo sapiens
aagttccaggatgct

SEQ ID NO: 197193 - DNA, 15 bp, Homo sapiens
caagttccaggatgc

SEQ ID NO: 197194 - DNA, 15 bp, Homo sapiens
gcaagttccaggatg

SEQ ID NO: 197195 - DNA, 15 bp, Homo sapiens
ggcaagttccaggat

SEQ ID NO: 197196 - DNA, 15 bp, Homo sapiens
gggcaagttccagga

SEQ ID NO: 197197 - DNA, 15 bp, Homo sapiens
tgggcaagttccagg

SEQ ID NO: 197198 - DNA, 15 bp, Homo sapiens
ctgggcaagttccag

SEQ ID NO: 197199 - DNA, 15 bp, Homo sapiens
cctgggcaagttcca

SEQ ID NO: 197200 - DNA, 15 bp, Homo sapiens
tcctgggcaagttcc

SEQ ID NO: 197201 - DNA, 15 bp, Homo sapiens
ctcctgggcaagttc

SEQ ID NO: 197202 - DNA, 15 bp, Homo sapiens
actcctgggcaagtt

SEQ ID NO: 197203 - DNA, 15 bp, Homo sapiens
gactcctgggcaagt

SEQ ID NO: 197204 - DNA, 15 bp, Homo sapiens
ggactcctgggcaag

SEQ ID NO: 197205 - DNA, 15 bp, Homo sapiens
cggactcctgggcaa

SEQ ID NO: 197206 - DNA, 15 bp, Homo sapiens
gcggactcctgggca

SEQ ID NO: 197207 - DNA, 15 bp, Homo sapiens
agcggactcctgggc

SEQ ID NO: 197208 - DNA, 15 bp, Homo sapiens
cagcggactcctggg

SEQ ID NO: 197209 - DNA, 15 bp, Homo sapiens
gcagcggactcctgg

SEQ ID NO: 197210 - DNA, 15 bp, Homo sapiens
tgcagcggactcctg

SEQ ID NO: 197211 - DNA, 15 bp, Homo sapiens
atgcagcggactcct

SEQ ID NO: 197212 - DNA, 15 bp, Homo sapiens
catgcagcggactcc

SEQ ID NO: 197213 - DNA, 15 bp, Homo sapiens
gcatgcagcggactc

SEQ ID NO: 197214 - DNA, 15 bp, Homo sapiens
agcatgcagcggact

SEQ ID NO: 197215 - DNA, 15 bp, Homo sapiens
cagcatgcagcggac

SEQ ID NO: 197216 - DNA, 15 bp, Homo sapiens
ccagcatgcagcgga

SEQ ID NO: 197217 - DNA, 15 bp, Homo sapiens
gccagcatgcagcgg

SEQ ID NO: 197218 - DNA, 15 bp, Homo sapiens
agccagcatgcagcg

SEQ ID NO: 197219 - DNA, 15 bp, Homo sapiens
aagccagcatgcagc

SEQ ID NO: 197220 - DNA, 15 bp, Homo sapiens
aaagccagcatgcag

SEQ ID NO: 197221 - DNA, 15 bp, Homo sapiens
gaaagccagcatgca

SEQ ID NO: 197222 - DNA, 15 bp, Homo sapiens
agaaagccagcatgc

SEQ ID NO: 197223 - DNA, 15 bp, Homo sapiens
gagaaagccagcatg

SEQ ID NO: 197224 - DNA, 15 bp, Homo sapiens
agagaaagccagcat

SEQ ID NO: 197225 - DNA, 15 bp, Homo sapiens
gagagaaagccagca

SEQ ID NO: 197226 - DNA, 15 bp, Homo sapiens
agagagaaagccagc

SEQ ID NO: 197227 - DNA, 15 bp, Homo sapiens
aagagagaaagccag

SEQ ID NO: 197228 - DNA, 15 bp, Homo sapiens
gaagagagaaagcca

SEQ ID NO: 197229 - DNA, 15 bp, Homo sapiens
agaagagagaaagcc

SEQ ID NO: 197230 - DNA, 15 bp, Homo sapiens
cagaagagagaaagc

SEQ ID NO: 197231 - DNA, 15 bp, Homo sapiens
gcagaagagagaaag

SEQ ID NO: 197232 - DNA, 15 bp, Homo sapiens
tgcagaagagagaaa

SEQ ID NO: 197233 - DNA, 15 bp, Homo sapiens
ctgcagaagagagaa

SEQ ID NO: 197234 - DNA, 15 bp, Homo sapiens
tctgcagaagagaga

SEQ ID NO: 197235 - DNA, 15 bp, Homo sapiens
ctctgcagaagagag

SEQ ID NO: 197236 - DNA, 15 bp, Homo sapiens
tctctgcagaagaga

SEQ ID NO: 197237 - DNA, 15 bp, Homo sapiens
gtctctgcagaagag

SEQ ID NO: 197238 - DNA, 15 bp, Homo sapiens
cgtctctgcagaaga

SEQ ID NO: 197239 - DNA, 15 bp, Homo sapiens
tcgtctctgcagaag

SEQ ID NO: 197240 - DNA, 15 bp, Homo sapiens
ctcgtctctgcagaa

SEQ ID NO: 197241 - DNA, 15 bp, Homo sapiens
cctcgtctctgcaga

SEQ ID NO: 197242 - DNA, 15 bp, Homo sapiens
ccctcgtctctgcag

SEQ ID NO: 197243 - DNA, 15 bp, Homo sapiens
cccctcgtctctgca

SEQ ID NO: 197244 - DNA, 15 bp, Homo sapiens
gcccctcgtctctgc

SEQ ID NO: 197245 - DNA, 15 bp, Homo sapiens
ggcccctcgtctctg

SEQ ID NO: 197246 - DNA, 15 bp, Homo sapiens
gggcccctcgtctct

SEQ ID NO: 197247 - DNA, 15 bp, Homo sapiens
tgggcccctcgtctc

SEQ ID NO: 197248 - DNA, 15 bp, Homo sapiens
ctgggcccctcgtct

SEQ ID NO: 197249 - DNA, 15 bp, Homo sapiens
tctgggcccctcgtc

SEQ ID NO: 197250 - DNA, 15 bp, Homo sapiens
atctgggcccctcgt

SEQ ID NO: 197251 - DNA, 15 bp, Homo sapiens
gatctgggcccctcg

SEQ ID NO: 197252 - DNA, 15 bp, Homo sapiens
cgatctgggcccctc

SEQ ID NO: 197253 - DNA, 15 bp, Homo sapiens
ccgatctgggcccct

SEQ ID NO: 197254 - DNA, 15 bp, Homo sapiens
cccgatctgggcccc

SEQ ID NO: 197255 - DNA, 15 bp, Homo sapiens
acccgatctgggccc

SEQ ID NO: 197256 - DNA, 15 bp, Homo sapiens
gacccgatctgggcc

SEQ ID NO: 197257 - DNA, 15 bp, Homo sapiens
tgacccgatctgggc

SEQ ID NO: 197258 - DNA, 15 bp, Homo sapiens
ctgacccgatctggg

SEQ ID NO: 197259 - DNA, 15 bp, Homo sapiens
gctgacccgatctgg

SEQ ID NO: 197260 - DNA, 15 bp, Homo sapiens
ggctgacccgatctg

SEQ ID NO: 197261 - DNA, 15 bp, Homo sapiens
aggctgacccgatct

SEQ ID NO: 197262 - DNA, 15 bp, Homo sapiens
gaggctgacccgatc

SEQ ID NO: 197263 - DNA, 15 bp, Homo sapiens
agaggctgacccgat

SEQ ID NO: 197264 - DNA, 15 bp, Homo sapiens
cagaggctgacccga

SEQ ID NO: 197265 - DNA, 15 bp, Homo sapiens
gcagaggctgacccg

SEQ ID NO: 197266 - DNA, 15 bp, Homo sapiens
agcagaggctgaccc

SEQ ID NO: 197267 - DNA, 15 bp, Homo sapiens
gagcagaggctgacc

SEQ ID NO: 197268 - DNA, 15 bp, Homo sapiens
tgagcagaggctgac

SEQ ID NO: 197269 - DNA, 15 bp, Homo sapiens
ctgagcagaggctga

SEQ ID NO: 197270 - DNA, 15 bp, Homo sapiens
gctgagcagaggctg

SEQ ID NO: 197271 - DNA, 15 bp, Homo sapiens
agctgagcagaggct

SEQ ID NO: 197272 - DNA, 15 bp, Homo sapiens
gagctgagcagaggc

SEQ ID NO: 197273 - DNA, 15 bp, Homo sapiens
agagctgagcagagg

SEQ ID NO: 197274 - DNA, 15 bp, Homo sapiens
cagagctgagcagag

SEQ ID NO: 197275 - DNA, 15 bp, Homo sapiens
gcagagctgagcaga

SEQ ID NO: 197276 - DNA, 15 bp, Homo sapiens
tgcagagctgagcag

SEQ ID NO: 197277 - DNA, 15 bp, Homo sapiens
ctgcagagctgagca

SEQ ID NO: 197278 - DNA, 15 bp, Homo sapiens
actgcagagctgagc

SEQ ID NO: 197279 - DNA, 15 bp, Homo sapiens
gactgcagagctgag

SEQ ID NO: 197280 - DNA, 15 bp, Homo sapiens
agactgcagagctga

SEQ ID NO: 197281 - DNA, 15 bp, Homo sapiens
aagactgcagagctg

SEQ ID NO: 197282 - DNA, 15 bp, Homo sapiens
caagactgcagagct

SEQ ID NO: 197283 - DNA, 15 bp, Homo sapiens
gcaagactgcagagc

SEQ ID NO: 197284 - DNA, 15 bp, Homo sapiens
ggcaagactgcagag

SEQ ID NO: 197285 - DNA, 15 bp, Homo sapiens
tggcaagactgcaga

SEQ ID NO: 197286 - DNA, 15 bp, Homo sapiens
ctggcaagactgcag

SEQ ID NO: 197287 - DNA, 15 bp, Homo sapiens
cctggcaagactgca

SEQ ID NO: 197288 - DNA, 15 bp, Homo sapiens
ccctggcaagactgc

SEQ ID NO: 197289 - DNA, 15 bp, Homo sapiens
cccctggcaagactg

SEQ ID NO: 197290 - DNA, 15 bp, Homo sapiens
ccccctggcaagact

SEQ ID NO: 197291 - DNA, 15 bp, Homo sapiens
tccccctggcaagac

SEQ ID NO: 197292 - DNA, 15 bp, Homo sapiens
ctccccctggcaaga

SEQ ID NO: 197293 - DNA, 15 bp, Homo sapiens
cctccccctggcaag

SEQ ID NO: 197294 - DNA, 15 bp, Homo sapiens
tcctccccctggcaa

SEQ ID NO: 197295 - DNA, 15 bp, Homo sapiens
ctcctccccctggca

SEQ ID NO: 197296 - DNA, 15 bp, Homo sapiens
cctcctccccctggc

SEQ ID NO: 197297 - DNA, 15 bp, Homo sapiens
tcctcctccccctgg

SEQ ID NO: 197298 - DNA, 15 bp, Homo sapiens
ttcctcctccccctg

SEQ ID NO: 197299 - DNA, 15 bp, Homo sapiens
attcctcctccccct

SEQ ID NO: 197300 - DNA, 15 bp, Homo sapiens
gattcctcctccccc

SEQ ID NO: 197301 - DNA, 15 bp, Homo sapiens
tgattcctcctcccc

SEQ ID NO: 197302 - DNA, 15 bp, Homo sapiens
ctgattcctcctccc

SEQ ID NO: 197303 - DNA, 15 bp, Homo sapiens
cctgattcctcctcc

SEQ ID NO: 197304 - DNA, 15 bp, Homo sapiens
gcctgattcctcctc

SEQ ID NO: 197305 - DNA, 15 bp, Homo sapiens
agcctgattcctcct

SEQ ID NO: 197306 - DNA, 15 bp, Homo sapiens
cagcctgattcctcc

SEQ ID NO: 197307 - DNA, 15 bp, Homo sapiens
ccagcctgattcctc

SEQ ID NO: 197308 - DNA, 15 bp, Homo sapiens
cccagcctgattcct

SEQ ID NO: 197309 - DNA, 15 bp, Homo sapiens
ccccagcctgattcc

SEQ ID NO: 197310 - DNA, 15 bp, Homo sapiens
cccccagcctgattc

SEQ ID NO: 197311 - DNA, 15 bp, Homo sapiens
ccccccagcctgatt

SEQ ID NO: 197312 - DNA, 15 bp, Homo sapiens
gccccccagcctgat

SEQ ID NO: 197313 - DNA, 15 bp, Homo sapiens
tgccccccagcctga

SEQ ID NO: 197314 - DNA, 15 bp, Homo sapiens
ctgccccccagcctg

SEQ ID NO: 197315 - DNA, 15 bp, Homo sapiens
cctgccccccagcct

SEQ ID NO: 197316 - DNA, 15 bp, Homo sapiens
ccctgccccccagcc

SEQ ID NO: 197317 - DNA, 15 bp, Homo sapiens
tccctgccccccagc

SEQ ID NO: 197318 - DNA, 15 bp, Homo sapiens
atccctgccccccag

SEQ ID NO: 197319 - DNA, 15 bp, Homo sapiens
tatccctgcccccca

SEQ ID NO: 197320 - DNA, 15 bp, Homo sapiens
ctatccctgcccccc

SEQ ID NO: 197321 - DNA, 15 bp, Homo sapiens
tctatccctgccccc

SEQ ID NO: 197322 - DNA, 15 bp, Homo sapiens
ctctatccctgcccc

SEQ ID NO: 197323 - DNA, 15 bp, Homo sapiens
cctctatccctgccc

SEQ ID NO: 197324 - DNA, 15 bp, Homo sapiens
ccctctatccctgcc

SEQ ID NO: 197325 - DNA, 15 bp, Homo sapiens
gccctctatccctgc

SEQ ID NO: 197326 - DNA, 15 bp, Homo sapiens
ggccctctatccctg

SEQ ID NO: 197327 - DNA, 15 bp, Homo sapiens
cggccctctatccct

SEQ ID NO: 197328 - DNA, 15 bp, Homo sapiens
acggccctctatccc

SEQ ID NO: 197329 - DNA, 15 bp, Homo sapiens
cacggccctctatcc

SEQ ID NO: 197330 - DNA, 15 bp, Homo sapiens
acacggccctctatc

SEQ ID NO: 197331 - DNA, 15 bp, Homo sapiens
cacacggccctctat

SEQ ID NO: 197332 - DNA, 15 bp, Homo sapiens
gcacacggccctcta

SEQ ID NO: 197333 - DNA, 15 bp, Homo sapiens
tgcacacggccctct

SEQ ID NO: 197334 - DNA, 15 bp, Homo sapiens
atgcacacggccctc

SEQ ID NO: 197335 - DNA, 15 bp, Homo sapiens
gatgcacacggccct

SEQ ID NO: 197336 - DNA, 15 bp, Homo sapiens
tgatgcacacggccc

SEQ ID NO: 197337 - DNA, 15 bp, Homo sapiens
ctgatgcacacggcc

SEQ ID NO: 197338 - DNA, 15 bp, Homo sapiens
cctgatgcacacggc

SEQ ID NO: 197339 - DNA, 15 bp, Homo sapiens
ccctgatgcacacgg

SEQ ID NO: 197340 - DNA, 15 bp, Homo sapiens
tccctgatgcacacg

SEQ ID NO: 197341 - DNA, 15 bp, Homo sapiens
ttccctgatgcacac

SEQ ID NO: 197342 - DNA, 15 bp, Homo sapiens
cttccctgatgcaca

SEQ ID NO: 197343 - DNA, 15 bp, Homo sapiens
ccttccctgatgcac

SEQ ID NO: 197344 - DNA, 15 bp, Homo sapiens
tccttccctgatgca

SEQ ID NO: 197345 - DNA, 15 bp, Homo sapiens
ctccttccctgatgc

SEQ ID NO: 197346 - DNA, 15 bp, Homo sapiens
cctccttccctgatg

SEQ ID NO: 197347 - DNA, 15 bp, Homo sapiens
gcctccttccctgat

SEQ ID NO: 197348 - DNA, 15 bp, Homo sapiens
ggcctccttccctga

SEQ ID NO: 197349 - DNA, 15 bp, Homo sapiens
gggcctccttccctg

SEQ ID NO: 197350 - DNA, 15 bp, Homo sapiens
agggcctccttccct

SEQ ID NO: 197351 - DNA, 15 bp, Homo sapiens
cagggcctccttccc

SEQ ID NO: 197352 - DNA, 15 bp, Homo sapiens
tcagggcctccttcc

SEQ ID NO: 197353 - DNA, 15 bp, Homo sapiens
ctcagggcctccttc

SEQ ID NO: 197354 - DNA, 15 bp, Homo sapiens
tctcagggcctcctt

SEQ ID NO: 197355 - DNA, 15 bp, Homo sapiens
atctcagggcctcct

SEQ ID NO: 197356 - DNA, 15 bp, Homo sapiens
catctcagggcctcc

SEQ ID NO: 197357 - DNA, 15 bp, Homo sapiens
tcatctcagggcctc

SEQ ID NO: 197358 - DNA, 15 bp, Homo sapiens
gtcatctcagggcct

SEQ ID NO: 197359 - DNA, 15 bp, Homo sapiens
tgtcatctcagggcc

SEQ ID NO: 197360 - DNA, 15 bp, Homo sapiens
ttgtcatctcagggc

SEQ ID NO: 197361 - DNA, 15 bp, Homo sapiens
cttgtcatctcaggg

SEQ ID NO: 197362 - DNA, 15 bp, Homo sapiens
gcttgtcatctcagg

SEQ ID NO: 197363 - DNA, 15 bp, Homo sapiens
agcttgtcatctcag

SEQ ID NO: 197364 - DNA, 15 bp, Homo sapiens
gagcttgtcatctca

SEQ ID NO: 197365 - DNA, 15 bp, Homo sapiens
ggagcttgtcatctc

SEQ ID NO: 197366 - DNA, 15 bp, Homo sapiens
tggagcttgtcatct

SEQ ID NO: 197367 - DNA, 15 bp, Homo sapiens
atggagcttgtcatc

SEQ ID NO: 197368 - DNA, 15 bp, Homo sapiens
catggagcttgtcat

SEQ ID NO: 197369 - DNA, 15 bp, Homo sapiens
aggctcacacctgta

SEQ ID NO: 197370 - DNA, 15 bp, Homo sapiens
gaggctcacacctgt

SEQ ID NO: 197371 - DNA, 15 bp, Homo sapiens
tgaggctcacacctg

SEQ ID NO: 197372 - DNA, 15 bp, Homo sapiens
gtgaggctcacacct

SEQ ID NO: 197373 - DNA, 15 bp, Homo sapiens
agtgaggctcacacc

SEQ ID NO: 197374 - DNA, 15 bp, Homo sapiens
aagtgaggctcacac

SEQ ID NO: 197375 - DNA, 15 bp, Homo sapiens
caagtgaggctcaca

SEQ ID NO: 197376 - DNA, 15 bp, Homo sapiens
tcaagtgaggctcac

SEQ ID NO: 197377 - DNA, 15 bp, Homo sapiens
atcaagtgaggctca

SEQ ID NO: 197378 - DNA, 15 bp, Homo sapiens
aatcaagtgaggctc

SEQ ID NO: 197379 - DNA, 15 bp, Homo sapiens
aaatcaagtgaggct

SEQ ID NO: 197380 - DNA, 15 bp, Homo sapiens
aaaatcaagtgaggc

SEQ ID NO: 197381 - DNA, 15 bp, Homo sapiens
aaaaatcaagtgagg

SEQ ID NO: 197382 - DNA, 15 bp, Homo sapiens
caaaaatcaagtgag

SEQ ID NO: 197383 - DNA, 15 bp, Homo sapiens
gcaaaaatcaagtga

SEQ ID NO: 197384 - DNA, 15 bp, Homo sapiens
ggcaaaaatcaagtg

SEQ ID NO: 197385 - DNA, 15 bp, Homo sapiens
aggcaaaaatcaagt

SEQ ID NO: 197386 - DNA, 15 bp, Homo sapiens
caggcaaaaatcaag

SEQ ID NO: 197387 - DNA, 15 bp, Homo sapiens
ccaggcaaaaatcaa

SEQ ID NO: 197388 - DNA, 15 bp, Homo sapiens
gccaggcaaaaatca

SEQ ID NO: 197389 - DNA, 15 bp, Homo sapiens
tgccaggcaaaaatc

SEQ ID NO: 197390 - DNA, 15 bp, Homo sapiens
atgccaggcaaaaat

SEQ ID NO: 197391 - DNA, 15 bp, Homo sapiens
tatgccaggcaaaaa

SEQ ID NO: 197392 - DNA, 15 bp, Homo sapiens
atatgccaggcaaaa

SEQ ID NO: 197393 - DNA, 15 bp, Homo sapiens
aatatgccaggcaaa

SEQ ID NO: 197394 - DNA, 15 bp, Homo sapiens
gaatatgccaggcaa

SEQ ID NO: 197395 - DNA, 15 bp, Homo sapiens
agaatatgccaggca

SEQ ID NO: 197396 - DNA, 15 bp, Homo sapiens
cagaatatgccaggc

SEQ ID NO: 197397 - DNA, 15 bp, Homo sapiens
ccagaatatgccagg

SEQ ID NO: 197398 - DNA, 15 bp, Homo sapiens
accagaatatgccag

SEQ ID NO: 197399 - DNA, 15 bp, Homo sapiens
aaccagaatatgcca

SEQ ID NO: 197400 - DNA, 15 bp, Homo sapiens
aaaccagaatatgcc

SEQ ID NO: 197401 - DNA, 15 bp, Homo sapiens
taaaccagaatatgc

SEQ ID NO: 197402 - DNA, 15 bp, Homo sapiens
ataaaccagaatatg

SEQ ID NO: 197403 - DNA, 15 bp, Homo sapiens
aataaaccagaatat

SEQ ID NO: 197404 - DNA, 15 bp, Homo sapiens
gaataaaccagaata

SEQ ID NO: 197405 - DNA, 15 bp, Homo sapiens
agaataaaccagaat

SEQ ID NO: 197406 - DNA, 15 bp, Homo sapiens
aagaataaaccagaa

SEQ ID NO: 197407 - DNA, 15 bp, Homo sapiens
aaagaataaaccaga

SEQ ID NO: 197408 - DNA, 15 bp, Homo sapiens
aaaagaataaaccag

SEQ ID NO: 197409 - DNA, 15 bp, Homo sapiens
taaaagaataaacca

SEQ ID NO: 197410 - DNA, 15 bp, Homo sapiens
gtaaaagaataaacc

SEQ ID NO: 197411 - DNA, 15 bp, Homo sapiens
agtaaaagaataaac

SEQ ID NO: 197412 - DNA, 15 bp, Homo sapiens
aagtaaaagaataaa

SEQ ID NO: 197413 - DNA, 15 bp, Homo sapiens
aaagtaaaagaataa

SEQ ID NO: 197414 - DNA, 15 bp, Homo sapiens
aaaagtaaaagaata

SEQ ID NO: 197415 - DNA, 15 bp, Homo sapiens
taaaagtaaaagaat

SEQ ID NO: 197416 - DNA, 15 bp, Homo sapiens
ttaaaagtaaaagaa

SEQ ID NO: 197417 - DNA, 15 bp, Homo sapiens
gttaaaagtaaaaga

SEQ ID NO: 197418 - DNA, 15 bp, Homo sapiens
ggttaaaagtaaaag

SEQ ID NO: 197419 - DNA, 15 bp, Homo sapiens
aggttaaaagtaaaa

SEQ ID NO: 197420 - DNA, 15 bp, Homo sapiens
aaggttaaaagtaaa

SEQ ID NO: 197421 - DNA, 15 bp, Homo sapiens
taaggttaaaagtaa

SEQ ID NO: 197422 - DNA, 15 bp, Homo sapiens
ataaggttaaaagta

SEQ ID NO: 197423 - DNA, 15 bp, Homo sapiens
aataaggttaaaagt

SEQ ID NO: 197424 - DNA, 15 bp, Homo sapiens
aaataaggttaaaag

SEQ ID NO: 197425 - DNA, 15 bp, Homo sapiens
aaaataaggttaaaa

SEQ ID NO: 197426 - DNA, 15 bp, Homo sapiens
caaaataaggttaaa

SEQ ID NO: 197427 - DNA, 15 bp, Homo sapiens
acaaaataaggttaa

SEQ ID NO: 197428 - DNA, 15 bp, Homo sapiens
gacaaaataaggtta

SEQ ID NO: 197429 - DNA, 15 bp, Homo sapiens
tgacaaaataaggtt

SEQ ID NO: 197430 - DNA, 15 bp, Homo sapiens
gtgacaaaataaggt

SEQ ID NO: 197431 - DNA, 15 bp, Homo sapiens
agtgacaaaataagg

SEQ ID NO: 197432 - DNA, 15 bp, Homo sapiens
aagtgacaaaataag

SEQ ID NO: 197433 - DNA, 15 bp, Homo sapiens
caagtgacaaaataa

SEQ ID NO: 197434 - DNA, 15 bp, Homo sapiens
ccaagtgacaaaata

SEQ ID NO: 197435 - DNA, 15 bp, Homo sapiens
accaagtgacaaaat

SEQ ID NO: 197436 - DNA, 15 bp, Homo sapiens
aaccaagtgacaaaa

SEQ ID NO: 197437 - DNA, 15 bp, Homo sapiens
aaaccaagtgacaaa

SEQ ID NO: 197438 - DNA, 15 bp, Homo sapiens
taaaccaagtgacaa

SEQ ID NO: 197439 - DNA, 15 bp, Homo sapiens
ctaaaccaagtgaca

SEQ ID NO: 197440 - DNA, 15 bp, Homo sapiens
cctaaaccaagtgac

SEQ ID NO: 197441 - DNA, 15 bp, Homo sapiens
ccctaaaccaagtga

SEQ ID NO: 197442 - DNA, 15 bp, Homo sapiens
accctaaaccaagtg

SEQ ID NO: 197443 - DNA, 15 bp, Homo sapiens
taccctaaaccaagt

SEQ ID NO: 197444 - DNA, 15 bp, Homo sapiens
ataccctaaaccaag

SEQ ID NO: 197445 - DNA, 15 bp, Homo sapiens
tataccctaaaccaa

SEQ ID NO: 197446 - DNA, 15 bp, Homo sapiens
atataccctaaacca

SEQ ID NO: 197447 - DNA, 15 bp, Homo sapiens
aatataccctaaacc

SEQ ID NO: 197448 - DNA, 15 bp, Homo sapiens
aaatataccctaaac

SEQ ID NO: 197449 - DNA, 15 bp, Homo sapiens
gaaatataccctaaa

SEQ ID NO: 197450 - DNA, 15 bp, Homo sapiens
agaaatataccctaa

SEQ ID NO: 197451 - DNA, 15 bp, Homo sapiens
aagaaatatacccta

SEQ ID NO: 197452 - DNA, 15 bp, Homo sapiens
taagaaatataccct

SEQ ID NO: 197453 - DNA, 15 bp, Homo sapiens
ataagaaatataccc

SEQ ID NO: 197454 - DNA, 15 bp, Homo sapiens
tataagaaatatacc

SEQ ID NO: 197455 - DNA, 15 bp, Homo sapiens
ttataagaaatatac

SEQ ID NO: 197456 - DNA, 15 bp, Homo sapiens
tttataagaaatata

SEQ ID NO: 197457 - DNA, 15 bp, Homo sapiens
gtttataagaaatat

SEQ ID NO: 197458 - DNA, 15 bp, Homo sapiens
tgtttataagaaata

SEQ ID NO: 197459 - DNA, 15 bp, Homo sapiens
ctgtttataagaaat

SEQ ID NO: 197460 - DNA, 15 bp, Homo sapiens
actgtttataagaaa

SEQ ID NO: 197461 - DNA, 15 bp, Homo sapiens
cactgtttataagaa

SEQ ID NO: 197462 - DNA, 15 bp, Homo sapiens
acactgtttataaga

SEQ ID NO: 197463 - DNA, 15 bp, Homo sapiens
tacactgtttataag

SEQ ID NO: 197464 - DNA, 15 bp, Homo sapiens
atacactgtttataa

SEQ ID NO: 197465 - DNA, 15 bp, Homo sapiens
tatacactgtttata

SEQ ID NO: 197466 - DNA, 15 bp, Homo sapiens
ttatacactgtttat

SEQ ID NO: 197467 - DNA, 15 bp, Homo sapiens
attatacactgttta

SEQ ID NO: 197468 - DNA, 15 bp, Homo sapiens
aattatacactgttt

SEQ ID NO: 197469 - DNA, 15 bp, Homo sapiens
aaattatacactgtt

SEQ ID NO: 197470 - DNA, 15 bp, Homo sapiens
aaaattatacactgt

SEQ ID NO: 197471 - DNA, 15 bp, Homo sapiens
taaaattatacactg

SEQ ID NO: 197472 - DNA, 15 bp, Homo sapiens
ataaaattatacact

SEQ ID NO: 197473 - DNA, 15 bp, Homo sapiens
tataaaattatacac

SEQ ID NO: 197474 - DNA, 15 bp, Homo sapiens
atataaaattataca

SEQ ID NO: 197475 - DNA, 15 bp, Homo sapiens
tatataaaattatac

SEQ ID NO: 197476 - DNA, 15 bp, Homo sapiens
atatataaaattata

SEQ ID NO: 197477 - DNA, 15 bp, Homo sapiens
aatatataaaattat

SEQ ID NO: 197478 - DNA, 15 bp, Homo sapiens
aaatatataaaatta

SEQ ID NO: 197479 - DNA, 15 bp, Homo sapiens
taaatatataaaatt

SEQ ID NO: 197480 - DNA, 15 bp, Homo sapiens
ataaatatataaaat

SEQ ID NO: 197481 - DNA, 15 bp, Homo sapiens
aataaatatataaaa

SEQ ID NO: 197482 - DNA, 15 bp, Homo sapiens
aaataaatatataaa

SEQ ID NO: 197483 - DNA, 15 bp, Homo sapiens
taaataaatatataa

SEQ ID NO: 197484 - DNA, 15 bp, Homo sapiens
ataaataaatatata

SEQ ID NO: 197485 - DNA, 15 bp, Homo sapiens
aataaataaatatat

SEQ ID NO: 197486 - DNA, 15 bp, Homo sapiens
taataaataaatata

SEQ ID NO: 197487 - DNA, 15 bp, Homo sapiens
ataataaataaatat

SEQ ID NO: 197488 - DNA, 15 bp, Homo sapiens
tataataaataaata

SEQ ID NO: 197489 - DNA, 15 bp, Homo sapiens
atataataaataaat

SEQ ID NO: 197490 - DNA, 15 bp, Homo sapiens
tatataataaataaa

SEQ ID NO: 197491 - DNA, 15 bp, Homo sapiens
atatataataaataa

SEQ ID NO: 197492 - DNA, 15 bp, Homo sapiens
aatatataataaata

SEQ ID NO: 197493 - DNA, 15 bp, Homo sapiens
taatatataataaat

SEQ ID NO: 197494 - DNA, 15 bp, Homo sapiens
ataatatataataaa

SEQ ID NO: 197495 - DNA, 15 bp, Homo sapiens
aataatatataataa

SEQ ID NO: 197496 - DNA, 15 bp, Homo sapiens
caataatatataata

SEQ ID NO: 197497 - DNA, 15 bp, Homo sapiens
gcaataatatataat

SEQ ID NO: 197498 - DNA, 15 bp, Homo sapiens
tgcaataatatataa

SEQ ID NO: 197499 - DNA, 15 bp, Homo sapiens
atgcaataatatata

SEQ ID NO: 197500 - DNA, 15 bp, Homo sapiens
tatgcaataatatat

SEQ ID NO: 197501 - DNA, 15 bp, Homo sapiens
atatgcaataatata

SEQ ID NO: 197502 - DNA, 15 bp, Homo sapiens
tatatgcaataatat

SEQ ID NO: 197503 - DNA, 15 bp, Homo sapiens
ctatatgcaataata

SEQ ID NO: 197504 - DNA, 15 bp, Homo sapiens
actatatgcaataat

SEQ ID NO: 197505 - DNA, 15 bp, Homo sapiens
aactatatgcaataa

SEQ ID NO: 197506 - DNA, 15 bp, Homo sapiens
taactatatgcaata

SEQ ID NO: 197507 - DNA, 15 bp, Homo sapiens
ttaactatatgcaat

SEQ ID NO: 197508 - DNA, 15 bp, Homo sapiens
attaactatatgcaa

SEQ ID NO: 197509 - DNA, 15 bp, Homo sapiens
tattaactatatgca

SEQ ID NO: 197510 - DNA, 15 bp, Homo sapiens
gtattaactatatgc

SEQ ID NO: 197511 - DNA, 15 bp, Homo sapiens
agtattaactatatg

SEQ ID NO: 197512 - DNA, 15 bp, Homo sapiens
tagtattaactatat

SEQ ID NO: 197513 - DNA, 15 bp, Homo sapiens
atagtattaactata

SEQ ID NO: 197514 - DNA, 15 bp, Homo sapiens
tatagtattaactat

SEQ ID NO: 197515 - DNA, 15 bp, Homo sapiens
atatagtattaacta

SEQ ID NO: 197516 - DNA, 15 bp, Homo sapiens
tatatagtattaact

SEQ ID NO: 197517 - DNA, 15 bp, Homo sapiens
atatatagtattaac

SEQ ID NO: 197518 - DNA, 15 bp, Homo sapiens
tatatatagtattaa

SEQ ID NO: 197519 - DNA, 15 bp, Homo sapiens
ttatatatagtatta

SEQ ID NO: 197520 - DNA, 15 bp, Homo sapiens
attatatatagtatt

SEQ ID NO: 197521 - DNA, 15 bp, Homo sapiens
cattatatatagtat

SEQ ID NO: 197522 - DNA, 15 bp, Homo sapiens
acattatatatagta

SEQ ID NO: 197523 - DNA, 15 bp, Homo sapiens
cacattatatatagt

SEQ ID NO: 197524 - DNA, 15 bp, Homo sapiens
acacattatatatag

SEQ ID NO: 197525 - DNA, 15 bp, Homo sapiens
tacacattatatata

SEQ ID NO: 197526 - DNA, 15 bp, Homo sapiens
gtacacattatatat

SEQ ID NO: 197527 - DNA, 15 bp, Homo sapiens
ggtacacattatata

SEQ ID NO: 197528 - DNA, 15 bp, Homo sapiens
tggtacacattatat

SEQ ID NO: 197529 - DNA, 15 bp, Homo sapiens
gtggtacacattata

SEQ ID NO: 197530 - DNA, 15 bp, Homo sapiens
tgtggtacacattat

SEQ ID NO: 197531 - DNA, 15 bp, Homo sapiens
gtgtggtacacatta

SEQ ID NO: 197532 - DNA, 15 bp, Homo sapiens
tgtgtggtacacatt

SEQ ID NO: 197533 - DNA, 15 bp, Homo sapiens
atgtgtggtacacat

SEQ ID NO: 197534 - DNA, 15 bp, Homo sapiens
aatgtgtggtacaca

SEQ ID NO: 197535 - DNA, 15 bp, Homo sapiens
aaatgtgtggtacac

SEQ ID NO: 197536 - DNA, 15 bp, Homo sapiens
aaaatgtgtggtaca

SEQ ID NO: 197537 - DNA, 15 bp, Homo sapiens
caaaatgtgtggtac

SEQ ID NO: 197538 - DNA, 15 bp, Homo sapiens
tcaaaatgtgtggta

SEQ ID NO: 197539 - DNA, 15 bp, Homo sapiens
atcaaaatgtgtggt

SEQ ID NO: 197540 - DNA, 15 bp, Homo sapiens
aatcaaaatgtgtgg

SEQ ID NO: 197541 - DNA, 15 bp, Homo sapiens
caatcaaaatgtgtg

SEQ ID NO: 197542 - DNA, 15 bp, Homo sapiens
acaatcaaaatgtgt

SEQ ID NO: 197543 - DNA, 15 bp, Homo sapiens
tacaatcaaaatgtg

SEQ ID NO: 197544 - DNA, 15 bp, Homo sapiens
ttacaatcaaaatgt

SEQ ID NO: 197545 - DNA, 15 bp, Homo sapiens
attacaatcaaaatg

SEQ ID NO: 197546 - DNA, 15 bp, Homo sapiens
tattacaatcaaaat

SEQ ID NO: 197547 - DNA, 15 bp, Homo sapiens
ttattacaatcaaaa

SEQ ID NO: 197548 - DNA, 15 bp, Homo sapiens
gttattacaatcaaa

SEQ ID NO: 197549 - DNA, 15 bp, Homo sapiens
agttattacaatcaa

SEQ ID NO: 197550 - DNA, 15 bp, Homo sapiens
tagttattacaatca

SEQ ID NO: 197551 - DNA, 15 bp, Homo sapiens
ttagttattacaatc

SEQ ID NO: 197552 - DNA, 15 bp, Homo sapiens
attagttattacaat

SEQ ID NO: 197553 - DNA, 15 bp, Homo sapiens
tattagttattacaa

SEQ ID NO: 197554 - DNA, 15 bp, Homo sapiens
atattagttattaca

SEQ ID NO: 197555 - DNA, 15 bp, Homo sapiens
catattagttattac

SEQ ID NO: 197556 - DNA, 15 bp, Homo sapiens
acatattagttatta

SEQ ID NO: 197557 - DNA, 15 bp, Homo sapiens
aacatattagttatt

SEQ ID NO: 197558 - DNA, 15 bp, Homo sapiens
aaacatattagttat

SEQ ID NO: 197559 - DNA, 15 bp, Homo sapiens
aaaacatattagtta

SEQ ID NO: 197560 - DNA, 15 bp, Homo sapiens
caaaacatattagtt

SEQ ID NO: 197561 - DNA, 15 bp, Homo sapiens
ccaaaacatattagt

SEQ ID NO: 197562 - DNA, 15 bp, Homo sapiens
gccaaaacatattag

SEQ ID NO: 197563 - DNA, 15 bp, Homo sapiens
ggccaaaacatatta

SEQ ID NO: 197564 - DNA, 15 bp, Homo sapiens
aggccaaaacatatt

SEQ ID NO: 197565 - DNA, 15 bp, Homo sapiens
aaggccaaaacatat

SEQ ID NO: 197566 - DNA, 15 bp, Homo sapiens
aaaggccaaaacata

SEQ ID NO: 197567 - DNA, 15 bp, Homo sapiens
gaaaggccaaaacat

SEQ ID NO: 197568 - DNA, 15 bp, Homo sapiens
agaaaggccaaaaca

SEQ ID NO: 197569 - DNA, 15 bp, Homo sapiens
cagaaaggccaaaac

SEQ ID NO: 197570 - DNA, 15 bp, Homo sapiens
acagaaaggccaaaa

SEQ ID NO: 197571 - DNA, 15 bp, Homo sapiens
aacagaaaggccaaa

SEQ ID NO: 197572 - DNA, 15 bp, Homo sapiens
aaacagaaaggccaa

SEQ ID NO: 197573 - DNA, 15 bp, Homo sapiens
aaaacagaaaggcca

SEQ ID NO: 197574 - DNA, 15 bp, Homo sapiens
aaaaacagaaaggcc

SEQ ID NO: 197575 - DNA, 15 bp, Homo sapiens
aaaaaacagaaaggc

SEQ ID NO: 197576 - DNA, 15 bp, Homo sapiens
taaaaaacagaaagg

SEQ ID NO: 197577 - DNA, 15 bp, Homo sapiens
ttaaaaaacagaaag

SEQ ID NO: 197578 - DNA, 15 bp, Homo sapiens
tttaaaaaacagaaa

SEQ ID NO: 197579 - DNA, 15 bp, Homo sapiens
ttttaaaaaacagaa

SEQ ID NO: 197580 - DNA, 15 bp, Homo sapiens
tttttaaaaaacaga

SEQ ID NO: 197581 - DNA, 15 bp, Homo sapiens
ttttttaaaaaacag

SEQ ID NO: 197582 - DNA, 15 bp, Homo sapiens
attttttaaaaaaca

SEQ ID NO: 197583 - DNA, 15 bp, Homo sapiens
cattttttaaaaaac

SEQ ID NO: 197584 - DNA, 15 bp, Homo sapiens
gcattttttaaaaaa

SEQ ID NO: 197585 - DNA, 15 bp, Homo sapiens
agcattttttaaaaa

SEQ ID NO: 197586 - DNA, 15 bp, Homo sapiens
aagcattttttaaaa

SEQ ID NO: 197587 - DNA, 15 bp, Homo sapiens
aaagcattttttaaa

SEQ ID NO: 197588 - DNA, 15 bp, Homo sapiens
aaaagcattttttaa

SEQ ID NO: 197589 - DNA, 15 bp, Homo sapiens
aaaaagcatttttta

SEQ ID NO: 197590 - DNA, 15 bp, Homo sapiens
caaaaagcatttttt

SEQ ID NO: 197591 - DNA, 15 bp, Homo sapiens
gcaaaaagcattttt

SEQ ID NO: 197592 - DNA, 15 bp, Homo sapiens
tgcaaaaagcatttt

SEQ ID NO: 197593 - DNA, 15 bp, Homo sapiens
ctgcaaaaagcattt

SEQ ID NO: 197594 - DNA, 15 bp, Homo sapiens
actgcaaaaagcatt

SEQ ID NO: 197595 - DNA, 15 bp, Homo sapiens
gactgcaaaaagcat

SEQ ID NO: 197596 - DNA, 15 bp, Homo sapiens
agactgcaaaaagca

SEQ ID NO: 197597 - DNA, 15 bp, Homo sapiens
aagactgcaaaaagc

SEQ ID NO: 197598 - DNA, 15 bp, Homo sapiens
aaagactgcaaaaag

SEQ ID NO: 197599 - DNA, 15 bp, Homo sapiens
aaaagactgcaaaaa

SEQ ID NO: 197600 - DNA, 15 bp, Homo sapiens
aaaaagactgcaaaa

SEQ ID NO: 197601 - DNA, 15 bp, Homo sapiens
aaaaaagactgcaaa

SEQ ID NO: 197602 - DNA, 15 bp, Homo sapiens
caaaaaagactgcaa

SEQ ID NO: 197603 - DNA, 15 bp, Homo sapiens
acaaaaaagactgca

SEQ ID NO: 197604 - DNA, 15 bp, Homo sapiens
gacaaaaaagactgc

SEQ ID NO: 197605 - DNA, 15 bp, Homo sapiens
agacaaaaaagactg

SEQ ID NO: 197606 - DNA, 15 bp, Homo sapiens
tagacaaaaaagact

SEQ ID NO: 197607 - DNA, 15 bp, Homo sapiens
atagacaaaaaagac

SEQ ID NO: 197608 - DNA, 15 bp, Homo sapiens
gatagacaaaaaaga

SEQ ID NO: 197609 - DNA, 15 bp, Homo sapiens
agatagacaaaaaag

SEQ ID NO: 197610 - DNA, 15 bp, Homo sapiens
cagatagacaaaaaa

SEQ ID NO: 197611 - DNA, 15 bp, Homo sapiens
acagatagacaaaaa

SEQ ID NO: 197612 - DNA, 15 bp, Homo sapiens
tacagatagacaaaa

SEQ ID NO: 197613 - DNA, 15 bp, Homo sapiens
ttacagatagacaaa

SEQ ID NO: 197614 - DNA, 15 bp, Homo sapiens
attacagatagacaa

SEQ ID NO: 197615 - DNA, 15 bp, Homo sapiens
tattacagatagaca

SEQ ID NO: 197616 - DNA, 15 bp, Homo sapiens
ctattacagatagac

SEQ ID NO: 197617 - DNA, 15 bp, Homo sapiens
tctattacagataga

SEQ ID NO: 197618 - DNA, 15 bp, Homo sapiens
atctattacagatag

SEQ ID NO: 197619 - DNA, 15 bp, Homo sapiens
tatctattacagata

SEQ ID NO: 197620 - DNA, 15 bp, Homo sapiens
atatctattacagat

SEQ ID NO: 197621 - DNA, 15 bp, Homo sapiens
aatatctattacaga

SEQ ID NO: 197622 - DNA, 15 bp, Homo sapiens
aaatatctattacag

SEQ ID NO: 197623 - DNA, 15 bp, Homo sapiens
taaatatctattaca

SEQ ID NO: 197624 - DNA, 15 bp, Homo sapiens
ttaaatatctattac

SEQ ID NO: 197625 - DNA, 15 bp, Homo sapiens
tttaaatatctatta

SEQ ID NO: 197626 - DNA, 15 bp, Homo sapiens
atttaaatatctatt

SEQ ID NO: 197627 - DNA, 15 bp, Homo sapiens
aatttaaatatctat

SEQ ID NO: 197628 - DNA, 15 bp, Homo sapiens
aaatttaaatatcta

SEQ ID NO: 197629 - DNA, 15 bp, Homo sapiens
aaaatttaaatatct

SEQ ID NO: 197630 - DNA, 15 bp, Homo sapiens
aaaaatttaaatatc

SEQ ID NO: 197631 - DNA, 15 bp, Homo sapiens
aaaaaatttaaatat

SEQ ID NO: 197632 - DNA, 15 bp, Homo sapiens
taaaaaatttaaata

SEQ ID NO: 197633 - DNA, 15 bp, Homo sapiens
ataaaaaatttaaat

SEQ ID NO: 197634 - DNA, 15 bp, Homo sapiens
aataaaaaatttaaa

SEQ ID NO: 197635 - DNA, 15 bp, Homo sapiens
aaataaaaaatttaa

SEQ ID NO: 197636 - DNA, 15 bp, Homo sapiens
aaaataaaaaattta

SEQ ID NO: 197637 - DNA, 15 bp, Homo sapiens
taaaataaaaaattt

SEQ ID NO: 197638 - DNA, 15 bp, Homo sapiens
ataaaataaaaaatt

SEQ ID NO: 197639 - DNA, 15 bp, Homo sapiens
tataaaataaaaaat

SEQ ID NO: 197640 - DNA, 15 bp, Homo sapiens
gtataaaataaaaaa

SEQ ID NO: 197641 - DNA, 15 bp, Homo sapiens
agtataaaataaaaa

SEQ ID NO: 197642 - DNA, 15 bp, Homo sapiens
aagtataaaataaaa

SEQ ID NO: 197643 - DNA, 15 bp, Homo sapiens
aaagtataaaataaa

SEQ ID NO: 197644 - DNA, 15 bp, Homo sapiens
aaaagtataaaataa

SEQ ID NO: 197645 - DNA, 15 bp, Homo sapiens
gaaaagtataaaata

SEQ ID NO: 197646 - DNA, 15 bp, Homo sapiens
agaaaagtataaaat

SEQ ID NO: 197647 - DNA, 15 bp, Homo sapiens
aagaaaagtataaaa

SEQ ID NO: 197648 - DNA, 15 bp, Homo sapiens
aaagaaaagtataaa

SEQ ID NO: 197649 - DNA, 15 bp, Homo sapiens
taaagaaaagtataa

SEQ ID NO: 197650 - DNA, 15 bp, Homo sapiens
ataaagaaaagtata

SEQ ID NO: 197651 - DNA, 15 bp, Homo sapiens
aataaagaaaagtat

SEQ ID NO: 197652 - DNA, 15 bp, Homo sapiens
taataaagaaaagta

SEQ ID NO: 197653 - DNA, 15 bp, Homo sapiens
ttaataaagaaaagt

SEQ ID NO: 197654 - DNA, 15 bp, Homo sapiens
tttaataaagaaaag

SEQ ID NO: 197655 - DNA, 15 bp, Homo sapiens
atttaataaagaaaa

SEQ ID NO: 197656 - DNA, 15 bp, Homo sapiens
aatttaataaagaaa

SEQ ID NO: 197657 - DNA, 15 bp, Homo sapiens
caatttaataaagaa

SEQ ID NO: 197658 - DNA, 15 bp, Homo sapiens
ccaatttaataaaga

SEQ ID NO: 197659 - DNA, 15 bp, Homo sapiens
tccaatttaataaag

SEQ ID NO: 197660 - DNA, 15 bp, Homo sapiens
ttccaatttaataaa

SEQ ID NO: 197661 - DNA, 15 bp, Homo sapiens
attccaatttaataa

SEQ ID NO: 197662 - DNA, 15 bp, Homo sapiens
cattccaatttaata

SEQ ID NO: 197663 - DNA, 15 bp, Homo sapiens
acattccaatttaat

SEQ ID NO: 197664 - DNA, 15 bp, Homo sapiens
gacattccaatttaa

SEQ ID NO: 197665 - DNA, 15 bp, Homo sapiens
agacattccaattta

SEQ ID NO: 197666 - DNA, 15 bp, Homo sapiens
tagacattccaattt

SEQ ID NO: 197667 - DNA, 15 bp, Homo sapiens
gtagacattccaatt

SEQ ID NO: 197668 - DNA, 15 bp, Homo sapiens
ggtagacattccaat

SEQ ID NO: 197669 - DNA, 15 bp, Homo sapiens
gggtagacattccaa

SEQ ID NO: 197670 - DNA, 15 bp, Homo sapiens
tgggtagacattcca

SEQ ID NO: 197671 - DNA, 15 bp, Homo sapiens
atgggtagacattcc

SEQ ID NO: 197672 - DNA, 15 bp, Homo sapiens
catgggtagacattc

SEQ ID NO: 197673 - DNA, 15 bp, Homo sapiens
gcatgggtagacatt

SEQ ID NO: 197674 - DNA, 15 bp, Homo sapiens
agcatgggtagacat

SEQ ID NO: 197675 - DNA, 15 bp, Homo sapiens
cagcatgggtagaca

SEQ ID NO: 197676 - DNA, 15 bp, Homo sapiens
gcagcatgggtagac

SEQ ID NO: 197677 - DNA, 15 bp, Homo sapiens
ggcagcatgggtaga

SEQ ID NO: 197678 - DNA, 15 bp, Homo sapiens
aggcagcatgggtag

SEQ ID NO: 197679 - DNA, 15 bp, Homo sapiens
gaggcagcatgggta

SEQ ID NO: 197680 - DNA, 15 bp, Homo sapiens
agaggcagcatgggt

SEQ ID NO: 197681 - DNA, 15 bp, Homo sapiens
gagaggcagcatggg

SEQ ID NO: 197682 - DNA, 15 bp, Homo sapiens
tgagaggcagcatgg

SEQ ID NO: 197683 - DNA, 15 bp, Homo sapiens
ttgagaggcagcatg

SEQ ID NO: 197684 - DNA, 15 bp, Homo sapiens
cttgagaggcagcat

SEQ ID NO: 197685 - DNA, 15 bp, Homo sapiens
acttgagaggcagca

SEQ ID NO: 197686 - DNA, 15 bp, Homo sapiens
tacttgagaggcagc

SEQ ID NO: 197687 - DNA, 15 bp, Homo sapiens
atacttgagaggcag

SEQ ID NO: 197688 - DNA, 15 bp, Homo sapiens
aatacttgagaggca

SEQ ID NO: 197689 - DNA, 15 bp, Homo sapiens
aaatacttgagaggc

SEQ ID NO: 197690 - DNA, 15 bp, Homo sapiens
taaatacttgagagg

SEQ ID NO: 197691 - DNA, 15 bp, Homo sapiens
ttaaatacttgagag

SEQ ID NO: 197692 - DNA, 15 bp, Homo sapiens
tttaaatacttgaga

SEQ ID NO: 197693 - DNA, 15 bp, Homo sapiens
ttttaaatacttgag

SEQ ID NO: 197694 - DNA, 15 bp, Homo sapiens
gttttaaatacttga

SEQ ID NO: 197695 - DNA, 15 bp, Homo sapiens
agttttaaatacttg

SEQ ID NO: 197696 - DNA, 15 bp, Homo sapiens
tagttttaaatactt

SEQ ID NO: 197697 - DNA, 15 bp, Homo sapiens
atagttttaaatact

SEQ ID NO: 197698 - DNA, 15 bp, Homo sapiens
aatagttttaaatac

SEQ ID NO: 197699 - DNA, 15 bp, Homo sapiens
caatagttttaaata

SEQ ID NO: 197700 - DNA, 15 bp, Homo sapiens
acaatagttttaaat

SEQ ID NO: 197701 - DNA, 15 bp, Homo sapiens
aacaatagttttaaa

SEQ ID NO: 197702 - DNA, 15 bp, Homo sapiens
gaacaatagttttaa

SEQ ID NO: 197703 - DNA, 15 bp, Homo sapiens
tgaacaatagtttta

SEQ ID NO: 197704 - DNA, 15 bp, Homo sapiens
ttgaacaatagtttt

SEQ ID NO: 197705 - DNA, 15 bp, Homo sapiens
gttgaacaatagttt

SEQ ID NO: 197706 - DNA, 15 bp, Homo sapiens
ggttgaacaatagtt

SEQ ID NO: 197707 - DNA, 15 bp, Homo sapiens
tggttgaacaatagt

SEQ ID NO: 197708 - DNA, 15 bp, Homo sapiens
atggttgaacaatag

SEQ ID NO: 197709 - DNA, 15 bp, Homo sapiens
tatggttgaacaata

SEQ ID NO: 197710 - DNA, 15 bp, Homo sapiens
atatggttgaacaat

SEQ ID NO: 197711 - DNA, 15 bp, Homo sapiens
aatatggttgaacaa

SEQ ID NO: 197712 - DNA, 15 bp, Homo sapiens
aaatatggttgaaca

SEQ ID NO: 197713 - DNA, 15 bp, Homo sapiens
aaaatatggttgaac

SEQ ID NO: 197714 - DNA, 15 bp, Homo sapiens
caaaatatggttgaa

SEQ ID NO: 197715 - DNA, 15 bp, Homo sapiens
gcaaaatatggttga

SEQ ID NO: 197716 - DNA, 15 bp, Homo sapiens
ggcaaaatatggttg

SEQ ID NO: 197717 - DNA, 15 bp, Homo sapiens
tggcaaaatatggtt

SEQ ID NO: 197718 - DNA, 15 bp, Homo sapiens
ttggcaaaatatggt

SEQ ID NO: 197719 - DNA, 15 bp, Homo sapiens
attggcaaaatatgg

SEQ ID NO: 197720 - DNA, 15 bp, Homo sapiens
cattggcaaaatatg

SEQ ID NO: 197721 - DNA, 15 bp, Homo sapiens
ccattggcaaaatat

SEQ ID NO: 197722 - DNA, 15 bp, Homo sapiens
accattggcaaaata

SEQ ID NO: 197723 - DNA, 15 bp, Homo sapiens
aaccattggcaaaat

SEQ ID NO: 197724 - DNA, 15 bp, Homo sapiens
taaccattggcaaaa

SEQ ID NO: 197725 - DNA, 15 bp, Homo sapiens
ttaaccattggcaaa

SEQ ID NO: 197726 - DNA, 15 bp, Homo sapiens
attaaccattggcaa

SEQ ID NO: 197727 - DNA, 15 bp, Homo sapiens
cattaaccattggca

SEQ ID NO: 197728 - DNA, 15 bp, Homo sapiens
acattaaccattggc

SEQ ID NO: 197729 - DNA, 15 bp, Homo sapiens
tacattaaccattgg

SEQ ID NO: 197730 - DNA, 15 bp, Homo sapiens
atacattaaccattg

SEQ ID NO: 197731 - DNA, 15 bp, Homo sapiens
tatacattaaccatt

SEQ ID NO: 197732 - DNA, 15 bp, Homo sapiens
ctatacattaaccat

SEQ ID NO: 197733 - DNA, 15 bp, Homo sapiens
tctatacattaacca

SEQ ID NO: 197734 - DNA, 15 bp, Homo sapiens
ctctatacattaacc

SEQ ID NO: 197735 - DNA, 15 bp, Homo sapiens
actctatacattaac

SEQ ID NO: 197736 - DNA, 15 bp, Homo sapiens
cactctatacattaa

SEQ ID NO: 197737 - DNA, 15 bp, Homo sapiens
tcactctatacatta

SEQ ID NO: 197738 - DNA, 15 bp, Homo sapiens
ttcactctatacatt

SEQ ID NO: 197739 - DNA, 15 bp, Homo sapiens
tttcactctatacat

SEQ ID NO: 197740 - DNA, 15 bp, Homo sapiens
atttcactctataca

SEQ ID NO: 197741 - DNA, 15 bp, Homo sapiens
tatttcactctatac

SEQ ID NO: 197742 - DNA, 15 bp, Homo sapiens
ctatttcactctata

SEQ ID NO: 197743 - DNA, 15 bp, Homo sapiens
gctatttcactctat

SEQ ID NO: 197744 - DNA, 15 bp, Homo sapiens
ggctatttcactcta

SEQ ID NO: 197745 - DNA, 15 bp, Homo sapiens
aggctatttcactct

SEQ ID NO: 197746 - DNA, 15 bp, Homo sapiens
gaggctatttcactc

SEQ ID NO: 197747 - DNA, 15 bp, Homo sapiens
agaggctatttcact

SEQ ID NO: 197748 - DNA, 15 bp, Homo sapiens
aagaggctatttcac

SEQ ID NO: 197749 - DNA, 15 bp, Homo sapiens
taagaggctatttca

SEQ ID NO: 197750 - DNA, 15 bp, Homo sapiens
gtaagaggctatttc

SEQ ID NO: 197751 - DNA, 15 bp, Homo sapiens
agtaagaggctattt

SEQ ID NO: 197752 - DNA, 15 bp, Homo sapiens
gagtaagaggctatt

SEQ ID NO: 197753 - DNA, 15 bp, Homo sapiens
ggagtaagaggctat

SEQ ID NO: 197754 - DNA, 15 bp, Homo sapiens
aggagtaagaggcta

SEQ ID NO: 197755 - DNA, 15 bp, Homo sapiens
aaggagtaagaggct

SEQ ID NO: 197756 - DNA, 15 bp, Homo sapiens
caaggagtaagaggc

SEQ ID NO: 197757 - DNA, 15 bp, Homo sapiens
gcaaggagtaagagg

SEQ ID NO: 197758 - DNA, 15 bp, Homo sapiens
ggcaaggagtaagag

SEQ ID NO: 197759 - DNA, 15 bp, Homo sapiens
tggcaaggagtaaga

SEQ ID NO: 197760 - DNA, 15 bp, Homo sapiens
gtggcaaggagtaag

SEQ ID NO: 197761 - DNA, 15 bp, Homo sapiens
cgtggcaaggagtaa

SEQ ID NO: 197762 - DNA, 15 bp, Homo sapiens
acgtggcaaggagta

SEQ ID NO: 197763 - DNA, 15 bp, Homo sapiens
tacgtggcaaggagt

SEQ ID NO: 197764 - DNA, 15 bp, Homo sapiens
ttacgtggcaaggag

SEQ ID NO: 197765 - DNA, 15 bp, Homo sapiens
cttacgtggcaagga

SEQ ID NO: 197766 - DNA, 15 bp, Homo sapiens
tcttacgtggcaagg

SEQ ID NO: 197767 - DNA, 15 bp, Homo sapiens
atcttacgtggcaag

SEQ ID NO: 197768 - DNA, 15 bp, Homo sapiens
tatcttacgtggcaa

SEQ ID NO: 197769 - DNA, 15 bp, Homo sapiens
ttatcttacgtggca

SEQ ID NO: 197770 - DNA, 15 bp, Homo sapiens
tttatcttacgtggc

SEQ ID NO: 197771 - DNA, 15 bp, Homo sapiens
atttatcttacgtgg

SEQ ID NO: 197772 - DNA, 15 bp, Homo sapiens
tatttatcttacgtg

SEQ ID NO: 197773 - DNA, 15 bp, Homo sapiens
ttatttatcttacgt

SEQ ID NO: 197774 - DNA, 15 bp, Homo sapiens
attatttatcttacg

SEQ ID NO: 197775 - DNA, 15 bp, Homo sapiens
aattatttatcttac

SEQ ID NO: 197776 - DNA, 15 bp, Homo sapiens
aaattatttatctta

SEQ ID NO: 197777 - DNA, 15 bp, Homo sapiens
aaaattatttatctt

SEQ ID NO: 197778 - DNA, 15 bp, Homo sapiens
aaaaattatttatct

SEQ ID NO: 197779 - DNA, 15 bp, Homo sapiens
gaaaaattatttatc

SEQ ID NO: 197780 - DNA, 15 bp, Homo sapiens
agaaaaattatttat

SEQ ID NO: 197781 - DNA, 15 bp, Homo sapiens
aagaaaaattattta

SEQ ID NO: 197782 - DNA, 15 bp, Homo sapiens
gaagaaaaattattt

SEQ ID NO: 197783 - DNA, 15 bp, Homo sapiens
agaagaaaaattatt

SEQ ID NO: 197784 - DNA, 15 bp, Homo sapiens
aagaagaaaaattat

SEQ ID NO: 197785 - DNA, 15 bp, Homo sapiens
aaagaagaaaaatta

SEQ ID NO: 197786 - DNA, 15 bp, Homo sapiens
aaaagaagaaaaatt

SEQ ID NO: 197787 - DNA, 15 bp, Homo sapiens
gaaaagaagaaaaat

SEQ ID NO: 197788 - DNA, 15 bp, Homo sapiens
tgaaaagaagaaaaa

SEQ ID NO: 197789 - DNA, 15 bp, Homo sapiens
atgaaaagaagaaaa

SEQ ID NO: 197790 - DNA, 15 bp, Homo sapiens
aatgaaaagaagaaa

SEQ ID NO: 197791 - DNA, 15 bp, Homo sapiens
gaatgaaaagaagaa

SEQ ID NO: 197792 - DNA, 15 bp, Homo sapiens
ggaatgaaaagaaga

SEQ ID NO: 197793 - DNA, 15 bp, Homo sapiens
gggaatgaaaagaag

SEQ ID NO: 197794 - DNA, 15 bp, Homo sapiens
ggggaatgaaaagaa

SEQ ID NO: 197795 - DNA, 15 bp, Homo sapiens
gggggaatgaaaaga

SEQ ID NO: 197796 - DNA, 15 bp, Homo sapiens
tgggggaatgaaaag

SEQ ID NO: 197797 - DNA, 15 bp, Homo sapiens
atgggggaatgaaaa

SEQ ID NO: 197798 - DNA, 15 bp, Homo sapiens
aatgggggaatgaaa

SEQ ID NO: 197799 - DNA, 15 bp, Homo sapiens
gaatgggggaatgaa

SEQ ID NO: 197800 - DNA, 15 bp, Homo sapiens
ggaatgggggaatga

SEQ ID NO: 197801 - DNA, 15 bp, Homo sapiens
tggaatgggggaatg

SEQ ID NO: 197802 - DNA, 15 bp, Homo sapiens
atggaatgggggaat

SEQ ID NO: 197803 - DNA, 15 bp, Homo sapiens
tatggaatgggggaa

SEQ ID NO: 197804 - DNA, 15 bp, Homo sapiens
ttatggaatggggga

SEQ ID NO: 197805 - DNA, 15 bp, Homo sapiens
attatggaatggggg

SEQ ID NO: 197806 - DNA, 15 bp, Homo sapiens
tattatggaatgggg

SEQ ID NO: 197807 - DNA, 15 bp, Homo sapiens
atattatggaatggg

SEQ ID NO: 197808 - DNA, 15 bp, Homo sapiens
aatattatggaatgg

SEQ ID NO: 197809 - DNA, 15 bp, Homo sapiens
taatattatggaatg

SEQ ID NO: 197810 - DNA, 15 bp, Homo sapiens
gtaatattatggaat

SEQ ID NO: 197811 - DNA, 15 bp, Homo sapiens
tgtaatattatggaa

SEQ ID NO: 197812 - DNA, 15 bp, Homo sapiens
gtgtaatattatgga

SEQ ID NO: 197813 - DNA, 15 bp, Homo sapiens
agtgtaatattatgg

SEQ ID NO: 197814 - DNA, 15 bp, Homo sapiens
gagtgtaatattatg

SEQ ID NO: 197815 - DNA, 15 bp, Homo sapiens
tgagtgtaatattat

SEQ ID NO: 197816 - DNA, 15 bp, Homo sapiens
atgagtgtaatatta

SEQ ID NO: 197817 - DNA, 15 bp, Homo sapiens
catgagtgtaatatt

SEQ ID NO: 197818 - DNA, 15 bp, Homo sapiens
gcatgagtgtaatat

SEQ ID NO: 197819 - DNA, 15 bp, Homo sapiens
agcatgagtgtaata

SEQ ID NO: 197820 - DNA, 15 bp, Homo sapiens
aagcatgagtgtaat

SEQ ID NO: 197821 - DNA, 15 bp, Homo sapiens
aaagcatgagtgtaa

SEQ ID NO: 197822 - DNA, 15 bp, Homo sapiens
aaaagcatgagtgta

SEQ ID NO: 197823 - DNA, 15 bp, Homo sapiens
taaaagcatgagtgt

SEQ ID NO: 197824 - DNA, 15 bp, Homo sapiens
ataaaagcatgagtg

SEQ ID NO: 197825 - DNA, 15 bp, Homo sapiens
cataaaagcatgagt

SEQ ID NO: 197826 - DNA, 15 bp, Homo sapiens
ccataaaagcatgag

SEQ ID NO: 197827 - DNA, 15 bp, Homo sapiens
accataaaagcatga

SEQ ID NO: 197828 - DNA, 15 bp, Homo sapiens
taccataaaagcatg

SEQ ID NO: 197829 - DNA, 15 bp, Homo sapiens
ataccataaaagcat

SEQ ID NO: 197830 - DNA, 15 bp, Homo sapiens
tataccataaaagca

SEQ ID NO: 197831 - DNA, 15 bp, Homo sapiens
ttataccataaaagc

SEQ ID NO: 197832 - DNA, 15 bp, Homo sapiens
attataccataaaag

SEQ ID NO: 197833 - DNA, 15 bp, Homo sapiens
gattataccataaaa

SEQ ID NO: 197834 - DNA, 15 bp, Homo sapiens
agattataccataaa

SEQ ID NO: 197835 - DNA, 15 bp, Homo sapiens
cagattataccataa

SEQ ID NO: 197836 - DNA, 15 bp, Homo sapiens
tcagattataccata

SEQ ID NO: 197837 - DNA, 15 bp, Homo sapiens
atcagattataccat

SEQ ID NO: 197838 - DNA, 15 bp, Homo sapiens
tatcagattatacca

SEQ ID NO: 197839 - DNA, 15 bp, Homo sapiens
atatcagattatacc

SEQ ID NO: 197840 - DNA, 15 bp, Homo sapiens
aatatcagattatac

SEQ ID NO: 197841 - DNA, 15 bp, Homo sapiens
aaatatcagattata

SEQ ID NO: 197842 - DNA, 15 bp, Homo sapiens
taaatatcagattat

SEQ ID NO: 197843 - DNA, 15 bp, Homo sapiens
ttaaatatcagatta

SEQ ID NO: 197844 - DNA, 15 bp, Homo sapiens
tttaaatatcagatt

SEQ ID NO: 197845 - DNA, 15 bp, Homo sapiens
ttttaaatatcagat

SEQ ID NO: 197846 - DNA, 15 bp, Homo sapiens
gttttaaatatcaga

SEQ ID NO: 197847 - DNA, 15 bp, Homo sapiens
agttttaaatatcag

SEQ ID NO: 197848 - DNA, 15 bp, Homo sapiens
aagttttaaatatca

SEQ ID NO: 197849 - DNA, 15 bp, Homo sapiens
gaagttttaaatatc

SEQ ID NO: 197850 - DNA, 15 bp, Homo sapiens
agaagttttaaatat

SEQ ID NO: 197851 - DNA, 15 bp, Homo sapiens
tagaagttttaaata

SEQ ID NO: 197852 - DNA, 15 bp, Homo sapiens
gtagaagttttaaat

SEQ ID NO: 197853 - DNA, 15 bp, Homo sapiens
agtagaagttttaaa

SEQ ID NO: 197854 - DNA, 15 bp, Homo sapiens
aagtagaagttttaa

SEQ ID NO: 197855 - DNA, 15 bp, Homo sapiens
taagtagaagtttta

SEQ ID NO: 197856 - DNA, 15 bp, Homo sapiens
ataagtagaagtttt

SEQ ID NO: 197857 - DNA, 15 bp, Homo sapiens
aataagtagaagttt

SEQ ID NO: 197858 - DNA, 15 bp, Homo sapiens
taataagtagaagtt

SEQ ID NO: 197859 - DNA, 15 bp, Homo sapiens
ataataagtagaagt

SEQ ID NO: 197860 - DNA, 15 bp, Homo sapiens
aataataagtagaag

SEQ ID NO: 197861 - DNA, 15 bp, Homo sapiens
taataataagtagaa

SEQ ID NO: 197862 - DNA, 15 bp, Homo sapiens
ataataataagtaga

SEQ ID NO: 197863 - DNA, 15 bp, Homo sapiens
aataataataagtag

SEQ ID NO: 197864 - DNA, 15 bp, Homo sapiens
taataataataagta

SEQ ID NO: 197865 - DNA, 15 bp, Homo sapiens
ataataataataagt

SEQ ID NO: 197866 - DNA, 15 bp, Homo sapiens
tataataataataag

SEQ ID NO: 197867 - DNA, 15 bp, Homo sapiens
atataataataataa

SEQ ID NO: 197868 - DNA, 15 bp, Homo sapiens
aatataataataata

SEQ ID NO: 197869 - DNA, 15 bp, Homo sapiens
aaatataataataat

SEQ ID NO: 197870 - DNA, 15 bp, Homo sapiens
aaaatataataataa

SEQ ID NO: 197871 - DNA, 15 bp, Homo sapiens
aaaaatataataata

SEQ ID NO: 197872 - DNA, 15 bp, Homo sapiens
gaaaaatataataat

SEQ ID NO: 197873 - DNA, 15 bp, Homo sapiens
tgaaaaatataataa

SEQ ID NO: 197874 - DNA, 15 bp, Homo sapiens
gtgaaaaatataata

SEQ ID NO: 197875 - DNA, 15 bp, Homo sapiens
tgtgaaaaatataat

SEQ ID NO: 197876 - DNA, 15 bp, Homo sapiens
atgtgaaaaatataa

SEQ ID NO: 197877 - DNA, 15 bp, Homo sapiens
aatgtgaaaaatata

SEQ ID NO: 197878 - DNA, 15 bp, Homo sapiens
aaatgtgaaaaatat

SEQ ID NO: 197879 - DNA, 15 bp, Homo sapiens
aaaatgtgaaaaata

SEQ ID NO: 197880 - DNA, 15 bp, Homo sapiens
taaaatgtgaaaaat

SEQ ID NO: 197881 - DNA, 15 bp, Homo sapiens
ataaaatgtgaaaaa

SEQ ID NO: 197882 - DNA, 15 bp, Homo sapiens
gataaaatgtgaaaa

SEQ ID NO: 197883 - DNA, 15 bp, Homo sapiens
agataaaatgtgaaa

SEQ ID NO: 197884 - DNA, 15 bp, Homo sapiens
aagataaaatgtgaa

SEQ ID NO: 197885 - DNA, 15 bp, Homo sapiens
gaagataaaatgtga

SEQ ID NO: 197886 - DNA, 15 bp, Homo sapiens
agaagataaaatgtg

SEQ ID NO: 197887 - DNA, 15 bp, Homo sapiens
gagaagataaaatgt

SEQ ID NO: 197888 - DNA, 15 bp, Homo sapiens
agagaagataaaatg

SEQ ID NO: 197889 - DNA, 15 bp, Homo sapiens
aagagaagataaaat

SEQ ID NO: 197890 - DNA, 15 bp, Homo sapiens
gaagagaagataaaa

SEQ ID NO: 197891 - DNA, 15 bp, Homo sapiens
ggaagagaagataaa

SEQ ID NO: 197892 - DNA, 15 bp, Homo sapiens
tggaagagaagataa

SEQ ID NO: 197893 - DNA, 15 bp, Homo sapiens
ttggaagagaagata

SEQ ID NO: 197894 - DNA, 15 bp, Homo sapiens
attggaagagaagat

SEQ ID NO: 197895 - DNA, 15 bp, Homo sapiens
tattggaagagaaga

SEQ ID NO: 197896 - DNA, 15 bp, Homo sapiens
ttattggaagagaag

SEQ ID NO: 197897 - DNA, 15 bp, Homo sapiens
tttattggaagagaa

SEQ ID NO: 197898 - DNA, 15 bp, Homo sapiens
atttattggaagaga

SEQ ID NO: 197899 - DNA, 15 bp, Homo sapiens
aatttattggaagag

SEQ ID NO: 197900 - DNA, 15 bp, Homo sapiens
aaatttattggaaga

SEQ ID NO: 197901 - DNA, 15 bp, Homo sapiens
aaaatttattggaag

SEQ ID NO: 197902 - DNA, 15 bp, Homo sapiens
taaaatttattggaa

SEQ ID NO: 197903 - DNA, 15 bp, Homo sapiens
ctaaaatttattgga

SEQ ID NO: 197904 - DNA, 15 bp, Homo sapiens
actaaaatttattgg

SEQ ID NO: 197905 - DNA, 15 bp, Homo sapiens
aactaaaatttattg

SEQ ID NO: 197906 - DNA, 15 bp, Homo sapiens
aaactaaaatttatt

SEQ ID NO: 197907 - DNA, 15 bp, Homo sapiens
aaaactaaaatttat

SEQ ID NO: 197908 - DNA, 15 bp, Homo sapiens
gaaaactaaaattta

SEQ ID NO: 197909 - DNA, 15 bp, Homo sapiens
tgaaaactaaaattt

SEQ ID NO: 197910 - DNA, 15 bp, Homo sapiens
atgaaaactaaaatt

SEQ ID NO: 197911 - DNA, 15 bp, Homo sapiens
aatgaaaactaaaat

SEQ ID NO: 197912 - DNA, 15 bp, Homo sapiens
aaatgaaaactaaaa

SEQ ID NO: 197913 - DNA, 15 bp, Homo sapiens
aaaatgaaaactaaa

SEQ ID NO: 197914 - DNA, 15 bp, Homo sapiens
gaaaatgaaaactaa

SEQ ID NO: 197915 - DNA, 15 bp, Homo sapiens
tgaaaatgaaaacta

SEQ ID NO: 197916 - DNA, 15 bp, Homo sapiens
atgaaaatgaaaact

SEQ ID NO: 197917 - DNA, 15 bp, Homo sapiens
aatgaaaatgaaaac

SEQ ID NO: 197918 - DNA, 15 bp, Homo sapiens
aaatgaaaatgaaaa

SEQ ID NO: 197919 - DNA, 15 bp, Homo sapiens
aaaatgaaaatgaaa

SEQ ID NO: 197920 - DNA, 15 bp, Homo sapiens
caaaatgaaaatgaa

SEQ ID NO: 197921 - DNA, 15 bp, Homo sapiens
tcaaaatgaaaatga

SEQ ID NO: 197922 - DNA, 15 bp, Homo sapiens
atcaaaatgaaaatg

SEQ ID NO: 197923 - DNA, 15 bp, Homo sapiens
aatcaaaatgaaaat

SEQ ID NO: 197924 - DNA, 15 bp, Homo sapiens
aaatcaaaatgaaaa

SEQ ID NO: 197925 - DNA, 15 bp, Homo sapiens
caaatcaaaatgaaa

SEQ ID NO: 197926 - DNA, 15 bp, Homo sapiens
acaaatcaaaatgaa

SEQ ID NO: 197927 - DNA, 15 bp, Homo sapiens
tacaaatcaaaatga

SEQ ID NO: 197928 - DNA, 15 bp, Homo sapiens
ttacaaatcaaaatg

SEQ ID NO: 197929 - DNA, 15 bp, Homo sapiens
attacaaatcaaaat

SEQ ID NO: 197930 - DNA, 15 bp, Homo sapiens
gattacaaatcaaaa

SEQ ID NO: 197931 - DNA, 15 bp, Homo sapiens
tgattacaaatcaaa

SEQ ID NO: 197932 - DNA, 15 bp, Homo sapiens
gtgattacaaatcaa

SEQ ID NO: 197933 - DNA, 15 bp, Homo sapiens
tgtgattacaaatca

SEQ ID NO: 197934 - DNA, 15 bp, Homo sapiens
ctgtgattacaaatc

SEQ ID NO: 197935 - DNA, 15 bp, Homo sapiens
actgtgattacaaat

SEQ ID NO: 197936 - DNA, 15 bp, Homo sapiens
aactgtgattacaaa

SEQ ID NO: 197937 - DNA, 15 bp, Homo sapiens
caactgtgattacaa

SEQ ID NO: 197938 - DNA, 15 bp, Homo sapiens
acaactgtgattaca

SEQ ID NO: 197939 - DNA, 15 bp, Homo sapiens
tacaactgtgattac

SEQ ID NO: 197940 - DNA, 15 bp, Homo sapiens
ttacaactgtgatta

SEQ ID NO: 197941 - DNA, 15 bp, Homo sapiens
gttacaactgtgatt

SEQ ID NO: 197942 - DNA, 15 bp, Homo sapiens
tgttacaactgtgat

SEQ ID NO: 197943 - DNA, 15 bp, Homo sapiens
ttgttacaactgtga

SEQ ID NO: 197944 - DNA, 15 bp, Homo sapiens
attgttacaactgtg

SEQ ID NO: 197945 - DNA, 15 bp, Homo sapiens
aattgttacaactgt

SEQ ID NO: 197946 - DNA, 15 bp, Homo sapiens
taattgttacaactg

SEQ ID NO: 197947 - DNA, 15 bp, Homo sapiens
ataattgttacaact

SEQ ID NO: 197948 - DNA, 15 bp, Homo sapiens
aataattgttacaac

SEQ ID NO: 197949 - DNA, 15 bp, Homo sapiens
aaataattgttacaa

SEQ ID NO: 197950 - DNA, 15 bp, Homo sapiens
taaataattgttaca

SEQ ID NO: 197951 - DNA, 15 bp, Homo sapiens
ttaaataattgttac

SEQ ID NO: 197952 - DNA, 15 bp, Homo sapiens
tttaaataattgtta

SEQ ID NO: 197953 - DNA, 15 bp, Homo sapiens
gtttaaataattgtt

SEQ ID NO: 197954 - DNA, 15 bp, Homo sapiens
ggtttaaataattgt

SEQ ID NO: 197955 - DNA, 15 bp, Homo sapiens
aggtttaaataattg

SEQ ID NO: 197956 - DNA, 15 bp, Homo sapiens
taggtttaaataatt

SEQ ID NO: 197957 - DNA, 15 bp, Homo sapiens
ttaggtttaaataat

SEQ ID NO: 197958 - DNA, 15 bp, Homo sapiens
attaggtttaaataa

SEQ ID NO: 197959 - DNA, 15 bp, Homo sapiens
tattaggtttaaata

SEQ ID NO: 197960 - DNA, 15 bp, Homo sapiens
ctattaggtttaaat

SEQ ID NO: 197961 - DNA, 15 bp, Homo sapiens
tctattaggtttaaa

SEQ ID NO: 197962 - DNA, 15 bp, Homo sapiens
atctattaggtttaa

SEQ ID NO: 197963 - DNA, 15 bp, Homo sapiens
gatctattaggttta

SEQ ID NO: 197964 - DNA, 15 bp, Homo sapiens
agatctattaggttt

SEQ ID NO: 197965 - DNA, 15 bp, Homo sapiens
aagatctattaggtt

SEQ ID NO: 197966 - DNA, 15 bp, Homo sapiens
taagatctattaggt

SEQ ID NO: 197967 - DNA, 15 bp, Homo sapiens
ctaagatctattagg

SEQ ID NO: 197968 - DNA, 15 bp, Homo sapiens
cctaagatctattag

SEQ ID NO: 197969 - DNA, 15 bp, Homo sapiens
ccctaagatctatta

SEQ ID NO: 197970 - DNA, 15 bp, Homo sapiens
accctaagatctatt

SEQ ID NO: 197971 - DNA, 15 bp, Homo sapiens
aaccctaagatctat

SEQ ID NO: 197972 - DNA, 15 bp, Homo sapiens
gaaccctaagatcta

SEQ ID NO: 197973 - DNA, 15 bp, Homo sapiens
tgaaccctaagatct

SEQ ID NO: 197974 - DNA, 15 bp, Homo sapiens
atgaaccctaagatc

SEQ ID NO: 197975 - DNA, 15 bp, Homo sapiens
aatgaaccctaagat

SEQ ID NO: 197976 - DNA, 15 bp, Homo sapiens
caatgaaccctaaga

SEQ ID NO: 197977 - DNA, 15 bp, Homo sapiens
gcaatgaaccctaag

SEQ ID NO: 197978 - DNA, 15 bp, Homo sapiens
ggcaatgaaccctaa

SEQ ID NO: 197979 - DNA, 15 bp, Homo sapiens
tggcaatgaacccta

SEQ ID NO: 197980 - DNA, 15 bp, Homo sapiens
ctggcaatgaaccct

SEQ ID NO: 197981 - DNA, 15 bp, Homo sapiens
tctggcaatgaaccc

SEQ ID NO: 197982 - DNA, 15 bp, Homo sapiens
atctggcaatgaacc

SEQ ID NO: 197983 - DNA, 15 bp, Homo sapiens
gatctggcaatgaac

SEQ ID NO: 197984 - DNA, 15 bp, Homo sapiens
agatctggcaatgaa

SEQ ID NO: 197985 - DNA, 15 bp, Homo sapiens
aagatctggcaatga

SEQ ID NO: 197986 - DNA, 15 bp, Homo sapiens
aaagatctggcaatg

SEQ ID NO: 197987 - DNA, 15 bp, Homo sapiens
taaagatctggcaat

SEQ ID NO: 197988 - DNA, 15 bp, Homo sapiens
ataaagatctggcaa

SEQ ID NO: 197989 - DNA, 15 bp, Homo sapiens
aataaagatctggca

SEQ ID NO: 197990 - DNA, 15 bp, Homo sapiens
taataaagatctggc

SEQ ID NO: 197991 - DNA, 15 bp, Homo sapiens
gtaataaagatctgg

SEQ ID NO: 197992 - DNA, 15 bp, Homo sapiens
ggtaataaagatctg

SEQ ID NO: 197993 - DNA, 15 bp, Homo sapiens
tggtaataaagatct

SEQ ID NO: 197994 - DNA, 15 bp, Homo sapiens
atggtaataaagatc

SEQ ID NO: 197995 - DNA, 15 bp, Homo sapiens
catggtaataaagat

SEQ ID NO: 197996 - DNA, 15 bp, Homo sapiens
ccatggtaataaaga

SEQ ID NO: 197997 - DNA, 15 bp, Homo sapiens
tccatggtaataaag

SEQ ID NO: 197998 - DNA, 15 bp, Homo sapiens
gtccatggtaataaa

SEQ ID NO: 197999 - DNA, 15 bp, Homo sapiens
tgtccatggtaataa

SEQ ID NO: 198000 - DNA, 15 bp, Homo sapiens
atgtccatggtaata

SEQ ID NO: 198001 - DNA, 15 bp, Homo sapiens
gatgtccatggtaat

SEQ ID NO: 198002 - DNA, 15 bp, Homo sapiens
agatgtccatggtaa

SEQ ID NO: 198003 - DNA, 15 bp, Homo sapiens
gagatgtccatggta

SEQ ID NO: 198004 - DNA, 15 bp, Homo sapiens
ggagatgtccatggt

SEQ ID NO: 198005 - DNA, 15 bp, Homo sapiens
aggagatgtccatgg

SEQ ID NO: 198006 - DNA, 15 bp, Homo sapiens
caggagatgtccatg

SEQ ID NO: 198007 - DNA, 15 bp, Homo sapiens
acaggagatgtccat

SEQ ID NO: 198008 - DNA, 15 bp, Homo sapiens
aacaggagatgtcca

SEQ ID NO: 198009 - DNA, 15 bp, Homo sapiens
caacaggagatgtcc

SEQ ID NO: 198010 - DNA, 15 bp, Homo sapiens
acaacaggagatgtc

SEQ ID NO: 198011 - DNA, 15 bp, Homo sapiens
aacaacaggagatgt

SEQ ID NO: 198012 - DNA, 15 bp, Homo sapiens
caacaacaggagatg

SEQ ID NO: 198013 - DNA, 15 bp, Homo sapiens
tcaacaacaggagat

SEQ ID NO: 198014 - DNA, 15 bp, Homo sapiens
ttcaacaacaggaga

SEQ ID NO: 198015 - DNA, 15 bp, Homo sapiens
attcaacaacaggag

SEQ ID NO: 198016 - DNA, 15 bp, Homo sapiens
aattcaacaacagga

SEQ ID NO: 198017 - DNA, 15 bp, Homo sapiens
gaattcaacaacagg

SEQ ID NO: 198018 - DNA, 15 bp, Homo sapiens
ggaattcaacaacag

SEQ ID NO: 198019 - DNA, 15 bp, Homo sapiens
aggaattcaacaaca

SEQ ID NO: 198020 - DNA, 15 bp, Homo sapiens
aaggaattcaacaac

SEQ ID NO: 198021 - DNA, 15 bp, Homo sapiens
caaggaattcaacaa

SEQ ID NO: 198022 - DNA, 15 bp, Homo sapiens
acaaggaattcaaca

SEQ ID NO: 198023 - DNA, 15 bp, Homo sapiens
aacaaggaattcaac

SEQ ID NO: 198024 - DNA, 15 bp, Homo sapiens
aaacaaggaattcaa

SEQ ID NO: 198025 - DNA, 15 bp, Homo sapiens
aaaacaaggaattca

SEQ ID NO: 198026 - DNA, 15 bp, Homo sapiens
caaaacaaggaattc

SEQ ID NO: 198027 - DNA, 15 bp, Homo sapiens
tcaaaacaaggaatt

SEQ ID NO: 198028 - DNA, 15 bp, Homo sapiens
atcaaaacaaggaat

SEQ ID NO: 198029 - DNA, 15 bp, Homo sapiens
aatcaaaacaaggaa

SEQ ID NO: 198030 - DNA, 15 bp, Homo sapiens
taatcaaaacaagga

SEQ ID NO: 198031 - DNA, 15 bp, Homo sapiens
ttaatcaaaacaagg

SEQ ID NO: 198032 - DNA, 15 bp, Homo sapiens
attaatcaaaacaag

SEQ ID NO: 198033 - DNA, 15 bp, Homo sapiens
cattaatcaaaacaa

SEQ ID NO: 198034 - DNA, 15 bp, Homo sapiens
acattaatcaaaaca

SEQ ID NO: 198035 - DNA, 15 bp, Homo sapiens
gacattaatcaaaac

SEQ ID NO: 198036 - DNA, 15 bp, Homo sapiens
agacattaatcaaaa

SEQ ID NO: 198037 - DNA, 15 bp, Homo sapiens
aagacattaatcaaa

SEQ ID NO: 198038 - DNA, 15 bp, Homo sapiens
taagacattaatcaa

SEQ ID NO: 198039 - DNA, 15 bp, Homo sapiens
ttaagacattaatca

SEQ ID NO: 198040 - DNA, 15 bp, Homo sapiens
attaagacattaatc

SEQ ID NO: 198041 - DNA, 15 bp, Homo sapiens
aattaagacattaat

SEQ ID NO: 198042 - DNA, 15 bp, Homo sapiens
taattaagacattaa

SEQ ID NO: 198043 - DNA, 15 bp, Homo sapiens
gtaattaagacatta

SEQ ID NO: 198044 - DNA, 15 bp, Homo sapiens
tgtaattaagacatt

SEQ ID NO: 198045 - DNA, 15 bp, Homo sapiens
ttgtaattaagacat

SEQ ID NO: 198046 - DNA, 15 bp, Homo sapiens
tttgtaattaagaca

SEQ ID NO: 198047 - DNA, 15 bp, Homo sapiens
atttgtaattaagac

SEQ ID NO: 198048 - DNA, 15 bp, Homo sapiens
tatttgtaattaaga

SEQ ID NO: 198049 - DNA, 15 bp, Homo sapiens
atatttgtaattaag

SEQ ID NO: 198050 - DNA, 15 bp, Homo sapiens
catatttgtaattaa

SEQ ID NO: 198051 - DNA, 15 bp, Homo sapiens
tcatatttgtaatta

SEQ ID NO: 198052 - DNA, 15 bp, Homo sapiens
ttcatatttgtaatt

SEQ ID NO: 198053 - DNA, 15 bp, Homo sapiens
tttcatatttgtaat

SEQ ID NO: 198054 - DNA, 15 bp, Homo sapiens
ttttcatatttgtaa

SEQ ID NO: 198055 - DNA, 15 bp, Homo sapiens
tttttcatatttgta

SEQ ID NO: 198056 - DNA, 15 bp, Homo sapiens
atttttcatatttgt

SEQ ID NO: 198057 - DNA, 15 bp, Homo sapiens
aatttttcatatttg

SEQ ID NO: 198058 - DNA, 15 bp, Homo sapiens
aaatttttcatattt

SEQ ID NO: 198059 - DNA, 15 bp, Homo sapiens
taaatttttcatatt

SEQ ID NO: 198060 - DNA, 15 bp, Homo sapiens
ttaaatttttcatat

SEQ ID NO: 198061 - DNA, 15 bp, Homo sapiens
gttaaatttttcata

SEQ ID NO: 198062 - DNA, 15 bp, Homo sapiens
tgttaaatttttcat

SEQ ID NO: 198063 - DNA, 15 bp, Homo sapiens
gtgttaaatttttca

SEQ ID NO: 198064 - DNA, 15 bp, Homo sapiens
ggtgttaaatttttc

SEQ ID NO: 198065 - DNA, 15 bp, Homo sapiens
aggtgttaaattttt

SEQ ID NO: 198066 - DNA, 15 bp, Homo sapiens
caggtgttaaatttt

SEQ ID NO: 198067 - DNA, 15 bp, Homo sapiens
acaggtgttaaattt

SEQ ID NO: 198068 - DNA, 15 bp, Homo sapiens
aacaggtgttaaatt

SEQ ID NO: 198069 - DNA, 15 bp, Homo sapiens
aaacaggtgttaaat

SEQ ID NO: 198070 - DNA, 15 bp, Homo sapiens
taaacaggtgttaaa

SEQ ID NO: 198071 - DNA, 15 bp, Homo sapiens
ttaaacaggtgttaa

SEQ ID NO: 198072 - DNA, 15 bp, Homo sapiens
attaaacaggtgtta

SEQ ID NO: 198073 - DNA, 15 bp, Homo sapiens
gattaaacaggtgtt

SEQ ID NO: 198074 - DNA, 15 bp, Homo sapiens
agattaaacaggtgt

SEQ ID NO: 198075 - DNA, 15 bp, Homo sapiens
aagattaaacaggtg

SEQ ID NO: 198076 - DNA, 15 bp, Homo sapiens
gaagattaaacaggt

SEQ ID NO: 198077 - DNA, 15 bp, Homo sapiens
agaagattaaacagg

SEQ ID NO: 198078 - DNA, 15 bp, Homo sapiens
aagaagattaaacag

SEQ ID NO: 198079 - DNA, 15 bp, Homo sapiens
caagaagattaaaca

SEQ ID NO: 198080 - DNA, 15 bp, Homo sapiens
tcaagaagattaaac

SEQ ID NO: 198081 - DNA, 15 bp, Homo sapiens
ttcaagaagattaaa

SEQ ID NO: 198082 - DNA, 15 bp, Homo sapiens
gttcaagaagattaa

SEQ ID NO: 198083 - DNA, 15 bp, Homo sapiens
tgttcaagaagatta

SEQ ID NO: 198084 - DNA, 15 bp, Homo sapiens
ttgttcaagaagatt

SEQ ID NO: 198085 - DNA, 15 bp, Homo sapiens
gttgttcaagaagat

SEQ ID NO: 198086 - DNA, 15 bp, Homo sapiens
cgttgttcaagaaga

SEQ ID NO: 198087 - DNA, 15 bp, Homo sapiens
acgttgttcaagaag

SEQ ID NO: 198088 - DNA, 15 bp, Homo sapiens
tacgttgttcaagaa

SEQ ID NO: 198089 - DNA, 15 bp, Homo sapiens
atacgttgttcaaga

SEQ ID NO: 198090 - DNA, 15 bp, Homo sapiens
aatacgttgttcaag

SEQ ID NO: 198091 - DNA, 15 bp, Homo sapiens
gaatacgttgttcaa

SEQ ID NO: 198092 - DNA, 15 bp, Homo sapiens
agaatacgttgttca

SEQ ID NO: 198093 - DNA, 15 bp, Homo sapiens
cagaatacgttgttc

SEQ ID NO: 198094 - DNA, 15 bp, Homo sapiens
gcagaatacgttgtt

SEQ ID NO: 198095 - DNA, 15 bp, Homo sapiens
agcagaatacgttgt

SEQ ID NO: 198096 - DNA, 15 bp, Homo sapiens
aagcagaatacgttg

SEQ ID NO: 198097 - DNA, 15 bp, Homo sapiens
aaagcagaatacgtt

SEQ ID NO: 198098 - DNA, 15 bp, Homo sapiens
taaagcagaatacgt

SEQ ID NO: 198099 - DNA, 15 bp, Homo sapiens
ataaagcagaatacg

SEQ ID NO: 198100 - DNA, 15 bp, Homo sapiens
gataaagcagaatac

SEQ ID NO: 198101 - DNA, 15 bp, Homo sapiens
cgataaagcagaata

SEQ ID NO: 198102 - DNA, 15 bp, Homo sapiens
gcgataaagcagaat

SEQ ID NO: 198103 - DNA, 15 bp, Homo sapiens
tgcgataaagcagaa

SEQ ID NO: 198104 - DNA, 15 bp, Homo sapiens
gtgcgataaagcaga

SEQ ID NO: 198105 - DNA, 15 bp, Homo sapiens
agtgcgataaagcag

SEQ ID NO: 198106 - DNA, 15 bp, Homo sapiens
aagtgcgataaagca

SEQ ID NO: 198107 - DNA, 15 bp, Homo sapiens
aaagtgcgataaagc

SEQ ID NO: 198108 - DNA, 15 bp, Homo sapiens
caaagtgcgataaag

SEQ ID NO: 198109 - DNA, 15 bp, Homo sapiens
gcaaagtgcgataaa

SEQ ID NO: 198110 - DNA, 15 bp, Homo sapiens
tgcaaagtgcgataa

SEQ ID NO: 198111 - DNA, 15 bp, Homo sapiens
gtgcaaagtgcgata

SEQ ID NO: 198112 - DNA, 15 bp, Homo sapiens
agtgcaaagtgcgat

SEQ ID NO: 198113 - DNA, 15 bp, Homo sapiens
aagtgcaaagtgcga

SEQ ID NO: 198114 - DNA, 15 bp, Homo sapiens
aaagtgcaaagtgcg

SEQ ID NO: 198115 - DNA, 15 bp, Homo sapiens
caaagtgcaaagtgc

SEQ ID NO: 198116 - DNA, 15 bp, Homo sapiens
acaaagtgcaaagtg

SEQ ID NO: 198117 - DNA, 15 bp, Homo sapiens
aacaaagtgcaaagt

SEQ ID NO: 198118 - DNA, 15 bp, Homo sapiens
aaacaaagtgcaaag

SEQ ID NO: 198119 - DNA, 15 bp, Homo sapiens
gaaacaaagtgcaaa

SEQ ID NO: 198120 - DNA, 15 bp, Homo sapiens
agaaacaaagtgcaa

SEQ ID NO: 198121 - DNA, 15 bp, Homo sapiens
aagaaacaaagtgca

SEQ ID NO: 198122 - DNA, 15 bp, Homo sapiens
aaagaaacaaagtgc

SEQ ID NO: 198123 - DNA, 15 bp, Homo sapiens
aaaagaaacaaagtg

SEQ ID NO: 198124 - DNA, 15 bp, Homo sapiens
taaaagaaacaaagt

SEQ ID NO: 198125 - DNA, 15 bp, Homo sapiens
ttaaaagaaacaaag

SEQ ID NO: 198126 - DNA, 15 bp, Homo sapiens
attaaaagaaacaaa

SEQ ID NO: 198127 - DNA, 15 bp, Homo sapiens
tattaaaagaaacaa

SEQ ID NO: 198128 - DNA, 15 bp, Homo sapiens
atattaaaagaaaca

SEQ ID NO: 198129 - DNA, 15 bp, Homo sapiens
catattaaaagaaac

SEQ ID NO: 198130 - DNA, 15 bp, Homo sapiens
tcatattaaaagaaa

SEQ ID NO: 198131 - DNA, 15 bp, Homo sapiens
ttcatattaaaagaa

SEQ ID NO: 198132 - DNA, 15 bp, Homo sapiens
attcatattaaaaga

SEQ ID NO: 198133 - DNA, 15 bp, Homo sapiens
cattcatattaaaag

SEQ ID NO: 198134 - DNA, 15 bp, Homo sapiens
tcattcatattaaaa

SEQ ID NO: 198135 - DNA, 15 bp, Homo sapiens
gtcattcatattaaa

SEQ ID NO: 198136 - DNA, 15 bp, Homo sapiens
tgtcattcatattaa

SEQ ID NO: 198137 - DNA, 15 bp, Homo sapiens
ttgtcattcatatta

SEQ ID NO: 198138 - DNA, 15 bp, Homo sapiens
gttgtcattcatatt

SEQ ID NO: 198139 - DNA, 15 bp, Homo sapiens
agttgtcattcatat

SEQ ID NO: 198140 - DNA, 15 bp, Homo sapiens
aagttgtcattcata

SEQ ID NO: 198141 - DNA, 15 bp, Homo sapiens
caagttgtcattcat

SEQ ID NO: 198142 - DNA, 15 bp, Homo sapiens
ccaagttgtcattca

SEQ ID NO: 198143 - DNA, 15 bp, Homo sapiens
gccaagttgtcattc

SEQ ID NO: 198144 - DNA, 15 bp, Homo sapiens
ggccaagttgtcatt

SEQ ID NO: 198145 - DNA, 15 bp, Homo sapiens
gggccaagttgtcat

SEQ ID NO: 198146 - DNA, 15 bp, Homo sapiens
agggccaagttgtca

SEQ ID NO: 198147 - DNA, 15 bp, Homo sapiens
cagggccaagttgtc

SEQ ID NO: 198148 - DNA, 15 bp, Homo sapiens
gcagggccaagttgt

SEQ ID NO: 198149 - DNA, 15 bp, Homo sapiens
agcagggccaagttg

SEQ ID NO: 198150 - DNA, 15 bp, Homo sapiens
cagcagggccaagtt

SEQ ID NO: 198151 - DNA, 15 bp, Homo sapiens
acagcagggccaagt

SEQ ID NO: 198152 - DNA, 15 bp, Homo sapiens
aacagcagggccaag

SEQ ID NO: 198153 - DNA, 15 bp, Homo sapiens
caacagcagggccaa

SEQ ID NO: 198154 - DNA, 15 bp, Homo sapiens
ccaacagcagggcca

SEQ ID NO: 198155 - DNA, 15 bp, Homo sapiens
cccaacagcagggcc

SEQ ID NO: 198156 - DNA, 15 bp, Homo sapiens
acccaacagcagggc

SEQ ID NO: 198157 - DNA, 15 bp, Homo sapiens
aacccaacagcaggg

SEQ ID NO: 198158 - DNA, 15 bp, Homo sapiens
aaacccaacagcagg

SEQ ID NO: 198159 - DNA, 15 bp, Homo sapiens
aaaacccaacagcag

SEQ ID NO: 198160 - DNA, 15 bp, Homo sapiens
caaaacccaacagca

SEQ ID NO: 198161 - DNA, 15 bp, Homo sapiens
gcaaaacccaacagc

SEQ ID NO: 198162 - DNA, 15 bp, Homo sapiens
tgcaaaacccaacag

SEQ ID NO: 198163 - DNA, 15 bp, Homo sapiens
ctgcaaaacccaaca

SEQ ID NO: 198164 - DNA, 15 bp, Homo sapiens
tctgcaaaacccaac

SEQ ID NO: 198165 - DNA, 15 bp, Homo sapiens
ctctgcaaaacccaa

SEQ ID NO: 198166 - DNA, 15 bp, Homo sapiens
cctctgcaaaaccca

SEQ ID NO: 198167 - DNA, 15 bp, Homo sapiens
tcctctgcaaaaccc

SEQ ID NO: 198168 - DNA, 15 bp, Homo sapiens
ctcctctgcaaaacc

SEQ ID NO: 198169 - DNA, 15 bp, Homo sapiens
tctcctctgcaaaac

SEQ ID NO: 198170 - DNA, 15 bp, Homo sapiens
gtctcctctgcaaaa

SEQ ID NO: 198171 - DNA, 15 bp, Homo sapiens
tgtctcctctgcaaa

SEQ ID NO: 198172 - DNA, 15 bp, Homo sapiens
atgtctcctctgcaa

SEQ ID NO: 198173 - DNA, 15 bp, Homo sapiens
gatgtctcctctgca

SEQ ID NO: 198174 - DNA, 15 bp, Homo sapiens
tgatgtctcctctgc

SEQ ID NO: 198175 - DNA, 15 bp, Homo sapiens
ctgatgtctcctctg

SEQ ID NO: 198176 - DNA, 15 bp, Homo sapiens
tctgatgtctcctct

SEQ ID NO: 198177 - DNA, 15 bp, Homo sapiens
atctgatgtctcctc

SEQ ID NO: 198178 - DNA, 15 bp, Homo sapiens
tatctgatgtctcct

SEQ ID NO: 198179 - DNA, 15 bp, Homo sapiens
atatctgatgtctcc

SEQ ID NO: 198180 - DNA, 15 bp, Homo sapiens
gatatctgatgtctc

SEQ ID NO: 198181 - DNA, 15 bp, Homo sapiens
tgatatctgatgtct

SEQ ID NO: 198182 - DNA, 15 bp, Homo sapiens
ctgatatctgatgtc

SEQ ID NO: 198183 - DNA, 15 bp, Homo sapiens
gctgatatctgatgt

SEQ ID NO: 198184 - DNA, 15 bp, Homo sapiens
agctgatatctgatg

SEQ ID NO: 198185 - DNA, 15 bp, Homo sapiens
aagctgatatctgat

SEQ ID NO: 198186 - DNA, 15 bp, Homo sapiens
caagctgatatctga

SEQ ID NO: 198187 - DNA, 15 bp, Homo sapiens
tcaagctgatatctg

SEQ ID NO: 198188 - DNA, 15 bp, Homo sapiens
atcaagctgatatct

SEQ ID NO: 198189 - DNA, 15 bp, Homo sapiens
aatcaagctgatatc

SEQ ID NO: 198190 - DNA, 15 bp, Homo sapiens
aaatcaagctgatat

SEQ ID NO: 198191 - DNA, 15 bp, Homo sapiens
aaaatcaagctgata

SEQ ID NO: 198192 - DNA, 15 bp, Homo sapiens
aaaaatcaagctgat

SEQ ID NO: 198193 - DNA, 15 bp, Homo sapiens
gaaaaatcaagctga

SEQ ID NO: 198194 - DNA, 15 bp, Homo sapiens
agaaaaatcaagctg

SEQ ID NO: 198195 - DNA, 15 bp, Homo sapiens
gagaaaaatcaagct

SEQ ID NO: 198196 - DNA, 15 bp, Homo sapiens
agagaaaaatcaagc

SEQ ID NO: 198197 - DNA, 15 bp, Homo sapiens
aagagaaaaatcaag

SEQ ID NO: 198198 - DNA, 15 bp, Homo sapiens
aaagagaaaaatcaa

SEQ ID NO: 198199 - DNA, 15 bp, Homo sapiens
aaaagagaaaaatca

SEQ ID NO: 198200 - DNA, 15 bp, Homo sapiens
aaaaagagaaaaatc

SEQ ID NO: 198201 - DNA, 15 bp, Homo sapiens
aaaaaagagaaaaat

SEQ ID NO: 198202 - DNA, 15 bp, Homo sapiens
aaaaaaagagaaaaa

SEQ ID NO: 198203 - DNA, 15 bp, Homo sapiens
aaaaaaaagagaaaa

SEQ ID NO: 198204 - DNA, 15 bp, Homo sapiens
aaaaaaaaagagaaa

SEQ ID NO: 198205 - DNA, 15 bp, Homo sapiens
gaaaaaaaaagagaa

SEQ ID NO: 198206 - DNA, 15 bp, Homo sapiens
tgaaaaaaaaagaga

SEQ ID NO: 198207 - DNA, 15 bp, Homo sapiens
atgaaaaaaaaagag

SEQ ID NO: 198208 - DNA, 15 bp, Homo sapiens
tatgaaaaaaaaaga

SEQ ID NO: 198209 - DNA, 15 bp, Homo sapiens
ctatgaaaaaaaaag

SEQ ID NO: 198210 - DNA, 15 bp, Homo sapiens
tctatgaaaaaaaaa

SEQ ID NO: 198211 - DNA, 15 bp, Homo sapiens
atctatgaaaaaaaa

SEQ ID NO: 198212 - DNA, 15 bp, Homo sapiens
tatctatgaaaaaaa

SEQ ID NO: 198213 - DNA, 15 bp, Homo sapiens
ttatctatgaaaaaa

SEQ ID NO: 198214 - DNA, 15 bp, Homo sapiens
attatctatgaaaaa

SEQ ID NO: 198215 - DNA, 15 bp, Homo sapiens
gattatctatgaaaa

SEQ ID NO: 198216 - DNA, 15 bp, Homo sapiens
agattatctatgaaa

SEQ ID NO: 198217 - DNA, 15 bp, Homo sapiens
cagattatctatgaa

SEQ ID NO: 198218 - DNA, 15 bp, Homo sapiens
tcagattatctatga

SEQ ID NO: 198219 - DNA, 15 bp, Homo sapiens
atcagattatctatg

SEQ ID NO: 198220 - DNA, 15 bp, Homo sapiens
tatcagattatctat

SEQ ID NO: 198221 - DNA, 15 bp, Homo sapiens
atatcagattatcta

SEQ ID NO: 198222 - DNA, 15 bp, Homo sapiens
gatatcagattatct

SEQ ID NO: 198223 - DNA, 15 bp, Homo sapiens
agatatcagattatc

SEQ ID NO: 198224 - DNA, 15 bp, Homo sapiens
aagatatcagattat

SEQ ID NO: 198225 - DNA, 15 bp, Homo sapiens
gaagatatcagatta

SEQ ID NO: 198226 - DNA, 15 bp, Homo sapiens
agaagatatcagatt

SEQ ID NO: 198227 - DNA, 15 bp, Homo sapiens
cagaagatatcagat

SEQ ID NO: 198228 - DNA, 15 bp, Homo sapiens
acagaagatatcaga

SEQ ID NO: 198229 - DNA, 15 bp, Homo sapiens
aacagaagatatcag

SEQ ID NO: 198230 - DNA, 15 bp, Homo sapiens
aaacagaagatatca

SEQ ID NO: 198231 - DNA, 15 bp, Homo sapiens
caaacagaagatatc

SEQ ID NO: 198232 - DNA, 15 bp, Homo sapiens
ccaaacagaagatat

SEQ ID NO: 198233 - DNA, 15 bp, Homo sapiens
tccaaacagaagata

SEQ ID NO: 198234 - DNA, 15 bp, Homo sapiens
atccaaacagaagat

SEQ ID NO: 198235 - DNA, 15 bp, Homo sapiens
catccaaacagaaga

SEQ ID NO: 198236 - DNA, 15 bp, Homo sapiens
gcatccaaacagaag

SEQ ID NO: 198237 - DNA, 15 bp, Homo sapiens
agcatccaaacagaa

SEQ ID NO: 198238 - DNA, 15 bp, Homo sapiens
cagcatccaaacaga

SEQ ID NO: 198239 - DNA, 15 bp, Homo sapiens
tcagcatccaaacag

SEQ ID NO: 198240 - DNA, 15 bp, Homo sapiens
atcagcatccaaaca

SEQ ID NO: 198241 - DNA, 15 bp, Homo sapiens
tatcagcatccaaac

SEQ ID NO: 198242 - DNA, 15 bp, Homo sapiens
ttatcagcatccaaa

SEQ ID NO: 198243 - DNA, 15 bp, Homo sapiens
attatcagcatccaa

SEQ ID NO: 198244 - DNA, 15 bp, Homo sapiens
aattatcagcatcca

SEQ ID NO: 198245 - DNA, 15 bp, Homo sapiens
gaattatcagcatcc

SEQ ID NO: 198246 - DNA, 15 bp, Homo sapiens
agaattatcagcatc

SEQ ID NO: 198247 - DNA, 15 bp, Homo sapiens
aagaattatcagcat

SEQ ID NO: 198248 - DNA, 15 bp, Homo sapiens
gaagaattatcagca

SEQ ID NO: 198249 - DNA, 15 bp, Homo sapiens
tgaagaattatcagc

SEQ ID NO: 198250 - DNA, 15 bp, Homo sapiens
gtgaagaattatcag

SEQ ID NO: 198251 - DNA, 15 bp, Homo sapiens
ggtgaagaattatca

SEQ ID NO: 198252 - DNA, 15 bp, Homo sapiens
tggtgaagaattatc

SEQ ID NO: 198253 - DNA, 15 bp, Homo sapiens
atggtgaagaattat

SEQ ID NO: 198254 - DNA, 15 bp, Homo sapiens
catggtgaagaatta

SEQ ID NO: 198255 - DNA, 15 bp, Homo sapiens
tcatggtgaagaatt

SEQ ID NO: 198256 - DNA, 15 bp, Homo sapiens
ttcatggtgaagaat

SEQ ID NO: 198257 - DNA, 15 bp, Homo sapiens
tttcatggtgaagaa

SEQ ID NO: 198258 - DNA, 15 bp, Homo sapiens
atttcatggtgaaga

SEQ ID NO: 198259 - DNA, 15 bp, Homo sapiens
aatttcatggtgaag

SEQ ID NO: 198260 - DNA, 15 bp, Homo sapiens
taatttcatggtgaa

SEQ ID NO: 198261 - DNA, 15 bp, Homo sapiens
ttaatttcatggtga

SEQ ID NO: 198262 - DNA, 15 bp, Homo sapiens
tttaatttcatggtg

SEQ ID NO: 198263 - DNA, 15 bp, Homo sapiens
ttttaatttcatggt

SEQ ID NO: 198264 - DNA, 15 bp, Homo sapiens
attttaatttcatgg

SEQ ID NO: 198265 - DNA, 15 bp, Homo sapiens
tattttaatttcatg

SEQ ID NO: 198266 - DNA, 15 bp, Homo sapiens
atattttaatttcat

SEQ ID NO: 198267 - DNA, 15 bp, Homo sapiens
tatattttaatttca

SEQ ID NO: 198268 - DNA, 15 bp, Homo sapiens
atatattttaatttc

SEQ ID NO: 198269 - DNA, 15 bp, Homo sapiens
catatattttaattt

SEQ ID NO: 198270 - DNA, 15 bp, Homo sapiens
acatatattttaatt

SEQ ID NO: 198271 - DNA, 15 bp, Homo sapiens
tacatatattttaat

SEQ ID NO: 198272 - DNA, 15 bp, Homo sapiens
atacatatattttaa

SEQ ID NO: 198273 - DNA, 15 bp, Homo sapiens
catacatatatttta

SEQ ID NO: 198274 - DNA, 15 bp, Homo sapiens
acatacatatatttt

SEQ ID NO: 198275 - DNA, 15 bp, Homo sapiens
tacatacatatattt

SEQ ID NO: 198276 - DNA, 15 bp, Homo sapiens
atacatacatatatt

SEQ ID NO: 198277 - DNA, 15 bp, Homo sapiens
catacatacatatat

SEQ ID NO: 198278 - DNA, 15 bp, Homo sapiens
acatacatacatata

SEQ ID NO: 198279 - DNA, 15 bp, Homo sapiens
cacatacatacatat

SEQ ID NO: 198280 - DNA, 15 bp, Homo sapiens
acacatacatacata

SEQ ID NO: 198281 - DNA, 15 bp, Homo sapiens
tacacatacatacat

SEQ ID NO: 198282 - DNA, 15 bp, Homo sapiens
atacacatacataca

SEQ ID NO: 198283 - DNA, 15 bp, Homo sapiens
tatacacatacatac

SEQ ID NO: 198284 - DNA, 15 bp, Homo sapiens
atatacacatacata

SEQ ID NO: 198285 - DNA, 15 bp, Homo sapiens
tatatacacatacat

SEQ ID NO: 198286 - DNA, 15 bp, Homo sapiens
atatatacacataca

SEQ ID NO: 198287 - DNA, 15 bp, Homo sapiens
tatatatacacatac

SEQ ID NO: 198288 - DNA, 15 bp, Homo sapiens
atatatatacacata

SEQ ID NO: 198289 - DNA, 15 bp, Homo sapiens
tatatatatacacat

SEQ ID NO: 198290 - DNA, 15 bp, Homo sapiens
atatatatatacaca

SEQ ID NO: 198291 - DNA, 15 bp, Homo sapiens
catatatatatacac

SEQ ID NO: 198292 - DNA, 15 bp, Homo sapiens
acatatatatataca

SEQ ID NO: 198293 - DNA, 15 bp, Homo sapiens
cacatatatatatac

SEQ ID NO: 198294 - DNA, 15 bp, Homo sapiens
acacatatatatata

SEQ ID NO: 198295 - DNA, 15 bp, Homo sapiens
cacacatatatatat

SEQ ID NO: 198296 - DNA, 15 bp, Homo sapiens
acacacatatatata

SEQ ID NO: 198297 - DNA, 15 bp, Homo sapiens
cacacacatatatat

SEQ ID NO: 198298 - DNA, 15 bp, Homo sapiens
acacacacatatata

SEQ ID NO: 198299 - DNA, 15 bp, Homo sapiens
cacacacacatatat

SEQ ID NO: 198300 - DNA, 15 bp, Homo sapiens
acacacacacatata

SEQ ID NO: 198301 - DNA, 15 bp, Homo sapiens
cacacacacacatat

SEQ ID NO: 198302 - DNA, 15 bp, Homo sapiens
acacacacacacata

SEQ ID NO: 198303 - DNA, 15 bp, Homo sapiens
atacacacacacaca

SEQ ID NO: 198304 - DNA, 15 bp, Homo sapiens
catacacacacacac

SEQ ID NO: 198305 - DNA, 15 bp, Homo sapiens
acatacacacacaca

SEQ ID NO: 198306 - DNA, 15 bp, Homo sapiens
acacatacacacaca

SEQ ID NO: 198307 - DNA, 15 bp, Homo sapiens
cacacatacacacac

SEQ ID NO: 198308 - DNA, 15 bp, Homo sapiens
acacacatacacaca

SEQ ID NO: 198309 - DNA, 15 bp, Homo sapiens
cacacacatacacac

SEQ ID NO: 198310 - DNA, 15 bp, Homo sapiens
tacacacacacacat

SEQ ID NO: 198311 - DNA, 15 bp, Homo sapiens
tatacacacacacac

SEQ ID NO: 198312 - DNA, 15 bp, Homo sapiens
atatacacacacaca

SEQ ID NO: 198313 - DNA, 15 bp, Homo sapiens
tatatacacacacac

SEQ ID NO: 198314 - DNA, 15 bp, Homo sapiens
atatatacacacaca

SEQ ID NO: 198315 - DNA, 15 bp, Homo sapiens
tatatatacacacac

SEQ ID NO: 198316 - DNA, 15 bp, Homo sapiens
atatatatacacaca

SEQ ID NO: 198317 - DNA, 15 bp, Homo sapiens
tatatatatacacac

SEQ ID NO: 198318 - DNA, 15 bp, Homo sapiens
tatatatatatacac

SEQ ID NO: 198319 - DNA, 15 bp, Homo sapiens
atatatatatataca

SEQ ID NO: 198320 - DNA, 15 bp, Homo sapiens
tatatatatatatac

SEQ ID NO: 198321 - DNA, 15 bp, Homo sapiens
atgtatatatatata

SEQ ID NO: 198322 - DNA, 15 bp, Homo sapiens
catgtatatatatat

SEQ ID NO: 198323 - DNA, 15 bp, Homo sapiens
gcatgtatatatata

SEQ ID NO: 198324 - DNA, 15 bp, Homo sapiens
ggcatgtatatatat

SEQ ID NO: 198325 - DNA, 15 bp, Homo sapiens
aggcatgtatatata

SEQ ID NO: 198326 - DNA, 15 bp, Homo sapiens
taggcatgtatatat

SEQ ID NO: 198327 - DNA, 15 bp, Homo sapiens
gtaggcatgtatata

SEQ ID NO: 198328 - DNA, 15 bp, Homo sapiens
agtaggcatgtatat

SEQ ID NO: 198329 - DNA, 15 bp, Homo sapiens
cagtaggcatgtata

SEQ ID NO: 198330 - DNA, 15 bp, Homo sapiens
tcagtaggcatgtat

SEQ ID NO: 198331 - DNA, 15 bp, Homo sapiens
ctcagtaggcatgta

SEQ ID NO: 198332 - DNA, 15 bp, Homo sapiens
gctcagtaggcatgt

SEQ ID NO: 198333 - DNA, 15 bp, Homo sapiens
tgctcagtaggcatg

SEQ ID NO: 198334 - DNA, 15 bp, Homo sapiens
atgctcagtaggcat

SEQ ID NO: 198335 - DNA, 15 bp, Homo sapiens
aatgctcagtaggca

SEQ ID NO: 198336 - DNA, 15 bp, Homo sapiens
aaatgctcagtaggc

SEQ ID NO: 198337 - DNA, 15 bp, Homo sapiens
aaaatgctcagtagg

SEQ ID NO: 198338 - DNA, 15 bp, Homo sapiens
caaaatgctcagtag

SEQ ID NO: 198339 - DNA, 15 bp, Homo sapiens
tcaaaatgctcagta

SEQ ID NO: 198340 - DNA, 15 bp, Homo sapiens
gtcaaaatgctcagt

SEQ ID NO: 198341 - DNA, 15 bp, Homo sapiens
agtcaaaatgctcag

SEQ ID NO: 198342 - DNA, 15 bp, Homo sapiens
aagtcaaaatgctca

SEQ ID NO: 198343 - DNA, 15 bp, Homo sapiens
aaagtcaaaatgctc

SEQ ID NO: 198344 - DNA, 15 bp, Homo sapiens
gaaagtcaaaatgct

SEQ ID NO: 198345 - DNA, 15 bp, Homo sapiens
tgaaagtcaaaatgc

SEQ ID NO: 198346 - DNA, 15 bp, Homo sapiens
ctgaaagtcaaaatg

SEQ ID NO: 198347 - DNA, 15 bp, Homo sapiens
tctgaaagtcaaaat

SEQ ID NO: 198348 - DNA, 15 bp, Homo sapiens
gtctgaaagtcaaaa

SEQ ID NO: 198349 - DNA, 15 bp, Homo sapiens
agtctgaaagtcaaa

SEQ ID NO: 198350 - DNA, 15 bp, Homo sapiens
aagtctgaaagtcaa

SEQ ID NO: 198351 - DNA, 15 bp, Homo sapiens
caagtctgaaagtca

SEQ ID NO: 198352 - DNA, 15 bp, Homo sapiens
ccaagtctgaaagtc

SEQ ID NO: 198353 - DNA, 15 bp, Homo sapiens
cccaagtctgaaagt

SEQ ID NO: 198354 - DNA, 15 bp, Homo sapiens
acccaagtctgaaag

SEQ ID NO: 198355 - DNA, 15 bp, Homo sapiens
gacccaagtctgaaa

SEQ ID NO: 198356 - DNA, 15 bp, Homo sapiens
agacccaagtctgaa

SEQ ID NO: 198357 - DNA, 15 bp, Homo sapiens
cagacccaagtctga

SEQ ID NO: 198358 - DNA, 15 bp, Homo sapiens
acagacccaagtctg

SEQ ID NO: 198359 - DNA, 15 bp, Homo sapiens
gacagacccaagtct

SEQ ID NO: 198360 - DNA, 15 bp, Homo sapiens
agacagacccaagtc

SEQ ID NO: 198361 - DNA, 15 bp, Homo sapiens
aagacagacccaagt

SEQ ID NO: 198362 - DNA, 15 bp, Homo sapiens
gaagacagacccaag

SEQ ID NO: 198363 - DNA, 15 bp, Homo sapiens
agaagacagacccaa

SEQ ID NO: 198364 - DNA, 15 bp, Homo sapiens
cagaagacagaccca

SEQ ID NO: 198365 - DNA, 15 bp, Homo sapiens
acagaagacagaccc

SEQ ID NO: 198366 - DNA, 15 bp, Homo sapiens
cacagaagacagacc

SEQ ID NO: 198367 - DNA, 15 bp, Homo sapiens
acacagaagacagac

SEQ ID NO: 198368 - DNA, 15 bp, Homo sapiens
aacacagaagacaga

SEQ ID NO: 198369 - DNA, 15 bp, Homo sapiens
taacacagaagacag

SEQ ID NO: 198370 - DNA, 15 bp, Homo sapiens
ttaacacagaagaca

SEQ ID NO: 198371 - DNA, 15 bp, Homo sapiens
cttaacacagaagac

SEQ ID NO: 198372 - DNA, 15 bp, Homo sapiens
tcttaacacagaaga

SEQ ID NO: 198373 - DNA, 15 bp, Homo sapiens
ttcttaacacagaag

SEQ ID NO: 198374 - DNA, 15 bp, Homo sapiens
tttcttaacacagaa

SEQ ID NO: 198375 - DNA, 15 bp, Homo sapiens
gtttcttaacacaga

SEQ ID NO: 198376 - DNA, 15 bp, Homo sapiens
agtttcttaacacag

SEQ ID NO: 198377 - DNA, 15 bp, Homo sapiens
aagtttcttaacaca

SEQ ID NO: 198378 - DNA, 15 bp, Homo sapiens
aaagtttcttaacac

SEQ ID NO: 198379 - DNA, 15 bp, Homo sapiens
aaaagtttcttaaca

SEQ ID NO: 198380 - DNA, 15 bp, Homo sapiens
aaaaagtttcttaac

SEQ ID NO: 198381 - DNA, 15 bp, Homo sapiens
aaaaaagtttcttaa

SEQ ID NO: 198382 - DNA, 15 bp, Homo sapiens
aaaaaaagtttctta

SEQ ID NO: 198383 - DNA, 15 bp, Homo sapiens
aaaaaaaagtttctt

SEQ ID NO: 198384 - DNA, 15 bp, Homo sapiens
caaaaaaaagtttct

SEQ ID NO: 198385 - DNA, 15 bp, Homo sapiens
acaaaaaaaagtttc

SEQ ID NO: 198386 - DNA, 15 bp, Homo sapiens
aacaaaaaaaagttt

SEQ ID NO: 198387 - DNA, 15 bp, Homo sapiens
aaacaaaaaaaagtt

SEQ ID NO: 198388 - DNA, 15 bp, Homo sapiens
aaaacaaaaaaaagt

SEQ ID NO: 198389 - DNA, 15 bp, Homo sapiens
gaaaacaaaaaaaag

SEQ ID NO: 198390 - DNA, 15 bp, Homo sapiens
cgaaaacaaaaaaaa

SEQ ID NO: 198391 - DNA, 15 bp, Homo sapiens
acgaaaacaaaaaaa

SEQ ID NO: 198392 - DNA, 15 bp, Homo sapiens
gacgaaaacaaaaaa

SEQ ID NO: 198393 - DNA, 15 bp, Homo sapiens
agacgaaaacaaaaa

SEQ ID NO: 198394 - DNA, 15 bp, Homo sapiens
aagacgaaaacaaaa

SEQ ID NO: 198395 - DNA, 15 bp, Homo sapiens
aaagacgaaaacaaa

SEQ ID NO: 198396 - DNA, 15 bp, Homo sapiens
aaaagacgaaaacaa

SEQ ID NO: 198397 - DNA, 15 bp, Homo sapiens
gaaaagacgaaaaca

SEQ ID NO: 198398 - DNA, 15 bp, Homo sapiens
tgaaaagacgaaaac

SEQ ID NO: 198399 - DNA, 15 bp, Homo sapiens
ctgaaaagacgaaaa

SEQ ID NO: 198400 - DNA, 15 bp, Homo sapiens
actgaaaagacgaaa

SEQ ID NO: 198401 - DNA, 15 bp, Homo sapiens
aactgaaaagacgaa

SEQ ID NO: 198402 - DNA, 15 bp, Homo sapiens
taactgaaaagacga

SEQ ID NO: 198403 - DNA, 15 bp, Homo sapiens
ctaactgaaaagacg

SEQ ID NO: 198404 - DNA, 15 bp, Homo sapiens
cctaactgaaaagac

SEQ ID NO: 198405 - DNA, 15 bp, Homo sapiens
acctaactgaaaaga

SEQ ID NO: 198406 - DNA, 15 bp, Homo sapiens
aacctaactgaaaag

SEQ ID NO: 198407 - DNA, 15 bp, Homo sapiens
aaacctaactgaaaa

SEQ ID NO: 198408 - DNA, 15 bp, Homo sapiens
taaacctaactgaaa

SEQ ID NO: 198409 - DNA, 15 bp, Homo sapiens
ataaacctaactgaa

SEQ ID NO: 198410 - DNA, 15 bp, Homo sapiens
aataaacctaactga

SEQ ID NO: 198411 - DNA, 15 bp, Homo sapiens
gaataaacctaactg

SEQ ID NO: 198412 - DNA, 15 bp, Homo sapiens
agaataaacctaact

SEQ ID NO: 198413 - DNA, 15 bp, Homo sapiens
cagaataaacctaac

SEQ ID NO: 198414 - DNA, 15 bp, Homo sapiens
tcagaataaacctaa

SEQ ID NO: 198415 - DNA, 15 bp, Homo sapiens
ttcagaataaaccta

SEQ ID NO: 198416 - DNA, 15 bp, Homo sapiens
attcagaataaacct

SEQ ID NO: 198417 - DNA, 15 bp, Homo sapiens
aattcagaataaacc

SEQ ID NO: 198418 - DNA, 15 bp, Homo sapiens
caattcagaataaac

SEQ ID NO: 198419 - DNA, 15 bp, Homo sapiens
ccaattcagaataaa

SEQ ID NO: 198420 - DNA, 15 bp, Homo sapiens
gccaattcagaataa

SEQ ID NO: 198421 - DNA, 15 bp, Homo sapiens
agccaattcagaata

SEQ ID NO: 198422 - DNA, 15 bp, Homo sapiens
cagccaattcagaat

SEQ ID NO: 198423 - DNA, 15 bp, Homo sapiens
gcagccaattcagaa

SEQ ID NO: 198424 - DNA, 15 bp, Homo sapiens
ggcagccaattcaga

SEQ ID NO: 198425 - DNA, 15 bp, Homo sapiens
aggcagccaattcag

SEQ ID NO: 198426 - DNA, 15 bp, Homo sapiens
caggcagccaattca

SEQ ID NO: 198427 - DNA, 15 bp, Homo sapiens
acaggcagccaattc

SEQ ID NO: 198428 - DNA, 15 bp, Homo sapiens
gacaggcagccaatt

SEQ ID NO: 198429 - DNA, 15 bp, Homo sapiens
ggacaggcagccaat

SEQ ID NO: 198430 - DNA, 15 bp, Homo sapiens
aggacaggcagccaa

SEQ ID NO: 198431 - DNA, 15 bp, Homo sapiens
gaggacaggcagcca

SEQ ID NO: 198432 - DNA, 15 bp, Homo sapiens
agaggacaggcagcc

SEQ ID NO: 198433 - DNA, 15 bp, Homo sapiens
tagaggacaggcagc

SEQ ID NO: 198434 - DNA, 15 bp, Homo sapiens
atagaggacaggcag

SEQ ID NO: 198435 - DNA, 15 bp, Homo sapiens
tatagaggacaggca

SEQ ID NO: 198436 - DNA, 15 bp, Homo sapiens
atatagaggacaggc

SEQ ID NO: 198437 - DNA, 15 bp, Homo sapiens
gatatagaggacagg

SEQ ID NO: 198438 - DNA, 15 bp, Homo sapiens
agatatagaggacag

SEQ ID NO: 198439 - DNA, 15 bp, Homo sapiens
cagatatagaggaca

SEQ ID NO: 198440 - DNA, 15 bp, Homo sapiens
acagatatagaggac

SEQ ID NO: 198441 - DNA, 15 bp, Homo sapiens
gacagatatagagga

SEQ ID NO: 198442 - DNA, 15 bp, Homo sapiens
tgacagatatagagg

SEQ ID NO: 198443 - DNA, 15 bp, Homo sapiens
atgacagatatagag

SEQ ID NO: 198444 - DNA, 15 bp, Homo sapiens
gatgacagatataga

SEQ ID NO: 198445 - DNA, 15 bp, Homo sapiens
agatgacagatatag

SEQ ID NO: 198446 - DNA, 15 bp, Homo sapiens
aagatgacagatata

SEQ ID NO: 198447 - DNA, 15 bp, Homo sapiens
aaagatgacagatat

SEQ ID NO: 198448 - DNA, 15 bp, Homo sapiens
aaaagatgacagata

SEQ ID NO: 198449 - DNA, 15 bp, Homo sapiens
aaaaagatgacagat

SEQ ID NO: 198450 - DNA, 15 bp, Homo sapiens
caaaaagatgacaga

SEQ ID NO: 198451 - DNA, 15 bp, Homo sapiens
acaaaaagatgacag

SEQ ID NO: 198452 - DNA, 15 bp, Homo sapiens
tacaaaaagatgaca

SEQ ID NO: 198453 - DNA, 15 bp, Homo sapiens
atacaaaaagatgac

SEQ ID NO: 198454 - DNA, 15 bp, Homo sapiens
tatacaaaaagatga

SEQ ID NO: 198455 - DNA, 15 bp, Homo sapiens
ttatacaaaaagatg

SEQ ID NO: 198456 - DNA, 15 bp, Homo sapiens
attatacaaaaagat

SEQ ID NO: 198457 - DNA, 15 bp, Homo sapiens
gattatacaaaaaga

SEQ ID NO: 198458 - DNA, 15 bp, Homo sapiens
agattatacaaaaag

SEQ ID NO: 198459 - DNA, 15 bp, Homo sapiens
cagattatacaaaaa

SEQ ID NO: 198460 - DNA, 15 bp, Homo sapiens
acagattatacaaaa

SEQ ID NO: 198461 - DNA, 15 bp, Homo sapiens
gacagattatacaaa

SEQ ID NO: 198462 - DNA, 15 bp, Homo sapiens
agacagattatacaa

SEQ ID NO: 198463 - DNA, 15 bp, Homo sapiens
aagacagattataca

SEQ ID NO: 198464 - DNA, 15 bp, Homo sapiens
taagacagattatac

SEQ ID NO: 198465 - DNA, 15 bp, Homo sapiens
ctaagacagattata

SEQ ID NO: 198466 - DNA, 15 bp, Homo sapiens
tctaagacagattat

SEQ ID NO: 198467 - DNA, 15 bp, Homo sapiens
gtctaagacagatta

SEQ ID NO: 198468 - DNA, 15 bp, Homo sapiens
ggtctaagacagatt

SEQ ID NO: 198469 - DNA, 15 bp, Homo sapiens
aggtctaagacagat

SEQ ID NO: 198470 - DNA, 15 bp, Homo sapiens
gaggtctaagacaga

SEQ ID NO: 198471 - DNA, 15 bp, Homo sapiens
tgaggtctaagacag

SEQ ID NO: 198472 - DNA, 15 bp, Homo sapiens
gtgaggtctaagaca

SEQ ID NO: 198473 - DNA, 15 bp, Homo sapiens
tgtgaggtctaagac

SEQ ID NO: 198474 - DNA, 15 bp, Homo sapiens
ctgtgaggtctaaga

SEQ ID NO: 198475 - DNA, 15 bp, Homo sapiens
actgtgaggtctaag

SEQ ID NO: 198476 - DNA, 15 bp, Homo sapiens
tactgtgaggtctaa

SEQ ID NO: 198477 - DNA, 15 bp, Homo sapiens
atactgtgaggtcta

SEQ ID NO: 198478 - DNA, 15 bp, Homo sapiens
aatactgtgaggtct

SEQ ID NO: 198479 - DNA, 15 bp, Homo sapiens
aaatactgtgaggtc

SEQ ID NO: 198480 - DNA, 15 bp, Homo sapiens
gaaatactgtgaggt

SEQ ID NO: 198481 - DNA, 15 bp, Homo sapiens
agaaatactgtgagg

SEQ ID NO: 198482 - DNA, 15 bp, Homo sapiens
cagaaatactgtgag

SEQ ID NO: 198483 - DNA, 15 bp, Homo sapiens
gcagaaatactgtga

SEQ ID NO: 198484 - DNA, 15 bp, Homo sapiens
agcagaaatactgtg

SEQ ID NO: 198485 - DNA, 15 bp, Homo sapiens
aagcagaaatactgt

SEQ ID NO: 198486 - DNA, 15 bp, Homo sapiens
gaagcagaaatactg

SEQ ID NO: 198487 - DNA, 15 bp, Homo sapiens
agaagcagaaatact

SEQ ID NO: 198488 - DNA, 15 bp, Homo sapiens
cagaagcagaaatac

SEQ ID NO: 198489 - DNA, 15 bp, Homo sapiens
acagaagcagaaata

SEQ ID NO: 198490 - DNA, 15 bp, Homo sapiens
tacagaagcagaaat

SEQ ID NO: 198491 - DNA, 15 bp, Homo sapiens
atacagaagcagaaa

SEQ ID NO: 198492 - DNA, 15 bp, Homo sapiens
aatacagaagcagaa

SEQ ID NO: 198493 - DNA, 15 bp, Homo sapiens
aaatacagaagcaga

SEQ ID NO: 198494 - DNA, 15 bp, Homo sapiens
aaaatacagaagcag

SEQ ID NO: 198495 - DNA, 15 bp, Homo sapiens
aaaaatacagaagca

SEQ ID NO: 198496 - DNA, 15 bp, Homo sapiens
aaaaaatacagaagc

SEQ ID NO: 198497 - DNA, 15 bp, Homo sapiens
aaaaaaatacagaag

SEQ ID NO: 198498 - DNA, 15 bp, Homo sapiens
gaaaaaaatacagaa

SEQ ID NO: 198499 - DNA, 15 bp, Homo sapiens
ggaaaaaaatacaga

SEQ ID NO: 198500 - DNA, 15 bp, Homo sapiens
aggaaaaaaatacag

SEQ ID NO: 198501 - DNA, 15 bp, Homo sapiens
gaggaaaaaaataca

SEQ ID NO: 198502 - DNA, 15 bp, Homo sapiens
agaggaaaaaaatac

SEQ ID NO: 198503 - DNA, 15 bp, Homo sapiens
aagaggaaaaaaata

SEQ ID NO: 198504 - DNA, 15 bp, Homo sapiens
gaagaggaaaaaaat

SEQ ID NO: 198505 - DNA, 15 bp, Homo sapiens
tgaagaggaaaaaaa

SEQ ID NO: 198506 - DNA, 15 bp, Homo sapiens
atgaagaggaaaaaa

SEQ ID NO: 198507 - DNA, 15 bp, Homo sapiens
aatgaagaggaaaaa

SEQ ID NO: 198508 - DNA, 15 bp, Homo sapiens
caaaatgaagaggaa

SEQ ID NO: 198509 - DNA, 15 bp, Homo sapiens
tcaaaatgaagagga

SEQ ID NO: 198510 - DNA, 15 bp, Homo sapiens
ctcaaaatgaagagg

SEQ ID NO: 198511 - DNA, 15 bp, Homo sapiens
tctcaaaatgaagag

SEQ ID NO: 198512 - DNA, 15 bp, Homo sapiens
ctctcaaaatgaaga

SEQ ID NO: 198513 - DNA, 15 bp, Homo sapiens
actctcaaaatgaag

SEQ ID NO: 198514 - DNA, 15 bp, Homo sapiens
cactctcaaaatgaa

SEQ ID NO: 198515 - DNA, 15 bp, Homo sapiens
gcactctcaaaatga

SEQ ID NO: 198516 - DNA, 15 bp, Homo sapiens
agcactctcaaaatg

SEQ ID NO: 198517 - DNA, 15 bp, Homo sapiens
aagcactctcaaaat

SEQ ID NO: 198518 - DNA, 15 bp, Homo sapiens
aaagcactctcaaaa

SEQ ID NO: 198519 - DNA, 15 bp, Homo sapiens
gaaagcactctcaaa

SEQ ID NO: 198520 - DNA, 15 bp, Homo sapiens
agaaagcactctcaa

SEQ ID NO: 198521 - DNA, 15 bp, Homo sapiens
tagaaagcactctca

SEQ ID NO: 198522 - DNA, 15 bp, Homo sapiens
ttagaaagcactctc

SEQ ID NO: 198523 - DNA, 15 bp, Homo sapiens
tttagaaagcactct

SEQ ID NO: 198524 - DNA, 15 bp, Homo sapiens
atttagaaagcactc

SEQ ID NO: 198525 - DNA, 15 bp, Homo sapiens
catttagaaagcact

SEQ ID NO: 198526 - DNA, 15 bp, Homo sapiens
acatttagaaagcac

SEQ ID NO: 198527 - DNA, 15 bp, Homo sapiens
cacatttagaaagca

SEQ ID NO: 198528 - DNA, 15 bp, Homo sapiens
gcacatttagaaagc

SEQ ID NO: 198529 - DNA, 15 bp, Homo sapiens
ggcacatttagaaag

SEQ ID NO: 198530 - DNA, 15 bp, Homo sapiens
gggcacatttagaaa

SEQ ID NO: 198531 - DNA, 15 bp, Homo sapiens
agggcacatttagaa

SEQ ID NO: 198532 - DNA, 15 bp, Homo sapiens
aagggcacatttaga

SEQ ID NO: 198533 - DNA, 15 bp, Homo sapiens
gaagggcacatttag

SEQ ID NO: 198534 - DNA, 15 bp, Homo sapiens
tgaagggcacattta

SEQ ID NO: 198535 - DNA, 15 bp, Homo sapiens
atgaagggcacattt

SEQ ID NO: 198536 - DNA, 15 bp, Homo sapiens
tatgaagggcacatt

SEQ ID NO: 198537 - DNA, 15 bp, Homo sapiens
ttatgaagggcacat

SEQ ID NO: 198538 - DNA, 15 bp, Homo sapiens
gttatgaagggcaca

SEQ ID NO: 198539 - DNA, 15 bp, Homo sapiens
tgttatgaagggcac

SEQ ID NO: 198540 - DNA, 15 bp, Homo sapiens
gtgttatgaagggca

SEQ ID NO: 198541 - DNA, 15 bp, Homo sapiens
tgtgttatgaagggc

SEQ ID NO: 198542 - DNA, 15 bp, Homo sapiens
atgtgttatgaaggg

SEQ ID NO: 198543 - DNA, 15 bp, Homo sapiens
gatgtgttatgaagg

SEQ ID NO: 198544 - DNA, 15 bp, Homo sapiens
agatgtgttatgaag

SEQ ID NO: 198545 - DNA, 15 bp, Homo sapiens
aagatgtgttatgaa

SEQ ID NO: 198546 - DNA, 15 bp, Homo sapiens
caagatgtgttatga

SEQ ID NO: 198547 - DNA, 15 bp, Homo sapiens
acaagatgtgttatg

SEQ ID NO: 198548 - DNA, 15 bp, Homo sapiens
aacaagatgtgttat

SEQ ID NO: 198549 - DNA, 15 bp, Homo sapiens
aaacaagatgtgtta

SEQ ID NO: 198550 - DNA, 15 bp, Homo sapiens
gaaacaagatgtgtt

SEQ ID NO: 198551 - DNA, 15 bp, Homo sapiens
tgaaacaagatgtgt

SEQ ID NO: 198552 - DNA, 15 bp, Homo sapiens
ctgaaacaagatgtg

SEQ ID NO: 198553 - DNA, 15 bp, Homo sapiens
tctgaaacaagatgt

SEQ ID NO: 198554 - DNA, 15 bp, Homo sapiens
ttctgaaacaagatg

SEQ ID NO: 198555 - DNA, 15 bp, Homo sapiens
tttctgaaacaagat

SEQ ID NO: 198556 - DNA, 15 bp, Homo sapiens
atttctgaaacaaga

SEQ ID NO: 198557 - DNA, 15 bp, Homo sapiens
tatttctgaaacaag

SEQ ID NO: 198558 - DNA, 15 bp, Homo sapiens
ttatttctgaaacaa

SEQ ID NO: 198559 - DNA, 15 bp, Homo sapiens
cttatttctgaaaca

SEQ ID NO: 198560 - DNA, 15 bp, Homo sapiens
acttatttctgaaac

SEQ ID NO: 198561 - DNA, 15 bp, Homo sapiens
aacttatttctgaaa

SEQ ID NO: 198562 - DNA, 15 bp, Homo sapiens
gaacttatttctgaa

SEQ ID NO: 198563 - DNA, 15 bp, Homo sapiens
agaacttatttctga

SEQ ID NO: 198564 - DNA, 15 bp, Homo sapiens
gagaacttatttctg

SEQ ID NO: 198565 - DNA, 15 bp, Homo sapiens
agagaacttatttct

SEQ ID NO: 198566 - DNA, 15 bp, Homo sapiens
aagagaacttatttc

SEQ ID NO: 198567 - DNA, 15 bp, Homo sapiens
caagagaacttattt

SEQ ID NO: 198568 - DNA, 15 bp, Homo sapiens
tcaagagaacttatt

SEQ ID NO: 198569 - DNA, 15 bp, Homo sapiens
gtcaagagaacttat

SEQ ID NO: 198570 - DNA, 15 bp, Homo sapiens
agtcaagagaactta

SEQ ID NO: 198571 - DNA, 15 bp, Homo sapiens
aagtcaagagaactt

SEQ ID NO: 198572 - DNA, 15 bp, Homo sapiens
aaagtcaagagaact

SEQ ID NO: 198573 - DNA, 15 bp, Homo sapiens
aaaagtcaagagaac

SEQ ID NO: 198574 - DNA, 15 bp, Homo sapiens
taaaagtcaagagaa

SEQ ID NO: 198575 - DNA, 15 bp, Homo sapiens
gtaaaagtcaagaga

SEQ ID NO: 198576 - DNA, 15 bp, Homo sapiens
agtaaaagtcaagag

SEQ ID NO: 198577 - DNA, 15 bp, Homo sapiens
cagtaaaagtcaaga

SEQ ID NO: 198578 - DNA, 15 bp, Homo sapiens
gcagtaaaagtcaag

SEQ ID NO: 198579 - DNA, 15 bp, Homo sapiens
tgcagtaaaagtcaa

SEQ ID NO: 198580 - DNA, 15 bp, Homo sapiens
ctgcagtaaaagtca

SEQ ID NO: 198581 - DNA, 15 bp, Homo sapiens
tctgcagtaaaagtc

SEQ ID NO: 198582 - DNA, 15 bp, Homo sapiens
gtctgcagtaaaagt

SEQ ID NO: 198583 - DNA, 15 bp, Homo sapiens
tgtctgcagtaaaag

SEQ ID NO: 198584 - DNA, 15 bp, Homo sapiens
atgtctgcagtaaaa

SEQ ID NO: 198585 - DNA, 15 bp, Homo sapiens
tatgtctgcagtaaa

SEQ ID NO: 198586 - DNA, 15 bp, Homo sapiens
ctatgtctgcagtaa

SEQ ID NO: 198587 - DNA, 15 bp, Homo sapiens
tctatgtctgcagta

SEQ ID NO: 198588 - DNA, 15 bp, Homo sapiens
ttctatgtctgcagt

SEQ ID NO: 198589 - DNA, 15 bp, Homo sapiens
attctatgtctgcag

SEQ ID NO: 198590 - DNA, 15 bp, Homo sapiens
tattctatgtctgca

SEQ ID NO: 198591 - DNA, 15 bp, Homo sapiens
ctattctatgtctgc

SEQ ID NO: 198592 - DNA, 15 bp, Homo sapiens
tctattctatgtctg

SEQ ID NO: 198593 - DNA, 15 bp, Homo sapiens
atctattctatgtct

SEQ ID NO: 198594 - DNA, 15 bp, Homo sapiens
catctattctatgtc

SEQ ID NO: 198595 - DNA, 15 bp, Homo sapiens
ccatctattctatgt

SEQ ID NO: 198596 - DNA, 15 bp, Homo sapiens
accatctattctatg

SEQ ID NO: 198597 - DNA, 15 bp, Homo sapiens
aaccatctattctat

SEQ ID NO: 198598 - DNA, 15 bp, Homo sapiens
aaaccatctattcta

SEQ ID NO: 198599 - DNA, 15 bp, Homo sapiens
gaaaccatctattct

SEQ ID NO: 198600 - DNA, 15 bp, Homo sapiens
agaaaccatctattc

SEQ ID NO: 198601 - DNA, 15 bp, Homo sapiens
gagaaaccatctatt

SEQ ID NO: 198602 - DNA, 15 bp, Homo sapiens
ggagaaaccatctat

SEQ ID NO: 198603 - DNA, 15 bp, Homo sapiens
tggagaaaccatcta

SEQ ID NO: 198604 - DNA, 15 bp, Homo sapiens
ttggagaaaccatct

SEQ ID NO: 198605 - DNA, 15 bp, Homo sapiens
cttggagaaaccatc

SEQ ID NO: 198606 - DNA, 15 bp, Homo sapiens
acttggagaaaccat

SEQ ID NO: 198607 - DNA, 15 bp, Homo sapiens
aacttggagaaacca

SEQ ID NO: 198608 - DNA, 15 bp, Homo sapiens
gaacttggagaaacc

SEQ ID NO: 198609 - DNA, 15 bp, Homo sapiens
tgaacttggagaaac

SEQ ID NO: 198610 - DNA, 15 bp, Homo sapiens
ttgaacttggagaaa

SEQ ID NO: 198611 - DNA, 15 bp, Homo sapiens
attgaacttggagaa

SEQ ID NO: 198612 - DNA, 15 bp, Homo sapiens
aattgaacttggaga

SEQ ID NO: 198613 - DNA, 15 bp, Homo sapiens
taattgaacttggag

SEQ ID NO: 198614 - DNA, 15 bp, Homo sapiens
ataattgaacttgga

SEQ ID NO: 198615 - DNA, 15 bp, Homo sapiens
gataattgaacttgg

SEQ ID NO: 198616 - DNA, 15 bp, Homo sapiens
tgataattgaacttg

SEQ ID NO: 198617 - DNA, 15 bp, Homo sapiens
gtgataattgaactt

SEQ ID NO: 198618 - DNA, 15 bp, Homo sapiens
tgtgataattgaact

SEQ ID NO: 198619 - DNA, 15 bp, Homo sapiens
ttgtgataattgaac

SEQ ID NO: 198620 - DNA, 15 bp, Homo sapiens
attgtgataattgaa

SEQ ID NO: 198621 - DNA, 15 bp, Homo sapiens
tattgtgataattga

SEQ ID NO: 198622 - DNA, 15 bp, Homo sapiens
atattgtgataattg

SEQ ID NO: 198623 - DNA, 15 bp, Homo sapiens
gatattgtgataatt

SEQ ID NO: 198624 - DNA, 15 bp, Homo sapiens
tgatattgtgataat

SEQ ID NO: 198625 - DNA, 15 bp, Homo sapiens
gtgatattgtgataa

SEQ ID NO: 198626 - DNA, 15 bp, Homo sapiens
tgtgatattgtgata

SEQ ID NO: 198627 - DNA, 15 bp, Homo sapiens
gtgtgatattgtgat

SEQ ID NO: 198628 - DNA, 15 bp, Homo sapiens
cgtgtgatattgtga

SEQ ID NO: 198629 - DNA, 15 bp, Homo sapiens
tcgtgtgatattgtg

SEQ ID NO: 198630 - DNA, 15 bp, Homo sapiens
ctcgtgtgatattgt

SEQ ID NO: 198631 - DNA, 15 bp, Homo sapiens
actcgtgtgatattg

SEQ ID NO: 198632 - DNA, 15 bp, Homo sapiens
aactcgtgtgatatt

SEQ ID NO: 198633 - DNA, 15 bp, Homo sapiens
caactcgtgtgatat

SEQ ID NO: 198634 - DNA, 15 bp, Homo sapiens
acaactcgtgtgata

SEQ ID NO: 198635 - DNA, 15 bp, Homo sapiens
aacaactcgtgtgat

SEQ ID NO: 198636 - DNA, 15 bp, Homo sapiens
aaacaactcgtgtga

SEQ ID NO: 198637 - DNA, 15 bp, Homo sapiens
taaacaactcgtgtg

SEQ ID NO: 198638 - DNA, 15 bp, Homo sapiens
gtaaacaactcgtgt

SEQ ID NO: 198639 - DNA, 15 bp, Homo sapiens
agtaaacaactcgtg

SEQ ID NO: 198640 - DNA, 15 bp, Homo sapiens
cagtaaacaactcgt

SEQ ID NO: 198641 - DNA, 15 bp, Homo sapiens
tcagtaaacaactcg

SEQ ID NO: 198642 - DNA, 15 bp, Homo sapiens
ctcagtaaacaactc

SEQ ID NO: 198643 - DNA, 15 bp, Homo sapiens
gctcagtaaacaact

SEQ ID NO: 198644 - DNA, 15 bp, Homo sapiens
tgctcagtaaacaac

SEQ ID NO: 198645 - DNA, 15 bp, Homo sapiens
gtgctcagtaaacaa

SEQ ID NO: 198646 - DNA, 15 bp, Homo sapiens
tgtgctcagtaaaca

SEQ ID NO: 198647 - DNA, 15 bp, Homo sapiens
ctgtgctcagtaaac

SEQ ID NO: 198648 - DNA, 15 bp, Homo sapiens
tctgtgctcagtaaa

SEQ ID NO: 198649 - DNA, 15 bp, Homo sapiens
gtctgtgctcagtaa

SEQ ID NO: 198650 - DNA, 15 bp, Homo sapiens
agtctgtgctcagta

SEQ ID NO: 198651 - DNA, 15 bp, Homo sapiens
cagtctgtgctcagt

SEQ ID NO: 198652 - DNA, 15 bp, Homo sapiens
acagtctgtgctcag

SEQ ID NO: 198653 - DNA, 15 bp, Homo sapiens
gacagtctgtgctca

SEQ ID NO: 198654 - DNA, 15 bp, Homo sapiens
ggacagtctgtgctc

SEQ ID NO: 198655 - DNA, 15 bp, Homo sapiens
aggacagtctgtgct

SEQ ID NO: 198656 - DNA, 15 bp, Homo sapiens
gaggacagtctgtgc

SEQ ID NO: 198657 - DNA, 15 bp, Homo sapiens
agaggacagtctgtg

SEQ ID NO: 198658 - DNA, 15 bp, Homo sapiens
cagaggacagtctgt

SEQ ID NO: 198659 - DNA, 15 bp, Homo sapiens
acagaggacagtctg

SEQ ID NO: 198660 - DNA, 15 bp, Homo sapiens
cacagaggacagtct

SEQ ID NO: 198661 - DNA, 15 bp, Homo sapiens
gcacagaggacagtc

SEQ ID NO: 198662 - DNA, 15 bp, Homo sapiens
tgcacagaggacagt

SEQ ID NO: 198663 - DNA, 15 bp, Homo sapiens
gtgcacagaggacag

SEQ ID NO: 198664 - DNA, 15 bp, Homo sapiens
agtgcacagaggaca

SEQ ID NO: 198665 - DNA, 15 bp, Homo sapiens
cagtgcacagaggac

SEQ ID NO: 198666 - DNA, 15 bp, Homo sapiens
acagtgcacagagga

SEQ ID NO: 198667 - DNA, 15 bp, Homo sapiens
cacagtgcacagagg

SEQ ID NO: 198668 - DNA, 15 bp, Homo sapiens
gcacagtgcacagag

SEQ ID NO: 198669 - DNA, 15 bp, Homo sapiens
agcacagtgcacaga

SEQ ID NO: 198670 - DNA, 15 bp, Homo sapiens
tagcacagtgcacag

SEQ ID NO: 198671 - DNA, 15 bp, Homo sapiens
ttagcacagtgcaca

SEQ ID NO: 198672 - DNA, 15 bp, Homo sapiens
cttagcacagtgcac

SEQ ID NO: 198673 - DNA, 15 bp, Homo sapiens
gcttagcacagtgca

SEQ ID NO: 198674 - DNA, 15 bp, Homo sapiens
tgcttagcacagtgc

SEQ ID NO: 198675 - DNA, 15 bp, Homo sapiens
gtgcttagcacagtg

SEQ ID NO: 198676 - DNA, 15 bp, Homo sapiens
agtgcttagcacagt

SEQ ID NO: 198677 - DNA, 15 bp, Homo sapiens
aagtgcttagcacag

SEQ ID NO: 198678 - DNA, 15 bp, Homo sapiens
aaagtgcttagcaca

SEQ ID NO: 198679 - DNA, 15 bp, Homo sapiens
caaagtgcttagcac

SEQ ID NO: 198680 - DNA, 15 bp, Homo sapiens
acaaagtgcttagca

SEQ ID NO: 198681 - DNA, 15 bp, Homo sapiens
cacaaagtgcttagc

SEQ ID NO: 198682 - DNA, 15 bp, Homo sapiens
acacaaagtgcttag

SEQ ID NO: 198683 - DNA, 15 bp, Homo sapiens
cacacaaagtgctta

SEQ ID NO: 198684 - DNA, 15 bp, Homo sapiens
gcacacaaagtgctt

SEQ ID NO: 198685 - DNA, 15 bp, Homo sapiens
tgcacacaaagtgct

SEQ ID NO: 198686 - DNA, 15 bp, Homo sapiens
atgcacacaaagtgc

SEQ ID NO: 198687 - DNA, 15 bp, Homo sapiens
aatgcacacaaagtg

SEQ ID NO: 198688 - DNA, 15 bp, Homo sapiens
taatgcacacaaagt

SEQ ID NO: 198689 - DNA, 15 bp, Homo sapiens
gtaatgcacacaaag

SEQ ID NO: 198690 - DNA, 15 bp, Homo sapiens
ggtaatgcacacaaa

SEQ ID NO: 198691 - DNA, 15 bp, Homo sapiens
aggtaatgcacacaa

SEQ ID NO: 198692 - DNA, 15 bp, Homo sapiens
gaggtaatgcacaca

SEQ ID NO: 198693 - DNA, 15 bp, Homo sapiens
tgaggtaatgcacac

SEQ ID NO: 198694 - DNA, 15 bp, Homo sapiens
ctgaggtaatgcaca

SEQ ID NO: 198695 - DNA, 15 bp, Homo sapiens
tctgaggtaatgcac

SEQ ID NO: 198696 - DNA, 15 bp, Homo sapiens
ttctgaggtaatgca

SEQ ID NO: 198697 - DNA, 15 bp, Homo sapiens
gttctgaggtaatgc

SEQ ID NO: 198698 - DNA, 15 bp, Homo sapiens
tgttctgaggtaatg

SEQ ID NO: 198699 - DNA, 15 bp, Homo sapiens
ttgttctgaggtaat

SEQ ID NO: 198700 - DNA, 15 bp, Homo sapiens
gttgttctgaggtaa

SEQ ID NO: 198701 - DNA, 15 bp, Homo sapiens
agttgttctgaggta

SEQ ID NO: 198702 - DNA, 15 bp, Homo sapiens
gagttgttctgaggt

SEQ ID NO: 198703 - DNA, 15 bp, Homo sapiens
ggagttgttctgagg

SEQ ID NO: 198704 - DNA, 15 bp, Homo sapiens
tggagttgttctgag

SEQ ID NO: 198705 - DNA, 15 bp, Homo sapiens
ttggagttgttctga

SEQ ID NO: 198706 - DNA, 15 bp, Homo sapiens
cttggagttgttctg

SEQ ID NO: 198707 - DNA, 15 bp, Homo sapiens
ccttggagttgttct

SEQ ID NO: 198708 - DNA, 15 bp, Homo sapiens
cccttggagttgttc

SEQ ID NO: 198709 - DNA, 15 bp, Homo sapiens
ccccttggagttgtt

SEQ ID NO: 198710 - DNA, 15 bp, Homo sapiens
gccccttggagttgt

SEQ ID NO: 198711 - DNA, 15 bp, Homo sapiens
tgccccttggagttg

SEQ ID NO: 198712 - DNA, 15 bp, Homo sapiens
atgccccttggagtt

SEQ ID NO: 198713 - DNA, 15 bp, Homo sapiens
catgccccttggagt

SEQ ID NO: 198714 - DNA, 15 bp, Homo sapiens
acatgccccttggag

SEQ ID NO: 198715 - DNA, 15 bp, Homo sapiens
cacatgccccttgga

SEQ ID NO: 198716 - DNA, 15 bp, Homo sapiens
gcacatgccccttgg

SEQ ID NO: 198717 - DNA, 15 bp, Homo sapiens
agcacatgccccttg

SEQ ID NO: 198718 - DNA, 15 bp, Homo sapiens
aagcacatgcccctt

SEQ ID NO: 198719 - DNA, 15 bp, Homo sapiens
aaagcacatgcccct

SEQ ID NO: 198720 - DNA, 15 bp, Homo sapiens
caaagcacatgcccc

SEQ ID NO: 198721 - DNA, 15 bp, Homo sapiens
acaaagcacatgccc

SEQ ID NO: 198722 - DNA, 15 bp, Homo sapiens
aacaaagcacatgcc

SEQ ID NO: 198723 - DNA, 15 bp, Homo sapiens
aaacaaagcacatgc

SEQ ID NO: 198724 - DNA, 15 bp, Homo sapiens
caaacaaagcacatg

SEQ ID NO: 198725 - DNA, 15 bp, Homo sapiens
acaaacaaagcacat

SEQ ID NO: 198726 - DNA, 15 bp, Homo sapiens
gacaaacaaagcaca

SEQ ID NO: 198727 - DNA, 15 bp, Homo sapiens
ggacaaacaaagcac

SEQ ID NO: 198728 - DNA, 15 bp, Homo sapiens
aggacaaacaaagca

SEQ ID NO: 198729 - DNA, 15 bp, Homo sapiens
gaggacaaacaaagc

SEQ ID NO: 198730 - DNA, 15 bp, Homo sapiens
tgaggacaaacaaag

SEQ ID NO: 198731 - DNA, 15 bp, Homo sapiens
atgaggacaaacaaa

SEQ ID NO: 198732 - DNA, 15 bp, Homo sapiens
aatgaggacaaacaa

SEQ ID NO: 198733 - DNA, 15 bp, Homo sapiens
taatgaggacaaaca

SEQ ID NO: 198734 - DNA, 15 bp, Homo sapiens
ataatgaggacaaac

SEQ ID NO: 198735 - DNA, 15 bp, Homo sapiens
tataatgaggacaaa

SEQ ID NO: 198736 - DNA, 15 bp, Homo sapiens
atataatgaggacaa

SEQ ID NO: 198737 - DNA, 15 bp, Homo sapiens
tatataatgaggaca

SEQ ID NO: 198738 - DNA, 15 bp, Homo sapiens
ctatataatgaggac

SEQ ID NO: 198739 - DNA, 15 bp, Homo sapiens
tctatataatgagga

SEQ ID NO: 198740 - DNA, 15 bp, Homo sapiens
atctatataatgagg

SEQ ID NO: 198741 - DNA, 15 bp, Homo sapiens
aatctatataatgag

SEQ ID NO: 198742 - DNA, 15 bp, Homo sapiens
caatctatataatga

SEQ ID NO: 198743 - DNA, 15 bp, Homo sapiens
ccaatctatataatg

SEQ ID NO: 198744 - DNA, 15 bp, Homo sapiens
cccaatctatataat

SEQ ID NO: 198745 - DNA, 15 bp, Homo sapiens
ccccaatctatataa

SEQ ID NO: 198746 - DNA, 15 bp, Homo sapiens
tccccaatctatata

SEQ ID NO: 198747 - DNA, 15 bp, Homo sapiens
ttccccaatctatat

SEQ ID NO: 198748 - DNA, 15 bp, Homo sapiens
tttccccaatctata

SEQ ID NO: 198749 - DNA, 15 bp, Homo sapiens
gtttccccaatctat

SEQ ID NO: 198750 - DNA, 15 bp, Homo sapiens
cgtttccccaatcta

SEQ ID NO: 198751 - DNA, 15 bp, Homo sapiens
gcgtttccccaatct

SEQ ID NO: 198752 - DNA, 15 bp, Homo sapiens
tgcgtttccccaatc

SEQ ID NO: 198753 - DNA, 15 bp, Homo sapiens
atgcgtttccccaat

SEQ ID NO: 198754 - DNA, 15 bp, Homo sapiens
catgcgtttccccaa

SEQ ID NO: 198755 - DNA, 15 bp, Homo sapiens
acatgcgtttcccca

SEQ ID NO: 198756 - DNA, 15 bp, Homo sapiens
gacatgcgtttcccc

SEQ ID NO: 198757 - DNA, 15 bp, Homo sapiens
ggacatgcgtttccc

SEQ ID NO: 198758 - DNA, 15 bp, Homo sapiens
tggacatgcgtttcc

SEQ ID NO: 198759 - DNA, 15 bp, Homo sapiens
ctggacatgcgtttc

SEQ ID NO: 198760 - DNA, 15 bp, Homo sapiens
tctggacatgcgttt

SEQ ID NO: 198761 - DNA, 15 bp, Homo sapiens
ctctggacatgcgtt

SEQ ID NO: 198762 - DNA, 15 bp, Homo sapiens
cctctggacatgcgt

SEQ ID NO: 198763 - DNA, 15 bp, Homo sapiens
ccctctggacatgcg

SEQ ID NO: 198764 - DNA, 15 bp, Homo sapiens
accctctggacatgc

SEQ ID NO: 198765 - DNA, 15 bp, Homo sapiens
aaccctctggacatg

SEQ ID NO: 198766 - DNA, 15 bp, Homo sapiens
caaccctctggacat

SEQ ID NO: 198767 - DNA, 15 bp, Homo sapiens
tcaaccctctggaca

SEQ ID NO: 198768 - DNA, 15 bp, Homo sapiens
ctcaaccctctggac

SEQ ID NO: 198769 - DNA, 15 bp, Homo sapiens
gctcaaccctctgga

SEQ ID NO: 198770 - DNA, 15 bp, Homo sapiens
ggctcaaccctctgg

SEQ ID NO: 198771 - DNA, 15 bp, Homo sapiens
gggctcaaccctctg

SEQ ID NO: 198772 - DNA, 15 bp, Homo sapiens
agggctcaaccctct

SEQ ID NO: 198773 - DNA, 15 bp, Homo sapiens
tagggctcaaccctc

SEQ ID NO: 198774 - DNA, 15 bp, Homo sapiens
gtagggctcaaccct

SEQ ID NO: 198775 - DNA, 15 bp, Homo sapiens
agtagggctcaaccc

SEQ ID NO: 198776 - DNA, 15 bp, Homo sapiens
gagtagggctcaacc

SEQ ID NO: 198777 - DNA, 15 bp, Homo sapiens
tgagtagggctcaac

SEQ ID NO: 198778 - DNA, 15 bp, Homo sapiens
ctgagtagggctcaa

SEQ ID NO: 198779 - DNA, 15 bp, Homo sapiens
gctgagtagggctca

SEQ ID NO: 198780 - DNA, 15 bp, Homo sapiens
ggctgagtagggctc

SEQ ID NO: 198781 - DNA, 15 bp, Homo sapiens
aggctgagtagggct

SEQ ID NO: 198782 - DNA, 15 bp, Homo sapiens
gaggctgagtagggc

SEQ ID NO: 198783 - DNA, 15 bp, Homo sapiens
tgaggctgagtaggg

SEQ ID NO: 198784 - DNA, 15 bp, Homo sapiens
atgaggctgagtagg

SEQ ID NO: 198785 - DNA, 15 bp, Homo sapiens
gatgaggctgagtag

SEQ ID NO: 198786 - DNA, 15 bp, Homo sapiens
agatgaggctgagta

SEQ ID NO: 198787 - DNA, 15 bp, Homo sapiens
cagatgaggctgagt

SEQ ID NO: 198788 - DNA, 15 bp, Homo sapiens
ccagatgaggctgag

SEQ ID NO: 198789 - DNA, 15 bp, Homo sapiens
cccagatgaggctga

SEQ ID NO: 198790 - DNA, 15 bp, Homo sapiens
acccagatgaggctg

SEQ ID NO: 198791 - DNA, 15 bp, Homo sapiens
tacccagatgaggct

SEQ ID NO: 198792 - DNA, 15 bp, Homo sapiens
gtacccagatgaggc

SEQ ID NO: 198793 - DNA, 15 bp, Homo sapiens
agtacccagatgagg

SEQ ID NO: 198794 - DNA, 15 bp, Homo sapiens
cagtacccagatgag

SEQ ID NO: 198795 - DNA, 15 bp, Homo sapiens
tcagtacccagatga

SEQ ID NO: 198796 - DNA, 15 bp, Homo sapiens
gtcagtacccagatg

SEQ ID NO: 198797 - DNA, 15 bp, Homo sapiens
agtcagtacccagat

SEQ ID NO: 198798 - DNA, 15 bp, Homo sapiens
cagtcagtacccaga

SEQ ID NO: 198799 - DNA, 15 bp, Homo sapiens
ccagtcagtacccag

SEQ ID NO: 198800 - DNA, 15 bp, Homo sapiens
cccagtcagtaccca

SEQ ID NO: 198801 - DNA, 15 bp, Homo sapiens
ccccagtcagtaccc

SEQ ID NO: 198802 - DNA, 15 bp, Homo sapiens
cccccagtcagtacc

SEQ ID NO: 198803 - DNA, 15 bp, Homo sapiens
gcccccagtcagtac

SEQ ID NO: 198804 - DNA, 15 bp, Homo sapiens
ggcccccagtcagta

SEQ ID NO: 198805 - DNA, 15 bp, Homo sapiens
tggcccccagtcagt

SEQ ID NO: 198806 - DNA, 15 bp, Homo sapiens
ctggcccccagtcag

SEQ ID NO: 198807 - DNA, 15 bp, Homo sapiens
cctggcccccagtca

SEQ ID NO: 198808 - DNA, 15 bp, Homo sapiens
tcctggcccccagtc

SEQ ID NO: 198809 - DNA, 15 bp, Homo sapiens
gtcctggcccccagt

SEQ ID NO: 198810 - DNA, 15 bp, Homo sapiens
agtcctggcccccag

SEQ ID NO: 198811 - DNA, 15 bp, Homo sapiens
gagtcctggccccca

SEQ ID NO: 198812 - DNA, 15 bp, Homo sapiens
tgagtcctggccccc

SEQ ID NO: 198813 - DNA, 15 bp, Homo sapiens
ctgagtcctggcccc

SEQ ID NO: 198814 - DNA, 15 bp, Homo sapiens
cctgagtcctggccc

SEQ ID NO: 198815 - DNA, 15 bp, Homo sapiens
acctgagtcctggcc

SEQ ID NO: 198816 - DNA, 15 bp, Homo sapiens
gacctgagtcctggc

SEQ ID NO: 198817 - DNA, 15 bp, Homo sapiens
ggacctgagtcctgg

SEQ ID NO: 198818 - DNA, 15 bp, Homo sapiens
tggacctgagtcctg

SEQ ID NO: 198819 - DNA, 15 bp, Homo sapiens
ctggacctgagtcct

SEQ ID NO: 198820 - DNA, 15 bp, Homo sapiens
gctggacctgagtcc

SEQ ID NO: 198821 - DNA, 15 bp, Homo sapiens
ggctggacctgagtc

SEQ ID NO: 198822 - DNA, 15 bp, Homo sapiens
tggctggacctgagt

SEQ ID NO: 198823 - DNA, 15 bp, Homo sapiens
ctggctggacctgag

SEQ ID NO: 198824 - DNA, 15 bp, Homo sapiens
actggctggacctga

SEQ ID NO: 198825 - DNA, 15 bp, Homo sapiens
aactggctggacctg

SEQ ID NO: 198826 - DNA, 15 bp, Homo sapiens
aaactggctggacct

SEQ ID NO: 198827 - DNA, 15 bp, Homo sapiens
gaaactggctggacc

SEQ ID NO: 198828 - DNA, 15 bp, Homo sapiens
tgaaactggctggac

SEQ ID NO: 198829 - DNA, 15 bp, Homo sapiens
gtgaaactggctgga

SEQ ID NO: 198830 - DNA, 15 bp, Homo sapiens
tgtgaaactggctgg

SEQ ID NO: 198831 - DNA, 15 bp, Homo sapiens
ctgtgaaactggctg

SEQ ID NO: 198832 - DNA, 15 bp, Homo sapiens
gctgtgaaactggct

SEQ ID NO: 198833 - DNA, 15 bp, Homo sapiens
tgctgtgaaactggc

SEQ ID NO: 198834 - DNA, 15 bp, Homo sapiens
ctgctgtgaaactgg

SEQ ID NO: 198835 - DNA, 15 bp, Homo sapiens
tctgctgtgaaactg

SEQ ID NO: 198836 - DNA, 15 bp, Homo sapiens
ctctgctgtgaaact

SEQ ID NO: 198837 - DNA, 15 bp, Homo sapiens
gctctgctgtgaaac

SEQ ID NO: 198838 - DNA, 15 bp, Homo sapiens
ggctctgctgtgaaa

SEQ ID NO: 198839 - DNA, 15 bp, Homo sapiens
aggctctgctgtgaa

SEQ ID NO: 198840 - DNA, 15 bp, Homo sapiens
caggctctgctgtga

SEQ ID NO: 198841 - DNA, 15 bp, Homo sapiens
acaggctctgctgtg

SEQ ID NO: 198842 - DNA, 15 bp, Homo sapiens
cacaggctctgctgt

SEQ ID NO: 198843 - DNA, 15 bp, Homo sapiens
gcacaggctctgctg

SEQ ID NO: 198844 - DNA, 15 bp, Homo sapiens
agcacaggctctgct

SEQ ID NO: 198845 - DNA, 15 bp, Homo sapiens
gagcacaggctctgc

SEQ ID NO: 198846 - DNA, 15 bp, Homo sapiens
agagcacaggctctg

SEQ ID NO: 198847 - DNA, 15 bp, Homo sapiens
aagagcacaggctct

SEQ ID NO: 198848 - DNA, 15 bp, Homo sapiens
caagagcacaggctc

SEQ ID NO: 198849 - DNA, 15 bp, Homo sapiens
ccaagagcacaggct

SEQ ID NO: 198850 - DNA, 15 bp, Homo sapiens
gccaagagcacaggc

SEQ ID NO: 198851 - DNA, 15 bp, Homo sapiens
ggccaagagcacagg

SEQ ID NO: 198852 - DNA, 15 bp, Homo sapiens
tggccaagagcacag

SEQ ID NO: 198853 - DNA, 15 bp, Homo sapiens
atggccaagagcaca

SEQ ID NO: 198854 - DNA, 15 bp, Homo sapiens
catggccaagagcac

SEQ ID NO: 198855 - DNA, 15 bp, Homo sapiens
tcatggccaagagca

SEQ ID NO: 198856 - DNA, 15 bp, Homo sapiens
atcatggccaagagc

SEQ ID NO: 198857 - DNA, 15 bp, Homo sapiens
catcatggccaagag

SEQ ID NO: 198858 - DNA, 15 bp, Homo sapiens
tcatcatggccaaga

SEQ ID NO: 198859 - DNA, 15 bp, Homo sapiens
atcatcatggccaag

SEQ ID NO: 198860 - DNA, 15 bp, Homo sapiens
tatcatcatggccaa

SEQ ID NO: 198861 - DNA, 15 bp, Homo sapiens
ttatcatcatggcca

SEQ ID NO: 198862 - DNA, 15 bp, Homo sapiens
attatcatcatggcc

SEQ ID NO: 198863 - DNA, 15 bp, Homo sapiens
cattatcatcatggc

SEQ ID NO: 198864 - DNA, 15 bp, Homo sapiens
ccattatcatcatgg

SEQ ID NO: 198865 - DNA, 15 bp, Homo sapiens
gccattatcatcatg

SEQ ID NO: 198866 - DNA, 15 bp, Homo sapiens
tgccattatcatcat

SEQ ID NO: 198867 - DNA, 15 bp, Homo sapiens
gtgccattatcatca

SEQ ID NO: 198868 - DNA, 15 bp, Homo sapiens
agtgccattatcatc

SEQ ID NO: 198869 - DNA, 15 bp, Homo sapiens
aagtgccattatcat

SEQ ID NO: 198870 - DNA, 15 bp, Homo sapiens
aaagtgccattatca

SEQ ID NO: 198871 - DNA, 15 bp, Homo sapiens
gaaagtgccattatc

SEQ ID NO: 198872 - DNA, 15 bp, Homo sapiens
ggaaagtgccattat

SEQ ID NO: 198873 - DNA, 15 bp, Homo sapiens
gggaaagtgccatta

SEQ ID NO: 198874 - DNA, 15 bp, Homo sapiens
tgggaaagtgccatt

SEQ ID NO: 198875 - DNA, 15 bp, Homo sapiens
gtgggaaagtgccat

SEQ ID NO: 198876 - DNA, 15 bp, Homo sapiens
ggtgggaaagtgcca

SEQ ID NO: 198877 - DNA, 15 bp, Homo sapiens
gggtgggaaagtgcc

SEQ ID NO: 198878 - DNA, 15 bp, Homo sapiens
tgggtgggaaagtgc

SEQ ID NO: 198879 - DNA, 15 bp, Homo sapiens
ctgggtgggaaagtg

SEQ ID NO: 198880 - DNA, 15 bp, Homo sapiens
actgggtgggaaagt

SEQ ID NO: 198881 - DNA, 15 bp, Homo sapiens
gactgggtgggaaag

SEQ ID NO: 198882 - DNA, 15 bp, Homo sapiens
ggactgggtgggaaa

SEQ ID NO: 198883 - DNA, 15 bp, Homo sapiens
aggactgggtgggaa

SEQ ID NO: 198884 - DNA, 15 bp, Homo sapiens
aaggactgggtggga

SEQ ID NO: 198885 - DNA, 15 bp, Homo sapiens
aaaggactgggtggg

SEQ ID NO: 198886 - DNA, 15 bp, Homo sapiens
aaaaggactgggtgg

SEQ ID NO: 198887 - DNA, 15 bp, Homo sapiens
aaaaaggactgggtg

SEQ ID NO: 198888 - DNA, 15 bp, Homo sapiens
aaaaaaggactgggt

SEQ ID NO: 198889 - DNA, 15 bp, Homo sapiens
aaaaaaaggactggg

SEQ ID NO: 198890 - DNA, 15 bp, Homo sapiens
aaaaaaaaggactgg

SEQ ID NO: 198891 - DNA, 15 bp, Homo sapiens
aaaaaaaaaggactg

SEQ ID NO: 198892 - DNA, 15 bp, Homo sapiens
aaaaaaaaaaggact

SEQ ID NO: 198893 - DNA, 15 bp, Homo sapiens
gaaaaaaaaaaggac

SEQ ID NO: 198894 - DNA, 15 bp, Homo sapiens
tgaaaaaaaaaagga

SEQ ID NO: 198895 - DNA, 15 bp, Homo sapiens
ttgaaaaaaaaaagg

SEQ ID NO: 198896 - DNA, 15 bp, Homo sapiens
tttgaaaaaaaaaag

SEQ ID NO: 198897 - DNA, 15 bp, Homo sapiens
atttgaaaaaaaaaa

SEQ ID NO: 198898 - DNA, 15 bp, Homo sapiens
aatttgaaaaaaaaa

SEQ ID NO: 198899 - DNA, 15 bp, Homo sapiens
aaatttgaaaaaaaa

SEQ ID NO: 198900 - DNA, 15 bp, Homo sapiens
taaatttgaaaaaaa

SEQ ID NO: 198901 - DNA, 15 bp, Homo sapiens
ataaatttgaaaaaa

SEQ ID NO: 198902 - DNA, 15 bp, Homo sapiens
aataaatttgaaaaa

SEQ ID NO: 198903 - DNA, 15 bp, Homo sapiens
aaataaatttgaaaa

SEQ ID NO: 198904 - DNA, 15 bp, Homo sapiens
taaataaatttgaaa

SEQ ID NO: 198905 - DNA, 15 bp, Homo sapiens
ataaataaatttgaa

SEQ ID NO: 198906 - DNA, 15 bp, Homo sapiens
aataaataaatttga

SEQ ID NO: 198907 - DNA, 15 bp, Homo sapiens
aaataaataaatttg

SEQ ID NO: 198908 - DNA, 15 bp, Homo sapiens
aaaataaataaattt

SEQ ID NO: 198909 - DNA, 15 bp, Homo sapiens
caaaataaataaatt

SEQ ID NO: 198910 - DNA, 15 bp, Homo sapiens
actcaaaataaataa

SEQ ID NO: 198911 - DNA, 15 bp, Homo sapiens
cactcaaaataaata

SEQ ID NO: 198912 - DNA, 15 bp, Homo sapiens
gcactcaaaataaat

SEQ ID NO: 198913 - DNA, 15 bp, Homo sapiens
agcactcaaaataaa

SEQ ID NO: 198914 - DNA, 15 bp, Homo sapiens
cagcactcaaaataa

SEQ ID NO: 198915 - DNA, 15 bp, Homo sapiens
gcagcactcaaaata

SEQ ID NO: 198916 - DNA, 15 bp, Homo sapiens
tgcagcactcaaaat

SEQ ID NO: 198917 - DNA, 15 bp, Homo sapiens
atgcagcactcaaaa

SEQ ID NO: 198918 - DNA, 15 bp, Homo sapiens
aatgcagcactcaaa

SEQ ID NO: 198919 - DNA, 15 bp, Homo sapiens
gaatgcagcactcaa

SEQ ID NO: 198920 - DNA, 15 bp, Homo sapiens
agaatgcagcactca

SEQ ID NO: 198921 - DNA, 15 bp, Homo sapiens
gagaatgcagcactc

SEQ ID NO: 198922 - DNA, 15 bp, Homo sapiens
agagaatgcagcact

SEQ ID NO: 198923 - DNA, 15 bp, Homo sapiens
tagagaatgcagcac

SEQ ID NO: 198924 - DNA, 15 bp, Homo sapiens
gtagagaatgcagca

SEQ ID NO: 198925 - DNA, 15 bp, Homo sapiens
ggtagagaatgcagc

SEQ ID NO: 198926 - DNA, 15 bp, Homo sapiens
aggtagagaatgcag

SEQ ID NO: 198927 - DNA, 15 bp, Homo sapiens
aaggtagagaatgca

SEQ ID NO: 198928 - DNA, 15 bp, Homo sapiens
aaaggtagagaatgc

SEQ ID NO: 198929 - DNA, 15 bp, Homo sapiens
aaaaggtagagaatg

SEQ ID NO: 198930 - DNA, 15 bp, Homo sapiens
taaaaggtagagaat

SEQ ID NO: 198931 - DNA, 15 bp, Homo sapiens
ataaaaggtagagaa

SEQ ID NO: 198932 - DNA, 15 bp, Homo sapiens
tataaaaggtagaga

SEQ ID NO: 198933 - DNA, 15 bp, Homo sapiens
ctataaaaggtagag

SEQ ID NO: 198934 - DNA, 15 bp, Homo sapiens
actataaaaggtaga

SEQ ID NO: 198935 - DNA, 15 bp, Homo sapiens
aactataaaaggtag

SEQ ID NO: 198936 - DNA, 15 bp, Homo sapiens
taactataaaaggta

SEQ ID NO: 198937 - DNA, 15 bp, Homo sapiens
ttaactataaaaggt

SEQ ID NO: 198938 - DNA, 15 bp, Homo sapiens
cttaactataaaagg

SEQ ID NO: 198939 - DNA, 15 bp, Homo sapiens
tcttaactataaaag

SEQ ID NO: 198940 - DNA, 15 bp, Homo sapiens
ttcttaactataaaa

SEQ ID NO: 198941 - DNA, 15 bp, Homo sapiens
attcttaactataaa

SEQ ID NO: 198942 - DNA, 15 bp, Homo sapiens
cattcttaactataa

SEQ ID NO: 198943 - DNA, 15 bp, Homo sapiens
acattcttaactata

SEQ ID NO: 198944 - DNA, 15 bp, Homo sapiens
aacattcttaactat

SEQ ID NO: 198945 - DNA, 15 bp, Homo sapiens
aaacattcttaacta

SEQ ID NO: 198946 - DNA, 15 bp, Homo sapiens
aaaacattcttaact

SEQ ID NO: 198947 - DNA, 15 bp, Homo sapiens
gaaaacattcttaac

SEQ ID NO: 198948 - DNA, 15 bp, Homo sapiens
tgaaaacattcttaa

SEQ ID NO: 198949 - DNA, 15 bp, Homo sapiens
ttgaaaacattctta

SEQ ID NO: 198950 - DNA, 15 bp, Homo sapiens
cttgaaaacattctt

SEQ ID NO: 198951 - DNA, 15 bp, Homo sapiens
ccttgaaaacattct

SEQ ID NO: 198952 - DNA, 15 bp, Homo sapiens
accttgaaaacattc

SEQ ID NO: 198953 - DNA, 15 bp, Homo sapiens
gaccttgaaaacatt

SEQ ID NO: 198954 - DNA, 15 bp, Homo sapiens
agaccttgaaaacat

SEQ ID NO: 198955 - DNA, 15 bp, Homo sapiens
cagaccttgaaaaca

SEQ ID NO: 198956 - DNA, 15 bp, Homo sapiens
ccagaccttgaaaac

SEQ ID NO: 198957 - DNA, 15 bp, Homo sapiens
accagaccttgaaaa

SEQ ID NO: 198958 - DNA, 15 bp, Homo sapiens
caccagaccttgaaa

SEQ ID NO: 198959 - DNA, 15 bp, Homo sapiens
ccaccagaccttgaa

SEQ ID NO: 198960 - DNA, 15 bp, Homo sapiens
cccaccagaccttga

SEQ ID NO: 198961 - DNA, 15 bp, Homo sapiens
tcccaccagaccttg

SEQ ID NO: 198962 - DNA, 15 bp, Homo sapiens
ctcccaccagacctt

SEQ ID NO: 198963 - DNA, 15 bp, Homo sapiens
cctcccaccagacct

SEQ ID NO: 198964 - DNA, 15 bp, Homo sapiens
acctcccaccagacc

SEQ ID NO: 198965 - DNA, 15 bp, Homo sapiens
aacctcccaccagac

SEQ ID NO: 198966 - DNA, 15 bp, Homo sapiens
aaacctcccaccaga

SEQ ID NO: 198967 - DNA, 15 bp, Homo sapiens
aaaacctcccaccag

SEQ ID NO: 198968 - DNA, 15 bp, Homo sapiens
gaaaacctcccacca

SEQ ID NO: 198969 - DNA, 15 bp, Homo sapiens
cgaaaacctcccacc

SEQ ID NO: 198970 - DNA, 15 bp, Homo sapiens
acgaaaacctcccac

SEQ ID NO: 198971 - DNA, 15 bp, Homo sapiens
cacgaaaacctccca

SEQ ID NO: 198972 - DNA, 15 bp, Homo sapiens
acacgaaaacctccc

SEQ ID NO: 198973 - DNA, 15 bp, Homo sapiens
aacacgaaaacctcc

SEQ ID NO: 198974 - DNA, 15 bp, Homo sapiens
aaacacgaaaacctc

SEQ ID NO: 198975 - DNA, 15 bp, Homo sapiens
aaaacacgaaaacct

SEQ ID NO: 198976 - DNA, 15 bp, Homo sapiens
caaaacacgaaaacc

SEQ ID NO: 198977 - DNA, 15 bp, Homo sapiens
gcaaaacacgaaaac

SEQ ID NO: 198978 - DNA, 15 bp, Homo sapiens
tgcaaaacacgaaaa

SEQ ID NO: 198979 - DNA, 15 bp, Homo sapiens
atgcaaaacacgaaa

SEQ ID NO: 198980 - DNA, 15 bp, Homo sapiens
gatgcaaaacacgaa

SEQ ID NO: 198981 - DNA, 15 bp, Homo sapiens
ggatgcaaaacacga

SEQ ID NO: 198982 - DNA, 15 bp, Homo sapiens
tggatgcaaaacacg

SEQ ID NO: 198983 - DNA, 15 bp, Homo sapiens
atggatgcaaaacac

SEQ ID NO: 198984 - DNA, 15 bp, Homo sapiens
catggatgcaaaaca

SEQ ID NO: 198985 - DNA, 15 bp, Homo sapiens
tcatggatgcaaaac

SEQ ID NO: 198986 - DNA, 15 bp, Homo sapiens
ttcatggatgcaaaa

SEQ ID NO: 198987 - DNA, 15 bp, Homo sapiens
attcatggatgcaaa

SEQ ID NO: 198988 - DNA, 15 bp, Homo sapiens
cattcatggatgcaa

SEQ ID NO: 198989 - DNA, 15 bp, Homo sapiens
gcattcatggatgca

SEQ ID NO: 198990 - DNA, 15 bp, Homo sapiens
tgcattcatggatgc

SEQ ID NO: 198991 - DNA, 15 bp, Homo sapiens
ctgcattcatggatg

SEQ ID NO: 198992 - DNA, 15 bp, Homo sapiens
actgcattcatggat

SEQ ID NO: 198993 - DNA, 15 bp, Homo sapiens
gactgcattcatgga

SEQ ID NO: 198994 - DNA, 15 bp, Homo sapiens
tgactgcattcatgg

SEQ ID NO: 198995 - DNA, 15 bp, Homo sapiens
ctgactgcattcatg

SEQ ID NO: 198996 - DNA, 15 bp, Homo sapiens
actgactgcattcat

SEQ ID NO: 198997 - DNA, 15 bp, Homo sapiens
cactgactgcattca

SEQ ID NO: 198998 - DNA, 15 bp, Homo sapiens
acactgactgcattc

SEQ ID NO: 198999 - DNA, 15 bp, Homo sapiens
aacactgactgcatt

SEQ ID NO: 199000 - DNA, 15 bp, Homo sapiens
aaacactgactgcat

SEQ ID NO: 199001 - DNA, 15 bp, Homo sapiens
caaacactgactgca

SEQ ID NO: 199002 - DNA, 15 bp, Homo sapiens
gcaaacactgactgc

SEQ ID NO: 199003 - DNA, 15 bp, Homo sapiens
ggcaaacactgactg

SEQ ID NO: 199004 - DNA, 15 bp, Homo sapiens
aggcaaacactgact

SEQ ID NO: 199005 - DNA, 15 bp, Homo sapiens
caggcaaacactgac

SEQ ID NO: 199006 - DNA, 15 bp, Homo sapiens
acaggcaaacactga

SEQ ID NO: 199007 - DNA, 15 bp, Homo sapiens
tacaggcaaacactg

SEQ ID NO: 199008 - DNA, 15 bp, Homo sapiens
ttacaggcaaacact

SEQ ID NO: 199009 - DNA, 15 bp, Homo sapiens
tttacaggcaaacac

SEQ ID NO: 199010 - DNA, 15 bp, Homo sapiens
atttacaggcaaaca

SEQ ID NO: 199011 - DNA, 15 bp, Homo sapiens
tatttacaggcaaac

SEQ ID NO: 199012 - DNA, 15 bp, Homo sapiens
ctatttacaggcaaa

SEQ ID NO: 199013 - DNA, 15 bp, Homo sapiens
cctatttacaggcaa

SEQ ID NO: 199014 - DNA, 15 bp, Homo sapiens
ccctatttacaggca

SEQ ID NO: 199015 - DNA, 15 bp, Homo sapiens
tccctatttacaggc

SEQ ID NO: 199016 - DNA, 15 bp, Homo sapiens
ctccctatttacagg

SEQ ID NO: 199017 - DNA, 15 bp, Homo sapiens
cctccctatttacag

SEQ ID NO: 199018 - DNA, 15 bp, Homo sapiens
ccctccctatttaca

SEQ ID NO: 199019 - DNA, 15 bp, Homo sapiens
accctccctatttac

SEQ ID NO: 199020 - DNA, 15 bp, Homo sapiens
gaccctccctattta

SEQ ID NO: 199021 - DNA, 15 bp, Homo sapiens
tgaccctccctattt

SEQ ID NO: 199022 - DNA, 15 bp, Homo sapiens
ttgaccctccctatt

SEQ ID NO: 199023 - DNA, 15 bp, Homo sapiens
attgaccctccctat

SEQ ID NO: 199024 - DNA, 15 bp, Homo sapiens
aattgaccctcccta

SEQ ID NO: 199025 - DNA, 15 bp, Homo sapiens
gaattgaccctccct

SEQ ID NO: 199026 - DNA, 15 bp, Homo sapiens
agaattgaccctccc

SEQ ID NO: 199027 - DNA, 15 bp, Homo sapiens
gagaattgaccctcc

SEQ ID NO: 199028 - DNA, 15 bp, Homo sapiens
agagaattgaccctc

SEQ ID NO: 199029 - DNA, 15 bp, Homo sapiens
aagagaattgaccct

SEQ ID NO: 199030 - DNA, 15 bp, Homo sapiens
caagagaattgaccc

SEQ ID NO: 199031 - DNA, 15 bp, Homo sapiens
ccaagagaattgacc

SEQ ID NO: 199032 - DNA, 15 bp, Homo sapiens
cccaagagaattgac

SEQ ID NO: 199033 - DNA, 15 bp, Homo sapiens
gcccaagagaattga

SEQ ID NO: 199034 - DNA, 15 bp, Homo sapiens
agcccaagagaattg

SEQ ID NO: 199035 - DNA, 15 bp, Homo sapiens
gagcccaagagaatt

SEQ ID NO: 199036 - DNA, 15 bp, Homo sapiens
ggagcccaagagaat

SEQ ID NO: 199037 - DNA, 15 bp, Homo sapiens
aggagcccaagagaa

SEQ ID NO: 199038 - DNA, 15 bp, Homo sapiens
gaggagcccaagaga

SEQ ID NO: 199039 - DNA, 15 bp, Homo sapiens
agaggagcccaagag

SEQ ID NO: 199040 - DNA, 15 bp, Homo sapiens
cagaggagcccaaga

SEQ ID NO: 199041 - DNA, 15 bp, Homo sapiens
gcagaggagcccaag

SEQ ID NO: 199042 - DNA, 15 bp, Homo sapiens
agcagaggagcccaa

SEQ ID NO: 199043 - DNA, 15 bp, Homo sapiens
cagcagaggagccca

SEQ ID NO: 199044 - DNA, 15 bp, Homo sapiens
acagcagaggagccc

SEQ ID NO: 199045 - DNA, 15 bp, Homo sapiens
cacagcagaggagcc

SEQ ID NO: 199046 - DNA, 15 bp, Homo sapiens
gcacagcagaggagc

SEQ ID NO: 199047 - DNA, 15 bp, Homo sapiens
tgcacagcagaggag

SEQ ID NO: 199048 - DNA, 15 bp, Homo sapiens
gtgcacagcagagga

SEQ ID NO: 199049 - DNA, 15 bp, Homo sapiens
ggtgcacagcagagg

SEQ ID NO: 199050 - DNA, 15 bp, Homo sapiens
aggtgcacagcagag

SEQ ID NO: 199051 - DNA, 15 bp, Homo sapiens
gaggtgcacagcaga

SEQ ID NO: 199052 - DNA, 15 bp, Homo sapiens
tgaggtgcacagcag

SEQ ID NO: 199053 - DNA, 15 bp, Homo sapiens
atgaggtgcacagca

SEQ ID NO: 199054 - DNA, 15 bp, Homo sapiens
aatgaggtgcacagc

SEQ ID NO: 199055 - DNA, 15 bp, Homo sapiens
caatgaggtgcacag

SEQ ID NO: 199056 - DNA, 15 bp, Homo sapiens
gcaatgaggtgcaca

SEQ ID NO: 199057 - DNA, 15 bp, Homo sapiens
ggcaatgaggtgcac

SEQ ID NO: 199058 - DNA, 15 bp, Homo sapiens
gggcaatgaggtgca

SEQ ID NO: 199059 - DNA, 15 bp, Homo sapiens
tgggcaatgaggtgc

SEQ ID NO: 199060 - DNA, 15 bp, Homo sapiens
atgggcaatgaggtg

SEQ ID NO: 199061 - DNA, 15 bp, Homo sapiens
tatgggcaatgaggt

SEQ ID NO: 199062 - DNA, 15 bp, Homo sapiens
ctatgggcaatgagg

SEQ ID NO: 199063 - DNA, 15 bp, Homo sapiens
tctatgggcaatgag

SEQ ID NO: 199064 - DNA, 15 bp, Homo sapiens
ttctatgggcaatga

SEQ ID NO: 199065 - DNA, 15 bp, Homo sapiens
attctatgggcaatg

SEQ ID NO: 199066 - DNA, 15 bp, Homo sapiens
cattctatgggcaat

SEQ ID NO: 199067 - DNA, 15 bp, Homo sapiens
gcattctatgggcaa

SEQ ID NO: 199068 - DNA, 15 bp, Homo sapiens
agcattctatgggca

SEQ ID NO: 199069 - DNA, 15 bp, Homo sapiens
tagcattctatgggc

SEQ ID NO: 199070 - DNA, 15 bp, Homo sapiens
gtagcattctatggg

SEQ ID NO: 199071 - DNA, 15 bp, Homo sapiens
agtagcattctatgg

SEQ ID NO: 199072 - DNA, 15 bp, Homo sapiens
gagtagcattctatg

SEQ ID NO: 199073 - DNA, 15 bp, Homo sapiens
agagtagcattctat

SEQ ID NO: 199074 - DNA, 15 bp, Homo sapiens
gagagtagcattcta

SEQ ID NO: 199075 - DNA, 15 bp, Homo sapiens
cgagagtagcattct

SEQ ID NO: 199076 - DNA, 15 bp, Homo sapiens
ccgagagtagcattc

SEQ ID NO: 199077 - DNA, 15 bp, Homo sapiens
tccgagagtagcatt

SEQ ID NO: 199078 - DNA, 15 bp, Homo sapiens
atccgagagtagcat

SEQ ID NO: 199079 - DNA, 15 bp, Homo sapiens
gatccgagagtagca

SEQ ID NO: 199080 - DNA, 15 bp, Homo sapiens
agatccgagagtagc

SEQ ID NO: 199081 - DNA, 15 bp, Homo sapiens
aagatccgagagtag

SEQ ID NO: 199082 - DNA, 15 bp, Homo sapiens
caagatccgagagta

SEQ ID NO: 199083 - DNA, 15 bp, Homo sapiens
gcaagatccgagagt

SEQ ID NO: 199084 - DNA, 15 bp, Homo sapiens
tgcaagatccgagag

SEQ ID NO: 199085 - DNA, 15 bp, Homo sapiens
gtgcaagatccgaga

SEQ ID NO: 199086 - DNA, 15 bp, Homo sapiens
agtgcaagatccgag

SEQ ID NO: 199087 - DNA, 15 bp, Homo sapiens
tagtgcaagatccga

SEQ ID NO: 199088 - DNA, 15 bp, Homo sapiens
ctagtgcaagatccg

SEQ ID NO: 199089 - DNA, 15 bp, Homo sapiens
tctagtgcaagatcc

SEQ ID NO: 199090 - DNA, 15 bp, Homo sapiens
ctctagtgcaagatc

SEQ ID NO: 199091 - DNA, 15 bp, Homo sapiens
gctctagtgcaagat

SEQ ID NO: 199092 - DNA, 15 bp, Homo sapiens
tgctctagtgcaaga

SEQ ID NO: 199093 - DNA, 15 bp, Homo sapiens
gtgctctagtgcaag

SEQ ID NO: 199094 - DNA, 15 bp, Homo sapiens
agtgctctagtgcaa

SEQ ID NO: 199095 - DNA, 15 bp, Homo sapiens
cagtgctctagtgca

SEQ ID NO: 199096 - DNA, 15 bp, Homo sapiens
ccagtgctctagtgc

SEQ ID NO: 199097 - DNA, 15 bp, Homo sapiens
tccagtgctctagtg

SEQ ID NO: 199098 - DNA, 15 bp, Homo sapiens
atccagtgctctagt

SEQ ID NO: 199099 - DNA, 15 bp, Homo sapiens
catccagtgctctag

SEQ ID NO: 199100 - DNA, 15 bp, Homo sapiens
tcatccagtgctcta

SEQ ID NO: 199101 - DNA, 15 bp, Homo sapiens
atcatccagtgctct

SEQ ID NO: 199102 - DNA, 15 bp, Homo sapiens
catcatccagtgctc

SEQ ID NO: 199103 - DNA, 15 bp, Homo sapiens
tcatcatccagtgct

SEQ ID NO: 199104 - DNA, 15 bp, Homo sapiens
ttcatcatccagtgc

SEQ ID NO: 199105 - DNA, 15 bp, Homo sapiens
cttcatcatccagtg

SEQ ID NO: 199106 - DNA, 15 bp, Homo sapiens
acttcatcatccagt

SEQ ID NO: 199107 - DNA, 15 bp, Homo sapiens
cacttcatcatccag

SEQ ID NO: 199108 - DNA, 15 bp, Homo sapiens
tcacttcatcatcca

SEQ ID NO: 199109 - DNA, 15 bp, Homo sapiens
ttcacttcatcatcc

SEQ ID NO: 199110 - DNA, 15 bp, Homo sapiens
cttcacttcatcatc

SEQ ID NO: 199111 - DNA, 15 bp, Homo sapiens
gcttcacttcatcat

SEQ ID NO: 199112 - DNA, 15 bp, Homo sapiens
ggcttcacttcatca

SEQ ID NO: 199113 - DNA, 15 bp, Homo sapiens
aggcttcacttcatc

SEQ ID NO: 199114 - DNA, 15 bp, Homo sapiens
aaggcttcacttcat

SEQ ID NO: 199115 - DNA, 15 bp, Homo sapiens
caaggcttcacttca

SEQ ID NO: 199116 - DNA, 15 bp, Homo sapiens
gcaaggcttcacttc

SEQ ID NO: 199117 - DNA, 15 bp, Homo sapiens
tgcaaggcttcactt

SEQ ID NO: 199118 - DNA, 15 bp, Homo sapiens
ctgcaaggcttcact

SEQ ID NO: 199119 - DNA, 15 bp, Homo sapiens
tctgcaaggcttcac

SEQ ID NO: 199120 - DNA, 15 bp, Homo sapiens
ctctgcaaggcttca

SEQ ID NO: 199121 - DNA, 15 bp, Homo sapiens
tctctgcaaggcttc

SEQ ID NO: 199122 - DNA, 15 bp, Homo sapiens
gtctctgcaaggctt

SEQ ID NO: 199123 - DNA, 15 bp, Homo sapiens
ggtctctgcaaggct

SEQ ID NO: 199124 - DNA, 15 bp, Homo sapiens
aggtctctgcaaggc

SEQ ID NO: 199125 - DNA, 15 bp, Homo sapiens
caggtctctgcaagg

SEQ ID NO: 199126 - DNA, 15 bp, Homo sapiens
acaggtctctgcaag

SEQ ID NO: 199127 - DNA, 15 bp, Homo sapiens
cacaggtctctgcaa

SEQ ID NO: 199128 - DNA, 15 bp, Homo sapiens
tcacaggtctctgca

SEQ ID NO: 199129 - DNA, 15 bp, Homo sapiens
ctcacaggtctctgc

SEQ ID NO: 199130 - DNA, 15 bp, Homo sapiens
actcacaggtctctg

SEQ ID NO: 199131 - DNA, 15 bp, Homo sapiens
gactcacaggtctct

SEQ ID NO: 199132 - DNA, 15 bp, Homo sapiens
agactcacaggtctc

SEQ ID NO: 199133 - DNA, 15 bp, Homo sapiens
cagactcacaggtct

SEQ ID NO: 199134 - DNA, 15 bp, Homo sapiens
ccagactcacaggtc

SEQ ID NO: 199135 - DNA, 15 bp, Homo sapiens
cccagactcacaggt

SEQ ID NO: 199136 - DNA, 15 bp, Homo sapiens
acccagactcacagg

SEQ ID NO: 199137 - DNA, 15 bp, Homo sapiens
cacccagactcacag

SEQ ID NO: 199138 - DNA, 15 bp, Homo sapiens
tcacccagactcaca

SEQ ID NO: 199139 - DNA, 15 bp, Homo sapiens
ctcacccagactcac

SEQ ID NO: 199140 - DNA, 15 bp, Homo sapiens
actcacccagactca

SEQ ID NO: 199141 - DNA, 15 bp, Homo sapiens
cactcacccagactc

SEQ ID NO: 199142 - DNA, 15 bp, Homo sapiens
tcactcacccagact

SEQ ID NO: 199143 - DNA, 15 bp, Homo sapiens
ctcactcacccagac

SEQ ID NO: 199144 - DNA, 15 bp, Homo sapiens
gctcactcacccaga

SEQ ID NO: 199145 - DNA, 15 bp, Homo sapiens
agctcactcacccag

SEQ ID NO: 199146 - DNA, 15 bp, Homo sapiens
cagctcactcaccca

SEQ ID NO: 199147 - DNA, 15 bp, Homo sapiens
ccagctcactcaccc

SEQ ID NO: 199148 - DNA, 15 bp, Homo sapiens
tccagctcactcacc

SEQ ID NO: 199149 - DNA, 15 bp, Homo sapiens
ttccagctcactcac

SEQ ID NO: 199150 - DNA, 15 bp, Homo sapiens
gttccagctcactca

SEQ ID NO: 199151 - DNA, 15 bp, Homo sapiens
ggttccagctcactc

SEQ ID NO: 199152 - DNA, 15 bp, Homo sapiens
tggttccagctcact

SEQ ID NO: 199153 - DNA, 15 bp, Homo sapiens
atggttccagctcac

SEQ ID NO: 199154 - DNA, 15 bp, Homo sapiens
catggttccagctca

SEQ ID NO: 199155 - DNA, 15 bp, Homo sapiens
tcatggttccagctc

SEQ ID NO: 199156 - DNA, 15 bp, Homo sapiens
ttcatggttccagct

SEQ ID NO: 199157 - DNA, 15 bp, Homo sapiens
attcatggttccagc

SEQ ID NO: 199158 - DNA, 15 bp, Homo sapiens
tattcatggttccag

SEQ ID NO: 199159 - DNA, 15 bp, Homo sapiens
ctattcatggttcca

SEQ ID NO: 199160 - DNA, 15 bp, Homo sapiens
actattcatggttcc

SEQ ID NO: 199161 - DNA, 15 bp, Homo sapiens
aactattcatggttc

SEQ ID NO: 199162 - DNA, 15 bp, Homo sapiens
gaactattcatggtt

SEQ ID NO: 199163 - DNA, 15 bp, Homo sapiens
ggaactattcatggt

SEQ ID NO: 199164 - DNA, 15 bp, Homo sapiens
tggaactattcatgg

SEQ ID NO: 199165 - DNA, 15 bp, Homo sapiens
ctggaactattcatg

SEQ ID NO: 199166 - DNA, 15 bp, Homo sapiens
tctggaactattcat

SEQ ID NO: 199167 - DNA, 15 bp, Homo sapiens
ttctggaactattca

SEQ ID NO: 199168 - DNA, 15 bp, Homo sapiens
cttctggaactattc

SEQ ID NO: 199169 - DNA, 15 bp, Homo sapiens
ccttctggaactatt

SEQ ID NO: 199170 - DNA, 15 bp, Homo sapiens
cccttctggaactat

SEQ ID NO: 199171 - DNA, 15 bp, Homo sapiens
ccccttctggaacta

SEQ ID NO: 199172 - DNA, 15 bp, Homo sapiens
tccccttctggaact

SEQ ID NO: 199173 - DNA, 15 bp, Homo sapiens
ttccccttctggaac

SEQ ID NO: 199174 - DNA, 15 bp, Homo sapiens
gttccccttctggaa

SEQ ID NO: 199175 - DNA, 15 bp, Homo sapiens
agttccccttctgga

SEQ ID NO: 199176 - DNA, 15 bp, Homo sapiens
aagttccccttctgg

SEQ ID NO: 199177 - DNA, 15 bp, Homo sapiens
taagttccccttctg

SEQ ID NO: 199178 - DNA, 15 bp, Homo sapiens
ttaagttccccttct

SEQ ID NO: 199179 - DNA, 15 bp, Homo sapiens
attaagttccccttc

SEQ ID NO: 199180 - DNA, 15 bp, Homo sapiens
gattaagttcccctt

SEQ ID NO: 199181 - DNA, 15 bp, Homo sapiens
ggattaagttcccct

SEQ ID NO: 199182 - DNA, 15 bp, Homo sapiens
aggattaagttcccc

SEQ ID NO: 199183 - DNA, 15 bp, Homo sapiens
caggattaagttccc

SEQ ID NO: 199184 - DNA, 15 bp, Homo sapiens
acaggattaagttcc

SEQ ID NO: 199185 - DNA, 15 bp, Homo sapiens
cacaggattaagttc

SEQ ID NO: 199186 - DNA, 15 bp, Homo sapiens
tcacaggattaagtt

SEQ ID NO: 199187 - DNA, 15 bp, Homo sapiens
atcacaggattaagt

SEQ ID NO: 199188 - DNA, 15 bp, Homo sapiens
tatcacaggattaag

SEQ ID NO: 199189 - DNA, 15 bp, Homo sapiens
atatcacaggattaa

SEQ ID NO: 199190 - DNA, 15 bp, Homo sapiens
aatatcacaggatta

SEQ ID NO: 199191 - DNA, 15 bp, Homo sapiens
aaatatcacaggatt

SEQ ID NO: 199192 - DNA, 15 bp, Homo sapiens
gaaatatcacaggat

SEQ ID NO: 199193 - DNA, 15 bp, Homo sapiens
agaaatatcacagga

SEQ ID NO: 199194 - DNA, 15 bp, Homo sapiens
aagaaatatcacagg

SEQ ID NO: 199195 - DNA, 15 bp, Homo sapiens
gaagaaatatcacag

SEQ ID NO: 199196 - DNA, 15 bp, Homo sapiens
agaagaaatatcaca

SEQ ID NO: 199197 - DNA, 15 bp, Homo sapiens
gagaagaaatatcac

SEQ ID NO: 199198 - DNA, 15 bp, Homo sapiens
agagaagaaatatca

SEQ ID NO: 199199 - DNA, 15 bp, Homo sapiens
cagagaagaaatatc

SEQ ID NO: 199200 - DNA, 15 bp, Homo sapiens
acagagaagaaatat

SEQ ID NO: 199201 - DNA, 15 bp, Homo sapiens
cacagagaagaaata

SEQ ID NO: 199202 - DNA, 15 bp, Homo sapiens
acacagagaagaaat

SEQ ID NO: 199203 - DNA, 15 bp, Homo sapiens
aacacagagaagaaa

SEQ ID NO: 199204 - DNA, 15 bp, Homo sapiens
aaacacagagaagaa

SEQ ID NO: 199205 - DNA, 15 bp, Homo sapiens
caaacacagagaaga

SEQ ID NO: 199206 - DNA, 15 bp, Homo sapiens
ccaaacacagagaag

SEQ ID NO: 199207 - DNA, 15 bp, Homo sapiens
accaaacacagagaa

SEQ ID NO: 199208 - DNA, 15 bp, Homo sapiens
taccaaacacagaga

SEQ ID NO: 199209 - DNA, 15 bp, Homo sapiens
ttaccaaacacagag

SEQ ID NO: 199210 - DNA, 15 bp, Homo sapiens
tttaccaaacacaga

SEQ ID NO: 199211 - DNA, 15 bp, Homo sapiens
ctttaccaaacacag

SEQ ID NO: 199212 - DNA, 15 bp, Homo sapiens
gctttaccaaacaca

SEQ ID NO: 199213 - DNA, 15 bp, Homo sapiens
ggctttaccaaacac

SEQ ID NO: 199214 - DNA, 15 bp, Homo sapiens
tggctttaccaaaca

SEQ ID NO: 199215 - DNA, 15 bp, Homo sapiens
gtggctttaccaaac

SEQ ID NO: 199216 - DNA, 15 bp, Homo sapiens
agtggctttaccaaa

SEQ ID NO: 199217 - DNA, 15 bp, Homo sapiens
cagtggctttaccaa

SEQ ID NO: 199218 - DNA, 15 bp, Homo sapiens
gcagtggctttacca

SEQ ID NO: 199219 - DNA, 15 bp, Homo sapiens
tgcagtggctttacc

SEQ ID NO: 199220 - DNA, 15 bp, Homo sapiens
gtgcagtggctttac

SEQ ID NO: 199221 - DNA, 15 bp, Homo sapiens
ggtgcagtggcttta

SEQ ID NO: 199222 - DNA, 15 bp, Homo sapiens
aggtgcagtggcttt

SEQ ID NO: 199223 - DNA, 15 bp, Homo sapiens
aaggtgcagtggctt

SEQ ID NO: 199224 - DNA, 15 bp, Homo sapiens
caaggtgcagtggct

SEQ ID NO: 199225 - DNA, 15 bp, Homo sapiens
acaaggtgcagtggc

SEQ ID NO: 199226 - DNA, 15 bp, Homo sapiens
cacaaggtgcagtgg

SEQ ID NO: 199227 - DNA, 15 bp, Homo sapiens
gcacaaggtgcagtg

SEQ ID NO: 199228 - DNA, 15 bp, Homo sapiens
ggcacaaggtgcagt

SEQ ID NO: 199229 - DNA, 15 bp, Homo sapiens
tggcacaaggtgcag

SEQ ID NO: 199230 - DNA, 15 bp, Homo sapiens
ttggcacaaggtgca

SEQ ID NO: 199231 - DNA, 15 bp, Homo sapiens
gttggcacaaggtgc

SEQ ID NO: 199232 - DNA, 15 bp, Homo sapiens
agttggcacaaggtg

SEQ ID NO: 199233 - DNA, 15 bp, Homo sapiens
cagttggcacaaggt

SEQ ID NO: 199234 - DNA, 15 bp, Homo sapiens
acagttggcacaagg

SEQ ID NO: 199235 - DNA, 15 bp, Homo sapiens
aacagttggcacaag

SEQ ID NO: 199236 - DNA, 15 bp, Homo sapiens
aaacagttggcacaa

SEQ ID NO: 199237 - DNA, 15 bp, Homo sapiens
caaacagttggcaca

SEQ ID NO: 199238 - DNA, 15 bp, Homo sapiens
gcaaacagttggcac

SEQ ID NO: 199239 - DNA, 15 bp, Homo sapiens
tgcaaacagttggca

SEQ ID NO: 199240 - DNA, 15 bp, Homo sapiens
atgcaaacagttggc

SEQ ID NO: 199241 - DNA, 15 bp, Homo sapiens
gatgcaaacagttgg

SEQ ID NO: 199242 - DNA, 15 bp, Homo sapiens
agatgcaaacagttg

SEQ ID NO: 199243 - DNA, 15 bp, Homo sapiens
cagatgcaaacagtt

SEQ ID NO: 199244 - DNA, 15 bp, Homo sapiens
ccagatgcaaacagt

SEQ ID NO: 199245 - DNA, 15 bp, Homo sapiens
gccagatgcaaacag

SEQ ID NO: 199246 - DNA, 15 bp, Homo sapiens
agccagatgcaaaca

SEQ ID NO: 199247 - DNA, 15 bp, Homo sapiens
aagccagatgcaaac

SEQ ID NO: 199248 - DNA, 15 bp, Homo sapiens
caagccagatgcaaa

SEQ ID NO: 199249 - DNA, 15 bp, Homo sapiens
gcaagccagatgcaa

SEQ ID NO: 199250 - DNA, 15 bp, Homo sapiens
agcaagccagatgca

SEQ ID NO: 199251 - DNA, 15 bp, Homo sapiens
cagcaagccagatgc

SEQ ID NO: 199252 - DNA, 15 bp, Homo sapiens
acagcaagccagatg

SEQ ID NO: 199253 - DNA, 15 bp, Homo sapiens
aacagcaagccagat

SEQ ID NO: 199254 - DNA, 15 bp, Homo sapiens
aaacagcaagccaga

SEQ ID NO: 199255 - DNA, 15 bp, Homo sapiens
taaacagcaagccag

SEQ ID NO: 199256 - DNA, 15 bp, Homo sapiens
ttaaacagcaagcca

SEQ ID NO: 199257 - DNA, 15 bp, Homo sapiens
gttaaacagcaagcc

SEQ ID NO: 199258 - DNA, 15 bp, Homo sapiens
ggttaaacagcaagc

SEQ ID NO: 199259 - DNA, 15 bp, Homo sapiens
aggttaaacagcaag

SEQ ID NO: 199260 - DNA, 15 bp, Homo sapiens
caggttaaacagcaa

SEQ ID NO: 199261 - DNA, 15 bp, Homo sapiens
ccaggttaaacagca

SEQ ID NO: 199262 - DNA, 15 bp, Homo sapiens
gccaggttaaacagc

SEQ ID NO: 199263 - DNA, 15 bp, Homo sapiens
ggccaggttaaacag

SEQ ID NO: 199264 - DNA, 15 bp, Homo sapiens
tggccaggttaaaca

SEQ ID NO: 199265 - DNA, 15 bp, Homo sapiens
ttggccaggttaaac

SEQ ID NO: 199266 - DNA, 15 bp, Homo sapiens
gttggccaggttaaa

SEQ ID NO: 199267 - DNA, 15 bp, Homo sapiens
tgttggccaggttaa

SEQ ID NO: 199268 - DNA, 15 bp, Homo sapiens
atgttggccaggtta

SEQ ID NO: 199269 - DNA, 15 bp, Homo sapiens
catgttggccaggtt

SEQ ID NO: 199270 - DNA, 15 bp, Homo sapiens
gcatgttggccaggt

SEQ ID NO: 199271 - DNA, 15 bp, Homo sapiens
ggcatgttggccagg

SEQ ID NO: 199272 - DNA, 15 bp, Homo sapiens
tggcatgttggccag

SEQ ID NO: 199273 - DNA, 15 bp, Homo sapiens
ctggcatgttggcca

SEQ ID NO: 199274 - DNA, 15 bp, Homo sapiens
cctggcatgttggcc

SEQ ID NO: 199275 - DNA, 15 bp, Homo sapiens
acctggcatgttggc

SEQ ID NO: 199276 - DNA, 15 bp, Homo sapiens
tacctggcatgttgg

SEQ ID NO: 199277 - DNA, 15 bp, Homo sapiens
gtacctggcatgttg

SEQ ID NO: 199278 - DNA, 15 bp, Homo sapiens
tgtacctggcatgtt

SEQ ID NO: 199279 - DNA, 15 bp, Homo sapiens
ttgtacctggcatgt

SEQ ID NO: 199280 - DNA, 15 bp, Homo sapiens
tttgtacctggcatg

SEQ ID NO: 199281 - DNA, 15 bp, Homo sapiens
gtttgtacctggcat

SEQ ID NO: 199282 - DNA, 15 bp, Homo sapiens
agtttgtacctggca

SEQ ID NO: 199283 - DNA, 15 bp, Homo sapiens
cagtttgtacctggc

SEQ ID NO: 199284 - DNA, 15 bp, Homo sapiens
acagtttgtacctgg

SEQ ID NO: 199285 - DNA, 15 bp, Homo sapiens
cacagtttgtacctg

SEQ ID NO: 199286 - DNA, 15 bp, Homo sapiens
gcacagtttgtacct

SEQ ID NO: 199287 - DNA, 15 bp, Homo sapiens
agcacagtttgtacc

SEQ ID NO: 199288 - DNA, 15 bp, Homo sapiens
aagcacagtttgtac

SEQ ID NO: 199289 - DNA, 15 bp, Homo sapiens
caagcacagtttgta

SEQ ID NO: 199290 - DNA, 15 bp, Homo sapiens
ccaagcacagtttgt

SEQ ID NO: 199291 - DNA, 15 bp, Homo sapiens
tccaagcacagtttg

SEQ ID NO: 199292 - DNA, 15 bp, Homo sapiens
gtccaagcacagttt

SEQ ID NO: 199293 - DNA, 15 bp, Homo sapiens
agtccaagcacagtt

SEQ ID NO: 199294 - DNA, 15 bp, Homo sapiens
aagtccaagcacagt

SEQ ID NO: 199295 - DNA, 15 bp, Homo sapiens
caagtccaagcacag

SEQ ID NO: 199296 - DNA, 15 bp, Homo sapiens
acaagtccaagcaca

SEQ ID NO: 199297 - DNA, 15 bp, Homo sapiens
gacaagtccaagcac

SEQ ID NO: 199298 - DNA, 15 bp, Homo sapiens
ggacaagtccaagca

SEQ ID NO: 199299 - DNA, 15 bp, Homo sapiens
aggacaagtccaagc

SEQ ID NO: 199300 - DNA, 15 bp, Homo sapiens
gaggacaagtccaag

SEQ ID NO: 199301 - DNA, 15 bp, Homo sapiens
ggaggacaagtccaa

SEQ ID NO: 199302 - DNA, 15 bp, Homo sapiens
aggaggacaagtcca

SEQ ID NO: 199303 - DNA, 15 bp, Homo sapiens
aaggaggacaagtcc

SEQ ID NO: 199304 - DNA, 15 bp, Homo sapiens
gaaggaggacaagtc

SEQ ID NO: 199305 - DNA, 15 bp, Homo sapiens
ggaaggaggacaagt

SEQ ID NO: 199306 - DNA, 15 bp, Homo sapiens
aggaaggaggacaag

SEQ ID NO: 199307 - DNA, 15 bp, Homo sapiens
caggaaggaggacaa

SEQ ID NO: 199308 - DNA, 15 bp, Homo sapiens
ccaggaaggaggaca

SEQ ID NO: 199309 - DNA, 15 bp, Homo sapiens
tccaggaaggaggac

SEQ ID NO: 199310 - DNA, 15 bp, Homo sapiens
ctccaggaaggagga

SEQ ID NO: 199311 - DNA, 15 bp, Homo sapiens
gctccaggaaggagg

SEQ ID NO: 199312 - DNA, 15 bp, Homo sapiens
agctccaggaaggag

SEQ ID NO: 199313 - DNA, 15 bp, Homo sapiens
cagctccaggaagga

SEQ ID NO: 199314 - DNA, 15 bp, Homo sapiens
gcagctccaggaagg

SEQ ID NO: 199315 - DNA, 15 bp, Homo sapiens
ggcagctccaggaag

SEQ ID NO: 199316 - DNA, 15 bp, Homo sapiens
tggcagctccaggaa

SEQ ID NO: 199317 - DNA, 15 bp, Homo sapiens
gtggcagctccagga

SEQ ID NO: 199318 - DNA, 15 bp, Homo sapiens
ggtggcagctccagg

SEQ ID NO: 199319 - DNA, 15 bp, Homo sapiens
aggtggcagctccag

SEQ ID NO: 199320 - DNA, 15 bp, Homo sapiens
caggtggcagctcca

SEQ ID NO: 199321 - DNA, 15 bp, Homo sapiens
gcaggtggcagctcc

SEQ ID NO: 199322 - DNA, 15 bp, Homo sapiens
agcaggtggcagctc

SEQ ID NO: 199323 - DNA, 15 bp, Homo sapiens
cagcaggtggcagct

SEQ ID NO: 199324 - DNA, 15 bp, Homo sapiens
acagcaggtggcagc

SEQ ID NO: 199325 - DNA, 15 bp, Homo sapiens
cacagcaggtggcag

SEQ ID NO: 199326 - DNA, 15 bp, Homo sapiens
acacagcaggtggca

SEQ ID NO: 199327 - DNA, 15 bp, Homo sapiens
gacacagcaggtggc

SEQ ID NO: 199328 - DNA, 15 bp, Homo sapiens
tgacacagcaggtgg

SEQ ID NO: 199329 - DNA, 15 bp, Homo sapiens
ctgacacagcaggtg

SEQ ID NO: 199330 - DNA, 15 bp, Homo sapiens
cctgacacagcaggt

SEQ ID NO: 199331 - DNA, 15 bp, Homo sapiens
ccctgacacagcagg

SEQ ID NO: 199332 - DNA, 15 bp, Homo sapiens
tccctgacacagcag

SEQ ID NO: 199333 - DNA, 15 bp, Homo sapiens
gtccctgacacagca

SEQ ID NO: 199334 - DNA, 15 bp, Homo sapiens
tgtccctgacacagc

SEQ ID NO: 199335 - DNA, 15 bp, Homo sapiens
ttgtccctgacacag

SEQ ID NO: 199336 - DNA, 15 bp, Homo sapiens
cttgtccctgacaca

SEQ ID NO: 199337 - DNA, 15 bp, Homo sapiens
gcttgtccctgacac

SEQ ID NO: 199338 - DNA, 15 bp, Homo sapiens
ggcttgtccctgaca

SEQ ID NO: 199339 - DNA, 15 bp, Homo sapiens
gggcttgtccctgac

SEQ ID NO: 199340 - DNA, 15 bp, Homo sapiens
ggggcttgtccctga

SEQ ID NO: 199341 - DNA, 15 bp, Homo sapiens
aggggcttgtccctg

SEQ ID NO: 199342 - DNA, 15 bp, Homo sapiens
caggggcttgtccct

SEQ ID NO: 199343 - DNA, 15 bp, Homo sapiens
gcaggggcttgtccc

SEQ ID NO: 199344 - DNA, 15 bp, Homo sapiens
ggcaggggcttgtcc

SEQ ID NO: 199345 - DNA, 15 bp, Homo sapiens
gggcaggggcttgtc

SEQ ID NO: 199346 - DNA, 15 bp, Homo sapiens
agggcaggggcttgt

SEQ ID NO: 199347 - DNA, 15 bp, Homo sapiens
cagggcaggggcttg

SEQ ID NO: 199348 - DNA, 15 bp, Homo sapiens
ccagggcaggggctt

SEQ ID NO: 199349 - DNA, 15 bp, Homo sapiens
gccagggcaggggct

SEQ ID NO: 199350 - DNA, 15 bp, Homo sapiens
ggccagggcaggggc
